United States Patent Application Publication US 2022/0307033 A1 - sequence listing, part 2

SEQ ID NO: 19631 - RNA, 20 nt, Artificial Sequence
  Antisense oligo
caggaggcagagguugcagu

SEQ ID NO: 19632 - RNA, 20 nt, Artificial Sequence
  Antisense oligo
ugaacccaggaggcagaggu

SEQ ID NO: 19633 - RNA, 20 nt, Artificial Sequence
  Antisense oligo
uugaacccaggaggcagagg

SEQ ID NO: 19634 - RNA, 20 nt, Artificial Sequence
  Antisense oligo
cuugaacccaggaggcagag

SEQ ID NO: 19635 - RNA, 20 nt, Artificial Sequence
  Antisense oligo
gcuugaacccaggaggcaga

SEQ ID NO: 19636 - RNA, 20 nt, Artificial Sequence
  Antisense oligo
ucgcuugaacccaggaggca

SEQ ID NO: 19637 - RNA, 20 nt, Artificial Sequence
  Antisense oligo
aucgcuugaacccaggaggc

SEQ ID NO: 19638 - RNA, 20 nt, Artificial Sequence
  Antisense oligo
aaucgcuugaacccaggagg

SEQ ID NO: 19639 - RNA, 20 nt, Artificial Sequence
  Antisense oligo
gaaucgcuugaacccaggag

SEQ ID NO: 19640 - RNA, 20 nt, Artificial Sequence
  Antisense oligo
agaaucgcuugaacccagga

SEQ ID NO: 19641 - RNA, 20 nt, Artificial Sequence
  Antisense oligo
gagaaucgcuugaacccagg

SEQ ID NO: 19642 - RNA, 20 nt, Artificial Sequence
  Antisense oligo
ggagaaucgcuugaacccag

SEQ ID NO: 19643 - RNA, 20 nt, Artificial Sequence
  Antisense oligo
aggagaaucgcuugaaccca

SEQ ID NO: 19644 - RNA, 20 nt, Artificial Sequence
  Antisense oligo
caggagaaucgcuugaaccc

SEQ ID NO: 19645 - RNA, 20 nt, Artificial Sequence
  Antisense oligo
gcaggagaaucgcuugaacc

SEQ ID NO: 19646 - RNA, 20 nt, Artificial Sequence
  Antisense oligo
ggcaggagaaucgcuugaac

SEQ ID NO: 19647 - RNA, 20 nt, Artificial Sequence
  Antisense oligo
aggcaggagaaucgcuugaa

SEQ ID NO: 19648 - RNA, 20 nt, Artificial Sequence
  Antisense oligo
gaggcaggagaaucgcuuga

SEQ ID NO: 19649 - RNA, 20 nt, Artificial Sequence
  Antisense oligo
ugaggcaggagaaucgcuug

SEQ ID NO: 19650 - RNA, 20 nt, Artificial Sequence
  Antisense oligo
cugaggcaggagaaucgcuu

SEQ ID NO: 19651 - RNA, 20 nt, Artificial Sequence
  Antisense oligo
gcugaggcaggagaaucgcu

SEQ ID NO: 19652 - RNA, 20 nt, Artificial Sequence
  Antisense oligo
aggcugaggcaggagaaucg

SEQ ID NO: 19653 - RNA, 20 nt, Artificial Sequence
  Antisense oligo
gaggcugaggcaggagaauc

SEQ ID NO: 19654 - RNA, 20 nt, Artificial Sequence
  Antisense oligo
ggaggcugaggcaggagaau

SEQ ID NO: 19655 - RNA, 20 nt, Artificial Sequence
  Antisense oligo
caugccuguagucccagcua

SEQ ID NO: 19656 - RNA, 20 nt, Artificial Sequence
  Antisense oligo
aacccgucucuacuaaaagu

SEQ ID NO: 19657 - RNA, 20 nt, Artificial Sequence
  Antisense oligo
aaacccgucucuacuaaaag

SEQ ID NO: 19658 - RNA, 20 nt, Artificial Sequence
  Antisense oligo
gaaacccgucucuacuaaaa

SEQ ID NO: 19659 - RNA, 20 nt, Artificial Sequence
  Antisense oligo
ugaaacccgucucuacuaaa

SEQ ID NO: 19660 - RNA, 20 nt, Artificial Sequence
  Antisense oligo
aacauggugaaacccgucuc

SEQ ID NO: 19661 - RNA, 20 nt, Artificial Sequence
  Antisense oligo
caacauggugaaacccgucu

SEQ ID NO: 19662 - RNA, 20 nt, Artificial Sequence
  Antisense oligo
ucaacauggugaaacccguc

SEQ ID NO: 19663 - RNA, 20 nt, Artificial Sequence
  Antisense oligo
gucaacauggugaaacccgu

SEQ ID NO: 19664 - RNA, 20 nt, Artificial Sequence
  Antisense oligo
ggucaacauggugaaacccg

SEQ ID NO: 19665 - RNA, 20 nt, Artificial Sequence
  Antisense oligo
uggucaacauggugaaaccc

SEQ ID NO: 19666 - RNA, 20 nt, Artificial Sequence
  Antisense oligo
cuggucaacauggugaaacc

SEQ ID NO: 19667 - RNA, 20 nt, Artificial Sequence
  Antisense oligo
gggcagaucacuugagguca

SEQ ID NO: 19668 - RNA, 20 nt, Artificial Sequence
  Antisense oligo
cgggcagaucacuugagguc

SEQ ID NO: 19669 - RNA, 20 nt, Artificial Sequence
  Antisense oligo
acgggcagaucacuugaggu

SEQ ID NO: 19670 - RNA, 20 nt, Artificial Sequence
  Antisense oligo
gacgggcagaucacuugagg

SEQ ID NO: 19671 - RNA, 20 nt, Artificial Sequence
  Antisense oligo
agacgggcagaucacuugag

SEQ ID NO: 19672 - RNA, 20 nt, Artificial Sequence
  Antisense oligo
gagacgggcagaucacuuga

SEQ ID NO: 19673 - RNA, 20 nt, Artificial Sequence
  Antisense oligo
cgagacgggcagaucacuug

SEQ ID NO: 19674 - RNA, 20 nt, Artificial Sequence
  Antisense oligo
agcacuuugggaggccgaga

SEQ ID NO: 19675 - RNA, 20 nt, Artificial Sequence
  Antisense oligo
uagcacuuugggaggccgag

SEQ ID NO: 19676 - RNA, 20 nt, Artificial Sequence
  Antisense oligo
cuagcacuuugggaggccga

SEQ ID NO: 19677 - RNA, 20 nt, Artificial Sequence
  Antisense oligo
caguggcucacgccuguaau

SEQ ID NO: 19678 - RNA, 20 nt, Artificial Sequence
  Antisense oligo
gcaguggcucacgccuguaa

SEQ ID NO: 19679 - RNA, 20 nt, Artificial Sequence
  Antisense oligo
guuugaugaucuagucagga

SEQ ID NO: 19680 - RNA, 20 nt, Artificial Sequence
  Antisense oligo
aguuugaugaucuagucagg

SEQ ID NO: 19681 - RNA, 20 nt, Artificial Sequence
  Antisense oligo
gaguuugaugaucuagucag

SEQ ID NO: 19682 - RNA, 20 nt, Artificial Sequence
  Antisense oligo
ggaguuugaugaucuaguca

SEQ ID NO: 19683 - RNA, 20 nt, Artificial Sequence
  Antisense oligo
uggaguuugaugaucuaguc

SEQ ID NO: 19684 - RNA, 20 nt, Artificial Sequence
  Antisense oligo
cuggaguuugaugaucuagu

SEQ ID NO: 19685 - RNA, 20 nt, Artificial Sequence
  Antisense oligo
gacuggaguuugaugaucua

SEQ ID NO: 19686 - RNA, 20 nt, Artificial Sequence
  Antisense oligo
aagacuggaguuugaugauc

SEQ ID NO: 19687 - RNA, 20 nt, Artificial Sequence
  Antisense oligo
gaagacuggaguuugaugau

SEQ ID NO: 19688 - RNA, 20 nt, Artificial Sequence
  Antisense oligo
ggaagacuggaguuugauga

SEQ ID NO: 19689 - RNA, 20 nt, Artificial Sequence
  Antisense oligo
aggaagacuggaguuugaug

SEQ ID NO: 19690 - RNA, 20 nt, Artificial Sequence
  Antisense oligo
gaggaagacuggaguuugau

SEQ ID NO: 19691 - RNA, 20 nt, Artificial Sequence
  Antisense oligo
ugaggaagacuggaguuuga

SEQ ID NO: 19692 - RNA, 20 nt, Artificial Sequence
  Antisense oligo
gugaggaagacuggaguuug

SEQ ID NO: 19693 - RNA, 20 nt, Artificial Sequence
  Antisense oligo
ggugaggaagacuggaguuu

SEQ ID NO: 19694 - RNA, 20 nt, Artificial Sequence
  Antisense oligo
uggugaggaagacuggaguu

SEQ ID NO: 19695 - RNA, 20 nt, Artificial Sequence
  Antisense oligo
cauauuggugaggaagacug

SEQ ID NO: 19696 - RNA, 20 nt, Artificial Sequence
  Antisense oligo
acauauuggugaggaagacu

SEQ ID NO: 19697 - RNA, 20 nt, Artificial Sequence
  Antisense oligo
aacauauuggugaggaagac

SEQ ID NO: 19698 - RNA, 20 nt, Artificial Sequence
  Antisense oligo
gaaacauauuggugaggaag

SEQ ID NO: 19699 - RNA, 20 nt, Artificial Sequence
  Antisense oligo
uaggaaacauauuggugagg

SEQ ID NO: 19700 - RNA, 20 nt, Artificial Sequence
  Antisense oligo
ggaggaagauagcaaauagg

SEQ ID NO: 19701 - RNA, 20 nt, Artificial Sequence
  Antisense oligo
cauaauggaggaagauagca

SEQ ID NO: 19702 - RNA, 20 nt, Artificial Sequence
  Antisense oligo
acauagcauaauggaggaag

SEQ ID NO: 19703 - RNA, 20 nt, Artificial Sequence
  Antisense oligo
cacauagcauaauggaggaa

SEQ ID NO: 19704 - RNA, 20 nt, Artificial Sequence
  Antisense oligo
ccacauagcauaauggagga

SEQ ID NO: 19705 - RNA, 20 nt, Artificial Sequence
  Antisense oligo
gccacauagcauaauggagg

SEQ ID NO: 19706 - RNA, 20 nt, Artificial Sequence
  Antisense oligo
ugccacauagcauaauggag

SEQ ID NO: 19707 - RNA, 20 nt, Artificial Sequence
  Antisense oligo
aggcuaguaaagacuuguug

SEQ ID NO: 19708 - RNA, 20 nt, Artificial Sequence
  Antisense oligo
acaggcuaguaaagacuugu

SEQ ID NO: 19709 - RNA, 20 nt, Artificial Sequence
  Antisense oligo
cacaggcuaguaaagacuug

SEQ ID NO: 19710 - RNA, 20 nt, Artificial Sequence
  Antisense oligo
gcacaggcuaguaaagacuu

SEQ ID NO: 19711 - RNA, 20 nt, Artificial Sequence
  Antisense oligo
agcacaggcuaguaaagacu

SEQ ID NO: 19712 - RNA, 20 nt, Artificial Sequence
  Antisense oligo
aagcacaggcuaguaaagac

SEQ ID NO: 19713 - RNA, 20 nt, Artificial Sequence
  Antisense oligo
aaagcacaggcuaguaaaga

SEQ ID NO: 19714 - RNA, 20 nt, Artificial Sequence
  Antisense oligo
aaaagcacaggcuaguaaag

SEQ ID NO: 19715 - RNA, 20 nt, Artificial Sequence
  Antisense oligo
gaaaagcacaggcuaguaaa

SEQ ID NO: 19716 - RNA, 20 nt, Artificial Sequence
  Antisense oligo
ugaaaagcacaggcuaguaa

SEQ ID NO: 19717 - RNA, 20 nt, Artificial Sequence
  Antisense oligo
augaaaagcacaggcuagua

SEQ ID NO: 19718 - RNA, 20 nt, Artificial Sequence
  Antisense oligo
caugaaaagcacaggcuagu

SEQ ID NO: 19719 - RNA, 20 nt, Artificial Sequence
  Antisense oligo
auucucuaggaaagggaucu

SEQ ID NO: 19720 - RNA, 20 nt, Artificial Sequence
  Antisense oligo
cucuagcaaggugauguuua

SEQ ID NO: 19721 - RNA, 20 nt, Artificial Sequence
  Antisense oligo
ccucuagcaaggugauguuu

SEQ ID NO: 19722 - RNA, 20 nt, Artificial Sequence
  Antisense oligo
gcccucuagcaaggugaugu

SEQ ID NO: 19723 - RNA, 20 nt, Artificial Sequence
  Antisense oligo
ggcccucuagcaaggugaug

SEQ ID NO: 19724 - RNA, 20 nt, Artificial Sequence
  Antisense oligo
aggcccucuagcaaggugau

SEQ ID NO: 19725 - RNA, 20 nt, Artificial Sequence
  Antisense oligo
uaggcccucuagcaagguga

SEQ ID NO: 19726 - RNA, 20 nt, Artificial Sequence
  Antisense oligo
uuaggcccucuagcaaggug

SEQ ID NO: 19727 - RNA, 20 nt, Artificial Sequence
  Antisense oligo
uuuaggcccucuagcaaggu

SEQ ID NO: 19728 - RNA, 20 nt, Artificial Sequence
  Antisense oligo
cuuuaggcccucuagcaagg

SEQ ID NO: 19729 - RNA, 20 nt, Artificial Sequence
  Antisense oligo
acuuuaggcccucuagcaag

SEQ ID NO: 19730 - RNA, 20 nt, Artificial Sequence
  Antisense oligo
gacuuuaggcccucuagcaa

SEQ ID NO: 19731 - RNA, 20 nt, Artificial Sequence
  Antisense oligo
ugacuuuaggcccucuagca

SEQ ID NO: 19732 - RNA, 20 nt, Artificial Sequence
  Antisense oligo
augacuuuaggcccucuagc

SEQ ID NO: 19733 - RNA, 20 nt, Artificial Sequence
  Antisense oligo
caugacuuuaggcccucuag

SEQ ID NO: 19734 - RNA, 20 nt, Artificial Sequence
  Antisense oligo
acaugacuuuaggcccucua

SEQ ID NO: 19735 - RNA, 20 nt, Artificial Sequence
  Antisense oligo
cacaugacuuuaggcccucu

SEQ ID NO: 19736 - RNA, 20 nt, Artificial Sequence
  Antisense oligo
ucacaugacuuuaggcccuc

SEQ ID NO: 19737 - RNA, 20 nt, Artificial Sequence
  Antisense oligo
ccuucacaugacuuuaggcc

SEQ ID NO: 19738 - RNA, 20 nt, Artificial Sequence
  Antisense oligo
cccuucacaugacuuuaggc

SEQ ID NO: 19739 - RNA, 20 nt, Artificial Sequence
  Antisense oligo
aacacgacagaagcccacgg

SEQ ID NO: 19740 - RNA, 20 nt, Artificial Sequence
  Antisense oligo
aaacacgacagaagcccacg

SEQ ID NO: 19741 - RNA, 20 nt, Artificial Sequence
  Antisense oligo
caaacacgacagaagcccac

SEQ ID NO: 19742 - RNA, 20 nt, Artificial Sequence
  Antisense oligo
acaaacacgacagaagccca

SEQ ID NO: 19743 - RNA, 20 nt, Artificial Sequence
  Antisense oligo
cacaaacacgacagaagccc

SEQ ID NO: 19744 - RNA, 20 nt, Artificial Sequence
  Antisense oligo
acacaaacacgacagaagcc

SEQ ID NO: 19745 - RNA, 20 nt, Artificial Sequence
  Antisense oligo
uacacaaacacgacagaagc

SEQ ID NO: 19746 - RNA, 20 nt, Artificial Sequence
  Antisense oligo
guacacaaacacgacagaag

SEQ ID NO: 19747 - RNA, 20 nt, Artificial Sequence
  Antisense oligo
aguacacaaacacgacagaa

SEQ ID NO: 19748 - RNA, 20 nt, Artificial Sequence
  Antisense oligo
caguacacaaacacgacaga

SEQ ID NO: 19749 - RNA, 20 nt, Artificial Sequence
  Antisense oligo
gcaguacacaaacacgacag

SEQ ID NO: 19750 - RNA, 20 nt, Artificial Sequence
  Antisense oligo
ugcaguacacaaacacgaca

SEQ ID NO: 19751 - RNA, 20 nt, Artificial Sequence
  Antisense oligo
augcaguacacaaacacgac

SEQ ID NO: 19752 - RNA, 20 nt, Artificial Sequence
  Antisense oligo
ccacaugcaguacacaaaca

SEQ ID NO: 19753 - RNA, 20 nt, Artificial Sequence
  Antisense oligo
cccacaugcaguacacaaac

SEQ ID NO: 19754 - RNA, 20 nt, Artificial Sequence
  Antisense oligo
ucccacaugcaguacacaaa

SEQ ID NO: 19755 - RNA, 20 nt, Artificial Sequence
  Antisense oligo
uucccacaugcaguacacaa

SEQ ID NO: 19756 - RNA, 20 nt, Artificial Sequence
  Antisense oligo
cuucccacaugcaguacaca

SEQ ID NO: 19757 - RNA, 20 nt, Artificial Sequence
  Antisense oligo
gcuucccacaugcaguacac

SEQ ID NO: 19758 - RNA, 20 nt, Artificial Sequence
  Antisense oligo
gacugcugcuucccacaugc

SEQ ID NO: 19759 - RNA, 20 nt, Artificial Sequence
  Antisense oligo
ugacugcugcuucccacaug

SEQ ID NO: 19760 - RNA, 20 nt, Artificial Sequence
  Antisense oligo
uggugccugacugcugcuuc

SEQ ID NO: 19761 - RNA, 20 nt, Artificial Sequence
  Antisense oligo
cuggugccugacugcugcuu

SEQ ID NO: 19762 - RNA, 20 nt, Artificial Sequence
  Antisense oligo
cuggguucaaggcucuggug

SEQ ID NO: 19763 - RNA, 20 nt, Artificial Sequence
  Antisense oligo
gcauccuggguucaaggcuc

SEQ ID NO: 19764 - RNA, 20 nt, Artificial Sequence
  Antisense oligo
agcauccuggguucaaggcu

SEQ ID NO: 19765 - RNA, 20 nt, Artificial Sequence
  Antisense oligo
uagcauccuggguucaaggc

SEQ ID NO: 19766 - RNA, 20 nt, Artificial Sequence
  Antisense oligo
cuagcauccuggguucaagg

SEQ ID NO: 19767 - RNA, 20 nt, Artificial Sequence
  Antisense oligo
acuagcauccuggguucaag

SEQ ID NO: 19768 - RNA, 20 nt, Artificial Sequence
  Antisense oligo
gacuagcauccuggguucaa

SEQ ID NO: 19769 - RNA, 20 nt, Artificial Sequence
  Antisense oligo
ugggacuagcauccuggguu

SEQ ID NO: 19770 - RNA, 20 nt, Artificial Sequence
  Antisense oligo
cugggacuagcauccugggu

SEQ ID NO: 19771 - RNA, 20 nt, Artificial Sequence
  Antisense oligo
acugggacuagcauccuggg

SEQ ID NO: 19772 - RNA, 20 nt, Artificial Sequence
  Antisense oligo
aacugggacuagcauccugg

SEQ ID NO: 19773 - RNA, 20 nt, Artificial Sequence
  Antisense oligo
gaacugggacuagcauccug

SEQ ID NO: 19774 - RNA, 20 nt, Artificial Sequence
  Antisense oligo
ugaacugggacuagcauccu

SEQ ID NO: 19775 - RNA, 20 nt, Artificial Sequence
  Antisense oligo
cugaacugggacuagcaucc

SEQ ID NO: 19776 - RNA, 20 nt, Artificial Sequence
  Antisense oligo
ccugaacugggacuagcauc

SEQ ID NO: 19777 - RNA, 20 nt, Artificial Sequence
  Antisense oligo
uccugaacugggacuagcau

SEQ ID NO: 19778 - RNA, 20 nt, Artificial Sequence
  Antisense oligo
cuccugaacugggacuagca

SEQ ID NO: 19779 - RNA, 20 nt, Artificial Sequence
  Antisense oligo
gagcaguuuaaggucaauga

SEQ ID NO: 19780 - RNA, 20 nt, Artificial Sequence
  Antisense oligo
ugggcgacagagcgagaaaa

SEQ ID NO: 19781 - RNA, 20 nt, Artificial Sequence
  Antisense oligo
cugggcgacagagcgagaaa

SEQ ID NO: 19782 - RNA, 20 nt, Artificial Sequence
  Antisense oligo
agccgagauugcaccacugc

SEQ ID NO: 19783 - RNA, 20 nt, Artificial Sequence
  Antisense oligo
gagccgagauugcaccacug

SEQ ID NO: 19784 - RNA, 20 nt, Artificial Sequence
  Antisense oligo
ugagccgagauugcaccacu

SEQ ID NO: 19785 - RNA, 20 nt, Artificial Sequence
  Antisense oligo
gugagccgagauugcaccac

SEQ ID NO: 19786 - RNA, 20 nt, Artificial Sequence
  Antisense oligo
agugagccgagauugcacca

SEQ ID NO: 19787 - RNA, 20 nt, Artificial Sequence
  Antisense oligo
cagugagccgagauugcacc

SEQ ID NO: 19788 - RNA, 20 nt, Artificial Sequence
  Antisense oligo
gcagugagccgagauugcac

SEQ ID NO: 19789 - RNA, 20 nt, Artificial Sequence
  Antisense oligo
uugcagugagccgagauugc

SEQ ID NO: 19790 - RNA, 20 nt, Artificial Sequence
  Antisense oligo
cuugcagugagccgagauug

SEQ ID NO: 19791 - RNA, 20 nt, Artificial Sequence
  Antisense oligo
gcuugcagugagccgagauu

SEQ ID NO: 19792 - RNA, 20 nt, Artificial Sequence
  Antisense oligo
agcuugcagugagccgagau

SEQ ID NO: 19793 - RNA, 20 nt, Artificial Sequence
  Antisense oligo
gagcuugcagugagccgaga

SEQ ID NO: 19794 - RNA, 20 nt, Artificial Sequence
  Antisense oligo
uggagcuugcagugagccga

SEQ ID NO: 19795 - RNA, 20 nt, Artificial Sequence
  Antisense oligo
agguggagcuugcagugagc

SEQ ID NO: 19796 - RNA, 20 nt, Artificial Sequence
  Antisense oligo
gagguggagcuugcagugag

SEQ ID NO: 19797 - RNA, 20 nt, Artificial Sequence
  Antisense oligo
aacccaggagguggagcuug

SEQ ID NO: 19798 - RNA, 20 nt, Artificial Sequence
  Antisense oligo
gaacccaggagguggagcuu

SEQ ID NO: 19799 - RNA, 20 nt, Artificial Sequence
  Antisense oligo
ugaacccaggagguggagcu

SEQ ID NO: 19800 - RNA, 20 nt, Artificial Sequence
  Antisense oligo
uugaacccaggagguggagc

SEQ ID NO: 19801 - RNA, 20 nt, Artificial Sequence
  Antisense oligo
cuugaacccaggagguggag

SEQ ID NO: 19802 - RNA, 20 nt, Artificial Sequence
  Antisense oligo
acuugaacccaggaggugga

SEQ ID NO: 19803 - RNA, 20 nt, Artificial Sequence
  Antisense oligo
cacuugaacccaggaggugg

SEQ ID NO: 19804 - RNA, 20 nt, Artificial Sequence
  Antisense oligo
ucacuugaacccaggaggug

SEQ ID NO: 19805 - RNA, 20 nt, Artificial Sequence
  Antisense oligo
aucacuugaacccaggaggu

SEQ ID NO: 19806 - RNA, 20 nt, Artificial Sequence
  Antisense oligo
aaucacuugaacccaggagg

SEQ ID NO: 19807 - RNA, 20 nt, Artificial Sequence
  Antisense oligo
aaaucacuugaacccaggag

SEQ ID NO: 19808 - RNA, 20 nt, Artificial Sequence
  Antisense oligo
aaaaucacuugaacccagga

SEQ ID NO: 19809 - RNA, 20 nt, Artificial Sequence
  Antisense oligo
gaaaaucacuugaacccagg

SEQ ID NO: 19810 - RNA, 20 nt, Artificial Sequence
  Antisense oligo
ggaaaaucacuugaacccag

SEQ ID NO: 19811 - RNA, 20 nt, Artificial Sequence
  Antisense oligo
aggaaaaucacuugaaccca

SEQ ID NO: 19812 - RNA, 20 nt, Artificial Sequence
  Antisense oligo
aggcugaggcaggaaaauca

SEQ ID NO: 19813 - RNA, 20 nt, Artificial Sequence
  Antisense oligo
gaggcugaggcaggaaaauc

SEQ ID NO: 19814 - RNA, 20 nt, Artificial Sequence
  Antisense oligo
ggaggcugaggcaggaaaau

SEQ ID NO: 19815 - RNA, 20 nt, Artificial Sequence
  Antisense oligo
gggaggcugaggcaggaaaa

SEQ ID NO: 19816 - RNA, 20 nt, Artificial Sequence
  Antisense oligo
uguaaucccagcuacucggg

SEQ ID NO: 19817 - RNA, 20 nt, Artificial Sequence
  Antisense oligo
cuguaaucccagcuacucgg

SEQ ID NO: 19818 - RNA, 20 nt, Artificial Sequence
  Antisense oligo
ccuguaaucccagcuacucg

SEQ ID NO: 19819 - RNA, 20 nt, Artificial Sequence
  Antisense oligo
gccuguaaucccagcuacuc

SEQ ID NO: 19820 - RNA, 20 nt, Artificial Sequence
  Antisense oligo
ugccuguaaucccagcuacu

SEQ ID NO: 19821 - RNA, 20 nt, Artificial Sequence
  Antisense oligo
gugccuguaaucccagcuac

SEQ ID NO: 19822 - RNA, 20 nt, Artificial Sequence
  Antisense oligo
ggugccuguaaucccagcua

SEQ ID NO: 19823 - RNA, 20 nt, Artificial Sequence
  Antisense oligo
gggugccuguaaucccagcu

SEQ ID NO: 19824 - RNA, 20 nt, Artificial Sequence
  Antisense oligo
gaaacccugucucuaguaaa

SEQ ID NO: 19825 - RNA, 20 nt, Artificial Sequence
  Antisense oligo
agaaacccugucucuaguaa

SEQ ID NO: 19826 - RNA, 20 nt, Artificial Sequence
  Antisense oligo
aacauggagaaacccugucu

SEQ ID NO: 19827 - RNA, 20 nt, Artificial Sequence
  Antisense oligo
caacauggagaaacccuguc

SEQ ID NO: 19828 - RNA, 20 nt, Artificial Sequence
  Antisense oligo
ccaacauggagaaacccugu

SEQ ID NO: 19829 - RNA, 20 nt, Artificial Sequence
  Antisense oligo
gccaacauggagaaacccug

SEQ ID NO: 19830 - RNA, 20 nt, Artificial Sequence
  Antisense oligo
agccaacauggagaaacccu

SEQ ID NO: 19831 - RNA, 20 nt, Artificial Sequence
  Antisense oligo
uagccaacauggagaaaccc

SEQ ID NO: 19832 - RNA, 20 nt, Artificial Sequence
  Antisense oligo
cuagccaacauggagaaacc

SEQ ID NO: 19833 - RNA, 20 nt, Artificial Sequence
  Antisense oligo
ccuagccaacauggagaaac

SEQ ID NO: 19834 - RNA, 20 nt, Artificial Sequence
  Antisense oligo
guucgagaccagccuagcca

SEQ ID NO: 19835 - RNA, 20 nt, Artificial Sequence
  Antisense oligo
aguucgagaccagccuagcc

SEQ ID NO: 19836 - RNA, 20 nt, Artificial Sequence
  Antisense oligo
gaguucgagaccagccuagc

SEQ ID NO: 19837 - RNA, 20 nt, Artificial Sequence
  Antisense oligo
ggaguucgagaccagccuag

SEQ ID NO: 19838 - RNA, 20 nt, Artificial Sequence
  Antisense oligo
aggaguucgagaccagccua

SEQ ID NO: 19839 - RNA, 20 nt, Artificial Sequence
  Antisense oligo
caggaguucgagaccagccu

SEQ ID NO: 19840 - RNA, 20 nt, Artificial Sequence
  Antisense oligo
ucaggaguucgagaccagcc

SEQ ID NO: 19841 - RNA, 20 nt, Artificial Sequence
  Antisense oligo
gucaggaguucgagaccagc

SEQ ID NO: 19842 - RNA, 20 nt, Artificial Sequence
  Antisense oligo
agucaggaguucgagaccag

SEQ ID NO: 19843 - RNA, 20 nt, Artificial Sequence
  Antisense oligo
aagucaggaguucgagacca

SEQ ID NO: 19844 - RNA, 20 nt, Artificial Sequence
  Antisense oligo
gaagucaggaguucgagacc

SEQ ID NO: 19845 - RNA, 20 nt, Artificial Sequence
  Antisense oligo
ugaagucaggaguucgagac

SEQ ID NO: 19846 - RNA, 20 nt, Artificial Sequence
  Antisense oligo
uugaagucaggaguucgaga

SEQ ID NO: 19847 - RNA, 20 nt, Artificial Sequence
  Antisense oligo
agguggaucacuugaaguca

SEQ ID NO: 19848 - RNA, 20 nt, Artificial Sequence
  Antisense oligo
cagguggaucacuugaaguc

SEQ ID NO: 19849 - RNA, 20 nt, Artificial Sequence
  Antisense oligo
gcagguggaucacuugaagu

SEQ ID NO: 19850 - RNA, 20 nt, Artificial Sequence
  Antisense oligo
ggcagguggaucacuugaag

SEQ ID NO: 19851 - RNA, 20 nt, Artificial Sequence
  Antisense oligo
aggcagguggaucacuugaa

SEQ ID NO: 19852 - RNA, 20 nt, Artificial Sequence
  Antisense oligo
gaggcagguggaucacuuga

SEQ ID NO: 19853 - RNA, 20 nt, Artificial Sequence
  Antisense oligo
ugaggcagguggaucacuug

SEQ ID NO: 19854 - RNA, 20 nt, Artificial Sequence
  Antisense oligo
cugaggcagguggaucacuu

SEQ ID NO: 19855 - RNA, 20 nt, Artificial Sequence
  Antisense oligo
gcugaggcagguggaucacu

SEQ ID NO: 19856 - RNA, 20 nt, Artificial Sequence
  Antisense oligo
aggcugaggcagguggauca

SEQ ID NO: 19857 - RNA, 20 nt, Artificial Sequence
  Antisense oligo
ccuauaauccuagcacuuug

SEQ ID NO: 19858 - RNA, 20 nt, Artificial Sequence
  Antisense oligo
gccuauaauccuagcacuuu

SEQ ID NO: 19859 - RNA, 20 nt, Artificial Sequence
  Antisense oligo
cgccuauaauccuagcacuu

SEQ ID NO: 19860 - RNA, 20 nt, Artificial Sequence
  Antisense oligo
guggcucacgccuauaaucc

SEQ ID NO: 19861 - RNA, 20 nt, Artificial Sequence
  Antisense oligo
aguggcucacgccuauaauc

SEQ ID NO: 19862 - RNA, 20 nt, Artificial Sequence
  Antisense oligo
caguggcucacgccuauaau

SEQ ID NO: 19863 - RNA, 20 nt, Artificial Sequence
  Antisense oligo
gcaguggcucacgccuauaa

SEQ ID NO: 19864 - RNA, 20 nt, Artificial Sequence
  Antisense oligo
cgcaguggcucacgccuaua

SEQ ID NO: 19865 - RNA, 20 nt, Artificial Sequence
  Antisense oligo
ccaaaaugcucguuaagacu

SEQ ID NO: 19866 - RNA, 20 nt, Artificial Sequence
  Antisense oligo
accaaaaugcucguuaagac

SEQ ID NO: 19867 - RNA, 20 nt, Artificial Sequence
  Antisense oligo
gaaccaaaaugcucguuaag

SEQ ID NO: 19868 - RNA, 20 nt, Artificial Sequence
  Antisense oligo
cagaaccaaaaugcucguua

SEQ ID NO: 19869 - RNA, 20 nt, Artificial Sequence
  Antisense oligo
gcagaaccaaaaugcucguu

SEQ ID NO: 19870 - RNA, 20 nt, Artificial Sequence
  Antisense oligo
caucagcagaaccaaaaugc

SEQ ID NO: 19871 - RNA, 20 nt, Artificial Sequence
  Antisense oligo
guugucaucagcagaaccaa

SEQ ID NO: 19872 - RNA, 20 nt, Artificial Sequence
  Antisense oligo
gcucccauauaacauaaggg

SEQ ID NO: 19873 - RNA, 20 nt, Artificial Sequence
  Antisense oligo
ggcucccauauaacauaagg

SEQ ID NO: 19874 - RNA, 20 nt, Artificial Sequence
  Antisense oligo
aggcucccauauaacauaag

SEQ ID NO: 19875 - RNA, 20 nt, Artificial Sequence
  Antisense oligo
gaaacccugucucuagcaaa

SEQ ID NO: 19876 - RNA, 20 nt, Artificial Sequence
  Antisense oligo
cgaaacccugucucuagcaa

SEQ ID NO: 19877 - RNA, 20 nt, Artificial Sequence
  Antisense oligo
gcgaaacccugucucuagca

SEQ ID NO: 19878 - RNA, 20 nt, Artificial Sequence
  Antisense oligo
ggcgaaacccugucucuagc

SEQ ID NO: 19879 - RNA, 20 nt, Artificial Sequence
  Antisense oligo
uggcgaaacccugucucuag

SEQ ID NO: 19880 - RNA, 20 nt, Artificial Sequence
  Antisense oligo
auggcgaaacccugucucua

SEQ ID NO: 19881 - RNA, 20 nt, Artificial Sequence
  Antisense oligo
cauggcgaaacccugucucu

SEQ ID NO: 19882 - RNA, 20 nt, Artificial Sequence
  Antisense oligo
acauggcgaaacccugucuc

SEQ ID NO: 19883 - RNA, 20 nt, Artificial Sequence
  Antisense oligo
aacauggcgaaacccugucu

SEQ ID NO: 19884 - RNA, 20 nt, Artificial Sequence
  Antisense oligo
caacauggcgaaacccuguc

SEQ ID NO: 19885 - RNA, 20 nt, Artificial Sequence
  Antisense oligo
gcaacauggcgaaacccugu

SEQ ID NO: 19886 - RNA, 20 nt, Artificial Sequence
  Antisense oligo
ggcaacauggcgaaacccug

SEQ ID NO: 19887 - RNA, 20 nt, Artificial Sequence
  Antisense oligo
gggcaacauggcgaaacccu

SEQ ID NO: 19888 - RNA, 20 nt, Artificial Sequence
  Antisense oligo
ugggcaacauggcgaaaccc

SEQ ID NO: 19889 - RNA, 20 nt, Artificial Sequence
  Antisense oligo
cugggcaacauggcgaaacc

SEQ ID NO: 19890 - RNA, 20 nt, Artificial Sequence
  Antisense oligo
ccugggcaacauggcgaaac

SEQ ID NO: 19891 - RNA, 20 nt, Artificial Sequence
  Antisense oligo
gccugggcaacauggcgaaa

SEQ ID NO: 19892 - RNA, 20 nt, Artificial Sequence
  Antisense oligo
agccugggcaacauggcgaa

SEQ ID NO: 19893 - RNA, 20 nt, Artificial Sequence
  Antisense oligo
agaccagccugggcaacaug

SEQ ID NO: 19894 - RNA, 20 nt, Artificial Sequence
  Antisense oligo
aagaccagccugggcaacau

SEQ ID NO: 19895 - RNA, 20 nt, Artificial Sequence
  Antisense oligo
caagaccagccugggcaaca

SEQ ID NO: 19896 - RNA, 20 nt, Artificial Sequence
  Antisense oligo
ucaagaccagccugggcaac

SEQ ID NO: 19897 - RNA, 20 nt, Artificial Sequence
  Antisense oligo
uucaagaccagccugggcaa

SEQ ID NO: 19898 - RNA, 20 nt, Artificial Sequence
  Antisense oligo
guucaagaccagccugggca

SEQ ID NO: 19899 - RNA, 20 nt, Artificial Sequence
  Antisense oligo
aguucaagaccagccugggc

SEQ ID NO: 19900 - RNA, 20 nt, Artificial Sequence
  Antisense oligo
gaguucaagaccagccuggg

SEQ ID NO: 19901 - RNA, 20 nt, Artificial Sequence
  Antisense oligo
ggaguucaagaccagccugg

SEQ ID NO: 19902 - RNA, 20 nt, Artificial Sequence
  Antisense oligo
aggaguucaagaccagccug

SEQ ID NO: 19903 - RNA, 20 nt, Artificial Sequence
  Antisense oligo
caggaguucaagaccagccu

SEQ ID NO: 19904 - RNA, 20 nt, Artificial Sequence
  Antisense oligo
ucaggaguucaagaccagcc

SEQ ID NO: 19905 - RNA, 20 nt, Artificial Sequence
  Antisense oligo
gucaggaguucaagaccagc

SEQ ID NO: 19906 - RNA, 20 nt, Artificial Sequence
  Antisense oligo
ggaggucaggaguucaagac

SEQ ID NO: 19907 - RNA, 20 nt, Artificial Sequence
  Antisense oligo
uggaggucaggaguucaaga

SEQ ID NO: 19908 - RNA, 20 nt, Artificial Sequence
  Antisense oligo
guggaggucaggaguucaag

SEQ ID NO: 19909 - RNA, 20 nt, Artificial Sequence
  Antisense oligo
aguggaggucaggaguucaa

SEQ ID NO: 19910 - RNA, 20 nt, Artificial Sequence
  Antisense oligo
caguggaggucaggaguuca

SEQ ID NO: 19911 - RNA, 20 nt, Artificial Sequence
  Antisense oligo
guguaagcccagcacugugu

SEQ ID NO: 19912 - RNA, 20 nt, Artificial Sequence
  Antisense oligo
cucagcaugguggcucacgu

SEQ ID NO: 19913 - RNA, 20 nt, Artificial Sequence
  Antisense oligo
uccucagcaugguggcucac

SEQ ID NO: 19914 - RNA, 20 nt, Artificial Sequence
  Antisense oligo
cuccucagcaugguggcuca

SEQ ID NO: 19915 - RNA, 20 nt, Artificial Sequence
  Antisense oligo
ucuccucagcaugguggcuc

SEQ ID NO: 19916 - RNA, 20 nt, Artificial Sequence
  Antisense oligo
gucuccucagcaugguggcu

SEQ ID NO: 19917 - RNA, 20 nt, Artificial Sequence
  Antisense oligo
acagucuccucagcauggug

SEQ ID NO: 19918 - RNA, 20 nt, Artificial Sequence
  Antisense oligo
uuaaaacagucuccucagca

SEQ ID NO: 19919 - RNA, 20 nt, Artificial Sequence
  Antisense oligo
uguaacuuacgagagugucu

SEQ ID NO: 19920 - RNA, 20 nt, Artificial Sequence
  Antisense oligo
auguaacuuacgagaguguc

SEQ ID NO: 19921 - RNA, 20 nt, Artificial Sequence
  Antisense oligo
uugcauguaacuuacgagag

SEQ ID NO: 19922 - RNA, 20 nt, Artificial Sequence
  Antisense oligo
guuugcauguaacuuacgag

SEQ ID NO: 19923 - RNA, 20 nt, Artificial Sequence
  Antisense oligo
cugggaacugagaugccauu

SEQ ID NO: 19924 - RNA, 20 nt, Artificial Sequence
  Antisense oligo
ucugggaacugagaugccau

SEQ ID NO: 19925 - RNA, 20 nt, Artificial Sequence
  Antisense oligo
uuccacacugagacacagcu

SEQ ID NO: 19926 - RNA, 20 nt, Artificial Sequence
  Antisense oligo
uguuuuccacacugagacac

SEQ ID NO: 19927 - RNA, 20 nt, Artificial Sequence
  Antisense oligo
cuguuuuccacacugagaca

SEQ ID NO: 19928 - RNA, 20 nt, Artificial Sequence
  Antisense oligo
agcuguuuuccacacugaga

SEQ ID NO: 19929 - RNA, 20 nt, Artificial Sequence
  Antisense oligo
uucucgauuccauuucagca

SEQ ID NO: 19930 - RNA, 20 nt, Artificial Sequence
  Antisense oligo
uuucucgauuccauuucagc

SEQ ID NO: 19931 - RNA, 20 nt, Artificial Sequence
  Antisense oligo
cuaucucauuucucgauucc

SEQ ID NO: 19932 - RNA, 20 nt, Artificial Sequence
  Antisense oligo
uccaaagauagcugaggaaa

SEQ ID NO: 19933 - RNA, 20 nt, Artificial Sequence
  Antisense oligo
gucauccaaagauagcugag

SEQ ID NO: 19934 - RNA, 20 nt, Artificial Sequence
  Antisense oligo
agucauccaaagauagcuga

SEQ ID NO: 19935 - RNA, 20 nt, Artificial Sequence
  Antisense oligo
aagucauccaaagauagcug

SEQ ID NO: 19936 - RNA, 20 nt, Artificial Sequence
  Antisense oligo
cuccaaagucauccaaagau

SEQ ID NO: 19937 - RNA, 20 nt, Artificial Sequence
  Antisense oligo
ucucuccaaagucauccaaa

SEQ ID NO: 19938 - RNA, 20 nt, Artificial Sequence
  Antisense oligo
uucucuccaaagucauccaa

SEQ ID NO: 19939 - RNA, 20 nt, Artificial Sequence
  Antisense oligo
cgaggagagaggagucuucu

SEQ ID NO: 19940 - RNA, 20 nt, Artificial Sequence
  Antisense oligo
acgaggagagaggagucuuc

SEQ ID NO: 19941 - RNA, 20 nt, Artificial Sequence
  Antisense oligo
gacgaggagagaggagucuu

SEQ ID NO: 19942 - RNA, 20 nt, Artificial Sequence
  Antisense oligo
gcagacgaggagagaggagu

SEQ ID NO: 19943 - RNA, 20 nt, Artificial Sequence
  Antisense oligo
aaaggcaccaguccaugauc

SEQ ID NO: 19944 - RNA, 20 nt, Artificial Sequence
  Antisense oligo
caaaggcaccaguccaugau

SEQ ID NO: 19945 - RNA, 20 nt, Artificial Sequence
  Antisense oligo
gcaaaggcaccaguccauga

SEQ ID NO: 19946 - RNA, 20 nt, Artificial Sequence
  Antisense oligo
ugcaaaggcaccaguccaug

SEQ ID NO: 19947 - RNA, 20 nt, Artificial Sequence
  Antisense oligo
augcaaaggcaccaguccau

SEQ ID NO: 19948 - RNA, 20 nt, Artificial Sequence
  Antisense oligo
aaugcaaaggcaccagucca

SEQ ID NO: 19949 - RNA, 20 nt, Artificial Sequence
  Antisense oligo
gaaugcaaaggcaccagucc

SEQ ID NO: 19950 - RNA, 20 nt, Artificial Sequence
  Antisense oligo
ugaaugcaaaggcaccaguc

SEQ ID NO: 19951 - RNA, 20 nt, Artificial Sequence
  Antisense oligo
ucugaaugcaaaggcaccag

SEQ ID NO: 19952 - RNA, 20 nt, Artificial Sequence
  Antisense oligo
uucugaaugcaaaggcacca

SEQ ID NO: 19953 - RNA, 20 nt, Artificial Sequence
  Antisense oligo
gcucuccuucugaaugcaaa

SEQ ID NO: 19954 - RNA, 20 nt, Artificial Sequence
  Antisense oligo
agcucuccuucugaaugcaa

SEQ ID NO: 19955 - RNA, 20 nt, Artificial Sequence
  Antisense oligo
acagcucuccuucugaaugc

SEQ ID NO: 19956 - RNA, 20 nt, Artificial Sequence
  Antisense oligo
gacagcucuccuucugaaug

SEQ ID NO: 19957 - RNA, 20 nt, Artificial Sequence
  Antisense oligo
ugacagcucuccuucugaau

SEQ ID NO: 19958 - RNA, 20 nt, Artificial Sequence
  Antisense oligo
cugacagcucuccuucugaa

SEQ ID NO: 19959 - RNA, 20 nt, Artificial Sequence
  Antisense oligo
acgcugacagcucuccuucu

SEQ ID NO: 19960 - RNA, 20 nt, Artificial Sequence
  Antisense oligo
uacgcugacagcucuccuuc

SEQ ID NO: 19961 - RNA, 20 nt, Artificial Sequence
  Antisense oligo
cuacgcugacagcucuccuu

SEQ ID NO: 19962 - RNA, 20 nt, Artificial Sequence
  Antisense oligo
gcuacgcugacagcucuccu

SEQ ID NO: 19963 - RNA, 20 nt, Artificial Sequence
  Antisense oligo
ugcuacgcugacagcucucc

SEQ ID NO: 19964 - RNA, 20 nt, Artificial Sequence
  Antisense oligo
gugcuacgcugacagcucuc

SEQ ID NO: 19965 - RNA, 20 nt, Artificial Sequence
  Antisense oligo
ggugcuacgcugacagcucu

SEQ ID NO: 19966 - RNA, 20 nt, Artificial Sequence
  Antisense oligo
ucggugcuacgcugacagcu

SEQ ID NO: 19967 - RNA, 20 nt, Artificial Sequence
  Antisense oligo
uucggugcuacgcugacagc

SEQ ID NO: 19968 - RNA, 20 nt, Artificial Sequence
  Antisense oligo
auucggugcuacgcugacag

SEQ ID NO: 19969 - RNA, 20 nt, Artificial Sequence
  Antisense oligo
aauucggugcuacgcugaca

SEQ ID NO: 19970 - RNA, 20 nt, Artificial Sequence
  Antisense oligo
gcacgccuuggucuugaauu

SEQ ID NO: 19971 - RNA, 20 nt, Artificial Sequence
  Antisense oligo
agcacgccuuggucuugaau

SEQ ID NO: 19972 - RNA, 20 nt, Artificial Sequence
  Antisense oligo
uagcacgccuuggucuugaa

SEQ ID NO: 19973 - RNA, 20 nt, Artificial Sequence
  Antisense oligo
guagcacgccuuggucuuga

SEQ ID NO: 19974 - RNA, 20 nt, Artificial Sequence
  Antisense oligo
gguagcacgccuuggucuug

SEQ ID NO: 19975 - RNA, 20 nt, Artificial Sequence
  Antisense oligo
agguagcacgccuuggucuu

SEQ ID NO: 19976 - RNA, 20 nt, Artificial Sequence
  Antisense oligo
cagguagcacgccuuggucu

SEQ ID NO: 19977 - RNA, 20 nt, Artificial Sequence
  Antisense oligo
ucagguagcacgccuugguc

SEQ ID NO: 19978 - RNA, 20 nt, Artificial Sequence
  Antisense oligo
cucagguagcacgccuuggu

SEQ ID NO: 19979 - RNA, 20 nt, Artificial Sequence
  Antisense oligo
agcucagguagcacgccuug

SEQ ID NO: 19980 - RNA, 20 nt, Artificial Sequence
  Antisense oligo
cagcucagguagcacgccuu

SEQ ID NO: 19981 - RNA, 20 nt, Artificial Sequence
  Antisense oligo
cugucagcucagguagcacg

SEQ ID NO: 19982 - RNA, 20 nt, Artificial Sequence
  Antisense oligo
gcugucagcucagguagcac

SEQ ID NO: 19983 - RNA, 20 nt, Artificial Sequence
  Antisense oligo
cuccuggaauguaaacaaug

SEQ ID NO: 19984 - RNA, 20 nt, Artificial Sequence
  Antisense oligo
gucuccuggaauguaaacaa

SEQ ID NO: 19985 - RNA, 20 nt, Artificial Sequence
  Antisense oligo
agucuccuggaauguaaaca

SEQ ID NO: 19986 - RNA, 20 nt, Artificial Sequence
  Antisense oligo
gcuacaagucuccuggaaug

SEQ ID NO: 19987 - RNA, 20 nt, Artificial Sequence
  Antisense oligo
agcuacaagucuccuggaau

SEQ ID NO: 19988 - RNA, 20 nt, Artificial Sequence
  Antisense oligo
gagcuacaagucuccuggaa

SEQ ID NO: 19989 - RNA, 20 nt, Artificial Sequence
  Antisense oligo
ugagcuacaagucuccugga

SEQ ID NO: 19990 - RNA, 20 nt, Artificial Sequence
  Antisense oligo
ggcugagcuacaagucuccu

SEQ ID NO: 19991 - RNA, 20 nt, Artificial Sequence
  Antisense oligo
uggcugagcuacaagucucc

SEQ ID NO: 19992 - RNA, 20 nt, Artificial Sequence
  Antisense oligo
guggcugagcuacaagucuc

SEQ ID NO: 19993 - RNA, 20 nt, Artificial Sequence
  Antisense oligo
uguggcugagcuacaagucu

SEQ ID NO: 19994 - RNA, 20 nt, Artificial Sequence
  Antisense oligo
guguggcugagcuacaaguc

SEQ ID NO: 19995 - RNA, 20 nt, Artificial Sequence
  Antisense oligo
uguguggcugagcuacaagu

SEQ ID NO: 19996 - RNA, 20 nt, Artificial Sequence
  Antisense oligo
guguguggcugagcuacaag

SEQ ID NO: 19997 - RNA, 20 nt, Artificial Sequence
  Antisense oligo
gcguguguggcugagcuaca

SEQ ID NO: 19998 - RNA, 20 nt, Artificial Sequence
  Antisense oligo
ugcguguguggcugagcuac

SEQ ID NO: 19999 - RNA, 20 nt, Artificial Sequence
  Antisense oligo
cugcguguguggcugagcua

SEQ ID NO: 20000 - RNA, 20 nt, Artificial Sequence
  Antisense oligo
uacugcguguguggcugagc

SEQ ID NO: 20001 - RNA, 20 nt, Artificial Sequence
  Antisense oligo
uuacugcguguguggcugag

SEQ ID NO: 20002 - RNA, 20 nt, Artificial Sequence
  Antisense oligo
auuacugcguguguggcuga

SEQ ID NO: 20003 - RNA, 20 nt, Artificial Sequence
  Antisense oligo
cauuacugcguguguggcug

SEQ ID NO: 20004 - RNA, 20 nt, Artificial Sequence
  Antisense oligo
ucauuacugcguguguggcu

SEQ ID NO: 20005 - RNA, 20 nt, Artificial Sequence
  Antisense oligo
gucauuacugcguguguggc

SEQ ID NO: 20006 - RNA, 20 nt, Artificial Sequence
  Antisense oligo
ggucauuacugcgugugugg

SEQ ID NO: 20007 - RNA, 20 nt, Artificial Sequence
  Antisense oligo
aggucauuacugcgugugug

SEQ ID NO: 20008 - RNA, 20 nt, Artificial Sequence
  Antisense oligo
caggucauuacugcgugugu

SEQ ID NO: 20009 - RNA, 20 nt, Artificial Sequence
  Antisense oligo
acaggucauuacugcgugug

SEQ ID NO: 20010 - RNA, 20 nt, Artificial Sequence
  Antisense oligo
cacaggucauuacugcgugu

SEQ ID NO: 20011 - RNA, 20 nt, Artificial Sequence
  Antisense oligo
gcacaggucauuacugcgug

SEQ ID NO: 20012 - RNA, 20 nt, Artificial Sequence
  Antisense oligo
ggcacaggucauuacugcgu

SEQ ID NO: 20013 - RNA, 20 nt, Artificial Sequence
  Antisense oligo
gggcacaggucauuacugcg

SEQ ID NO: 20014 - RNA, 20 nt, Artificial Sequence
  Antisense oligo
cgggcacaggucauuacugc

SEQ ID NO: 20015 - RNA, 20 nt, Artificial Sequence
  Antisense oligo
acgggcacaggucauuacug

SEQ ID NO: 20016 - RNA, 20 nt, Artificial Sequence
  Antisense oligo
aacgggcacaggucauuacu

SEQ ID NO: 20017 - RNA, 20 nt, Artificial Sequence
  Antisense oligo
gaacgggcacaggucauuac

SEQ ID NO: 20018 - RNA, 20 nt, Artificial Sequence
  Antisense oligo
cgaacgggcacaggucauua

SEQ ID NO: 20019 - RNA, 20 nt, Artificial Sequence
  Antisense oligo
gcgaacgggcacaggucauu

SEQ ID NO: 20020 - RNA, 20 nt, Artificial Sequence
  Antisense oligo
caucaucgugggaacccaga

SEQ ID NO: 20021 - RNA, 20 nt, Artificial Sequence
  Antisense oligo
acaucaucgugggaacccag

SEQ ID NO: 20022 - RNA, 20 nt, Artificial Sequence
  Antisense oligo
cacaucaucgugggaaccca

SEQ ID NO: 20023 - RNA, 20 nt, Artificial Sequence
  Antisense oligo
ucacaucaucgugggaaccc

SEQ ID NO: 20024 - RNA, 20 nt, Artificial Sequence
  Antisense oligo
uucacaucaucgugggaacc

SEQ ID NO: 20025 - RNA, 20 nt, Artificial Sequence
  Antisense oligo
uuucacaucaucgugggaac

SEQ ID NO: 20026 - RNA, 20 nt, Artificial Sequence
  Antisense oligo
uuuucacaucaucgugggaa

SEQ ID NO: 20027 - RNA, 20 nt, Artificial Sequence
  Antisense oligo
uuaaggcacucacaaaaugc

SEQ ID NO: 20028 - RNA, 20 nt, Artificial Sequence
  Antisense oligo
ggcucuuacccucugaagug

SEQ ID NO: 20029 - RNA, 20 nt, Artificial Sequence
  Antisense oligo
gcuuuuggcucuuacccucu

SEQ ID NO: 20030 - RNA, 20 nt, Artificial Sequence
  Antisense oligo
ggcuuuuggcucuuacccuc

SEQ ID NO: 20031 - RNA, 20 nt, Artificial Sequence
  Antisense oligo
aggcuuuuggcucuuacccu

SEQ ID NO: 20032 - RNA, 20 nt, Artificial Sequence
  Antisense oligo
ucacaaugaggcuuuuggcu

SEQ ID NO: 20033 - RNA, 20 nt, Artificial Sequence
  Antisense oligo
cagugccuuucacaaugagg

SEQ ID NO: 20034 - RNA, 20 nt, Artificial Sequence
  Antisense oligo
ccagugccuuucacaaugag

SEQ ID NO: 20035 - RNA, 20 nt, Artificial Sequence
  Antisense oligo
aguccagugccuuucacaau

SEQ ID NO: 20036 - RNA, 20 nt, Artificial Sequence
  Antisense oligo
ccaaguccagugccuuucac

SEQ ID NO: 20037 - RNA, 20 nt, Artificial Sequence
  Antisense oligo
guccaaguccagugccuuuc

SEQ ID NO: 20038 - RNA, 20 nt, Artificial Sequence
  Antisense oligo
ugguccaaguccagugccuu

SEQ ID NO: 20039 - RNA, 20 nt, Artificial Sequence
  Antisense oligo
gugucccugguccaagucca

SEQ ID NO: 20040 - RNA, 20 nt, Artificial Sequence
  Antisense oligo
gauggugucccugguccaag

SEQ ID NO: 20041 - RNA, 20 nt, Artificial Sequence
  Antisense oligo
cugauggugucccuggucca

SEQ ID NO: 20042 - RNA, 20 nt, Artificial Sequence
  Antisense oligo
gaucagaagaaucuuuggcg

SEQ ID NO: 20043 - RNA, 20 nt, Artificial Sequence
  Antisense oligo
acagucaucuaguuucucuc

SEQ ID NO: 20044 - RNA, 20 nt, Artificial Sequence
  Antisense oligo
ggccugugaccaaguuuaca

SEQ ID NO: 20045 - RNA, 20 nt, Artificial Sequence
  Antisense oligo
agaacugccagaaccaggcc

SEQ ID NO: 20046 - RNA, 20 nt, Artificial Sequence
  Antisense oligo
aagaacugccagaaccaggc

SEQ ID NO: 20047 - RNA, 20 nt, Artificial Sequence
  Antisense oligo
caaagaacugccagaaccag

SEQ ID NO: 20048 - RNA, 20 nt, Artificial Sequence
  Antisense oligo
gcaaagaacugccagaacca

SEQ ID NO: 20049 - RNA, 20 nt, Artificial Sequence
  Antisense oligo
cgcaaagaacugccagaacc

SEQ ID NO: 20050 - RNA, 20 nt, Artificial Sequence
  Antisense oligo
ccgcaaagaacugccagaac

SEQ ID NO: 20051 - RNA, 20 nt, Artificial Sequence
  Antisense oligo
uccgcaaagaacugccagaa

SEQ ID NO: 20052 - RNA, 20 nt, Artificial Sequence
  Antisense oligo
guccgcaaagaacugccaga

SEQ ID NO: 20053 - RNA, 20 nt, Artificial Sequence
  Antisense oligo
aguccgcaaagaacugccag

SEQ ID NO: 20054 - RNA, 20 nt, Artificial Sequence
  Antisense oligo
aaguccgcaaagaacugcca

SEQ ID NO: 20055 - RNA, 20 nt, Artificial Sequence
  Antisense oligo
aaaguccgcaaagaacugcc

SEQ ID NO: 20056 - RNA, 20 nt, Artificial Sequence
  Antisense oligo
aaaaguccgcaaagaacugc

SEQ ID NO: 20057 - RNA, 20 nt, Artificial Sequence
  Antisense oligo
cacugagacugcauguuuau

SEQ ID NO: 20058 - RNA, 20 nt, Artificial Sequence
  Antisense oligo
acacugagacugcauguuua

SEQ ID NO: 20059 - RNA, 20 nt, Artificial Sequence
  Antisense oligo
cacacugagacugcauguuu

SEQ ID NO: 20060 - RNA, 20 nt, Artificial Sequence
  Antisense oligo
agcacacugagacugcaugu

SEQ ID NO: 20061 - RNA, 20 nt, Artificial Sequence
  Antisense oligo
gagcacacugagacugcaug

SEQ ID NO: 20062 - RNA, 20 nt, Artificial Sequence
  Antisense oligo
agagcacacugagacugcau

SEQ ID NO: 20063 - RNA, 20 nt, Artificial Sequence
  Antisense oligo
gagagcacacugagacugca

SEQ ID NO: 20064 - RNA, 20 nt, Artificial Sequence
  Antisense oligo
cgagagcacacugagacugc

SEQ ID NO: 20065 - RNA, 20 nt, Artificial Sequence
  Antisense oligo
gcgagagcacacugagacug

SEQ ID NO: 20066 - RNA, 20 nt, Artificial Sequence
  Antisense oligo
augcgagagcacacugagac

SEQ ID NO: 20067 - RNA, 20 nt, Artificial Sequence
  Antisense oligo
caugcgagagcacacugaga

SEQ ID NO: 20068 - RNA, 20 nt, Artificial Sequence
  Antisense oligo
uacaugcgagagcacacuga

SEQ ID NO: 20069 - RNA, 20 nt, Artificial Sequence
  Antisense oligo
auacaugcgagagcacacug

SEQ ID NO: 20070 - RNA, 20 nt, Artificial Sequence
  Antisense oligo
cauacaugcgagagcacacu

SEQ ID NO: 20071 - RNA, 20 nt, Artificial Sequence
  Antisense oligo
ucauacaugcgagagcacac

SEQ ID NO: 20072 - RNA, 20 nt, Artificial Sequence
  Antisense oligo
uucauacaugcgagagcaca

SEQ ID NO: 20073 - RNA, 20 nt, Artificial Sequence
  Antisense oligo
auucauacaugcgagagcac

SEQ ID NO: 20074 - RNA, 20 nt, Artificial Sequence
  Antisense oligo
uauucauacaugcgagagca

SEQ ID NO: 20075 - RNA, 20 nt, Artificial Sequence
  Antisense oligo
auauucauacaugcgagagc

SEQ ID NO: 20076 - RNA, 20 nt, Artificial Sequence
  Antisense oligo
gauauucauacaugcgagag

SEQ ID NO: 20077 - RNA, 20 nt, Artificial Sequence
  Antisense oligo
ccacagaaaggacuagauau

SEQ ID NO: 20078 - RNA, 20 nt, Artificial Sequence
  Antisense oligo
accacagaaaggacuagaua

SEQ ID NO: 20079 - RNA, 20 nt, Artificial Sequence
  Antisense oligo
augucuuggcugagaaccac

SEQ ID NO: 20080 - RNA, 20 nt, Artificial Sequence
  Antisense oligo
uuuaugucuuggcugagaac

SEQ ID NO: 20081 - RNA, 20 nt, Artificial Sequence
  Antisense oligo
augugcucugaguccuaguu

SEQ ID NO: 20082 - RNA, 20 nt, Artificial Sequence
  Antisense oligo
uaugugcucugaguccuagu

SEQ ID NO: 20083 - RNA, 20 nt, Artificial Sequence
  Antisense oligo
guaugugcucugaguccuag

SEQ ID NO: 20084 - RNA, 20 nt, Artificial Sequence
  Antisense oligo
uguaugugcucugaguccua

SEQ ID NO: 20085 - RNA, 20 nt, Artificial Sequence
  Antisense oligo
uuguaugugcucugaguccu

SEQ ID NO: 20086 - RNA, 20 nt, Artificial Sequence
  Antisense oligo
gguuuuguaugugcucugag

SEQ ID NO: 20087 - RNA, 20 nt, Artificial Sequence
  Antisense oligo
ugguuuuguaugugcucuga

SEQ ID NO: 20088 - RNA, 20 nt, Artificial Sequence
  Antisense oligo
cugguuuuguaugugcucug

SEQ ID NO: 20089 - RNA, 20 nt, Artificial Sequence
  Antisense oligo
acugguuuuguaugugcucu

SEQ ID NO: 20090 - RNA, 20 nt, Artificial Sequence
  Antisense oligo
aacugguuuuguaugugcuc

SEQ ID NO: 20091 - RNA, 20 nt, Artificial Sequence
  Antisense oligo
cgucagugagaaaagcagca

SEQ ID NO: 20092 - RNA, 20 nt, Artificial Sequence
  Antisense oligo
acgucagugagaaaagcagc

SEQ ID NO: 20093 - RNA, 20 nt, Artificial Sequence
  Antisense oligo
aacacgucagugagaaaagc

SEQ ID NO: 20094 - RNA, 20 nt, Artificial Sequence
  Antisense oligo
caacacgucagugagaaaag

SEQ ID NO: 20095 - RNA, 20 nt, Artificial Sequence
  Antisense oligo
gcaacacgucagugagaaaa

SEQ ID NO: 20096 - RNA, 20 nt, Artificial Sequence
  Antisense oligo
aggcaacacgucagugagaa

SEQ ID NO: 20097 - RNA, 20 nt, Artificial Sequence
  Antisense oligo
aaggcaacacgucagugaga

SEQ ID NO: 20098 - RNA, 20 nt, Artificial Sequence
  Antisense oligo
aaaggcaacacgucagugag

SEQ ID NO: 20099 - RNA, 20 nt, Artificial Sequence
  Antisense oligo
aaaaggcaacacgucaguga

SEQ ID NO: 20100 - RNA, 20 nt, Artificial Sequence
  Antisense oligo
guccuaaguaucaaagcaga

SEQ ID NO: 20101 - RNA, 20 nt, Artificial Sequence
  Antisense oligo
agguccuaaguaucaaagca

SEQ ID NO: 20102 - RNA, 20 nt, Artificial Sequence
  Antisense oligo
gagguccuaaguaucaaagc

SEQ ID NO: 20103 - RNA, 20 nt, Artificial Sequence
  Antisense oligo
agagguccuaaguaucaaag

SEQ ID NO: 20104 - RNA, 20 nt, Artificial Sequence
  Antisense oligo
gagagguccuaaguaucaaa

SEQ ID NO: 20105 - RNA, 20 nt, Artificial Sequence
  Antisense oligo
agagagguccuaaguaucaa

SEQ ID NO: 20106 - RNA, 20 nt, Artificial Sequence
  Antisense oligo
cagagagguccuaaguauca

SEQ ID NO: 20107 - RNA, 20 nt, Artificial Sequence
  Antisense oligo
uccagagagguccuaaguau

SEQ ID NO: 20108 - RNA, 20 nt, Artificial Sequence
  Antisense oligo
guccagagagguccuaagua

SEQ ID NO: 20109 - RNA, 20 nt, Artificial Sequence
  Antisense oligo
aauuaguccagagagguccu

SEQ ID NO: 20110 - RNA, 20 nt, Artificial Sequence
  Antisense oligo
gaaauuaguccagagagguc

SEQ ID NO: 20111 - RNA, 20 nt, Artificial Sequence
  Antisense oligo
gugcugagcugucuaggaag

SEQ ID NO: 20112 - RNA, 20 nt, Artificial Sequence
  Antisense oligo
cauaucaauagcugugcuga

SEQ ID NO: 20113 - RNA, 20 nt, Artificial Sequence
  Antisense oligo
acauaucaauagcugugcug

SEQ ID NO: 20114 - RNA, 20 nt, Artificial Sequence
  Antisense oligo
gccucuaacauaucaauagc

SEQ ID NO: 20115 - RNA, 20 nt, Artificial Sequence
  Antisense oligo
aggauacugccucuaacaua

SEQ ID NO: 20116 - RNA, 20 nt, Artificial Sequence
  Antisense oligo
aaggauacugccucuaacau

SEQ ID NO: 20117 - RNA, 20 nt, Artificial Sequence
  Antisense oligo
uaaggauacugccucuaaca

SEQ ID NO: 20118 - RNA, 20 nt, Artificial Sequence
  Antisense oligo
uuaaggauacugccucuaac

SEQ ID NO: 20119 - RNA, 20 nt, Artificial Sequence
  Antisense oligo
cccaauuucaaguuaagucg

SEQ ID NO: 20120 - RNA, 20 nt, Artificial Sequence
  Antisense oligo
aggcccaauuucaaguuaag

SEQ ID NO: 20121 - RNA, 20 nt, Artificial Sequence
  Antisense oligo
cuuaggcccaauuucaaguu

SEQ ID NO: 20122 - RNA, 20 nt, Artificial Sequence
  Antisense oligo
ccuuaggcccaauuucaagu

SEQ ID NO: 20123 - RNA, 20 nt, Artificial Sequence
  Antisense oligo
uccuuaggcccaauuucaag

SEQ ID NO: 20124 - RNA, 20 nt, Artificial Sequence
  Antisense oligo
cuccuuaggcccaauuucaa

SEQ ID NO: 20125 - RNA, 20 nt, Artificial Sequence
  Antisense oligo
acuccuuaggcccaauuuca

SEQ ID NO: 20126 - RNA, 20 nt, Artificial Sequence
  Antisense oligo
cacuccuuaggcccaauuuc

SEQ ID NO: 20127 - RNA, 20 nt, Artificial Sequence
  Antisense oligo
uucucacuccuuaggcccaa

SEQ ID NO: 20128 - RNA, 20 nt, Artificial Sequence
  Antisense oligo
aguucucacuccuuaggccc

SEQ ID NO: 20129 - RNA, 20 nt, Artificial Sequence
  Antisense oligo
uaguucucacuccuuaggcc

SEQ ID NO: 20130 - RNA, 20 nt, Artificial Sequence
  Antisense oligo
guaguucucacuccuuaggc

SEQ ID NO: 20131 - RNA, 20 nt, Artificial Sequence
  Antisense oligo
uguaguucucacuccuuagg

SEQ ID NO: 20132 - RNA, 20 nt, Artificial Sequence
  Antisense oligo
uuguaguucucacuccuuag

SEQ ID NO: 20133 - RNA, 20 nt, Artificial Sequence
  Antisense oligo
aguccuggacaagcauuuug

SEQ ID NO: 20134 - RNA, 20 nt, Artificial Sequence
  Antisense oligo
gaguccuggacaagcauuuu

SEQ ID NO: 20135 - RNA, 20 nt, Artificial Sequence
  Antisense oligo
ugaguccuggacaagcauuu

SEQ ID NO: 20136 - RNA, 20 nt, Artificial Sequence
  Antisense oligo
cugaguccuggacaagcauu

SEQ ID NO: 20137 - RNA, 20 nt, Artificial Sequence
  Antisense oligo
gcugaguccuggacaagcau

SEQ ID NO: 20138 - RNA, 20 nt, Artificial Sequence
  Antisense oligo
uggcugaguccuggacaagc

SEQ ID NO: 20139 - RNA, 20 nt, Artificial Sequence
  Antisense oligo
acaguuccuuccgugccucc

SEQ ID NO: 20140 - RNA, 20 nt, Artificial Sequence
  Antisense oligo
cacaguuccuuccgugccuc

SEQ ID NO: 20141 - RNA, 20 nt, Artificial Sequence
  Antisense oligo
ggagcacaguuccuuccgug

SEQ ID NO: 20142 - RNA, 20 nt, Artificial Sequence
  Antisense oligo
ccuucaucagacacuggugg

SEQ ID NO: 20143 - RNA, 20 nt, Artificial Sequence
  Antisense oligo
gcccuucaucagacacuggu

SEQ ID NO: 20144 - RNA, 20 nt, Artificial Sequence
  Antisense oligo
gucacucugcccuucaucag

SEQ ID NO: 20145 - RNA, 20 nt, Artificial Sequence
  Antisense oligo
ggucacucugcccuucauca

SEQ ID NO: 20146 - RNA, 20 nt, Artificial Sequence
  Antisense oligo
gggucacucugcccuucauc

SEQ ID NO: 20147 - RNA, 20 nt, Artificial Sequence
  Antisense oligo
gaagucaguuacugccugca

SEQ ID NO: 20148 - RNA, 20 nt, Artificial Sequence
  Antisense oligo
ugaagucaguuacugccugc

SEQ ID NO: 20149 - RNA, 20 nt, Artificial Sequence
  Antisense oligo
gugaagucaguuacugccug

SEQ ID NO: 20150 - RNA, 20 nt, Artificial Sequence
  Antisense oligo
ugugaagucaguuacugccu

SEQ ID NO: 20151 - RNA, 20 nt, Artificial Sequence
  Antisense oligo
cugugugaagucaguuacug

SEQ ID NO: 20152 - RNA, 20 nt, Artificial Sequence
  Antisense oligo
ugacuaaaugccagggacug

SEQ ID NO: 20153 - RNA, 20 nt, Artificial Sequence
  Antisense oligo
augacuaaaugccagggacu

SEQ ID NO: 20154 - RNA, 20 nt, Artificial Sequence
  Antisense oligo
gaugacuaaaugccagggac

SEQ ID NO: 20155 - RNA, 20 nt, Artificial Sequence
  Antisense oligo
agaugacuaaaugccaggga

SEQ ID NO: 20156 - RNA, 20 nt, Artificial Sequence
  Antisense oligo
cagaugacuaaaugccaggg

SEQ ID NO: 20157 - RNA, 20 nt, Artificial Sequence
  Antisense oligo
acagaugacuaaaugccagg

SEQ ID NO: 20158 - RNA, 20 nt, Artificial Sequence
  Antisense oligo
cacagaugacuaaaugccag

SEQ ID NO: 20159 - RNA, 20 nt, Artificial Sequence
  Antisense oligo
ucacagaugacuaaaugcca

SEQ ID NO: 20160 - RNA, 20 nt, Artificial Sequence
  Antisense oligo
aucacagaugacuaaaugcc

SEQ ID NO: 20161 - RNA, 20 nt, Artificial Sequence
  Antisense oligo
cacaguccagagugauaaaa

SEQ ID NO: 20162 - RNA, 20 nt, Artificial Sequence
  Antisense oligo
ugcacaguccagagugauaa

SEQ ID NO: 20163 - RNA, 20 nt, Artificial Sequence
  Antisense oligo
aggcagucggaaugcagauc

SEQ ID NO: 20164 - RNA, 20 nt, Artificial Sequence
  Antisense oligo
uaggcagucggaaugcagau

SEQ ID NO: 20165 - RNA, 20 nt, Artificial Sequence
  Antisense oligo
cguucauaggcagucggaau

SEQ ID NO: 20166 - RNA, 20 nt, Artificial Sequence
  Antisense oligo
ccguucauaggcagucggaa

SEQ ID NO: 20167 - RNA, 20 nt, Artificial Sequence
  Antisense oligo
cccguucauaggcagucgga

SEQ ID NO: 20168 - RNA, 20 nt, Artificial Sequence
  Antisense oligo
acccguucauaggcagucgg

SEQ ID NO: 20169 - RNA, 20 nt, Artificial Sequence
  Antisense oligo
cacccguucauaggcagucg

SEQ ID NO: 20170 - RNA, 20 nt, Artificial Sequence
  Antisense oligo
acacccguucauaggcaguc

SEQ ID NO: 20171 - RNA, 20 nt, Artificial Sequence
  Antisense oligo
cacacccguucauaggcagu

SEQ ID NO: 20172 - RNA, 20 nt, Artificial Sequence
  Antisense oligo
cccacacccguucauaggca

SEQ ID NO: 20173 - RNA, 20 nt, Artificial Sequence
  Antisense oligo
aagacuucagcaagccagcc

SEQ ID NO: 20174 - RNA, 20 nt, Artificial Sequence
  Antisense oligo
gaagacuucagcaagccagc

SEQ ID NO: 20175 - RNA, 20 nt, Artificial Sequence
  Antisense oligo
ccgagugcaaguugaagacu

SEQ ID NO: 20176 - RNA, 20 nt, Artificial Sequence
  Antisense oligo
uccgagugcaaguugaagac

SEQ ID NO: 20177 - RNA, 20 nt, Artificial Sequence
  Antisense oligo
cuccgagugcaaguugaaga

SEQ ID NO: 20178 - RNA, 20 nt, Artificial Sequence
  Antisense oligo
gcuccgagugcaaguugaag

SEQ ID NO: 20179 - RNA, 20 nt, Artificial Sequence
  Antisense oligo
cucugagguaucaaaggagc

SEQ ID NO: 20180 - RNA, 20 nt, Artificial Sequence
  Antisense oligo
agcucugagguaucaaagga

SEQ ID NO: 20181 - RNA, 20 nt, Artificial Sequence
  Antisense oligo
cagcucugagguaucaaagg

SEQ ID NO: 20182 - RNA, 20 nt, Artificial Sequence
  Antisense oligo
ccagcucugagguaucaaag

SEQ ID NO: 20183 - RNA, 20 nt, Artificial Sequence
  Antisense oligo
gccagcucugagguaucaaa

SEQ ID NO: 20184 - RNA, 20 nt, Artificial Sequence
  Antisense oligo
agccagcucugagguaucaa

SEQ ID NO: 20185 - RNA, 20 nt, Artificial Sequence
  Antisense oligo
cagccagcucugagguauca

SEQ ID NO: 20186 - RNA, 20 nt, Artificial Sequence
  Antisense oligo
ugagucugggugugagcugc

SEQ ID NO: 20187 - RNA, 20 nt, Artificial Sequence
  Antisense oligo
gugagucugggugugagcug

SEQ ID NO: 20188 - RNA, 20 nt, Artificial Sequence
  Antisense oligo
gagacugacacucgacuccc

SEQ ID NO: 20189 - RNA, 20 nt, Artificial Sequence
  Antisense oligo
agagacugacacucgacucc

SEQ ID NO: 20190 - RNA, 20 nt, Artificial Sequence
  Antisense oligo
aagagacugacacucgacuc

SEQ ID NO: 20191 - RNA, 20 nt, Artificial Sequence
  Antisense oligo
aaagagacugacacucgacu

SEQ ID NO: 20192 - RNA, 20 nt, Artificial Sequence
  Antisense oligo
gaaagagacugacacucgac

SEQ ID NO: 20193 - RNA, 20 nt, Artificial Sequence
  Antisense oligo
agaaagagacugacacucga

SEQ ID NO: 20194 - RNA, 20 nt, Artificial Sequence
  Antisense oligo
cagaaagagacugacacucg

SEQ ID NO: 20195 - RNA, 20 nt, Artificial Sequence
  Antisense oligo
acagaaagagacugacacuc

SEQ ID NO: 20196 - RNA, 20 nt, Artificial Sequence
  Antisense oligo
uucacagaaagagacugaca

SEQ ID NO: 20197 - RNA, 20 nt, Artificial Sequence
  Antisense oligo
agccuucacagaaagagacu

SEQ ID NO: 20198 - RNA, 20 nt, Artificial Sequence
  Antisense oligo
aaaauucccaggccaaagga

SEQ ID NO: 20199 - RNA, 20 nt, Artificial Sequence
  Antisense oligo
cacagcacacaaaaugaaac

SEQ ID NO: 20200 - RNA, 20 nt, Artificial Sequence
  Antisense oligo
aagcacagcacacaaaauga

SEQ ID NO: 20201 - RNA, 20 nt, Artificial Sequence
  Antisense oligo
gaagcacagcacacaaaaug

SEQ ID NO: 20202 - RNA, 20 nt, Artificial Sequence
  Antisense oligo
ugaagcacagcacacaaaau

SEQ ID NO: 20203 - RNA, 20 nt, Artificial Sequence
  Antisense oligo
ggcuuugaagcacagcacac

SEQ ID NO: 20204 - RNA, 20 nt, Artificial Sequence
  Antisense oligo
aggcuuugaagcacagcaca

SEQ ID NO: 20205 - RNA, 20 nt, Artificial Sequence
  Antisense oligo
aaggcuuugaagcacagcac

SEQ ID NO: 20206 - RNA, 20 nt, Artificial Sequence
  Antisense oligo
uaaggcuuugaagcacagca

SEQ ID NO: 20207 - RNA, 20 nt, Artificial Sequence
  Antisense oligo
uuaaggcuuugaagcacagc

SEQ ID NO: 20208 - RNA, 20 nt, Artificial Sequence
  Antisense oligo
guuaaggcuuugaagcacag

SEQ ID NO: 20209 - RNA, 20 nt, Artificial Sequence
  Antisense oligo
aguuaaggcuuugaagcaca

SEQ ID NO: 20210 - RNA, 20 nt, Artificial Sequence
  Antisense oligo
acaguuaaggcuuugaagca

SEQ ID NO: 20211 - RNA, 20 nt, Artificial Sequence
  Antisense oligo
gacaguuaaggcuuugaagc

SEQ ID NO: 20212 - RNA, 20 nt, Artificial Sequence
  Antisense oligo
ugacaguuaaggcuuugaag

SEQ ID NO: 20213 - RNA, 20 nt, Artificial Sequence
  Antisense oligo
gcaagauuugacaguuaagg

SEQ ID NO: 20214 - RNA, 20 nt, Artificial Sequence
  Antisense oligo
gacaggugugacaaguaaaa

SEQ ID NO: 20215 - RNA, 20 nt, Artificial Sequence
  Antisense oligo
aagacaggugugacaaguaa

SEQ ID NO: 20216 - RNA, 20 nt, Artificial Sequence
  Antisense oligo
uaagacaggugugacaagua

SEQ ID NO: 20217 - RNA, 20 nt, Artificial Sequence
  Antisense oligo
auuaagacaggugugacaag

SEQ ID NO: 20218 - RNA, 20 nt, Artificial Sequence
  Antisense oligo
cauaaauagaagcucugccc

SEQ ID NO: 20219 - RNA, 20 nt, Artificial Sequence
  Antisense oligo
ccauaaauagaagcucugcc

SEQ ID NO: 20220 - RNA, 20 nt, Artificial Sequence
  Antisense oligo
gccauaaauagaagcucugc

SEQ ID NO: 20221 - RNA, 20 nt, Artificial Sequence
  Antisense oligo
ugccauaaauagaagcucug

SEQ ID NO: 20222 - RNA, 20 nt, Artificial Sequence
  Antisense oligo
ugugccauaaauagaagcuc

SEQ ID NO: 20223 - RNA, 20 nt, Artificial Sequence
  Antisense oligo
agcugaugucuaugugccau

SEQ ID NO: 20224 - RNA, 20 nt, Artificial Sequence
  Antisense oligo
uagcugaugucuaugugcca

SEQ ID NO: 20225 - RNA, 20 nt, Artificial Sequence
  Antisense oligo
cuagcugaugucuaugugcc

SEQ ID NO: 20226 - RNA, 20 nt, Artificial Sequence
  Antisense oligo
ccuagcugaugucuaugugc

SEQ ID NO: 20227 - RNA, 20 nt, Artificial Sequence
  Antisense oligo
gccuagcugaugucuaugug

SEQ ID NO: 20228 - RNA, 20 nt, Artificial Sequence
  Antisense oligo
agccuagcugaugucuaugu

SEQ ID NO: 20229 - RNA, 20 nt, Artificial Sequence
  Antisense oligo
aagccuagcugaugucuaug

SEQ ID NO: 20230 - RNA, 20 nt, Artificial Sequence
  Antisense oligo
aaagccuagcugaugucuau

SEQ ID NO: 20231 - RNA, 20 nt, Artificial Sequence
  Antisense oligo
ccaaaagccuagcugauguc

SEQ ID NO: 20232 - RNA, 20 nt, Artificial Sequence
  Antisense oligo
cccaaaagccuagcugaugu

SEQ ID NO: 20233 - RNA, 20 nt, Artificial Sequence
  Antisense oligo
ucccaaaagccuagcugaug

SEQ ID NO: 20234 - RNA, 20 nt, Artificial Sequence
  Antisense oligo
auucccaaaagccuagcuga

SEQ ID NO: 20235 - RNA, 20 nt, Artificial Sequence
  Antisense oligo
gauucccaaaagccuagcug

SEQ ID NO: 20236 - RNA, 20 nt, Artificial Sequence
  Antisense oligo
cgauucccaaaagccuagcu

SEQ ID NO: 20237 - RNA, 20 nt, Artificial Sequence
  Antisense oligo
acgauucccaaaagccuagc

SEQ ID NO: 20238 - RNA, 20 nt, Artificial Sequence
  Antisense oligo
aaacgauucccaaaagccua

SEQ ID NO: 20239 - RNA, 20 nt, Artificial Sequence
  Antisense oligo
caaacgauucccaaaagccu

SEQ ID NO: 20240 - RNA, 20 nt, Artificial Sequence
  Antisense oligo
gaacacaaacgauucccaaa

SEQ ID NO: 20241 - RNA, 20 nt, Artificial Sequence
  Antisense oligo
aagaacacaaacgauuccca

SEQ ID NO: 20242 - RNA, 20 nt, Artificial Sequence
  Antisense oligo
aaagaacacaaacgauuccc

SEQ ID NO: 20243 - RNA, 20 nt, Artificial Sequence
  Antisense oligo
caaagaacacaaacgauucc

SEQ ID NO: 20244 - RNA, 20 nt, Artificial Sequence
  Antisense oligo
ggacauuuccacaaagaaca

SEQ ID NO: 20245 - RNA, 20 nt, Artificial Sequence
  Antisense oligo
aggacauuuccacaaagaac

SEQ ID NO: 20246 - RNA, 20 nt, Artificial Sequence
  Antisense oligo
ugcuucuaaaggacauuucc

SEQ ID NO: 20247 - RNA, 20 nt, Artificial Sequence
  Antisense oligo
gugcuucuaaaggacauuuc

SEQ ID NO: 20248 - RNA, 20 nt, Artificial Sequence
  Antisense oligo
ggugcuucuaaaggacauuu

SEQ ID NO: 20249 - RNA, 20 nt, Artificial Sequence
  Antisense oligo
gggugcuucuaaaggacauu

SEQ ID NO: 20250 - RNA, 20 nt, Artificial Sequence
  Antisense oligo
ugggugcuucuaaaggacau

SEQ ID NO: 20251 - RNA, 20 nt, Artificial Sequence
  Antisense oligo
augggugcuucuaaaggaca

SEQ ID NO: 20252 - RNA, 20 nt, Artificial Sequence
  Antisense oligo
caugggugcuucuaaaggac

SEQ ID NO: 20253 - RNA, 20 nt, Artificial Sequence
  Antisense oligo
ucaugggugcuucuaaagga

SEQ ID NO: 20254 - RNA, 20 nt, Artificial Sequence
  Antisense oligo
uucaugggugcuucuaaagg

SEQ ID NO: 20255 - RNA, 20 nt, Artificial Sequence
  Antisense oligo
acuucaugggugcuucuaaa

SEQ ID NO: 20256 - RNA, 20 nt, Artificial Sequence
  Antisense oligo
uacuucaugggugcuucuaa

SEQ ID NO: 20257 - RNA, 20 nt, Artificial Sequence
  Antisense oligo
cacuacuucaugggugcuuc

SEQ ID NO: 20258 - RNA, 20 nt, Artificial Sequence
  Antisense oligo
acacuacuucaugggugcuu

SEQ ID NO: 20259 - RNA, 20 nt, Artificial Sequence
  Antisense oligo
cacacuacuucaugggugcu

SEQ ID NO: 20260 - RNA, 20 nt, Artificial Sequence
  Antisense oligo
gaacacacuacuucaugggu

SEQ ID NO: 20261 - RNA, 20 nt, Artificial Sequence
  Antisense oligo
cacagucugaacacacuacu

SEQ ID NO: 20262 - RNA, 20 nt, Artificial Sequence
  Antisense oligo
ugcacagucugaacacacua

SEQ ID NO: 20263 - RNA, 20 nt, Artificial Sequence
  Antisense oligo
aaaguccaccgucucacaug

SEQ ID NO: 20264 - RNA, 20 nt, Artificial Sequence
  Antisense oligo
aaaaguccaccgucucacau

SEQ ID NO: 20265 - RNA, 20 nt, Artificial Sequence
  Antisense oligo
gaaaaguccaccgucucaca

SEQ ID NO: 20266 - RNA, 20 nt, Artificial Sequence
  Antisense oligo
ggaaaaguccaccgucucac

SEQ ID NO: 20267 - RNA, 20 nt, Artificial Sequence
  Antisense oligo
aggaaaaguccaccgucuca

SEQ ID NO: 20268 - RNA, 20 nt, Artificial Sequence
  Antisense oligo
gaggaaaaguccaccgucuc

SEQ ID NO: 20269 - RNA, 20 nt, Artificial Sequence
  Antisense oligo
agaggaaaaguccaccgucu

SEQ ID NO: 20270 - RNA, 20 nt, Artificial Sequence
  Antisense oligo
uccagaggaaaaguccaccg

SEQ ID NO: 20271 - RNA, 20 nt, Artificial Sequence
  Antisense oligo
agaucggcuacagggagugg

SEQ ID NO: 20272 - RNA, 20 nt, Artificial Sequence
  Antisense oligo
cagaucggcuacagggagug

SEQ ID NO: 20273 - RNA, 20 nt, Artificial Sequence
  Antisense oligo
ccagaucggcuacagggagu

SEQ ID NO: 20274 - RNA, 20 nt, Artificial Sequence
  Antisense oligo
agucccagaucggcuacagg

SEQ ID NO: 20275 - RNA, 20 nt, Artificial Sequence
  Antisense oligo
cagucccagaucggcuacag

SEQ ID NO: 20276 - RNA, 20 nt, Artificial Sequence
  Antisense oligo
ucagucccagaucggcuaca

SEQ ID NO: 20277 - RNA, 20 nt, Artificial Sequence
  Antisense oligo
uucagucccagaucggcuac

SEQ ID NO: 20278 - RNA, 20 nt, Artificial Sequence
  Antisense oligo
uuucagucccagaucggcua

SEQ ID NO: 20279 - RNA, 20 nt, Artificial Sequence
  Antisense oligo
guuucagucccagaucggcu

SEQ ID NO: 20280 - RNA, 20 nt, Artificial Sequence
  Antisense oligo
cguuucagucccagaucggc

SEQ ID NO: 20281 - RNA, 20 nt, Artificial Sequence
  Antisense oligo
gcguuucagucccagaucgg

SEQ ID NO: 20282 - RNA, 20 nt, Artificial Sequence
  Antisense oligo
agcguuucagucccagaucg

SEQ ID NO: 20283 - RNA, 20 nt, Artificial Sequence
  Antisense oligo
aagcguuucagucccagauc

SEQ ID NO: 20284 - RNA, 20 nt, Artificial Sequence
  Antisense oligo
uaagcguuucagucccagau

SEQ ID NO: 20285 - RNA, 20 nt, Artificial Sequence
  Antisense oligo
guaagcguuucagucccaga

SEQ ID NO: 20286 - RNA, 20 nt, Artificial Sequence
  Antisense oligo
uguaagcguuucagucccag

SEQ ID NO: 20287 - RNA, 20 nt, Artificial Sequence
  Antisense oligo
guguaagcguuucaguccca

SEQ ID NO: 20288 - RNA, 20 nt, Artificial Sequence
  Antisense oligo
gguguaagcguuucaguccc

SEQ ID NO: 20289 - RNA, 20 nt, Artificial Sequence
  Antisense oligo
agguguaagcguuucagucc

SEQ ID NO: 20290 - RNA, 20 nt, Artificial Sequence
  Antisense oligo
gagguguaagcguuucaguc

SEQ ID NO: 20291 - RNA, 20 nt, Artificial Sequence
  Antisense oligo
agagguguaagcguuucagu

SEQ ID NO: 20292 - RNA, 20 nt, Artificial Sequence
  Antisense oligo
cagagguguaagcguuucag

SEQ ID NO: 20293 - RNA, 20 nt, Artificial Sequence
  Antisense oligo
gcagagguguaagcguuuca

SEQ ID NO: 20294 - RNA, 20 nt, Artificial Sequence
  Antisense oligo
ggcagagguguaagcguuuc

SEQ ID NO: 20295 - RNA, 20 nt, Artificial Sequence
  Antisense oligo
aggcagagguguaagcguuu

SEQ ID NO: 20296 - RNA, 20 nt, Artificial Sequence
  Antisense oligo
gaggcagagguguaagcguu

SEQ ID NO: 20297 - RNA, 20 nt, Artificial Sequence
  Antisense oligo
ugaggcagagguguaagcgu

SEQ ID NO: 20298 - RNA, 20 nt, Artificial Sequence
  Antisense oligo
cugaggcagagguguaagcg

SEQ ID NO: 20299 - RNA, 20 nt, Artificial Sequence
  Antisense oligo
gaagucauuucaggcagggc

SEQ ID NO: 20300 - RNA, 20 nt, Artificial Sequence
  Antisense oligo
gcuguguccagugaagucau

SEQ ID NO: 20301 - RNA, 20 nt, Artificial Sequence
  Antisense oligo
ccgcuguguccagugaaguc

SEQ ID NO: 20302 - RNA, 20 nt, Artificial Sequence
  Antisense oligo
cccgcuguguccagugaagu

SEQ ID NO: 20303 - RNA, 20 nt, Artificial Sequence
  Antisense oligo
guuagcuccuaccuguaccc

SEQ ID NO: 20304 - RNA, 20 nt, Artificial Sequence
  Antisense oligo
aguuagcuccuaccuguacc

SEQ ID NO: 20305 - RNA, 20 nt, Artificial Sequence
  Antisense oligo
uaguuagcuccuaccuguac

SEQ ID NO: 20306 - RNA, 20 nt, Artificial Sequence
  Antisense oligo
uuaguuagcuccuaccugua

SEQ ID NO: 20307 - RNA, 20 nt, Artificial Sequence
  Antisense oligo
guuaguuagcuccuaccugu

SEQ ID NO: 20308 - RNA, 20 nt, Artificial Sequence
  Antisense oligo
aguuaguuagcuccuaccug

SEQ ID NO: 20309 - RNA, 20 nt, Artificial Sequence
  Antisense oligo
aaguuaguuagcuccuaccu

SEQ ID NO: 20310 - RNA, 20 nt, Artificial Sequence
  Antisense oligo
gaaguuaguuagcuccuacc

SEQ ID NO: 20311 - RNA, 20 nt, Artificial Sequence
  Antisense oligo
gugaaguuaguuagcuccua

SEQ ID NO: 20312 - RNA, 20 nt, Artificial Sequence
  Antisense oligo
ggugaaguuaguuagcuccu

SEQ ID NO: 20313 - RNA, 20 nt, Artificial Sequence
  Antisense oligo
gggugaaguuaguuagcucc

SEQ ID NO: 20314 - RNA, 20 nt, Artificial Sequence
  Antisense oligo
ccuggaaggguuacuguuua

SEQ ID NO: 20315 - RNA, 20 nt, Artificial Sequence
  Antisense oligo
uccuggaaggguuacuguuu

SEQ ID NO: 20316 - RNA, 20 nt, Artificial Sequence
  Antisense oligo
cuccuggaaggguuacuguu

SEQ ID NO: 20317 - RNA, 20 nt, Artificial Sequence
  Antisense oligo
gcuccuggaaggguuacugu

SEQ ID NO: 20318 - RNA, 20 nt, Artificial Sequence
  Antisense oligo
gugggcuccuggaaggguua

SEQ ID NO: 20319 - RNA, 20 nt, Artificial Sequence
  Antisense oligo
uccaacgucagugggcuccu

SEQ ID NO: 20320 - RNA, 20 nt, Artificial Sequence
  Antisense oligo
acuccaacgucagugggcuc

SEQ ID NO: 20321 - RNA, 20 nt, Artificial Sequence
  Antisense oligo
uuuuagcacuccaacgucag

SEQ ID NO: 20322 - RNA, 20 nt, Artificial Sequence
  Antisense oligo
cucgccuggaagaaccuuuc

SEQ ID NO: 20323 - RNA, 20 nt, Artificial Sequence
  Antisense oligo
uagaccacagguuucucgcc

SEQ ID NO: 20324 - RNA, 20 nt, Artificial Sequence
  Antisense oligo
uccucuucuugcugugguuc

SEQ ID NO: 20325 - RNA, 20 nt, Artificial Sequence
  Antisense oligo
augccuccucuucuugcugu

SEQ ID NO: 20326 - RNA, 20 nt, Artificial Sequence
  Antisense oligo
agugagucuuccggugcagg

SEQ ID NO: 20327 - RNA, 20 nt, Artificial Sequence
  Antisense oligo
aagugagucuuccggugcag

SEQ ID NO: 20328 - RNA, 20 nt, Artificial Sequence
  Antisense oligo
aaagugagucuuccggugca

SEQ ID NO: 20329 - RNA, 20 nt, Artificial Sequence
  Antisense oligo
caaagugagucuuccggugc

SEQ ID NO: 20330 - RNA, 20 nt, Artificial Sequence
  Antisense oligo
acaaagugagucuuccggug

SEQ ID NO: 20331 - RNA, 20 nt, Artificial Sequence
  Antisense oligo
gacaaagugagucuuccggu

SEQ ID NO: 20332 - RNA, 20 nt, Artificial Sequence
  Antisense oligo
cagggcagacaaagugaguc

SEQ ID NO: 20333 - RNA, 20 nt, Artificial Sequence
  Antisense oligo
uggcggaaacgggaacugca

SEQ ID NO: 20334 - RNA, 20 nt, Artificial Sequence
  Antisense oligo
auggcggaaacgggaacugc

SEQ ID NO: 20335 - RNA, 20 nt, Artificial Sequence
  Antisense oligo
cauggcggaaacgggaacug

SEQ ID NO: 20336 - RNA, 20 nt, Artificial Sequence
  Antisense oligo
caggguuggugaugaggcau

SEQ ID NO: 20337 - RNA, 20 nt, Artificial Sequence
  Antisense oligo
ucaggguuggugaugaggca

SEQ ID NO: 20338 - RNA, 20 nt, Artificial Sequence
  Antisense oligo
gucaggguuggugaugaggc

SEQ ID NO: 20339 - RNA, 20 nt, Artificial Sequence
  Antisense oligo
ggucaggguuggugaugagg

SEQ ID NO: 20340 - RNA, 20 nt, Artificial Sequence
  Antisense oligo
aggucaggguuggugaugag

SEQ ID NO: 20341 - RNA, 20 nt, Artificial Sequence
  Antisense oligo
aaggucaggguuggugauga

SEQ ID NO: 20342 - RNA, 20 nt, Artificial Sequence
  Antisense oligo
augaauaaaggguugggagg

SEQ ID NO: 20343 - RNA, 20 nt, Artificial Sequence
  Antisense oligo
gaugaauaaaggguugggag

SEQ ID NO: 20344 - RNA, 20 nt, Artificial Sequence
  Antisense oligo
ggaugaauaaaggguuggga

SEQ ID NO: 20345 - RNA, 20 nt, Artificial Sequence
  Antisense oligo
aggaugaauaaaggguuggg

SEQ ID NO: 20346 - RNA, 20 nt, Artificial Sequence
  Antisense oligo
gaggaugaauaaaggguugg

SEQ ID NO: 20347 - RNA, 20 nt, Artificial Sequence
  Antisense oligo
gagugaggaugaauaaaggg

SEQ ID NO: 20348 - RNA, 20 nt, Artificial Sequence
  Antisense oligo
ggagugaggaugaauaaagg

SEQ ID NO: 20349 - RNA, 20 nt, Artificial Sequence
  Antisense oligo
gggagugaggaugaauaaag

SEQ ID NO: 20350 - RNA, 20 nt, Artificial Sequence
  Antisense oligo
gagugggagugaggaugaau

SEQ ID NO: 20351 - RNA, 20 nt, Artificial Sequence
  Antisense oligo
cggguaugagugggagugag

SEQ ID NO: 20352 - RNA, 20 nt, Artificial Sequence
  Antisense oligo
gcggguaugagugggaguga

SEQ ID NO: 20353 - RNA, 20 nt, Artificial Sequence
  Antisense oligo
uagggcugaaagcagaaaga

SEQ ID NO: 20354 - RNA, 20 nt, Artificial Sequence
  Antisense oligo
gguagggcugaaagcagaaa

SEQ ID NO: 20355 - RNA, 20 nt, Artificial Sequence
  Antisense oligo
caagguagggcugaaagcag

SEQ ID NO: 20356 - RNA, 20 nt, Artificial Sequence
  Antisense oligo
accaagguagggcugaaagc

SEQ ID NO: 20357 - RNA, 20 nt, Artificial Sequence
  Antisense oligo
ccaccaagguagggcugaaa

SEQ ID NO: 20358 - RNA, 20 nt, Artificial Sequence
  Antisense oligo
accaccaagguagggcugaa

SEQ ID NO: 20359 - RNA, 20 nt, Artificial Sequence
  Antisense oligo
aucaccaccaagguagggcu

SEQ ID NO: 20360 - RNA, 20 nt, Artificial Sequence
  Antisense oligo
aaaucaccaccaagguaggg

SEQ ID NO: 20361 - RNA, 20 nt, Artificial Sequence
  Antisense oligo
gguaaaucaccaccaaggua

SEQ ID NO: 20362 - RNA, 20 nt, Artificial Sequence
  Antisense oligo
gcugggauuacaggugugca

SEQ ID NO: 20363 - RNA, 20 nt, Artificial Sequence
  Antisense oligo
agcugggauuacaggugugc

SEQ ID NO: 20364 - RNA, 20 nt, Artificial Sequence
  Antisense oligo
uagcugggauuacaggugug

SEQ ID NO: 20365 - RNA, 20 nt, Artificial Sequence
  Antisense oligo
guagcugggauuacaggugu

SEQ ID NO: 20366 - RNA, 20 nt, Artificial Sequence
  Antisense oligo
gguagcugggauuacaggug

SEQ ID NO: 20367 - RNA, 20 nt, Artificial Sequence
  Antisense oligo
gcucaagcaauccucauacc

SEQ ID NO: 20368 - RNA, 20 nt, Artificial Sequence
  Antisense oligo
ggcucaagcaauccucauac

SEQ ID NO: 20369 - RNA, 20 nt, Artificial Sequence
  Antisense oligo
aggcucaagcaauccucaua

SEQ ID NO: 20370 - RNA, 20 nt, Artificial Sequence
  Antisense oligo
caggcucaagcaauccucau

SEQ ID NO: 20371 - RNA, 20 nt, Artificial Sequence
  Antisense oligo
ccaggcucaagcaauccuca

SEQ ID NO: 20372 - RNA, 20 nt, Artificial Sequence
  Antisense oligo
cccaggcucaagcaauccuc

SEQ ID NO: 20373 - RNA, 20 nt, Artificial Sequence
  Antisense oligo
ucccaggcucaagcaauccu

SEQ ID NO: 20374 - RNA, 20 nt, Artificial Sequence
  Antisense oligo
cucccaggcucaagcaaucc

SEQ ID NO: 20375 - RNA, 20 nt, Artificial Sequence
  Antisense oligo
gugcaaucauagcucacugc

SEQ ID NO: 20376 - RNA, 20 nt, Artificial Sequence
  Antisense oligo
agguuggagugcaguggugc

SEQ ID NO: 20377 - RNA, 20 nt, Artificial Sequence
  Antisense oligo
cagguuggagugcaguggug

SEQ ID NO: 20378 - RNA, 20 nt, Artificial Sequence
  Antisense oligo
acucugucacccagguugga

SEQ ID NO: 20379 - RNA, 20 nt, Artificial Sequence
  Antisense oligo
cacucugucacccagguugg

SEQ ID NO: 20380 - RNA, 20 nt, Artificial Sequence
  Antisense oligo
ucacucugucacccagguug

SEQ ID NO: 20381 - RNA, 20 nt, Artificial Sequence
  Antisense oligo
cucacucugucacccagguu

SEQ ID NO: 20382 - RNA, 20 nt, Artificial Sequence
  Antisense oligo
ucucacucugucacccaggu

SEQ ID NO: 20383 - RNA, 20 nt, Artificial Sequence
  Antisense oligo
gucucacucugucacccagg

SEQ ID NO: 20384 - RNA, 20 nt, Artificial Sequence
  Antisense oligo
ggucucacucugucacccag

SEQ ID NO: 20385 - RNA, 20 nt, Artificial Sequence
  Antisense oligo
cagggucucacucugucacc

SEQ ID NO: 20386 - RNA, 20 nt, Artificial Sequence
  Antisense oligo
uugcacacacaauaaggucc

SEQ ID NO: 20387 - RNA, 20 nt, Artificial Sequence
  Antisense oligo
caugcacaaagucucauaac

SEQ ID NO: 20388 - RNA, 20 nt, Artificial Sequence
  Antisense oligo
aacacaugcacaaagucuca

SEQ ID NO: 20389 - RNA, 20 nt, Artificial Sequence
  Antisense oligo
uaacacaugcacaaagucuc

SEQ ID NO: 20390 - RNA, 20 nt, Artificial Sequence
  Antisense oligo
acaggaguaacugaaauagc

SEQ ID NO: 20391 - RNA, 20 nt, Artificial Sequence
  Antisense oligo
gaacauacaggaguaacuga

SEQ ID NO: 20392 - RNA, 20 nt, Artificial Sequence
  Antisense oligo
cugaacauacaggaguaacu

SEQ ID NO: 20393 - RNA, 20 nt, Artificial Sequence
  Antisense oligo
ggaauugccugaacauacag

SEQ ID NO: 20394 - RNA, 20 nt, Artificial Sequence
  Antisense oligo
uggaauugccugaacauaca

SEQ ID NO: 20395 - RNA, 20 nt, Artificial Sequence
  Antisense oligo
uuggaauugccugaacauac

SEQ ID NO: 20396 - RNA, 20 nt, Artificial Sequence
  Antisense oligo
gagcugacauuuucuuccca

SEQ ID NO: 20397 - RNA, 20 nt, Artificial Sequence
  Antisense oligo
ugagcugacauuuucuuccc

SEQ ID NO: 20398 - RNA, 20 nt, Artificial Sequence
  Antisense oligo
cuuggcccugagcugacauu

SEQ ID NO: 20399 - RNA, 20 nt, Artificial Sequence
  Antisense oligo
uacuuggcccugagcugaca

SEQ ID NO: 20400 - RNA, 20 nt, Artificial Sequence
  Antisense oligo
cuacuuggcccugagcugac

SEQ ID NO: 20401 - RNA, 20 nt, Artificial Sequence
  Antisense oligo
accuacuuggcccugagcug

SEQ ID NO: 20402 - RNA, 20 nt, Artificial Sequence
  Antisense oligo
uaccuacuuggcccugagcu

SEQ ID NO: 20403 - RNA, 20 nt, Artificial Sequence
  Antisense oligo
gcuuuaccuacuuggcccug

SEQ ID NO: 20404 - RNA, 20 nt, Artificial Sequence
  Antisense oligo
ggcuuuaccuacuuggcccu

SEQ ID NO: 20405 - RNA, 20 nt, Artificial Sequence
  Antisense oligo
ggguggcuuuaccuacuugg

SEQ ID NO: 20406 - RNA, 20 nt, Artificial Sequence
  Antisense oligo
uggguggcuuuaccuacuug

SEQ ID NO: 20407 - RNA, 20 nt, Artificial Sequence
  Antisense oligo
uuggguggcuuuaccuacuu

SEQ ID NO: 20408 - RNA, 20 nt, Artificial Sequence
  Antisense oligo
cuuggguggcuuuaccuacu

SEQ ID NO: 20409 - RNA, 20 nt, Artificial Sequence
  Antisense oligo
acuuggguggcuuuaccuac

SEQ ID NO: 20410 - RNA, 20 nt, Artificial Sequence
  Antisense oligo
gacuuggguggcuuuaccua

SEQ ID NO: 20411 - RNA, 20 nt, Artificial Sequence
  Antisense oligo
agacuuggguggcuuuaccu

SEQ ID NO: 20412 - RNA, 20 nt, Artificial Sequence
  Antisense oligo
uagacuuggguggcuuuacc

SEQ ID NO: 20413 - RNA, 20 nt, Artificial Sequence
  Antisense oligo
cuagacuuggguggcuuuac

SEQ ID NO: 20414 - RNA, 20 nt, Artificial Sequence
  Antisense oligo
gcuagacuuggguggcuuua

SEQ ID NO: 20415 - RNA, 20 nt, Artificial Sequence
  Antisense oligo
ggcuagacuuggguggcuuu

SEQ ID NO: 20416 - RNA, 20 nt, Artificial Sequence
  Antisense oligo
uggcuagacuuggguggcuu

SEQ ID NO: 20417 - RNA, 20 nt, Artificial Sequence
  Antisense oligo
auggcuagacuuggguggcu

SEQ ID NO: 20418 - RNA, 20 nt, Artificial Sequence
  Antisense oligo
cauggcuagacuuggguggc

SEQ ID NO: 20419 - RNA, 20 nt, Artificial Sequence
  Antisense oligo
ugcauggcuagacuugggug

SEQ ID NO: 20420 - RNA, 20 nt, Artificial Sequence
  Antisense oligo
gugcauggcuagacuugggu

SEQ ID NO: 20421 - RNA, 20 nt, Artificial Sequence
  Antisense oligo
ugugcauggcuagacuuggg

SEQ ID NO: 20422 - RNA, 20 nt, Artificial Sequence
  Antisense oligo
gugugcauggcuagacuugg

SEQ ID NO: 20423 - RNA, 20 nt, Artificial Sequence
  Antisense oligo
ugugugcauggcuagacuug

SEQ ID NO: 20424 - RNA, 20 nt, Artificial Sequence
  Antisense oligo
cugugugcauggcuagacuu

SEQ ID NO: 20425 - RNA, 20 nt, Artificial Sequence
  Antisense oligo
ccugugugcauggcuagacu

SEQ ID NO: 20426 - RNA, 20 nt, Artificial Sequence
  Antisense oligo
gccugugugcauggcuagac

SEQ ID NO: 20427 - RNA, 20 nt, Artificial Sequence
  Antisense oligo
ugccugugugcauggcuaga

SEQ ID NO: 20428 - RNA, 20 nt, Artificial Sequence
  Antisense oligo
gugccugugugcauggcuag

SEQ ID NO: 20429 - RNA, 20 nt, Artificial Sequence
  Antisense oligo
cuagugccugugugcauggc

SEQ ID NO: 20430 - RNA, 20 nt, Artificial Sequence
  Antisense oligo
agguguuuuccuucagcaca

SEQ ID NO: 20431 - RNA, 20 nt, Artificial Sequence
  Antisense oligo
aucagagguguuuuccuuca

SEQ ID NO: 20432 - RNA, 20 nt, Artificial Sequence
  Antisense oligo
aaucagagguguuuuccuuc

SEQ ID NO: 20433 - RNA, 20 nt, Artificial Sequence
  Antisense oligo
ucaaaucagagguguuuucc

SEQ ID NO: 20434 - RNA, 20 nt, Artificial Sequence
  Antisense oligo
ugcaaccuucacacuuuaug

SEQ ID NO: 20435 - RNA, 20 nt, Artificial Sequence
  Antisense oligo
guuaugcaaccuucacacuu

SEQ ID NO: 20436 - RNA, 20 nt, Artificial Sequence
  Antisense oligo
aguuaugcaaccuucacacu

SEQ ID NO: 20437 - RNA, 20 nt, Artificial Sequence
  Antisense oligo
caguuaugcaaccuucacac

SEQ ID NO: 20438 - RNA, 20 nt, Artificial Sequence
  Antisense oligo
cucagguuuucuccagccac

SEQ ID NO: 20439 - RNA, 20 nt, Artificial Sequence
  Antisense oligo
gcucagguuuucuccagcca

SEQ ID NO: 20440 - RNA, 20 nt, Artificial Sequence
  Antisense oligo
aggcucagguuuucuccagc

SEQ ID NO: 20441 - RNA, 20 nt, Artificial Sequence
  Antisense oligo
auggcuuggauuguuacuca

SEQ ID NO: 20442 - RNA, 20 nt, Artificial Sequence
  Antisense oligo
aucauggcuuggauuguuac

SEQ ID NO: 20443 - RNA, 20 nt, Artificial Sequence
  Antisense oligo
aaugcuaaucauggcuugga

SEQ ID NO: 20444 - RNA, 20 nt, Artificial Sequence
  Antisense oligo
aaaugcuaaucauggcuugg

SEQ ID NO: 20445 - RNA, 20 nt, Artificial Sequence
  Antisense oligo
gaacgugauaggaugagaau

SEQ ID NO: 20446 - RNA, 20 nt, Artificial Sequence
  Antisense oligo
ugaacgugauaggaugagaa

SEQ ID NO: 20447 - RNA, 20 nt, Artificial Sequence
  Antisense oligo
augaacgugauaggaugaga

SEQ ID NO: 20448 - RNA, 20 nt, Artificial Sequence
  Antisense oligo
aaugaacgugauaggaugag

SEQ ID NO: 20449 - RNA, 20 nt, Artificial Sequence
  Antisense oligo
ggauucguaaugguaauggu

SEQ ID NO: 20450 - RNA, 20 nt, Artificial Sequence
  Antisense oligo
gggauucguaaugguaaugg

SEQ ID NO: 20451 - RNA, 20 nt, Artificial Sequence
  Antisense oligo
cgggauucguaaugguaaug

SEQ ID NO: 20452 - RNA, 20 nt, Artificial Sequence
  Antisense oligo
acgggauucguaaugguaau

SEQ ID NO: 20453 - RNA, 20 nt, Artificial Sequence
  Antisense oligo
aacgggauucguaaugguaa

SEQ ID NO: 20454 - RNA, 20 nt, Artificial Sequence
  Antisense oligo
aaacgggauucguaauggua

SEQ ID NO: 20455 - RNA, 20 nt, Artificial Sequence
  Antisense oligo
gaaacgggauucguaauggu

SEQ ID NO: 20456 - RNA, 20 nt, Artificial Sequence
  Antisense oligo
ggaaacgggauucguaaugg

SEQ ID NO: 20457 - RNA, 20 nt, Artificial Sequence
  Antisense oligo
ucugaccaaaguugcucugg

SEQ ID NO: 20458 - RNA, 20 nt, Artificial Sequence
  Antisense oligo
auuaggugugacuucugacc

SEQ ID NO: 20459 - RNA, 20 nt, Artificial Sequence
  Antisense oligo
gauuaggugugacuucugac

SEQ ID NO: 20460 - RNA, 20 nt, Artificial Sequence
  Antisense oligo
ggugauuaggugugacuucu

SEQ ID NO: 20461 - RNA, 20 nt, Artificial Sequence
  Antisense oligo
gggugauuaggugugacuuc

SEQ ID NO: 20462 - RNA, 20 nt, Artificial Sequence
  Antisense oligo
agggugauuaggugugacuu

SEQ ID NO: 20463 - RNA, 20 nt, Artificial Sequence
  Antisense oligo
gagggugauuaggugugacu

SEQ ID NO: 20464 - RNA, 20 nt, Artificial Sequence
  Antisense oligo
agagggugauuaggugugac

SEQ ID NO: 20465 - RNA, 20 nt, Artificial Sequence
  Antisense oligo
gagagggugauuagguguga

SEQ ID NO: 20466 - RNA, 20 nt, Artificial Sequence
  Antisense oligo
ugcagagagggugauuaggu

SEQ ID NO: 20467 - RNA, 20 nt, Artificial Sequence
  Antisense oligo
cuccucaaaagggcuauccc

SEQ ID NO: 20468 - RNA, 20 nt, Artificial Sequence
  Antisense oligo
ccuccucaaaagggcuaucc

SEQ ID NO: 20469 - RNA, 20 nt, Artificial Sequence
  Antisense oligo
caccuccucaaaagggcuau

SEQ ID NO: 20470 - RNA, 20 nt, Artificial Sequence
  Antisense oligo
ccaccuccucaaaagggcua

SEQ ID NO: 20471 - RNA, 20 nt, Artificial Sequence
  Antisense oligo
cccaccuccucaaaagggcu

SEQ ID NO: 20472 - RNA, 20 nt, Artificial Sequence
  Antisense oligo
uggagcacuugcuggaccca

SEQ ID NO: 20473 - RNA, 20 nt, Artificial Sequence
  Antisense oligo
ugguggagcacuugcuggac

SEQ ID NO: 20474 - RNA, 20 nt, Artificial Sequence
  Antisense oligo
cugguggagcacuugcugga

SEQ ID NO: 20475 - RNA, 20 nt, Artificial Sequence
  Antisense oligo
agccugguggagcacuugcu

SEQ ID NO: 20476 - RNA, 20 nt, Artificial Sequence
  Antisense oligo
uaugggcuguggagcaccug

SEQ ID NO: 20477 - RNA, 20 nt, Artificial Sequence
  Antisense oligo
uuuaugggcuguggagcacc

SEQ ID NO: 20478 - RNA, 20 nt, Artificial Sequence
  Antisense oligo
aguaaguuuaggugugaggg

SEQ ID NO: 20479 - RNA, 20 nt, Artificial Sequence
  Antisense oligo
uaguaaguuuaggugugagg

SEQ ID NO: 20480 - RNA, 20 nt, Artificial Sequence
  Antisense oligo
agggcacagguagcagugau

SEQ ID NO: 20481 - RNA, 20 nt, Artificial Sequence
  Antisense oligo
uucagggcacagguagcagu

SEQ ID NO: 20482 - RNA, 20 nt, Artificial Sequence
  Antisense oligo
cuucagggcacagguagcag

SEQ ID NO: 20483 - RNA, 20 nt, Artificial Sequence
  Antisense oligo
uguugcgcuucagggcacag

SEQ ID NO: 20484 - RNA, 20 nt, Artificial Sequence
  Antisense oligo
cuguugcgcuucagggcaca

SEQ ID NO: 20485 - RNA, 20 nt, Artificial Sequence
  Antisense oligo
ucuguugcgcuucagggcac

SEQ ID NO: 20486 - RNA, 20 nt, Artificial Sequence
  Antisense oligo
uucuguugcgcuucagggca

SEQ ID NO: 20487 - RNA, 20 nt, Artificial Sequence
  Antisense oligo
guucuguugcgcuucagggc

SEQ ID NO: 20488 - RNA, 20 nt, Artificial Sequence
  Antisense oligo
gguucuguugcgcuucaggg

SEQ ID NO: 20489 - RNA, 20 nt, Artificial Sequence
  Antisense oligo
agguucuguugcgcuucagg

SEQ ID NO: 20490 - RNA, 20 nt, Artificial Sequence
  Antisense oligo
gagguucuguugcgcuucag

SEQ ID NO: 20491 - RNA, 20 nt, Artificial Sequence
  Antisense oligo
ugagguucuguugcgcuuca

SEQ ID NO: 20492 - RNA, 20 nt, Artificial Sequence
  Antisense oligo
uggguugagguucuguugcg

SEQ ID NO: 20493 - RNA, 20 nt, Artificial Sequence
  Antisense oligo
cuggguugagguucuguugc

SEQ ID NO: 20494 - RNA, 20 nt, Artificial Sequence
  Antisense oligo
ucuggguugagguucuguug

SEQ ID NO: 20495 - RNA, 20 nt, Artificial Sequence
  Antisense oligo
cucuggguugagguucuguu

SEQ ID NO: 20496 - RNA, 20 nt, Artificial Sequence
  Antisense oligo
guggcuguccucuggguuga

SEQ ID NO: 20497 - RNA, 20 nt, Artificial Sequence
  Antisense oligo
aaguggcuguccucuggguu

SEQ ID NO: 20498 - RNA, 20 nt, Artificial Sequence
  Antisense oligo
guucugaggaaguggcuguc

SEQ ID NO: 20499 - RNA, 20 nt, Artificial Sequence
  Antisense oligo
aucguggguucugaggaagu

SEQ ID NO: 20500 - RNA, 20 nt, Artificial Sequence
  Antisense oligo
gaucguggguucugaggaag

SEQ ID NO: 20501 - RNA, 20 nt, Artificial Sequence
  Antisense oligo
agaucguggguucugaggaa

SEQ ID NO: 20502 - RNA, 20 nt, Artificial Sequence
  Antisense oligo
aagaucguggguucugagga

SEQ ID NO: 20503 - RNA, 20 nt, Artificial Sequence
  Antisense oligo
aaagaucguggguucugagg

SEQ ID NO: 20504 - RNA, 20 nt, Artificial Sequence
  Antisense oligo
caaagaucguggguucugag

SEQ ID NO: 20505 - RNA, 20 nt, Artificial Sequence
  Antisense oligo
gcaaagaucguggguucuga

SEQ ID NO: 20506 - RNA, 20 nt, Artificial Sequence
  Antisense oligo
ggcaaagaucguggguucug

SEQ ID NO: 20507 - RNA, 20 nt, Artificial Sequence
  Antisense oligo
gggcaaagaucguggguucu

SEQ ID NO: 20508 - RNA, 20 nt, Artificial Sequence
  Antisense oligo
ucauggaccuguggcgaugg

SEQ ID NO: 20509 - RNA, 20 nt, Artificial Sequence
  Antisense oligo
cucauggaccuguggcgaug

SEQ ID NO: 20510 - RNA, 20 nt, Artificial Sequence
  Antisense oligo
acucauggaccuguggcgau

SEQ ID NO: 20511 - RNA, 20 nt, Artificial Sequence
  Antisense oligo
cacucauggaccuguggcga

SEQ ID NO: 20512 - RNA, 20 nt, Artificial Sequence
  Antisense oligo
ucacucauggaccuguggcg

SEQ ID NO: 20513 - RNA, 20 nt, Artificial Sequence
  Antisense oligo
agucacucauggaccugugg

SEQ ID NO: 20514 - RNA, 20 nt, Artificial Sequence
  Antisense oligo
gagucacucauggaccugug

SEQ ID NO: 20515 - RNA, 20 nt, Artificial Sequence
  Antisense oligo
ggagucacucauggaccugu

SEQ ID NO: 20516 - RNA, 20 nt, Artificial Sequence
  Antisense oligo
aggagucacucauggaccug

SEQ ID NO: 20517 - RNA, 20 nt, Artificial Sequence
  Antisense oligo
auuaggagucacucauggac

SEQ ID NO: 20518 - RNA, 20 nt, Artificial Sequence
  Antisense oligo
aauuaggagucacucaugga

SEQ ID NO: 20519 - RNA, 20 nt, Artificial Sequence
  Antisense oligo
aggagcccuuggauuuggua

SEQ ID NO: 20520 - RNA, 20 nt, Artificial Sequence
  Antisense oligo
uuccagaguggucaggguga

SEQ ID NO: 20521 - RNA, 20 nt, Artificial Sequence
  Antisense oligo
guuggguuccagagugguca

SEQ ID NO: 20522 - RNA, 20 nt, Artificial Sequence
  Antisense oligo
agcuuuguuggguuccagag

SEQ ID NO: 20523 - RNA, 20 nt, Artificial Sequence
  Antisense oligo
ucagcuuuguuggguuccag

SEQ ID NO: 20524 - RNA, 20 nt, Artificial Sequence
  Antisense oligo
gucagcuuuguuggguucca

SEQ ID NO: 20525 - RNA, 20 nt, Artificial Sequence
  Antisense oligo
gugucagcuuuguuggguuc

SEQ ID NO: 20526 - RNA, 20 nt, Artificial Sequence
  Antisense oligo
ugugucagcuuuguuggguu

SEQ ID NO: 20527 - RNA, 20 nt, Artificial Sequence
  Antisense oligo
gugugucagcuuuguugggu

SEQ ID NO: 20528 - RNA, 20 nt, Artificial Sequence
  Antisense oligo
gagccaggacccacauucag

SEQ ID NO: 20529 - RNA, 20 nt, Artificial Sequence
  Antisense oligo
gagagccaggacccacauuc

SEQ ID NO: 20530 - RNA, 20 nt, Artificial Sequence
  Antisense oligo
ggagagccaggacccacauu

SEQ ID NO: 20531 - RNA, 20 nt, Artificial Sequence
  Antisense oligo
cauggcuguagaacuggcaa

SEQ ID NO: 20532 - RNA, 20 nt, Artificial Sequence
  Antisense oligo
aggucgagccacuugcccau

SEQ ID NO: 20533 - RNA, 20 nt, Artificial Sequence
  Antisense oligo
agagaggucgagccacuugc

SEQ ID NO: 20534 - RNA, 20 nt, Artificial Sequence
  Antisense oligo
uagagaggucgagccacuug

SEQ ID NO: 20535 - RNA, 20 nt, Artificial Sequence
  Antisense oligo
uuagagaggucgagccacuu

SEQ ID NO: 20536 - RNA, 20 nt, Artificial Sequence
  Antisense oligo
cuuagagaggucgagccacu

SEQ ID NO: 20537 - RNA, 20 nt, Artificial Sequence
  Antisense oligo
agcuuagagaggucgagcca

SEQ ID NO: 20538 - RNA, 20 nt, Artificial Sequence
  Antisense oligo
cagauauuucacagacgagg

SEQ ID NO: 20539 - RNA, 20 nt, Artificial Sequence
  Antisense oligo
gacagauauuucacagacga

SEQ ID NO: 20540 - RNA, 20 nt, Artificial Sequence
  Antisense oligo
agagcacugacagauauuuc

SEQ ID NO: 20541 - RNA, 20 nt, Artificial Sequence
  Antisense oligo
gacacgaguuaaagaagggc

SEQ ID NO: 20542 - RNA, 20 nt, Artificial Sequence
  Antisense oligo
agacacgaguuaaagaaggg

SEQ ID NO: 20543 - RNA, 20 nt, Artificial Sequence
  Antisense oligo
accuagauuccuggucaggg

SEQ ID NO: 20544 - RNA, 20 nt, Artificial Sequence
  Antisense oligo
caccuagauuccuggucagg

SEQ ID NO: 20545 - RNA, 20 nt, Artificial Sequence
  Antisense oligo
ucaccuagauuccuggucag

SEQ ID NO: 20546 - RNA, 20 nt, Artificial Sequence
  Antisense oligo
aucaccuagauuccugguca

SEQ ID NO: 20547 - RNA, 20 nt, Artificial Sequence
  Antisense oligo
uccaugucgcucaagcuggc

SEQ ID NO: 20548 - RNA, 20 nt, Artificial Sequence
  Antisense oligo
auccaugucgcucaagcugg

SEQ ID NO: 20549 - RNA, 20 nt, Artificial Sequence
  Antisense oligo
gauccaugucgcucaagcug

SEQ ID NO: 20550 - RNA, 20 nt, Artificial Sequence
  Antisense oligo
ugcuacacacugcucuggcc

SEQ ID NO: 20551 - RNA, 20 nt, Artificial Sequence
  Antisense oligo
aaguggcaguuccuucccgg

SEQ ID NO: 20552 - RNA, 20 nt, Artificial Sequence
  Antisense oligo
cuggacuccaaguggcaguu

SEQ ID NO: 20553 - RNA, 20 nt, Artificial Sequence
  Antisense oligo
ucuggacuccaaguggcagu

SEQ ID NO: 20554 - RNA, 20 nt, Artificial Sequence
  Antisense oligo
accagagugccaguacaggc

SEQ ID NO: 20555 - RNA, 20 nt, Artificial Sequence
  Antisense oligo
aaccagagugccaguacagg

SEQ ID NO: 20556 - RNA, 20 nt, Artificial Sequence
  Antisense oligo
aaaccagagugccaguacag

SEQ ID NO: 20557 - RNA, 20 nt, Artificial Sequence
  Antisense oligo
uacacgcauaccacaaaaca

SEQ ID NO: 20558 - RNA, 20 nt, Artificial Sequence
  Antisense oligo
cuacacgcauaccacaaaac

SEQ ID NO: 20559 - RNA, 20 nt, Artificial Sequence
  Antisense oligo
ccuacacgcauaccacaaaa

SEQ ID NO: 20560 - RNA, 20 nt, Artificial Sequence
  Antisense oligo
cccuacacgcauaccacaaa

SEQ ID NO: 20561 - RNA, 20 nt, Artificial Sequence
  Antisense oligo
cacccuacacgcauaccaca

SEQ ID NO: 20562 - RNA, 20 nt, Artificial Sequence
  Antisense oligo
ucacccuacacgcauaccac

SEQ ID NO: 20563 - RNA, 20 nt, Artificial Sequence
  Antisense oligo
cucacccuacacgcauacca

SEQ ID NO: 20564 - RNA, 20 nt, Artificial Sequence
  Antisense oligo
gcucacccuacacgcauacc

SEQ ID NO: 20565 - RNA, 20 nt, Artificial Sequence
  Antisense oligo
cgcucacccuacacgcauac

SEQ ID NO: 20566 - RNA, 20 nt, Artificial Sequence
  Antisense oligo
acgcucacccuacacgcaua

SEQ ID NO: 20567 - RNA, 20 nt, Artificial Sequence
  Antisense oligo
uacgcucacccuacacgcau

SEQ ID NO: 20568 - RNA, 20 nt, Artificial Sequence
  Antisense oligo
uuacgcucacccuacacgca

SEQ ID NO: 20569 - RNA, 20 nt, Artificial Sequence
  Antisense oligo
auuacgcucacccuacacgc

SEQ ID NO: 20570 - RNA, 20 nt, Artificial Sequence
  Antisense oligo
cauuacgcucacccuacacg

SEQ ID NO: 20571 - RNA, 20 nt, Artificial Sequence
  Antisense oligo
acauuacgcucacccuacac

SEQ ID NO: 20572 - RNA, 20 nt, Artificial Sequence
  Antisense oligo
aacauuacgcucacccuaca

SEQ ID NO: 20573 - RNA, 20 nt, Artificial Sequence
  Antisense oligo
aaacauuacgcucacccuac

SEQ ID NO: 20574 - RNA, 20 nt, Artificial Sequence
  Antisense oligo
aaaacauuacgcucacccua

SEQ ID NO: 20575 - RNA, 20 nt, Artificial Sequence
  Antisense oligo
caaaacauuacgcucacccu

SEQ ID NO: 20576 - RNA, 20 nt, Artificial Sequence
  Antisense oligo
acaaaacauuacgcucaccc

SEQ ID NO: 20577 - RNA, 20 nt, Artificial Sequence
  Antisense oligo
gacaaaacauuacgcucacc

SEQ ID NO: 20578 - RNA, 20 nt, Artificial Sequence
  Antisense oligo
agacaaaacauuacgcucac

SEQ ID NO: 20579 - RNA, 20 nt, Artificial Sequence
  Antisense oligo
caagacaaaacauuacgcuc

SEQ ID NO: 20580 - RNA, 20 nt, Artificial Sequence
  Antisense oligo
uggucuuacuuugugcuuga

SEQ ID NO: 20581 - RNA, 20 nt, Artificial Sequence
  Antisense oligo
guggucuuacuuugugcuug

SEQ ID NO: 20582 - RNA, 20 nt, Artificial Sequence
  Antisense oligo
caggcuucacucugauggcc

SEQ ID NO: 20583 - RNA, 20 nt, Artificial Sequence
  Antisense oligo
guccaggcuucacucugaug

SEQ ID NO: 20584 - RNA, 20 nt, Artificial Sequence
  Antisense oligo
uguccaggcuucacucugau

SEQ ID NO: 20585 - RNA, 20 nt, Artificial Sequence
  Antisense oligo
acgggaacugguguggguac

SEQ ID NO: 20586 - RNA, 20 nt, Artificial Sequence
  Antisense oligo
uacgggaacuggugugggua

SEQ ID NO: 20587 - RNA, 20 nt, Artificial Sequence
  Antisense oligo
guacgggaacuggugugggu

SEQ ID NO: 20588 - RNA, 20 nt, Artificial Sequence
  Antisense oligo
uguacgggaacugguguggg

SEQ ID NO: 20589 - RNA, 20 nt, Artificial Sequence
  Antisense oligo
guguacgggaacuggugugg

SEQ ID NO: 20590 - RNA, 20 nt, Artificial Sequence
  Antisense oligo
uguguacgggaacuggugug

SEQ ID NO: 20591 - RNA, 20 nt, Artificial Sequence
  Antisense oligo
cuguguacgggaacuggugu

SEQ ID NO: 20592 - RNA, 20 nt, Artificial Sequence
  Antisense oligo
ucuguguacgggaacuggug

SEQ ID NO: 20593 - RNA, 20 nt, Artificial Sequence
  Antisense oligo
ugucuguguacgggaacugg

SEQ ID NO: 20594 - RNA, 20 nt, Artificial Sequence
  Antisense oligo
gugucuguguacgggaacug

SEQ ID NO: 20595 - RNA, 20 nt, Artificial Sequence
  Antisense oligo
agugucuguguacgggaacu

SEQ ID NO: 20596 - RNA, 20 nt, Artificial Sequence
  Antisense oligo
aagugucuguguacgggaac

SEQ ID NO: 20597 - RNA, 20 nt, Artificial Sequence
  Antisense oligo
caagugucuguguacgggaa

SEQ ID NO: 20598 - RNA, 20 nt, Artificial Sequence
  Antisense oligo
aaccaagugucuguguacgg

SEQ ID NO: 20599 - RNA, 20 nt, Artificial Sequence
  Antisense oligo
uaaccaagugucuguguacg

SEQ ID NO: 20600 - RNA, 20 nt, Artificial Sequence
  Antisense oligo
guaaccaagugucuguguac

SEQ ID NO: 20601 - RNA, 20 nt, Artificial Sequence
  Antisense oligo
uguaaccaagugucugugua

SEQ ID NO: 20602 - RNA, 20 nt, Artificial Sequence
  Antisense oligo
cucuuucucucucugcuggu

SEQ ID NO: 20603 - RNA, 19 nt, Artificial Sequence
  Sense Oligo
cgggcuaggauacaguggg

SEQ ID NO: 20604 - RNA, 19 nt, Artificial Sequence
  Antisense Oligo
cccacuguauccuagcccg

SEQ ID NO: 20605 - RNA, 19 nt, Artificial Sequence
  Sense Oligo
gggcuaggauacagugggc

SEQ ID NO: 20606 - RNA, 19 nt, Artificial Sequence
  Antisense Oligo
gcccacuguauccuagccc

SEQ ID NO: 20607 - RNA, 19 nt, Artificial Sequence
  Sense Oligo
ggcuaggauacagugggcc

SEQ ID NO: 20608 - RNA, 19 nt, Artificial Sequence
  Antisense Oligo
ggcccacuguauccuagcc

SEQ ID NO: 20609 - RNA, 19 nt, Artificial Sequence
  Sense Oligo
ccggcuccaaguuucgguu

SEQ ID NO: 20610 - RNA, 19 nt, Artificial Sequence
  Antisense Oligo
aaccgaaacuuggagccgg

SEQ ID NO: 20611 - RNA, 19 nt, Artificial Sequence
  Sense Oligo
cggcuccaaguuucgguuu

SEQ ID NO: 20612 - RNA, 19 nt, Artificial Sequence
  Antisense Oligo
aaaccgaaacuuggagccg

SEQ ID NO: 20613 - RNA, 19 nt, Artificial Sequence
  Sense Oligo
ggcuccaaguuucgguuuc

SEQ ID NO: 20614 - RNA, 19 nt, Artificial Sequence
  Antisense Oligo
gaaaccgaaacuuggagcc

SEQ ID NO: 20615 - RNA, 19 nt, Artificial Sequence
  Sense Oligo
gcuccaaguuucgguuucg

SEQ ID NO: 20616 - RNA, 19 nt, Artificial Sequence
  Antisense Oligo
cgaaaccgaaacuuggagc

SEQ ID NO: 20617 - RNA, 19 nt, Artificial Sequence
  Sense Oligo
cuccaaguuucgguuucgc

SEQ ID NO: 20618 - RNA, 19 nt, Artificial Sequence
  Antisense Oligo
gcgaaaccgaaacuuggag

SEQ ID NO: 20619 - RNA, 19 nt, Artificial Sequence
  Sense Oligo
uccaaguuucgguuucgcc

SEQ ID NO: 20620 - RNA, 19 nt, Artificial Sequence
  Antisense Oligo
ggcgaaaccgaaacuugga

SEQ ID NO: 20621 - RNA, 19 nt, Artificial Sequence
  Sense Oligo
ccaaguuucgguuucgccg

SEQ ID NO: 20622 - RNA, 19 nt, Artificial Sequence
  Antisense Oligo
cggcgaaaccgaaacuugg

SEQ ID NO: 20623 - RNA, 19 nt, Artificial Sequence
  Sense Oligo
cgggaauccugcgccugua

SEQ ID NO: 20624 - RNA, 19 nt, Artificial Sequence
  Antisense Oligo
uacaggcgcaggauucccg

SEQ ID NO: 20625 - RNA, 19 nt, Artificial Sequence
  Sense Oligo
gggaauccugcgccuguac

SEQ ID NO: 20626 - RNA, 19 nt, Artificial Sequence
  Antisense Oligo
guacaggcgcaggauuccc

SEQ ID NO: 20627 - RNA, 19 nt, Artificial Sequence
  Sense Oligo
ggaauccugcgccuguacg

SEQ ID NO: 20628 - RNA, 19 nt, Artificial Sequence
  Antisense Oligo
cguacaggcgcaggauucc

SEQ ID NO: 20629 - RNA, 19 nt, Artificial Sequence
  Sense Oligo
gaauccugcgccuguacga

SEQ ID NO: 20630 - RNA, 19 nt, Artificial Sequence
  Antisense Oligo
ucguacaggcgcaggauuc

SEQ ID NO: 20631 - RNA, 19 nt, Artificial Sequence
  Sense Oligo
aauccugcgccuguacgaa

SEQ ID NO: 20632 - RNA, 19 nt, Artificial Sequence
  Antisense Oligo
uucguacaggcgcaggauu

SEQ ID NO: 20633 - RNA, 19 nt, Artificial Sequence
  Sense Oligo
auccugcgccuguacgaau

SEQ ID NO: 20634 - RNA, 19 nt, Artificial Sequence
  Antisense Oligo
auucguacaggcgcaggau

SEQ ID NO: 20635 - RNA, 19 nt, Artificial Sequence
  Sense Oligo
acagacuccuaacuuuuac

SEQ ID NO: 20636 - RNA, 19 nt, Artificial Sequence
  Antisense Oligo
guaaaaguuaggagucugu

SEQ ID NO: 20637 - RNA, 19 nt, Artificial Sequence
  Sense Oligo
cagacuccuaacuuuuacg

SEQ ID NO: 20638 - RNA, 19 nt, Artificial Sequence
  Antisense Oligo
cguaaaaguuaggagucug

SEQ ID NO: 20639 - RNA, 19 nt, Artificial Sequence
  Sense Oligo
agacuccuaacuuuuacga

SEQ ID NO: 20640 - RNA, 19 nt, Artificial Sequence
  Antisense Oligo
ucguaaaaguuaggagucu

SEQ ID NO: 20641 - RNA, 19 nt, Artificial Sequence
  Sense Oligo
gacuccuaacuuuuacgag

SEQ ID NO: 20642 - RNA, 19 nt, Artificial Sequence
  Antisense Oligo
cucguaaaaguuaggaguc

SEQ ID NO: 20643 - RNA, 19 nt, Artificial Sequence
  Sense Oligo
acuccuaacuuuuacgagg

SEQ ID NO: 20644 - RNA, 19 nt, Artificial Sequence
  Antisense Oligo
ccucguaaaaguuaggagu

SEQ ID NO: 20645 - RNA, 19 nt, Artificial Sequence
  Sense Oligo
cuccuaacuuuuacgaggg

SEQ ID NO: 20646 - RNA, 19 nt, Artificial Sequence
  Antisense Oligo
cccucguaaaaguuaggag

SEQ ID NO: 20647 - RNA, 19 nt, Artificial Sequence
  Sense Oligo
uccuaacuuuuacgaggga

SEQ ID NO: 20648 - RNA, 19 nt, Artificial Sequence
  Antisense Oligo
ucccucguaaaaguuagga

SEQ ID NO: 20649 - RNA, 19 nt, Artificial Sequence
  Sense Oligo
aacuuuuacgagggaggca

SEQ ID NO: 20650 - RNA, 19 nt, Artificial Sequence
  Antisense Oligo
ugccucccucguaaaaguu

SEQ ID NO: 20651 - RNA, 19 nt, Artificial Sequence
  Sense Oligo
uuuacgagggaggcaucgc

SEQ ID NO: 20652 - RNA, 19 nt, Artificial Sequence
  Antisense Oligo
gcgaugccucccucguaaa

SEQ ID NO: 20653 - RNA, 19 nt, Artificial Sequence
  Sense Oligo
uuacgagggaggcaucgcc

SEQ ID NO: 20654 - RNA, 19 nt, Artificial Sequence
  Antisense Oligo
ggcgaugccucccucguaa

SEQ ID NO: 20655 - RNA, 19 nt, Artificial Sequence
  Sense Oligo
cgcagcguccuuccgacuu

SEQ ID NO: 20656 - RNA, 19 nt, Artificial Sequence
  Antisense Oligo
aagucggaaggacgcugcg

SEQ ID NO: 20657 - RNA, 19 nt, Artificial Sequence
  Sense Oligo
cguccuuccgacuuggcga

SEQ ID NO: 20658 - RNA, 19 nt, Artificial Sequence
  Antisense Oligo
ucgccaagucggaaggacg

SEQ ID NO: 20659 - RNA, 19 nt, Artificial Sequence
  Sense Oligo
guccuuccgacuuggcgaa

SEQ ID NO: 20660 - RNA, 19 nt, Artificial Sequence
  Antisense Oligo
uucgccaagucggaaggac

SEQ ID NO: 20661 - RNA, 19 nt, Artificial Sequence
  Sense Oligo
cccaccuuguugacuuugg

SEQ ID NO: 20662 - RNA, 19 nt, Artificial Sequence
  Antisense Oligo
ccaaagucaacaagguggg

SEQ ID NO: 20663 - RNA, 19 nt, Artificial Sequence
  Sense Oligo
ccaccuuguugacuuuggu

SEQ ID NO: 20664 - RNA, 19 nt, Artificial Sequence
  Antisense Oligo
accaaagucaacaaggugg

SEQ ID NO: 20665 - RNA, 19 nt, Artificial Sequence
  Sense Oligo
caccuuguugacuuugguu

SEQ ID NO: 20666 - RNA, 19 nt, Artificial Sequence
  Antisense Oligo
aaccaaagucaacaaggug

SEQ ID NO: 20667 - RNA, 19 nt, Artificial Sequence
  Sense Oligo
accuuguugacuuugguug

SEQ ID NO: 20668 - RNA, 19 nt, Artificial Sequence
  Antisense Oligo
caaccaaagucaacaaggu

SEQ ID NO: 20669 - RNA, 19 nt, Artificial Sequence
  Sense Oligo
cuuguugacuuugguugug

SEQ ID NO: 20670 - RNA, 19 nt, Artificial Sequence
  Antisense Oligo
cacaaccaaagucaacaag

SEQ ID NO: 20671 - RNA, 19 nt, Artificial Sequence
  Sense Oligo
uuguugacuuugguugugg

SEQ ID NO: 20672 - RNA, 19 nt, Artificial Sequence
  Antisense Oligo
ccacaaccaaagucaacaa

SEQ ID NO: 20673 - RNA, 19 nt, Artificial Sequence
  Sense Oligo
ugacuuugguugugguugg

SEQ ID NO: 20674 - RNA, 19 nt, Artificial Sequence
  Antisense Oligo
ccaaccacaaccaaaguca

SEQ ID NO: 20675 - RNA, 19 nt, Artificial Sequence
  Sense Oligo
gacuuugguugugguuggg

SEQ ID NO: 20676 - RNA, 19 nt, Artificial Sequence
  Antisense Oligo
cccaaccacaaccaaaguc

SEQ ID NO: 20677 - RNA, 19 nt, Artificial Sequence
  Sense Oligo
ggaugggcuuugauuuggg

SEQ ID NO: 20678 - RNA, 19 nt, Artificial Sequence
  Antisense Oligo
cccaaaucaaagcccaucc

SEQ ID NO: 20679 - RNA, 19 nt, Artificial Sequence
  Sense Oligo
gaugggcuuugauuugggu

SEQ ID NO: 20680 - RNA, 19 nt, Artificial Sequence
  Antisense Oligo
acccaaaucaaagcccauc

SEQ ID NO: 20681 - RNA, 19 nt, Artificial Sequence
  Sense Oligo
augggcuuugauuugggug

SEQ ID NO: 20682 - RNA, 19 nt, Artificial Sequence
  Antisense Oligo
cacccaaaucaaagcccau

SEQ ID NO: 20683 - RNA, 19 nt, Artificial Sequence
  Sense Oligo
ugggcuuugauuugggugg

SEQ ID NO: 20684 - RNA, 19 nt, Artificial Sequence
  Antisense Oligo
ccacccaaaucaaagccca

SEQ ID NO: 20685 - RNA, 19 nt, Artificial Sequence
  Sense Oligo
gggcuuugauuuggguggc

SEQ ID NO: 20686 - RNA, 19 nt, Artificial Sequence
  Antisense Oligo
gccacccaaaucaaagccc

SEQ ID NO: 20687 - RNA, 19 nt, Artificial Sequence
  Sense Oligo
ggcuuugauuuggguggca

SEQ ID NO: 20688 - RNA, 19 nt, Artificial Sequence
  Antisense Oligo
ugccacccaaaucaaagcc

SEQ ID NO: 20689 - RNA, 19 nt, Artificial Sequence
  Sense Oligo
cuuugauuuggguggcagu

SEQ ID NO: 20690 - RNA, 19 nt, Artificial Sequence
  Antisense Oligo
acugccacccaaaucaaag

SEQ ID NO: 20691 - RNA, 19 nt, Artificial Sequence
  Sense Oligo
gauuuggguggcagugucu

SEQ ID NO: 20692 - RNA, 19 nt, Artificial Sequence
  Antisense Oligo
agacacugccacccaaauc

SEQ ID NO: 20693 - RNA, 19 nt, Artificial Sequence
  Sense Oligo
auuuggguggcagugucug

SEQ ID NO: 20694 - RNA, 19 nt, Artificial Sequence
  Antisense Oligo
cagacacugccacccaaau

SEQ ID NO: 20695 - RNA, 19 nt, Artificial Sequence
  Sense Oligo
uuuggguggcagugucugu

SEQ ID NO: 20696 - RNA, 19 nt, Artificial Sequence
  Antisense Oligo
acagacacugccacccaaa

SEQ ID NO: 20697 - RNA, 19 nt, Artificial Sequence
  Sense Oligo
uggguggcagugucugugc

SEQ ID NO: 20698 - RNA, 19 nt, Artificial Sequence
  Antisense Oligo
gcacagacacugccaccca

SEQ ID NO: 20699 - RNA, 19 nt, Artificial Sequence
  Sense Oligo
ggguggcagugucugugcu

SEQ ID NO: 20700 - RNA, 19 nt, Artificial Sequence
  Antisense Oligo
agcacagacacugccaccc

SEQ ID NO: 20701 - RNA, 19 nt, Artificial Sequence
  Sense Oligo
gguggcagugucugugcuu

SEQ ID NO: 20702 - RNA, 19 nt, Artificial Sequence
  Antisense Oligo
aagcacagacacugccacc

SEQ ID NO: 20703 - RNA, 19 nt, Artificial Sequence
  Sense Oligo
guggcagugucugugcuug

SEQ ID NO: 20704 - RNA, 19 nt, Artificial Sequence
  Antisense Oligo
caagcacagacacugccac

SEQ ID NO: 20705 - RNA, 19 nt, Artificial Sequence
  Sense Oligo
uggcagugucugugcuugg

SEQ ID NO: 20706 - RNA, 19 nt, Artificial Sequence
  Antisense Oligo
ccaagcacagacacugcca

SEQ ID NO: 20707 - RNA, 19 nt, Artificial Sequence
  Sense Oligo
ggcagugucugugcuuggg

SEQ ID NO: 20708 - RNA, 19 nt, Artificial Sequence
  Antisense Oligo
cccaagcacagacacugcc

SEQ ID NO: 20709 - RNA, 19 nt, Artificial Sequence
  Sense Oligo
gcagugucugugcuuggga

SEQ ID NO: 20710 - RNA, 19 nt, Artificial Sequence
  Antisense Oligo
ucccaagcacagacacugc

SEQ ID NO: 20711 - RNA, 19 nt, Artificial Sequence
  Sense Oligo
cagugucugugcuugggaa

SEQ ID NO: 20712 - RNA, 19 nt, Artificial Sequence
  Antisense Oligo
uucccaagcacagacacug

SEQ ID NO: 20713 - RNA, 19 nt, Artificial Sequence
  Sense Oligo
aaaagacaggaagcggauu

SEQ ID NO: 20714 - RNA, 19 nt, Artificial Sequence
  Antisense Oligo
aauccgcuuccugucuuuu

SEQ ID NO: 20715 - RNA, 19 nt, Artificial Sequence
  Sense Oligo
aaagacaggaagcggauug

SEQ ID NO: 20716 - RNA, 19 nt, Artificial Sequence
  Antisense Oligo
caauccgcuuccugucuuu

SEQ ID NO: 20717 - RNA, 19 nt, Artificial Sequence
  Sense Oligo
aagacaggaagcggauuga

SEQ ID NO: 20718 - RNA, 19 nt, Artificial Sequence
  Antisense Oligo
ucaauccgcuuccugucuu

SEQ ID NO: 20719 - RNA, 19 nt, Artificial Sequence
  Sense Oligo
agacaggaagcggauugaa

SEQ ID NO: 20720 - RNA, 19 nt, Artificial Sequence
  Antisense Oligo
uucaauccgcuuccugucu

SEQ ID NO: 20721 - RNA, 19 nt, Artificial Sequence
  Sense Oligo
gacaggaagcggauugaau

SEQ ID NO: 20722 - RNA, 19 nt, Artificial Sequence
  Antisense Oligo
auucaauccgcuuccuguc

SEQ ID NO: 20723 - RNA, 19 nt, Artificial Sequence
  Sense Oligo
acaggaagcggauugaaug

SEQ ID NO: 20724 - RNA, 19 nt, Artificial Sequence
  Antisense Oligo
cauucaauccgcuuccugu

SEQ ID NO: 20725 - RNA, 19 nt, Artificial Sequence
  Sense Oligo
caggaagcggauugaaugc

SEQ ID NO: 20726 - RNA, 19 nt, Artificial Sequence
  Antisense Oligo
gcauucaauccgcuuccug

SEQ ID NO: 20727 - RNA, 19 nt, Artificial Sequence
  Sense Oligo
gggcucucucuugugucuu

SEQ ID NO: 20728 - RNA, 19 nt, Artificial Sequence
  Antisense Oligo
aagacacaagagagagccc

SEQ ID NO: 20729 - RNA, 19 nt, Artificial Sequence
  Sense Oligo
cucucuugugucuuccggc

SEQ ID NO: 20730 - RNA, 19 nt, Artificial Sequence
  Antisense Oligo
gccggaagacacaagagag

SEQ ID NO: 20731 - RNA, 19 nt, Artificial Sequence
  Sense Oligo
ggcuaaugccuguaauccc

SEQ ID NO: 20732 - RNA, 19 nt, Artificial Sequence
  Antisense Oligo
gggauuacaggcauuagcc

SEQ ID NO: 20733 - RNA, 19 nt, Artificial Sequence
  Sense Oligo
aaugccuguaaucccaaaa

SEQ ID NO: 20734 - RNA, 19 nt, Artificial Sequence
  Antisense Oligo
uuuugggauuacaggcauu

SEQ ID NO: 20735 - RNA, 19 nt, Artificial Sequence
  Sense Oligo
ugugguggcgcaugccugu

SEQ ID NO: 20736 - RNA, 19 nt, Artificial Sequence
  Antisense Oligo
acaggcaugcgccaccaca

SEQ ID NO: 20737 - RNA, 19 nt, Artificial Sequence
  Sense Oligo
gugguggcgcaugccugua

SEQ ID NO: 20738 - RNA, 19 nt, Artificial Sequence
  Antisense Oligo
uacaggcaugcgccaccac

SEQ ID NO: 20739 - RNA, 19 nt, Artificial Sequence
  Sense Oligo
ugguggcgcaugccuguaa

SEQ ID NO: 20740 - RNA, 19 nt, Artificial Sequence
  Antisense Oligo
uuacaggcaugcgccacca

SEQ ID NO: 20741 - RNA, 19 nt, Artificial Sequence
  Sense Oligo
gguggcgcaugccuguaac

SEQ ID NO: 20742 - RNA, 19 nt, Artificial Sequence
  Antisense Oligo
guuacaggcaugcgccacc

SEQ ID NO: 20743 - RNA, 19 nt, Artificial Sequence
  Sense Oligo
guggcgcaugccuguaacu

SEQ ID NO: 20744 - RNA, 19 nt, Artificial Sequence
  Antisense Oligo
aguuacaggcaugcgccac

SEQ ID NO: 20745 - RNA, 19 nt, Artificial Sequence
  Sense Oligo
uggcgcaugccuguaacuc

SEQ ID NO: 20746 - RNA, 19 nt, Artificial Sequence
  Antisense Oligo
gaguuacaggcaugcgcca

SEQ ID NO: 20747 - RNA, 19 nt, Artificial Sequence
  Sense Oligo
ggcgcaugccuguaacucc

SEQ ID NO: 20748 - RNA, 19 nt, Artificial Sequence
  Antisense Oligo
ggaguuacaggcaugcgcc

SEQ ID NO: 20749 - RNA, 19 nt, Artificial Sequence
  Sense Oligo
caugccuguaacuccaccu

SEQ ID NO: 20750 - RNA, 19 nt, Artificial Sequence
  Antisense Oligo
agguggaguuacaggcaug

SEQ ID NO: 20751 - RNA, 19 nt, Artificial Sequence
  Sense Oligo
cuguaacuccaccuacuug

SEQ ID NO: 20752 - RNA, 19 nt, Artificial Sequence
  Antisense Oligo
caaguagguggaguuacag

SEQ ID NO: 20753 - RNA, 19 nt, Artificial Sequence
  Sense Oligo
uaacuccaccuacuuggga

SEQ ID NO: 20754 - RNA, 19 nt, Artificial Sequence
  Antisense Oligo
ucccaaguagguggaguua

SEQ ID NO: 20755 - RNA, 19 nt, Artificial Sequence
  Sense Oligo
gcggagguugcagugagcu

SEQ ID NO: 20756 - RNA, 19 nt, Artificial Sequence
  Antisense Oligo
agcucacugcaaccuccgc

SEQ ID NO: 20757 - RNA, 19 nt, Artificial Sequence
  Sense Oligo
cggagguugcagugagcug

SEQ ID NO: 20758 - RNA, 19 nt, Artificial Sequence
  Antisense Oligo
cagcucacugcaaccuccg

SEQ ID NO: 20759 - RNA, 19 nt, Artificial Sequence
  Sense Oligo
ggagguugcagugagcuga

SEQ ID NO: 20760 - RNA, 19 nt, Artificial Sequence
  Antisense Oligo
ucagcucacugcaaccucc

SEQ ID NO: 20761 - RNA, 19 nt, Artificial Sequence
  Sense Oligo
gagguugcagugagcugag

SEQ ID NO: 20762 - RNA, 19 nt, Artificial Sequence
  Antisense Oligo
cucagcucacugcaaccuc

SEQ ID NO: 20763 - RNA, 19 nt, Artificial Sequence
  Sense Oligo
acuguacuccagccugggu

SEQ ID NO: 20764 - RNA, 19 nt, Artificial Sequence
  Antisense Oligo
acccaggcuggaguacagu

SEQ ID NO: 20765 - RNA, 19 nt, Artificial Sequence
  Sense Oligo
cuguacuccagccugggug

SEQ ID NO: 20766 - RNA, 19 nt, Artificial Sequence
  Antisense Oligo
cacccaggcuggaguacag

SEQ ID NO: 20767 - RNA, 19 nt, Artificial Sequence
  Sense Oligo
uguacuccagccuggguga

SEQ ID NO: 20768 - RNA, 19 nt, Artificial Sequence
  Antisense Oligo
ucacccaggcuggaguaca

SEQ ID NO: 20769 - RNA, 19 nt, Artificial Sequence
  Sense Oligo
guacuccagccugggugaa

SEQ ID NO: 20770 - RNA, 19 nt, Artificial Sequence
  Antisense Oligo
uucacccaggcuggaguac

SEQ ID NO: 20771 - RNA, 19 nt, Artificial Sequence
  Sense Oligo
uuuucuggucugugguucc

SEQ ID NO: 20772 - RNA, 19 nt, Artificial Sequence
  Antisense Oligo
ggaaccacagaccagaaaa

SEQ ID NO: 20773 - RNA, 19 nt, Artificial Sequence
  Sense Oligo
aagguguuugagggaggga

SEQ ID NO: 20774 - RNA, 19 nt, Artificial Sequence
  Antisense Oligo
ucccucccucaaacaccuu

SEQ ID NO: 20775 - RNA, 19 nt, Artificial Sequence
  Sense Oligo
uguuugagggagggagugu

SEQ ID NO: 20776 - RNA, 19 nt, Artificial Sequence
  Antisense Oligo
acacucccucccucaaaca

SEQ ID NO: 20777 - RNA, 19 nt, Artificial Sequence
  Sense Oligo
uuugagggagggagugucc

SEQ ID NO: 20778 - RNA, 19 nt, Artificial Sequence
  Antisense Oligo
ggacacucccucccucaaa

SEQ ID NO: 20779 - RNA, 19 nt, Artificial Sequence
  Sense Oligo
uugagggagggagugucca

SEQ ID NO: 20780 - RNA, 19 nt, Artificial Sequence
  Antisense Oligo
uggacacucccucccucaa

SEQ ID NO: 20781 - RNA, 19 nt, Artificial Sequence
  Sense Oligo
gggaguguccacugguggu

SEQ ID NO: 20782 - RNA, 19 nt, Artificial Sequence
  Antisense Oligo
accaccaguggacacuccc

SEQ ID NO: 20783 - RNA, 19 nt, Artificial Sequence
  Sense Oligo
ggaguguccacuggugguu

SEQ ID NO: 20784 - RNA, 19 nt, Artificial Sequence
  Antisense Oligo
aaccaccaguggacacucc

SEQ ID NO: 20785 - RNA, 19 nt, Artificial Sequence
  Sense Oligo
gaguguccacuggugguug

SEQ ID NO: 20786 - RNA, 19 nt, Artificial Sequence
  Antisense Oligo
caaccaccaguggacacuc

SEQ ID NO: 20787 - RNA, 19 nt, Artificial Sequence
  Sense Oligo
aguguccacuggugguugu

SEQ ID NO: 20788 - RNA, 19 nt, Artificial Sequence
  Antisense Oligo
acaaccaccaguggacacu

SEQ ID NO: 20789 - RNA, 19 nt, Artificial Sequence
  Sense Oligo
guguccacuggugguuguu

SEQ ID NO: 20790 - RNA, 19 nt, Artificial Sequence
  Antisense Oligo
aacaaccaccaguggacac

SEQ ID NO: 20791 - RNA, 19 nt, Artificial Sequence
  Sense Oligo
uguccacuggugguuguuu

SEQ ID NO: 20792 - RNA, 19 nt, Artificial Sequence
  Antisense Oligo
aaacaaccaccaguggaca

SEQ ID NO: 20793 - RNA, 19 nt, Artificial Sequence
  Sense Oligo
ggugguuguuucagguaga

SEQ ID NO: 20794 - RNA, 19 nt, Artificial Sequence
  Antisense Oligo
ucuaccugaaacaaccacc

SEQ ID NO: 20795 - RNA, 19 nt, Artificial Sequence
  Sense Oligo
gugguuguuucagguagag

SEQ ID NO: 20796 - RNA, 19 nt, Artificial Sequence
  Antisense Oligo
cucuaccugaaacaaccac

SEQ ID NO: 20797 - RNA, 19 nt, Artificial Sequence
  Sense Oligo
ugguuguuucagguagagu

SEQ ID NO: 20798 - RNA, 19 nt, Artificial Sequence
  Antisense Oligo
acucuaccugaaacaacca

SEQ ID NO: 20799 - RNA, 19 nt, Artificial Sequence
  Sense Oligo
gguuguuucagguagagug

SEQ ID NO: 20800 - RNA, 19 nt, Artificial Sequence
  Antisense Oligo
cacucuaccugaaacaacc

SEQ ID NO: 20801 - RNA, 19 nt, Artificial Sequence
  Sense Oligo
guuguuucagguagagugu

SEQ ID NO: 20802 - RNA, 19 nt, Artificial Sequence
  Antisense Oligo
acacucuaccugaaacaac

SEQ ID NO: 20803 - RNA, 19 nt, Artificial Sequence
  Sense Oligo
uuguuucagguagagugug

SEQ ID NO: 20804 - RNA, 19 nt, Artificial Sequence
  Antisense Oligo
cacacucuaccugaaacaa

SEQ ID NO: 20805 - RNA, 19 nt, Artificial Sequence
  Sense Oligo
uguuucagguagagugugg

SEQ ID NO: 20806 - RNA, 19 nt, Artificial Sequence
  Antisense Oligo
ccacacucuaccugaaaca

SEQ ID NO: 20807 - RNA, 19 nt, Artificial Sequence
  Sense Oligo
guuucagguagagugugga

SEQ ID NO: 20808 - RNA, 19 nt, Artificial Sequence
  Antisense Oligo
uccacacucuaccugaaac

SEQ ID NO: 20809 - RNA, 19 nt, Artificial Sequence
  Sense Oligo
uuucagguagaguguggag

SEQ ID NO: 20810 - RNA, 19 nt, Artificial Sequence
  Antisense Oligo
cuccacacucuaccugaaa

SEQ ID NO: 20811 - RNA, 19 nt, Artificial Sequence
  Sense Oligo
uucagguagaguguggagg

SEQ ID NO: 20812 - RNA, 19 nt, Artificial Sequence
  Antisense Oligo
ccuccacacucuaccugaa

SEQ ID NO: 20813 - RNA, 19 nt, Artificial Sequence
  Sense Oligo
ucagguagaguguggaggg

SEQ ID NO: 20814 - RNA, 19 nt, Artificial Sequence
  Antisense Oligo
cccuccacacucuaccuga

SEQ ID NO: 20815 - RNA, 19 nt, Artificial Sequence
  Sense Oligo
agauaauuuuagucucugg

SEQ ID NO: 20816 - RNA, 19 nt, Artificial Sequence
  Antisense Oligo
ccagagacuaaaauuaucu

SEQ ID NO: 20817 - RNA, 19 nt, Artificial Sequence
  Sense Oligo
uuagucucuggaauaaaag

SEQ ID NO: 20818 - RNA, 19 nt, Artificial Sequence
  Antisense Oligo
cuuuuauuccagagacuaa

SEQ ID NO: 20819 - RNA, 19 nt, Artificial Sequence
  Sense Oligo
agucucuggaauaaaaggg

SEQ ID NO: 20820 - RNA, 19 nt, Artificial Sequence
  Antisense Oligo
cccuuuuauuccagagacu

SEQ ID NO: 20821 - RNA, 19 nt, Artificial Sequence
  Sense Oligo
gucucuggaauaaaagggc

SEQ ID NO: 20822 - RNA, 19 nt, Artificial Sequence
  Antisense Oligo
gcccuuuuauuccagagac

SEQ ID NO: 20823 - RNA, 19 nt, Artificial Sequence
  Sense Oligo
uaaaagggcagcagaccug

SEQ ID NO: 20824 - RNA, 19 nt, Artificial Sequence
  Antisense Oligo
caggucugcugcccuuuua

SEQ ID NO: 20825 - RNA, 19 nt, Artificial Sequence
  Sense Oligo
aaagggcagcagaccugga

SEQ ID NO: 20826 - RNA, 19 nt, Artificial Sequence
  Antisense Oligo
uccaggucugcugcccuuu

SEQ ID NO: 20827 - RNA, 19 nt, Artificial Sequence
  Sense Oligo
aaaagggaugcaaauuguc

SEQ ID NO: 20828 - RNA, 19 nt, Artificial Sequence
  Antisense Oligo
gacaauuugcaucccuuuu

SEQ ID NO: 20829 - RNA, 19 nt, Artificial Sequence
  Sense Oligo
aaagggaugcaaauugucc

SEQ ID NO: 20830 - RNA, 19 nt, Artificial Sequence
  Antisense Oligo
ggacaauuugcaucccuuu

SEQ ID NO: 20831 - RNA, 19 nt, Artificial Sequence
  Sense Oligo
ggaugcaaauugucccaua

SEQ ID NO: 20832 - RNA, 19 nt, Artificial Sequence
  Antisense Oligo
uaugggacaauuugcaucc

SEQ ID NO: 20833 - RNA, 19 nt, Artificial Sequence
  Sense Oligo
gaugcaaauugucccauac

SEQ ID NO: 20834 - RNA, 19 nt, Artificial Sequence
  Antisense Oligo
guaugggacaauuugcauc

SEQ ID NO: 20835 - RNA, 19 nt, Artificial Sequence
  Sense Oligo
aaauugucccauacaccua

SEQ ID NO: 20836 - RNA, 19 nt, Artificial Sequence
  Antisense Oligo
uagguguaugggacaauuu

SEQ ID NO: 20837 - RNA, 19 nt, Artificial Sequence
  Sense Oligo
aauugucccauacaccuau

SEQ ID NO: 20838 - RNA, 19 nt, Artificial Sequence
  Antisense Oligo
auagguguaugggacaauu

SEQ ID NO: 20839 - RNA, 19 nt, Artificial Sequence
  Sense Oligo
auugucccauacaccuauu

SEQ ID NO: 20840 - RNA, 19 nt, Artificial Sequence
  Antisense Oligo
aauagguguaugggacaau

SEQ ID NO: 20841 - RNA, 19 nt, Artificial Sequence
  Sense Oligo
uugucccauacaccuauug

SEQ ID NO: 20842 - RNA, 19 nt, Artificial Sequence
  Antisense Oligo
caauagguguaugggacaa

SEQ ID NO: 20843 - RNA, 19 nt, Artificial Sequence
  Sense Oligo
agaagacugcagaagacag

SEQ ID NO: 20844 - RNA, 19 nt, Artificial Sequence
  Antisense Oligo
cugucuucugcagucuucu

SEQ ID NO: 20845 - RNA, 19 nt, Artificial Sequence
  Sense Oligo
aagacugcagaagacagau

SEQ ID NO: 20846 - RNA, 19 nt, Artificial Sequence
  Antisense Oligo
aucugucuucugcagucuu

SEQ ID NO: 20847 - RNA, 19 nt, Artificial Sequence
  Sense Oligo
agacugcagaagacagaug

SEQ ID NO: 20848 - RNA, 19 nt, Artificial Sequence
  Antisense Oligo
caucugucuucugcagucu

SEQ ID NO: 20849 - RNA, 19 nt, Artificial Sequence
  Sense Oligo
gacugcagaagacagauga

SEQ ID NO: 20850 - RNA, 19 nt, Artificial Sequence
  Antisense Oligo
ucaucugucuucugcaguc

SEQ ID NO: 20851 - RNA, 19 nt, Artificial Sequence
  Sense Oligo
agaagacagaugauugaug

SEQ ID NO: 20852 - RNA, 19 nt, Artificial Sequence
  Antisense Oligo
caucaaucaucugucuucu

SEQ ID NO: 20853 - RNA, 19 nt, Artificial Sequence
  Sense Oligo
gaagacagaugauugaugu

SEQ ID NO: 20854 - RNA, 19 nt, Artificial Sequence
  Antisense Oligo
acaucaaucaucugucuuc

SEQ ID NO: 20855 - RNA, 19 nt, Artificial Sequence
  Sense Oligo
aagacagaugauugauguu

SEQ ID NO: 20856 - RNA, 19 nt, Artificial Sequence
  Antisense Oligo
aacaucaaucaucugucuu

SEQ ID NO: 20857 - RNA, 19 nt, Artificial Sequence
  Sense Oligo
agacagaugauugauguuu

SEQ ID NO: 20858 - RNA, 19 nt, Artificial Sequence
  Antisense Oligo
aaacaucaaucaucugucu

SEQ ID NO: 20859 - RNA, 19 nt, Artificial Sequence
  Sense Oligo
gacagaugauugauguuuu

SEQ ID NO: 20860 - RNA, 19 nt, Artificial Sequence
  Antisense Oligo
aaaacaucaaucaucuguc

SEQ ID NO: 20861 - RNA, 19 nt, Artificial Sequence
  Sense Oligo
gggaggugugcaggguugu

SEQ ID NO: 20862 - RNA, 19 nt, Artificial Sequence
  Antisense Oligo
acaacccugcacaccuccc

SEQ ID NO: 20863 - RNA, 19 nt, Artificial Sequence
  Sense Oligo
ggaggugugcaggguuguc

SEQ ID NO: 20864 - RNA, 19 nt, Artificial Sequence
  Antisense Oligo
gacaacccugcacaccucc

SEQ ID NO: 20865 - RNA, 19 nt, Artificial Sequence
  Sense Oligo
gaggugugcaggguugucu

SEQ ID NO: 20866 - RNA, 19 nt, Artificial Sequence
  Antisense Oligo
agacaacccugcacaccuc

SEQ ID NO: 20867 - RNA, 19 nt, Artificial Sequence
  Sense Oligo
aggugugcaggguugucuu

SEQ ID NO: 20868 - RNA, 19 nt, Artificial Sequence
  Antisense Oligo
aagacaacccugcacaccu

SEQ ID NO: 20869 - RNA, 19 nt, Artificial Sequence
  Sense Oligo
ggugugcaggguugucuug

SEQ ID NO: 20870 - RNA, 19 nt, Artificial Sequence
  Antisense Oligo
caagacaacccugcacacc

SEQ ID NO: 20871 - RNA, 19 nt, Artificial Sequence
  Sense Oligo
gugugcaggguugucuugu

SEQ ID NO: 20872 - RNA, 19 nt, Artificial Sequence
  Antisense Oligo
acaagacaacccugcacac

SEQ ID NO: 20873 - RNA, 19 nt, Artificial Sequence
  Sense Oligo
caggguugucuuguugugc

SEQ ID NO: 20874 - RNA, 19 nt, Artificial Sequence
  Antisense Oligo
gcacaacaagacaacccug

SEQ ID NO: 20875 - RNA, 19 nt, Artificial Sequence
  Sense Oligo
aggguugucuuguugugca

SEQ ID NO: 20876 - RNA, 19 nt, Artificial Sequence
  Antisense Oligo
ugcacaacaagacaacccu

SEQ ID NO: 20877 - RNA, 19 nt, Artificial Sequence
  Sense Oligo
uugucuuguugugcagaua

SEQ ID NO: 20878 - RNA, 19 nt, Artificial Sequence
  Antisense Oligo
uaucugcacaacaagacaa

SEQ ID NO: 20879 - RNA, 19 nt, Artificial Sequence
  Sense Oligo
ugucuuguugugcagauaa

SEQ ID NO: 20880 - RNA, 19 nt, Artificial Sequence
  Antisense Oligo
uuaucugcacaacaagaca

SEQ ID NO: 20881 - RNA, 19 nt, Artificial Sequence
  Sense Oligo
gucuuguugugcagauaau

SEQ ID NO: 20882 - RNA, 19 nt, Artificial Sequence
  Antisense Oligo
auuaucugcacaacaagac

SEQ ID NO: 20883 - RNA, 19 nt, Artificial Sequence
  Sense Oligo
ucuuguugugcagauaauc

SEQ ID NO: 20884 - RNA, 19 nt, Artificial Sequence
  Antisense Oligo
gauuaucugcacaacaaga

SEQ ID NO: 20885 - RNA, 19 nt, Artificial Sequence
  Sense Oligo
cuuguugugcagauaauca

SEQ ID NO: 20886 - RNA, 19 nt, Artificial Sequence
  Antisense Oligo
ugauuaucugcacaacaag

SEQ ID NO: 20887 - RNA, 19 nt, Artificial Sequence
  Sense Oligo
uuguugugcagauaaucac

SEQ ID NO: 20888 - RNA, 19 nt, Artificial Sequence
  Antisense Oligo
gugauuaucugcacaacaa

SEQ ID NO: 20889 - RNA, 19 nt, Artificial Sequence
  Sense Oligo
uguugugcagauaaucacu

SEQ ID NO: 20890 - RNA, 19 nt, Artificial Sequence
  Antisense Oligo
agugauuaucugcacaaca

SEQ ID NO: 20891 - RNA, 19 nt, Artificial Sequence
  Sense Oligo
guugugcagauaaucacuc

SEQ ID NO: 20892 - RNA, 19 nt, Artificial Sequence
  Antisense Oligo
gagugauuaucugcacaac

SEQ ID NO: 20893 - RNA, 19 nt, Artificial Sequence
  Sense Oligo
gcagauaaucacucaggug

SEQ ID NO: 20894 - RNA, 19 nt, Artificial Sequence
  Antisense Oligo
caccugagugauuaucugc

SEQ ID NO: 20895 - RNA, 19 nt, Artificial Sequence
  Sense Oligo
ucaggugaucucagagcug

SEQ ID NO: 20896 - RNA, 19 nt, Artificial Sequence
  Antisense Oligo
cagcucugagaucaccuga

SEQ ID NO: 20897 - RNA, 19 nt, Artificial Sequence
  Sense Oligo
caggugaucucagagcugc

SEQ ID NO: 20898 - RNA, 19 nt, Artificial Sequence
  Antisense Oligo
gcagcucugagaucaccug

SEQ ID NO: 20899 - RNA, 19 nt, Artificial Sequence
  Sense Oligo
gcaggcacuccucuugugu

SEQ ID NO: 20900 - RNA, 19 nt, Artificial Sequence
  Antisense Oligo
acacaagaggagugccugc

SEQ ID NO: 20901 - RNA, 19 nt, Artificial Sequence
  Sense Oligo
caggcacuccucuugugug

SEQ ID NO: 20902 - RNA, 19 nt, Artificial Sequence
  Antisense Oligo
cacacaagaggagugccug

SEQ ID NO: 20903 - RNA, 19 nt, Artificial Sequence
  Sense Oligo
cacuccucuuguguguccc

SEQ ID NO: 20904 - RNA, 19 nt, Artificial Sequence
  Antisense Oligo
gggacacacaagaggagug

SEQ ID NO: 20905 - RNA, 19 nt, Artificial Sequence
  Sense Oligo
acuccucuugugugucccu

SEQ ID NO: 20906 - RNA, 19 nt, Artificial Sequence
  Antisense Oligo
agggacacacaagaggagu

SEQ ID NO: 20907 - RNA, 19 nt, Artificial Sequence
  Sense Oligo
cuccucuugugugucccug

SEQ ID NO: 20908 - RNA, 19 nt, Artificial Sequence
  Antisense Oligo
cagggacacacaagaggag

SEQ ID NO: 20909 - RNA, 19 nt, Artificial Sequence
  Sense Oligo
ucccugggaccguuccuag

SEQ ID NO: 20910 - RNA, 19 nt, Artificial Sequence
  Antisense Oligo
cuaggaacggucccaggga

SEQ ID NO: 20911 - RNA, 19 nt, Artificial Sequence
  Sense Oligo
cccugggaccguuccuaga

SEQ ID NO: 20912 - RNA, 19 nt, Artificial Sequence
  Antisense Oligo
ucuaggaacggucccaggg

SEQ ID NO: 20913 - RNA, 19 nt, Artificial Sequence
  Sense Oligo
ccugggaccguuccuagau

SEQ ID NO: 20914 - RNA, 19 nt, Artificial Sequence
  Antisense Oligo
aucuaggaacggucccagg

SEQ ID NO: 20915 - RNA, 19 nt, Artificial Sequence
  Sense Oligo
cugggaccguuccuagauc

SEQ ID NO: 20916 - RNA, 19 nt, Artificial Sequence
  Antisense Oligo
gaucuaggaacggucccag

SEQ ID NO: 20917 - RNA, 19 nt, Artificial Sequence
  Sense Oligo
ugggaccguuccuagaucc

SEQ ID NO: 20918 - RNA, 19 nt, Artificial Sequence
  Antisense Oligo
ggaucuaggaacgguccca

SEQ ID NO: 20919 - RNA, 19 nt, Artificial Sequence
  Sense Oligo
gaucccucuaggcagauaa

SEQ ID NO: 20920 - RNA, 19 nt, Artificial Sequence
  Antisense Oligo
uuaucugccuagagggauc

SEQ ID NO: 20921 - RNA, 19 nt, Artificial Sequence
  Sense Oligo
aucccucuaggcagauaau

SEQ ID NO: 20922 - RNA, 19 nt, Artificial Sequence
  Antisense Oligo
auuaucugccuagagggau

SEQ ID NO: 20923 - RNA, 19 nt, Artificial Sequence
  Sense Oligo
ucccucuaggcagauaaug

SEQ ID NO: 20924 - RNA, 19 nt, Artificial Sequence
  Antisense Oligo
cauuaucugccuagaggga

SEQ ID NO: 20925 - RNA, 19 nt, Artificial Sequence
  Sense Oligo
cccucuaggcagauaaugg

SEQ ID NO: 20926 - RNA, 19 nt, Artificial Sequence
  Antisense Oligo
ccauuaucugccuagaggg

SEQ ID NO: 20927 - RNA, 19 nt, Artificial Sequence
  Sense Oligo
ccucuaggcagauaauggg

SEQ ID NO: 20928 - RNA, 19 nt, Artificial Sequence
  Antisense Oligo
cccauuaucugccuagagg

SEQ ID NO: 20929 - RNA, 19 nt, Artificial Sequence
  Sense Oligo
agcuucugcuccauucugc

SEQ ID NO: 20930 - RNA, 19 nt, Artificial Sequence
  Antisense Oligo
gcagaauggagcagaagcu

SEQ ID NO: 20931 - RNA, 19 nt, Artificial Sequence
  Sense Oligo
cugcuccauucugcuguuu

SEQ ID NO: 20932 - RNA, 19 nt, Artificial Sequence
  Antisense Oligo
aaacagcagaauggagcag

SEQ ID NO: 20933 - RNA, 19 nt, Artificial Sequence
  Sense Oligo
guggauuuccuuuauagcc

SEQ ID NO: 20934 - RNA, 19 nt, Artificial Sequence
  Antisense Oligo
ggcuauaaaggaaauccac

SEQ ID NO: 20935 - RNA, 19 nt, Artificial Sequence
  Sense Oligo
uggauuuccuuuauagccu

SEQ ID NO: 20936 - RNA, 19 nt, Artificial Sequence
  Antisense Oligo
aggcuauaaaggaaaucca

SEQ ID NO: 20937 - RNA, 19 nt, Artificial Sequence
  Sense Oligo
ggauuuccuuuauagccuu

SEQ ID NO: 20938 - RNA, 19 nt, Artificial Sequence
  Antisense Oligo
aaggcuauaaaggaaaucc

SEQ ID NO: 20939 - RNA, 19 nt, Artificial Sequence
  Sense Oligo
gauuuccuuuauagccuuu

SEQ ID NO: 20940 - RNA, 19 nt, Artificial Sequence
  Antisense Oligo
aaaggcuauaaaggaaauc

SEQ ID NO: 20941 - RNA, 19 nt, Artificial Sequence
  Sense Oligo
uuccuuuauagccuuuuac

SEQ ID NO: 20942 - RNA, 19 nt, Artificial Sequence
  Antisense Oligo
guaaaaggcuauaaaggaa

SEQ ID NO: 20943 - RNA, 19 nt, Artificial Sequence
  Sense Oligo
uccuuuauagccuuuuaca

SEQ ID NO: 20944 - RNA, 19 nt, Artificial Sequence
  Antisense Oligo
uguaaaaggcuauaaagga

SEQ ID NO: 20945 - RNA, 19 nt, Artificial Sequence
  Sense Oligo
ccugaguaugugguugcuc

SEQ ID NO: 20946 - RNA, 19 nt, Artificial Sequence
  Antisense Oligo
gagcaaccacauacucagg

SEQ ID NO: 20947 - RNA, 19 nt, Artificial Sequence
  Sense Oligo
cugaguaugugguugcucu

SEQ ID NO: 20948 - RNA, 19 nt, Artificial Sequence
  Antisense Oligo
agagcaaccacauacucag

SEQ ID NO: 20949 - RNA, 19 nt, Artificial Sequence
  Sense Oligo
ugaguaugugguugcucug

SEQ ID NO: 20950 - RNA, 19 nt, Artificial Sequence
  Antisense Oligo
cagagcaaccacauacuca

SEQ ID NO: 20951 - RNA, 19 nt, Artificial Sequence
  Sense Oligo
gaguaugugguugcucuga

SEQ ID NO: 20952 - RNA, 19 nt, Artificial Sequence
  Antisense Oligo
ucagagcaaccacauacuc

SEQ ID NO: 20953 - RNA, 19 nt, Artificial Sequence
  Sense Oligo
aguaugugguugcucugaa

SEQ ID NO: 20954 - RNA, 19 nt, Artificial Sequence
  Antisense Oligo
uucagagcaaccacauacu

SEQ ID NO: 20955 - RNA, 19 nt, Artificial Sequence
  Sense Oligo
ugguugcucugaauagcca

SEQ ID NO: 20956 - RNA, 19 nt, Artificial Sequence
  Antisense Oligo
uggcuauucagagcaacca

SEQ ID NO: 20957 - RNA, 19 nt, Artificial Sequence
  Sense Oligo
aauagccaucucaaaauug

SEQ ID NO: 20958 - RNA, 19 nt, Artificial Sequence
  Antisense Oligo
caauuuugagauggcuauu

SEQ ID NO: 20959 - RNA, 19 nt, Artificial Sequence
  Sense Oligo
auagccaucucaaaauuga

SEQ ID NO: 20960 - RNA, 19 nt, Artificial Sequence
  Antisense Oligo
ucaauuuugagauggcuau

SEQ ID NO: 20961 - RNA, 19 nt, Artificial Sequence
  Sense Oligo
uagccaucucaaaauugac

SEQ ID NO: 20962 - RNA, 19 nt, Artificial Sequence
  Antisense Oligo
gucaauuuugagauggcua

SEQ ID NO: 20963 - RNA, 19 nt, Artificial Sequence
  Sense Oligo
agccaucucaaaauugacc

SEQ ID NO: 20964 - RNA, 19 nt, Artificial Sequence
  Antisense Oligo
ggucaauuuugagauggcu

SEQ ID NO: 20965 - RNA, 19 nt, Artificial Sequence
  Sense Oligo
gccaucucaaaauugacca

SEQ ID NO: 20966 - RNA, 19 nt, Artificial Sequence
  Antisense Oligo
uggucaauuuugagauggc

SEQ ID NO: 20967 - RNA, 19 nt, Artificial Sequence
  Sense Oligo
caaaauugaccacagaauc

SEQ ID NO: 20968 - RNA, 19 nt, Artificial Sequence
  Antisense Oligo
gauucuguggucaauuuug

SEQ ID NO: 20969 - RNA, 19 nt, Artificial Sequence
  Sense Oligo
aaaauugaccacagaaucu

SEQ ID NO: 20970 - RNA, 19 nt, Artificial Sequence
  Antisense Oligo
agauucuguggucaauuuu

SEQ ID NO: 20971 - RNA, 19 nt, Artificial Sequence
  Sense Oligo
ggguggcauagauuagucu

SEQ ID NO: 20972 - RNA, 19 nt, Artificial Sequence
  Antisense Oligo
agacuaaucuaugccaccc

SEQ ID NO: 20973 - RNA, 19 nt, Artificial Sequence
  Sense Oligo
agugccuccgucccucguu

SEQ ID NO: 20974 - RNA, 19 nt, Artificial Sequence
  Antisense Oligo
aacgagggacggaggcacu

SEQ ID NO: 20975 - RNA, 19 nt, Artificial Sequence
  Sense Oligo
ugccuccgucccucguuca

SEQ ID NO: 20976 - RNA, 19 nt, Artificial Sequence
  Antisense Oligo
ugaacgagggacggaggca

SEQ ID NO: 20977 - RNA, 19 nt, Artificial Sequence
  Sense Oligo
cugaguguccuccuggcug

SEQ ID NO: 20978 - RNA, 19 nt, Artificial Sequence
  Antisense Oligo
cagccaggaggacacucag

SEQ ID NO: 20979 - RNA, 19 nt, Artificial Sequence
  Sense Oligo
ugaguguccuccuggcugc

SEQ ID NO: 20980 - RNA, 19 nt, Artificial Sequence
  Antisense Oligo
gcagccaggaggacacuca

SEQ ID NO: 20981 - RNA, 19 nt, Artificial Sequence
  Sense Oligo
guccuccuggcugcugaag

SEQ ID NO: 20982 - RNA, 19 nt, Artificial Sequence
  Antisense Oligo
cuucagcagccaggaggac

SEQ ID NO: 20983 - RNA, 19 nt, Artificial Sequence
  Sense Oligo
uccuggcugcugaaggcac

SEQ ID NO: 20984 - RNA, 19 nt, Artificial Sequence
  Antisense Oligo
gugccuucagcagccagga

SEQ ID NO: 20985 - RNA, 19 nt, Artificial Sequence
  Sense Oligo
cuggcugcugaaggcacca

SEQ ID NO: 20986 - RNA, 19 nt, Artificial Sequence
  Antisense Oligo
uggugccuucagcagccag

SEQ ID NO: 20987 - RNA, 19 nt, Artificial Sequence
  Sense Oligo
uggcugcugaaggcaccag

SEQ ID NO: 20988 - RNA, 19 nt, Artificial Sequence
  Antisense Oligo
cuggugccuucagcagcca

SEQ ID NO: 20989 - RNA, 19 nt, Artificial Sequence
  Sense Oligo
ggcugcugaaggcaccagu

SEQ ID NO: 20990 - RNA, 19 nt, Artificial Sequence
  Antisense Oligo
acuggugccuucagcagcc

SEQ ID NO: 20991 - RNA, 19 nt, Artificial Sequence
  Sense Oligo
ugaaggcaccagucagcug

SEQ ID NO: 20992 - RNA, 19 nt, Artificial Sequence
  Antisense Oligo
cagcugacuggugccuuca

SEQ ID NO: 20993 - RNA, 19 nt, Artificial Sequence
  Sense Oligo
gaaggcaccagucagcugc

SEQ ID NO: 20994 - RNA, 19 nt, Artificial Sequence
  Antisense Oligo
gcagcugacuggugccuuc

SEQ ID NO: 20995 - RNA, 19 nt, Artificial Sequence
  Sense Oligo
cccaguggaguucuuuggu

SEQ ID NO: 20996 - RNA, 19 nt, Artificial Sequence
  Antisense Oligo
accaaagaacuccacuggg

SEQ ID NO: 20997 - RNA, 19 nt, Artificial Sequence
  Sense Oligo
ccaguggaguucuuugguu

SEQ ID NO: 20998 - RNA, 19 nt, Artificial Sequence
  Antisense Oligo
aaccaaagaacuccacugg

SEQ ID NO: 20999 - RNA, 19 nt, Artificial Sequence
  Sense Oligo
caguggaguucuuugguuc

SEQ ID NO: 21000 - RNA, 19 nt, Artificial Sequence
  Antisense Oligo
gaaccaaagaacuccacug

SEQ ID NO: 21001 - RNA, 19 nt, Artificial Sequence
  Sense Oligo
aguggaguucuuugguucc

SEQ ID NO: 21002 - RNA, 19 nt, Artificial Sequence
  Antisense Oligo
ggaaccaaagaacuccacu

SEQ ID NO: 21003 - RNA, 19 nt, Artificial Sequence
  Sense Oligo
ggaguucuuugguuccaag

SEQ ID NO: 21004 - RNA, 19 nt, Artificial Sequence
  Antisense Oligo
cuuggaaccaaagaacucc

SEQ ID NO: 21005 - RNA, 19 nt, Artificial Sequence
  Sense Oligo
gaguucuuugguuccaagc

SEQ ID NO: 21006 - RNA, 19 nt, Artificial Sequence
  Antisense Oligo
gcuuggaaccaaagaacuc

SEQ ID NO: 21007 - RNA, 19 nt, Artificial Sequence
  Sense Oligo
aguucuuugguuccaagcc

SEQ ID NO: 21008 - RNA, 19 nt, Artificial Sequence
  Antisense Oligo
ggcuuggaaccaaagaacu

SEQ ID NO: 21009 - RNA, 19 nt, Artificial Sequence
  Sense Oligo
uuccaagccagcagaagaa

SEQ ID NO: 21010 - RNA, 19 nt, Artificial Sequence
  Antisense Oligo
uucuucugcuggcuuggaa

SEQ ID NO: 21011 - RNA, 19 nt, Artificial Sequence
  Sense Oligo
uccaagccagcagaagaag

SEQ ID NO: 21012 - RNA, 19 nt, Artificial Sequence
  Antisense Oligo
cuucuucugcuggcuugga

SEQ ID NO: 21013 - RNA, 19 nt, Artificial Sequence
  Sense Oligo
agccagcagaagaaggugg

SEQ ID NO: 21014 - RNA, 19 nt, Artificial Sequence
  Antisense Oligo
ccaccuucuucugcuggcu

SEQ ID NO: 21015 - RNA, 19 nt, Artificial Sequence
  Sense Oligo
cagugugcccugaggcuuc

SEQ ID NO: 21016 - RNA, 19 nt, Artificial Sequence
  Antisense Oligo
gaagccucagggcacacug

SEQ ID NO: 21017 - RNA, 19 nt, Artificial Sequence
  Sense Oligo
agugugcccugaggcuucu

SEQ ID NO: 21018 - RNA, 19 nt, Artificial Sequence
  Antisense Oligo
agaagccucagggcacacu

SEQ ID NO: 21019 - RNA, 19 nt, Artificial Sequence
  Sense Oligo
gugugcccugaggcuucuu

SEQ ID NO: 21020 - RNA, 19 nt, Artificial Sequence
  Antisense Oligo
aagaagccucagggcacac

SEQ ID NO: 21021 - RNA, 19 nt, Artificial Sequence
  Sense Oligo
ugugcccugaggcuucuua

SEQ ID NO: 21022 - RNA, 19 nt, Artificial Sequence
  Antisense Oligo
uaagaagccucagggcaca

SEQ ID NO: 21023 - RNA, 19 nt, Artificial Sequence
  Sense Oligo
gugcccugaggcuucuuac

SEQ ID NO: 21024 - RNA, 19 nt, Artificial Sequence
  Antisense Oligo
guaagaagccucagggcac

SEQ ID NO: 21025 - RNA, 19 nt, Artificial Sequence
  Sense Oligo
ugcccugaggcuucuuacu

SEQ ID NO: 21026 - RNA, 19 nt, Artificial Sequence
  Antisense Oligo
aguaagaagccucagggca

SEQ ID NO: 21027 - RNA, 19 nt, Artificial Sequence
  Sense Oligo
cucucacccuggaugcaag

SEQ ID NO: 21028 - RNA, 19 nt, Artificial Sequence
  Antisense Oligo
cuugcauccagggugagag

SEQ ID NO: 21029 - RNA, 19 nt, Artificial Sequence
  Sense Oligo
ucucacccuggaugcaaga

SEQ ID NO: 21030 - RNA, 19 nt, Artificial Sequence
  Antisense Oligo
ucuugcauccagggugaga

SEQ ID NO: 21031 - RNA, 19 nt, Artificial Sequence
  Sense Oligo
cucacccuggaugcaagaa

SEQ ID NO: 21032 - RNA, 19 nt, Artificial Sequence
  Antisense Oligo
uucuugcauccagggugag

SEQ ID NO: 21033 - RNA, 19 nt, Artificial Sequence
  Sense Oligo
ucacccuggaugcaagaag

SEQ ID NO: 21034 - RNA, 19 nt, Artificial Sequence
  Antisense Oligo
cuucuugcauccaggguga

SEQ ID NO: 21035 - RNA, 19 nt, Artificial Sequence
  Sense Oligo
cacccuggaugcaagaagu

SEQ ID NO: 21036 - RNA, 19 nt, Artificial Sequence
  Antisense Oligo
acuucuugcauccagggug

SEQ ID NO: 21037 - RNA, 19 nt, Artificial Sequence
  Sense Oligo
acccuggaugcaagaagug

SEQ ID NO: 21038 - RNA, 19 nt, Artificial Sequence
  Antisense Oligo
cacuucuugcauccagggu

SEQ ID NO: 21039 - RNA, 19 nt, Artificial Sequence
  Sense Oligo
cccuggaugcaagaaguga

SEQ ID NO: 21040 - RNA, 19 nt, Artificial Sequence
  Antisense Oligo
ucacuucuugcauccaggg

SEQ ID NO: 21041 - RNA, 19 nt, Artificial Sequence
  Sense Oligo
ugaguccuggccuuggucu

SEQ ID NO: 21042 - RNA, 19 nt, Artificial Sequence
  Antisense Oligo
agaccaaggccaggacuca

SEQ ID NO: 21043 - RNA, 19 nt, Artificial Sequence
  Sense Oligo
gaguccuggccuuggucug

SEQ ID NO: 21044 - RNA, 19 nt, Artificial Sequence
  Antisense Oligo
cagaccaaggccaggacuc

SEQ ID NO: 21045 - RNA, 19 nt, Artificial Sequence
  Sense Oligo
aguccuggccuuggucugg

SEQ ID NO: 21046 - RNA, 19 nt, Artificial Sequence
  Antisense Oligo
ccagaccaaggccaggacu

SEQ ID NO: 21047 - RNA, 19 nt, Artificial Sequence
  Sense Oligo
guccuggccuuggucuggu

SEQ ID NO: 21048 - RNA, 19 nt, Artificial Sequence
  Antisense Oligo
accagaccaaggccaggac

SEQ ID NO: 21049 - RNA, 19 nt, Artificial Sequence
  Sense Oligo
uccuggccuuggucugguu

SEQ ID NO: 21050 - RNA, 19 nt, Artificial Sequence
  Antisense Oligo
aaccagaccaaggccagga

SEQ ID NO: 21051 - RNA, 19 nt, Artificial Sequence
  Sense Oligo
ccuggccuuggucugguuu

SEQ ID NO: 21052 - RNA, 19 nt, Artificial Sequence
  Antisense Oligo
aaaccagaccaaggccagg

SEQ ID NO: 21053 - RNA, 19 nt, Artificial Sequence
  Sense Oligo
gccuuggucugguuugaug

SEQ ID NO: 21054 - RNA, 19 nt, Artificial Sequence
  Antisense Oligo
caucaaaccagaccaaggc

SEQ ID NO: 21055 - RNA, 19 nt, Artificial Sequence
  Sense Oligo
ccuuggucugguuugaugc

SEQ ID NO: 21056 - RNA, 19 nt, Artificial Sequence
  Antisense Oligo
gcaucaaaccagaccaagg

SEQ ID NO: 21057 - RNA, 19 nt, Artificial Sequence
  Sense Oligo
cuuggucugguuugaugcc

SEQ ID NO: 21058 - RNA, 19 nt, Artificial Sequence
  Antisense Oligo
ggcaucaaaccagaccaag

SEQ ID NO: 21059 - RNA, 19 nt, Artificial Sequence
  Sense Oligo
uuggucugguuugaugcca

SEQ ID NO: 21060 - RNA, 19 nt, Artificial Sequence
  Antisense Oligo
uggcaucaaaccagaccaa

SEQ ID NO: 21061 - RNA, 19 nt, Artificial Sequence
  Sense Oligo
ucugguuugaugccaucca

SEQ ID NO: 21062 - RNA, 19 nt, Artificial Sequence
  Antisense Oligo
uggauggcaucaaaccaga

SEQ ID NO: 21063 - RNA, 19 nt, Artificial Sequence
  Sense Oligo
cugguuugaugccauccac

SEQ ID NO: 21064 - RNA, 19 nt, Artificial Sequence
  Antisense Oligo
guggauggcaucaaaccag

SEQ ID NO: 21065 - RNA, 19 nt, Artificial Sequence
  Sense Oligo
ugguuugaugccauccacc

SEQ ID NO: 21066 - RNA, 19 nt, Artificial Sequence
  Antisense Oligo
gguggauggcaucaaacca

SEQ ID NO: 21067 - RNA, 19 nt, Artificial Sequence
  Sense Oligo
gguuugaugccauccaccg

SEQ ID NO: 21068 - RNA, 19 nt, Artificial Sequence
  Antisense Oligo
cgguggauggcaucaaacc

SEQ ID NO: 21069 - RNA, 19 nt, Artificial Sequence
  Sense Oligo
guuugaugccauccaccgc

SEQ ID NO: 21070 - RNA, 19 nt, Artificial Sequence
  Antisense Oligo
gcgguggauggcaucaaac

SEQ ID NO: 21071 - RNA, 19 nt, Artificial Sequence
  Sense Oligo
uuugaugccauccaccgca

SEQ ID NO: 21072 - RNA, 19 nt, Artificial Sequence
  Antisense Oligo
ugcgguggauggcaucaaa

SEQ ID NO: 21073 - RNA, 19 nt, Artificial Sequence
  Sense Oligo
uugaugccauccaccgcag

SEQ ID NO: 21074 - RNA, 19 nt, Artificial Sequence
  Antisense Oligo
cugcgguggauggcaucaa

SEQ ID NO: 21075 - RNA, 19 nt, Artificial Sequence
  Sense Oligo
ugaugccauccaccgcaga

SEQ ID NO: 21076 - RNA, 19 nt, Artificial Sequence
  Antisense Oligo
ucugcgguggauggcauca

SEQ ID NO: 21077 - RNA, 19 nt, Artificial Sequence
  Sense Oligo
gaugccauccaccgcagag

SEQ ID NO: 21078 - RNA, 19 nt, Artificial Sequence
  Antisense Oligo
cucugcgguggauggcauc

SEQ ID NO: 21079 - RNA, 19 nt, Artificial Sequence
  Sense Oligo
augccauccaccgcagagg

SEQ ID NO: 21080 - RNA, 19 nt, Artificial Sequence
  Antisense Oligo
ccucugcgguggauggcau

SEQ ID NO: 21081 - RNA, 19 nt, Artificial Sequence
  Sense Oligo
cauccaccgcagaggcugu

SEQ ID NO: 21082 - RNA, 19 nt, Artificial Sequence
  Antisense Oligo
acagccucugcgguggaug

SEQ ID NO: 21083 - RNA, 19 nt, Artificial Sequence
  Sense Oligo
auccaccgcagaggcuguu

SEQ ID NO: 21084 - RNA, 19 nt, Artificial Sequence
  Antisense Oligo
aacagccucugcgguggau

SEQ ID NO: 21085 - RNA, 19 nt, Artificial Sequence
  Sense Oligo
uccaccgcagaggcuguuc

SEQ ID NO: 21086 - RNA, 19 nt, Artificial Sequence
  Antisense Oligo
gaacagccucugcggugga

SEQ ID NO: 21087 - RNA, 19 nt, Artificial Sequence
  Sense Oligo
ccaccgcagaggcuguucu

SEQ ID NO: 21088 - RNA, 19 nt, Artificial Sequence
  Antisense Oligo
agaacagccucugcggugg

SEQ ID NO: 21089 - RNA, 19 nt, Artificial Sequence
  Sense Oligo
gcuguucugagggcaggug

SEQ ID NO: 21090 - RNA, 19 nt, Artificial Sequence
  Antisense Oligo
caccugcccucagaacagc

SEQ ID NO: 21091 - RNA, 19 nt, Artificial Sequence
  Sense Oligo
cuguucugagggcaggugg

SEQ ID NO: 21092 - RNA, 19 nt, Artificial Sequence
  Antisense Oligo
ccaccugcccucagaacag

SEQ ID NO: 21093 - RNA, 19 nt, Artificial Sequence
  Sense Oligo
uguucugagggcagguggu

SEQ ID NO: 21094 - RNA, 19 nt, Artificial Sequence
  Antisense Oligo
accaccugcccucagaaca

SEQ ID NO: 21095 - RNA, 19 nt, Artificial Sequence
  Sense Oligo
guucugagggcaggugguc

SEQ ID NO: 21096 - RNA, 19 nt, Artificial Sequence
  Antisense Oligo
gaccaccugcccucagaac

SEQ ID NO: 21097 - RNA, 19 nt, Artificial Sequence
  Sense Oligo
ugagggcagguggucagug

SEQ ID NO: 21098 - RNA, 19 nt, Artificial Sequence
  Antisense Oligo
cacugaccaccugcccuca

SEQ ID NO: 21099 - RNA, 19 nt, Artificial Sequence
  Sense Oligo
agggcagguggucagugca

SEQ ID NO: 21100 - RNA, 19 nt, Artificial Sequence
  Antisense Oligo
ugcacugaccaccugcccu

SEQ ID NO: 21101 - RNA, 19 nt, Artificial Sequence
  Sense Oligo
cagguggucagugcagagu

SEQ ID NO: 21102 - RNA, 19 nt, Artificial Sequence
  Antisense Oligo
acucugcacugaccaccug

SEQ ID NO: 21103 - RNA, 19 nt, Artificial Sequence
  Sense Oligo
agguggucagugcagagug

SEQ ID NO: 21104 - RNA, 19 nt, Artificial Sequence
  Antisense Oligo
cacucugcacugaccaccu

SEQ ID NO: 21105 - RNA, 19 nt, Artificial Sequence
  Sense Oligo
gguggucagugcagagugg

SEQ ID NO: 21106 - RNA, 19 nt, Artificial Sequence
  Antisense Oligo
ccacucugcacugaccacc

SEQ ID NO: 21107 - RNA, 19 nt, Artificial Sequence
  Sense Oligo
cgcgcuuuguggauggcag

SEQ ID NO: 21108 - RNA, 19 nt, Artificial Sequence
  Antisense Oligo
cugccauccacaaagcgcg

SEQ ID NO: 21109 - RNA, 19 nt, Artificial Sequence
  Sense Oligo
gcgcuuuguggauggcagc

SEQ ID NO: 21110 - RNA, 19 nt, Artificial Sequence
  Antisense Oligo
gcugccauccacaaagcgc

SEQ ID NO: 21111 - RNA, 19 nt, Artificial Sequence
  Sense Oligo
gggcaggugcuuuaguccc

SEQ ID NO: 21112 - RNA, 19 nt, Artificial Sequence
  Antisense Oligo
gggacuaaagcaccugccc

SEQ ID NO: 21113 - RNA, 19 nt, Artificial Sequence
  Sense Oligo
cccuuaagaggaugaggag

SEQ ID NO: 21114 - RNA, 19 nt, Artificial Sequence
  Antisense Oligo
cuccucauccucuuaaggg

SEQ ID NO: 21115 - RNA, 19 nt, Artificial Sequence
  Sense Oligo
ccuuaagaggaugaggagg

SEQ ID NO: 21116 - RNA, 19 nt, Artificial Sequence
  Antisense Oligo
ccuccucauccucuuaagg

SEQ ID NO: 21117 - RNA, 19 nt, Artificial Sequence
  Sense Oligo
gaggaugaggagggugagg

SEQ ID NO: 21118 - RNA, 19 nt, Artificial Sequence
  Antisense Oligo
ccucacccuccucauccuc

SEQ ID NO: 21119 - RNA, 19 nt, Artificial Sequence
  Sense Oligo
aggaugaggagggugaggc

SEQ ID NO: 21120 - RNA, 19 nt, Artificial Sequence
  Antisense Oligo
gccucacccuccucauccu

SEQ ID NO: 21121 - RNA, 19 nt, Artificial Sequence
  Sense Oligo
ggaugaggagggugaggca

SEQ ID NO: 21122 - RNA, 19 nt, Artificial Sequence
  Antisense Oligo
ugccucacccuccucaucc

SEQ ID NO: 21123 - RNA, 19 nt, Artificial Sequence
  Sense Oligo
cacccagcccaacccaugu

SEQ ID NO: 21124 - RNA, 19 nt, Artificial Sequence
  Antisense Oligo
acauggguugggcugggug

SEQ ID NO: 21125 - RNA, 19 nt, Artificial Sequence
  Sense Oligo
acccagcccaacccauguu

SEQ ID NO: 21126 - RNA, 19 nt, Artificial Sequence
  Antisense Oligo
aacauggguugggcugggu

SEQ ID NO: 21127 - RNA, 19 nt, Artificial Sequence
  Sense Oligo
cccagcccaacccauguuc

SEQ ID NO: 21128 - RNA, 19 nt, Artificial Sequence
  Antisense Oligo
gaacauggguugggcuggg

SEQ ID NO: 21129 - RNA, 19 nt, Artificial Sequence
  Sense Oligo
ccagcccaacccauguucu

SEQ ID NO: 21130 - RNA, 19 nt, Artificial Sequence
  Antisense Oligo
agaacauggguugggcugg

SEQ ID NO: 21131 - RNA, 19 nt, Artificial Sequence
  Sense Oligo
ucucagcagcagggauggu

SEQ ID NO: 21132 - RNA, 19 nt, Artificial Sequence
  Antisense Oligo
accaucccugcugcugaga

SEQ ID NO: 21133 - RNA, 19 nt, Artificial Sequence
  Sense Oligo
cucagcagcagggaugguu

SEQ ID NO: 21134 - RNA, 19 nt, Artificial Sequence
  Antisense Oligo
aaccaucccugcugcugag

SEQ ID NO: 21135 - RNA, 19 nt, Artificial Sequence
  Sense Oligo
ucagcagcagggaugguuc

SEQ ID NO: 21136 - RNA, 19 nt, Artificial Sequence
  Antisense Oligo
gaaccaucccugcugcuga

SEQ ID NO: 21137 - RNA, 19 nt, Artificial Sequence
  Sense Oligo
cagcagcagggaugguucu

SEQ ID NO: 21138 - RNA, 19 nt, Artificial Sequence
  Antisense Oligo
agaaccaucccugcugcug

SEQ ID NO: 21139 - RNA, 19 nt, Artificial Sequence
  Sense Oligo
agcagcagggaugguucua

SEQ ID NO: 21140 - RNA, 19 nt, Artificial Sequence
  Antisense Oligo
uagaaccaucccugcugcu

SEQ ID NO: 21141 - RNA, 19 nt, Artificial Sequence
  Sense Oligo
gcagcagggaugguucuag

SEQ ID NO: 21142 - RNA, 19 nt, Artificial Sequence
  Antisense Oligo
cuagaaccaucccugcugc

SEQ ID NO: 21143 - RNA, 19 nt, Artificial Sequence
  Sense Oligo
cagcagggaugguucuagg

SEQ ID NO: 21144 - RNA, 19 nt, Artificial Sequence
  Antisense Oligo
ccuagaaccaucccugcug

SEQ ID NO: 21145 - RNA, 19 nt, Artificial Sequence
  Sense Oligo
agcagggaugguucuaggc

SEQ ID NO: 21146 - RNA, 19 nt, Artificial Sequence
  Antisense Oligo
gccuagaaccaucccugcu

SEQ ID NO: 21147 - RNA, 19 nt, Artificial Sequence
  Sense Oligo
gcagggaugguucuaggcu

SEQ ID NO: 21148 - RNA, 19 nt, Artificial Sequence
  Antisense Oligo
agccuagaaccaucccugc

SEQ ID NO: 21149 - RNA, 19 nt, Artificial Sequence
  Sense Oligo
cagggaugguucuaggcug

SEQ ID NO: 21150 - RNA, 19 nt, Artificial Sequence
  Antisense Oligo
cagccuagaaccaucccug

SEQ ID NO: 21151 - RNA, 19 nt, Artificial Sequence
  Sense Oligo
agggaugguucuaggcugg

SEQ ID NO: 21152 - RNA, 19 nt, Artificial Sequence
  Antisense Oligo
ccagccuagaaccaucccu

SEQ ID NO: 21153 - RNA, 19 nt, Artificial Sequence
  Sense Oligo
gggaugguucuaggcuggc

SEQ ID NO: 21154 - RNA, 19 nt, Artificial Sequence
  Antisense Oligo
gccagccuagaaccauccc

SEQ ID NO: 21155 - RNA, 19 nt, Artificial Sequence
  Sense Oligo
ggaugguucuaggcuggcu

SEQ ID NO: 21156 - RNA, 19 nt, Artificial Sequence
  Antisense Oligo
agccagccuagaaccaucc

SEQ ID NO: 21157 - RNA, 19 nt, Artificial Sequence
  Sense Oligo
gaugguucuaggcuggcug

SEQ ID NO: 21158 - RNA, 19 nt, Artificial Sequence
  Antisense Oligo
cagccagccuagaaccauc

SEQ ID NO: 21159 - RNA, 19 nt, Artificial Sequence
  Sense Oligo
augguucuaggcuggcuga

SEQ ID NO: 21160 - RNA, 19 nt, Artificial Sequence
  Antisense Oligo
ucagccagccuagaaccau

SEQ ID NO: 21161 - RNA, 19 nt, Artificial Sequence
  Sense Oligo
ugguucuaggcuggcugaa

SEQ ID NO: 21162 - RNA, 19 nt, Artificial Sequence
  Antisense Oligo
uucagccagccuagaacca

SEQ ID NO: 21163 - RNA, 19 nt, Artificial Sequence
  Sense Oligo
uaggcuggcugaaugaggg

SEQ ID NO: 21164 - RNA, 19 nt, Artificial Sequence
  Antisense Oligo
cccucauucagccagccua

SEQ ID NO: 21165 - RNA, 19 nt, Artificial Sequence
  Sense Oligo
gcuggcugaaugagggacc

SEQ ID NO: 21166 - RNA, 19 nt, Artificial Sequence
  Antisense Oligo
ggucccucauucagccagc

SEQ ID NO: 21167 - RNA, 19 nt, Artificial Sequence
  Sense Oligo
cuggcugaaugagggacca

SEQ ID NO: 21168 - RNA, 19 nt, Artificial Sequence
  Antisense Oligo
uggucccucauucagccag

SEQ ID NO: 21169 - RNA, 19 nt, Artificial Sequence
  Sense Oligo
cugaaugagggaccagggc

SEQ ID NO: 21170 - RNA, 19 nt, Artificial Sequence
  Antisense Oligo
gcccuggucccucauucag

SEQ ID NO: 21171 - RNA, 19 nt, Artificial Sequence
  Sense Oligo
cuugggcugugcuccuguu

SEQ ID NO: 21172 - RNA, 19 nt, Artificial Sequence
  Antisense Oligo
aacaggagcacagcccaag

SEQ ID NO: 21173 - RNA, 19 nt, Artificial Sequence
  Sense Oligo
uugggcugugcuccuguug

SEQ ID NO: 21174 - RNA, 19 nt, Artificial Sequence
  Antisense Oligo
caacaggagcacagcccaa

SEQ ID NO: 21175 - RNA, 19 nt, Artificial Sequence
  Sense Oligo
ugggcugugcuccuguugg

SEQ ID NO: 21176 - RNA, 19 nt, Artificial Sequence
  Antisense Oligo
ccaacaggagcacagccca

SEQ ID NO: 21177 - RNA, 19 nt, Artificial Sequence
  Sense Oligo
ggcugugcuccuguugggu

SEQ ID NO: 21178 - RNA, 19 nt, Artificial Sequence
  Antisense Oligo
acccaacaggagcacagcc

SEQ ID NO: 21179 - RNA, 19 nt, Artificial Sequence
  Sense Oligo
gcugugcuccuguuggguu

SEQ ID NO: 21180 - RNA, 19 nt, Artificial Sequence
  Antisense Oligo
aacccaacaggagcacagc

SEQ ID NO: 21181 - RNA, 19 nt, Artificial Sequence
  Sense Oligo
cugugcuccuguuggguuu

SEQ ID NO: 21182 - RNA, 19 nt, Artificial Sequence
  Antisense Oligo
aaacccaacaggagcacag

SEQ ID NO: 21183 - RNA, 19 nt, Artificial Sequence
  Sense Oligo
ugugcuccuguuggguuuc

SEQ ID NO: 21184 - RNA, 19 nt, Artificial Sequence
  Antisense Oligo
gaaacccaacaggagcaca

SEQ ID NO: 21185 - RNA, 19 nt, Artificial Sequence
  Sense Oligo
gugcuccuguuggguuucc

SEQ ID NO: 21186 - RNA, 19 nt, Artificial Sequence
  Antisense Oligo
ggaaacccaacaggagcac

SEQ ID NO: 21187 - RNA, 19 nt, Artificial Sequence
  Sense Oligo
ugcuccuguuggguuucca

SEQ ID NO: 21188 - RNA, 19 nt, Artificial Sequence
  Antisense Oligo
uggaaacccaacaggagca

SEQ ID NO: 21189 - RNA, 19 nt, Artificial Sequence
  Sense Oligo
gcuccuguuggguuuccau

SEQ ID NO: 21190 - RNA, 19 nt, Artificial Sequence
  Antisense Oligo
auggaaacccaacaggagc

SEQ ID NO: 21191 - RNA, 19 nt, Artificial Sequence
  Sense Oligo
uccuguuggguuuccauua

SEQ ID NO: 21192 - RNA, 19 nt, Artificial Sequence
  Antisense Oligo
uaauggaaacccaacagga

SEQ ID NO: 21193 - RNA, 19 nt, Artificial Sequence
  Sense Oligo
ccuguuggguuuccauuaa

SEQ ID NO: 21194 - RNA, 19 nt, Artificial Sequence
  Antisense Oligo
uuaauggaaacccaacagg

SEQ ID NO: 21195 - RNA, 19 nt, Artificial Sequence
  Sense Oligo
cuguuggguuuccauuaac

SEQ ID NO: 21196 - RNA, 19 nt, Artificial Sequence
  Antisense Oligo
guuaauggaaacccaacag

SEQ ID NO: 21197 - RNA, 19 nt, Artificial Sequence
  Sense Oligo
gcugugauuucacuuucgc

SEQ ID NO: 21198 - RNA, 19 nt, Artificial Sequence
  Antisense Oligo
gcgaaagugaaaucacagc

SEQ ID NO: 21199 - RNA, 19 nt, Artificial Sequence
  Sense Oligo
cugugauuucacuuucgca

SEQ ID NO: 21200 - RNA, 19 nt, Artificial Sequence
  Antisense Oligo
ugcgaaagugaaaucacag

SEQ ID NO: 21201 - RNA, 19 nt, Artificial Sequence
  Sense Oligo
ugugauuucacuuucgcag

SEQ ID NO: 21202 - RNA, 19 nt, Artificial Sequence
  Antisense Oligo
cugcgaaagugaaaucaca

SEQ ID NO: 21203 - RNA, 19 nt, Artificial Sequence
  Sense Oligo
gugauuucacuuucgcaga

SEQ ID NO: 21204 - RNA, 19 nt, Artificial Sequence
  Antisense Oligo
ucugcgaaagugaaaucac

SEQ ID NO: 21205 - RNA, 19 nt, Artificial Sequence
  Sense Oligo
aacugaagccguggucacg

SEQ ID NO: 21206 - RNA, 19 nt, Artificial Sequence
  Antisense Oligo
cgugaccacggcuucaguu

SEQ ID NO: 21207 - RNA, 19 nt, Artificial Sequence
  Sense Oligo
acugaagccguggucacgu

SEQ ID NO: 21208 - RNA, 19 nt, Artificial Sequence
  Antisense Oligo
acgugaccacggcuucagu

SEQ ID NO: 21209 - RNA, 19 nt, Artificial Sequence
  Sense Oligo
cugaagccguggucacgug

SEQ ID NO: 21210 - RNA, 19 nt, Artificial Sequence
  Antisense Oligo
cacgugaccacggcuucag

SEQ ID NO: 21211 - RNA, 19 nt, Artificial Sequence
  Sense Oligo
ugaagccguggucacguga

SEQ ID NO: 21212 - RNA, 19 nt, Artificial Sequence
  Antisense Oligo
ucacgugaccacggcuuca

SEQ ID NO: 21213 - RNA, 19 nt, Artificial Sequence
  Sense Oligo
gaagccguggucacgugac

SEQ ID NO: 21214 - RNA, 19 nt, Artificial Sequence
  Antisense Oligo
gucacgugaccacggcuuc

SEQ ID NO: 21215 - RNA, 19 nt, Artificial Sequence
  Sense Oligo
aagccguggucacgugaca

SEQ ID NO: 21216 - RNA, 19 nt, Artificial Sequence
  Antisense Oligo
ugucacgugaccacggcuu

SEQ ID NO: 21217 - RNA, 19 nt, Artificial Sequence
  Sense Oligo
agccguggucacgugacag

SEQ ID NO: 21218 - RNA, 19 nt, Artificial Sequence
  Antisense Oligo
cugucacgugaccacggcu

SEQ ID NO: 21219 - RNA, 19 nt, Artificial Sequence
  Sense Oligo
guggucacgugacaggaca

SEQ ID NO: 21220 - RNA, 19 nt, Artificial Sequence
  Antisense Oligo
uguccugucacgugaccac

SEQ ID NO: 21221 - RNA, 19 nt, Artificial Sequence
  Sense Oligo
uggucacgugacaggacau

SEQ ID NO: 21222 - RNA, 19 nt, Artificial Sequence
  Antisense Oligo
auguccugucacgugacca

SEQ ID NO: 21223 - RNA, 19 nt, Artificial Sequence
  Sense Oligo
ggucacgugacaggacaug

SEQ ID NO: 21224 - RNA, 19 nt, Artificial Sequence
  Antisense Oligo
cauguccugucacgugacc

SEQ ID NO: 21225 - RNA, 19 nt, Artificial Sequence
  Sense Oligo
gucacgugacaggacaugu

SEQ ID NO: 21226 - RNA, 19 nt, Artificial Sequence
  Antisense Oligo
acauguccugucacgugac

SEQ ID NO: 21227 - RNA, 19 nt, Artificial Sequence
  Sense Oligo
ucacgugacaggacaugua

SEQ ID NO: 21228 - RNA, 19 nt, Artificial Sequence
  Antisense Oligo
uacauguccugucacguga

SEQ ID NO: 21229 - RNA, 19 nt, Artificial Sequence
  Sense Oligo
cacgugacaggacauguag

SEQ ID NO: 21230 - RNA, 19 nt, Artificial Sequence
  Antisense Oligo
cuacauguccugucacgug

SEQ ID NO: 21231 - RNA, 19 nt, Artificial Sequence
  Sense Oligo
acgugacaggacauguagu

SEQ ID NO: 21232 - RNA, 19 nt, Artificial Sequence
  Antisense Oligo
acuacauguccugucacgu

SEQ ID NO: 21233 - RNA, 19 nt, Artificial Sequence
  Sense Oligo
cgugacaggacauguagua

SEQ ID NO: 21234 - RNA, 19 nt, Artificial Sequence
  Antisense Oligo
uacuacauguccugucacg

SEQ ID NO: 21235 - RNA, 19 nt, Artificial Sequence
  Sense Oligo
gugacaggacauguaguau

SEQ ID NO: 21236 - RNA, 19 nt, Artificial Sequence
  Antisense Oligo
auacuacauguccugucac

SEQ ID NO: 21237 - RNA, 19 nt, Artificial Sequence
  Sense Oligo
acaggacauguaguauaua

SEQ ID NO: 21238 - RNA, 19 nt, Artificial Sequence
  Antisense Oligo
uauauacuacauguccugu

SEQ ID NO: 21239 - RNA, 19 nt, Artificial Sequence
  Sense Oligo
aggacauguaguauauagc

SEQ ID NO: 21240 - RNA, 19 nt, Artificial Sequence
  Antisense Oligo
gcuauauacuacauguccu

SEQ ID NO: 21241 - RNA, 19 nt, Artificial Sequence
  Sense Oligo
ggacauguaguauauagca

SEQ ID NO: 21242 - RNA, 19 nt, Artificial Sequence
  Antisense Oligo
ugcuauauacuacaugucc

SEQ ID NO: 21243 - RNA, 19 nt, Artificial Sequence
  Sense Oligo
gacauguaguauauagcag

SEQ ID NO: 21244 - RNA, 19 nt, Artificial Sequence
  Antisense Oligo
cugcuauauacuacauguc

SEQ ID NO: 21245 - RNA, 19 nt, Artificial Sequence
  Sense Oligo
uguaguauauagcaggcug

SEQ ID NO: 21246 - RNA, 19 nt, Artificial Sequence
  Antisense Oligo
cagccugcuauauacuaca

SEQ ID NO: 21247 - RNA, 19 nt, Artificial Sequence
  Sense Oligo
guaguauauagcaggcugc

SEQ ID NO: 21248 - RNA, 19 nt, Artificial Sequence
  Antisense Oligo
gcagccugcuauauacuac

SEQ ID NO: 21249 - RNA, 19 nt, Artificial Sequence
  Sense Oligo
uaguauauagcaggcugcc

SEQ ID NO: 21250 - RNA, 19 nt, Artificial Sequence
  Antisense Oligo
ggcagccugcuauauacua

SEQ ID NO: 21251 - RNA, 19 nt, Artificial Sequence
  Sense Oligo
aguauauagcaggcugcca

SEQ ID NO: 21252 - RNA, 19 nt, Artificial Sequence
  Antisense Oligo
uggcagccugcuauauacu

SEQ ID NO: 21253 - RNA, 19 nt, Artificial Sequence
  Sense Oligo
guauauagcaggcugccag

SEQ ID NO: 21254 - RNA, 19 nt, Artificial Sequence
  Antisense Oligo
cuggcagccugcuauauac

SEQ ID NO: 21255 - RNA, 19 nt, Artificial Sequence
  Sense Oligo
uauauagcaggcugccagc

SEQ ID NO: 21256 - RNA, 19 nt, Artificial Sequence
  Antisense Oligo
gcuggcagccugcuauaua

SEQ ID NO: 21257 - RNA, 19 nt, Artificial Sequence
  Sense Oligo
auauagcaggcugccagcg

SEQ ID NO: 21258 - RNA, 19 nt, Artificial Sequence
  Antisense Oligo
cgcuggcagccugcuauau

SEQ ID NO: 21259 - RNA, 19 nt, Artificial Sequence
  Sense Oligo
uauagcaggcugccagcga

SEQ ID NO: 21260 - RNA, 19 nt, Artificial Sequence
  Antisense Oligo
ucgcuggcagccugcuaua

SEQ ID NO: 21261 - RNA, 19 nt, Artificial Sequence
  Sense Oligo
auagcaggcugccagcgac

SEQ ID NO: 21262 - RNA, 19 nt, Artificial Sequence
  Antisense Oligo
gucgcuggcagccugcuau

SEQ ID NO: 21263 - RNA, 19 nt, Artificial Sequence
  Sense Oligo
uagcaggcugccagcgacu

SEQ ID NO: 21264 - RNA, 19 nt, Artificial Sequence
  Antisense Oligo
agucgcuggcagccugcua

SEQ ID NO: 21265 - RNA, 19 nt, Artificial Sequence
  Sense Oligo
ugccagcgacuccugcucu

SEQ ID NO: 21266 - RNA, 19 nt, Artificial Sequence
  Antisense Oligo
agagcaggagucgcuggca

SEQ ID NO: 21267 - RNA, 19 nt, Artificial Sequence
  Sense Oligo
gccagcgacuccugcucuu

SEQ ID NO: 21268 - RNA, 19 nt, Artificial Sequence
  Antisense Oligo
aagagcaggagucgcuggc

SEQ ID NO: 21269 - RNA, 19 nt, Artificial Sequence
  Sense Oligo
gcgacuccugcucuugcuu

SEQ ID NO: 21270 - RNA, 19 nt, Artificial Sequence
  Antisense Oligo
aagcaagagcaggagucgc

SEQ ID NO: 21271 - RNA, 19 nt, Artificial Sequence
  Sense Oligo
cgacuccugcucuugcuuc

SEQ ID NO: 21272 - RNA, 19 nt, Artificial Sequence
  Antisense Oligo
gaagcaagagcaggagucg

SEQ ID NO: 21273 - RNA, 19 nt, Artificial Sequence
  Sense Oligo
gacuccugcucuugcuucu

SEQ ID NO: 21274 - RNA, 19 nt, Artificial Sequence
  Antisense Oligo
agaagcaagagcaggaguc

SEQ ID NO: 21275 - RNA, 19 nt, Artificial Sequence
  Sense Oligo
acuccugcucuugcuucug

SEQ ID NO: 21276 - RNA, 19 nt, Artificial Sequence
  Antisense Oligo
cagaagcaagagcaggagu

SEQ ID NO: 21277 - RNA, 19 nt, Artificial Sequence
  Sense Oligo
uccugcucuugcuucugga

SEQ ID NO: 21278 - RNA, 19 nt, Artificial Sequence
  Antisense Oligo
uccagaagcaagagcagga

SEQ ID NO: 21279 - RNA, 19 nt, Artificial Sequence
  Sense Oligo
gcucuugcuucuggaucug

SEQ ID NO: 21280 - RNA, 19 nt, Artificial Sequence
  Antisense Oligo
cagauccagaagcaagagc

SEQ ID NO: 21281 - RNA, 19 nt, Artificial Sequence
  Sense Oligo
cucuugcuucuggaucugc

SEQ ID NO: 21282 - RNA, 19 nt, Artificial Sequence
  Antisense Oligo
gcagauccagaagcaagag

SEQ ID NO: 21283 - RNA, 19 nt, Artificial Sequence
  Sense Oligo
ucuugcuucuggaucugca

SEQ ID NO: 21284 - RNA, 19 nt, Artificial Sequence
  Antisense Oligo
ugcagauccagaagcaaga

SEQ ID NO: 21285 - RNA, 19 nt, Artificial Sequence
  Sense Oligo
gcuucuggaucugcagggc

SEQ ID NO: 21286 - RNA, 19 nt, Artificial Sequence
  Antisense Oligo
gcccugcagauccagaagc

SEQ ID NO: 21287 - RNA, 19 nt, Artificial Sequence
  Sense Oligo
ucccagcaggacccaugga

SEQ ID NO: 21288 - RNA, 19 nt, Artificial Sequence
  Antisense Oligo
uccauggguccugcuggga

SEQ ID NO: 21289 - RNA, 19 nt, Artificial Sequence
  Sense Oligo
gcaggacccauggaguguc

SEQ ID NO: 21290 - RNA, 19 nt, Artificial Sequence
  Antisense Oligo
gacacuccauggguccugc

SEQ ID NO: 21291 - RNA, 19 nt, Artificial Sequence
  Sense Oligo
gacccauggaguguccuuc

SEQ ID NO: 21292 - RNA, 19 nt, Artificial Sequence
  Antisense Oligo
gaaggacacuccauggguc

SEQ ID NO: 21293 - RNA, 19 nt, Artificial Sequence
  Sense Oligo
acccauggaguguccuucg

SEQ ID NO: 21294 - RNA, 19 nt, Artificial Sequence
  Antisense Oligo
cgaaggacacuccaugggu

SEQ ID NO: 21295 - RNA, 19 nt, Artificial Sequence
  Sense Oligo
cccauggaguguccuucgu

SEQ ID NO: 21296 - RNA, 19 nt, Artificial Sequence
  Antisense Oligo
acgaaggacacuccauggg

SEQ ID NO: 21297 - RNA, 19 nt, Artificial Sequence
  Sense Oligo
ccauggaguguccuucgug

SEQ ID NO: 21298 - RNA, 19 nt, Artificial Sequence
  Antisense Oligo
cacgaaggacacuccaugg

SEQ ID NO: 21299 - RNA, 19 nt, Artificial Sequence
  Sense Oligo
cauggaguguccuucgugc

SEQ ID NO: 21300 - RNA, 19 nt, Artificial Sequence
  Antisense Oligo
gcacgaaggacacuccaug

SEQ ID NO: 21301 - RNA, 19 nt, Artificial Sequence
  Sense Oligo
auggaguguccuucgugcc

SEQ ID NO: 21302 - RNA, 19 nt, Artificial Sequence
  Antisense Oligo
ggcacgaaggacacuccau

SEQ ID NO: 21303 - RNA, 19 nt, Artificial Sequence
  Sense Oligo
uggaguguccuucgugcca

SEQ ID NO: 21304 - RNA, 19 nt, Artificial Sequence
  Antisense Oligo
uggcacgaaggacacucca

SEQ ID NO: 21305 - RNA, 19 nt, Artificial Sequence
  Sense Oligo
ggaguguccuucgugccag

SEQ ID NO: 21306 - RNA, 19 nt, Artificial Sequence
  Antisense Oligo
cuggcacgaaggacacucc

SEQ ID NO: 21307 - RNA, 19 nt, Artificial Sequence
  Sense Oligo
gaguguccuucgugccagc

SEQ ID NO: 21308 - RNA, 19 nt, Artificial Sequence
  Antisense Oligo
gcuggcacgaaggacacuc

SEQ ID NO: 21309 - RNA, 19 nt, Artificial Sequence
  Sense Oligo
aguguccuucgugccagca

SEQ ID NO: 21310 - RNA, 19 nt, Artificial Sequence
  Antisense Oligo
ugcuggcacgaaggacacu

SEQ ID NO: 21311 - RNA, 19 nt, Artificial Sequence
  Sense Oligo
guguccuucgugccagcau

SEQ ID NO: 21312 - RNA, 19 nt, Artificial Sequence
  Antisense Oligo
augcuggcacgaaggacac

SEQ ID NO: 21313 - RNA, 19 nt, Artificial Sequence
  Sense Oligo
uguccuucgugccagcaug

SEQ ID NO: 21314 - RNA, 19 nt, Artificial Sequence
  Antisense Oligo
caugcuggcacgaaggaca

SEQ ID NO: 21315 - RNA, 19 nt, Artificial Sequence
  Sense Oligo
guccuucgugccagcaugu

SEQ ID NO: 21316 - RNA, 19 nt, Artificial Sequence
  Antisense Oligo
acaugcuggcacgaaggac

SEQ ID NO: 21317 - RNA, 19 nt, Artificial Sequence
  Sense Oligo
uccuucgugccagcauguc

SEQ ID NO: 21318 - RNA, 19 nt, Artificial Sequence
  Antisense Oligo
gacaugcuggcacgaagga

SEQ ID NO: 21319 - RNA, 19 nt, Artificial Sequence
  Sense Oligo
ccuucgugccagcaugucu

SEQ ID NO: 21320 - RNA, 19 nt, Artificial Sequence
  Antisense Oligo
agacaugcuggcacgaagg

SEQ ID NO: 21321 - RNA, 19 nt, Artificial Sequence
  Sense Oligo
cuucgugccagcaugucuc

SEQ ID NO: 21322 - RNA, 19 nt, Artificial Sequence
  Antisense Oligo
gagacaugcuggcacgaag

SEQ ID NO: 21323 - RNA, 19 nt, Artificial Sequence
  Sense Oligo
gugccagcaugucuccaag

SEQ ID NO: 21324 - RNA, 19 nt, Artificial Sequence
  Antisense Oligo
cuuggagacaugcuggcac

SEQ ID NO: 21325 - RNA, 19 nt, Artificial Sequence
  Sense Oligo
cagcaugucuccaaggagg

SEQ ID NO: 21326 - RNA, 19 nt, Artificial Sequence
  Antisense Oligo
ccuccuuggagacaugcug

SEQ ID NO: 21327 - RNA, 19 nt, Artificial Sequence
  Sense Oligo
agcaugucuccaaggagga

SEQ ID NO: 21328 - RNA, 19 nt, Artificial Sequence
  Antisense Oligo
uccuccuuggagacaugcu

SEQ ID NO: 21329 - RNA, 19 nt, Artificial Sequence
  Sense Oligo
uucugcagccagugcggag

SEQ ID NO: 21330 - RNA, 19 nt, Artificial Sequence
  Antisense Oligo
cuccgcacuggcugcagaa

SEQ ID NO: 21331 - RNA, 19 nt, Artificial Sequence
  Sense Oligo
ccauagcaggugaggccca

SEQ ID NO: 21332 - RNA, 19 nt, Artificial Sequence
  Antisense Oligo
ugggccucaccugcuaugg

SEQ ID NO: 21333 - RNA, 19 nt, Artificial Sequence
  Sense Oligo
auagcaggugaggcccagg

SEQ ID NO: 21334 - RNA, 19 nt, Artificial Sequence
  Antisense Oligo
ccugggccucaccugcuau

SEQ ID NO: 21335 - RNA, 19 nt, Artificial Sequence
  Sense Oligo
agaugucucaccucccuuc

SEQ ID NO: 21336 - RNA, 19 nt, Artificial Sequence
  Antisense Oligo
gaagggaggugagacaucu

SEQ ID NO: 21337 - RNA, 19 nt, Artificial Sequence
  Sense Oligo
gaugucucaccucccuucc

SEQ ID NO: 21338 - RNA, 19 nt, Artificial Sequence
  Antisense Oligo
ggaagggaggugagacauc

SEQ ID NO: 21339 - RNA, 19 nt, Artificial Sequence
  Sense Oligo
ugucucaccucccuuccag

SEQ ID NO: 21340 - RNA, 19 nt, Artificial Sequence
  Antisense Oligo
cuggaagggaggugagaca

SEQ ID NO: 21341 - RNA, 19 nt, Artificial Sequence
  Sense Oligo
gucucaccucccuuccagg

SEQ ID NO: 21342 - RNA, 19 nt, Artificial Sequence
  Antisense Oligo
ccuggaagggaggugagac

SEQ ID NO: 21343 - RNA, 19 nt, Artificial Sequence
  Sense Oligo
gaauagccaucucaaaagu

SEQ ID NO: 21344 - RNA, 19 nt, Artificial Sequence
  Antisense Oligo
acuuuugagauggcuauuc

SEQ ID NO: 21345 - RNA, 19 nt, Artificial Sequence
  Sense Oligo
aauagccaucucaaaagug

SEQ ID NO: 21346 - RNA, 19 nt, Artificial Sequence
  Antisense Oligo
cacuuuugagauggcuauu

SEQ ID NO: 21347 - RNA, 19 nt, Artificial Sequence
  Sense Oligo
auagccaucucaaaaguga

SEQ ID NO: 21348 - RNA, 19 nt, Artificial Sequence
  Antisense Oligo
ucacuuuugagauggcuau

SEQ ID NO: 21349 - RNA, 19 nt, Artificial Sequence
  Sense Oligo
ccaucucaaaagugaccac

SEQ ID NO: 21350 - RNA, 19 nt, Artificial Sequence
  Antisense Oligo
guggucacuuuugagaugg

SEQ ID NO: 21351 - RNA, 19 nt, Artificial Sequence
  Sense Oligo
caucucaaaagugaccaca

SEQ ID NO: 21352 - RNA, 19 nt, Artificial Sequence
  Antisense Oligo
uguggucacuuuugagaug

SEQ ID NO: 21353 - RNA, 19 nt, Artificial Sequence
  Sense Oligo
ucaaaagugaccacagagu

SEQ ID NO: 21354 - RNA, 19 nt, Artificial Sequence
  Antisense Oligo
acucuguggucacuuuuga

SEQ ID NO: 21355 - RNA, 19 nt, Artificial Sequence
  Sense Oligo
caaaagugaccacagaguc

SEQ ID NO: 21356 - RNA, 19 nt, Artificial Sequence
  Antisense Oligo
gacucuguggucacuuuug

SEQ ID NO: 21357 - RNA, 19 nt, Artificial Sequence
  Sense Oligo
aaaagugaccacagagucu

SEQ ID NO: 21358 - RNA, 19 nt, Artificial Sequence
  Antisense Oligo
agacucuguggucacuuuu

SEQ ID NO: 21359 - RNA, 19 nt, Artificial Sequence
  Sense Oligo
aaagugaccacagagucug

SEQ ID NO: 21360 - RNA, 19 nt, Artificial Sequence
  Antisense Oligo
cagacucuguggucacuuu

SEQ ID NO: 21361 - RNA, 19 nt, Artificial Sequence
  Sense Oligo
ggguggcauagauuagucu

SEQ ID NO: 21362 - RNA, 19 nt, Artificial Sequence
  Antisense Oligo
agacuaaucuaugccaccc

SEQ ID NO: 21363 - RNA, 19 nt, Artificial Sequence
  Sense Oligo
ggaccaccacccagugcuu

SEQ ID NO: 21364 - RNA, 19 nt, Artificial Sequence
  Antisense Oligo
aagcacugggugguggucc

SEQ ID NO: 21365 - RNA, 19 nt, Artificial Sequence
  Sense Oligo
gaccaccacccagugcuuc

SEQ ID NO: 21366 - RNA, 19 nt, Artificial Sequence
  Antisense Oligo
gaagcacuggguggugguc

SEQ ID NO: 21367 - RNA, 19 nt, Artificial Sequence
  Sense Oligo
caccacccagugcuuccgu

SEQ ID NO: 21368 - RNA, 19 nt, Artificial Sequence
  Antisense Oligo
acggaagcacuggguggug

SEQ ID NO: 21369 - RNA, 19 nt, Artificial Sequence
  Sense Oligo
accacccagugcuuccguc

SEQ ID NO: 21370 - RNA, 19 nt, Artificial Sequence
  Antisense Oligo
gacggaagcacuggguggu

SEQ ID NO: 21371 - RNA, 19 nt, Artificial Sequence
  Sense Oligo
cagugcuuccgucccucgu

SEQ ID NO: 21372 - RNA, 19 nt, Artificial Sequence
  Antisense Oligo
acgagggacggaagcacug

SEQ ID NO: 21373 - RNA, 19 nt, Artificial Sequence
  Sense Oligo
agugcuuccgucccucguu

SEQ ID NO: 21374 - RNA, 19 nt, Artificial Sequence
  Antisense Oligo
aacgagggacggaagcacu

SEQ ID NO: 21375 - RNA, 19 nt, Artificial Sequence
  Sense Oligo
gugcuuccgucccucguuc

SEQ ID NO: 21376 - RNA, 19 nt, Artificial Sequence
  Antisense Oligo
gaacgagggacggaagcac

SEQ ID NO: 21377 - RNA, 19 nt, Artificial Sequence
  Sense Oligo
ugcuuccgucccucguuca

SEQ ID NO: 21378 - RNA, 19 nt, Artificial Sequence
  Antisense Oligo
ugaacgagggacggaagca

SEQ ID NO: 21379 - RNA, 19 nt, Artificial Sequence
  Sense Oligo
gcuuccgucccucguucag

SEQ ID NO: 21380 - RNA, 19 nt, Artificial Sequence
  Antisense Oligo
cugaacgagggacggaagc

SEQ ID NO: 21381 - RNA, 19 nt, Artificial Sequence
  Sense Oligo
cuuccgucccucguucagg

SEQ ID NO: 21382 - RNA, 19 nt, Artificial Sequence
  Antisense Oligo
ccugaacgagggacggaag

SEQ ID NO: 21383 - RNA, 19 nt, Artificial Sequence
  Sense Oligo
uuccgucccucguucaggc

SEQ ID NO: 21384 - RNA, 19 nt, Artificial Sequence
  Antisense Oligo
gccugaacgagggacggaa

SEQ ID NO: 21385 - RNA, 19 nt, Artificial Sequence
  Sense Oligo
ugagugagcccacccgagu

SEQ ID NO: 21386 - RNA, 19 nt, Artificial Sequence
  Antisense Oligo
acucgggugggcucacuca

SEQ ID NO: 21387 - RNA, 19 nt, Artificial Sequence
  Sense Oligo
ggucuuugcuggagguucc

SEQ ID NO: 21388 - RNA, 19 nt, Artificial Sequence
  Antisense Oligo
ggaaccuccagcaaagacc

SEQ ID NO: 21389 - RNA, 19 nt, Artificial Sequence
  Sense Oligo
gucuuugcuggagguuccu

SEQ ID NO: 21390 - RNA, 19 nt, Artificial Sequence
  Antisense Oligo
aggaaccuccagcaaagac

SEQ ID NO: 21391 - RNA, 19 nt, Artificial Sequence
  Sense Oligo
uugcuggagguuccugcuu

SEQ ID NO: 21392 - RNA, 19 nt, Artificial Sequence
  Antisense Oligo
aagcaggaaccuccagcaa

SEQ ID NO: 21393 - RNA, 19 nt, Artificial Sequence
  Sense Oligo
ugcuggagguuccugcuuu

SEQ ID NO: 21394 - RNA, 19 nt, Artificial Sequence
  Antisense Oligo
aaagcaggaaccuccagca

SEQ ID NO: 21395 - RNA, 19 nt, Artificial Sequence
  Sense Oligo
gcuggagguuccugcuuuu

SEQ ID NO: 21396 - RNA, 19 nt, Artificial Sequence
  Antisense Oligo
aaaagcaggaaccuccagc

SEQ ID NO: 21397 - RNA, 19 nt, Artificial Sequence
  Sense Oligo
cuggagguuccugcuuuug

SEQ ID NO: 21398 - RNA, 19 nt, Artificial Sequence
  Antisense Oligo
caaaagcaggaaccuccag

SEQ ID NO: 21399 - RNA, 19 nt, Artificial Sequence
  Sense Oligo
uggagguuccugcuuuuga

SEQ ID NO: 21400 - RNA, 19 nt, Artificial Sequence
  Antisense Oligo
ucaaaagcaggaaccucca

SEQ ID NO: 21401 - RNA, 19 nt, Artificial Sequence
  Sense Oligo
ggagguuccugcuuuugaa

SEQ ID NO: 21402 - RNA, 19 nt, Artificial Sequence
  Antisense Oligo
uucaaaagcaggaaccucc

SEQ ID NO: 21403 - RNA, 19 nt, Artificial Sequence
  Sense Oligo
agaagugucgggcugagcu

SEQ ID NO: 21404 - RNA, 19 nt, Artificial Sequence
  Antisense Oligo
agcucagcccgacacuucu

SEQ ID NO: 21405 - RNA, 19 nt, Artificial Sequence
  Sense Oligo
gaagugucgggcugagcug

SEQ ID NO: 21406 - RNA, 19 nt, Artificial Sequence
  Antisense Oligo
cagcucagcccgacacuuc

SEQ ID NO: 21407 - RNA, 19 nt, Artificial Sequence
  Sense Oligo
aagugucgggcugagcuga

SEQ ID NO: 21408 - RNA, 19 nt, Artificial Sequence
  Antisense Oligo
ucagcucagcccgacacuu

SEQ ID NO: 21409 - RNA, 19 nt, Artificial Sequence
  Sense Oligo
agugucgggcugagcugag

SEQ ID NO: 21410 - RNA, 19 nt, Artificial Sequence
  Antisense Oligo
cucagcucagcccgacacu

SEQ ID NO: 21411 - RNA, 19 nt, Artificial Sequence
  Sense Oligo
agcugagggcuucauagag

SEQ ID NO: 21412 - RNA, 19 nt, Artificial Sequence
  Antisense Oligo
cucuaugaagcccucagcu

SEQ ID NO: 21413 - RNA, 19 nt, Artificial Sequence
  Sense Oligo
gcagggaagcagaguuuga

SEQ ID NO: 21414 - RNA, 19 nt, Artificial Sequence
  Antisense Oligo
ucaaacucugcuucccugc

SEQ ID NO: 21415 - RNA, 19 nt, Artificial Sequence
  Sense Oligo
gaagcagaguuugaggcuc

SEQ ID NO: 21416 - RNA, 19 nt, Artificial Sequence
  Antisense Oligo
gagccucaaacucugcuuc

SEQ ID NO: 21417 - RNA, 19 nt, Artificial Sequence
  Sense Oligo
agagcucugccuggguuag

SEQ ID NO: 21418 - RNA, 19 nt, Artificial Sequence
  Antisense Oligo
cuaacccaggcagagcucu

SEQ ID NO: 21419 - RNA, 19 nt, Artificial Sequence
  Sense Oligo
gagcucugccuggguuagu

SEQ ID NO: 21420 - RNA, 19 nt, Artificial Sequence
  Antisense Oligo
acuaacccaggcagagcuc

SEQ ID NO: 21421 - RNA, 19 nt, Artificial Sequence
  Sense Oligo
agcucugccuggguuaguu

SEQ ID NO: 21422 - RNA, 19 nt, Artificial Sequence
  Antisense Oligo
aacuaacccaggcagagcu

SEQ ID NO: 21423 - RNA, 19 nt, Artificial Sequence
  Sense Oligo
gcucugccuggguuaguuu

SEQ ID NO: 21424 - RNA, 19 nt, Artificial Sequence
  Antisense Oligo
aaacuaacccaggcagagc

SEQ ID NO: 21425 - RNA, 19 nt, Artificial Sequence
  Sense Oligo
cucugccuggguuaguuuu

SEQ ID NO: 21426 - RNA, 19 nt, Artificial Sequence
  Antisense Oligo
aaaacuaacccaggcagag

SEQ ID NO: 21427 - RNA, 19 nt, Artificial Sequence
  Sense Oligo
aggaccuguccaggcaccu

SEQ ID NO: 21428 - RNA, 19 nt, Artificial Sequence
  Antisense Oligo
aggugccuggacagguccu

SEQ ID NO: 21429 - RNA, 19 nt, Artificial Sequence
  Sense Oligo
ggccuugccugcugagcau

SEQ ID NO: 21430 - RNA, 19 nt, Artificial Sequence
  Antisense Oligo
augcucagcaggcaaggcc

SEQ ID NO: 21431 - RNA, 19 nt, Artificial Sequence
  Sense Oligo
gccuugccugcugagcauc

SEQ ID NO: 21432 - RNA, 19 nt, Artificial Sequence
  Antisense Oligo
gaugcucagcaggcaaggc

SEQ ID NO: 21433 - RNA, 19 nt, Artificial Sequence
  Sense Oligo
uugccugcugagcaucuug

SEQ ID NO: 21434 - RNA, 19 nt, Artificial Sequence
  Antisense Oligo
caagaugcucagcaggcaa

SEQ ID NO: 21435 - RNA, 19 nt, Artificial Sequence
  Sense Oligo
ugccugcugagcaucuuga

SEQ ID NO: 21436 - RNA, 19 nt, Artificial Sequence
  Antisense Oligo
ucaagaugcucagcaggca

SEQ ID NO: 21437 - RNA, 19 nt, Artificial Sequence
  Sense Oligo
gccugcugagcaucuugag

SEQ ID NO: 21438 - RNA, 19 nt, Artificial Sequence
  Antisense Oligo
cucaagaugcucagcaggc

SEQ ID NO: 21439 - RNA, 19 nt, Artificial Sequence
  Sense Oligo
ccugcugagcaucuugagu

SEQ ID NO: 21440 - RNA, 19 nt, Artificial Sequence
  Antisense Oligo
acucaagaugcucagcagg

SEQ ID NO: 21441 - RNA, 19 nt, Artificial Sequence
  Sense Oligo
cugcugagcaucuugaguc

SEQ ID NO: 21442 - RNA, 19 nt, Artificial Sequence
  Antisense Oligo
gacucaagaugcucagcag

SEQ ID NO: 21443 - RNA, 19 nt, Artificial Sequence
  Sense Oligo
ugcugagcaucuugagucc

SEQ ID NO: 21444 - RNA, 19 nt, Artificial Sequence
  Antisense Oligo
ggacucaagaugcucagca

SEQ ID NO: 21445 - RNA, 19 nt, Artificial Sequence
  Sense Oligo
cugagcaucuugaguccau

SEQ ID NO: 21446 - RNA, 19 nt, Artificial Sequence
  Antisense Oligo
auggacucaagaugcucag

SEQ ID NO: 21447 - RNA, 19 nt, Artificial Sequence
  Sense Oligo
ugagcaucuugaguccauu

SEQ ID NO: 21448 - RNA, 19 nt, Artificial Sequence
  Antisense Oligo
aauggacucaagaugcuca

SEQ ID NO: 21449 - RNA, 19 nt, Artificial Sequence
  Sense Oligo
gagcaucuugaguccauuc

SEQ ID NO: 21450 - RNA, 19 nt, Artificial Sequence
  Antisense Oligo
gaauggacucaagaugcuc

SEQ ID NO: 21451 - RNA, 19 nt, Artificial Sequence
  Sense Oligo
gcaucuugaguccauucuc

SEQ ID NO: 21452 - RNA, 19 nt, Artificial Sequence
  Antisense Oligo
gagaauggacucaagaugc

SEQ ID NO: 21453 - RNA, 19 nt, Artificial Sequence
  Sense Oligo
uucucaauuuuguuggcuu

SEQ ID NO: 21454 - RNA, 19 nt, Artificial Sequence
  Antisense Oligo
aagccaacaaaauugagaa

SEQ ID NO: 21455 - RNA, 19 nt, Artificial Sequence
  Sense Oligo
ucucaauuuuguuggcuuc

SEQ ID NO: 21456 - RNA, 19 nt, Artificial Sequence
  Antisense Oligo
gaagccaacaaaauugaga

SEQ ID NO: 21457 - RNA, 19 nt, Artificial Sequence
  Sense Oligo
cucaauuuuguuggcuucu

SEQ ID NO: 21458 - RNA, 19 nt, Artificial Sequence
  Antisense Oligo
agaagccaacaaaauugag

SEQ ID NO: 21459 - RNA, 19 nt, Artificial Sequence
  Sense Oligo
ucaauuuuguuggcuucug

SEQ ID NO: 21460 - RNA, 19 nt, Artificial Sequence
  Antisense Oligo
cagaagccaacaaaauuga

SEQ ID NO: 21461 - RNA, 19 nt, Artificial Sequence
  Sense Oligo
caauuuuguuggcuucugg

SEQ ID NO: 21462 - RNA, 19 nt, Artificial Sequence
  Antisense Oligo
ccagaagccaacaaaauug

SEQ ID NO: 21463 - RNA, 19 nt, Artificial Sequence
  Sense Oligo
aauuuuguuggcuucuggg

SEQ ID NO: 21464 - RNA, 19 nt, Artificial Sequence
  Antisense Oligo
cccagaagccaacaaaauu

SEQ ID NO: 21465 - RNA, 19 nt, Artificial Sequence
  Sense Oligo
agaccuucagccuuucugu

SEQ ID NO: 21466 - RNA, 19 nt, Artificial Sequence
  Antisense Oligo
acagaaaggcugaaggucu

SEQ ID NO: 21467 - RNA, 19 nt, Artificial Sequence
  Sense Oligo
gaccuucagccuuucugug

SEQ ID NO: 21468 - RNA, 19 nt, Artificial Sequence
  Antisense Oligo
cacagaaaggcugaagguc

SEQ ID NO: 21469 - RNA, 19 nt, Artificial Sequence
  Sense Oligo
accuucagccuuucugugu

SEQ ID NO: 21470 - RNA, 19 nt, Artificial Sequence
  Antisense Oligo
acacagaaaggcugaaggu

SEQ ID NO: 21471 - RNA, 19 nt, Artificial Sequence
  Sense Oligo
ccuucagccuuucuguguc

SEQ ID NO: 21472 - RNA, 19 nt, Artificial Sequence
  Antisense Oligo
gacacagaaaggcugaagg

SEQ ID NO: 21473 - RNA, 19 nt, Artificial Sequence
  Sense Oligo
ucagccuuucuguguccaa

SEQ ID NO: 21474 - RNA, 19 nt, Artificial Sequence
  Antisense Oligo
uuggacacagaaaggcuga

SEQ ID NO: 21475 - RNA, 19 nt, Artificial Sequence
  Sense Oligo
cagccuuucuguguccaaa

SEQ ID NO: 21476 - RNA, 19 nt, Artificial Sequence
  Antisense Oligo
uuuggacacagaaaggcug

SEQ ID NO: 21477 - RNA, 19 nt, Artificial Sequence
  Sense Oligo
ucuguguccaaagcccagc

SEQ ID NO: 21478 - RNA, 19 nt, Artificial Sequence
  Antisense Oligo
gcugggcuuuggacacaga

SEQ ID NO: 21479 - RNA, 19 nt, Artificial Sequence
  Sense Oligo
gcaccucauucuuccagcu

SEQ ID NO: 21480 - RNA, 19 nt, Artificial Sequence
  Antisense Oligo
agcuggaagaaugaggugc

SEQ ID NO: 21481 - RNA, 19 nt, Artificial Sequence
  Sense Oligo
accucauucuuccagcugc

SEQ ID NO: 21482 - RNA, 19 nt, Artificial Sequence
  Antisense Oligo
gcagcuggaagaaugaggu

SEQ ID NO: 21483 - RNA, 19 nt, Artificial Sequence
  Sense Oligo
cauucuuccagcugcuucu

SEQ ID NO: 21484 - RNA, 19 nt, Artificial Sequence
  Antisense Oligo
agaagcagcuggaagaaug

SEQ ID NO: 21485 - RNA, 19 nt, Artificial Sequence
  Sense Oligo
cuuccagcugcuucuaucg

SEQ ID NO: 21486 - RNA, 19 nt, Artificial Sequence
  Antisense Oligo
cgauagaagcagcuggaag

SEQ ID NO: 21487 - RNA, 19 nt, Artificial Sequence
  Sense Oligo
uuccagcugcuucuaucgg

SEQ ID NO: 21488 - RNA, 19 nt, Artificial Sequence
  Antisense Oligo
ccgauagaagcagcuggaa

SEQ ID NO: 21489 - RNA, 19 nt, Artificial Sequence
  Sense Oligo
uccagcugcuucuaucgga

SEQ ID NO: 21490 - RNA, 19 nt, Artificial Sequence
  Antisense Oligo
uccgauagaagcagcugga

SEQ ID NO: 21491 - RNA, 19 nt, Artificial Sequence
  Sense Oligo
ccagcugcuucuaucggac

SEQ ID NO: 21492 - RNA, 19 nt, Artificial Sequence
  Antisense Oligo
guccgauagaagcagcugg

SEQ ID NO: 21493 - RNA, 19 nt, Artificial Sequence
  Sense Oligo
cagcugcuucuaucggacc

SEQ ID NO: 21494 - RNA, 19 nt, Artificial Sequence
  Antisense Oligo
gguccgauagaagcagcug

SEQ ID NO: 21495 - RNA, 19 nt, Artificial Sequence
  Sense Oligo
agcugcuucuaucggaccc

SEQ ID NO: 21496 - RNA, 19 nt, Artificial Sequence
  Antisense Oligo
ggguccgauagaagcagcu

SEQ ID NO: 21497 - RNA, 19 nt, Artificial Sequence
  Sense Oligo
gcugcuucuaucggaccca

SEQ ID NO: 21498 - RNA, 19 nt, Artificial Sequence
  Antisense Oligo
uggguccgauagaagcagc

SEQ ID NO: 21499 - RNA, 19 nt, Artificial Sequence
  Sense Oligo
cugcuucuaucggacccau

SEQ ID NO: 21500 - RNA, 19 nt, Artificial Sequence
  Antisense Oligo
auggguccgauagaagcag

SEQ ID NO: 21501 - RNA, 19 nt, Artificial Sequence
  Sense Oligo
ugcuucuaucggacccauc

SEQ ID NO: 21502 - RNA, 19 nt, Artificial Sequence
  Antisense Oligo
gauggguccgauagaagca

SEQ ID NO: 21503 - RNA, 19 nt, Artificial Sequence
  Sense Oligo
gcuucuaucggacccauca

SEQ ID NO: 21504 - RNA, 19 nt, Artificial Sequence
  Antisense Oligo
ugauggguccgauagaagc

SEQ ID NO: 21505 - RNA, 19 nt, Artificial Sequence
  Sense Oligo
cuucuaucggacccaucac

SEQ ID NO: 21506 - RNA, 19 nt, Artificial Sequence
  Antisense Oligo
gugauggguccgauagaag

SEQ ID NO: 21507 - RNA, 19 nt, Artificial Sequence
  Sense Oligo
uucuaucggacccaucacc

SEQ ID NO: 21508 - RNA, 19 nt, Artificial Sequence
  Antisense Oligo
ggugauggguccgauagaa

SEQ ID NO: 21509 - RNA, 19 nt, Artificial Sequence
  Sense Oligo
ucuaucggacccaucaccc

SEQ ID NO: 21510 - RNA, 19 nt, Artificial Sequence
  Antisense Oligo
gggugauggguccgauaga

SEQ ID NO: 21511 - RNA, 19 nt, Artificial Sequence
  Sense Oligo
caugcugccuuccugcuuc

SEQ ID NO: 21512 - RNA, 19 nt, Artificial Sequence
  Antisense Oligo
gaagcaggaaggcagcaug

SEQ ID NO: 21513 - RNA, 19 nt, Artificial Sequence
  Sense Oligo
ccuuccugcuuccugcuca

SEQ ID NO: 21514 - RNA, 19 nt, Artificial Sequence
  Antisense Oligo
ugagcaggaagcaggaagg

SEQ ID NO: 21515 - RNA, 19 nt, Artificial Sequence
  Sense Oligo
cucagcacagcagacaguc

SEQ ID NO: 21516 - RNA, 19 nt, Artificial Sequence
  Antisense Oligo
gacugucugcugugcugag

SEQ ID NO: 21517 - RNA, 19 nt, Artificial Sequence
  Sense Oligo
ucagcacagcagacaguca

SEQ ID NO: 21518 - RNA, 19 nt, Artificial Sequence
  Antisense Oligo
ugacugucugcugugcuga

SEQ ID NO: 21519 - RNA, 19 nt, Artificial Sequence
  Sense Oligo
cagcacagcagacagucaa

SEQ ID NO: 21520 - RNA, 19 nt, Artificial Sequence
  Antisense Oligo
uugacugucugcugugcug

SEQ ID NO: 21521 - RNA, 19 nt, Artificial Sequence
  Sense Oligo
caagcaggagcccuuacgg

SEQ ID NO: 21522 - RNA, 19 nt, Artificial Sequence
  Antisense Oligo
ccguaagggcuccugcuug

SEQ ID NO: 21523 - RNA, 19 nt, Artificial Sequence
  Sense Oligo
aagcaggagcccuuacggu

SEQ ID NO: 21524 - RNA, 19 nt, Artificial Sequence
  Antisense Oligo
accguaagggcuccugcuu

SEQ ID NO: 21525 - RNA, 19 nt, Artificial Sequence
  Sense Oligo
agcaggagcccuuacggug

SEQ ID NO: 21526 - RNA, 19 nt, Artificial Sequence
  Antisense Oligo
caccguaagggcuccugcu

SEQ ID NO: 21527 - RNA, 19 nt, Artificial Sequence
  Sense Oligo
gguccuacauagacggcug

SEQ ID NO: 21528 - RNA, 19 nt, Artificial Sequence
  Antisense Oligo
cagccgucuauguaggacc

SEQ ID NO: 21529 - RNA, 19 nt, Artificial Sequence
  Sense Oligo
guccuacauagacggcugc

SEQ ID NO: 21530 - RNA, 19 nt, Artificial Sequence
  Antisense Oligo
gcagccgucuauguaggac

SEQ ID NO: 21531 - RNA, 19 nt, Artificial Sequence
  Sense Oligo
uccuacauagacggcugcc

SEQ ID NO: 21532 - RNA, 19 nt, Artificial Sequence
  Antisense Oligo
ggcagccgucuauguagga

SEQ ID NO: 21533 - RNA, 19 nt, Artificial Sequence
  Sense Oligo
ccuacauagacggcugccc

SEQ ID NO: 21534 - RNA, 19 nt, Artificial Sequence
  Antisense Oligo
gggcagccgucuauguagg

SEQ ID NO: 21535 - RNA, 19 nt, Artificial Sequence
  Sense Oligo
cuacauagacggcugccca

SEQ ID NO: 21536 - RNA, 19 nt, Artificial Sequence
  Antisense Oligo
ugggcagccgucuauguag

SEQ ID NO: 21537 - RNA, 19 nt, Artificial Sequence
  Sense Oligo
uacauagacggcugcccac

SEQ ID NO: 21538 - RNA, 19 nt, Artificial Sequence
  Antisense Oligo
gugggcagccgucuaugua

SEQ ID NO: 21539 - RNA, 19 nt, Artificial Sequence
  Sense Oligo
cauuccucuuggcucccuc

SEQ ID NO: 21540 - RNA, 19 nt, Artificial Sequence
  Antisense Oligo
gagggagccaagaggaaug

SEQ ID NO: 21541 - RNA, 19 nt, Artificial Sequence
  Sense Oligo
auuccucuuggcucccucu

SEQ ID NO: 21542 - RNA, 19 nt, Artificial Sequence
  Antisense Oligo
agagggagccaagaggaau

SEQ ID NO: 21543 - RNA, 19 nt, Artificial Sequence
  Sense Oligo
uuccucuuggcucccucuc

SEQ ID NO: 21544 - RNA, 19 nt, Artificial Sequence
  Antisense Oligo
gagagggagccaagaggaa

SEQ ID NO: 21545 - RNA, 19 nt, Artificial Sequence
  Sense Oligo
agagcccaccaccuucugg

SEQ ID NO: 21546 - RNA, 19 nt, Artificial Sequence
  Antisense Oligo
ccagaagguggugggcucu

SEQ ID NO: 21547 - RNA, 19 nt, Artificial Sequence
  Sense Oligo
caccaccuucuggcccuuc

SEQ ID NO: 21548 - RNA, 19 nt, Artificial Sequence
  Antisense Oligo
gaagggccagaagguggug

SEQ ID NO: 21549 - RNA, 19 nt, Artificial Sequence
  Sense Oligo
accaccuucuggcccuucc

SEQ ID NO: 21550 - RNA, 19 nt, Artificial Sequence
  Antisense Oligo
ggaagggccagaagguggu

SEQ ID NO: 21551 - RNA, 19 nt, Artificial Sequence
  Sense Oligo
ccaccuucuggcccuuccu

SEQ ID NO: 21552 - RNA, 19 nt, Artificial Sequence
  Antisense Oligo
aggaagggccagaaggugg

SEQ ID NO: 21553 - RNA, 19 nt, Artificial Sequence
  Sense Oligo
cuggcccuuccuggauaca

SEQ ID NO: 21554 - RNA, 19 nt, Artificial Sequence
  Antisense Oligo
uguauccaggaagggccag

SEQ ID NO: 21555 - RNA, 19 nt, Artificial Sequence
  Sense Oligo
ccucuuucagucuuugccc

SEQ ID NO: 21556 - RNA, 19 nt, Artificial Sequence
  Antisense Oligo
gggcaaagacugaaagagg

SEQ ID NO: 21557 - RNA, 19 nt, Artificial Sequence
  Sense Oligo
cucuuucagucuuugccca

SEQ ID NO: 21558 - RNA, 19 nt, Artificial Sequence
  Antisense Oligo
ugggcaaagacugaaagag

SEQ ID NO: 21559 - RNA, 19 nt, Artificial Sequence
  Sense Oligo
cuuucagucuuugcccagc

SEQ ID NO: 21560 - RNA, 19 nt, Artificial Sequence
  Antisense Oligo
gcugggcaaagacugaaag

SEQ ID NO: 21561 - RNA, 19 nt, Artificial Sequence
  Sense Oligo
ucuuugcccagcugcucgc

SEQ ID NO: 21562 - RNA, 19 nt, Artificial Sequence
  Antisense Oligo
gcgagcagcugggcaaaga

SEQ ID NO: 21563 - RNA, 19 nt, Artificial Sequence
  Sense Oligo
uuugcccagcugcucgcca

SEQ ID NO: 21564 - RNA, 19 nt, Artificial Sequence
  Antisense Oligo
uggcgagcagcugggcaaa

SEQ ID NO: 21565 - RNA, 19 nt, Artificial Sequence
  Sense Oligo
gggucucuccgauguuguc

SEQ ID NO: 21566 - RNA, 19 nt, Artificial Sequence
  Antisense Oligo
gacaacaucggagagaccc

SEQ ID NO: 21567 - RNA, 19 nt, Artificial Sequence
  Sense Oligo
ggucucuccgauguugucc

SEQ ID NO: 21568 - RNA, 19 nt, Artificial Sequence
  Antisense Oligo
ggacaacaucggagagacc

SEQ ID NO: 21569 - RNA, 19 nt, Artificial Sequence
  Sense Oligo
gucucuccgauguuguccu

SEQ ID NO: 21570 - RNA, 19 nt, Artificial Sequence
  Antisense Oligo
aggacaacaucggagagac

SEQ ID NO: 21571 - RNA, 19 nt, Artificial Sequence
  Sense Oligo
ucucuccgauguuguccuu

SEQ ID NO: 21572 - RNA, 19 nt, Artificial Sequence
  Antisense Oligo
aaggacaacaucggagaga

SEQ ID NO: 21573 - RNA, 19 nt, Artificial Sequence
  Sense Oligo
cucuccgauguuguccuuc

SEQ ID NO: 21574 - RNA, 19 nt, Artificial Sequence
  Antisense Oligo
gaaggacaacaucggagag

SEQ ID NO: 21575 - RNA, 19 nt, Artificial Sequence
  Sense Oligo
ucuccgauguuguccuuca

SEQ ID NO: 21576 - RNA, 19 nt, Artificial Sequence
  Antisense Oligo
ugaaggacaacaucggaga

SEQ ID NO: 21577 - RNA, 19 nt, Artificial Sequence
  Sense Oligo
cuccgauguuguccuucaa

SEQ ID NO: 21578 - RNA, 19 nt, Artificial Sequence
  Antisense Oligo
uugaaggacaacaucggag

SEQ ID NO: 21579 - RNA, 19 nt, Artificial Sequence
  Sense Oligo
uccgauguuguccuucaag

SEQ ID NO: 21580 - RNA, 19 nt, Artificial Sequence
  Antisense Oligo
cuugaaggacaacaucgga

SEQ ID NO: 21581 - RNA, 19 nt, Artificial Sequence
  Sense Oligo
ccgauguuguccuucaagg

SEQ ID NO: 21582 - RNA, 19 nt, Artificial Sequence
  Antisense Oligo
ccuugaaggacaacaucgg

SEQ ID NO: 21583 - RNA, 19 nt, Artificial Sequence
  Sense Oligo
cgauguuguccuucaaggg

SEQ ID NO: 21584 - RNA, 19 nt, Artificial Sequence
  Antisense Oligo
cccuugaaggacaacaucg

SEQ ID NO: 21585 - RNA, 19 nt, Artificial Sequence
  Sense Oligo
gauguuguccuucaagggu

SEQ ID NO: 21586 - RNA, 19 nt, Artificial Sequence
  Antisense Oligo
acccuugaaggacaacauc

SEQ ID NO: 21587 - RNA, 19 nt, Artificial Sequence
  Sense Oligo
uuguccuucaaggguguga

SEQ ID NO: 21588 - RNA, 19 nt, Artificial Sequence
  Antisense Oligo
ucacacccuugaaggacaa

SEQ ID NO: 21589 - RNA, 19 nt, Artificial Sequence
  Sense Oligo
cccaguccuuccauguuug

SEQ ID NO: 21590 - RNA, 19 nt, Artificial Sequence
  Antisense Oligo
caaacauggaaggacuggg

SEQ ID NO: 21591 - RNA, 19 nt, Artificial Sequence
  Sense Oligo
ccaguccuuccauguuugu

SEQ ID NO: 21592 - RNA, 19 nt, Artificial Sequence
  Antisense Oligo
acaaacauggaaggacugg

SEQ ID NO: 21593 - RNA, 19 nt, Artificial Sequence
  Sense Oligo
uccuuccauguuuguuugu

SEQ ID NO: 21594 - RNA, 19 nt, Artificial Sequence
  Antisense Oligo
acaaacaaacauggaagga

SEQ ID NO: 21595 - RNA, 19 nt, Artificial Sequence
  Sense Oligo
uuguucuuguugcucuggc

SEQ ID NO: 21596 - RNA, 19 nt, Artificial Sequence
  Antisense Oligo
gccagagcaacaagaacaa

SEQ ID NO: 21597 - RNA, 19 nt, Artificial Sequence
  Sense Oligo
guucuuguugcucuggcua

SEQ ID NO: 21598 - RNA, 19 nt, Artificial Sequence
  Antisense Oligo
uagccagagcaacaagaac

SEQ ID NO: 21599 - RNA, 19 nt, Artificial Sequence
  Sense Oligo
uucuuguugcucuggcuag

SEQ ID NO: 21600 - RNA, 19 nt, Artificial Sequence
  Antisense Oligo
cuagccagagcaacaagaa

SEQ ID NO: 21601 - RNA, 19 nt, Artificial Sequence
  Sense Oligo
aaaucucagcucacugcaa

SEQ ID NO: 21602 - RNA, 19 nt, Artificial Sequence
  Antisense Oligo
uugcagugagcugagauuu

SEQ ID NO: 21603 - RNA, 19 nt, Artificial Sequence
  Sense Oligo
aaucucagcucacugcaac

SEQ ID NO: 21604 - RNA, 19 nt, Artificial Sequence
  Antisense Oligo
guugcagugagcugagauu

SEQ ID NO: 21605 - RNA, 19 nt, Artificial Sequence
  Sense Oligo
aucucagcucacugcaacc

SEQ ID NO: 21606 - RNA, 19 nt, Artificial Sequence
  Antisense Oligo
gguugcagugagcugagau

SEQ ID NO: 21607 - RNA, 19 nt, Artificial Sequence
  Sense Oligo
ucucagcucacugcaaccu

SEQ ID NO: 21608 - RNA, 19 nt, Artificial Sequence
  Antisense Oligo
agguugcagugagcugaga

SEQ ID NO: 21609 - RNA, 19 nt, Artificial Sequence
  Sense Oligo
cggguucaagugauucuuc

SEQ ID NO: 21610 - RNA, 19 nt, Artificial Sequence
  Antisense Oligo
gaagaaucacuugaacccg

SEQ ID NO: 21611 - RNA, 19 nt, Artificial Sequence
  Sense Oligo
ggguucaagugauucuucu

SEQ ID NO: 21612 - RNA, 19 nt, Artificial Sequence
  Antisense Oligo
agaagaaucacuugaaccc

SEQ ID NO: 21613 - RNA, 19 nt, Artificial Sequence
  Sense Oligo
gguucaagugauucuucug

SEQ ID NO: 21614 - RNA, 19 nt, Artificial Sequence
  Antisense Oligo
cagaagaaucacuugaacc

SEQ ID NO: 21615 - RNA, 19 nt, Artificial Sequence
  Sense Oligo
guucaagugauucuucugc

SEQ ID NO: 21616 - RNA, 19 nt, Artificial Sequence
  Antisense Oligo
gcagaagaaucacuugaac

SEQ ID NO: 21617 - RNA, 19 nt, Artificial Sequence
  Sense Oligo
ggguuucaccauguuggcc

SEQ ID NO: 21618 - RNA, 19 nt, Artificial Sequence
  Antisense Oligo
ggccaacauggugaaaccc

SEQ ID NO: 21619 - RNA, 19 nt, Artificial Sequence
  Sense Oligo
gguuucaccauguuggcca

SEQ ID NO: 21620 - RNA, 19 nt, Artificial Sequence
  Antisense Oligo
uggccaacauggugaaacc

SEQ ID NO: 21621 - RNA, 19 nt, Artificial Sequence
  Sense Oligo
guuucaccauguuggccag

SEQ ID NO: 21622 - RNA, 19 nt, Artificial Sequence
  Antisense Oligo
cuggccaacauggugaaac

SEQ ID NO: 21623 - RNA, 19 nt, Artificial Sequence
  Sense Oligo
caccauguuggccaggcug

SEQ ID NO: 21624 - RNA, 19 nt, Artificial Sequence
  Antisense Oligo
cagccuggccaacauggug

SEQ ID NO: 21625 - RNA, 19 nt, Artificial Sequence
  Sense Oligo
accauguuggccaggcugg

SEQ ID NO: 21626 - RNA, 19 nt, Artificial Sequence
  Antisense Oligo
ccagccuggccaacauggu

SEQ ID NO: 21627 - RNA, 19 nt, Artificial Sequence
  Sense Oligo
ccauguuggccaggcuggu

SEQ ID NO: 21628 - RNA, 19 nt, Artificial Sequence
  Antisense Oligo
accagccuggccaacaugg

SEQ ID NO: 21629 - RNA, 19 nt, Artificial Sequence
  Sense Oligo
cauguuggccaggcugguu

SEQ ID NO: 21630 - RNA, 19 nt, Artificial Sequence
  Antisense Oligo
aaccagccuggccaacaug

SEQ ID NO: 21631 - RNA, 19 nt, Artificial Sequence
  Sense Oligo
auguuggccaggcugguuu

SEQ ID NO: 21632 - RNA, 19 nt, Artificial Sequence
  Antisense Oligo
aaaccagccuggccaacau

SEQ ID NO: 21633 - RNA, 19 nt, Artificial Sequence
  Sense Oligo
uguuggccaggcugguuuu

SEQ ID NO: 21634 - RNA, 19 nt, Artificial Sequence
  Antisense Oligo
aaaaccagccuggccaaca

SEQ ID NO: 21635 - RNA, 19 nt, Artificial Sequence
  Sense Oligo
guuggccaggcugguuuug

SEQ ID NO: 21636 - RNA, 19 nt, Artificial Sequence
  Antisense Oligo
caaaaccagccuggccaac

SEQ ID NO: 21637 - RNA, 19 nt, Artificial Sequence
  Sense Oligo
uuggccaggcugguuuuga

SEQ ID NO: 21638 - RNA, 19 nt, Artificial Sequence
  Antisense Oligo
ucaaaaccagccuggccaa

SEQ ID NO: 21639 - RNA, 19 nt, Artificial Sequence
  Sense Oligo
cugaccucaggugauccac

SEQ ID NO: 21640 - RNA, 19 nt, Artificial Sequence
  Antisense Oligo
guggaucaccugaggucag

SEQ ID NO: 21641 - RNA, 19 nt, Artificial Sequence
  Sense Oligo
aagugcugggauuauaggc

SEQ ID NO: 21642 - RNA, 19 nt, Artificial Sequence
  Antisense Oligo
gccuauaaucccagcacuu

SEQ ID NO: 21643 - RNA, 19 nt, Artificial Sequence
  Sense Oligo
agugcugggauuauaggcg

SEQ ID NO: 21644 - RNA, 19 nt, Artificial Sequence
  Antisense Oligo
cgccuauaaucccagcacu

SEQ ID NO: 21645 - RNA, 19 nt, Artificial Sequence
  Sense Oligo
gugcugggauuauaggcgu

SEQ ID NO: 21646 - RNA, 19 nt, Artificial Sequence
  Antisense Oligo
acgccuauaaucccagcac

SEQ ID NO: 21647 - RNA, 19 nt, Artificial Sequence
  Sense Oligo
ugcugggauuauaggcgug

SEQ ID NO: 21648 - RNA, 19 nt, Artificial Sequence
  Antisense Oligo
cacgccuauaaucccagca

SEQ ID NO: 21649 - RNA, 19 nt, Artificial Sequence
  Sense Oligo
gcugggauuauaggcguga

SEQ ID NO: 21650 - RNA, 19 nt, Artificial Sequence
  Antisense Oligo
ucacgccuauaaucccagc

SEQ ID NO: 21651 - RNA, 19 nt, Artificial Sequence
  Sense Oligo
cugggauuauaggcgugag

SEQ ID NO: 21652 - RNA, 19 nt, Artificial Sequence
  Antisense Oligo
cucacgccuauaaucccag

SEQ ID NO: 21653 - RNA, 19 nt, Artificial Sequence
  Sense Oligo
ugggauuauaggcgugagc

SEQ ID NO: 21654 - RNA, 19 nt, Artificial Sequence
  Antisense Oligo
gcucacgccuauaauccca

SEQ ID NO: 21655 - RNA, 19 nt, Artificial Sequence
  Sense Oligo
auuauaggcgugagccacc

SEQ ID NO: 21656 - RNA, 19 nt, Artificial Sequence
  Antisense Oligo
gguggcucacgccuauaau

SEQ ID NO: 21657 - RNA, 19 nt, Artificial Sequence
  Sense Oligo
uuauaggcgugagccaccg

SEQ ID NO: 21658 - RNA, 19 nt, Artificial Sequence
  Antisense Oligo
cgguggcucacgccuauaa

SEQ ID NO: 21659 - RNA, 19 nt, Artificial Sequence
  Sense Oligo
uauaggcgugagccaccgc

SEQ ID NO: 21660 - RNA, 19 nt, Artificial Sequence
  Antisense Oligo
gcgguggcucacgccuaua

SEQ ID NO: 21661 - RNA, 19 nt, Artificial Sequence
  Sense Oligo
gccuaagggcuccacuucu

SEQ ID NO: 21662 - RNA, 19 nt, Artificial Sequence
  Antisense Oligo
agaaguggagcccuuaggc

SEQ ID NO: 21663 - RNA, 19 nt, Artificial Sequence
  Sense Oligo
ccuaagggcuccacuucua

SEQ ID NO: 21664 - RNA, 19 nt, Artificial Sequence
  Antisense Oligo
uagaaguggagcccuuagg

SEQ ID NO: 21665 - RNA, 19 nt, Artificial Sequence
  Sense Oligo
cuaagggcuccacuucuau

SEQ ID NO: 21666 - RNA, 19 nt, Artificial Sequence
  Antisense Oligo
auagaaguggagcccuuag

SEQ ID NO: 21667 - RNA, 19 nt, Artificial Sequence
  Sense Oligo
uaagggcuccacuucuauu

SEQ ID NO: 21668 - RNA, 19 nt, Artificial Sequence
  Antisense Oligo
aauagaaguggagcccuua

SEQ ID NO: 21669 - RNA, 19 nt, Artificial Sequence
  Sense Oligo
aagggcuccacuucuauua

SEQ ID NO: 21670 - RNA, 19 nt, Artificial Sequence
  Antisense Oligo
uaauagaaguggagcccuu

SEQ ID NO: 21671 - RNA, 19 nt, Artificial Sequence
  Sense Oligo
agggcuccacuucuauuaa

SEQ ID NO: 21672 - RNA, 19 nt, Artificial Sequence
  Antisense Oligo
uuaauagaaguggagcccu

SEQ ID NO: 21673 - RNA, 19 nt, Artificial Sequence
  Sense Oligo
gggcuccacuucuauuaau

SEQ ID NO: 21674 - RNA, 19 nt, Artificial Sequence
  Antisense Oligo
auuaauagaaguggagccc

SEQ ID NO: 21675 - RNA, 19 nt, Artificial Sequence
  Sense Oligo
gcuccacuucuauuaauaa

SEQ ID NO: 21676 - RNA, 19 nt, Artificial Sequence
  Antisense Oligo
uuauuaauagaaguggagc

SEQ ID NO: 21677 - RNA, 19 nt, Artificial Sequence
  Sense Oligo
cugguagugcgcagcauga

SEQ ID NO: 21678 - RNA, 19 nt, Artificial Sequence
  Antisense Oligo
ucaugcugcgcacuaccag

SEQ ID NO: 21679 - RNA, 19 nt, Artificial Sequence
  Sense Oligo
ugguagugcgcagcaugaa

SEQ ID NO: 21680 - RNA, 19 nt, Artificial Sequence
  Antisense Oligo
uucaugcugcgcacuacca

SEQ ID NO: 21681 - RNA, 19 nt, Artificial Sequence
  Sense Oligo
cuguuucuagaggcaugca

SEQ ID NO: 21682 - RNA, 19 nt, Artificial Sequence
  Antisense Oligo
ugcaugccucuagaaacag

SEQ ID NO: 21683 - RNA, 19 nt, Artificial Sequence
  Sense Oligo
uguuucuagaggcaugcaa

SEQ ID NO: 21684 - RNA, 19 nt, Artificial Sequence
  Antisense Oligo
uugcaugccucuagaaaca

SEQ ID NO: 21685 - RNA, 19 nt, Artificial Sequence
  Sense Oligo
guuucuagaggcaugcaaa

SEQ ID NO: 21686 - RNA, 19 nt, Artificial Sequence
  Antisense Oligo
uuugcaugccucuagaaac

SEQ ID NO: 21687 - RNA, 19 nt, Artificial Sequence
  Sense Oligo
uuucuagaggcaugcaaag

SEQ ID NO: 21688 - RNA, 19 nt, Artificial Sequence
  Antisense Oligo
cuuugcaugccucuagaaa

SEQ ID NO: 21689 - RNA, 19 nt, Artificial Sequence
  Sense Oligo
uucuagaggcaugcaaagc

SEQ ID NO: 21690 - RNA, 19 nt, Artificial Sequence
  Antisense Oligo
gcuuugcaugccucuagaa

SEQ ID NO: 21691 - RNA, 19 nt, Artificial Sequence
  Sense Oligo
ucuagaggcaugcaaagca

SEQ ID NO: 21692 - RNA, 19 nt, Artificial Sequence
  Antisense Oligo
ugcuuugcaugccucuaga

SEQ ID NO: 21693 - RNA, 19 nt, Artificial Sequence
  Sense Oligo
cuagaggcaugcaaagcaa

SEQ ID NO: 21694 - RNA, 19 nt, Artificial Sequence
  Antisense Oligo
uugcuuugcaugccucuag

SEQ ID NO: 21695 - RNA, 19 nt, Artificial Sequence
  Sense Oligo
uagaggcaugcaaagcaaa

SEQ ID NO: 21696 - RNA, 19 nt, Artificial Sequence
  Antisense Oligo
uuugcuuugcaugccucua

SEQ ID NO: 21697 - RNA, 19 nt, Artificial Sequence
  Sense Oligo
agaggcaugcaaagcaaau

SEQ ID NO: 21698 - RNA, 19 nt, Artificial Sequence
  Antisense Oligo
auuugcuuugcaugccucu

SEQ ID NO: 21699 - RNA, 19 nt, Artificial Sequence
  Sense Oligo
gaggcaugcaaagcaaaug

SEQ ID NO: 21700 - RNA, 19 nt, Artificial Sequence
  Antisense Oligo
cauuugcuuugcaugccuc

SEQ ID NO: 21701 - RNA, 19 nt, Artificial Sequence
  Sense Oligo
cuccuaauucaccacuugu

SEQ ID NO: 21702 - RNA, 19 nt, Artificial Sequence
  Antisense Oligo
acaaguggugaauuaggag

SEQ ID NO: 21703 - RNA, 19 nt, Artificial Sequence
  Sense Oligo
uccuaauucaccacuugua

SEQ ID NO: 21704 - RNA, 19 nt, Artificial Sequence
  Antisense Oligo
uacaaguggugaauuagga

SEQ ID NO: 21705 - RNA, 19 nt, Artificial Sequence
  Sense Oligo
ccuaauucaccacuuguaa

SEQ ID NO: 21706 - RNA, 19 nt, Artificial Sequence
  Antisense Oligo
uuacaaguggugaauuagg

SEQ ID NO: 21707 - RNA, 19 nt, Artificial Sequence
  Sense Oligo
aauucaccacuuguaagag

SEQ ID NO: 21708 - RNA, 19 nt, Artificial Sequence
  Antisense Oligo
cucuuacaaguggugaauu

SEQ ID NO: 21709 - RNA, 19 nt, Artificial Sequence
  Sense Oligo
auucaccacuuguaagagg

SEQ ID NO: 21710 - RNA, 19 nt, Artificial Sequence
  Antisense Oligo
ccucuuacaaguggugaau

SEQ ID NO: 21711 - RNA, 19 nt, Artificial Sequence
  Sense Oligo
uucaccacuuguaagaggc

SEQ ID NO: 21712 - RNA, 19 nt, Artificial Sequence
  Antisense Oligo
gccucuuacaaguggugaa

SEQ ID NO: 21713 - RNA, 19 nt, Artificial Sequence
  Sense Oligo
ucaccacuuguaagaggcc

SEQ ID NO: 21714 - RNA, 19 nt, Artificial Sequence
  Antisense Oligo
ggccucuuacaagugguga

SEQ ID NO: 21715 - RNA, 19 nt, Artificial Sequence
  Sense Oligo
caccacuuguaagaggcca

SEQ ID NO: 21716 - RNA, 19 nt, Artificial Sequence
  Antisense Oligo
uggccucuuacaaguggug

SEQ ID NO: 21717 - RNA, 19 nt, Artificial Sequence
  Sense Oligo
accacuuguaagaggccag

SEQ ID NO: 21718 - RNA, 19 nt, Artificial Sequence
  Antisense Oligo
cuggccucuuacaaguggu

SEQ ID NO: 21719 - RNA, 19 nt, Artificial Sequence
  Sense Oligo
uuguaagaggccaggaauu

SEQ ID NO: 21720 - RNA, 19 nt, Artificial Sequence
  Antisense Oligo
aauuccuggccucuuacaa

SEQ ID NO: 21721 - RNA, 19 nt, Artificial Sequence
  Sense Oligo
aagaggccaggaauuuggu

SEQ ID NO: 21722 - RNA, 19 nt, Artificial Sequence
  Antisense Oligo
accaaauuccuggccucuu

SEQ ID NO: 21723 - RNA, 19 nt, Artificial Sequence
  Sense Oligo
agaggccaggaauuuggug

SEQ ID NO: 21724 - RNA, 19 nt, Artificial Sequence
  Antisense Oligo
caccaaauuccuggccucu

SEQ ID NO: 21725 - RNA, 19 nt, Artificial Sequence
  Sense Oligo
gaggccaggaauuugguga

SEQ ID NO: 21726 - RNA, 19 nt, Artificial Sequence
  Antisense Oligo
ucaccaaauuccuggccuc

SEQ ID NO: 21727 - RNA, 19 nt, Artificial Sequence
  Sense Oligo
aggccaggaauuuggugac

SEQ ID NO: 21728 - RNA, 19 nt, Artificial Sequence
  Antisense Oligo
gucaccaaauuccuggccu

SEQ ID NO: 21729 - RNA, 19 nt, Artificial Sequence
  Sense Oligo
ggccaggaauuuggugacu

SEQ ID NO: 21730 - RNA, 19 nt, Artificial Sequence
  Antisense Oligo
agucaccaaauuccuggcc

SEQ ID NO: 21731 - RNA, 19 nt, Artificial Sequence
  Sense Oligo
ccaggaauuuggugacucu

SEQ ID NO: 21732 - RNA, 19 nt, Artificial Sequence
  Antisense Oligo
agagucaccaaauuccugg

SEQ ID NO: 21733 - RNA, 19 nt, Artificial Sequence
  Sense Oligo
gaauuuggugacucuguac

SEQ ID NO: 21734 - RNA, 19 nt, Artificial Sequence
  Antisense Oligo
guacagagucaccaaauuc

SEQ ID NO: 21735 - RNA, 19 nt, Artificial Sequence
  Sense Oligo
ggugacucuguacaugaug

SEQ ID NO: 21736 - RNA, 19 nt, Artificial Sequence
  Antisense Oligo
caucauguacagagucacc

SEQ ID NO: 21737 - RNA, 19 nt, Artificial Sequence
  Sense Oligo
gacucuguacaugaugcuu

SEQ ID NO: 21738 - RNA, 19 nt, Artificial Sequence
  Antisense Oligo
aagcaucauguacagaguc

SEQ ID NO: 21739 - RNA, 19 nt, Artificial Sequence
  Sense Oligo
acucuguacaugaugcuuu

SEQ ID NO: 21740 - RNA, 19 nt, Artificial Sequence
  Antisense Oligo
aaagcaucauguacagagu

SEQ ID NO: 21741 - RNA, 19 nt, Artificial Sequence
  Sense Oligo
cucuguacaugaugcuuuu

SEQ ID NO: 21742 - RNA, 19 nt, Artificial Sequence
  Antisense Oligo
aaaagcaucauguacagag

SEQ ID NO: 21743 - RNA, 19 nt, Artificial Sequence
  Sense Oligo
aauacagugaugcuggcug

SEQ ID NO: 21744 - RNA, 19 nt, Artificial Sequence
  Antisense Oligo
cagccagcaucacuguauu

SEQ ID NO: 21745 - RNA, 19 nt, Artificial Sequence
  Sense Oligo
auacagugaugcuggcugg

SEQ ID NO: 21746 - RNA, 19 nt, Artificial Sequence
  Antisense Oligo
ccagccagcaucacuguau

SEQ ID NO: 21747 - RNA, 19 nt, Artificial Sequence
  Sense Oligo
acagugaugcuggcugguu

SEQ ID NO: 21748 - RNA, 19 nt, Artificial Sequence
  Antisense Oligo
aaccagccagcaucacugu

SEQ ID NO: 21749 - RNA, 19 nt, Artificial Sequence
  Sense Oligo
cagugaugcuggcugguug

SEQ ID NO: 21750 - RNA, 19 nt, Artificial Sequence
  Antisense Oligo
caaccagccagcaucacug

SEQ ID NO: 21751 - RNA, 19 nt, Artificial Sequence
  Sense Oligo
agugaugcuggcugguugc

SEQ ID NO: 21752 - RNA, 19 nt, Artificial Sequence
  Antisense Oligo
gcaaccagccagcaucacu

SEQ ID NO: 21753 - RNA, 19 nt, Artificial Sequence
  Sense Oligo
gugaugcuggcugguugcc

SEQ ID NO: 21754 - RNA, 19 nt, Artificial Sequence
  Antisense Oligo
ggcaaccagccagcaucac

SEQ ID NO: 21755 - RNA, 19 nt, Artificial Sequence
  Sense Oligo
ugaugcuggcugguugccc

SEQ ID NO: 21756 - RNA, 19 nt, Artificial Sequence
  Antisense Oligo
gggcaaccagccagcauca

SEQ ID NO: 21757 - RNA, 19 nt, Artificial Sequence
  Sense Oligo
aacucagggauucgauguc

SEQ ID NO: 21758 - RNA, 19 nt, Artificial Sequence
  Antisense Oligo
gacaucgaaucccugaguu

SEQ ID NO: 21759 - RNA, 19 nt, Artificial Sequence
  Sense Oligo
acucagggauucgaugucu

SEQ ID NO: 21760 - RNA, 19 nt, Artificial Sequence
  Antisense Oligo
agacaucgaaucccugagu

SEQ ID NO: 21761 - RNA, 19 nt, Artificial Sequence
  Sense Oligo
cucagggauucgaugucug

SEQ ID NO: 21762 - RNA, 19 nt, Artificial Sequence
  Antisense Oligo
cagacaucgaaucccugag

SEQ ID NO: 21763 - RNA, 19 nt, Artificial Sequence
  Sense Oligo
ucagggauucgaugucugg

SEQ ID NO: 21764 - RNA, 19 nt, Artificial Sequence
  Antisense Oligo
ccagacaucgaaucccuga

SEQ ID NO: 21765 - RNA, 19 nt, Artificial Sequence
  Sense Oligo
cagggauucgaugucuggg

SEQ ID NO: 21766 - RNA, 19 nt, Artificial Sequence
  Antisense Oligo
cccagacaucgaaucccug

SEQ ID NO: 21767 - RNA, 19 nt, Artificial Sequence
  Sense Oligo
agggauucgaugucugggc

SEQ ID NO: 21768 - RNA, 19 nt, Artificial Sequence
  Antisense Oligo
gcccagacaucgaaucccu

SEQ ID NO: 21769 - RNA, 19 nt, Artificial Sequence
  Sense Oligo
gggauucgaugucugggcu

SEQ ID NO: 21770 - RNA, 19 nt, Artificial Sequence
  Antisense Oligo
agcccagacaucgaauccc

SEQ ID NO: 21771 - RNA, 19 nt, Artificial Sequence
  Sense Oligo
ggauucgaugucugggcug

SEQ ID NO: 21772 - RNA, 19 nt, Artificial Sequence
  Antisense Oligo
cagcccagacaucgaaucc

SEQ ID NO: 21773 - RNA, 19 nt, Artificial Sequence
  Sense Oligo
gauucgaugucugggcugc

SEQ ID NO: 21774 - RNA, 19 nt, Artificial Sequence
  Antisense Oligo
gcagcccagacaucgaauc

SEQ ID NO: 21775 - RNA, 19 nt, Artificial Sequence
  Sense Oligo
auucgaugucugggcugca

SEQ ID NO: 21776 - RNA, 19 nt, Artificial Sequence
  Antisense Oligo
ugcagcccagacaucgaau

SEQ ID NO: 21777 - RNA, 19 nt, Artificial Sequence
  Sense Oligo
ugucugggcugcagcucug

SEQ ID NO: 21778 - RNA, 19 nt, Artificial Sequence
  Antisense Oligo
cagagcugcagcccagaca

SEQ ID NO: 21779 - RNA, 19 nt, Artificial Sequence
  Sense Oligo
agcucugcauaaaugaucu

SEQ ID NO: 21780 - RNA, 19 nt, Artificial Sequence
  Antisense Oligo
agaucauuuaugcagagcu

SEQ ID NO: 21781 - RNA, 19 nt, Artificial Sequence
  Sense Oligo
gcucugcauaaaugaucug

SEQ ID NO: 21782 - RNA, 19 nt, Artificial Sequence
  Antisense Oligo
cagaucauuuaugcagagc

SEQ ID NO: 21783 - RNA, 19 nt, Artificial Sequence
  Sense Oligo
cucugcauaaaugaucuga

SEQ ID NO: 21784 - RNA, 19 nt, Artificial Sequence
  Antisense Oligo
ucagaucauuuaugcagag

SEQ ID NO: 21785 - RNA, 19 nt, Artificial Sequence
  Sense Oligo
ucugcauaaaugaucugag

SEQ ID NO: 21786 - RNA, 19 nt, Artificial Sequence
  Antisense Oligo
cucagaucauuuaugcaga

SEQ ID NO: 21787 - RNA, 19 nt, Artificial Sequence
  Sense Oligo
agaguuucuuagugugccc

SEQ ID NO: 21788 - RNA, 19 nt, Artificial Sequence
  Antisense Oligo
gggcacacuaagaaacucu

SEQ ID NO: 21789 - RNA, 19 nt, Artificial Sequence
  Sense Oligo
gaguuucuuagugugcccu

SEQ ID NO: 21790 - RNA, 19 nt, Artificial Sequence
  Antisense Oligo
agggcacacuaagaaacuc

SEQ ID NO: 21791 - RNA, 19 nt, Artificial Sequence
  Sense Oligo
aguuucuuagugugcccug

SEQ ID NO: 21792 - RNA, 19 nt, Artificial Sequence
  Antisense Oligo
cagggcacacuaagaaacu

SEQ ID NO: 21793 - RNA, 19 nt, Artificial Sequence
  Sense Oligo
gugugcccuggaucagaau

SEQ ID NO: 21794 - RNA, 19 nt, Artificial Sequence
  Antisense Oligo
auucugauccagggcacac

SEQ ID NO: 21795 - RNA, 19 nt, Artificial Sequence
  Sense Oligo
ugugcccuggaucagaauc

SEQ ID NO: 21796 - RNA, 19 nt, Artificial Sequence
  Antisense Oligo
gauucugauccagggcaca

SEQ ID NO: 21797 - RNA, 19 nt, Artificial Sequence
  Sense Oligo
gugcccuggaucagaaucu

SEQ ID NO: 21798 - RNA, 19 nt, Artificial Sequence
  Antisense Oligo
agauucugauccagggcac

SEQ ID NO: 21799 - RNA, 19 nt, Artificial Sequence
  Sense Oligo
ugcccuggaucagaaucuu

SEQ ID NO: 21800 - RNA, 19 nt, Artificial Sequence
  Antisense Oligo
aagauucugauccagggca

SEQ ID NO: 21801 - RNA, 19 nt, Artificial Sequence
  Sense Oligo
gcccuggaucagaaucuuc

SEQ ID NO: 21802 - RNA, 19 nt, Artificial Sequence
  Antisense Oligo
gaagauucugauccagggc

SEQ ID NO: 21803 - RNA, 19 nt, Artificial Sequence
  Sense Oligo
ccuggaucagaaucuucuc

SEQ ID NO: 21804 - RNA, 19 nt, Artificial Sequence
  Antisense Oligo
gagaagauucugauccagg

SEQ ID NO: 21805 - RNA, 19 nt, Artificial Sequence
  Sense Oligo
cuggaucagaaucuucucu

SEQ ID NO: 21806 - RNA, 19 nt, Artificial Sequence
  Antisense Oligo
agagaagauucugauccag

SEQ ID NO: 21807 - RNA, 19 nt, Artificial Sequence
  Sense Oligo
uggaucagaaucuucucuc

SEQ ID NO: 21808 - RNA, 19 nt, Artificial Sequence
  Antisense Oligo
gagagaagauucugaucca

SEQ ID NO: 21809 - RNA, 19 nt, Artificial Sequence
  Sense Oligo
agcaccagcucucacgcga

SEQ ID NO: 21810 - RNA, 19 nt, Artificial Sequence
  Antisense Oligo
ucgcgugagagcuggugcu

SEQ ID NO: 21811 - RNA, 19 nt, Artificial Sequence
  Sense Oligo
gcaccagcucucacgcgau

SEQ ID NO: 21812 - RNA, 19 nt, Artificial Sequence
  Antisense Oligo
aucgcgugagagcuggugc

SEQ ID NO: 21813 - RNA, 19 nt, Artificial Sequence
  Sense Oligo
caccagcucucacgcgauu

SEQ ID NO: 21814 - RNA, 19 nt, Artificial Sequence
  Antisense Oligo
aaucgcgugagagcuggug

SEQ ID NO: 21815 - RNA, 19 nt, Artificial Sequence
  Sense Oligo
accagcucucacgcgauua

SEQ ID NO: 21816 - RNA, 19 nt, Artificial Sequence
  Antisense Oligo
uaaucgcgugagagcuggu

SEQ ID NO: 21817 - RNA, 19 nt, Artificial Sequence
  Sense Oligo
ccagcucucacgcgauuag

SEQ ID NO: 21818 - RNA, 19 nt, Artificial Sequence
  Antisense Oligo
cuaaucgcgugagagcugg

SEQ ID NO: 21819 - RNA, 19 nt, Artificial Sequence
  Sense Oligo
cagcucucacgcgauuagc

SEQ ID NO: 21820 - RNA, 19 nt, Artificial Sequence
  Antisense Oligo
gcuaaucgcgugagagcug

SEQ ID NO: 21821 - RNA, 19 nt, Artificial Sequence
  Sense Oligo
gcucucacgcgauuagcug

SEQ ID NO: 21822 - RNA, 19 nt, Artificial Sequence
  Antisense Oligo
cagcuaaucgcgugagagc

SEQ ID NO: 21823 - RNA, 19 nt, Artificial Sequence
  Sense Oligo
cucucacgcgauuagcuga

SEQ ID NO: 21824 - RNA, 19 nt, Artificial Sequence
  Antisense Oligo
ucagcuaaucgcgugagag

SEQ ID NO: 21825 - RNA, 19 nt, Artificial Sequence
  Sense Oligo
acgcgauuagcugaguuaa

SEQ ID NO: 21826 - RNA, 19 nt, Artificial Sequence
  Antisense Oligo
uuaacucagcuaaucgcgu

SEQ ID NO: 21827 - RNA, 19 nt, Artificial Sequence
  Sense Oligo
cgcgauuagcugaguuaaa

SEQ ID NO: 21828 - RNA, 19 nt, Artificial Sequence
  Antisense Oligo
uuuaacucagcuaaucgcg

SEQ ID NO: 21829 - RNA, 19 nt, Artificial Sequence
  Sense Oligo
gcgauuagcugaguuaaaa

SEQ ID NO: 21830 - RNA, 19 nt, Artificial Sequence
  Antisense Oligo
uuuuaacucagcuaaucgc

SEQ ID NO: 21831 - RNA, 19 nt, Artificial Sequence
  Sense Oligo
cugagcuuccaggcaugca

SEQ ID NO: 21832 - RNA, 19 nt, Artificial Sequence
  Antisense Oligo
ugcaugccuggaagcucag

SEQ ID NO: 21833 - RNA, 19 nt, Artificial Sequence
  Sense Oligo
cagggcgucugcuguuaaa

SEQ ID NO: 21834 - RNA, 19 nt, Artificial Sequence
  Antisense Oligo
uuuaacagcagacgcccug

SEQ ID NO: 21835 - RNA, 19 nt, Artificial Sequence
  Sense Oligo
agggcgucugcuguuaaag

SEQ ID NO: 21836 - RNA, 19 nt, Artificial Sequence
  Antisense Oligo
cuuuaacagcagacgcccu

SEQ ID NO: 21837 - RNA, 19 nt, Artificial Sequence
  Sense Oligo
gggcgucugcuguuaaagu

SEQ ID NO: 21838 - RNA, 19 nt, Artificial Sequence
  Antisense Oligo
acuuuaacagcagacgccc

SEQ ID NO: 21839 - RNA, 19 nt, Artificial Sequence
  Sense Oligo
cgucugcuguuaaaguggg

SEQ ID NO: 21840 - RNA, 19 nt, Artificial Sequence
  Antisense Oligo
cccacuuuaacagcagacg

SEQ ID NO: 21841 - RNA, 19 nt, Artificial Sequence
  Sense Oligo
cacuuaagccggaugccgu

SEQ ID NO: 21842 - RNA, 19 nt, Artificial Sequence
  Antisense Oligo
acggcauccggcuuaagug

SEQ ID NO: 21843 - RNA, 19 nt, Artificial Sequence
  Sense Oligo
acuuaagccggaugccgug

SEQ ID NO: 21844 - RNA, 19 nt, Artificial Sequence
  Antisense Oligo
cacggcauccggcuuaagu

SEQ ID NO: 21845 - RNA, 19 nt, Artificial Sequence
  Sense Oligo
cuuaagccggaugccgugg

SEQ ID NO: 21846 - RNA, 19 nt, Artificial Sequence
  Antisense Oligo
ccacggcauccggcuuaag

SEQ ID NO: 21847 - RNA, 19 nt, Artificial Sequence
  Sense Oligo
uuaagccggaugccguggu

SEQ ID NO: 21848 - RNA, 19 nt, Artificial Sequence
  Antisense Oligo
accacggcauccggcuuaa

SEQ ID NO: 21849 - RNA, 19 nt, Artificial Sequence
  Sense Oligo
uaagccggaugccgugguu

SEQ ID NO: 21850 - RNA, 19 nt, Artificial Sequence
  Antisense Oligo
aaccacggcauccggcuua

SEQ ID NO: 21851 - RNA, 19 nt, Artificial Sequence
  Sense Oligo
aagccggaugccgugguuc

SEQ ID NO: 21852 - RNA, 19 nt, Artificial Sequence
  Antisense Oligo
gaaccacggcauccggcuu

SEQ ID NO: 21853 - RNA, 19 nt, Artificial Sequence
  Sense Oligo
agccggaugccgugguuca

SEQ ID NO: 21854 - RNA, 19 nt, Artificial Sequence
  Antisense Oligo
ugaaccacggcauccggcu

SEQ ID NO: 21855 - RNA, 19 nt, Artificial Sequence
  Sense Oligo
cccagcauguuugcaggcc

SEQ ID NO: 21856 - RNA, 19 nt, Artificial Sequence
  Antisense Oligo
ggccugcaaacaugcuggg

SEQ ID NO: 21857 - RNA, 19 nt, Artificial Sequence
  Sense Oligo
ccagcauguuugcaggcca

SEQ ID NO: 21858 - RNA, 19 nt, Artificial Sequence
  Antisense Oligo
uggccugcaaacaugcugg

SEQ ID NO: 21859 - RNA, 19 nt, Artificial Sequence
  Sense Oligo
cagcauguuugcaggccaa

SEQ ID NO: 21860 - RNA, 19 nt, Artificial Sequence
  Antisense Oligo
uuggccugcaaacaugcug

SEQ ID NO: 21861 - RNA, 19 nt, Artificial Sequence
  Sense Oligo
agcauguuugcaggccaag

SEQ ID NO: 21862 - RNA, 19 nt, Artificial Sequence
  Antisense Oligo
cuuggccugcaaacaugcu

SEQ ID NO: 21863 - RNA, 19 nt, Artificial Sequence
  Sense Oligo
uguuugcaggccaaggugg

SEQ ID NO: 21864 - RNA, 19 nt, Artificial Sequence
  Antisense Oligo
ccaccuuggccugcaaaca

SEQ ID NO: 21865 - RNA, 19 nt, Artificial Sequence
  Sense Oligo
guuugcaggccaagguggg

SEQ ID NO: 21866 - RNA, 19 nt, Artificial Sequence
  Antisense Oligo
cccaccuuggccugcaaac

SEQ ID NO: 21867 - RNA, 19 nt, Artificial Sequence
  Sense Oligo
aggccaaggugggaggauc

SEQ ID NO: 21868 - RNA, 19 nt, Artificial Sequence
  Antisense Oligo
gauccucccaccuuggccu

SEQ ID NO: 21869 - RNA, 19 nt, Artificial Sequence
  Sense Oligo
ggccaaggugggaggauca

SEQ ID NO: 21870 - RNA, 19 nt, Artificial Sequence
  Antisense Oligo
ugauccucccaccuuggcc

SEQ ID NO: 21871 - RNA, 19 nt, Artificial Sequence
  Sense Oligo
gccaaggugggaggaucac

SEQ ID NO: 21872 - RNA, 19 nt, Artificial Sequence
  Antisense Oligo
gugauccucccaccuuggc

SEQ ID NO: 21873 - RNA, 19 nt, Artificial Sequence
  Sense Oligo
ccaaggugggaggaucacu

SEQ ID NO: 21874 - RNA, 19 nt, Artificial Sequence
  Antisense Oligo
agugauccucccaccuugg

SEQ ID NO: 21875 - RNA, 19 nt, Artificial Sequence
  Sense Oligo
caaggugggaggaucacuu

SEQ ID NO: 21876 - RNA, 19 nt, Artificial Sequence
  Antisense Oligo
aagugauccucccaccuug

SEQ ID NO: 21877 - RNA, 19 nt, Artificial Sequence
  Sense Oligo
aaggugggaggaucacuug

SEQ ID NO: 21878 - RNA, 19 nt, Artificial Sequence
  Antisense Oligo
caagugauccucccaccuu

SEQ ID NO: 21879 - RNA, 19 nt, Artificial Sequence
  Sense Oligo
gaggaucacuugagccuag

SEQ ID NO: 21880 - RNA, 19 nt, Artificial Sequence
  Antisense Oligo
cuaggcucaagugauccuc

SEQ ID NO: 21881 - RNA, 19 nt, Artificial Sequence
  Sense Oligo
aggaucacuugagccuagg

SEQ ID NO: 21882 - RNA, 19 nt, Artificial Sequence
  Antisense Oligo
ccuaggcucaagugauccu

SEQ ID NO: 21883 - RNA, 19 nt, Artificial Sequence
  Sense Oligo
ggaucacuugagccuagga

SEQ ID NO: 21884 - RNA, 19 nt, Artificial Sequence
  Antisense Oligo
uccuaggcucaagugaucc

SEQ ID NO: 21885 - RNA, 19 nt, Artificial Sequence
  Sense Oligo
agaccagccugggcaaugu

SEQ ID NO: 21886 - RNA, 19 nt, Artificial Sequence
  Antisense Oligo
acauugcccaggcuggucu

SEQ ID NO: 21887 - RNA, 19 nt, Artificial Sequence
  Sense Oligo
gaccagccugggcaaugua

SEQ ID NO: 21888 - RNA, 19 nt, Artificial Sequence
  Antisense Oligo
uacauugcccaggcugguc

SEQ ID NO: 21889 - RNA, 19 nt, Artificial Sequence
  Sense Oligo
accagccugggcaauguag

SEQ ID NO: 21890 - RNA, 19 nt, Artificial Sequence
  Antisense Oligo
cuacauugcccaggcuggu

SEQ ID NO: 21891 - RNA, 19 nt, Artificial Sequence
  Sense Oligo
ccagccugggcaauguaga

SEQ ID NO: 21892 - RNA, 19 nt, Artificial Sequence
  Antisense Oligo
ucuacauugcccaggcugg

SEQ ID NO: 21893 - RNA, 19 nt, Artificial Sequence
  Sense Oligo
aaagacuccaucucuguau

SEQ ID NO: 21894 - RNA, 19 nt, Artificial Sequence
  Antisense Oligo
auacagagauggagucuuu

SEQ ID NO: 21895 - RNA, 19 nt, Artificial Sequence
  Sense Oligo
aagacuccaucucuguauu

SEQ ID NO: 21896 - RNA, 19 nt, Artificial Sequence
  Antisense Oligo
aauacagagauggagucuu

SEQ ID NO: 21897 - RNA, 19 nt, Artificial Sequence
  Sense Oligo
agacuccaucucuguauua

SEQ ID NO: 21898 - RNA, 19 nt, Artificial Sequence
  Antisense Oligo
uaauacagagauggagucu

SEQ ID NO: 21899 - RNA, 19 nt, Artificial Sequence
  Sense Oligo
gacuccaucucuguauuac

SEQ ID NO: 21900 - RNA, 19 nt, Artificial Sequence
  Antisense Oligo
guaauacagagauggaguc

SEQ ID NO: 21901 - RNA, 19 nt, Artificial Sequence
  Sense Oligo
acuccaucucuguauuaca

SEQ ID NO: 21902 - RNA, 19 nt, Artificial Sequence
  Antisense Oligo
uguaauacagagauggagu

SEQ ID NO: 21903 - RNA, 19 nt, Artificial Sequence
  Sense Oligo
aaaagugaggacauugggu

SEQ ID NO: 21904 - RNA, 19 nt, Artificial Sequence
  Antisense Oligo
acccaauguccucacuuuu

SEQ ID NO: 21905 - RNA, 19 nt, Artificial Sequence
  Sense Oligo
aaagugaggacauugggug

SEQ ID NO: 21906 - RNA, 19 nt, Artificial Sequence
  Antisense Oligo
cacccaauguccucacuuu

SEQ ID NO: 21907 - RNA, 19 nt, Artificial Sequence
  Sense Oligo
aagugaggacauugggugg

SEQ ID NO: 21908 - RNA, 19 nt, Artificial Sequence
  Antisense Oligo
ccacccaauguccucacuu

SEQ ID NO: 21909 - RNA, 19 nt, Artificial Sequence
  Sense Oligo
agugaggacauuggguggc

SEQ ID NO: 21910 - RNA, 19 nt, Artificial Sequence
  Antisense Oligo
gccacccaauguccucacu

SEQ ID NO: 21911 - RNA, 19 nt, Artificial Sequence
  Sense Oligo
ugaggacauuggguggcaa

SEQ ID NO: 21912 - RNA, 19 nt, Artificial Sequence
  Antisense Oligo
uugccacccaauguccuca

SEQ ID NO: 21913 - RNA, 19 nt, Artificial Sequence
  Sense Oligo
gaggacauuggguggcaaa

SEQ ID NO: 21914 - RNA, 19 nt, Artificial Sequence
  Antisense Oligo
uuugccacccaauguccuc

SEQ ID NO: 21915 - RNA, 19 nt, Artificial Sequence
  Sense Oligo
aggacauuggguggcaaag

SEQ ID NO: 21916 - RNA, 19 nt, Artificial Sequence
  Antisense Oligo
cuuugccacccaauguccu

SEQ ID NO: 21917 - RNA, 19 nt, Artificial Sequence
  Sense Oligo
ggacauuggguggcaaagg

SEQ ID NO: 21918 - RNA, 19 nt, Artificial Sequence
  Antisense Oligo
ccuuugccacccaaugucc

SEQ ID NO: 21919 - RNA, 19 nt, Artificial Sequence
  Sense Oligo
gacauuggguggcaaagga

SEQ ID NO: 21920 - RNA, 19 nt, Artificial Sequence
  Antisense Oligo
uccuuugccacccaauguc

SEQ ID NO: 21921 - RNA, 19 nt, Artificial Sequence
  Sense Oligo
acauuggguggcaaaggaa

SEQ ID NO: 21922 - RNA, 19 nt, Artificial Sequence
  Antisense Oligo
uuccuuugccacccaaugu

SEQ ID NO: 21923 - RNA, 19 nt, Artificial Sequence
  Sense Oligo
cauuggguggcaaaggaag

SEQ ID NO: 21924 - RNA, 19 nt, Artificial Sequence
  Antisense Oligo
cuuccuuugccacccaaug

SEQ ID NO: 21925 - RNA, 19 nt, Artificial Sequence
  Sense Oligo
auuggguggcaaaggaagg

SEQ ID NO: 21926 - RNA, 19 nt, Artificial Sequence
  Antisense Oligo
ccuuccuuugccacccaau

SEQ ID NO: 21927 - RNA, 19 nt, Artificial Sequence
  Sense Oligo
agggauccuucaaguuggg

SEQ ID NO: 21928 - RNA, 19 nt, Artificial Sequence
  Antisense Oligo
cccaacuugaaggaucccu

SEQ ID NO: 21929 - RNA, 19 nt, Artificial Sequence
  Sense Oligo
gggauccuucaaguuggga

SEQ ID NO: 21930 - RNA, 19 nt, Artificial Sequence
  Antisense Oligo
ucccaacuugaaggauccc

SEQ ID NO: 21931 - RNA, 19 nt, Artificial Sequence
  Sense Oligo
uccuucaaguugggauggg

SEQ ID NO: 21932 - RNA, 19 nt, Artificial Sequence
  Antisense Oligo
cccaucccaacuugaagga

SEQ ID NO: 21933 - RNA, 19 nt, Artificial Sequence
  Sense Oligo
aaaguugagucagguugag

SEQ ID NO: 21934 - RNA, 19 nt, Artificial Sequence
  Antisense Oligo
cucaaccugacucaacuuu

SEQ ID NO: 21935 - RNA, 19 nt, Artificial Sequence
  Sense Oligo
aaguugagucagguugagu

SEQ ID NO: 21936 - RNA, 19 nt, Artificial Sequence
  Antisense Oligo
acucaaccugacucaacuu

SEQ ID NO: 21937 - RNA, 19 nt, Artificial Sequence
  Sense Oligo
aguugagucagguugaguu

SEQ ID NO: 21938 - RNA, 19 nt, Artificial Sequence
  Antisense Oligo
aacucaaccugacucaacu

SEQ ID NO: 21939 - RNA, 19 nt, Artificial Sequence
  Sense Oligo
guugagucagguugaguuu

SEQ ID NO: 21940 - RNA, 19 nt, Artificial Sequence
  Antisense Oligo
aaacucaaccugacucaac

SEQ ID NO: 21941 - RNA, 19 nt, Artificial Sequence
  Sense Oligo
uugagucagguugaguuua

SEQ ID NO: 21942 - RNA, 19 nt, Artificial Sequence
  Antisense Oligo
uaaacucaaccugacucaa

SEQ ID NO: 21943 - RNA, 19 nt, Artificial Sequence
  Sense Oligo
ugagucagguugaguuuag

SEQ ID NO: 21944 - RNA, 19 nt, Artificial Sequence
  Antisense Oligo
cuaaacucaaccugacuca

SEQ ID NO: 21945 - RNA, 19 nt, Artificial Sequence
  Sense Oligo
gagucagguugaguuuagu

SEQ ID NO: 21946 - RNA, 19 nt, Artificial Sequence
  Antisense Oligo
acuaaacucaaccugacuc

SEQ ID NO: 21947 - RNA, 19 nt, Artificial Sequence
  Sense Oligo
agucagguugaguuuagua

SEQ ID NO: 21948 - RNA, 19 nt, Artificial Sequence
  Antisense Oligo
uacuaaacucaaccugacu

SEQ ID NO: 21949 - RNA, 19 nt, Artificial Sequence
  Sense Oligo
gucagguugaguuuaguag

SEQ ID NO: 21950 - RNA, 19 nt, Artificial Sequence
  Antisense Oligo
cuacuaaacucaaccugac

SEQ ID NO: 21951 - RNA, 19 nt, Artificial Sequence
  Sense Oligo
ucagguugaguuuaguagu

SEQ ID NO: 21952 - RNA, 19 nt, Artificial Sequence
  Antisense Oligo
acuacuaaacucaaccuga

SEQ ID NO: 21953 - RNA, 19 nt, Artificial Sequence
  Sense Oligo
cagguugaguuuaguagug

SEQ ID NO: 21954 - RNA, 19 nt, Artificial Sequence
  Antisense Oligo
cacuacuaaacucaaccug

SEQ ID NO: 21955 - RNA, 19 nt, Artificial Sequence
  Sense Oligo
agguugaguuuaguagugu

SEQ ID NO: 21956 - RNA, 19 nt, Artificial Sequence
  Antisense Oligo
acacuacuaaacucaaccu

SEQ ID NO: 21957 - RNA, 19 nt, Artificial Sequence
  Sense Oligo
gguugaguuuaguagugug

SEQ ID NO: 21958 - RNA, 19 nt, Artificial Sequence
  Antisense Oligo
cacacuacuaaacucaacc

SEQ ID NO: 21959 - RNA, 19 nt, Artificial Sequence
  Sense Oligo
guugaguuuaguagugugg

SEQ ID NO: 21960 - RNA, 19 nt, Artificial Sequence
  Antisense Oligo
ccacacuacuaaacucaac

SEQ ID NO: 21961 - RNA, 19 nt, Artificial Sequence
  Sense Oligo
uugaguuuaguaguguggg

SEQ ID NO: 21962 - RNA, 19 nt, Artificial Sequence
  Antisense Oligo
cccacacuacuaaacucaa

SEQ ID NO: 21963 - RNA, 19 nt, Artificial Sequence
  Sense Oligo
ugaguuuaguagugugggc

SEQ ID NO: 21964 - RNA, 19 nt, Artificial Sequence
  Antisense Oligo
gcccacacuacuaaacuca

SEQ ID NO: 21965 - RNA, 19 nt, Artificial Sequence
  Sense Oligo
gaguuuaguagugugggcc

SEQ ID NO: 21966 - RNA, 19 nt, Artificial Sequence
  Antisense Oligo
ggcccacacuacuaaacuc

SEQ ID NO: 21967 - RNA, 19 nt, Artificial Sequence
  Sense Oligo
gauuaugcauuucauguug

SEQ ID NO: 21968 - RNA, 19 nt, Artificial Sequence
  Antisense Oligo
caacaugaaaugcauaauc

SEQ ID NO: 21969 - RNA, 19 nt, Artificial Sequence
  Sense Oligo
uucauguugcagcugguag

SEQ ID NO: 21970 - RNA, 19 nt, Artificial Sequence
  Antisense Oligo
cuaccagcugcaacaugaa

SEQ ID NO: 21971 - RNA, 19 nt, Artificial Sequence
  Sense Oligo
ucauguugcagcugguaga

SEQ ID NO: 21972 - RNA, 19 nt, Artificial Sequence
  Antisense Oligo
ucuaccagcugcaacauga

SEQ ID NO: 21973 - RNA, 19 nt, Artificial Sequence
  Sense Oligo
cauguugcagcugguagag

SEQ ID NO: 21974 - RNA, 19 nt, Artificial Sequence
  Antisense Oligo
cucuaccagcugcaacaug

SEQ ID NO: 21975 - RNA, 19 nt, Artificial Sequence
  Sense Oligo
auguugcagcugguagagu

SEQ ID NO: 21976 - RNA, 19 nt, Artificial Sequence
  Antisense Oligo
acucuaccagcugcaacau

SEQ ID NO: 21977 - RNA, 19 nt, Artificial Sequence
  Sense Oligo
guugcagcugguagaguua

SEQ ID NO: 21978 - RNA, 19 nt, Artificial Sequence
  Antisense Oligo
uaacucuaccagcugcaac

SEQ ID NO: 21979 - RNA, 19 nt, Artificial Sequence
  Sense Oligo
uugcagcugguagaguuag

SEQ ID NO: 21980 - RNA, 19 nt, Artificial Sequence
  Antisense Oligo
cuaacucuaccagcugcaa

SEQ ID NO: 21981 - RNA, 19 nt, Artificial Sequence
  Sense Oligo
ugcagcugguagaguuagg

SEQ ID NO: 21982 - RNA, 19 nt, Artificial Sequence
  Antisense Oligo
ccuaacucuaccagcugca

SEQ ID NO: 21983 - RNA, 19 nt, Artificial Sequence
  Sense Oligo
gcagcugguagaguuagga

SEQ ID NO: 21984 - RNA, 19 nt, Artificial Sequence
  Antisense Oligo
uccuaacucuaccagcugc

SEQ ID NO: 21985 - RNA, 19 nt, Artificial Sequence
  Sense Oligo
guagaguuaggaaggccuc

SEQ ID NO: 21986 - RNA, 19 nt, Artificial Sequence
  Antisense Oligo
gaggccuuccuaacucuac

SEQ ID NO: 21987 - RNA, 19 nt, Artificial Sequence
  Sense Oligo
gaguuaggaaggccucuga

SEQ ID NO: 21988 - RNA, 19 nt, Artificial Sequence
  Antisense Oligo
ucagaggccuuccuaacuc

SEQ ID NO: 21989 - RNA, 19 nt, Artificial Sequence
  Sense Oligo
aguuaggaaggccucugag

SEQ ID NO: 21990 - RNA, 19 nt, Artificial Sequence
  Antisense Oligo
cucagaggccuuccuaacu

SEQ ID NO: 21991 - RNA, 19 nt, Artificial Sequence
  Sense Oligo
aggaaggccucugagucuu

SEQ ID NO: 21992 - RNA, 19 nt, Artificial Sequence
  Antisense Oligo
aagacucagaggccuuccu

SEQ ID NO: 21993 - RNA, 19 nt, Artificial Sequence
  Sense Oligo
ccucugagucuuuguuugg

SEQ ID NO: 21994 - RNA, 19 nt, Artificial Sequence
  Antisense Oligo
ccaaacaaagacucagagg

SEQ ID NO: 21995 - RNA, 19 nt, Artificial Sequence
  Sense Oligo
ucugagucuuuguuugguu

SEQ ID NO: 21996 - RNA, 19 nt, Artificial Sequence
  Antisense Oligo
aaccaaacaaagacucaga

SEQ ID NO: 21997 - RNA, 19 nt, Artificial Sequence
  Sense Oligo
cugagucuuuguuugguug

SEQ ID NO: 21998 - RNA, 19 nt, Artificial Sequence
  Antisense Oligo
caaccaaacaaagacucag

SEQ ID NO: 21999 - RNA, 19 nt, Artificial Sequence
  Sense Oligo
gagucuuuguuugguuggc

SEQ ID NO: 22000 - RNA, 19 nt, Artificial Sequence
  Antisense Oligo
gccaaccaaacaaagacuc

SEQ ID NO: 22001 - RNA, 19 nt, Artificial Sequence
  Sense Oligo
agucuuuguuugguuggcu

SEQ ID NO: 22002 - RNA, 19 nt, Artificial Sequence
  Antisense Oligo
agccaaccaaacaaagacu

SEQ ID NO: 22003 - RNA, 19 nt, Artificial Sequence
  Sense Oligo
gucuuuguuugguuggcug

SEQ ID NO: 22004 - RNA, 19 nt, Artificial Sequence
  Antisense Oligo
cagccaaccaaacaaagac

SEQ ID NO: 22005 - RNA, 19 nt, Artificial Sequence
  Sense Oligo
uggcccaccuuacuaggcg

SEQ ID NO: 22006 - RNA, 19 nt, Artificial Sequence
  Antisense Oligo
cgccuaguaaggugggcca

SEQ ID NO: 22007 - RNA, 19 nt, Artificial Sequence
  Sense Oligo
ggcccaccuuacuaggcgu

SEQ ID NO: 22008 - RNA, 19 nt, Artificial Sequence
  Antisense Oligo
acgccuaguaaggugggcc

SEQ ID NO: 22009 - RNA, 19 nt, Artificial Sequence
  Sense Oligo
gcccaccuuacuaggcgug

SEQ ID NO: 22010 - RNA, 19 nt, Artificial Sequence
  Antisense Oligo
cacgccuaguaaggugggc

SEQ ID NO: 22011 - RNA, 19 nt, Artificial Sequence
  Sense Oligo
accuuacuaggcguggugg

SEQ ID NO: 22012 - RNA, 19 nt, Artificial Sequence
  Antisense Oligo
ccaccacgccuaguaaggu

SEQ ID NO: 22013 - RNA, 19 nt, Artificial Sequence
  Sense Oligo
ccuuacuaggcgugguggu

SEQ ID NO: 22014 - RNA, 19 nt, Artificial Sequence
  Antisense Oligo
accaccacgccuaguaagg

SEQ ID NO: 22015 - RNA, 19 nt, Artificial Sequence
  Sense Oligo
cuuacuaggcguggugguu

SEQ ID NO: 22016 - RNA, 19 nt, Artificial Sequence
  Antisense Oligo
aaccaccacgccuaguaag

SEQ ID NO: 22017 - RNA, 19 nt, Artificial Sequence
  Sense Oligo
uuacuaggcguggugguuc

SEQ ID NO: 22018 - RNA, 19 nt, Artificial Sequence
  Antisense Oligo
gaaccaccacgccuaguaa

SEQ ID NO: 22019 - RNA, 19 nt, Artificial Sequence
  Sense Oligo
gugguucacgccuguaauc

SEQ ID NO: 22020 - RNA, 19 nt, Artificial Sequence
  Antisense Oligo
gauuacaggcgugaaccac

SEQ ID NO: 22021 - RNA, 19 nt, Artificial Sequence
  Sense Oligo
ugguucacgccuguaaucc

SEQ ID NO: 22022 - RNA, 19 nt, Artificial Sequence
  Antisense Oligo
ggauuacaggcgugaacca

SEQ ID NO: 22023 - RNA, 19 nt, Artificial Sequence
  Sense Oligo
gguucacgccuguaauccc

SEQ ID NO: 22024 - RNA, 19 nt, Artificial Sequence
  Antisense Oligo
gggauuacaggcgugaacc

SEQ ID NO: 22025 - RNA, 19 nt, Artificial Sequence
  Sense Oligo
acgccuguaaucccagcac

SEQ ID NO: 22026 - RNA, 19 nt, Artificial Sequence
  Antisense Oligo
gugcugggauuacaggcgu

SEQ ID NO: 22027 - RNA, 19 nt, Artificial Sequence
  Sense Oligo
cagcacuuugggaggccga

SEQ ID NO: 22028 - RNA, 19 nt, Artificial Sequence
  Antisense Oligo
ucggccucccaaagugcug

SEQ ID NO: 22029 - RNA, 19 nt, Artificial Sequence
  Sense Oligo
agcacuuugggaggccgag

SEQ ID NO: 22030 - RNA, 19 nt, Artificial Sequence
  Antisense Oligo
cucggccucccaaagugcu

SEQ ID NO: 22031 - RNA, 19 nt, Artificial Sequence
  Sense Oligo
cacuuugggaggccgaggu

SEQ ID NO: 22032 - RNA, 19 nt, Artificial Sequence
  Antisense Oligo
accucggccucccaaagug

SEQ ID NO: 22033 - RNA, 19 nt, Artificial Sequence
  Sense Oligo
acuuugggaggccgaggug

SEQ ID NO: 22034 - RNA, 19 nt, Artificial Sequence
  Antisense Oligo
caccucggccucccaaagu

SEQ ID NO: 22035 - RNA, 19 nt, Artificial Sequence
  Sense Oligo
cuuugggaggccgagguga

SEQ ID NO: 22036 - RNA, 19 nt, Artificial Sequence
  Antisense Oligo
ucaccucggccucccaaag

SEQ ID NO: 22037 - RNA, 19 nt, Artificial Sequence
  Sense Oligo
uuugggaggccgaggugag

SEQ ID NO: 22038 - RNA, 19 nt, Artificial Sequence
  Antisense Oligo
cucaccucggccucccaaa

SEQ ID NO: 22039 - RNA, 19 nt, Artificial Sequence
  Sense Oligo
cgaggugaguagaucgcuu

SEQ ID NO: 22040 - RNA, 19 nt, Artificial Sequence
  Antisense Oligo
aagcgaucuacucaccucg

SEQ ID NO: 22041 - RNA, 19 nt, Artificial Sequence
  Sense Oligo
agaucgcuugagcccagga

SEQ ID NO: 22042 - RNA, 19 nt, Artificial Sequence
  Antisense Oligo
uccugggcucaagcgaucu

SEQ ID NO: 22043 - RNA, 19 nt, Artificial Sequence
  Sense Oligo
gaucgcuugagcccaggag

SEQ ID NO: 22044 - RNA, 19 nt, Artificial Sequence
  Antisense Oligo
cuccugggcucaagcgauc

SEQ ID NO: 22045 - RNA, 19 nt, Artificial Sequence
  Sense Oligo
aucgcuugagcccaggagu

SEQ ID NO: 22046 - RNA, 19 nt, Artificial Sequence
  Antisense Oligo
acuccugggcucaagcgau

SEQ ID NO: 22047 - RNA, 19 nt, Artificial Sequence
  Sense Oligo
ucgcuugagcccaggaguu

SEQ ID NO: 22048 - RNA, 19 nt, Artificial Sequence
  Antisense Oligo
aacuccugggcucaagcga

SEQ ID NO: 22049 - RNA, 19 nt, Artificial Sequence
  Sense Oligo
cgcuugagcccaggaguuc

SEQ ID NO: 22050 - RNA, 19 nt, Artificial Sequence
  Antisense Oligo
gaacuccugggcucaagcg

SEQ ID NO: 22051 - RNA, 19 nt, Artificial Sequence
  Sense Oligo
gcuugagcccaggaguucg

SEQ ID NO: 22052 - RNA, 19 nt, Artificial Sequence
  Antisense Oligo
cgaacuccugggcucaagc

SEQ ID NO: 22053 - RNA, 19 nt, Artificial Sequence
  Sense Oligo
cuugagcccaggaguucga

SEQ ID NO: 22054 - RNA, 19 nt, Artificial Sequence
  Antisense Oligo
ucgaacuccugggcucaag

SEQ ID NO: 22055 - RNA, 19 nt, Artificial Sequence
  Sense Oligo
uugagcccaggaguucgag

SEQ ID NO: 22056 - RNA, 19 nt, Artificial Sequence
  Antisense Oligo
cucgaacuccugggcucaa

SEQ ID NO: 22057 - RNA, 19 nt, Artificial Sequence
  Sense Oligo
caagaauuagcuggagcag

SEQ ID NO: 22058 - RNA, 19 nt, Artificial Sequence
  Antisense Oligo
cugcuccagcuaauucuug

SEQ ID NO: 22059 - RNA, 19 nt, Artificial Sequence
  Sense Oligo
aauuagcuggagcaggagg

SEQ ID NO: 22060 - RNA, 19 nt, Artificial Sequence
  Antisense Oligo
ccuccugcuccagcuaauu

SEQ ID NO: 22061 - RNA, 19 nt, Artificial Sequence
  Sense Oligo
auuagcuggagcaggagga

SEQ ID NO: 22062 - RNA, 19 nt, Artificial Sequence
  Antisense Oligo
uccuccugcuccagcuaau

SEQ ID NO: 22063 - RNA, 19 nt, Artificial Sequence
  Sense Oligo
cuggagcaggaggaucacu

SEQ ID NO: 22064 - RNA, 19 nt, Artificial Sequence
  Antisense Oligo
agugauccuccugcuccag

SEQ ID NO: 22065 - RNA, 19 nt, Artificial Sequence
  Sense Oligo
uggagcaggaggaucacuu

SEQ ID NO: 22066 - RNA, 19 nt, Artificial Sequence
  Antisense Oligo
aagugauccuccugcucca

SEQ ID NO: 22067 - RNA, 19 nt, Artificial Sequence
  Sense Oligo
ggagcaggaggaucacuug

SEQ ID NO: 22068 - RNA, 19 nt, Artificial Sequence
  Antisense Oligo
caagugauccuccugcucc

SEQ ID NO: 22069 - RNA, 19 nt, Artificial Sequence
  Sense Oligo
ggaucacuugagccuggga

SEQ ID NO: 22070 - RNA, 19 nt, Artificial Sequence
  Antisense Oligo
ucccaggcucaagugaucc

SEQ ID NO: 22071 - RNA, 19 nt, Artificial Sequence
  Sense Oligo
acugcacuccagccugggu

SEQ ID NO: 22072 - RNA, 19 nt, Artificial Sequence
  Antisense Oligo
acccaggcuggagugcagu

SEQ ID NO: 22073 - RNA, 19 nt, Artificial Sequence
  Sense Oligo
ugcacuccagccuggguga

SEQ ID NO: 22074 - RNA, 19 nt, Artificial Sequence
  Antisense Oligo
ucacccaggcuggagugca

SEQ ID NO: 22075 - RNA, 19 nt, Artificial Sequence
  Sense Oligo
cacuccagccugggugaca

SEQ ID NO: 22076 - RNA, 19 nt, Artificial Sequence
  Antisense Oligo
ugucacccaggcuggagug

SEQ ID NO: 22077 - RNA, 19 nt, Artificial Sequence
  Sense Oligo
acuccagccugggugacag

SEQ ID NO: 22078 - RNA, 19 nt, Artificial Sequence
  Antisense Oligo
cugucacccaggcuggagu

SEQ ID NO: 22079 - RNA, 19 nt, Artificial Sequence
  Sense Oligo
cuccagccugggugacaga

SEQ ID NO: 22080 - RNA, 19 nt, Artificial Sequence
  Antisense Oligo
ucugucacccaggcuggag

SEQ ID NO: 22081 - RNA, 19 nt, Artificial Sequence
  Sense Oligo
uccagccugggugacagag

SEQ ID NO: 22082 - RNA, 19 nt, Artificial Sequence
  Antisense Oligo
cucugucacccaggcugga

SEQ ID NO: 22083 - RNA, 19 nt, Artificial Sequence
  Sense Oligo
ccagccugggugacagagu

SEQ ID NO: 22084 - RNA, 19 nt, Artificial Sequence
  Antisense Oligo
acucugucacccaggcugg

SEQ ID NO: 22085 - RNA, 19 nt, Artificial Sequence
  Sense Oligo
cagccugggugacagagug

SEQ ID NO: 22086 - RNA, 19 nt, Artificial Sequence
  Antisense Oligo
cacucugucacccaggcug

SEQ ID NO: 22087 - RNA, 19 nt, Artificial Sequence
  Sense Oligo
agccugggugacagaguga

SEQ ID NO: 22088 - RNA, 19 nt, Artificial Sequence
  Antisense Oligo
ucacucugucacccaggcu

SEQ ID NO: 22089 - RNA, 19 nt, Artificial Sequence
  Sense Oligo
gccugggugacagagugag

SEQ ID NO: 22090 - RNA, 19 nt, Artificial Sequence
  Antisense Oligo
cucacucugucacccaggc

SEQ ID NO: 22091 - RNA, 19 nt, Artificial Sequence
  Sense Oligo
aaaagccuuacaguggucu

SEQ ID NO: 22092 - RNA, 19 nt, Artificial Sequence
  Antisense Oligo
agaccacuguaaggcuuuu

SEQ ID NO: 22093 - RNA, 19 nt, Artificial Sequence
  Sense Oligo
aaagccuuacaguggucuc

SEQ ID NO: 22094 - RNA, 19 nt, Artificial Sequence
  Antisense Oligo
gagaccacuguaaggcuuu

SEQ ID NO: 22095 - RNA, 19 nt, Artificial Sequence
  Sense Oligo
aagccuuacaguggucucu

SEQ ID NO: 22096 - RNA, 19 nt, Artificial Sequence
  Antisense Oligo
agagaccacuguaaggcuu

SEQ ID NO: 22097 - RNA, 19 nt, Artificial Sequence
  Sense Oligo
agccuuacaguggucucuc

SEQ ID NO: 22098 - RNA, 19 nt, Artificial Sequence
  Antisense Oligo
gagagaccacuguaaggcu

SEQ ID NO: 22099 - RNA, 19 nt, Artificial Sequence
  Sense Oligo
gccuuacaguggucucuca

SEQ ID NO: 22100 - RNA, 19 nt, Artificial Sequence
  Antisense Oligo
ugagagaccacuguaaggc

SEQ ID NO: 22101 - RNA, 19 nt, Artificial Sequence
  Sense Oligo
ccuuacaguggucucucag

SEQ ID NO: 22102 - RNA, 19 nt, Artificial Sequence
  Antisense Oligo
cugagagaccacuguaagg

SEQ ID NO: 22103 - RNA, 19 nt, Artificial Sequence
  Sense Oligo
cuuacaguggucucucagu

SEQ ID NO: 22104 - RNA, 19 nt, Artificial Sequence
  Antisense Oligo
acugagagaccacuguaag

SEQ ID NO: 22105 - RNA, 19 nt, Artificial Sequence
  Sense Oligo
uuacaguggucucucagug

SEQ ID NO: 22106 - RNA, 19 nt, Artificial Sequence
  Antisense Oligo
cacugagagaccacuguaa

SEQ ID NO: 22107 - RNA, 19 nt, Artificial Sequence
  Sense Oligo
uacaguggucucucagugc

SEQ ID NO: 22108 - RNA, 19 nt, Artificial Sequence
  Antisense Oligo
gcacugagagaccacugua

SEQ ID NO: 22109 - RNA, 19 nt, Artificial Sequence
  Sense Oligo
acaguggucucucagugcu

SEQ ID NO: 22110 - RNA, 19 nt, Artificial Sequence
  Antisense Oligo
agcacugagagaccacugu

SEQ ID NO: 22111 - RNA, 19 nt, Artificial Sequence
  Sense Oligo
uggucucucagugcucaaa

SEQ ID NO: 22112 - RNA, 19 nt, Artificial Sequence
  Antisense Oligo
uuugagcacugagagacca

SEQ ID NO: 22113 - RNA, 19 nt, Artificial Sequence
  Sense Oligo
ggucucucagugcucaaau

SEQ ID NO: 22114 - RNA, 19 nt, Artificial Sequence
  Antisense Oligo
auuugagcacugagagacc

SEQ ID NO: 22115 - RNA, 19 nt, Artificial Sequence
  Sense Oligo
gucucucagugcucaaaug

SEQ ID NO: 22116 - RNA, 19 nt, Artificial Sequence
  Antisense Oligo
cauuugagcacugagagac

SEQ ID NO: 22117 - RNA, 19 nt, Artificial Sequence
  Sense Oligo
agucuugcucugucaccca

SEQ ID NO: 22118 - RNA, 19 nt, Artificial Sequence
  Antisense Oligo
ugggugacagagcaagacu

SEQ ID NO: 22119 - RNA, 19 nt, Artificial Sequence
  Sense Oligo
gucuugcucugucacccag

SEQ ID NO: 22120 - RNA, 19 nt, Artificial Sequence
  Antisense Oligo
cugggugacagagcaagac

SEQ ID NO: 22121 - RNA, 19 nt, Artificial Sequence
  Sense Oligo
ucuugcucugucacccagg

SEQ ID NO: 22122 - RNA, 19 nt, Artificial Sequence
  Antisense Oligo
ccugggugacagagcaaga

SEQ ID NO: 22123 - RNA, 19 nt, Artificial Sequence
  Sense Oligo
cuugcucugucacccaggc

SEQ ID NO: 22124 - RNA, 19 nt, Artificial Sequence
  Antisense Oligo
gccugggugacagagcaag

SEQ ID NO: 22125 - RNA, 19 nt, Artificial Sequence
  Sense Oligo
uugcucugucacccaggcu

SEQ ID NO: 22126 - RNA, 19 nt, Artificial Sequence
  Antisense Oligo
agccugggugacagagcaa

SEQ ID NO: 22127 - RNA, 19 nt, Artificial Sequence
  Sense Oligo
ugcucugucacccaggcug

SEQ ID NO: 22128 - RNA, 19 nt, Artificial Sequence
  Antisense Oligo
cagccugggugacagagca

SEQ ID NO: 22129 - RNA, 19 nt, Artificial Sequence
  Sense Oligo
cucugucacccaggcugga

SEQ ID NO: 22130 - RNA, 19 nt, Artificial Sequence
  Antisense Oligo
uccagccugggugacagag

SEQ ID NO: 22131 - RNA, 19 nt, Artificial Sequence
  Sense Oligo
ucugucacccaggcuggag

SEQ ID NO: 22132 - RNA, 19 nt, Artificial Sequence
  Antisense Oligo
cuccagccugggugacaga

SEQ ID NO: 22133 - RNA, 19 nt, Artificial Sequence
  Sense Oligo
ucacccaggcuggagugca

SEQ ID NO: 22134 - RNA, 19 nt, Artificial Sequence
  Antisense Oligo
ugcacuccagccuggguga

SEQ ID NO: 22135 - RNA, 19 nt, Artificial Sequence
  Sense Oligo
aggcuggagugcaguggug

SEQ ID NO: 22136 - RNA, 19 nt, Artificial Sequence
  Antisense Oligo
caccacugcacuccagccu

SEQ ID NO: 22137 - RNA, 19 nt, Artificial Sequence
  Sense Oligo
ccauuucagcucacugcaa

SEQ ID NO: 22138 - RNA, 19 nt, Artificial Sequence
  Antisense Oligo
uugcagugagcugaaaugg

SEQ ID NO: 22139 - RNA, 19 nt, Artificial Sequence
  Sense Oligo
cauuucagcucacugcaac

SEQ ID NO: 22140 - RNA, 19 nt, Artificial Sequence
  Antisense Oligo
guugcagugagcugaaaug

SEQ ID NO: 22141 - RNA, 19 nt, Artificial Sequence
  Sense Oligo
auuucagcucacugcaacc

SEQ ID NO: 22142 - RNA, 19 nt, Artificial Sequence
  Antisense Oligo
gguugcagugagcugaaau

SEQ ID NO: 22143 - RNA, 19 nt, Artificial Sequence
  Sense Oligo
uuucagcucacugcaaccu

SEQ ID NO: 22144 - RNA, 19 nt, Artificial Sequence
  Antisense Oligo
agguugcagugagcugaaa

SEQ ID NO: 22145 - RNA, 19 nt, Artificial Sequence
  Sense Oligo
uucagcucacugcaaccuu

SEQ ID NO: 22146 - RNA, 19 nt, Artificial Sequence
  Antisense Oligo
aagguugcagugagcugaa

SEQ ID NO: 22147 - RNA, 19 nt, Artificial Sequence
  Sense Oligo
ucagcucacugcaaccuuu

SEQ ID NO: 22148 - RNA, 19 nt, Artificial Sequence
  Antisense Oligo
aaagguugcagugagcuga

SEQ ID NO: 22149 - RNA, 19 nt, Artificial Sequence
  Sense Oligo
cagcucacugcaaccuuua

SEQ ID NO: 22150 - RNA, 19 nt, Artificial Sequence
  Antisense Oligo
uaaagguugcagugagcug

SEQ ID NO: 22151 - RNA, 19 nt, Artificial Sequence
  Sense Oligo
agcucacugcaaccuuuac

SEQ ID NO: 22152 - RNA, 19 nt, Artificial Sequence
  Antisense Oligo
guaaagguugcagugagcu

SEQ ID NO: 22153 - RNA, 19 nt, Artificial Sequence
  Sense Oligo
gcucacugcaaccuuuacc

SEQ ID NO: 22154 - RNA, 19 nt, Artificial Sequence
  Antisense Oligo
gguaaagguugcagugagc

SEQ ID NO: 22155 - RNA, 19 nt, Artificial Sequence
  Sense Oligo
cccagguucaagugauguu

SEQ ID NO: 22156 - RNA, 19 nt, Artificial Sequence
  Antisense Oligo
aacaucacuugaaccuggg

SEQ ID NO: 22157 - RNA, 19 nt, Artificial Sequence
  Sense Oligo
ccagguucaagugauguuc

SEQ ID NO: 22158 - RNA, 19 nt, Artificial Sequence
  Antisense Oligo
gaacaucacuugaaccugg

SEQ ID NO: 22159 - RNA, 19 nt, Artificial Sequence
  Sense Oligo
cagguucaagugauguucc

SEQ ID NO: 22160 - RNA, 19 nt, Artificial Sequence
  Antisense Oligo
ggaacaucacuugaaccug

SEQ ID NO: 22161 - RNA, 19 nt, Artificial Sequence
  Sense Oligo
cugccucagccucccaagu

SEQ ID NO: 22162 - RNA, 19 nt, Artificial Sequence
  Antisense Oligo
acuugggaggcugaggcag

SEQ ID NO: 22163 - RNA, 19 nt, Artificial Sequence
  Sense Oligo
ugccucagccucccaagua

SEQ ID NO: 22164 - RNA, 19 nt, Artificial Sequence
  Antisense Oligo
uacuugggaggcugaggca

SEQ ID NO: 22165 - RNA, 19 nt, Artificial Sequence
  Sense Oligo
gccucagccucccaaguag

SEQ ID NO: 22166 - RNA, 19 nt, Artificial Sequence
  Antisense Oligo
cuacuugggaggcugaggc

SEQ ID NO: 22167 - RNA, 19 nt, Artificial Sequence
  Sense Oligo
ccucagccucccaaguagc

SEQ ID NO: 22168 - RNA, 19 nt, Artificial Sequence
  Antisense Oligo
gcuacuugggaggcugagg

SEQ ID NO: 22169 - RNA, 19 nt, Artificial Sequence
  Sense Oligo
cucagccucccaaguagcg

SEQ ID NO: 22170 - RNA, 19 nt, Artificial Sequence
  Antisense Oligo
cgcuacuugggaggcugag

SEQ ID NO: 22171 - RNA, 19 nt, Artificial Sequence
  Sense Oligo
ucagccucccaaguagcgg

SEQ ID NO: 22172 - RNA, 19 nt, Artificial Sequence
  Antisense Oligo
ccgcuacuugggaggcuga

SEQ ID NO: 22173 - RNA, 19 nt, Artificial Sequence
  Sense Oligo
gggauuacaggcgugaggc

SEQ ID NO: 22174 - RNA, 19 nt, Artificial Sequence
  Antisense Oligo
gccucacgccuguaauccc

SEQ ID NO: 22175 - RNA, 19 nt, Artificial Sequence
  Sense Oligo
ggauuacaggcgugaggca

SEQ ID NO: 22176 - RNA, 19 nt, Artificial Sequence
  Antisense Oligo
ugccucacgccuguaaucc

SEQ ID NO: 22177 - RNA, 19 nt, Artificial Sequence
  Sense Oligo
gauuacaggcgugaggcac

SEQ ID NO: 22178 - RNA, 19 nt, Artificial Sequence
  Antisense Oligo
gugccucacgccuguaauc

SEQ ID NO: 22179 - RNA, 19 nt, Artificial Sequence
  Sense Oligo
auuacaggcgugaggcacc

SEQ ID NO: 22180 - RNA, 19 nt, Artificial Sequence
  Antisense Oligo
ggugccucacgccuguaau

SEQ ID NO: 22181 - RNA, 19 nt, Artificial Sequence
  Sense Oligo
aggcaccacccucagcuau

SEQ ID NO: 22182 - RNA, 19 nt, Artificial Sequence
  Antisense Oligo
auagcugaggguggugccu

SEQ ID NO: 22183 - RNA, 19 nt, Artificial Sequence
  Sense Oligo
acggcguuucaccauguug

SEQ ID NO: 22184 - RNA, 19 nt, Artificial Sequence
  Antisense Oligo
caacauggugaaacgccgu

SEQ ID NO: 22185 - RNA, 19 nt, Artificial Sequence
  Sense Oligo
cggcguuucaccauguugg

SEQ ID NO: 22186 - RNA, 19 nt, Artificial Sequence
  Antisense Oligo
ccaacauggugaaacgccg

SEQ ID NO: 22187 - RNA, 19 nt, Artificial Sequence
  Sense Oligo
ggcguuucaccauguuggc

SEQ ID NO: 22188 - RNA, 19 nt, Artificial Sequence
  Antisense Oligo
gccaacauggugaaacgcc

SEQ ID NO: 22189 - RNA, 19 nt, Artificial Sequence
  Sense Oligo
gcguuucaccauguuggcc

SEQ ID NO: 22190 - RNA, 19 nt, Artificial Sequence
  Antisense Oligo
ggccaacauggugaaacgc

SEQ ID NO: 22191 - RNA, 19 nt, Artificial Sequence
  Sense Oligo
cguuucaccauguuggcca

SEQ ID NO: 22192 - RNA, 19 nt, Artificial Sequence
  Antisense Oligo
uggccaacauggugaaacg

SEQ ID NO: 22193 - RNA, 19 nt, Artificial Sequence
  Sense Oligo
guuucaccauguuggccag

SEQ ID NO: 22194 - RNA, 19 nt, Artificial Sequence
  Antisense Oligo
cuggccaacauggugaaac

SEQ ID NO: 22195 - RNA, 19 nt, Artificial Sequence
  Sense Oligo
aacuccugaccucaaguga

SEQ ID NO: 22196 - RNA, 19 nt, Artificial Sequence
  Antisense Oligo
ucacuugaggucaggaguu

SEQ ID NO: 22197 - RNA, 19 nt, Artificial Sequence
  Sense Oligo
ccugaccucaagugaugcg

SEQ ID NO: 22198 - RNA, 19 nt, Artificial Sequence
  Antisense Oligo
cgcaucacuugaggucagg

SEQ ID NO: 22199 - RNA, 19 nt, Artificial Sequence
  Sense Oligo
cugaccucaagugaugcgc

SEQ ID NO: 22200 - RNA, 19 nt, Artificial Sequence
  Antisense Oligo
gcgcaucacuugaggucag

SEQ ID NO: 22201 - RNA, 19 nt, Artificial Sequence
  Sense Oligo
ugaccucaagugaugcgcc

SEQ ID NO: 22202 - RNA, 19 nt, Artificial Sequence
  Antisense Oligo
ggcgcaucacuugagguca

SEQ ID NO: 22203 - RNA, 19 nt, Artificial Sequence
  Sense Oligo
gcccaccuuggccucucaa

SEQ ID NO: 22204 - RNA, 19 nt, Artificial Sequence
  Antisense Oligo
uugagaggccaaggugggc

SEQ ID NO: 22205 - RNA, 19 nt, Artificial Sequence
  Sense Oligo
cccaccuuggccucucaaa

SEQ ID NO: 22206 - RNA, 19 nt, Artificial Sequence
  Antisense Oligo
uuugagaggccaagguggg

SEQ ID NO: 22207 - RNA, 19 nt, Artificial Sequence
  Sense Oligo
ccaccuuggccucucaaag

SEQ ID NO: 22208 - RNA, 19 nt, Artificial Sequence
  Antisense Oligo
cuuugagaggccaaggugg

SEQ ID NO: 22209 - RNA, 19 nt, Artificial Sequence
  Sense Oligo
caccuuggccucucaaagu

SEQ ID NO: 22210 - RNA, 19 nt, Artificial Sequence
  Antisense Oligo
acuuugagaggccaaggug

SEQ ID NO: 22211 - RNA, 19 nt, Artificial Sequence
  Sense Oligo
accuuggccucucaaagug

SEQ ID NO: 22212 - RNA, 19 nt, Artificial Sequence
  Antisense Oligo
cacuuugagaggccaaggu

SEQ ID NO: 22213 - RNA, 19 nt, Artificial Sequence
  Sense Oligo
ccuuggccucucaaagugc

SEQ ID NO: 22214 - RNA, 19 nt, Artificial Sequence
  Antisense Oligo
gcacuuugagaggccaagg

SEQ ID NO: 22215 - RNA, 19 nt, Artificial Sequence
  Sense Oligo
cuuggccucucaaagugcu

SEQ ID NO: 22216 - RNA, 19 nt, Artificial Sequence
  Antisense Oligo
agcacuuugagaggccaag

SEQ ID NO: 22217 - RNA, 19 nt, Artificial Sequence
  Sense Oligo
ccucucaaagugcugggau

SEQ ID NO: 22218 - RNA, 19 nt, Artificial Sequence
  Antisense Oligo
aucccagcacuuugagagg

SEQ ID NO: 22219 - RNA, 19 nt, Artificial Sequence
  Sense Oligo
cucucaaagugcugggauu

SEQ ID NO: 22220 - RNA, 19 nt, Artificial Sequence
  Antisense Oligo
aaucccagcacuuugagag

SEQ ID NO: 22221 - RNA, 19 nt, Artificial Sequence
  Sense Oligo
ucucaaagugcugggauua

SEQ ID NO: 22222 - RNA, 19 nt, Artificial Sequence
  Antisense Oligo
uaaucccagcacuuugaga

SEQ ID NO: 22223 - RNA, 19 nt, Artificial Sequence
  Sense Oligo
cucaaagugcugggauuac

SEQ ID NO: 22224 - RNA, 19 nt, Artificial Sequence
  Antisense Oligo
guaaucccagcacuuugag

SEQ ID NO: 22225 - RNA, 19 nt, Artificial Sequence
  Sense Oligo
ucaaagugcugggauuaca

SEQ ID NO: 22226 - RNA, 19 nt, Artificial Sequence
  Antisense Oligo
uguaaucccagcacuuuga

SEQ ID NO: 22227 - RNA, 19 nt, Artificial Sequence
  Sense Oligo
caaagugcugggauuacag

SEQ ID NO: 22228 - RNA, 19 nt, Artificial Sequence
  Antisense Oligo
cuguaaucccagcacuuug

SEQ ID NO: 22229 - RNA, 19 nt, Artificial Sequence
  Sense Oligo
gugcugggauuacaggugu

SEQ ID NO: 22230 - RNA, 19 nt, Artificial Sequence
  Antisense Oligo
acaccuguaaucccagcac

SEQ ID NO: 22231 - RNA, 19 nt, Artificial Sequence
  Sense Oligo
ugcugggauuacaggugug

SEQ ID NO: 22232 - RNA, 19 nt, Artificial Sequence
  Antisense Oligo
cacaccuguaaucccagca

SEQ ID NO: 22233 - RNA, 19 nt, Artificial Sequence
  Sense Oligo
gcugggauuacagguguga

SEQ ID NO: 22234 - RNA, 19 nt, Artificial Sequence
  Antisense Oligo
ucacaccuguaaucccagc

SEQ ID NO: 22235 - RNA, 19 nt, Artificial Sequence
  Sense Oligo
accuggccucaugucucuc

SEQ ID NO: 22236 - RNA, 19 nt, Artificial Sequence
  Antisense Oligo
gagagacaugaggccaggu

SEQ ID NO: 22237 - RNA, 19 nt, Artificial Sequence
  Sense Oligo
ccuggccucaugucucuca

SEQ ID NO: 22238 - RNA, 19 nt, Artificial Sequence
  Antisense Oligo
ugagagacaugaggccagg

SEQ ID NO: 22239 - RNA, 19 nt, Artificial Sequence
  Sense Oligo
cuggccucaugucucucac

SEQ ID NO: 22240 - RNA, 19 nt, Artificial Sequence
  Antisense Oligo
gugagagacaugaggccag

SEQ ID NO: 22241 - RNA, 19 nt, Artificial Sequence
  Sense Oligo
uggccucaugucucucacu

SEQ ID NO: 22242 - RNA, 19 nt, Artificial Sequence
  Antisense Oligo
agugagagacaugaggcca

SEQ ID NO: 22243 - RNA, 19 nt, Artificial Sequence
  Sense Oligo
ggccucaugucucucacuu

SEQ ID NO: 22244 - RNA, 19 nt, Artificial Sequence
  Antisense Oligo
aagugagagacaugaggcc

SEQ ID NO: 22245 - RNA, 19 nt, Artificial Sequence
  Sense Oligo
ucaagaguuagacaugauu

SEQ ID NO: 22246 - RNA, 19 nt, Artificial Sequence
  Antisense Oligo
aaucaugucuaacucuuga

SEQ ID NO: 22247 - RNA, 19 nt, Artificial Sequence
  Sense Oligo
caagaguuagacaugauua

SEQ ID NO: 22248 - RNA, 19 nt, Artificial Sequence
  Antisense Oligo
uaaucaugucuaacucuug

SEQ ID NO: 22249 - RNA, 19 nt, Artificial Sequence
  Sense Oligo
agaguuagacaugauuaag

SEQ ID NO: 22250 - RNA, 19 nt, Artificial Sequence
  Antisense Oligo
cuuaaucaugucuaacucu

SEQ ID NO: 22251 - RNA, 19 nt, Artificial Sequence
  Sense Oligo
gaguuagacaugauuaagc

SEQ ID NO: 22252 - RNA, 19 nt, Artificial Sequence
  Antisense Oligo
gcuuaaucaugucuaacuc

SEQ ID NO: 22253 - RNA, 19 nt, Artificial Sequence
  Sense Oligo
uagacaugauuaagcuucu

SEQ ID NO: 22254 - RNA, 19 nt, Artificial Sequence
  Antisense Oligo
agaagcuuaaucaugucua

SEQ ID NO: 22255 - RNA, 19 nt, Artificial Sequence
  Sense Oligo
agacaugauuaagcuucuu

SEQ ID NO: 22256 - RNA, 19 nt, Artificial Sequence
  Antisense Oligo
aagaagcuuaaucaugucu

SEQ ID NO: 22257 - RNA, 19 nt, Artificial Sequence
  Sense Oligo
caugauuaagcuucuugag

SEQ ID NO: 22258 - RNA, 19 nt, Artificial Sequence
  Antisense Oligo
cucaagaagcuuaaucaug

SEQ ID NO: 22259 - RNA, 19 nt, Artificial Sequence
  Sense Oligo
uucuugaggaaggcauguu

SEQ ID NO: 22260 - RNA, 19 nt, Artificial Sequence
  Antisense Oligo
aacaugccuuccucaagaa

SEQ ID NO: 22261 - RNA, 19 nt, Artificial Sequence
  Sense Oligo
auaggcugauagcuaggcc

SEQ ID NO: 22262 - RNA, 19 nt, Artificial Sequence
  Antisense Oligo
ggccuagcuaucagccuau

SEQ ID NO: 22263 - RNA, 19 nt, Artificial Sequence
  Sense Oligo
agcacuuugggaggcugag

SEQ ID NO: 22264 - RNA, 19 nt, Artificial Sequence
  Antisense Oligo
cucagccucccaaagugcu

SEQ ID NO: 22265 - RNA, 19 nt, Artificial Sequence
  Sense Oligo
gcacuuugggaggcugagg

SEQ ID NO: 22266 - RNA, 19 nt, Artificial Sequence
  Antisense Oligo
ccucagccucccaaagugc

SEQ ID NO: 22267 - RNA, 19 nt, Artificial Sequence
  Sense Oligo
cacuuugggaggcugaggu

SEQ ID NO: 22268 - RNA, 19 nt, Artificial Sequence
  Antisense Oligo
accucagccucccaaagug

SEQ ID NO: 22269 - RNA, 19 nt, Artificial Sequence
  Sense Oligo
acuuugggaggcugaggua

SEQ ID NO: 22270 - RNA, 19 nt, Artificial Sequence
  Antisense Oligo
uaccucagccucccaaagu

SEQ ID NO: 22271 - RNA, 19 nt, Artificial Sequence
  Sense Oligo
cuuugggaggcugagguag

SEQ ID NO: 22272 - RNA, 19 nt, Artificial Sequence
  Antisense Oligo
cuaccucagccucccaaag

SEQ ID NO: 22273 - RNA, 19 nt, Artificial Sequence
  Sense Oligo
uuugggaggcugagguagg

SEQ ID NO: 22274 - RNA, 19 nt, Artificial Sequence
  Antisense Oligo
ccuaccucagccucccaaa

SEQ ID NO: 22275 - RNA, 19 nt, Artificial Sequence
  Sense Oligo
uugggaggcugagguaggu

SEQ ID NO: 22276 - RNA, 19 nt, Artificial Sequence
  Antisense Oligo
accuaccucagccucccaa

SEQ ID NO: 22277 - RNA, 19 nt, Artificial Sequence
  Sense Oligo
ugggaggcugagguaggug

SEQ ID NO: 22278 - RNA, 19 nt, Artificial Sequence
  Antisense Oligo
caccuaccucagccuccca

SEQ ID NO: 22279 - RNA, 19 nt, Artificial Sequence
  Sense Oligo
ggaggcugagguaggugga

SEQ ID NO: 22280 - RNA, 19 nt, Artificial Sequence
  Antisense Oligo
uccaccuaccucagccucc

SEQ ID NO: 22281 - RNA, 19 nt, Artificial Sequence
  Sense Oligo
gaggcugagguagguggau

SEQ ID NO: 22282 - RNA, 19 nt, Artificial Sequence
  Antisense Oligo
auccaccuaccucagccuc

SEQ ID NO: 22283 - RNA, 19 nt, Artificial Sequence
  Sense Oligo
agaccagccuggccaacgu

SEQ ID NO: 22284 - RNA, 19 nt, Artificial Sequence
  Antisense Oligo
acguuggccaggcuggucu

SEQ ID NO: 22285 - RNA, 19 nt, Artificial Sequence
  Sense Oligo
auuagcugggugugguggc

SEQ ID NO: 22286 - RNA, 19 nt, Artificial Sequence
  Antisense Oligo
gccaccacacccagcuaau

SEQ ID NO: 22287 - RNA, 19 nt, Artificial Sequence
  Sense Oligo
uuagcugggugugguggcu

SEQ ID NO: 22288 - RNA, 19 nt, Artificial Sequence
  Antisense Oligo
agccaccacacccagcuaa

SEQ ID NO: 22289 - RNA, 19 nt, Artificial Sequence
  Sense Oligo
uagcugggugugguggcuc

SEQ ID NO: 22290 - RNA, 19 nt, Artificial Sequence
  Antisense Oligo
gagccaccacacccagcua

SEQ ID NO: 22291 - RNA, 19 nt, Artificial Sequence
  Sense Oligo
agcugggugugguggcuca

SEQ ID NO: 22292 - RNA, 19 nt, Artificial Sequence
  Antisense Oligo
ugagccaccacacccagcu

SEQ ID NO: 22293 - RNA, 19 nt, Artificial Sequence
  Sense Oligo
gcugggugugguggcucau

SEQ ID NO: 22294 - RNA, 19 nt, Artificial Sequence
  Antisense Oligo
augagccaccacacccagc

SEQ ID NO: 22295 - RNA, 19 nt, Artificial Sequence
  Sense Oligo
cugggugugguggcucaug

SEQ ID NO: 22296 - RNA, 19 nt, Artificial Sequence
  Antisense Oligo
caugagccaccacacccag

SEQ ID NO: 22297 - RNA, 19 nt, Artificial Sequence
  Sense Oligo
ugggugugguggcucaugc

SEQ ID NO: 22298 - RNA, 19 nt, Artificial Sequence
  Antisense Oligo
gcaugagccaccacaccca

SEQ ID NO: 22299 - RNA, 19 nt, Artificial Sequence
  Sense Oligo
ggugugguggcucaugccu

SEQ ID NO: 22300 - RNA, 19 nt, Artificial Sequence
  Antisense Oligo
aggcaugagccaccacacc

SEQ ID NO: 22301 - RNA, 19 nt, Artificial Sequence
  Sense Oligo
gugugguggcucaugccug

SEQ ID NO: 22302 - RNA, 19 nt, Artificial Sequence
  Antisense Oligo
caggcaugagccaccacac

SEQ ID NO: 22303 - RNA, 19 nt, Artificial Sequence
  Sense Oligo
ugugguggcucaugccugu

SEQ ID NO: 22304 - RNA, 19 nt, Artificial Sequence
  Antisense Oligo
acaggcaugagccaccaca

SEQ ID NO: 22305 - RNA, 19 nt, Artificial Sequence
  Sense Oligo
gugguggcucaugccugua

SEQ ID NO: 22306 - RNA, 19 nt, Artificial Sequence
  Antisense Oligo
uacaggcaugagccaccac

SEQ ID NO: 22307 - RNA, 19 nt, Artificial Sequence
  Sense Oligo
ugguggcucaugccuguaa

SEQ ID NO: 22308 - RNA, 19 nt, Artificial Sequence
  Antisense Oligo
uuacaggcaugagccacca

SEQ ID NO: 22309 - RNA, 19 nt, Artificial Sequence
  Sense Oligo
gguggcucaugccuguaau

SEQ ID NO: 22310 - RNA, 19 nt, Artificial Sequence
  Antisense Oligo
auuacaggcaugagccacc

SEQ ID NO: 22311 - RNA, 19 nt, Artificial Sequence
  Sense Oligo
guggcucaugccuguaauc

SEQ ID NO: 22312 - RNA, 19 nt, Artificial Sequence
  Antisense Oligo
gauuacaggcaugagccac

SEQ ID NO: 22313 - RNA, 19 nt, Artificial Sequence
  Sense Oligo
uggcucaugccuguaaucc

SEQ ID NO: 22314 - RNA, 19 nt, Artificial Sequence
  Antisense Oligo
ggauuacaggcaugagcca

SEQ ID NO: 22315 - RNA, 19 nt, Artificial Sequence
  Sense Oligo
ggcucaugccuguaauccc

SEQ ID NO: 22316 - RNA, 19 nt, Artificial Sequence
  Antisense Oligo
gggauuacaggcaugagcc

SEQ ID NO: 22317 - RNA, 19 nt, Artificial Sequence
  Sense Oligo
augccuguaaucccagcuu

SEQ ID NO: 22318 - RNA, 19 nt, Artificial Sequence
  Antisense Oligo
aagcugggauuacaggcau

SEQ ID NO: 22319 - RNA, 19 nt, Artificial Sequence
  Sense Oligo
acggagguugcagugagcu

SEQ ID NO: 22320 - RNA, 19 nt, Artificial Sequence
  Antisense Oligo
agcucacugcaaccuccgu

SEQ ID NO: 22321 - RNA, 19 nt, Artificial Sequence
  Sense Oligo
cggagguugcagugagcug

SEQ ID NO: 22322 - RNA, 19 nt, Artificial Sequence
  Antisense Oligo
cagcucacugcaaccuccg

SEQ ID NO: 22323 - RNA, 19 nt, Artificial Sequence
  Sense Oligo
ggagguugcagugagcuga

SEQ ID NO: 22324 - RNA, 19 nt, Artificial Sequence
  Antisense Oligo
ucagcucacugcaaccucc

SEQ ID NO: 22325 - RNA, 19 nt, Artificial Sequence
  Sense Oligo
gagguugcagugagcugag

SEQ ID NO: 22326 - RNA, 19 nt, Artificial Sequence
  Antisense Oligo
cucagcucacugcaaccuc

SEQ ID NO: 22327 - RNA, 19 nt, Artificial Sequence
  Sense Oligo
acugcacuccagccugggu

SEQ ID NO: 22328 - RNA, 19 nt, Artificial Sequence
  Antisense Oligo
acccaggcuggagugcagu

SEQ ID NO: 22329 - RNA, 19 nt, Artificial Sequence
  Sense Oligo
ugcacuccagccuggguga

SEQ ID NO: 22330 - RNA, 19 nt, Artificial Sequence
  Antisense Oligo
ucacccaggcuggagugca

SEQ ID NO: 22331 - RNA, 19 nt, Artificial Sequence
  Sense Oligo
cacuccagccugggugaca

SEQ ID NO: 22332 - RNA, 19 nt, Artificial Sequence
  Antisense Oligo
ugucacccaggcuggagug

SEQ ID NO: 22333 - RNA, 19 nt, Artificial Sequence
  Sense Oligo
agaccauccuggccaauau

SEQ ID NO: 22334 - RNA, 19 nt, Artificial Sequence
  Antisense Oligo
auauuggccaggauggucu

SEQ ID NO: 22335 - RNA, 19 nt, Artificial Sequence
  Sense Oligo
gaccauccuggccaauaug

SEQ ID NO: 22336 - RNA, 19 nt, Artificial Sequence
  Antisense Oligo
cauauuggccaggaugguc

SEQ ID NO: 22337 - RNA, 19 nt, Artificial Sequence
  Sense Oligo
guaccuguagucccagcua

SEQ ID NO: 22338 - RNA, 19 nt, Artificial Sequence
  Antisense Oligo
uagcugggacuacagguac

SEQ ID NO: 22339 - RNA, 19 nt, Artificial Sequence
  Sense Oligo
agcuacucgggaggcugag

SEQ ID NO: 22340 - RNA, 19 nt, Artificial Sequence
  Antisense Oligo
cucagccucccgaguagcu

SEQ ID NO: 22341 - RNA, 19 nt, Artificial Sequence
  Sense Oligo
uacucgggaggcugaggca

SEQ ID NO: 22342 - RNA, 19 nt, Artificial Sequence
  Antisense Oligo
ugccucagccucccgagua

SEQ ID NO: 22343 - RNA, 19 nt, Artificial Sequence
  Sense Oligo
acccaggagguggagguug

SEQ ID NO: 22344 - RNA, 19 nt, Artificial Sequence
  Antisense Oligo
caaccuccaccuccugggu

SEQ ID NO: 22345 - RNA, 19 nt, Artificial Sequence
  Sense Oligo
ccaggagguggagguugca

SEQ ID NO: 22346 - RNA, 19 nt, Artificial Sequence
  Antisense Oligo
ugcaaccuccaccuccugg

SEQ ID NO: 22347 - RNA, 19 nt, Artificial Sequence
  Sense Oligo
caggagguggagguugcag

SEQ ID NO: 22348 - RNA, 19 nt, Artificial Sequence
  Antisense Oligo
cugcaaccuccaccuccug

SEQ ID NO: 22349 - RNA, 19 nt, Artificial Sequence
  Sense Oligo
gagguugcagugagccgag

SEQ ID NO: 22350 - RNA, 19 nt, Artificial Sequence
  Antisense Oligo
cucggcucacugcaaccuc

SEQ ID NO: 22351 - RNA, 19 nt, Artificial Sequence
  Sense Oligo
agccuuauugugauaugga

SEQ ID NO: 22352 - RNA, 19 nt, Artificial Sequence
  Antisense Oligo
uccauaucacaauaaggcu

SEQ ID NO: 22353 - RNA, 19 nt, Artificial Sequence
  Sense Oligo
agaguuugcaaugucugga

SEQ ID NO: 22354 - RNA, 19 nt, Artificial Sequence
  Antisense Oligo
uccagacauugcaaacucu

SEQ ID NO: 22355 - RNA, 19 nt, Artificial Sequence
  Sense Oligo
gaguuugcaaugucuggag

SEQ ID NO: 22356 - RNA, 19 nt, Artificial Sequence
  Antisense Oligo
cuccagacauugcaaacuc

SEQ ID NO: 22357 - RNA, 19 nt, Artificial Sequence
  Sense Oligo
aaccacagccgaauccaca

SEQ ID NO: 22358 - RNA, 19 nt, Artificial Sequence
  Antisense Oligo
uguggauucggcugugguu

SEQ ID NO: 22359 - RNA, 19 nt, Artificial Sequence
  Sense Oligo
acagccgaauccacaguaa

SEQ ID NO: 22360 - RNA, 19 nt, Artificial Sequence
  Antisense Oligo
uuacuguggauucggcugu

SEQ ID NO: 22361 - RNA, 19 nt, Artificial Sequence
  Sense Oligo
cagccgaauccacaguaaa

SEQ ID NO: 22362 - RNA, 19 nt, Artificial Sequence
  Antisense Oligo
uuuacuguggauucggcug

SEQ ID NO: 22363 - RNA, 19 nt, Artificial Sequence
  Sense Oligo
agccgaauccacaguaaag

SEQ ID NO: 22364 - RNA, 19 nt, Artificial Sequence
  Antisense Oligo
cuuuacuguggauucggcu

SEQ ID NO: 22365 - RNA, 19 nt, Artificial Sequence
  Sense Oligo
gccgaauccacaguaaagc

SEQ ID NO: 22366 - RNA, 19 nt, Artificial Sequence
  Antisense Oligo
gcuuuacuguggauucggc

SEQ ID NO: 22367 - RNA, 19 nt, Artificial Sequence
  Sense Oligo
ccgaauccacaguaaagcc

SEQ ID NO: 22368 - RNA, 19 nt, Artificial Sequence
  Antisense Oligo
ggcuuuacuguggauucgg

SEQ ID NO: 22369 - RNA, 19 nt, Artificial Sequence
  Sense Oligo
cacaggcugacagaguuga

SEQ ID NO: 22370 - RNA, 19 nt, Artificial Sequence
  Antisense Oligo
ucaacucugucagccugug

SEQ ID NO: 22371 - RNA, 19 nt, Artificial Sequence
  Sense Oligo
ggcugacagaguugaggag

SEQ ID NO: 22372 - RNA, 19 nt, Artificial Sequence
  Antisense Oligo
cuccucaacucugucagcc

SEQ ID NO: 22373 - RNA, 19 nt, Artificial Sequence
  Sense Oligo
ugacagaguugaggaggcu

SEQ ID NO: 22374 - RNA, 19 nt, Artificial Sequence
  Antisense Oligo
agccuccucaacucuguca

SEQ ID NO: 22375 - RNA, 19 nt, Artificial Sequence
  Sense Oligo
gacagaguugaggaggcug

SEQ ID NO: 22376 - RNA, 19 nt, Artificial Sequence
  Antisense Oligo
cagccuccucaacucuguc

SEQ ID NO: 22377 - RNA, 19 nt, Artificial Sequence
  Sense Oligo
acagaguugaggaggcugc

SEQ ID NO: 22378 - RNA, 19 nt, Artificial Sequence
  Antisense Oligo
gcagccuccucaacucugu

SEQ ID NO: 22379 - RNA, 19 nt, Artificial Sequence
  Sense Oligo
agaagaucuugaagcuagc

SEQ ID NO: 22380 - RNA, 19 nt, Artificial Sequence
  Antisense Oligo
gcuagcuucaagaucuucu

SEQ ID NO: 22381 - RNA, 19 nt, Artificial Sequence
  Sense Oligo
gaagaucuugaagcuagca

SEQ ID NO: 22382 - RNA, 19 nt, Artificial Sequence
  Antisense Oligo
ugcuagcuucaagaucuuc

SEQ ID NO: 22383 - RNA, 19 nt, Artificial Sequence
  Sense Oligo
aagaucuugaagcuagcag

SEQ ID NO: 22384 - RNA, 19 nt, Artificial Sequence
  Antisense Oligo
cugcuagcuucaagaucuu

SEQ ID NO: 22385 - RNA, 19 nt, Artificial Sequence
  Sense Oligo
gaucuugaagcuagcagag

SEQ ID NO: 22386 - RNA, 19 nt, Artificial Sequence
  Antisense Oligo
cucugcuagcuucaagauc

SEQ ID NO: 22387 - RNA, 19 nt, Artificial Sequence
  Sense Oligo
acugguuuaugagguuuua

SEQ ID NO: 22388 - RNA, 19 nt, Artificial Sequence
  Antisense Oligo
uaaaaccucauaaaccagu

SEQ ID NO: 22389 - RNA, 19 nt, Artificial Sequence
  Sense Oligo
cugguuuaugagguuuuag

SEQ ID NO: 22390 - RNA, 19 nt, Artificial Sequence
  Antisense Oligo
cuaaaaccucauaaaccag

SEQ ID NO: 22391 - RNA, 19 nt, Artificial Sequence
  Sense Oligo
aguaaguucuccagaucug

SEQ ID NO: 22392 - RNA, 19 nt, Artificial Sequence
  Antisense Oligo
cagaucuggagaacuuacu

SEQ ID NO: 22393 - RNA, 19 nt, Artificial Sequence
  Sense Oligo
uuauugauggagguggcuc

SEQ ID NO: 22394 - RNA, 19 nt, Artificial Sequence
  Antisense Oligo
gagccaccuccaucaauaa

SEQ ID NO: 22395 - RNA, 19 nt, Artificial Sequence
  Sense Oligo
uauugauggagguggcucu

SEQ ID NO: 22396 - RNA, 19 nt, Artificial Sequence
  Antisense Oligo
agagccaccuccaucaaua

SEQ ID NO: 22397 - RNA, 19 nt, Artificial Sequence
  Sense Oligo
uugauggagguggcucuac

SEQ ID NO: 22398 - RNA, 19 nt, Artificial Sequence
  Antisense Oligo
guagagccaccuccaucaa

SEQ ID NO: 22399 - RNA, 19 nt, Artificial Sequence
  Sense Oligo
ggagguggcucuacucaac

SEQ ID NO: 22400 - RNA, 19 nt, Artificial Sequence
  Antisense Oligo
guugaguagagccaccucc

SEQ ID NO: 22401 - RNA, 19 nt, Artificial Sequence
  Sense Oligo
acagcagauuuucuuuucu

SEQ ID NO: 22402 - RNA, 19 nt, Artificial Sequence
  Antisense Oligo
agaaaagaaaaucugcugu

SEQ ID NO: 22403 - RNA, 19 nt, Artificial Sequence
  Sense Oligo
cagcagauuuucuuuucuu

SEQ ID NO: 22404 - RNA, 19 nt, Artificial Sequence
  Antisense Oligo
aagaaaagaaaaucugcug

SEQ ID NO: 22405 - RNA, 19 nt, Artificial Sequence
  Sense Oligo
gucugucucccaggcugga

SEQ ID NO: 22406 - RNA, 19 nt, Artificial Sequence
  Antisense Oligo
uccagccugggagacagac

SEQ ID NO: 22407 - RNA, 19 nt, Artificial Sequence
  Sense Oligo
cuggagugcaguggcuggu

SEQ ID NO: 22408 - RNA, 19 nt, Artificial Sequence
  Antisense Oligo
accagccacugcacuccag

SEQ ID NO: 22409 - RNA, 19 nt, Artificial Sequence
  Sense Oligo
uggagugcaguggcugguc

SEQ ID NO: 22410 - RNA, 19 nt, Artificial Sequence
  Antisense Oligo
gaccagccacugcacucca

SEQ ID NO: 22411 - RNA, 19 nt, Artificial Sequence
  Sense Oligo
gagugcaguggcugguccu

SEQ ID NO: 22412 - RNA, 19 nt, Artificial Sequence
  Antisense Oligo
aggaccagccacugcacuc

SEQ ID NO: 22413 - RNA, 19 nt, Artificial Sequence
  Sense Oligo
agugcaguggcugguccuc

SEQ ID NO: 22414 - RNA, 19 nt, Artificial Sequence
  Antisense Oligo
gaggaccagccacugcacu

SEQ ID NO: 22415 - RNA, 19 nt, Artificial Sequence
  Sense Oligo
gccucccagguucaagcaa

SEQ ID NO: 22416 - RNA, 19 nt, Artificial Sequence
  Antisense Oligo
uugcuugaaccugggaggc

SEQ ID NO: 22417 - RNA, 19 nt, Artificial Sequence
  Sense Oligo
ccucccagguucaagcaau

SEQ ID NO: 22418 - RNA, 19 nt, Artificial Sequence
  Antisense Oligo
auugcuugaaccugggagg

SEQ ID NO: 22419 - RNA, 19 nt, Artificial Sequence
  Sense Oligo
cucccagguucaagcaauu

SEQ ID NO: 22420 - RNA, 19 nt, Artificial Sequence
  Antisense Oligo
aauugcuugaaccugggag

SEQ ID NO: 22421 - RNA, 19 nt, Artificial Sequence
  Sense Oligo
cagguucaagcaauucucc

SEQ ID NO: 22422 - RNA, 19 nt, Artificial Sequence
  Antisense Oligo
ggagaauugcuugaaccug

SEQ ID NO: 22423 - RNA, 19 nt, Artificial Sequence
  Sense Oligo
agguucaagcaauucuccu

SEQ ID NO: 22424 - RNA, 19 nt, Artificial Sequence
  Antisense Oligo
aggagaauugcuugaaccu

SEQ ID NO: 22425 - RNA, 19 nt, Artificial Sequence
  Sense Oligo
gguucaagcaauucuccug

SEQ ID NO: 22426 - RNA, 19 nt, Artificial Sequence
  Antisense Oligo
caggagaauugcuugaacc

SEQ ID NO: 22427 - RNA, 19 nt, Artificial Sequence
  Sense Oligo
guucaagcaauucuccugc

SEQ ID NO: 22428 - RNA, 19 nt, Artificial Sequence
  Antisense Oligo
gcaggagaauugcuugaac

SEQ ID NO: 22429 - RNA, 19 nt, Artificial Sequence
  Sense Oligo
uucaagcaauucuccugcc

SEQ ID NO: 22430 - RNA, 19 nt, Artificial Sequence
  Antisense Oligo
ggcaggagaauugcuugaa

SEQ ID NO: 22431 - RNA, 19 nt, Artificial Sequence
  Sense Oligo
ucaagcaauucuccugccu

SEQ ID NO: 22432 - RNA, 19 nt, Artificial Sequence
  Antisense Oligo
aggcaggagaauugcuuga

SEQ ID NO: 22433 - RNA, 19 nt, Artificial Sequence
  Sense Oligo
cugccucagccucccaagu

SEQ ID NO: 22434 - RNA, 19 nt, Artificial Sequence
  Antisense Oligo
acuugggaggcugaggcag

SEQ ID NO: 22435 - RNA, 19 nt, Artificial Sequence
  Sense Oligo
ugccucagccucccaagua

SEQ ID NO: 22436 - RNA, 19 nt, Artificial Sequence
  Antisense Oligo
uacuugggaggcugaggca

SEQ ID NO: 22437 - RNA, 19 nt, Artificial Sequence
  Sense Oligo
gccucagccucccaaguag

SEQ ID NO: 22438 - RNA, 19 nt, Artificial Sequence
  Antisense Oligo
cuacuugggaggcugaggc

SEQ ID NO: 22439 - RNA, 19 nt, Artificial Sequence
  Sense Oligo
ccucagccucccaaguagc

SEQ ID NO: 22440 - RNA, 19 nt, Artificial Sequence
  Antisense Oligo
gcuacuugggaggcugagg

SEQ ID NO: 22441 - RNA, 19 nt, Artificial Sequence
  Sense Oligo
cucagccucccaaguagcu

SEQ ID NO: 22442 - RNA, 19 nt, Artificial Sequence
  Antisense Oligo
agcuacuugggaggcugag

SEQ ID NO: 22443 - RNA, 19 nt, Artificial Sequence
  Sense Oligo
ccaaguagcugggauuaca

SEQ ID NO: 22444 - RNA, 19 nt, Artificial Sequence
  Antisense Oligo
uguaaucccagcuacuugg

SEQ ID NO: 22445 - RNA, 19 nt, Artificial Sequence
  Sense Oligo
caaguagcugggauuacag

SEQ ID NO: 22446 - RNA, 19 nt, Artificial Sequence
  Antisense Oligo
cuguaaucccagcuacuug

SEQ ID NO: 22447 - RNA, 19 nt, Artificial Sequence
  Sense Oligo
uagcugggauuacaggugu

SEQ ID NO: 22448 - RNA, 19 nt, Artificial Sequence
  Antisense Oligo
acaccuguaaucccagcua

SEQ ID NO: 22449 - RNA, 19 nt, Artificial Sequence
  Sense Oligo
agcugggauuacaggugug

SEQ ID NO: 22450 - RNA, 19 nt, Artificial Sequence
  Antisense Oligo
cacaccuguaaucccagcu

SEQ ID NO: 22451 - RNA, 19 nt, Artificial Sequence
  Sense Oligo
gggauuacaggugugugcc

SEQ ID NO: 22452 - RNA, 19 nt, Artificial Sequence
  Antisense Oligo
ggcacacaccuguaauccc

SEQ ID NO: 22453 - RNA, 19 nt, Artificial Sequence
  Sense Oligo
ggauuacaggugugugcca

SEQ ID NO: 22454 - RNA, 19 nt, Artificial Sequence
  Antisense Oligo
uggcacacaccuguaaucc

SEQ ID NO: 22455 - RNA, 19 nt, Artificial Sequence
  Sense Oligo
uaggguuucuccauauuag

SEQ ID NO: 22456 - RNA, 19 nt, Artificial Sequence
  Antisense Oligo
cuaauauggagaaacccua

SEQ ID NO: 22457 - RNA, 19 nt, Artificial Sequence
  Sense Oligo
ggguuucuccauauuagca

SEQ ID NO: 22458 - RNA, 19 nt, Artificial Sequence
  Antisense Oligo
ugcuaauauggagaaaccc

SEQ ID NO: 22459 - RNA, 19 nt, Artificial Sequence
  Sense Oligo
gguuucuccauauuagcau

SEQ ID NO: 22460 - RNA, 19 nt, Artificial Sequence
  Antisense Oligo
augcuaauauggagaaacc

SEQ ID NO: 22461 - RNA, 19 nt, Artificial Sequence
  Sense Oligo
guuucuccauauuagcauu

SEQ ID NO: 22462 - RNA, 19 nt, Artificial Sequence
  Antisense Oligo
aaugcuaauauggagaaac

SEQ ID NO: 22463 - RNA, 19 nt, Artificial Sequence
  Sense Oligo
uuucuccauauuagcauug

SEQ ID NO: 22464 - RNA, 19 nt, Artificial Sequence
  Antisense Oligo
caaugcuaauauggagaaa

SEQ ID NO: 22465 - RNA, 19 nt, Artificial Sequence
  Sense Oligo
uucuccauauuagcauugc

SEQ ID NO: 22466 - RNA, 19 nt, Artificial Sequence
  Antisense Oligo
gcaaugcuaauauggagaa

SEQ ID NO: 22467 - RNA, 19 nt, Artificial Sequence
  Sense Oligo
ucuccauauuagcauugcu

SEQ ID NO: 22468 - RNA, 19 nt, Artificial Sequence
  Antisense Oligo
agcaaugcuaauauggaga

SEQ ID NO: 22469 - RNA, 19 nt, Artificial Sequence
  Sense Oligo
cuccauauuagcauugcug

SEQ ID NO: 22470 - RNA, 19 nt, Artificial Sequence
  Antisense Oligo
cagcaaugcuaauauggag

SEQ ID NO: 22471 - RNA, 19 nt, Artificial Sequence
  Sense Oligo
auauuagcauugcuggucu

SEQ ID NO: 22472 - RNA, 19 nt, Artificial Sequence
  Antisense Oligo
agaccagcaaugcuaauau

SEQ ID NO: 22473 - RNA, 19 nt, Artificial Sequence
  Sense Oligo
agcauugcuggucuccaac

SEQ ID NO: 22474 - RNA, 19 nt, Artificial Sequence
  Antisense Oligo
guuggagaccagcaaugcu

SEQ ID NO: 22475 - RNA, 19 nt, Artificial Sequence
  Sense Oligo
gcauugcuggucuccaacu

SEQ ID NO: 22476 - RNA, 19 nt, Artificial Sequence
  Antisense Oligo
aguuggagaccagcaaugc

SEQ ID NO: 22477 - RNA, 19 nt, Artificial Sequence
  Sense Oligo
uuuuaaggccgaguagugu

SEQ ID NO: 22478 - RNA, 19 nt, Artificial Sequence
  Antisense Oligo
acacuacucggccuuaaaa

SEQ ID NO: 22479 - RNA, 19 nt, Artificial Sequence
  Sense Oligo
aaggccgaguaguguucca

SEQ ID NO: 22480 - RNA, 19 nt, Artificial Sequence
  Antisense Oligo
uggaacacuacucggccuu

SEQ ID NO: 22481 - RNA, 19 nt, Artificial Sequence
  Sense Oligo
cgaguaguguuccauuaug

SEQ ID NO: 22482 - RNA, 19 nt, Artificial Sequence
  Antisense Oligo
cauaauggaacacuacucg

SEQ ID NO: 22483 - RNA, 19 nt, Artificial Sequence
  Sense Oligo
uaccacauuuucuucaacg

SEQ ID NO: 22484 - RNA, 19 nt, Artificial Sequence
  Antisense Oligo
cguugaagaaaauguggua

SEQ ID NO: 22485 - RNA, 19 nt, Artificial Sequence
  Sense Oligo
accacauuuucuucaacgu

SEQ ID NO: 22486 - RNA, 19 nt, Artificial Sequence
  Antisense Oligo
acguugaagaaaauguggu

SEQ ID NO: 22487 - RNA, 19 nt, Artificial Sequence
  Sense Oligo
ccacauuuucuucaacguc

SEQ ID NO: 22488 - RNA, 19 nt, Artificial Sequence
  Antisense Oligo
gacguugaagaaaaugugg

SEQ ID NO: 22489 - RNA, 19 nt, Artificial Sequence
  Sense Oligo
cacauuuucuucaacgucc

SEQ ID NO: 22490 - RNA, 19 nt, Artificial Sequence
  Antisense Oligo
ggacguugaagaaaaugug

SEQ ID NO: 22491 - RNA, 19 nt, Artificial Sequence
  Sense Oligo
acauuuucuucaacgucca

SEQ ID NO: 22492 - RNA, 19 nt, Artificial Sequence
  Antisense Oligo
uggacguugaagaaaaugu

SEQ ID NO: 22493 - RNA, 19 nt, Artificial Sequence
  Sense Oligo
cauuuucuucaacguccau

SEQ ID NO: 22494 - RNA, 19 nt, Artificial Sequence
  Antisense Oligo
auggacguugaagaaaaug

SEQ ID NO: 22495 - RNA, 19 nt, Artificial Sequence
  Sense Oligo
auuuucuucaacguccauu

SEQ ID NO: 22496 - RNA, 19 nt, Artificial Sequence
  Antisense Oligo
aauggacguugaagaaaau

SEQ ID NO: 22497 - RNA, 19 nt, Artificial Sequence
  Sense Oligo
uuuucuucaacguccauug

SEQ ID NO: 22498 - RNA, 19 nt, Artificial Sequence
  Antisense Oligo
caauggacguugaagaaaa

SEQ ID NO: 22499 - RNA, 19 nt, Artificial Sequence
  Sense Oligo
uuucuucaacguccauugu

SEQ ID NO: 22500 - RNA, 19 nt, Artificial Sequence
  Antisense Oligo
acaauggacguugaagaaa

SEQ ID NO: 22501 - RNA, 19 nt, Artificial Sequence
  Sense Oligo
uucuucaacguccauuguu

SEQ ID NO: 22502 - RNA, 19 nt, Artificial Sequence
  Antisense Oligo
aacaauggacguugaagaa

SEQ ID NO: 22503 - RNA, 19 nt, Artificial Sequence
  Sense Oligo
ccauuguuggauaguuggu

SEQ ID NO: 22504 - RNA, 19 nt, Artificial Sequence
  Antisense Oligo
accaacuauccaacaaugg

SEQ ID NO: 22505 - RNA, 19 nt, Artificial Sequence
  Sense Oligo
auuguuggauaguuggugg

SEQ ID NO: 22506 - RNA, 19 nt, Artificial Sequence
  Antisense Oligo
ccaccaacuauccaacaau

SEQ ID NO: 22507 - RNA, 19 nt, Artificial Sequence
  Sense Oligo
uuguuggauaguuggugga

SEQ ID NO: 22508 - RNA, 19 nt, Artificial Sequence
  Antisense Oligo
uccaccaacuauccaacaa

SEQ ID NO: 22509 - RNA, 19 nt, Artificial Sequence
  Sense Oligo
uguuggauaguugguggau

SEQ ID NO: 22510 - RNA, 19 nt, Artificial Sequence
  Antisense Oligo
auccaccaacuauccaaca

SEQ ID NO: 22511 - RNA, 19 nt, Artificial Sequence
  Sense Oligo
guuggauaguugguggauu

SEQ ID NO: 22512 - RNA, 19 nt, Artificial Sequence
  Antisense Oligo
aauccaccaacuauccaac

SEQ ID NO: 22513 - RNA, 19 nt, Artificial Sequence
  Sense Oligo
uuggauaguugguggauuc

SEQ ID NO: 22514 - RNA, 19 nt, Artificial Sequence
  Antisense Oligo
gaauccaccaacuauccaa

SEQ ID NO: 22515 - RNA, 19 nt, Artificial Sequence
  Sense Oligo
uggauaguugguggauucc

SEQ ID NO: 22516 - RNA, 19 nt, Artificial Sequence
  Antisense Oligo
ggaauccaccaacuaucca

SEQ ID NO: 22517 - RNA, 19 nt, Artificial Sequence
  Sense Oligo
ggauaguugguggauucca

SEQ ID NO: 22518 - RNA, 19 nt, Artificial Sequence
  Antisense Oligo
uggaauccaccaacuaucc

SEQ ID NO: 22519 - RNA, 19 nt, Artificial Sequence
  Sense Oligo
gauaguugguggauuccau

SEQ ID NO: 22520 - RNA, 19 nt, Artificial Sequence
  Antisense Oligo
auggaauccaccaacuauc

SEQ ID NO: 22521 - RNA, 19 nt, Artificial Sequence
  Sense Oligo
auaguugguggauuccaua

SEQ ID NO: 22522 - RNA, 19 nt, Artificial Sequence
  Antisense Oligo
uauggaauccaccaacuau

SEQ ID NO: 22523 - RNA, 19 nt, Artificial Sequence
  Sense Oligo
uaguugguggauuccauau

SEQ ID NO: 22524 - RNA, 19 nt, Artificial Sequence
  Antisense Oligo
auauggaauccaccaacua

SEQ ID NO: 22525 - RNA, 19 nt, Artificial Sequence
  Sense Oligo
augggugugcauggcagga

SEQ ID NO: 22526 - RNA, 19 nt, Artificial Sequence
  Antisense Oligo
uccugccaugcacacccau

SEQ ID NO: 22527 - RNA, 19 nt, Artificial Sequence
  Sense Oligo
ugggugugcauggcaggau

SEQ ID NO: 22528 - RNA, 19 nt, Artificial Sequence
  Antisense Oligo
auccugccaugcacaccca

SEQ ID NO: 22529 - RNA, 19 nt, Artificial Sequence
  Sense Oligo
gggugugcauggcaggauu

SEQ ID NO: 22530 - RNA, 19 nt, Artificial Sequence
  Antisense Oligo
aauccugccaugcacaccc

SEQ ID NO: 22531 - RNA, 19 nt, Artificial Sequence
  Sense Oligo
ggugugcauggcaggauug

SEQ ID NO: 22532 - RNA, 19 nt, Artificial Sequence
  Antisense Oligo
caauccugccaugcacacc

SEQ ID NO: 22533 - RNA, 19 nt, Artificial Sequence
  Sense Oligo
gugugcauggcaggauugc

SEQ ID NO: 22534 - RNA, 19 nt, Artificial Sequence
  Antisense Oligo
gcaauccugccaugcacac

SEQ ID NO: 22535 - RNA, 19 nt, Artificial Sequence
  Sense Oligo
ugugcauggcaggauugcu

SEQ ID NO: 22536 - RNA, 19 nt, Artificial Sequence
  Antisense Oligo
agcaauccugccaugcaca

SEQ ID NO: 22537 - RNA, 19 nt, Artificial Sequence
  Sense Oligo
gugcauggcaggauugcug

SEQ ID NO: 22538 - RNA, 19 nt, Artificial Sequence
  Antisense Oligo
cagcaauccugccaugcac

SEQ ID NO: 22539 - RNA, 19 nt, Artificial Sequence
  Sense Oligo
gcugcagugagccgugauc

SEQ ID NO: 22540 - RNA, 19 nt, Artificial Sequence
  Antisense Oligo
gaucacggcucacugcagc

SEQ ID NO: 22541 - RNA, 19 nt, Artificial Sequence
  Sense Oligo
acugcacuccagccugggu

SEQ ID NO: 22542 - RNA, 19 nt, Artificial Sequence
  Antisense Oligo
acccaggcuggagugcagu

SEQ ID NO: 22543 - RNA, 19 nt, Artificial Sequence
  Sense Oligo
acuccagccugggucgaca

SEQ ID NO: 22544 - RNA, 19 nt, Artificial Sequence
  Antisense Oligo
ugucgacccaggcuggagu

SEQ ID NO: 22545 - RNA, 19 nt, Artificial Sequence
  Sense Oligo
uccagccugggucgacagu

SEQ ID NO: 22546 - RNA, 19 nt, Artificial Sequence
  Antisense Oligo
acugucgacccaggcugga

SEQ ID NO: 22547 - RNA, 19 nt, Artificial Sequence
  Sense Oligo
agggacugcagggauuagu

SEQ ID NO: 22548 - RNA, 19 nt, Artificial Sequence
  Antisense Oligo
acuaaucccugcagucccu

SEQ ID NO: 22549 - RNA, 19 nt, Artificial Sequence
  Sense Oligo
gggacugcagggauuagug

SEQ ID NO: 22550 - RNA, 19 nt, Artificial Sequence
  Antisense Oligo
cacuaaucccugcaguccc

SEQ ID NO: 22551 - RNA, 19 nt, Artificial Sequence
  Sense Oligo
ggacugcagggauuagugc

SEQ ID NO: 22552 - RNA, 19 nt, Artificial Sequence
  Antisense Oligo
gcacuaaucccugcagucc

SEQ ID NO: 22553 - RNA, 19 nt, Artificial Sequence
  Sense Oligo
gacugcagggauuagugcc

SEQ ID NO: 22554 - RNA, 19 nt, Artificial Sequence
  Antisense Oligo
ggcacuaaucccugcaguc

SEQ ID NO: 22555 - RNA, 19 nt, Artificial Sequence
  Sense Oligo
acugcagggauuagugcca

SEQ ID NO: 22556 - RNA, 19 nt, Artificial Sequence
  Antisense Oligo
uggcacuaaucccugcagu

SEQ ID NO: 22557 - RNA, 19 nt, Artificial Sequence
  Sense Oligo
cugcagggauuagugccac

SEQ ID NO: 22558 - RNA, 19 nt, Artificial Sequence
  Antisense Oligo
guggcacuaaucccugcag

SEQ ID NO: 22559 - RNA, 19 nt, Artificial Sequence
  Sense Oligo
auuagugccaccaccaagc

SEQ ID NO: 22560 - RNA, 19 nt, Artificial Sequence
  Antisense Oligo
gcuuggugguggcacuaau

SEQ ID NO: 22561 - RNA, 19 nt, Artificial Sequence
  Sense Oligo
uuagugccaccaccaagca

SEQ ID NO: 22562 - RNA, 19 nt, Artificial Sequence
  Antisense Oligo
ugcuuggugguggcacuaa

SEQ ID NO: 22563 - RNA, 19 nt, Artificial Sequence
  Sense Oligo
accaagcacuccaaagaug

SEQ ID NO: 22564 - RNA, 19 nt, Artificial Sequence
  Antisense Oligo
caucuuuggagugcuuggu

SEQ ID NO: 22565 - RNA, 19 nt, Artificial Sequence
  Sense Oligo
ccaagcacuccaaagaugc

SEQ ID NO: 22566 - RNA, 19 nt, Artificial Sequence
  Antisense Oligo
gcaucuuuggagugcuugg

SEQ ID NO: 22567 - RNA, 19 nt, Artificial Sequence
  Sense Oligo
caagcacuccaaagaugca

SEQ ID NO: 22568 - RNA, 19 nt, Artificial Sequence
  Antisense Oligo
ugcaucuuuggagugcuug

SEQ ID NO: 22569 - RNA, 19 nt, Artificial Sequence
  Sense Oligo
gggauucccauucaccucc

SEQ ID NO: 22570 - RNA, 19 nt, Artificial Sequence
  Antisense Oligo
ggaggugaaugggaauccc

SEQ ID NO: 22571 - RNA, 19 nt, Artificial Sequence
  Sense Oligo
ggauucccauucaccuccc

SEQ ID NO: 22572 - RNA, 19 nt, Artificial Sequence
  Antisense Oligo
gggaggugaaugggaaucc

SEQ ID NO: 22573 - RNA, 19 nt, Artificial Sequence
  Sense Oligo
cccuauuuggccuuugugg

SEQ ID NO: 22574 - RNA, 19 nt, Artificial Sequence
  Antisense Oligo
ccacaaaggccaaauaggg

SEQ ID NO: 22575 - RNA, 19 nt, Artificial Sequence
  Sense Oligo
ccuauuuggccuuugugga

SEQ ID NO: 22576 - RNA, 19 nt, Artificial Sequence
  Antisense Oligo
uccacaaaggccaaauagg

SEQ ID NO: 22577 - RNA, 19 nt, Artificial Sequence
  Sense Oligo
cuauuuggccuuuguggaa

SEQ ID NO: 22578 - RNA, 19 nt, Artificial Sequence
  Antisense Oligo
uuccacaaaggccaaauag

SEQ ID NO: 22579 - RNA, 19 nt, Artificial Sequence
  Sense Oligo
uauuuggccuuuguggaag

SEQ ID NO: 22580 - RNA, 19 nt, Artificial Sequence
  Antisense Oligo
cuuccacaaaggccaaaua

SEQ ID NO: 22581 - RNA, 19 nt, Artificial Sequence
  Sense Oligo
auuuggccuuuguggaaga

SEQ ID NO: 22582 - RNA, 19 nt, Artificial Sequence
  Antisense Oligo
ucuuccacaaaggccaaau

SEQ ID NO: 22583 - RNA, 19 nt, Artificial Sequence
  Sense Oligo
aaaaugaaugaucguaagc

SEQ ID NO: 22584 - RNA, 19 nt, Artificial Sequence
  Antisense Oligo
gcuuacgaucauucauuuu

SEQ ID NO: 22585 - RNA, 19 nt, Artificial Sequence
  Sense Oligo
ugaaugaucguaagcuuaa

SEQ ID NO: 22586 - RNA, 19 nt, Artificial Sequence
  Antisense Oligo
uuaagcuuacgaucauuca

SEQ ID NO: 22587 - RNA, 19 nt, Artificial Sequence
  Sense Oligo
gaaugaucguaagcuuaau

SEQ ID NO: 22588 - RNA, 19 nt, Artificial Sequence
  Antisense Oligo
auuaagcuuacgaucauuc

SEQ ID NO: 22589 - RNA, 19 nt, Artificial Sequence
  Sense Oligo
aaugaucguaagcuuaauc

SEQ ID NO: 22590 - RNA, 19 nt, Artificial Sequence
  Antisense Oligo
gauuaagcuuacgaucauu

SEQ ID NO: 22591 - RNA, 19 nt, Artificial Sequence
  Sense Oligo
gaucguaagcuuaaucaaa

SEQ ID NO: 22592 - RNA, 19 nt, Artificial Sequence
  Antisense Oligo
uuugauuaagcuuacgauc

SEQ ID NO: 22593 - RNA, 19 nt, Artificial Sequence
  Sense Oligo
ucguaagcuuaaucaaaug

SEQ ID NO: 22594 - RNA, 19 nt, Artificial Sequence
  Antisense Oligo
cauuugauuaagcuuacga

SEQ ID NO: 22595 - RNA, 19 nt, Artificial Sequence
  Sense Oligo
cguaagcuuaaucaaaugg

SEQ ID NO: 22596 - RNA, 19 nt, Artificial Sequence
  Antisense Oligo
ccauuugauuaagcuuacg

SEQ ID NO: 22597 - RNA, 19 nt, Artificial Sequence
  Sense Oligo
guaagcuuaaucaaauggu

SEQ ID NO: 22598 - RNA, 19 nt, Artificial Sequence
  Antisense Oligo
accauuugauuaagcuuac

SEQ ID NO: 22599 - RNA, 19 nt, Artificial Sequence
  Sense Oligo
uaagcuuaaucaaauggug

SEQ ID NO: 22600 - RNA, 19 nt, Artificial Sequence
  Antisense Oligo
caccauuugauuaagcuua

SEQ ID NO: 22601 - RNA, 19 nt, Artificial Sequence
  Sense Oligo
aagcuuaaucaaaugguga

SEQ ID NO: 22602 - RNA, 19 nt, Artificial Sequence
  Antisense Oligo
ucaccauuugauuaagcuu

SEQ ID NO: 22603 - RNA, 19 nt, Artificial Sequence
  Sense Oligo
ucucagccuccauagucgu

SEQ ID NO: 22604 - RNA, 19 nt, Artificial Sequence
  Antisense Oligo
acgacuauggaggcugaga

SEQ ID NO: 22605 - RNA, 19 nt, Artificial Sequence
  Sense Oligo
cauagucgugugagccaau

SEQ ID NO: 22606 - RNA, 19 nt, Artificial Sequence
  Antisense Oligo
auuggcucacacgacuaug

SEQ ID NO: 22607 - RNA, 19 nt, Artificial Sequence
  Sense Oligo
auagucgugugagccaauu

SEQ ID NO: 22608 - RNA, 19 nt, Artificial Sequence
  Antisense Oligo
aauuggcucacacgacuau

SEQ ID NO: 22609 - RNA, 19 nt, Artificial Sequence
  Sense Oligo
gccaauucuccuaauacau

SEQ ID NO: 22610 - RNA, 19 nt, Artificial Sequence
  Antisense Oligo
auguauuaggagaauuggc

SEQ ID NO: 22611 - RNA, 19 nt, Artificial Sequence
  Sense Oligo
ccaauucuccuaauacauc

SEQ ID NO: 22612 - RNA, 19 nt, Artificial Sequence
  Antisense Oligo
gauguauuaggagaauugg

SEQ ID NO: 22613 - RNA, 19 nt, Artificial Sequence
  Sense Oligo
caauucuccuaauacaucc

SEQ ID NO: 22614 - RNA, 19 nt, Artificial Sequence
  Antisense Oligo
ggauguauuaggagaauug

SEQ ID NO: 22615 - RNA, 19 nt, Artificial Sequence
  Sense Oligo
aauucuccuaauacauccu

SEQ ID NO: 22616 - RNA, 19 nt, Artificial Sequence
  Antisense Oligo
aggauguauuaggagaauu

SEQ ID NO: 22617 - RNA, 19 nt, Artificial Sequence
  Sense Oligo
auucuccuaauacauccuc

SEQ ID NO: 22618 - RNA, 19 nt, Artificial Sequence
  Antisense Oligo
gaggauguauuaggagaau

SEQ ID NO: 22619 - RNA, 19 nt, Artificial Sequence
  Sense Oligo
uucuccuaauacauccucu

SEQ ID NO: 22620 - RNA, 19 nt, Artificial Sequence
  Antisense Oligo
agaggauguauuaggagaa

SEQ ID NO: 22621 - RNA, 19 nt, Artificial Sequence
  Sense Oligo
ucuccuaauacauccucuc

SEQ ID NO: 22622 - RNA, 19 nt, Artificial Sequence
  Antisense Oligo
gagaggauguauuaggaga

SEQ ID NO: 22623 - RNA, 19 nt, Artificial Sequence
  Sense Oligo
cuccuaauacauccucucu

SEQ ID NO: 22624 - RNA, 19 nt, Artificial Sequence
  Antisense Oligo
agagaggauguauuaggag

SEQ ID NO: 22625 - RNA, 19 nt, Artificial Sequence
  Sense Oligo
cuaauacauccucucucau

SEQ ID NO: 22626 - RNA, 19 nt, Artificial Sequence
  Antisense Oligo
augagagaggauguauuag

SEQ ID NO: 22627 - RNA, 19 nt, Artificial Sequence
  Sense Oligo
uaauacauccucucucauc

SEQ ID NO: 22628 - RNA, 19 nt, Artificial Sequence
  Antisense Oligo
gaugagagaggauguauua

SEQ ID NO: 22629 - RNA, 19 nt, Artificial Sequence
  Sense Oligo
aauacauccucucucaucc

SEQ ID NO: 22630 - RNA, 19 nt, Artificial Sequence
  Antisense Oligo
ggaugagagaggauguauu

SEQ ID NO: 22631 - RNA, 19 nt, Artificial Sequence
  Sense Oligo
uacauccucucucauccau

SEQ ID NO: 22632 - RNA, 19 nt, Artificial Sequence
  Antisense Oligo
auggaugagagaggaugua

SEQ ID NO: 22633 - RNA, 19 nt, Artificial Sequence
  Sense Oligo
cauccucucucauccaucu

SEQ ID NO: 22634 - RNA, 19 nt, Artificial Sequence
  Antisense Oligo
agauggaugagagaggaug

SEQ ID NO: 22635 - RNA, 19 nt, Artificial Sequence
  Sense Oligo
auccucucucauccaucug

SEQ ID NO: 22636 - RNA, 19 nt, Artificial Sequence
  Antisense Oligo
cagauggaugagagaggau

SEQ ID NO: 22637 - RNA, 19 nt, Artificial Sequence
  Sense Oligo
ccucucucauccaucuguu

SEQ ID NO: 22638 - RNA, 19 nt, Artificial Sequence
  Antisense Oligo
aacagauggaugagagagg

SEQ ID NO: 22639 - RNA, 19 nt, Artificial Sequence
  Sense Oligo
ucucucauccaucuguuug

SEQ ID NO: 22640 - RNA, 19 nt, Artificial Sequence
  Antisense Oligo
caaacagauggaugagaga

SEQ ID NO: 22641 - RNA, 19 nt, Artificial Sequence
  Sense Oligo
cucucauccaucuguuugu

SEQ ID NO: 22642 - RNA, 19 nt, Artificial Sequence
  Antisense Oligo
acaaacagauggaugagag

SEQ ID NO: 22643 - RNA, 19 nt, Artificial Sequence
  Sense Oligo
ucucauccaucuguuuguc

SEQ ID NO: 22644 - RNA, 19 nt, Artificial Sequence
  Antisense Oligo
gacaaacagauggaugaga

SEQ ID NO: 22645 - RNA, 19 nt, Artificial Sequence
  Sense Oligo
cucauccaucuguuugucc

SEQ ID NO: 22646 - RNA, 19 nt, Artificial Sequence
  Antisense Oligo
ggacaaacagauggaugag

SEQ ID NO: 22647 - RNA, 19 nt, Artificial Sequence
  Sense Oligo
guuuguccauccauccauc

SEQ ID NO: 22648 - RNA, 19 nt, Artificial Sequence
  Antisense Oligo
gauggauggauggacaaac

SEQ ID NO: 22649 - RNA, 19 nt, Artificial Sequence
  Sense Oligo
uuuguccauccauccaucc

SEQ ID NO: 22650 - RNA, 19 nt, Artificial Sequence
  Antisense Oligo
ggauggauggauggacaaa

SEQ ID NO: 22651 - RNA, 19 nt, Artificial Sequence
  Sense Oligo
uuguccauccauccaucca

SEQ ID NO: 22652 - RNA, 19 nt, Artificial Sequence
  Antisense Oligo
uggauggauggauggacaa

SEQ ID NO: 22653 - RNA, 19 nt, Artificial Sequence
  Sense Oligo
uguccauccauccauccau

SEQ ID NO: 22654 - RNA, 19 nt, Artificial Sequence
  Antisense Oligo
auggauggauggauggaca

SEQ ID NO: 22655 - RNA, 19 nt, Artificial Sequence
  Sense Oligo
guccauccauccauccauc

SEQ ID NO: 22656 - RNA, 19 nt, Artificial Sequence
  Antisense Oligo
gauggauggauggauggac

SEQ ID NO: 22657 - RNA, 19 nt, Artificial Sequence
  Sense Oligo
uccauccauccauccaucc

SEQ ID NO: 22658 - RNA, 19 nt, Artificial Sequence
  Antisense Oligo
ggauggauggauggaugga

SEQ ID NO: 22659 - RNA, 19 nt, Artificial Sequence
  Sense Oligo
ccauccauccauccaucca

SEQ ID NO: 22660 - RNA, 19 nt, Artificial Sequence
  Antisense Oligo
uggauggauggauggaugg

SEQ ID NO: 22661 - RNA, 19 nt, Artificial Sequence
  Sense Oligo
cauccauccauccauccau

SEQ ID NO: 22662 - RNA, 19 nt, Artificial Sequence
  Antisense Oligo
auggauggauggauggaug

SEQ ID NO: 22663 - RNA, 19 nt, Artificial Sequence
  Sense Oligo
auccauccauccauccauc

SEQ ID NO: 22664 - RNA, 19 nt, Artificial Sequence
  Antisense Oligo
gauggauggauggauggau

SEQ ID NO: 22665 - RNA, 19 nt, Artificial Sequence
  Sense Oligo
uccauccauccauccaucc

SEQ ID NO: 22666 - RNA, 19 nt, Artificial Sequence
  Antisense Oligo
ggauggauggauggaugga

SEQ ID NO: 22667 - RNA, 19 nt, Artificial Sequence
  Sense Oligo
ccauccauccauccaucca

SEQ ID NO: 22668 - RNA, 19 nt, Artificial Sequence
  Antisense Oligo
uggauggauggauggaugg

SEQ ID NO: 22669 - RNA, 19 nt, Artificial Sequence
  Sense Oligo
cauccauccauccauccau

SEQ ID NO: 22670 - RNA, 19 nt, Artificial Sequence
  Antisense Oligo
auggauggauggauggaug

SEQ ID NO: 22671 - RNA, 19 nt, Artificial Sequence
  Sense Oligo
auccauccauccauccauc

SEQ ID NO: 22672 - RNA, 19 nt, Artificial Sequence
  Antisense Oligo
gauggauggauggauggau

SEQ ID NO: 22673 - RNA, 19 nt, Artificial Sequence
  Sense Oligo
uaucugucaucugucuucu

SEQ ID NO: 22674 - RNA, 19 nt, Artificial Sequence
  Antisense Oligo
agaagacagaugacagaua

SEQ ID NO: 22675 - RNA, 19 nt, Artificial Sequence
  Sense Oligo
aucugucaucugucuucua

SEQ ID NO: 22676 - RNA, 19 nt, Artificial Sequence
  Antisense Oligo
uagaagacagaugacagau

SEQ ID NO: 22677 - RNA, 19 nt, Artificial Sequence
  Sense Oligo
cugucaucugucuucuauc

SEQ ID NO: 22678 - RNA, 19 nt, Artificial Sequence
  Antisense Oligo
gauagaagacagaugacag

SEQ ID NO: 22679 - RNA, 19 nt, Artificial Sequence
  Sense Oligo
ugucaucugucuucuauca

SEQ ID NO: 22680 - RNA, 19 nt, Artificial Sequence
  Antisense Oligo
ugauagaagacagaugaca

SEQ ID NO: 22681 - RNA, 19 nt, Artificial Sequence
  Sense Oligo
gucaucugucuucuaucaa

SEQ ID NO: 22682 - RNA, 19 nt, Artificial Sequence
  Antisense Oligo
uugauagaagacagaugac

SEQ ID NO: 22683 - RNA, 19 nt, Artificial Sequence
  Sense Oligo
cugucuucuaucaauuauc

SEQ ID NO: 22684 - RNA, 19 nt, Artificial Sequence
  Antisense Oligo
gauaauugauagaagacag

SEQ ID NO: 22685 - RNA, 19 nt, Artificial Sequence
  Sense Oligo
ugucuucuaucaauuaucc

SEQ ID NO: 22686 - RNA, 19 nt, Artificial Sequence
  Antisense Oligo
ggauaauugauagaagaca

SEQ ID NO: 22687 - RNA, 19 nt, Artificial Sequence
  Sense Oligo
uucuaucaauuauccaucc

SEQ ID NO: 22688 - RNA, 19 nt, Artificial Sequence
  Antisense Oligo
ggauggauaauugauagaa

SEQ ID NO: 22689 - RNA, 19 nt, Artificial Sequence
  Sense Oligo
uaucaauuauccauccauc

SEQ ID NO: 22690 - RNA, 19 nt, Artificial Sequence
  Antisense Oligo
gauggauggauaauugaua

SEQ ID NO: 22691 - RNA, 19 nt, Artificial Sequence
  Sense Oligo
ucaauuauccauccaucca

SEQ ID NO: 22692 - RNA, 19 nt, Artificial Sequence
  Antisense Oligo
uggauggauggauaauuga

SEQ ID NO: 22693 - RNA, 19 nt, Artificial Sequence
  Sense Oligo
caauuauccauccauccau

SEQ ID NO: 22694 - RNA, 19 nt, Artificial Sequence
  Antisense Oligo
auggauggauggauaauug

SEQ ID NO: 22695 - RNA, 19 nt, Artificial Sequence
  Sense Oligo
auccauccauccauucauc

SEQ ID NO: 22696 - RNA, 19 nt, Artificial Sequence
  Antisense Oligo
gaugaauggauggauggau

SEQ ID NO: 22697 - RNA, 19 nt, Artificial Sequence
  Sense Oligo
auccauucauccauguacc

SEQ ID NO: 22698 - RNA, 19 nt, Artificial Sequence
  Antisense Oligo
gguacauggaugaauggau

SEQ ID NO: 22699 - RNA, 19 nt, Artificial Sequence
  Sense Oligo
uccauucauccauguaccu

SEQ ID NO: 22700 - RNA, 19 nt, Artificial Sequence
  Antisense Oligo
agguacauggaugaaugga

SEQ ID NO: 22701 - RNA, 19 nt, Artificial Sequence
  Sense Oligo
ccauucauccauguaccua

SEQ ID NO: 22702 - RNA, 19 nt, Artificial Sequence
  Antisense Oligo
uagguacauggaugaaugg

SEQ ID NO: 22703 - RNA, 19 nt, Artificial Sequence
  Sense Oligo
cauucauccauguaccuau

SEQ ID NO: 22704 - RNA, 19 nt, Artificial Sequence
  Antisense Oligo
auagguacauggaugaaug

SEQ ID NO: 22705 - RNA, 19 nt, Artificial Sequence
  Sense Oligo
auucauccauguaccuauc

SEQ ID NO: 22706 - RNA, 19 nt, Artificial Sequence
  Antisense Oligo
gauagguacauggaugaau

SEQ ID NO: 22707 - RNA, 19 nt, Artificial Sequence
  Sense Oligo
uucauccauguaccuaucc

SEQ ID NO: 22708 - RNA, 19 nt, Artificial Sequence
  Antisense Oligo
ggauagguacauggaugaa

SEQ ID NO: 22709 - RNA, 19 nt, Artificial Sequence
  Sense Oligo
uccauguaccuauccaucc

SEQ ID NO: 22710 - RNA, 19 nt, Artificial Sequence
  Antisense Oligo
ggauggauagguacaugga

SEQ ID NO: 22711 - RNA, 19 nt, Artificial Sequence
  Sense Oligo
ccauguaccuauccaucca

SEQ ID NO: 22712 - RNA, 19 nt, Artificial Sequence
  Antisense Oligo
uggauggauagguacaugg

SEQ ID NO: 22713 - RNA, 19 nt, Artificial Sequence
  Sense Oligo
cauguaccuauccauccau

SEQ ID NO: 22714 - RNA, 19 nt, Artificial Sequence
  Antisense Oligo
auggauggauagguacaug

SEQ ID NO: 22715 - RNA, 19 nt, Artificial Sequence
  Sense Oligo
auguaccuauccauccauc

SEQ ID NO: 22716 - RNA, 19 nt, Artificial Sequence
  Antisense Oligo
gauggauggauagguacau

SEQ ID NO: 22717 - RNA, 19 nt, Artificial Sequence
  Sense Oligo
guaccuauccauccaucuu

SEQ ID NO: 22718 - RNA, 19 nt, Artificial Sequence
  Antisense Oligo
aagauggauggauagguac

SEQ ID NO: 22719 - RNA, 19 nt, Artificial Sequence
  Sense Oligo
uaccuauccauccaucuua

SEQ ID NO: 22720 - RNA, 19 nt, Artificial Sequence
  Antisense Oligo
uaagauggauggauaggua

SEQ ID NO: 22721 - RNA, 19 nt, Artificial Sequence
  Sense Oligo
accuauccauccaucuuau

SEQ ID NO: 22722 - RNA, 19 nt, Artificial Sequence
  Antisense Oligo
auaagauggauggauaggu

SEQ ID NO: 22723 - RNA, 19 nt, Artificial Sequence
  Sense Oligo
ccuauccauccaucuuauc

SEQ ID NO: 22724 - RNA, 19 nt, Artificial Sequence
  Antisense Oligo
gauaagauggauggauagg

SEQ ID NO: 22725 - RNA, 19 nt, Artificial Sequence
  Sense Oligo
cuauccauccaucuuaucu

SEQ ID NO: 22726 - RNA, 19 nt, Artificial Sequence
  Antisense Oligo
agauaagauggauggauag

SEQ ID NO: 22727 - RNA, 19 nt, Artificial Sequence
  Sense Oligo
uauccauccaucuuaucua

SEQ ID NO: 22728 - RNA, 19 nt, Artificial Sequence
  Antisense Oligo
uagauaagauggauggaua

SEQ ID NO: 22729 - RNA, 19 nt, Artificial Sequence
  Sense Oligo
ccaucuuaucuaucuaucc

SEQ ID NO: 22730 - RNA, 19 nt, Artificial Sequence
  Antisense Oligo
ggauagauagauaagaugg

SEQ ID NO: 22731 - RNA, 19 nt, Artificial Sequence
  Sense Oligo
caucuuaucuaucuauccu

SEQ ID NO: 22732 - RNA, 19 nt, Artificial Sequence
  Antisense Oligo
aggauagauagauaagaug

SEQ ID NO: 22733 - RNA, 19 nt, Artificial Sequence
  Sense Oligo
cuuaucuaucuauccuauc

SEQ ID NO: 22734 - RNA, 19 nt, Artificial Sequence
  Antisense Oligo
gauaggauagauagauaag

SEQ ID NO: 22735 - RNA, 19 nt, Artificial Sequence
  Sense Oligo
auccaucuaucuauaaguc

SEQ ID NO: 22736 - RNA, 19 nt, Artificial Sequence
  Antisense Oligo
gacuuauagauagauggau

SEQ ID NO: 22737 - RNA, 19 nt, Artificial Sequence
  Sense Oligo
uccaucuaucuauaagucu

SEQ ID NO: 22738 - RNA, 19 nt, Artificial Sequence
  Antisense Oligo
agacuuauagauagaugga

SEQ ID NO: 22739 - RNA, 19 nt, Artificial Sequence
  Sense Oligo
ccaucuaucuauaagucug

SEQ ID NO: 22740 - RNA, 19 nt, Artificial Sequence
  Antisense Oligo
cagacuuauagauagaugg

SEQ ID NO: 22741 - RNA, 19 nt, Artificial Sequence
  Sense Oligo
caucuaucuauaagucugu

SEQ ID NO: 22742 - RNA, 19 nt, Artificial Sequence
  Antisense Oligo
acagacuuauagauagaug

SEQ ID NO: 22743 - RNA, 19 nt, Artificial Sequence
  Sense Oligo
ucuauaagucuguauuagg

SEQ ID NO: 22744 - RNA, 19 nt, Artificial Sequence
  Antisense Oligo
ccuaauacagacuuauaga

SEQ ID NO: 22745 - RNA, 19 nt, Artificial Sequence
  Sense Oligo
cuauaagucuguauuaggg

SEQ ID NO: 22746 - RNA, 19 nt, Artificial Sequence
  Antisense Oligo
cccuaauacagacuuauag

SEQ ID NO: 22747 - RNA, 19 nt, Artificial Sequence
  Sense Oligo
uauaagucuguauuagggu

SEQ ID NO: 22748 - RNA, 19 nt, Artificial Sequence
  Antisense Oligo
acccuaauacagacuuaua

SEQ ID NO: 22749 - RNA, 19 nt, Artificial Sequence
  Sense Oligo
auaagucuguauuaggguu

SEQ ID NO: 22750 - RNA, 19 nt, Artificial Sequence
  Antisense Oligo
aacccuaauacagacuuau

SEQ ID NO: 22751 - RNA, 19 nt, Artificial Sequence
  Sense Oligo
uaggaucuaugucuguaag

SEQ ID NO: 22752 - RNA, 19 nt, Artificial Sequence
  Antisense Oligo
cuuacagacauagauccua

SEQ ID NO: 22753 - RNA, 19 nt, Artificial Sequence
  Sense Oligo
aggaucuaugucuguaaga

SEQ ID NO: 22754 - RNA, 19 nt, Artificial Sequence
  Antisense Oligo
ucuuacagacauagauccu

SEQ ID NO: 22755 - RNA, 19 nt, Artificial Sequence
  Sense Oligo
ggaucuaugucuguaagaa

SEQ ID NO: 22756 - RNA, 19 nt, Artificial Sequence
  Antisense Oligo
uucuuacagacauagaucc

SEQ ID NO: 22757 - RNA, 19 nt, Artificial Sequence
  Sense Oligo
aggugaagucccaugguag

SEQ ID NO: 22758 - RNA, 19 nt, Artificial Sequence
  Antisense Oligo
cuaccaugggacuucaccu

SEQ ID NO: 22759 - RNA, 19 nt, Artificial Sequence
  Sense Oligo
cacuggcguaaguccaagu

SEQ ID NO: 22760 - RNA, 19 nt, Artificial Sequence
  Antisense Oligo
acuuggacuuacgccagug

SEQ ID NO: 22761 - RNA, 19 nt, Artificial Sequence
  Sense Oligo
acuggcguaaguccaaguu

SEQ ID NO: 22762 - RNA, 19 nt, Artificial Sequence
  Antisense Oligo
aacuuggacuuacgccagu

SEQ ID NO: 22763 - RNA, 19 nt, Artificial Sequence
  Sense Oligo
cuggcguaaguccaaguuu

SEQ ID NO: 22764 - RNA, 19 nt, Artificial Sequence
  Antisense Oligo
aaacuuggacuuacgccag

SEQ ID NO: 22765 - RNA, 19 nt, Artificial Sequence
  Sense Oligo
uggcguaaguccaaguuuc

SEQ ID NO: 22766 - RNA, 19 nt, Artificial Sequence
  Antisense Oligo
gaaacuuggacuuacgcca

SEQ ID NO: 22767 - RNA, 19 nt, Artificial Sequence
  Sense Oligo
ggcguaaguccaaguuucc

SEQ ID NO: 22768 - RNA, 19 nt, Artificial Sequence
  Antisense Oligo
ggaaacuuggacuuacgcc

SEQ ID NO: 22769 - RNA, 19 nt, Artificial Sequence
  Sense Oligo
cguaaguccaaguuuccaa

SEQ ID NO: 22770 - RNA, 19 nt, Artificial Sequence
  Antisense Oligo
uuggaaacuuggacuuacg

SEQ ID NO: 22771 - RNA, 19 nt, Artificial Sequence
  Sense Oligo
guaaguccaaguuuccaaa

SEQ ID NO: 22772 - RNA, 19 nt, Artificial Sequence
  Antisense Oligo
uuuggaaacuuggacuuac

SEQ ID NO: 22773 - RNA, 19 nt, Artificial Sequence
  Sense Oligo
guccaaguuuccaaaggcc

SEQ ID NO: 22774 - RNA, 19 nt, Artificial Sequence
  Antisense Oligo
ggccuuuggaaacuuggac

SEQ ID NO: 22775 - RNA, 19 nt, Artificial Sequence
  Sense Oligo
ccaaguuuccaaaggccaa

SEQ ID NO: 22776 - RNA, 19 nt, Artificial Sequence
  Antisense Oligo
uuggccuuuggaaacuugg

SEQ ID NO: 22777 - RNA, 19 nt, Artificial Sequence
  Sense Oligo
caaguuuccaaaggccaaa

SEQ ID NO: 22778 - RNA, 19 nt, Artificial Sequence
  Antisense Oligo
uuuggccuuuggaaacuug

SEQ ID NO: 22779 - RNA, 19 nt, Artificial Sequence
  Sense Oligo
aacgugaggaagcauccag

SEQ ID NO: 22780 - RNA, 19 nt, Artificial Sequence
  Antisense Oligo
cuggaugcuuccucacguu

SEQ ID NO: 22781 - RNA, 19 nt, Artificial Sequence
  Sense Oligo
acgugaggaagcauccagc

SEQ ID NO: 22782 - RNA, 19 nt, Artificial Sequence
  Antisense Oligo
gcuggaugcuuccucacgu

SEQ ID NO: 22783 - RNA, 19 nt, Artificial Sequence
  Sense Oligo
cgugaggaagcauccagca

SEQ ID NO: 22784 - RNA, 19 nt, Artificial Sequence
  Antisense Oligo
ugcuggaugcuuccucacg

SEQ ID NO: 22785 - RNA, 19 nt, Artificial Sequence
  Sense Oligo
uccagcauaggaggaagau

SEQ ID NO: 22786 - RNA, 19 nt, Artificial Sequence
  Antisense Oligo
aucuuccuccuaugcugga

SEQ ID NO: 22787 - RNA, 19 nt, Artificial Sequence
  Sense Oligo
cagaagacucagcgagcca

SEQ ID NO: 22788 - RNA, 19 nt, Artificial Sequence
  Antisense Oligo
uggcucgcugagucuucug

SEQ ID NO: 22789 - RNA, 19 nt, Artificial Sequence
  Sense Oligo
agacucagcgagccagcuu

SEQ ID NO: 22790 - RNA, 19 nt, Artificial Sequence
  Antisense Oligo
aagcuggcucgcugagucu

SEQ ID NO: 22791 - RNA, 19 nt, Artificial Sequence
  Sense Oligo
gacucagcgagccagcuua

SEQ ID NO: 22792 - RNA, 19 nt, Artificial Sequence
  Antisense Oligo
uaagcuggcucgcugaguc

SEQ ID NO: 22793 - RNA, 19 nt, Artificial Sequence
  Sense Oligo
acucagcgagccagcuuac

SEQ ID NO: 22794 - RNA, 19 nt, Artificial Sequence
  Antisense Oligo
guaagcuggcucgcugagu

SEQ ID NO: 22795 - RNA, 19 nt, Artificial Sequence
  Sense Oligo
cucagcgagccagcuuacc

SEQ ID NO: 22796 - RNA, 19 nt, Artificial Sequence
  Antisense Oligo
gguaagcuggcucgcugag

SEQ ID NO: 22797 - RNA, 19 nt, Artificial Sequence
  Sense Oligo
ucagcgagccagcuuaccc

SEQ ID NO: 22798 - RNA, 19 nt, Artificial Sequence
  Antisense Oligo
ggguaagcuggcucgcuga

SEQ ID NO: 22799 - RNA, 19 nt, Artificial Sequence
  Sense Oligo
gcugacuggaugcugccca

SEQ ID NO: 22800 - RNA, 19 nt, Artificial Sequence
  Antisense Oligo
ugggcagcauccagucagc

SEQ ID NO: 22801 - RNA, 19 nt, Artificial Sequence
  Sense Oligo
uuccucucccaggccauug

SEQ ID NO: 22802 - RNA, 19 nt, Artificial Sequence
  Antisense Oligo
caauggccugggagaggaa

SEQ ID NO: 22803 - RNA, 19 nt, Artificial Sequence
  Sense Oligo
uccucucccaggccauuga

SEQ ID NO: 22804 - RNA, 19 nt, Artificial Sequence
  Antisense Oligo
ucaauggccugggagagga

SEQ ID NO: 22805 - RNA, 19 nt, Artificial Sequence
  Sense Oligo
ccucucccaggccauugac

SEQ ID NO: 22806 - RNA, 19 nt, Artificial Sequence
  Antisense Oligo
gucaauggccugggagagg

SEQ ID NO: 22807 - RNA, 19 nt, Artificial Sequence
  Sense Oligo
ucucccaggccauugacuc

SEQ ID NO: 22808 - RNA, 19 nt, Artificial Sequence
  Antisense Oligo
gagucaauggccugggaga

SEQ ID NO: 22809 - RNA, 19 nt, Artificial Sequence
  Sense Oligo
cucccaggccauugacuca

SEQ ID NO: 22810 - RNA, 19 nt, Artificial Sequence
  Antisense Oligo
ugagucaauggccugggag

SEQ ID NO: 22811 - RNA, 19 nt, Artificial Sequence
  Sense Oligo
ucccaggccauugacucaa

SEQ ID NO: 22812 - RNA, 19 nt, Artificial Sequence
  Antisense Oligo
uugagucaauggccuggga

SEQ ID NO: 22813 - RNA, 19 nt, Artificial Sequence
  Sense Oligo
ccaacuaccuaggcauccu

SEQ ID NO: 22814 - RNA, 19 nt, Artificial Sequence
  Antisense Oligo
aggaugccuagguaguugg

SEQ ID NO: 22815 - RNA, 19 nt, Artificial Sequence
  Sense Oligo
caacuaccuaggcauccuu

SEQ ID NO: 22816 - RNA, 19 nt, Artificial Sequence
  Antisense Oligo
aaggaugccuagguaguug

SEQ ID NO: 22817 - RNA, 19 nt, Artificial Sequence
  Sense Oligo
aacuaccuaggcauccuuc

SEQ ID NO: 22818 - RNA, 19 nt, Artificial Sequence
  Antisense Oligo
gaaggaugccuagguaguu

SEQ ID NO: 22819 - RNA, 19 nt, Artificial Sequence
  Sense Oligo
uaccuaggcauccuucaac

SEQ ID NO: 22820 - RNA, 19 nt, Artificial Sequence
  Antisense Oligo
guugaaggaugccuaggua

SEQ ID NO: 22821 - RNA, 19 nt, Artificial Sequence
  Sense Oligo
aaccaucacaccgucuauc

SEQ ID NO: 22822 - RNA, 19 nt, Artificial Sequence
  Antisense Oligo
gauagacggugugaugguu

SEQ ID NO: 22823 - RNA, 19 nt, Artificial Sequence
  Sense Oligo
accaucacaccgucuaucc

SEQ ID NO: 22824 - RNA, 19 nt, Artificial Sequence
  Antisense Oligo
ggauagacggugugauggu

SEQ ID NO: 22825 - RNA, 19 nt, Artificial Sequence
  Sense Oligo
ucacaccgucuauccaucc

SEQ ID NO: 22826 - RNA, 19 nt, Artificial Sequence
  Antisense Oligo
ggauggauagacgguguga

SEQ ID NO: 22827 - RNA, 19 nt, Artificial Sequence
  Sense Oligo
cacaccgucuauccauccc

SEQ ID NO: 22828 - RNA, 19 nt, Artificial Sequence
  Antisense Oligo
gggauggauagacggugug

SEQ ID NO: 22829 - RNA, 19 nt, Artificial Sequence
  Sense Oligo
uccaucccucuacccuauc

SEQ ID NO: 22830 - RNA, 19 nt, Artificial Sequence
  Antisense Oligo
gauaggguagagggaugga

SEQ ID NO: 22831 - RNA, 19 nt, Artificial Sequence
  Sense Oligo
ccaucccucuacccuaucu

SEQ ID NO: 22832 - RNA, 19 nt, Artificial Sequence
  Antisense Oligo
agauaggguagagggaugg

SEQ ID NO: 22833 - RNA, 19 nt, Artificial Sequence
  Sense Oligo
caucccucuacccuaucug

SEQ ID NO: 22834 - RNA, 19 nt, Artificial Sequence
  Antisense Oligo
cagauaggguagagggaug

SEQ ID NO: 22835 - RNA, 19 nt, Artificial Sequence
  Sense Oligo
aucccucuacccuaucugu

SEQ ID NO: 22836 - RNA, 19 nt, Artificial Sequence
  Antisense Oligo
acagauaggguagagggau

SEQ ID NO: 22837 - RNA, 19 nt, Artificial Sequence
  Sense Oligo
ucccucuacccuaucuguc

SEQ ID NO: 22838 - RNA, 19 nt, Artificial Sequence
  Antisense Oligo
gacagauaggguagaggga

SEQ ID NO: 22839 - RNA, 19 nt, Artificial Sequence
  Sense Oligo
cccucuacccuaucugucc

SEQ ID NO: 22840 - RNA, 19 nt, Artificial Sequence
  Antisense Oligo
ggacagauaggguagaggg

SEQ ID NO: 22841 - RNA, 19 nt, Artificial Sequence
  Sense Oligo
ccucuacccuaucugucca

SEQ ID NO: 22842 - RNA, 19 nt, Artificial Sequence
  Antisense Oligo
uggacagauaggguagagg

SEQ ID NO: 22843 - RNA, 19 nt, Artificial Sequence
  Sense Oligo
uacccuaucuguccaccua

SEQ ID NO: 22844 - RNA, 19 nt, Artificial Sequence
  Antisense Oligo
uagguggacagauagggua

SEQ ID NO: 22845 - RNA, 19 nt, Artificial Sequence
  Sense Oligo
acccuaucuguccaccuac

SEQ ID NO: 22846 - RNA, 19 nt, Artificial Sequence
  Antisense Oligo
guagguggacagauagggu

SEQ ID NO: 22847 - RNA, 19 nt, Artificial Sequence
  Sense Oligo
cccuaucuguccaccuacc

SEQ ID NO: 22848 - RNA, 19 nt, Artificial Sequence
  Antisense Oligo
gguagguggacagauaggg

SEQ ID NO: 22849 - RNA, 19 nt, Artificial Sequence
  Sense Oligo
ccuaucuguccaccuaccc

SEQ ID NO: 22850 - RNA, 19 nt, Artificial Sequence
  Antisense Oligo
ggguagguggacagauagg

SEQ ID NO: 22851 - RNA, 19 nt, Artificial Sequence
  Sense Oligo
uaucuguccaccuacccua

SEQ ID NO: 22852 - RNA, 19 nt, Artificial Sequence
  Antisense Oligo
uaggguagguggacagaua

SEQ ID NO: 22853 - RNA, 19 nt, Artificial Sequence
  Sense Oligo
aucuguccaccuacccuau

SEQ ID NO: 22854 - RNA, 19 nt, Artificial Sequence
  Antisense Oligo
auaggguagguggacagau

SEQ ID NO: 22855 - RNA, 19 nt, Artificial Sequence
  Sense Oligo
ucuguccaccuacccuauc

SEQ ID NO: 22856 - RNA, 19 nt, Artificial Sequence
  Antisense Oligo
gauaggguagguggacaga

SEQ ID NO: 22857 - RNA, 19 nt, Artificial Sequence
  Sense Oligo
cuguccaccuacccuaucu

SEQ ID NO: 22858 - RNA, 19 nt, Artificial Sequence
  Antisense Oligo
agauaggguagguggacag

SEQ ID NO: 22859 - RNA, 19 nt, Artificial Sequence
  Sense Oligo
uguccaccuacccuaucua

SEQ ID NO: 22860 - RNA, 19 nt, Artificial Sequence
  Antisense Oligo
uagauaggguagguggaca

SEQ ID NO: 22861 - RNA, 19 nt, Artificial Sequence
  Sense Oligo
guccaccuacccuaucuau

SEQ ID NO: 22862 - RNA, 19 nt, Artificial Sequence
  Antisense Oligo
auagauaggguagguggac

SEQ ID NO: 22863 - RNA, 19 nt, Artificial Sequence
  Sense Oligo
ccaccuacccuaucuaucu

SEQ ID NO: 22864 - RNA, 19 nt, Artificial Sequence
  Antisense Oligo
agauagauaggguaggugg

SEQ ID NO: 22865 - RNA, 19 nt, Artificial Sequence
  Sense Oligo
caccuacccuaucuaucua

SEQ ID NO: 22866 - RNA, 19 nt, Artificial Sequence
  Antisense Oligo
uagauagauaggguaggug

SEQ ID NO: 22867 - RNA, 19 nt, Artificial Sequence
  Sense Oligo
accuacccuaucuaucuau

SEQ ID NO: 22868 - RNA, 19 nt, Artificial Sequence
  Antisense Oligo
auagauagauaggguaggu

SEQ ID NO: 22869 - RNA, 19 nt, Artificial Sequence
  Sense Oligo
ccuacccuaucuaucuauc

SEQ ID NO: 22870 - RNA, 19 nt, Artificial Sequence
  Antisense Oligo
gauagauagauaggguagg

SEQ ID NO: 22871 - RNA, 19 nt, Artificial Sequence
  Sense Oligo
cuacccuaucuaucuaucc

SEQ ID NO: 22872 - RNA, 19 nt, Artificial Sequence
  Antisense Oligo
ggauagauagauaggguag

SEQ ID NO: 22873 - RNA, 19 nt, Artificial Sequence
  Sense Oligo
ccuaucuaucuauccaccu

SEQ ID NO: 22874 - RNA, 19 nt, Artificial Sequence
  Antisense Oligo
agguggauagauagauagg

SEQ ID NO: 22875 - RNA, 19 nt, Artificial Sequence
  Sense Oligo
uccauucaucuauucuauc

SEQ ID NO: 22876 - RNA, 19 nt, Artificial Sequence
  Antisense Oligo
gauagaauagaugaaugga

SEQ ID NO: 22877 - RNA, 19 nt, Artificial Sequence
  Sense Oligo
uccauucaucuauucuauc

SEQ ID NO: 22878 - RNA, 19 nt, Artificial Sequence
  Antisense Oligo
gauagaauagaugaaugga

SEQ ID NO: 22879 - RNA, 19 nt, Artificial Sequence
  Sense Oligo
ucaucuauucuaucuaucc

SEQ ID NO: 22880 - RNA, 19 nt, Artificial Sequence
  Antisense Oligo
ggauagauagaauagauga

SEQ ID NO: 22881 - RNA, 19 nt, Artificial Sequence
  Sense Oligo
uccauucaucuauucuauc

SEQ ID NO: 22882 - RNA, 19 nt, Artificial Sequence
  Antisense Oligo
gauagaauagaugaaugga

SEQ ID NO: 22883 - RNA, 19 nt, Artificial Sequence
  Sense Oligo
ucaucuauucuaucuaucc

SEQ ID NO: 22884 - RNA, 19 nt, Artificial Sequence
  Antisense Oligo
ggauagauagaauagauga

SEQ ID NO: 22885 - RNA, 19 nt, Artificial Sequence
  Sense Oligo
auccauccauccucuuucu

SEQ ID NO: 22886 - RNA, 19 nt, Artificial Sequence
  Antisense Oligo
agaaagaggauggauggau

SEQ ID NO: 22887 - RNA, 19 nt, Artificial Sequence
  Sense Oligo
auccauccucuuucuauuc

SEQ ID NO: 22888 - RNA, 19 nt, Artificial Sequence
  Antisense Oligo
gaauagaaagaggauggau

SEQ ID NO: 22889 - RNA, 19 nt, Artificial Sequence
  Sense Oligo
uccauccucuuucuauuca

SEQ ID NO: 22890 - RNA, 19 nt, Artificial Sequence
  Antisense Oligo
ugaauagaaagaggaugga

SEQ ID NO: 22891 - RNA, 19 nt, Artificial Sequence
  Sense Oligo
cauccucuuucuauucauc

SEQ ID NO: 22892 - RNA, 19 nt, Artificial Sequence
  Antisense Oligo
gaugaauagaaagaggaug

SEQ ID NO: 22893 - RNA, 19 nt, Artificial Sequence
  Sense Oligo
uccucuuucuauucaucca

SEQ ID NO: 22894 - RNA, 19 nt, Artificial Sequence
  Antisense Oligo
uggaugaauagaaagagga

SEQ ID NO: 22895 - RNA, 19 nt, Artificial Sequence
  Sense Oligo
cuauccaucuauucuaucu

SEQ ID NO: 22896 - RNA, 19 nt, Artificial Sequence
  Antisense Oligo
agauagaauagauggauag

SEQ ID NO: 22897 - RNA, 19 nt, Artificial Sequence
  Sense Oligo
uauccaucuauucuaucug

SEQ ID NO: 22898 - RNA, 19 nt, Artificial Sequence
  Antisense Oligo
cagauagaauagauggaua

SEQ ID NO: 22899 - RNA, 19 nt, Artificial Sequence
  Sense Oligo
ccaucuauucuaucugucc

SEQ ID NO: 22900 - RNA, 19 nt, Artificial Sequence
  Antisense Oligo
ggacagauagaauagaugg

SEQ ID NO: 22901 - RNA, 19 nt, Artificial Sequence
  Sense Oligo
caucuauucuaucugucca

SEQ ID NO: 22902 - RNA, 19 nt, Artificial Sequence
  Antisense Oligo
uggacagauagaauagaug

SEQ ID NO: 22903 - RNA, 19 nt, Artificial Sequence
  Sense Oligo
aucuauucuaucuguccau

SEQ ID NO: 22904 - RNA, 19 nt, Artificial Sequence
  Antisense Oligo
auggacagauagaauagau

SEQ ID NO: 22905 - RNA, 19 nt, Artificial Sequence
  Sense Oligo
ucuauucuaucuguccauc

SEQ ID NO: 22906 - RNA, 19 nt, Artificial Sequence
  Antisense Oligo
gauggacagauagaauaga

SEQ ID NO: 22907 - RNA, 19 nt, Artificial Sequence
  Sense Oligo
cuauucuaucuguccaucc

SEQ ID NO: 22908 - RNA, 19 nt, Artificial Sequence
  Antisense Oligo
ggauggacagauagaauag

SEQ ID NO: 22909 - RNA, 19 nt, Artificial Sequence
  Sense Oligo
uguccauccaucuauacua

SEQ ID NO: 22910 - RNA, 19 nt, Artificial Sequence
  Antisense Oligo
uaguauagauggauggaca

SEQ ID NO: 22911 - RNA, 19 nt, Artificial Sequence
  Sense Oligo
guccauccaucuauacuau

SEQ ID NO: 22912 - RNA, 19 nt, Artificial Sequence
  Antisense Oligo
auaguauagauggauggac

SEQ ID NO: 22913 - RNA, 19 nt, Artificial Sequence
  Sense Oligo
uccauccaucuauacuauc

SEQ ID NO: 22914 - RNA, 19 nt, Artificial Sequence
  Antisense Oligo
gauaguauagauggaugga

SEQ ID NO: 22915 - RNA, 19 nt, Artificial Sequence
  Sense Oligo
ccauccaucuauacuaucu

SEQ ID NO: 22916 - RNA, 19 nt, Artificial Sequence
  Antisense Oligo
agauaguauagauggaugg

SEQ ID NO: 22917 - RNA, 19 nt, Artificial Sequence
  Sense Oligo
cauccaucuauacuaucua

SEQ ID NO: 22918 - RNA, 19 nt, Artificial Sequence
  Antisense Oligo
uagauaguauagauggaug

SEQ ID NO: 22919 - RNA, 19 nt, Artificial Sequence
  Sense Oligo
uccauccuaucuguuuauc

SEQ ID NO: 22920 - RNA, 19 nt, Artificial Sequence
  Antisense Oligo
gauaaacagauaggaugga

SEQ ID NO: 22921 - RNA, 19 nt, Artificial Sequence
  Sense Oligo
ccauccuaucuguuuaucu

SEQ ID NO: 22922 - RNA, 19 nt, Artificial Sequence
  Antisense Oligo
agauaaacagauaggaugg

SEQ ID NO: 22923 - RNA, 19 nt, Artificial Sequence
  Sense Oligo
cauccuaucuguuuaucua

SEQ ID NO: 22924 - RNA, 19 nt, Artificial Sequence
  Antisense Oligo
uagauaaacagauaggaug

SEQ ID NO: 22925 - RNA, 19 nt, Artificial Sequence
  Sense Oligo
cuauccauucaucuagcuu

SEQ ID NO: 22926 - RNA, 19 nt, Artificial Sequence
  Antisense Oligo
aagcuagaugaauggauag

SEQ ID NO: 22927 - RNA, 19 nt, Artificial Sequence
  Sense Oligo
uauccauucaucuagcuua

SEQ ID NO: 22928 - RNA, 19 nt, Artificial Sequence
  Antisense Oligo
uaagcuagaugaauggaua

SEQ ID NO: 22929 - RNA, 19 nt, Artificial Sequence
  Sense Oligo
auccauucaucuagcuuau

SEQ ID NO: 22930 - RNA, 19 nt, Artificial Sequence
  Antisense Oligo
auaagcuagaugaauggau

SEQ ID NO: 22931 - RNA, 19 nt, Artificial Sequence
  Sense Oligo
uccauucaucuagcuuauc

SEQ ID NO: 22932 - RNA, 19 nt, Artificial Sequence
  Antisense Oligo
gauaagcuagaugaaugga

SEQ ID NO: 22933 - RNA, 19 nt, Artificial Sequence
  Sense Oligo
ccauucaucuagcuuaucu

SEQ ID NO: 22934 - RNA, 19 nt, Artificial Sequence
  Antisense Oligo
agauaagcuagaugaaugg

SEQ ID NO: 22935 - RNA, 19 nt, Artificial Sequence
  Sense Oligo
cauucaucuagcuuaucua

SEQ ID NO: 22936 - RNA, 19 nt, Artificial Sequence
  Antisense Oligo
uagauaagcuagaugaaug

SEQ ID NO: 22937 - RNA, 19 nt, Artificial Sequence
  Sense Oligo
uucaucuagcuuaucuauc

SEQ ID NO: 22938 - RNA, 19 nt, Artificial Sequence
  Antisense Oligo
gauagauaagcuagaugaa

SEQ ID NO: 22939 - RNA, 19 nt, Artificial Sequence
  Sense Oligo
ucaucuagcuuaucuaucu

SEQ ID NO: 22940 - RNA, 19 nt, Artificial Sequence
  Antisense Oligo
agauagauaagcuagauga

SEQ ID NO: 22941 - RNA, 19 nt, Artificial Sequence
  Sense Oligo
caucuagcuuaucuaucua

SEQ ID NO: 22942 - RNA, 19 nt, Artificial Sequence
  Antisense Oligo
uagauagauaagcuagaug

SEQ ID NO: 22943 - RNA, 19 nt, Artificial Sequence
  Sense Oligo
uucaucuguucuaucuaug

SEQ ID NO: 22944 - RNA, 19 nt, Artificial Sequence
  Antisense Oligo
cauagauagaacagaugaa

SEQ ID NO: 22945 - RNA, 19 nt, Artificial Sequence
  Sense Oligo
cuaucuuauguaucuaucc

SEQ ID NO: 22946 - RNA, 19 nt, Artificial Sequence
  Antisense Oligo
ggauagauacauaagauag

SEQ ID NO: 22947 - RNA, 19 nt, Artificial Sequence
  Sense Oligo
auucaucuaucccaucuua

SEQ ID NO: 22948 - RNA, 19 nt, Artificial Sequence
  Antisense Oligo
uaagaugggauagaugaau

SEQ ID NO: 22949 - RNA, 19 nt, Artificial Sequence
  Sense Oligo
uucaucuaucccaucuuau

SEQ ID NO: 22950 - RNA, 19 nt, Artificial Sequence
  Antisense Oligo
auaagaugggauagaugaa

SEQ ID NO: 22951 - RNA, 19 nt, Artificial Sequence
  Sense Oligo
caucuaucccaucuuaucu

SEQ ID NO: 22952 - RNA, 19 nt, Artificial Sequence
  Antisense Oligo
agauaagaugggauagaug

SEQ ID NO: 22953 - RNA, 19 nt, Artificial Sequence
  Sense Oligo
aucuaucccaucuuaucua

SEQ ID NO: 22954 - RNA, 19 nt, Artificial Sequence
  Antisense Oligo
uagauaagaugggauagau

SEQ ID NO: 22955 - RNA, 19 nt, Artificial Sequence
  Sense Oligo
ucuaucccaucuuaucuau

SEQ ID NO: 22956 - RNA, 19 nt, Artificial Sequence
  Antisense Oligo
auagauaagaugggauaga

SEQ ID NO: 22957 - RNA, 19 nt, Artificial Sequence
  Sense Oligo
cuaucccaucuuaucuauc

SEQ ID NO: 22958 - RNA, 19 nt, Artificial Sequence
  Antisense Oligo
gauagauaagaugggauag

SEQ ID NO: 22959 - RNA, 19 nt, Artificial Sequence
  Sense Oligo
uaucccaucuuaucuaucc

SEQ ID NO: 22960 - RNA, 19 nt, Artificial Sequence
  Antisense Oligo
ggauagauaagaugggaua

SEQ ID NO: 22961 - RNA, 19 nt, Artificial Sequence
  Sense Oligo
caucuuaucuauccauccc

SEQ ID NO: 22962 - RNA, 19 nt, Artificial Sequence
  Antisense Oligo
gggauggauagauaagaug

SEQ ID NO: 22963 - RNA, 19 nt, Artificial Sequence
  Sense Oligo
uuaucuauccaucccaucu

SEQ ID NO: 22964 - RNA, 19 nt, Artificial Sequence
  Antisense Oligo
agaugggauggauagauaa

SEQ ID NO: 22965 - RNA, 19 nt, Artificial Sequence
  Sense Oligo
uaucuauccaucccaucuu

SEQ ID NO: 22966 - RNA, 19 nt, Artificial Sequence
  Antisense Oligo
aagaugggauggauagaua

SEQ ID NO: 22967 - RNA, 19 nt, Artificial Sequence
  Sense Oligo
aucuauccaucccaucuua

SEQ ID NO: 22968 - RNA, 19 nt, Artificial Sequence
  Antisense Oligo
uaagaugggauggauagau

SEQ ID NO: 22969 - RNA, 19 nt, Artificial Sequence
  Sense Oligo
cguccauccauccauguau

SEQ ID NO: 22970 - RNA, 19 nt, Artificial Sequence
  Antisense Oligo
auacauggauggauggacg

SEQ ID NO: 22971 - RNA, 19 nt, Artificial Sequence
  Sense Oligo
guccauccauccauguauc

SEQ ID NO: 22972 - RNA, 19 nt, Artificial Sequence
  Antisense Oligo
gauacauggauggauggac

SEQ ID NO: 22973 - RNA, 19 nt, Artificial Sequence
  Sense Oligo
cuaccuaucuaccugucua

SEQ ID NO: 22974 - RNA, 19 nt, Artificial Sequence
  Antisense Oligo
uagacagguagauagguag

SEQ ID NO: 22975 - RNA, 19 nt, Artificial Sequence
  Sense Oligo
uucugcucucuggauaacc

SEQ ID NO: 22976 - RNA, 19 nt, Artificial Sequence
  Antisense Oligo
gguuauccagagagcagaa

SEQ ID NO: 22977 - RNA, 19 nt, Artificial Sequence
  Sense Oligo
ucugcucucuggauaaccc

SEQ ID NO: 22978 - RNA, 19 nt, Artificial Sequence
  Antisense Oligo
ggguuauccagagagcaga

SEQ ID NO: 22979 - RNA, 19 nt, Artificial Sequence
  Sense Oligo
acauguacauuguuuagga

SEQ ID NO: 22980 - RNA, 19 nt, Artificial Sequence
  Antisense Oligo
uccuaaacaauguacaugu

SEQ ID NO: 22981 - RNA, 19 nt, Artificial Sequence
  Sense Oligo
guacauuguuuaggaagug

SEQ ID NO: 22982 - RNA, 19 nt, Artificial Sequence
  Antisense Oligo
cacuuccuaaacaauguac

SEQ ID NO: 22983 - RNA, 19 nt, Artificial Sequence
  Sense Oligo
cauuguuuaggaagugcua

SEQ ID NO: 22984 - RNA, 19 nt, Artificial Sequence
  Antisense Oligo
uagcacuuccuaaacaaug

SEQ ID NO: 22985 - RNA, 19 nt, Artificial Sequence
  Sense Oligo
auuguuuaggaagugcuag

SEQ ID NO: 22986 - RNA, 19 nt, Artificial Sequence
  Antisense Oligo
cuagcacuuccuaaacaau

SEQ ID NO: 22987 - RNA, 19 nt, Artificial Sequence
  Sense Oligo
uuguuuaggaagugcuagu

SEQ ID NO: 22988 - RNA, 19 nt, Artificial Sequence
  Antisense Oligo
acuagcacuuccuaaacaa

SEQ ID NO: 22989 - RNA, 19 nt, Artificial Sequence
  Sense Oligo
uaggaagugcuaguuaagu

SEQ ID NO: 22990 - RNA, 19 nt, Artificial Sequence
  Antisense Oligo
acuuaacuagcacuuccua

SEQ ID NO: 22991 - RNA, 19 nt, Artificial Sequence
  Sense Oligo
aggaagugcuaguuaagua

SEQ ID NO: 22992 - RNA, 19 nt, Artificial Sequence
  Antisense Oligo
uacuuaacuagcacuuccu

SEQ ID NO: 22993 - RNA, 19 nt, Artificial Sequence
  Sense Oligo
gaagugcuaguuaaguaug

SEQ ID NO: 22994 - RNA, 19 nt, Artificial Sequence
  Antisense Oligo
cauacuuaacuagcacuuc

SEQ ID NO: 22995 - RNA, 19 nt, Artificial Sequence
  Sense Oligo
agugcuaguuaaguauguc

SEQ ID NO: 22996 - RNA, 19 nt, Artificial Sequence
  Antisense Oligo
gacauacuuaacuagcacu

SEQ ID NO: 22997 - RNA, 19 nt, Artificial Sequence
  Sense Oligo
gugcuaguuaaguaugucu

SEQ ID NO: 22998 - RNA, 19 nt, Artificial Sequence
  Antisense Oligo
agacauacuuaacuagcac

SEQ ID NO: 22999 - RNA, 19 nt, Artificial Sequence
  Sense Oligo
gcuaguuaaguaugucucu

SEQ ID NO: 23000 - RNA, 19 nt, Artificial Sequence
  Antisense Oligo
agagacauacuuaacuagc

SEQ ID NO: 23001 - RNA, 19 nt, Artificial Sequence
  Sense Oligo
cuaguuaaguaugucucuu

SEQ ID NO: 23002 - RNA, 19 nt, Artificial Sequence
  Antisense Oligo
aagagacauacuuaacuag

SEQ ID NO: 23003 - RNA, 19 nt, Artificial Sequence
  Sense Oligo
uauuucugaauccagcuac

SEQ ID NO: 23004 - RNA, 19 nt, Artificial Sequence
  Antisense Oligo
guagcuggauucagaaaua

SEQ ID NO: 23005 - RNA, 19 nt, Artificial Sequence
  Sense Oligo
auuucugaauccagcuacu

SEQ ID NO: 23006 - RNA, 19 nt, Artificial Sequence
  Antisense Oligo
aguagcuggauucagaaau

SEQ ID NO: 23007 - RNA, 19 nt, Artificial Sequence
  Sense Oligo
uuucugaauccagcuacuu

SEQ ID NO: 23008 - RNA, 19 nt, Artificial Sequence
  Antisense Oligo
aaguagcuggauucagaaa

SEQ ID NO: 23009 - RNA, 19 nt, Artificial Sequence
  Sense Oligo
uucugaauccagcuacuua

SEQ ID NO: 23010 - RNA, 19 nt, Artificial Sequence
  Antisense Oligo
uaaguagcuggauucagaa

SEQ ID NO: 23011 - RNA, 19 nt, Artificial Sequence
  Sense Oligo
ucugaauccagcuacuuac

SEQ ID NO: 23012 - RNA, 19 nt, Artificial Sequence
  Antisense Oligo
guaaguagcuggauucaga

SEQ ID NO: 23013 - RNA, 19 nt, Artificial Sequence
  Sense Oligo
cugaauccagcuacuuacu

SEQ ID NO: 23014 - RNA, 19 nt, Artificial Sequence
  Antisense Oligo
aguaaguagcuggauucag

SEQ ID NO: 23015 - RNA, 19 nt, Artificial Sequence
  Sense Oligo
ugaauccagcuacuuacuu

SEQ ID NO: 23016 - RNA, 19 nt, Artificial Sequence
  Antisense Oligo
aaguaaguagcuggauuca

SEQ ID NO: 23017 - RNA, 19 nt, Artificial Sequence
  Sense Oligo
gaauccagcuacuuacuuu

SEQ ID NO: 23018 - RNA, 19 nt, Artificial Sequence
  Antisense Oligo
aaaguaaguagcuggauuc

SEQ ID NO: 23019 - RNA, 19 nt, Artificial Sequence
  Sense Oligo
aauccagcuacuuacuuuu

SEQ ID NO: 23020 - RNA, 19 nt, Artificial Sequence
  Antisense Oligo
aaaaguaaguagcuggauu

SEQ ID NO: 23021 - RNA, 19 nt, Artificial Sequence
  Sense Oligo
auccagcuacuuacuuuua

SEQ ID NO: 23022 - RNA, 19 nt, Artificial Sequence
  Antisense Oligo
uaaaaguaaguagcuggau

SEQ ID NO: 23023 - RNA, 19 nt, Artificial Sequence
  Sense Oligo
ccagcuacuuacuuuuaug

SEQ ID NO: 23024 - RNA, 19 nt, Artificial Sequence
  Antisense Oligo
cauaaaaguaaguagcugg

SEQ ID NO: 23025 - RNA, 19 nt, Artificial Sequence
  Sense Oligo
cagcuacuuacuuuuauga

SEQ ID NO: 23026 - RNA, 19 nt, Artificial Sequence
  Antisense Oligo
ucauaaaaguaaguagcug

SEQ ID NO: 23027 - RNA, 19 nt, Artificial Sequence
  Sense Oligo
agcuacuuacuuuuaugac

SEQ ID NO: 23028 - RNA, 19 nt, Artificial Sequence
  Antisense Oligo
gucauaaaaguaaguagcu

SEQ ID NO: 23029 - RNA, 19 nt, Artificial Sequence
  Sense Oligo
gcuacuuacuuuuaugaca

SEQ ID NO: 23030 - RNA, 19 nt, Artificial Sequence
  Antisense Oligo
ugucauaaaaguaaguagc

SEQ ID NO: 23031 - RNA, 19 nt, Artificial Sequence
  Sense Oligo
aaaauguaaaugcugguug

SEQ ID NO: 23032 - RNA, 19 nt, Artificial Sequence
  Antisense Oligo
caaccagcauuuacauuuu

SEQ ID NO: 23033 - RNA, 19 nt, Artificial Sequence
  Sense Oligo
aauguaaaugcugguuggc

SEQ ID NO: 23034 - RNA, 19 nt, Artificial Sequence
  Antisense Oligo
gccaaccagcauuuacauu

SEQ ID NO: 23035 - RNA, 19 nt, Artificial Sequence
  Sense Oligo
auguaaaugcugguuggca

SEQ ID NO: 23036 - RNA, 19 nt, Artificial Sequence
  Antisense Oligo
ugccaaccagcauuuacau

SEQ ID NO: 23037 - RNA, 19 nt, Artificial Sequence
  Sense Oligo
uguaaaugcugguuggcaa

SEQ ID NO: 23038 - RNA, 19 nt, Artificial Sequence
  Antisense Oligo
uugccaaccagcauuuaca

SEQ ID NO: 23039 - RNA, 19 nt, Artificial Sequence
  Sense Oligo
guaaaugcugguuggcaaa

SEQ ID NO: 23040 - RNA, 19 nt, Artificial Sequence
  Antisense Oligo
uuugccaaccagcauuuac

SEQ ID NO: 23041 - RNA, 19 nt, Artificial Sequence
  Sense Oligo
uaaaugcugguuggcaaau

SEQ ID NO: 23042 - RNA, 19 nt, Artificial Sequence
  Antisense Oligo
auuugccaaccagcauuua

SEQ ID NO: 23043 - RNA, 19 nt, Artificial Sequence
  Sense Oligo
aaaugcugguuggcaaaug

SEQ ID NO: 23044 - RNA, 19 nt, Artificial Sequence
  Antisense Oligo
cauuugccaaccagcauuu

SEQ ID NO: 23045 - RNA, 19 nt, Artificial Sequence
  Sense Oligo
cugguuggcaaaugaccca

SEQ ID NO: 23046 - RNA, 19 nt, Artificial Sequence
  Antisense Oligo
ugggucauuugccaaccag

SEQ ID NO: 23047 - RNA, 19 nt, Artificial Sequence
  Sense Oligo
ugguuggcaaaugacccac

SEQ ID NO: 23048 - RNA, 19 nt, Artificial Sequence
  Antisense Oligo
gugggucauuugccaacca

SEQ ID NO: 23049 - RNA, 19 nt, Artificial Sequence
  Sense Oligo
ggcaaaugacccacauguu

SEQ ID NO: 23050 - RNA, 19 nt, Artificial Sequence
  Antisense Oligo
aacaugugggucauuugcc

SEQ ID NO: 23051 - RNA, 19 nt, Artificial Sequence
  Sense Oligo
gcaaaugacccacauguua

SEQ ID NO: 23052 - RNA, 19 nt, Artificial Sequence
  Antisense Oligo
uaacaugugggucauuugc

SEQ ID NO: 23053 - RNA, 19 nt, Artificial Sequence
  Sense Oligo
acccacauguuacaggagg

SEQ ID NO: 23054 - RNA, 19 nt, Artificial Sequence
  Antisense Oligo
ccuccuguaacaugugggu

SEQ ID NO: 23055 - RNA, 19 nt, Artificial Sequence
  Sense Oligo
ccacauguuacaggaggac

SEQ ID NO: 23056 - RNA, 19 nt, Artificial Sequence
  Antisense Oligo
guccuccuguaacaugugg

SEQ ID NO: 23057 - RNA, 19 nt, Artificial Sequence
  Sense Oligo
cacauguuacaggaggaca

SEQ ID NO: 23058 - RNA, 19 nt, Artificial Sequence
  Antisense Oligo
uguccuccuguaacaugug

SEQ ID NO: 23059 - RNA, 19 nt, Artificial Sequence
  Sense Oligo
uguuacaggaggacauaaa

SEQ ID NO: 23060 - RNA, 19 nt, Artificial Sequence
  Antisense Oligo
uuuauguccuccuguaaca

SEQ ID NO: 23061 - RNA, 19 nt, Artificial Sequence
  Sense Oligo
guuacaggaggacauaaaa

SEQ ID NO: 23062 - RNA, 19 nt, Artificial Sequence
  Antisense Oligo
uuuuauguccuccuguaac

SEQ ID NO: 23063 - RNA, 19 nt, Artificial Sequence
  Sense Oligo
uuacaggaggacauaaaau

SEQ ID NO: 23064 - RNA, 19 nt, Artificial Sequence
  Antisense Oligo
auuuuauguccuccuguaa

SEQ ID NO: 23065 - RNA, 19 nt, Artificial Sequence
  Sense Oligo
ggaggacauaaaauagcac

SEQ ID NO: 23066 - RNA, 19 nt, Artificial Sequence
  Antisense Oligo
gugcuauuuuauguccucc

SEQ ID NO: 23067 - RNA, 19 nt, Artificial Sequence
  Sense Oligo
gaggacauaaaauagcacg

SEQ ID NO: 23068 - RNA, 19 nt, Artificial Sequence
  Antisense Oligo
cgugcuauuuuauguccuc

SEQ ID NO: 23069 - RNA, 19 nt, Artificial Sequence
  Sense Oligo
ggacauaaaauagcacgaa

SEQ ID NO: 23070 - RNA, 19 nt, Artificial Sequence
  Antisense Oligo
uucgugcuauuuuaugucc

SEQ ID NO: 23071 - RNA, 19 nt, Artificial Sequence
  Sense Oligo
gacauaaaauagcacgaag

SEQ ID NO: 23072 - RNA, 19 nt, Artificial Sequence
  Antisense Oligo
cuucgugcuauuuuauguc

SEQ ID NO: 23073 - RNA, 19 nt, Artificial Sequence
  Sense Oligo
acauaaaauagcacgaagu

SEQ ID NO: 23074 - RNA, 19 nt, Artificial Sequence
  Antisense Oligo
acuucgugcuauuuuaugu

SEQ ID NO: 23075 - RNA, 19 nt, Artificial Sequence
  Sense Oligo
cauaaaauagcacgaaguu

SEQ ID NO: 23076 - RNA, 19 nt, Artificial Sequence
  Antisense Oligo
aacuucgugcuauuuuaug

SEQ ID NO: 23077 - RNA, 19 nt, Artificial Sequence
  Sense Oligo
uaaaauagcacgaaguuuc

SEQ ID NO: 23078 - RNA, 19 nt, Artificial Sequence
  Antisense Oligo
gaaacuucgugcuauuuua

SEQ ID NO: 23079 - RNA, 19 nt, Artificial Sequence
  Sense Oligo
aaaauagcacgaaguuucc

SEQ ID NO: 23080 - RNA, 19 nt, Artificial Sequence
  Antisense Oligo
ggaaacuucgugcuauuuu

SEQ ID NO: 23081 - RNA, 19 nt, Artificial Sequence
  Sense Oligo
gcacgaaguuuccucaccc

SEQ ID NO: 23082 - RNA, 19 nt, Artificial Sequence
  Antisense Oligo
gggugaggaaacuucgugc

SEQ ID NO: 23083 - RNA, 19 nt, Artificial Sequence
  Sense Oligo
cacgaaguuuccucacccu

SEQ ID NO: 23084 - RNA, 19 nt, Artificial Sequence
  Antisense Oligo
agggugaggaaacuucgug

SEQ ID NO: 23085 - RNA, 19 nt, Artificial Sequence
  Sense Oligo
acgaaguuuccucacccug

SEQ ID NO: 23086 - RNA, 19 nt, Artificial Sequence
  Antisense Oligo
cagggugaggaaacuucgu

SEQ ID NO: 23087 - RNA, 19 nt, Artificial Sequence
  Sense Oligo
aguuuccucacccugggcc

SEQ ID NO: 23088 - RNA, 19 nt, Artificial Sequence
  Antisense Oligo
ggcccagggugaggaaacu

SEQ ID NO: 23089 - RNA, 19 nt, Artificial Sequence
  Sense Oligo
gggccaggacugucacauu

SEQ ID NO: 23090 - RNA, 19 nt, Artificial Sequence
  Antisense Oligo
aaugugacaguccuggccc

SEQ ID NO: 23091 - RNA, 19 nt, Artificial Sequence
  Sense Oligo
ggccaggacugucacauuc

SEQ ID NO: 23092 - RNA, 19 nt, Artificial Sequence
  Antisense Oligo
gaaugugacaguccuggcc

SEQ ID NO: 23093 - RNA, 19 nt, Artificial Sequence
  Sense Oligo
aacugguguguccucuucu

SEQ ID NO: 23094 - RNA, 19 nt, Artificial Sequence
  Antisense Oligo
agaagaggacacaccaguu

SEQ ID NO: 23095 - RNA, 19 nt, Artificial Sequence
  Sense Oligo
acugguguguccucuucua

SEQ ID NO: 23096 - RNA, 19 nt, Artificial Sequence
  Antisense Oligo
uagaagaggacacaccagu

SEQ ID NO: 23097 - RNA, 19 nt, Artificial Sequence
  Sense Oligo
ugguguguccucuucuaga

SEQ ID NO: 23098 - RNA, 19 nt, Artificial Sequence
  Antisense Oligo
ucuagaagaggacacacca

SEQ ID NO: 23099 - RNA, 19 nt, Artificial Sequence
  Sense Oligo
gguguguccucuucuagac

SEQ ID NO: 23100 - RNA, 19 nt, Artificial Sequence
  Antisense Oligo
gucuagaagaggacacacc

SEQ ID NO: 23101 - RNA, 19 nt, Artificial Sequence
  Sense Oligo
cucuucuagacaucuccuc

SEQ ID NO: 23102 - RNA, 19 nt, Artificial Sequence
  Antisense Oligo
gaggagaugucuagaagag

SEQ ID NO: 23103 - RNA, 19 nt, Artificial Sequence
  Sense Oligo
ucuucuagacaucuccucu

SEQ ID NO: 23104 - RNA, 19 nt, Artificial Sequence
  Antisense Oligo
agaggagaugucuagaaga

SEQ ID NO: 23105 - RNA, 19 nt, Artificial Sequence
  Sense Oligo
cuucuagacaucuccucug

SEQ ID NO: 23106 - RNA, 19 nt, Artificial Sequence
  Antisense Oligo
cagaggagaugucuagaag

SEQ ID NO: 23107 - RNA, 19 nt, Artificial Sequence
  Sense Oligo
uagacaucuccucugcgug

SEQ ID NO: 23108 - RNA, 19 nt, Artificial Sequence
  Antisense Oligo
cacgcagaggagaugucua

SEQ ID NO: 23109 - RNA, 19 nt, Artificial Sequence
  Sense Oligo
agacaucuccucugcguga

SEQ ID NO: 23110 - RNA, 19 nt, Artificial Sequence
  Antisense Oligo
ucacgcagaggagaugucu

SEQ ID NO: 23111 - RNA, 19 nt, Artificial Sequence
  Sense Oligo
gacaucuccucugcgugaa

SEQ ID NO: 23112 - RNA, 19 nt, Artificial Sequence
  Antisense Oligo
uucacgcagaggagauguc

SEQ ID NO: 23113 - RNA, 19 nt, Artificial Sequence
  Sense Oligo
acaucuccucugcgugaau

SEQ ID NO: 23114 - RNA, 19 nt, Artificial Sequence
  Antisense Oligo
auucacgcagaggagaugu

SEQ ID NO: 23115 - RNA, 19 nt, Artificial Sequence
  Sense Oligo
cguuaaugugaguggcagc

SEQ ID NO: 23116 - RNA, 19 nt, Artificial Sequence
  Antisense Oligo
gcugccacucacauuaacg

SEQ ID NO: 23117 - RNA, 19 nt, Artificial Sequence
  Sense Oligo
aaugugaguggcagcucgu

SEQ ID NO: 23118 - RNA, 19 nt, Artificial Sequence
  Antisense Oligo
acgagcugccacucacauu

SEQ ID NO: 23119 - RNA, 19 nt, Artificial Sequence
  Sense Oligo
augugaguggcagcucgug

SEQ ID NO: 23120 - RNA, 19 nt, Artificial Sequence
  Antisense Oligo
cacgagcugccacucacau

SEQ ID NO: 23121 - RNA, 19 nt, Artificial Sequence
  Sense Oligo
ugugaguggcagcucgugc

SEQ ID NO: 23122 - RNA, 19 nt, Artificial Sequence
  Antisense Oligo
gcacgagcugccacucaca

SEQ ID NO: 23123 - RNA, 19 nt, Artificial Sequence
  Sense Oligo
gcgcaugccuugcuacuuu

SEQ ID NO: 23124 - RNA, 19 nt, Artificial Sequence
  Antisense Oligo
aaaguagcaaggcaugcgc

SEQ ID NO: 23125 - RNA, 19 nt, Artificial Sequence
  Sense Oligo
cgcaugccuugcuacuuuc

SEQ ID NO: 23126 - RNA, 19 nt, Artificial Sequence
  Antisense Oligo
gaaaguagcaaggcaugcg

SEQ ID NO: 23127 - RNA, 19 nt, Artificial Sequence
  Sense Oligo
ugccuugcuacuuucaugu

SEQ ID NO: 23128 - RNA, 19 nt, Artificial Sequence
  Antisense Oligo
acaugaaaguagcaaggca

SEQ ID NO: 23129 - RNA, 19 nt, Artificial Sequence
  Sense Oligo
gccuugcuacuuucaugua

SEQ ID NO: 23130 - RNA, 19 nt, Artificial Sequence
  Antisense Oligo
uacaugaaaguagcaaggc

SEQ ID NO: 23131 - RNA, 19 nt, Artificial Sequence
  Sense Oligo
ccuugcuacuuucauguac

SEQ ID NO: 23132 - RNA, 19 nt, Artificial Sequence
  Antisense Oligo
guacaugaaaguagcaagg

SEQ ID NO: 23133 - RNA, 19 nt, Artificial Sequence
  Sense Oligo
gcuacuuucauguacagug

SEQ ID NO: 23134 - RNA, 19 nt, Artificial Sequence
  Antisense Oligo
cacuguacaugaaaguagc

SEQ ID NO: 23135 - RNA, 19 nt, Artificial Sequence
  Sense Oligo
uuucauguacaguggcuga

SEQ ID NO: 23136 - RNA, 19 nt, Artificial Sequence
  Antisense Oligo
ucagccacuguacaugaaa

SEQ ID NO: 23137 - RNA, 19 nt, Artificial Sequence
  Sense Oligo
uucauguacaguggcugag

SEQ ID NO: 23138 - RNA, 19 nt, Artificial Sequence
  Antisense Oligo
cucagccacuguacaugaa

SEQ ID NO: 23139 - RNA, 19 nt, Artificial Sequence
  Sense Oligo
ucauguacaguggcugagg

SEQ ID NO: 23140 - RNA, 19 nt, Artificial Sequence
  Antisense Oligo
ccucagccacuguacauga

SEQ ID NO: 23141 - RNA, 19 nt, Artificial Sequence
  Sense Oligo
cauguacaguggcugaggc

SEQ ID NO: 23142 - RNA, 19 nt, Artificial Sequence
  Antisense Oligo
gccucagccacuguacaug

SEQ ID NO: 23143 - RNA, 19 nt, Artificial Sequence
  Sense Oligo
auguacaguggcugaggcc

SEQ ID NO: 23144 - RNA, 19 nt, Artificial Sequence
  Antisense Oligo
ggccucagccacuguacau

SEQ ID NO: 23145 - RNA, 19 nt, Artificial Sequence
  Sense Oligo
uguacaguggcugaggccu

SEQ ID NO: 23146 - RNA, 19 nt, Artificial Sequence
  Antisense Oligo
aggccucagccacuguaca

SEQ ID NO: 23147 - RNA, 19 nt, Artificial Sequence
  Sense Oligo
ggcugaggccucuagugga

SEQ ID NO: 23148 - RNA, 19 nt, Artificial Sequence
  Antisense Oligo
uccacuagaggccucagcc

SEQ ID NO: 23149 - RNA, 19 nt, Artificial Sequence
  Sense Oligo
gcugaggccucuaguggag

SEQ ID NO: 23150 - RNA, 19 nt, Artificial Sequence
  Antisense Oligo
cuccacuagaggccucagc

SEQ ID NO: 23151 - RNA, 19 nt, Artificial Sequence
  Sense Oligo
cucuaguggaggacggacc

SEQ ID NO: 23152 - RNA, 19 nt, Artificial Sequence
  Antisense Oligo
gguccguccuccacuagag

SEQ ID NO: 23153 - RNA, 19 nt, Artificial Sequence
  Sense Oligo
ucuaguggaggacggaccu

SEQ ID NO: 23154 - RNA, 19 nt, Artificial Sequence
  Antisense Oligo
agguccguccuccacuaga

SEQ ID NO: 23155 - RNA, 19 nt, Artificial Sequence
  Sense Oligo
ccuauccugggcacuuccc

SEQ ID NO: 23156 - RNA, 19 nt, Artificial Sequence
  Antisense Oligo
gggaagugcccaggauagg

SEQ ID NO: 23157 - RNA, 19 nt, Artificial Sequence
  Sense Oligo
cuauccugggcacuucccu

SEQ ID NO: 23158 - RNA, 19 nt, Artificial Sequence
  Antisense Oligo
agggaagugcccaggauag

SEQ ID NO: 23159 - RNA, 19 nt, Artificial Sequence
  Sense Oligo
uauccugggcacuucccuu

SEQ ID NO: 23160 - RNA, 19 nt, Artificial Sequence
  Antisense Oligo
aagggaagugcccaggaua

SEQ ID NO: 23161 - RNA, 19 nt, Artificial Sequence
  Sense Oligo
auccugggcacuucccuug

SEQ ID NO: 23162 - RNA, 19 nt, Artificial Sequence
  Antisense Oligo
caagggaagugcccaggau

SEQ ID NO: 23163 - RNA, 19 nt, Artificial Sequence
  Sense Oligo
ugggcacuucccuuguccu

SEQ ID NO: 23164 - RNA, 19 nt, Artificial Sequence
  Antisense Oligo
aggacaagggaagugccca

SEQ ID NO: 23165 - RNA, 19 nt, Artificial Sequence
  Sense Oligo
gggcacuucccuuguccug

SEQ ID NO: 23166 - RNA, 19 nt, Artificial Sequence
  Antisense Oligo
caggacaagggaagugccc

SEQ ID NO: 23167 - RNA, 19 nt, Artificial Sequence
  Sense Oligo
ggcacuucccuuguccugc

SEQ ID NO: 23168 - RNA, 19 nt, Artificial Sequence
  Antisense Oligo
gcaggacaagggaagugcc

SEQ ID NO: 23169 - RNA, 19 nt, Artificial Sequence
  Sense Oligo
gcacuucccuuguccugcu

SEQ ID NO: 23170 - RNA, 19 nt, Artificial Sequence
  Antisense Oligo
agcaggacaagggaagugc

SEQ ID NO: 23171 - RNA, 19 nt, Artificial Sequence
  Sense Oligo
ucccuuguccugcuguuuu

SEQ ID NO: 23172 - RNA, 19 nt, Artificial Sequence
  Antisense Oligo
aaaacagcaggacaaggga

SEQ ID NO: 23173 - RNA, 19 nt, Artificial Sequence
  Sense Oligo
cccuuguccugcuguuuug

SEQ ID NO: 23174 - RNA, 19 nt, Artificial Sequence
  Antisense Oligo
caaaacagcaggacaaggg

SEQ ID NO: 23175 - RNA, 19 nt, Artificial Sequence
  Sense Oligo
ccuuguccugcuguuuugc

SEQ ID NO: 23176 - RNA, 19 nt, Artificial Sequence
  Antisense Oligo
gcaaaacagcaggacaagg

SEQ ID NO: 23177 - RNA, 19 nt, Artificial Sequence
  Sense Oligo
cuuguccugcuguuuugcc

SEQ ID NO: 23178 - RNA, 19 nt, Artificial Sequence
  Antisense Oligo
ggcaaaacagcaggacaag

SEQ ID NO: 23179 - RNA, 19 nt, Artificial Sequence
  Sense Oligo
uuguccugcuguuuugccg

SEQ ID NO: 23180 - RNA, 19 nt, Artificial Sequence
  Antisense Oligo
cggcaaaacagcaggacaa

SEQ ID NO: 23181 - RNA, 19 nt, Artificial Sequence
  Sense Oligo
guccugcuguuuugccgug

SEQ ID NO: 23182 - RNA, 19 nt, Artificial Sequence
  Antisense Oligo
cacggcaaaacagcaggac

SEQ ID NO: 23183 - RNA, 19 nt, Artificial Sequence
  Sense Oligo
uccugcuguuuugccguga

SEQ ID NO: 23184 - RNA, 19 nt, Artificial Sequence
  Antisense Oligo
ucacggcaaaacagcagga

SEQ ID NO: 23185 - RNA, 19 nt, Artificial Sequence
  Sense Oligo
ccugcuguuuugccgugac

SEQ ID NO: 23186 - RNA, 19 nt, Artificial Sequence
  Antisense Oligo
gucacggcaaaacagcagg

SEQ ID NO: 23187 - RNA, 19 nt, Artificial Sequence
  Sense Oligo
cugcuguuuugccgugaca

SEQ ID NO: 23188 - RNA, 19 nt, Artificial Sequence
  Antisense Oligo
ugucacggcaaaacagcag

SEQ ID NO: 23189 - RNA, 19 nt, Artificial Sequence
  Sense Oligo
ugcuguuuugccgugacau

SEQ ID NO: 23190 - RNA, 19 nt, Artificial Sequence
  Antisense Oligo
augucacggcaaaacagca

SEQ ID NO: 23191 - RNA, 19 nt, Artificial Sequence
  Sense Oligo
gcuguuuugccgugacaua

SEQ ID NO: 23192 - RNA, 19 nt, Artificial Sequence
  Antisense Oligo
uaugucacggcaaaacagc

SEQ ID NO: 23193 - RNA, 19 nt, Artificial Sequence
  Sense Oligo
cuguuuugccgugacauag

SEQ ID NO: 23194 - RNA, 19 nt, Artificial Sequence
  Antisense Oligo
cuaugucacggcaaaacag

SEQ ID NO: 23195 - RNA, 19 nt, Artificial Sequence
  Sense Oligo
uguuuugccgugacauagg

SEQ ID NO: 23196 - RNA, 19 nt, Artificial Sequence
  Antisense Oligo
ccuaugucacggcaaaaca

SEQ ID NO: 23197 - RNA, 19 nt, Artificial Sequence
  Sense Oligo
guuuugccgugacauaggc

SEQ ID NO: 23198 - RNA, 19 nt, Artificial Sequence
  Antisense Oligo
gccuaugucacggcaaaac

SEQ ID NO: 23199 - RNA, 19 nt, Artificial Sequence
  Sense Oligo
uuuugccgugacauaggcu

SEQ ID NO: 23200 - RNA, 19 nt, Artificial Sequence
  Antisense Oligo
agccuaugucacggcaaaa

SEQ ID NO: 23201 - RNA, 19 nt, Artificial Sequence
  Sense Oligo
uuugccgugacauaggcug

SEQ ID NO: 23202 - RNA, 19 nt, Artificial Sequence
  Antisense Oligo
cagccuaugucacggcaaa

SEQ ID NO: 23203 - RNA, 19 nt, Artificial Sequence
  Sense Oligo
uugccgugacauaggcugc

SEQ ID NO: 23204 - RNA, 19 nt, Artificial Sequence
  Antisense Oligo
gcagccuaugucacggcaa

SEQ ID NO: 23205 - RNA, 19 nt, Artificial Sequence
  Sense Oligo
cgugacauaggcugcuagg

SEQ ID NO: 23206 - RNA, 19 nt, Artificial Sequence
  Antisense Oligo
ccuagcagccuaugucacg

SEQ ID NO: 23207 - RNA, 19 nt, Artificial Sequence
  Sense Oligo
gugacauaggcugcuaggc

SEQ ID NO: 23208 - RNA, 19 nt, Artificial Sequence
  Antisense Oligo
gccuagcagccuaugucac

SEQ ID NO: 23209 - RNA, 19 nt, Artificial Sequence
  Sense Oligo
ugacauaggcugcuaggcu

SEQ ID NO: 23210 - RNA, 19 nt, Artificial Sequence
  Antisense Oligo
agccuagcagccuauguca

SEQ ID NO: 23211 - RNA, 19 nt, Artificial Sequence
  Sense Oligo
gacauaggcugcuaggcug

SEQ ID NO: 23212 - RNA, 19 nt, Artificial Sequence
  Antisense Oligo
cagccuagcagccuauguc

SEQ ID NO: 23213 - RNA, 19 nt, Artificial Sequence
  Sense Oligo
acauaggcugcuaggcugc

SEQ ID NO: 23214 - RNA, 19 nt, Artificial Sequence
  Antisense Oligo
gcagccuagcagccuaugu

SEQ ID NO: 23215 - RNA, 19 nt, Artificial Sequence
  Sense Oligo
cauaggcugcuaggcugca

SEQ ID NO: 23216 - RNA, 19 nt, Artificial Sequence
  Antisense Oligo
ugcagccuagcagccuaug

SEQ ID NO: 23217 - RNA, 19 nt, Artificial Sequence
  Sense Oligo
auaggcugcuaggcugcau

SEQ ID NO: 23218 - RNA, 19 nt, Artificial Sequence
  Antisense Oligo
augcagccuagcagccuau

SEQ ID NO: 23219 - RNA, 19 nt, Artificial Sequence
  Sense Oligo
uaggcugcuaggcugcaug

SEQ ID NO: 23220 - RNA, 19 nt, Artificial Sequence
  Antisense Oligo
caugcagccuagcagccua

SEQ ID NO: 23221 - RNA, 19 nt, Artificial Sequence
  Sense Oligo
aggcugcuaggcugcaugc

SEQ ID NO: 23222 - RNA, 19 nt, Artificial Sequence
  Antisense Oligo
gcaugcagccuagcagccu

SEQ ID NO: 23223 - RNA, 19 nt, Artificial Sequence
  Sense Oligo
ggcugcuaggcugcaugcu

SEQ ID NO: 23224 - RNA, 19 nt, Artificial Sequence
  Antisense Oligo
agcaugcagccuagcagcc

SEQ ID NO: 23225 - RNA, 19 nt, Artificial Sequence
  Sense Oligo
gcugcuaggcugcaugcuu

SEQ ID NO: 23226 - RNA, 19 nt, Artificial Sequence
  Antisense Oligo
aagcaugcagccuagcagc

SEQ ID NO: 23227 - RNA, 19 nt, Artificial Sequence
  Sense Oligo
cugcuaggcugcaugcuug

SEQ ID NO: 23228 - RNA, 19 nt, Artificial Sequence
  Antisense Oligo
caagcaugcagccuagcag

SEQ ID NO: 23229 - RNA, 19 nt, Artificial Sequence
  Sense Oligo
ugcuaggcugcaugcuugc

SEQ ID NO: 23230 - RNA, 19 nt, Artificial Sequence
  Antisense Oligo
gcaagcaugcagccuagca

SEQ ID NO: 23231 - RNA, 19 nt, Artificial Sequence
  Sense Oligo
gauucccagccacuagccu

SEQ ID NO: 23232 - RNA, 19 nt, Artificial Sequence
  Antisense Oligo
aggcuaguggcugggaauc

SEQ ID NO: 23233 - RNA, 19 nt, Artificial Sequence
  Sense Oligo
ugcuggcuucaggcuggca

SEQ ID NO: 23234 - RNA, 19 nt, Artificial Sequence
  Antisense Oligo
ugccagccugaagccagca

SEQ ID NO: 23235 - RNA, 19 nt, Artificial Sequence
  Sense Oligo
cuggcuucaggcuggcaca

SEQ ID NO: 23236 - RNA, 19 nt, Artificial Sequence
  Antisense Oligo
ugugccagccugaagccag

SEQ ID NO: 23237 - RNA, 19 nt, Artificial Sequence
  Sense Oligo
cuucaggcuggcacauuua

SEQ ID NO: 23238 - RNA, 19 nt, Artificial Sequence
  Antisense Oligo
uaaaugugccagccugaag

SEQ ID NO: 23239 - RNA, 19 nt, Artificial Sequence
  Sense Oligo
uucaggcuggcacauuuac

SEQ ID NO: 23240 - RNA, 19 nt, Artificial Sequence
  Antisense Oligo
guaaaugugccagccugaa

SEQ ID NO: 23241 - RNA, 19 nt, Artificial Sequence
  Sense Oligo
ucaggcuggcacauuuaca

SEQ ID NO: 23242 - RNA, 19 nt, Artificial Sequence
  Antisense Oligo
uguaaaugugccagccuga

SEQ ID NO: 23243 - RNA, 19 nt, Artificial Sequence
  Sense Oligo
caaagcuucucuggccacu

SEQ ID NO: 23244 - RNA, 19 nt, Artificial Sequence
  Antisense Oligo
aguggccagagaagcuuug

SEQ ID NO: 23245 - RNA, 19 nt, Artificial Sequence
  Sense Oligo
aaagcuucucuggccacuc

SEQ ID NO: 23246 - RNA, 19 nt, Artificial Sequence
  Antisense Oligo
gaguggccagagaagcuuu

SEQ ID NO: 23247 - RNA, 19 nt, Artificial Sequence
  Sense Oligo
cugugcucccugccuucua

SEQ ID NO: 23248 - RNA, 19 nt, Artificial Sequence
  Antisense Oligo
uagaaggcagggagcacag

SEQ ID NO: 23249 - RNA, 19 nt, Artificial Sequence
  Sense Oligo
gugcucccugccuucuaga

SEQ ID NO: 23250 - RNA, 19 nt, Artificial Sequence
  Antisense Oligo
ucuagaaggcagggagcac

SEQ ID NO: 23251 - RNA, 19 nt, Artificial Sequence
  Sense Oligo
ugcucccugccuucuagau

SEQ ID NO: 23252 - RNA, 19 nt, Artificial Sequence
  Antisense Oligo
aucuagaaggcagggagca

SEQ ID NO: 23253 - RNA, 19 nt, Artificial Sequence
  Sense Oligo
cucccugccuucuagauuu

SEQ ID NO: 23254 - RNA, 19 nt, Artificial Sequence
  Antisense Oligo
aaaucuagaaggcagggag

SEQ ID NO: 23255 - RNA, 19 nt, Artificial Sequence
  Sense Oligo
ucccugccuucuagauuuc

SEQ ID NO: 23256 - RNA, 19 nt, Artificial Sequence
  Antisense Oligo
gaaaucuagaaggcaggga

SEQ ID NO: 23257 - RNA, 19 nt, Artificial Sequence
  Sense Oligo
cccugccuucuagauuucu

SEQ ID NO: 23258 - RNA, 19 nt, Artificial Sequence
  Antisense Oligo
agaaaucuagaaggcaggg

SEQ ID NO: 23259 - RNA, 19 nt, Artificial Sequence
  Sense Oligo
ccugccuucuagauuucua

SEQ ID NO: 23260 - RNA, 19 nt, Artificial Sequence
  Antisense Oligo
uagaaaucuagaaggcagg

SEQ ID NO: 23261 - RNA, 19 nt, Artificial Sequence
  Sense Oligo
ucagauucucuccagcguu

SEQ ID NO: 23262 - RNA, 19 nt, Artificial Sequence
  Antisense Oligo
aacgcuggagagaaucuga

SEQ ID NO: 23263 - RNA, 19 nt, Artificial Sequence
  Sense Oligo
cagauucucuccagcguuc

SEQ ID NO: 23264 - RNA, 19 nt, Artificial Sequence
  Antisense Oligo
gaacgcuggagagaaucug

SEQ ID NO: 23265 - RNA, 19 nt, Artificial Sequence
  Sense Oligo
agauucucuccagcguuca

SEQ ID NO: 23266 - RNA, 19 nt, Artificial Sequence
  Antisense Oligo
ugaacgcuggagagaaucu

SEQ ID NO: 23267 - RNA, 19 nt, Artificial Sequence
  Sense Oligo
gauucucuccagcguucag

SEQ ID NO: 23268 - RNA, 19 nt, Artificial Sequence
  Antisense Oligo
cugaacgcuggagagaauc

SEQ ID NO: 23269 - RNA, 19 nt, Artificial Sequence
  Sense Oligo
auucucuccagcguucaga

SEQ ID NO: 23270 - RNA, 19 nt, Artificial Sequence
  Antisense Oligo
ucugaacgcuggagagaau

SEQ ID NO: 23271 - RNA, 19 nt, Artificial Sequence
  Sense Oligo
ucucuccagcguucagaau

SEQ ID NO: 23272 - RNA, 19 nt, Artificial Sequence
  Antisense Oligo
auucugaacgcuggagaga

SEQ ID NO: 23273 - RNA, 19 nt, Artificial Sequence
  Sense Oligo
cucuccagcguucagaaug

SEQ ID NO: 23274 - RNA, 19 nt, Artificial Sequence
  Antisense Oligo
cauucugaacgcuggagag

SEQ ID NO: 23275 - RNA, 19 nt, Artificial Sequence
  Sense Oligo
ccagcguucagaaugaugg

SEQ ID NO: 23276 - RNA, 19 nt, Artificial Sequence
  Antisense Oligo
ccaucauucugaacgcugg

SEQ ID NO: 23277 - RNA, 19 nt, Artificial Sequence
  Sense Oligo
cagcguucagaaugaugga

SEQ ID NO: 23278 - RNA, 19 nt, Artificial Sequence
  Antisense Oligo
uccaucauucugaacgcug

SEQ ID NO: 23279 - RNA, 19 nt, Artificial Sequence
  Sense Oligo
agcguucagaaugauggau

SEQ ID NO: 23280 - RNA, 19 nt, Artificial Sequence
  Antisense Oligo
auccaucauucugaacgcu

SEQ ID NO: 23281 - RNA, 19 nt, Artificial Sequence
  Sense Oligo
gcguucagaaugauggauc

SEQ ID NO: 23282 - RNA, 19 nt, Artificial Sequence
  Antisense Oligo
gauccaucauucugaacgc

SEQ ID NO: 23283 - RNA, 19 nt, Artificial Sequence
  Sense Oligo
cguucagaaugauggaucu

SEQ ID NO: 23284 - RNA, 19 nt, Artificial Sequence
  Antisense Oligo
agauccaucauucugaacg

SEQ ID NO: 23285 - RNA, 19 nt, Artificial Sequence
  Sense Oligo
guucagaaugauggaucuu

SEQ ID NO: 23286 - RNA, 19 nt, Artificial Sequence
  Antisense Oligo
aagauccaucauucugaac

SEQ ID NO: 23287 - RNA, 19 nt, Artificial Sequence
  Sense Oligo
uucagaaugauggaucuug

SEQ ID NO: 23288 - RNA, 19 nt, Artificial Sequence
  Antisense Oligo
caagauccaucauucugaa

SEQ ID NO: 23289 - RNA, 19 nt, Artificial Sequence
  Sense Oligo
ucagaaugauggaucuugu

SEQ ID NO: 23290 - RNA, 19 nt, Artificial Sequence
  Antisense Oligo
acaagauccaucauucuga

SEQ ID NO: 23291 - RNA, 19 nt, Artificial Sequence
  Sense Oligo
cagaaugauggaucuuguc

SEQ ID NO: 23292 - RNA, 19 nt, Artificial Sequence
  Antisense Oligo
gacaagauccaucauucug

SEQ ID NO: 23293 - RNA, 19 nt, Artificial Sequence
  Sense Oligo
agaaugauggaucuuguca

SEQ ID NO: 23294 - RNA, 19 nt, Artificial Sequence
  Antisense Oligo
ugacaagauccaucauucu

SEQ ID NO: 23295 - RNA, 19 nt, Artificial Sequence
  Sense Oligo
gaaugauggaucuugucaa

SEQ ID NO: 23296 - RNA, 19 nt, Artificial Sequence
  Antisense Oligo
uugacaagauccaucauuc

SEQ ID NO: 23297 - RNA, 19 nt, Artificial Sequence
  Sense Oligo
aaugauggaucuugucaau

SEQ ID NO: 23298 - RNA, 19 nt, Artificial Sequence
  Antisense Oligo
auugacaagauccaucauu

SEQ ID NO: 23299 - RNA, 19 nt, Artificial Sequence
  Sense Oligo
augauggaucuugucaauc

SEQ ID NO: 23300 - RNA, 19 nt, Artificial Sequence
  Antisense Oligo
gauugacaagauccaucau

SEQ ID NO: 23301 - RNA, 19 nt, Artificial Sequence
  Sense Oligo
ugauggaucuugucaaucu

SEQ ID NO: 23302 - RNA, 19 nt, Artificial Sequence
  Antisense Oligo
agauugacaagauccauca

SEQ ID NO: 23303 - RNA, 19 nt, Artificial Sequence
  Sense Oligo
gauggaucuugucaaucug

SEQ ID NO: 23304 - RNA, 19 nt, Artificial Sequence
  Antisense Oligo
cagauugacaagauccauc

SEQ ID NO: 23305 - RNA, 19 nt, Artificial Sequence
  Sense Oligo
auggaucuugucaaucugu

SEQ ID NO: 23306 - RNA, 19 nt, Artificial Sequence
  Antisense Oligo
acagauugacaagauccau

SEQ ID NO: 23307 - RNA, 19 nt, Artificial Sequence
  Sense Oligo
uggaucuugucaaucugug

SEQ ID NO: 23308 - RNA, 19 nt, Artificial Sequence
  Antisense Oligo
cacagauugacaagaucca

SEQ ID NO: 23309 - RNA, 19 nt, Artificial Sequence
  Sense Oligo
ggaucuugucaaucugugc

SEQ ID NO: 23310 - RNA, 19 nt, Artificial Sequence
  Antisense Oligo
gcacagauugacaagaucc

SEQ ID NO: 23311 - RNA, 19 nt, Artificial Sequence
  Sense Oligo
gaucuugucaaucugugcc

SEQ ID NO: 23312 - RNA, 19 nt, Artificial Sequence
  Antisense Oligo
ggcacagauugacaagauc

SEQ ID NO: 23313 - RNA, 19 nt, Artificial Sequence
  Sense Oligo
aucuugucaaucugugccg

SEQ ID NO: 23314 - RNA, 19 nt, Artificial Sequence
  Antisense Oligo
cggcacagauugacaagau

SEQ ID NO: 23315 - RNA, 19 nt, Artificial Sequence
  Sense Oligo
ucuugucaaucugugccgg

SEQ ID NO: 23316 - RNA, 19 nt, Artificial Sequence
  Antisense Oligo
ccggcacagauugacaaga

SEQ ID NO: 23317 - RNA, 19 nt, Artificial Sequence
  Sense Oligo
cuugucaaucugugccggu

SEQ ID NO: 23318 - RNA, 19 nt, Artificial Sequence
  Antisense Oligo
accggcacagauugacaag

SEQ ID NO: 23319 - RNA, 19 nt, Artificial Sequence
  Sense Oligo
uugucaaucugugccgguc

SEQ ID NO: 23320 - RNA, 19 nt, Artificial Sequence
  Antisense Oligo
gaccggcacagauugacaa

SEQ ID NO: 23321 - RNA, 19 nt, Artificial Sequence
  Sense Oligo
ugucaaucugugccggucg

SEQ ID NO: 23322 - RNA, 19 nt, Artificial Sequence
  Antisense Oligo
cgaccggcacagauugaca

SEQ ID NO: 23323 - RNA, 19 nt, Artificial Sequence
  Sense Oligo
gucaaucugugccggucgu

SEQ ID NO: 23324 - RNA, 19 nt, Artificial Sequence
  Antisense Oligo
acgaccggcacagauugac

SEQ ID NO: 23325 - RNA, 19 nt, Artificial Sequence
  Sense Oligo
ucaaucugugccggucguu

SEQ ID NO: 23326 - RNA, 19 nt, Artificial Sequence
  Antisense Oligo
aacgaccggcacagauuga

SEQ ID NO: 23327 - RNA, 19 nt, Artificial Sequence
  Sense Oligo
caaucugugccggucguug

SEQ ID NO: 23328 - RNA, 19 nt, Artificial Sequence
  Antisense Oligo
caacgaccggcacagauug

SEQ ID NO: 23329 - RNA, 19 nt, Artificial Sequence
  Sense Oligo
aaucugugccggucguugg

SEQ ID NO: 23330 - RNA, 19 nt, Artificial Sequence
  Antisense Oligo
ccaacgaccggcacagauu

SEQ ID NO: 23331 - RNA, 19 nt, Artificial Sequence
  Sense Oligo
aucugugccggucguuggg

SEQ ID NO: 23332 - RNA, 19 nt, Artificial Sequence
  Antisense Oligo
cccaacgaccggcacagau

SEQ ID NO: 23333 - RNA, 19 nt, Artificial Sequence
  Sense Oligo
ucugugccggucguugggu

SEQ ID NO: 23334 - RNA, 19 nt, Artificial Sequence
  Antisense Oligo
acccaacgaccggcacaga

SEQ ID NO: 23335 - RNA, 19 nt, Artificial Sequence
  Sense Oligo
ugccggucguuggguggaa

SEQ ID NO: 23336 - RNA, 19 nt, Artificial Sequence
  Antisense Oligo
uuccacccaacgaccggca

SEQ ID NO: 23337 - RNA, 19 nt, Artificial Sequence
  Sense Oligo
aaauggcacugcagggccu

SEQ ID NO: 23338 - RNA, 19 nt, Artificial Sequence
  Antisense Oligo
aggcccugcagugccauuu

SEQ ID NO: 23339 - RNA, 19 nt, Artificial Sequence
  Sense Oligo
aauggcacugcagggccuc

SEQ ID NO: 23340 - RNA, 19 nt, Artificial Sequence
  Antisense Oligo
gaggcccugcagugccauu

SEQ ID NO: 23341 - RNA, 19 nt, Artificial Sequence
  Sense Oligo
ugcagggccuccguucuga

SEQ ID NO: 23342 - RNA, 19 nt, Artificial Sequence
  Antisense Oligo
ucagaacggaggcccugca

SEQ ID NO: 23343 - RNA, 19 nt, Artificial Sequence
  Sense Oligo
gcagggccuccguucugau

SEQ ID NO: 23344 - RNA, 19 nt, Artificial Sequence
  Antisense Oligo
aucagaacggaggcccugc

SEQ ID NO: 23345 - RNA, 19 nt, Artificial Sequence
  Sense Oligo
cagggccuccguucugauu

SEQ ID NO: 23346 - RNA, 19 nt, Artificial Sequence
  Antisense Oligo
aaucagaacggaggcccug

SEQ ID NO: 23347 - RNA, 19 nt, Artificial Sequence
  Sense Oligo
uccguucugauuuccuuca

SEQ ID NO: 23348 - RNA, 19 nt, Artificial Sequence
  Antisense Oligo
ugaaggaaaucagaacgga

SEQ ID NO: 23349 - RNA, 19 nt, Artificial Sequence
  Sense Oligo
ccguucugauuuccuucau

SEQ ID NO: 23350 - RNA, 19 nt, Artificial Sequence
  Antisense Oligo
augaaggaaaucagaacgg

SEQ ID NO: 23351 - RNA, 19 nt, Artificial Sequence
  Sense Oligo
cguucugauuuccuucauc

SEQ ID NO: 23352 - RNA, 19 nt, Artificial Sequence
  Antisense Oligo
gaugaaggaaaucagaacg

SEQ ID NO: 23353 - RNA, 19 nt, Artificial Sequence
  Sense Oligo
gauuuccuucaucaguagg

SEQ ID NO: 23354 - RNA, 19 nt, Artificial Sequence
  Antisense Oligo
ccuacugaugaaggaaauc

SEQ ID NO: 23355 - RNA, 19 nt, Artificial Sequence
  Sense Oligo
auuuccuucaucaguaggc

SEQ ID NO: 23356 - RNA, 19 nt, Artificial Sequence
  Antisense Oligo
gccuacugaugaaggaaau

SEQ ID NO: 23357 - RNA, 19 nt, Artificial Sequence
  Sense Oligo
uuuccuucaucaguaggca

SEQ ID NO: 23358 - RNA, 19 nt, Artificial Sequence
  Antisense Oligo
ugccuacugaugaaggaaa

SEQ ID NO: 23359 - RNA, 19 nt, Artificial Sequence
  Sense Oligo
uucaucaguaggcauggca

SEQ ID NO: 23360 - RNA, 19 nt, Artificial Sequence
  Antisense Oligo
ugccaugccuacugaugaa

SEQ ID NO: 23361 - RNA, 19 nt, Artificial Sequence
  Sense Oligo
ucaucaguaggcauggcag

SEQ ID NO: 23362 - RNA, 19 nt, Artificial Sequence
  Antisense Oligo
cugccaugccuacugauga

SEQ ID NO: 23363 - RNA, 19 nt, Artificial Sequence
  Sense Oligo
caucaguaggcauggcagg

SEQ ID NO: 23364 - RNA, 19 nt, Artificial Sequence
  Antisense Oligo
ccugccaugccuacugaug

SEQ ID NO: 23365 - RNA, 19 nt, Artificial Sequence
  Sense Oligo
aucaguaggcauggcaggc

SEQ ID NO: 23366 - RNA, 19 nt, Artificial Sequence
  Antisense Oligo
gccugccaugccuacugau

SEQ ID NO: 23367 - RNA, 19 nt, Artificial Sequence
  Sense Oligo
gcauggcaggcaucucuuu

SEQ ID NO: 23368 - RNA, 19 nt, Artificial Sequence
  Antisense Oligo
aaagagaugccugccaugc

SEQ ID NO: 23369 - RNA, 19 nt, Artificial Sequence
  Sense Oligo
cauggcaggcaucucuuug

SEQ ID NO: 23370 - RNA, 19 nt, Artificial Sequence
  Antisense Oligo
caaagagaugccugccaug

SEQ ID NO: 23371 - RNA, 19 nt, Artificial Sequence
  Sense Oligo
auggcaggcaucucuuugg

SEQ ID NO: 23372 - RNA, 19 nt, Artificial Sequence
  Antisense Oligo
ccaaagagaugccugccau

SEQ ID NO: 23373 - RNA, 19 nt, Artificial Sequence
  Sense Oligo
uggcaggcaucucuuugga

SEQ ID NO: 23374 - RNA, 19 nt, Artificial Sequence
  Antisense Oligo
uccaaagagaugccugcca

SEQ ID NO: 23375 - RNA, 19 nt, Artificial Sequence
  Sense Oligo
ggcaggcaucucuuuggaa

SEQ ID NO: 23376 - RNA, 19 nt, Artificial Sequence
  Antisense Oligo
uuccaaagagaugccugcc

SEQ ID NO: 23377 - RNA, 19 nt, Artificial Sequence
  Sense Oligo
gcaggcaucucuuuggaag

SEQ ID NO: 23378 - RNA, 19 nt, Artificial Sequence
  Antisense Oligo
cuuccaaagagaugccugc

SEQ ID NO: 23379 - RNA, 19 nt, Artificial Sequence
  Sense Oligo
caggcaucucuuuggaagu

SEQ ID NO: 23380 - RNA, 19 nt, Artificial Sequence
  Antisense Oligo
acuuccaaagagaugccug

SEQ ID NO: 23381 - RNA, 19 nt, Artificial Sequence
  Sense Oligo
ggcaucucuuuggaaguua

SEQ ID NO: 23382 - RNA, 19 nt, Artificial Sequence
  Antisense Oligo
uaacuuccaaagagaugcc

SEQ ID NO: 23383 - RNA, 19 nt, Artificial Sequence
  Sense Oligo
caucucuuuggaaguuaag

SEQ ID NO: 23384 - RNA, 19 nt, Artificial Sequence
  Antisense Oligo
cuuaacuuccaaagagaug

SEQ ID NO: 23385 - RNA, 19 nt, Artificial Sequence
  Sense Oligo
uguauguguauuuccuuga

SEQ ID NO: 23386 - RNA, 19 nt, Artificial Sequence
  Antisense Oligo
ucaaggaaauacacauaca

SEQ ID NO: 23387 - RNA, 19 nt, Artificial Sequence
  Sense Oligo
guauguguauuuccuugag

SEQ ID NO: 23388 - RNA, 19 nt, Artificial Sequence
  Antisense Oligo
cucaaggaaauacacauac

SEQ ID NO: 23389 - RNA, 19 nt, Artificial Sequence
  Sense Oligo
uauguguauuuccuugagc

SEQ ID NO: 23390 - RNA, 19 nt, Artificial Sequence
  Antisense Oligo
gcucaaggaaauacacaua

SEQ ID NO: 23391 - RNA, 19 nt, Artificial Sequence
  Sense Oligo
auguguauuuccuugagcg

SEQ ID NO: 23392 - RNA, 19 nt, Artificial Sequence
  Antisense Oligo
cgcucaaggaaauacacau

SEQ ID NO: 23393 - RNA, 19 nt, Artificial Sequence
  Sense Oligo
uguguauuuccuugagcgg

SEQ ID NO: 23394 - RNA, 19 nt, Artificial Sequence
  Antisense Oligo
ccgcucaaggaaauacaca

SEQ ID NO: 23395 - RNA, 19 nt, Artificial Sequence
  Sense Oligo
guguauuuccuugagcggc

SEQ ID NO: 23396 - RNA, 19 nt, Artificial Sequence
  Antisense Oligo
gccgcucaaggaaauacac

SEQ ID NO: 23397 - RNA, 19 nt, Artificial Sequence
  Sense Oligo
cggccugucugucuuuagg

SEQ ID NO: 23398 - RNA, 19 nt, Artificial Sequence
  Antisense Oligo
ccuaaagacagacaggccg

SEQ ID NO: 23399 - RNA, 19 nt, Artificial Sequence
  Sense Oligo
ggccugucugucuuuaggg

SEQ ID NO: 23400 - RNA, 19 nt, Artificial Sequence
  Antisense Oligo
cccuaaagacagacaggcc

SEQ ID NO: 23401 - RNA, 19 nt, Artificial Sequence
  Sense Oligo
gccugucugucuuuaggga

SEQ ID NO: 23402 - RNA, 19 nt, Artificial Sequence
  Antisense Oligo
ucccuaaagacagacaggc

SEQ ID NO: 23403 - RNA, 19 nt, Artificial Sequence
  Sense Oligo
ccugucugucuuuagggaa

SEQ ID NO: 23404 - RNA, 19 nt, Artificial Sequence
  Antisense Oligo
uucccuaaagacagacagg

SEQ ID NO: 23405 - RNA, 19 nt, Artificial Sequence
  Sense Oligo
ugucugucuuuagggaagc

SEQ ID NO: 23406 - RNA, 19 nt, Artificial Sequence
  Antisense Oligo
gcuucccuaaagacagaca

SEQ ID NO: 23407 - RNA, 19 nt, Artificial Sequence
  Sense Oligo
gucuuuagggaagcucguu

SEQ ID NO: 23408 - RNA, 19 nt, Artificial Sequence
  Antisense Oligo
aacgagcuucccuaaagac

SEQ ID NO: 23409 - RNA, 19 nt, Artificial Sequence
  Sense Oligo
ucuuuagggaagcucguuu

SEQ ID NO: 23410 - RNA, 19 nt, Artificial Sequence
  Antisense Oligo
aaacgagcuucccuaaaga

SEQ ID NO: 23411 - RNA, 19 nt, Artificial Sequence
  Sense Oligo
cuuuagggaagcucguuuu

SEQ ID NO: 23412 - RNA, 19 nt, Artificial Sequence
  Antisense Oligo
aaaacgagcuucccuaaag

SEQ ID NO: 23413 - RNA, 19 nt, Artificial Sequence
  Sense Oligo
uuuagggaagcucguuuug

SEQ ID NO: 23414 - RNA, 19 nt, Artificial Sequence
  Antisense Oligo
caaaacgagcuucccuaaa

SEQ ID NO: 23415 - RNA, 19 nt, Artificial Sequence
  Sense Oligo
uuagggaagcucguuuugc

SEQ ID NO: 23416 - RNA, 19 nt, Artificial Sequence
  Antisense Oligo
gcaaaacgagcuucccuaa

SEQ ID NO: 23417 - RNA, 19 nt, Artificial Sequence
  Sense Oligo
uagggaagcucguuuugcu

SEQ ID NO: 23418 - RNA, 19 nt, Artificial Sequence
  Antisense Oligo
agcaaaacgagcuucccua

SEQ ID NO: 23419 - RNA, 19 nt, Artificial Sequence
  Sense Oligo
agcucguuuugcuuugguu

SEQ ID NO: 23420 - RNA, 19 nt, Artificial Sequence
  Antisense Oligo
aaccaaagcaaaacgagcu

SEQ ID NO: 23421 - RNA, 19 nt, Artificial Sequence
  Sense Oligo
gcucguuuugcuuugguug

SEQ ID NO: 23422 - RNA, 19 nt, Artificial Sequence
  Antisense Oligo
caaccaaagcaaaacgagc

SEQ ID NO: 23423 - RNA, 19 nt, Artificial Sequence
  Sense Oligo
cucguuuugcuuugguugg

SEQ ID NO: 23424 - RNA, 19 nt, Artificial Sequence
  Antisense Oligo
ccaaccaaagcaaaacgag

SEQ ID NO: 23425 - RNA, 19 nt, Artificial Sequence
  Sense Oligo
cguuuugcuuugguugguc

SEQ ID NO: 23426 - RNA, 19 nt, Artificial Sequence
  Antisense Oligo
gaccaaccaaagcaaaacg

SEQ ID NO: 23427 - RNA, 19 nt, Artificial Sequence
  Sense Oligo
uuuugcuuugguugguccu

SEQ ID NO: 23428 - RNA, 19 nt, Artificial Sequence
  Antisense Oligo
aggaccaaccaaagcaaaa

SEQ ID NO: 23429 - RNA, 19 nt, Artificial Sequence
  Sense Oligo
uuugcuuugguugguccuu

SEQ ID NO: 23430 - RNA, 19 nt, Artificial Sequence
  Antisense Oligo
aaggaccaaccaaagcaaa

SEQ ID NO: 23431 - RNA, 19 nt, Artificial Sequence
  Sense Oligo
gauuguugggacuguuuau

SEQ ID NO: 23432 - RNA, 19 nt, Artificial Sequence
  Antisense Oligo
auaaacagucccaacaauc

SEQ ID NO: 23433 - RNA, 19 nt, Artificial Sequence
  Sense Oligo
guugggacuguuuauacug

SEQ ID NO: 23434 - RNA, 19 nt, Artificial Sequence
  Antisense Oligo
caguauaaacagucccaac

SEQ ID NO: 23435 - RNA, 19 nt, Artificial Sequence
  Sense Oligo
uugggacuguuuauacugg

SEQ ID NO: 23436 - RNA, 19 nt, Artificial Sequence
  Antisense Oligo
ccaguauaaacagucccaa

SEQ ID NO: 23437 - RNA, 19 nt, Artificial Sequence
  Sense Oligo
ugggacuguuuauacuggg

SEQ ID NO: 23438 - RNA, 19 nt, Artificial Sequence
  Antisense Oligo
cccaguauaaacaguccca

SEQ ID NO: 23439 - RNA, 19 nt, Artificial Sequence
  Sense Oligo
agcuuugucugcaggugga

SEQ ID NO: 23440 - RNA, 19 nt, Artificial Sequence
  Antisense Oligo
uccaccugcagacaaagcu

SEQ ID NO: 23441 - RNA, 19 nt, Artificial Sequence
  Sense Oligo
gcuuugucugcagguggag

SEQ ID NO: 23442 - RNA, 19 nt, Artificial Sequence
  Antisense Oligo
cuccaccugcagacaaagc

SEQ ID NO: 23443 - RNA, 19 nt, Artificial Sequence
  Sense Oligo
uugucugcagguggaggag

SEQ ID NO: 23444 - RNA, 19 nt, Artificial Sequence
  Antisense Oligo
cuccuccaccugcagacaa

SEQ ID NO: 23445 - RNA, 19 nt, Artificial Sequence
  Sense Oligo
gacagugguuucccagcac

SEQ ID NO: 23446 - RNA, 19 nt, Artificial Sequence
  Antisense Oligo
gugcugggaaaccacuguc

SEQ ID NO: 23447 - RNA, 19 nt, Artificial Sequence
  Sense Oligo
guuucccagcaccaccuca

SEQ ID NO: 23448 - RNA, 19 nt, Artificial Sequence
  Antisense Oligo
ugagguggugcugggaaac

SEQ ID NO: 23449 - RNA, 19 nt, Artificial Sequence
  Sense Oligo
uuucccagcaccaccucau

SEQ ID NO: 23450 - RNA, 19 nt, Artificial Sequence
  Antisense Oligo
augagguggugcugggaaa

SEQ ID NO: 23451 - RNA, 19 nt, Artificial Sequence
  Sense Oligo
uucccagcaccaccucaug

SEQ ID NO: 23452 - RNA, 19 nt, Artificial Sequence
  Antisense Oligo
caugagguggugcugggaa

SEQ ID NO: 23453 - RNA, 19 nt, Artificial Sequence
  Sense Oligo
ccaccucauggucuuucca

SEQ ID NO: 23454 - RNA, 19 nt, Artificial Sequence
  Antisense Oligo
uggaaagaccaugaggugg

SEQ ID NO: 23455 - RNA, 19 nt, Artificial Sequence
  Sense Oligo
caccucauggucuuuccag

SEQ ID NO: 23456 - RNA, 19 nt, Artificial Sequence
  Antisense Oligo
cuggaaagaccaugaggug

SEQ ID NO: 23457 - RNA, 19 nt, Artificial Sequence
  Sense Oligo
accucauggucuuuccagg

SEQ ID NO: 23458 - RNA, 19 nt, Artificial Sequence
  Antisense Oligo
ccuggaaagaccaugaggu

SEQ ID NO: 23459 - RNA, 19 nt, Artificial Sequence
  Sense Oligo
ccucauggucuuuccagga

SEQ ID NO: 23460 - RNA, 19 nt, Artificial Sequence
  Antisense Oligo
uccuggaaagaccaugagg

SEQ ID NO: 23461 - RNA, 19 nt, Artificial Sequence
  Sense Oligo
cucauggucuuuccaggau

SEQ ID NO: 23462 - RNA, 19 nt, Artificial Sequence
  Antisense Oligo
auccuggaaagaccaugag

SEQ ID NO: 23463 - RNA, 19 nt, Artificial Sequence
  Sense Oligo
ucauggucuuuccaggaug

SEQ ID NO: 23464 - RNA, 19 nt, Artificial Sequence
  Antisense Oligo
cauccuggaaagaccauga

SEQ ID NO: 23465 - RNA, 19 nt, Artificial Sequence
  Sense Oligo
ccaguaaggguccagaagu

SEQ ID NO: 23466 - RNA, 19 nt, Artificial Sequence
  Antisense Oligo
acuucuggacccuuacugg

SEQ ID NO: 23467 - RNA, 19 nt, Artificial Sequence
  Sense Oligo
caguaaggguccagaagua

SEQ ID NO: 23468 - RNA, 19 nt, Artificial Sequence
  Antisense Oligo
uacuucuggacccuuacug

SEQ ID NO: 23469 - RNA, 19 nt, Artificial Sequence
  Sense Oligo
aguaaggguccagaaguau

SEQ ID NO: 23470 - RNA, 19 nt, Artificial Sequence
  Antisense Oligo
auacuucuggacccuuacu

SEQ ID NO: 23471 - RNA, 19 nt, Artificial Sequence
  Sense Oligo
guaaggguccagaaguaug

SEQ ID NO: 23472 - RNA, 19 nt, Artificial Sequence
  Antisense Oligo
cauacuucuggacccuuac

SEQ ID NO: 23473 - RNA, 19 nt, Artificial Sequence
  Sense Oligo
uaaggguccagaaguaugg

SEQ ID NO: 23474 - RNA, 19 nt, Artificial Sequence
  Antisense Oligo
ccauacuucuggacccuua

SEQ ID NO: 23475 - RNA, 19 nt, Artificial Sequence
  Sense Oligo
ggaugcuuccauacuucuu

SEQ ID NO: 23476 - RNA, 19 nt, Artificial Sequence
  Antisense Oligo
aagaaguauggaagcaucc

SEQ ID NO: 23477 - RNA, 19 nt, Artificial Sequence
  Sense Oligo
gaugcuuccauacuucuug

SEQ ID NO: 23478 - RNA, 19 nt, Artificial Sequence
  Antisense Oligo
caagaaguauggaagcauc

SEQ ID NO: 23479 - RNA, 19 nt, Artificial Sequence
  Sense Oligo
ugcuuccauacuucuugcu

SEQ ID NO: 23480 - RNA, 19 nt, Artificial Sequence
  Antisense Oligo
agcaagaaguauggaagca

SEQ ID NO: 23481 - RNA, 19 nt, Artificial Sequence
  Sense Oligo
gcuuccauacuucuugcug

SEQ ID NO: 23482 - RNA, 19 nt, Artificial Sequence
  Antisense Oligo
cagcaagaaguauggaagc

SEQ ID NO: 23483 - RNA, 19 nt, Artificial Sequence
  Sense Oligo
ccauacuucuugcugguug

SEQ ID NO: 23484 - RNA, 19 nt, Artificial Sequence
  Antisense Oligo
caaccagcaagaaguaugg

SEQ ID NO: 23485 - RNA, 19 nt, Artificial Sequence
  Sense Oligo
cauacuucuugcugguugg

SEQ ID NO: 23486 - RNA, 19 nt, Artificial Sequence
  Antisense Oligo
ccaaccagcaagaaguaug

SEQ ID NO: 23487 - RNA, 19 nt, Artificial Sequence
  Sense Oligo
auacuucuugcugguuggc

SEQ ID NO: 23488 - RNA, 19 nt, Artificial Sequence
  Antisense Oligo
gccaaccagcaagaaguau

SEQ ID NO: 23489 - RNA, 19 nt, Artificial Sequence
  Sense Oligo
uacuucuugcugguuggcc

SEQ ID NO: 23490 - RNA, 19 nt, Artificial Sequence
  Antisense Oligo
ggccaaccagcaagaagua

SEQ ID NO: 23491 - RNA, 19 nt, Artificial Sequence
  Sense Oligo
acuucuugcugguuggccc

SEQ ID NO: 23492 - RNA, 19 nt, Artificial Sequence
  Antisense Oligo
gggccaaccagcaagaagu

SEQ ID NO: 23493 - RNA, 19 nt, Artificial Sequence
  Sense Oligo
cuucuugcugguuggcccu

SEQ ID NO: 23494 - RNA, 19 nt, Artificial Sequence
  Antisense Oligo
agggccaaccagcaagaag

SEQ ID NO: 23495 - RNA, 19 nt, Artificial Sequence
  Sense Oligo
uucuugcugguuggcccuu

SEQ ID NO: 23496 - RNA, 19 nt, Artificial Sequence
  Antisense Oligo
aagggccaaccagcaagaa

SEQ ID NO: 23497 - RNA, 19 nt, Artificial Sequence
  Sense Oligo
cuugcugguuggcccuucc

SEQ ID NO: 23498 - RNA, 19 nt, Artificial Sequence
  Antisense Oligo
ggaagggccaaccagcaag

SEQ ID NO: 23499 - RNA, 19 nt, Artificial Sequence
  Sense Oligo
uugcugguuggcccuuccc

SEQ ID NO: 23500 - RNA, 19 nt, Artificial Sequence
  Antisense Oligo
gggaagggccaaccagcaa

SEQ ID NO: 23501 - RNA, 19 nt, Artificial Sequence
  Sense Oligo
ugcugguuggcccuucccu

SEQ ID NO: 23502 - RNA, 19 nt, Artificial Sequence
  Antisense Oligo
agggaagggccaaccagca

SEQ ID NO: 23503 - RNA, 19 nt, Artificial Sequence
  Sense Oligo
gcugguuggcccuucccuu

SEQ ID NO: 23504 - RNA, 19 nt, Artificial Sequence
  Antisense Oligo
aagggaagggccaaccagc

SEQ ID NO: 23505 - RNA, 19 nt, Artificial Sequence
  Sense Oligo
cugguuggcccuucccuua

SEQ ID NO: 23506 - RNA, 19 nt, Artificial Sequence
  Antisense Oligo
uaagggaagggccaaccag

SEQ ID NO: 23507 - RNA, 19 nt, Artificial Sequence
  Sense Oligo
ugguuggcccuucccuuag

SEQ ID NO: 23508 - RNA, 19 nt, Artificial Sequence
  Antisense Oligo
cuaagggaagggccaacca

SEQ ID NO: 23509 - RNA, 19 nt, Artificial Sequence
  Sense Oligo
gguuggcccuucccuuagu

SEQ ID NO: 23510 - RNA, 19 nt, Artificial Sequence
  Antisense Oligo
acuaagggaagggccaacc

SEQ ID NO: 23511 - RNA, 19 nt, Artificial Sequence
  Sense Oligo
guuggcccuucccuuaguc

SEQ ID NO: 23512 - RNA, 19 nt, Artificial Sequence
  Antisense Oligo
gacuaagggaagggccaac

SEQ ID NO: 23513 - RNA, 19 nt, Artificial Sequence
  Sense Oligo
uuggcccuucccuuaguca

SEQ ID NO: 23514 - RNA, 19 nt, Artificial Sequence
  Antisense Oligo
ugacuaagggaagggccaa

SEQ ID NO: 23515 - RNA, 19 nt, Artificial Sequence
  Sense Oligo
cccuucccuuagucaauca

SEQ ID NO: 23516 - RNA, 19 nt, Artificial Sequence
  Antisense Oligo
ugauugacuaagggaaggg

SEQ ID NO: 23517 - RNA, 19 nt, Artificial Sequence
  Sense Oligo
cuucccuuagucaaucacu

SEQ ID NO: 23518 - RNA, 19 nt, Artificial Sequence
  Antisense Oligo
agugauugacuaagggaag

SEQ ID NO: 23519 - RNA, 19 nt, Artificial Sequence
  Sense Oligo
agucaaucacuagugccag

SEQ ID NO: 23520 - RNA, 19 nt, Artificial Sequence
  Antisense Oligo
cuggcacuagugauugacu

SEQ ID NO: 23521 - RNA, 19 nt, Artificial Sequence
  Sense Oligo
ucacuagugccaggguaaa

SEQ ID NO: 23522 - RNA, 19 nt, Artificial Sequence
  Antisense Oligo
uuuacccuggcacuaguga

SEQ ID NO: 23523 - RNA, 19 nt, Artificial Sequence
  Sense Oligo
cacuagugccaggguaaau

SEQ ID NO: 23524 - RNA, 19 nt, Artificial Sequence
  Antisense Oligo
auuuacccuggcacuagug

SEQ ID NO: 23525 - RNA, 19 nt, Artificial Sequence
  Sense Oligo
acuagugccaggguaaaua

SEQ ID NO: 23526 - RNA, 19 nt, Artificial Sequence
  Antisense Oligo
uauuuacccuggcacuagu

SEQ ID NO: 23527 - RNA, 19 nt, Artificial Sequence
  Sense Oligo
cuagugccaggguaaauau

SEQ ID NO: 23528 - RNA, 19 nt, Artificial Sequence
  Antisense Oligo
auauuuacccuggcacuag

SEQ ID NO: 23529 - RNA, 19 nt, Artificial Sequence
  Sense Oligo
uagugccaggguaaauauc

SEQ ID NO: 23530 - RNA, 19 nt, Artificial Sequence
  Antisense Oligo
gauauuuacccuggcacua

SEQ ID NO: 23531 - RNA, 19 nt, Artificial Sequence
  Sense Oligo
agugccaggguaaauaucg

SEQ ID NO: 23532 - RNA, 19 nt, Artificial Sequence
  Antisense Oligo
cgauauuuacccuggcacu

SEQ ID NO: 23533 - RNA, 19 nt, Artificial Sequence
  Sense Oligo
gugccaggguaaauaucgg

SEQ ID NO: 23534 - RNA, 19 nt, Artificial Sequence
  Antisense Oligo
ccgauauuuacccuggcac

SEQ ID NO: 23535 - RNA, 19 nt, Artificial Sequence
  Sense Oligo
ugccaggguaaauaucggc

SEQ ID NO: 23536 - RNA, 19 nt, Artificial Sequence
  Antisense Oligo
gccgauauuuacccuggca

SEQ ID NO: 23537 - RNA, 19 nt, Artificial Sequence
  Sense Oligo
gccaggguaaauaucggcc

SEQ ID NO: 23538 - RNA, 19 nt, Artificial Sequence
  Antisense Oligo
ggccgauauuuacccuggc

SEQ ID NO: 23539 - RNA, 19 nt, Artificial Sequence
  Sense Oligo
ccuggugggaggguagguu

SEQ ID NO: 23540 - RNA, 19 nt, Artificial Sequence
  Antisense Oligo
aaccuacccucccaccagg

SEQ ID NO: 23541 - RNA, 19 nt, Artificial Sequence
  Sense Oligo
cuggugggaggguagguug

SEQ ID NO: 23542 - RNA, 19 nt, Artificial Sequence
  Antisense Oligo
caaccuacccucccaccag

SEQ ID NO: 23543 - RNA, 19 nt, Artificial Sequence
  Sense Oligo
uggugggaggguagguugg

SEQ ID NO: 23544 - RNA, 19 nt, Artificial Sequence
  Antisense Oligo
ccaaccuacccucccacca

SEQ ID NO: 23545 - RNA, 19 nt, Artificial Sequence
  Sense Oligo
ggugggaggguagguuggu

SEQ ID NO: 23546 - RNA, 19 nt, Artificial Sequence
  Antisense Oligo
accaaccuacccucccacc

SEQ ID NO: 23547 - RNA, 19 nt, Artificial Sequence
  Sense Oligo
gugggaggguagguuggug

SEQ ID NO: 23548 - RNA, 19 nt, Artificial Sequence
  Antisense Oligo
caccaaccuacccucccac

SEQ ID NO: 23549 - RNA, 19 nt, Artificial Sequence
  Sense Oligo
gguagguuggugggagggu

SEQ ID NO: 23550 - RNA, 19 nt, Artificial Sequence
  Antisense Oligo
acccucccaccaaccuacc

SEQ ID NO: 23551 - RNA, 19 nt, Artificial Sequence
  Sense Oligo
guagguuggugggagggua

SEQ ID NO: 23552 - RNA, 19 nt, Artificial Sequence
  Antisense Oligo
uacccucccaccaaccuac

SEQ ID NO: 23553 - RNA, 19 nt, Artificial Sequence
  Sense Oligo
uagguuggugggaggguag

SEQ ID NO: 23554 - RNA, 19 nt, Artificial Sequence
  Antisense Oligo
cuacccucccaccaaccua

SEQ ID NO: 23555 - RNA, 19 nt, Artificial Sequence
  Sense Oligo
agguuggugggaggguagg

SEQ ID NO: 23556 - RNA, 19 nt, Artificial Sequence
  Antisense Oligo
ccuacccucccaccaaccu

SEQ ID NO: 23557 - RNA, 19 nt, Artificial Sequence
  Sense Oligo
gguuggugggaggguaggu

SEQ ID NO: 23558 - RNA, 19 nt, Artificial Sequence
  Antisense Oligo
accuacccucccaccaacc

SEQ ID NO: 23559 - RNA, 19 nt, Artificial Sequence
  Sense Oligo
guuggugggaggguagguu

SEQ ID NO: 23560 - RNA, 19 nt, Artificial Sequence
  Antisense Oligo
aaccuacccucccaccaac

SEQ ID NO: 23561 - RNA, 19 nt, Artificial Sequence
  Sense Oligo
uuggugggaggguagguug

SEQ ID NO: 23562 - RNA, 19 nt, Artificial Sequence
  Antisense Oligo
caaccuacccucccaccaa

SEQ ID NO: 23563 - RNA, 19 nt, Artificial Sequence
  Sense Oligo
uggugggaggguagguugg

SEQ ID NO: 23564 - RNA, 19 nt, Artificial Sequence
  Antisense Oligo
ccaaccuacccucccacca

SEQ ID NO: 23565 - RNA, 19 nt, Artificial Sequence
  Sense Oligo
ggugggaggguagguuggu

SEQ ID NO: 23566 - RNA, 19 nt, Artificial Sequence
  Antisense Oligo
accaaccuacccucccacc

SEQ ID NO: 23567 - RNA, 19 nt, Artificial Sequence
  Sense Oligo
gugggaggguagguuggug

SEQ ID NO: 23568 - RNA, 19 nt, Artificial Sequence
  Antisense Oligo
caccaaccuacccucccac

SEQ ID NO: 23569 - RNA, 19 nt, Artificial Sequence
  Sense Oligo
gcagcucucgaaggauggg

SEQ ID NO: 23570 - RNA, 19 nt, Artificial Sequence
  Antisense Oligo
cccauccuucgagagcugc

SEQ ID NO: 23571 - RNA, 19 nt, Artificial Sequence
  Sense Oligo
cgccuguugcagaucuuuc

SEQ ID NO: 23572 - RNA, 19 nt, Artificial Sequence
  Antisense Oligo
gaaagaucugcaacaggcg

SEQ ID NO: 23573 - RNA, 19 nt, Artificial Sequence
  Sense Oligo
gccuguugcagaucuuucu

SEQ ID NO: 23574 - RNA, 19 nt, Artificial Sequence
  Antisense Oligo
agaaagaucugcaacaggc

SEQ ID NO: 23575 - RNA, 19 nt, Artificial Sequence
  Sense Oligo
guugcagaucuuucuccag

SEQ ID NO: 23576 - RNA, 19 nt, Artificial Sequence
  Antisense Oligo
cuggagaaagaucugcaac

SEQ ID NO: 23577 - RNA, 19 nt, Artificial Sequence
  Sense Oligo
ugcagaucuuucuccagcu

SEQ ID NO: 23578 - RNA, 19 nt, Artificial Sequence
  Antisense Oligo
agcuggagaaagaucugca

SEQ ID NO: 23579 - RNA, 19 nt, Artificial Sequence
  Sense Oligo
gcagaucuuucuccagcuc

SEQ ID NO: 23580 - RNA, 19 nt, Artificial Sequence
  Antisense Oligo
gagcuggagaaagaucugc

SEQ ID NO: 23581 - RNA, 19 nt, Artificial Sequence
  Sense Oligo
gaucuuucuccagcucuua

SEQ ID NO: 23582 - RNA, 19 nt, Artificial Sequence
  Antisense Oligo
uaagagcuggagaaagauc

SEQ ID NO: 23583 - RNA, 19 nt, Artificial Sequence
  Sense Oligo
uucuccagcucuuacuuuc

SEQ ID NO: 23584 - RNA, 19 nt, Artificial Sequence
  Antisense Oligo
gaaaguaagagcuggagaa

SEQ ID NO: 23585 - RNA, 19 nt, Artificial Sequence
  Sense Oligo
ucuccagcucuuacuuucu

SEQ ID NO: 23586 - RNA, 19 nt, Artificial Sequence
  Antisense Oligo
agaaaguaagagcuggaga

SEQ ID NO: 23587 - RNA, 19 nt, Artificial Sequence
  Sense Oligo
cuccagcucuuacuuucug

SEQ ID NO: 23588 - RNA, 19 nt, Artificial Sequence
  Antisense Oligo
cagaaaguaagagcuggag

SEQ ID NO: 23589 - RNA, 19 nt, Artificial Sequence
  Sense Oligo
cagcucuuacuuucuggcu

SEQ ID NO: 23590 - RNA, 19 nt, Artificial Sequence
  Antisense Oligo
agccagaaaguaagagcug

SEQ ID NO: 23591 - RNA, 19 nt, Artificial Sequence
  Sense Oligo
agcucuuacuuucuggcug

SEQ ID NO: 23592 - RNA, 19 nt, Artificial Sequence
  Antisense Oligo
cagccagaaaguaagagcu

SEQ ID NO: 23593 - RNA, 19 nt, Artificial Sequence
  Sense Oligo
cuggcugugauguuucaug

SEQ ID NO: 23594 - RNA, 19 nt, Artificial Sequence
  Antisense Oligo
caugaaacaucacagccag

SEQ ID NO: 23595 - RNA, 19 nt, Artificial Sequence
  Sense Oligo
uggcugugauguuucaugu

SEQ ID NO: 23596 - RNA, 19 nt, Artificial Sequence
  Antisense Oligo
acaugaaacaucacagcca

SEQ ID NO: 23597 - RNA, 19 nt, Artificial Sequence
  Sense Oligo
ggcugugauguuucaugug

SEQ ID NO: 23598 - RNA, 19 nt, Artificial Sequence
  Antisense Oligo
cacaugaaacaucacagcc

SEQ ID NO: 23599 - RNA, 19 nt, Artificial Sequence
  Sense Oligo
gcugugauguuucaugugu

SEQ ID NO: 23600 - RNA, 19 nt, Artificial Sequence
  Antisense Oligo
acacaugaaacaucacagc

SEQ ID NO: 23601 - RNA, 19 nt, Artificial Sequence
  Sense Oligo
cugugauguuucaugugug

SEQ ID NO: 23602 - RNA, 19 nt, Artificial Sequence
  Antisense Oligo
cacacaugaaacaucacag

SEQ ID NO: 23603 - RNA, 19 nt, Artificial Sequence
  Sense Oligo
gauguuucaugugugucuu

SEQ ID NO: 23604 - RNA, 19 nt, Artificial Sequence
  Antisense Oligo
aagacacacaugaaacauc

SEQ ID NO: 23605 - RNA, 19 nt, Artificial Sequence
  Sense Oligo
uuucaugugugucuuaugu

SEQ ID NO: 23606 - RNA, 19 nt, Artificial Sequence
  Antisense Oligo
acauaagacacacaugaaa

SEQ ID NO: 23607 - RNA, 19 nt, Artificial Sequence
  Sense Oligo
uucaugugugucuuaugua

SEQ ID NO: 23608 - RNA, 19 nt, Artificial Sequence
  Antisense Oligo
uacauaagacacacaugaa

SEQ ID NO: 23609 - RNA, 19 nt, Artificial Sequence
  Sense Oligo
augugugucuuauguaugu

SEQ ID NO: 23610 - RNA, 19 nt, Artificial Sequence
  Antisense Oligo
acauacauaagacacacau

SEQ ID NO: 23611 - RNA, 19 nt, Artificial Sequence
  Sense Oligo
ugugugucuuauguaugua

SEQ ID NO: 23612 - RNA, 19 nt, Artificial Sequence
  Antisense Oligo
uacauacauaagacacaca

SEQ ID NO: 23613 - RNA, 19 nt, Artificial Sequence
  Sense Oligo
gugugucuuauguauguag

SEQ ID NO: 23614 - RNA, 19 nt, Artificial Sequence
  Antisense Oligo
cuacauacauaagacacac

SEQ ID NO: 23615 - RNA, 19 nt, Artificial Sequence
  Sense Oligo
uguuaucaauuuugagucc

SEQ ID NO: 23616 - RNA, 19 nt, Artificial Sequence
  Antisense Oligo
ggacucaaaauugauaaca

SEQ ID NO: 23617 - RNA, 19 nt, Artificial Sequence
  Sense Oligo
guuaucaauuuugaguccu

SEQ ID NO: 23618 - RNA, 19 nt, Artificial Sequence
  Antisense Oligo
aggacucaaaauugauaac

SEQ ID NO: 23619 - RNA, 19 nt, Artificial Sequence
  Sense Oligo
uuaucaauuuugaguccug

SEQ ID NO: 23620 - RNA, 19 nt, Artificial Sequence
  Antisense Oligo
caggacucaaaauugauaa

SEQ ID NO: 23621 - RNA, 19 nt, Artificial Sequence
  Sense Oligo
uaucaauuuugaguccugc

SEQ ID NO: 23622 - RNA, 19 nt, Artificial Sequence
  Antisense Oligo
gcaggacucaaaauugaua

SEQ ID NO: 23623 - RNA, 19 nt, Artificial Sequence
  Sense Oligo
aucaauuuugaguccugcu

SEQ ID NO: 23624 - RNA, 19 nt, Artificial Sequence
  Antisense Oligo
agcaggacucaaaauugau

SEQ ID NO: 23625 - RNA, 19 nt, Artificial Sequence
  Sense Oligo
ucaauuuugaguccugcua

SEQ ID NO: 23626 - RNA, 19 nt, Artificial Sequence
  Antisense Oligo
uagcaggacucaaaauuga

SEQ ID NO: 23627 - RNA, 19 nt, Artificial Sequence
  Sense Oligo
caauuuugaguccugcuaa

SEQ ID NO: 23628 - RNA, 19 nt, Artificial Sequence
  Antisense Oligo
uuagcaggacucaaaauug

SEQ ID NO: 23629 - RNA, 19 nt, Artificial Sequence
  Sense Oligo
aauuuugaguccugcuaag

SEQ ID NO: 23630 - RNA, 19 nt, Artificial Sequence
  Antisense Oligo
cuuagcaggacucaaaauu

SEQ ID NO: 23631 - RNA, 19 nt, Artificial Sequence
  Sense Oligo
auuuugaguccugcuaagg

SEQ ID NO: 23632 - RNA, 19 nt, Artificial Sequence
  Antisense Oligo
ccuuagcaggacucaaaau

SEQ ID NO: 23633 - RNA, 19 nt, Artificial Sequence
  Sense Oligo
aacuucacgaauucuugag

SEQ ID NO: 23634 - RNA, 19 nt, Artificial Sequence
  Antisense Oligo
cucaagaauucgugaaguu

SEQ ID NO: 23635 - RNA, 19 nt, Artificial Sequence
  Sense Oligo
acuucacgaauucuugagc

SEQ ID NO: 23636 - RNA, 19 nt, Artificial Sequence
  Antisense Oligo
gcucaagaauucgugaagu

SEQ ID NO: 23637 - RNA, 19 nt, Artificial Sequence
  Sense Oligo
cuucacgaauucuugagcu

SEQ ID NO: 23638 - RNA, 19 nt, Artificial Sequence
  Antisense Oligo
agcucaagaauucgugaag

SEQ ID NO: 23639 - RNA, 19 nt, Artificial Sequence
  Sense Oligo
ucacgaauucuugagcucu

SEQ ID NO: 23640 - RNA, 19 nt, Artificial Sequence
  Antisense Oligo
agagcucaagaauucguga

SEQ ID NO: 23641 - RNA, 19 nt, Artificial Sequence
  Sense Oligo
cacgaauucuugagcucuu

SEQ ID NO: 23642 - RNA, 19 nt, Artificial Sequence
  Antisense Oligo
aagagcucaagaauucgug

SEQ ID NO: 23643 - RNA, 19 nt, Artificial Sequence
  Sense Oligo
aauucuugagcucuuggcu

SEQ ID NO: 23644 - RNA, 19 nt, Artificial Sequence
  Antisense Oligo
agccaagagcucaagaauu

SEQ ID NO: 23645 - RNA, 19 nt, Artificial Sequence
  Sense Oligo
auucuugagcucuuggcua

SEQ ID NO: 23646 - RNA, 19 nt, Artificial Sequence
  Antisense Oligo
uagccaagagcucaagaau

SEQ ID NO: 23647 - RNA, 19 nt, Artificial Sequence
  Sense Oligo
uucuugagcucuuggcuac

SEQ ID NO: 23648 - RNA, 19 nt, Artificial Sequence
  Antisense Oligo
guagccaagagcucaagaa

SEQ ID NO: 23649 - RNA, 19 nt, Artificial Sequence
  Sense Oligo
ucuugagcucuuggcuacg

SEQ ID NO: 23650 - RNA, 19 nt, Artificial Sequence
  Antisense Oligo
cguagccaagagcucaaga

SEQ ID NO: 23651 - RNA, 19 nt, Artificial Sequence
  Sense Oligo
cuugagcucuuggcuacgc

SEQ ID NO: 23652 - RNA, 19 nt, Artificial Sequence
  Antisense Oligo
gcguagccaagagcucaag

SEQ ID NO: 23653 - RNA, 19 nt, Artificial Sequence
  Sense Oligo
uugagcucuuggcuacgcc

SEQ ID NO: 23654 - RNA, 19 nt, Artificial Sequence
  Antisense Oligo
ggcguagccaagagcucaa

SEQ ID NO: 23655 - RNA, 19 nt, Artificial Sequence
  Sense Oligo
gucccugcccuccagaucu

SEQ ID NO: 23656 - RNA, 19 nt, Artificial Sequence
  Antisense Oligo
agaucuggagggcagggac

SEQ ID NO: 23657 - RNA, 19 nt, Artificial Sequence
  Sense Oligo
ucccugcccuccagaucuc

SEQ ID NO: 23658 - RNA, 19 nt, Artificial Sequence
  Antisense Oligo
gagaucuggagggcaggga

SEQ ID NO: 23659 - RNA, 19 nt, Artificial Sequence
  Sense Oligo
cccugcccuccagaucuca

SEQ ID NO: 23660 - RNA, 19 nt, Artificial Sequence
  Antisense Oligo
ugagaucuggagggcaggg

SEQ ID NO: 23661 - RNA, 19 nt, Artificial Sequence
  Sense Oligo
ccugcccuccagaucucag

SEQ ID NO: 23662 - RNA, 19 nt, Artificial Sequence
  Antisense Oligo
cugagaucuggagggcagg

SEQ ID NO: 23663 - RNA, 19 nt, Artificial Sequence
  Sense Oligo
cugcccuccagaucucaga

SEQ ID NO: 23664 - RNA, 19 nt, Artificial Sequence
  Antisense Oligo
ucugagaucuggagggcag

SEQ ID NO: 23665 - RNA, 19 nt, Artificial Sequence
  Sense Oligo
uccagaucucagaggagga

SEQ ID NO: 23666 - RNA, 19 nt, Artificial Sequence
  Antisense Oligo
uccuccucugagaucugga

SEQ ID NO: 23667 - RNA, 19 nt, Artificial Sequence
  Sense Oligo
ccagaucucagaggaggag

SEQ ID NO: 23668 - RNA, 19 nt, Artificial Sequence
  Antisense Oligo
cuccuccucugagaucugg

SEQ ID NO: 23669 - RNA, 19 nt, Artificial Sequence
  Sense Oligo
gggaugaaguguccagaca

SEQ ID NO: 23670 - RNA, 19 nt, Artificial Sequence
  Antisense Oligo
ugucuggacacuucauccc

SEQ ID NO: 23671 - RNA, 19 nt, Artificial Sequence
  Sense Oligo
ggaugaaguguccagacag

SEQ ID NO: 23672 - RNA, 19 nt, Artificial Sequence
  Antisense Oligo
cugucuggacacuucaucc

SEQ ID NO: 23673 - RNA, 19 nt, Artificial Sequence
  Sense Oligo
gaugaaguguccagacagg

SEQ ID NO: 23674 - RNA, 19 nt, Artificial Sequence
  Antisense Oligo
ccugucuggacacuucauc

SEQ ID NO: 23675 - RNA, 19 nt, Artificial Sequence
  Sense Oligo
gggaucaggcagagggaag

SEQ ID NO: 23676 - RNA, 19 nt, Artificial Sequence
  Antisense Oligo
cuucccucugccugauccc

SEQ ID NO: 23677 - RNA, 19 nt, Artificial Sequence
  Sense Oligo
ucaggcagagggaagguuc

SEQ ID NO: 23678 - RNA, 19 nt, Artificial Sequence
  Antisense Oligo
gaaccuucccucugccuga

SEQ ID NO: 23679 - RNA, 19 nt, Artificial Sequence
  Sense Oligo
caggcagagggaagguucu

SEQ ID NO: 23680 - RNA, 19 nt, Artificial Sequence
  Antisense Oligo
agaaccuucccucugccug

SEQ ID NO: 23681 - RNA, 19 nt, Artificial Sequence
  Sense Oligo
uggcaccaucuggagugug

SEQ ID NO: 23682 - RNA, 19 nt, Artificial Sequence
  Antisense Oligo
cacacuccagauggugcca

SEQ ID NO: 23683 - RNA, 19 nt, Artificial Sequence
  Sense Oligo
caucuggagugugugucag

SEQ ID NO: 23684 - RNA, 19 nt, Artificial Sequence
  Antisense Oligo
cugacacacacuccagaug

SEQ ID NO: 23685 - RNA, 19 nt, Artificial Sequence
  Sense Oligo
aucuggagugugugucagg

SEQ ID NO: 23686 - RNA, 19 nt, Artificial Sequence
  Antisense Oligo
ccugacacacacuccagau

SEQ ID NO: 23687 - RNA, 19 nt, Artificial Sequence
  Sense Oligo
gucguccagacccaggauu

SEQ ID NO: 23688 - RNA, 19 nt, Artificial Sequence
  Antisense Oligo
aauccugggucuggacgac

SEQ ID NO: 23689 - RNA, 19 nt, Artificial Sequence
  Sense Oligo
ucguccagacccaggauug

SEQ ID NO: 23690 - RNA, 19 nt, Artificial Sequence
  Antisense Oligo
caauccugggucuggacga

SEQ ID NO: 23691 - RNA, 19 nt, Artificial Sequence
  Sense Oligo
cguccagacccaggauuga

SEQ ID NO: 23692 - RNA, 19 nt, Artificial Sequence
  Antisense Oligo
ucaauccugggucuggacg

SEQ ID NO: 23693 - RNA, 19 nt, Artificial Sequence
  Sense Oligo
guccagacccaggauugaa

SEQ ID NO: 23694 - RNA, 19 nt, Artificial Sequence
  Antisense Oligo
uucaauccugggucuggac

SEQ ID NO: 23695 - RNA, 19 nt, Artificial Sequence
  Sense Oligo
gacuccuugaaggguguuu

SEQ ID NO: 23696 - RNA, 19 nt, Artificial Sequence
  Antisense Oligo
aaacacccuucaaggaguc

SEQ ID NO: 23697 - RNA, 19 nt, Artificial Sequence
  Sense Oligo
acuccuugaaggguguuuu

SEQ ID NO: 23698 - RNA, 19 nt, Artificial Sequence
  Antisense Oligo
aaaacacccuucaaggagu

SEQ ID NO: 23699 - RNA, 19 nt, Artificial Sequence
  Sense Oligo
cuccuugaaggguguuuuc

SEQ ID NO: 23700 - RNA, 19 nt, Artificial Sequence
  Antisense Oligo
gaaaacacccuucaaggag

SEQ ID NO: 23701 - RNA, 19 nt, Artificial Sequence
  Sense Oligo
uccuugaaggguguuuucg

SEQ ID NO: 23702 - RNA, 19 nt, Artificial Sequence
  Antisense Oligo
cgaaaacacccuucaagga

SEQ ID NO: 23703 - RNA, 19 nt, Artificial Sequence
  Sense Oligo
ccuugaaggguguuuucgu

SEQ ID NO: 23704 - RNA, 19 nt, Artificial Sequence
  Antisense Oligo
acgaaaacacccuucaagg

SEQ ID NO: 23705 - RNA, 19 nt, Artificial Sequence
  Sense Oligo
cuugaaggguguuuucguc

SEQ ID NO: 23706 - RNA, 19 nt, Artificial Sequence
  Antisense Oligo
gacgaaaacacccuucaag

SEQ ID NO: 23707 - RNA, 19 nt, Artificial Sequence
  Sense Oligo
uugaaggguguuuucgucc

SEQ ID NO: 23708 - RNA, 19 nt, Artificial Sequence
  Antisense Oligo
ggacgaaaacacccuucaa

SEQ ID NO: 23709 - RNA, 19 nt, Artificial Sequence
  Sense Oligo
ugaaggguguuuucgucca

SEQ ID NO: 23710 - RNA, 19 nt, Artificial Sequence
  Antisense Oligo
uggacgaaaacacccuuca

SEQ ID NO: 23711 - RNA, 19 nt, Artificial Sequence
  Sense Oligo
gaaggguguuuucguccau

SEQ ID NO: 23712 - RNA, 19 nt, Artificial Sequence
  Antisense Oligo
auggacgaaaacacccuuc

SEQ ID NO: 23713 - RNA, 19 nt, Artificial Sequence
  Sense Oligo
aaggguguuuucguccauu

SEQ ID NO: 23714 - RNA, 19 nt, Artificial Sequence
  Antisense Oligo
aauggacgaaaacacccuu

SEQ ID NO: 23715 - RNA, 19 nt, Artificial Sequence
  Sense Oligo
aggguguuuucguccauuu

SEQ ID NO: 23716 - RNA, 19 nt, Artificial Sequence
  Antisense Oligo
aaauggacgaaaacacccu

SEQ ID NO: 23717 - RNA, 19 nt, Artificial Sequence
  Sense Oligo
gguguuuucguccauuuuc

SEQ ID NO: 23718 - RNA, 19 nt, Artificial Sequence
  Antisense Oligo
gaaaauggacgaaaacacc

SEQ ID NO: 23719 - RNA, 19 nt, Artificial Sequence
  Sense Oligo
guguuuucguccauuuucu

SEQ ID NO: 23720 - RNA, 19 nt, Artificial Sequence
  Antisense Oligo
agaaaauggacgaaaacac

SEQ ID NO: 23721 - RNA, 19 nt, Artificial Sequence
  Sense Oligo
uguuuucguccauuuucug

SEQ ID NO: 23722 - RNA, 19 nt, Artificial Sequence
  Antisense Oligo
cagaaaauggacgaaaaca

SEQ ID NO: 23723 - RNA, 19 nt, Artificial Sequence
  Sense Oligo
guuuucguccauuuucugu

SEQ ID NO: 23724 - RNA, 19 nt, Artificial Sequence
  Antisense Oligo
acagaaaauggacgaaaac

SEQ ID NO: 23725 - RNA, 19 nt, Artificial Sequence
  Sense Oligo
uuucuguugccauaagagu

SEQ ID NO: 23726 - RNA, 19 nt, Artificial Sequence
  Antisense Oligo
acucuuauggcaacagaaa

SEQ ID NO: 23727 - RNA, 19 nt, Artificial Sequence
  Sense Oligo
uucuguugccauaagagua

SEQ ID NO: 23728 - RNA, 19 nt, Artificial Sequence
  Antisense Oligo
uacucuuauggcaacagaa

SEQ ID NO: 23729 - RNA, 19 nt, Artificial Sequence
  Sense Oligo
ucuguugccauaagaguac

SEQ ID NO: 23730 - RNA, 19 nt, Artificial Sequence
  Antisense Oligo
guacucuuauggcaacaga

SEQ ID NO: 23731 - RNA, 19 nt, Artificial Sequence
  Sense Oligo
cuguugccauaagaguacc

SEQ ID NO: 23732 - RNA, 19 nt, Artificial Sequence
  Antisense Oligo
gguacucuuauggcaacag

SEQ ID NO: 23733 - RNA, 19 nt, Artificial Sequence
  Sense Oligo
uguugccauaagaguaccc

SEQ ID NO: 23734 - RNA, 19 nt, Artificial Sequence
  Antisense Oligo
ggguacucuuauggcaaca

SEQ ID NO: 23735 - RNA, 19 nt, Artificial Sequence
  Sense Oligo
ccgagccuggguaauugaa

SEQ ID NO: 23736 - RNA, 19 nt, Artificial Sequence
  Antisense Oligo
uucaauuacccaggcucgg

SEQ ID NO: 23737 - RNA, 19 nt, Artificial Sequence
  Sense Oligo
ggugugguggcucaagccu

SEQ ID NO: 23738 - RNA, 19 nt, Artificial Sequence
  Antisense Oligo
aggcuugagccaccacacc

SEQ ID NO: 23739 - RNA, 19 nt, Artificial Sequence
  Sense Oligo
acuuugggaggccgaggug

SEQ ID NO: 23740 - RNA, 19 nt, Artificial Sequence
  Antisense Oligo
caccucggccucccaaagu

SEQ ID NO: 23741 - RNA, 19 nt, Artificial Sequence
  Sense Oligo
gaucacgaggucaggaguu

SEQ ID NO: 23742 - RNA, 19 nt, Artificial Sequence
  Antisense Oligo
aacuccugaccucgugauc

SEQ ID NO: 23743 - RNA, 19 nt, Artificial Sequence
  Sense Oligo
aucacgaggucaggaguuc

SEQ ID NO: 23744 - RNA, 19 nt, Artificial Sequence
  Antisense Oligo
gaacuccugaccucgugau

SEQ ID NO: 23745 - RNA, 19 nt, Artificial Sequence
  Sense Oligo
cgaggucaggaguucaaga

SEQ ID NO: 23746 - RNA, 19 nt, Artificial Sequence
  Antisense Oligo
ucuugaacuccugaccucg

SEQ ID NO: 23747 - RNA, 19 nt, Artificial Sequence
  Sense Oligo
augccuguaaucccagcua

SEQ ID NO: 23748 - RNA, 19 nt, Artificial Sequence
  Antisense Oligo
uagcugggauuacaggcau

SEQ ID NO: 23749 - RNA, 19 nt, Artificial Sequence
  Sense Oligo
ugccuguaaucccagcuac

SEQ ID NO: 23750 - RNA, 19 nt, Artificial Sequence
  Antisense Oligo
guagcugggauuacaggca

SEQ ID NO: 23751 - RNA, 19 nt, Artificial Sequence
  Sense Oligo
gccuguaaucccagcuacu

SEQ ID NO: 23752 - RNA, 19 nt, Artificial Sequence
  Antisense Oligo
aguagcugggauuacaggc

SEQ ID NO: 23753 - RNA, 19 nt, Artificial Sequence
  Sense Oligo
ccuguaaucccagcuacuc

SEQ ID NO: 23754 - RNA, 19 nt, Artificial Sequence
  Antisense Oligo
gaguagcugggauuacagg

SEQ ID NO: 23755 - RNA, 19 nt, Artificial Sequence
  Sense Oligo
cuguaaucccagcuacucc

SEQ ID NO: 23756 - RNA, 19 nt, Artificial Sequence
  Antisense Oligo
ggaguagcugggauuacag

SEQ ID NO: 23757 - RNA, 19 nt, Artificial Sequence
  Sense Oligo
acuccagaggcugaggcag

SEQ ID NO: 23758 - RNA, 19 nt, Artificial Sequence
  Antisense Oligo
cugccucagccucuggagu

SEQ ID NO: 23759 - RNA, 19 nt, Artificial Sequence
  Sense Oligo
uccagaggcugaggcagga

SEQ ID NO: 23760 - RNA, 19 nt, Artificial Sequence
  Antisense Oligo
uccugccucagccucugga

SEQ ID NO: 23761 - RNA, 19 nt, Artificial Sequence
  Sense Oligo
acccaggagguggagguug

SEQ ID NO: 23762 - RNA, 19 nt, Artificial Sequence
  Antisense Oligo
caaccuccaccuccugggu

SEQ ID NO: 23763 - RNA, 19 nt, Artificial Sequence
  Sense Oligo
ccaggagguggagguugca

SEQ ID NO: 23764 - RNA, 19 nt, Artificial Sequence
  Antisense Oligo
ugcaaccuccaccuccugg

SEQ ID NO: 23765 - RNA, 19 nt, Artificial Sequence
  Sense Oligo
caggagguggagguugcag

SEQ ID NO: 23766 - RNA, 19 nt, Artificial Sequence
  Antisense Oligo
cugcaaccuccaccuccug

SEQ ID NO: 23767 - RNA, 19 nt, Artificial Sequence
  Sense Oligo
gagguugcagugagccgag

SEQ ID NO: 23768 - RNA, 19 nt, Artificial Sequence
  Antisense Oligo
cucggcucacugcaaccuc

SEQ ID NO: 23769 - RNA, 19 nt, Artificial Sequence
  Sense Oligo
acugcacuccagccugggu

SEQ ID NO: 23770 - RNA, 19 nt, Artificial Sequence
  Antisense Oligo
acccaggcuggagugcagu

SEQ ID NO: 23771 - RNA, 19 nt, Artificial Sequence
  Sense Oligo
ugcacuccagccuggguga

SEQ ID NO: 23772 - RNA, 19 nt, Artificial Sequence
  Antisense Oligo
ucacccaggcuggagugca

SEQ ID NO: 23773 - RNA, 19 nt, Artificial Sequence
  Sense Oligo
cacuccagccugggugaca

SEQ ID NO: 23774 - RNA, 19 nt, Artificial Sequence
  Antisense Oligo
ugucacccaggcuggagug

SEQ ID NO: 23775 - RNA, 19 nt, Artificial Sequence
  Sense Oligo
acuccagccugggugacag

SEQ ID NO: 23776 - RNA, 19 nt, Artificial Sequence
  Antisense Oligo
cugucacccaggcuggagu

SEQ ID NO: 23777 - RNA, 19 nt, Artificial Sequence
  Sense Oligo
cuccagccugggugacaga

SEQ ID NO: 23778 - RNA, 19 nt, Artificial Sequence
  Antisense Oligo
ucugucacccaggcuggag

SEQ ID NO: 23779 - RNA, 19 nt, Artificial Sequence
  Sense Oligo
uccagccugggugacagag

SEQ ID NO: 23780 - RNA, 19 nt, Artificial Sequence
  Antisense Oligo
cucugucacccaggcugga

SEQ ID NO: 23781 - RNA, 19 nt, Artificial Sequence
  Sense Oligo
agccugggugacagagcga

SEQ ID NO: 23782 - RNA, 19 nt, Artificial Sequence
  Antisense Oligo
ucgcucugucacccaggcu

SEQ ID NO: 23783 - RNA, 19 nt, Artificial Sequence
  Sense Oligo
guggcucacaccuguaauc

SEQ ID NO: 23784 - RNA, 19 nt, Artificial Sequence
  Antisense Oligo
gauuacaggugugagccac

SEQ ID NO: 23785 - RNA, 19 nt, Artificial Sequence
  Sense Oligo
uggcucacaccuguaaucc

SEQ ID NO: 23786 - RNA, 19 nt, Artificial Sequence
  Antisense Oligo
ggauuacaggugugagcca

SEQ ID NO: 23787 - RNA, 19 nt, Artificial Sequence
  Sense Oligo
ggcucacaccuguaauccc

SEQ ID NO: 23788 - RNA, 19 nt, Artificial Sequence
  Antisense Oligo
gggauuacaggugugagcc

SEQ ID NO: 23789 - RNA, 19 nt, Artificial Sequence
  Sense Oligo
acaccuguaaucccagcac

SEQ ID NO: 23790 - RNA, 19 nt, Artificial Sequence
  Antisense Oligo
gugcugggauuacaggugu

SEQ ID NO: 23791 - RNA, 19 nt, Artificial Sequence
  Sense Oligo
ugaggucaggaguucaaga

SEQ ID NO: 23792 - RNA, 19 nt, Artificial Sequence
  Antisense Oligo
ucuugaacuccugaccuca

SEQ ID NO: 23793 - RNA, 19 nt, Artificial Sequence
  Sense Oligo
gucaggaguucaagaccau

SEQ ID NO: 23794 - RNA, 19 nt, Artificial Sequence
  Antisense Oligo
auggucuugaacuccugac

SEQ ID NO: 23795 - RNA, 19 nt, Artificial Sequence
  Sense Oligo
ucaggaguucaagaccauc

SEQ ID NO: 23796 - RNA, 19 nt, Artificial Sequence
  Antisense Oligo
gauggucuugaacuccuga

SEQ ID NO: 23797 - RNA, 19 nt, Artificial Sequence
  Sense Oligo
caggaguucaagaccaucc

SEQ ID NO: 23798 - RNA, 19 nt, Artificial Sequence
  Antisense Oligo
ggauggucuugaacuccug

SEQ ID NO: 23799 - RNA, 19 nt, Artificial Sequence
  Sense Oligo
ggaguucaagaccauccug

SEQ ID NO: 23800 - RNA, 19 nt, Artificial Sequence
  Antisense Oligo
caggauggucuugaacucc

SEQ ID NO: 23801 - RNA, 19 nt, Artificial Sequence
  Sense Oligo
uucaagaccauccuggcca

SEQ ID NO: 23802 - RNA, 19 nt, Artificial Sequence
  Antisense Oligo
uggccaggauggucuugaa

SEQ ID NO: 23803 - RNA, 19 nt, Artificial Sequence
  Sense Oligo
ucaagaccauccuggccaa

SEQ ID NO: 23804 - RNA, 19 nt, Artificial Sequence
  Antisense Oligo
uuggccaggauggucuuga

SEQ ID NO: 23805 - RNA, 19 nt, Artificial Sequence
  Sense Oligo
caagaccauccuggccaag

SEQ ID NO: 23806 - RNA, 19 nt, Artificial Sequence
  Antisense Oligo
cuuggccaggauggucuug

SEQ ID NO: 23807 - RNA, 19 nt, Artificial Sequence
  Sense Oligo
aagaccauccuggccaaga

SEQ ID NO: 23808 - RNA, 19 nt, Artificial Sequence
  Antisense Oligo
ucuuggccaggauggucuu

SEQ ID NO: 23809 - RNA, 19 nt, Artificial Sequence
  Sense Oligo
agaccauccuggccaagau

SEQ ID NO: 23810 - RNA, 19 nt, Artificial Sequence
  Antisense Oligo
aucuuggccaggauggucu

SEQ ID NO: 23811 - RNA, 19 nt, Artificial Sequence
  Sense Oligo
ggcaugcaccuguaauccc

SEQ ID NO: 23812 - RNA, 19 nt, Artificial Sequence
  Antisense Oligo
gggauuacaggugcaugcc

SEQ ID NO: 23813 - RNA, 19 nt, Artificial Sequence
  Sense Oligo
gcaccuguaaucccagcua

SEQ ID NO: 23814 - RNA, 19 nt, Artificial Sequence
  Antisense Oligo
uagcugggauuacaggugc

SEQ ID NO: 23815 - RNA, 19 nt, Artificial Sequence
  Sense Oligo
caccuguaaucccagcuac

SEQ ID NO: 23816 - RNA, 19 nt, Artificial Sequence
  Antisense Oligo
guagcugggauuacaggug

SEQ ID NO: 23817 - RNA, 19 nt, Artificial Sequence
  Sense Oligo
accuguaaucccagcuacu

SEQ ID NO: 23818 - RNA, 19 nt, Artificial Sequence
  Antisense Oligo
aguagcugggauuacaggu

SEQ ID NO: 23819 - RNA, 19 nt, Artificial Sequence
  Sense Oligo
ccuguaaucccagcuacuu

SEQ ID NO: 23820 - RNA, 19 nt, Artificial Sequence
  Antisense Oligo
aaguagcugggauuacagg

SEQ ID NO: 23821 - RNA, 19 nt, Artificial Sequence
  Sense Oligo
cuguaaucccagcuacuug

SEQ ID NO: 23822 - RNA, 19 nt, Artificial Sequence
  Antisense Oligo
caaguagcugggauuacag

SEQ ID NO: 23823 - RNA, 19 nt, Artificial Sequence
  Sense Oligo
uguaaucccagcuacuugg

SEQ ID NO: 23824 - RNA, 19 nt, Artificial Sequence
  Antisense Oligo
ccaaguagcugggauuaca

SEQ ID NO: 23825 - RNA, 19 nt, Artificial Sequence
  Sense Oligo
cugggaggcagagguugca

SEQ ID NO: 23826 - RNA, 19 nt, Artificial Sequence
  Antisense Oligo
ugcaaccucugccucccag

SEQ ID NO: 23827 - RNA, 19 nt, Artificial Sequence
  Sense Oligo
ugggaggcagagguugcag

SEQ ID NO: 23828 - RNA, 19 nt, Artificial Sequence
  Antisense Oligo
cugcaaccucugccuccca

SEQ ID NO: 23829 - RNA, 19 nt, Artificial Sequence
  Sense Oligo
gagguugcagugagccaag

SEQ ID NO: 23830 - RNA, 19 nt, Artificial Sequence
  Antisense Oligo
cuuggcucacugcaaccuc

SEQ ID NO: 23831 - RNA, 19 nt, Artificial Sequence
  Sense Oligo
agguugcagugagccaaga

SEQ ID NO: 23832 - RNA, 19 nt, Artificial Sequence
  Antisense Oligo
ucuuggcucacugcaaccu

SEQ ID NO: 23833 - RNA, 19 nt, Artificial Sequence
  Sense Oligo
gguugcagugagccaagau

SEQ ID NO: 23834 - RNA, 19 nt, Artificial Sequence
  Antisense Oligo
aucuuggcucacugcaacc

SEQ ID NO: 23835 - RNA, 19 nt, Artificial Sequence
  Sense Oligo
guugcagugagccaagauu

SEQ ID NO: 23836 - RNA, 19 nt, Artificial Sequence
  Antisense Oligo
aaucuuggcucacugcaac

SEQ ID NO: 23837 - RNA, 19 nt, Artificial Sequence
  Sense Oligo
uugcagugagccaagauug

SEQ ID NO: 23838 - RNA, 19 nt, Artificial Sequence
  Antisense Oligo
caaucuuggcucacugcaa

SEQ ID NO: 23839 - RNA, 19 nt, Artificial Sequence
  Sense Oligo
ugcagugagccaagauugu

SEQ ID NO: 23840 - RNA, 19 nt, Artificial Sequence
  Antisense Oligo
acaaucuuggcucacugca

SEQ ID NO: 23841 - RNA, 19 nt, Artificial Sequence
  Sense Oligo
gcagugagccaagauugug

SEQ ID NO: 23842 - RNA, 19 nt, Artificial Sequence
  Antisense Oligo
cacaaucuuggcucacugc

SEQ ID NO: 23843 - RNA, 19 nt, Artificial Sequence
  Sense Oligo
cagugagccaagauugugc

SEQ ID NO: 23844 - RNA, 19 nt, Artificial Sequence
  Antisense Oligo
gcacaaucuuggcucacug

SEQ ID NO: 23845 - RNA, 19 nt, Artificial Sequence
  Sense Oligo
agugagccaagauugugcc

SEQ ID NO: 23846 - RNA, 19 nt, Artificial Sequence
  Antisense Oligo
ggcacaaucuuggcucacu

SEQ ID NO: 23847 - RNA, 19 nt, Artificial Sequence
  Sense Oligo
gugagccaagauugugccu

SEQ ID NO: 23848 - RNA, 19 nt, Artificial Sequence
  Antisense Oligo
aggcacaaucuuggcucac

SEQ ID NO: 23849 - RNA, 19 nt, Artificial Sequence
  Sense Oligo
aaagacuaagccugauggg

SEQ ID NO: 23850 - RNA, 19 nt, Artificial Sequence
  Antisense Oligo
cccaucaggcuuagucuuu

SEQ ID NO: 23851 - RNA, 19 nt, Artificial Sequence
  Sense Oligo
aagacuaagccugauggga

SEQ ID NO: 23852 - RNA, 19 nt, Artificial Sequence
  Antisense Oligo
ucccaucaggcuuagucuu

SEQ ID NO: 23853 - RNA, 19 nt, Artificial Sequence
  Sense Oligo
agacuaagccugaugggac

SEQ ID NO: 23854 - RNA, 19 nt, Artificial Sequence
  Antisense Oligo
gucccaucaggcuuagucu

SEQ ID NO: 23855 - RNA, 19 nt, Artificial Sequence
  Sense Oligo
gacuaagccugaugggaca

SEQ ID NO: 23856 - RNA, 19 nt, Artificial Sequence
  Antisense Oligo
ugucccaucaggcuuaguc

SEQ ID NO: 23857 - RNA, 19 nt, Artificial Sequence
  Sense Oligo
acuaagccugaugggacau

SEQ ID NO: 23858 - RNA, 19 nt, Artificial Sequence
  Antisense Oligo
augucccaucaggcuuagu

SEQ ID NO: 23859 - RNA, 19 nt, Artificial Sequence
  Sense Oligo
augggacaucuugacuuca

SEQ ID NO: 23860 - RNA, 19 nt, Artificial Sequence
  Antisense Oligo
ugaagucaagaugucccau

SEQ ID NO: 23861 - RNA, 19 nt, Artificial Sequence
  Sense Oligo
ugggacaucuugacuucau

SEQ ID NO: 23862 - RNA, 19 nt, Artificial Sequence
  Antisense Oligo
augaagucaagauguccca

SEQ ID NO: 23863 - RNA, 19 nt, Artificial Sequence
  Sense Oligo
gggacaucuugacuucaua

SEQ ID NO: 23864 - RNA, 19 nt, Artificial Sequence
  Antisense Oligo
uaugaagucaagauguccc

SEQ ID NO: 23865 - RNA, 19 nt, Artificial Sequence
  Sense Oligo
ggacaucuugacuucauaa

SEQ ID NO: 23866 - RNA, 19 nt, Artificial Sequence
  Antisense Oligo
uuaugaagucaagaugucc

SEQ ID NO: 23867 - RNA, 19 nt, Artificial Sequence
  Sense Oligo
gacaucuugacuucauaac

SEQ ID NO: 23868 - RNA, 19 nt, Artificial Sequence
  Antisense Oligo
guuaugaagucaagauguc

SEQ ID NO: 23869 - RNA, 19 nt, Artificial Sequence
  Sense Oligo
gcuaauccauucccgaggg

SEQ ID NO: 23870 - RNA, 19 nt, Artificial Sequence
  Antisense Oligo
cccucgggaauggauuagc

SEQ ID NO: 23871 - RNA, 19 nt, Artificial Sequence
  Sense Oligo
caagccucucaagaguaaa

SEQ ID NO: 23872 - RNA, 19 nt, Artificial Sequence
  Antisense Oligo
uuuacucuugagaggcuug

SEQ ID NO: 23873 - RNA, 19 nt, Artificial Sequence
  Sense Oligo
ccucacgacccacagaccu

SEQ ID NO: 23874 - RNA, 19 nt, Artificial Sequence
  Antisense Oligo
aggucugugggucgugagg

SEQ ID NO: 23875 - RNA, 19 nt, Artificial Sequence
  Sense Oligo
cucacgacccacagaccuc

SEQ ID NO: 23876 - RNA, 19 nt, Artificial Sequence
  Antisense Oligo
gaggucugugggucgugag

SEQ ID NO: 23877 - RNA, 19 nt, Artificial Sequence
  Sense Oligo
ucacgacccacagaccucc

SEQ ID NO: 23878 - RNA, 19 nt, Artificial Sequence
  Antisense Oligo
ggaggucugugggucguga

SEQ ID NO: 23879 - RNA, 19 nt, Artificial Sequence
  Sense Oligo
gccucccagcacuggcaua

SEQ ID NO: 23880 - RNA, 19 nt, Artificial Sequence
  Antisense Oligo
uaugccagugcugggaggc

SEQ ID NO: 23881 - RNA, 19 nt, Artificial Sequence
  Sense Oligo
ccucccagcacuggcauac

SEQ ID NO: 23882 - RNA, 19 nt, Artificial Sequence
  Antisense Oligo
guaugccagugcugggagg

SEQ ID NO: 23883 - RNA, 19 nt, Artificial Sequence
  Sense Oligo
cucccagcacuggcauacu

SEQ ID NO: 23884 - RNA, 19 nt, Artificial Sequence
  Antisense Oligo
aguaugccagugcugggag

SEQ ID NO: 23885 - RNA, 19 nt, Artificial Sequence
  Sense Oligo
ucccagcacuggcauacug

SEQ ID NO: 23886 - RNA, 19 nt, Artificial Sequence
  Antisense Oligo
caguaugccagugcuggga

SEQ ID NO: 23887 - RNA, 19 nt, Artificial Sequence
  Sense Oligo
caaugaaggcuagagugag

SEQ ID NO: 23888 - RNA, 19 nt, Artificial Sequence
  Antisense Oligo
cucacucuagccuucauug

SEQ ID NO: 23889 - RNA, 19 nt, Artificial Sequence
  Sense Oligo
gaaggcuagagugagugug

SEQ ID NO: 23890 - RNA, 19 nt, Artificial Sequence
  Antisense Oligo
cacacucacucuagccuuc

SEQ ID NO: 23891 - RNA, 19 nt, Artificial Sequence
  Sense Oligo
aaggcuagagugagugugg

SEQ ID NO: 23892 - RNA, 19 nt, Artificial Sequence
  Antisense Oligo
ccacacucacucuagccuu

SEQ ID NO: 23893 - RNA, 19 nt, Artificial Sequence
  Sense Oligo
aggcuagagugaguguggg

SEQ ID NO: 23894 - RNA, 19 nt, Artificial Sequence
  Antisense Oligo
cccacacucacucuagccu

SEQ ID NO: 23895 - RNA, 19 nt, Artificial Sequence
  Sense Oligo
gggugcuccaugcugucug

SEQ ID NO: 23896 - RNA, 19 nt, Artificial Sequence
  Antisense Oligo
cagacagcauggagcaccc

SEQ ID NO: 23897 - RNA, 19 nt, Artificial Sequence
  Sense Oligo
ggugcuccaugcugucugc

SEQ ID NO: 23898 - RNA, 19 nt, Artificial Sequence
  Antisense Oligo
gcagacagcauggagcacc

SEQ ID NO: 23899 - RNA, 19 nt, Artificial Sequence
  Sense Oligo
auggcagcucugcaugggu

SEQ ID NO: 23900 - RNA, 19 nt, Artificial Sequence
  Antisense Oligo
acccaugcagagcugccau

SEQ ID NO: 23901 - RNA, 19 nt, Artificial Sequence
  Sense Oligo
uggcagcucugcaugggug

SEQ ID NO: 23902 - RNA, 19 nt, Artificial Sequence
  Antisense Oligo
cacccaugcagagcugcca

SEQ ID NO: 23903 - RNA, 19 nt, Artificial Sequence
  Sense Oligo
ggcagcucugcauggguga

SEQ ID NO: 23904 - RNA, 19 nt, Artificial Sequence
  Antisense Oligo
ucacccaugcagagcugcc

SEQ ID NO: 23905 - RNA, 19 nt, Artificial Sequence
  Sense Oligo
gcagcucugcaugggugag

SEQ ID NO: 23906 - RNA, 19 nt, Artificial Sequence
  Antisense Oligo
cucacccaugcagagcugc

SEQ ID NO: 23907 - RNA, 19 nt, Artificial Sequence
  Sense Oligo
cgggcagaugccuuagugc

SEQ ID NO: 23908 - RNA, 19 nt, Artificial Sequence
  Antisense Oligo
gcacuaaggcaucugcccg

SEQ ID NO: 23909 - RNA, 19 nt, Artificial Sequence
  Sense Oligo
gcagaugccuuagugccag

SEQ ID NO: 23910 - RNA, 19 nt, Artificial Sequence
  Antisense Oligo
cuggcacuaaggcaucugc

SEQ ID NO: 23911 - RNA, 19 nt, Artificial Sequence
  Sense Oligo
augccuuagugccaggaca

SEQ ID NO: 23912 - RNA, 19 nt, Artificial Sequence
  Antisense Oligo
uguccuggcacuaaggcau

SEQ ID NO: 23913 - RNA, 19 nt, Artificial Sequence
  Sense Oligo
aggaggaaugucuacagua

SEQ ID NO: 23914 - RNA, 19 nt, Artificial Sequence
  Antisense Oligo
uacuguagacauuccuccu

SEQ ID NO: 23915 - RNA, 19 nt, Artificial Sequence
  Sense Oligo
ggaggaaugucuacaguag

SEQ ID NO: 23916 - RNA, 19 nt, Artificial Sequence
  Antisense Oligo
cuacuguagacauuccucc

SEQ ID NO: 23917 - RNA, 19 nt, Artificial Sequence
  Sense Oligo
gaggaaugucuacaguagg

SEQ ID NO: 23918 - RNA, 19 nt, Artificial Sequence
  Antisense Oligo
ccuacuguagacauuccuc

SEQ ID NO: 23919 - RNA, 19 nt, Artificial Sequence
  Sense Oligo
aggaaugucuacaguaggg

SEQ ID NO: 23920 - RNA, 19 nt, Artificial Sequence
  Antisense Oligo
cccuacuguagacauuccu

SEQ ID NO: 23921 - RNA, 19 nt, Artificial Sequence
  Sense Oligo
ucuguuuuagaggugcccg

SEQ ID NO: 23922 - RNA, 19 nt, Artificial Sequence
  Antisense Oligo
cgggcaccucuaaaacaga

SEQ ID NO: 23923 - RNA, 19 nt, Artificial Sequence
  Sense Oligo
cuguuuuagaggugcccga

SEQ ID NO: 23924 - RNA, 19 nt, Artificial Sequence
  Antisense Oligo
ucgggcaccucuaaaacag

SEQ ID NO: 23925 - RNA, 19 nt, Artificial Sequence
  Sense Oligo
uguuuuagaggugcccgag

SEQ ID NO: 23926 - RNA, 19 nt, Artificial Sequence
  Antisense Oligo
cucgggcaccucuaaaaca

SEQ ID NO: 23927 - RNA, 19 nt, Artificial Sequence
  Sense Oligo
cugacauccuaguacagag

SEQ ID NO: 23928 - RNA, 19 nt, Artificial Sequence
  Antisense Oligo
cucuguacuaggaugucag

SEQ ID NO: 23929 - RNA, 19 nt, Artificial Sequence
  Sense Oligo
ugacauccuaguacagagu

SEQ ID NO: 23930 - RNA, 19 nt, Artificial Sequence
  Antisense Oligo
acucuguacuaggauguca

SEQ ID NO: 23931 - RNA, 19 nt, Artificial Sequence
  Sense Oligo
gacauccuaguacagaguc

SEQ ID NO: 23932 - RNA, 19 nt, Artificial Sequence
  Antisense Oligo
gacucuguacuaggauguc

SEQ ID NO: 23933 - RNA, 19 nt, Artificial Sequence
  Sense Oligo
acauccuaguacagaguca

SEQ ID NO: 23934 - RNA, 19 nt, Artificial Sequence
  Antisense Oligo
ugacucuguacuaggaugu

SEQ ID NO: 23935 - RNA, 19 nt, Artificial Sequence
  Sense Oligo
ccuaguacagagucaggug

SEQ ID NO: 23936 - RNA, 19 nt, Artificial Sequence
  Antisense Oligo
caccugacucuguacuagg

SEQ ID NO: 23937 - RNA, 19 nt, Artificial Sequence
  Sense Oligo
cuaguacagagucagguga

SEQ ID NO: 23938 - RNA, 19 nt, Artificial Sequence
  Antisense Oligo
ucaccugacucuguacuag

SEQ ID NO: 23939 - RNA, 19 nt, Artificial Sequence
  Sense Oligo
uaguacagagucaggugaa

SEQ ID NO: 23940 - RNA, 19 nt, Artificial Sequence
  Antisense Oligo
uucaccugacucuguacua

SEQ ID NO: 23941 - RNA, 19 nt, Artificial Sequence
  Sense Oligo
aguacagagucaggugaau

SEQ ID NO: 23942 - RNA, 19 nt, Artificial Sequence
  Antisense Oligo
auucaccugacucuguacu

SEQ ID NO: 23943 - RNA, 19 nt, Artificial Sequence
  Sense Oligo
uacagagucaggugaaucc

SEQ ID NO: 23944 - RNA, 19 nt, Artificial Sequence
  Antisense Oligo
ggauucaccugacucugua

SEQ ID NO: 23945 - RNA, 19 nt, Artificial Sequence
  Sense Oligo
acagagucaggugaaucca

SEQ ID NO: 23946 - RNA, 19 nt, Artificial Sequence
  Antisense Oligo
uggauucaccugacucugu

SEQ ID NO: 23947 - RNA, 19 nt, Artificial Sequence
  Sense Oligo
cagagucaggugaauccac

SEQ ID NO: 23948 - RNA, 19 nt, Artificial Sequence
  Antisense Oligo
guggauucaccugacucug

SEQ ID NO: 23949 - RNA, 19 nt, Artificial Sequence
  Sense Oligo
agagucaggugaauccacu

SEQ ID NO: 23950 - RNA, 19 nt, Artificial Sequence
  Antisense Oligo
aguggauucaccugacucu

SEQ ID NO: 23951 - RNA, 19 nt, Artificial Sequence
  Sense Oligo
agucaggugaauccacucg

SEQ ID NO: 23952 - RNA, 19 nt, Artificial Sequence
  Antisense Oligo
cgaguggauucaccugacu

SEQ ID NO: 23953 - RNA, 19 nt, Artificial Sequence
  Sense Oligo
gucaggugaauccacucgu

SEQ ID NO: 23954 - RNA, 19 nt, Artificial Sequence
  Antisense Oligo
acgaguggauucaccugac

SEQ ID NO: 23955 - RNA, 19 nt, Artificial Sequence
  Sense Oligo
ucaggugaauccacucgug

SEQ ID NO: 23956 - RNA, 19 nt, Artificial Sequence
  Antisense Oligo
cacgaguggauucaccuga

SEQ ID NO: 23957 - RNA, 19 nt, Artificial Sequence
  Sense Oligo
caggugaauccacucgugg

SEQ ID NO: 23958 - RNA, 19 nt, Artificial Sequence
  Antisense Oligo
ccacgaguggauucaccug

SEQ ID NO: 23959 - RNA, 19 nt, Artificial Sequence
  Sense Oligo
ggaagaggcuggaugcuag

SEQ ID NO: 23960 - RNA, 19 nt, Artificial Sequence
  Antisense Oligo
cuagcauccagccucuucc

SEQ ID NO: 23961 - RNA, 19 nt, Artificial Sequence
  Sense Oligo
gaagaggcuggaugcuagg

SEQ ID NO: 23962 - RNA, 19 nt, Artificial Sequence
  Antisense Oligo
ccuagcauccagccucuuc

SEQ ID NO: 23963 - RNA, 19 nt, Artificial Sequence
  Sense Oligo
aagaggcuggaugcuagga

SEQ ID NO: 23964 - RNA, 19 nt, Artificial Sequence
  Antisense Oligo
uccuagcauccagccucuu

SEQ ID NO: 23965 - RNA, 19 nt, Artificial Sequence
  Sense Oligo
agaggcuggaugcuaggac

SEQ ID NO: 23966 - RNA, 19 nt, Artificial Sequence
  Antisense Oligo
guccuagcauccagccucu

SEQ ID NO: 23967 - RNA, 19 nt, Artificial Sequence
  Sense Oligo
gaggcuggaugcuaggacg

SEQ ID NO: 23968 - RNA, 19 nt, Artificial Sequence
  Antisense Oligo
cguccuagcauccagccuc

SEQ ID NO: 23969 - RNA, 19 nt, Artificial Sequence
  Sense Oligo
aggcuggaugcuaggacgg

SEQ ID NO: 23970 - RNA, 19 nt, Artificial Sequence
  Antisense Oligo
ccguccuagcauccagccu

SEQ ID NO: 23971 - RNA, 19 nt, Artificial Sequence
  Sense Oligo
gcuggaugcuaggacggca

SEQ ID NO: 23972 - RNA, 19 nt, Artificial Sequence
  Antisense Oligo
ugccguccuagcauccagc

SEQ ID NO: 23973 - RNA, 19 nt, Artificial Sequence
  Sense Oligo
cuggaugcuaggacggcac

SEQ ID NO: 23974 - RNA, 19 nt, Artificial Sequence
  Antisense Oligo
gugccguccuagcauccag

SEQ ID NO: 23975 - RNA, 19 nt, Artificial Sequence
  Sense Oligo
uggaugcuaggacggcaca

SEQ ID NO: 23976 - RNA, 19 nt, Artificial Sequence
  Antisense Oligo
ugugccguccuagcaucca

SEQ ID NO: 23977 - RNA, 19 nt, Artificial Sequence
  Sense Oligo
ggaugcuaggacggcacag

SEQ ID NO: 23978 - RNA, 19 nt, Artificial Sequence
  Antisense Oligo
cugugccguccuagcaucc

SEQ ID NO: 23979 - RNA, 19 nt, Artificial Sequence
  Sense Oligo
gaugcuaggacggcacagu

SEQ ID NO: 23980 - RNA, 19 nt, Artificial Sequence
  Antisense Oligo
acugugccguccuagcauc

SEQ ID NO: 23981 - RNA, 19 nt, Artificial Sequence
  Sense Oligo
augcuaggacggcacaguc

SEQ ID NO: 23982 - RNA, 19 nt, Artificial Sequence
  Antisense Oligo
gacugugccguccuagcau

SEQ ID NO: 23983 - RNA, 19 nt, Artificial Sequence
  Sense Oligo
ggacggcacagucuuucug

SEQ ID NO: 23984 - RNA, 19 nt, Artificial Sequence
  Antisense Oligo
cagaaagacugugccgucc

SEQ ID NO: 23985 - RNA, 19 nt, Artificial Sequence
  Sense Oligo
ucccugguucccuccuacc

SEQ ID NO: 23986 - RNA, 19 nt, Artificial Sequence
  Antisense Oligo
gguaggagggaaccaggga

SEQ ID NO: 23987 - RNA, 19 nt, Artificial Sequence
  Sense Oligo
ccugguucccuccuaccca

SEQ ID NO: 23988 - RNA, 19 nt, Artificial Sequence
  Antisense Oligo
uggguaggagggaaccagg

SEQ ID NO: 23989 - RNA, 19 nt, Artificial Sequence
  Sense Oligo
uccuacccaccuggagcag

SEQ ID NO: 23990 - RNA, 19 nt, Artificial Sequence
  Antisense Oligo
cugcuccagguggguagga

SEQ ID NO: 23991 - RNA, 19 nt, Artificial Sequence
  Sense Oligo
ccuacccaccuggagcaga

SEQ ID NO: 23992 - RNA, 19 nt, Artificial Sequence
  Antisense Oligo
ucugcuccagguggguagg

SEQ ID NO: 23993 - RNA, 19 nt, Artificial Sequence
  Sense Oligo
cuacccugcucauguuagc

SEQ ID NO: 23994 - RNA, 19 nt, Artificial Sequence
  Antisense Oligo
gcuaacaugagcaggguag

SEQ ID NO: 23995 - RNA, 19 nt, Artificial Sequence
  Sense Oligo
gcucauguuagcaggccca

SEQ ID NO: 23996 - RNA, 19 nt, Artificial Sequence
  Antisense Oligo
ugggccugcuaacaugagc

SEQ ID NO: 23997 - RNA, 19 nt, Artificial Sequence
  Sense Oligo
cucauguuagcaggcccaa

SEQ ID NO: 23998 - RNA, 19 nt, Artificial Sequence
  Antisense Oligo
uugggccugcuaacaugag

SEQ ID NO: 23999 - RNA, 19 nt, Artificial Sequence
  Sense Oligo
ucauguuagcaggcccaau

SEQ ID NO: 24000 - RNA, 19 nt, Artificial Sequence
  Antisense Oligo
auugggccugcuaacauga

SEQ ID NO: 24001 - RNA, 19 nt, Artificial Sequence
  Sense Oligo
cauguuagcaggcccaaug

SEQ ID NO: 24002 - RNA, 19 nt, Artificial Sequence
  Antisense Oligo
cauugggccugcuaacaug

SEQ ID NO: 24003 - RNA, 19 nt, Artificial Sequence
  Sense Oligo
auguuagcaggcccaaugc

SEQ ID NO: 24004 - RNA, 19 nt, Artificial Sequence
  Antisense Oligo
gcauugggccugcuaacau

SEQ ID NO: 24005 - RNA, 19 nt, Artificial Sequence
  Sense Oligo
agcaggcccaaugcaggac

SEQ ID NO: 24006 - RNA, 19 nt, Artificial Sequence
  Antisense Oligo
guccugcauugggccugcu

SEQ ID NO: 24007 - RNA, 19 nt, Artificial Sequence
  Sense Oligo
caggcccaaugcaggaccu

SEQ ID NO: 24008 - RNA, 19 nt, Artificial Sequence
  Antisense Oligo
agguccugcauugggccug

SEQ ID NO: 24009 - RNA, 19 nt, Artificial Sequence
  Sense Oligo
aggcccaaugcaggaccuc

SEQ ID NO: 24010 - RNA, 19 nt, Artificial Sequence
  Antisense Oligo
gagguccugcauugggccu

SEQ ID NO: 24011 - RNA, 19 nt, Artificial Sequence
  Sense Oligo
cccaaugcaggaccucgga

SEQ ID NO: 24012 - RNA, 19 nt, Artificial Sequence
  Antisense Oligo
uccgagguccugcauuggg

SEQ ID NO: 24013 - RNA, 19 nt, Artificial Sequence
  Sense Oligo
ccaaugcaggaccucggag

SEQ ID NO: 24014 - RNA, 19 nt, Artificial Sequence
  Antisense Oligo
cuccgagguccugcauugg

SEQ ID NO: 24015 - RNA, 19 nt, Artificial Sequence
  Sense Oligo
caaugcaggaccucggagg

SEQ ID NO: 24016 - RNA, 19 nt, Artificial Sequence
  Antisense Oligo
ccuccgagguccugcauug

SEQ ID NO: 24017 - RNA, 19 nt, Artificial Sequence
  Sense Oligo
aaugcaggaccucggaggg

SEQ ID NO: 24018 - RNA, 19 nt, Artificial Sequence
  Antisense Oligo
cccuccgagguccugcauu

SEQ ID NO: 24019 - RNA, 19 nt, Artificial Sequence
  Sense Oligo
augcaggaccucggaggga

SEQ ID NO: 24020 - RNA, 19 nt, Artificial Sequence
  Antisense Oligo
ucccuccgagguccugcau

SEQ ID NO: 24021 - RNA, 19 nt, Artificial Sequence
  Sense Oligo
ggugaaucucuccaugcac

SEQ ID NO: 24022 - RNA, 19 nt, Artificial Sequence
  Antisense Oligo
gugcauggagagauucacc

SEQ ID NO: 24023 - RNA, 19 nt, Artificial Sequence
  Sense Oligo
aaucucuccaugcacucgu

SEQ ID NO: 24024 - RNA, 19 nt, Artificial Sequence
  Antisense Oligo
acgagugcauggagagauu

SEQ ID NO: 24025 - RNA, 19 nt, Artificial Sequence
  Sense Oligo
aucucuccaugcacucgug

SEQ ID NO: 24026 - RNA, 19 nt, Artificial Sequence
  Antisense Oligo
cacgagugcauggagagau

SEQ ID NO: 24027 - RNA, 19 nt, Artificial Sequence
  Sense Oligo
ucucuccaugcacucgugg

SEQ ID NO: 24028 - RNA, 19 nt, Artificial Sequence
  Antisense Oligo
ccacgagugcauggagaga

SEQ ID NO: 24029 - RNA, 19 nt, Artificial Sequence
  Sense Oligo
cucuccaugcacucguggg

SEQ ID NO: 24030 - RNA, 19 nt, Artificial Sequence
  Antisense Oligo
cccacgagugcauggagag

SEQ ID NO: 24031 - RNA, 19 nt, Artificial Sequence
  Sense Oligo
acacucgcuucucucugag

SEQ ID NO: 24032 - RNA, 19 nt, Artificial Sequence
  Antisense Oligo
cucagagagaagcgagugu

SEQ ID NO: 24033 - RNA, 19 nt, Artificial Sequence
  Sense Oligo
agaucugacccuuccuuca

SEQ ID NO: 24034 - RNA, 19 nt, Artificial Sequence
  Antisense Oligo
ugaaggaagggucagaucu

SEQ ID NO: 24035 - RNA, 19 nt, Artificial Sequence
  Sense Oligo
aucugacccuuccuucauc

SEQ ID NO: 24036 - RNA, 19 nt, Artificial Sequence
  Antisense Oligo
gaugaaggaagggucagau

SEQ ID NO: 24037 - RNA, 19 nt, Artificial Sequence
  Sense Oligo
ucugacccuuccuucaucu

SEQ ID NO: 24038 - RNA, 19 nt, Artificial Sequence
  Antisense Oligo
agaugaaggaagggucaga

SEQ ID NO: 24039 - RNA, 19 nt, Artificial Sequence
  Sense Oligo
cugacccuuccuucaucug

SEQ ID NO: 24040 - RNA, 19 nt, Artificial Sequence
  Antisense Oligo
cagaugaaggaagggucag

SEQ ID NO: 24041 - RNA, 19 nt, Artificial Sequence
  Sense Oligo
ugacccuuccuucaucugc

SEQ ID NO: 24042 - RNA, 19 nt, Artificial Sequence
  Antisense Oligo
gcagaugaaggaaggguca

SEQ ID NO: 24043 - RNA, 19 nt, Artificial Sequence
  Sense Oligo
gacccuuccuucaucugcc

SEQ ID NO: 24044 - RNA, 19 nt, Artificial Sequence
  Antisense Oligo
ggcagaugaaggaaggguc

SEQ ID NO: 24045 - RNA, 19 nt, Artificial Sequence
  Sense Oligo
acccuuccuucaucugccg

SEQ ID NO: 24046 - RNA, 19 nt, Artificial Sequence
  Antisense Oligo
cggcagaugaaggaagggu

SEQ ID NO: 24047 - RNA, 19 nt, Artificial Sequence
  Sense Oligo
cccuuccuucaucugccgu

SEQ ID NO: 24048 - RNA, 19 nt, Artificial Sequence
  Antisense Oligo
acggcagaugaaggaaggg

SEQ ID NO: 24049 - RNA, 19 nt, Artificial Sequence
  Sense Oligo
ccuuccuucaucugccguu

SEQ ID NO: 24050 - RNA, 19 nt, Artificial Sequence
  Antisense Oligo
aacggcagaugaaggaagg

SEQ ID NO: 24051 - RNA, 19 nt, Artificial Sequence
  Sense Oligo
cuuccuucaucugccguua

SEQ ID NO: 24052 - RNA, 19 nt, Artificial Sequence
  Antisense Oligo
uaacggcagaugaaggaag

SEQ ID NO: 24053 - RNA, 19 nt, Artificial Sequence
  Sense Oligo
uuccuucaucugccguuac

SEQ ID NO: 24054 - RNA, 19 nt, Artificial Sequence
  Antisense Oligo
guaacggcagaugaaggaa

SEQ ID NO: 24055 - RNA, 19 nt, Artificial Sequence
  Sense Oligo
uccuucaucugccguuaca

SEQ ID NO: 24056 - RNA, 19 nt, Artificial Sequence
  Antisense Oligo
uguaacggcagaugaagga

SEQ ID NO: 24057 - RNA, 19 nt, Artificial Sequence
  Sense Oligo
ccuucaucugccguuacag

SEQ ID NO: 24058 - RNA, 19 nt, Artificial Sequence
  Antisense Oligo
cuguaacggcagaugaagg

SEQ ID NO: 24059 - RNA, 19 nt, Artificial Sequence
  Sense Oligo
agugugggcaggagcugaa

SEQ ID NO: 24060 - RNA, 19 nt, Artificial Sequence
  Antisense Oligo
uucagcuccugcccacacu

SEQ ID NO: 24061 - RNA, 19 nt, Artificial Sequence
  Sense Oligo
gugugggcaggagcugaag

SEQ ID NO: 24062 - RNA, 19 nt, Artificial Sequence
  Antisense Oligo
cuucagcuccugcccacac

SEQ ID NO: 24063 - RNA, 19 nt, Artificial Sequence
  Sense Oligo
cgggcucagacaguuggca

SEQ ID NO: 24064 - RNA, 19 nt, Artificial Sequence
  Antisense Oligo
ugccaacugucugagcccg

SEQ ID NO: 24065 - RNA, 19 nt, Artificial Sequence
  Sense Oligo
gggcucagacaguuggcaa

SEQ ID NO: 24066 - RNA, 19 nt, Artificial Sequence
  Antisense Oligo
uugccaacugucugagccc

SEQ ID NO: 24067 - RNA, 19 nt, Artificial Sequence
  Sense Oligo
ggcucagacaguuggcaag

SEQ ID NO: 24068 - RNA, 19 nt, Artificial Sequence
  Antisense Oligo
cuugccaacugucugagcc

SEQ ID NO: 24069 - RNA, 19 nt, Artificial Sequence
  Sense Oligo
ccaaagccuccuggaccgu

SEQ ID NO: 24070 - RNA, 19 nt, Artificial Sequence
  Antisense Oligo
acgguccaggaggcuuugg

SEQ ID NO: 24071 - RNA, 19 nt, Artificial Sequence
  Sense Oligo
caaagccuccuggaccguc

SEQ ID NO: 24072 - RNA, 19 nt, Artificial Sequence
  Antisense Oligo
gacgguccaggaggcuuug

SEQ ID NO: 24073 - RNA, 19 nt, Artificial Sequence
  Sense Oligo
ggaccguccaagaagugag

SEQ ID NO: 24074 - RNA, 19 nt, Artificial Sequence
  Antisense Oligo
cucacuucuuggacggucc

SEQ ID NO: 24075 - RNA, 19 nt, Artificial Sequence
  Sense Oligo
cguccaagaagugagugca

SEQ ID NO: 24076 - RNA, 19 nt, Artificial Sequence
  Antisense Oligo
ugcacucacuucuuggacg

SEQ ID NO: 24077 - RNA, 19 nt, Artificial Sequence
  Sense Oligo
guccaagaagugagugcac

SEQ ID NO: 24078 - RNA, 19 nt, Artificial Sequence
  Antisense Oligo
gugcacucacuucuuggac

SEQ ID NO: 24079 - RNA, 19 nt, Artificial Sequence
  Sense Oligo
ugagugcacugccucggcu

SEQ ID NO: 24080 - RNA, 19 nt, Artificial Sequence
  Antisense Oligo
agccgaggcagugcacuca

SEQ ID NO: 24081 - RNA, 19 nt, Artificial Sequence
  Sense Oligo
cgcucacucugcccaggaa

SEQ ID NO: 24082 - RNA, 19 nt, Artificial Sequence
  Antisense Oligo
uuccugggcagagugagcg

SEQ ID NO: 24083 - RNA, 19 nt, Artificial Sequence
  Sense Oligo
aaaaucucacugcacagcu

SEQ ID NO: 24084 - RNA, 19 nt, Artificial Sequence
  Antisense Oligo
agcugugcagugagauuuu

SEQ ID NO: 24085 - RNA, 19 nt, Artificial Sequence
  Sense Oligo
aaaucucacugcacagcug

SEQ ID NO: 24086 - RNA, 19 nt, Artificial Sequence
  Antisense Oligo
cagcugugcagugagauuu

SEQ ID NO: 24087 - RNA, 19 nt, Artificial Sequence
  Sense Oligo
aaucucacugcacagcugc

SEQ ID NO: 24088 - RNA, 19 nt, Artificial Sequence
  Antisense Oligo
gcagcugugcagugagauu

SEQ ID NO: 24089 - RNA, 19 nt, Artificial Sequence
  Sense Oligo
aucucacugcacagcugcc

SEQ ID NO: 24090 - RNA, 19 nt, Artificial Sequence
  Antisense Oligo
ggcagcugugcagugagau

SEQ ID NO: 24091 - RNA, 19 nt, Artificial Sequence
  Sense Oligo
ucucacugcacagcugccc

SEQ ID NO: 24092 - RNA, 19 nt, Artificial Sequence
  Antisense Oligo
gggcagcugugcagugaga

SEQ ID NO: 24093 - RNA, 19 nt, Artificial Sequence
  Sense Oligo
cucacugcacagcugccca

SEQ ID NO: 24094 - RNA, 19 nt, Artificial Sequence
  Antisense Oligo
ugggcagcugugcagugag

SEQ ID NO: 24095 - RNA, 19 nt, Artificial Sequence
  Sense Oligo
acagggcagcagcagagcu

SEQ ID NO: 24096 - RNA, 19 nt, Artificial Sequence
  Antisense Oligo
agcucugcugcugcccugu

SEQ ID NO: 24097 - RNA, 19 nt, Artificial Sequence
  Sense Oligo
cuucugcaccugauucauc

SEQ ID NO: 24098 - RNA, 19 nt, Artificial Sequence
  Antisense Oligo
gaugaaucaggugcagaag

SEQ ID NO: 24099 - RNA, 19 nt, Artificial Sequence
  Sense Oligo
uucugcaccugauucaucu

SEQ ID NO: 24100 - RNA, 19 nt, Artificial Sequence
  Antisense Oligo
agaugaaucaggugcagaa

SEQ ID NO: 24101 - RNA, 19 nt, Artificial Sequence
  Sense Oligo
caccugauucaucucuggc

SEQ ID NO: 24102 - RNA, 19 nt, Artificial Sequence
  Antisense Oligo
gccagagaugaaucaggug

SEQ ID NO: 24103 - RNA, 19 nt, Artificial Sequence
  Sense Oligo
accugauucaucucuggcu

SEQ ID NO: 24104 - RNA, 19 nt, Artificial Sequence
  Antisense Oligo
agccagagaugaaucaggu

SEQ ID NO: 24105 - RNA, 19 nt, Artificial Sequence
  Sense Oligo
ccugauucaucucuggcug

SEQ ID NO: 24106 - RNA, 19 nt, Artificial Sequence
  Antisense Oligo
cagccagagaugaaucagg

SEQ ID NO: 24107 - RNA, 19 nt, Artificial Sequence
  Sense Oligo
cugauucaucucuggcugg

SEQ ID NO: 24108 - RNA, 19 nt, Artificial Sequence
  Antisense Oligo
ccagccagagaugaaucag

SEQ ID NO: 24109 - RNA, 19 nt, Artificial Sequence
  Sense Oligo
ugauucaucucuggcugga

SEQ ID NO: 24110 - RNA, 19 nt, Artificial Sequence
  Antisense Oligo
uccagccagagaugaauca

SEQ ID NO: 24111 - RNA, 19 nt, Artificial Sequence
  Sense Oligo
gauucaucucuggcuggag

SEQ ID NO: 24112 - RNA, 19 nt, Artificial Sequence
  Antisense Oligo
cuccagccagagaugaauc

SEQ ID NO: 24113 - RNA, 19 nt, Artificial Sequence
  Sense Oligo
caucucuggcuggagucug

SEQ ID NO: 24114 - RNA, 19 nt, Artificial Sequence
  Antisense Oligo
cagacuccagccagagaug

SEQ ID NO: 24115 - RNA, 19 nt, Artificial Sequence
  Sense Oligo
aucucuggcuggagucugu

SEQ ID NO: 24116 - RNA, 19 nt, Artificial Sequence
  Antisense Oligo
acagacuccagccagagau

SEQ ID NO: 24117 - RNA, 19 nt, Artificial Sequence
  Sense Oligo
ucucuggcuggagucugug

SEQ ID NO: 24118 - RNA, 19 nt, Artificial Sequence
  Antisense Oligo
cacagacuccagccagaga

SEQ ID NO: 24119 - RNA, 19 nt, Artificial Sequence
  Sense Oligo
ucuggcuggagucuguggg

SEQ ID NO: 24120 - RNA, 19 nt, Artificial Sequence
  Antisense Oligo
cccacagacuccagccaga

SEQ ID NO: 24121 - RNA, 19 nt, Artificial Sequence
  Sense Oligo
cuggcuggagucugugggu

SEQ ID NO: 24122 - RNA, 19 nt, Artificial Sequence
  Antisense Oligo
acccacagacuccagccag

SEQ ID NO: 24123 - RNA, 19 nt, Artificial Sequence
  Sense Oligo
uggcuggagucuguggguu

SEQ ID NO: 24124 - RNA, 19 nt, Artificial Sequence
  Antisense Oligo
aacccacagacuccagcca

SEQ ID NO: 24125 - RNA, 19 nt, Artificial Sequence
  Sense Oligo
gcuggagucuguggguucc

SEQ ID NO: 24126 - RNA, 19 nt, Artificial Sequence
  Antisense Oligo
ggaacccacagacuccagc

SEQ ID NO: 24127 - RNA, 19 nt, Artificial Sequence
  Sense Oligo
gcucuuguugcccaggcug

SEQ ID NO: 24128 - RNA, 19 nt, Artificial Sequence
  Antisense Oligo
cagccugggcaacaagagc

SEQ ID NO: 24129 - RNA, 19 nt, Artificial Sequence
  Sense Oligo
cucuuguugcccaggcugg

SEQ ID NO: 24130 - RNA, 19 nt, Artificial Sequence
  Antisense Oligo
ccagccugggcaacaagag

SEQ ID NO: 24131 - RNA, 19 nt, Artificial Sequence
  Sense Oligo
ucuuguugcccaggcugga

SEQ ID NO: 24132 - RNA, 19 nt, Artificial Sequence
  Antisense Oligo
uccagccugggcaacaaga

SEQ ID NO: 24133 - RNA, 19 nt, Artificial Sequence
  Sense Oligo
cuuguugcccaggcuggag

SEQ ID NO: 24134 - RNA, 19 nt, Artificial Sequence
  Antisense Oligo
cuccagccugggcaacaag

SEQ ID NO: 24135 - RNA, 19 nt, Artificial Sequence
  Sense Oligo
uugcccaggcuggagugca

SEQ ID NO: 24136 - RNA, 19 nt, Artificial Sequence
  Antisense Oligo
ugcacuccagccugggcaa

SEQ ID NO: 24137 - RNA, 19 nt, Artificial Sequence
  Sense Oligo
aggcuggagugcaguggug

SEQ ID NO: 24138 - RNA, 19 nt, Artificial Sequence
  Antisense Oligo
caccacugcacuccagccu

SEQ ID NO: 24139 - RNA, 19 nt, Artificial Sequence
  Sense Oligo
uggagugcaguggugcgau

SEQ ID NO: 24140 - RNA, 19 nt, Artificial Sequence
  Antisense Oligo
aucgcaccacugcacucca

SEQ ID NO: 24141 - RNA, 19 nt, Artificial Sequence
  Sense Oligo
ggagugcaguggugcgauc

SEQ ID NO: 24142 - RNA, 19 nt, Artificial Sequence
  Antisense Oligo
gaucgcaccacugcacucc

SEQ ID NO: 24143 - RNA, 19 nt, Artificial Sequence
  Sense Oligo
gagugcaguggugcgaucu

SEQ ID NO: 24144 - RNA, 19 nt, Artificial Sequence
  Antisense Oligo
agaucgcaccacugcacuc

SEQ ID NO: 24145 - RNA, 19 nt, Artificial Sequence
  Sense Oligo
agugcaguggugcgaucuc

SEQ ID NO: 24146 - RNA, 19 nt, Artificial Sequence
  Antisense Oligo
gagaucgcaccacugcacu

SEQ ID NO: 24147 - RNA, 19 nt, Artificial Sequence
  Sense Oligo
gugcaguggugcgaucucg

SEQ ID NO: 24148 - RNA, 19 nt, Artificial Sequence
  Antisense Oligo
cgagaucgcaccacugcac

SEQ ID NO: 24149 - RNA, 19 nt, Artificial Sequence
  Sense Oligo
ugcaguggugcgaucucgg

SEQ ID NO: 24150 - RNA, 19 nt, Artificial Sequence
  Antisense Oligo
ccgagaucgcaccacugca

SEQ ID NO: 24151 - RNA, 19 nt, Artificial Sequence
  Sense Oligo
caguggugcgaucucggcu

SEQ ID NO: 24152 - RNA, 19 nt, Artificial Sequence
  Antisense Oligo
agccgagaucgcaccacug

SEQ ID NO: 24153 - RNA, 19 nt, Artificial Sequence
  Sense Oligo
aguggugcgaucucggcuc

SEQ ID NO: 24154 - RNA, 19 nt, Artificial Sequence
  Antisense Oligo
gagccgagaucgcaccacu

SEQ ID NO: 24155 - RNA, 19 nt, Artificial Sequence
  Sense Oligo
ccuccaccuccugguuuca

SEQ ID NO: 24156 - RNA, 19 nt, Artificial Sequence
  Antisense Oligo
ugaaaccaggagguggagg

SEQ ID NO: 24157 - RNA, 19 nt, Artificial Sequence
  Sense Oligo
ugguuucaagcaauucucc

SEQ ID NO: 24158 - RNA, 19 nt, Artificial Sequence
  Antisense Oligo
ggagaauugcuugaaacca

SEQ ID NO: 24159 - RNA, 19 nt, Artificial Sequence
  Sense Oligo
gguuucaagcaauucuccu

SEQ ID NO: 24160 - RNA, 19 nt, Artificial Sequence
  Antisense Oligo
aggagaauugcuugaaacc

SEQ ID NO: 24161 - RNA, 19 nt, Artificial Sequence
  Sense Oligo
guuucaagcaauucuccug

SEQ ID NO: 24162 - RNA, 19 nt, Artificial Sequence
  Antisense Oligo
caggagaauugcuugaaac

SEQ ID NO: 24163 - RNA, 19 nt, Artificial Sequence
  Sense Oligo
uuucaagcaauucuccugc

SEQ ID NO: 24164 - RNA, 19 nt, Artificial Sequence
  Antisense Oligo
gcaggagaauugcuugaaa

SEQ ID NO: 24165 - RNA, 19 nt, Artificial Sequence
  Sense Oligo
uucaagcaauucuccugcc

SEQ ID NO: 24166 - RNA, 19 nt, Artificial Sequence
  Antisense Oligo
ggcaggagaauugcuugaa

SEQ ID NO: 24167 - RNA, 19 nt, Artificial Sequence
  Sense Oligo
ucaagcaauucuccugccu

SEQ ID NO: 24168 - RNA, 19 nt, Artificial Sequence
  Antisense Oligo
aggcaggagaauugcuuga

SEQ ID NO: 24169 - RNA, 19 nt, Artificial Sequence
  Sense Oligo
cugccucagccucccaagu

SEQ ID NO: 24170 - RNA, 19 nt, Artificial Sequence
  Antisense Oligo
acuugggaggcugaggcag

SEQ ID NO: 24171 - RNA, 19 nt, Artificial Sequence
  Sense Oligo
ugccucagccucccaagua

SEQ ID NO: 24172 - RNA, 19 nt, Artificial Sequence
  Antisense Oligo
uacuugggaggcugaggca

SEQ ID NO: 24173 - RNA, 19 nt, Artificial Sequence
  Sense Oligo
gccucagccucccaaguag

SEQ ID NO: 24174 - RNA, 19 nt, Artificial Sequence
  Antisense Oligo
cuacuugggaggcugaggc

SEQ ID NO: 24175 - RNA, 19 nt, Artificial Sequence
  Sense Oligo
ccucagccucccaaguagc

SEQ ID NO: 24176 - RNA, 19 nt, Artificial Sequence
  Antisense Oligo
gcuacuugggaggcugagg

SEQ ID NO: 24177 - RNA, 19 nt, Artificial Sequence
  Sense Oligo
cucagccucccaaguagcu

SEQ ID NO: 24178 - RNA, 19 nt, Artificial Sequence
  Antisense Oligo
agcuacuugggaggcugag

SEQ ID NO: 24179 - RNA, 19 nt, Artificial Sequence
  Sense Oligo
cugggacuacaggcaugca

SEQ ID NO: 24180 - RNA, 19 nt, Artificial Sequence
  Antisense Oligo
ugcaugccuguagucccag

SEQ ID NO: 24181 - RNA, 19 nt, Artificial Sequence
  Sense Oligo
ugggacuacaggcaugcac

SEQ ID NO: 24182 - RNA, 19 nt, Artificial Sequence
  Antisense Oligo
gugcaugccuguaguccca

SEQ ID NO: 24183 - RNA, 19 nt, Artificial Sequence
  Sense Oligo
gggacuacaggcaugcacc

SEQ ID NO: 24184 - RNA, 19 nt, Artificial Sequence
  Antisense Oligo
ggugcaugccuguaguccc

SEQ ID NO: 24185 - RNA, 19 nt, Artificial Sequence
  Sense Oligo
ggacuacaggcaugcacca

SEQ ID NO: 24186 - RNA, 19 nt, Artificial Sequence
  Antisense Oligo
uggugcaugccuguagucc

SEQ ID NO: 24187 - RNA, 19 nt, Artificial Sequence
  Sense Oligo
gacuacaggcaugcaccac

SEQ ID NO: 24188 - RNA, 19 nt, Artificial Sequence
  Antisense Oligo
guggugcaugccuguaguc

SEQ ID NO: 24189 - RNA, 19 nt, Artificial Sequence
  Sense Oligo
acaggcaugcaccaccacg

SEQ ID NO: 24190 - RNA, 19 nt, Artificial Sequence
  Antisense Oligo
cgugguggugcaugccugu

SEQ ID NO: 24191 - RNA, 19 nt, Artificial Sequence
  Sense Oligo
caggcaugcaccaccacga

SEQ ID NO: 24192 - RNA, 19 nt, Artificial Sequence
  Antisense Oligo
ucgugguggugcaugccug

SEQ ID NO: 24193 - RNA, 19 nt, Artificial Sequence
  Sense Oligo
aggcaugcaccaccacgac

SEQ ID NO: 24194 - RNA, 19 nt, Artificial Sequence
  Antisense Oligo
gucgugguggugcaugccu

SEQ ID NO: 24195 - RNA, 19 nt, Artificial Sequence
  Sense Oligo
gcaugcaccaccacgacca

SEQ ID NO: 24196 - RNA, 19 nt, Artificial Sequence
  Antisense Oligo
uggucgugguggugcaugc

SEQ ID NO: 24197 - RNA, 19 nt, Artificial Sequence
  Sense Oligo
cucggccucccaaagugcu

SEQ ID NO: 24198 - RNA, 19 nt, Artificial Sequence
  Antisense Oligo
agcacuuugggaggccgag

SEQ ID NO: 24199 - RNA, 19 nt, Artificial Sequence
  Sense Oligo
ccaaagugcugggauuaca

SEQ ID NO: 24200 - RNA, 19 nt, Artificial Sequence
  Antisense Oligo
uguaaucccagcacuuugg

SEQ ID NO: 24201 - RNA, 19 nt, Artificial Sequence
  Sense Oligo
caaagugcugggauuacag

SEQ ID NO: 24202 - RNA, 19 nt, Artificial Sequence
  Antisense Oligo
cuguaaucccagcacuuug

SEQ ID NO: 24203 - RNA, 19 nt, Artificial Sequence
  Sense Oligo
gugcugggauuacaggugu

SEQ ID NO: 24204 - RNA, 19 nt, Artificial Sequence
  Antisense Oligo
acaccuguaaucccagcac

SEQ ID NO: 24205 - RNA, 19 nt, Artificial Sequence
  Sense Oligo
ugcugggauuacaggugug

SEQ ID NO: 24206 - RNA, 19 nt, Artificial Sequence
  Antisense Oligo
cacaccuguaaucccagca

SEQ ID NO: 24207 - RNA, 19 nt, Artificial Sequence
  Sense Oligo
gcugggauuacagguguga

SEQ ID NO: 24208 - RNA, 19 nt, Artificial Sequence
  Antisense Oligo
ucacaccuguaaucccagc

SEQ ID NO: 24209 - RNA, 19 nt, Artificial Sequence
  Sense Oligo
gccuccaccuuccuuuucu

SEQ ID NO: 24210 - RNA, 19 nt, Artificial Sequence
  Antisense Oligo
agaaaaggaagguggaggc

SEQ ID NO: 24211 - RNA, 19 nt, Artificial Sequence
  Sense Oligo
ccuccaccuuccuuuucuu

SEQ ID NO: 24212 - RNA, 19 nt, Artificial Sequence
  Antisense Oligo
aagaaaaggaagguggagg

SEQ ID NO: 24213 - RNA, 19 nt, Artificial Sequence
  Sense Oligo
caccuuccuuuucuuucua

SEQ ID NO: 24214 - RNA, 19 nt, Artificial Sequence
  Antisense Oligo
uagaaagaaaaggaaggug

SEQ ID NO: 24215 - RNA, 19 nt, Artificial Sequence
  Sense Oligo
accuuccuuuucuuucuac

SEQ ID NO: 24216 - RNA, 19 nt, Artificial Sequence
  Antisense Oligo
guagaaagaaaaggaaggu

SEQ ID NO: 24217 - RNA, 19 nt, Artificial Sequence
  Sense Oligo
ccuuuucuuucuaccagac

SEQ ID NO: 24218 - RNA, 19 nt, Artificial Sequence
  Antisense Oligo
gucugguagaaagaaaagg

SEQ ID NO: 24219 - RNA, 19 nt, Artificial Sequence
  Sense Oligo
cuuucuaccagacccaaua

SEQ ID NO: 24220 - RNA, 19 nt, Artificial Sequence
  Antisense Oligo
uauugggucugguagaaag

SEQ ID NO: 24221 - RNA, 19 nt, Artificial Sequence
  Sense Oligo
uuucuaccagacccaauac

SEQ ID NO: 24222 - RNA, 19 nt, Artificial Sequence
  Antisense Oligo
guauugggucugguagaaa

SEQ ID NO: 24223 - RNA, 19 nt, Artificial Sequence
  Sense Oligo
uucuaccagacccaauacu

SEQ ID NO: 24224 - RNA, 19 nt, Artificial Sequence
  Antisense Oligo
aguauugggucugguagaa

SEQ ID NO: 24225 - RNA, 19 nt, Artificial Sequence
  Sense Oligo
accagacccaauacucgug

SEQ ID NO: 24226 - RNA, 19 nt, Artificial Sequence
  Antisense Oligo
cacgaguauugggucuggu

SEQ ID NO: 24227 - RNA, 19 nt, Artificial Sequence
  Sense Oligo
ccagacccaauacucgugu

SEQ ID NO: 24228 - RNA, 19 nt, Artificial Sequence
  Antisense Oligo
acacgaguauugggucugg

SEQ ID NO: 24229 - RNA, 19 nt, Artificial Sequence
  Sense Oligo
cagacccaauacucgugug

SEQ ID NO: 24230 - RNA, 19 nt, Artificial Sequence
  Antisense Oligo
cacacgaguauugggucug

SEQ ID NO: 24231 - RNA, 19 nt, Artificial Sequence
  Sense Oligo
cccaauacucgugugucuc

SEQ ID NO: 24232 - RNA, 19 nt, Artificial Sequence
  Antisense Oligo
gagacacacgaguauuggg

SEQ ID NO: 24233 - RNA, 19 nt, Artificial Sequence
  Sense Oligo
cucgugugucucccagaag

SEQ ID NO: 24234 - RNA, 19 nt, Artificial Sequence
  Antisense Oligo
cuucugggagacacacgag

SEQ ID NO: 24235 - RNA, 19 nt, Artificial Sequence
  Sense Oligo
ugugucucccagaagcugu

SEQ ID NO: 24236 - RNA, 19 nt, Artificial Sequence
  Antisense Oligo
acagcuucugggagacaca

SEQ ID NO: 24237 - RNA, 19 nt, Artificial Sequence
  Sense Oligo
gugucucccagaagcugug

SEQ ID NO: 24238 - RNA, 19 nt, Artificial Sequence
  Antisense Oligo
cacagcuucugggagacac

SEQ ID NO: 24239 - RNA, 19 nt, Artificial Sequence
  Sense Oligo
ugucucccagaagcugugg

SEQ ID NO: 24240 - RNA, 19 nt, Artificial Sequence
  Antisense Oligo
ccacagcuucugggagaca

SEQ ID NO: 24241 - RNA, 19 nt, Artificial Sequence
  Sense Oligo
gucucccagaagcuguggc

SEQ ID NO: 24242 - RNA, 19 nt, Artificial Sequence
  Antisense Oligo
gccacagcuucugggagac

SEQ ID NO: 24243 - RNA, 19 nt, Artificial Sequence
  Sense Oligo
ucucccagaagcuguggcu

SEQ ID NO: 24244 - RNA, 19 nt, Artificial Sequence
  Antisense Oligo
agccacagcuucugggaga

SEQ ID NO: 24245 - RNA, 19 nt, Artificial Sequence
  Sense Oligo
cucccagaagcuguggcug

SEQ ID NO: 24246 - RNA, 19 nt, Artificial Sequence
  Antisense Oligo
cagccacagcuucugggag

SEQ ID NO: 24247 - RNA, 19 nt, Artificial Sequence
  Sense Oligo
gccugagcuucugccgugu

SEQ ID NO: 24248 - RNA, 19 nt, Artificial Sequence
  Antisense Oligo
acacggcagaagcucaggc

SEQ ID NO: 24249 - RNA, 19 nt, Artificial Sequence
  Sense Oligo
ccugagcuucugccgugug

SEQ ID NO: 24250 - RNA, 19 nt, Artificial Sequence
  Antisense Oligo
cacacggcagaagcucagg

SEQ ID NO: 24251 - RNA, 19 nt, Artificial Sequence
  Sense Oligo
agcuucugccguguguauc

SEQ ID NO: 24252 - RNA, 19 nt, Artificial Sequence
  Antisense Oligo
gauacacacggcagaagcu

SEQ ID NO: 24253 - RNA, 19 nt, Artificial Sequence
  Sense Oligo
gcuucugccguguguaucu

SEQ ID NO: 24254 - RNA, 19 nt, Artificial Sequence
  Antisense Oligo
agauacacacggcagaagc

SEQ ID NO: 24255 - RNA, 19 nt, Artificial Sequence
  Sense Oligo
cuucugccguguguaucug

SEQ ID NO: 24256 - RNA, 19 nt, Artificial Sequence
  Antisense Oligo
cagauacacacggcagaag

SEQ ID NO: 24257 - RNA, 19 nt, Artificial Sequence
  Sense Oligo
uucugccguguguaucugu

SEQ ID NO: 24258 - RNA, 19 nt, Artificial Sequence
  Antisense Oligo
acagauacacacggcagaa

SEQ ID NO: 24259 - RNA, 19 nt, Artificial Sequence
  Sense Oligo
ucugccguguguaucugug

SEQ ID NO: 24260 - RNA, 19 nt, Artificial Sequence
  Antisense Oligo
cacagauacacacggcaga

SEQ ID NO: 24261 - RNA, 19 nt, Artificial Sequence
  Sense Oligo
cugccguguguaucugugu

SEQ ID NO: 24262 - RNA, 19 nt, Artificial Sequence
  Antisense Oligo
acacagauacacacggcag

SEQ ID NO: 24263 - RNA, 19 nt, Artificial Sequence
  Sense Oligo
ugccguguguaucuguguc

SEQ ID NO: 24264 - RNA, 19 nt, Artificial Sequence
  Antisense Oligo
gacacagauacacacggca

SEQ ID NO: 24265 - RNA, 19 nt, Artificial Sequence
  Sense Oligo
gccguguguaucugugucc

SEQ ID NO: 24266 - RNA, 19 nt, Artificial Sequence
  Antisense Oligo
ggacacagauacacacggc

SEQ ID NO: 24267 - RNA, 19 nt, Artificial Sequence
  Sense Oligo
ccguguguaucuguguccc

SEQ ID NO: 24268 - RNA, 19 nt, Artificial Sequence
  Antisense Oligo
gggacacagauacacacgg

SEQ ID NO: 24269 - RNA, 19 nt, Artificial Sequence
  Sense Oligo
cguguguaucuguguccca

SEQ ID NO: 24270 - RNA, 19 nt, Artificial Sequence
  Antisense Oligo
ugggacacagauacacacg

SEQ ID NO: 24271 - RNA, 19 nt, Artificial Sequence
  Sense Oligo
guguaucugugucccaagc

SEQ ID NO: 24272 - RNA, 19 nt, Artificial Sequence
  Antisense Oligo
gcuugggacacagauacac

SEQ ID NO: 24273 - RNA, 19 nt, Artificial Sequence
  Sense Oligo
uguaucugugucccaagcu

SEQ ID NO: 24274 - RNA, 19 nt, Artificial Sequence
  Antisense Oligo
agcuugggacacagauaca

SEQ ID NO: 24275 - RNA, 19 nt, Artificial Sequence
  Sense Oligo
guaucugugucccaagcuu

SEQ ID NO: 24276 - RNA, 19 nt, Artificial Sequence
  Antisense Oligo
aagcuugggacacagauac

SEQ ID NO: 24277 - RNA, 19 nt, Artificial Sequence
  Sense Oligo
uaucugugucccaagcuuc

SEQ ID NO: 24278 - RNA, 19 nt, Artificial Sequence
  Antisense Oligo
gaagcuugggacacagaua

SEQ ID NO: 24279 - RNA, 19 nt, Artificial Sequence
  Sense Oligo
aucugugucccaagcuucu

SEQ ID NO: 24280 - RNA, 19 nt, Artificial Sequence
  Antisense Oligo
agaagcuugggacacagau

SEQ ID NO: 24281 - RNA, 19 nt, Artificial Sequence
  Sense Oligo
ucugugucccaagcuucug

SEQ ID NO: 24282 - RNA, 19 nt, Artificial Sequence
  Antisense Oligo
cagaagcuugggacacaga

SEQ ID NO: 24283 - RNA, 19 nt, Artificial Sequence
  Sense Oligo
cugugucccaagcuucugu

SEQ ID NO: 24284 - RNA, 19 nt, Artificial Sequence
  Antisense Oligo
acagaagcuugggacacag

SEQ ID NO: 24285 - RNA, 19 nt, Artificial Sequence
  Sense Oligo
ugugucccaagcuucugug

SEQ ID NO: 24286 - RNA, 19 nt, Artificial Sequence
  Antisense Oligo
cacagaagcuugggacaca

SEQ ID NO: 24287 - RNA, 19 nt, Artificial Sequence
  Sense Oligo
gugucccaagcuucugugg

SEQ ID NO: 24288 - RNA, 19 nt, Artificial Sequence
  Antisense Oligo
ccacagaagcuugggacac

SEQ ID NO: 24289 - RNA, 19 nt, Artificial Sequence
  Sense Oligo
caagcuucugugggucucu

SEQ ID NO: 24290 - RNA, 19 nt, Artificial Sequence
  Antisense Oligo
agagacccacagaagcuug

SEQ ID NO: 24291 - RNA, 19 nt, Artificial Sequence
  Sense Oligo
agcuucugugggucucuuu

SEQ ID NO: 24292 - RNA, 19 nt, Artificial Sequence
  Antisense Oligo
aaagagacccacagaagcu

SEQ ID NO: 24293 - RNA, 19 nt, Artificial Sequence
  Sense Oligo
cuucugugggucucuuugc

SEQ ID NO: 24294 - RNA, 19 nt, Artificial Sequence
  Antisense Oligo
gcaaagagacccacagaag

SEQ ID NO: 24295 - RNA, 19 nt, Artificial Sequence
  Sense Oligo
uucugugggucucuuugca

SEQ ID NO: 24296 - RNA, 19 nt, Artificial Sequence
  Antisense Oligo
ugcaaagagacccacagaa

SEQ ID NO: 24297 - RNA, 19 nt, Artificial Sequence
  Sense Oligo
ucugugggucucuuugcau

SEQ ID NO: 24298 - RNA, 19 nt, Artificial Sequence
  Antisense Oligo
augcaaagagacccacaga

SEQ ID NO: 24299 - RNA, 19 nt, Artificial Sequence
  Sense Oligo
ugugggucucuuugcauug

SEQ ID NO: 24300 - RNA, 19 nt, Artificial Sequence
  Antisense Oligo
caaugcaaagagacccaca

SEQ ID NO: 24301 - RNA, 19 nt, Artificial Sequence
  Sense Oligo
gugggucucuuugcauuga

SEQ ID NO: 24302 - RNA, 19 nt, Artificial Sequence
  Antisense Oligo
ucaaugcaaagagacccac

SEQ ID NO: 24303 - RNA, 19 nt, Artificial Sequence
  Sense Oligo
ugggucucuuugcauugag

SEQ ID NO: 24304 - RNA, 19 nt, Artificial Sequence
  Antisense Oligo
cucaaugcaaagagaccca

SEQ ID NO: 24305 - RNA, 19 nt, Artificial Sequence
  Sense Oligo
gggucucuuugcauugagg

SEQ ID NO: 24306 - RNA, 19 nt, Artificial Sequence
  Antisense Oligo
ccucaaugcaaagagaccc

SEQ ID NO: 24307 - RNA, 19 nt, Artificial Sequence
  Sense Oligo
ggucucuuugcauugaggg

SEQ ID NO: 24308 - RNA, 19 nt, Artificial Sequence
  Antisense Oligo
cccucaaugcaaagagacc

SEQ ID NO: 24309 - RNA, 19 nt, Artificial Sequence
  Sense Oligo
gucucuuugcauugagggu

SEQ ID NO: 24310 - RNA, 19 nt, Artificial Sequence
  Antisense Oligo
acccucaaugcaaagagac

SEQ ID NO: 24311 - RNA, 19 nt, Artificial Sequence
  Sense Oligo
gggugcaagcucagaggug

SEQ ID NO: 24312 - RNA, 19 nt, Artificial Sequence
  Antisense Oligo
caccucugagcuugcaccc

SEQ ID NO: 24313 - RNA, 19 nt, Artificial Sequence
  Sense Oligo
ggugcaagcucagaggugc

SEQ ID NO: 24314 - RNA, 19 nt, Artificial Sequence
  Antisense Oligo
gcaccucugagcuugcacc

SEQ ID NO: 24315 - RNA, 19 nt, Artificial Sequence
  Sense Oligo
gugcaagcucagaggugcc

SEQ ID NO: 24316 - RNA, 19 nt, Artificial Sequence
  Antisense Oligo
ggcaccucugagcuugcac

SEQ ID NO: 24317 - RNA, 19 nt, Artificial Sequence
  Sense Oligo
ugcaagcucagaggugccu

SEQ ID NO: 24318 - RNA, 19 nt, Artificial Sequence
  Antisense Oligo
aggcaccucugagcuugca

SEQ ID NO: 24319 - RNA, 19 nt, Artificial Sequence
  Sense Oligo
gaggugccuugcugcuucg

SEQ ID NO: 24320 - RNA, 19 nt, Artificial Sequence
  Antisense Oligo
cgaagcagcaaggcaccuc

SEQ ID NO: 24321 - RNA, 19 nt, Artificial Sequence
  Sense Oligo
aggugccuugcugcuucgg

SEQ ID NO: 24322 - RNA, 19 nt, Artificial Sequence
  Antisense Oligo
ccgaagcagcaaggcaccu

SEQ ID NO: 24323 - RNA, 19 nt, Artificial Sequence
  Sense Oligo
ucuguaggccucugcauug

SEQ ID NO: 24324 - RNA, 19 nt, Artificial Sequence
  Antisense Oligo
caaugcagaggccuacaga

SEQ ID NO: 24325 - RNA, 19 nt, Artificial Sequence
  Sense Oligo
cuguaggccucugcauuga

SEQ ID NO: 24326 - RNA, 19 nt, Artificial Sequence
  Antisense Oligo
ucaaugcagaggccuacag

SEQ ID NO: 24327 - RNA, 19 nt, Artificial Sequence
  Sense Oligo
uguaggccucugcauugag

SEQ ID NO: 24328 - RNA, 19 nt, Artificial Sequence
  Antisense Oligo
cucaaugcagaggccuaca

SEQ ID NO: 24329 - RNA, 19 nt, Artificial Sequence
  Sense Oligo
cucugcauugagggugcgu

SEQ ID NO: 24330 - RNA, 19 nt, Artificial Sequence
  Antisense Oligo
acgcacccucaaugcagag

SEQ ID NO: 24331 - RNA, 19 nt, Artificial Sequence
  Sense Oligo
ucugcauugagggugcgug

SEQ ID NO: 24332 - RNA, 19 nt, Artificial Sequence
  Antisense Oligo
cacgcacccucaaugcaga

SEQ ID NO: 24333 - RNA, 19 nt, Artificial Sequence
  Sense Oligo
cugcauugagggugcgugc

SEQ ID NO: 24334 - RNA, 19 nt, Artificial Sequence
  Antisense Oligo
gcacgcacccucaaugcag

SEQ ID NO: 24335 - RNA, 19 nt, Artificial Sequence
  Sense Oligo
ugcauugagggugcgugcc

SEQ ID NO: 24336 - RNA, 19 nt, Artificial Sequence
  Antisense Oligo
ggcacgcacccucaaugca

SEQ ID NO: 24337 - RNA, 19 nt, Artificial Sequence
  Sense Oligo
cauugagggugcgugccca

SEQ ID NO: 24338 - RNA, 19 nt, Artificial Sequence
  Antisense Oligo
ugggcacgcacccucaaug

SEQ ID NO: 24339 - RNA, 19 nt, Artificial Sequence
  Sense Oligo
auugagggugcgugcccag

SEQ ID NO: 24340 - RNA, 19 nt, Artificial Sequence
  Antisense Oligo
cugggcacgcacccucaau

SEQ ID NO: 24341 - RNA, 19 nt, Artificial Sequence
  Sense Oligo
uugagggugcgugcccaga

SEQ ID NO: 24342 - RNA, 19 nt, Artificial Sequence
  Antisense Oligo
ucugggcacgcacccucaa

SEQ ID NO: 24343 - RNA, 19 nt, Artificial Sequence
  Sense Oligo
aaugugcuggcuggcaggu

SEQ ID NO: 24344 - RNA, 19 nt, Artificial Sequence
  Antisense Oligo
accugccagccagcacauu

SEQ ID NO: 24345 - RNA, 19 nt, Artificial Sequence
  Sense Oligo
uggcuggcagguuacccuu

SEQ ID NO: 24346 - RNA, 19 nt, Artificial Sequence
  Antisense Oligo
aaggguaaccugccagcca

SEQ ID NO: 24347 - RNA, 19 nt, Artificial Sequence
  Sense Oligo
ggcuggcagguuacccuuc

SEQ ID NO: 24348 - RNA, 19 nt, Artificial Sequence
  Antisense Oligo
gaaggguaaccugccagcc

SEQ ID NO: 24349 - RNA, 19 nt, Artificial Sequence
  Sense Oligo
gcuggcagguuacccuucu

SEQ ID NO: 24350 - RNA, 19 nt, Artificial Sequence
  Antisense Oligo
agaaggguaaccugccagc

SEQ ID NO: 24351 - RNA, 19 nt, Artificial Sequence
  Sense Oligo
cuggcagguuacccuucuu

SEQ ID NO: 24352 - RNA, 19 nt, Artificial Sequence
  Antisense Oligo
aagaaggguaaccugccag

SEQ ID NO: 24353 - RNA, 19 nt, Artificial Sequence
  Sense Oligo
uggcagguuacccuucuug

SEQ ID NO: 24354 - RNA, 19 nt, Artificial Sequence
  Antisense Oligo
caagaaggguaaccugcca

SEQ ID NO: 24355 - RNA, 19 nt, Artificial Sequence
  Sense Oligo
ggcagguuacccuucuugg

SEQ ID NO: 24356 - RNA, 19 nt, Artificial Sequence
  Antisense Oligo
ccaagaaggguaaccugcc

SEQ ID NO: 24357 - RNA, 19 nt, Artificial Sequence
  Sense Oligo
gcagguuacccuucuugga

SEQ ID NO: 24358 - RNA, 19 nt, Artificial Sequence
  Antisense Oligo
uccaagaaggguaaccugc

SEQ ID NO: 24359 - RNA, 19 nt, Artificial Sequence
  Sense Oligo
cagguuacccuucuuggaa

SEQ ID NO: 24360 - RNA, 19 nt, Artificial Sequence
  Antisense Oligo
uuccaagaaggguaaccug

SEQ ID NO: 24361 - RNA, 19 nt, Artificial Sequence
  Sense Oligo
caccuuuuggcucccucug

SEQ ID NO: 24362 - RNA, 19 nt, Artificial Sequence
  Antisense Oligo
cagagggagccaaaaggug

SEQ ID NO: 24363 - RNA, 19 nt, Artificial Sequence
  Sense Oligo
accuuuuggcucccucugg

SEQ ID NO: 24364 - RNA, 19 nt, Artificial Sequence
  Antisense Oligo
ccagagggagccaaaaggu

SEQ ID NO: 24365 - RNA, 19 nt, Artificial Sequence
  Sense Oligo
ccuuuuggcucccucuggc

SEQ ID NO: 24366 - RNA, 19 nt, Artificial Sequence
  Antisense Oligo
gccagagggagccaaaagg

SEQ ID NO: 24367 - RNA, 19 nt, Artificial Sequence
  Sense Oligo
cuuuuggcucccucuggcc

SEQ ID NO: 24368 - RNA, 19 nt, Artificial Sequence
  Antisense Oligo
ggccagagggagccaaaag

SEQ ID NO: 24369 - RNA, 19 nt, Artificial Sequence
  Sense Oligo
uuuuggcucccucuggccu

SEQ ID NO: 24370 - RNA, 19 nt, Artificial Sequence
  Antisense Oligo
aggccagagggagccaaaa

SEQ ID NO: 24371 - RNA, 19 nt, Artificial Sequence
  Sense Oligo
cuuaggcguuagacaccaa

SEQ ID NO: 24372 - RNA, 19 nt, Artificial Sequence
  Antisense Oligo
uuggugucuaacgccuaag

SEQ ID NO: 24373 - RNA, 19 nt, Artificial Sequence
  Sense Oligo
uuaggcguuagacaccaag

SEQ ID NO: 24374 - RNA, 19 nt, Artificial Sequence
  Antisense Oligo
cuuggugucuaacgccuaa

SEQ ID NO: 24375 - RNA, 19 nt, Artificial Sequence
  Sense Oligo
uaggcguuagacaccaaga

SEQ ID NO: 24376 - RNA, 19 nt, Artificial Sequence
  Antisense Oligo
ucuuggugucuaacgccua

SEQ ID NO: 24377 - RNA, 19 nt, Artificial Sequence
  Sense Oligo
aggcguuagacaccaagag

SEQ ID NO: 24378 - RNA, 19 nt, Artificial Sequence
  Antisense Oligo
cucuuggugucuaacgccu

SEQ ID NO: 24379 - RNA, 19 nt, Artificial Sequence
  Sense Oligo
gcguccuuguuaagauucc

SEQ ID NO: 24380 - RNA, 19 nt, Artificial Sequence
  Antisense Oligo
ggaaucuuaacaaggacgc

SEQ ID NO: 24381 - RNA, 19 nt, Artificial Sequence
  Sense Oligo
cguccuuguuaagauuccc

SEQ ID NO: 24382 - RNA, 19 nt, Artificial Sequence
  Antisense Oligo
gggaaucuuaacaaggacg

SEQ ID NO: 24383 - RNA, 19 nt, Artificial Sequence
  Sense Oligo
guccuuguuaagauuccca

SEQ ID NO: 24384 - RNA, 19 nt, Artificial Sequence
  Antisense Oligo
ugggaaucuuaacaaggac

SEQ ID NO: 24385 - RNA, 19 nt, Artificial Sequence
  Sense Oligo
uuguuaagauucccaguug

SEQ ID NO: 24386 - RNA, 19 nt, Artificial Sequence
  Antisense Oligo
caacugggaaucuuaacaa

SEQ ID NO: 24387 - RNA, 19 nt, Artificial Sequence
  Sense Oligo
uguuaagauucccaguugg

SEQ ID NO: 24388 - RNA, 19 nt, Artificial Sequence
  Antisense Oligo
ccaacugggaaucuuaaca

SEQ ID NO: 24389 - RNA, 19 nt, Artificial Sequence
  Sense Oligo
guuaagauucccaguugga

SEQ ID NO: 24390 - RNA, 19 nt, Artificial Sequence
  Antisense Oligo
uccaacugggaaucuuaac

SEQ ID NO: 24391 - RNA, 19 nt, Artificial Sequence
  Sense Oligo
uuaagauucccaguuggag

SEQ ID NO: 24392 - RNA, 19 nt, Artificial Sequence
  Antisense Oligo
cuccaacugggaaucuuaa

SEQ ID NO: 24393 - RNA, 19 nt, Artificial Sequence
  Sense Oligo
uaagauucccaguuggagc

SEQ ID NO: 24394 - RNA, 19 nt, Artificial Sequence
  Antisense Oligo
gcuccaacugggaaucuua

SEQ ID NO: 24395 - RNA, 19 nt, Artificial Sequence
  Sense Oligo
agauucccaguuggagcac

SEQ ID NO: 24396 - RNA, 19 nt, Artificial Sequence
  Antisense Oligo
gugcuccaacugggaaucu

SEQ ID NO: 24397 - RNA, 19 nt, Artificial Sequence
  Sense Oligo
ucccaguuggagcacuagg

SEQ ID NO: 24398 - RNA, 19 nt, Artificial Sequence
  Antisense Oligo
ccuagugcuccaacuggga

SEQ ID NO: 24399 - RNA, 19 nt, Artificial Sequence
  Sense Oligo
cccaguuggagcacuaggc

SEQ ID NO: 24400 - RNA, 19 nt, Artificial Sequence
  Antisense Oligo
gccuagugcuccaacuggg

SEQ ID NO: 24401 - RNA, 19 nt, Artificial Sequence
  Sense Oligo
ccaguuggagcacuaggcg

SEQ ID NO: 24402 - RNA, 19 nt, Artificial Sequence
  Antisense Oligo
cgccuagugcuccaacugg

SEQ ID NO: 24403 - RNA, 19 nt, Artificial Sequence
  Sense Oligo
caguuggagcacuaggcga

SEQ ID NO: 24404 - RNA, 19 nt, Artificial Sequence
  Antisense Oligo
ucgccuagugcuccaacug

SEQ ID NO: 24405 - RNA, 19 nt, Artificial Sequence
  Sense Oligo
aguuggagcacuaggcgag

SEQ ID NO: 24406 - RNA, 19 nt, Artificial Sequence
  Antisense Oligo
cucgccuagugcuccaacu

SEQ ID NO: 24407 - RNA, 19 nt, Artificial Sequence
  Sense Oligo
guuggagcacuaggcgagg

SEQ ID NO: 24408 - RNA, 19 nt, Artificial Sequence
  Antisense Oligo
ccucgccuagugcuccaac

SEQ ID NO: 24409 - RNA, 19 nt, Artificial Sequence
  Sense Oligo
uuggagcacuaggcgaggc

SEQ ID NO: 24410 - RNA, 19 nt, Artificial Sequence
  Antisense Oligo
gccucgccuagugcuccaa

SEQ ID NO: 24411 - RNA, 19 nt, Artificial Sequence
  Sense Oligo
uggagcacuaggcgaggcu

SEQ ID NO: 24412 - RNA, 19 nt, Artificial Sequence
  Antisense Oligo
agccucgccuagugcucca

SEQ ID NO: 24413 - RNA, 19 nt, Artificial Sequence
  Sense Oligo
ggagcacuaggcgaggcuu

SEQ ID NO: 24414 - RNA, 19 nt, Artificial Sequence
  Antisense Oligo
aagccucgccuagugcucc

SEQ ID NO: 24415 - RNA, 19 nt, Artificial Sequence
  Sense Oligo
gagcacuaggcgaggcuuu

SEQ ID NO: 24416 - RNA, 19 nt, Artificial Sequence
  Antisense Oligo
aaagccucgccuagugcuc

SEQ ID NO: 24417 - RNA, 19 nt, Artificial Sequence
  Sense Oligo
agcacuaggcgaggcuuuc

SEQ ID NO: 24418 - RNA, 19 nt, Artificial Sequence
  Antisense Oligo
gaaagccucgccuagugcu

SEQ ID NO: 24419 - RNA, 19 nt, Artificial Sequence
  Sense Oligo
gcacuaggcgaggcuuucg

SEQ ID NO: 24420 - RNA, 19 nt, Artificial Sequence
  Antisense Oligo
cgaaagccucgccuagugc

SEQ ID NO: 24421 - RNA, 19 nt, Artificial Sequence
  Sense Oligo
cacuaggcgaggcuuucga

SEQ ID NO: 24422 - RNA, 19 nt, Artificial Sequence
  Antisense Oligo
ucgaaagccucgccuagug

SEQ ID NO: 24423 - RNA, 19 nt, Artificial Sequence
  Sense Oligo
acuaggcgaggcuuucgag

SEQ ID NO: 24424 - RNA, 19 nt, Artificial Sequence
  Antisense Oligo
cucgaaagccucgccuagu

SEQ ID NO: 24425 - RNA, 19 nt, Artificial Sequence
  Sense Oligo
cuaggcgaggcuuucgagg

SEQ ID NO: 24426 - RNA, 19 nt, Artificial Sequence
  Antisense Oligo
ccucgaaagccucgccuag

SEQ ID NO: 24427 - RNA, 19 nt, Artificial Sequence
  Sense Oligo
uaggcgaggcuuucgaggg

SEQ ID NO: 24428 - RNA, 19 nt, Artificial Sequence
  Antisense Oligo
cccucgaaagccucgccua

SEQ ID NO: 24429 - RNA, 19 nt, Artificial Sequence
  Sense Oligo
gggagcguccuggacaugu

SEQ ID NO: 24430 - RNA, 19 nt, Artificial Sequence
  Antisense Oligo
acauguccaggacgcuccc

SEQ ID NO: 24431 - RNA, 19 nt, Artificial Sequence
  Sense Oligo
ggagcguccuggacauguu

SEQ ID NO: 24432 - RNA, 19 nt, Artificial Sequence
  Antisense Oligo
aacauguccaggacgcucc

SEQ ID NO: 24433 - RNA, 19 nt, Artificial Sequence
  Sense Oligo
gagcguccuggacauguuc

SEQ ID NO: 24434 - RNA, 19 nt, Artificial Sequence
  Antisense Oligo
gaacauguccaggacgcuc

SEQ ID NO: 24435 - RNA, 19 nt, Artificial Sequence
  Sense Oligo
agcguccuggacauguuca

SEQ ID NO: 24436 - RNA, 19 nt, Artificial Sequence
  Antisense Oligo
ugaacauguccaggacgcu

SEQ ID NO: 24437 - RNA, 19 nt, Artificial Sequence
  Sense Oligo
gcguccuggacauguucaa

SEQ ID NO: 24438 - RNA, 19 nt, Artificial Sequence
  Antisense Oligo
uugaacauguccaggacgc

SEQ ID NO: 24439 - RNA, 19 nt, Artificial Sequence
  Sense Oligo
cguccuggacauguucaag

SEQ ID NO: 24440 - RNA, 19 nt, Artificial Sequence
  Antisense Oligo
cuugaacauguccaggacg

SEQ ID NO: 24441 - RNA, 19 nt, Artificial Sequence
  Sense Oligo
guccuggacauguucaagg

SEQ ID NO: 24442 - RNA, 19 nt, Artificial Sequence
  Antisense Oligo
ccuugaacauguccaggac

SEQ ID NO: 24443 - RNA, 19 nt, Artificial Sequence
  Sense Oligo
ccuggacauguucaaggag

SEQ ID NO: 24444 - RNA, 19 nt, Artificial Sequence
  Antisense Oligo
cuccuugaacauguccagg

SEQ ID NO: 24445 - RNA, 19 nt, Artificial Sequence
  Sense Oligo
gaagggcuccugggcucua

SEQ ID NO: 24446 - RNA, 19 nt, Artificial Sequence
  Antisense Oligo
uagagcccaggagcccuuc

SEQ ID NO: 24447 - RNA, 19 nt, Artificial Sequence
  Sense Oligo
aagggcuccugggcucuag

SEQ ID NO: 24448 - RNA, 19 nt, Artificial Sequence
  Antisense Oligo
cuagagcccaggagcccuu

SEQ ID NO: 24449 - RNA, 19 nt, Artificial Sequence
  Sense Oligo
ccggguuucuugcugggca

SEQ ID NO: 24450 - RNA, 19 nt, Artificial Sequence
  Antisense Oligo
ugcccagcaagaaacccgg

SEQ ID NO: 24451 - RNA, 19 nt, Artificial Sequence
  Sense Oligo
cggguuucuugcugggcac

SEQ ID NO: 24452 - RNA, 19 nt, Artificial Sequence
  Antisense Oligo
gugcccagcaagaaacccg

SEQ ID NO: 24453 - RNA, 19 nt, Artificial Sequence
  Sense Oligo
ggguuucuugcugggcacg

SEQ ID NO: 24454 - RNA, 19 nt, Artificial Sequence
  Antisense Oligo
cgugcccagcaagaaaccc

SEQ ID NO: 24455 - RNA, 19 nt, Artificial Sequence
  Sense Oligo
gguuucuugcugggcacgg

SEQ ID NO: 24456 - RNA, 19 nt, Artificial Sequence
  Antisense Oligo
ccgugcccagcaagaaacc

SEQ ID NO: 24457 - RNA, 19 nt, Artificial Sequence
  Sense Oligo
guuucuugcugggcacgga

SEQ ID NO: 24458 - RNA, 19 nt, Artificial Sequence
  Antisense Oligo
uccgugcccagcaagaaac

SEQ ID NO: 24459 - RNA, 19 nt, Artificial Sequence
  Sense Oligo
uuucuugcugggcacggag

SEQ ID NO: 24460 - RNA, 19 nt, Artificial Sequence
  Antisense Oligo
cuccgugcccagcaagaaa

SEQ ID NO: 24461 - RNA, 19 nt, Artificial Sequence
  Sense Oligo
gggaagcugucuuucugug

SEQ ID NO: 24462 - RNA, 19 nt, Artificial Sequence
  Antisense Oligo
cacagaaagacagcuuccc

SEQ ID NO: 24463 - RNA, 19 nt, Artificial Sequence
  Sense Oligo
uggcacuccaugguugggc

SEQ ID NO: 24464 - RNA, 19 nt, Artificial Sequence
  Antisense Oligo
gcccaaccauggagugcca

SEQ ID NO: 24465 - RNA, 19 nt, Artificial Sequence
  Sense Oligo
ggcacuccaugguugggcu

SEQ ID NO: 24466 - RNA, 19 nt, Artificial Sequence
  Antisense Oligo
agcccaaccauggagugcc

SEQ ID NO: 24467 - RNA, 19 nt, Artificial Sequence
  Sense Oligo
gugaguggugugaauggga

SEQ ID NO: 24468 - RNA, 19 nt, Artificial Sequence
  Antisense Oligo
ucccauucacaccacucac

SEQ ID NO: 24469 - RNA, 19 nt, Artificial Sequence
  Sense Oligo
ugaguggugugaaugggau

SEQ ID NO: 24470 - RNA, 19 nt, Artificial Sequence
  Antisense Oligo
aucccauucacaccacuca

SEQ ID NO: 24471 - RNA, 19 nt, Artificial Sequence
  Sense Oligo
aguggugugaaugggaugu

SEQ ID NO: 24472 - RNA, 19 nt, Artificial Sequence
  Antisense Oligo
acaucccauucacaccacu

SEQ ID NO: 24473 - RNA, 19 nt, Artificial Sequence
  Sense Oligo
guggugugaaugggaugug

SEQ ID NO: 24474 - RNA, 19 nt, Artificial Sequence
  Antisense Oligo
cacaucccauucacaccac

SEQ ID NO: 24475 - RNA, 19 nt, Artificial Sequence
  Sense Oligo
uggugugaaugggaugugu

SEQ ID NO: 24476 - RNA, 19 nt, Artificial Sequence
  Antisense Oligo
acacaucccauucacacca

SEQ ID NO: 24477 - RNA, 19 nt, Artificial Sequence
  Sense Oligo
ggugugaaugggaugugug

SEQ ID NO: 24478 - RNA, 19 nt, Artificial Sequence
  Antisense Oligo
cacacaucccauucacacc

SEQ ID NO: 24479 - RNA, 19 nt, Artificial Sequence
  Sense Oligo
uguuggauguguguguaug

SEQ ID NO: 24480 - RNA, 19 nt, Artificial Sequence
  Antisense Oligo
cauacacacacauccaaca

SEQ ID NO: 24481 - RNA, 19 nt, Artificial Sequence
  Sense Oligo
guuggauguguguguaugu

SEQ ID NO: 24482 - RNA, 19 nt, Artificial Sequence
  Antisense Oligo
acauacacacacauccaac

SEQ ID NO: 24483 - RNA, 19 nt, Artificial Sequence
  Sense Oligo
uuggauguguguguaugug

SEQ ID NO: 24484 - RNA, 19 nt, Artificial Sequence
  Antisense Oligo
cacauacacacacauccaa

SEQ ID NO: 24485 - RNA, 19 nt, Artificial Sequence
  Sense Oligo
uggauguguguguaugugu

SEQ ID NO: 24486 - RNA, 19 nt, Artificial Sequence
  Antisense Oligo
acacauacacacacaucca

SEQ ID NO: 24487 - RNA, 19 nt, Artificial Sequence
  Sense Oligo
ggauguguguguauguguu

SEQ ID NO: 24488 - RNA, 19 nt, Artificial Sequence
  Antisense Oligo
aacacauacacacacaucc

SEQ ID NO: 24489 - RNA, 19 nt, Artificial Sequence
  Sense Oligo
ggguaugugaguuggugug

SEQ ID NO: 24490 - RNA, 19 nt, Artificial Sequence
  Antisense Oligo
cacaccaacucacauaccc

SEQ ID NO: 24491 - RNA, 19 nt, Artificial Sequence
  Sense Oligo
guguuggugugugaguugg

SEQ ID NO: 24492 - RNA, 19 nt, Artificial Sequence
  Antisense Oligo
ccaacucacacaccaacac

SEQ ID NO: 24493 - RNA, 19 nt, Artificial Sequence
  Sense Oligo
uguuggugugugaguuggg

SEQ ID NO: 24494 - RNA, 19 nt, Artificial Sequence
  Antisense Oligo
cccaacucacacaccaaca

SEQ ID NO: 24495 - RNA, 19 nt, Artificial Sequence
  Sense Oligo
gguguguguguguugggug

SEQ ID NO: 24496 - RNA, 19 nt, Artificial Sequence
  Antisense Oligo
cacccaacacacacacacc

SEQ ID NO: 24497 - RNA, 19 nt, Artificial Sequence
  Sense Oligo
uugggugugugcguguugg

SEQ ID NO: 24498 - RNA, 19 nt, Artificial Sequence
  Antisense Oligo
ccaacacgcacacacccaa

SEQ ID NO: 24499 - RNA, 19 nt, Artificial Sequence
  Sense Oligo
ugggugugugcguguuggg

SEQ ID NO: 24500 - RNA, 19 nt, Artificial Sequence
  Antisense Oligo
cccaacacgcacacaccca

SEQ ID NO: 24501 - RNA, 19 nt, Artificial Sequence
  Sense Oligo
gggugugugcguguugggu

SEQ ID NO: 24502 - RNA, 19 nt, Artificial Sequence
  Antisense Oligo
acccaacacgcacacaccc

SEQ ID NO: 24503 - RNA, 19 nt, Artificial Sequence
  Sense Oligo
gugugugcguguugggugu

SEQ ID NO: 24504 - RNA, 19 nt, Artificial Sequence
  Antisense Oligo
acacccaacacgcacacac

SEQ ID NO: 24505 - RNA, 19 nt, Artificial Sequence
  Sense Oligo
ugugugcguguugggugug

SEQ ID NO: 24506 - RNA, 19 nt, Artificial Sequence
  Antisense Oligo
cacacccaacacgcacaca

SEQ ID NO: 24507 - RNA, 19 nt, Artificial Sequence
  Sense Oligo
agugggauguguguguaug

SEQ ID NO: 24508 - RNA, 19 nt, Artificial Sequence
  Antisense Oligo
cauacacacacaucccacu

SEQ ID NO: 24509 - RNA, 19 nt, Artificial Sequence
  Sense Oligo
gugggauguguguguaugu

SEQ ID NO: 24510 - RNA, 19 nt, Artificial Sequence
  Antisense Oligo
acauacacacacaucccac

SEQ ID NO: 24511 - RNA, 19 nt, Artificial Sequence
  Sense Oligo
gggauguguguguauguug

SEQ ID NO: 24512 - RNA, 19 nt, Artificial Sequence
  Antisense Oligo
caacauacacacacauccc

SEQ ID NO: 24513 - RNA, 19 nt, Artificial Sequence
  Sense Oligo
ggauguguguguauguugg

SEQ ID NO: 24514 - RNA, 19 nt, Artificial Sequence
  Antisense Oligo
ccaacauacacacacaucc

SEQ ID NO: 24515 - RNA, 19 nt, Artificial Sequence
  Sense Oligo
gauguguguguauguuggg

SEQ ID NO: 24516 - RNA, 19 nt, Artificial Sequence
  Antisense Oligo
cccaacauacacacacauc

SEQ ID NO: 24517 - RNA, 19 nt, Artificial Sequence
  Sense Oligo
gugcuugugucauucccuu

SEQ ID NO: 24518 - RNA, 19 nt, Artificial Sequence
  Antisense Oligo
aagggaaugacacaagcac

SEQ ID NO: 24519 - RNA, 19 nt, Artificial Sequence
  Sense Oligo
ugcuugugucauucccuug

SEQ ID NO: 24520 - RNA, 19 nt, Artificial Sequence
  Antisense Oligo
caagggaaugacacaagca

SEQ ID NO: 24521 - RNA, 19 nt, Artificial Sequence
  Sense Oligo
uugugucauucccuuggag

SEQ ID NO: 24522 - RNA, 19 nt, Artificial Sequence
  Antisense Oligo
cuccaagggaaugacacaa

SEQ ID NO: 24523 - RNA, 19 nt, Artificial Sequence
  Sense Oligo
auaaucccuuccagagcag

SEQ ID NO: 24524 - RNA, 19 nt, Artificial Sequence
  Antisense Oligo
cugcucuggaagggauuau

SEQ ID NO: 24525 - RNA, 19 nt, Artificial Sequence
  Sense Oligo
aagccuggagcacauggga

SEQ ID NO: 24526 - RNA, 19 nt, Artificial Sequence
  Antisense Oligo
ucccaugugcuccaggcuu

SEQ ID NO: 24527 - RNA, 19 nt, Artificial Sequence
  Sense Oligo
agccuggagcacaugggau

SEQ ID NO: 24528 - RNA, 19 nt, Artificial Sequence
  Antisense Oligo
aucccaugugcuccaggcu

SEQ ID NO: 24529 - RNA, 19 nt, Artificial Sequence
  Sense Oligo
gccuggagcacaugggaug

SEQ ID NO: 24530 - RNA, 19 nt, Artificial Sequence
  Antisense Oligo
caucccaugugcuccaggc

SEQ ID NO: 24531 - RNA, 19 nt, Artificial Sequence
  Sense Oligo
ggagcacaugggaugcgga

SEQ ID NO: 24532 - RNA, 19 nt, Artificial Sequence
  Antisense Oligo
uccgcaucccaugugcucc

SEQ ID NO: 24533 - RNA, 19 nt, Artificial Sequence
  Sense Oligo
gagcacaugggaugcggaa

SEQ ID NO: 24534 - RNA, 19 nt, Artificial Sequence
  Antisense Oligo
uuccgcaucccaugugcuc

SEQ ID NO: 24535 - RNA, 19 nt, Artificial Sequence
  Sense Oligo
agcacaugggaugcggaag

SEQ ID NO: 24536 - RNA, 19 nt, Artificial Sequence
  Antisense Oligo
cuuccgcaucccaugugcu

SEQ ID NO: 24537 - RNA, 19 nt, Artificial Sequence
  Sense Oligo
gcacaugggaugcggaagg

SEQ ID NO: 24538 - RNA, 19 nt, Artificial Sequence
  Antisense Oligo
ccuuccgcaucccaugugc

SEQ ID NO: 24539 - RNA, 19 nt, Artificial Sequence
  Sense Oligo
cacaugggaugcggaaggu

SEQ ID NO: 24540 - RNA, 19 nt, Artificial Sequence
  Antisense Oligo
accuuccgcaucccaugug

SEQ ID NO: 24541 - RNA, 19 nt, Artificial Sequence
  Sense Oligo
acaugggaugcggaagguu

SEQ ID NO: 24542 - RNA, 19 nt, Artificial Sequence
  Antisense Oligo
aaccuuccgcaucccaugu

SEQ ID NO: 24543 - RNA, 19 nt, Artificial Sequence
  Sense Oligo
caugggaugcggaagguuu

SEQ ID NO: 24544 - RNA, 19 nt, Artificial Sequence
  Antisense Oligo
aaaccuuccgcaucccaug

SEQ ID NO: 24545 - RNA, 19 nt, Artificial Sequence
  Sense Oligo
ggaugcggaagguuugggu

SEQ ID NO: 24546 - RNA, 19 nt, Artificial Sequence
  Antisense Oligo
acccaaaccuuccgcaucc

SEQ ID NO: 24547 - RNA, 19 nt, Artificial Sequence
  Sense Oligo
gaugcggaagguuugggua

SEQ ID NO: 24548 - RNA, 19 nt, Artificial Sequence
  Antisense Oligo
uacccaaaccuuccgcauc

SEQ ID NO: 24549 - RNA, 19 nt, Artificial Sequence
  Sense Oligo
augcggaagguuuggguaa

SEQ ID NO: 24550 - RNA, 19 nt, Artificial Sequence
  Antisense Oligo
uuacccaaaccuuccgcau

SEQ ID NO: 24551 - RNA, 19 nt, Artificial Sequence
  Sense Oligo
ugcggaagguuuggguaac

SEQ ID NO: 24552 - RNA, 19 nt, Artificial Sequence
  Antisense Oligo
guuacccaaaccuuccgca

SEQ ID NO: 24553 - RNA, 19 nt, Artificial Sequence
  Sense Oligo
gcggaagguuuggguaacu

SEQ ID NO: 24554 - RNA, 19 nt, Artificial Sequence
  Antisense Oligo
aguuacccaaaccuuccgc

SEQ ID NO: 24555 - RNA, 19 nt, Artificial Sequence
  Sense Oligo
cggaagguuuggguaacuc

SEQ ID NO: 24556 - RNA, 19 nt, Artificial Sequence
  Antisense Oligo
gaguuacccaaaccuuccg

SEQ ID NO: 24557 - RNA, 19 nt, Artificial Sequence
  Sense Oligo
ggaagguuuggguaacucc

SEQ ID NO: 24558 - RNA, 19 nt, Artificial Sequence
  Antisense Oligo
ggaguuacccaaaccuucc

SEQ ID NO: 24559 - RNA, 19 nt, Artificial Sequence
  Sense Oligo
aagguuuggguaacucccu

SEQ ID NO: 24560 - RNA, 19 nt, Artificial Sequence
  Antisense Oligo
agggaguuacccaaaccuu

SEQ ID NO: 24561 - RNA, 19 nt, Artificial Sequence
  Sense Oligo
agguuuggguaacucccuu

SEQ ID NO: 24562 - RNA, 19 nt, Artificial Sequence
  Antisense Oligo
aagggaguuacccaaaccu

SEQ ID NO: 24563 - RNA, 19 nt, Artificial Sequence
  Sense Oligo
gguuuggguaacucccuuu

SEQ ID NO: 24564 - RNA, 19 nt, Artificial Sequence
  Antisense Oligo
aaagggaguuacccaaacc

SEQ ID NO: 24565 - RNA, 19 nt, Artificial Sequence
  Sense Oligo
guuuggguaacucccuuuu

SEQ ID NO: 24566 - RNA, 19 nt, Artificial Sequence
  Antisense Oligo
aaaagggaguuacccaaac

SEQ ID NO: 24567 - RNA, 19 nt, Artificial Sequence
  Sense Oligo
acggaugguguuccuugaa

SEQ ID NO: 24568 - RNA, 19 nt, Artificial Sequence
  Antisense Oligo
uucaaggaacaccauccgu

SEQ ID NO: 24569 - RNA, 19 nt, Artificial Sequence
  Sense Oligo
aagcuaagaauugaguuac

SEQ ID NO: 24570 - RNA, 19 nt, Artificial Sequence
  Antisense Oligo
guaacucaauucuuagcuu

SEQ ID NO: 24571 - RNA, 19 nt, Artificial Sequence
  Sense Oligo
agcuaagaauugaguuacu

SEQ ID NO: 24572 - RNA, 19 nt, Artificial Sequence
  Antisense Oligo
aguaacucaauucuuagcu

SEQ ID NO: 24573 - RNA, 19 nt, Artificial Sequence
  Sense Oligo
gcuaagaauugaguuacuu

SEQ ID NO: 24574 - RNA, 19 nt, Artificial Sequence
  Antisense Oligo
aaguaacucaauucuuagc

SEQ ID NO: 24575 - RNA, 19 nt, Artificial Sequence
  Sense Oligo
cuaagaauugaguuacuug

SEQ ID NO: 24576 - RNA, 19 nt, Artificial Sequence
  Antisense Oligo
caaguaacucaauucuuag

SEQ ID NO: 24577 - RNA, 19 nt, Artificial Sequence
  Sense Oligo
uaagaauugaguuacuugg

SEQ ID NO: 24578 - RNA, 19 nt, Artificial Sequence
  Antisense Oligo
ccaaguaacucaauucuua

SEQ ID NO: 24579 - RNA, 19 nt, Artificial Sequence
  Sense Oligo
aagaauugaguuacuuggg

SEQ ID NO: 24580 - RNA, 19 nt, Artificial Sequence
  Antisense Oligo
cccaaguaacucaauucuu

SEQ ID NO: 24581 - RNA, 19 nt, Artificial Sequence
  Sense Oligo
guuuccaugaauaaugagg

SEQ ID NO: 24582 - RNA, 19 nt, Artificial Sequence
  Antisense Oligo
ccucauuauucauggaaac

SEQ ID NO: 24583 - RNA, 19 nt, Artificial Sequence
  Sense Oligo
caugaauaaugaggaaucu

SEQ ID NO: 24584 - RNA, 19 nt, Artificial Sequence
  Antisense Oligo
agauuccucauuauucaug

SEQ ID NO: 24585 - RNA, 19 nt, Artificial Sequence
  Sense Oligo
ugaauaaugaggaaucuag

SEQ ID NO: 24586 - RNA, 19 nt, Artificial Sequence
  Antisense Oligo
cuagauuccucauuauuca

SEQ ID NO: 24587 - RNA, 19 nt, Artificial Sequence
  Sense Oligo
gaauaaugaggaaucuaga

SEQ ID NO: 24588 - RNA, 19 nt, Artificial Sequence
  Antisense Oligo
ucuagauuccucauuauuc

SEQ ID NO: 24589 - RNA, 19 nt, Artificial Sequence
  Sense Oligo
gaagaccucagugcaggcu

SEQ ID NO: 24590 - RNA, 19 nt, Artificial Sequence
  Antisense Oligo
agccugcacugaggucuuc

SEQ ID NO: 24591 - RNA, 19 nt, Artificial Sequence
  Sense Oligo
aagaccucagugcaggcug

SEQ ID NO: 24592 - RNA, 19 nt, Artificial Sequence
  Antisense Oligo
cagccugcacugaggucuu

SEQ ID NO: 24593 - RNA, 19 nt, Artificial Sequence
  Sense Oligo
agaccucagugcaggcugg

SEQ ID NO: 24594 - RNA, 19 nt, Artificial Sequence
  Antisense Oligo
ccagccugcacugaggucu

SEQ ID NO: 24595 - RNA, 19 nt, Artificial Sequence
  Sense Oligo
accucagugcaggcuggaa

SEQ ID NO: 24596 - RNA, 19 nt, Artificial Sequence
  Antisense Oligo
uuccagccugcacugaggu

SEQ ID NO: 24597 - RNA, 19 nt, Artificial Sequence
  Sense Oligo
ccucagugcaggcuggaag

SEQ ID NO: 24598 - RNA, 19 nt, Artificial Sequence
  Antisense Oligo
cuuccagccugcacugagg

SEQ ID NO: 24599 - RNA, 19 nt, Artificial Sequence
  Sense Oligo
cucagugcaggcuggaagg

SEQ ID NO: 24600 - RNA, 19 nt, Artificial Sequence
  Antisense Oligo
ccuuccagccugcacugag

SEQ ID NO: 24601 - RNA, 19 nt, Artificial Sequence
  Sense Oligo
ucagugcaggcuggaagga

SEQ ID NO: 24602 - RNA, 19 nt, Artificial Sequence
  Antisense Oligo
uccuuccagccugcacuga

SEQ ID NO: 24603 - RNA, 19 nt, Artificial Sequence
  Sense Oligo
cagugcaggcuggaaggaa

SEQ ID NO: 24604 - RNA, 19 nt, Artificial Sequence
  Antisense Oligo
uuccuuccagccugcacug

SEQ ID NO: 24605 - RNA, 19 nt, Artificial Sequence
  Sense Oligo
agugcaggcuggaaggaag

SEQ ID NO: 24606 - RNA, 19 nt, Artificial Sequence
  Antisense Oligo
cuuccuuccagccugcacu

SEQ ID NO: 24607 - RNA, 19 nt, Artificial Sequence
  Sense Oligo
gugcaggcuggaaggaagg

SEQ ID NO: 24608 - RNA, 19 nt, Artificial Sequence
  Antisense Oligo
ccuuccuuccagccugcac

SEQ ID NO: 24609 - RNA, 19 nt, Artificial Sequence
  Sense Oligo
gcaggcuggaaggaaggcu

SEQ ID NO: 24610 - RNA, 19 nt, Artificial Sequence
  Antisense Oligo
agccuuccuuccagccugc

SEQ ID NO: 24611 - RNA, 19 nt, Artificial Sequence
  Sense Oligo
caggcuggaaggaaggcug

SEQ ID NO: 24612 - RNA, 19 nt, Artificial Sequence
  Antisense Oligo
cagccuuccuuccagccug

SEQ ID NO: 24613 - RNA, 19 nt, Artificial Sequence
  Sense Oligo
ggcuggaaggaaggcugag

SEQ ID NO: 24614 - RNA, 19 nt, Artificial Sequence
  Antisense Oligo
cucagccuuccuuccagcc

SEQ ID NO: 24615 - RNA, 19 nt, Artificial Sequence
  Sense Oligo
gaaggaaggcugagugugg

SEQ ID NO: 24616 - RNA, 19 nt, Artificial Sequence
  Antisense Oligo
ccacacucagccuuccuuc

SEQ ID NO: 24617 - RNA, 19 nt, Artificial Sequence
  Sense Oligo
aaggaaggcugaguguggg

SEQ ID NO: 24618 - RNA, 19 nt, Artificial Sequence
  Antisense Oligo
cccacacucagccuuccuu

SEQ ID NO: 24619 - RNA, 19 nt, Artificial Sequence
  Sense Oligo
ggcugagugugggaggagu

SEQ ID NO: 24620 - RNA, 19 nt, Artificial Sequence
  Antisense Oligo
acuccucccacacucagcc

SEQ ID NO: 24621 - RNA, 19 nt, Artificial Sequence
  Sense Oligo
cugagugugggaggagugu

SEQ ID NO: 24622 - RNA, 19 nt, Artificial Sequence
  Antisense Oligo
acacuccucccacacucag

SEQ ID NO: 24623 - RNA, 19 nt, Artificial Sequence
  Sense Oligo
ugagugugggaggaguguc

SEQ ID NO: 24624 - RNA, 19 nt, Artificial Sequence
  Antisense Oligo
gacacuccucccacacuca

SEQ ID NO: 24625 - RNA, 19 nt, Artificial Sequence
  Sense Oligo
gagugugggaggagugucc

SEQ ID NO: 24626 - RNA, 19 nt, Artificial Sequence
  Antisense Oligo
ggacacuccucccacacuc

SEQ ID NO: 24627 - RNA, 19 nt, Artificial Sequence
  Sense Oligo
acucagggccagucuacag

SEQ ID NO: 24628 - RNA, 19 nt, Artificial Sequence
  Antisense Oligo
cuguagacuggcccugagu

SEQ ID NO: 24629 - RNA, 19 nt, Artificial Sequence
  Sense Oligo
cucagggccagucuacaga

SEQ ID NO: 24630 - RNA, 19 nt, Artificial Sequence
  Antisense Oligo
ucuguagacuggcccugag

SEQ ID NO: 24631 - RNA, 19 nt, Artificial Sequence
  Sense Oligo
cuccuuugcccaggcugga

SEQ ID NO: 24632 - RNA, 19 nt, Artificial Sequence
  Antisense Oligo
uccagccugggcaaaggag

SEQ ID NO: 24633 - RNA, 19 nt, Artificial Sequence
  Sense Oligo
uccuuugcccaggcuggag

SEQ ID NO: 24634 - RNA, 19 nt, Artificial Sequence
  Antisense Oligo
cuccagccugggcaaagga

SEQ ID NO: 24635 - RNA, 19 nt, Artificial Sequence
  Sense Oligo
uugcccaggcuggagugca

SEQ ID NO: 24636 - RNA, 19 nt, Artificial Sequence
  Antisense Oligo
ugcacuccagccugggcaa

SEQ ID NO: 24637 - RNA, 19 nt, Artificial Sequence
  Sense Oligo
gcgccaucucagcucaacu

SEQ ID NO: 24638 - RNA, 19 nt, Artificial Sequence
  Antisense Oligo
aguugagcugagauggcgc

SEQ ID NO: 24639 - RNA, 19 nt, Artificial Sequence
  Sense Oligo
cgccaucucagcucaacug

SEQ ID NO: 24640 - RNA, 19 nt, Artificial Sequence
  Antisense Oligo
caguugagcugagauggcg

SEQ ID NO: 24641 - RNA, 19 nt, Artificial Sequence
  Sense Oligo
gccaucucagcucaacugc

SEQ ID NO: 24642 - RNA, 19 nt, Artificial Sequence
  Antisense Oligo
gcaguugagcugagauggc

SEQ ID NO: 24643 - RNA, 19 nt, Artificial Sequence
  Sense Oligo
ccaccacgccuggcuaauu

SEQ ID NO: 24644 - RNA, 19 nt, Artificial Sequence
  Antisense Oligo
aauuagccaggcguggugg

SEQ ID NO: 24645 - RNA, 19 nt, Artificial Sequence
  Sense Oligo
caccacgccuggcuaauuu

SEQ ID NO: 24646 - RNA, 19 nt, Artificial Sequence
  Antisense Oligo
aaauuagccaggcguggug

SEQ ID NO: 24647 - RNA, 19 nt, Artificial Sequence
  Sense Oligo
accacgccuggcuaauuuu

SEQ ID NO: 24648 - RNA, 19 nt, Artificial Sequence
  Antisense Oligo
aaaauuagccaggcguggu

SEQ ID NO: 24649 - RNA, 19 nt, Artificial Sequence
  Sense Oligo
ggguuucaccauguuggcc

SEQ ID NO: 24650 - RNA, 19 nt, Artificial Sequence
  Antisense Oligo
ggccaacauggugaaaccc

SEQ ID NO: 24651 - RNA, 19 nt, Artificial Sequence
  Sense Oligo
gguuucaccauguuggcca

SEQ ID NO: 24652 - RNA, 19 nt, Artificial Sequence
  Antisense Oligo
uggccaacauggugaaacc

SEQ ID NO: 24653 - RNA, 19 nt, Artificial Sequence
  Sense Oligo
guuucaccauguuggccag

SEQ ID NO: 24654 - RNA, 19 nt, Artificial Sequence
  Antisense Oligo
cuggccaacauggugaaac

SEQ ID NO: 24655 - RNA, 19 nt, Artificial Sequence
  Sense Oligo
caccauguuggccaggaug

SEQ ID NO: 24656 - RNA, 19 nt, Artificial Sequence
  Antisense Oligo
cauccuggccaacauggug

SEQ ID NO: 24657 - RNA, 19 nt, Artificial Sequence
  Sense Oligo
cauguuggccaggaugguc

SEQ ID NO: 24658 - RNA, 19 nt, Artificial Sequence
  Antisense Oligo
gaccauccuggccaacaug

SEQ ID NO: 24659 - RNA, 19 nt, Artificial Sequence
  Sense Oligo
auguuggccaggauggucu

SEQ ID NO: 24660 - RNA, 19 nt, Artificial Sequence
  Antisense Oligo
agaccauccuggccaacau

SEQ ID NO: 24661 - RNA, 19 nt, Artificial Sequence
  Sense Oligo
uguuggccaggauggucuc

SEQ ID NO: 24662 - RNA, 19 nt, Artificial Sequence
  Antisense Oligo
gagaccauccuggccaaca

SEQ ID NO: 24663 - RNA, 19 nt, Artificial Sequence
  Sense Oligo
guuggccaggauggucucg

SEQ ID NO: 24664 - RNA, 19 nt, Artificial Sequence
  Antisense Oligo
cgagaccauccuggccaac

SEQ ID NO: 24665 - RNA, 19 nt, Artificial Sequence
  Sense Oligo
uuggccaggauggucucga

SEQ ID NO: 24666 - RNA, 19 nt, Artificial Sequence
  Antisense Oligo
ucgagaccauccuggccaa

SEQ ID NO: 24667 - RNA, 19 nt, Artificial Sequence
  Sense Oligo
uggccaggauggucucgau

SEQ ID NO: 24668 - RNA, 19 nt, Artificial Sequence
  Antisense Oligo
aucgagaccauccuggcca

SEQ ID NO: 24669 - RNA, 19 nt, Artificial Sequence
  Sense Oligo
caggauggucucgaucucc

SEQ ID NO: 24670 - RNA, 19 nt, Artificial Sequence
  Antisense Oligo
ggagaucgagaccauccug

SEQ ID NO: 24671 - RNA, 19 nt, Artificial Sequence
  Sense Oligo
ggauggucucgaucuccug

SEQ ID NO: 24672 - RNA, 19 nt, Artificial Sequence
  Antisense Oligo
caggagaucgagaccaucc

SEQ ID NO: 24673 - RNA, 19 nt, Artificial Sequence
  Sense Oligo
gauggucucgaucuccuga

SEQ ID NO: 24674 - RNA, 19 nt, Artificial Sequence
  Antisense Oligo
ucaggagaucgagaccauc

SEQ ID NO: 24675 - RNA, 19 nt, Artificial Sequence
  Sense Oligo
auggucucgaucuccugac

SEQ ID NO: 24676 - RNA, 19 nt, Artificial Sequence
  Antisense Oligo
gucaggagaucgagaccau

SEQ ID NO: 24677 - RNA, 19 nt, Artificial Sequence
  Sense Oligo
cucgaucuccugaccuugu

SEQ ID NO: 24678 - RNA, 19 nt, Artificial Sequence
  Antisense Oligo
acaaggucaggagaucgag

SEQ ID NO: 24679 - RNA, 19 nt, Artificial Sequence
  Sense Oligo
ucgaucuccugaccuugug

SEQ ID NO: 24680 - RNA, 19 nt, Artificial Sequence
  Antisense Oligo
cacaaggucaggagaucga

SEQ ID NO: 24681 - RNA, 19 nt, Artificial Sequence
  Sense Oligo
ucuccugaccuugugaucc

SEQ ID NO: 24682 - RNA, 19 nt, Artificial Sequence
  Antisense Oligo
ggaucacaaggucaggaga

SEQ ID NO: 24683 - RNA, 19 nt, Artificial Sequence
  Sense Oligo
cuccugaccuugugaucca

SEQ ID NO: 24684 - RNA, 19 nt, Artificial Sequence
  Antisense Oligo
uggaucacaaggucaggag

SEQ ID NO: 24685 - RNA, 19 nt, Artificial Sequence
  Sense Oligo
uccugaccuugugauccac

SEQ ID NO: 24686 - RNA, 19 nt, Artificial Sequence
  Antisense Oligo
guggaucacaaggucagga

SEQ ID NO: 24687 - RNA, 19 nt, Artificial Sequence
  Sense Oligo
ccugaccuugugauccacc

SEQ ID NO: 24688 - RNA, 19 nt, Artificial Sequence
  Antisense Oligo
gguggaucacaaggucagg

SEQ ID NO: 24689 - RNA, 19 nt, Artificial Sequence
  Sense Oligo
cagaauguugggauuacag

SEQ ID NO: 24690 - RNA, 19 nt, Artificial Sequence
  Antisense Oligo
cuguaaucccaacauucug

SEQ ID NO: 24691 - RNA, 19 nt, Artificial Sequence
  Sense Oligo
auguugggauuacaggcgu

SEQ ID NO: 24692 - RNA, 19 nt, Artificial Sequence
  Antisense Oligo
acgccuguaaucccaacau

SEQ ID NO: 24693 - RNA, 19 nt, Artificial Sequence
  Sense Oligo
uguugggauuacaggcgug

SEQ ID NO: 24694 - RNA, 19 nt, Artificial Sequence
  Antisense Oligo
cacgccuguaaucccaaca

SEQ ID NO: 24695 - RNA, 19 nt, Artificial Sequence
  Sense Oligo
guugggauuacaggcguga

SEQ ID NO: 24696 - RNA, 19 nt, Artificial Sequence
  Antisense Oligo
ucacgccuguaaucccaac

SEQ ID NO: 24697 - RNA, 19 nt, Artificial Sequence
  Sense Oligo
uugggauuacaggcgugag

SEQ ID NO: 24698 - RNA, 19 nt, Artificial Sequence
  Antisense Oligo
cucacgccuguaaucccaa

SEQ ID NO: 24699 - RNA, 19 nt, Artificial Sequence
  Sense Oligo
ugggauuacaggcgugagc

SEQ ID NO: 24700 - RNA, 19 nt, Artificial Sequence
  Antisense Oligo
gcucacgccuguaauccca

SEQ ID NO: 24701 - RNA, 19 nt, Artificial Sequence
  Sense Oligo
auuacaggcgugagccacc

SEQ ID NO: 24702 - RNA, 19 nt, Artificial Sequence
  Antisense Oligo
gguggcucacgccuguaau

SEQ ID NO: 24703 - RNA, 19 nt, Artificial Sequence
  Sense Oligo
uuacaggcgugagccacca

SEQ ID NO: 24704 - RNA, 19 nt, Artificial Sequence
  Antisense Oligo
ugguggcucacgccuguaa

SEQ ID NO: 24705 - RNA, 19 nt, Artificial Sequence
  Sense Oligo
uacaggcgugagccaccau

SEQ ID NO: 24706 - RNA, 19 nt, Artificial Sequence
  Antisense Oligo
augguggcucacgccugua

SEQ ID NO: 24707 - RNA, 19 nt, Artificial Sequence
  Sense Oligo
acaggcgugagccaccaug

SEQ ID NO: 24708 - RNA, 19 nt, Artificial Sequence
  Antisense Oligo
caugguggcucacgccugu

SEQ ID NO: 24709 - RNA, 19 nt, Artificial Sequence
  Sense Oligo
uucuuuuccauguuuuggc

SEQ ID NO: 24710 - RNA, 19 nt, Artificial Sequence
  Antisense Oligo
gccaaaacauggaaaagaa

SEQ ID NO: 24711 - RNA, 19 nt, Artificial Sequence
  Sense Oligo
ucuuuuccauguuuuggcu

SEQ ID NO: 24712 - RNA, 19 nt, Artificial Sequence
  Antisense Oligo
agccaaaacauggaaaaga

SEQ ID NO: 24713 - RNA, 19 nt, Artificial Sequence
  Sense Oligo
cuuuuccauguuuuggcug

SEQ ID NO: 24714 - RNA, 19 nt, Artificial Sequence
  Antisense Oligo
cagccaaaacauggaaaag

SEQ ID NO: 24715 - RNA, 19 nt, Artificial Sequence
  Sense Oligo
cauguuuuggcuguaggug

SEQ ID NO: 24716 - RNA, 19 nt, Artificial Sequence
  Antisense Oligo
caccuacagccaaaacaug

SEQ ID NO: 24717 - RNA, 19 nt, Artificial Sequence
  Sense Oligo
auguuuuggcuguaggugu

SEQ ID NO: 24718 - RNA, 19 nt, Artificial Sequence
  Antisense Oligo
acaccuacagccaaaacau

SEQ ID NO: 24719 - RNA, 19 nt, Artificial Sequence
  Sense Oligo
guuuuggcuguagguguuu

SEQ ID NO: 24720 - RNA, 19 nt, Artificial Sequence
  Antisense Oligo
aaacaccuacagccaaaac

SEQ ID NO: 24721 - RNA, 19 nt, Artificial Sequence
  Sense Oligo
uuuuggcuguagguguuua

SEQ ID NO: 24722 - RNA, 19 nt, Artificial Sequence
  Antisense Oligo
uaaacaccuacagccaaaa

SEQ ID NO: 24723 - RNA, 19 nt, Artificial Sequence
  Sense Oligo
uuuggcuguagguguuuaa

SEQ ID NO: 24724 - RNA, 19 nt, Artificial Sequence
  Antisense Oligo
uuaaacaccuacagccaaa

SEQ ID NO: 24725 - RNA, 19 nt, Artificial Sequence
  Sense Oligo
uuggcuguagguguuuaag

SEQ ID NO: 24726 - RNA, 19 nt, Artificial Sequence
  Antisense Oligo
cuuaaacaccuacagccaa

SEQ ID NO: 24727 - RNA, 19 nt, Artificial Sequence
  Sense Oligo
uggcuguagguguuuaagg

SEQ ID NO: 24728 - RNA, 19 nt, Artificial Sequence
  Antisense Oligo
ccuuaaacaccuacagcca

SEQ ID NO: 24729 - RNA, 19 nt, Artificial Sequence
  Sense Oligo
ggcuguagguguuuaagga

SEQ ID NO: 24730 - RNA, 19 nt, Artificial Sequence
  Antisense Oligo
uccuuaaacaccuacagcc

SEQ ID NO: 24731 - RNA, 19 nt, Artificial Sequence
  Sense Oligo
gcuguagguguuuaaggaa

SEQ ID NO: 24732 - RNA, 19 nt, Artificial Sequence
  Antisense Oligo
uuccuuaaacaccuacagc

SEQ ID NO: 24733 - RNA, 19 nt, Artificial Sequence
  Sense Oligo
ucgcuccuguugccaagcu

SEQ ID NO: 24734 - RNA, 19 nt, Artificial Sequence
  Antisense Oligo
agcuuggcaacaggagcga

SEQ ID NO: 24735 - RNA, 19 nt, Artificial Sequence
  Sense Oligo
cgcuccuguugccaagcua

SEQ ID NO: 24736 - RNA, 19 nt, Artificial Sequence
  Antisense Oligo
uagcuuggcaacaggagcg

SEQ ID NO: 24737 - RNA, 19 nt, Artificial Sequence
  Sense Oligo
gcuccuguugccaagcuag

SEQ ID NO: 24738 - RNA, 19 nt, Artificial Sequence
  Antisense Oligo
cuagcuuggcaacaggagc

SEQ ID NO: 24739 - RNA, 19 nt, Artificial Sequence
  Sense Oligo
cuccuguugccaagcuagg

SEQ ID NO: 24740 - RNA, 19 nt, Artificial Sequence
  Antisense Oligo
ccuagcuuggcaacaggag

SEQ ID NO: 24741 - RNA, 19 nt, Artificial Sequence
  Sense Oligo
uccuguugccaagcuaggg

SEQ ID NO: 24742 - RNA, 19 nt, Artificial Sequence
  Antisense Oligo
cccuagcuuggcaacagga

SEQ ID NO: 24743 - RNA, 19 nt, Artificial Sequence
  Sense Oligo
ccuguugccaagcuagggu

SEQ ID NO: 24744 - RNA, 19 nt, Artificial Sequence
  Antisense Oligo
acccuagcuuggcaacagg

SEQ ID NO: 24745 - RNA, 19 nt, Artificial Sequence
  Sense Oligo
ucacagcaaccuccaccuc

SEQ ID NO: 24746 - RNA, 19 nt, Artificial Sequence
  Antisense Oligo
gagguggagguugcuguga

SEQ ID NO: 24747 - RNA, 19 nt, Artificial Sequence
  Sense Oligo
cacagcaaccuccaccucc

SEQ ID NO: 24748 - RNA, 19 nt, Artificial Sequence
  Antisense Oligo
ggagguggagguugcugug

SEQ ID NO: 24749 - RNA, 19 nt, Artificial Sequence
  Sense Oligo
acagcaaccuccaccuccc

SEQ ID NO: 24750 - RNA, 19 nt, Artificial Sequence
  Antisense Oligo
gggagguggagguugcugu

SEQ ID NO: 24751 - RNA, 19 nt, Artificial Sequence
  Sense Oligo
ccggguucaagcgauucuc

SEQ ID NO: 24752 - RNA, 19 nt, Artificial Sequence
  Antisense Oligo
gagaaucgcuugaacccgg

SEQ ID NO: 24753 - RNA, 19 nt, Artificial Sequence
  Sense Oligo
cggguucaagcgauucucc

SEQ ID NO: 24754 - RNA, 19 nt, Artificial Sequence
  Antisense Oligo
ggagaaucgcuugaacccg

SEQ ID NO: 24755 - RNA, 19 nt, Artificial Sequence
  Sense Oligo
ggguucaagcgauucuccu

SEQ ID NO: 24756 - RNA, 19 nt, Artificial Sequence
  Antisense Oligo
aggagaaucgcuugaaccc

SEQ ID NO: 24757 - RNA, 19 nt, Artificial Sequence
  Sense Oligo
gguucaagcgauucuccug

SEQ ID NO: 24758 - RNA, 19 nt, Artificial Sequence
  Antisense Oligo
caggagaaucgcuugaacc

SEQ ID NO: 24759 - RNA, 19 nt, Artificial Sequence
  Sense Oligo
guucaagcgauucuccugc

SEQ ID NO: 24760 - RNA, 19 nt, Artificial Sequence
  Antisense Oligo
gcaggagaaucgcuugaac

SEQ ID NO: 24761 - RNA, 19 nt, Artificial Sequence
  Sense Oligo
uucaagcgauucuccugcc

SEQ ID NO: 24762 - RNA, 19 nt, Artificial Sequence
  Antisense Oligo
ggcaggagaaucgcuugaa

SEQ ID NO: 24763 - RNA, 19 nt, Artificial Sequence
  Sense Oligo
ucaagcgauucuccugccu

SEQ ID NO: 24764 - RNA, 19 nt, Artificial Sequence
  Antisense Oligo
aggcaggagaaucgcuuga

SEQ ID NO: 24765 - RNA, 19 nt, Artificial Sequence
  Sense Oligo
ugccucagccucccagcua

SEQ ID NO: 24766 - RNA, 19 nt, Artificial Sequence
  Antisense Oligo
uagcugggaggcugaggca

SEQ ID NO: 24767 - RNA, 19 nt, Artificial Sequence
  Sense Oligo
cagcuagcugggauuacag

SEQ ID NO: 24768 - RNA, 19 nt, Artificial Sequence
  Antisense Oligo
cuguaaucccagcuagcug

SEQ ID NO: 24769 - RNA, 19 nt, Artificial Sequence
  Sense Oligo
cugggauuacaggcaugca

SEQ ID NO: 24770 - RNA, 19 nt, Artificial Sequence
  Antisense Oligo
ugcaugccuguaaucccag

SEQ ID NO: 24771 - RNA, 19 nt, Artificial Sequence
  Sense Oligo
ugggauuacaggcaugcac

SEQ ID NO: 24772 - RNA, 19 nt, Artificial Sequence
  Antisense Oligo
gugcaugccuguaauccca

SEQ ID NO: 24773 - RNA, 19 nt, Artificial Sequence
  Sense Oligo
gggauuacaggcaugcacc

SEQ ID NO: 24774 - RNA, 19 nt, Artificial Sequence
  Antisense Oligo
ggugcaugccuguaauccc

SEQ ID NO: 24775 - RNA, 19 nt, Artificial Sequence
  Sense Oligo
ggauuacaggcaugcacca

SEQ ID NO: 24776 - RNA, 19 nt, Artificial Sequence
  Antisense Oligo
uggugcaugccuguaaucc

SEQ ID NO: 24777 - RNA, 19 nt, Artificial Sequence
  Sense Oligo
gauuacaggcaugcaccac

SEQ ID NO: 24778 - RNA, 19 nt, Artificial Sequence
  Antisense Oligo
guggugcaugccuguaauc

SEQ ID NO: 24779 - RNA, 19 nt, Artificial Sequence
  Sense Oligo
ggguuucuccauguugguc

SEQ ID NO: 24780 - RNA, 19 nt, Artificial Sequence
  Antisense Oligo
gaccaacauggagaaaccc

SEQ ID NO: 24781 - RNA, 19 nt, Artificial Sequence
  Sense Oligo
gguuucuccauguugguca

SEQ ID NO: 24782 - RNA, 19 nt, Artificial Sequence
  Antisense Oligo
ugaccaacauggagaaacc

SEQ ID NO: 24783 - RNA, 19 nt, Artificial Sequence
  Sense Oligo
guuucuccauguuggucag

SEQ ID NO: 24784 - RNA, 19 nt, Artificial Sequence
  Antisense Oligo
cugaccaacauggagaaac

SEQ ID NO: 24785 - RNA, 19 nt, Artificial Sequence
  Sense Oligo
uuucuccauguuggucagg

SEQ ID NO: 24786 - RNA, 19 nt, Artificial Sequence
  Antisense Oligo
ccugaccaacauggagaaa

SEQ ID NO: 24787 - RNA, 19 nt, Artificial Sequence
  Sense Oligo
uucuccauguuggucaggc

SEQ ID NO: 24788 - RNA, 19 nt, Artificial Sequence
  Antisense Oligo
gccugaccaacauggagaa

SEQ ID NO: 24789 - RNA, 19 nt, Artificial Sequence
  Sense Oligo
ucuccauguuggucaggcu

SEQ ID NO: 24790 - RNA, 19 nt, Artificial Sequence
  Antisense Oligo
agccugaccaacauggaga

SEQ ID NO: 24791 - RNA, 19 nt, Artificial Sequence
  Sense Oligo
cuccauguuggucaggcug

SEQ ID NO: 24792 - RNA, 19 nt, Artificial Sequence
  Antisense Oligo
cagccugaccaacauggag

SEQ ID NO: 24793 - RNA, 19 nt, Artificial Sequence
  Sense Oligo
uccauguuggucaggcugg

SEQ ID NO: 24794 - RNA, 19 nt, Artificial Sequence
  Antisense Oligo
ccagccugaccaacaugga

SEQ ID NO: 24795 - RNA, 19 nt, Artificial Sequence
  Sense Oligo
ccauguuggucaggcuggu

SEQ ID NO: 24796 - RNA, 19 nt, Artificial Sequence
  Antisense Oligo
accagccugaccaacaugg

SEQ ID NO: 24797 - RNA, 19 nt, Artificial Sequence
  Sense Oligo
cauguuggucaggcugguc

SEQ ID NO: 24798 - RNA, 19 nt, Artificial Sequence
  Antisense Oligo
gaccagccugaccaacaug

SEQ ID NO: 24799 - RNA, 19 nt, Artificial Sequence
  Sense Oligo
auguuggucaggcuggucu

SEQ ID NO: 24800 - RNA, 19 nt, Artificial Sequence
  Antisense Oligo
agaccagccugaccaacau

SEQ ID NO: 24801 - RNA, 19 nt, Artificial Sequence
  Sense Oligo
uguuggucaggcuggucuu

SEQ ID NO: 24802 - RNA, 19 nt, Artificial Sequence
  Antisense Oligo
aagaccagccugaccaaca

SEQ ID NO: 24803 - RNA, 19 nt, Artificial Sequence
  Sense Oligo
guuggucaggcuggucuug

SEQ ID NO: 24804 - RNA, 19 nt, Artificial Sequence
  Antisense Oligo
caagaccagccugaccaac

SEQ ID NO: 24805 - RNA, 19 nt, Artificial Sequence
  Sense Oligo
uuggucaggcuggucuuga

SEQ ID NO: 24806 - RNA, 19 nt, Artificial Sequence
  Antisense Oligo
ucaagaccagccugaccaa

SEQ ID NO: 24807 - RNA, 19 nt, Artificial Sequence
  Sense Oligo
uggucaggcuggucuugaa

SEQ ID NO: 24808 - RNA, 19 nt, Artificial Sequence
  Antisense Oligo
uucaagaccagccugacca

SEQ ID NO: 24809 - RNA, 19 nt, Artificial Sequence
  Sense Oligo
ccucagccucccaaagugc

SEQ ID NO: 24810 - RNA, 19 nt, Artificial Sequence
  Antisense Oligo
gcacuuugggaggcugagg

SEQ ID NO: 24811 - RNA, 19 nt, Artificial Sequence
  Sense Oligo
cucagccucccaaagugcu

SEQ ID NO: 24812 - RNA, 19 nt, Artificial Sequence
  Antisense Oligo
agcacuuugggaggcugag

SEQ ID NO: 24813 - RNA, 19 nt, Artificial Sequence
  Sense Oligo
caccacgccugcccuauuu

SEQ ID NO: 24814 - RNA, 19 nt, Artificial Sequence
  Antisense Oligo
aaauagggcaggcguggug

SEQ ID NO: 24815 - RNA, 19 nt, Artificial Sequence
  Sense Oligo
accacgccugcccuauuuu

SEQ ID NO: 24816 - RNA, 19 nt, Artificial Sequence
  Antisense Oligo
aaaauagggcaggcguggu

SEQ ID NO: 24817 - RNA, 19 nt, Artificial Sequence
  Sense Oligo
uguaaaauguagaguugac

SEQ ID NO: 24818 - RNA, 19 nt, Artificial Sequence
  Antisense Oligo
gucaacucuacauuuuaca

SEQ ID NO: 24819 - RNA, 19 nt, Artificial Sequence
  Sense Oligo
uaaaauguagaguugacac

SEQ ID NO: 24820 - RNA, 19 nt, Artificial Sequence
  Antisense Oligo
gugucaacucuacauuuua

SEQ ID NO: 24821 - RNA, 19 nt, Artificial Sequence
  Sense Oligo
augaagacauuuucuaggg

SEQ ID NO: 24822 - RNA, 19 nt, Artificial Sequence
  Antisense Oligo
cccuagaaaaugucuucau

SEQ ID NO: 24823 - RNA, 19 nt, Artificial Sequence
  Sense Oligo
ugaagacauuuucuaggga

SEQ ID NO: 24824 - RNA, 19 nt, Artificial Sequence
  Antisense Oligo
ucccuagaaaaugucuuca

SEQ ID NO: 24825 - RNA, 19 nt, Artificial Sequence
  Sense Oligo
gaagacauuuucuagggaa

SEQ ID NO: 24826 - RNA, 19 nt, Artificial Sequence
  Antisense Oligo
uucccuagaaaaugucuuc

SEQ ID NO: 24827 - RNA, 19 nt, Artificial Sequence
  Sense Oligo
agacauuuucuagggaauc

SEQ ID NO: 24828 - RNA, 19 nt, Artificial Sequence
  Antisense Oligo
gauucccuagaaaaugucu

SEQ ID NO: 24829 - RNA, 19 nt, Artificial Sequence
  Sense Oligo
gacauuuucuagggaaucu

SEQ ID NO: 24830 - RNA, 19 nt, Artificial Sequence
  Antisense Oligo
agauucccuagaaaauguc

SEQ ID NO: 24831 - RNA, 19 nt, Artificial Sequence
  Sense Oligo
acauuuucuagggaaucuu

SEQ ID NO: 24832 - RNA, 19 nt, Artificial Sequence
  Antisense Oligo
aagauucccuagaaaaugu

SEQ ID NO: 24833 - RNA, 19 nt, Artificial Sequence
  Sense Oligo
cauuuucuagggaaucuug

SEQ ID NO: 24834 - RNA, 19 nt, Artificial Sequence
  Antisense Oligo
caagauucccuagaaaaug

SEQ ID NO: 24835 - RNA, 19 nt, Artificial Sequence
  Sense Oligo
auuuucuagggaaucuuga

SEQ ID NO: 24836 - RNA, 19 nt, Artificial Sequence
  Antisense Oligo
ucaagauucccuagaaaau

SEQ ID NO: 24837 - RNA, 19 nt, Artificial Sequence
  Sense Oligo
uuuucuagggaaucuugaa

SEQ ID NO: 24838 - RNA, 19 nt, Artificial Sequence
  Antisense Oligo
uucaagauucccuagaaaa

SEQ ID NO: 24839 - RNA, 19 nt, Artificial Sequence
  Sense Oligo
guguuguacaguguuggug

SEQ ID NO: 24840 - RNA, 19 nt, Artificial Sequence
  Antisense Oligo
caccaacacuguacaacac

SEQ ID NO: 24841 - RNA, 19 nt, Artificial Sequence
  Sense Oligo
acgcugcagccguuaagga

SEQ ID NO: 24842 - RNA, 19 nt, Artificial Sequence
  Antisense Oligo
uccuuaacggcugcagcgu

SEQ ID NO: 24843 - RNA, 19 nt, Artificial Sequence
  Sense Oligo
cgcugcagccguuaaggaa

SEQ ID NO: 24844 - RNA, 19 nt, Artificial Sequence
  Antisense Oligo
uuccuuaacggcugcagcg

SEQ ID NO: 24845 - RNA, 19 nt, Artificial Sequence
  Sense Oligo
gcugcagccguuaaggaag

SEQ ID NO: 24846 - RNA, 19 nt, Artificial Sequence
  Antisense Oligo
cuuccuuaacggcugcagc

SEQ ID NO: 24847 - RNA, 19 nt, Artificial Sequence
  Sense Oligo
cugcagccguuaaggaagc

SEQ ID NO: 24848 - RNA, 19 nt, Artificial Sequence
  Antisense Oligo
gcuuccuuaacggcugcag

SEQ ID NO: 24849 - RNA, 19 nt, Artificial Sequence
  Sense Oligo
ugcagccguuaaggaagca

SEQ ID NO: 24850 - RNA, 19 nt, Artificial Sequence
  Antisense Oligo
ugcuuccuuaacggcugca

SEQ ID NO: 24851 - RNA, 19 nt, Artificial Sequence
  Sense Oligo
caaggcaguugauccaaaa

SEQ ID NO: 24852 - RNA, 19 nt, Artificial Sequence
  Antisense Oligo
uuuuggaucaacugccuug

SEQ ID NO: 24853 - RNA, 19 nt, Artificial Sequence
  Sense Oligo
aaggcaguugauccaaaag

SEQ ID NO: 24854 - RNA, 19 nt, Artificial Sequence
  Antisense Oligo
cuuuuggaucaacugccuu

SEQ ID NO: 24855 - RNA, 19 nt, Artificial Sequence
  Sense Oligo
aggcaguugauccaaaagu

SEQ ID NO: 24856 - RNA, 19 nt, Artificial Sequence
  Antisense Oligo
acuuuuggaucaacugccu

SEQ ID NO: 24857 - RNA, 19 nt, Artificial Sequence
  Sense Oligo
ggcaguugauccaaaaguu

SEQ ID NO: 24858 - RNA, 19 nt, Artificial Sequence
  Antisense Oligo
aacuuuuggaucaacugcc

SEQ ID NO: 24859 - RNA, 19 nt, Artificial Sequence
  Sense Oligo
gcaguugauccaaaaguua

SEQ ID NO: 24860 - RNA, 19 nt, Artificial Sequence
  Antisense Oligo
uaacuuuuggaucaacugc

SEQ ID NO: 24861 - RNA, 19 nt, Artificial Sequence
  Sense Oligo
caguugauccaaaaguuac

SEQ ID NO: 24862 - RNA, 19 nt, Artificial Sequence
  Antisense Oligo
guaacuuuuggaucaacug

SEQ ID NO: 24863 - RNA, 19 nt, Artificial Sequence
  Sense Oligo
aguugauccaaaaguuacg

SEQ ID NO: 24864 - RNA, 19 nt, Artificial Sequence
  Antisense Oligo
cguaacuuuuggaucaacu

SEQ ID NO: 24865 - RNA, 19 nt, Artificial Sequence
  Sense Oligo
guugauccaaaaguuacgc

SEQ ID NO: 24866 - RNA, 19 nt, Artificial Sequence
  Antisense Oligo
gcguaacuuuuggaucaac

SEQ ID NO: 24867 - RNA, 19 nt, Artificial Sequence
  Sense Oligo
uugauccaaaaguuacgca

SEQ ID NO: 24868 - RNA, 19 nt, Artificial Sequence
  Antisense Oligo
ugcguaacuuuuggaucaa

SEQ ID NO: 24869 - RNA, 19 nt, Artificial Sequence
  Sense Oligo
ugauccaaaaguuacgcau

SEQ ID NO: 24870 - RNA, 19 nt, Artificial Sequence
  Antisense Oligo
augcguaacuuuuggauca

SEQ ID NO: 24871 - RNA, 19 nt, Artificial Sequence
  Sense Oligo
gauccaaaaguuacgcaua

SEQ ID NO: 24872 - RNA, 19 nt, Artificial Sequence
  Antisense Oligo
uaugcguaacuuuuggauc

SEQ ID NO: 24873 - RNA, 19 nt, Artificial Sequence
  Sense Oligo
auccaaaaguuacgcauaa

SEQ ID NO: 24874 - RNA, 19 nt, Artificial Sequence
  Antisense Oligo
uuaugcguaacuuuuggau

SEQ ID NO: 24875 - RNA, 19 nt, Artificial Sequence
  Sense Oligo
uccaaaaguuacgcauaaa

SEQ ID NO: 24876 - RNA, 19 nt, Artificial Sequence
  Antisense Oligo
uuuaugcguaacuuuugga

SEQ ID NO: 24877 - RNA, 19 nt, Artificial Sequence
  Sense Oligo
ccaaaaguuacgcauaaaa

SEQ ID NO: 24878 - RNA, 19 nt, Artificial Sequence
  Antisense Oligo
uuuuaugcguaacuuuugg

SEQ ID NO: 24879 - RNA, 19 nt, Artificial Sequence
  Sense Oligo
guuacgcauaaaauuaucc

SEQ ID NO: 24880 - RNA, 19 nt, Artificial Sequence
  Antisense Oligo
ggauaauuuuaugcguaac

SEQ ID NO: 24881 - RNA, 19 nt, Artificial Sequence
  Sense Oligo
acgcauaaaauuauccuag

SEQ ID NO: 24882 - RNA, 19 nt, Artificial Sequence
  Antisense Oligo
cuaggauaauuuuaugcgu

SEQ ID NO: 24883 - RNA, 19 nt, Artificial Sequence
  Sense Oligo
gcauaaaauuauccuaggc

SEQ ID NO: 24884 - RNA, 19 nt, Artificial Sequence
  Antisense Oligo
gccuaggauaauuuuaugc

SEQ ID NO: 24885 - RNA, 19 nt, Artificial Sequence
  Sense Oligo
cauaaaauuauccuaggcc

SEQ ID NO: 24886 - RNA, 19 nt, Artificial Sequence
  Antisense Oligo
ggccuaggauaauuuuaug

SEQ ID NO: 24887 - RNA, 19 nt, Artificial Sequence
  Sense Oligo
auaaaauuauccuaggccg

SEQ ID NO: 24888 - RNA, 19 nt, Artificial Sequence
  Antisense Oligo
cggccuaggauaauuuuau

SEQ ID NO: 24889 - RNA, 19 nt, Artificial Sequence
  Sense Oligo
agcacuuugggaggcugag

SEQ ID NO: 24890 - RNA, 19 nt, Artificial Sequence
  Antisense Oligo
cucagccucccaaagugcu

SEQ ID NO: 24891 - RNA, 19 nt, Artificial Sequence
  Sense Oligo
gcacuuugggaggcugagg

SEQ ID NO: 24892 - RNA, 19 nt, Artificial Sequence
  Antisense Oligo
ccucagccucccaaagugc

SEQ ID NO: 24893 - RNA, 19 nt, Artificial Sequence
  Sense Oligo
cacuuugggaggcugaggu

SEQ ID NO: 24894 - RNA, 19 nt, Artificial Sequence
  Antisense Oligo
accucagccucccaaagug

SEQ ID NO: 24895 - RNA, 19 nt, Artificial Sequence
  Sense Oligo
acuuugggaggcugaggug

SEQ ID NO: 24896 - RNA, 19 nt, Artificial Sequence
  Antisense Oligo
caccucagccucccaaagu

SEQ ID NO: 24897 - RNA, 19 nt, Artificial Sequence
  Sense Oligo
cuuugggaggcugaggugg

SEQ ID NO: 24898 - RNA, 19 nt, Artificial Sequence
  Antisense Oligo
ccaccucagccucccaaag

SEQ ID NO: 24899 - RNA, 19 nt, Artificial Sequence
  Sense Oligo
uuugggaggcugagguggg

SEQ ID NO: 24900 - RNA, 19 nt, Artificial Sequence
  Antisense Oligo
cccaccucagccucccaaa

SEQ ID NO: 24901 - RNA, 19 nt, Artificial Sequence
  Sense Oligo
uugggaggcugaggugggu

SEQ ID NO: 24902 - RNA, 19 nt, Artificial Sequence
  Antisense Oligo
acccaccucagccucccaa

SEQ ID NO: 24903 - RNA, 19 nt, Artificial Sequence
  Sense Oligo
gaggcugagguggguggau

SEQ ID NO: 24904 - RNA, 19 nt, Artificial Sequence
  Antisense Oligo
auccacccaccucagccuc

SEQ ID NO: 24905 - RNA, 19 nt, Artificial Sequence
  Sense Oligo
aggcugagguggguggauc

SEQ ID NO: 24906 - RNA, 19 nt, Artificial Sequence
  Antisense Oligo
gauccacccaccucagccu

SEQ ID NO: 24907 - RNA, 19 nt, Artificial Sequence
  Sense Oligo
ggcugagguggguggauca

SEQ ID NO: 24908 - RNA, 19 nt, Artificial Sequence
  Antisense Oligo
ugauccacccaccucagcc

SEQ ID NO: 24909 - RNA, 19 nt, Artificial Sequence
  Sense Oligo
gcugagguggguggaucac

SEQ ID NO: 24910 - RNA, 19 nt, Artificial Sequence
  Antisense Oligo
gugauccacccaccucagc

SEQ ID NO: 24911 - RNA, 19 nt, Artificial Sequence
  Sense Oligo
cugagguggguggaucacg

SEQ ID NO: 24912 - RNA, 19 nt, Artificial Sequence
  Antisense Oligo
cgugauccacccaccucag

SEQ ID NO: 24913 - RNA, 19 nt, Artificial Sequence
  Sense Oligo
ugagguggguggaucacga

SEQ ID NO: 24914 - RNA, 19 nt, Artificial Sequence
  Antisense Oligo
ucgugauccacccaccuca

SEQ ID NO: 24915 - RNA, 19 nt, Artificial Sequence
  Sense Oligo
gagguggguggaucacgag

SEQ ID NO: 24916 - RNA, 19 nt, Artificial Sequence
  Antisense Oligo
cucgugauccacccaccuc

SEQ ID NO: 24917 - RNA, 19 nt, Artificial Sequence
  Sense Oligo
agguggguggaucacgagg

SEQ ID NO: 24918 - RNA, 19 nt, Artificial Sequence
  Antisense Oligo
ccucgugauccacccaccu

SEQ ID NO: 24919 - RNA, 19 nt, Artificial Sequence
  Sense Oligo
gguggguggaucacgaggu

SEQ ID NO: 24920 - RNA, 19 nt, Artificial Sequence
  Antisense Oligo
accucgugauccacccacc

SEQ ID NO: 24921 - RNA, 19 nt, Artificial Sequence
  Sense Oligo
guggguggaucacgagguc

SEQ ID NO: 24922 - RNA, 19 nt, Artificial Sequence
  Antisense Oligo
gaccucgugauccacccac

SEQ ID NO: 24923 - RNA, 19 nt, Artificial Sequence
  Sense Oligo
aaaauuagcugggcguggu

SEQ ID NO: 24924 - RNA, 19 nt, Artificial Sequence
  Antisense Oligo
accacgcccagcuaauuuu

SEQ ID NO: 24925 - RNA, 19 nt, Artificial Sequence
  Sense Oligo
aaauuagcugggcguggug

SEQ ID NO: 24926 - RNA, 19 nt, Artificial Sequence
  Antisense Oligo
caccacgcccagcuaauuu

SEQ ID NO: 24927 - RNA, 19 nt, Artificial Sequence
  Sense Oligo
aauuagcugggcguggugg

SEQ ID NO: 24928 - RNA, 19 nt, Artificial Sequence
  Antisense Oligo
ccaccacgcccagcuaauu

SEQ ID NO: 24929 - RNA, 19 nt, Artificial Sequence
  Sense Oligo
auuagcugggcgugguggc

SEQ ID NO: 24930 - RNA, 19 nt, Artificial Sequence
  Antisense Oligo
gccaccacgcccagcuaau

SEQ ID NO: 24931 - RNA, 19 nt, Artificial Sequence
  Sense Oligo
acugcacuccagccuggca

SEQ ID NO: 24932 - RNA, 19 nt, Artificial Sequence
  Antisense Oligo
ugccaggcuggagugcagu

SEQ ID NO: 24933 - RNA, 19 nt, Artificial Sequence
  Sense Oligo
cugcacuccagccuggcaa

SEQ ID NO: 24934 - RNA, 19 nt, Artificial Sequence
  Antisense Oligo
uugccaggcuggagugcag

SEQ ID NO: 24935 - RNA, 19 nt, Artificial Sequence
  Sense Oligo
ugcacuccagccuggcaac

SEQ ID NO: 24936 - RNA, 19 nt, Artificial Sequence
  Antisense Oligo
guugccaggcuggagugca

SEQ ID NO: 24937 - RNA, 19 nt, Artificial Sequence
  Sense Oligo
aaagaauacgauauggauc

SEQ ID NO: 24938 - RNA, 19 nt, Artificial Sequence
  Antisense Oligo
gauccauaucguauucuuu

SEQ ID NO: 24939 - RNA, 19 nt, Artificial Sequence
  Sense Oligo
aagaauacgauauggaucu

SEQ ID NO: 24940 - RNA, 19 nt, Artificial Sequence
  Antisense Oligo
agauccauaucguauucuu

SEQ ID NO: 24941 - RNA, 19 nt, Artificial Sequence
  Sense Oligo
agaauacgauauggaucug

SEQ ID NO: 24942 - RNA, 19 nt, Artificial Sequence
  Antisense Oligo
cagauccauaucguauucu

SEQ ID NO: 24943 - RNA, 19 nt, Artificial Sequence
  Sense Oligo
gaauacgauauggaucugu

SEQ ID NO: 24944 - RNA, 19 nt, Artificial Sequence
  Antisense Oligo
acagauccauaucguauuc

SEQ ID NO: 24945 - RNA, 19 nt, Artificial Sequence
  Sense Oligo
aauacgauauggaucugug

SEQ ID NO: 24946 - RNA, 19 nt, Artificial Sequence
  Antisense Oligo
cacagauccauaucguauu

SEQ ID NO: 24947 - RNA, 19 nt, Artificial Sequence
  Sense Oligo
auacgauauggaucugugc

SEQ ID NO: 24948 - RNA, 19 nt, Artificial Sequence
  Antisense Oligo
gcacagauccauaucguau

SEQ ID NO: 24949 - RNA, 19 nt, Artificial Sequence
  Sense Oligo
uacgauauggaucugugcu

SEQ ID NO: 24950 - RNA, 19 nt, Artificial Sequence
  Antisense Oligo
agcacagauccauaucgua

SEQ ID NO: 24951 - RNA, 19 nt, Artificial Sequence
  Sense Oligo
gugcuguagccuggaugga

SEQ ID NO: 24952 - RNA, 19 nt, Artificial Sequence
  Antisense Oligo
uccauccaggcuacagcac

SEQ ID NO: 24953 - RNA, 19 nt, Artificial Sequence
  Sense Oligo
ugcuguagccuggauggac

SEQ ID NO: 24954 - RNA, 19 nt, Artificial Sequence
  Antisense Oligo
guccauccaggcuacagca

SEQ ID NO: 24955 - RNA, 19 nt, Artificial Sequence
  Sense Oligo
gcuguagccuggauggacc

SEQ ID NO: 24956 - RNA, 19 nt, Artificial Sequence
  Antisense Oligo
gguccauccaggcuacagc

SEQ ID NO: 24957 - RNA, 19 nt, Artificial Sequence
  Sense Oligo
cuguagccuggauggaccc

SEQ ID NO: 24958 - RNA, 19 nt, Artificial Sequence
  Antisense Oligo
ggguccauccaggcuacag

SEQ ID NO: 24959 - RNA, 19 nt, Artificial Sequence
  Sense Oligo
aggccauguaugauuccuu

SEQ ID NO: 24960 - RNA, 19 nt, Artificial Sequence
  Antisense Oligo
aaggaaucauacauggccu

SEQ ID NO: 24961 - RNA, 19 nt, Artificial Sequence
  Sense Oligo
ggccauguaugauuccuuu

SEQ ID NO: 24962 - RNA, 19 nt, Artificial Sequence
  Antisense Oligo
aaaggaaucauacauggcc

SEQ ID NO: 24963 - RNA, 19 nt, Artificial Sequence
  Sense Oligo
gccauguaugauuccuuug

SEQ ID NO: 24964 - RNA, 19 nt, Artificial Sequence
  Antisense Oligo
caaaggaaucauacauggc

SEQ ID NO: 24965 - RNA, 19 nt, Artificial Sequence
  Sense Oligo
ccauguaugauuccuuuga

SEQ ID NO: 24966 - RNA, 19 nt, Artificial Sequence
  Antisense Oligo
ucaaaggaaucauacaugg

SEQ ID NO: 24967 - RNA, 19 nt, Artificial Sequence
  Sense Oligo
cauguaugauuccuuugau

SEQ ID NO: 24968 - RNA, 19 nt, Artificial Sequence
  Antisense Oligo
aucaaaggaaucauacaug

SEQ ID NO: 24969 - RNA, 19 nt, Artificial Sequence
  Sense Oligo
cacagauuagugguuggcu

SEQ ID NO: 24970 - RNA, 19 nt, Artificial Sequence
  Antisense Oligo
agccaaccacuaaucugug

SEQ ID NO: 24971 - RNA, 19 nt, Artificial Sequence
  Sense Oligo
gugguuggcugggaggagu

SEQ ID NO: 24972 - RNA, 19 nt, Artificial Sequence
  Antisense Oligo
acuccucccagccaaccac

SEQ ID NO: 24973 - RNA, 19 nt, Artificial Sequence
  Sense Oligo
gggaggagggagucauugc

SEQ ID NO: 24974 - RNA, 19 nt, Artificial Sequence
  Antisense Oligo
gcaaugacucccuccuccc

SEQ ID NO: 24975 - RNA, 19 nt, Artificial Sequence
  Sense Oligo
ggaggagggagucauugcu

SEQ ID NO: 24976 - RNA, 19 nt, Artificial Sequence
  Antisense Oligo
agcaaugacucccuccucc

SEQ ID NO: 24977 - RNA, 19 nt, Artificial Sequence
  Sense Oligo
gaggagggagucauugcug

SEQ ID NO: 24978 - RNA, 19 nt, Artificial Sequence
  Antisense Oligo
cagcaaugacucccuccuc

SEQ ID NO: 24979 - RNA, 19 nt, Artificial Sequence
  Sense Oligo
aggagggagucauugcugu

SEQ ID NO: 24980 - RNA, 19 nt, Artificial Sequence
  Antisense Oligo
acagcaaugacucccuccu

SEQ ID NO: 24981 - RNA, 19 nt, Artificial Sequence
  Sense Oligo
ggagggagucauugcugug

SEQ ID NO: 24982 - RNA, 19 nt, Artificial Sequence
  Antisense Oligo
cacagcaaugacucccucc

SEQ ID NO: 24983 - RNA, 19 nt, Artificial Sequence
  Sense Oligo
gagggagucauugcugugg

SEQ ID NO: 24984 - RNA, 19 nt, Artificial Sequence
  Antisense Oligo
ccacagcaaugacucccuc

SEQ ID NO: 24985 - RNA, 19 nt, Artificial Sequence
  Sense Oligo
agggagucauugcuguggg

SEQ ID NO: 24986 - RNA, 19 nt, Artificial Sequence
  Antisense Oligo
cccacagcaaugacucccu

SEQ ID NO: 24987 - RNA, 19 nt, Artificial Sequence
  Sense Oligo
agucauugcugugggauuu

SEQ ID NO: 24988 - RNA, 19 nt, Artificial Sequence
  Antisense Oligo
aaaucccacagcaaugacu

SEQ ID NO: 24989 - RNA, 19 nt, Artificial Sequence
  Sense Oligo
gucauugcugugggauuuc

SEQ ID NO: 24990 - RNA, 19 nt, Artificial Sequence
  Antisense Oligo
gaaaucccacagcaaugac

SEQ ID NO: 24991 - RNA, 19 nt, Artificial Sequence
  Sense Oligo
cauugcugugggauuucuu

SEQ ID NO: 24992 - RNA, 19 nt, Artificial Sequence
  Antisense Oligo
aagaaaucccacagcaaug

SEQ ID NO: 24993 - RNA, 19 nt, Artificial Sequence
  Sense Oligo
gcugugggauuucuuucug

SEQ ID NO: 24994 - RNA, 19 nt, Artificial Sequence
  Antisense Oligo
cagaaagaaaucccacagc

SEQ ID NO: 24995 - RNA, 19 nt, Artificial Sequence
  Sense Oligo
cugugggauuucuuucugg

SEQ ID NO: 24996 - RNA, 19 nt, Artificial Sequence
  Antisense Oligo
ccagaaagaaaucccacag

SEQ ID NO: 24997 - RNA, 19 nt, Artificial Sequence
  Sense Oligo
ugugggauuucuuucuggg

SEQ ID NO: 24998 - RNA, 19 nt, Artificial Sequence
  Antisense Oligo
cccagaaagaaaucccaca

SEQ ID NO: 24999 - RNA, 19 nt, Artificial Sequence
  Sense Oligo
gugggauuucuuucuggga

SEQ ID NO: 25000 - RNA, 19 nt, Artificial Sequence
  Antisense Oligo
ucccagaaagaaaucccac

SEQ ID NO: 25001 - RNA, 19 nt, Artificial Sequence
  Sense Oligo
gauuucuuucugggaugaa

SEQ ID NO: 25002 - RNA, 19 nt, Artificial Sequence
  Antisense Oligo
uucaucccagaaagaaauc

SEQ ID NO: 25003 - RNA, 19 nt, Artificial Sequence
  Sense Oligo
auuucuuucugggaugaag

SEQ ID NO: 25004 - RNA, 19 nt, Artificial Sequence
  Antisense Oligo
cuucaucccagaaagaaau

SEQ ID NO: 25005 - RNA, 19 nt, Artificial Sequence
  Sense Oligo
uggcuucucaccuguaauc

SEQ ID NO: 25006 - RNA, 19 nt, Artificial Sequence
  Antisense Oligo
gauuacaggugagaagcca

SEQ ID NO: 25007 - RNA, 19 nt, Artificial Sequence
  Sense Oligo
ggcuucucaccuguaaucc

SEQ ID NO: 25008 - RNA, 19 nt, Artificial Sequence
  Antisense Oligo
ggauuacaggugagaagcc

SEQ ID NO: 25009 - RNA, 19 nt, Artificial Sequence
  Sense Oligo
gcuucucaccuguaauccc

SEQ ID NO: 25010 - RNA, 19 nt, Artificial Sequence
  Antisense Oligo
gggauuacaggugagaagc

SEQ ID NO: 25011 - RNA, 19 nt, Artificial Sequence
  Sense Oligo
gcacauugggaggcugagg

SEQ ID NO: 25012 - RNA, 19 nt, Artificial Sequence
  Antisense Oligo
ccucagccucccaaugugc

SEQ ID NO: 25013 - RNA, 19 nt, Artificial Sequence
  Sense Oligo
ggguggaucacuugagguc

SEQ ID NO: 25014 - RNA, 19 nt, Artificial Sequence
  Antisense Oligo
gaccucaagugauccaccc

SEQ ID NO: 25015 - RNA, 19 nt, Artificial Sequence
  Sense Oligo
ucacuugaggucaggaguu

SEQ ID NO: 25016 - RNA, 19 nt, Artificial Sequence
  Antisense Oligo
aacuccugaccucaaguga

SEQ ID NO: 25017 - RNA, 19 nt, Artificial Sequence
  Sense Oligo
cacuugaggucaggaguuc

SEQ ID NO: 25018 - RNA, 19 nt, Artificial Sequence
  Antisense Oligo
gaacuccugaccucaagug

SEQ ID NO: 25019 - RNA, 19 nt, Artificial Sequence
  Sense Oligo
ugaggucaggaguucaaga

SEQ ID NO: 25020 - RNA, 19 nt, Artificial Sequence
  Antisense Oligo
ucuugaacuccugaccuca

SEQ ID NO: 25021 - RNA, 19 nt, Artificial Sequence
  Sense Oligo
uugccuguaaucccagcua

SEQ ID NO: 25022 - RNA, 19 nt, Artificial Sequence
  Antisense Oligo
uagcugggauuacaggcaa

SEQ ID NO: 25023 - RNA, 19 nt, Artificial Sequence
  Sense Oligo
ugccuguaaucccagcuac

SEQ ID NO: 25024 - RNA, 19 nt, Artificial Sequence
  Antisense Oligo
guagcugggauuacaggca

SEQ ID NO: 25025 - RNA, 19 nt, Artificial Sequence
  Sense Oligo
gccuguaaucccagcuacu

SEQ ID NO: 25026 - RNA, 19 nt, Artificial Sequence
  Antisense Oligo
aguagcugggauuacaggc

SEQ ID NO: 25027 - RNA, 19 nt, Artificial Sequence
  Sense Oligo
ccuguaaucccagcuacuc

SEQ ID NO: 25028 - RNA, 19 nt, Artificial Sequence
  Antisense Oligo
gaguagcugggauuacagg

SEQ ID NO: 25029 - RNA, 19 nt, Artificial Sequence
  Sense Oligo
cuguaaucccagcuacuca

SEQ ID NO: 25030 - RNA, 19 nt, Artificial Sequence
  Antisense Oligo
ugaguagcugggauuacag

SEQ ID NO: 25031 - RNA, 19 nt, Artificial Sequence
  Sense Oligo
ucccagcuacucaggaggu

SEQ ID NO: 25032 - RNA, 19 nt, Artificial Sequence
  Antisense Oligo
accuccugaguagcuggga

SEQ ID NO: 25033 - RNA, 19 nt, Artificial Sequence
  Sense Oligo
cccagcuacucaggagguu

SEQ ID NO: 25034 - RNA, 19 nt, Artificial Sequence
  Antisense Oligo
aaccuccugaguagcuggg

SEQ ID NO: 25035 - RNA, 19 nt, Artificial Sequence
  Sense Oligo
ccagcuacucaggagguug

SEQ ID NO: 25036 - RNA, 19 nt, Artificial Sequence
  Antisense Oligo
caaccuccugaguagcugg

SEQ ID NO: 25037 - RNA, 19 nt, Artificial Sequence
  Sense Oligo
cagcuacucaggagguuga

SEQ ID NO: 25038 - RNA, 19 nt, Artificial Sequence
  Antisense Oligo
ucaaccuccugaguagcug

SEQ ID NO: 25039 - RNA, 19 nt, Artificial Sequence
  Sense Oligo
ccuaggaggcagagguugc

SEQ ID NO: 25040 - RNA, 19 nt, Artificial Sequence
  Antisense Oligo
gcaaccucugccuccuagg

SEQ ID NO: 25041 - RNA, 19 nt, Artificial Sequence
  Sense Oligo
cuaggaggcagagguugca

SEQ ID NO: 25042 - RNA, 19 nt, Artificial Sequence
  Antisense Oligo
ugcaaccucugccuccuag

SEQ ID NO: 25043 - RNA, 19 nt, Artificial Sequence
  Sense Oligo
uaggaggcagagguugcag

SEQ ID NO: 25044 - RNA, 19 nt, Artificial Sequence
  Antisense Oligo
cugcaaccucugccuccua

SEQ ID NO: 25045 - RNA, 19 nt, Artificial Sequence
  Sense Oligo
gagguugcagugagccgag

SEQ ID NO: 25046 - RNA, 19 nt, Artificial Sequence
  Antisense Oligo
cucggcucacugcaaccuc

SEQ ID NO: 25047 - RNA, 19 nt, Artificial Sequence
  Sense Oligo
ugucucuggugaugaguuu

SEQ ID NO: 25048 - RNA, 19 nt, Artificial Sequence
  Antisense Oligo
aaacucaucaccagagaca

SEQ ID NO: 25049 - RNA, 19 nt, Artificial Sequence
  Sense Oligo
gucucuggugaugaguuua

SEQ ID NO: 25050 - RNA, 19 nt, Artificial Sequence
  Antisense Oligo
uaaacucaucaccagagac

SEQ ID NO: 25051 - RNA, 19 nt, Artificial Sequence
  Sense Oligo
cacagggagccuauugaau

SEQ ID NO: 25052 - RNA, 19 nt, Artificial Sequence
  Antisense Oligo
auucaauaggcucccugug

SEQ ID NO: 25053 - RNA, 19 nt, Artificial Sequence
  Sense Oligo
acagggagccuauugaauu

SEQ ID NO: 25054 - RNA, 19 nt, Artificial Sequence
  Antisense Oligo
aauucaauaggcucccugu

SEQ ID NO: 25055 - RNA, 19 nt, Artificial Sequence
  Sense Oligo
cagggagccuauugaauuc

SEQ ID NO: 25056 - RNA, 19 nt, Artificial Sequence
  Antisense Oligo
gaauucaauaggcucccug

SEQ ID NO: 25057 - RNA, 19 nt, Artificial Sequence
  Sense Oligo
agggagccuauugaauucu

SEQ ID NO: 25058 - RNA, 19 nt, Artificial Sequence
  Antisense Oligo
agaauucaauaggcucccu

SEQ ID NO: 25059 - RNA, 19 nt, Artificial Sequence
  Sense Oligo
gggagccuauugaauucug

SEQ ID NO: 25060 - RNA, 19 nt, Artificial Sequence
  Antisense Oligo
cagaauucaauaggcuccc

SEQ ID NO: 25061 - RNA, 19 nt, Artificial Sequence
  Sense Oligo
ggagccuauugaauucuga

SEQ ID NO: 25062 - RNA, 19 nt, Artificial Sequence
  Antisense Oligo
ucagaauucaauaggcucc

SEQ ID NO: 25063 - RNA, 19 nt, Artificial Sequence
  Sense Oligo
gagccuauugaauucugaa

SEQ ID NO: 25064 - RNA, 19 nt, Artificial Sequence
  Antisense Oligo
uucagaauucaauaggcuc

SEQ ID NO: 25065 - RNA, 19 nt, Artificial Sequence
  Sense Oligo
gccuauugaauucugaagc

SEQ ID NO: 25066 - RNA, 19 nt, Artificial Sequence
  Antisense Oligo
gcuucagaauucaauaggc

SEQ ID NO: 25067 - RNA, 19 nt, Artificial Sequence
  Sense Oligo
cuauugaauucugaagcug

SEQ ID NO: 25068 - RNA, 19 nt, Artificial Sequence
  Antisense Oligo
cagcuucagaauucaauag

SEQ ID NO: 25069 - RNA, 19 nt, Artificial Sequence
  Sense Oligo
auugaauucugaagcugag

SEQ ID NO: 25070 - RNA, 19 nt, Artificial Sequence
  Antisense Oligo
cucagcuucagaauucaau

SEQ ID NO: 25071 - RNA, 19 nt, Artificial Sequence
  Sense Oligo
agagcaguguaugcgugaa

SEQ ID NO: 25072 - RNA, 19 nt, Artificial Sequence
  Antisense Oligo
uucacgcauacacugcucu

SEQ ID NO: 25073 - RNA, 19 nt, Artificial Sequence
  Sense Oligo
gccgcauucuaaccauggu

SEQ ID NO: 25074 - RNA, 19 nt, Artificial Sequence
  Antisense Oligo
accaugguuagaaugcggc

SEQ ID NO: 25075 - RNA, 19 nt, Artificial Sequence
  Sense Oligo
ccgcauucuaaccauggug

SEQ ID NO: 25076 - RNA, 19 nt, Artificial Sequence
  Antisense Oligo
caccaugguuagaaugcgg

SEQ ID NO: 25077 - RNA, 19 nt, Artificial Sequence
  Sense Oligo
cgcauucuaaccaugguga

SEQ ID NO: 25078 - RNA, 19 nt, Artificial Sequence
  Antisense Oligo
ucaccaugguuagaaugcg

SEQ ID NO: 25079 - RNA, 19 nt, Artificial Sequence
  Sense Oligo
gcauucuaaccauggugag

SEQ ID NO: 25080 - RNA, 19 nt, Artificial Sequence
  Antisense Oligo
cucaccaugguuagaaugc

SEQ ID NO: 25081 - RNA, 19 nt, Artificial Sequence
  Sense Oligo
cauucuaaccauggugagg

SEQ ID NO: 25082 - RNA, 19 nt, Artificial Sequence
  Antisense Oligo
ccucaccaugguuagaaug

SEQ ID NO: 25083 - RNA, 19 nt, Artificial Sequence
  Sense Oligo
uucuaaccauggugaggag

SEQ ID NO: 25084 - RNA, 19 nt, Artificial Sequence
  Antisense Oligo
cuccucaccaugguuagaa

SEQ ID NO: 25085 - RNA, 19 nt, Artificial Sequence
  Sense Oligo
cuaaccauggugaggaggg

SEQ ID NO: 25086 - RNA, 19 nt, Artificial Sequence
  Antisense Oligo
cccuccucaccaugguuag

SEQ ID NO: 25087 - RNA, 19 nt, Artificial Sequence
  Sense Oligo
ggugaggagggugcuagga

SEQ ID NO: 25088 - RNA, 19 nt, Artificial Sequence
  Antisense Oligo
uccuagcacccuccucacc

SEQ ID NO: 25089 - RNA, 19 nt, Artificial Sequence
  Sense Oligo
gugaggagggugcuaggag

SEQ ID NO: 25090 - RNA, 19 nt, Artificial Sequence
  Antisense Oligo
cuccuagcacccuccucac

SEQ ID NO: 25091 - RNA, 19 nt, Artificial Sequence
  Sense Oligo
ggagggugcuaggagccaa

SEQ ID NO: 25092 - RNA, 19 nt, Artificial Sequence
  Antisense Oligo
uuggcuccuagcacccucc

SEQ ID NO: 25093 - RNA, 19 nt, Artificial Sequence
  Sense Oligo
gagggugcuaggagccaag

SEQ ID NO: 25094 - RNA, 19 nt, Artificial Sequence
  Antisense Oligo
cuuggcuccuagcacccuc

SEQ ID NO: 25095 - RNA, 19 nt, Artificial Sequence
  Sense Oligo
agagucagguggucagucc

SEQ ID NO: 25096 - RNA, 19 nt, Artificial Sequence
  Antisense Oligo
ggacugaccaccugacucu

SEQ ID NO: 25097 - RNA, 19 nt, Artificial Sequence
  Sense Oligo
gagucagguggucaguccu

SEQ ID NO: 25098 - RNA, 19 nt, Artificial Sequence
  Antisense Oligo
aggacugaccaccugacuc

SEQ ID NO: 25099 - RNA, 19 nt, Artificial Sequence
  Sense Oligo
agucagguggucaguccuc

SEQ ID NO: 25100 - RNA, 19 nt, Artificial Sequence
  Antisense Oligo
gaggacugaccaccugacu

SEQ ID NO: 25101 - RNA, 19 nt, Artificial Sequence
  Sense Oligo
aguccucaccugcagucau

SEQ ID NO: 25102 - RNA, 19 nt, Artificial Sequence
  Antisense Oligo
augacugcaggugaggacu

SEQ ID NO: 25103 - RNA, 19 nt, Artificial Sequence
  Sense Oligo
guccucaccugcagucaug

SEQ ID NO: 25104 - RNA, 19 nt, Artificial Sequence
  Antisense Oligo
caugacugcaggugaggac

SEQ ID NO: 25105 - RNA, 19 nt, Artificial Sequence
  Sense Oligo
uccucaccugcagucaugg

SEQ ID NO: 25106 - RNA, 19 nt, Artificial Sequence
  Antisense Oligo
ccaugacugcaggugagga

SEQ ID NO: 25107 - RNA, 19 nt, Artificial Sequence
  Sense Oligo
gcacagccauccuccacuu

SEQ ID NO: 25108 - RNA, 19 nt, Artificial Sequence
  Antisense Oligo
aaguggaggauggcugugc

SEQ ID NO: 25109 - RNA, 19 nt, Artificial Sequence
  Sense Oligo
cacagccauccuccacuug

SEQ ID NO: 25110 - RNA, 19 nt, Artificial Sequence
  Antisense Oligo
caaguggaggauggcugug

SEQ ID NO: 25111 - RNA, 19 nt, Artificial Sequence
  Sense Oligo
acagccauccuccacuugg

SEQ ID NO: 25112 - RNA, 19 nt, Artificial Sequence
  Antisense Oligo
ccaaguggaggauggcugu

SEQ ID NO: 25113 - RNA, 19 nt, Artificial Sequence
  Sense Oligo
acuuggccucuccuuuggu

SEQ ID NO: 25114 - RNA, 19 nt, Artificial Sequence
  Antisense Oligo
accaaaggagaggccaagu

SEQ ID NO: 25115 - RNA, 19 nt, Artificial Sequence
  Sense Oligo
cuuggccucuccuuuggug

SEQ ID NO: 25116 - RNA, 19 nt, Artificial Sequence
  Antisense Oligo
caccaaaggagaggccaag

SEQ ID NO: 25117 - RNA, 19 nt, Artificial Sequence
  Sense Oligo
uuggccucuccuuuggugg

SEQ ID NO: 25118 - RNA, 19 nt, Artificial Sequence
  Antisense Oligo
ccaccaaaggagaggccaa

SEQ ID NO: 25119 - RNA, 19 nt, Artificial Sequence
  Sense Oligo
uggccucuccuuugguggc

SEQ ID NO: 25120 - RNA, 19 nt, Artificial Sequence
  Antisense Oligo
gccaccaaaggagaggcca

SEQ ID NO: 25121 - RNA, 19 nt, Artificial Sequence
  Sense Oligo
gccgcugguugcugacuaa

SEQ ID NO: 25122 - RNA, 19 nt, Artificial Sequence
  Antisense Oligo
uuagucagcaaccagcggc

SEQ ID NO: 25123 - RNA, 19 nt, Artificial Sequence
  Sense Oligo
ccgcugguugcugacuaac

SEQ ID NO: 25124 - RNA, 19 nt, Artificial Sequence
  Antisense Oligo
guuagucagcaaccagcgg

SEQ ID NO: 25125 - RNA, 19 nt, Artificial Sequence
  Sense Oligo
aggcuacugggcuuggcug

SEQ ID NO: 25126 - RNA, 19 nt, Artificial Sequence
  Antisense Oligo
cagccaagcccaguagccu

SEQ ID NO: 25127 - RNA, 19 nt, Artificial Sequence
  Sense Oligo
ugggcuuggcugcuggguu

SEQ ID NO: 25128 - RNA, 19 nt, Artificial Sequence
  Antisense Oligo
aacccagcagccaagccca

SEQ ID NO: 25129 - RNA, 19 nt, Artificial Sequence
  Sense Oligo
ggcuuggcugcuggguugu

SEQ ID NO: 25130 - RNA, 19 nt, Artificial Sequence
  Antisense Oligo
acaacccagcagccaagcc

SEQ ID NO: 25131 - RNA, 19 nt, Artificial Sequence
  Sense Oligo
gcuuggcugcuggguugua

SEQ ID NO: 25132 - RNA, 19 nt, Artificial Sequence
  Antisense Oligo
uacaacccagcagccaagc

SEQ ID NO: 25133 - RNA, 19 nt, Artificial Sequence
  Sense Oligo
cuuggcugcuggguuguac

SEQ ID NO: 25134 - RNA, 19 nt, Artificial Sequence
  Antisense Oligo
guacaacccagcagccaag

SEQ ID NO: 25135 - RNA, 19 nt, Artificial Sequence
  Sense Oligo
uuggcugcuggguuguacu

SEQ ID NO: 25136 - RNA, 19 nt, Artificial Sequence
  Antisense Oligo
aguacaacccagcagccaa

SEQ ID NO: 25137 - RNA, 19 nt, Artificial Sequence
  Sense Oligo
uggcugcuggguuguacuu

SEQ ID NO: 25138 - RNA, 19 nt, Artificial Sequence
  Antisense Oligo
aaguacaacccagcagcca

SEQ ID NO: 25139 - RNA, 19 nt, Artificial Sequence
  Sense Oligo
ggcugcuggguuguacuuc

SEQ ID NO: 25140 - RNA, 19 nt, Artificial Sequence
  Antisense Oligo
gaaguacaacccagcagcc

SEQ ID NO: 25141 - RNA, 19 nt, Artificial Sequence
  Sense Oligo
gcugcuggguuguacuucc

SEQ ID NO: 25142 - RNA, 19 nt, Artificial Sequence
  Antisense Oligo
ggaaguacaacccagcagc

SEQ ID NO: 25143 - RNA, 19 nt, Artificial Sequence
  Sense Oligo
cugcuggguuguacuuccu

SEQ ID NO: 25144 - RNA, 19 nt, Artificial Sequence
  Antisense Oligo
aggaaguacaacccagcag

SEQ ID NO: 25145 - RNA, 19 nt, Artificial Sequence
  Sense Oligo
uggguuguacuuccugugg

SEQ ID NO: 25146 - RNA, 19 nt, Artificial Sequence
  Antisense Oligo
ccacaggaaguacaaccca

SEQ ID NO: 25147 - RNA, 19 nt, Artificial Sequence
  Sense Oligo
gggucauuuggguuggagg

SEQ ID NO: 25148 - RNA, 19 nt, Artificial Sequence
  Antisense Oligo
ccuccaacccaaaugaccc

SEQ ID NO: 25149 - RNA, 19 nt, Artificial Sequence
  Sense Oligo
ggucauuuggguuggaggc

SEQ ID NO: 25150 - RNA, 19 nt, Artificial Sequence
  Antisense Oligo
gccuccaacccaaaugacc

SEQ ID NO: 25151 - RNA, 19 nt, Artificial Sequence
  Sense Oligo
gucauuuggguuggaggca

SEQ ID NO: 25152 - RNA, 19 nt, Artificial Sequence
  Antisense Oligo
ugccuccaacccaaaugac

SEQ ID NO: 25153 - RNA, 19 nt, Artificial Sequence
  Sense Oligo
uuuggguuggaggcaucgg

SEQ ID NO: 25154 - RNA, 19 nt, Artificial Sequence
  Antisense Oligo
ccgaugccuccaacccaaa

SEQ ID NO: 25155 - RNA, 19 nt, Artificial Sequence
  Sense Oligo
uuggguuggaggcaucggc

SEQ ID NO: 25156 - RNA, 19 nt, Artificial Sequence
  Antisense Oligo
gccgaugccuccaacccaa

SEQ ID NO: 25157 - RNA, 19 nt, Artificial Sequence
  Sense Oligo
uggguuggaggcaucggca

SEQ ID NO: 25158 - RNA, 19 nt, Artificial Sequence
  Antisense Oligo
ugccgaugccuccaaccca

SEQ ID NO: 25159 - RNA, 19 nt, Artificial Sequence
  Sense Oligo
gcugcugguggagcuuccu

SEQ ID NO: 25160 - RNA, 19 nt, Artificial Sequence
  Antisense Oligo
aggaagcuccaccagcagc

SEQ ID NO: 25161 - RNA, 19 nt, Artificial Sequence
  Sense Oligo
ugcugguggagcuuccuuu

SEQ ID NO: 25162 - RNA, 19 nt, Artificial Sequence
  Antisense Oligo
aaaggaagcuccaccagca

SEQ ID NO: 25163 - RNA, 19 nt, Artificial Sequence
  Sense Oligo
cuuccuuuccucagcuucc

SEQ ID NO: 25164 - RNA, 19 nt, Artificial Sequence
  Antisense Oligo
ggaagcugaggaaaggaag

SEQ ID NO: 25165 - RNA, 19 nt, Artificial Sequence
  Sense Oligo
uuccuuuccucagcuuccu

SEQ ID NO: 25166 - RNA, 19 nt, Artificial Sequence
  Antisense Oligo
aggaagcugaggaaaggaa

SEQ ID NO: 25167 - RNA, 19 nt, Artificial Sequence
  Sense Oligo
uugcugugaggucucccgg

SEQ ID NO: 25168 - RNA, 19 nt, Artificial Sequence
  Antisense Oligo
ccgggagaccucacagcaa

SEQ ID NO: 25169 - RNA, 19 nt, Artificial Sequence
  Sense Oligo
uguggaagggaggugucgg

SEQ ID NO: 25170 - RNA, 19 nt, Artificial Sequence
  Antisense Oligo
ccgacaccucccuuccaca

SEQ ID NO: 25171 - RNA, 19 nt, Artificial Sequence
  Sense Oligo
guggaagggaggugucgga

SEQ ID NO: 25172 - RNA, 19 nt, Artificial Sequence
  Antisense Oligo
uccgacaccucccuuccac

SEQ ID NO: 25173 - RNA, 19 nt, Artificial Sequence
  Sense Oligo
uggaagggaggugucggau

SEQ ID NO: 25174 - RNA, 19 nt, Artificial Sequence
  Antisense Oligo
auccgacaccucccuucca

SEQ ID NO: 25175 - RNA, 19 nt, Artificial Sequence
  Sense Oligo
ggaagggaggugucggaug

SEQ ID NO: 25176 - RNA, 19 nt, Artificial Sequence
  Antisense Oligo
cauccgacaccucccuucc

SEQ ID NO: 25177 - RNA, 19 nt, Artificial Sequence
  Sense Oligo
gaagggaggugucggauga

SEQ ID NO: 25178 - RNA, 19 nt, Artificial Sequence
  Antisense Oligo
ucauccgacaccucccuuc

SEQ ID NO: 25179 - RNA, 19 nt, Artificial Sequence
  Sense Oligo
aagggaggugucggaugag

SEQ ID NO: 25180 - RNA, 19 nt, Artificial Sequence
  Antisense Oligo
cucauccgacaccucccuu

SEQ ID NO: 25181 - RNA, 19 nt, Artificial Sequence
  Sense Oligo
gaggugucggaugagcaug

SEQ ID NO: 25182 - RNA, 19 nt, Artificial Sequence
  Antisense Oligo
caugcucauccgacaccuc

SEQ ID NO: 25183 - RNA, 19 nt, Artificial Sequence
  Sense Oligo
aggugucggaugagcaugc

SEQ ID NO: 25184 - RNA, 19 nt, Artificial Sequence
  Antisense Oligo
gcaugcucauccgacaccu

SEQ ID NO: 25185 - RNA, 19 nt, Artificial Sequence
  Sense Oligo
ggugucggaugagcaugcc

SEQ ID NO: 25186 - RNA, 19 nt, Artificial Sequence
  Antisense Oligo
ggcaugcucauccgacacc

SEQ ID NO: 25187 - RNA, 19 nt, Artificial Sequence
  Sense Oligo
gugucggaugagcaugccc

SEQ ID NO: 25188 - RNA, 19 nt, Artificial Sequence
  Antisense Oligo
gggcaugcucauccgacac

SEQ ID NO: 25189 - RNA, 19 nt, Artificial Sequence
  Sense Oligo
ugucggaugagcaugcccg

SEQ ID NO: 25190 - RNA, 19 nt, Artificial Sequence
  Antisense Oligo
cgggcaugcucauccgaca

SEQ ID NO: 25191 - RNA, 19 nt, Artificial Sequence
  Sense Oligo
gccugccuauaccuucugg

SEQ ID NO: 25192 - RNA, 19 nt, Artificial Sequence
  Antisense Oligo
ccagaagguauaggcaggc

SEQ ID NO: 25193 - RNA, 19 nt, Artificial Sequence
  Sense Oligo
ccugccuauaccuucuggg

SEQ ID NO: 25194 - RNA, 19 nt, Artificial Sequence
  Antisense Oligo
cccagaagguauaggcagg

SEQ ID NO: 25195 - RNA, 19 nt, Artificial Sequence
  Sense Oligo
cugccuauaccuucugggu

SEQ ID NO: 25196 - RNA, 19 nt, Artificial Sequence
  Antisense Oligo
acccagaagguauaggcag

SEQ ID NO: 25197 - RNA, 19 nt, Artificial Sequence
  Sense Oligo
ugccuauaccuucuggguc

SEQ ID NO: 25198 - RNA, 19 nt, Artificial Sequence
  Antisense Oligo
gacccagaagguauaggca

SEQ ID NO: 25199 - RNA, 19 nt, Artificial Sequence
  Sense Oligo
gccuauaccuucugggucg

SEQ ID NO: 25200 - RNA, 19 nt, Artificial Sequence
  Antisense Oligo
cgacccagaagguauaggc

SEQ ID NO: 25201 - RNA, 19 nt, Artificial Sequence
  Sense Oligo
ccuauaccuucugggucgg

SEQ ID NO: 25202 - RNA, 19 nt, Artificial Sequence
  Antisense Oligo
ccgacccagaagguauagg

SEQ ID NO: 25203 - RNA, 19 nt, Artificial Sequence
  Sense Oligo
cuauaccuucugggucggu

SEQ ID NO: 25204 - RNA, 19 nt, Artificial Sequence
  Antisense Oligo
accgacccagaagguauag

SEQ ID NO: 25205 - RNA, 19 nt, Artificial Sequence
  Sense Oligo
accuucugggucggucucu

SEQ ID NO: 25206 - RNA, 19 nt, Artificial Sequence
  Antisense Oligo
agagaccgacccagaaggu

SEQ ID NO: 25207 - RNA, 19 nt, Artificial Sequence
  Sense Oligo
ccuucugggucggucucug

SEQ ID NO: 25208 - RNA, 19 nt, Artificial Sequence
  Antisense Oligo
cagagaccgacccagaagg

SEQ ID NO: 25209 - RNA, 19 nt, Artificial Sequence
  Sense Oligo
ggucucugcagugcaucug

SEQ ID NO: 25210 - RNA, 19 nt, Artificial Sequence
  Antisense Oligo
cagaugcacugcagagacc

SEQ ID NO: 25211 - RNA, 19 nt, Artificial Sequence
  Sense Oligo
gucucugcagugcaucugu

SEQ ID NO: 25212 - RNA, 19 nt, Artificial Sequence
  Antisense Oligo
acagaugcacugcagagac

SEQ ID NO: 25213 - RNA, 19 nt, Artificial Sequence
  Sense Oligo
ucucugcagugcaucugug

SEQ ID NO: 25214 - RNA, 19 nt, Artificial Sequence
  Antisense Oligo
cacagaugcacugcagaga

SEQ ID NO: 25215 - RNA, 19 nt, Artificial Sequence
  Sense Oligo
cucugcagugcaucugugc

SEQ ID NO: 25216 - RNA, 19 nt, Artificial Sequence
  Antisense Oligo
gcacagaugcacugcagag

SEQ ID NO: 25217 - RNA, 19 nt, Artificial Sequence
  Sense Oligo
ucugcagugcaucugugcu

SEQ ID NO: 25218 - RNA, 19 nt, Artificial Sequence
  Antisense Oligo
agcacagaugcacugcaga

SEQ ID NO: 25219 - RNA, 19 nt, Artificial Sequence
  Sense Oligo
cagugcaucugugcucuga

SEQ ID NO: 25220 - RNA, 19 nt, Artificial Sequence
  Antisense Oligo
ucagagcacagaugcacug

SEQ ID NO: 25221 - RNA, 19 nt, Artificial Sequence
  Sense Oligo
agugcaucugugcucugag

SEQ ID NO: 25222 - RNA, 19 nt, Artificial Sequence
  Antisense Oligo
cucagagcacagaugcacu

SEQ ID NO: 25223 - RNA, 19 nt, Artificial Sequence
  Sense Oligo
caagccaaggcauucgugu

SEQ ID NO: 25224 - RNA, 19 nt, Artificial Sequence
  Antisense Oligo
acacgaaugccuuggcuug

SEQ ID NO: 25225 - RNA, 19 nt, Artificial Sequence
  Sense Oligo
aagccaaggcauucgugug

SEQ ID NO: 25226 - RNA, 19 nt, Artificial Sequence
  Antisense Oligo
cacacgaaugccuuggcuu

SEQ ID NO: 25227 - RNA, 19 nt, Artificial Sequence
  Sense Oligo
agccaaggcauucgugugg

SEQ ID NO: 25228 - RNA, 19 nt, Artificial Sequence
  Antisense Oligo
ccacacgaaugccuuggcu

SEQ ID NO: 25229 - RNA, 19 nt, Artificial Sequence
  Sense Oligo
gccaaggcauucgugugga

SEQ ID NO: 25230 - RNA, 19 nt, Artificial Sequence
  Antisense Oligo
uccacacgaaugccuuggc

SEQ ID NO: 25231 - RNA, 19 nt, Artificial Sequence
  Sense Oligo
ccaaggcauucguguggag

SEQ ID NO: 25232 - RNA, 19 nt, Artificial Sequence
  Antisense Oligo
cuccacacgaaugccuugg

SEQ ID NO: 25233 - RNA, 19 nt, Artificial Sequence
  Sense Oligo
caaggcauucguguggagg

SEQ ID NO: 25234 - RNA, 19 nt, Artificial Sequence
  Antisense Oligo
ccuccacacgaaugccuug

SEQ ID NO: 25235 - RNA, 19 nt, Artificial Sequence
  Sense Oligo
aaggcauucguguggaggc

SEQ ID NO: 25236 - RNA, 19 nt, Artificial Sequence
  Antisense Oligo
gccuccacacgaaugccuu

SEQ ID NO: 25237 - RNA, 19 nt, Artificial Sequence
  Sense Oligo
aggcauucguguggaggcc

SEQ ID NO: 25238 - RNA, 19 nt, Artificial Sequence
  Antisense Oligo
ggccuccacacgaaugccu

SEQ ID NO: 25239 - RNA, 19 nt, Artificial Sequence
  Sense Oligo
ccucuggugugggcaguuc

SEQ ID NO: 25240 - RNA, 19 nt, Artificial Sequence
  Antisense Oligo
gaacugcccacaccagagg

SEQ ID NO: 25241 - RNA, 19 nt, Artificial Sequence
  Sense Oligo
cucuggugugggcaguucu

SEQ ID NO: 25242 - RNA, 19 nt, Artificial Sequence
  Antisense Oligo
agaacugcccacaccagag

SEQ ID NO: 25243 - RNA, 19 nt, Artificial Sequence
  Sense Oligo
ggugugggcaguucuccuc

SEQ ID NO: 25244 - RNA, 19 nt, Artificial Sequence
  Antisense Oligo
gaggagaacugcccacacc

SEQ ID NO: 25245 - RNA, 19 nt, Artificial Sequence
  Sense Oligo
ugugggcaguucuccucuu

SEQ ID NO: 25246 - RNA, 19 nt, Artificial Sequence
  Antisense Oligo
aagaggagaacugcccaca

SEQ ID NO: 25247 - RNA, 19 nt, Artificial Sequence
  Sense Oligo
gugggcaguucuccucuua

SEQ ID NO: 25248 - RNA, 19 nt, Artificial Sequence
  Antisense Oligo
uaagaggagaacugcccac

SEQ ID NO: 25249 - RNA, 19 nt, Artificial Sequence
  Sense Oligo
ugggcaguucuccucuuac

SEQ ID NO: 25250 - RNA, 19 nt, Artificial Sequence
  Antisense Oligo
guaagaggagaacugccca

SEQ ID NO: 25251 - RNA, 19 nt, Artificial Sequence
  Sense Oligo
gggcaguucuccucuuacg

SEQ ID NO: 25252 - RNA, 19 nt, Artificial Sequence
  Antisense Oligo
cguaagaggagaacugccc

SEQ ID NO: 25253 - RNA, 19 nt, Artificial Sequence
  Sense Oligo
ggcaguucuccucuuacgu

SEQ ID NO: 25254 - RNA, 19 nt, Artificial Sequence
  Antisense Oligo
acguaagaggagaacugcc

SEQ ID NO: 25255 - RNA, 19 nt, Artificial Sequence
  Sense Oligo
gcaguucuccucuuacgug

SEQ ID NO: 25256 - RNA, 19 nt, Artificial Sequence
  Antisense Oligo
cacguaagaggagaacugc

SEQ ID NO: 25257 - RNA, 19 nt, Artificial Sequence
  Sense Oligo
caguucuccucuuacgugg

SEQ ID NO: 25258 - RNA, 19 nt, Artificial Sequence
  Antisense Oligo
ccacguaagaggagaacug

SEQ ID NO: 25259 - RNA, 19 nt, Artificial Sequence
  Sense Oligo
aguucuccucuuacgugga

SEQ ID NO: 25260 - RNA, 19 nt, Artificial Sequence
  Antisense Oligo
uccacguaagaggagaacu

SEQ ID NO: 25261 - RNA, 19 nt, Artificial Sequence
  Sense Oligo
guucuccucuuacguggac

SEQ ID NO: 25262 - RNA, 19 nt, Artificial Sequence
  Antisense Oligo
guccacguaagaggagaac

SEQ ID NO: 25263 - RNA, 19 nt, Artificial Sequence
  Sense Oligo
uucuccucuuacguggacu

SEQ ID NO: 25264 - RNA, 19 nt, Artificial Sequence
  Antisense Oligo
aguccacguaagaggagaa

SEQ ID NO: 25265 - RNA, 19 nt, Artificial Sequence
  Sense Oligo
ucuccucuuacguggacuu

SEQ ID NO: 25266 - RNA, 19 nt, Artificial Sequence
  Antisense Oligo
aaguccacguaagaggaga

SEQ ID NO: 25267 - RNA, 19 nt, Artificial Sequence
  Sense Oligo
cucuuacguggacuugucc

SEQ ID NO: 25268 - RNA, 19 nt, Artificial Sequence
  Antisense Oligo
ggacaaguccacguaagag

SEQ ID NO: 25269 - RNA, 19 nt, Artificial Sequence
  Sense Oligo
ucuuacguggacuuguccu

SEQ ID NO: 25270 - RNA, 19 nt, Artificial Sequence
  Antisense Oligo
aggacaaguccacguaaga

SEQ ID NO: 25271 - RNA, 19 nt, Artificial Sequence
  Sense Oligo
cuuacguggacuuguccug

SEQ ID NO: 25272 - RNA, 19 nt, Artificial Sequence
  Antisense Oligo
caggacaaguccacguaag

SEQ ID NO: 25273 - RNA, 19 nt, Artificial Sequence
  Sense Oligo
uuacguggacuuguccugc

SEQ ID NO: 25274 - RNA, 19 nt, Artificial Sequence
  Antisense Oligo
gcaggacaaguccacguaa

SEQ ID NO: 25275 - RNA, 19 nt, Artificial Sequence
  Sense Oligo
uacguggacuuguccugca

SEQ ID NO: 25276 - RNA, 19 nt, Artificial Sequence
  Antisense Oligo
ugcaggacaaguccacgua

SEQ ID NO: 25277 - RNA, 19 nt, Artificial Sequence
  Sense Oligo
caggagcugcuucuucguc

SEQ ID NO: 25278 - RNA, 19 nt, Artificial Sequence
  Antisense Oligo
gacgaagaagcagcuccug

SEQ ID NO: 25279 - RNA, 19 nt, Artificial Sequence
  Sense Oligo
aggagcugcuucuucgucu

SEQ ID NO: 25280 - RNA, 19 nt, Artificial Sequence
  Antisense Oligo
agacgaagaagcagcuccu

SEQ ID NO: 25281 - RNA, 19 nt, Artificial Sequence
  Sense Oligo
ggagcugcuucuucgucuu

SEQ ID NO: 25282 - RNA, 19 nt, Artificial Sequence
  Antisense Oligo
aagacgaagaagcagcucc

SEQ ID NO: 25283 - RNA, 19 nt, Artificial Sequence
  Sense Oligo
gagcugcuucuucgucuuc

SEQ ID NO: 25284 - RNA, 19 nt, Artificial Sequence
  Antisense Oligo
gaagacgaagaagcagcuc

SEQ ID NO: 25285 - RNA, 19 nt, Artificial Sequence
  Sense Oligo
ugcuucuucgucuucccac

SEQ ID NO: 25286 - RNA, 19 nt, Artificial Sequence
  Antisense Oligo
gugggaagacgaagaagca

SEQ ID NO: 25287 - RNA, 19 nt, Artificial Sequence
  Sense Oligo
uucgucuucccacacccuc

SEQ ID NO: 25288 - RNA, 19 nt, Artificial Sequence
  Antisense Oligo
gagggugugggaagacgaa

SEQ ID NO: 25289 - RNA, 19 nt, Artificial Sequence
  Sense Oligo
ucgucuucccacacccucc

SEQ ID NO: 25290 - RNA, 19 nt, Artificial Sequence
  Antisense Oligo
ggagggugugggaagacga

SEQ ID NO: 25291 - RNA, 19 nt, Artificial Sequence
  Sense Oligo
aggcagacggugcugggaa

SEQ ID NO: 25292 - RNA, 19 nt, Artificial Sequence
  Antisense Oligo
uucccagcaccgucugccu

SEQ ID NO: 25293 - RNA, 19 nt, Artificial Sequence
  Sense Oligo
cagacggugcugggaagcu

SEQ ID NO: 25294 - RNA, 19 nt, Artificial Sequence
  Antisense Oligo
agcuucccagcaccgucug

SEQ ID NO: 25295 - RNA, 19 nt, Artificial Sequence
  Sense Oligo
agacggugcugggaagcug

SEQ ID NO: 25296 - RNA, 19 nt, Artificial Sequence
  Antisense Oligo
cagcuucccagcaccgucu

SEQ ID NO: 25297 - RNA, 19 nt, Artificial Sequence
  Sense Oligo
acggugcugggaagcuggu

SEQ ID NO: 25298 - RNA, 19 nt, Artificial Sequence
  Antisense Oligo
accagcuucccagcaccgu

SEQ ID NO: 25299 - RNA, 19 nt, Artificial Sequence
  Sense Oligo
ggugcugggaagcugguca

SEQ ID NO: 25300 - RNA, 19 nt, Artificial Sequence
  Antisense Oligo
ugaccagcuucccagcacc

SEQ ID NO: 25301 - RNA, 19 nt, Artificial Sequence
  Sense Oligo
gugcugggaagcuggucag

SEQ ID NO: 25302 - RNA, 19 nt, Artificial Sequence
  Antisense Oligo
cugaccagcuucccagcac

SEQ ID NO: 25303 - RNA, 19 nt, Artificial Sequence
  Sense Oligo
ugcugggaagcuggucagu

SEQ ID NO: 25304 - RNA, 19 nt, Artificial Sequence
  Antisense Oligo
acugaccagcuucccagca

SEQ ID NO: 25305 - RNA, 19 nt, Artificial Sequence
  Sense Oligo
cugggaagcuggucagugc

SEQ ID NO: 25306 - RNA, 19 nt, Artificial Sequence
  Antisense Oligo
gcacugaccagcuucccag

SEQ ID NO: 25307 - RNA, 19 nt, Artificial Sequence
  Sense Oligo
ugggaagcuggucagugcc

SEQ ID NO: 25308 - RNA, 19 nt, Artificial Sequence
  Antisense Oligo
ggcacugaccagcuuccca

SEQ ID NO: 25309 - RNA, 19 nt, Artificial Sequence
  Sense Oligo
gaagcuggucagugcccac

SEQ ID NO: 25310 - RNA, 19 nt, Artificial Sequence
  Antisense Oligo
gugggcacugaccagcuuc

SEQ ID NO: 25311 - RNA, 19 nt, Artificial Sequence
  Sense Oligo
uggucagugcccacaugug

SEQ ID NO: 25312 - RNA, 19 nt, Artificial Sequence
  Antisense Oligo
cacaugugggcacugacca

SEQ ID NO: 25313 - RNA, 19 nt, Artificial Sequence
  Sense Oligo
ggucagugcccacaugugg

SEQ ID NO: 25314 - RNA, 19 nt, Artificial Sequence
  Antisense Oligo
ccacaugugggcacugacc

SEQ ID NO: 25315 - RNA, 19 nt, Artificial Sequence
  Sense Oligo
ccacaugugggugucccug

SEQ ID NO: 25316 - RNA, 19 nt, Artificial Sequence
  Antisense Oligo
cagggacacccacaugugg

SEQ ID NO: 25317 - RNA, 19 nt, Artificial Sequence
  Sense Oligo
augugggugucccugccug

SEQ ID NO: 25318 - RNA, 19 nt, Artificial Sequence
  Antisense Oligo
caggcagggacacccacau

SEQ ID NO: 25319 - RNA, 19 nt, Artificial Sequence
  Sense Oligo
ggccuucccaagaggaggu

SEQ ID NO: 25320 - RNA, 19 nt, Artificial Sequence
  Antisense Oligo
accuccucuugggaaggcc

SEQ ID NO: 25321 - RNA, 19 nt, Artificial Sequence
  Sense Oligo
gccuucccaagaggaggug

SEQ ID NO: 25322 - RNA, 19 nt, Artificial Sequence
  Antisense Oligo
caccuccucuugggaaggc

SEQ ID NO: 25323 - RNA, 19 nt, Artificial Sequence
  Sense Oligo
ccuucccaagaggaggugg

SEQ ID NO: 25324 - RNA, 19 nt, Artificial Sequence
  Antisense Oligo
ccaccuccucuugggaagg

SEQ ID NO: 25325 - RNA, 19 nt, Artificial Sequence
  Sense Oligo
cuucccaagaggagguggc

SEQ ID NO: 25326 - RNA, 19 nt, Artificial Sequence
  Antisense Oligo
gccaccuccucuugggaag

SEQ ID NO: 25327 - RNA, 19 nt, Artificial Sequence
  Sense Oligo
uugcgagucuacuggagcu

SEQ ID NO: 25328 - RNA, 19 nt, Artificial Sequence
  Antisense Oligo
agcuccaguagacucgcaa

SEQ ID NO: 25329 - RNA, 19 nt, Artificial Sequence
  Sense Oligo
ugcgagucuacuggagcug

SEQ ID NO: 25330 - RNA, 19 nt, Artificial Sequence
  Antisense Oligo
cagcuccaguagacucgca

SEQ ID NO: 25331 - RNA, 19 nt, Artificial Sequence
  Sense Oligo
gcgagucuacuggagcugu

SEQ ID NO: 25332 - RNA, 19 nt, Artificial Sequence
  Antisense Oligo
acagcuccaguagacucgc

SEQ ID NO: 25333 - RNA, 19 nt, Artificial Sequence
  Sense Oligo
cgagucuacuggagcugug

SEQ ID NO: 25334 - RNA, 19 nt, Artificial Sequence
  Antisense Oligo
cacagcuccaguagacucg

SEQ ID NO: 25335 - RNA, 19 nt, Artificial Sequence
  Sense Oligo
gagucuacuggagcugugc

SEQ ID NO: 25336 - RNA, 19 nt, Artificial Sequence
  Antisense Oligo
gcacagcuccaguagacuc

SEQ ID NO: 25337 - RNA, 19 nt, Artificial Sequence
  Sense Oligo
gucuacuggagcugugcgu

SEQ ID NO: 25338 - RNA, 19 nt, Artificial Sequence
  Antisense Oligo
acgcacagcuccaguagac

SEQ ID NO: 25339 - RNA, 19 nt, Artificial Sequence
  Sense Oligo
ucuacuggagcugugcgug

SEQ ID NO: 25340 - RNA, 19 nt, Artificial Sequence
  Antisense Oligo
cacgcacagcuccaguaga

SEQ ID NO: 25341 - RNA, 19 nt, Artificial Sequence
  Sense Oligo
cuacuggagcugugcgugg

SEQ ID NO: 25342 - RNA, 19 nt, Artificial Sequence
  Antisense Oligo
ccacgcacagcuccaguag

SEQ ID NO: 25343 - RNA, 19 nt, Artificial Sequence
  Sense Oligo
uacuggagcugugcguggg

SEQ ID NO: 25344 - RNA, 19 nt, Artificial Sequence
  Antisense Oligo
cccacgcacagcuccagua

SEQ ID NO: 25345 - RNA, 19 nt, Artificial Sequence
  Sense Oligo
agcccugcccugucugaag

SEQ ID NO: 25346 - RNA, 19 nt, Artificial Sequence
  Antisense Oligo
cuucagacagggcagggcu

SEQ ID NO: 25347 - RNA, 19 nt, Artificial Sequence
  Sense Oligo
gggagcuacaucagagguu

SEQ ID NO: 25348 - RNA, 19 nt, Artificial Sequence
  Antisense Oligo
aaccucugauguagcuccc

SEQ ID NO: 25349 - RNA, 19 nt, Artificial Sequence
  Sense Oligo
ggagcuacaucagagguuu

SEQ ID NO: 25350 - RNA, 19 nt, Artificial Sequence
  Antisense Oligo
aaaccucugauguagcucc

SEQ ID NO: 25351 - RNA, 19 nt, Artificial Sequence
  Sense Oligo
gagcuacaucagagguuuu

SEQ ID NO: 25352 - RNA, 19 nt, Artificial Sequence
  Antisense Oligo
aaaaccucugauguagcuc

SEQ ID NO: 25353 - RNA, 19 nt, Artificial Sequence
  Sense Oligo
gcuacaucagagguuuugg

SEQ ID NO: 25354 - RNA, 19 nt, Artificial Sequence
  Antisense Oligo
ccaaaaccucugauguagc

SEQ ID NO: 25355 - RNA, 19 nt, Artificial Sequence
  Sense Oligo
uacaucagagguuuuggua

SEQ ID NO: 25356 - RNA, 19 nt, Artificial Sequence
  Antisense Oligo
uaccaaaaccucugaugua

SEQ ID NO: 25357 - RNA, 19 nt, Artificial Sequence
  Sense Oligo
acaucagagguuuugguag

SEQ ID NO: 25358 - RNA, 19 nt, Artificial Sequence
  Antisense Oligo
cuaccaaaaccucugaugu

SEQ ID NO: 25359 - RNA, 19 nt, Artificial Sequence
  Sense Oligo
caucagagguuuugguaga

SEQ ID NO: 25360 - RNA, 19 nt, Artificial Sequence
  Antisense Oligo
ucuaccaaaaccucugaug

SEQ ID NO: 25361 - RNA, 19 nt, Artificial Sequence
  Sense Oligo
aucagagguuuugguagau

SEQ ID NO: 25362 - RNA, 19 nt, Artificial Sequence
  Antisense Oligo
aucuaccaaaaccucugau

SEQ ID NO: 25363 - RNA, 19 nt, Artificial Sequence
  Sense Oligo
ucagagguuuugguagaug

SEQ ID NO: 25364 - RNA, 19 nt, Artificial Sequence
  Antisense Oligo
caucuaccaaaaccucuga

SEQ ID NO: 25365 - RNA, 19 nt, Artificial Sequence
  Sense Oligo
cagagguuuugguagaugc

SEQ ID NO: 25366 - RNA, 19 nt, Artificial Sequence
  Antisense Oligo
gcaucuaccaaaaccucug

SEQ ID NO: 25367 - RNA, 19 nt, Artificial Sequence
  Sense Oligo
agagguuuugguagaugcu

SEQ ID NO: 25368 - RNA, 19 nt, Artificial Sequence
  Antisense Oligo
agcaucuaccaaaaccucu

SEQ ID NO: 25369 - RNA, 19 nt, Artificial Sequence
  Sense Oligo
gagguuuugguagaugcug

SEQ ID NO: 25370 - RNA, 19 nt, Artificial Sequence
  Antisense Oligo
cagcaucuaccaaaaccuc

SEQ ID NO: 25371 - RNA, 19 nt, Artificial Sequence
  Sense Oligo
guagaugcugcuguagacc

SEQ ID NO: 25372 - RNA, 19 nt, Artificial Sequence
  Antisense Oligo
ggucuacagcagcaucuac

SEQ ID NO: 25373 - RNA, 19 nt, Artificial Sequence
  Sense Oligo
uagaugcugcuguagaccu

SEQ ID NO: 25374 - RNA, 19 nt, Artificial Sequence
  Antisense Oligo
aggucuacagcagcaucua

SEQ ID NO: 25375 - RNA, 19 nt, Artificial Sequence
  Sense Oligo
agaugcugcuguagaccuc

SEQ ID NO: 25376 - RNA, 19 nt, Artificial Sequence
  Antisense Oligo
gaggucuacagcagcaucu

SEQ ID NO: 25377 - RNA, 19 nt, Artificial Sequence
  Sense Oligo
gaugcugcuguagaccuca

SEQ ID NO: 25378 - RNA, 19 nt, Artificial Sequence
  Antisense Oligo
ugaggucuacagcagcauc

SEQ ID NO: 25379 - RNA, 19 nt, Artificial Sequence
  Sense Oligo
augcugcuguagaccucau

SEQ ID NO: 25380 - RNA, 19 nt, Artificial Sequence
  Antisense Oligo
augaggucuacagcagcau

SEQ ID NO: 25381 - RNA, 19 nt, Artificial Sequence
  Sense Oligo
ugcugcuguagaccucaua

SEQ ID NO: 25382 - RNA, 19 nt, Artificial Sequence
  Antisense Oligo
uaugaggucuacagcagca

SEQ ID NO: 25383 - RNA, 19 nt, Artificial Sequence
  Sense Oligo
gcugcuguagaccucauau

SEQ ID NO: 25384 - RNA, 19 nt, Artificial Sequence
  Antisense Oligo
auaugaggucuacagcagc

SEQ ID NO: 25385 - RNA, 19 nt, Artificial Sequence
  Sense Oligo
cuguagaccucauauccga

SEQ ID NO: 25386 - RNA, 19 nt, Artificial Sequence
  Antisense Oligo
ucggauaugaggucuacag

SEQ ID NO: 25387 - RNA, 19 nt, Artificial Sequence
  Sense Oligo
uguagaccucauauccgau

SEQ ID NO: 25388 - RNA, 19 nt, Artificial Sequence
  Antisense Oligo
aucggauaugaggucuaca

SEQ ID NO: 25389 - RNA, 19 nt, Artificial Sequence
  Sense Oligo
guagaccucauauccgaug

SEQ ID NO: 25390 - RNA, 19 nt, Artificial Sequence
  Antisense Oligo
caucggauaugaggucuac

SEQ ID NO: 25391 - RNA, 19 nt, Artificial Sequence
  Sense Oligo
cauauccgaugaaugggaa

SEQ ID NO: 25392 - RNA, 19 nt, Artificial Sequence
  Antisense Oligo
uucccauucaucggauaug

SEQ ID NO: 25393 - RNA, 19 nt, Artificial Sequence
  Sense Oligo
auauccgaugaaugggaag

SEQ ID NO: 25394 - RNA, 19 nt, Artificial Sequence
  Antisense Oligo
cuucccauucaucggauau

SEQ ID NO: 25395 - RNA, 19 nt, Artificial Sequence
  Sense Oligo
uauccgaugaaugggaagc

SEQ ID NO: 25396 - RNA, 19 nt, Artificial Sequence
  Antisense Oligo
gcuucccauucaucggaua

SEQ ID NO: 25397 - RNA, 19 nt, Artificial Sequence
  Sense Oligo
auccgaugaaugggaagcu

SEQ ID NO: 25398 - RNA, 19 nt, Artificial Sequence
  Antisense Oligo
agcuucccauucaucggau

SEQ ID NO: 25399 - RNA, 19 nt, Artificial Sequence
  Sense Oligo
uccgaugaaugggaagcug

SEQ ID NO: 25400 - RNA, 19 nt, Artificial Sequence
  Antisense Oligo
cagcuucccauucaucgga

SEQ ID NO: 25401 - RNA, 19 nt, Artificial Sequence
  Sense Oligo
ccgaugaaugggaagcugc

SEQ ID NO: 25402 - RNA, 19 nt, Artificial Sequence
  Antisense Oligo
gcagcuucccauucaucgg

SEQ ID NO: 25403 - RNA, 19 nt, Artificial Sequence
  Sense Oligo
ugaaugggaagcugcuaau

SEQ ID NO: 25404 - RNA, 19 nt, Artificial Sequence
  Antisense Oligo
auuagcagcuucccauuca

SEQ ID NO: 25405 - RNA, 19 nt, Artificial Sequence
  Sense Oligo
gaaugggaagcugcuaaug

SEQ ID NO: 25406 - RNA, 19 nt, Artificial Sequence
  Antisense Oligo
cauuagcagcuucccauuc

SEQ ID NO: 25407 - RNA, 19 nt, Artificial Sequence
  Sense Oligo
aaugggaagcugcuaaugc

SEQ ID NO: 25408 - RNA, 19 nt, Artificial Sequence
  Antisense Oligo
gcauuagcagcuucccauu

SEQ ID NO: 25409 - RNA, 19 nt, Artificial Sequence
  Sense Oligo
augggaagcugcuaaugcc

SEQ ID NO: 25410 - RNA, 19 nt, Artificial Sequence
  Antisense Oligo
ggcauuagcagcuucccau

SEQ ID NO: 25411 - RNA, 19 nt, Artificial Sequence
  Sense Oligo
ugggaagcugcuaaugcca

SEQ ID NO: 25412 - RNA, 19 nt, Artificial Sequence
  Antisense Oligo
uggcauuagcagcuuccca

SEQ ID NO: 25413 - RNA, 19 nt, Artificial Sequence
  Sense Oligo
aagcugcuaaugccauacc

SEQ ID NO: 25414 - RNA, 19 nt, Artificial Sequence
  Antisense Oligo
gguauggcauuagcagcuu

SEQ ID NO: 25415 - RNA, 19 nt, Artificial Sequence
  Sense Oligo
agcugcuaaugccauaccc

SEQ ID NO: 25416 - RNA, 19 nt, Artificial Sequence
  Antisense Oligo
ggguauggcauuagcagcu

SEQ ID NO: 25417 - RNA, 19 nt, Artificial Sequence
  Sense Oligo
gcugcuaaugccauaccca

SEQ ID NO: 25418 - RNA, 19 nt, Artificial Sequence
  Antisense Oligo
uggguauggcauuagcagc

SEQ ID NO: 25419 - RNA, 19 nt, Artificial Sequence
  Sense Oligo
cugcuaaugccauacccag

SEQ ID NO: 25420 - RNA, 19 nt, Artificial Sequence
  Antisense Oligo
cuggguauggcauuagcag

SEQ ID NO: 25421 - RNA, 19 nt, Artificial Sequence
  Sense Oligo
ugcuaaugccauacccagc

SEQ ID NO: 25422 - RNA, 19 nt, Artificial Sequence
  Antisense Oligo
gcuggguauggcauuagca

SEQ ID NO: 25423 - RNA, 19 nt, Artificial Sequence
  Sense Oligo
gcuaaugccauacccagca

SEQ ID NO: 25424 - RNA, 19 nt, Artificial Sequence
  Antisense Oligo
ugcuggguauggcauuagc

SEQ ID NO: 25425 - RNA, 19 nt, Artificial Sequence
  Sense Oligo
cuaaugccauacccagcaa

SEQ ID NO: 25426 - RNA, 19 nt, Artificial Sequence
  Antisense Oligo
uugcuggguauggcauuag

SEQ ID NO: 25427 - RNA, 19 nt, Artificial Sequence
  Sense Oligo
uaaugccauacccagcaag

SEQ ID NO: 25428 - RNA, 19 nt, Artificial Sequence
  Antisense Oligo
cuugcuggguauggcauua

SEQ ID NO: 25429 - RNA, 19 nt, Artificial Sequence
  Sense Oligo
aaugccauacccagcaaga

SEQ ID NO: 25430 - RNA, 19 nt, Artificial Sequence
  Antisense Oligo
ucuugcuggguauggcauu

SEQ ID NO: 25431 - RNA, 19 nt, Artificial Sequence
  Sense Oligo
augccauacccagcaagag

SEQ ID NO: 25432 - RNA, 19 nt, Artificial Sequence
  Antisense Oligo
cucuugcuggguauggcau

SEQ ID NO: 25433 - RNA, 19 nt, Artificial Sequence
  Sense Oligo
gcagacugugagcagguag

SEQ ID NO: 25434 - RNA, 19 nt, Artificial Sequence
  Antisense Oligo
cuaccugcucacagucugc

SEQ ID NO: 25435 - RNA, 19 nt, Artificial Sequence
  Sense Oligo
cagacugugagcagguagu

SEQ ID NO: 25436 - RNA, 19 nt, Artificial Sequence
  Antisense Oligo
acuaccugcucacagucug

SEQ ID NO: 25437 - RNA, 19 nt, Artificial Sequence
  Sense Oligo
aauaguuugggcagaaugc

SEQ ID NO: 25438 - RNA, 19 nt, Artificial Sequence
  Antisense Oligo
gcauucugcccaaacuauu

SEQ ID NO: 25439 - RNA, 19 nt, Artificial Sequence
  Sense Oligo
auaguuugggcagaaugcu

SEQ ID NO: 25440 - RNA, 19 nt, Artificial Sequence
  Antisense Oligo
agcauucugcccaaacuau

SEQ ID NO: 25441 - RNA, 19 nt, Artificial Sequence
  Sense Oligo
uaguuugggcagaaugcuc

SEQ ID NO: 25442 - RNA, 19 nt, Artificial Sequence
  Antisense Oligo
gagcauucugcccaaacua

SEQ ID NO: 25443 - RNA, 19 nt, Artificial Sequence
  Sense Oligo
aguuugggcagaaugcucc

SEQ ID NO: 25444 - RNA, 19 nt, Artificial Sequence
  Antisense Oligo
ggagcauucugcccaaacu

SEQ ID NO: 25445 - RNA, 19 nt, Artificial Sequence
  Sense Oligo
guuugggcagaaugcuccc

SEQ ID NO: 25446 - RNA, 19 nt, Artificial Sequence
  Antisense Oligo
gggagcauucugcccaaac

SEQ ID NO: 25447 - RNA, 19 nt, Artificial Sequence
  Sense Oligo
uuugggcagaaugcucccu

SEQ ID NO: 25448 - RNA, 19 nt, Artificial Sequence
  Antisense Oligo
agggagcauucugcccaaa

SEQ ID NO: 25449 - RNA, 19 nt, Artificial Sequence
  Sense Oligo
uugggcagaaugcucccug

SEQ ID NO: 25450 - RNA, 19 nt, Artificial Sequence
  Antisense Oligo
cagggagcauucugcccaa

SEQ ID NO: 25451 - RNA, 19 nt, Artificial Sequence
  Sense Oligo
cagaaugcucccugcccug

SEQ ID NO: 25452 - RNA, 19 nt, Artificial Sequence
  Antisense Oligo
cagggcagggagcauucug

SEQ ID NO: 25453 - RNA, 19 nt, Artificial Sequence
  Sense Oligo
uugagucccugccagucga

SEQ ID NO: 25454 - RNA, 19 nt, Artificial Sequence
  Antisense Oligo
ucgacuggcagggacucaa

SEQ ID NO: 25455 - RNA, 19 nt, Artificial Sequence
  Sense Oligo
ugagucccugccagucgag

SEQ ID NO: 25456 - RNA, 19 nt, Artificial Sequence
  Antisense Oligo
cucgacuggcagggacuca

SEQ ID NO: 25457 - RNA, 19 nt, Artificial Sequence
  Sense Oligo
agucccugccagucgagga

SEQ ID NO: 25458 - RNA, 19 nt, Artificial Sequence
  Antisense Oligo
uccucgacuggcagggacu

SEQ ID NO: 25459 - RNA, 19 nt, Artificial Sequence
  Sense Oligo
cugccagucgaggaaggcu

SEQ ID NO: 25460 - RNA, 19 nt, Artificial Sequence
  Antisense Oligo
agccuuccucgacuggcag

SEQ ID NO: 25461 - RNA, 19 nt, Artificial Sequence
  Sense Oligo
ugccagucgaggaaggcug

SEQ ID NO: 25462 - RNA, 19 nt, Artificial Sequence
  Antisense Oligo
cagccuuccucgacuggca

SEQ ID NO: 25463 - RNA, 19 nt, Artificial Sequence
  Sense Oligo
agucgaggaaggcugccca

SEQ ID NO: 25464 - RNA, 19 nt, Artificial Sequence
  Antisense Oligo
ugggcagccuuccucgacu

SEQ ID NO: 25465 - RNA, 19 nt, Artificial Sequence
  Sense Oligo
ugggcguuuucgggucacc

SEQ ID NO: 25466 - RNA, 19 nt, Artificial Sequence
  Antisense Oligo
ggugacccgaaaacgccca

SEQ ID NO: 25467 - RNA, 19 nt, Artificial Sequence
  Sense Oligo
ggcguuuucgggucacccu

SEQ ID NO: 25468 - RNA, 19 nt, Artificial Sequence
  Antisense Oligo
agggugacccgaaaacgcc

SEQ ID NO: 25469 - RNA, 19 nt, Artificial Sequence
  Sense Oligo
gcguuuucgggucacccuu

SEQ ID NO: 25470 - RNA, 19 nt, Artificial Sequence
  Antisense Oligo
aagggugacccgaaaacgc

SEQ ID NO: 25471 - RNA, 19 nt, Artificial Sequence
  Sense Oligo
cguuuucgggucacccuug

SEQ ID NO: 25472 - RNA, 19 nt, Artificial Sequence
  Antisense Oligo
caagggugacccgaaaacg

SEQ ID NO: 25473 - RNA, 19 nt, Artificial Sequence
  Sense Oligo
guuuucgggucacccuugg

SEQ ID NO: 25474 - RNA, 19 nt, Artificial Sequence
  Antisense Oligo
ccaagggugacccgaaaac

SEQ ID NO: 25475 - RNA, 19 nt, Artificial Sequence
  Sense Oligo
uuuucgggucacccuuggg

SEQ ID NO: 25476 - RNA, 19 nt, Artificial Sequence
  Antisense Oligo
cccaagggugacccgaaaa

SEQ ID NO: 25477 - RNA, 19 nt, Artificial Sequence
  Sense Oligo
uuucgggucacccuugggc

SEQ ID NO: 25478 - RNA, 19 nt, Artificial Sequence
  Antisense Oligo
gcccaagggugacccgaaa

SEQ ID NO: 25479 - RNA, 19 nt, Artificial Sequence
  Sense Oligo
uucgggucacccuugggcu

SEQ ID NO: 25480 - RNA, 19 nt, Artificial Sequence
  Antisense Oligo
agcccaagggugacccgaa

SEQ ID NO: 25481 - RNA, 19 nt, Artificial Sequence
  Sense Oligo
agagcaacgcugauucagg

SEQ ID NO: 25482 - RNA, 19 nt, Artificial Sequence
  Antisense Oligo
ccugaaucagcguugcucu

SEQ ID NO: 25483 - RNA, 19 nt, Artificial Sequence
  Sense Oligo
gagcaacgcugauucaggc

SEQ ID NO: 25484 - RNA, 19 nt, Artificial Sequence
  Antisense Oligo
gccugaaucagcguugcuc

SEQ ID NO: 25485 - RNA, 19 nt, Artificial Sequence
  Sense Oligo
agcaacgcugauucaggcu

SEQ ID NO: 25486 - RNA, 19 nt, Artificial Sequence
  Antisense Oligo
agccugaaucagcguugcu

SEQ ID NO: 25487 - RNA, 19 nt, Artificial Sequence
  Sense Oligo
gcaacgcugauucaggcuu

SEQ ID NO: 25488 - RNA, 19 nt, Artificial Sequence
  Antisense Oligo
aagccugaaucagcguugc

SEQ ID NO: 25489 - RNA, 19 nt, Artificial Sequence
  Sense Oligo
caacgcugauucaggcuug

SEQ ID NO: 25490 - RNA, 19 nt, Artificial Sequence
  Antisense Oligo
caagccugaaucagcguug

SEQ ID NO: 25491 - RNA, 19 nt, Artificial Sequence
  Sense Oligo
aacgcugauucaggcuugg

SEQ ID NO: 25492 - RNA, 19 nt, Artificial Sequence
  Antisense Oligo
ccaagccugaaucagcguu

SEQ ID NO: 25493 - RNA, 19 nt, Artificial Sequence
  Sense Oligo
acgcugauucaggcuuggc

SEQ ID NO: 25494 - RNA, 19 nt, Artificial Sequence
  Antisense Oligo
gccaagccugaaucagcgu

SEQ ID NO: 25495 - RNA, 19 nt, Artificial Sequence
  Sense Oligo
cgcugauucaggcuuggcu

SEQ ID NO: 25496 - RNA, 19 nt, Artificial Sequence
  Antisense Oligo
agccaagccugaaucagcg

SEQ ID NO: 25497 - RNA, 19 nt, Artificial Sequence
  Sense Oligo
gcugauucaggcuuggcuc

SEQ ID NO: 25498 - RNA, 19 nt, Artificial Sequence
  Antisense Oligo
gagccaagccugaaucagc

SEQ ID NO: 25499 - RNA, 19 nt, Artificial Sequence
  Sense Oligo
cugauucaggcuuggcucu

SEQ ID NO: 25500 - RNA, 19 nt, Artificial Sequence
  Antisense Oligo
agagccaagccugaaucag

SEQ ID NO: 25501 - RNA, 19 nt, Artificial Sequence
  Sense Oligo
ugauucaggcuuggcucuu

SEQ ID NO: 25502 - RNA, 19 nt, Artificial Sequence
  Antisense Oligo
aagagccaagccugaauca

SEQ ID NO: 25503 - RNA, 19 nt, Artificial Sequence
  Sense Oligo
ggcuuggcucuugugacuc

SEQ ID NO: 25504 - RNA, 19 nt, Artificial Sequence
  Antisense Oligo
gagucacaagagccaagcc

SEQ ID NO: 25505 - RNA, 19 nt, Artificial Sequence
  Sense Oligo
gcuuggcucuugugacucu

SEQ ID NO: 25506 - RNA, 19 nt, Artificial Sequence
  Antisense Oligo
agagucacaagagccaagc

SEQ ID NO: 25507 - RNA, 19 nt, Artificial Sequence
  Sense Oligo
ggcucuugugacucugagg

SEQ ID NO: 25508 - RNA, 19 nt, Artificial Sequence
  Antisense Oligo
ccucagagucacaagagcc

SEQ ID NO: 25509 - RNA, 19 nt, Artificial Sequence
  Sense Oligo
gcucuugugacucugagga

SEQ ID NO: 25510 - RNA, 19 nt, Artificial Sequence
  Antisense Oligo
uccucagagucacaagagc

SEQ ID NO: 25511 - RNA, 19 nt, Artificial Sequence
  Sense Oligo
cucuugugacucugaggau

SEQ ID NO: 25512 - RNA, 19 nt, Artificial Sequence
  Antisense Oligo
auccucagagucacaagag

SEQ ID NO: 25513 - RNA, 19 nt, Artificial Sequence
  Sense Oligo
cuugugacucugaggaugu

SEQ ID NO: 25514 - RNA, 19 nt, Artificial Sequence
  Antisense Oligo
acauccucagagucacaag

SEQ ID NO: 25515 - RNA, 19 nt, Artificial Sequence
  Sense Oligo
ugugacucugaggauguuu

SEQ ID NO: 25516 - RNA, 19 nt, Artificial Sequence
  Antisense Oligo
aaacauccucagagucaca

SEQ ID NO: 25517 - RNA, 19 nt, Artificial Sequence
  Sense Oligo
gugacucugaggauguuuu

SEQ ID NO: 25518 - RNA, 19 nt, Artificial Sequence
  Antisense Oligo
aaaacauccucagagucac

SEQ ID NO: 25519 - RNA, 19 nt, Artificial Sequence
  Sense Oligo
ugacucugaggauguuuug

SEQ ID NO: 25520 - RNA, 19 nt, Artificial Sequence
  Antisense Oligo
caaaacauccucagaguca

SEQ ID NO: 25521 - RNA, 19 nt, Artificial Sequence
  Sense Oligo
gacucugaggauguuuugc

SEQ ID NO: 25522 - RNA, 19 nt, Artificial Sequence
  Antisense Oligo
gcaaaacauccucagaguc

SEQ ID NO: 25523 - RNA, 19 nt, Artificial Sequence
  Sense Oligo
acucugaggauguuuugcu

SEQ ID NO: 25524 - RNA, 19 nt, Artificial Sequence
  Antisense Oligo
agcaaaacauccucagagu

SEQ ID NO: 25525 - RNA, 19 nt, Artificial Sequence
  Sense Oligo
cucugaggauguuuugcua

SEQ ID NO: 25526 - RNA, 19 nt, Artificial Sequence
  Antisense Oligo
uagcaaaacauccucagag

SEQ ID NO: 25527 - RNA, 19 nt, Artificial Sequence
  Sense Oligo
auuucagcuuuauugugcu

SEQ ID NO: 25528 - RNA, 19 nt, Artificial Sequence
  Antisense Oligo
agcacaauaaagcugaaau

SEQ ID NO: 25529 - RNA, 19 nt, Artificial Sequence
  Sense Oligo
uucagcuuuauugugcuug

SEQ ID NO: 25530 - RNA, 19 nt, Artificial Sequence
  Antisense Oligo
caagcacaauaaagcugaa

SEQ ID NO: 25531 - RNA, 19 nt, Artificial Sequence
  Sense Oligo
ucagcuuuauugugcuugc

SEQ ID NO: 25532 - RNA, 19 nt, Artificial Sequence
  Antisense Oligo
gcaagcacaauaaagcuga

SEQ ID NO: 25533 - RNA, 19 nt, Artificial Sequence
  Sense Oligo
cuuuauugugcuugcccuu

SEQ ID NO: 25534 - RNA, 19 nt, Artificial Sequence
  Antisense Oligo
aagggcaagcacaauaaag

SEQ ID NO: 25535 - RNA, 19 nt, Artificial Sequence
  Sense Oligo
uauugugcuugcccuucug

SEQ ID NO: 25536 - RNA, 19 nt, Artificial Sequence
  Antisense Oligo
cagaagggcaagcacaaua

SEQ ID NO: 25537 - RNA, 19 nt, Artificial Sequence
  Sense Oligo
auugugcuugcccuucugg

SEQ ID NO: 25538 - RNA, 19 nt, Artificial Sequence
  Antisense Oligo
ccagaagggcaagcacaau

SEQ ID NO: 25539 - RNA, 19 nt, Artificial Sequence
  Sense Oligo
uugugcuugcccuucuggc

SEQ ID NO: 25540 - RNA, 19 nt, Artificial Sequence
  Antisense Oligo
gccagaagggcaagcacaa

SEQ ID NO: 25541 - RNA, 19 nt, Artificial Sequence
  Sense Oligo
ugugcuugcccuucuggcc

SEQ ID NO: 25542 - RNA, 19 nt, Artificial Sequence
  Antisense Oligo
ggccagaagggcaagcaca

SEQ ID NO: 25543 - RNA, 19 nt, Artificial Sequence
  Sense Oligo
cccuucuggcccacauccu

SEQ ID NO: 25544 - RNA, 19 nt, Artificial Sequence
  Antisense Oligo
aggaugugggccagaaggg

SEQ ID NO: 25545 - RNA, 19 nt, Artificial Sequence
  Sense Oligo
ccuucuggcccacauccuu

SEQ ID NO: 25546 - RNA, 19 nt, Artificial Sequence
  Antisense Oligo
aaggaugugggccagaagg

SEQ ID NO: 25547 - RNA, 19 nt, Artificial Sequence
  Sense Oligo
cuucuggcccacauccuuc

SEQ ID NO: 25548 - RNA, 19 nt, Artificial Sequence
  Antisense Oligo
gaaggaugugggccagaag

SEQ ID NO: 25549 - RNA, 19 nt, Artificial Sequence
  Sense Oligo
uucuggcccacauccuucc

SEQ ID NO: 25550 - RNA, 19 nt, Artificial Sequence
  Antisense Oligo
ggaaggaugugggccagaa

SEQ ID NO: 25551 - RNA, 19 nt, Artificial Sequence
  Sense Oligo
ucuggcccacauccuucca

SEQ ID NO: 25552 - RNA, 19 nt, Artificial Sequence
  Antisense Oligo
uggaaggaugugggccaga

SEQ ID NO: 25553 - RNA, 19 nt, Artificial Sequence
  Sense Oligo
uggcccacauccuuccacu

SEQ ID NO: 25554 - RNA, 19 nt, Artificial Sequence
  Antisense Oligo
aguggaaggaugugggcca

SEQ ID NO: 25555 - RNA, 19 nt, Artificial Sequence
  Sense Oligo
ggcccacauccuuccacuu

SEQ ID NO: 25556 - RNA, 19 nt, Artificial Sequence
  Antisense Oligo
aaguggaaggaugugggcc

SEQ ID NO: 25557 - RNA, 19 nt, Artificial Sequence
  Sense Oligo
gcccacauccuuccacuug

SEQ ID NO: 25558 - RNA, 19 nt, Artificial Sequence
  Antisense Oligo
caaguggaaggaugugggc

SEQ ID NO: 25559 - RNA, 19 nt, Artificial Sequence
  Sense Oligo
cccacauccuuccacuugc

SEQ ID NO: 25560 - RNA, 19 nt, Artificial Sequence
  Antisense Oligo
gcaaguggaaggauguggg

SEQ ID NO: 25561 - RNA, 19 nt, Artificial Sequence
  Sense Oligo
aaccuggcugcacucaccu

SEQ ID NO: 25562 - RNA, 19 nt, Artificial Sequence
  Antisense Oligo
aggugagugcagccagguu

SEQ ID NO: 25563 - RNA, 19 nt, Artificial Sequence
  Sense Oligo
uggcugcacucaccuggcu

SEQ ID NO: 25564 - RNA, 19 nt, Artificial Sequence
  Antisense Oligo
agccaggugagugcagcca

SEQ ID NO: 25565 - RNA, 19 nt, Artificial Sequence
  Sense Oligo
ggcugcacucaccuggcua

SEQ ID NO: 25566 - RNA, 19 nt, Artificial Sequence
  Antisense Oligo
uagccaggugagugcagcc

SEQ ID NO: 25567 - RNA, 19 nt, Artificial Sequence
  Sense Oligo
gcugcacucaccuggcuaa

SEQ ID NO: 25568 - RNA, 19 nt, Artificial Sequence
  Antisense Oligo
uuagccaggugagugcagc

SEQ ID NO: 25569 - RNA, 19 nt, Artificial Sequence
  Sense Oligo
ugcacucaccuggcuaaag

SEQ ID NO: 25570 - RNA, 19 nt, Artificial Sequence
  Antisense Oligo
cuuuagccaggugagugca

SEQ ID NO: 25571 - RNA, 19 nt, Artificial Sequence
  Sense Oligo
gcacucaccuggcuaaagc

SEQ ID NO: 25572 - RNA, 19 nt, Artificial Sequence
  Antisense Oligo
gcuuuagccaggugagugc

SEQ ID NO: 25573 - RNA, 19 nt, Artificial Sequence
  Sense Oligo
caccuggcuaaagcuccac

SEQ ID NO: 25574 - RNA, 19 nt, Artificial Sequence
  Antisense Oligo
guggagcuuuagccaggug

SEQ ID NO: 25575 - RNA, 19 nt, Artificial Sequence
  Sense Oligo
accuggcuaaagcuccacc

SEQ ID NO: 25576 - RNA, 19 nt, Artificial Sequence
  Antisense Oligo
gguggagcuuuagccaggu

SEQ ID NO: 25577 - RNA, 19 nt, Artificial Sequence
  Sense Oligo
cuaaagcuccaccagcaac

SEQ ID NO: 25578 - RNA, 19 nt, Artificial Sequence
  Antisense Oligo
guugcugguggagcuuuag

SEQ ID NO: 25579 - RNA, 19 nt, Artificial Sequence
  Sense Oligo
guaguggaagcccugcuca

SEQ ID NO: 25580 - RNA, 19 nt, Artificial Sequence
  Antisense Oligo
ugagcagggcuuccacuac

SEQ ID NO: 25581 - RNA, 19 nt, Artificial Sequence
  Sense Oligo
uaguggaagcccugcucag

SEQ ID NO: 25582 - RNA, 19 nt, Artificial Sequence
  Antisense Oligo
cugagcagggcuuccacua

SEQ ID NO: 25583 - RNA, 19 nt, Artificial Sequence
  Sense Oligo
aguggaagcccugcucagu

SEQ ID NO: 25584 - RNA, 19 nt, Artificial Sequence
  Antisense Oligo
acugagcagggcuuccacu

SEQ ID NO: 25585 - RNA, 19 nt, Artificial Sequence
  Sense Oligo
guggaagcccugcucaguu

SEQ ID NO: 25586 - RNA, 19 nt, Artificial Sequence
  Antisense Oligo
aacugagcagggcuuccac

SEQ ID NO: 25587 - RNA, 19 nt, Artificial Sequence
  Sense Oligo
ggaagcccugcucaguuua

SEQ ID NO: 25588 - RNA, 19 nt, Artificial Sequence
  Antisense Oligo
uaaacugagcagggcuucc

SEQ ID NO: 25589 - RNA, 19 nt, Artificial Sequence
  Sense Oligo
gaagcccugcucaguuuag

SEQ ID NO: 25590 - RNA, 19 nt, Artificial Sequence
  Antisense Oligo
cuaaacugagcagggcuuc

SEQ ID NO: 25591 - RNA, 19 nt, Artificial Sequence
  Sense Oligo
aagcccugcucaguuuagu

SEQ ID NO: 25592 - RNA, 19 nt, Artificial Sequence
  Antisense Oligo
acuaaacugagcagggcuu

SEQ ID NO: 25593 - RNA, 19 nt, Artificial Sequence
  Sense Oligo
cccugcucaguuuagucuc

SEQ ID NO: 25594 - RNA, 19 nt, Artificial Sequence
  Antisense Oligo
gagacuaaacugagcaggg

SEQ ID NO: 25595 - RNA, 19 nt, Artificial Sequence
  Sense Oligo
ccugcucaguuuagucucu

SEQ ID NO: 25596 - RNA, 19 nt, Artificial Sequence
  Antisense Oligo
agagacuaaacugagcagg

SEQ ID NO: 25597 - RNA, 19 nt, Artificial Sequence
  Sense Oligo
cugcucaguuuagucucug

SEQ ID NO: 25598 - RNA, 19 nt, Artificial Sequence
  Antisense Oligo
cagagacuaaacugagcag

SEQ ID NO: 25599 - RNA, 19 nt, Artificial Sequence
  Sense Oligo
ugcucaguuuagucucugg

SEQ ID NO: 25600 - RNA, 19 nt, Artificial Sequence
  Antisense Oligo
ccagagacuaaacugagca

SEQ ID NO: 25601 - RNA, 19 nt, Artificial Sequence
  Sense Oligo
gcucaguuuagucucuggu

SEQ ID NO: 25602 - RNA, 19 nt, Artificial Sequence
  Antisense Oligo
accagagacuaaacugagc

SEQ ID NO: 25603 - RNA, 19 nt, Artificial Sequence
  Sense Oligo
cucaguuuagucucugguu

SEQ ID NO: 25604 - RNA, 19 nt, Artificial Sequence
  Antisense Oligo
aaccagagacuaaacugag

SEQ ID NO: 25605 - RNA, 19 nt, Artificial Sequence
  Sense Oligo
caguuuagucucugguuuu

SEQ ID NO: 25606 - RNA, 19 nt, Artificial Sequence
  Antisense Oligo
aaaaccagagacuaaacug

SEQ ID NO: 25607 - RNA, 19 nt, Artificial Sequence
  Sense Oligo
agucucgcucugucgccca

SEQ ID NO: 25608 - RNA, 19 nt, Artificial Sequence
  Antisense Oligo
ugggcgacagagcgagacu

SEQ ID NO: 25609 - RNA, 19 nt, Artificial Sequence
  Sense Oligo
gucucgcucugucgcccaa

SEQ ID NO: 25610 - RNA, 19 nt, Artificial Sequence
  Antisense Oligo
uugggcgacagagcgagac

SEQ ID NO: 25611 - RNA, 19 nt, Artificial Sequence
  Sense Oligo
ucucgcucugucgcccaag

SEQ ID NO: 25612 - RNA, 19 nt, Artificial Sequence
  Antisense Oligo
cuugggcgacagagcgaga

SEQ ID NO: 25613 - RNA, 19 nt, Artificial Sequence
  Sense Oligo
ucgcucugucgcccaagcu

SEQ ID NO: 25614 - RNA, 19 nt, Artificial Sequence
  Antisense Oligo
agcuugggcgacagagcga

SEQ ID NO: 25615 - RNA, 19 nt, Artificial Sequence
  Sense Oligo
ugcaguggcacgaucucag

SEQ ID NO: 25616 - RNA, 19 nt, Artificial Sequence
  Antisense Oligo
cugagaucgugccacugca

SEQ ID NO: 25617 - RNA, 19 nt, Artificial Sequence
  Sense Oligo
gcaguggcacgaucucagu

SEQ ID NO: 25618 - RNA, 19 nt, Artificial Sequence
  Antisense Oligo
acugagaucgugccacugc

SEQ ID NO: 25619 - RNA, 19 nt, Artificial Sequence
  Sense Oligo
caguggcacgaucucaguu

SEQ ID NO: 25620 - RNA, 19 nt, Artificial Sequence
  Antisense Oligo
aacugagaucgugccacug

SEQ ID NO: 25621 - RNA, 19 nt, Artificial Sequence
  Sense Oligo
aguggcacgaucucaguuc

SEQ ID NO: 25622 - RNA, 19 nt, Artificial Sequence
  Antisense Oligo
gaacugagaucgugccacu

SEQ ID NO: 25623 - RNA, 19 nt, Artificial Sequence
  Sense Oligo
ugcaggguucaagcgauuc

SEQ ID NO: 25624 - RNA, 19 nt, Artificial Sequence
  Antisense Oligo
gaaucgcuugaacccugca

SEQ ID NO: 25625 - RNA, 19 nt, Artificial Sequence
  Sense Oligo
gcaggguucaagcgauucu

SEQ ID NO: 25626 - RNA, 19 nt, Artificial Sequence
  Antisense Oligo
agaaucgcuugaacccugc

SEQ ID NO: 25627 - RNA, 19 nt, Artificial Sequence
  Sense Oligo
caggguucaagcgauucuc

SEQ ID NO: 25628 - RNA, 19 nt, Artificial Sequence
  Antisense Oligo
gagaaucgcuugaacccug

SEQ ID NO: 25629 - RNA, 19 nt, Artificial Sequence
  Sense Oligo
aggguucaagcgauucucc

SEQ ID NO: 25630 - RNA, 19 nt, Artificial Sequence
  Antisense Oligo
ggagaaucgcuugaacccu

SEQ ID NO: 25631 - RNA, 19 nt, Artificial Sequence
  Sense Oligo
ggguucaagcgauucuccu

SEQ ID NO: 25632 - RNA, 19 nt, Artificial Sequence
  Antisense Oligo
aggagaaucgcuugaaccc

SEQ ID NO: 25633 - RNA, 19 nt, Artificial Sequence
  Sense Oligo
gguucaagcgauucuccug

SEQ ID NO: 25634 - RNA, 19 nt, Artificial Sequence
  Antisense Oligo
caggagaaucgcuugaacc

SEQ ID NO: 25635 - RNA, 19 nt, Artificial Sequence
  Sense Oligo
guucaagcgauucuccugc

SEQ ID NO: 25636 - RNA, 19 nt, Artificial Sequence
  Antisense Oligo
gcaggagaaucgcuugaac

SEQ ID NO: 25637 - RNA, 19 nt, Artificial Sequence
  Sense Oligo
uucaagcgauucuccugcc

SEQ ID NO: 25638 - RNA, 19 nt, Artificial Sequence
  Antisense Oligo
ggcaggagaaucgcuugaa

SEQ ID NO: 25639 - RNA, 19 nt, Artificial Sequence
  Sense Oligo
ucaagcgauucuccugccu

SEQ ID NO: 25640 - RNA, 19 nt, Artificial Sequence
  Antisense Oligo
aggcaggagaaucgcuuga

SEQ ID NO: 25641 - RNA, 19 nt, Artificial Sequence
  Sense Oligo
gcgauucuccugccucacc

SEQ ID NO: 25642 - RNA, 19 nt, Artificial Sequence
  Antisense Oligo
ggugaggcaggagaaucgc

SEQ ID NO: 25643 - RNA, 19 nt, Artificial Sequence
  Sense Oligo
cgauucuccugccucaccc

SEQ ID NO: 25644 - RNA, 19 nt, Artificial Sequence
  Antisense Oligo
gggugaggcaggagaaucg

SEQ ID NO: 25645 - RNA, 19 nt, Artificial Sequence
  Sense Oligo
gauucuccugccucacccu

SEQ ID NO: 25646 - RNA, 19 nt, Artificial Sequence
  Antisense Oligo
agggugaggcaggagaauc

SEQ ID NO: 25647 - RNA, 19 nt, Artificial Sequence
  Sense Oligo
auucuccugccucacccuc

SEQ ID NO: 25648 - RNA, 19 nt, Artificial Sequence
  Antisense Oligo
gagggugaggcaggagaau

SEQ ID NO: 25649 - RNA, 19 nt, Artificial Sequence
  Sense Oligo
gcugggauuacaggcaccu

SEQ ID NO: 25650 - RNA, 19 nt, Artificial Sequence
  Antisense Oligo
aggugccuguaaucccagc

SEQ ID NO: 25651 - RNA, 19 nt, Artificial Sequence
  Sense Oligo
ggauuacaggcaccugcca

SEQ ID NO: 25652 - RNA, 19 nt, Artificial Sequence
  Antisense Oligo
uggcaggugccuguaaucc

SEQ ID NO: 25653 - RNA, 19 nt, Artificial Sequence
  Sense Oligo
gauuacaggcaccugccac

SEQ ID NO: 25654 - RNA, 19 nt, Artificial Sequence
  Antisense Oligo
guggcaggugccuguaauc

SEQ ID NO: 25655 - RNA, 19 nt, Artificial Sequence
  Sense Oligo
auuacaggcaccugccacc

SEQ ID NO: 25656 - RNA, 19 nt, Artificial Sequence
  Antisense Oligo
gguggcaggugccuguaau

SEQ ID NO: 25657 - RNA, 19 nt, Artificial Sequence
  Sense Oligo
uuacaggcaccugccacca

SEQ ID NO: 25658 - RNA, 19 nt, Artificial Sequence
  Antisense Oligo
ugguggcaggugccuguaa

SEQ ID NO: 25659 - RNA, 19 nt, Artificial Sequence
  Sense Oligo
ccauguuggccaggcuggu

SEQ ID NO: 25660 - RNA, 19 nt, Artificial Sequence
  Antisense Oligo
accagccuggccaacaugg

SEQ ID NO: 25661 - RNA, 19 nt, Artificial Sequence
  Sense Oligo
cauguuggccaggcugguc

SEQ ID NO: 25662 - RNA, 19 nt, Artificial Sequence
  Antisense Oligo
gaccagccuggccaacaug

SEQ ID NO: 25663 - RNA, 19 nt, Artificial Sequence
  Sense Oligo
auguuggccaggcuggucu

SEQ ID NO: 25664 - RNA, 19 nt, Artificial Sequence
  Antisense Oligo
agaccagccuggccaacau

SEQ ID NO: 25665 - RNA, 19 nt, Artificial Sequence
  Sense Oligo
uguuggccaggcuggucuc

SEQ ID NO: 25666 - RNA, 19 nt, Artificial Sequence
  Antisense Oligo
gagaccagccuggccaaca

SEQ ID NO: 25667 - RNA, 19 nt, Artificial Sequence
  Sense Oligo
uuggccaggcuggucucga

SEQ ID NO: 25668 - RNA, 19 nt, Artificial Sequence
  Antisense Oligo
ucgagaccagccuggccaa

SEQ ID NO: 25669 - RNA, 19 nt, Artificial Sequence
  Sense Oligo
uggccaggcuggucucgaa

SEQ ID NO: 25670 - RNA, 19 nt, Artificial Sequence
  Antisense Oligo
uucgagaccagccuggcca

SEQ ID NO: 25671 - RNA, 19 nt, Artificial Sequence
  Sense Oligo
uuucuauagcauuuaggag

SEQ ID NO: 25672 - RNA, 19 nt, Artificial Sequence
  Antisense Oligo
cuccuaaaugcuauagaaa

SEQ ID NO: 25673 - RNA, 19 nt, Artificial Sequence
  Sense Oligo
uucuauagcauuuaggagu

SEQ ID NO: 25674 - RNA, 19 nt, Artificial Sequence
  Antisense Oligo
acuccuaaaugcuauagaa

SEQ ID NO: 25675 - RNA, 19 nt, Artificial Sequence
  Sense Oligo
ucuauagcauuuaggagua

SEQ ID NO: 25676 - RNA, 19 nt, Artificial Sequence
  Antisense Oligo
uacuccuaaaugcuauaga

SEQ ID NO: 25677 - RNA, 19 nt, Artificial Sequence
  Sense Oligo
cuauagcauuuaggaguau

SEQ ID NO: 25678 - RNA, 19 nt, Artificial Sequence
  Antisense Oligo
auacuccuaaaugcuauag

SEQ ID NO: 25679 - RNA, 19 nt, Artificial Sequence
  Sense Oligo
agcauuuaggaguauuaca

SEQ ID NO: 25680 - RNA, 19 nt, Artificial Sequence
  Antisense Oligo
uguaauacuccuaaaugcu

SEQ ID NO: 25681 - RNA, 19 nt, Artificial Sequence
  Sense Oligo
uuaggaguauuacaggacu

SEQ ID NO: 25682 - RNA, 19 nt, Artificial Sequence
  Antisense Oligo
aguccuguaauacuccuaa

SEQ ID NO: 25683 - RNA, 19 nt, Artificial Sequence
  Sense Oligo
aguauuacaggacucacua

SEQ ID NO: 25684 - RNA, 19 nt, Artificial Sequence
  Antisense Oligo
uagugaguccuguaauacu

SEQ ID NO: 25685 - RNA, 19 nt, Artificial Sequence
  Sense Oligo
guauuacaggacucacuaa

SEQ ID NO: 25686 - RNA, 19 nt, Artificial Sequence
  Antisense Oligo
uuagugaguccuguaauac

SEQ ID NO: 25687 - RNA, 19 nt, Artificial Sequence
  Sense Oligo
uuacaggacucacuaauaa

SEQ ID NO: 25688 - RNA, 19 nt, Artificial Sequence
  Antisense Oligo
uuauuagugaguccuguaa

SEQ ID NO: 25689 - RNA, 19 nt, Artificial Sequence
  Sense Oligo
aggacucacuaauaauauc

SEQ ID NO: 25690 - RNA, 19 nt, Artificial Sequence
  Antisense Oligo
gauauuauuagugaguccu

SEQ ID NO: 25691 - RNA, 19 nt, Artificial Sequence
  Sense Oligo
ggacucacuaauaauauca

SEQ ID NO: 25692 - RNA, 19 nt, Artificial Sequence
  Antisense Oligo
ugauauuauuagugagucc

SEQ ID NO: 25693 - RNA, 19 nt, Artificial Sequence
  Sense Oligo
agcaagggagcuucauacc

SEQ ID NO: 25694 - RNA, 19 nt, Artificial Sequence
  Antisense Oligo
gguaugaagcucccuugcu

SEQ ID NO: 25695 - RNA, 19 nt, Artificial Sequence
  Sense Oligo
gcaagggagcuucauaccu

SEQ ID NO: 25696 - RNA, 19 nt, Artificial Sequence
  Antisense Oligo
agguaugaagcucccuugc

SEQ ID NO: 25697 - RNA, 19 nt, Artificial Sequence
  Sense Oligo
agggagcuucauaccuuga

SEQ ID NO: 25698 - RNA, 19 nt, Artificial Sequence
  Antisense Oligo
ucaagguaugaagcucccu

SEQ ID NO: 25699 - RNA, 19 nt, Artificial Sequence
  Sense Oligo
uaccuugaagagugaugcu

SEQ ID NO: 25700 - RNA, 19 nt, Artificial Sequence
  Antisense Oligo
agcaucacucuucaaggua

SEQ ID NO: 25701 - RNA, 19 nt, Artificial Sequence
  Sense Oligo
accuugaagagugaugcuu

SEQ ID NO: 25702 - RNA, 19 nt, Artificial Sequence
  Antisense Oligo
aagcaucacucuucaaggu

SEQ ID NO: 25703 - RNA, 19 nt, Artificial Sequence
  Sense Oligo
ccuugaagagugaugcuug

SEQ ID NO: 25704 - RNA, 19 nt, Artificial Sequence
  Antisense Oligo
caagcaucacucuucaagg

SEQ ID NO: 25705 - RNA, 19 nt, Artificial Sequence
  Sense Oligo
cuugaagagugaugcuugu

SEQ ID NO: 25706 - RNA, 19 nt, Artificial Sequence
  Antisense Oligo
acaagcaucacucuucaag

SEQ ID NO: 25707 - RNA, 19 nt, Artificial Sequence
  Sense Oligo
uugaagagugaugcuugug

SEQ ID NO: 25708 - RNA, 19 nt, Artificial Sequence
  Antisense Oligo
cacaagcaucacucuucaa

SEQ ID NO: 25709 - RNA, 19 nt, Artificial Sequence
  Sense Oligo
agagugaugcuugugaagu

SEQ ID NO: 25710 - RNA, 19 nt, Artificial Sequence
  Antisense Oligo
acuucacaagcaucacucu

SEQ ID NO: 25711 - RNA, 19 nt, Artificial Sequence
  Sense Oligo
gagugaugcuugugaaguu

SEQ ID NO: 25712 - RNA, 19 nt, Artificial Sequence
  Antisense Oligo
aacuucacaagcaucacuc

SEQ ID NO: 25713 - RNA, 19 nt, Artificial Sequence
  Sense Oligo
agugaugcuugugaaguuu

SEQ ID NO: 25714 - RNA, 19 nt, Artificial Sequence
  Antisense Oligo
aaacuucacaagcaucacu

SEQ ID NO: 25715 - RNA, 19 nt, Artificial Sequence
  Sense Oligo
gugaugcuugugaaguuua

SEQ ID NO: 25716 - RNA, 19 nt, Artificial Sequence
  Antisense Oligo
uaaacuucacaagcaucac

SEQ ID NO: 25717 - RNA, 19 nt, Artificial Sequence
  Sense Oligo
gcuugugaaguuuauuacu

SEQ ID NO: 25718 - RNA, 19 nt, Artificial Sequence
  Antisense Oligo
aguaauaaacuucacaagc

SEQ ID NO: 25719 - RNA, 19 nt, Artificial Sequence
  Sense Oligo
uuuugcagagggcgacggc

SEQ ID NO: 25720 - RNA, 19 nt, Artificial Sequence
  Antisense Oligo
gccgucgcccucugcaaaa

SEQ ID NO: 25721 - RNA, 19 nt, Artificial Sequence
  Sense Oligo
agauggucauguguucauu

SEQ ID NO: 25722 - RNA, 19 nt, Artificial Sequence
  Antisense Oligo
aaugaacacaugaccaucu

SEQ ID NO: 25723 - RNA, 19 nt, Artificial Sequence
  Sense Oligo
gauggucauguguucauug

SEQ ID NO: 25724 - RNA, 19 nt, Artificial Sequence
  Antisense Oligo
caaugaacacaugaccauc

SEQ ID NO: 25725 - RNA, 19 nt, Artificial Sequence
  Sense Oligo
auggucauguguucauuga

SEQ ID NO: 25726 - RNA, 19 nt, Artificial Sequence
  Antisense Oligo
ucaaugaacacaugaccau

SEQ ID NO: 25727 - RNA, 19 nt, Artificial Sequence
  Sense Oligo
uggucauguguucauugaa

SEQ ID NO: 25728 - RNA, 19 nt, Artificial Sequence
  Antisense Oligo
uucaaugaacacaugacca

SEQ ID NO: 25729 - RNA, 19 nt, Artificial Sequence
  Sense Oligo
agacuuaccgagcauccac

SEQ ID NO: 25730 - RNA, 19 nt, Artificial Sequence
  Antisense Oligo
guggaugcucgguaagucu

SEQ ID NO: 25731 - RNA, 19 nt, Artificial Sequence
  Sense Oligo
gacuuaccgagcauccacc

SEQ ID NO: 25732 - RNA, 19 nt, Artificial Sequence
  Antisense Oligo
gguggaugcucgguaaguc

SEQ ID NO: 25733 - RNA, 19 nt, Artificial Sequence
  Sense Oligo
acuuaccgagcauccacca

SEQ ID NO: 25734 - RNA, 19 nt, Artificial Sequence
  Antisense Oligo
ugguggaugcucgguaagu

SEQ ID NO: 25735 - RNA, 19 nt, Artificial Sequence
  Sense Oligo
cuuaccgagcauccaccac

SEQ ID NO: 25736 - RNA, 19 nt, Artificial Sequence
  Antisense Oligo
gugguggaugcucgguaag

SEQ ID NO: 25737 - RNA, 19 nt, Artificial Sequence
  Sense Oligo
uuaccgagcauccaccacg

SEQ ID NO: 25738 - RNA, 19 nt, Artificial Sequence
  Antisense Oligo
cgugguggaugcucgguaa

SEQ ID NO: 25739 - RNA, 19 nt, Artificial Sequence
  Sense Oligo
uaccgagcauccaccacgc

SEQ ID NO: 25740 - RNA, 19 nt, Artificial Sequence
  Antisense Oligo
gcgugguggaugcucggua

SEQ ID NO: 25741 - RNA, 19 nt, Artificial Sequence
  Sense Oligo
cgagcauccaccacgccua

SEQ ID NO: 25742 - RNA, 19 nt, Artificial Sequence
  Antisense Oligo
uaggcgugguggaugcucg

SEQ ID NO: 25743 - RNA, 19 nt, Artificial Sequence
  Sense Oligo
gagcauccaccacgccuag

SEQ ID NO: 25744 - RNA, 19 nt, Artificial Sequence
  Antisense Oligo
cuaggcgugguggaugcuc

SEQ ID NO: 25745 - RNA, 19 nt, Artificial Sequence
  Sense Oligo
agcauccaccacgccuagg

SEQ ID NO: 25746 - RNA, 19 nt, Artificial Sequence
  Antisense Oligo
ccuaggcgugguggaugcu

SEQ ID NO: 25747 - RNA, 19 nt, Artificial Sequence
  Sense Oligo
gcauccaccacgccuaggu

SEQ ID NO: 25748 - RNA, 19 nt, Artificial Sequence
  Antisense Oligo
accuaggcgugguggaugc

SEQ ID NO: 25749 - RNA, 19 nt, Artificial Sequence
  Sense Oligo
cauccaccacgccuagguc

SEQ ID NO: 25750 - RNA, 19 nt, Artificial Sequence
  Antisense Oligo
gaccuaggcgugguggaug

SEQ ID NO: 25751 - RNA, 19 nt, Artificial Sequence
  Sense Oligo
auccaccacgccuaggucu

SEQ ID NO: 25752 - RNA, 19 nt, Artificial Sequence
  Antisense Oligo
agaccuaggcgugguggau

SEQ ID NO: 25753 - RNA, 19 nt, Artificial Sequence
  Sense Oligo
uccaccacgccuaggucuu

SEQ ID NO: 25754 - RNA, 19 nt, Artificial Sequence
  Antisense Oligo
aagaccuaggcguggugga

SEQ ID NO: 25755 - RNA, 19 nt, Artificial Sequence
  Sense Oligo
ccacgccuaggucuuaagu

SEQ ID NO: 25756 - RNA, 19 nt, Artificial Sequence
  Antisense Oligo
acuuaagaccuaggcgugg

SEQ ID NO: 25757 - RNA, 19 nt, Artificial Sequence
  Sense Oligo
cacgccuaggucuuaagug

SEQ ID NO: 25758 - RNA, 19 nt, Artificial Sequence
  Antisense Oligo
cacuuaagaccuaggcgug

SEQ ID NO: 25759 - RNA, 19 nt, Artificial Sequence
  Sense Oligo
acgccuaggucuuaagugu

SEQ ID NO: 25760 - RNA, 19 nt, Artificial Sequence
  Antisense Oligo
acacuuaagaccuaggcgu

SEQ ID NO: 25761 - RNA, 19 nt, Artificial Sequence
  Sense Oligo
cgccuaggucuuaagugua

SEQ ID NO: 25762 - RNA, 19 nt, Artificial Sequence
  Antisense Oligo
uacacuuaagaccuaggcg

SEQ ID NO: 25763 - RNA, 19 nt, Artificial Sequence
  Sense Oligo
gccuaggucuuaaguguag

SEQ ID NO: 25764 - RNA, 19 nt, Artificial Sequence
  Antisense Oligo
cuacacuuaagaccuaggc

SEQ ID NO: 25765 - RNA, 19 nt, Artificial Sequence
  Sense Oligo
cuaggucuuaaguguaggc

SEQ ID NO: 25766 - RNA, 19 nt, Artificial Sequence
  Antisense Oligo
gccuacacuuaagaccuag

SEQ ID NO: 25767 - RNA, 19 nt, Artificial Sequence
  Sense Oligo
uaggucuuaaguguaggca

SEQ ID NO: 25768 - RNA, 19 nt, Artificial Sequence
  Antisense Oligo
ugccuacacuuaagaccua

SEQ ID NO: 25769 - RNA, 19 nt, Artificial Sequence
  Sense Oligo
aggucuuaaguguaggcag

SEQ ID NO: 25770 - RNA, 19 nt, Artificial Sequence
  Antisense Oligo
cugccuacacuuaagaccu

SEQ ID NO: 25771 - RNA, 19 nt, Artificial Sequence
  Sense Oligo
cuuuccucugugggcuggg

SEQ ID NO: 25772 - RNA, 19 nt, Artificial Sequence
  Antisense Oligo
cccagcccacagaggaaag

SEQ ID NO: 25773 - RNA, 19 nt, Artificial Sequence
  Sense Oligo
uagccagaccuaaggcaca

SEQ ID NO: 25774 - RNA, 19 nt, Artificial Sequence
  Antisense Oligo
ugugccuuaggucuggcua

SEQ ID NO: 25775 - RNA, 19 nt, Artificial Sequence
  Sense Oligo
agccagaccuaaggcacag

SEQ ID NO: 25776 - RNA, 19 nt, Artificial Sequence
  Antisense Oligo
cugugccuuaggucuggcu

SEQ ID NO: 25777 - RNA, 19 nt, Artificial Sequence
  Sense Oligo
gccagaccuaaggcacagu

SEQ ID NO: 25778 - RNA, 19 nt, Artificial Sequence
  Antisense Oligo
acugugccuuaggucuggc

SEQ ID NO: 25779 - RNA, 19 nt, Artificial Sequence
  Sense Oligo
ccagaccuaaggcacagug

SEQ ID NO: 25780 - RNA, 19 nt, Artificial Sequence
  Antisense Oligo
cacugugccuuaggucugg

SEQ ID NO: 25781 - RNA, 19 nt, Artificial Sequence
  Sense Oligo
cagaccuaaggcacagugu

SEQ ID NO: 25782 - RNA, 19 nt, Artificial Sequence
  Antisense Oligo
acacugugccuuaggucug

SEQ ID NO: 25783 - RNA, 19 nt, Artificial Sequence
  Sense Oligo
agaccuaaggcacagugug

SEQ ID NO: 25784 - RNA, 19 nt, Artificial Sequence
  Antisense Oligo
cacacugugccuuaggucu

SEQ ID NO: 25785 - RNA, 19 nt, Artificial Sequence
  Sense Oligo
gaccuaaggcacagugugg

SEQ ID NO: 25786 - RNA, 19 nt, Artificial Sequence
  Antisense Oligo
ccacacugugccuuagguc

SEQ ID NO: 25787 - RNA, 19 nt, Artificial Sequence
  Sense Oligo
accuaaggcacaguguggg

SEQ ID NO: 25788 - RNA, 19 nt, Artificial Sequence
  Antisense Oligo
cccacacugugccuuaggu

SEQ ID NO: 25789 - RNA, 19 nt, Artificial Sequence
  Sense Oligo
ccuaaggcacagugugggu

SEQ ID NO: 25790 - RNA, 19 nt, Artificial Sequence
  Antisense Oligo
acccacacugugccuuagg

SEQ ID NO: 25791 - RNA, 19 nt, Artificial Sequence
  Sense Oligo
cuaaggcacagugugggug

SEQ ID NO: 25792 - RNA, 19 nt, Artificial Sequence
  Antisense Oligo
cacccacacugugccuuag

SEQ ID NO: 25793 - RNA, 19 nt, Artificial Sequence
  Sense Oligo
uaaggcacagugugggugg

SEQ ID NO: 25794 - RNA, 19 nt, Artificial Sequence
  Antisense Oligo
ccacccacacugugccuua

SEQ ID NO: 25795 - RNA, 19 nt, Artificial Sequence
  Sense Oligo
aaggcacagugugggugga

SEQ ID NO: 25796 - RNA, 19 nt, Artificial Sequence
  Antisense Oligo
uccacccacacugugccuu

SEQ ID NO: 25797 - RNA, 19 nt, Artificial Sequence
  Sense Oligo
aggcacaguguggguggag

SEQ ID NO: 25798 - RNA, 19 nt, Artificial Sequence
  Antisense Oligo
cuccacccacacugugccu

SEQ ID NO: 25799 - RNA, 19 nt, Artificial Sequence
  Sense Oligo
auaaaggauggauucauag

SEQ ID NO: 25800 - RNA, 19 nt, Artificial Sequence
  Antisense Oligo
cuaugaauccauccuuuau

SEQ ID NO: 25801 - RNA, 19 nt, Artificial Sequence
  Sense Oligo
uaaaggauggauucauagg

SEQ ID NO: 25802 - RNA, 19 nt, Artificial Sequence
  Antisense Oligo
ccuaugaauccauccuuua

SEQ ID NO: 25803 - RNA, 19 nt, Artificial Sequence
  Sense Oligo
cucgggcucagcagacagu

SEQ ID NO: 25804 - RNA, 19 nt, Artificial Sequence
  Antisense Oligo
acugucugcugagcccgag

SEQ ID NO: 25805 - RNA, 19 nt, Artificial Sequence
  Sense Oligo
ucgggcucagcagacagug

SEQ ID NO: 25806 - RNA, 19 nt, Artificial Sequence
  Antisense Oligo
cacugucugcugagcccga

SEQ ID NO: 25807 - RNA, 19 nt, Artificial Sequence
  Sense Oligo
gcucagcagacagugaagu

SEQ ID NO: 25808 - RNA, 19 nt, Artificial Sequence
  Antisense Oligo
acuucacugucugcugagc

SEQ ID NO: 25809 - RNA, 19 nt, Artificial Sequence
  Sense Oligo
ucagcagacagugaagucc

SEQ ID NO: 25810 - RNA, 19 nt, Artificial Sequence
  Antisense Oligo
ggacuucacugucugcuga

SEQ ID NO: 25811 - RNA, 19 nt, Artificial Sequence
  Sense Oligo
cagcagacagugaaguccg

SEQ ID NO: 25812 - RNA, 19 nt, Artificial Sequence
  Antisense Oligo
cggacuucacugucugcug

SEQ ID NO: 25813 - RNA, 19 nt, Artificial Sequence
  Sense Oligo
agcagacagugaaguccgu

SEQ ID NO: 25814 - RNA, 19 nt, Artificial Sequence
  Antisense Oligo
acggacuucacugucugcu

SEQ ID NO: 25815 - RNA, 19 nt, Artificial Sequence
  Sense Oligo
gcagacagugaaguccgug

SEQ ID NO: 25816 - RNA, 19 nt, Artificial Sequence
  Antisense Oligo
cacggacuucacugucugc

SEQ ID NO: 25817 - RNA, 19 nt, Artificial Sequence
  Sense Oligo
cagacagugaaguccgugg

SEQ ID NO: 25818 - RNA, 19 nt, Artificial Sequence
  Antisense Oligo
ccacggacuucacugucug

SEQ ID NO: 25819 - RNA, 19 nt, Artificial Sequence
  Sense Oligo
agacagugaaguccgugga

SEQ ID NO: 25820 - RNA, 19 nt, Artificial Sequence
  Antisense Oligo
uccacggacuucacugucu

SEQ ID NO: 25821 - RNA, 19 nt, Artificial Sequence
  Sense Oligo
gacagugaaguccguggag

SEQ ID NO: 25822 - RNA, 19 nt, Artificial Sequence
  Antisense Oligo
cuccacggacuucacuguc

SEQ ID NO: 25823 - RNA, 19 nt, Artificial Sequence
  Sense Oligo
agaugucugcugucaccca

SEQ ID NO: 25824 - RNA, 19 nt, Artificial Sequence
  Antisense Oligo
ugggugacagcagacaucu

SEQ ID NO: 25825 - RNA, 19 nt, Artificial Sequence
  Sense Oligo
gaugucugcugucacccag

SEQ ID NO: 25826 - RNA, 19 nt, Artificial Sequence
  Antisense Oligo
cugggugacagcagacauc

SEQ ID NO: 25827 - RNA, 19 nt, Artificial Sequence
  Sense Oligo
cacccagaaugacacggga

SEQ ID NO: 25828 - RNA, 19 nt, Artificial Sequence
  Antisense Oligo
ucccgugucauucugggug

SEQ ID NO: 25829 - RNA, 19 nt, Artificial Sequence
  Sense Oligo
acccagaaugacacgggaa

SEQ ID NO: 25830 - RNA, 19 nt, Artificial Sequence
  Antisense Oligo
uucccgugucauucugggu

SEQ ID NO: 25831 - RNA, 19 nt, Artificial Sequence
  Sense Oligo
acaguaguauagcucugaa

SEQ ID NO: 25832 - RNA, 19 nt, Artificial Sequence
  Antisense Oligo
uucagagcuauacuacugu

SEQ ID NO: 25833 - RNA, 19 nt, Artificial Sequence
  Sense Oligo
uaguauagcucugaauggg

SEQ ID NO: 25834 - RNA, 19 nt, Artificial Sequence
  Antisense Oligo
cccauucagagcuauacua

SEQ ID NO: 25835 - RNA, 19 nt, Artificial Sequence
  Sense Oligo
aguauagcucugaaugggu

SEQ ID NO: 25836 - RNA, 19 nt, Artificial Sequence
  Antisense Oligo
acccauucagagcuauacu

SEQ ID NO: 25837 - RNA, 19 nt, Artificial Sequence
  Sense Oligo
guauagcucugaauggguu

SEQ ID NO: 25838 - RNA, 19 nt, Artificial Sequence
  Antisense Oligo
aacccauucagagcuauac

SEQ ID NO: 25839 - RNA, 19 nt, Artificial Sequence
  Sense Oligo
uauagcucugaauggguuu

SEQ ID NO: 25840 - RNA, 19 nt, Artificial Sequence
  Antisense Oligo
aaacccauucagagcuaua

SEQ ID NO: 25841 - RNA, 19 nt, Artificial Sequence
  Sense Oligo
gcucugaauggguuuggug

SEQ ID NO: 25842 - RNA, 19 nt, Artificial Sequence
  Antisense Oligo
caccaaacccauucagagc

SEQ ID NO: 25843 - RNA, 19 nt, Artificial Sequence
  Sense Oligo
cucugaauggguuuggugg

SEQ ID NO: 25844 - RNA, 19 nt, Artificial Sequence
  Antisense Oligo
ccaccaaacccauucagag

SEQ ID NO: 25845 - RNA, 19 nt, Artificial Sequence
  Sense Oligo
ucugaauggguuugguggg

SEQ ID NO: 25846 - RNA, 19 nt, Artificial Sequence
  Antisense Oligo
cccaccaaacccauucaga

SEQ ID NO: 25847 - RNA, 19 nt, Artificial Sequence
  Sense Oligo
cugaauggguuuggugggu

SEQ ID NO: 25848 - RNA, 19 nt, Artificial Sequence
  Antisense Oligo
acccaccaaacccauucag

SEQ ID NO: 25849 - RNA, 19 nt, Artificial Sequence
  Sense Oligo
ugaauggguuugguggguu

SEQ ID NO: 25850 - RNA, 19 nt, Artificial Sequence
  Antisense Oligo
aacccaccaaacccauuca

SEQ ID NO: 25851 - RNA, 19 nt, Artificial Sequence
  Sense Oligo
gaauggguuugguggguuu

SEQ ID NO: 25852 - RNA, 19 nt, Artificial Sequence
  Antisense Oligo
aaacccaccaaacccauuc

SEQ ID NO: 25853 - RNA, 19 nt, Artificial Sequence
  Sense Oligo
auggguuugguggguuuug

SEQ ID NO: 25854 - RNA, 19 nt, Artificial Sequence
  Antisense Oligo
caaaacccaccaaacccau

SEQ ID NO: 25855 - RNA, 19 nt, Artificial Sequence
  Sense Oligo
uuuuguuuguuuugaggca

SEQ ID NO: 25856 - RNA, 19 nt, Artificial Sequence
  Antisense Oligo
ugccucaaaacaaacaaaa

SEQ ID NO: 25857 - RNA, 19 nt, Artificial Sequence
  Sense Oligo
gcaaaaucauagcucacug

SEQ ID NO: 25858 - RNA, 19 nt, Artificial Sequence
  Antisense Oligo
cagugagcuaugauuuugc

SEQ ID NO: 25859 - RNA, 19 nt, Artificial Sequence
  Sense Oligo
caaaaucauagcucacugc

SEQ ID NO: 25860 - RNA, 19 nt, Artificial Sequence
  Antisense Oligo
gcagugagcuaugauuuug

SEQ ID NO: 25861 - RNA, 19 nt, Artificial Sequence
  Sense Oligo
aaaaucauagcucacugca

SEQ ID NO: 25862 - RNA, 19 nt, Artificial Sequence
  Antisense Oligo
ugcagugagcuaugauuuu

SEQ ID NO: 25863 - RNA, 19 nt, Artificial Sequence
  Sense Oligo
uagcucacugcagccuuga

SEQ ID NO: 25864 - RNA, 19 nt, Artificial Sequence
  Antisense Oligo
ucaaggcugcagugagcua

SEQ ID NO: 25865 - RNA, 19 nt, Artificial Sequence
  Sense Oligo
agcucacugcagccuugac

SEQ ID NO: 25866 - RNA, 19 nt, Artificial Sequence
  Antisense Oligo
gucaaggcugcagugagcu

SEQ ID NO: 25867 - RNA, 19 nt, Artificial Sequence
  Sense Oligo
gcucacugcagccuugacu

SEQ ID NO: 25868 - RNA, 19 nt, Artificial Sequence
  Antisense Oligo
agucaaggcugcagugagc

SEQ ID NO: 25869 - RNA, 19 nt, Artificial Sequence
  Sense Oligo
cucacugcagccuugacuu

SEQ ID NO: 25870 - RNA, 19 nt, Artificial Sequence
  Antisense Oligo
aagucaaggcugcagugag

SEQ ID NO: 25871 - RNA, 19 nt, Artificial Sequence
  Sense Oligo
ucacugcagccuugacuuc

SEQ ID NO: 25872 - RNA, 19 nt, Artificial Sequence
  Antisense Oligo
gaagucaaggcugcaguga

SEQ ID NO: 25873 - RNA, 19 nt, Artificial Sequence
  Sense Oligo
cacugcagccuugacuucc

SEQ ID NO: 25874 - RNA, 19 nt, Artificial Sequence
  Antisense Oligo
ggaagucaaggcugcagug

SEQ ID NO: 25875 - RNA, 19 nt, Artificial Sequence
  Sense Oligo
ugccucagccucccgagua

SEQ ID NO: 25876 - RNA, 19 nt, Artificial Sequence
  Antisense Oligo
uacucgggaggcugaggca

SEQ ID NO: 25877 - RNA, 19 nt, Artificial Sequence
  Sense Oligo
cucagccucccgaguagcu

SEQ ID NO: 25878 - RNA, 19 nt, Artificial Sequence
  Antisense Oligo
agcuacucgggaggcugag

SEQ ID NO: 25879 - RNA, 19 nt, Artificial Sequence
  Sense Oligo
uagcugggacuacaggcgu

SEQ ID NO: 25880 - RNA, 19 nt, Artificial Sequence
  Antisense Oligo
acgccuguagucccagcua

SEQ ID NO: 25881 - RNA, 19 nt, Artificial Sequence
  Sense Oligo
agcugggacuacaggcgug

SEQ ID NO: 25882 - RNA, 19 nt, Artificial Sequence
  Antisense Oligo
cacgccuguagucccagcu

SEQ ID NO: 25883 - RNA, 19 nt, Artificial Sequence
  Sense Oligo
cugggacuacaggcgugca

SEQ ID NO: 25884 - RNA, 19 nt, Artificial Sequence
  Antisense Oligo
ugcacgccuguagucccag

SEQ ID NO: 25885 - RNA, 19 nt, Artificial Sequence
  Sense Oligo
ugggacuacaggcgugcac

SEQ ID NO: 25886 - RNA, 19 nt, Artificial Sequence
  Antisense Oligo
gugcacgccuguaguccca

SEQ ID NO: 25887 - RNA, 19 nt, Artificial Sequence
  Sense Oligo
cgugcaccaccacacccaa

SEQ ID NO: 25888 - RNA, 19 nt, Artificial Sequence
  Antisense Oligo
uugggugugguggugcacg

SEQ ID NO: 25889 - RNA, 19 nt, Artificial Sequence
  Sense Oligo
gugcaccaccacacccaau

SEQ ID NO: 25890 - RNA, 19 nt, Artificial Sequence
  Antisense Oligo
auugggugugguggugcac

SEQ ID NO: 25891 - RNA, 19 nt, Artificial Sequence
  Sense Oligo
ugcaccaccacacccaauu

SEQ ID NO: 25892 - RNA, 19 nt, Artificial Sequence
  Antisense Oligo
aauugggugugguggugca

SEQ ID NO: 25893 - RNA, 19 nt, Artificial Sequence
  Sense Oligo
gcaccaccacacccaauua

SEQ ID NO: 25894 - RNA, 19 nt, Artificial Sequence
  Antisense Oligo
uaauugggugugguggugc

SEQ ID NO: 25895 - RNA, 19 nt, Artificial Sequence
  Sense Oligo
caccaccacacccaauuaa

SEQ ID NO: 25896 - RNA, 19 nt, Artificial Sequence
  Antisense Oligo
uuaauugggugugguggug

SEQ ID NO: 25897 - RNA, 19 nt, Artificial Sequence
  Sense Oligo
cccagccucccaaagugca

SEQ ID NO: 25898 - RNA, 19 nt, Artificial Sequence
  Antisense Oligo
ugcacuuugggaggcuggg

SEQ ID NO: 25899 - RNA, 19 nt, Artificial Sequence
  Sense Oligo
ccaccacccuagccucguu

SEQ ID NO: 25900 - RNA, 19 nt, Artificial Sequence
  Antisense Oligo
aacgaggcuaggguggugg

SEQ ID NO: 25901 - RNA, 19 nt, Artificial Sequence
  Sense Oligo
caccacccuagccucguuu

SEQ ID NO: 25902 - RNA, 19 nt, Artificial Sequence
  Antisense Oligo
aaacgaggcuaggguggug

SEQ ID NO: 25903 - RNA, 19 nt, Artificial Sequence
  Sense Oligo
accacccuagccucguuuu

SEQ ID NO: 25904 - RNA, 19 nt, Artificial Sequence
  Antisense Oligo
aaaacgaggcuaggguggu

SEQ ID NO: 25905 - RNA, 19 nt, Artificial Sequence
  Sense Oligo
ccacccuagccucguuuug

SEQ ID NO: 25906 - RNA, 19 nt, Artificial Sequence
  Antisense Oligo
caaaacgaggcuagggugg

SEQ ID NO: 25907 - RNA, 19 nt, Artificial Sequence
  Sense Oligo
cacccuagccucguuuugu

SEQ ID NO: 25908 - RNA, 19 nt, Artificial Sequence
  Antisense Oligo
acaaaacgaggcuagggug

SEQ ID NO: 25909 - RNA, 19 nt, Artificial Sequence
  Sense Oligo
acccuagccucguuuugua

SEQ ID NO: 25910 - RNA, 19 nt, Artificial Sequence
  Antisense Oligo
uacaaaacgaggcuagggu

SEQ ID NO: 25911 - RNA, 19 nt, Artificial Sequence
  Sense Oligo
uagccucguuuuguauuuu

SEQ ID NO: 25912 - RNA, 19 nt, Artificial Sequence
  Antisense Oligo
aaaauacaaaacgaggcua

SEQ ID NO: 25913 - RNA, 19 nt, Artificial Sequence
  Sense Oligo
uuuuggaaguugacagauu

SEQ ID NO: 25914 - RNA, 19 nt, Artificial Sequence
  Antisense Oligo
aaucugucaacuuccaaaa

SEQ ID NO: 25915 - RNA, 19 nt, Artificial Sequence
  Sense Oligo
aacuauaaauuggugagga

SEQ ID NO: 25916 - RNA, 19 nt, Artificial Sequence
  Antisense Oligo
uccucaccaauuuauaguu

SEQ ID NO: 25917 - RNA, 19 nt, Artificial Sequence
  Sense Oligo
acuauaaauuggugaggau

SEQ ID NO: 25918 - RNA, 19 nt, Artificial Sequence
  Antisense Oligo
auccucaccaauuuauagu

SEQ ID NO: 25919 - RNA, 19 nt, Artificial Sequence
  Sense Oligo
cuauaaauuggugaggaua

SEQ ID NO: 25920 - RNA, 19 nt, Artificial Sequence
  Antisense Oligo
uauccucaccaauuuauag

SEQ ID NO: 25921 - RNA, 19 nt, Artificial Sequence
  Sense Oligo
uauaaauuggugaggauac

SEQ ID NO: 25922 - RNA, 19 nt, Artificial Sequence
  Antisense Oligo
guauccucaccaauuuaua

SEQ ID NO: 25923 - RNA, 19 nt, Artificial Sequence
  Sense Oligo
auaaauuggugaggauacu

SEQ ID NO: 25924 - RNA, 19 nt, Artificial Sequence
  Antisense Oligo
aguauccucaccaauuuau

SEQ ID NO: 25925 - RNA, 19 nt, Artificial Sequence
  Sense Oligo
uaaauuggugaggauacuu

SEQ ID NO: 25926 - RNA, 19 nt, Artificial Sequence
  Antisense Oligo
aaguauccucaccaauuua

SEQ ID NO: 25927 - RNA, 19 nt, Artificial Sequence
  Sense Oligo
aaauuggugaggauacuua

SEQ ID NO: 25928 - RNA, 19 nt, Artificial Sequence
  Antisense Oligo
uaaguauccucaccaauuu

SEQ ID NO: 25929 - RNA, 19 nt, Artificial Sequence
  Sense Oligo
aauuggugaggauacuuaa

SEQ ID NO: 25930 - RNA, 19 nt, Artificial Sequence
  Antisense Oligo
uuaaguauccucaccaauu

SEQ ID NO: 25931 - RNA, 19 nt, Artificial Sequence
  Sense Oligo
auuggugaggauacuuaac

SEQ ID NO: 25932 - RNA, 19 nt, Artificial Sequence
  Antisense Oligo
guuaaguauccucaccaau

SEQ ID NO: 25933 - RNA, 19 nt, Artificial Sequence
  Sense Oligo
uuauaguaaagcugucaac

SEQ ID NO: 25934 - RNA, 19 nt, Artificial Sequence
  Antisense Oligo
guugacagcuuuacuauaa

SEQ ID NO: 25935 - RNA, 19 nt, Artificial Sequence
  Sense Oligo
agaugugagcuggaguuag

SEQ ID NO: 25936 - RNA, 19 nt, Artificial Sequence
  Antisense Oligo
cuaacuccagcucacaucu

SEQ ID NO: 25937 - RNA, 19 nt, Artificial Sequence
  Sense Oligo
gaugugagcuggaguuagg

SEQ ID NO: 25938 - RNA, 19 nt, Artificial Sequence
  Antisense Oligo
ccuaacuccagcucacauc

SEQ ID NO: 25939 - RNA, 19 nt, Artificial Sequence
  Sense Oligo
ugugagcuggaguuagggc

SEQ ID NO: 25940 - RNA, 19 nt, Artificial Sequence
  Antisense Oligo
gcccuaacuccagcucaca

SEQ ID NO: 25941 - RNA, 19 nt, Artificial Sequence
  Sense Oligo
uggaguuagggcacugcau

SEQ ID NO: 25942 - RNA, 19 nt, Artificial Sequence
  Antisense Oligo
augcagugcccuaacucca

SEQ ID NO: 25943 - RNA, 19 nt, Artificial Sequence
  Sense Oligo
ggaguuagggcacugcaua

SEQ ID NO: 25944 - RNA, 19 nt, Artificial Sequence
  Antisense Oligo
uaugcagugcccuaacucc

SEQ ID NO: 25945 - RNA, 19 nt, Artificial Sequence
  Sense Oligo
aguuagggcacugcauaug

SEQ ID NO: 25946 - RNA, 19 nt, Artificial Sequence
  Antisense Oligo
cauaugcagugcccuaacu

SEQ ID NO: 25947 - RNA, 19 nt, Artificial Sequence
  Sense Oligo
guuagggcacugcauaugc

SEQ ID NO: 25948 - RNA, 19 nt, Artificial Sequence
  Antisense Oligo
gcauaugcagugcccuaac

SEQ ID NO: 25949 - RNA, 19 nt, Artificial Sequence
  Sense Oligo
uuagggcacugcauaugcg

SEQ ID NO: 25950 - RNA, 19 nt, Artificial Sequence
  Antisense Oligo
cgcauaugcagugcccuaa

SEQ ID NO: 25951 - RNA, 19 nt, Artificial Sequence
  Sense Oligo
uagggcacugcauaugcgg

SEQ ID NO: 25952 - RNA, 19 nt, Artificial Sequence
  Antisense Oligo
ccgcauaugcagugcccua

SEQ ID NO: 25953 - RNA, 19 nt, Artificial Sequence
  Sense Oligo
agggcacugcauaugcgga

SEQ ID NO: 25954 - RNA, 19 nt, Artificial Sequence
  Antisense Oligo
uccgcauaugcagugcccu

SEQ ID NO: 25955 - RNA, 19 nt, Artificial Sequence
  Sense Oligo
gggcacugcauaugcggac

SEQ ID NO: 25956 - RNA, 19 nt, Artificial Sequence
  Antisense Oligo
guccgcauaugcagugccc

SEQ ID NO: 25957 - RNA, 19 nt, Artificial Sequence
  Sense Oligo
ggcacugcauaugcggacc

SEQ ID NO: 25958 - RNA, 19 nt, Artificial Sequence
  Antisense Oligo
gguccgcauaugcagugcc

SEQ ID NO: 25959 - RNA, 19 nt, Artificial Sequence
  Sense Oligo
gcacugcauaugcggaccg

SEQ ID NO: 25960 - RNA, 19 nt, Artificial Sequence
  Antisense Oligo
cgguccgcauaugcagugc

SEQ ID NO: 25961 - RNA, 19 nt, Artificial Sequence
  Sense Oligo
cacugcauaugcggaccgg

SEQ ID NO: 25962 - RNA, 19 nt, Artificial Sequence
  Antisense Oligo
ccgguccgcauaugcagug

SEQ ID NO: 25963 - RNA, 19 nt, Artificial Sequence
  Sense Oligo
acugcauaugcggaccgga

SEQ ID NO: 25964 - RNA, 19 nt, Artificial Sequence
  Antisense Oligo
uccgguccgcauaugcagu

SEQ ID NO: 25965 - RNA, 19 nt, Artificial Sequence
  Sense Oligo
cugcauaugcggaccggag

SEQ ID NO: 25966 - RNA, 19 nt, Artificial Sequence
  Antisense Oligo
cuccgguccgcauaugcag

SEQ ID NO: 25967 - RNA, 19 nt, Artificial Sequence
  Sense Oligo
ugcauaugcggaccggagc

SEQ ID NO: 25968 - RNA, 19 nt, Artificial Sequence
  Antisense Oligo
gcuccgguccgcauaugca

SEQ ID NO: 25969 - RNA, 19 nt, Artificial Sequence
  Sense Oligo
cauaugcggaccggagcgu

SEQ ID NO: 25970 - RNA, 19 nt, Artificial Sequence
  Antisense Oligo
acgcuccgguccgcauaug

SEQ ID NO: 25971 - RNA, 19 nt, Artificial Sequence
  Sense Oligo
auaugcggaccggagcgug

SEQ ID NO: 25972 - RNA, 19 nt, Artificial Sequence
  Antisense Oligo
cacgcuccgguccgcauau

SEQ ID NO: 25973 - RNA, 19 nt, Artificial Sequence
  Sense Oligo
uaugcggaccggagcgugu

SEQ ID NO: 25974 - RNA, 19 nt, Artificial Sequence
  Antisense Oligo
acacgcuccgguccgcaua

SEQ ID NO: 25975 - RNA, 19 nt, Artificial Sequence
  Sense Oligo
augcggaccggagcguguu

SEQ ID NO: 25976 - RNA, 19 nt, Artificial Sequence
  Antisense Oligo
aacacgcuccgguccgcau

SEQ ID NO: 25977 - RNA, 19 nt, Artificial Sequence
  Sense Oligo
accggagcguguuggucag

SEQ ID NO: 25978 - RNA, 19 nt, Artificial Sequence
  Antisense Oligo
cugaccaacacgcuccggu

SEQ ID NO: 25979 - RNA, 19 nt, Artificial Sequence
  Sense Oligo
cguguuggucaggguguau

SEQ ID NO: 25980 - RNA, 19 nt, Artificial Sequence
  Antisense Oligo
auacacccugaccaacacg

SEQ ID NO: 25981 - RNA, 19 nt, Artificial Sequence
  Sense Oligo
gucaggguguauacacggg

SEQ ID NO: 25982 - RNA, 19 nt, Artificial Sequence
  Antisense Oligo
cccguguauacacccugac

SEQ ID NO: 25983 - RNA, 19 nt, Artificial Sequence
  Sense Oligo
ggguguauacacgggugug

SEQ ID NO: 25984 - RNA, 19 nt, Artificial Sequence
  Antisense Oligo
cacacccguguauacaccc

SEQ ID NO: 25985 - RNA, 19 nt, Artificial Sequence
  Sense Oligo
gguguauacacgggugugg

SEQ ID NO: 25986 - RNA, 19 nt, Artificial Sequence
  Antisense Oligo
ccacacccguguauacacc

SEQ ID NO: 25987 - RNA, 19 nt, Artificial Sequence
  Sense Oligo
guguauacacgggugugga

SEQ ID NO: 25988 - RNA, 19 nt, Artificial Sequence
  Antisense Oligo
uccacacccguguauacac

SEQ ID NO: 25989 - RNA, 19 nt, Artificial Sequence
  Sense Oligo
uguauacacggguguggaa

SEQ ID NO: 25990 - RNA, 19 nt, Artificial Sequence
  Antisense Oligo
uuccacacccguguauaca

SEQ ID NO: 25991 - RNA, 19 nt, Artificial Sequence
  Sense Oligo
gucuagaccaugggcucag

SEQ ID NO: 25992 - RNA, 19 nt, Artificial Sequence
  Antisense Oligo
cugagcccauggucuagac

SEQ ID NO: 25993 - RNA, 19 nt, Artificial Sequence
  Sense Oligo
gaccaugggcucagcauuu

SEQ ID NO: 25994 - RNA, 19 nt, Artificial Sequence
  Antisense Oligo
aaaugcugagcccaugguc

SEQ ID NO: 25995 - RNA, 19 nt, Artificial Sequence
  Sense Oligo
accaugggcucagcauuug

SEQ ID NO: 25996 - RNA, 19 nt, Artificial Sequence
  Antisense Oligo
caaaugcugagcccauggu

SEQ ID NO: 25997 - RNA, 19 nt, Artificial Sequence
  Sense Oligo
ccaugggcucagcauuugg

SEQ ID NO: 25998 - RNA, 19 nt, Artificial Sequence
  Antisense Oligo
ccaaaugcugagcccaugg

SEQ ID NO: 25999 - RNA, 19 nt, Artificial Sequence
  Sense Oligo
caugggcucagcauuuggg

SEQ ID NO: 26000 - RNA, 19 nt, Artificial Sequence
  Antisense Oligo
cccaaaugcugagcccaug

SEQ ID NO: 26001 - RNA, 19 nt, Artificial Sequence
  Sense Oligo
augggcucagcauuugggu

SEQ ID NO: 26002 - RNA, 19 nt, Artificial Sequence
  Antisense Oligo
acccaaaugcugagcccau

SEQ ID NO: 26003 - RNA, 19 nt, Artificial Sequence
  Sense Oligo
ugggcucagcauuugggua

SEQ ID NO: 26004 - RNA, 19 nt, Artificial Sequence
  Antisense Oligo
uacccaaaugcugagccca

SEQ ID NO: 26005 - RNA, 19 nt, Artificial Sequence
  Sense Oligo
gggcucagcauuuggguaa

SEQ ID NO: 26006 - RNA, 19 nt, Artificial Sequence
  Antisense Oligo
uuacccaaaugcugagccc

SEQ ID NO: 26007 - RNA, 19 nt, Artificial Sequence
  Sense Oligo
ggcucagcauuuggguaaa

SEQ ID NO: 26008 - RNA, 19 nt, Artificial Sequence
  Antisense Oligo
uuuacccaaaugcugagcc

SEQ ID NO: 26009 - RNA, 19 nt, Artificial Sequence
  Sense Oligo
gcucagcauuuggguaaaa

SEQ ID NO: 26010 - RNA, 19 nt, Artificial Sequence
  Antisense Oligo
uuuuacccaaaugcugagc

SEQ ID NO: 26011 - RNA, 19 nt, Artificial Sequence
  Sense Oligo
cccacucacaccacuuaca

SEQ ID NO: 26012 - RNA, 19 nt, Artificial Sequence
  Antisense Oligo
uguaaguggugugaguggg

SEQ ID NO: 26013 - RNA, 19 nt, Artificial Sequence
  Sense Oligo
ccacucacaccacuuacac

SEQ ID NO: 26014 - RNA, 19 nt, Artificial Sequence
  Antisense Oligo
guguaaguggugugagugg

SEQ ID NO: 26015 - RNA, 19 nt, Artificial Sequence
  Sense Oligo
acauacgcaagucccacuc

SEQ ID NO: 26016 - RNA, 19 nt, Artificial Sequence
  Antisense Oligo
gagugggacuugcguaugu

SEQ ID NO: 26017 - RNA, 19 nt, Artificial Sequence
  Sense Oligo
acgcaagucccacucacac

SEQ ID NO: 26018 - RNA, 19 nt, Artificial Sequence
  Antisense Oligo
gugugagugggacuugcgu

SEQ ID NO: 26019 - RNA, 19 nt, Artificial Sequence
  Sense Oligo
aagucccacucacacccau

SEQ ID NO: 26020 - RNA, 19 nt, Artificial Sequence
  Antisense Oligo
augggugugagugggacuu

SEQ ID NO: 26021 - RNA, 19 nt, Artificial Sequence
  Sense Oligo
agucccacucacacccauc

SEQ ID NO: 26022 - RNA, 19 nt, Artificial Sequence
  Antisense Oligo
gaugggugugagugggacu

SEQ ID NO: 26023 - RNA, 19 nt, Artificial Sequence
  Sense Oligo
cacucacacccaucucaua

SEQ ID NO: 26024 - RNA, 19 nt, Artificial Sequence
  Antisense Oligo
uaugagaugggugugagug

SEQ ID NO: 26025 - RNA, 19 nt, Artificial Sequence
  Sense Oligo
acucacacccaucucauac

SEQ ID NO: 26026 - RNA, 19 nt, Artificial Sequence
  Antisense Oligo
guaugagaugggugugagu

SEQ ID NO: 26027 - RNA, 19 nt, Artificial Sequence
  Sense Oligo
cucacacccaucucauacu

SEQ ID NO: 26028 - RNA, 19 nt, Artificial Sequence
  Antisense Oligo
aguaugagaugggugugag

SEQ ID NO: 26029 - RNA, 19 nt, Artificial Sequence
  Sense Oligo
caguggucccuuguugccc

SEQ ID NO: 26030 - RNA, 19 nt, Artificial Sequence
  Antisense Oligo
gggcaacaagggaccacug

SEQ ID NO: 26031 - RNA, 19 nt, Artificial Sequence
  Sense Oligo
aguggucccuuguugccca

SEQ ID NO: 26032 - RNA, 19 nt, Artificial Sequence
  Antisense Oligo
ugggcaacaagggaccacu

SEQ ID NO: 26033 - RNA, 19 nt, Artificial Sequence
  Sense Oligo
aaauccaaggaugcccagu

SEQ ID NO: 26034 - RNA, 19 nt, Artificial Sequence
  Antisense Oligo
acugggcauccuuggauuu

SEQ ID NO: 26035 - RNA, 19 nt, Artificial Sequence
  Sense Oligo
auccaaggaugcccagucc

SEQ ID NO: 26036 - RNA, 19 nt, Artificial Sequence
  Antisense Oligo
ggacugggcauccuuggau

SEQ ID NO: 26037 - RNA, 19 nt, Artificial Sequence
  Sense Oligo
uccaaggaugcccaguccc

SEQ ID NO: 26038 - RNA, 19 nt, Artificial Sequence
  Antisense Oligo
gggacugggcauccuugga

SEQ ID NO: 26039 - RNA, 19 nt, Artificial Sequence
  Sense Oligo
aacggcguggcauugguac

SEQ ID NO: 26040 - RNA, 19 nt, Artificial Sequence
  Antisense Oligo
guaccaaugccacgccguu

SEQ ID NO: 26041 - RNA, 19 nt, Artificial Sequence
  Sense Oligo
acggcguggcauugguaca

SEQ ID NO: 26042 - RNA, 19 nt, Artificial Sequence
  Antisense Oligo
uguaccaaugccacgccgu

SEQ ID NO: 26043 - RNA, 19 nt, Artificial Sequence
  Sense Oligo
cggcguggcauugguacau

SEQ ID NO: 26044 - RNA, 19 nt, Artificial Sequence
  Antisense Oligo
auguaccaaugccacgccg

SEQ ID NO: 26045 - RNA, 19 nt, Artificial Sequence
  Sense Oligo
ggcguggcauugguacaua

SEQ ID NO: 26046 - RNA, 19 nt, Artificial Sequence
  Antisense Oligo
uauguaccaaugccacgcc

SEQ ID NO: 26047 - RNA, 19 nt, Artificial Sequence
  Sense Oligo
gcguggcauugguacauaa

SEQ ID NO: 26048 - RNA, 19 nt, Artificial Sequence
  Antisense Oligo
uuauguaccaaugccacgc

SEQ ID NO: 26049 - RNA, 19 nt, Artificial Sequence
  Sense Oligo
cguggcauugguacauaac

SEQ ID NO: 26050 - RNA, 19 nt, Artificial Sequence
  Antisense Oligo
guuauguaccaaugccacg

SEQ ID NO: 26051 - RNA, 19 nt, Artificial Sequence
  Sense Oligo
guggcauugguacauaacc

SEQ ID NO: 26052 - RNA, 19 nt, Artificial Sequence
  Antisense Oligo
gguuauguaccaaugccac

SEQ ID NO: 26053 - RNA, 19 nt, Artificial Sequence
  Sense Oligo
uggcauugguacauaaccc

SEQ ID NO: 26054 - RNA, 19 nt, Artificial Sequence
  Antisense Oligo
ggguuauguaccaaugcca

SEQ ID NO: 26055 - RNA, 19 nt, Artificial Sequence
  Sense Oligo
ggcauugguacauaaccca

SEQ ID NO: 26056 - RNA, 19 nt, Artificial Sequence
  Antisense Oligo
uggguuauguaccaaugcc

SEQ ID NO: 26057 - RNA, 19 nt, Artificial Sequence
  Sense Oligo
gcauugguacauaacccac

SEQ ID NO: 26058 - RNA, 19 nt, Artificial Sequence
  Antisense Oligo
guggguuauguaccaaugc

SEQ ID NO: 26059 - RNA, 19 nt, Artificial Sequence
  Sense Oligo
gguacauaacccacagcau

SEQ ID NO: 26060 - RNA, 19 nt, Artificial Sequence
  Antisense Oligo
augcuguggguuauguacc

SEQ ID NO: 26061 - RNA, 19 nt, Artificial Sequence
  Sense Oligo
guacauaacccacagcauc

SEQ ID NO: 26062 - RNA, 19 nt, Artificial Sequence
  Antisense Oligo
gaugcuguggguuauguac

SEQ ID NO: 26063 - RNA, 19 nt, Artificial Sequence
  Sense Oligo
uacauaacccacagcaucc

SEQ ID NO: 26064 - RNA, 19 nt, Artificial Sequence
  Antisense Oligo
ggaugcuguggguuaugua

SEQ ID NO: 26065 - RNA, 19 nt, Artificial Sequence
  Sense Oligo
acauaacccacagcauccg

SEQ ID NO: 26066 - RNA, 19 nt, Artificial Sequence
  Antisense Oligo
cggaugcuguggguuaugu

SEQ ID NO: 26067 - RNA, 19 nt, Artificial Sequence
  Sense Oligo
cauaacccacagcauccgc

SEQ ID NO: 26068 - RNA, 19 nt, Artificial Sequence
  Antisense Oligo
gcggaugcuguggguuaug

SEQ ID NO: 26069 - RNA, 19 nt, Artificial Sequence
  Sense Oligo
agcauccgccuguacacuu

SEQ ID NO: 26070 - RNA, 19 nt, Artificial Sequence
  Antisense Oligo
aaguguacaggcggaugcu

SEQ ID NO: 26071 - RNA, 19 nt, Artificial Sequence
  Sense Oligo
gcauccgccuguacacuua

SEQ ID NO: 26072 - RNA, 19 nt, Artificial Sequence
  Antisense Oligo
uaaguguacaggcggaugc

SEQ ID NO: 26073 - RNA, 19 nt, Artificial Sequence
  Sense Oligo
cauccgccuguacacuuaa

SEQ ID NO: 26074 - RNA, 19 nt, Artificial Sequence
  Antisense Oligo
uuaaguguacaggcggaug

SEQ ID NO: 26075 - RNA, 19 nt, Artificial Sequence
  Sense Oligo
auccgccuguacacuuaau

SEQ ID NO: 26076 - RNA, 19 nt, Artificial Sequence
  Antisense Oligo
auuaaguguacaggcggau

SEQ ID NO: 26077 - RNA, 19 nt, Artificial Sequence
  Sense Oligo
uccgccuguacacuuaauu

SEQ ID NO: 26078 - RNA, 19 nt, Artificial Sequence
  Antisense Oligo
aauuaaguguacaggcgga

SEQ ID NO: 26079 - RNA, 19 nt, Artificial Sequence
  Sense Oligo
ccgccuguacacuuaauuu

SEQ ID NO: 26080 - RNA, 19 nt, Artificial Sequence
  Antisense Oligo
aaauuaaguguacaggcgg

SEQ ID NO: 26081 - RNA, 19 nt, Artificial Sequence
  Sense Oligo
cgccuguacacuuaauuuu

SEQ ID NO: 26082 - RNA, 19 nt, Artificial Sequence
  Antisense Oligo
aaaauuaaguguacaggcg

SEQ ID NO: 26083 - RNA, 19 nt, Artificial Sequence
  Sense Oligo
gacggauucucucucuuuu

SEQ ID NO: 26084 - RNA, 19 nt, Artificial Sequence
  Antisense Oligo
aaaagagagagaauccguc

SEQ ID NO: 26085 - RNA, 19 nt, Artificial Sequence
  Sense Oligo
acggauucucucucuuuug

SEQ ID NO: 26086 - RNA, 19 nt, Artificial Sequence
  Antisense Oligo
caaaagagagagaauccgu

SEQ ID NO: 26087 - RNA, 19 nt, Artificial Sequence
  Sense Oligo
cggauucucucucuuuugc

SEQ ID NO: 26088 - RNA, 19 nt, Artificial Sequence
  Antisense Oligo
gcaaaagagagagaauccg

SEQ ID NO: 26089 - RNA, 19 nt, Artificial Sequence
  Sense Oligo
ggauucucucucuuuugcc

SEQ ID NO: 26090 - RNA, 19 nt, Artificial Sequence
  Antisense Oligo
ggcaaaagagagagaaucc

SEQ ID NO: 26091 - RNA, 19 nt, Artificial Sequence
  Sense Oligo
gauucucucucuuuugccc

SEQ ID NO: 26092 - RNA, 19 nt, Artificial Sequence
  Antisense Oligo
gggcaaaagagagagaauc

SEQ ID NO: 26093 - RNA, 19 nt, Artificial Sequence
  Sense Oligo
auucucucucuuuugccca

SEQ ID NO: 26094 - RNA, 19 nt, Artificial Sequence
  Antisense Oligo
ugggcaaaagagagagaau

SEQ ID NO: 26095 - RNA, 19 nt, Artificial Sequence
  Sense Oligo
cucuuuugcccaggcugga

SEQ ID NO: 26096 - RNA, 19 nt, Artificial Sequence
  Antisense Oligo
uccagccugggcaaaagag

SEQ ID NO: 26097 - RNA, 19 nt, Artificial Sequence
  Sense Oligo
ucuuuugcccaggcuggag

SEQ ID NO: 26098 - RNA, 19 nt, Artificial Sequence
  Antisense Oligo
cuccagccugggcaaaaga

SEQ ID NO: 26099 - RNA, 19 nt, Artificial Sequence
  Sense Oligo
uugcccaggcuggagugca

SEQ ID NO: 26100 - RNA, 19 nt, Artificial Sequence
  Antisense Oligo
ugcacuccagccugggcaa

SEQ ID NO: 26101 - RNA, 19 nt, Artificial Sequence
  Sense Oligo
ugcccaggcuggagugcaa

SEQ ID NO: 26102 - RNA, 19 nt, Artificial Sequence
  Antisense Oligo
uugcacuccagccugggca

SEQ ID NO: 26103 - RNA, 19 nt, Artificial Sequence
  Sense Oligo
caggcuggagugcaauggc

SEQ ID NO: 26104 - RNA, 19 nt, Artificial Sequence
  Antisense Oligo
gccauugcacuccagccug

SEQ ID NO: 26105 - RNA, 19 nt, Artificial Sequence
  Sense Oligo
aggcuggagugcaauggcg

SEQ ID NO: 26106 - RNA, 19 nt, Artificial Sequence
  Antisense Oligo
cgccauugcacuccagccu

SEQ ID NO: 26107 - RNA, 19 nt, Artificial Sequence
  Sense Oligo
ggcuggagugcaauggcgu

SEQ ID NO: 26108 - RNA, 19 nt, Artificial Sequence
  Antisense Oligo
acgccauugcacuccagcc

SEQ ID NO: 26109 - RNA, 19 nt, Artificial Sequence
  Sense Oligo
gcuggagugcaauggcgug

SEQ ID NO: 26110 - RNA, 19 nt, Artificial Sequence
  Antisense Oligo
cacgccauugcacuccagc

SEQ ID NO: 26111 - RNA, 19 nt, Artificial Sequence
  Sense Oligo
cuggagugcaauggcguga

SEQ ID NO: 26112 - RNA, 19 nt, Artificial Sequence
  Antisense Oligo
ucacgccauugcacuccag

SEQ ID NO: 26113 - RNA, 19 nt, Artificial Sequence
  Sense Oligo
uggagugcaauggcgugau

SEQ ID NO: 26114 - RNA, 19 nt, Artificial Sequence
  Antisense Oligo
aucacgccauugcacucca

SEQ ID NO: 26115 - RNA, 19 nt, Artificial Sequence
  Sense Oligo
ggagugcaauggcgugauc

SEQ ID NO: 26116 - RNA, 19 nt, Artificial Sequence
  Antisense Oligo
gaucacgccauugcacucc

SEQ ID NO: 26117 - RNA, 19 nt, Artificial Sequence
  Sense Oligo
gagugcaauggcgugaucu

SEQ ID NO: 26118 - RNA, 19 nt, Artificial Sequence
  Antisense Oligo
agaucacgccauugcacuc

SEQ ID NO: 26119 - RNA, 19 nt, Artificial Sequence
  Sense Oligo
agugcaauggcgugaucuc

SEQ ID NO: 26120 - RNA, 19 nt, Artificial Sequence
  Antisense Oligo
gagaucacgccauugcacu

SEQ ID NO: 26121 - RNA, 19 nt, Artificial Sequence
  Sense Oligo
ccuccuggguucaagcgag

SEQ ID NO: 26122 - RNA, 19 nt, Artificial Sequence
  Antisense Oligo
cucgcuugaacccaggagg

SEQ ID NO: 26123 - RNA, 19 nt, Artificial Sequence
  Sense Oligo
cuccuggguucaagcgagu

SEQ ID NO: 26124 - RNA, 19 nt, Artificial Sequence
  Antisense Oligo
acucgcuugaacccaggag

SEQ ID NO: 26125 - RNA, 19 nt, Artificial Sequence
  Sense Oligo
uccuggguucaagcgaguc

SEQ ID NO: 26126 - RNA, 19 nt, Artificial Sequence
  Antisense Oligo
gacucgcuugaacccagga

SEQ ID NO: 26127 - RNA, 19 nt, Artificial Sequence
  Sense Oligo
ccuggguucaagcgagucc

SEQ ID NO: 26128 - RNA, 19 nt, Artificial Sequence
  Antisense Oligo
ggacucgcuugaacccagg

SEQ ID NO: 26129 - RNA, 19 nt, Artificial Sequence
  Sense Oligo
cuggguucaagcgaguccc

SEQ ID NO: 26130 - RNA, 19 nt, Artificial Sequence
  Antisense Oligo
gggacucgcuugaacccag

SEQ ID NO: 26131 - RNA, 19 nt, Artificial Sequence
  Sense Oligo
cgagcagcugggacuauag

SEQ ID NO: 26132 - RNA, 19 nt, Artificial Sequence
  Antisense Oligo
cuauagucccagcugcucg

SEQ ID NO: 26133 - RNA, 19 nt, Artificial Sequence
  Sense Oligo
ccaccacaccuggcuaauu

SEQ ID NO: 26134 - RNA, 19 nt, Artificial Sequence
  Antisense Oligo
aauuagccagguguggugg

SEQ ID NO: 26135 - RNA, 19 nt, Artificial Sequence
  Sense Oligo
caccacaccuggcuaauuu

SEQ ID NO: 26136 - RNA, 19 nt, Artificial Sequence
  Antisense Oligo
aaauuagccagguguggug

SEQ ID NO: 26137 - RNA, 19 nt, Artificial Sequence
  Sense Oligo
accacaccuggcuaauuuu

SEQ ID NO: 26138 - RNA, 19 nt, Artificial Sequence
  Antisense Oligo
aaaauuagccagguguggu

SEQ ID NO: 26139 - RNA, 19 nt, Artificial Sequence
  Sense Oligo
cgacaccaugcacuuuaau

SEQ ID NO: 26140 - RNA, 19 nt, Artificial Sequence
  Antisense Oligo
auuaaagugcauggugucg

SEQ ID NO: 26141 - RNA, 19 nt, Artificial Sequence
  Sense Oligo
gacaccaugcacuuuaauu

SEQ ID NO: 26142 - RNA, 19 nt, Artificial Sequence
  Antisense Oligo
aauuaaagugcaugguguc

SEQ ID NO: 26143 - RNA, 19 nt, Artificial Sequence
  Sense Oligo
acaccaugcacuuuaauuc

SEQ ID NO: 26144 - RNA, 19 nt, Artificial Sequence
  Antisense Oligo
gaauuaaagugcauggugu

SEQ ID NO: 26145 - RNA, 19 nt, Artificial Sequence
  Sense Oligo
caccaugcacuuuaauuca

SEQ ID NO: 26146 - RNA, 19 nt, Artificial Sequence
  Antisense Oligo
ugaauuaaagugcauggug

SEQ ID NO: 26147 - RNA, 19 nt, Artificial Sequence
  Sense Oligo
accaugcacuuuaauucau

SEQ ID NO: 26148 - RNA, 19 nt, Artificial Sequence
  Antisense Oligo
augaauuaaagugcauggu

SEQ ID NO: 26149 - RNA, 19 nt, Artificial Sequence
  Sense Oligo
ccaugcacuuuaauucauc

SEQ ID NO: 26150 - RNA, 19 nt, Artificial Sequence
  Antisense Oligo
gaugaauuaaagugcaugg

SEQ ID NO: 26151 - RNA, 19 nt, Artificial Sequence
  Sense Oligo
caugcacuuuaauucaucu

SEQ ID NO: 26152 - RNA, 19 nt, Artificial Sequence
  Antisense Oligo
agaugaauuaaagugcaug

SEQ ID NO: 26153 - RNA, 19 nt, Artificial Sequence
  Sense Oligo
caucucuagauuccuuacc

SEQ ID NO: 26154 - RNA, 19 nt, Artificial Sequence
  Antisense Oligo
gguaaggaaucuagagaug

SEQ ID NO: 26155 - RNA, 19 nt, Artificial Sequence
  Sense Oligo
aucucuagauuccuuacca

SEQ ID NO: 26156 - RNA, 19 nt, Artificial Sequence
  Antisense Oligo
ugguaaggaaucuagagau

SEQ ID NO: 26157 - RNA, 19 nt, Artificial Sequence
  Sense Oligo
ucucuagauuccuuaccac

SEQ ID NO: 26158 - RNA, 19 nt, Artificial Sequence
  Antisense Oligo
gugguaaggaaucuagaga

SEQ ID NO: 26159 - RNA, 19 nt, Artificial Sequence
  Sense Oligo
cucuagauuccuuaccaca

SEQ ID NO: 26160 - RNA, 19 nt, Artificial Sequence
  Antisense Oligo
ugugguaaggaaucuagag

SEQ ID NO: 26161 - RNA, 19 nt, Artificial Sequence
  Sense Oligo
uccuuaccacaggcaucug

SEQ ID NO: 26162 - RNA, 19 nt, Artificial Sequence
  Antisense Oligo
cagaugccugugguaagga

SEQ ID NO: 26163 - RNA, 19 nt, Artificial Sequence
  Sense Oligo
caggcaucuguaugacaua

SEQ ID NO: 26164 - RNA, 19 nt, Artificial Sequence
  Antisense Oligo
uaugucauacagaugccug

SEQ ID NO: 26165 - RNA, 19 nt, Artificial Sequence
  Sense Oligo
aggcaucuguaugacauag

SEQ ID NO: 26166 - RNA, 19 nt, Artificial Sequence
  Antisense Oligo
cuaugucauacagaugccu

SEQ ID NO: 26167 - RNA, 19 nt, Artificial Sequence
  Sense Oligo
ggcaucuguaugacauaga

SEQ ID NO: 26168 - RNA, 19 nt, Artificial Sequence
  Antisense Oligo
ucuaugucauacagaugcc

SEQ ID NO: 26169 - RNA, 19 nt, Artificial Sequence
  Sense Oligo
ucuguaugacauagaugcu

SEQ ID NO: 26170 - RNA, 19 nt, Artificial Sequence
  Antisense Oligo
agcaucuaugucauacaga

SEQ ID NO: 26171 - RNA, 19 nt, Artificial Sequence
  Sense Oligo
cuguaugacauagaugcug

SEQ ID NO: 26172 - RNA, 19 nt, Artificial Sequence
  Antisense Oligo
cagcaucuaugucauacag

SEQ ID NO: 26173 - RNA, 19 nt, Artificial Sequence
  Sense Oligo
uguaugacauagaugcugu

SEQ ID NO: 26174 - RNA, 19 nt, Artificial Sequence
  Antisense Oligo
acagcaucuaugucauaca

SEQ ID NO: 26175 - RNA, 19 nt, Artificial Sequence
  Sense Oligo
guaugacauagaugcugua

SEQ ID NO: 26176 - RNA, 19 nt, Artificial Sequence
  Antisense Oligo
uacagcaucuaugucauac

SEQ ID NO: 26177 - RNA, 19 nt, Artificial Sequence
  Sense Oligo
uaugacauagaugcuguau

SEQ ID NO: 26178 - RNA, 19 nt, Artificial Sequence
  Antisense Oligo
auacagcaucuaugucaua

SEQ ID NO: 26179 - RNA, 19 nt, Artificial Sequence
  Sense Oligo
cccaguauuuucugucugu

SEQ ID NO: 26180 - RNA, 19 nt, Artificial Sequence
  Antisense Oligo
acagacagaaaauacuggg

SEQ ID NO: 26181 - RNA, 19 nt, Artificial Sequence
  Sense Oligo
uuuucugucugugguuggc

SEQ ID NO: 26182 - RNA, 19 nt, Artificial Sequence
  Antisense Oligo
gccaaccacagacagaaaa

SEQ ID NO: 26183 - RNA, 19 nt, Artificial Sequence
  Sense Oligo
uucugucugugguuggcug

SEQ ID NO: 26184 - RNA, 19 nt, Artificial Sequence
  Antisense Oligo
cagccaaccacagacagaa

SEQ ID NO: 26185 - RNA, 19 nt, Artificial Sequence
  Sense Oligo
gguuggcugaaucuguggc

SEQ ID NO: 26186 - RNA, 19 nt, Artificial Sequence
  Antisense Oligo
gccacagauucagccaacc

SEQ ID NO: 26187 - RNA, 19 nt, Artificial Sequence
  Sense Oligo
guuggcugaaucuguggcu

SEQ ID NO: 26188 - RNA, 19 nt, Artificial Sequence
  Antisense Oligo
agccacagauucagccaac

SEQ ID NO: 26189 - RNA, 19 nt, Artificial Sequence
  Sense Oligo
uggcugaaucuguggcugc

SEQ ID NO: 26190 - RNA, 19 nt, Artificial Sequence
  Antisense Oligo
gcagccacagauucagcca

SEQ ID NO: 26191 - RNA, 19 nt, Artificial Sequence
  Sense Oligo
ggcugaaucuguggcugca

SEQ ID NO: 26192 - RNA, 19 nt, Artificial Sequence
  Antisense Oligo
ugcagccacagauucagcc

SEQ ID NO: 26193 - RNA, 19 nt, Artificial Sequence
  Sense Oligo
ccgacuguauaccagcuug

SEQ ID NO: 26194 - RNA, 19 nt, Artificial Sequence
  Antisense Oligo
caagcugguauacagucgg

SEQ ID NO: 26195 - RNA, 19 nt, Artificial Sequence
  Sense Oligo
cgacuguauaccagcuuga

SEQ ID NO: 26196 - RNA, 19 nt, Artificial Sequence
  Antisense Oligo
ucaagcugguauacagucg

SEQ ID NO: 26197 - RNA, 19 nt, Artificial Sequence
  Sense Oligo
gacuguauaccagcuugau

SEQ ID NO: 26198 - RNA, 19 nt, Artificial Sequence
  Antisense Oligo
aucaagcugguauacaguc

SEQ ID NO: 26199 - RNA, 19 nt, Artificial Sequence
  Sense Oligo
acuguauaccagcuugauu

SEQ ID NO: 26200 - RNA, 19 nt, Artificial Sequence
  Antisense Oligo
aaucaagcugguauacagu

SEQ ID NO: 26201 - RNA, 19 nt, Artificial Sequence
  Sense Oligo
uauaccagcuugauucaau

SEQ ID NO: 26202 - RNA, 19 nt, Artificial Sequence
  Antisense Oligo
auugaaucaagcugguaua

SEQ ID NO: 26203 - RNA, 19 nt, Artificial Sequence
  Sense Oligo
auaccagcuugauucaaua

SEQ ID NO: 26204 - RNA, 19 nt, Artificial Sequence
  Antisense Oligo
uauugaaucaagcugguau

SEQ ID NO: 26205 - RNA, 19 nt, Artificial Sequence
  Sense Oligo
uaccagcuugauucaauau

SEQ ID NO: 26206 - RNA, 19 nt, Artificial Sequence
  Antisense Oligo
auauugaaucaagcuggua

SEQ ID NO: 26207 - RNA, 19 nt, Artificial Sequence
  Sense Oligo
accagcuugauucaauauu

SEQ ID NO: 26208 - RNA, 19 nt, Artificial Sequence
  Antisense Oligo
aauauugaaucaagcuggu

SEQ ID NO: 26209 - RNA, 19 nt, Artificial Sequence
  Sense Oligo
agucucacucugucgccca

SEQ ID NO: 26210 - RNA, 19 nt, Artificial Sequence
  Antisense Oligo
ugggcgacagagugagacu

SEQ ID NO: 26211 - RNA, 19 nt, Artificial Sequence
  Sense Oligo
gucucacucugucgcccag

SEQ ID NO: 26212 - RNA, 19 nt, Artificial Sequence
  Antisense Oligo
cugggcgacagagugagac

SEQ ID NO: 26213 - RNA, 19 nt, Artificial Sequence
  Sense Oligo
ucucacucugucgcccagg

SEQ ID NO: 26214 - RNA, 19 nt, Artificial Sequence
  Antisense Oligo
ccugggcgacagagugaga

SEQ ID NO: 26215 - RNA, 19 nt, Artificial Sequence
  Sense Oligo
caaucucggcucacugcaa

SEQ ID NO: 26216 - RNA, 19 nt, Artificial Sequence
  Antisense Oligo
uugcagugagccgagauug

SEQ ID NO: 26217 - RNA, 19 nt, Artificial Sequence
  Sense Oligo
aaucucggcucacugcaag

SEQ ID NO: 26218 - RNA, 19 nt, Artificial Sequence
  Antisense Oligo
cuugcagugagccgagauu

SEQ ID NO: 26219 - RNA, 19 nt, Artificial Sequence
  Sense Oligo
aucucggcucacugcaagc

SEQ ID NO: 26220 - RNA, 19 nt, Artificial Sequence
  Antisense Oligo
gcuugcagugagccgagau

SEQ ID NO: 26221 - RNA, 19 nt, Artificial Sequence
  Sense Oligo
ucucggcucacugcaagcu

SEQ ID NO: 26222 - RNA, 19 nt, Artificial Sequence
  Antisense Oligo
agcuugcagugagccgaga

SEQ ID NO: 26223 - RNA, 19 nt, Artificial Sequence
  Sense Oligo
ugccucagccucccgagua

SEQ ID NO: 26224 - RNA, 19 nt, Artificial Sequence
  Antisense Oligo
uacucgggaggcugaggca

SEQ ID NO: 26225 - RNA, 19 nt, Artificial Sequence
  Sense Oligo
cucagccucccgaguagcu

SEQ ID NO: 26226 - RNA, 19 nt, Artificial Sequence
  Antisense Oligo
agcuacucgggaggcugag

SEQ ID NO: 26227 - RNA, 19 nt, Artificial Sequence
  Sense Oligo
uagcugggacuacaggcgc

SEQ ID NO: 26228 - RNA, 19 nt, Artificial Sequence
  Antisense Oligo
gcgccuguagucccagcua

SEQ ID NO: 26229 - RNA, 19 nt, Artificial Sequence
  Sense Oligo
ccaccacgcccagccaauu

SEQ ID NO: 26230 - RNA, 19 nt, Artificial Sequence
  Antisense Oligo
aauuggcugggcguggugg

SEQ ID NO: 26231 - RNA, 19 nt, Artificial Sequence
  Sense Oligo
ggguuucaccguguuagcc

SEQ ID NO: 26232 - RNA, 19 nt, Artificial Sequence
  Antisense Oligo
ggcuaacacggugaaaccc

SEQ ID NO: 26233 - RNA, 19 nt, Artificial Sequence
  Sense Oligo
gguuucaccguguuagcca

SEQ ID NO: 26234 - RNA, 19 nt, Artificial Sequence
  Antisense Oligo
uggcuaacacggugaaacc

SEQ ID NO: 26235 - RNA, 19 nt, Artificial Sequence
  Sense Oligo
caccguguuagccaggaug

SEQ ID NO: 26236 - RNA, 19 nt, Artificial Sequence
  Antisense Oligo
cauccuggcuaacacggug

SEQ ID NO: 26237 - RNA, 19 nt, Artificial Sequence
  Sense Oligo
accguguuagccaggaugg

SEQ ID NO: 26238 - RNA, 19 nt, Artificial Sequence
  Antisense Oligo
ccauccuggcuaacacggu

SEQ ID NO: 26239 - RNA, 19 nt, Artificial Sequence
  Sense Oligo
ccguguuagccaggauggu

SEQ ID NO: 26240 - RNA, 19 nt, Artificial Sequence
  Antisense Oligo
accauccuggcuaacacgg

SEQ ID NO: 26241 - RNA, 19 nt, Artificial Sequence
  Sense Oligo
cguguuagccaggaugguc

SEQ ID NO: 26242 - RNA, 19 nt, Artificial Sequence
  Antisense Oligo
gaccauccuggcuaacacg

SEQ ID NO: 26243 - RNA, 19 nt, Artificial Sequence
  Sense Oligo
guguuagccaggauggucu

SEQ ID NO: 26244 - RNA, 19 nt, Artificial Sequence
  Antisense Oligo
agaccauccuggcuaacac

SEQ ID NO: 26245 - RNA, 19 nt, Artificial Sequence
  Sense Oligo
uguuagccaggauggucug

SEQ ID NO: 26246 - RNA, 19 nt, Artificial Sequence
  Antisense Oligo
cagaccauccuggcuaaca

SEQ ID NO: 26247 - RNA, 19 nt, Artificial Sequence
  Sense Oligo
ccaaagugcugggauuaca

SEQ ID NO: 26248 - RNA, 19 nt, Artificial Sequence
  Antisense Oligo
uguaaucccagcacuuugg

SEQ ID NO: 26249 - RNA, 19 nt, Artificial Sequence
  Sense Oligo
caaagugcugggauuacag

SEQ ID NO: 26250 - RNA, 19 nt, Artificial Sequence
  Antisense Oligo
cuguaaucccagcacuuug

SEQ ID NO: 26251 - RNA, 19 nt, Artificial Sequence
  Sense Oligo
gugcugggauuacaggcgu

SEQ ID NO: 26252 - RNA, 19 nt, Artificial Sequence
  Antisense Oligo
acgccuguaaucccagcac

SEQ ID NO: 26253 - RNA, 19 nt, Artificial Sequence
  Sense Oligo
ugcugggauuacaggcgug

SEQ ID NO: 26254 - RNA, 19 nt, Artificial Sequence
  Antisense Oligo
cacgccuguaaucccagca

SEQ ID NO: 26255 - RNA, 19 nt, Artificial Sequence
  Sense Oligo
gcugggauuacaggcguga

SEQ ID NO: 26256 - RNA, 19 nt, Artificial Sequence
  Antisense Oligo
ucacgccuguaaucccagc

SEQ ID NO: 26257 - RNA, 19 nt, Artificial Sequence
  Sense Oligo
cugggauuacaggcgugag

SEQ ID NO: 26258 - RNA, 19 nt, Artificial Sequence
  Antisense Oligo
cucacgccuguaaucccag

SEQ ID NO: 26259 - RNA, 19 nt, Artificial Sequence
  Sense Oligo
ugggauuacaggcgugagc

SEQ ID NO: 26260 - RNA, 19 nt, Artificial Sequence
  Antisense Oligo
gcucacgccuguaauccca

SEQ ID NO: 26261 - RNA, 19 nt, Artificial Sequence
  Sense Oligo
auuacaggcgugagccacu

SEQ ID NO: 26262 - RNA, 19 nt, Artificial Sequence
  Antisense Oligo
aguggcucacgccuguaau

SEQ ID NO: 26263 - RNA, 19 nt, Artificial Sequence
  Sense Oligo
cucugucucccaggcugga

SEQ ID NO: 26264 - RNA, 19 nt, Artificial Sequence
  Antisense Oligo
uccagccugggagacagag

SEQ ID NO: 26265 - RNA, 19 nt, Artificial Sequence
  Sense Oligo
aggcuggagugcaguggug

SEQ ID NO: 26266 - RNA, 19 nt, Artificial Sequence
  Antisense Oligo
caccacugcacuccagccu

SEQ ID NO: 26267 - RNA, 19 nt, Artificial Sequence
  Sense Oligo
gcaguggugcaaucuuggc

SEQ ID NO: 26268 - RNA, 19 nt, Artificial Sequence
  Antisense Oligo
gccaagauugcaccacugc

SEQ ID NO: 26269 - RNA, 19 nt, Artificial Sequence
  Sense Oligo
caguggugcaaucuuggcu

SEQ ID NO: 26270 - RNA, 19 nt, Artificial Sequence
  Antisense Oligo
agccaagauugcaccacug

SEQ ID NO: 26271 - RNA, 19 nt, Artificial Sequence
  Sense Oligo
aguggugcaaucuuggcuc

SEQ ID NO: 26272 - RNA, 19 nt, Artificial Sequence
  Antisense Oligo
gagccaagauugcaccacu

SEQ ID NO: 26273 - RNA, 19 nt, Artificial Sequence
  Sense Oligo
guggugcaaucuuggcuca

SEQ ID NO: 26274 - RNA, 19 nt, Artificial Sequence
  Antisense Oligo
ugagccaagauugcaccac

SEQ ID NO: 26275 - RNA, 19 nt, Artificial Sequence
  Sense Oligo
uggugcaaucuuggcucac

SEQ ID NO: 26276 - RNA, 19 nt, Artificial Sequence
  Antisense Oligo
gugagccaagauugcacca

SEQ ID NO: 26277 - RNA, 19 nt, Artificial Sequence
  Sense Oligo
ggugcaaucuuggcucacu

SEQ ID NO: 26278 - RNA, 19 nt, Artificial Sequence
  Antisense Oligo
agugagccaagauugcacc

SEQ ID NO: 26279 - RNA, 19 nt, Artificial Sequence
  Sense Oligo
gugcaaucuuggcucacug

SEQ ID NO: 26280 - RNA, 19 nt, Artificial Sequence
  Antisense Oligo
cagugagccaagauugcac

SEQ ID NO: 26281 - RNA, 19 nt, Artificial Sequence
  Sense Oligo
ugcaaucuuggcucacugc

SEQ ID NO: 26282 - RNA, 19 nt, Artificial Sequence
  Antisense Oligo
gcagugagccaagauugca

SEQ ID NO: 26283 - RNA, 19 nt, Artificial Sequence
  Sense Oligo
gcaaucuuggcucacugca

SEQ ID NO: 26284 - RNA, 19 nt, Artificial Sequence
  Antisense Oligo
ugcagugagccaagauugc

SEQ ID NO: 26285 - RNA, 19 nt, Artificial Sequence
  Sense Oligo
caaucuuggcucacugcaa

SEQ ID NO: 26286 - RNA, 19 nt, Artificial Sequence
  Antisense Oligo
uugcagugagccaagauug

SEQ ID NO: 26287 - RNA, 19 nt, Artificial Sequence
  Sense Oligo
aaucuuggcucacugcaac

SEQ ID NO: 26288 - RNA, 19 nt, Artificial Sequence
  Antisense Oligo
guugcagugagccaagauu

SEQ ID NO: 26289 - RNA, 19 nt, Artificial Sequence
  Sense Oligo
aucuuggcucacugcaacc

SEQ ID NO: 26290 - RNA, 19 nt, Artificial Sequence
  Antisense Oligo
gguugcagugagccaagau

SEQ ID NO: 26291 - RNA, 19 nt, Artificial Sequence
  Sense Oligo
ucuuggcucacugcaaccu

SEQ ID NO: 26292 - RNA, 19 nt, Artificial Sequence
  Antisense Oligo
agguugcagugagccaaga

SEQ ID NO: 26293 - RNA, 19 nt, Artificial Sequence
  Sense Oligo
gcaaccucugccuccuagg

SEQ ID NO: 26294 - RNA, 19 nt, Artificial Sequence
  Antisense Oligo
ccuaggaggcagagguugc

SEQ ID NO: 26295 - RNA, 19 nt, Artificial Sequence
  Sense Oligo
ccugccucagccucuagag

SEQ ID NO: 26296 - RNA, 19 nt, Artificial Sequence
  Antisense Oligo
cucuagaggcugaggcagg

SEQ ID NO: 26297 - RNA, 19 nt, Artificial Sequence
  Sense Oligo
cugccucagccucuagagu

SEQ ID NO: 26298 - RNA, 19 nt, Artificial Sequence
  Antisense Oligo
acucuagaggcugaggcag

SEQ ID NO: 26299 - RNA, 19 nt, Artificial Sequence
  Sense Oligo
cucuagaguagcugggauu

SEQ ID NO: 26300 - RNA, 19 nt, Artificial Sequence
  Antisense Oligo
aaucccagcuacucuagag

SEQ ID NO: 26301 - RNA, 19 nt, Artificial Sequence
  Sense Oligo
ucuagaguagcugggauua

SEQ ID NO: 26302 - RNA, 19 nt, Artificial Sequence
  Antisense Oligo
uaaucccagcuacucuaga

SEQ ID NO: 26303 - RNA, 19 nt, Artificial Sequence
  Sense Oligo
cuagaguagcugggauuac

SEQ ID NO: 26304 - RNA, 19 nt, Artificial Sequence
  Antisense Oligo
guaaucccagcuacucuag

SEQ ID NO: 26305 - RNA, 19 nt, Artificial Sequence
  Sense Oligo
uagaguagcugggauuaca

SEQ ID NO: 26306 - RNA, 19 nt, Artificial Sequence
  Antisense Oligo
uguaaucccagcuacucua

SEQ ID NO: 26307 - RNA, 19 nt, Artificial Sequence
  Sense Oligo
agaguagcugggauuacag

SEQ ID NO: 26308 - RNA, 19 nt, Artificial Sequence
  Antisense Oligo
cuguaaucccagcuacucu

SEQ ID NO: 26309 - RNA, 19 nt, Artificial Sequence
  Sense Oligo
uagcugggauuacaggugu

SEQ ID NO: 26310 - RNA, 19 nt, Artificial Sequence
  Antisense Oligo
acaccuguaaucccagcua

SEQ ID NO: 26311 - RNA, 19 nt, Artificial Sequence
  Sense Oligo
agcugggauuacaggugug

SEQ ID NO: 26312 - RNA, 19 nt, Artificial Sequence
  Antisense Oligo
cacaccuguaaucccagcu

SEQ ID NO: 26313 - RNA, 19 nt, Artificial Sequence
  Sense Oligo
gggauuacaggugugugcc

SEQ ID NO: 26314 - RNA, 19 nt, Artificial Sequence
  Antisense Oligo
ggcacacaccuguaauccc

SEQ ID NO: 26315 - RNA, 19 nt, Artificial Sequence
  Sense Oligo
ggauuacaggugugugcca

SEQ ID NO: 26316 - RNA, 19 nt, Artificial Sequence
  Antisense Oligo
uggcacacaccuguaaucc

SEQ ID NO: 26317 - RNA, 19 nt, Artificial Sequence
  Sense Oligo
ccaccacgccuggcuaauu

SEQ ID NO: 26318 - RNA, 19 nt, Artificial Sequence
  Antisense Oligo
aauuagccaggcguggugg

SEQ ID NO: 26319 - RNA, 19 nt, Artificial Sequence
  Sense Oligo
caccacgccuggcuaauuu

SEQ ID NO: 26320 - RNA, 19 nt, Artificial Sequence
  Antisense Oligo
aaauuagccaggcguggug

SEQ ID NO: 26321 - RNA, 19 nt, Artificial Sequence
  Sense Oligo
accacgccuggcuaauuuu

SEQ ID NO: 26322 - RNA, 19 nt, Artificial Sequence
  Antisense Oligo
aaaauuagccaggcguggu

SEQ ID NO: 26323 - RNA, 19 nt, Artificial Sequence
  Sense Oligo
uuggccaggcuggucucga

SEQ ID NO: 26324 - RNA, 19 nt, Artificial Sequence
  Antisense Oligo
ucgagaccagccuggccaa

SEQ ID NO: 26325 - RNA, 19 nt, Artificial Sequence
  Sense Oligo
uggccaggcuggucucgaa

SEQ ID NO: 26326 - RNA, 19 nt, Artificial Sequence
  Antisense Oligo
uucgagaccagccuggcca

SEQ ID NO: 26327 - RNA, 19 nt, Artificial Sequence
  Sense Oligo
cucguucucucaaagugcu

SEQ ID NO: 26328 - RNA, 19 nt, Artificial Sequence
  Antisense Oligo
agcacuuugagagaacgag

SEQ ID NO: 26329 - RNA, 19 nt, Artificial Sequence
  Sense Oligo
ucucucaaagugcugggau

SEQ ID NO: 26330 - RNA, 19 nt, Artificial Sequence
  Antisense Oligo
aucccagcacuuugagaga

SEQ ID NO: 26331 - RNA, 19 nt, Artificial Sequence
  Sense Oligo
cucucaaagugcugggauu

SEQ ID NO: 26332 - RNA, 19 nt, Artificial Sequence
  Antisense Oligo
aaucccagcacuuugagag

SEQ ID NO: 26333 - RNA, 19 nt, Artificial Sequence
  Sense Oligo
ucucaaagugcugggauua

SEQ ID NO: 26334 - RNA, 19 nt, Artificial Sequence
  Antisense Oligo
uaaucccagcacuuugaga

SEQ ID NO: 26335 - RNA, 19 nt, Artificial Sequence
  Sense Oligo
cucaaagugcugggauuac

SEQ ID NO: 26336 - RNA, 19 nt, Artificial Sequence
  Antisense Oligo
guaaucccagcacuuugag

SEQ ID NO: 26337 - RNA, 19 nt, Artificial Sequence
  Sense Oligo
ucaaagugcugggauuaca

SEQ ID NO: 26338 - RNA, 19 nt, Artificial Sequence
  Antisense Oligo
uguaaucccagcacuuuga

SEQ ID NO: 26339 - RNA, 19 nt, Artificial Sequence
  Sense Oligo
caaagugcugggauuacag

SEQ ID NO: 26340 - RNA, 19 nt, Artificial Sequence
  Antisense Oligo
cuguaaucccagcacuuug

SEQ ID NO: 26341 - RNA, 19 nt, Artificial Sequence
  Sense Oligo
gugcugggauuacaggugu

SEQ ID NO: 26342 - RNA, 19 nt, Artificial Sequence
  Antisense Oligo
acaccuguaaucccagcac

SEQ ID NO: 26343 - RNA, 19 nt, Artificial Sequence
  Sense Oligo
ugcugggauuacaggugug

SEQ ID NO: 26344 - RNA, 19 nt, Artificial Sequence
  Antisense Oligo
cacaccuguaaucccagca

SEQ ID NO: 26345 - RNA, 19 nt, Artificial Sequence
  Sense Oligo
gcugggauuacagguguga

SEQ ID NO: 26346 - RNA, 19 nt, Artificial Sequence
  Antisense Oligo
ucacaccuguaaucccagc

SEQ ID NO: 26347 - RNA, 19 nt, Artificial Sequence
  Sense Oligo
cuggccugauucaauauuu

SEQ ID NO: 26348 - RNA, 19 nt, Artificial Sequence
  Antisense Oligo
aaauauugaaucaggccag

SEQ ID NO: 26349 - RNA, 19 nt, Artificial Sequence
  Sense Oligo
agcauccuaaaagcucuag

SEQ ID NO: 26350 - RNA, 19 nt, Artificial Sequence
  Antisense Oligo
cuagagcuuuuaggaugcu

SEQ ID NO: 26351 - RNA, 19 nt, Artificial Sequence
  Sense Oligo
gcauccuaaaagcucuaga

SEQ ID NO: 26352 - RNA, 19 nt, Artificial Sequence
  Antisense Oligo
ucuagagcuuuuaggaugc

SEQ ID NO: 26353 - RNA, 19 nt, Artificial Sequence
  Sense Oligo
auguaaauacuucuaagcc

SEQ ID NO: 26354 - RNA, 19 nt, Artificial Sequence
  Antisense Oligo
ggcuuagaaguauuuacau

SEQ ID NO: 26355 - RNA, 19 nt, Artificial Sequence
  Sense Oligo
aauacuucuaagccucacc

SEQ ID NO: 26356 - RNA, 19 nt, Artificial Sequence
  Antisense Oligo
ggugaggcuuagaaguauu

SEQ ID NO: 26357 - RNA, 19 nt, Artificial Sequence
  Sense Oligo
auacuucuaagccucaccc

SEQ ID NO: 26358 - RNA, 19 nt, Artificial Sequence
  Antisense Oligo
gggugaggcuuagaaguau

SEQ ID NO: 26359 - RNA, 19 nt, Artificial Sequence
  Sense Oligo
cuaugguuauguaguucga

SEQ ID NO: 26360 - RNA, 19 nt, Artificial Sequence
  Antisense Oligo
ucgaacuacauaaccauag

SEQ ID NO: 26361 - RNA, 19 nt, Artificial Sequence
  Sense Oligo
uaugguuauguaguucgag

SEQ ID NO: 26362 - RNA, 19 nt, Artificial Sequence
  Antisense Oligo
cucgaacuacauaaccaua

SEQ ID NO: 26363 - RNA, 19 nt, Artificial Sequence
  Sense Oligo
ucugggucaaagaagacua

SEQ ID NO: 26364 - RNA, 19 nt, Artificial Sequence
  Antisense Oligo
uagucuucuuugacccaga

SEQ ID NO: 26365 - RNA, 19 nt, Artificial Sequence
  Sense Oligo
cugggucaaagaagacuau

SEQ ID NO: 26366 - RNA, 19 nt, Artificial Sequence
  Antisense Oligo
auagucuucuuugacccag

SEQ ID NO: 26367 - RNA, 19 nt, Artificial Sequence
  Sense Oligo
ugggucaaagaagacuaug

SEQ ID NO: 26368 - RNA, 19 nt, Artificial Sequence
  Antisense Oligo
cauagucuucuuugaccca

SEQ ID NO: 26369 - RNA, 19 nt, Artificial Sequence
  Sense Oligo
aaagcagacagcaggaggc

SEQ ID NO: 26370 - RNA, 19 nt, Artificial Sequence
  Antisense Oligo
gccuccugcugucugcuuu

SEQ ID NO: 26371 - RNA, 19 nt, Artificial Sequence
  Sense Oligo
agcagacagcaggaggcac

SEQ ID NO: 26372 - RNA, 19 nt, Artificial Sequence
  Antisense Oligo
gugccuccugcugucugcu

SEQ ID NO: 26373 - RNA, 19 nt, Artificial Sequence
  Sense Oligo
agaaguaaguggucccuaa

SEQ ID NO: 26374 - RNA, 19 nt, Artificial Sequence
  Antisense Oligo
uuagggaccacuuacuucu

SEQ ID NO: 26375 - RNA, 19 nt, Artificial Sequence
  Sense Oligo
gaaguaaguggucccuaac

SEQ ID NO: 26376 - RNA, 19 nt, Artificial Sequence
  Antisense Oligo
guuagggaccacuuacuuc

SEQ ID NO: 26377 - RNA, 19 nt, Artificial Sequence
  Sense Oligo
aaguaaguggucccuaacu

SEQ ID NO: 26378 - RNA, 19 nt, Artificial Sequence
  Antisense Oligo
aguuagggaccacuuacuu

SEQ ID NO: 26379 - RNA, 19 nt, Artificial Sequence
  Sense Oligo
aguaaguggucccuaacuc

SEQ ID NO: 26380 - RNA, 19 nt, Artificial Sequence
  Antisense Oligo
gaguuagggaccacuuacu

SEQ ID NO: 26381 - RNA, 19 nt, Artificial Sequence
  Sense Oligo
guaaguggucccuaacuca

SEQ ID NO: 26382 - RNA, 19 nt, Artificial Sequence
  Antisense Oligo
ugaguuagggaccacuuac

SEQ ID NO: 26383 - RNA, 19 nt, Artificial Sequence
  Sense Oligo
cuaacucagggccaggugg

SEQ ID NO: 26384 - RNA, 19 nt, Artificial Sequence
  Antisense Oligo
ccaccuggcccugaguuag

SEQ ID NO: 26385 - RNA, 19 nt, Artificial Sequence
  Sense Oligo
uaacucagggccagguggc

SEQ ID NO: 26386 - RNA, 19 nt, Artificial Sequence
  Antisense Oligo
gccaccuggcccugaguua

SEQ ID NO: 26387 - RNA, 19 nt, Artificial Sequence
  Sense Oligo
aacucagggccagguggca

SEQ ID NO: 26388 - RNA, 19 nt, Artificial Sequence
  Antisense Oligo
ugccaccuggcccugaguu

SEQ ID NO: 26389 - RNA, 19 nt, Artificial Sequence
  Sense Oligo
gccagguggcaguucacac

SEQ ID NO: 26390 - RNA, 19 nt, Artificial Sequence
  Antisense Oligo
gugugaacugccaccuggc

SEQ ID NO: 26391 - RNA, 19 nt, Artificial Sequence
  Sense Oligo
ccagguggcaguucacacg

SEQ ID NO: 26392 - RNA, 19 nt, Artificial Sequence
  Antisense Oligo
cgugugaacugccaccugg

SEQ ID NO: 26393 - RNA, 19 nt, Artificial Sequence
  Sense Oligo
cagguggcaguucacacgg

SEQ ID NO: 26394 - RNA, 19 nt, Artificial Sequence
  Antisense Oligo
ccgugugaacugccaccug

SEQ ID NO: 26395 - RNA, 19 nt, Artificial Sequence
  Sense Oligo
agguggcaguucacacggg

SEQ ID NO: 26396 - RNA, 19 nt, Artificial Sequence
  Antisense Oligo
cccgugugaacugccaccu

SEQ ID NO: 26397 - RNA, 19 nt, Artificial Sequence
  Sense Oligo
gguggcaguucacacggga

SEQ ID NO: 26398 - RNA, 19 nt, Artificial Sequence
  Antisense Oligo
ucccgugugaacugccacc

SEQ ID NO: 26399 - RNA, 19 nt, Artificial Sequence
  Sense Oligo
guggcaguucacacgggaa

SEQ ID NO: 26400 - RNA, 19 nt, Artificial Sequence
  Antisense Oligo
uucccgugugaacugccac

SEQ ID NO: 26401 - RNA, 19 nt, Artificial Sequence
  Sense Oligo
uggcaguucacacgggaag

SEQ ID NO: 26402 - RNA, 19 nt, Artificial Sequence
  Antisense Oligo
cuucccgugugaacugcca

SEQ ID NO: 26403 - RNA, 19 nt, Artificial Sequence
  Sense Oligo
ggcaguucacacgggaaga

SEQ ID NO: 26404 - RNA, 19 nt, Artificial Sequence
  Antisense Oligo
ucuucccgugugaacugcc

SEQ ID NO: 26405 - RNA, 19 nt, Artificial Sequence
  Sense Oligo
gcaguucacacgggaagag

SEQ ID NO: 26406 - RNA, 19 nt, Artificial Sequence
  Antisense Oligo
cucuucccgugugaacugc

SEQ ID NO: 26407 - RNA, 19 nt, Artificial Sequence
  Sense Oligo
caguucacacgggaagagc

SEQ ID NO: 26408 - RNA, 19 nt, Artificial Sequence
  Antisense Oligo
gcucuucccgugugaacug

SEQ ID NO: 26409 - RNA, 19 nt, Artificial Sequence
  Sense Oligo
guucacacgggaagagcug

SEQ ID NO: 26410 - RNA, 19 nt, Artificial Sequence
  Antisense Oligo
cagcucuucccgugugaac

SEQ ID NO: 26411 - RNA, 19 nt, Artificial Sequence
  Sense Oligo
uucacacgggaagagcuga

SEQ ID NO: 26412 - RNA, 19 nt, Artificial Sequence
  Antisense Oligo
ucagcucuucccgugugaa

SEQ ID NO: 26413 - RNA, 19 nt, Artificial Sequence
  Sense Oligo
ucacacgggaagagcugag

SEQ ID NO: 26414 - RNA, 19 nt, Artificial Sequence
  Antisense Oligo
cucagcucuucccguguga

SEQ ID NO: 26415 - RNA, 19 nt, Artificial Sequence
  Sense Oligo
cacacgggaagagcugagg

SEQ ID NO: 26416 - RNA, 19 nt, Artificial Sequence
  Antisense Oligo
ccucagcucuucccgugug

SEQ ID NO: 26417 - RNA, 19 nt, Artificial Sequence
  Sense Oligo
ggugugaugaugucagaug

SEQ ID NO: 26418 - RNA, 19 nt, Artificial Sequence
  Antisense Oligo
caucugacaucaucacacc

SEQ ID NO: 26419 - RNA, 19 nt, Artificial Sequence
  Sense Oligo
gugugaugaugucagaugg

SEQ ID NO: 26420 - RNA, 19 nt, Artificial Sequence
  Antisense Oligo
ccaucugacaucaucacac

SEQ ID NO: 26421 - RNA, 19 nt, Artificial Sequence
  Sense Oligo
ugaugaugucagaugguug

SEQ ID NO: 26422 - RNA, 19 nt, Artificial Sequence
  Antisense Oligo
caaccaucugacaucauca

SEQ ID NO: 26423 - RNA, 19 nt, Artificial Sequence
  Sense Oligo
gaugaugucagaugguugg

SEQ ID NO: 26424 - RNA, 19 nt, Artificial Sequence
  Antisense Oligo
ccaaccaucugacaucauc

SEQ ID NO: 26425 - RNA, 19 nt, Artificial Sequence
  Sense Oligo
augaugucagaugguuggu

SEQ ID NO: 26426 - RNA, 19 nt, Artificial Sequence
  Antisense Oligo
accaaccaucugacaucau

SEQ ID NO: 26427 - RNA, 19 nt, Artificial Sequence
  Sense Oligo
ugaugucagaugguugguu

SEQ ID NO: 26428 - RNA, 19 nt, Artificial Sequence
  Antisense Oligo
aaccaaccaucugacauca

SEQ ID NO: 26429 - RNA, 19 nt, Artificial Sequence
  Sense Oligo
gaugucagaugguugguuu

SEQ ID NO: 26430 - RNA, 19 nt, Artificial Sequence
  Antisense Oligo
aaaccaaccaucugacauc

SEQ ID NO: 26431 - RNA, 19 nt, Artificial Sequence
  Sense Oligo
augucagaugguugguuuu

SEQ ID NO: 26432 - RNA, 19 nt, Artificial Sequence
  Antisense Oligo
aaaaccaaccaucugacau

SEQ ID NO: 26433 - RNA, 19 nt, Artificial Sequence
  Sense Oligo
ggcuugagggcaguggucu

SEQ ID NO: 26434 - RNA, 19 nt, Artificial Sequence
  Antisense Oligo
agaccacugcccucaagcc

SEQ ID NO: 26435 - RNA, 19 nt, Artificial Sequence
  Sense Oligo
gcuugagggcaguggucuu

SEQ ID NO: 26436 - RNA, 19 nt, Artificial Sequence
  Antisense Oligo
aagaccacugcccucaagc

SEQ ID NO: 26437 - RNA, 19 nt, Artificial Sequence
  Sense Oligo
cuugagggcaguggucuuc

SEQ ID NO: 26438 - RNA, 19 nt, Artificial Sequence
  Antisense Oligo
gaagaccacugcccucaag

SEQ ID NO: 26439 - RNA, 19 nt, Artificial Sequence
  Sense Oligo
gggcaguggucuuccagga

SEQ ID NO: 26440 - RNA, 19 nt, Artificial Sequence
  Antisense Oligo
uccuggaagaccacugccc

SEQ ID NO: 26441 - RNA, 19 nt, Artificial Sequence
  Sense Oligo
ggcaguggucuuccaggaa

SEQ ID NO: 26442 - RNA, 19 nt, Artificial Sequence
  Antisense Oligo
uuccuggaagaccacugcc

SEQ ID NO: 26443 - RNA, 19 nt, Artificial Sequence
  Sense Oligo
aacuggaucacggucccuc

SEQ ID NO: 26444 - RNA, 19 nt, Artificial Sequence
  Antisense Oligo
gagggaccgugauccaguu

SEQ ID NO: 26445 - RNA, 19 nt, Artificial Sequence
  Sense Oligo
acuggaucacggucccucc

SEQ ID NO: 26446 - RNA, 19 nt, Artificial Sequence
  Antisense Oligo
ggagggaccgugauccagu

SEQ ID NO: 26447 - RNA, 19 nt, Artificial Sequence
  Sense Oligo
cuccaagggucucuccugc

SEQ ID NO: 26448 - RNA, 19 nt, Artificial Sequence
  Antisense Oligo
gcaggagagacccuuggag

SEQ ID NO: 26449 - RNA, 19 nt, Artificial Sequence
  Sense Oligo
uccaagggucucuccugca

SEQ ID NO: 26450 - RNA, 19 nt, Artificial Sequence
  Antisense Oligo
ugcaggagagacccuugga

SEQ ID NO: 26451 - RNA, 19 nt, Artificial Sequence
  Sense Oligo
ucucuccugcaguugcguc

SEQ ID NO: 26452 - RNA, 19 nt, Artificial Sequence
  Antisense Oligo
gacgcaacugcaggagaga

SEQ ID NO: 26453 - RNA, 19 nt, Artificial Sequence
  Sense Oligo
ucuccugcaguugcgucug

SEQ ID NO: 26454 - RNA, 19 nt, Artificial Sequence
  Antisense Oligo
cagacgcaacugcaggaga

SEQ ID NO: 26455 - RNA, 19 nt, Artificial Sequence
  Sense Oligo
caguugcgucugcgcuuac

SEQ ID NO: 26456 - RNA, 19 nt, Artificial Sequence
  Antisense Oligo
guaagcgcagacgcaacug

SEQ ID NO: 26457 - RNA, 19 nt, Artificial Sequence
  Sense Oligo
aguugcgucugcgcuuacu

SEQ ID NO: 26458 - RNA, 19 nt, Artificial Sequence
  Antisense Oligo
aguaagcgcagacgcaacu

SEQ ID NO: 26459 - RNA, 19 nt, Artificial Sequence
  Sense Oligo
gcuuacugcagucuuucca

SEQ ID NO: 26460 - RNA, 19 nt, Artificial Sequence
  Antisense Oligo
uggaaagacugcaguaagc

SEQ ID NO: 26461 - RNA, 19 nt, Artificial Sequence
  Sense Oligo
cuuacugcagucuuuccac

SEQ ID NO: 26462 - RNA, 19 nt, Artificial Sequence
  Antisense Oligo
guggaaagacugcaguaag

SEQ ID NO: 26463 - RNA, 19 nt, Artificial Sequence
  Sense Oligo
uuacugcagucuuuccaca

SEQ ID NO: 26464 - RNA, 19 nt, Artificial Sequence
  Antisense Oligo
uguggaaagacugcaguaa

SEQ ID NO: 26465 - RNA, 19 nt, Artificial Sequence
  Sense Oligo
cguguugugggcagaggga

SEQ ID NO: 26466 - RNA, 19 nt, Artificial Sequence
  Antisense Oligo
ucccucugcccacaacacg

SEQ ID NO: 26467 - RNA, 19 nt, Artificial Sequence
  Sense Oligo
uugugggcagagggaguga

SEQ ID NO: 26468 - RNA, 19 nt, Artificial Sequence
  Antisense Oligo
ucacucccucugcccacaa

SEQ ID NO: 26469 - RNA, 19 nt, Artificial Sequence
  Sense Oligo
ugugggcagagggagugag

SEQ ID NO: 26470 - RNA, 19 nt, Artificial Sequence
  Antisense Oligo
cucacucccucugcccaca

SEQ ID NO: 26471 - RNA, 19 nt, Artificial Sequence
  Sense Oligo
ugcuguuucuuccuggcug

SEQ ID NO: 26472 - RNA, 19 nt, Artificial Sequence
  Antisense Oligo
cagccaggaagaaacagca

SEQ ID NO: 26473 - RNA, 19 nt, Artificial Sequence
  Sense Oligo
gcuguuucuuccuggcugg

SEQ ID NO: 26474 - RNA, 19 nt, Artificial Sequence
  Antisense Oligo
ccagccaggaagaaacagc

SEQ ID NO: 26475 - RNA, 19 nt, Artificial Sequence
  Sense Oligo
cuguuucuuccuggcuggc

SEQ ID NO: 26476 - RNA, 19 nt, Artificial Sequence
  Antisense Oligo
gccagccaggaagaaacag

SEQ ID NO: 26477 - RNA, 19 nt, Artificial Sequence
  Sense Oligo
uguuucuuccuggcuggcc

SEQ ID NO: 26478 - RNA, 19 nt, Artificial Sequence
  Antisense Oligo
ggccagccaggaagaaaca

SEQ ID NO: 26479 - RNA, 19 nt, Artificial Sequence
  Sense Oligo
guuucuuccuggcuggcca

SEQ ID NO: 26480 - RNA, 19 nt, Artificial Sequence
  Antisense Oligo
uggccagccaggaagaaac

SEQ ID NO: 26481 - RNA, 19 nt, Artificial Sequence
  Sense Oligo
uuucuuccuggcuggccac

SEQ ID NO: 26482 - RNA, 19 nt, Artificial Sequence
  Antisense Oligo
guggccagccaggaagaaa

SEQ ID NO: 26483 - RNA, 19 nt, Artificial Sequence
  Sense Oligo
uucuuccuggcuggccacu

SEQ ID NO: 26484 - RNA, 19 nt, Artificial Sequence
  Antisense Oligo
aguggccagccaggaagaa

SEQ ID NO: 26485 - RNA, 19 nt, Artificial Sequence
  Sense Oligo
ucuuccuggcuggccacuc

SEQ ID NO: 26486 - RNA, 19 nt, Artificial Sequence
  Antisense Oligo
gaguggccagccaggaaga

SEQ ID NO: 26487 - RNA, 19 nt, Artificial Sequence
  Sense Oligo
ggugcuggcagcuguuccu

SEQ ID NO: 26488 - RNA, 19 nt, Artificial Sequence
  Antisense Oligo
aggaacagcugccagcacc

SEQ ID NO: 26489 - RNA, 19 nt, Artificial Sequence
  Sense Oligo
gugcuggcagcuguuccua

SEQ ID NO: 26490 - RNA, 19 nt, Artificial Sequence
  Antisense Oligo
uaggaacagcugccagcac

SEQ ID NO: 26491 - RNA, 19 nt, Artificial Sequence
  Sense Oligo
ugcuggcagcuguuccuaa

SEQ ID NO: 26492 - RNA, 19 nt, Artificial Sequence
  Antisense Oligo
uuaggaacagcugccagca

SEQ ID NO: 26493 - RNA, 19 nt, Artificial Sequence
  Sense Oligo
gcuggcagcuguuccuaag

SEQ ID NO: 26494 - RNA, 19 nt, Artificial Sequence
  Antisense Oligo
cuuaggaacagcugccagc

SEQ ID NO: 26495 - RNA, 19 nt, Artificial Sequence
  Sense Oligo
cuggcagcuguuccuaagg

SEQ ID NO: 26496 - RNA, 19 nt, Artificial Sequence
  Antisense Oligo
ccuuaggaacagcugccag

SEQ ID NO: 26497 - RNA, 19 nt, Artificial Sequence
  Sense Oligo
ggcagcuguuccuaagguc

SEQ ID NO: 26498 - RNA, 19 nt, Artificial Sequence
  Antisense Oligo
gaccuuaggaacagcugcc

SEQ ID NO: 26499 - RNA, 19 nt, Artificial Sequence
  Sense Oligo
cagcuguuccuaaggucug

SEQ ID NO: 26500 - RNA, 19 nt, Artificial Sequence
  Antisense Oligo
cagaccuuaggaacagcug

SEQ ID NO: 26501 - RNA, 19 nt, Artificial Sequence
  Sense Oligo
agcuguuccuaaggucuga

SEQ ID NO: 26502 - RNA, 19 nt, Artificial Sequence
  Antisense Oligo
ucagaccuuaggaacagcu

SEQ ID NO: 26503 - RNA, 19 nt, Artificial Sequence
  Sense Oligo
gcuguuccuaaggucugag

SEQ ID NO: 26504 - RNA, 19 nt, Artificial Sequence
  Antisense Oligo
cucagaccuuaggaacagc

SEQ ID NO: 26505 - RNA, 19 nt, Artificial Sequence
  Sense Oligo
cuguuccuaaggucugagc

SEQ ID NO: 26506 - RNA, 19 nt, Artificial Sequence
  Antisense Oligo
gcucagaccuuaggaacag

SEQ ID NO: 26507 - RNA, 19 nt, Artificial Sequence
  Sense Oligo
aggucugagcccuuugcua

SEQ ID NO: 26508 - RNA, 19 nt, Artificial Sequence
  Antisense Oligo
uagcaaagggcucagaccu

SEQ ID NO: 26509 - RNA, 19 nt, Artificial Sequence
  Sense Oligo
ggucugagcccuuugcuac

SEQ ID NO: 26510 - RNA, 19 nt, Artificial Sequence
  Antisense Oligo
guagcaaagggcucagacc

SEQ ID NO: 26511 - RNA, 19 nt, Artificial Sequence
  Sense Oligo
gucugagcccuuugcuaca

SEQ ID NO: 26512 - RNA, 19 nt, Artificial Sequence
  Antisense Oligo
uguagcaaagggcucagac

SEQ ID NO: 26513 - RNA, 19 nt, Artificial Sequence
  Sense Oligo
gagcccuuugcuacaucaa

SEQ ID NO: 26514 - RNA, 19 nt, Artificial Sequence
  Antisense Oligo
uugauguagcaaagggcuc

SEQ ID NO: 26515 - RNA, 19 nt, Artificial Sequence
  Sense Oligo
agcccuuugcuacaucaag

SEQ ID NO: 26516 - RNA, 19 nt, Artificial Sequence
  Antisense Oligo
cuugauguagcaaagggcu

SEQ ID NO: 26517 - RNA, 19 nt, Artificial Sequence
  Sense Oligo
caucuuccaugcugguggg

SEQ ID NO: 26518 - RNA, 19 nt, Artificial Sequence
  Antisense Oligo
cccaccagcauggaagaug

SEQ ID NO: 26519 - RNA, 19 nt, Artificial Sequence
  Sense Oligo
uccaugcuggugggaggug

SEQ ID NO: 26520 - RNA, 19 nt, Artificial Sequence
  Antisense Oligo
caccucccaccagcaugga

SEQ ID NO: 26521 - RNA, 19 nt, Artificial Sequence
  Sense Oligo
cagugggcuccuccuguuc

SEQ ID NO: 26522 - RNA, 19 nt, Artificial Sequence
  Antisense Oligo
gaacaggaggagcccacug

SEQ ID NO: 26523 - RNA, 19 nt, Artificial Sequence
  Sense Oligo
agugggcuccuccuguucc

SEQ ID NO: 26524 - RNA, 19 nt, Artificial Sequence
  Antisense Oligo
ggaacaggaggagcccacu

SEQ ID NO: 26525 - RNA, 19 nt, Artificial Sequence
  Sense Oligo
aggauucuccgucuauuuc

SEQ ID NO: 26526 - RNA, 19 nt, Artificial Sequence
  Antisense Oligo
gaaauagacggagaauccu

SEQ ID NO: 26527 - RNA, 19 nt, Artificial Sequence
  Sense Oligo
gauucuccgucuauuucug

SEQ ID NO: 26528 - RNA, 19 nt, Artificial Sequence
  Antisense Oligo
cagaaauagacggagaauc

SEQ ID NO: 26529 - RNA, 19 nt, Artificial Sequence
  Sense Oligo
auucuccgucuauuucugc

SEQ ID NO: 26530 - RNA, 19 nt, Artificial Sequence
  Antisense Oligo
gcagaaauagacggagaau

SEQ ID NO: 26531 - RNA, 19 nt, Artificial Sequence
  Sense Oligo
uucuccgucuauuucugcc

SEQ ID NO: 26532 - RNA, 19 nt, Artificial Sequence
  Antisense Oligo
ggcagaaauagacggagaa

SEQ ID NO: 26533 - RNA, 19 nt, Artificial Sequence
  Sense Oligo
ucuccgucuauuucugcca

SEQ ID NO: 26534 - RNA, 19 nt, Artificial Sequence
  Antisense Oligo
uggcagaaauagacggaga

SEQ ID NO: 26535 - RNA, 19 nt, Artificial Sequence
  Sense Oligo
cuccgucuauuucugccag

SEQ ID NO: 26536 - RNA, 19 nt, Artificial Sequence
  Antisense Oligo
cuggcagaaauagacggag

SEQ ID NO: 26537 - RNA, 19 nt, Artificial Sequence
  Sense Oligo
uccgucuauuucugccaga

SEQ ID NO: 26538 - RNA, 19 nt, Artificial Sequence
  Antisense Oligo
ucuggcagaaauagacgga

SEQ ID NO: 26539 - RNA, 19 nt, Artificial Sequence
  Sense Oligo
uuucugccagagccugauu

SEQ ID NO: 26540 - RNA, 19 nt, Artificial Sequence
  Antisense Oligo
aaucaggcucuggcagaaa

SEQ ID NO: 26541 - RNA, 19 nt, Artificial Sequence
  Sense Oligo
uucugccagagccugauua

SEQ ID NO: 26542 - RNA, 19 nt, Artificial Sequence
  Antisense Oligo
uaaucaggcucuggcagaa

SEQ ID NO: 26543 - RNA, 19 nt, Artificial Sequence
  Sense Oligo
ucugccagagccugauuau

SEQ ID NO: 26544 - RNA, 19 nt, Artificial Sequence
  Antisense Oligo
auaaucaggcucuggcaga

SEQ ID NO: 26545 - RNA, 19 nt, Artificial Sequence
  Sense Oligo
cugccagagccugauuaug

SEQ ID NO: 26546 - RNA, 19 nt, Artificial Sequence
  Antisense Oligo
cauaaucaggcucuggcag

SEQ ID NO: 26547 - RNA, 19 nt, Artificial Sequence
  Sense Oligo
ugccagagccugauuaugu

SEQ ID NO: 26548 - RNA, 19 nt, Artificial Sequence
  Antisense Oligo
acauaaucaggcucuggca

SEQ ID NO: 26549 - RNA, 19 nt, Artificial Sequence
  Sense Oligo
gccagagccugauuauguc

SEQ ID NO: 26550 - RNA, 19 nt, Artificial Sequence
  Antisense Oligo
gacauaaucaggcucuggc

SEQ ID NO: 26551 - RNA, 19 nt, Artificial Sequence
  Sense Oligo
ccagagccugauuauguca

SEQ ID NO: 26552 - RNA, 19 nt, Artificial Sequence
  Antisense Oligo
ugacauaaucaggcucugg

SEQ ID NO: 26553 - RNA, 19 nt, Artificial Sequence
  Sense Oligo
agccugauuaugucaucga

SEQ ID NO: 26554 - RNA, 19 nt, Artificial Sequence
  Antisense Oligo
ucgaugacauaaucaggcu

SEQ ID NO: 26555 - RNA, 19 nt, Artificial Sequence
  Sense Oligo
gccugauuaugucaucgaa

SEQ ID NO: 26556 - RNA, 19 nt, Artificial Sequence
  Antisense Oligo
uucgaugacauaaucaggc

SEQ ID NO: 26557 - RNA, 19 nt, Artificial Sequence
  Sense Oligo
ccugauuaugucaucgaag

SEQ ID NO: 26558 - RNA, 19 nt, Artificial Sequence
  Antisense Oligo
cuucgaugacauaaucagg

SEQ ID NO: 26559 - RNA, 19 nt, Artificial Sequence
  Sense Oligo
cugauuaugucaucgaagc

SEQ ID NO: 26560 - RNA, 19 nt, Artificial Sequence
  Antisense Oligo
gcuucgaugacauaaucag

SEQ ID NO: 26561 - RNA, 19 nt, Artificial Sequence
  Sense Oligo
ugauuaugucaucgaagcu

SEQ ID NO: 26562 - RNA, 19 nt, Artificial Sequence
  Antisense Oligo
agcuucgaugacauaauca

SEQ ID NO: 26563 - RNA, 19 nt, Artificial Sequence
  Sense Oligo
gauuaugucaucgaagcug

SEQ ID NO: 26564 - RNA, 19 nt, Artificial Sequence
  Antisense Oligo
cagcuucgaugacauaauc

SEQ ID NO: 26565 - RNA, 19 nt, Artificial Sequence
  Sense Oligo
auuaugucaucgaagcugc

SEQ ID NO: 26566 - RNA, 19 nt, Artificial Sequence
  Antisense Oligo
gcagcuucgaugacauaau

SEQ ID NO: 26567 - RNA, 19 nt, Artificial Sequence
  Sense Oligo
caucgaagcugcuagagca

SEQ ID NO: 26568 - RNA, 19 nt, Artificial Sequence
  Antisense Oligo
ugcucuagcagcuucgaug

SEQ ID NO: 26569 - RNA, 19 nt, Artificial Sequence
  Sense Oligo
aucgaagcugcuagagcau

SEQ ID NO: 26570 - RNA, 19 nt, Artificial Sequence
  Antisense Oligo
augcucuagcagcuucgau

SEQ ID NO: 26571 - RNA, 19 nt, Artificial Sequence
  Sense Oligo
ucgaagcugcuagagcauc

SEQ ID NO: 26572 - RNA, 19 nt, Artificial Sequence
  Antisense Oligo
gaugcucuagcagcuucga

SEQ ID NO: 26573 - RNA, 19 nt, Artificial Sequence
  Sense Oligo
cgaagcugcuagagcaucc

SEQ ID NO: 26574 - RNA, 19 nt, Artificial Sequence
  Antisense Oligo
ggaugcucuagcagcuucg

SEQ ID NO: 26575 - RNA, 19 nt, Artificial Sequence
  Sense Oligo
gaagcugcuagagcaucca

SEQ ID NO: 26576 - RNA, 19 nt, Artificial Sequence
  Antisense Oligo
uggaugcucuagcagcuuc

SEQ ID NO: 26577 - RNA, 19 nt, Artificial Sequence
  Sense Oligo
aagcugcuagagcauccau

SEQ ID NO: 26578 - RNA, 19 nt, Artificial Sequence
  Antisense Oligo
auggaugcucuagcagcuu

SEQ ID NO: 26579 - RNA, 19 nt, Artificial Sequence
  Sense Oligo
ugcuagagcauccaugacc

SEQ ID NO: 26580 - RNA, 19 nt, Artificial Sequence
  Antisense Oligo
ggucauggaugcucuagca

SEQ ID NO: 26581 - RNA, 19 nt, Artificial Sequence
  Sense Oligo
agagcauccaugaccuugg

SEQ ID NO: 26582 - RNA, 19 nt, Artificial Sequence
  Antisense Oligo
ccaaggucauggaugcucu

SEQ ID NO: 26583 - RNA, 19 nt, Artificial Sequence
  Sense Oligo
gagcauccaugaccuuggc

SEQ ID NO: 26584 - RNA, 19 nt, Artificial Sequence
  Antisense Oligo
gccaaggucauggaugcuc

SEQ ID NO: 26585 - RNA, 19 nt, Artificial Sequence
  Sense Oligo
agcauccaugaccuuggcu

SEQ ID NO: 26586 - RNA, 19 nt, Artificial Sequence
  Antisense Oligo
agccaaggucauggaugcu

SEQ ID NO: 26587 - RNA, 19 nt, Artificial Sequence
  Sense Oligo
gcauccaugaccuuggcuu

SEQ ID NO: 26588 - RNA, 19 nt, Artificial Sequence
  Antisense Oligo
aagccaaggucauggaugc

SEQ ID NO: 26589 - RNA, 19 nt, Artificial Sequence
  Sense Oligo
cauccaugaccuuggcuua

SEQ ID NO: 26590 - RNA, 19 nt, Artificial Sequence
  Antisense Oligo
uaagccaaggucauggaug

SEQ ID NO: 26591 - RNA, 19 nt, Artificial Sequence
  Sense Oligo
auccaugaccuuggcuuau

SEQ ID NO: 26592 - RNA, 19 nt, Artificial Sequence
  Antisense Oligo
auaagccaaggucauggau

SEQ ID NO: 26593 - RNA, 19 nt, Artificial Sequence
  Sense Oligo
uccaugaccuuggcuuauu

SEQ ID NO: 26594 - RNA, 19 nt, Artificial Sequence
  Antisense Oligo
aauaagccaaggucaugga

SEQ ID NO: 26595 - RNA, 19 nt, Artificial Sequence
  Sense Oligo
ccaugaccuuggcuuauuu

SEQ ID NO: 26596 - RNA, 19 nt, Artificial Sequence
  Antisense Oligo
aaauaagccaaggucaugg

SEQ ID NO: 26597 - RNA, 19 nt, Artificial Sequence
  Sense Oligo
caugaccuuggcuuauuuu

SEQ ID NO: 26598 - RNA, 19 nt, Artificial Sequence
  Antisense Oligo
aaaauaagccaaggucaug

SEQ ID NO: 26599 - RNA, 19 nt, Artificial Sequence
  Sense Oligo
ugaccuuggcuuauuuuca

SEQ ID NO: 26600 - RNA, 19 nt, Artificial Sequence
  Antisense Oligo
ugaaaauaagccaagguca

SEQ ID NO: 26601 - RNA, 19 nt, Artificial Sequence
  Sense Oligo
gaccuuggcuuauuuucaa

SEQ ID NO: 26602 - RNA, 19 nt, Artificial Sequence
  Antisense Oligo
uugaaaauaagccaagguc

SEQ ID NO: 26603 - RNA, 19 nt, Artificial Sequence
  Sense Oligo
accuuggcuuauuuucaac

SEQ ID NO: 26604 - RNA, 19 nt, Artificial Sequence
  Antisense Oligo
guugaaaauaagccaaggu

SEQ ID NO: 26605 - RNA, 19 nt, Artificial Sequence
  Sense Oligo
ccuuggcuuauuuucaacu

SEQ ID NO: 26606 - RNA, 19 nt, Artificial Sequence
  Antisense Oligo
aguugaaaauaagccaagg

SEQ ID NO: 26607 - RNA, 19 nt, Artificial Sequence
  Sense Oligo
ucaacuuucauaauuaggg

SEQ ID NO: 26608 - RNA, 19 nt, Artificial Sequence
  Antisense Oligo
cccuaauuaugaaaguuga

SEQ ID NO: 26609 - RNA, 19 nt, Artificial Sequence
  Sense Oligo
caacuuucauaauuaggga

SEQ ID NO: 26610 - RNA, 19 nt, Artificial Sequence
  Antisense Oligo
ucccuaauuaugaaaguug

SEQ ID NO: 26611 - RNA, 19 nt, Artificial Sequence
  Sense Oligo
aaaucuuuggguaauggcc

SEQ ID NO: 26612 - RNA, 19 nt, Artificial Sequence
  Antisense Oligo
ggccauuacccaaagauuu

SEQ ID NO: 26613 - RNA, 19 nt, Artificial Sequence
  Sense Oligo
aaucuuuggguaauggcca

SEQ ID NO: 26614 - RNA, 19 nt, Artificial Sequence
  Antisense Oligo
uggccauuacccaaagauu

SEQ ID NO: 26615 - RNA, 19 nt, Artificial Sequence
  Sense Oligo
aucuuuggguaauggccag

SEQ ID NO: 26616 - RNA, 19 nt, Artificial Sequence
  Antisense Oligo
cuggccauuacccaaagau

SEQ ID NO: 26617 - RNA, 19 nt, Artificial Sequence
  Sense Oligo
ggguaauggccaggcacag

SEQ ID NO: 26618 - RNA, 19 nt, Artificial Sequence
  Antisense Oligo
cugugccuggccauuaccc

SEQ ID NO: 26619 - RNA, 19 nt, Artificial Sequence
  Sense Oligo
gguaauggccaggcacagu

SEQ ID NO: 26620 - RNA, 19 nt, Artificial Sequence
  Antisense Oligo
acugugccuggccauuacc

SEQ ID NO: 26621 - RNA, 19 nt, Artificial Sequence
  Sense Oligo
guaauggccaggcacagug

SEQ ID NO: 26622 - RNA, 19 nt, Artificial Sequence
  Antisense Oligo
cacugugccuggccauuac

SEQ ID NO: 26623 - RNA, 19 nt, Artificial Sequence
  Sense Oligo
uaauggccaggcacagugg

SEQ ID NO: 26624 - RNA, 19 nt, Artificial Sequence
  Antisense Oligo
ccacugugccuggccauua

SEQ ID NO: 26625 - RNA, 19 nt, Artificial Sequence
  Sense Oligo
ccaggcacaguggcucaca

SEQ ID NO: 26626 - RNA, 19 nt, Artificial Sequence
  Antisense Oligo
ugugagccacugugccugg

SEQ ID NO: 26627 - RNA, 19 nt, Artificial Sequence
  Sense Oligo
caggcacaguggcucacac

SEQ ID NO: 26628 - RNA, 19 nt, Artificial Sequence
  Antisense Oligo
gugugagccacugugccug

SEQ ID NO: 26629 - RNA, 19 nt, Artificial Sequence
  Sense Oligo
cacagcacuuugggaggcc

SEQ ID NO: 26630 - RNA, 19 nt, Artificial Sequence
  Antisense Oligo
ggccucccaaagugcugug

SEQ ID NO: 26631 - RNA, 19 nt, Artificial Sequence
  Sense Oligo
acagcacuuugggaggccg

SEQ ID NO: 26632 - RNA, 19 nt, Artificial Sequence
  Antisense Oligo
cggccucccaaagugcugu

SEQ ID NO: 26633 - RNA, 19 nt, Artificial Sequence
  Sense Oligo
cagcacuuugggaggccga

SEQ ID NO: 26634 - RNA, 19 nt, Artificial Sequence
  Antisense Oligo
ucggccucccaaagugcug

SEQ ID NO: 26635 - RNA, 19 nt, Artificial Sequence
  Sense Oligo
agcacuuugggaggccgag

SEQ ID NO: 26636 - RNA, 19 nt, Artificial Sequence
  Antisense Oligo
cucggccucccaaagugcu

SEQ ID NO: 26637 - RNA, 19 nt, Artificial Sequence
  Sense Oligo
cacuuugggaggccgaggu

SEQ ID NO: 26638 - RNA, 19 nt, Artificial Sequence
  Antisense Oligo
accucggccucccaaagug

SEQ ID NO: 26639 - RNA, 19 nt, Artificial Sequence
  Sense Oligo
acuuugggaggccgaggug

SEQ ID NO: 26640 - RNA, 19 nt, Artificial Sequence
  Antisense Oligo
caccucggccucccaaagu

SEQ ID NO: 26641 - RNA, 19 nt, Artificial Sequence
  Sense Oligo
cagcacuuugggaggccga

SEQ ID NO: 26642 - RNA, 19 nt, Artificial Sequence
  Antisense Oligo
ucggccucccaaagugcug

SEQ ID NO: 26643 - RNA, 19 nt, Artificial Sequence
  Sense Oligo
agcacuuugggaggccgag

SEQ ID NO: 26644 - RNA, 19 nt, Artificial Sequence
  Antisense Oligo
cucggccucccaaagugcu

SEQ ID NO: 26645 - RNA, 19 nt, Artificial Sequence
  Sense Oligo
ggaucaccugaggucaguu

SEQ ID NO: 26646 - RNA, 19 nt, Artificial Sequence
  Antisense Oligo
aacugaccucaggugaucc

SEQ ID NO: 26647 - RNA, 19 nt, Artificial Sequence
  Sense Oligo
gaucaccugaggucaguuc

SEQ ID NO: 26648 - RNA, 19 nt, Artificial Sequence
  Antisense Oligo
gaacugaccucaggugauc

SEQ ID NO: 26649 - RNA, 19 nt, Artificial Sequence
  Sense Oligo
guucaagaccagccuggcc

SEQ ID NO: 26650 - RNA, 19 nt, Artificial Sequence
  Antisense Oligo
ggccaggcuggucuugaac

SEQ ID NO: 26651 - RNA, 19 nt, Artificial Sequence
  Sense Oligo
uucaagaccagccuggcca

SEQ ID NO: 26652 - RNA, 19 nt, Artificial Sequence
  Antisense Oligo
uggccaggcuggucuugaa

SEQ ID NO: 26653 - RNA, 19 nt, Artificial Sequence
  Sense Oligo
ucaagaccagccuggccaa

SEQ ID NO: 26654 - RNA, 19 nt, Artificial Sequence
  Antisense Oligo
uuggccaggcuggucuuga

SEQ ID NO: 26655 - RNA, 19 nt, Artificial Sequence
  Sense Oligo
caagaccagccuggccaac

SEQ ID NO: 26656 - RNA, 19 nt, Artificial Sequence
  Antisense Oligo
guuggccaggcuggucuug

SEQ ID NO: 26657 - RNA, 19 nt, Artificial Sequence
  Sense Oligo
agcuacuugggaggcugag

SEQ ID NO: 26658 - RNA, 19 nt, Artificial Sequence
  Antisense Oligo
cucagccucccaaguagcu

SEQ ID NO: 26659 - RNA, 19 nt, Artificial Sequence
  Sense Oligo
gcuacuugggaggcugagg

SEQ ID NO: 26660 - RNA, 19 nt, Artificial Sequence
  Antisense Oligo
ccucagccucccaaguagc

SEQ ID NO: 26661 - RNA, 19 nt, Artificial Sequence
  Sense Oligo
cuacuugggaggcugaggc

SEQ ID NO: 26662 - RNA, 19 nt, Artificial Sequence
  Antisense Oligo
gccucagccucccaaguag

SEQ ID NO: 26663 - RNA, 19 nt, Artificial Sequence
  Sense Oligo
uacuugggaggcugaggca

SEQ ID NO: 26664 - RNA, 19 nt, Artificial Sequence
  Antisense Oligo
ugccucagccucccaagua

SEQ ID NO: 26665 - RNA, 19 nt, Artificial Sequence
  Sense Oligo
acuugggaggcugaggcag

SEQ ID NO: 26666 - RNA, 19 nt, Artificial Sequence
  Antisense Oligo
cugccucagccucccaagu

SEQ ID NO: 26667 - RNA, 19 nt, Artificial Sequence
  Sense Oligo
uugggaggcugaggcagga

SEQ ID NO: 26668 - RNA, 19 nt, Artificial Sequence
  Antisense Oligo
uccugccucagccucccaa

SEQ ID NO: 26669 - RNA, 19 nt, Artificial Sequence
  Sense Oligo
ugggaggcugaggcaggau

SEQ ID NO: 26670 - RNA, 19 nt, Artificial Sequence
  Antisense Oligo
auccugccucagccuccca

SEQ ID NO: 26671 - RNA, 19 nt, Artificial Sequence
  Sense Oligo
gggaggcugaggcaggaua

SEQ ID NO: 26672 - RNA, 19 nt, Artificial Sequence
  Antisense Oligo
uauccugccucagccuccc

SEQ ID NO: 26673 - RNA, 19 nt, Artificial Sequence
  Sense Oligo
ggaggcugaggcaggauaa

SEQ ID NO: 26674 - RNA, 19 nt, Artificial Sequence
  Antisense Oligo
uuauccugccucagccucc

SEQ ID NO: 26675 - RNA, 19 nt, Artificial Sequence
  Sense Oligo
gaggcugaggcaggauaau

SEQ ID NO: 26676 - RNA, 19 nt, Artificial Sequence
  Antisense Oligo
auuauccugccucagccuc

SEQ ID NO: 26677 - RNA, 19 nt, Artificial Sequence
  Sense Oligo
aggcugaggcaggauaauc

SEQ ID NO: 26678 - RNA, 19 nt, Artificial Sequence
  Antisense Oligo
gauuauccugccucagccu

SEQ ID NO: 26679 - RNA, 19 nt, Artificial Sequence
  Sense Oligo
ggauaaucaccugagcugg

SEQ ID NO: 26680 - RNA, 19 nt, Artificial Sequence
  Antisense Oligo
ccagcucaggugauuaucc

SEQ ID NO: 26681 - RNA, 19 nt, Artificial Sequence
  Sense Oligo
aggcggagguugcaauggg

SEQ ID NO: 26682 - RNA, 19 nt, Artificial Sequence
  Antisense Oligo
cccauugcaaccuccgccu

SEQ ID NO: 26683 - RNA, 19 nt, Artificial Sequence
  Sense Oligo
gguugcaaugggcucagau

SEQ ID NO: 26684 - RNA, 19 nt, Artificial Sequence
  Antisense Oligo
aucugagcccauugcaacc

SEQ ID NO: 26685 - RNA, 19 nt, Artificial Sequence
  Sense Oligo
uugcaaugggcucagauca

SEQ ID NO: 26686 - RNA, 19 nt, Artificial Sequence
  Antisense Oligo
ugaucugagcccauugcaa

SEQ ID NO: 26687 - RNA, 19 nt, Artificial Sequence
  Sense Oligo
ugcaaugggcucagaucau

SEQ ID NO: 26688 - RNA, 19 nt, Artificial Sequence
  Antisense Oligo
augaucugagcccauugca

SEQ ID NO: 26689 - RNA, 19 nt, Artificial Sequence
  Sense Oligo
gcaaugggcucagaucaug

SEQ ID NO: 26690 - RNA, 19 nt, Artificial Sequence
  Antisense Oligo
caugaucugagcccauugc

SEQ ID NO: 26691 - RNA, 19 nt, Artificial Sequence
  Sense Oligo
caaugggcucagaucaugc

SEQ ID NO: 26692 - RNA, 19 nt, Artificial Sequence
  Antisense Oligo
gcaugaucugagcccauug

SEQ ID NO: 26693 - RNA, 19 nt, Artificial Sequence
  Sense Oligo
aaugggcucagaucaugcc

SEQ ID NO: 26694 - RNA, 19 nt, Artificial Sequence
  Antisense Oligo
ggcaugaucugagcccauu

SEQ ID NO: 26695 - RNA, 19 nt, Artificial Sequence
  Sense Oligo
augggcucagaucaugcca

SEQ ID NO: 26696 - RNA, 19 nt, Artificial Sequence
  Antisense Oligo
uggcaugaucugagcccau

SEQ ID NO: 26697 - RNA, 19 nt, Artificial Sequence
  Sense Oligo
auugcacuccagccugggc

SEQ ID NO: 26698 - RNA, 19 nt, Artificial Sequence
  Antisense Oligo
gcccaggcuggagugcaau

SEQ ID NO: 26699 - RNA, 19 nt, Artificial Sequence
  Sense Oligo
uugcacuccagccugggca

SEQ ID NO: 26700 - RNA, 19 nt, Artificial Sequence
  Antisense Oligo
ugcccaggcuggagugcaa

SEQ ID NO: 26701 - RNA, 19 nt, Artificial Sequence
  Sense Oligo
ugcacuccagccugggcaa

SEQ ID NO: 26702 - RNA, 19 nt, Artificial Sequence
  Antisense Oligo
uugcccaggcuggagugca

SEQ ID NO: 26703 - RNA, 19 nt, Artificial Sequence
  Sense Oligo
aaaauagcugggcguggug

SEQ ID NO: 26704 - RNA, 19 nt, Artificial Sequence
  Antisense Oligo
caccacgcccagcuauuuu

SEQ ID NO: 26705 - RNA, 19 nt, Artificial Sequence
  Sense Oligo
aaauagcugggcguggugg

SEQ ID NO: 26706 - RNA, 19 nt, Artificial Sequence
  Antisense Oligo
ccaccacgcccagcuauuu

SEQ ID NO: 26707 - RNA, 19 nt, Artificial Sequence
  Sense Oligo
aauagcugggcgugguggc

SEQ ID NO: 26708 - RNA, 19 nt, Artificial Sequence
  Antisense Oligo
gccaccacgcccagcuauu

SEQ ID NO: 26709 - RNA, 19 nt, Artificial Sequence
  Sense Oligo
auagcugggcgugguggca

SEQ ID NO: 26710 - RNA, 19 nt, Artificial Sequence
  Antisense Oligo
ugccaccacgcccagcuau

SEQ ID NO: 26711 - RNA, 19 nt, Artificial Sequence
  Sense Oligo
uagcugggcgugguggcau

SEQ ID NO: 26712 - RNA, 19 nt, Artificial Sequence
  Antisense Oligo
augccaccacgcccagcua

SEQ ID NO: 26713 - RNA, 19 nt, Artificial Sequence
  Sense Oligo
ggcaugugccuguaauccc

SEQ ID NO: 26714 - RNA, 19 nt, Artificial Sequence
  Antisense Oligo
gggauuacaggcacaugcc

SEQ ID NO: 26715 - RNA, 19 nt, Artificial Sequence
  Sense Oligo
gugccuguaaucccagcua

SEQ ID NO: 26716 - RNA, 19 nt, Artificial Sequence
  Antisense Oligo
uagcugggauuacaggcac

SEQ ID NO: 26717 - RNA, 19 nt, Artificial Sequence
  Sense Oligo
ugccuguaaucccagcuac

SEQ ID NO: 26718 - RNA, 19 nt, Artificial Sequence
  Antisense Oligo
guagcugggauuacaggca

SEQ ID NO: 26719 - RNA, 19 nt, Artificial Sequence
  Sense Oligo
gccuguaaucccagcuacu

SEQ ID NO: 26720 - RNA, 19 nt, Artificial Sequence
  Antisense Oligo
aguagcugggauuacaggc

SEQ ID NO: 26721 - RNA, 19 nt, Artificial Sequence
  Sense Oligo
ccuguaaucccagcuacuc

SEQ ID NO: 26722 - RNA, 19 nt, Artificial Sequence
  Antisense Oligo
gaguagcugggauuacagg

SEQ ID NO: 26723 - RNA, 19 nt, Artificial Sequence
  Sense Oligo
acagagguugcagugagcu

SEQ ID NO: 26724 - RNA, 19 nt, Artificial Sequence
  Antisense Oligo
agcucacugcaaccucugu

SEQ ID NO: 26725 - RNA, 19 nt, Artificial Sequence
  Sense Oligo
cagagguugcagugagcug

SEQ ID NO: 26726 - RNA, 19 nt, Artificial Sequence
  Antisense Oligo
cagcucacugcaaccucug

SEQ ID NO: 26727 - RNA, 19 nt, Artificial Sequence
  Sense Oligo
agagguugcagugagcuga

SEQ ID NO: 26728 - RNA, 19 nt, Artificial Sequence
  Antisense Oligo
ucagcucacugcaaccucu

SEQ ID NO: 26729 - RNA, 19 nt, Artificial Sequence
  Sense Oligo
gagguugcagugagcugag

SEQ ID NO: 26730 - RNA, 19 nt, Artificial Sequence
  Antisense Oligo
cucagcucacugcaaccuc

SEQ ID NO: 26731 - RNA, 19 nt, Artificial Sequence
  Sense Oligo
acugcacuccagccugggu

SEQ ID NO: 26732 - RNA, 19 nt, Artificial Sequence
  Antisense Oligo
acccaggcuggagugcagu

SEQ ID NO: 26733 - RNA, 19 nt, Artificial Sequence
  Sense Oligo
ugcacuccagccuggguga

SEQ ID NO: 26734 - RNA, 19 nt, Artificial Sequence
  Antisense Oligo
ucacccaggcuggagugca

SEQ ID NO: 26735 - RNA, 19 nt, Artificial Sequence
  Sense Oligo
cacuccagccugggugaca

SEQ ID NO: 26736 - RNA, 19 nt, Artificial Sequence
  Antisense Oligo
ugucacccaggcuggagug

SEQ ID NO: 26737 - RNA, 19 nt, Artificial Sequence
  Sense Oligo
acuccagccugggugacag

SEQ ID NO: 26738 - RNA, 19 nt, Artificial Sequence
  Antisense Oligo
cugucacccaggcuggagu

SEQ ID NO: 26739 - RNA, 19 nt, Artificial Sequence
  Sense Oligo
cuccagccugggugacaga

SEQ ID NO: 26740 - RNA, 19 nt, Artificial Sequence
  Antisense Oligo
ucugucacccaggcuggag

SEQ ID NO: 26741 - RNA, 19 nt, Artificial Sequence
  Sense Oligo
uccagccugggugacagag

SEQ ID NO: 26742 - RNA, 19 nt, Artificial Sequence
  Antisense Oligo
cucugucacccaggcugga

SEQ ID NO: 26743 - RNA, 19 nt, Artificial Sequence
  Sense Oligo
ccagccugggugacagagu

SEQ ID NO: 26744 - RNA, 19 nt, Artificial Sequence
  Antisense Oligo
acucugucacccaggcugg

SEQ ID NO: 26745 - RNA, 19 nt, Artificial Sequence
  Sense Oligo
cagccugggugacagagug

SEQ ID NO: 26746 - RNA, 19 nt, Artificial Sequence
  Antisense Oligo
cacucugucacccaggcug

SEQ ID NO: 26747 - RNA, 19 nt, Artificial Sequence
  Sense Oligo
agccugggugacagaguga

SEQ ID NO: 26748 - RNA, 19 nt, Artificial Sequence
  Antisense Oligo
ucacucugucacccaggcu

SEQ ID NO: 26749 - RNA, 19 nt, Artificial Sequence
  Sense Oligo
gccugggugacagagugag

SEQ ID NO: 26750 - RNA, 19 nt, Artificial Sequence
  Antisense Oligo
cucacucugucacccaggc

SEQ ID NO: 26751 - RNA, 19 nt, Artificial Sequence
  Sense Oligo
aaaagccuuugaauugcaa

SEQ ID NO: 26752 - RNA, 19 nt, Artificial Sequence
  Antisense Oligo
uugcaauucaaaggcuuuu

SEQ ID NO: 26753 - RNA, 19 nt, Artificial Sequence
  Sense Oligo
cccagcuccaccuuucuaa

SEQ ID NO: 26754 - RNA, 19 nt, Artificial Sequence
  Antisense Oligo
uuagaaagguggagcuggg

SEQ ID NO: 26755 - RNA, 19 nt, Artificial Sequence
  Sense Oligo
ccagcuccaccuuucuaau

SEQ ID NO: 26756 - RNA, 19 nt, Artificial Sequence
  Antisense Oligo
auuagaaagguggagcugg

SEQ ID NO: 26757 - RNA, 19 nt, Artificial Sequence
  Sense Oligo
gcuccaccuuucuaauccc

SEQ ID NO: 26758 - RNA, 19 nt, Artificial Sequence
  Antisense Oligo
gggauuagaaagguggagc

SEQ ID NO: 26759 - RNA, 19 nt, Artificial Sequence
  Sense Oligo
caccuuucuaaucccauug

SEQ ID NO: 26760 - RNA, 19 nt, Artificial Sequence
  Antisense Oligo
caaugggauuagaaaggug

SEQ ID NO: 26761 - RNA, 19 nt, Artificial Sequence
  Sense Oligo
accuuucuaaucccauuga

SEQ ID NO: 26762 - RNA, 19 nt, Artificial Sequence
  Antisense Oligo
ucaaugggauuagaaaggu

SEQ ID NO: 26763 - RNA, 19 nt, Artificial Sequence
  Sense Oligo
cuuucuaaucccauugagg

SEQ ID NO: 26764 - RNA, 19 nt, Artificial Sequence
  Antisense Oligo
ccucaaugggauuagaaag

SEQ ID NO: 26765 - RNA, 19 nt, Artificial Sequence
  Sense Oligo
uaaucccauugaggaaguu

SEQ ID NO: 26766 - RNA, 19 nt, Artificial Sequence
  Antisense Oligo
aacuuccucaaugggauua

SEQ ID NO: 26767 - RNA, 19 nt, Artificial Sequence
  Sense Oligo
aaucccauugaggaaguuu

SEQ ID NO: 26768 - RNA, 19 nt, Artificial Sequence
  Antisense Oligo
aaacuuccucaaugggauu

SEQ ID NO: 26769 - RNA, 19 nt, Artificial Sequence
  Sense Oligo
cccauugaggaaguuuauu

SEQ ID NO: 26770 - RNA, 19 nt, Artificial Sequence
  Antisense Oligo
aauaaacuuccucaauggg

SEQ ID NO: 26771 - RNA, 19 nt, Artificial Sequence
  Sense Oligo
ccauugaggaaguuuauua

SEQ ID NO: 26772 - RNA, 19 nt, Artificial Sequence
  Antisense Oligo
uaauaaacuuccucaaugg

SEQ ID NO: 26773 - RNA, 19 nt, Artificial Sequence
  Sense Oligo
gaggaaguuuauuauggac

SEQ ID NO: 26774 - RNA, 19 nt, Artificial Sequence
  Antisense Oligo
guccauaauaaacuuccuc

SEQ ID NO: 26775 - RNA, 19 nt, Artificial Sequence
  Sense Oligo
aggaaguuuauuauggaca

SEQ ID NO: 26776 - RNA, 19 nt, Artificial Sequence
  Antisense Oligo
uguccauaauaaacuuccu

SEQ ID NO: 26777 - RNA, 19 nt, Artificial Sequence
  Sense Oligo
ggaaguuuauuauggacac

SEQ ID NO: 26778 - RNA, 19 nt, Artificial Sequence
  Antisense Oligo
guguccauaauaaacuucc

SEQ ID NO: 26779 - RNA, 19 nt, Artificial Sequence
  Sense Oligo
ccuguaggugaggcuuggu

SEQ ID NO: 26780 - RNA, 19 nt, Artificial Sequence
  Antisense Oligo
accaagccucaccuacagg

SEQ ID NO: 26781 - RNA, 19 nt, Artificial Sequence
  Sense Oligo
cuguaggugaggcuuggug

SEQ ID NO: 26782 - RNA, 19 nt, Artificial Sequence
  Antisense Oligo
caccaagccucaccuacag

SEQ ID NO: 26783 - RNA, 19 nt, Artificial Sequence
  Sense Oligo
ugaggcuuggugcaggcgu

SEQ ID NO: 26784 - RNA, 19 nt, Artificial Sequence
  Antisense Oligo
acgccugcaccaagccuca

SEQ ID NO: 26785 - RNA, 19 nt, Artificial Sequence
  Sense Oligo
aggcuuggugcaggcgucu

SEQ ID NO: 26786 - RNA, 19 nt, Artificial Sequence
  Antisense Oligo
agacgccugcaccaagccu

SEQ ID NO: 26787 - RNA, 19 nt, Artificial Sequence
  Sense Oligo
ugucuacucugccuuccgg

SEQ ID NO: 26788 - RNA, 19 nt, Artificial Sequence
  Antisense Oligo
ccggaaggcagaguagaca

SEQ ID NO: 26789 - RNA, 19 nt, Artificial Sequence
  Sense Oligo
gucuacucugccuuccgga

SEQ ID NO: 26790 - RNA, 19 nt, Artificial Sequence
  Antisense Oligo
uccggaaggcagaguagac

SEQ ID NO: 26791 - RNA, 19 nt, Artificial Sequence
  Sense Oligo
ucuacucugccuuccggac

SEQ ID NO: 26792 - RNA, 19 nt, Artificial Sequence
  Antisense Oligo
guccggaaggcagaguaga

SEQ ID NO: 26793 - RNA, 19 nt, Artificial Sequence
  Sense Oligo
cuacucugccuuccggacg

SEQ ID NO: 26794 - RNA, 19 nt, Artificial Sequence
  Antisense Oligo
cguccggaaggcagaguag

SEQ ID NO: 26795 - RNA, 19 nt, Artificial Sequence
  Sense Oligo
uacucugccuuccggacgg

SEQ ID NO: 26796 - RNA, 19 nt, Artificial Sequence
  Antisense Oligo
ccguccggaaggcagagua

SEQ ID NO: 26797 - RNA, 19 nt, Artificial Sequence
  Sense Oligo
gagccucucaucagcuguu

SEQ ID NO: 26798 - RNA, 19 nt, Artificial Sequence
  Antisense Oligo
aacagcugaugagaggcuc

SEQ ID NO: 26799 - RNA, 19 nt, Artificial Sequence
  Sense Oligo
agccucucaucagcuguuu

SEQ ID NO: 26800 - RNA, 19 nt, Artificial Sequence
  Antisense Oligo
aaacagcugaugagaggcu

SEQ ID NO: 26801 - RNA, 19 nt, Artificial Sequence
  Sense Oligo
ucaucagcuguuucccguu

SEQ ID NO: 26802 - RNA, 19 nt, Artificial Sequence
  Antisense Oligo
aacgggaaacagcugauga

SEQ ID NO: 26803 - RNA, 19 nt, Artificial Sequence
  Sense Oligo
caucagcuguuucccguua

SEQ ID NO: 26804 - RNA, 19 nt, Artificial Sequence
  Antisense Oligo
uaacgggaaacagcugaug

SEQ ID NO: 26805 - RNA, 19 nt, Artificial Sequence
  Sense Oligo
aucagcuguuucccguuac

SEQ ID NO: 26806 - RNA, 19 nt, Artificial Sequence
  Antisense Oligo
guaacgggaaacagcugau

SEQ ID NO: 26807 - RNA, 19 nt, Artificial Sequence
  Sense Oligo
ucagcuguuucccguuacu

SEQ ID NO: 26808 - RNA, 19 nt, Artificial Sequence
  Antisense Oligo
aguaacgggaaacagcuga

SEQ ID NO: 26809 - RNA, 19 nt, Artificial Sequence
  Sense Oligo
cagcuguuucccguuacuc

SEQ ID NO: 26810 - RNA, 19 nt, Artificial Sequence
  Antisense Oligo
gaguaacgggaaacagcug

SEQ ID NO: 26811 - RNA, 19 nt, Artificial Sequence
  Sense Oligo
agcuguuucccguuacucc

SEQ ID NO: 26812 - RNA, 19 nt, Artificial Sequence
  Antisense Oligo
ggaguaacgggaaacagcu

SEQ ID NO: 26813 - RNA, 19 nt, Artificial Sequence
  Sense Oligo
gcuguuucccguuacuccc

SEQ ID NO: 26814 - RNA, 19 nt, Artificial Sequence
  Antisense Oligo
gggaguaacgggaaacagc

SEQ ID NO: 26815 - RNA, 19 nt, Artificial Sequence
  Sense Oligo
cuguuucccguuacucccu

SEQ ID NO: 26816 - RNA, 19 nt, Artificial Sequence
  Antisense Oligo
agggaguaacgggaaacag

SEQ ID NO: 26817 - RNA, 19 nt, Artificial Sequence
  Sense Oligo
caccugcuacucuguccuu

SEQ ID NO: 26818 - RNA, 19 nt, Artificial Sequence
  Antisense Oligo
aaggacagaguagcaggug

SEQ ID NO: 26819 - RNA, 19 nt, Artificial Sequence
  Sense Oligo
accugcuacucuguccuuc

SEQ ID NO: 26820 - RNA, 19 nt, Artificial Sequence
  Antisense Oligo
gaaggacagaguagcaggu

SEQ ID NO: 26821 - RNA, 19 nt, Artificial Sequence
  Sense Oligo
ccugcuacucuguccuuca

SEQ ID NO: 26822 - RNA, 19 nt, Artificial Sequence
  Antisense Oligo
ugaaggacagaguagcagg

SEQ ID NO: 26823 - RNA, 19 nt, Artificial Sequence
  Sense Oligo
cugcuacucuguccuucag

SEQ ID NO: 26824 - RNA, 19 nt, Artificial Sequence
  Antisense Oligo
cugaaggacagaguagcag

SEQ ID NO: 26825 - RNA, 19 nt, Artificial Sequence
  Sense Oligo
ugcuacucuguccuucagg

SEQ ID NO: 26826 - RNA, 19 nt, Artificial Sequence
  Antisense Oligo
ccugaaggacagaguagca

SEQ ID NO: 26827 - RNA, 19 nt, Artificial Sequence
  Sense Oligo
caagacagcgccuccucug

SEQ ID NO: 26828 - RNA, 19 nt, Artificial Sequence
  Antisense Oligo
cagaggaggcgcugucuug

SEQ ID NO: 26829 - RNA, 19 nt, Artificial Sequence
  Sense Oligo
aagacagcgccuccucugg

SEQ ID NO: 26830 - RNA, 19 nt, Artificial Sequence
  Antisense Oligo
ccagaggaggcgcugucuu

SEQ ID NO: 26831 - RNA, 19 nt, Artificial Sequence
  Sense Oligo
agacagcgccuccucuggu

SEQ ID NO: 26832 - RNA, 19 nt, Artificial Sequence
  Antisense Oligo
accagaggaggcgcugucu

SEQ ID NO: 26833 - RNA, 19 nt, Artificial Sequence
  Sense Oligo
acagcgccuccucugguga

SEQ ID NO: 26834 - RNA, 19 nt, Artificial Sequence
  Antisense Oligo
ucaccagaggaggcgcugu

SEQ ID NO: 26835 - RNA, 19 nt, Artificial Sequence
  Sense Oligo
cagcgccuccucuggugau

SEQ ID NO: 26836 - RNA, 19 nt, Artificial Sequence
  Antisense Oligo
aucaccagaggaggcgcug

SEQ ID NO: 26837 - RNA, 19 nt, Artificial Sequence
  Sense Oligo
agcgccuccucuggugauu

SEQ ID NO: 26838 - RNA, 19 nt, Artificial Sequence
  Antisense Oligo
aaucaccagaggaggcgcu

SEQ ID NO: 26839 - RNA, 19 nt, Artificial Sequence
  Sense Oligo
gcgccuccucuggugauug

SEQ ID NO: 26840 - RNA, 19 nt, Artificial Sequence
  Antisense Oligo
caaucaccagaggaggcgc

SEQ ID NO: 26841 - RNA, 19 nt, Artificial Sequence
  Sense Oligo
cgccuccucuggugauuga

SEQ ID NO: 26842 - RNA, 19 nt, Artificial Sequence
  Antisense Oligo
ucaaucaccagaggaggcg

SEQ ID NO: 26843 - RNA, 19 nt, Artificial Sequence
  Sense Oligo
cucuggugauugauuccuc

SEQ ID NO: 26844 - RNA, 19 nt, Artificial Sequence
  Antisense Oligo
gaggaaucaaucaccagag

SEQ ID NO: 26845 - RNA, 19 nt, Artificial Sequence
  Sense Oligo
ucuggugauugauuccucu

SEQ ID NO: 26846 - RNA, 19 nt, Artificial Sequence
  Antisense Oligo
agaggaaucaaucaccaga

SEQ ID NO: 26847 - RNA, 19 nt, Artificial Sequence
  Sense Oligo
cuggugauugauuccucug

SEQ ID NO: 26848 - RNA, 19 nt, Artificial Sequence
  Antisense Oligo
cagaggaaucaaucaccag

SEQ ID NO: 26849 - RNA, 19 nt, Artificial Sequence
  Sense Oligo
uggugauugauuccucugg

SEQ ID NO: 26850 - RNA, 19 nt, Artificial Sequence
  Antisense Oligo
ccagaggaaucaaucacca

SEQ ID NO: 26851 - RNA, 19 nt, Artificial Sequence
  Sense Oligo
ggugauugauuccucugga

SEQ ID NO: 26852 - RNA, 19 nt, Artificial Sequence
  Antisense Oligo
uccagaggaaucaaucacc

SEQ ID NO: 26853 - RNA, 19 nt, Artificial Sequence
  Sense Oligo
gugauugauuccucuggag

SEQ ID NO: 26854 - RNA, 19 nt, Artificial Sequence
  Antisense Oligo
cuccagaggaaucaaucac

SEQ ID NO: 26855 - RNA, 19 nt, Artificial Sequence
  Sense Oligo
gaagcgcuuccucaaaucu

SEQ ID NO: 26856 - RNA, 19 nt, Artificial Sequence
  Antisense Oligo
agauuugaggaagcgcuuc

SEQ ID NO: 26857 - RNA, 19 nt, Artificial Sequence
  Sense Oligo
cgcuuccucaaaucucauu

SEQ ID NO: 26858 - RNA, 19 nt, Artificial Sequence
  Antisense Oligo
aaugagauuugaggaagcg

SEQ ID NO: 26859 - RNA, 19 nt, Artificial Sequence
  Sense Oligo
gcuuccucaaaucucauug

SEQ ID NO: 26860 - RNA, 19 nt, Artificial Sequence
  Antisense Oligo
caaugagauuugaggaagc

SEQ ID NO: 26861 - RNA, 19 nt, Artificial Sequence
  Sense Oligo
uuccucaaaucucauuggc

SEQ ID NO: 26862 - RNA, 19 nt, Artificial Sequence
  Antisense Oligo
gccaaugagauuugaggaa

SEQ ID NO: 26863 - RNA, 19 nt, Artificial Sequence
  Sense Oligo
caaaucucauuggcucuga

SEQ ID NO: 26864 - RNA, 19 nt, Artificial Sequence
  Antisense Oligo
ucagagccaaugagauuug

SEQ ID NO: 26865 - RNA, 19 nt, Artificial Sequence
  Sense Oligo
aaaucucauuggcucugau

SEQ ID NO: 26866 - RNA, 19 nt, Artificial Sequence
  Antisense Oligo
aucagagccaaugagauuu

SEQ ID NO: 26867 - RNA, 19 nt, Artificial Sequence
  Sense Oligo
cauuggcucugauuggcuc

SEQ ID NO: 26868 - RNA, 19 nt, Artificial Sequence
  Antisense Oligo
gagccaaucagagccaaug

SEQ ID NO: 26869 - RNA, 19 nt, Artificial Sequence
  Sense Oligo
auuggcucugauuggcuca

SEQ ID NO: 26870 - RNA, 19 nt, Artificial Sequence
  Antisense Oligo
ugagccaaucagagccaau

SEQ ID NO: 26871 - RNA, 19 nt, Artificial Sequence
  Sense Oligo
gcucugauuggcucacagg

SEQ ID NO: 26872 - RNA, 19 nt, Artificial Sequence
  Antisense Oligo
ccugugagccaaucagagc

SEQ ID NO: 26873 - RNA, 19 nt, Artificial Sequence
  Sense Oligo
cucugauuggcucacaggc

SEQ ID NO: 26874 - RNA, 19 nt, Artificial Sequence
  Antisense Oligo
gccugugagccaaucagag

SEQ ID NO: 26875 - RNA, 19 nt, Artificial Sequence
  Sense Oligo
ucugauuggcucacaggcc

SEQ ID NO: 26876 - RNA, 19 nt, Artificial Sequence
  Antisense Oligo
ggccugugagccaaucaga

SEQ ID NO: 26877 - RNA, 19 nt, Artificial Sequence
  Sense Oligo
uauggccaggaugauagac

SEQ ID NO: 26878 - RNA, 19 nt, Artificial Sequence
  Antisense Oligo
gucuaucauccuggccaua

SEQ ID NO: 26879 - RNA, 19 nt, Artificial Sequence
  Sense Oligo
auggccaggaugauagaca

SEQ ID NO: 26880 - RNA, 19 nt, Artificial Sequence
  Antisense Oligo
ugucuaucauccuggccau

SEQ ID NO: 26881 - RNA, 19 nt, Artificial Sequence
  Sense Oligo
guugacaccagcccacgca

SEQ ID NO: 26882 - RNA, 19 nt, Artificial Sequence
  Antisense Oligo
ugcgugggcuggugucaac

SEQ ID NO: 26883 - RNA, 19 nt, Artificial Sequence
  Sense Oligo
uugacaccagcccacgcac

SEQ ID NO: 26884 - RNA, 19 nt, Artificial Sequence
  Antisense Oligo
gugcgugggcuggugucaa

SEQ ID NO: 26885 - RNA, 19 nt, Artificial Sequence
  Sense Oligo
augggccauccagcgcugu

SEQ ID NO: 26886 - RNA, 19 nt, Artificial Sequence
  Antisense Oligo
acagcgcuggauggcccau

SEQ ID NO: 26887 - RNA, 19 nt, Artificial Sequence
  Sense Oligo
cauccagcgcugucaccag

SEQ ID NO: 26888 - RNA, 19 nt, Artificial Sequence
  Antisense Oligo
cuggugacagcgcuggaug

SEQ ID NO: 26889 - RNA, 19 nt, Artificial Sequence
  Sense Oligo
auccagcgcugucaccagg

SEQ ID NO: 26890 - RNA, 19 nt, Artificial Sequence
  Antisense Oligo
ccuggugacagcgcuggau

SEQ ID NO: 26891 - RNA, 19 nt, Artificial Sequence
  Sense Oligo
uccagcgcugucaccaggu

SEQ ID NO: 26892 - RNA, 19 nt, Artificial Sequence
  Antisense Oligo
accuggugacagcgcugga

SEQ ID NO: 26893 - RNA, 19 nt, Artificial Sequence
  Sense Oligo
cugucaccagguggccaca

SEQ ID NO: 26894 - RNA, 19 nt, Artificial Sequence
  Antisense Oligo
uguggccaccuggugacag

SEQ ID NO: 26895 - RNA, 19 nt, Artificial Sequence
  Sense Oligo
caccugcuguguguggaca

SEQ ID NO: 26896 - RNA, 19 nt, Artificial Sequence
  Antisense Oligo
uguccacacacagcaggug

SEQ ID NO: 26897 - RNA, 19 nt, Artificial Sequence
  Sense Oligo
cguguaccaggcagugucc

SEQ ID NO: 26898 - RNA, 19 nt, Artificial Sequence
  Antisense Oligo
ggacacugccugguacacg

SEQ ID NO: 26899 - RNA, 19 nt, Artificial Sequence
  Sense Oligo
uguaccaggcaguguccua

SEQ ID NO: 26900 - RNA, 19 nt, Artificial Sequence
  Antisense Oligo
uaggacacugccugguaca

SEQ ID NO: 26901 - RNA, 19 nt, Artificial Sequence
  Sense Oligo
cucuccgugugcuuugucc

SEQ ID NO: 26902 - RNA, 19 nt, Artificial Sequence
  Antisense Oligo
ggacaaagcacacggagag

SEQ ID NO: 26903 - RNA, 19 nt, Artificial Sequence
  Sense Oligo
ucuccgugugcuuuguccc

SEQ ID NO: 26904 - RNA, 19 nt, Artificial Sequence
  Antisense Oligo
gggacaaagcacacggaga

SEQ ID NO: 26905 - RNA, 19 nt, Artificial Sequence
  Sense Oligo
cuccgugugcuuuguccca

SEQ ID NO: 26906 - RNA, 19 nt, Artificial Sequence
  Antisense Oligo
ugggacaaagcacacggag

SEQ ID NO: 26907 - RNA, 19 nt, Artificial Sequence
  Sense Oligo
uccgugugcuuugucccau

SEQ ID NO: 26908 - RNA, 19 nt, Artificial Sequence
  Antisense Oligo
augggacaaagcacacgga

SEQ ID NO: 26909 - RNA, 19 nt, Artificial Sequence
  Sense Oligo
ccgugugcuuugucccauu

SEQ ID NO: 26910 - RNA, 19 nt, Artificial Sequence
  Antisense Oligo
aaugggacaaagcacacgg

SEQ ID NO: 26911 - RNA, 19 nt, Artificial Sequence
  Sense Oligo
cgugugcuuugucccauuu

SEQ ID NO: 26912 - RNA, 19 nt, Artificial Sequence
  Antisense Oligo
aaaugggacaaagcacacg

SEQ ID NO: 26913 - RNA, 19 nt, Artificial Sequence
  Sense Oligo
gugugcuuugucccauuug

SEQ ID NO: 26914 - RNA, 19 nt, Artificial Sequence
  Antisense Oligo
caaaugggacaaagcacac

SEQ ID NO: 26915 - RNA, 19 nt, Artificial Sequence
  Sense Oligo
ugugcuuugucccauuugg

SEQ ID NO: 26916 - RNA, 19 nt, Artificial Sequence
  Antisense Oligo
ccaaaugggacaaagcaca

SEQ ID NO: 26917 - RNA, 19 nt, Artificial Sequence
  Sense Oligo
gugcuuugucccauuuggu

SEQ ID NO: 26918 - RNA, 19 nt, Artificial Sequence
  Antisense Oligo
accaaaugggacaaagcac

SEQ ID NO: 26919 - RNA, 19 nt, Artificial Sequence
  Sense Oligo
ugcuuugucccauuugguc

SEQ ID NO: 26920 - RNA, 19 nt, Artificial Sequence
  Antisense Oligo
gaccaaaugggacaaagca

SEQ ID NO: 26921 - RNA, 19 nt, Artificial Sequence
  Sense Oligo
gcuuugucccauuugguca

SEQ ID NO: 26922 - RNA, 19 nt, Artificial Sequence
  Antisense Oligo
ugaccaaaugggacaaagc

SEQ ID NO: 26923 - RNA, 19 nt, Artificial Sequence
  Sense Oligo
cuuugucccauuuggucac

SEQ ID NO: 26924 - RNA, 19 nt, Artificial Sequence
  Antisense Oligo
gugaccaaaugggacaaag

SEQ ID NO: 26925 - RNA, 19 nt, Artificial Sequence
  Sense Oligo
uugucccauuuggucaccc

SEQ ID NO: 26926 - RNA, 19 nt, Artificial Sequence
  Antisense Oligo
gggugaccaaaugggacaa

SEQ ID NO: 26927 - RNA, 19 nt, Artificial Sequence
  Sense Oligo
ugucccauuuggucacccu

SEQ ID NO: 26928 - RNA, 19 nt, Artificial Sequence
  Antisense Oligo
agggugaccaaaugggaca

SEQ ID NO: 26929 - RNA, 19 nt, Artificial Sequence
  Sense Oligo
gucccauuuggucacccuc

SEQ ID NO: 26930 - RNA, 19 nt, Artificial Sequence
  Antisense Oligo
gagggugaccaaaugggac

SEQ ID NO: 26931 - RNA, 19 nt, Artificial Sequence
  Sense Oligo
ucccauuuggucacccuca

SEQ ID NO: 26932 - RNA, 19 nt, Artificial Sequence
  Antisense Oligo
ugagggugaccaaauggga

SEQ ID NO: 26933 - RNA, 19 nt, Artificial Sequence
  Sense Oligo
ccauuuggucacccucagu

SEQ ID NO: 26934 - RNA, 19 nt, Artificial Sequence
  Antisense Oligo
acugagggugaccaaaugg

SEQ ID NO: 26935 - RNA, 19 nt, Artificial Sequence
  Sense Oligo
cacccucagugaugcucug

SEQ ID NO: 26936 - RNA, 19 nt, Artificial Sequence
  Antisense Oligo
cagagcaucacugagggug

SEQ ID NO: 26937 - RNA, 19 nt, Artificial Sequence
  Sense Oligo
cagugaugcucugaugugg

SEQ ID NO: 26938 - RNA, 19 nt, Artificial Sequence
  Antisense Oligo
ccacaucagagcaucacug

SEQ ID NO: 26939 - RNA, 19 nt, Artificial Sequence
  Sense Oligo
agugaugcucugaugugga

SEQ ID NO: 26940 - RNA, 19 nt, Artificial Sequence
  Antisense Oligo
uccacaucagagcaucacu

SEQ ID NO: 26941 - RNA, 19 nt, Artificial Sequence
  Sense Oligo
gugaugcucugauguggac

SEQ ID NO: 26942 - RNA, 19 nt, Artificial Sequence
  Antisense Oligo
guccacaucagagcaucac

SEQ ID NO: 26943 - RNA, 19 nt, Artificial Sequence
  Sense Oligo
ugaugcucugauguggaca

SEQ ID NO: 26944 - RNA, 19 nt, Artificial Sequence
  Antisense Oligo
uguccacaucagagcauca

SEQ ID NO: 26945 - RNA, 19 nt, Artificial Sequence
  Sense Oligo
gaugcucugauguggacac

SEQ ID NO: 26946 - RNA, 19 nt, Artificial Sequence
  Antisense Oligo
guguccacaucagagcauc

SEQ ID NO: 26947 - RNA, 19 nt, Artificial Sequence
  Sense Oligo
cacaucugcugucuccacu

SEQ ID NO: 26948 - RNA, 19 nt, Artificial Sequence
  Antisense Oligo
aguggagacagcagaugug

SEQ ID NO: 26949 - RNA, 19 nt, Artificial Sequence
  Sense Oligo
acaucugcugucuccacuu

SEQ ID NO: 26950 - RNA, 19 nt, Artificial Sequence
  Antisense Oligo
aaguggagacagcagaugu

SEQ ID NO: 26951 - RNA, 19 nt, Artificial Sequence
  Sense Oligo
cugcugucuccacuuuaaa

SEQ ID NO: 26952 - RNA, 19 nt, Artificial Sequence
  Antisense Oligo
uuuaaaguggagacagcag

SEQ ID NO: 26953 - RNA, 19 nt, Artificial Sequence
  Sense Oligo
cugucuccacuuuaaagau

SEQ ID NO: 26954 - RNA, 19 nt, Artificial Sequence
  Antisense Oligo
aucuuuaaaguggagacag

SEQ ID NO: 26955 - RNA, 19 nt, Artificial Sequence
  Sense Oligo
gucuccacuuuaaagaugg

SEQ ID NO: 26956 - RNA, 19 nt, Artificial Sequence
  Antisense Oligo
ccaucuuuaaaguggagac

SEQ ID NO: 26957 - RNA, 19 nt, Artificial Sequence
  Sense Oligo
ucuccacuuuaaagauggg

SEQ ID NO: 26958 - RNA, 19 nt, Artificial Sequence
  Antisense Oligo
cccaucuuuaaaguggaga

SEQ ID NO: 26959 - RNA, 19 nt, Artificial Sequence
  Sense Oligo
acgguggcucagugaccca

SEQ ID NO: 26960 - RNA, 19 nt, Artificial Sequence
  Antisense Oligo
ugggucacugagccaccgu

SEQ ID NO: 26961 - RNA, 19 nt, Artificial Sequence
  Sense Oligo
agcccagacgccacugcau

SEQ ID NO: 26962 - RNA, 19 nt, Artificial Sequence
  Antisense Oligo
augcaguggcgucugggcu

SEQ ID NO: 26963 - RNA, 19 nt, Artificial Sequence
  Sense Oligo
cugucuucagggcugggac

SEQ ID NO: 26964 - RNA, 19 nt, Artificial Sequence
  Antisense Oligo
gucccagcccugaagacag

SEQ ID NO: 26965 - RNA, 19 nt, Artificial Sequence
  Sense Oligo
ugucuucagggcugggacc

SEQ ID NO: 26966 - RNA, 19 nt, Artificial Sequence
  Antisense Oligo
ggucccagcccugaagaca

SEQ ID NO: 26967 - RNA, 19 nt, Artificial Sequence
  Sense Oligo
acacugaggacgaugggug

SEQ ID NO: 26968 - RNA, 19 nt, Artificial Sequence
  Antisense Oligo
cacccaucguccucagugu

SEQ ID NO: 26969 - RNA, 19 nt, Artificial Sequence
  Sense Oligo
cacugaggacgaugggugc

SEQ ID NO: 26970 - RNA, 19 nt, Artificial Sequence
  Antisense Oligo
gcacccaucguccucagug

SEQ ID NO: 26971 - RNA, 19 nt, Artificial Sequence
  Sense Oligo
acugaggacgaugggugcc

SEQ ID NO: 26972 - RNA, 19 nt, Artificial Sequence
  Antisense Oligo
ggcacccaucguccucagu

SEQ ID NO: 26973 - RNA, 19 nt, Artificial Sequence
  Sense Oligo
cugaggacgaugggugccu

SEQ ID NO: 26974 - RNA, 19 nt, Artificial Sequence
  Antisense Oligo
aggcacccaucguccucag

SEQ ID NO: 26975 - RNA, 19 nt, Artificial Sequence
  Sense Oligo
ugaggacgaugggugccug

SEQ ID NO: 26976 - RNA, 19 nt, Artificial Sequence
  Antisense Oligo
caggcacccaucguccuca

SEQ ID NO: 26977 - RNA, 19 nt, Artificial Sequence
  Sense Oligo
aggacgaugggugccugca

SEQ ID NO: 26978 - RNA, 19 nt, Artificial Sequence
  Antisense Oligo
ugcaggcacccaucguccu

SEQ ID NO: 26979 - RNA, 19 nt, Artificial Sequence
  Sense Oligo
gugccugcagugaaggguu

SEQ ID NO: 26980 - RNA, 19 nt, Artificial Sequence
  Antisense Oligo
aacccuucacugcaggcac

SEQ ID NO: 26981 - RNA, 19 nt, Artificial Sequence
  Sense Oligo
ugccugcagugaaggguug

SEQ ID NO: 26982 - RNA, 19 nt, Artificial Sequence
  Antisense Oligo
caacccuucacugcaggca

SEQ ID NO: 26983 - RNA, 19 nt, Artificial Sequence
  Sense Oligo
gccugcagugaaggguugu

SEQ ID NO: 26984 - RNA, 19 nt, Artificial Sequence
  Antisense Oligo
acaacccuucacugcaggc

SEQ ID NO: 26985 - RNA, 19 nt, Artificial Sequence
  Sense Oligo
ccugcagugaaggguugug

SEQ ID NO: 26986 - RNA, 19 nt, Artificial Sequence
  Antisense Oligo
cacaacccuucacugcagg

SEQ ID NO: 26987 - RNA, 19 nt, Artificial Sequence
  Sense Oligo
cugcagugaaggguugugc

SEQ ID NO: 26988 - RNA, 19 nt, Artificial Sequence
  Antisense Oligo
gcacaacccuucacugcag

SEQ ID NO: 26989 - RNA, 19 nt, Artificial Sequence
  Sense Oligo
gugaaggguugugcagcac

SEQ ID NO: 26990 - RNA, 19 nt, Artificial Sequence
  Antisense Oligo
gugcugcacaacccuucac

SEQ ID NO: 26991 - RNA, 19 nt, Artificial Sequence
  Sense Oligo
agcaccugccuguuucuug

SEQ ID NO: 26992 - RNA, 19 nt, Artificial Sequence
  Antisense Oligo
caagaaacaggcaggugcu

SEQ ID NO: 26993 - RNA, 19 nt, Artificial Sequence
  Sense Oligo
gcaccugccuguuucuuga

SEQ ID NO: 26994 - RNA, 19 nt, Artificial Sequence
  Antisense Oligo
ucaagaaacaggcaggugc

SEQ ID NO: 26995 - RNA, 19 nt, Artificial Sequence
  Sense Oligo
caccugccuguuucuugac

SEQ ID NO: 26996 - RNA, 19 nt, Artificial Sequence
  Antisense Oligo
gucaagaaacaggcaggug

SEQ ID NO: 26997 - RNA, 19 nt, Artificial Sequence
  Sense Oligo
accugccuguuucuugacg

SEQ ID NO: 26998 - RNA, 19 nt, Artificial Sequence
  Antisense Oligo
cgucaagaaacaggcaggu

SEQ ID NO: 26999 - RNA, 19 nt, Artificial Sequence
  Sense Oligo
ccugccuguuucuugacgg

SEQ ID NO: 27000 - RNA, 19 nt, Artificial Sequence
  Antisense Oligo
ccgucaagaaacaggcagg

SEQ ID NO: 27001 - RNA, 19 nt, Artificial Sequence
  Sense Oligo
cugccuguuucuugacggc

SEQ ID NO: 27002 - RNA, 19 nt, Artificial Sequence
  Antisense Oligo
gccgucaagaaacaggcag

SEQ ID NO: 27003 - RNA, 19 nt, Artificial Sequence
  Sense Oligo
ugccuguuucuugacggcc

SEQ ID NO: 27004 - RNA, 19 nt, Artificial Sequence
  Antisense Oligo
ggccgucaagaaacaggca

SEQ ID NO: 27005 - RNA, 19 nt, Artificial Sequence
  Sense Oligo
gccuguuucuugacggccu

SEQ ID NO: 27006 - RNA, 19 nt, Artificial Sequence
  Antisense Oligo
aggccgucaagaaacaggc

SEQ ID NO: 27007 - RNA, 19 nt, Artificial Sequence
  Sense Oligo
ccuguuucuugacggccuc

SEQ ID NO: 27008 - RNA, 19 nt, Artificial Sequence
  Antisense Oligo
gaggccgucaagaaacagg

SEQ ID NO: 27009 - RNA, 19 nt, Artificial Sequence
  Sense Oligo
cuguuucuugacggccucu

SEQ ID NO: 27010 - RNA, 19 nt, Artificial Sequence
  Antisense Oligo
agaggccgucaagaaacag

SEQ ID NO: 27011 - RNA, 19 nt, Artificial Sequence
  Sense Oligo
uguuucuugacggccucuu

SEQ ID NO: 27012 - RNA, 19 nt, Artificial Sequence
  Antisense Oligo
aagaggccgucaagaaaca

SEQ ID NO: 27013 - RNA, 19 nt, Artificial Sequence
  Sense Oligo
ucuugacggccucuugcuu

SEQ ID NO: 27014 - RNA, 19 nt, Artificial Sequence
  Antisense Oligo
aagcaagaggccgucaaga

SEQ ID NO: 27015 - RNA, 19 nt, Artificial Sequence
  Sense Oligo
cuugacggccucuugcuuc

SEQ ID NO: 27016 - RNA, 19 nt, Artificial Sequence
  Antisense Oligo
gaagcaagaggccgucaag

SEQ ID NO: 27017 - RNA, 19 nt, Artificial Sequence
  Sense Oligo
uugacggccucuugcuucc

SEQ ID NO: 27018 - RNA, 19 nt, Artificial Sequence
  Antisense Oligo
ggaagcaagaggccgucaa

SEQ ID NO: 27019 - RNA, 19 nt, Artificial Sequence
  Sense Oligo
ugacggccucuugcuuccc

SEQ ID NO: 27020 - RNA, 19 nt, Artificial Sequence
  Antisense Oligo
gggaagcaagaggccguca

SEQ ID NO: 27021 - RNA, 19 nt, Artificial Sequence
  Sense Oligo
gaccagccugucauucaga

SEQ ID NO: 27022 - RNA, 19 nt, Artificial Sequence
  Antisense Oligo
ucugaaugacaggcugguc

SEQ ID NO: 27023 - RNA, 19 nt, Artificial Sequence
  Sense Oligo
gcugauaccugcugaugac

SEQ ID NO: 27024 - RNA, 19 nt, Artificial Sequence
  Antisense Oligo
gucaucagcagguaucagc

SEQ ID NO: 27025 - RNA, 19 nt, Artificial Sequence
  Sense Oligo
cugauaccugcugaugacg

SEQ ID NO: 27026 - RNA, 19 nt, Artificial Sequence
  Antisense Oligo
cgucaucagcagguaucag

SEQ ID NO: 27027 - RNA, 19 nt, Artificial Sequence
  Sense Oligo
ugauaccugcugaugacgc

SEQ ID NO: 27028 - RNA, 19 nt, Artificial Sequence
  Antisense Oligo
gcgucaucagcagguauca

SEQ ID NO: 27029 - RNA, 19 nt, Artificial Sequence
  Sense Oligo
gauaccugcugaugacgcc

SEQ ID NO: 27030 - RNA, 19 nt, Artificial Sequence
  Antisense Oligo
ggcgucaucagcagguauc

SEQ ID NO: 27031 - RNA, 19 nt, Artificial Sequence
  Sense Oligo
auaccugcugaugacgcca

SEQ ID NO: 27032 - RNA, 19 nt, Artificial Sequence
  Antisense Oligo
uggcgucaucagcagguau

SEQ ID NO: 27033 - RNA, 19 nt, Artificial Sequence
  Sense Oligo
uaccugcugaugacgccac

SEQ ID NO: 27034 - RNA, 19 nt, Artificial Sequence
  Antisense Oligo
guggcgucaucagcaggua

SEQ ID NO: 27035 - RNA, 19 nt, Artificial Sequence
  Sense Oligo
accugcugaugacgccacu

SEQ ID NO: 27036 - RNA, 19 nt, Artificial Sequence
  Antisense Oligo
aguggcgucaucagcaggu

SEQ ID NO: 27037 - RNA, 19 nt, Artificial Sequence
  Sense Oligo
ccugcugaugacgccacuc

SEQ ID NO: 27038 - RNA, 19 nt, Artificial Sequence
  Antisense Oligo
gaguggcgucaucagcagg

SEQ ID NO: 27039 - RNA, 19 nt, Artificial Sequence
  Sense Oligo
cugcugaugacgccacucu

SEQ ID NO: 27040 - RNA, 19 nt, Artificial Sequence
  Antisense Oligo
agaguggcgucaucagcag

SEQ ID NO: 27041 - RNA, 19 nt, Artificial Sequence
  Sense Oligo
ugcugaugacgccacucua

SEQ ID NO: 27042 - RNA, 19 nt, Artificial Sequence
  Antisense Oligo
uagaguggcgucaucagca

SEQ ID NO: 27043 - RNA, 19 nt, Artificial Sequence
  Sense Oligo
gcugaugacgccacucuac

SEQ ID NO: 27044 - RNA, 19 nt, Artificial Sequence
  Antisense Oligo
guagaguggcgucaucagc

SEQ ID NO: 27045 - RNA, 19 nt, Artificial Sequence
  Sense Oligo
cugaugacgccacucuaca

SEQ ID NO: 27046 - RNA, 19 nt, Artificial Sequence
  Antisense Oligo
uguagaguggcgucaucag

SEQ ID NO: 27047 - RNA, 19 nt, Artificial Sequence
  Sense Oligo
ugaugacgccacucuacag

SEQ ID NO: 27048 - RNA, 19 nt, Artificial Sequence
  Antisense Oligo
cuguagaguggcgucauca

SEQ ID NO: 27049 - RNA, 19 nt, Artificial Sequence
  Sense Oligo
gaugacgccacucuacagu

SEQ ID NO: 27050 - RNA, 19 nt, Artificial Sequence
  Antisense Oligo
acuguagaguggcgucauc

SEQ ID NO: 27051 - RNA, 19 nt, Artificial Sequence
  Sense Oligo
agauggagucuugcucuau

SEQ ID NO: 27052 - RNA, 19 nt, Artificial Sequence
  Antisense Oligo
auagagcaagacuccaucu

SEQ ID NO: 27053 - RNA, 19 nt, Artificial Sequence
  Sense Oligo
gauggagucuugcucuauu

SEQ ID NO: 27054 - RNA, 19 nt, Artificial Sequence
  Antisense Oligo
aauagagcaagacuccauc

SEQ ID NO: 27055 - RNA, 19 nt, Artificial Sequence
  Sense Oligo
auggagucuugcucuauug

SEQ ID NO: 27056 - RNA, 19 nt, Artificial Sequence
  Antisense Oligo
caauagagcaagacuccau

SEQ ID NO: 27057 - RNA, 19 nt, Artificial Sequence
  Sense Oligo
uggagucuugcucuauugc

SEQ ID NO: 27058 - RNA, 19 nt, Artificial Sequence
  Antisense Oligo
gcaauagagcaagacucca

SEQ ID NO: 27059 - RNA, 19 nt, Artificial Sequence
  Sense Oligo
cucuauugcucaggcugga

SEQ ID NO: 27060 - RNA, 19 nt, Artificial Sequence
  Antisense Oligo
uccagccugagcaauagag

SEQ ID NO: 27061 - RNA, 19 nt, Artificial Sequence
  Sense Oligo
ucuauugcucaggcuggag

SEQ ID NO: 27062 - RNA, 19 nt, Artificial Sequence
  Antisense Oligo
cuccagccugagcaauaga

SEQ ID NO: 27063 - RNA, 19 nt, Artificial Sequence
  Sense Oligo
uugcucaggcuggagugca

SEQ ID NO: 27064 - RNA, 19 nt, Artificial Sequence
  Antisense Oligo
ugcacuccagccugagcaa

SEQ ID NO: 27065 - RNA, 19 nt, Artificial Sequence
  Sense Oligo
caggcuggagugcaguugc

SEQ ID NO: 27066 - RNA, 19 nt, Artificial Sequence
  Antisense Oligo
gcaacugcacuccagccug

SEQ ID NO: 27067 - RNA, 19 nt, Artificial Sequence
  Sense Oligo
aggcuggagugcaguugcg

SEQ ID NO: 27068 - RNA, 19 nt, Artificial Sequence
  Antisense Oligo
cgcaacugcacuccagccu

SEQ ID NO: 27069 - RNA, 19 nt, Artificial Sequence
  Sense Oligo
ggcuggagugcaguugcgu

SEQ ID NO: 27070 - RNA, 19 nt, Artificial Sequence
  Antisense Oligo
acgcaacugcacuccagcc

SEQ ID NO: 27071 - RNA, 19 nt, Artificial Sequence
  Sense Oligo
gagugcaguugcguaauau

SEQ ID NO: 27072 - RNA, 19 nt, Artificial Sequence
  Antisense Oligo
auauuacgcaacugcacuc

SEQ ID NO: 27073 - RNA, 19 nt, Artificial Sequence
  Sense Oligo
agugcaguugcguaauauc

SEQ ID NO: 27074 - RNA, 19 nt, Artificial Sequence
  Antisense Oligo
gauauuacgcaacugcacu

SEQ ID NO: 27075 - RNA, 19 nt, Artificial Sequence
  Sense Oligo
gugcaguugcguaauaucg

SEQ ID NO: 27076 - RNA, 19 nt, Artificial Sequence
  Antisense Oligo
cgauauuacgcaacugcac

SEQ ID NO: 27077 - RNA, 19 nt, Artificial Sequence
  Sense Oligo
ugcaguugcguaauaucgg

SEQ ID NO: 27078 - RNA, 19 nt, Artificial Sequence
  Antisense Oligo
ccgauauuacgcaacugca

SEQ ID NO: 27079 - RNA, 19 nt, Artificial Sequence
  Sense Oligo
gcaguugcguaauaucggc

SEQ ID NO: 27080 - RNA, 19 nt, Artificial Sequence
  Antisense Oligo
gccgauauuacgcaacugc

SEQ ID NO: 27081 - RNA, 19 nt, Artificial Sequence
  Sense Oligo
caguugcguaauaucggcu

SEQ ID NO: 27082 - RNA, 19 nt, Artificial Sequence
  Antisense Oligo
agccgauauuacgcaacug

SEQ ID NO: 27083 - RNA, 19 nt, Artificial Sequence
  Sense Oligo
cggguucaagcaauucucc

SEQ ID NO: 27084 - RNA, 19 nt, Artificial Sequence
  Antisense Oligo
ggagaauugcuugaacccg

SEQ ID NO: 27085 - RNA, 19 nt, Artificial Sequence
  Sense Oligo
ggguucaagcaauucuccu

SEQ ID NO: 27086 - RNA, 19 nt, Artificial Sequence
  Antisense Oligo
aggagaauugcuugaaccc

SEQ ID NO: 27087 - RNA, 19 nt, Artificial Sequence
  Sense Oligo
gguucaagcaauucuccug

SEQ ID NO: 27088 - RNA, 19 nt, Artificial Sequence
  Antisense Oligo
caggagaauugcuugaacc

SEQ ID NO: 27089 - RNA, 19 nt, Artificial Sequence
  Sense Oligo
guucaagcaauucuccugc

SEQ ID NO: 27090 - RNA, 19 nt, Artificial Sequence
  Antisense Oligo
gcaggagaauugcuugaac

SEQ ID NO: 27091 - RNA, 19 nt, Artificial Sequence
  Sense Oligo
caauucuccugcuucagcc

SEQ ID NO: 27092 - RNA, 19 nt, Artificial Sequence
  Antisense Oligo
ggcugaagcaggagaauug

SEQ ID NO: 27093 - RNA, 19 nt, Artificial Sequence
  Sense Oligo
cugcuucagccucccaagu

SEQ ID NO: 27094 - RNA, 19 nt, Artificial Sequence
  Antisense Oligo
acuugggaggcugaagcag

SEQ ID NO: 27095 - RNA, 19 nt, Artificial Sequence
  Sense Oligo
ugcuucagccucccaagua

SEQ ID NO: 27096 - RNA, 19 nt, Artificial Sequence
  Antisense Oligo
uacuugggaggcugaagca

SEQ ID NO: 27097 - RNA, 19 nt, Artificial Sequence
  Sense Oligo
gcuucagccucccaaguag

SEQ ID NO: 27098 - RNA, 19 nt, Artificial Sequence
  Antisense Oligo
cuacuugggaggcugaagc

SEQ ID NO: 27099 - RNA, 19 nt, Artificial Sequence
  Sense Oligo
cuucagccucccaaguagc

SEQ ID NO: 27100 - RNA, 19 nt, Artificial Sequence
  Antisense Oligo
gcuacuugggaggcugaag

SEQ ID NO: 27101 - RNA, 19 nt, Artificial Sequence
  Sense Oligo
uucagccucccaaguagcu

SEQ ID NO: 27102 - RNA, 19 nt, Artificial Sequence
  Antisense Oligo
agcuacuugggaggcugaa

SEQ ID NO: 27103 - RNA, 19 nt, Artificial Sequence
  Sense Oligo
ggaucucaccauguuggcc

SEQ ID NO: 27104 - RNA, 19 nt, Artificial Sequence
  Antisense Oligo
ggccaacauggugagaucc

SEQ ID NO: 27105 - RNA, 19 nt, Artificial Sequence
  Sense Oligo
gaucucaccauguuggcca

SEQ ID NO: 27106 - RNA, 19 nt, Artificial Sequence
  Antisense Oligo
uggccaacauggugagauc

SEQ ID NO: 27107 - RNA, 19 nt, Artificial Sequence
  Sense Oligo
aucucaccauguuggccag

SEQ ID NO: 27108 - RNA, 19 nt, Artificial Sequence
  Antisense Oligo
cuggccaacauggugagau

SEQ ID NO: 27109 - RNA, 19 nt, Artificial Sequence
  Sense Oligo
caccauguuggccaggcug

SEQ ID NO: 27110 - RNA, 19 nt, Artificial Sequence
  Antisense Oligo
cagccuggccaacauggug

SEQ ID NO: 27111 - RNA, 19 nt, Artificial Sequence
  Sense Oligo
accauguuggccaggcugg

SEQ ID NO: 27112 - RNA, 19 nt, Artificial Sequence
  Antisense Oligo
ccagccuggccaacauggu

SEQ ID NO: 27113 - RNA, 19 nt, Artificial Sequence
  Sense Oligo
ccauguuggccaggcuggu

SEQ ID NO: 27114 - RNA, 19 nt, Artificial Sequence
  Antisense Oligo
accagccuggccaacaugg

SEQ ID NO: 27115 - RNA, 19 nt, Artificial Sequence
  Sense Oligo
cauguuggccaggcuggug

SEQ ID NO: 27116 - RNA, 19 nt, Artificial Sequence
  Antisense Oligo
caccagccuggccaacaug

SEQ ID NO: 27117 - RNA, 19 nt, Artificial Sequence
  Sense Oligo
auguuggccaggcuggugg

SEQ ID NO: 27118 - RNA, 19 nt, Artificial Sequence
  Antisense Oligo
ccaccagccuggccaacau

SEQ ID NO: 27119 - RNA, 19 nt, Artificial Sequence
  Sense Oligo
ggccucccaaagugcuagg

SEQ ID NO: 27120 - RNA, 19 nt, Artificial Sequence
  Antisense Oligo
ccuagcacuuugggaggcc

SEQ ID NO: 27121 - RNA, 19 nt, Artificial Sequence
  Sense Oligo
gccucccaaagugcuagga

SEQ ID NO: 27122 - RNA, 19 nt, Artificial Sequence
  Antisense Oligo
uccuagcacuuugggaggc

SEQ ID NO: 27123 - RNA, 19 nt, Artificial Sequence
  Sense Oligo
ccucccaaagugcuaggau

SEQ ID NO: 27124 - RNA, 19 nt, Artificial Sequence
  Antisense Oligo
auccuagcacuuugggagg

SEQ ID NO: 27125 - RNA, 19 nt, Artificial Sequence
  Sense Oligo
cucccaaagugcuaggauu

SEQ ID NO: 27126 - RNA, 19 nt, Artificial Sequence
  Antisense Oligo
aauccuagcacuuugggag

SEQ ID NO: 27127 - RNA, 19 nt, Artificial Sequence
  Sense Oligo
ucccaaagugcuaggauua

SEQ ID NO: 27128 - RNA, 19 nt, Artificial Sequence
  Antisense Oligo
uaauccuagcacuuuggga

SEQ ID NO: 27129 - RNA, 19 nt, Artificial Sequence
  Sense Oligo
cccaaagugcuaggauuac

SEQ ID NO: 27130 - RNA, 19 nt, Artificial Sequence
  Antisense Oligo
guaauccuagcacuuuggg

SEQ ID NO: 27131 - RNA, 19 nt, Artificial Sequence
  Sense Oligo
ccaaagugcuaggauuaca

SEQ ID NO: 27132 - RNA, 19 nt, Artificial Sequence
  Antisense Oligo
uguaauccuagcacuuugg

SEQ ID NO: 27133 - RNA, 19 nt, Artificial Sequence
  Sense Oligo
caaagugcuaggauuacag

SEQ ID NO: 27134 - RNA, 19 nt, Artificial Sequence
  Antisense Oligo
cuguaauccuagcacuuug

SEQ ID NO: 27135 - RNA, 19 nt, Artificial Sequence
  Sense Oligo
gugcuaggauuacaggccu

SEQ ID NO: 27136 - RNA, 19 nt, Artificial Sequence
  Antisense Oligo
aggccuguaauccuagcac

SEQ ID NO: 27137 - RNA, 19 nt, Artificial Sequence
  Sense Oligo
ugcuaggauuacaggccug

SEQ ID NO: 27138 - RNA, 19 nt, Artificial Sequence
  Antisense Oligo
caggccuguaauccuagca

SEQ ID NO: 27139 - RNA, 19 nt, Artificial Sequence
  Sense Oligo
gcuaggauuacaggccuga

SEQ ID NO: 27140 - RNA, 19 nt, Artificial Sequence
  Antisense Oligo
ucaggccuguaauccuagc

SEQ ID NO: 27141 - RNA, 19 nt, Artificial Sequence
  Sense Oligo
cuaggauuacaggccugag

SEQ ID NO: 27142 - RNA, 19 nt, Artificial Sequence
  Antisense Oligo
cucaggccuguaauccuag

SEQ ID NO: 27143 - RNA, 19 nt, Artificial Sequence
  Sense Oligo
caccugaccuauuguuuua

SEQ ID NO: 27144 - RNA, 19 nt, Artificial Sequence
  Antisense Oligo
uaaaacaauaggucaggug

SEQ ID NO: 27145 - RNA, 19 nt, Artificial Sequence
  Sense Oligo
accugaccuauuguuuuau

SEQ ID NO: 27146 - RNA, 19 nt, Artificial Sequence
  Antisense Oligo
auaaaacaauaggucaggu

SEQ ID NO: 27147 - RNA, 19 nt, Artificial Sequence
  Sense Oligo
ccugaccuauuguuuuauu

SEQ ID NO: 27148 - RNA, 19 nt, Artificial Sequence
  Antisense Oligo
aauaaaacaauaggucagg

SEQ ID NO: 27149 - RNA, 19 nt, Artificial Sequence
  Sense Oligo
agucucacucugucgccca

SEQ ID NO: 27150 - RNA, 19 nt, Artificial Sequence
  Antisense Oligo
ugggcgacagagugagacu

SEQ ID NO: 27151 - RNA, 19 nt, Artificial Sequence
  Sense Oligo
gucucacucugucgcccag

SEQ ID NO: 27152 - RNA, 19 nt, Artificial Sequence
  Antisense Oligo
cugggcgacagagugagac

SEQ ID NO: 27153 - RNA, 19 nt, Artificial Sequence
  Sense Oligo
ucucacucugucgcccagg

SEQ ID NO: 27154 - RNA, 19 nt, Artificial Sequence
  Antisense Oligo
ccugggcgacagagugaga

SEQ ID NO: 27155 - RNA, 19 nt, Artificial Sequence
  Sense Oligo
ucacucugucgcccaggcu

SEQ ID NO: 27156 - RNA, 19 nt, Artificial Sequence
  Antisense Oligo
agccugggcgacagaguga

SEQ ID NO: 27157 - RNA, 19 nt, Artificial Sequence
  Sense Oligo
caguggccagaucucagug

SEQ ID NO: 27158 - RNA, 19 nt, Artificial Sequence
  Antisense Oligo
cacugagaucuggccacug

SEQ ID NO: 27159 - RNA, 19 nt, Artificial Sequence
  Sense Oligo
uuuuagagucagccugcgc

SEQ ID NO: 27160 - RNA, 19 nt, Artificial Sequence
  Antisense Oligo
gcgcaggcugacucuaaaa

SEQ ID NO: 27161 - RNA, 19 nt, Artificial Sequence
  Sense Oligo
uuuagagucagccugcgcu

SEQ ID NO: 27162 - RNA, 19 nt, Artificial Sequence
  Antisense Oligo
agcgcaggcugacucuaaa

SEQ ID NO: 27163 - RNA, 19 nt, Artificial Sequence
  Sense Oligo
ugcgcugggagugagucuc

SEQ ID NO: 27164 - RNA, 19 nt, Artificial Sequence
  Antisense Oligo
gagacucacucccagcgca

SEQ ID NO: 27165 - RNA, 19 nt, Artificial Sequence
  Sense Oligo
agugagucuccucugucca

SEQ ID NO: 27166 - RNA, 19 nt, Artificial Sequence
  Antisense Oligo
uggacagaggagacucacu

SEQ ID NO: 27167 - RNA, 19 nt, Artificial Sequence
  Sense Oligo
cuccucuguccacacccaa

SEQ ID NO: 27168 - RNA, 19 nt, Artificial Sequence
  Antisense Oligo
uuggguguggacagaggag

SEQ ID NO: 27169 - RNA, 19 nt, Artificial Sequence
  Sense Oligo
uccucuguccacacccaaa

SEQ ID NO: 27170 - RNA, 19 nt, Artificial Sequence
  Antisense Oligo
uuuggguguggacagagga

SEQ ID NO: 27171 - RNA, 19 nt, Artificial Sequence
  Sense Oligo
ugccauuucagcaguggug

SEQ ID NO: 27172 - RNA, 19 nt, Artificial Sequence
  Antisense Oligo
caccacugcugaaauggca

SEQ ID NO: 27173 - RNA, 19 nt, Artificial Sequence
  Sense Oligo
gcaguggugcuugcucccu

SEQ ID NO: 27174 - RNA, 19 nt, Artificial Sequence
  Antisense Oligo
agggagcaagcaccacugc

SEQ ID NO: 27175 - RNA, 19 nt, Artificial Sequence
  Sense Oligo
caguggugcuugcucccug

SEQ ID NO: 27176 - RNA, 19 nt, Artificial Sequence
  Antisense Oligo
cagggagcaagcaccacug

SEQ ID NO: 27177 - RNA, 19 nt, Artificial Sequence
  Sense Oligo
ggugcuugcucccuggaau

SEQ ID NO: 27178 - RNA, 19 nt, Artificial Sequence
  Antisense Oligo
auuccagggagcaagcacc

SEQ ID NO: 27179 - RNA, 19 nt, Artificial Sequence
  Sense Oligo
gugcuugcucccuggaaug

SEQ ID NO: 27180 - RNA, 19 nt, Artificial Sequence
  Antisense Oligo
cauuccagggagcaagcac

SEQ ID NO: 27181 - RNA, 19 nt, Artificial Sequence
  Sense Oligo
ugcuugcucccuggaaugg

SEQ ID NO: 27182 - RNA, 19 nt, Artificial Sequence
  Antisense Oligo
ccauuccagggagcaagca

SEQ ID NO: 27183 - RNA, 19 nt, Artificial Sequence
  Sense Oligo
gcuugcucccuggaauggg

SEQ ID NO: 27184 - RNA, 19 nt, Artificial Sequence
  Antisense Oligo
cccauuccagggagcaagc

SEQ ID NO: 27185 - RNA, 19 nt, Artificial Sequence
  Sense Oligo
augggaccaggugcucuca

SEQ ID NO: 27186 - RNA, 19 nt, Artificial Sequence
  Antisense Oligo
ugagagcaccuggucccau

SEQ ID NO: 27187 - RNA, 19 nt, Artificial Sequence
  Sense Oligo
ugggaccaggugcucucag

SEQ ID NO: 27188 - RNA, 19 nt, Artificial Sequence
  Antisense Oligo
cugagagcaccugguccca

SEQ ID NO: 27189 - RNA, 19 nt, Artificial Sequence
  Sense Oligo
ugugguggguugguggccu

SEQ ID NO: 27190 - RNA, 19 nt, Artificial Sequence
  Antisense Oligo
aggccaccaacccaccaca

SEQ ID NO: 27191 - RNA, 19 nt, Artificial Sequence
  Sense Oligo
gaggcuggagccaagcugu

SEQ ID NO: 27192 - RNA, 19 nt, Artificial Sequence
  Antisense Oligo
acagcuuggcuccagccuc

SEQ ID NO: 27193 - RNA, 19 nt, Artificial Sequence
  Sense Oligo
aggcuggagccaagcugug

SEQ ID NO: 27194 - RNA, 19 nt, Artificial Sequence
  Antisense Oligo
cacagcuuggcuccagccu

SEQ ID NO: 27195 - RNA, 19 nt, Artificial Sequence
  Sense Oligo
agauguuaugggucggagg

SEQ ID NO: 27196 - RNA, 19 nt, Artificial Sequence
  Antisense Oligo
ccuccgacccauaacaucu

SEQ ID NO: 27197 - RNA, 19 nt, Artificial Sequence
  Sense Oligo
gauguuaugggucggaggg

SEQ ID NO: 27198 - RNA, 19 nt, Artificial Sequence
  Antisense Oligo
cccuccgacccauaacauc

SEQ ID NO: 27199 - RNA, 19 nt, Artificial Sequence
  Sense Oligo
auguuaugggucggagggu

SEQ ID NO: 27200 - RNA, 19 nt, Artificial Sequence
  Antisense Oligo
acccuccgacccauaacau

SEQ ID NO: 27201 - RNA, 19 nt, Artificial Sequence
  Sense Oligo
cgccuccugugcuuugugu

SEQ ID NO: 27202 - RNA, 19 nt, Artificial Sequence
  Antisense Oligo
acacaaagcacaggaggcg

SEQ ID NO: 27203 - RNA, 19 nt, Artificial Sequence
  Sense Oligo
gccuccugugcuuugugua

SEQ ID NO: 27204 - RNA, 19 nt, Artificial Sequence
  Antisense Oligo
uacacaaagcacaggaggc

SEQ ID NO: 27205 - RNA, 19 nt, Artificial Sequence
  Sense Oligo
ccuccugugcuuuguguac

SEQ ID NO: 27206 - RNA, 19 nt, Artificial Sequence
  Antisense Oligo
guacacaaagcacaggagg

SEQ ID NO: 27207 - RNA, 19 nt, Artificial Sequence
  Sense Oligo
cugugcuuuguguacacug

SEQ ID NO: 27208 - RNA, 19 nt, Artificial Sequence
  Antisense Oligo
caguguacacaaagcacag

SEQ ID NO: 27209 - RNA, 19 nt, Artificial Sequence
  Sense Oligo
ugugcuuuguguacacuga

SEQ ID NO: 27210 - RNA, 19 nt, Artificial Sequence
  Antisense Oligo
ucaguguacacaaagcaca

SEQ ID NO: 27211 - RNA, 19 nt, Artificial Sequence
  Sense Oligo
ugcuuuguguacacugagc

SEQ ID NO: 27212 - RNA, 19 nt, Artificial Sequence
  Antisense Oligo
gcucaguguacacaaagca

SEQ ID NO: 27213 - RNA, 19 nt, Artificial Sequence
  Sense Oligo
gcuuuguguacacugagca

SEQ ID NO: 27214 - RNA, 19 nt, Artificial Sequence
  Antisense Oligo
ugcucaguguacacaaagc

SEQ ID NO: 27215 - RNA, 19 nt, Artificial Sequence
  Sense Oligo
cuuuguguacacugagcau

SEQ ID NO: 27216 - RNA, 19 nt, Artificial Sequence
  Antisense Oligo
augcucaguguacacaaag

SEQ ID NO: 27217 - RNA, 19 nt, Artificial Sequence
  Sense Oligo
uuuguguacacugagcaug

SEQ ID NO: 27218 - RNA, 19 nt, Artificial Sequence
  Antisense Oligo
caugcucaguguacacaaa

SEQ ID NO: 27219 - RNA, 19 nt, Artificial Sequence
  Sense Oligo
uuguguacacugagcaugg

SEQ ID NO: 27220 - RNA, 19 nt, Artificial Sequence
  Antisense Oligo
ccaugcucaguguacacaa

SEQ ID NO: 27221 - RNA, 19 nt, Artificial Sequence
  Sense Oligo
uguguacacugagcauggg

SEQ ID NO: 27222 - RNA, 19 nt, Artificial Sequence
  Antisense Oligo
cccaugcucaguguacaca

SEQ ID NO: 27223 - RNA, 19 nt, Artificial Sequence
  Sense Oligo
guguacacugagcaugggu

SEQ ID NO: 27224 - RNA, 19 nt, Artificial Sequence
  Antisense Oligo
acccaugcucaguguacac

SEQ ID NO: 27225 - RNA, 19 nt, Artificial Sequence
  Sense Oligo
uguacacugagcauggguu

SEQ ID NO: 27226 - RNA, 19 nt, Artificial Sequence
  Antisense Oligo
aacccaugcucaguguaca

SEQ ID NO: 27227 - RNA, 19 nt, Artificial Sequence
  Sense Oligo
guacacugagcauggguuu

SEQ ID NO: 27228 - RNA, 19 nt, Artificial Sequence
  Antisense Oligo
aaacccaugcucaguguac

SEQ ID NO: 27229 - RNA, 19 nt, Artificial Sequence
  Sense Oligo
uacacugagcauggguuuc

SEQ ID NO: 27230 - RNA, 19 nt, Artificial Sequence
  Antisense Oligo
gaaacccaugcucagugua

SEQ ID NO: 27231 - RNA, 19 nt, Artificial Sequence
  Sense Oligo
acacugagcauggguuucc

SEQ ID NO: 27232 - RNA, 19 nt, Artificial Sequence
  Antisense Oligo
ggaaacccaugcucagugu

SEQ ID NO: 27233 - RNA, 19 nt, Artificial Sequence
  Sense Oligo
ugagcauggguuuccucug

SEQ ID NO: 27234 - RNA, 19 nt, Artificial Sequence
  Antisense Oligo
cagaggaaacccaugcuca

SEQ ID NO: 27235 - RNA, 19 nt, Artificial Sequence
  Sense Oligo
gagcauggguuuccucuga

SEQ ID NO: 27236 - RNA, 19 nt, Artificial Sequence
  Antisense Oligo
ucagaggaaacccaugcuc

SEQ ID NO: 27237 - RNA, 19 nt, Artificial Sequence
  Sense Oligo
gguuuccucugaauuuaaa

SEQ ID NO: 27238 - RNA, 19 nt, Artificial Sequence
  Antisense Oligo
uuuaaauucagaggaaacc

SEQ ID NO: 27239 - RNA, 19 nt, Artificial Sequence
  Sense Oligo
cugguucuggcaggaagug

SEQ ID NO: 27240 - RNA, 19 nt, Artificial Sequence
  Antisense Oligo
cacuuccugccagaaccag

SEQ ID NO: 27241 - RNA, 19 nt, Artificial Sequence
  Sense Oligo
ugguucuggcaggaagugu

SEQ ID NO: 27242 - RNA, 19 nt, Artificial Sequence
  Antisense Oligo
acacuuccugccagaacca

SEQ ID NO: 27243 - RNA, 19 nt, Artificial Sequence
  Sense Oligo
gguucuggcaggaagugug

SEQ ID NO: 27244 - RNA, 19 nt, Artificial Sequence
  Antisense Oligo
cacacuuccugccagaacc

SEQ ID NO: 27245 - RNA, 19 nt, Artificial Sequence
  Sense Oligo
uucuggcaggaaguguggc

SEQ ID NO: 27246 - RNA, 19 nt, Artificial Sequence
  Antisense Oligo
gccacacuuccugccagaa

SEQ ID NO: 27247 - RNA, 19 nt, Artificial Sequence
  Sense Oligo
ucuggcaggaaguguggcc

SEQ ID NO: 27248 - RNA, 19 nt, Artificial Sequence
  Antisense Oligo
ggccacacuuccugccaga

SEQ ID NO: 27249 - RNA, 19 nt, Artificial Sequence
  Sense Oligo
aggaaguguggccaugugu

SEQ ID NO: 27250 - RNA, 19 nt, Artificial Sequence
  Antisense Oligo
acacauggccacacuuccu

SEQ ID NO: 27251 - RNA, 19 nt, Artificial Sequence
  Sense Oligo
ggaaguguggccaugugug

SEQ ID NO: 27252 - RNA, 19 nt, Artificial Sequence
  Antisense Oligo
cacacauggccacacuucc

SEQ ID NO: 27253 - RNA, 19 nt, Artificial Sequence
  Sense Oligo
gaaguguggccauguguga

SEQ ID NO: 27254 - RNA, 19 nt, Artificial Sequence
  Antisense Oligo
ucacacauggccacacuuc

SEQ ID NO: 27255 - RNA, 19 nt, Artificial Sequence
  Sense Oligo
aaguguggccaugugugau

SEQ ID NO: 27256 - RNA, 19 nt, Artificial Sequence
  Antisense Oligo
aucacacauggccacacuu

SEQ ID NO: 27257 - RNA, 19 nt, Artificial Sequence
  Sense Oligo
aguguggccaugugugaua

SEQ ID NO: 27258 - RNA, 19 nt, Artificial Sequence
  Antisense Oligo
uaucacacauggccacacu

SEQ ID NO: 27259 - RNA, 19 nt, Artificial Sequence
  Sense Oligo
guguggccaugugugauag

SEQ ID NO: 27260 - RNA, 19 nt, Artificial Sequence
  Antisense Oligo
cuaucacacauggccacac

SEQ ID NO: 27261 - RNA, 19 nt, Artificial Sequence
  Sense Oligo
uguggccaugugugauaga

SEQ ID NO: 27262 - RNA, 19 nt, Artificial Sequence
  Antisense Oligo
ucuaucacacauggccaca

SEQ ID NO: 27263 - RNA, 19 nt, Artificial Sequence
  Sense Oligo
guggccaugugugauagag

SEQ ID NO: 27264 - RNA, 19 nt, Artificial Sequence
  Antisense Oligo
cucuaucacacauggccac

SEQ ID NO: 27265 - RNA, 19 nt, Artificial Sequence
  Sense Oligo
uccuggaagcccugggaug

SEQ ID NO: 27266 - RNA, 19 nt, Artificial Sequence
  Antisense Oligo
caucccagggcuuccagga

SEQ ID NO: 27267 - RNA, 19 nt, Artificial Sequence
  Sense Oligo
ugggaugcagcccugucca

SEQ ID NO: 27268 - RNA, 19 nt, Artificial Sequence
  Antisense Oligo
uggacagggcugcauccca

SEQ ID NO: 27269 - RNA, 19 nt, Artificial Sequence
  Sense Oligo
aacgcagccuccuccuugg

SEQ ID NO: 27270 - RNA, 19 nt, Artificial Sequence
  Antisense Oligo
ccaaggaggaggcugcguu

SEQ ID NO: 27271 - RNA, 19 nt, Artificial Sequence
  Sense Oligo
gggcuccugaaguggcagu

SEQ ID NO: 27272 - RNA, 19 nt, Artificial Sequence
  Antisense Oligo
acugccacuucaggagccc

SEQ ID NO: 27273 - RNA, 19 nt, Artificial Sequence
  Sense Oligo
cugaaguggcagugauggg

SEQ ID NO: 27274 - RNA, 19 nt, Artificial Sequence
  Antisense Oligo
cccaucacugccacuucag

SEQ ID NO: 27275 - RNA, 19 nt, Artificial Sequence
  Sense Oligo
aaguggcagugaugggauc

SEQ ID NO: 27276 - RNA, 19 nt, Artificial Sequence
  Antisense Oligo
gaucccaucacugccacuu

SEQ ID NO: 27277 - RNA, 19 nt, Artificial Sequence
  Sense Oligo
aguggcagugaugggaucc

SEQ ID NO: 27278 - RNA, 19 nt, Artificial Sequence
  Antisense Oligo
ggaucccaucacugccacu

SEQ ID NO: 27279 - RNA, 19 nt, Artificial Sequence
  Sense Oligo
guggcagugaugggauccu

SEQ ID NO: 27280 - RNA, 19 nt, Artificial Sequence
  Antisense Oligo
aggaucccaucacugccac

SEQ ID NO: 27281 - RNA, 19 nt, Artificial Sequence
  Sense Oligo
uggcagugaugggauccug

SEQ ID NO: 27282 - RNA, 19 nt, Artificial Sequence
  Antisense Oligo
caggaucccaucacugcca

SEQ ID NO: 27283 - RNA, 19 nt, Artificial Sequence
  Sense Oligo
ggcagugaugggauccugu

SEQ ID NO: 27284 - RNA, 19 nt, Artificial Sequence
  Antisense Oligo
acaggaucccaucacugcc

SEQ ID NO: 27285 - RNA, 19 nt, Artificial Sequence
  Sense Oligo
gcagugaugggauccugug

SEQ ID NO: 27286 - RNA, 19 nt, Artificial Sequence
  Antisense Oligo
cacaggaucccaucacugc

SEQ ID NO: 27287 - RNA, 19 nt, Artificial Sequence
  Sense Oligo
cagugaugggauccugugg

SEQ ID NO: 27288 - RNA, 19 nt, Artificial Sequence
  Antisense Oligo
ccacaggaucccaucacug

SEQ ID NO: 27289 - RNA, 19 nt, Artificial Sequence
  Sense Oligo
agugaugggauccuguggc

SEQ ID NO: 27290 - RNA, 19 nt, Artificial Sequence
  Antisense Oligo
gccacaggaucccaucacu

SEQ ID NO: 27291 - RNA, 19 nt, Artificial Sequence
  Sense Oligo
gugaugggauccuguggcg

SEQ ID NO: 27292 - RNA, 19 nt, Artificial Sequence
  Antisense Oligo
cgccacaggaucccaucac

SEQ ID NO: 27293 - RNA, 19 nt, Artificial Sequence
  Sense Oligo
ugaugggauccuguggcgc

SEQ ID NO: 27294 - RNA, 19 nt, Artificial Sequence
  Antisense Oligo
gcgccacaggaucccauca

SEQ ID NO: 27295 - RNA, 19 nt, Artificial Sequence
  Sense Oligo
gaugggauccuguggcgcu

SEQ ID NO: 27296 - RNA, 19 nt, Artificial Sequence
  Antisense Oligo
agcgccacaggaucccauc

SEQ ID NO: 27297 - RNA, 19 nt, Artificial Sequence
  Sense Oligo
augggauccuguggcgcuu

SEQ ID NO: 27298 - RNA, 19 nt, Artificial Sequence
  Antisense Oligo
aagcgccacaggaucccau

SEQ ID NO: 27299 - RNA, 19 nt, Artificial Sequence
  Sense Oligo
ugggauccuguggcgcuuc

SEQ ID NO: 27300 - RNA, 19 nt, Artificial Sequence
  Antisense Oligo
gaagcgccacaggauccca

SEQ ID NO: 27301 - RNA, 19 nt, Artificial Sequence
  Sense Oligo
ggauccuguggcgcuuccu

SEQ ID NO: 27302 - RNA, 19 nt, Artificial Sequence
  Antisense Oligo
aggaagcgccacaggaucc

SEQ ID NO: 27303 - RNA, 19 nt, Artificial Sequence
  Sense Oligo
gauccuguggcgcuuccuc

SEQ ID NO: 27304 - RNA, 19 nt, Artificial Sequence
  Antisense Oligo
gaggaagcgccacaggauc

SEQ ID NO: 27305 - RNA, 19 nt, Artificial Sequence
  Sense Oligo
cuguggcgcuuccucaucc

SEQ ID NO: 27306 - RNA, 19 nt, Artificial Sequence
  Antisense Oligo
ggaugaggaagcgccacag

SEQ ID NO: 27307 - RNA, 19 nt, Artificial Sequence
  Sense Oligo
uguggcgcuuccucauccc

SEQ ID NO: 27308 - RNA, 19 nt, Artificial Sequence
  Antisense Oligo
gggaugaggaagcgccaca

SEQ ID NO: 27309 - RNA, 19 nt, Artificial Sequence
  Sense Oligo
cccuuguuaccaguugcug

SEQ ID NO: 27310 - RNA, 19 nt, Artificial Sequence
  Antisense Oligo
cagcaacugguaacaaggg

SEQ ID NO: 27311 - RNA, 19 nt, Artificial Sequence
  Sense Oligo
ccuuguuaccaguugcuga

SEQ ID NO: 27312 - RNA, 19 nt, Artificial Sequence
  Antisense Oligo
ucagcaacugguaacaagg

SEQ ID NO: 27313 - RNA, 19 nt, Artificial Sequence
  Sense Oligo
cuuguuaccaguugcugag

SEQ ID NO: 27314 - RNA, 19 nt, Artificial Sequence
  Antisense Oligo
cucagcaacugguaacaag

SEQ ID NO: 27315 - RNA, 19 nt, Artificial Sequence
  Sense Oligo
uuguuaccaguugcugagg

SEQ ID NO: 27316 - RNA, 19 nt, Artificial Sequence
  Antisense Oligo
ccucagcaacugguaacaa

SEQ ID NO: 27317 - RNA, 19 nt, Artificial Sequence
  Sense Oligo
uguuaccaguugcugagga

SEQ ID NO: 27318 - RNA, 19 nt, Artificial Sequence
  Antisense Oligo
uccucagcaacugguaaca

SEQ ID NO: 27319 - RNA, 19 nt, Artificial Sequence
  Sense Oligo
cugggcugcaccucagugu

SEQ ID NO: 27320 - RNA, 19 nt, Artificial Sequence
  Antisense Oligo
acacugaggugcagcccag

SEQ ID NO: 27321 - RNA, 19 nt, Artificial Sequence
  Sense Oligo
ugggcugcaccucagugug

SEQ ID NO: 27322 - RNA, 19 nt, Artificial Sequence
  Antisense Oligo
cacacugaggugcagccca

SEQ ID NO: 27323 - RNA, 19 nt, Artificial Sequence
  Sense Oligo
ccucagugugugcaggucu

SEQ ID NO: 27324 - RNA, 19 nt, Artificial Sequence
  Antisense Oligo
agaccugcacacacugagg

SEQ ID NO: 27325 - RNA, 19 nt, Artificial Sequence
  Sense Oligo
cucagugugugcaggucuu

SEQ ID NO: 27326 - RNA, 19 nt, Artificial Sequence
  Antisense Oligo
aagaccugcacacacugag

SEQ ID NO: 27327 - RNA, 19 nt, Artificial Sequence
  Sense Oligo
ucagugugugcaggucuuc

SEQ ID NO: 27328 - RNA, 19 nt, Artificial Sequence
  Antisense Oligo
gaagaccugcacacacuga

SEQ ID NO: 27329 - RNA, 19 nt, Artificial Sequence
  Sense Oligo
gugcaggucuucccaggua

SEQ ID NO: 27330 - RNA, 19 nt, Artificial Sequence
  Antisense Oligo
uaccugggaagaccugcac

SEQ ID NO: 27331 - RNA, 19 nt, Artificial Sequence
  Sense Oligo
aggucuucccagguaugug

SEQ ID NO: 27332 - RNA, 19 nt, Artificial Sequence
  Antisense Oligo
cacauaccugggaagaccu

SEQ ID NO: 27333 - RNA, 19 nt, Artificial Sequence
  Sense Oligo
ggucuucccagguaugugg

SEQ ID NO: 27334 - RNA, 19 nt, Artificial Sequence
  Antisense Oligo
ccacauaccugggaagacc

SEQ ID NO: 27335 - RNA, 19 nt, Artificial Sequence
  Sense Oligo
agguaugugggugcaggag

SEQ ID NO: 27336 - RNA, 19 nt, Artificial Sequence
  Antisense Oligo
cuccugcacccacauaccu

SEQ ID NO: 27337 - RNA, 19 nt, Artificial Sequence
  Sense Oligo
gguaugugggugcaggagg

SEQ ID NO: 27338 - RNA, 19 nt, Artificial Sequence
  Antisense Oligo
ccuccugcacccacauacc

SEQ ID NO: 27339 - RNA, 19 nt, Artificial Sequence
  Sense Oligo
guaugugggugcaggaggu

SEQ ID NO: 27340 - RNA, 19 nt, Artificial Sequence
  Antisense Oligo
accuccugcacccacauac

SEQ ID NO: 27341 - RNA, 19 nt, Artificial Sequence
  Sense Oligo
uaugugggugcaggaggug

SEQ ID NO: 27342 - RNA, 19 nt, Artificial Sequence
  Antisense Oligo
caccuccugcacccacaua

SEQ ID NO: 27343 - RNA, 19 nt, Artificial Sequence
  Sense Oligo
ggagugggcacagguucac

SEQ ID NO: 27344 - RNA, 19 nt, Artificial Sequence
  Antisense Oligo
gugaaccugugcccacucc

SEQ ID NO: 27345 - RNA, 19 nt, Artificial Sequence
  Sense Oligo
agugggcacagguucacac

SEQ ID NO: 27346 - RNA, 19 nt, Artificial Sequence
  Antisense Oligo
gugugaaccugugcccacu

SEQ ID NO: 27347 - RNA, 19 nt, Artificial Sequence
  Sense Oligo
cacaccaccagguuucagg

SEQ ID NO: 27348 - RNA, 19 nt, Artificial Sequence
  Antisense Oligo
ccugaaaccugguggugug

SEQ ID NO: 27349 - RNA, 19 nt, Artificial Sequence
  Sense Oligo
caagucacuuuccuguacu

SEQ ID NO: 27350 - RNA, 19 nt, Artificial Sequence
  Antisense Oligo
aguacaggaaagugacuug

SEQ ID NO: 27351 - RNA, 19 nt, Artificial Sequence
  Sense Oligo
aagucacuuuccuguacug

SEQ ID NO: 27352 - RNA, 19 nt, Artificial Sequence
  Antisense Oligo
caguacaggaaagugacuu

SEQ ID NO: 27353 - RNA, 19 nt, Artificial Sequence
  Sense Oligo
agucacuuuccuguacuga

SEQ ID NO: 27354 - RNA, 19 nt, Artificial Sequence
  Antisense Oligo
ucaguacaggaaagugacu

SEQ ID NO: 27355 - RNA, 19 nt, Artificial Sequence
  Sense Oligo
uuuccuguacugaccugau

SEQ ID NO: 27356 - RNA, 19 nt, Artificial Sequence
  Antisense Oligo
aucaggucaguacaggaaa

SEQ ID NO: 27357 - RNA, 19 nt, Artificial Sequence
  Sense Oligo
guacugaccugauccacac

SEQ ID NO: 27358 - RNA, 19 nt, Artificial Sequence
  Antisense Oligo
guguggaucaggucaguac

SEQ ID NO: 27359 - RNA, 19 nt, Artificial Sequence
  Sense Oligo
aaccuggaugugccuuuga

SEQ ID NO: 27360 - RNA, 19 nt, Artificial Sequence
  Antisense Oligo
ucaaaggcacauccagguu

SEQ ID NO: 27361 - RNA, 19 nt, Artificial Sequence
  Sense Oligo
gugccuuugagccuggcug

SEQ ID NO: 27362 - RNA, 19 nt, Artificial Sequence
  Antisense Oligo
cagccaggcucaaaggcac

SEQ ID NO: 27363 - RNA, 19 nt, Artificial Sequence
  Sense Oligo
ugccuuugagccuggcugu

SEQ ID NO: 27364 - RNA, 19 nt, Artificial Sequence
  Antisense Oligo
acagccaggcucaaaggca

SEQ ID NO: 27365 - RNA, 19 nt, Artificial Sequence
  Sense Oligo
gccuuugagccuggcugug

SEQ ID NO: 27366 - RNA, 19 nt, Artificial Sequence
  Antisense Oligo
cacagccaggcucaaaggc

SEQ ID NO: 27367 - RNA, 19 nt, Artificial Sequence
  Sense Oligo
ccuuugagccuggcugugc

SEQ ID NO: 27368 - RNA, 19 nt, Artificial Sequence
  Antisense Oligo
gcacagccaggcucaaagg

SEQ ID NO: 27369 - RNA, 19 nt, Artificial Sequence
  Sense Oligo
cuuugagccuggcugugcc

SEQ ID NO: 27370 - RNA, 19 nt, Artificial Sequence
  Antisense Oligo
ggcacagccaggcucaaag

SEQ ID NO: 27371 - RNA, 19 nt, Artificial Sequence
  Sense Oligo
uuugagccuggcugugccu

SEQ ID NO: 27372 - RNA, 19 nt, Artificial Sequence
  Antisense Oligo
aggcacagccaggcucaaa

SEQ ID NO: 27373 - RNA, 19 nt, Artificial Sequence
  Sense Oligo
uugagccuggcugugccug

SEQ ID NO: 27374 - RNA, 19 nt, Artificial Sequence
  Antisense Oligo
caggcacagccaggcucaa

SEQ ID NO: 27375 - RNA, 19 nt, Artificial Sequence
  Sense Oligo
ugcggugggagcugcuacu

SEQ ID NO: 27376 - RNA, 19 nt, Artificial Sequence
  Antisense Oligo
aguagcagcucccaccgca

SEQ ID NO: 27377 - RNA, 19 nt, Artificial Sequence
  Sense Oligo
cggugggagcugcuacuca

SEQ ID NO: 27378 - RNA, 19 nt, Artificial Sequence
  Antisense Oligo
ugaguagcagcucccaccg

SEQ ID NO: 27379 - RNA, 19 nt, Artificial Sequence
  Sense Oligo
ggugggagcugcuacucau

SEQ ID NO: 27380 - RNA, 19 nt, Artificial Sequence
  Antisense Oligo
augaguagcagcucccacc

SEQ ID NO: 27381 - RNA, 19 nt, Artificial Sequence
  Sense Oligo
gugggagcugcuacucauu

SEQ ID NO: 27382 - RNA, 19 nt, Artificial Sequence
  Antisense Oligo
aaugaguagcagcucccac

SEQ ID NO: 27383 - RNA, 19 nt, Artificial Sequence
  Sense Oligo
ugggagcugcuacucauuu

SEQ ID NO: 27384 - RNA, 19 nt, Artificial Sequence
  Antisense Oligo
aaaugaguagcagcuccca

SEQ ID NO: 27385 - RNA, 19 nt, Artificial Sequence
  Sense Oligo
gggagcugcuacucauuuu

SEQ ID NO: 27386 - RNA, 19 nt, Artificial Sequence
  Antisense Oligo
aaaaugaguagcagcuccc

SEQ ID NO: 27387 - RNA, 19 nt, Artificial Sequence
  Sense Oligo
uuuagucucauccuucuca

SEQ ID NO: 27388 - RNA, 19 nt, Artificial Sequence
  Antisense Oligo
ugagaaggaugagacuaaa

SEQ ID NO: 27389 - RNA, 19 nt, Artificial Sequence
  Sense Oligo
uuagucucauccuucucau

SEQ ID NO: 27390 - RNA, 19 nt, Artificial Sequence
  Antisense Oligo
augagaaggaugagacuaa

SEQ ID NO: 27391 - RNA, 19 nt, Artificial Sequence
  Sense Oligo
uagucucauccuucucauu

SEQ ID NO: 27392 - RNA, 19 nt, Artificial Sequence
  Antisense Oligo
aaugagaaggaugagacua

SEQ ID NO: 27393 - RNA, 19 nt, Artificial Sequence
  Sense Oligo
agucucauccuucucauuu

SEQ ID NO: 27394 - RNA, 19 nt, Artificial Sequence
  Antisense Oligo
aaaugagaaggaugagacu

SEQ ID NO: 27395 - RNA, 19 nt, Artificial Sequence
  Sense Oligo
gucucauccuucucauuuc

SEQ ID NO: 27396 - RNA, 19 nt, Artificial Sequence
  Antisense Oligo
gaaaugagaaggaugagac

SEQ ID NO: 27397 - RNA, 19 nt, Artificial Sequence
  Sense Oligo
cauccuucucauuucaaau

SEQ ID NO: 27398 - RNA, 19 nt, Artificial Sequence
  Antisense Oligo
auuugaaaugagaaggaug

SEQ ID NO: 27399 - RNA, 19 nt, Artificial Sequence
  Sense Oligo
agccugugugugcuuucua

SEQ ID NO: 27400 - RNA, 19 nt, Artificial Sequence
  Antisense Oligo
uagaaagcacacacaggcu

SEQ ID NO: 27401 - RNA, 19 nt, Artificial Sequence
  Sense Oligo
gccugugugugcuuucuaa

SEQ ID NO: 27402 - RNA, 19 nt, Artificial Sequence
  Antisense Oligo
uuagaaagcacacacaggc

SEQ ID NO: 27403 - RNA, 19 nt, Artificial Sequence
  Sense Oligo
ugugcuuucuaauguucaa

SEQ ID NO: 27404 - RNA, 19 nt, Artificial Sequence
  Antisense Oligo
uugaacauuagaaagcaca

SEQ ID NO: 27405 - RNA, 19 nt, Artificial Sequence
  Sense Oligo
gugcuuucuaauguucaaa

SEQ ID NO: 27406 - RNA, 19 nt, Artificial Sequence
  Antisense Oligo
uuugaacauuagaaagcac

SEQ ID NO: 27407 - RNA, 19 nt, Artificial Sequence
  Sense Oligo
acgguggcucacgcgugua

SEQ ID NO: 27408 - RNA, 19 nt, Artificial Sequence
  Antisense Oligo
uacacgcgugagccaccgu

SEQ ID NO: 27409 - RNA, 19 nt, Artificial Sequence
  Sense Oligo
uugccugagccuagguguu

SEQ ID NO: 27410 - RNA, 19 nt, Artificial Sequence
  Antisense Oligo
aacaccuaggcucaggcaa

SEQ ID NO: 27411 - RNA, 19 nt, Artificial Sequence
  Sense Oligo
ugccugagccuagguguug

SEQ ID NO: 27412 - RNA, 19 nt, Artificial Sequence
  Antisense Oligo
caacaccuaggcucaggca

SEQ ID NO: 27413 - RNA, 19 nt, Artificial Sequence
  Sense Oligo
gccugagccuagguguugg

SEQ ID NO: 27414 - RNA, 19 nt, Artificial Sequence
  Antisense Oligo
ccaacaccuaggcucaggc

SEQ ID NO: 27415 - RNA, 19 nt, Artificial Sequence
  Sense Oligo
cugccucuacagagcauuu

SEQ ID NO: 27416 - RNA, 19 nt, Artificial Sequence
  Antisense Oligo
aaaugcucuguagaggcag

SEQ ID NO: 27417 - RNA, 19 nt, Artificial Sequence
  Sense Oligo
ugccucuacagagcauuuu

SEQ ID NO: 27418 - RNA, 19 nt, Artificial Sequence
  Antisense Oligo
aaaaugcucuguagaggca

SEQ ID NO: 27419 - RNA, 19 nt, Artificial Sequence
  Sense Oligo
ccagcugggaauggugguu

SEQ ID NO: 27420 - RNA, 19 nt, Artificial Sequence
  Antisense Oligo
aaccaccauucccagcugg

SEQ ID NO: 27421 - RNA, 19 nt, Artificial Sequence
  Sense Oligo
aaaauuagcugggcguagu

SEQ ID NO: 27422 - RNA, 19 nt, Artificial Sequence
  Antisense Oligo
acuacgcccagcuaauuuu

SEQ ID NO: 27423 - RNA, 19 nt, Artificial Sequence
  Sense Oligo
aaauuagcugggcguagug

SEQ ID NO: 27424 - RNA, 19 nt, Artificial Sequence
  Antisense Oligo
cacuacgcccagcuaauuu

SEQ ID NO: 27425 - RNA, 19 nt, Artificial Sequence
  Sense Oligo
aauuagcugggcguaguga

SEQ ID NO: 27426 - RNA, 19 nt, Artificial Sequence
  Antisense Oligo
ucacuacgcccagcuaauu

SEQ ID NO: 27427 - RNA, 19 nt, Artificial Sequence
  Sense Oligo
cugggcguagugaugcuca

SEQ ID NO: 27428 - RNA, 19 nt, Artificial Sequence
  Antisense Oligo
ugagcaucacuacgcccag

SEQ ID NO: 27429 - RNA, 19 nt, Artificial Sequence
  Sense Oligo
gaggaucacuugagcccag

SEQ ID NO: 27430 - RNA, 19 nt, Artificial Sequence
  Antisense Oligo
cugggcucaagugauccuc

SEQ ID NO: 27431 - RNA, 19 nt, Artificial Sequence
  Sense Oligo
aggaucacuugagcccagg

SEQ ID NO: 27432 - RNA, 19 nt, Artificial Sequence
  Antisense Oligo
ccugggcucaagugauccu

SEQ ID NO: 27433 - RNA, 19 nt, Artificial Sequence
  Sense Oligo
ggaucacuugagcccagga

SEQ ID NO: 27434 - RNA, 19 nt, Artificial Sequence
  Antisense Oligo
uccugggcucaagugaucc

SEQ ID NO: 27435 - RNA, 19 nt, Artificial Sequence
  Sense Oligo
gaucacuugagcccaggag

SEQ ID NO: 27436 - RNA, 19 nt, Artificial Sequence
  Antisense Oligo
cuccugggcucaagugauc

SEQ ID NO: 27437 - RNA, 19 nt, Artificial Sequence
  Sense Oligo
aucacuugagcccaggagg

SEQ ID NO: 27438 - RNA, 19 nt, Artificial Sequence
  Antisense Oligo
ccuccugggcucaagugau

SEQ ID NO: 27439 - RNA, 19 nt, Artificial Sequence
  Sense Oligo
ucacuugagcccaggaggu

SEQ ID NO: 27440 - RNA, 19 nt, Artificial Sequence
  Antisense Oligo
accuccugggcucaaguga

SEQ ID NO: 27441 - RNA, 19 nt, Artificial Sequence
  Sense Oligo
cacuugagcccaggagguc

SEQ ID NO: 27442 - RNA, 19 nt, Artificial Sequence
  Antisense Oligo
gaccuccugggcucaagug

SEQ ID NO: 27443 - RNA, 19 nt, Artificial Sequence
  Sense Oligo
ugagcccaggaggucaagg

SEQ ID NO: 27444 - RNA, 19 nt, Artificial Sequence
  Antisense Oligo
ccuugaccuccugggcuca

SEQ ID NO: 27445 - RNA, 19 nt, Artificial Sequence
  Sense Oligo
gcuacagugagcuggguuu

SEQ ID NO: 27446 - RNA, 19 nt, Artificial Sequence
  Antisense Oligo
aaacccagcucacuguagc

SEQ ID NO: 27447 - RNA, 19 nt, Artificial Sequence
  Sense Oligo
aucucaguggauguccaau

SEQ ID NO: 27448 - RNA, 19 nt, Artificial Sequence
  Antisense Oligo
auuggacauccacugagau

SEQ ID NO: 27449 - RNA, 19 nt, Artificial Sequence
  Sense Oligo
ucucaguggauguccaaua

SEQ ID NO: 27450 - RNA, 19 nt, Artificial Sequence
  Antisense Oligo
uauuggacauccacugaga

SEQ ID NO: 27451 - RNA, 19 nt, Artificial Sequence
  Sense Oligo
cucaguggauguccaauaa

SEQ ID NO: 27452 - RNA, 19 nt, Artificial Sequence
  Antisense Oligo
uuauuggacauccacugag

SEQ ID NO: 27453 - RNA, 19 nt, Artificial Sequence
  Sense Oligo
ucaguggauguccaauaag

SEQ ID NO: 27454 - RNA, 19 nt, Artificial Sequence
  Antisense Oligo
cuuauuggacauccacuga

SEQ ID NO: 27455 - RNA, 19 nt, Artificial Sequence
  Sense Oligo
caguggauguccaauaagc

SEQ ID NO: 27456 - RNA, 19 nt, Artificial Sequence
  Antisense Oligo
gcuuauuggacauccacug

SEQ ID NO: 27457 - RNA, 19 nt, Artificial Sequence
  Sense Oligo
aguggauguccaauaagca

SEQ ID NO: 27458 - RNA, 19 nt, Artificial Sequence
  Antisense Oligo
ugcuuauuggacauccacu

SEQ ID NO: 27459 - RNA, 19 nt, Artificial Sequence
  Sense Oligo
guggauguccaauaagcag

SEQ ID NO: 27460 - RNA, 19 nt, Artificial Sequence
  Antisense Oligo
cugcuuauuggacauccac

SEQ ID NO: 27461 - RNA, 19 nt, Artificial Sequence
  Sense Oligo
uggauguccaauaagcagu

SEQ ID NO: 27462 - RNA, 19 nt, Artificial Sequence
  Antisense Oligo
acugcuuauuggacaucca

SEQ ID NO: 27463 - RNA, 19 nt, Artificial Sequence
  Sense Oligo
caauaagcagugagcccgu

SEQ ID NO: 27464 - RNA, 19 nt, Artificial Sequence
  Antisense Oligo
acgggcucacugcuuauug

SEQ ID NO: 27465 - RNA, 19 nt, Artificial Sequence
  Sense Oligo
aauaagcagugagcccgug

SEQ ID NO: 27466 - RNA, 19 nt, Artificial Sequence
  Antisense Oligo
cacgggcucacugcuuauu

SEQ ID NO: 27467 - RNA, 19 nt, Artificial Sequence
  Sense Oligo
auaagcagugagcccgugu

SEQ ID NO: 27468 - RNA, 19 nt, Artificial Sequence
  Antisense Oligo
acacgggcucacugcuuau

SEQ ID NO: 27469 - RNA, 19 nt, Artificial Sequence
  Sense Oligo
uaagcagugagcccgugug

SEQ ID NO: 27470 - RNA, 19 nt, Artificial Sequence
  Antisense Oligo
cacacgggcucacugcuua

SEQ ID NO: 27471 - RNA, 19 nt, Artificial Sequence
  Sense Oligo
aagcagugagcccguguga

SEQ ID NO: 27472 - RNA, 19 nt, Artificial Sequence
  Antisense Oligo
ucacacgggcucacugcuu

SEQ ID NO: 27473 - RNA, 19 nt, Artificial Sequence
  Sense Oligo
agugagcccgugugagggu

SEQ ID NO: 27474 - RNA, 19 nt, Artificial Sequence
  Antisense Oligo
acccucacacgggcucacu

SEQ ID NO: 27475 - RNA, 19 nt, Artificial Sequence
  Sense Oligo
uguggcgagcgcuucaagg

SEQ ID NO: 27476 - RNA, 19 nt, Artificial Sequence
  Antisense Oligo
ccuugaagcgcucgccaca

SEQ ID NO: 27477 - RNA, 19 nt, Artificial Sequence
  Sense Oligo
cgagcgcuucaaggccacu

SEQ ID NO: 27478 - RNA, 19 nt, Artificial Sequence
  Antisense Oligo
aguggccuugaagcgcucg

SEQ ID NO: 27479 - RNA, 19 nt, Artificial Sequence
  Sense Oligo
gagcgcuucaaggccacuu

SEQ ID NO: 27480 - RNA, 19 nt, Artificial Sequence
  Antisense Oligo
aaguggccuugaagcgcuc

SEQ ID NO: 27481 - RNA, 19 nt, Artificial Sequence
  Sense Oligo
cccacuuuuguuucuuaau

SEQ ID NO: 27482 - RNA, 19 nt, Artificial Sequence
  Antisense Oligo
auuaagaaacaaaaguggg

SEQ ID NO: 27483 - RNA, 19 nt, Artificial Sequence
  Sense Oligo
uaauuucauucuuuccagg

SEQ ID NO: 27484 - RNA, 19 nt, Artificial Sequence
  Antisense Oligo
ccuggaaagaaugaaauua

SEQ ID NO: 27485 - RNA, 19 nt, Artificial Sequence
  Sense Oligo
aauuucauucuuuccagga

SEQ ID NO: 27486 - RNA, 19 nt, Artificial Sequence
  Antisense Oligo
uccuggaaagaaugaaauu

SEQ ID NO: 27487 - RNA, 19 nt, Artificial Sequence
  Sense Oligo
acagauguuagguacuuug

SEQ ID NO: 27488 - RNA, 19 nt, Artificial Sequence
  Antisense Oligo
caaaguaccuaacaucugu

SEQ ID NO: 27489 - RNA, 19 nt, Artificial Sequence
  Sense Oligo
cagauguuagguacuuugg

SEQ ID NO: 27490 - RNA, 19 nt, Artificial Sequence
  Antisense Oligo
ccaaaguaccuaacaucug

SEQ ID NO: 27491 - RNA, 19 nt, Artificial Sequence
  Sense Oligo
agauguuagguacuuuggu

SEQ ID NO: 27492 - RNA, 19 nt, Artificial Sequence
  Antisense Oligo
accaaaguaccuaacaucu

SEQ ID NO: 27493 - RNA, 19 nt, Artificial Sequence
  Sense Oligo
gauguuagguacuuugguc

SEQ ID NO: 27494 - RNA, 19 nt, Artificial Sequence
  Antisense Oligo
gaccaaaguaccuaacauc

SEQ ID NO: 27495 - RNA, 19 nt, Artificial Sequence
  Sense Oligo
auguuagguacuuuggucg

SEQ ID NO: 27496 - RNA, 19 nt, Artificial Sequence
  Antisense Oligo
cgaccaaaguaccuaacau

SEQ ID NO: 27497 - RNA, 19 nt, Artificial Sequence
  Sense Oligo
uguuagguacuuuggucga

SEQ ID NO: 27498 - RNA, 19 nt, Artificial Sequence
  Antisense Oligo
ucgaccaaaguaccuaaca

SEQ ID NO: 27499 - RNA, 19 nt, Artificial Sequence
  Sense Oligo
guuagguacuuuggucgag

SEQ ID NO: 27500 - RNA, 19 nt, Artificial Sequence
  Antisense Oligo
cucgaccaaaguaccuaac

SEQ ID NO: 27501 - RNA, 19 nt, Artificial Sequence
  Sense Oligo
uuagguacuuuggucgagc

SEQ ID NO: 27502 - RNA, 19 nt, Artificial Sequence
  Antisense Oligo
gcucgaccaaaguaccuaa

SEQ ID NO: 27503 - RNA, 19 nt, Artificial Sequence
  Sense Oligo
uagguacuuuggucgagcc

SEQ ID NO: 27504 - RNA, 19 nt, Artificial Sequence
  Antisense Oligo
ggcucgaccaaaguaccua

SEQ ID NO: 27505 - RNA, 19 nt, Artificial Sequence
  Sense Oligo
agguacuuuggucgagcca

SEQ ID NO: 27506 - RNA, 19 nt, Artificial Sequence
  Antisense Oligo
uggcucgaccaaaguaccu

SEQ ID NO: 27507 - RNA, 19 nt, Artificial Sequence
  Sense Oligo
uggucgagccaagcuugau

SEQ ID NO: 27508 - RNA, 19 nt, Artificial Sequence
  Antisense Oligo
aucaagcuuggcucgacca

SEQ ID NO: 27509 - RNA, 19 nt, Artificial Sequence
  Sense Oligo
ggucgagccaagcuugaug

SEQ ID NO: 27510 - RNA, 19 nt, Artificial Sequence
  Antisense Oligo
caucaagcuuggcucgacc

SEQ ID NO: 27511 - RNA, 19 nt, Artificial Sequence
  Sense Oligo
gucgagccaagcuugaugu

SEQ ID NO: 27512 - RNA, 19 nt, Artificial Sequence
  Antisense Oligo
acaucaagcuuggcucgac

SEQ ID NO: 27513 - RNA, 19 nt, Artificial Sequence
  Sense Oligo
ucgagccaagcuugaugua

SEQ ID NO: 27514 - RNA, 19 nt, Artificial Sequence
  Antisense Oligo
uacaucaagcuuggcucga

SEQ ID NO: 27515 - RNA, 19 nt, Artificial Sequence
  Sense Oligo
cgagccaagcuugauguag

SEQ ID NO: 27516 - RNA, 19 nt, Artificial Sequence
  Antisense Oligo
cuacaucaagcuuggcucg

SEQ ID NO: 27517 - RNA, 19 nt, Artificial Sequence
  Sense Oligo
gagccaagcuugauguagu

SEQ ID NO: 27518 - RNA, 19 nt, Artificial Sequence
  Antisense Oligo
acuacaucaagcuuggcuc

SEQ ID NO: 27519 - RNA, 19 nt, Artificial Sequence
  Sense Oligo
agccaagcuugauguaguu

SEQ ID NO: 27520 - RNA, 19 nt, Artificial Sequence
  Antisense Oligo
aacuacaucaagcuuggcu

SEQ ID NO: 27521 - RNA, 19 nt, Artificial Sequence
  Sense Oligo
gccaagcuugauguaguug

SEQ ID NO: 27522 - RNA, 19 nt, Artificial Sequence
  Antisense Oligo
caacuacaucaagcuuggc

SEQ ID NO: 27523 - RNA, 19 nt, Artificial Sequence
  Sense Oligo
ccaagcuugauguaguuga

SEQ ID NO: 27524 - RNA, 19 nt, Artificial Sequence
  Antisense Oligo
ucaacuacaucaagcuugg

SEQ ID NO: 27525 - RNA, 19 nt, Artificial Sequence
  Sense Oligo
caagcuugauguaguugag

SEQ ID NO: 27526 - RNA, 19 nt, Artificial Sequence
  Antisense Oligo
cucaacuacaucaagcuug

SEQ ID NO: 27527 - RNA, 19 nt, Artificial Sequence
  Sense Oligo
aagcuugauguaguugagg

SEQ ID NO: 27528 - RNA, 19 nt, Artificial Sequence
  Antisense Oligo
ccucaacuacaucaagcuu

SEQ ID NO: 27529 - RNA, 19 nt, Artificial Sequence
  Sense Oligo
agcuugauguaguugagga

SEQ ID NO: 27530 - RNA, 19 nt, Artificial Sequence
  Antisense Oligo
uccucaacuacaucaagcu

SEQ ID NO: 27531 - RNA, 19 nt, Artificial Sequence
  Sense Oligo
acacgggcuagaguagagu

SEQ ID NO: 27532 - RNA, 19 nt, Artificial Sequence
  Antisense Oligo
acucuacucuagcccgugu

SEQ ID NO: 27533 - RNA, 19 nt, Artificial Sequence
  Sense Oligo
cacgggcuagaguagagua

SEQ ID NO: 27534 - RNA, 19 nt, Artificial Sequence
  Antisense Oligo
uacucuacucuagcccgug

SEQ ID NO: 27535 - RNA, 19 nt, Artificial Sequence
  Sense Oligo
acgggcuagaguagaguaa

SEQ ID NO: 27536 - RNA, 19 nt, Artificial Sequence
  Antisense Oligo
uuacucuacucuagcccgu

SEQ ID NO: 27537 - RNA, 19 nt, Artificial Sequence
  Sense Oligo
cgggcuagaguagaguaaa

SEQ ID NO: 27538 - RNA, 19 nt, Artificial Sequence
  Antisense Oligo
uuuacucuacucuagcccg

SEQ ID NO: 27539 - RNA, 19 nt, Artificial Sequence
  Sense Oligo
gggcuagaguagaguaaau

SEQ ID NO: 27540 - RNA, 19 nt, Artificial Sequence
  Antisense Oligo
auuuacucuacucuagccc

SEQ ID NO: 27541 - RNA, 19 nt, Artificial Sequence
  Sense Oligo
ggcuagaguagaguaaauc

SEQ ID NO: 27542 - RNA, 19 nt, Artificial Sequence
  Antisense Oligo
gauuuacucuacucuagcc

SEQ ID NO: 27543 - RNA, 19 nt, Artificial Sequence
  Sense Oligo
gcuagaguagaguaaaucu

SEQ ID NO: 27544 - RNA, 19 nt, Artificial Sequence
  Antisense Oligo
agauuuacucuacucuagc

SEQ ID NO: 27545 - RNA, 19 nt, Artificial Sequence
  Sense Oligo
gucucucuuucuguuuaga

SEQ ID NO: 27546 - RNA, 19 nt, Artificial Sequence
  Antisense Oligo
ucuaaacagaaagagagac

SEQ ID NO: 27547 - RNA, 19 nt, Artificial Sequence
  Sense Oligo
ucuuucuguuuagagcaaa

SEQ ID NO: 27548 - RNA, 19 nt, Artificial Sequence
  Antisense Oligo
uuugcucuaaacagaaaga

SEQ ID NO: 27549 - RNA, 19 nt, Artificial Sequence
  Sense Oligo
cuuucuguuuagagcaaaa

SEQ ID NO: 27550 - RNA, 19 nt, Artificial Sequence
  Antisense Oligo
uuuugcucuaaacagaaag

SEQ ID NO: 27551 - RNA, 19 nt, Artificial Sequence
  Sense Oligo
guccgcuuccucagagcug

SEQ ID NO: 27552 - RNA, 19 nt, Artificial Sequence
  Antisense Oligo
cagcucugaggaagcggac

SEQ ID NO: 27553 - RNA, 19 nt, Artificial Sequence
  Sense Oligo
uccgcuuccucagagcugg

SEQ ID NO: 27554 - RNA, 19 nt, Artificial Sequence
  Antisense Oligo
ccagcucugaggaagcgga

SEQ ID NO: 27555 - RNA, 19 nt, Artificial Sequence
  Sense Oligo
cgcuuccucagagcuggcu

SEQ ID NO: 27556 - RNA, 19 nt, Artificial Sequence
  Antisense Oligo
agccagcucugaggaagcg

SEQ ID NO: 27557 - RNA, 19 nt, Artificial Sequence
  Sense Oligo
cuuccucagagcuggcuuc

SEQ ID NO: 27558 - RNA, 19 nt, Artificial Sequence
  Antisense Oligo
gaagccagcucugaggaag

SEQ ID NO: 27559 - RNA, 19 nt, Artificial Sequence
  Sense Oligo
uuccucagagcuggcuucc

SEQ ID NO: 27560 - RNA, 19 nt, Artificial Sequence
  Antisense Oligo
ggaagccagcucugaggaa

SEQ ID NO: 27561 - RNA, 19 nt, Artificial Sequence
  Sense Oligo
uccucagagcuggcuuccu

SEQ ID NO: 27562 - RNA, 19 nt, Artificial Sequence
  Antisense Oligo
aggaagccagcucugagga

SEQ ID NO: 27563 - RNA, 19 nt, Artificial Sequence
  Sense Oligo
ccucagagcuggcuuccuu

SEQ ID NO: 27564 - RNA, 19 nt, Artificial Sequence
  Antisense Oligo
aaggaagccagcucugagg

SEQ ID NO: 27565 - RNA, 19 nt, Artificial Sequence
  Sense Oligo
cucagagcuggcuuccuug

SEQ ID NO: 27566 - RNA, 19 nt, Artificial Sequence
  Antisense Oligo
caaggaagccagcucugag

SEQ ID NO: 27567 - RNA, 19 nt, Artificial Sequence
  Sense Oligo
gucaccugacuuugcuuuc

SEQ ID NO: 27568 - RNA, 19 nt, Artificial Sequence
  Antisense Oligo
gaaagcaaagucaggugac

SEQ ID NO: 27569 - RNA, 19 nt, Artificial Sequence
  Sense Oligo
agccaagcccagcagagug

SEQ ID NO: 27570 - RNA, 19 nt, Artificial Sequence
  Antisense Oligo
cacucugcugggcuuggcu

SEQ ID NO: 27571 - RNA, 19 nt, Artificial Sequence
  Sense Oligo
agaggcaggaguggccaca

SEQ ID NO: 27572 - RNA, 19 nt, Artificial Sequence
  Antisense Oligo
uguggccacuccugccucu

SEQ ID NO: 27573 - RNA, 19 nt, Artificial Sequence
  Sense Oligo
gcaggaguggccacaggaa

SEQ ID NO: 27574 - RNA, 19 nt, Artificial Sequence
  Antisense Oligo
uuccuguggccacuccugc

SEQ ID NO: 27575 - RNA, 19 nt, Artificial Sequence
  Sense Oligo
ggaguggccacaggaagug

SEQ ID NO: 27576 - RNA, 19 nt, Artificial Sequence
  Antisense Oligo
cacuuccuguggccacucc

SEQ ID NO: 27577 - RNA, 19 nt, Artificial Sequence
  Sense Oligo
gaguggccacaggaaguga

SEQ ID NO: 27578 - RNA, 19 nt, Artificial Sequence
  Antisense Oligo
ucacuuccuguggccacuc

SEQ ID NO: 27579 - RNA, 19 nt, Artificial Sequence
  Sense Oligo
aguggccacaggaagugag

SEQ ID NO: 27580 - RNA, 19 nt, Artificial Sequence
  Antisense Oligo
cucacuuccuguggccacu

SEQ ID NO: 27581 - RNA, 19 nt, Artificial Sequence
  Sense Oligo
uggccacaggaagugaggc

SEQ ID NO: 27582 - RNA, 19 nt, Artificial Sequence
  Antisense Oligo
gccucacuuccuguggcca

SEQ ID NO: 27583 - RNA, 19 nt, Artificial Sequence
  Sense Oligo
ggccacaggaagugaggcu

SEQ ID NO: 27584 - RNA, 19 nt, Artificial Sequence
  Antisense Oligo
agccucacuuccuguggcc

SEQ ID NO: 27585 - RNA, 19 nt, Artificial Sequence
  Sense Oligo
ccacaggaagugaggcuca

SEQ ID NO: 27586 - RNA, 19 nt, Artificial Sequence
  Antisense Oligo
ugagccucacuuccugugg

SEQ ID NO: 27587 - RNA, 19 nt, Artificial Sequence
  Sense Oligo
cacaggaagugaggcucag

SEQ ID NO: 27588 - RNA, 19 nt, Artificial Sequence
  Antisense Oligo
cugagccucacuuccugug

SEQ ID NO: 27589 - RNA, 19 nt, Artificial Sequence
  Sense Oligo
cccgcaauuccaggaccac

SEQ ID NO: 27590 - RNA, 19 nt, Artificial Sequence
  Antisense Oligo
gugguccuggaauugcggg

SEQ ID NO: 27591 - RNA, 19 nt, Artificial Sequence
  Sense Oligo
ccgcaauuccaggaccaca

SEQ ID NO: 27592 - RNA, 19 nt, Artificial Sequence
  Antisense Oligo
ugugguccuggaauugcgg

SEQ ID NO: 27593 - RNA, 19 nt, Artificial Sequence
  Sense Oligo
cgcaauuccaggaccacac

SEQ ID NO: 27594 - RNA, 19 nt, Artificial Sequence
  Antisense Oligo
gugugguccuggaauugcg

SEQ ID NO: 27595 - RNA, 19 nt, Artificial Sequence
  Sense Oligo
caauuccaggaccacacgg

SEQ ID NO: 27596 - RNA, 19 nt, Artificial Sequence
  Antisense Oligo
ccgugugguccuggaauug

SEQ ID NO: 27597 - RNA, 19 nt, Artificial Sequence
  Sense Oligo
uccaggaccacacggaagg

SEQ ID NO: 27598 - RNA, 19 nt, Artificial Sequence
  Antisense Oligo
ccuuccgugugguccugga

SEQ ID NO: 27599 - RNA, 19 nt, Artificial Sequence
  Sense Oligo
ccucugcuggugaaggcca

SEQ ID NO: 27600 - RNA, 19 nt, Artificial Sequence
  Antisense Oligo
uggccuucaccagcagagg

SEQ ID NO: 27601 - RNA, 19 nt, Artificial Sequence
  Sense Oligo
cucugcuggugaaggccau

SEQ ID NO: 27602 - RNA, 19 nt, Artificial Sequence
  Antisense Oligo
auggccuucaccagcagag

SEQ ID NO: 27603 - RNA, 19 nt, Artificial Sequence
  Sense Oligo
ucugcuggugaaggccauu

SEQ ID NO: 27604 - RNA, 19 nt, Artificial Sequence
  Antisense Oligo
aauggccuucaccagcaga

SEQ ID NO: 27605 - RNA, 19 nt, Artificial Sequence
  Sense Oligo
cugcuggugaaggccauuc

SEQ ID NO: 27606 - RNA, 19 nt, Artificial Sequence
  Antisense Oligo
gaauggccuucaccagcag

SEQ ID NO: 27607 - RNA, 19 nt, Artificial Sequence
  Sense Oligo
gcuggugaaggccauucua

SEQ ID NO: 27608 - RNA, 19 nt, Artificial Sequence
  Antisense Oligo
uagaauggccuucaccagc

SEQ ID NO: 27609 - RNA, 19 nt, Artificial Sequence
  Sense Oligo
cuggugaaggccauucuag

SEQ ID NO: 27610 - RNA, 19 nt, Artificial Sequence
  Antisense Oligo
cuagaauggccuucaccag

SEQ ID NO: 27611 - RNA, 19 nt, Artificial Sequence
  Sense Oligo
uggugaaggccauucuagg

SEQ ID NO: 27612 - RNA, 19 nt, Artificial Sequence
  Antisense Oligo
ccuagaauggccuucacca

SEQ ID NO: 27613 - RNA, 19 nt, Artificial Sequence
  Sense Oligo
ggugaaggccauucuagga

SEQ ID NO: 27614 - RNA, 19 nt, Artificial Sequence
  Antisense Oligo
uccuagaauggccuucacc

SEQ ID NO: 27615 - RNA, 19 nt, Artificial Sequence
  Sense Oligo
gugaaggccauucuaggac

SEQ ID NO: 27616 - RNA, 19 nt, Artificial Sequence
  Antisense Oligo
guccuagaauggccuucac

SEQ ID NO: 27617 - RNA, 19 nt, Artificial Sequence
  Sense Oligo
ugaaggccauucuaggacu

SEQ ID NO: 27618 - RNA, 19 nt, Artificial Sequence
  Antisense Oligo
aguccuagaauggccuuca

SEQ ID NO: 27619 - RNA, 19 nt, Artificial Sequence
  Sense Oligo
ggccauucuaggacugaag

SEQ ID NO: 27620 - RNA, 19 nt, Artificial Sequence
  Antisense Oligo
cuucaguccuagaauggcc

SEQ ID NO: 27621 - RNA, 19 nt, Artificial Sequence
  Sense Oligo
gccauucuaggacugaaga

SEQ ID NO: 27622 - RNA, 19 nt, Artificial Sequence
  Antisense Oligo
ucuucaguccuagaauggc

SEQ ID NO: 27623 - RNA, 19 nt, Artificial Sequence
  Sense Oligo
ccauucuaggacugaagau

SEQ ID NO: 27624 - RNA, 19 nt, Artificial Sequence
  Antisense Oligo
aucuucaguccuagaaugg

SEQ ID NO: 27625 - RNA, 19 nt, Artificial Sequence
  Sense Oligo
cauucuaggacugaagaug

SEQ ID NO: 27626 - RNA, 19 nt, Artificial Sequence
  Antisense Oligo
caucuucaguccuagaaug

SEQ ID NO: 27627 - RNA, 19 nt, Artificial Sequence
  Sense Oligo
uucuaggacugaagaugcu

SEQ ID NO: 27628 - RNA, 19 nt, Artificial Sequence
  Antisense Oligo
agcaucuucaguccuagaa

SEQ ID NO: 27629 - RNA, 19 nt, Artificial Sequence
  Sense Oligo
ucuaggacugaagaugcug

SEQ ID NO: 27630 - RNA, 19 nt, Artificial Sequence
  Antisense Oligo
cagcaucuucaguccuaga

SEQ ID NO: 27631 - RNA, 19 nt, Artificial Sequence
  Sense Oligo
gacugaagaugcugcccag

SEQ ID NO: 27632 - RNA, 19 nt, Artificial Sequence
  Antisense Oligo
cugggcagcaucuucaguc

SEQ ID NO: 27633 - RNA, 19 nt, Artificial Sequence
  Sense Oligo
acugaagaugcugcccagg

SEQ ID NO: 27634 - RNA, 19 nt, Artificial Sequence
  Antisense Oligo
ccugggcagcaucuucagu

SEQ ID NO: 27635 - RNA, 19 nt, Artificial Sequence
  Sense Oligo
aagaugcugcccaggagcu

SEQ ID NO: 27636 - RNA, 19 nt, Artificial Sequence
  Antisense Oligo
agcuccugggcagcaucuu

SEQ ID NO: 27637 - RNA, 19 nt, Artificial Sequence
  Sense Oligo
agaugcugcccaggagcuc

SEQ ID NO: 27638 - RNA, 19 nt, Artificial Sequence
  Antisense Oligo
gagcuccugggcagcaucu

SEQ ID NO: 27639 - RNA, 19 nt, Artificial Sequence
  Sense Oligo
aggagcuccuguugccuga

SEQ ID NO: 27640 - RNA, 19 nt, Artificial Sequence
  Antisense Oligo
ucaggcaacaggagcuccu

SEQ ID NO: 27641 - RNA, 19 nt, Artificial Sequence
  Sense Oligo
ggagcuccuguugccugag

SEQ ID NO: 27642 - RNA, 19 nt, Artificial Sequence
  Antisense Oligo
cucaggcaacaggagcucc

SEQ ID NO: 27643 - RNA, 19 nt, Artificial Sequence
  Sense Oligo
cuccuguugccugagucaa

SEQ ID NO: 27644 - RNA, 19 nt, Artificial Sequence
  Antisense Oligo
uugacucaggcaacaggag

SEQ ID NO: 27645 - RNA, 19 nt, Artificial Sequence
  Sense Oligo
uccuguugccugagucaaa

SEQ ID NO: 27646 - RNA, 19 nt, Artificial Sequence
  Antisense Oligo
uuugacucaggcaacagga

SEQ ID NO: 27647 - RNA, 19 nt, Artificial Sequence
  Sense Oligo
ccuguugccugagucaaaa

SEQ ID NO: 27648 - RNA, 19 nt, Artificial Sequence
  Antisense Oligo
uuuugacucaggcaacagg

SEQ ID NO: 27649 - RNA, 19 nt, Artificial Sequence
  Sense Oligo
cuguugccugagucaaaag

SEQ ID NO: 27650 - RNA, 19 nt, Artificial Sequence
  Antisense Oligo
cuuuugacucaggcaacag

SEQ ID NO: 27651 - RNA, 19 nt, Artificial Sequence
  Sense Oligo
uguugccugagucaaaagg

SEQ ID NO: 27652 - RNA, 19 nt, Artificial Sequence
  Antisense Oligo
ccuuuugacucaggcaaca

SEQ ID NO: 27653 - RNA, 19 nt, Artificial Sequence
  Sense Oligo
guugccugagucaaaagga

SEQ ID NO: 27654 - RNA, 19 nt, Artificial Sequence
  Antisense Oligo
uccuuuugacucaggcaac

SEQ ID NO: 27655 - RNA, 19 nt, Artificial Sequence
  Sense Oligo
uugccugagucaaaaggag

SEQ ID NO: 27656 - RNA, 19 nt, Artificial Sequence
  Antisense Oligo
cuccuuuugacucaggcaa

SEQ ID NO: 27657 - RNA, 19 nt, Artificial Sequence
  Sense Oligo
ugccugagucaaaaggagg

SEQ ID NO: 27658 - RNA, 19 nt, Artificial Sequence
  Antisense Oligo
ccuccuuuugacucaggca

SEQ ID NO: 27659 - RNA, 19 nt, Artificial Sequence
  Sense Oligo
ccugagucaaaaggaggca

SEQ ID NO: 27660 - RNA, 19 nt, Artificial Sequence
  Antisense Oligo
ugccuccuuuugacucagg

SEQ ID NO: 27661 - RNA, 19 nt, Artificial Sequence
  Sense Oligo
cugagucaaaaggaggcag

SEQ ID NO: 27662 - RNA, 19 nt, Artificial Sequence
  Antisense Oligo
cugccuccuuuugacucag

SEQ ID NO: 27663 - RNA, 19 nt, Artificial Sequence
  Sense Oligo
ugagucaaaaggaggcagc

SEQ ID NO: 27664 - RNA, 19 nt, Artificial Sequence
  Antisense Oligo
gcugccuccuuuugacuca

SEQ ID NO: 27665 - RNA, 19 nt, Artificial Sequence
  Sense Oligo
ucaaaaggaggcagcucug

SEQ ID NO: 27666 - RNA, 19 nt, Artificial Sequence
  Antisense Oligo
cagagcugccuccuuuuga

SEQ ID NO: 27667 - RNA, 19 nt, Artificial Sequence
  Sense Oligo
caaaaggaggcagcucuga

SEQ ID NO: 27668 - RNA, 19 nt, Artificial Sequence
  Antisense Oligo
ucagagcugccuccuuuug

SEQ ID NO: 27669 - RNA, 19 nt, Artificial Sequence
  Sense Oligo
cugcagaccaccgagcaac

SEQ ID NO: 27670 - RNA, 19 nt, Artificial Sequence
  Antisense Oligo
guugcucgguggucugcag

SEQ ID NO: 27671 - RNA, 19 nt, Artificial Sequence
  Sense Oligo
accugggcucugcugcaag

SEQ ID NO: 27672 - RNA, 19 nt, Artificial Sequence
  Antisense Oligo
cuugcagcagagcccaggu

SEQ ID NO: 27673 - RNA, 19 nt, Artificial Sequence
  Sense Oligo
cugggcucugcugcaaggu

SEQ ID NO: 27674 - RNA, 19 nt, Artificial Sequence
  Antisense Oligo
accuugcagcagagcccag

SEQ ID NO: 27675 - RNA, 19 nt, Artificial Sequence
  Sense Oligo
ugggcucugcugcaaggug

SEQ ID NO: 27676 - RNA, 19 nt, Artificial Sequence
  Antisense Oligo
caccuugcagcagagccca

SEQ ID NO: 27677 - RNA, 19 nt, Artificial Sequence
  Sense Oligo
ugcugcaaggugcuggcgu

SEQ ID NO: 27678 - RNA, 19 nt, Artificial Sequence
  Antisense Oligo
acgccagcaccuugcagca

SEQ ID NO: 27679 - RNA, 19 nt, Artificial Sequence
  Sense Oligo
gcugcaaggugcuggcguu

SEQ ID NO: 27680 - RNA, 19 nt, Artificial Sequence
  Antisense Oligo
aacgccagcaccuugcagc

SEQ ID NO: 27681 - RNA, 19 nt, Artificial Sequence
  Sense Oligo
cugcaaggugcuggcguug

SEQ ID NO: 27682 - RNA, 19 nt, Artificial Sequence
  Antisense Oligo
caacgccagcaccuugcag

SEQ ID NO: 27683 - RNA, 19 nt, Artificial Sequence
  Sense Oligo
caaggugcuggcguugcuu

SEQ ID NO: 27684 - RNA, 19 nt, Artificial Sequence
  Antisense Oligo
aagcaacgccagcaccuug

SEQ ID NO: 27685 - RNA, 19 nt, Artificial Sequence
  Sense Oligo
aaggugcuggcguugcuuc

SEQ ID NO: 27686 - RNA, 19 nt, Artificial Sequence
  Antisense Oligo
gaagcaacgccagcaccuu

SEQ ID NO: 27687 - RNA, 19 nt, Artificial Sequence
  Sense Oligo
aggugcuggcguugcuucc

SEQ ID NO: 27688 - RNA, 19 nt, Artificial Sequence
  Antisense Oligo
ggaagcaacgccagcaccu

SEQ ID NO: 27689 - RNA, 19 nt, Artificial Sequence
  Sense Oligo
gugcuggcguugcuucccu

SEQ ID NO: 27690 - RNA, 19 nt, Artificial Sequence
  Antisense Oligo
agggaagcaacgccagcac

SEQ ID NO: 27691 - RNA, 19 nt, Artificial Sequence
  Sense Oligo
ugcuggcguugcuucccug

SEQ ID NO: 27692 - RNA, 19 nt, Artificial Sequence
  Antisense Oligo
cagggaagcaacgccagca

SEQ ID NO: 27693 - RNA, 19 nt, Artificial Sequence
  Sense Oligo
acccugucccucggcuugu

SEQ ID NO: 27694 - RNA, 19 nt, Artificial Sequence
  Antisense Oligo
acaagccgagggacagggu

SEQ ID NO: 27695 - RNA, 19 nt, Artificial Sequence
  Sense Oligo
cucggcuuguggcagaugc

SEQ ID NO: 27696 - RNA, 19 nt, Artificial Sequence
  Antisense Oligo
gcaucugccacaagccgag

SEQ ID NO: 27697 - RNA, 19 nt, Artificial Sequence
  Sense Oligo
ucggcuuguggcagaugcu

SEQ ID NO: 27698 - RNA, 19 nt, Artificial Sequence
  Antisense Oligo
agcaucugccacaagccga

SEQ ID NO: 27699 - RNA, 19 nt, Artificial Sequence
  Sense Oligo
cggcuuguggcagaugcug

SEQ ID NO: 27700 - RNA, 19 nt, Artificial Sequence
  Antisense Oligo
cagcaucugccacaagccg

SEQ ID NO: 27701 - RNA, 19 nt, Artificial Sequence
  Sense Oligo
aaccauugagucggaguca

SEQ ID NO: 27702 - RNA, 19 nt, Artificial Sequence
  Antisense Oligo
ugacuccgacucaaugguu

SEQ ID NO: 27703 - RNA, 19 nt, Artificial Sequence
  Sense Oligo
auugagucggagucacccu

SEQ ID NO: 27704 - RNA, 19 nt, Artificial Sequence
  Antisense Oligo
agggugacuccgacucaau

SEQ ID NO: 27705 - RNA, 19 nt, Artificial Sequence
  Sense Oligo
uugagucggagucacccug

SEQ ID NO: 27706 - RNA, 19 nt, Artificial Sequence
  Antisense Oligo
cagggugacuccgacucaa

SEQ ID NO: 27707 - RNA, 19 nt, Artificial Sequence
  Sense Oligo
gagucacccuggcccauuu

SEQ ID NO: 27708 - RNA, 19 nt, Artificial Sequence
  Antisense Oligo
aaaugggccagggugacuc

SEQ ID NO: 27709 - RNA, 19 nt, Artificial Sequence
  Sense Oligo
agucacccuggcccauuuu

SEQ ID NO: 27710 - RNA, 19 nt, Artificial Sequence
  Antisense Oligo
aaaaugggccagggugacu

SEQ ID NO: 27711 - RNA, 19 nt, Artificial Sequence
  Sense Oligo
gucacccuggcccauuuug

SEQ ID NO: 27712 - RNA, 19 nt, Artificial Sequence
  Antisense Oligo
caaaaugggccagggugac

SEQ ID NO: 27713 - RNA, 19 nt, Artificial Sequence
  Sense Oligo
ucacccuggcccauuuugu

SEQ ID NO: 27714 - RNA, 19 nt, Artificial Sequence
  Antisense Oligo
acaaaaugggccaggguga

SEQ ID NO: 27715 - RNA, 19 nt, Artificial Sequence
  Sense Oligo
cacccuggcccauuuuguc

SEQ ID NO: 27716 - RNA, 19 nt, Artificial Sequence
  Antisense Oligo
gacaaaaugggccagggug

SEQ ID NO: 27717 - RNA, 19 nt, Artificial Sequence
  Sense Oligo
acccuggcccauuuuguca

SEQ ID NO: 27718 - RNA, 19 nt, Artificial Sequence
  Antisense Oligo
ugacaaaaugggccagggu

SEQ ID NO: 27719 - RNA, 19 nt, Artificial Sequence
  Sense Oligo
cccauuuugucaccuuggc

SEQ ID NO: 27720 - RNA, 19 nt, Artificial Sequence
  Antisense Oligo
gccaaggugacaaaauggg

SEQ ID NO: 27721 - RNA, 19 nt, Artificial Sequence
  Sense Oligo
ccauuuugucaccuuggcu

SEQ ID NO: 27722 - RNA, 19 nt, Artificial Sequence
  Antisense Oligo
agccaaggugacaaaaugg

SEQ ID NO: 27723 - RNA, 19 nt, Artificial Sequence
  Sense Oligo
cauuuugucaccuuggcuc

SEQ ID NO: 27724 - RNA, 19 nt, Artificial Sequence
  Antisense Oligo
gagccaaggugacaaaaug

SEQ ID NO: 27725 - RNA, 19 nt, Artificial Sequence
  Sense Oligo
auuuugucaccuuggcucu

SEQ ID NO: 27726 - RNA, 19 nt, Artificial Sequence
  Antisense Oligo
agagccaaggugacaaaau

SEQ ID NO: 27727 - RNA, 19 nt, Artificial Sequence
  Sense Oligo
uuuugucaccuuggcucug

SEQ ID NO: 27728 - RNA, 19 nt, Artificial Sequence
  Antisense Oligo
cagagccaaggugacaaaa

SEQ ID NO: 27729 - RNA, 19 nt, Artificial Sequence
  Sense Oligo
uuugucaccuuggcucugg

SEQ ID NO: 27730 - RNA, 19 nt, Artificial Sequence
  Antisense Oligo
ccagagccaaggugacaaa

SEQ ID NO: 27731 - RNA, 19 nt, Artificial Sequence
  Sense Oligo
uugucaccuuggcucuggu

SEQ ID NO: 27732 - RNA, 19 nt, Artificial Sequence
  Antisense Oligo
accagagccaaggugacaa

SEQ ID NO: 27733 - RNA, 19 nt, Artificial Sequence
  Sense Oligo
accuuggcucugguguuug

SEQ ID NO: 27734 - RNA, 19 nt, Artificial Sequence
  Antisense Oligo
caaacaccagagccaaggu

SEQ ID NO: 27735 - RNA, 19 nt, Artificial Sequence
  Sense Oligo
ccuuggcucugguguuugg

SEQ ID NO: 27736 - RNA, 19 nt, Artificial Sequence
  Antisense Oligo
ccaaacaccagagccaagg

SEQ ID NO: 27737 - RNA, 19 nt, Artificial Sequence
  Sense Oligo
cuuggcucugguguuuggg

SEQ ID NO: 27738 - RNA, 19 nt, Artificial Sequence
  Antisense Oligo
cccaaacaccagagccaag

SEQ ID NO: 27739 - RNA, 19 nt, Artificial Sequence
  Sense Oligo
gggucuuucaggcaguuga

SEQ ID NO: 27740 - RNA, 19 nt, Artificial Sequence
  Antisense Oligo
ucaacugccugaaagaccc

SEQ ID NO: 27741 - RNA, 19 nt, Artificial Sequence
  Sense Oligo
ggucuuucaggcaguugau

SEQ ID NO: 27742 - RNA, 19 nt, Artificial Sequence
  Antisense Oligo
aucaacugccugaaagacc

SEQ ID NO: 27743 - RNA, 19 nt, Artificial Sequence
  Sense Oligo
cuuucaggcaguugaugcu

SEQ ID NO: 27744 - RNA, 19 nt, Artificial Sequence
  Antisense Oligo
agcaucaacugccugaaag

SEQ ID NO: 27745 - RNA, 19 nt, Artificial Sequence
  Sense Oligo
uuucaggcaguugaugcug

SEQ ID NO: 27746 - RNA, 19 nt, Artificial Sequence
  Antisense Oligo
cagcaucaacugccugaaa

SEQ ID NO: 27747 - RNA, 19 nt, Artificial Sequence
  Sense Oligo
uucaggcaguugaugcugu

SEQ ID NO: 27748 - RNA, 19 nt, Artificial Sequence
  Antisense Oligo
acagcaucaacugccugaa

SEQ ID NO: 27749 - RNA, 19 nt, Artificial Sequence
  Sense Oligo
ucaggcaguugaugcugua

SEQ ID NO: 27750 - RNA, 19 nt, Artificial Sequence
  Antisense Oligo
uacagcaucaacugccuga

SEQ ID NO: 27751 - RNA, 19 nt, Artificial Sequence
  Sense Oligo
caguugaugcuguagcuga

SEQ ID NO: 27752 - RNA, 19 nt, Artificial Sequence
  Antisense Oligo
ucagcuacagcaucaacug

SEQ ID NO: 27753 - RNA, 19 nt, Artificial Sequence
  Sense Oligo
aguugaugcuguagcugag

SEQ ID NO: 27754 - RNA, 19 nt, Artificial Sequence
  Antisense Oligo
cucagcuacagcaucaacu

SEQ ID NO: 27755 - RNA, 19 nt, Artificial Sequence
  Sense Oligo
guugaugcuguagcugagc

SEQ ID NO: 27756 - RNA, 19 nt, Artificial Sequence
  Antisense Oligo
gcucagcuacagcaucaac

SEQ ID NO: 27757 - RNA, 19 nt, Artificial Sequence
  Sense Oligo
agccagccaaugcaguuaa

SEQ ID NO: 27758 - RNA, 19 nt, Artificial Sequence
  Antisense Oligo
uuaacugcauuggcuggcu

SEQ ID NO: 27759 - RNA, 19 nt, Artificial Sequence
  Sense Oligo
gccagccaaugcaguuaaa

SEQ ID NO: 27760 - RNA, 19 nt, Artificial Sequence
  Antisense Oligo
uuuaacugcauuggcuggc

SEQ ID NO: 27761 - RNA, 19 nt, Artificial Sequence
  Sense Oligo
ccagccaaugcaguuaaag

SEQ ID NO: 27762 - RNA, 19 nt, Artificial Sequence
  Antisense Oligo
cuuuaacugcauuggcugg

SEQ ID NO: 27763 - RNA, 19 nt, Artificial Sequence
  Sense Oligo
cagccaaugcaguuaaagg

SEQ ID NO: 27764 - RNA, 19 nt, Artificial Sequence
  Antisense Oligo
ccuuuaacugcauuggcug

SEQ ID NO: 27765 - RNA, 19 nt, Artificial Sequence
  Sense Oligo
agccaaugcaguuaaaggg

SEQ ID NO: 27766 - RNA, 19 nt, Artificial Sequence
  Antisense Oligo
cccuuuaacugcauuggcu

SEQ ID NO: 27767 - RNA, 19 nt, Artificial Sequence
  Sense Oligo
accacuccuccuuucaaaa

SEQ ID NO: 27768 - RNA, 19 nt, Artificial Sequence
  Antisense Oligo
uuuugaaaggaggaguggu

SEQ ID NO: 27769 - RNA, 19 nt, Artificial Sequence
  Sense Oligo
cacacugccaggugcgucu

SEQ ID NO: 27770 - RNA, 19 nt, Artificial Sequence
  Antisense Oligo
agacgcaccuggcagugug

SEQ ID NO: 27771 - RNA, 19 nt, Artificial Sequence
  Sense Oligo
acacugccaggugcgucuc

SEQ ID NO: 27772 - RNA, 19 nt, Artificial Sequence
  Antisense Oligo
gagacgcaccuggcagugu

SEQ ID NO: 27773 - RNA, 19 nt, Artificial Sequence
  Sense Oligo
ugccaggugcgucuccuuc

SEQ ID NO: 27774 - RNA, 19 nt, Artificial Sequence
  Antisense Oligo
gaaggagacgcaccuggca

SEQ ID NO: 27775 - RNA, 19 nt, Artificial Sequence
  Sense Oligo
ccaggugcgucuccuuccu

SEQ ID NO: 27776 - RNA, 19 nt, Artificial Sequence
  Antisense Oligo
aggaaggagacgcaccugg

SEQ ID NO: 27777 - RNA, 19 nt, Artificial Sequence
  Sense Oligo
ugcgucuccuuccugccug

SEQ ID NO: 27778 - RNA, 19 nt, Artificial Sequence
  Antisense Oligo
caggcaggaaggagacgca

SEQ ID NO: 27779 - RNA, 19 nt, Artificial Sequence
  Sense Oligo
ggcugcgccucuuucauuu

SEQ ID NO: 27780 - RNA, 19 nt, Artificial Sequence
  Antisense Oligo
aaaugaaagaggcgcagcc

SEQ ID NO: 27781 - RNA, 19 nt, Artificial Sequence
  Sense Oligo
gcugcgccucuuucauuua

SEQ ID NO: 27782 - RNA, 19 nt, Artificial Sequence
  Antisense Oligo
uaaaugaaagaggcgcagc

SEQ ID NO: 27783 - RNA, 19 nt, Artificial Sequence
  Sense Oligo
cugcgccucuuucauuuaa

SEQ ID NO: 27784 - RNA, 19 nt, Artificial Sequence
  Antisense Oligo
uuaaaugaaagaggcgcag

SEQ ID NO: 27785 - RNA, 19 nt, Artificial Sequence
  Sense Oligo
ugcgccucuuucauuuaau

SEQ ID NO: 27786 - RNA, 19 nt, Artificial Sequence
  Antisense Oligo
auuaaaugaaagaggcgca

SEQ ID NO: 27787 - RNA, 19 nt, Artificial Sequence
  Sense Oligo
gcgccucuuucauuuaauu

SEQ ID NO: 27788 - RNA, 19 nt, Artificial Sequence
  Antisense Oligo
aauuaaaugaaagaggcgc

SEQ ID NO: 27789 - RNA, 19 nt, Artificial Sequence
  Sense Oligo
gauauagccaugauucaga

SEQ ID NO: 27790 - RNA, 19 nt, Artificial Sequence
  Antisense Oligo
ucugaaucauggcuauauc

SEQ ID NO: 27791 - RNA, 19 nt, Artificial Sequence
  Sense Oligo
auauagccaugauucagac

SEQ ID NO: 27792 - RNA, 19 nt, Artificial Sequence
  Antisense Oligo
gucugaaucauggcuauau

SEQ ID NO: 27793 - RNA, 19 nt, Artificial Sequence
  Sense Oligo
uauagccaugauucagaca

SEQ ID NO: 27794 - RNA, 19 nt, Artificial Sequence
  Antisense Oligo
ugucugaaucauggcuaua

SEQ ID NO: 27795 - RNA, 19 nt, Artificial Sequence
  Sense Oligo
caaagcucuggccuucggg

SEQ ID NO: 27796 - RNA, 19 nt, Artificial Sequence
  Antisense Oligo
cccgaaggccagagcuuug

SEQ ID NO: 27797 - RNA, 19 nt, Artificial Sequence
  Sense Oligo
aagagcguggagggaggga

SEQ ID NO: 27798 - RNA, 19 nt, Artificial Sequence
  Antisense Oligo
ucccucccuccacgcucuu

SEQ ID NO: 27799 - RNA, 19 nt, Artificial Sequence
  Sense Oligo
cgagguaccauggcaccca

SEQ ID NO: 27800 - RNA, 19 nt, Artificial Sequence
  Antisense Oligo
ugggugccaugguaccucg

SEQ ID NO: 27801 - RNA, 19 nt, Artificial Sequence
  Sense Oligo
gagguaccauggcacccac

SEQ ID NO: 27802 - RNA, 19 nt, Artificial Sequence
  Antisense Oligo
gugggugccaugguaccuc

SEQ ID NO: 27803 - RNA, 19 nt, Artificial Sequence
  Sense Oligo
ucucuuaggagguggugag

SEQ ID NO: 27804 - RNA, 19 nt, Artificial Sequence
  Antisense Oligo
cucaccaccuccuaagaga

SEQ ID NO: 27805 - RNA, 19 nt, Artificial Sequence
  Sense Oligo
cucuuaggagguggugagg

SEQ ID NO: 27806 - RNA, 19 nt, Artificial Sequence
  Antisense Oligo
ccucaccaccuccuaagag

SEQ ID NO: 27807 - RNA, 19 nt, Artificial Sequence
  Sense Oligo
ucuuaggagguggugaggg

SEQ ID NO: 27808 - RNA, 19 nt, Artificial Sequence
  Antisense Oligo
cccucaccaccuccuaaga

SEQ ID NO: 27809 - RNA, 19 nt, Artificial Sequence
  Sense Oligo
cuuaggagguggugaggga

SEQ ID NO: 27810 - RNA, 19 nt, Artificial Sequence
  Antisense Oligo
ucccucaccaccuccuaag

SEQ ID NO: 27811 - RNA, 19 nt, Artificial Sequence
  Sense Oligo
gagguggugagggaugguc

SEQ ID NO: 27812 - RNA, 19 nt, Artificial Sequence
  Antisense Oligo
gaccaucccucaccaccuc

SEQ ID NO: 27813 - RNA, 19 nt, Artificial Sequence
  Sense Oligo
agguggugagggauggucc

SEQ ID NO: 27814 - RNA, 19 nt, Artificial Sequence
  Antisense Oligo
ggaccaucccucaccaccu

SEQ ID NO: 27815 - RNA, 19 nt, Artificial Sequence
  Sense Oligo
gugucugggaaggucaugu

SEQ ID NO: 27816 - RNA, 19 nt, Artificial Sequence
  Antisense Oligo
acaugaccuucccagacac

SEQ ID NO: 27817 - RNA, 19 nt, Artificial Sequence
  Sense Oligo
ugucugggaaggucaugug

SEQ ID NO: 27818 - RNA, 19 nt, Artificial Sequence
  Antisense Oligo
cacaugaccuucccagaca

SEQ ID NO: 27819 - RNA, 19 nt, Artificial Sequence
  Sense Oligo
gucugggaaggucaugugc

SEQ ID NO: 27820 - RNA, 19 nt, Artificial Sequence
  Antisense Oligo
gcacaugaccuucccagac

SEQ ID NO: 27821 - RNA, 19 nt, Artificial Sequence
  Sense Oligo
ucugggaaggucaugugca

SEQ ID NO: 27822 - RNA, 19 nt, Artificial Sequence
  Antisense Oligo
ugcacaugaccuucccaga

SEQ ID NO: 27823 - RNA, 19 nt, Artificial Sequence
  Sense Oligo
ggaaggucaugugcagagg

SEQ ID NO: 27824 - RNA, 19 nt, Artificial Sequence
  Antisense Oligo
ccucugcacaugaccuucc

SEQ ID NO: 27825 - RNA, 19 nt, Artificial Sequence
  Sense Oligo
gaaggucaugugcagaggc

SEQ ID NO: 27826 - RNA, 19 nt, Artificial Sequence
  Antisense Oligo
gccucugcacaugaccuuc

SEQ ID NO: 27827 - RNA, 19 nt, Artificial Sequence
  Sense Oligo
aaggucaugugcagaggcc

SEQ ID NO: 27828 - RNA, 19 nt, Artificial Sequence
  Antisense Oligo
ggccucugcacaugaccuu

SEQ ID NO: 27829 - RNA, 19 nt, Artificial Sequence
  Sense Oligo
aggucaugugcagaggccc

SEQ ID NO: 27830 - RNA, 19 nt, Artificial Sequence
  Antisense Oligo
gggccucugcacaugaccu

SEQ ID NO: 27831 - RNA, 19 nt, Artificial Sequence
  Sense Oligo
ggucaugugcagaggcccu

SEQ ID NO: 27832 - RNA, 19 nt, Artificial Sequence
  Antisense Oligo
agggccucugcacaugacc

SEQ ID NO: 27833 - RNA, 19 nt, Artificial Sequence
  Sense Oligo
agaggccaccaaugaggcu

SEQ ID NO: 27834 - RNA, 19 nt, Artificial Sequence
  Antisense Oligo
agccucauugguggccucu

SEQ ID NO: 27835 - RNA, 19 nt, Artificial Sequence
  Sense Oligo
gaggccaccaaugaggcug

SEQ ID NO: 27836 - RNA, 19 nt, Artificial Sequence
  Antisense Oligo
cagccucauugguggccuc

SEQ ID NO: 27837 - RNA, 19 nt, Artificial Sequence
  Sense Oligo
aggccaccaaugaggcugg

SEQ ID NO: 27838 - RNA, 19 nt, Artificial Sequence
  Antisense Oligo
ccagccucauugguggccu

SEQ ID NO: 27839 - RNA, 19 nt, Artificial Sequence
  Sense Oligo
ggccaccaaugaggcugga

SEQ ID NO: 27840 - RNA, 19 nt, Artificial Sequence
  Antisense Oligo
uccagccucauugguggcc

SEQ ID NO: 27841 - RNA, 19 nt, Artificial Sequence
  Sense Oligo
gccaccaaugaggcuggag

SEQ ID NO: 27842 - RNA, 19 nt, Artificial Sequence
  Antisense Oligo
cuccagccucauugguggc

SEQ ID NO: 27843 - RNA, 19 nt, Artificial Sequence
  Sense Oligo
ccucuggaggcugugauua

SEQ ID NO: 27844 - RNA, 19 nt, Artificial Sequence
  Antisense Oligo
uaaucacagccuccagagg

SEQ ID NO: 27845 - RNA, 19 nt, Artificial Sequence
  Sense Oligo
cucuggaggcugugauuag

SEQ ID NO: 27846 - RNA, 19 nt, Artificial Sequence
  Antisense Oligo
cuaaucacagccuccagag

SEQ ID NO: 27847 - RNA, 19 nt, Artificial Sequence
  Sense Oligo
ucuggaggcugugauuagu

SEQ ID NO: 27848 - RNA, 19 nt, Artificial Sequence
  Antisense Oligo
acuaaucacagccuccaga

SEQ ID NO: 27849 - RNA, 19 nt, Artificial Sequence
  Sense Oligo
cuggaggcugugauuagug

SEQ ID NO: 27850 - RNA, 19 nt, Artificial Sequence
  Antisense Oligo
cacuaaucacagccuccag

SEQ ID NO: 27851 - RNA, 19 nt, Artificial Sequence
  Sense Oligo
uggaggcugugauuagugg

SEQ ID NO: 27852 - RNA, 19 nt, Artificial Sequence
  Antisense Oligo
ccacuaaucacagccucca

SEQ ID NO: 27853 - RNA, 19 nt, Artificial Sequence
  Sense Oligo
gccgcuguaagaagcaucc

SEQ ID NO: 27854 - RNA, 19 nt, Artificial Sequence
  Antisense Oligo
ggaugcuucuuacagcggc

SEQ ID NO: 27855 - RNA, 19 nt, Artificial Sequence
  Sense Oligo
ccgcuguaagaagcauccc

SEQ ID NO: 27856 - RNA, 19 nt, Artificial Sequence
  Antisense Oligo
gggaugcuucuuacagcgg

SEQ ID NO: 27857 - RNA, 19 nt, Artificial Sequence
  Sense Oligo
gggucaauguggaggcugg

SEQ ID NO: 27858 - RNA, 19 nt, Artificial Sequence
  Antisense Oligo
ccagccuccacauugaccc

SEQ ID NO: 27859 - RNA, 19 nt, Artificial Sequence
  Sense Oligo
ggucaauguggaggcuggg

SEQ ID NO: 27860 - RNA, 19 nt, Artificial Sequence
  Antisense Oligo
cccagccuccacauugacc

SEQ ID NO: 27861 - RNA, 19 nt, Artificial Sequence
  Sense Oligo
gucaauguggaggcugggc

SEQ ID NO: 27862 - RNA, 19 nt, Artificial Sequence
  Antisense Oligo
gcccagccuccacauugac

SEQ ID NO: 27863 - RNA, 19 nt, Artificial Sequence
  Sense Oligo
acaccuauaaucccagcac

SEQ ID NO: 27864 - RNA, 19 nt, Artificial Sequence
  Antisense Oligo
gugcugggauuauaggugu

SEQ ID NO: 27865 - RNA, 19 nt, Artificial Sequence
  Sense Oligo
ugaguucaggaguucaaga

SEQ ID NO: 27866 - RNA, 19 nt, Artificial Sequence
  Antisense Oligo
ucuugaacuccugaacuca

SEQ ID NO: 27867 - RNA, 19 nt, Artificial Sequence
  Sense Oligo
guucaagaccagccuggcc

SEQ ID NO: 27868 - RNA, 19 nt, Artificial Sequence
  Antisense Oligo
ggccaggcuggucuugaac

SEQ ID NO: 27869 - RNA, 19 nt, Artificial Sequence
  Sense Oligo
uucaagaccagccuggcca

SEQ ID NO: 27870 - RNA, 19 nt, Artificial Sequence
  Antisense Oligo
uggccaggcuggucuugaa

SEQ ID NO: 27871 - RNA, 19 nt, Artificial Sequence
  Sense Oligo
ucaagaccagccuggccaa

SEQ ID NO: 27872 - RNA, 19 nt, Artificial Sequence
  Antisense Oligo
uuggccaggcuggucuuga

SEQ ID NO: 27873 - RNA, 19 nt, Artificial Sequence
  Sense Oligo
caagaccagccuggccaac

SEQ ID NO: 27874 - RNA, 19 nt, Artificial Sequence
  Antisense Oligo
guuggccaggcuggucuug

SEQ ID NO: 27875 - RNA, 19 nt, Artificial Sequence
  Sense Oligo
ggcaugugccuguaauccc

SEQ ID NO: 27876 - RNA, 19 nt, Artificial Sequence
  Antisense Oligo
gggauuacaggcacaugcc

SEQ ID NO: 27877 - RNA, 19 nt, Artificial Sequence
  Sense Oligo
gugccuguaaucccagcua

SEQ ID NO: 27878 - RNA, 19 nt, Artificial Sequence
  Antisense Oligo
uagcugggauuacaggcac

SEQ ID NO: 27879 - RNA, 19 nt, Artificial Sequence
  Sense Oligo
ugccuguaaucccagcuac

SEQ ID NO: 27880 - RNA, 19 nt, Artificial Sequence
  Antisense Oligo
guagcugggauuacaggca

SEQ ID NO: 27881 - RNA, 19 nt, Artificial Sequence
  Sense Oligo
gccuguaaucccagcuacu

SEQ ID NO: 27882 - RNA, 19 nt, Artificial Sequence
  Antisense Oligo
aguagcugggauuacaggc

SEQ ID NO: 27883 - RNA, 19 nt, Artificial Sequence
  Sense Oligo
ccuguaaucccagcuacuc

SEQ ID NO: 27884 - RNA, 19 nt, Artificial Sequence
  Antisense Oligo
gaguagcugggauuacagg

SEQ ID NO: 27885 - RNA, 19 nt, Artificial Sequence
  Sense Oligo
cuguaaucccagcuacucg

SEQ ID NO: 27886 - RNA, 19 nt, Artificial Sequence
  Antisense Oligo
cgaguagcugggauuacag

SEQ ID NO: 27887 - RNA, 19 nt, Artificial Sequence
  Sense Oligo
uguaaucccagcuacucgg

SEQ ID NO: 27888 - RNA, 19 nt, Artificial Sequence
  Antisense Oligo
ccgaguagcugggauuaca

SEQ ID NO: 27889 - RNA, 19 nt, Artificial Sequence
  Sense Oligo
guaaucccagcuacucggg

SEQ ID NO: 27890 - RNA, 19 nt, Artificial Sequence
  Antisense Oligo
cccgaguagcugggauuac

SEQ ID NO: 27891 - RNA, 19 nt, Artificial Sequence
  Sense Oligo
agcuacucgggaggcuguc

SEQ ID NO: 27892 - RNA, 19 nt, Artificial Sequence
  Antisense Oligo
gacagccucccgaguagcu

SEQ ID NO: 27893 - RNA, 19 nt, Artificial Sequence
  Sense Oligo
gaauugcuugagccuggga

SEQ ID NO: 27894 - RNA, 19 nt, Artificial Sequence
  Antisense Oligo
ucccaggcucaagcaauuc

SEQ ID NO: 27895 - RNA, 19 nt, Artificial Sequence
  Sense Oligo
gagguugcagugagcugag

SEQ ID NO: 27896 - RNA, 19 nt, Artificial Sequence
  Antisense Oligo
cucagcucacugcaaccuc

SEQ ID NO: 27897 - RNA, 19 nt, Artificial Sequence
  Sense Oligo
uacugcacuccagccuugg

SEQ ID NO: 27898 - RNA, 19 nt, Artificial Sequence
  Antisense Oligo
ccaaggcuggagugcagua

SEQ ID NO: 27899 - RNA, 19 nt, Artificial Sequence
  Sense Oligo
acugcacuccagccuuggu

SEQ ID NO: 27900 - RNA, 19 nt, Artificial Sequence
  Antisense Oligo
accaaggcuggagugcagu

SEQ ID NO: 27901 - RNA, 19 nt, Artificial Sequence
  Sense Oligo
cugcacuccagccuuggua

SEQ ID NO: 27902 - RNA, 19 nt, Artificial Sequence
  Antisense Oligo
uaccaaggcuggagugcag

SEQ ID NO: 27903 - RNA, 19 nt, Artificial Sequence
  Sense Oligo
uccagccuugguaauaaga

SEQ ID NO: 27904 - RNA, 19 nt, Artificial Sequence
  Antisense Oligo
ucuuauuaccaaggcugga

SEQ ID NO: 27905 - RNA, 19 nt, Artificial Sequence
  Sense Oligo
ccagccuugguaauaagag

SEQ ID NO: 27906 - RNA, 19 nt, Artificial Sequence
  Antisense Oligo
cucuuauuaccaaggcugg

SEQ ID NO: 27907 - RNA, 19 nt, Artificial Sequence
  Sense Oligo
cagccuugguaauaagagc

SEQ ID NO: 27908 - RNA, 19 nt, Artificial Sequence
  Antisense Oligo
gcucuuauuaccaaggcug

SEQ ID NO: 27909 - RNA, 19 nt, Artificial Sequence
  Sense Oligo
agccuugguaauaagagcg

SEQ ID NO: 27910 - RNA, 19 nt, Artificial Sequence
  Antisense Oligo
cgcucuuauuaccaaggcu

SEQ ID NO: 27911 - RNA, 19 nt, Artificial Sequence
  Sense Oligo
gccuugguaauaagagcga

SEQ ID NO: 27912 - RNA, 19 nt, Artificial Sequence
  Antisense Oligo
ucgcucuuauuaccaaggc

SEQ ID NO: 27913 - RNA, 19 nt, Artificial Sequence
  Sense Oligo
ccuugguaauaagagcgag

SEQ ID NO: 27914 - RNA, 19 nt, Artificial Sequence
  Antisense Oligo
cucgcucuuauuaccaagg

SEQ ID NO: 27915 - RNA, 19 nt, Artificial Sequence
  Sense Oligo
aaggucaggguuugguucc

SEQ ID NO: 27916 - RNA, 19 nt, Artificial Sequence
  Antisense Oligo
ggaaccaaacccugaccuu

SEQ ID NO: 27917 - RNA, 19 nt, Artificial Sequence
  Sense Oligo
aggucaggguuugguuccu

SEQ ID NO: 27918 - RNA, 19 nt, Artificial Sequence
  Antisense Oligo
aggaaccaaacccugaccu

SEQ ID NO: 27919 - RNA, 19 nt, Artificial Sequence
  Sense Oligo
ggucaggguuugguuccuu

SEQ ID NO: 27920 - RNA, 19 nt, Artificial Sequence
  Antisense Oligo
aaggaaccaaacccugacc

SEQ ID NO: 27921 - RNA, 19 nt, Artificial Sequence
  Sense Oligo
gucaggguuugguuccuug

SEQ ID NO: 27922 - RNA, 19 nt, Artificial Sequence
  Antisense Oligo
caaggaaccaaacccugac

SEQ ID NO: 27923 - RNA, 19 nt, Artificial Sequence
  Sense Oligo
ucaggguuugguuccuugu

SEQ ID NO: 27924 - RNA, 19 nt, Artificial Sequence
  Antisense Oligo
acaaggaaccaaacccuga

SEQ ID NO: 27925 - RNA, 19 nt, Artificial Sequence
  Sense Oligo
caggguuugguuccuuguu

SEQ ID NO: 27926 - RNA, 19 nt, Artificial Sequence
  Antisense Oligo
aacaaggaaccaaacccug

SEQ ID NO: 27927 - RNA, 19 nt, Artificial Sequence
  Sense Oligo
aggguuugguuccuuguuc

SEQ ID NO: 27928 - RNA, 19 nt, Artificial Sequence
  Antisense Oligo
gaacaaggaaccaaacccu

SEQ ID NO: 27929 - RNA, 19 nt, Artificial Sequence
  Sense Oligo
ggguuugguuccuuguucc

SEQ ID NO: 27930 - RNA, 19 nt, Artificial Sequence
  Antisense Oligo
ggaacaaggaaccaaaccc

SEQ ID NO: 27931 - RNA, 19 nt, Artificial Sequence
  Sense Oligo
gguuugguuccuuguucca

SEQ ID NO: 27932 - RNA, 19 nt, Artificial Sequence
  Antisense Oligo
uggaacaaggaaccaaacc

SEQ ID NO: 27933 - RNA, 19 nt, Artificial Sequence
  Sense Oligo
guuugguuccuuguuccag

SEQ ID NO: 27934 - RNA, 19 nt, Artificial Sequence
  Antisense Oligo
cuggaacaaggaaccaaac

SEQ ID NO: 27935 - RNA, 19 nt, Artificial Sequence
  Sense Oligo
uuugguuccuuguuccagg

SEQ ID NO: 27936 - RNA, 19 nt, Artificial Sequence
  Antisense Oligo
ccuggaacaaggaaccaaa

SEQ ID NO: 27937 - RNA, 19 nt, Artificial Sequence
  Sense Oligo
agaccaagaccaaggacga

SEQ ID NO: 27938 - RNA, 19 nt, Artificial Sequence
  Antisense Oligo
ucguccuuggucuuggucu

SEQ ID NO: 27939 - RNA, 19 nt, Artificial Sequence
  Sense Oligo
gaccaagaccaaggacgag

SEQ ID NO: 27940 - RNA, 19 nt, Artificial Sequence
  Antisense Oligo
cucguccuuggucuugguc

SEQ ID NO: 27941 - RNA, 19 nt, Artificial Sequence
  Sense Oligo
gggagccugaagaccucaa

SEQ ID NO: 27942 - RNA, 19 nt, Artificial Sequence
  Antisense Oligo
uugaggucuucaggcuccc

SEQ ID NO: 27943 - RNA, 19 nt, Artificial Sequence
  Sense Oligo
ggagccugaagaccucaag

SEQ ID NO: 27944 - RNA, 19 nt, Artificial Sequence
  Antisense Oligo
cuugaggucuucaggcucc

SEQ ID NO: 27945 - RNA, 19 nt, Artificial Sequence
  Sense Oligo
gagccugaagaccucaaga

SEQ ID NO: 27946 - RNA, 19 nt, Artificial Sequence
  Antisense Oligo
ucuugaggucuucaggcuc

SEQ ID NO: 27947 - RNA, 19 nt, Artificial Sequence
  Sense Oligo
agccugaagaccucaagaa

SEQ ID NO: 27948 - RNA, 19 nt, Artificial Sequence
  Antisense Oligo
uucuugaggucuucaggcu

SEQ ID NO: 27949 - RNA, 19 nt, Artificial Sequence
  Sense Oligo
gccugaagaccucaagaag

SEQ ID NO: 27950 - RNA, 19 nt, Artificial Sequence
  Antisense Oligo
cuucuugaggucuucaggc

SEQ ID NO: 27951 - RNA, 19 nt, Artificial Sequence
  Sense Oligo
accaggaagcagaugucca

SEQ ID NO: 27952 - RNA, 19 nt, Artificial Sequence
  Antisense Oligo
uggacaucugcuuccuggu

SEQ ID NO: 27953 - RNA, 19 nt, Artificial Sequence
  Sense Oligo
ggaagcagauguccaggaa

SEQ ID NO: 27954 - RNA, 19 nt, Artificial Sequence
  Antisense Oligo
uuccuggacaucugcuucc

SEQ ID NO: 27955 - RNA, 19 nt, Artificial Sequence
  Sense Oligo
gaagcagauguccaggaag

SEQ ID NO: 27956 - RNA, 19 nt, Artificial Sequence
  Antisense Oligo
cuuccuggacaucugcuuc

SEQ ID NO: 27957 - RNA, 19 nt, Artificial Sequence
  Sense Oligo
aagcagauguccaggaagu

SEQ ID NO: 27958 - RNA, 19 nt, Artificial Sequence
  Antisense Oligo
acuuccuggacaucugcuu

SEQ ID NO: 27959 - RNA, 19 nt, Artificial Sequence
  Sense Oligo
agcagauguccaggaagug

SEQ ID NO: 27960 - RNA, 19 nt, Artificial Sequence
  Antisense Oligo
cacuuccuggacaucugcu

SEQ ID NO: 27961 - RNA, 19 nt, Artificial Sequence
  Sense Oligo
gcagauguccaggaaguga

SEQ ID NO: 27962 - RNA, 19 nt, Artificial Sequence
  Antisense Oligo
ucacuuccuggacaucugc

SEQ ID NO: 27963 - RNA, 19 nt, Artificial Sequence
  Sense Oligo
agauguccaggaagugaag

SEQ ID NO: 27964 - RNA, 19 nt, Artificial Sequence
  Antisense Oligo
cuucacuuccuggacaucu

SEQ ID NO: 27965 - RNA, 19 nt, Artificial Sequence
  Sense Oligo
cugcccuucuagucagcug

SEQ ID NO: 27966 - RNA, 19 nt, Artificial Sequence
  Antisense Oligo
cagcugacuagaagggcag

SEQ ID NO: 27967 - RNA, 19 nt, Artificial Sequence
  Sense Oligo
ugcccuucuagucagcugu

SEQ ID NO: 27968 - RNA, 19 nt, Artificial Sequence
  Antisense Oligo
acagcugacuagaagggca

SEQ ID NO: 27969 - RNA, 19 nt, Artificial Sequence
  Sense Oligo
gcccuucuagucagcuguu

SEQ ID NO: 27970 - RNA, 19 nt, Artificial Sequence
  Antisense Oligo
aacagcugacuagaagggc

SEQ ID NO: 27971 - RNA, 19 nt, Artificial Sequence
  Sense Oligo
cccuucuagucagcuguuu

SEQ ID NO: 27972 - RNA, 19 nt, Artificial Sequence
  Antisense Oligo
aaacagcugacuagaaggg

SEQ ID NO: 27973 - RNA, 19 nt, Artificial Sequence
  Sense Oligo
ccuucuagucagcuguuuu

SEQ ID NO: 27974 - RNA, 19 nt, Artificial Sequence
  Antisense Oligo
aaaacagcugacuagaagg

SEQ ID NO: 27975 - RNA, 19 nt, Artificial Sequence
  Sense Oligo
cuucuagucagcuguuuug

SEQ ID NO: 27976 - RNA, 19 nt, Artificial Sequence
  Antisense Oligo
caaaacagcugacuagaag

SEQ ID NO: 27977 - RNA, 19 nt, Artificial Sequence
  Sense Oligo
uucuagucagcuguuuugg

SEQ ID NO: 27978 - RNA, 19 nt, Artificial Sequence
  Antisense Oligo
ccaaaacagcugacuagaa

SEQ ID NO: 27979 - RNA, 19 nt, Artificial Sequence
  Sense Oligo
ucuagucagcuguuuuggc

SEQ ID NO: 27980 - RNA, 19 nt, Artificial Sequence
  Antisense Oligo
gccaaaacagcugacuaga

SEQ ID NO: 27981 - RNA, 19 nt, Artificial Sequence
  Sense Oligo
cuagucagcuguuuuggca

SEQ ID NO: 27982 - RNA, 19 nt, Artificial Sequence
  Antisense Oligo
ugccaaaacagcugacuag

SEQ ID NO: 27983 - RNA, 19 nt, Artificial Sequence
  Sense Oligo
uagucagcuguuuuggcaa

SEQ ID NO: 27984 - RNA, 19 nt, Artificial Sequence
  Antisense Oligo
uugccaaaacagcugacua

SEQ ID NO: 27985 - RNA, 19 nt, Artificial Sequence
  Sense Oligo
agucagcuguuuuggcaag

SEQ ID NO: 27986 - RNA, 19 nt, Artificial Sequence
  Antisense Oligo
cuugccaaaacagcugacu

SEQ ID NO: 27987 - RNA, 19 nt, Artificial Sequence
  Sense Oligo
gucagcuguuuuggcaagu

SEQ ID NO: 27988 - RNA, 19 nt, Artificial Sequence
  Antisense Oligo
acuugccaaaacagcugac

SEQ ID NO: 27989 - RNA, 19 nt, Artificial Sequence
  Sense Oligo
cagcuguuuuggcaaguuu

SEQ ID NO: 27990 - RNA, 19 nt, Artificial Sequence
  Antisense Oligo
aaacuugccaaaacagcug

SEQ ID NO: 27991 - RNA, 19 nt, Artificial Sequence
  Sense Oligo
agcuguuuuggcaaguuua

SEQ ID NO: 27992 - RNA, 19 nt, Artificial Sequence
  Antisense Oligo
uaaacuugccaaaacagcu

SEQ ID NO: 27993 - RNA, 19 nt, Artificial Sequence
  Sense Oligo
gcuguuuuggcaaguuuaa

SEQ ID NO: 27994 - RNA, 19 nt, Artificial Sequence
  Antisense Oligo
uuaaacuugccaaaacagc

SEQ ID NO: 27995 - RNA, 19 nt, Artificial Sequence
  Sense Oligo
cuguuuuggcaaguuuaac

SEQ ID NO: 27996 - RNA, 19 nt, Artificial Sequence
  Antisense Oligo
guuaaacuugccaaaacag

SEQ ID NO: 27997 - RNA, 19 nt, Artificial Sequence
  Sense Oligo
caccugugccaguuucuug

SEQ ID NO: 27998 - RNA, 19 nt, Artificial Sequence
  Antisense Oligo
caagaaacuggcacaggug

SEQ ID NO: 27999 - RNA, 19 nt, Artificial Sequence
  Sense Oligo
accugugccaguuucuugu

SEQ ID NO: 28000 - RNA, 19 nt, Artificial Sequence
  Antisense Oligo
acaagaaacuggcacaggu

SEQ ID NO: 28001 - RNA, 19 nt, Artificial Sequence
  Sense Oligo
ccugugccaguuucuuguu

SEQ ID NO: 28002 - RNA, 19 nt, Artificial Sequence
  Antisense Oligo
aacaagaaacuggcacagg

SEQ ID NO: 28003 - RNA, 19 nt, Artificial Sequence
  Sense Oligo
cugugccaguuucuuguuu

SEQ ID NO: 28004 - RNA, 19 nt, Artificial Sequence
  Antisense Oligo
aaacaagaaacuggcacag

SEQ ID NO: 28005 - RNA, 19 nt, Artificial Sequence
  Sense Oligo
guuucuuguuuccuaauag

SEQ ID NO: 28006 - RNA, 19 nt, Artificial Sequence
  Antisense Oligo
cuauuaggaaacaagaaac

SEQ ID NO: 28007 - RNA, 19 nt, Artificial Sequence
  Sense Oligo
uuucuuguuuccuaauagc

SEQ ID NO: 28008 - RNA, 19 nt, Artificial Sequence
  Antisense Oligo
gcuauuaggaaacaagaaa

SEQ ID NO: 28009 - RNA, 19 nt, Artificial Sequence
  Sense Oligo
ccagcacuucagagguggg

SEQ ID NO: 28010 - RNA, 19 nt, Artificial Sequence
  Antisense Oligo
cccaccucugaagugcugg

SEQ ID NO: 28011 - RNA, 19 nt, Artificial Sequence
  Sense Oligo
cagcacuucagaggugggc

SEQ ID NO: 28012 - RNA, 19 nt, Artificial Sequence
  Antisense Oligo
gcccaccucugaagugcug

SEQ ID NO: 28013 - RNA, 19 nt, Artificial Sequence
  Sense Oligo
agcacuucagaggugggca

SEQ ID NO: 28014 - RNA, 19 nt, Artificial Sequence
  Antisense Oligo
ugcccaccucugaagugcu

SEQ ID NO: 28015 - RNA, 19 nt, Artificial Sequence
  Sense Oligo
cagggaguggccaccucuu

SEQ ID NO: 28016 - RNA, 19 nt, Artificial Sequence
  Antisense Oligo
aagagguggccacucccug

SEQ ID NO: 28017 - RNA, 19 nt, Artificial Sequence
  Sense Oligo
agggaguggccaccucuuc

SEQ ID NO: 28018 - RNA, 19 nt, Artificial Sequence
  Antisense Oligo
gaagagguggccacucccu

SEQ ID NO: 28019 - RNA, 19 nt, Artificial Sequence
  Sense Oligo
gggaguggccaccucuucu

SEQ ID NO: 28020 - RNA, 19 nt, Artificial Sequence
  Antisense Oligo
agaagagguggccacuccc

SEQ ID NO: 28021 - RNA, 19 nt, Artificial Sequence
  Sense Oligo
ggaguggccaccucuucuu

SEQ ID NO: 28022 - RNA, 19 nt, Artificial Sequence
  Antisense Oligo
aagaagagguggccacucc

SEQ ID NO: 28023 - RNA, 19 nt, Artificial Sequence
  Sense Oligo
gaguggccaccucuucuuc

SEQ ID NO: 28024 - RNA, 19 nt, Artificial Sequence
  Antisense Oligo
gaagaagagguggccacuc

SEQ ID NO: 28025 - RNA, 19 nt, Artificial Sequence
  Sense Oligo
ccucuucuuccuccauuuu

SEQ ID NO: 28026 - RNA, 19 nt, Artificial Sequence
  Antisense Oligo
aaaauggaggaagaagagg

SEQ ID NO: 28027 - RNA, 19 nt, Artificial Sequence
  Sense Oligo
cucuucuuccuccauuuug

SEQ ID NO: 28028 - RNA, 19 nt, Artificial Sequence
  Antisense Oligo
caaaauggaggaagaagag

SEQ ID NO: 28029 - RNA, 19 nt, Artificial Sequence
  Sense Oligo
ucuucuuccuccauuuugg

SEQ ID NO: 28030 - RNA, 19 nt, Artificial Sequence
  Antisense Oligo
ccaaaauggaggaagaaga

SEQ ID NO: 28031 - RNA, 19 nt, Artificial Sequence
  Sense Oligo
auuuuggaggcagugaaga

SEQ ID NO: 28032 - RNA, 19 nt, Artificial Sequence
  Antisense Oligo
ucuucacugccuccaaaau

SEQ ID NO: 28033 - RNA, 19 nt, Artificial Sequence
  Sense Oligo
uuuuggaggcagugaagag

SEQ ID NO: 28034 - RNA, 19 nt, Artificial Sequence
  Antisense Oligo
cucuucacugccuccaaaa

SEQ ID NO: 28035 - RNA, 19 nt, Artificial Sequence
  Sense Oligo
acguggacgugcuugcaug

SEQ ID NO: 28036 - RNA, 19 nt, Artificial Sequence
  Antisense Oligo
caugcaagcacguccacgu

SEQ ID NO: 28037 - RNA, 19 nt, Artificial Sequence
  Sense Oligo
cguggacgugcuugcaugu

SEQ ID NO: 28038 - RNA, 19 nt, Artificial Sequence
  Antisense Oligo
acaugcaagcacguccacg

SEQ ID NO: 28039 - RNA, 19 nt, Artificial Sequence
  Sense Oligo
guggacgugcuugcauguu

SEQ ID NO: 28040 - RNA, 19 nt, Artificial Sequence
  Antisense Oligo
aacaugcaagcacguccac

SEQ ID NO: 28041 - RNA, 19 nt, Artificial Sequence
  Sense Oligo
uggacgugcuugcauguuu

SEQ ID NO: 28042 - RNA, 19 nt, Artificial Sequence
  Antisense Oligo
aaacaugcaagcacgucca

SEQ ID NO: 28043 - RNA, 19 nt, Artificial Sequence
  Sense Oligo
ggacgugcuugcauguuug

SEQ ID NO: 28044 - RNA, 19 nt, Artificial Sequence
  Antisense Oligo
caaacaugcaagcacgucc

SEQ ID NO: 28045 - RNA, 19 nt, Artificial Sequence
  Sense Oligo
gacgugcuugcauguuugc

SEQ ID NO: 28046 - RNA, 19 nt, Artificial Sequence
  Antisense Oligo
gcaaacaugcaagcacguc

SEQ ID NO: 28047 - RNA, 19 nt, Artificial Sequence
  Sense Oligo
acgugcuugcauguuugcu

SEQ ID NO: 28048 - RNA, 19 nt, Artificial Sequence
  Antisense Oligo
agcaaacaugcaagcacgu

SEQ ID NO: 28049 - RNA, 19 nt, Artificial Sequence
  Sense Oligo
cgugcuugcauguuugcua

SEQ ID NO: 28050 - RNA, 19 nt, Artificial Sequence
  Antisense Oligo
uagcaaacaugcaagcacg

SEQ ID NO: 28051 - RNA, 19 nt, Artificial Sequence
  Sense Oligo
gugcuugcauguuugcuag

SEQ ID NO: 28052 - RNA, 19 nt, Artificial Sequence
  Antisense Oligo
cuagcaaacaugcaagcac

SEQ ID NO: 28053 - RNA, 19 nt, Artificial Sequence
  Sense Oligo
ugcuugcauguuugcuagg

SEQ ID NO: 28054 - RNA, 19 nt, Artificial Sequence
  Antisense Oligo
ccuagcaaacaugcaagca

SEQ ID NO: 28055 - RNA, 19 nt, Artificial Sequence
  Sense Oligo
gcuugcauguuugcuaggg

SEQ ID NO: 28056 - RNA, 19 nt, Artificial Sequence
  Antisense Oligo
cccuagcaaacaugcaagc

SEQ ID NO: 28057 - RNA, 19 nt, Artificial Sequence
  Sense Oligo
cuugcauguuugcuagggu

SEQ ID NO: 28058 - RNA, 19 nt, Artificial Sequence
  Antisense Oligo
acccuagcaaacaugcaag

SEQ ID NO: 28059 - RNA, 19 nt, Artificial Sequence
  Sense Oligo
auguuugcuagggugugau

SEQ ID NO: 28060 - RNA, 19 nt, Artificial Sequence
  Antisense Oligo
aucacacccuagcaaacau

SEQ ID NO: 28061 - RNA, 19 nt, Artificial Sequence
  Sense Oligo
uguuugcuagggugugaua

SEQ ID NO: 28062 - RNA, 19 nt, Artificial Sequence
  Antisense Oligo
uaucacacccuagcaaaca

SEQ ID NO: 28063 - RNA, 19 nt, Artificial Sequence
  Sense Oligo
guuugcuagggugugauaa

SEQ ID NO: 28064 - RNA, 19 nt, Artificial Sequence
  Antisense Oligo
uuaucacacccuagcaaac

SEQ ID NO: 28065 - RNA, 19 nt, Artificial Sequence
  Sense Oligo
uuugcuagggugugauaau

SEQ ID NO: 28066 - RNA, 19 nt, Artificial Sequence
  Antisense Oligo
auuaucacacccuagcaaa

SEQ ID NO: 28067 - RNA, 19 nt, Artificial Sequence
  Sense Oligo
uugcuagggugugauaaug

SEQ ID NO: 28068 - RNA, 19 nt, Artificial Sequence
  Antisense Oligo
cauuaucacacccuagcaa

SEQ ID NO: 28069 - RNA, 19 nt, Artificial Sequence
  Sense Oligo
uagggugugauaaugugca

SEQ ID NO: 28070 - RNA, 19 nt, Artificial Sequence
  Antisense Oligo
ugcacauuaucacacccua

SEQ ID NO: 28071 - RNA, 19 nt, Artificial Sequence
  Sense Oligo
aaggaccaugugccugugu

SEQ ID NO: 28072 - RNA, 19 nt, Artificial Sequence
  Antisense Oligo
acacaggcacaugguccuu

SEQ ID NO: 28073 - RNA, 19 nt, Artificial Sequence
  Sense Oligo
aggaccaugugccugugug

SEQ ID NO: 28074 - RNA, 19 nt, Artificial Sequence
  Antisense Oligo
cacacaggcacaugguccu

SEQ ID NO: 28075 - RNA, 19 nt, Artificial Sequence
  Sense Oligo
gccugugugugugcaugug

SEQ ID NO: 28076 - RNA, 19 nt, Artificial Sequence
  Antisense Oligo
cacaugcacacacacaggc

SEQ ID NO: 28077 - RNA, 19 nt, Artificial Sequence
  Sense Oligo
ccugugugugugcaugugg

SEQ ID NO: 28078 - RNA, 19 nt, Artificial Sequence
  Antisense Oligo
ccacaugcacacacacagg

SEQ ID NO: 28079 - RNA, 19 nt, Artificial Sequence
  Sense Oligo
cugugugugugcauguggg

SEQ ID NO: 28080 - RNA, 19 nt, Artificial Sequence
  Antisense Oligo
cccacaugcacacacacag

SEQ ID NO: 28081 - RNA, 19 nt, Artificial Sequence
  Sense Oligo
ugugugugugcaugugggu

SEQ ID NO: 28082 - RNA, 19 nt, Artificial Sequence
  Antisense Oligo
acccacaugcacacacaca

SEQ ID NO: 28083 - RNA, 19 nt, Artificial Sequence
  Sense Oligo
gugugugugcaugugggug

SEQ ID NO: 28084 - RNA, 19 nt, Artificial Sequence
  Antisense Oligo
cacccacaugcacacacac

SEQ ID NO: 28085 - RNA, 19 nt, Artificial Sequence
  Sense Oligo
ugugugugcaugugggugu

SEQ ID NO: 28086 - RNA, 19 nt, Artificial Sequence
  Antisense Oligo
acacccacaugcacacaca

SEQ ID NO: 28087 - RNA, 19 nt, Artificial Sequence
  Sense Oligo
ggugugugcgugugcguuc

SEQ ID NO: 28088 - RNA, 19 nt, Artificial Sequence
  Antisense Oligo
gaacgcacacgcacacacc

SEQ ID NO: 28089 - RNA, 19 nt, Artificial Sequence
  Sense Oligo
ugugugcgugugcguucac

SEQ ID NO: 28090 - RNA, 19 nt, Artificial Sequence
  Antisense Oligo
gugaacgcacacgcacaca

SEQ ID NO: 28091 - RNA, 19 nt, Artificial Sequence
  Sense Oligo
gcacauggcagguggacag

SEQ ID NO: 28092 - RNA, 19 nt, Artificial Sequence
  Antisense Oligo
cuguccaccugccaugugc

SEQ ID NO: 28093 - RNA, 19 nt, Artificial Sequence
  Sense Oligo
cacauggcagguggacaga

SEQ ID NO: 28094 - RNA, 19 nt, Artificial Sequence
  Antisense Oligo
ucuguccaccugccaugug

SEQ ID NO: 28095 - RNA, 19 nt, Artificial Sequence
  Sense Oligo
cauggcagguggacagauc

SEQ ID NO: 28096 - RNA, 19 nt, Artificial Sequence
  Antisense Oligo
gaucuguccaccugccaug

SEQ ID NO: 28097 - RNA, 19 nt, Artificial Sequence
  Sense Oligo
auggcagguggacagaucu

SEQ ID NO: 28098 - RNA, 19 nt, Artificial Sequence
  Antisense Oligo
agaucuguccaccugccau

SEQ ID NO: 28099 - RNA, 19 nt, Artificial Sequence
  Sense Oligo
uggcagguggacagaucuc

SEQ ID NO: 28100 - RNA, 19 nt, Artificial Sequence
  Antisense Oligo
gagaucuguccaccugcca

SEQ ID NO: 28101 - RNA, 19 nt, Artificial Sequence
  Sense Oligo
ggcagguggacagaucuca

SEQ ID NO: 28102 - RNA, 19 nt, Artificial Sequence
  Antisense Oligo
ugagaucuguccaccugcc

SEQ ID NO: 28103 - RNA, 19 nt, Artificial Sequence
  Sense Oligo
gcagguggacagaucucac

SEQ ID NO: 28104 - RNA, 19 nt, Artificial Sequence
  Antisense Oligo
gugagaucuguccaccugc

SEQ ID NO: 28105 - RNA, 19 nt, Artificial Sequence
  Sense Oligo
cagguggacagaucucacg

SEQ ID NO: 28106 - RNA, 19 nt, Artificial Sequence
  Antisense Oligo
cgugagaucuguccaccug

SEQ ID NO: 28107 - RNA, 19 nt, Artificial Sequence
  Sense Oligo
agguggacagaucucacgg

SEQ ID NO: 28108 - RNA, 19 nt, Artificial Sequence
  Antisense Oligo
ccgugagaucuguccaccu

SEQ ID NO: 28109 - RNA, 19 nt, Artificial Sequence
  Sense Oligo
gguggacagaucucacggg

SEQ ID NO: 28110 - RNA, 19 nt, Artificial Sequence
  Antisense Oligo
cccgugagaucuguccacc

SEQ ID NO: 28111 - RNA, 19 nt, Artificial Sequence
  Sense Oligo
guggacagaucucacggga

SEQ ID NO: 28112 - RNA, 19 nt, Artificial Sequence
  Antisense Oligo
ucccgugagaucuguccac

SEQ ID NO: 28113 - RNA, 19 nt, Artificial Sequence
  Sense Oligo
uggacagaucucacgggaa

SEQ ID NO: 28114 - RNA, 19 nt, Artificial Sequence
  Antisense Oligo
uucccgugagaucugucca

SEQ ID NO: 28115 - RNA, 19 nt, Artificial Sequence
  Sense Oligo
ggacagaucucacgggaau

SEQ ID NO: 28116 - RNA, 19 nt, Artificial Sequence
  Antisense Oligo
auucccgugagaucugucc

SEQ ID NO: 28117 - RNA, 19 nt, Artificial Sequence
  Sense Oligo
gacagaucucacgggaauc

SEQ ID NO: 28118 - RNA, 19 nt, Artificial Sequence
  Antisense Oligo
gauucccgugagaucuguc

SEQ ID NO: 28119 - RNA, 19 nt, Artificial Sequence
  Sense Oligo
acagaucucacgggaauca

SEQ ID NO: 28120 - RNA, 19 nt, Artificial Sequence
  Antisense Oligo
ugauucccgugagaucugu

SEQ ID NO: 28121 - RNA, 19 nt, Artificial Sequence
  Sense Oligo
ucucacgggaaucagauuu

SEQ ID NO: 28122 - RNA, 19 nt, Artificial Sequence
  Antisense Oligo
aaaucugauucccgugaga

SEQ ID NO: 28123 - RNA, 19 nt, Artificial Sequence
  Sense Oligo
cucacgggaaucagauuuc

SEQ ID NO: 28124 - RNA, 19 nt, Artificial Sequence
  Antisense Oligo
gaaaucugauucccgugag

SEQ ID NO: 28125 - RNA, 19 nt, Artificial Sequence
  Sense Oligo
ucacgggaaucagauuucu

SEQ ID NO: 28126 - RNA, 19 nt, Artificial Sequence
  Antisense Oligo
agaaaucugauucccguga

SEQ ID NO: 28127 - RNA, 19 nt, Artificial Sequence
  Sense Oligo
cacgggaaucagauuucug

SEQ ID NO: 28128 - RNA, 19 nt, Artificial Sequence
  Antisense Oligo
cagaaaucugauucccgug

SEQ ID NO: 28129 - RNA, 19 nt, Artificial Sequence
  Sense Oligo
acgggaaucagauuucugu

SEQ ID NO: 28130 - RNA, 19 nt, Artificial Sequence
  Antisense Oligo
acagaaaucugauucccgu

SEQ ID NO: 28131 - RNA, 19 nt, Artificial Sequence
  Sense Oligo
cgggaaucagauuucuguu

SEQ ID NO: 28132 - RNA, 19 nt, Artificial Sequence
  Antisense Oligo
aacagaaaucugauucccg

SEQ ID NO: 28133 - RNA, 19 nt, Artificial Sequence
  Sense Oligo
gggaaucagauuucuguuu

SEQ ID NO: 28134 - RNA, 19 nt, Artificial Sequence
  Antisense Oligo
aaacagaaaucugauuccc

SEQ ID NO: 28135 - RNA, 19 nt, Artificial Sequence
  Sense Oligo
gaaucagauuucuguuuug

SEQ ID NO: 28136 - RNA, 19 nt, Artificial Sequence
  Antisense Oligo
caaaacagaaaucugauuc

SEQ ID NO: 28137 - RNA, 19 nt, Artificial Sequence
  Sense Oligo
aucagauuucuguuuuggu

SEQ ID NO: 28138 - RNA, 19 nt, Artificial Sequence
  Antisense Oligo
accaaaacagaaaucugau

SEQ ID NO: 28139 - RNA, 19 nt, Artificial Sequence
  Sense Oligo
ucagauuucuguuuugguu

SEQ ID NO: 28140 - RNA, 19 nt, Artificial Sequence
  Antisense Oligo
aaccaaaacagaaaucuga

SEQ ID NO: 28141 - RNA, 19 nt, Artificial Sequence
  Sense Oligo
uuucuguuuugguuuucca

SEQ ID NO: 28142 - RNA, 19 nt, Artificial Sequence
  Antisense Oligo
uggaaaaccaaaacagaaa

SEQ ID NO: 28143 - RNA, 19 nt, Artificial Sequence
  Sense Oligo
gguuuuccaccagcacgcu

SEQ ID NO: 28144 - RNA, 19 nt, Artificial Sequence
  Antisense Oligo
agcgugcugguggaaaacc

SEQ ID NO: 28145 - RNA, 19 nt, Artificial Sequence
  Sense Oligo
guuuuccaccagcacgcug

SEQ ID NO: 28146 - RNA, 19 nt, Artificial Sequence
  Antisense Oligo
cagcgugcugguggaaaac

SEQ ID NO: 28147 - RNA, 19 nt, Artificial Sequence
  Sense Oligo
uuuuccaccagcacgcuga

SEQ ID NO: 28148 - RNA, 19 nt, Artificial Sequence
  Antisense Oligo
ucagcgugcugguggaaaa

SEQ ID NO: 28149 - RNA, 19 nt, Artificial Sequence
  Sense Oligo
uuuccaccagcacgcugag

SEQ ID NO: 28150 - RNA, 19 nt, Artificial Sequence
  Antisense Oligo
cucagcgugcugguggaaa

SEQ ID NO: 28151 - RNA, 19 nt, Artificial Sequence
  Sense Oligo
uuccaccagcacgcugagc

SEQ ID NO: 28152 - RNA, 19 nt, Artificial Sequence
  Antisense Oligo
gcucagcgugcugguggaa

SEQ ID NO: 28153 - RNA, 19 nt, Artificial Sequence
  Sense Oligo
guggaggagucaccguguu

SEQ ID NO: 28154 - RNA, 19 nt, Artificial Sequence
  Antisense Oligo
aacacggugacuccuccac

SEQ ID NO: 28155 - RNA, 19 nt, Artificial Sequence
  Sense Oligo
uggaggagucaccguguuc

SEQ ID NO: 28156 - RNA, 19 nt, Artificial Sequence
  Antisense Oligo
gaacacggugacuccucca

SEQ ID NO: 28157 - RNA, 19 nt, Artificial Sequence
  Sense Oligo
ggaggagucaccguguucu

SEQ ID NO: 28158 - RNA, 19 nt, Artificial Sequence
  Antisense Oligo
agaacacggugacuccucc

SEQ ID NO: 28159 - RNA, 19 nt, Artificial Sequence
  Sense Oligo
gaggagucaccguguucuu

SEQ ID NO: 28160 - RNA, 19 nt, Artificial Sequence
  Antisense Oligo
aagaacacggugacuccuc

SEQ ID NO: 28161 - RNA, 19 nt, Artificial Sequence
  Sense Oligo
aggagucaccguguucuuc

SEQ ID NO: 28162 - RNA, 19 nt, Artificial Sequence
  Antisense Oligo
gaagaacacggugacuccu

SEQ ID NO: 28163 - RNA, 19 nt, Artificial Sequence
  Sense Oligo
uguucuuccacgccaucau

SEQ ID NO: 28164 - RNA, 19 nt, Artificial Sequence
  Antisense Oligo
augauggcguggaagaaca

SEQ ID NO: 28165 - RNA, 19 nt, Artificial Sequence
  Sense Oligo
guucuuccacgccaucauc

SEQ ID NO: 28166 - RNA, 19 nt, Artificial Sequence
  Antisense Oligo
gaugauggcguggaagaac

SEQ ID NO: 28167 - RNA, 19 nt, Artificial Sequence
  Sense Oligo
uccacgccaucaucucucu

SEQ ID NO: 28168 - RNA, 19 nt, Artificial Sequence
  Antisense Oligo
agagagaugauggcgugga

SEQ ID NO: 28169 - RNA, 19 nt, Artificial Sequence
  Sense Oligo
ccacgccaucaucucucuu

SEQ ID NO: 28170 - RNA, 19 nt, Artificial Sequence
  Antisense Oligo
aagagagaugauggcgugg

SEQ ID NO: 28171 - RNA, 19 nt, Artificial Sequence
  Sense Oligo
cacgccaucaucucucuuc

SEQ ID NO: 28172 - RNA, 19 nt, Artificial Sequence
  Antisense Oligo
gaagagagaugauggcgug

SEQ ID NO: 28173 - RNA, 19 nt, Artificial Sequence
  Sense Oligo
ccaucaucucucuucauuu

SEQ ID NO: 28174 - RNA, 19 nt, Artificial Sequence
  Antisense Oligo
aaaugaagagagaugaugg

SEQ ID NO: 28175 - RNA, 19 nt, Artificial Sequence
  Sense Oligo
caucaucucucuucauuuc

SEQ ID NO: 28176 - RNA, 19 nt, Artificial Sequence
  Antisense Oligo
gaaaugaagagagaugaug

SEQ ID NO: 28177 - RNA, 19 nt, Artificial Sequence
  Sense Oligo
aucaucucucuucauuucc

SEQ ID NO: 28178 - RNA, 19 nt, Artificial Sequence
  Antisense Oligo
ggaaaugaagagagaugau

SEQ ID NO: 28179 - RNA, 19 nt, Artificial Sequence
  Sense Oligo
auccugaccuccauaaagu

SEQ ID NO: 28180 - RNA, 19 nt, Artificial Sequence
  Antisense Oligo
acuuuauggaggucaggau

SEQ ID NO: 28181 - RNA, 19 nt, Artificial Sequence
  Sense Oligo
uccugaccuccauaaaguc

SEQ ID NO: 28182 - RNA, 19 nt, Artificial Sequence
  Antisense Oligo
gacuuuauggaggucagga

SEQ ID NO: 28183 - RNA, 19 nt, Artificial Sequence
  Sense Oligo
ccugaccuccauaaagucu

SEQ ID NO: 28184 - RNA, 19 nt, Artificial Sequence
  Antisense Oligo
agacuuuauggaggucagg

SEQ ID NO: 28185 - RNA, 19 nt, Artificial Sequence
  Sense Oligo
cugaccuccauaaagucuu

SEQ ID NO: 28186 - RNA, 19 nt, Artificial Sequence
  Antisense Oligo
aagacuuuauggaggucag

SEQ ID NO: 28187 - RNA, 19 nt, Artificial Sequence
  Sense Oligo
ugaccuccauaaagucuuc

SEQ ID NO: 28188 - RNA, 19 nt, Artificial Sequence
  Antisense Oligo
gaagacuuuauggagguca

SEQ ID NO: 28189 - RNA, 19 nt, Artificial Sequence
  Sense Oligo
cuccauaaagucuucauca

SEQ ID NO: 28190 - RNA, 19 nt, Artificial Sequence
  Antisense Oligo
ugaugaagacuuuauggag

SEQ ID NO: 28191 - RNA, 19 nt, Artificial Sequence
  Sense Oligo
aaagucuucaucagaggag

SEQ ID NO: 28192 - RNA, 19 nt, Artificial Sequence
  Antisense Oligo
cuccucugaugaagacuuu

SEQ ID NO: 28193 - RNA, 19 nt, Artificial Sequence
  Sense Oligo
aagucuucaucagaggagg

SEQ ID NO: 28194 - RNA, 19 nt, Artificial Sequence
  Antisense Oligo
ccuccucugaugaagacuu

SEQ ID NO: 28195 - RNA, 19 nt, Artificial Sequence
  Sense Oligo
agucuucaucagaggagga

SEQ ID NO: 28196 - RNA, 19 nt, Artificial Sequence
  Antisense Oligo
uccuccucugaugaagacu

SEQ ID NO: 28197 - RNA, 19 nt, Artificial Sequence
  Sense Oligo
gggagucaaaaugggacag

SEQ ID NO: 28198 - RNA, 19 nt, Artificial Sequence
  Antisense Oligo
cugucccauuuugacuccc

SEQ ID NO: 28199 - RNA, 19 nt, Artificial Sequence
  Sense Oligo
ggagucaaaaugggacagc

SEQ ID NO: 28200 - RNA, 19 nt, Artificial Sequence
  Antisense Oligo
gcugucccauuuugacucc

SEQ ID NO: 28201 - RNA, 19 nt, Artificial Sequence
  Sense Oligo
gagucaaaaugggacagca

SEQ ID NO: 28202 - RNA, 19 nt, Artificial Sequence
  Antisense Oligo
ugcugucccauuuugacuc

SEQ ID NO: 28203 - RNA, 19 nt, Artificial Sequence
  Sense Oligo
agucaaaaugggacagcaa

SEQ ID NO: 28204 - RNA, 19 nt, Artificial Sequence
  Antisense Oligo
uugcugucccauuuugacu

SEQ ID NO: 28205 - RNA, 19 nt, Artificial Sequence
  Sense Oligo
gucaaaaugggacagcaau

SEQ ID NO: 28206 - RNA, 19 nt, Artificial Sequence
  Antisense Oligo
auugcugucccauuuugac

SEQ ID NO: 28207 - RNA, 19 nt, Artificial Sequence
  Sense Oligo
aaaugggacagcaauaucu

SEQ ID NO: 28208 - RNA, 19 nt, Artificial Sequence
  Antisense Oligo
agauauugcugucccauuu

SEQ ID NO: 28209 - RNA, 19 nt, Artificial Sequence
  Sense Oligo
aaugggacagcaauaucug

SEQ ID NO: 28210 - RNA, 19 nt, Artificial Sequence
  Antisense Oligo
cagauauugcugucccauu

SEQ ID NO: 28211 - RNA, 19 nt, Artificial Sequence
  Sense Oligo
agcaauaucugugagcugc

SEQ ID NO: 28212 - RNA, 19 nt, Artificial Sequence
  Antisense Oligo
gcagcucacagauauugcu

SEQ ID NO: 28213 - RNA, 19 nt, Artificial Sequence
  Sense Oligo
cugugagcugcacuacacc

SEQ ID NO: 28214 - RNA, 19 nt, Artificial Sequence
  Antisense Oligo
gguguagugcagcucacag

SEQ ID NO: 28215 - RNA, 19 nt, Artificial Sequence
  Sense Oligo
ugugagcugcacuacacca

SEQ ID NO: 28216 - RNA, 19 nt, Artificial Sequence
  Antisense Oligo
ugguguagugcagcucaca

SEQ ID NO: 28217 - RNA, 19 nt, Artificial Sequence
  Sense Oligo
gugagcugcacuacaccag

SEQ ID NO: 28218 - RNA, 19 nt, Artificial Sequence
  Antisense Oligo
cugguguagugcagcucac

SEQ ID NO: 28219 - RNA, 19 nt, Artificial Sequence
  Sense Oligo
ugagcugcacuacaccagg

SEQ ID NO: 28220 - RNA, 19 nt, Artificial Sequence
  Antisense Oligo
ccugguguagugcagcuca

SEQ ID NO: 28221 - RNA, 19 nt, Artificial Sequence
  Sense Oligo
gagcugcacuacaccaggu

SEQ ID NO: 28222 - RNA, 19 nt, Artificial Sequence
  Antisense Oligo
accugguguagugcagcuc

SEQ ID NO: 28223 - RNA, 19 nt, Artificial Sequence
  Sense Oligo
agcugcacuacaccaggug

SEQ ID NO: 28224 - RNA, 19 nt, Artificial Sequence
  Antisense Oligo
caccugguguagugcagcu

SEQ ID NO: 28225 - RNA, 19 nt, Artificial Sequence
  Sense Oligo
gcugcacuacaccagguga

SEQ ID NO: 28226 - RNA, 19 nt, Artificial Sequence
  Antisense Oligo
ucaccugguguagugcagc

SEQ ID NO: 28227 - RNA, 19 nt, Artificial Sequence
  Sense Oligo
cugcacuacaccaggugag

SEQ ID NO: 28228 - RNA, 19 nt, Artificial Sequence
  Antisense Oligo
cucaccugguguagugcag

SEQ ID NO: 28229 - RNA, 19 nt, Artificial Sequence
  Sense Oligo
ugcacuacaccaggugagc

SEQ ID NO: 28230 - RNA, 19 nt, Artificial Sequence
  Antisense Oligo
gcucaccugguguagugca

SEQ ID NO: 28231 - RNA, 19 nt, Artificial Sequence
  Sense Oligo
gcacuacaccaggugagcg

SEQ ID NO: 28232 - RNA, 19 nt, Artificial Sequence
  Antisense Oligo
cgcucaccugguguagugc

SEQ ID NO: 28233 - RNA, 19 nt, Artificial Sequence
  Sense Oligo
cacuacaccaggugagcgu

SEQ ID NO: 28234 - RNA, 19 nt, Artificial Sequence
  Antisense Oligo
acgcucaccugguguagug

SEQ ID NO: 28235 - RNA, 19 nt, Artificial Sequence
  Sense Oligo
acuacaccaggugagcgug

SEQ ID NO: 28236 - RNA, 19 nt, Artificial Sequence
  Antisense Oligo
cacgcucaccugguguagu

SEQ ID NO: 28237 - RNA, 19 nt, Artificial Sequence
  Sense Oligo
caccaggugagcgugucug

SEQ ID NO: 28238 - RNA, 19 nt, Artificial Sequence
  Antisense Oligo
cagacacgcucaccuggug

SEQ ID NO: 28239 - RNA, 19 nt, Artificial Sequence
  Sense Oligo
accaggugagcgugucugu

SEQ ID NO: 28240 - RNA, 19 nt, Artificial Sequence
  Antisense Oligo
acagacacgcucaccuggu

SEQ ID NO: 28241 - RNA, 19 nt, Artificial Sequence
  Sense Oligo
ccaggugagcgugucugua

SEQ ID NO: 28242 - RNA, 19 nt, Artificial Sequence
  Antisense Oligo
uacagacacgcucaccugg

SEQ ID NO: 28243 - RNA, 19 nt, Artificial Sequence
  Sense Oligo
gaugcccagccugugacac

SEQ ID NO: 28244 - RNA, 19 nt, Artificial Sequence
  Antisense Oligo
gugucacaggcugggcauc

SEQ ID NO: 28245 - RNA, 19 nt, Artificial Sequence
  Sense Oligo
cccagccugugacacguag

SEQ ID NO: 28246 - RNA, 19 nt, Artificial Sequence
  Antisense Oligo
cuacgugucacaggcuggg

SEQ ID NO: 28247 - RNA, 19 nt, Artificial Sequence
  Sense Oligo
ccagccugugacacguagu

SEQ ID NO: 28248 - RNA, 19 nt, Artificial Sequence
  Antisense Oligo
acuacgugucacaggcugg

SEQ ID NO: 28249 - RNA, 19 nt, Artificial Sequence
  Sense Oligo
cagccugugacacguaguu

SEQ ID NO: 28250 - RNA, 19 nt, Artificial Sequence
  Antisense Oligo
aacuacgugucacaggcug

SEQ ID NO: 28251 - RNA, 19 nt, Artificial Sequence
  Sense Oligo
agccugugacacguaguuu

SEQ ID NO: 28252 - RNA, 19 nt, Artificial Sequence
  Antisense Oligo
aaacuacgugucacaggcu

SEQ ID NO: 28253 - RNA, 19 nt, Artificial Sequence
  Sense Oligo
cugugacacguaguuuaaa

SEQ ID NO: 28254 - RNA, 19 nt, Artificial Sequence
  Antisense Oligo
uuuaaacuacgugucacag

SEQ ID NO: 28255 - RNA, 19 nt, Artificial Sequence
  Sense Oligo
ugugacacguaguuuaaaa

SEQ ID NO: 28256 - RNA, 19 nt, Artificial Sequence
  Antisense Oligo
uuuuaaacuacgugucaca

SEQ ID NO: 28257 - RNA, 19 nt, Artificial Sequence
  Sense Oligo
gacggagucuugcuguguc

SEQ ID NO: 28258 - RNA, 19 nt, Artificial Sequence
  Antisense Oligo
gacacagcaagacuccguc

SEQ ID NO: 28259 - RNA, 19 nt, Artificial Sequence
  Sense Oligo
ugcugugucacccaggcug

SEQ ID NO: 28260 - RNA, 19 nt, Artificial Sequence
  Antisense Oligo
cagccugggugacacagca

SEQ ID NO: 28261 - RNA, 19 nt, Artificial Sequence
  Sense Oligo
cugugucacccaggcugga

SEQ ID NO: 28262 - RNA, 19 nt, Artificial Sequence
  Antisense Oligo
uccagccugggugacacag

SEQ ID NO: 28263 - RNA, 19 nt, Artificial Sequence
  Sense Oligo
ugugucacccaggcuggag

SEQ ID NO: 28264 - RNA, 19 nt, Artificial Sequence
  Antisense Oligo
cuccagccugggugacaca

SEQ ID NO: 28265 - RNA, 19 nt, Artificial Sequence
  Sense Oligo
ucacccaggcuggagugug

SEQ ID NO: 28266 - RNA, 19 nt, Artificial Sequence
  Antisense Oligo
cacacuccagccuggguga

SEQ ID NO: 28267 - RNA, 19 nt, Artificial Sequence
  Sense Oligo
gcaccaucucagcucacug

SEQ ID NO: 28268 - RNA, 19 nt, Artificial Sequence
  Antisense Oligo
cagugagcugagauggugc

SEQ ID NO: 28269 - RNA, 19 nt, Artificial Sequence
  Sense Oligo
ccuccuggguucaagcgau

SEQ ID NO: 28270 - RNA, 19 nt, Artificial Sequence
  Antisense Oligo
aucgcuugaacccaggagg

SEQ ID NO: 28271 - RNA, 19 nt, Artificial Sequence
  Sense Oligo
cuccuggguucaagcgauu

SEQ ID NO: 28272 - RNA, 19 nt, Artificial Sequence
  Antisense Oligo
aaucgcuugaacccaggag

SEQ ID NO: 28273 - RNA, 19 nt, Artificial Sequence
  Sense Oligo
uccuggguucaagcgauuc

SEQ ID NO: 28274 - RNA, 19 nt, Artificial Sequence
  Antisense Oligo
gaaucgcuugaacccagga

SEQ ID NO: 28275 - RNA, 19 nt, Artificial Sequence
  Sense Oligo
ccuggguucaagcgauucu

SEQ ID NO: 28276 - RNA, 19 nt, Artificial Sequence
  Antisense Oligo
agaaucgcuugaacccagg

SEQ ID NO: 28277 - RNA, 19 nt, Artificial Sequence
  Sense Oligo
cuggguucaagcgauucuc

SEQ ID NO: 28278 - RNA, 19 nt, Artificial Sequence
  Antisense Oligo
gagaaucgcuugaacccag

SEQ ID NO: 28279 - RNA, 19 nt, Artificial Sequence
  Sense Oligo
uggguucaagcgauucuca

SEQ ID NO: 28280 - RNA, 19 nt, Artificial Sequence
  Antisense Oligo
ugagaaucgcuugaaccca

SEQ ID NO: 28281 - RNA, 19 nt, Artificial Sequence
  Sense Oligo
ggguucaagcgauucucau

SEQ ID NO: 28282 - RNA, 19 nt, Artificial Sequence
  Antisense Oligo
augagaaucgcuugaaccc

SEQ ID NO: 28283 - RNA, 19 nt, Artificial Sequence
  Sense Oligo
gguucaagcgauucucaug

SEQ ID NO: 28284 - RNA, 19 nt, Artificial Sequence
  Antisense Oligo
caugagaaucgcuugaacc

SEQ ID NO: 28285 - RNA, 19 nt, Artificial Sequence
  Sense Oligo
guucaagcgauucucaugc

SEQ ID NO: 28286 - RNA, 19 nt, Artificial Sequence
  Antisense Oligo
gcaugagaaucgcuugaac

SEQ ID NO: 28287 - RNA, 19 nt, Artificial Sequence
  Sense Oligo
uucaagcgauucucaugcc

SEQ ID NO: 28288 - RNA, 19 nt, Artificial Sequence
  Antisense Oligo
ggcaugagaaucgcuugaa

SEQ ID NO: 28289 - RNA, 19 nt, Artificial Sequence
  Sense Oligo
uagcugggacuacaggugu

SEQ ID NO: 28290 - RNA, 19 nt, Artificial Sequence
  Antisense Oligo
acaccuguagucccagcua

SEQ ID NO: 28291 - RNA, 19 nt, Artificial Sequence
  Sense Oligo
agcugggacuacaggugug

SEQ ID NO: 28292 - RNA, 19 nt, Artificial Sequence
  Antisense Oligo
cacaccuguagucccagcu

SEQ ID NO: 28293 - RNA, 19 nt, Artificial Sequence
  Sense Oligo
agacggaguuucuacuaaa

SEQ ID NO: 28294 - RNA, 19 nt, Artificial Sequence
  Antisense Oligo
uuuaguagaaacuccgucu

SEQ ID NO: 28295 - RNA, 19 nt, Artificial Sequence
  Sense Oligo
gacggaguuucuacuaaau

SEQ ID NO: 28296 - RNA, 19 nt, Artificial Sequence
  Antisense Oligo
auuuaguagaaacuccguc

SEQ ID NO: 28297 - RNA, 19 nt, Artificial Sequence
  Sense Oligo
acggaguuucuacuaaaug

SEQ ID NO: 28298 - RNA, 19 nt, Artificial Sequence
  Antisense Oligo
cauuuaguagaaacuccgu

SEQ ID NO: 28299 - RNA, 19 nt, Artificial Sequence
  Sense Oligo
cggaguuucuacuaaaugc

SEQ ID NO: 28300 - RNA, 19 nt, Artificial Sequence
  Antisense Oligo
gcauuuaguagaaacuccg

SEQ ID NO: 28301 - RNA, 19 nt, Artificial Sequence
  Sense Oligo
ggaguuucuacuaaaugcu

SEQ ID NO: 28302 - RNA, 19 nt, Artificial Sequence
  Antisense Oligo
agcauuuaguagaaacucc

SEQ ID NO: 28303 - RNA, 19 nt, Artificial Sequence
  Sense Oligo
uucuacuaaaugcuggcua

SEQ ID NO: 28304 - RNA, 19 nt, Artificial Sequence
  Antisense Oligo
uagccagcauuuaguagaa

SEQ ID NO: 28305 - RNA, 19 nt, Artificial Sequence
  Sense Oligo
ucuacuaaaugcuggcuag

SEQ ID NO: 28306 - RNA, 19 nt, Artificial Sequence
  Antisense Oligo
cuagccagcauuuaguaga

SEQ ID NO: 28307 - RNA, 19 nt, Artificial Sequence
  Sense Oligo
cuacuaaaugcuggcuagg

SEQ ID NO: 28308 - RNA, 19 nt, Artificial Sequence
  Antisense Oligo
ccuagccagcauuuaguag

SEQ ID NO: 28309 - RNA, 19 nt, Artificial Sequence
  Sense Oligo
uacuaaaugcuggcuaggc

SEQ ID NO: 28310 - RNA, 19 nt, Artificial Sequence
  Antisense Oligo
gccuagccagcauuuagua

SEQ ID NO: 28311 - RNA, 19 nt, Artificial Sequence
  Sense Oligo
acuaaaugcuggcuaggcu

SEQ ID NO: 28312 - RNA, 19 nt, Artificial Sequence
  Antisense Oligo
agccuagccagcauuuagu

SEQ ID NO: 28313 - RNA, 19 nt, Artificial Sequence
  Sense Oligo
cuaaaugcuggcuaggcua

SEQ ID NO: 28314 - RNA, 19 nt, Artificial Sequence
  Antisense Oligo
uagccuagccagcauuuag

SEQ ID NO: 28315 - RNA, 19 nt, Artificial Sequence
  Sense Oligo
uaaaugcuggcuaggcuag

SEQ ID NO: 28316 - RNA, 19 nt, Artificial Sequence
  Antisense Oligo
cuagccuagccagcauuua

SEQ ID NO: 28317 - RNA, 19 nt, Artificial Sequence
  Sense Oligo
aaaugcuggcuaggcuagu

SEQ ID NO: 28318 - RNA, 19 nt, Artificial Sequence
  Antisense Oligo
acuagccuagccagcauuu

SEQ ID NO: 28319 - RNA, 19 nt, Artificial Sequence
  Sense Oligo
uuuuauccagugaguugau

SEQ ID NO: 28320 - RNA, 19 nt, Artificial Sequence
  Antisense Oligo
aucaacucacuggauaaaa

SEQ ID NO: 28321 - RNA, 19 nt, Artificial Sequence
  Sense Oligo
uuuauccagugaguugaug

SEQ ID NO: 28322 - RNA, 19 nt, Artificial Sequence
  Antisense Oligo
caucaacucacuggauaaa

SEQ ID NO: 28323 - RNA, 19 nt, Artificial Sequence
  Sense Oligo
uuauccagugaguugauga

SEQ ID NO: 28324 - RNA, 19 nt, Artificial Sequence
  Antisense Oligo
ucaucaacucacuggauaa

SEQ ID NO: 28325 - RNA, 19 nt, Artificial Sequence
  Sense Oligo
uauccagugaguugaugac

SEQ ID NO: 28326 - RNA, 19 nt, Artificial Sequence
  Antisense Oligo
gucaucaacucacuggaua

SEQ ID NO: 28327 - RNA, 19 nt, Artificial Sequence
  Sense Oligo
auccagugaguugaugaca

SEQ ID NO: 28328 - RNA, 19 nt, Artificial Sequence
  Antisense Oligo
ugucaucaacucacuggau

SEQ ID NO: 28329 - RNA, 19 nt, Artificial Sequence
  Sense Oligo
uccagugaguugaugacau

SEQ ID NO: 28330 - RNA, 19 nt, Artificial Sequence
  Antisense Oligo
augucaucaacucacugga

SEQ ID NO: 28331 - RNA, 19 nt, Artificial Sequence
  Sense Oligo
ccagugaguugaugacauu

SEQ ID NO: 28332 - RNA, 19 nt, Artificial Sequence
  Antisense Oligo
aaugucaucaacucacugg

SEQ ID NO: 28333 - RNA, 19 nt, Artificial Sequence
  Sense Oligo
gugaguugaugacauucuu

SEQ ID NO: 28334 - RNA, 19 nt, Artificial Sequence
  Antisense Oligo
aagaaugucaucaacucac

SEQ ID NO: 28335 - RNA, 19 nt, Artificial Sequence
  Sense Oligo
ugaguugaugacauucuuc

SEQ ID NO: 28336 - RNA, 19 nt, Artificial Sequence
  Antisense Oligo
gaagaaugucaucaacuca

SEQ ID NO: 28337 - RNA, 19 nt, Artificial Sequence
  Sense Oligo
gaguugaugacauucuucg

SEQ ID NO: 28338 - RNA, 19 nt, Artificial Sequence
  Antisense Oligo
cgaagaaugucaucaacuc

SEQ ID NO: 28339 - RNA, 19 nt, Artificial Sequence
  Sense Oligo
guugaugacauucuucggg

SEQ ID NO: 28340 - RNA, 19 nt, Artificial Sequence
  Antisense Oligo
cccgaagaaugucaucaac

SEQ ID NO: 28341 - RNA, 19 nt, Artificial Sequence
  Sense Oligo
uugaugacauucuucgggu

SEQ ID NO: 28342 - RNA, 19 nt, Artificial Sequence
  Antisense Oligo
acccgaagaaugucaucaa

SEQ ID NO: 28343 - RNA, 19 nt, Artificial Sequence
  Sense Oligo
ugaugacauucuucggguu

SEQ ID NO: 28344 - RNA, 19 nt, Artificial Sequence
  Antisense Oligo
aacccgaagaaugucauca

SEQ ID NO: 28345 - RNA, 19 nt, Artificial Sequence
  Sense Oligo
gaugacauucuucggguuc

SEQ ID NO: 28346 - RNA, 19 nt, Artificial Sequence
  Antisense Oligo
gaacccgaagaaugucauc

SEQ ID NO: 28347 - RNA, 19 nt, Artificial Sequence
  Sense Oligo
augacauucuucggguucu

SEQ ID NO: 28348 - RNA, 19 nt, Artificial Sequence
  Antisense Oligo
agaacccgaagaaugucau

SEQ ID NO: 28349 - RNA, 19 nt, Artificial Sequence
  Sense Oligo
ugacauucuucggguucug

SEQ ID NO: 28350 - RNA, 19 nt, Artificial Sequence
  Antisense Oligo
cagaacccgaagaauguca

SEQ ID NO: 28351 - RNA, 19 nt, Artificial Sequence
  Sense Oligo
gacauucuucggguucugg

SEQ ID NO: 28352 - RNA, 19 nt, Artificial Sequence
  Antisense Oligo
ccagaacccgaagaauguc

SEQ ID NO: 28353 - RNA, 19 nt, Artificial Sequence
  Sense Oligo
acauucuucggguucugga

SEQ ID NO: 28354 - RNA, 19 nt, Artificial Sequence
  Antisense Oligo
uccagaacccgaagaaugu

SEQ ID NO: 28355 - RNA, 19 nt, Artificial Sequence
  Sense Oligo
cauucuucggguucuggaa

SEQ ID NO: 28356 - RNA, 19 nt, Artificial Sequence
  Antisense Oligo
uuccagaacccgaagaaug

SEQ ID NO: 28357 - RNA, 19 nt, Artificial Sequence
  Sense Oligo
uucggguucuggaagauga

SEQ ID NO: 28358 - RNA, 19 nt, Artificial Sequence
  Antisense Oligo
ucaucuuccagaacccgaa

SEQ ID NO: 28359 - RNA, 19 nt, Artificial Sequence
  Sense Oligo
ucggguucuggaagaugaa

SEQ ID NO: 28360 - RNA, 19 nt, Artificial Sequence
  Antisense Oligo
uucaucuuccagaacccga

SEQ ID NO: 28361 - RNA, 19 nt, Artificial Sequence
  Sense Oligo
ucuggaagaugaauauuuc

SEQ ID NO: 28362 - RNA, 19 nt, Artificial Sequence
  Antisense Oligo
gaaauauucaucuuccaga

SEQ ID NO: 28363 - RNA, 19 nt, Artificial Sequence
  Sense Oligo
gaauauuucagacagcucu

SEQ ID NO: 28364 - RNA, 19 nt, Artificial Sequence
  Antisense Oligo
agagcugucugaaauauuc

SEQ ID NO: 28365 - RNA, 19 nt, Artificial Sequence
  Sense Oligo
aauauuucagacagcucuu

SEQ ID NO: 28366 - RNA, 19 nt, Artificial Sequence
  Antisense Oligo
aagagcugucugaaauauu

SEQ ID NO: 28367 - RNA, 19 nt, Artificial Sequence
  Sense Oligo
auauuucagacagcucuuc

SEQ ID NO: 28368 - RNA, 19 nt, Artificial Sequence
  Antisense Oligo
gaagagcugucugaaauau

SEQ ID NO: 28369 - RNA, 19 nt, Artificial Sequence
  Sense Oligo
gacagcucuuccuggccau

SEQ ID NO: 28370 - RNA, 19 nt, Artificial Sequence
  Antisense Oligo
auggccaggaagagcuguc

SEQ ID NO: 28371 - RNA, 19 nt, Artificial Sequence
  Sense Oligo
acagcucuuccuggccaug

SEQ ID NO: 28372 - RNA, 19 nt, Artificial Sequence
  Antisense Oligo
cauggccaggaagagcugu

SEQ ID NO: 28373 - RNA, 19 nt, Artificial Sequence
  Sense Oligo
cagcucuuccuggccaugc

SEQ ID NO: 28374 - RNA, 19 nt, Artificial Sequence
  Antisense Oligo
gcauggccaggaagagcug

SEQ ID NO: 28375 - RNA, 19 nt, Artificial Sequence
  Sense Oligo
agcucuuccuggccaugca

SEQ ID NO: 28376 - RNA, 19 nt, Artificial Sequence
  Antisense Oligo
ugcauggccaggaagagcu

SEQ ID NO: 28377 - RNA, 19 nt, Artificial Sequence
  Sense Oligo
gcucuuccuggccaugcau

SEQ ID NO: 28378 - RNA, 19 nt, Artificial Sequence
  Antisense Oligo
augcauggccaggaagagc

SEQ ID NO: 28379 - RNA, 19 nt, Artificial Sequence
  Sense Oligo
cucuuccuggccaugcauu

SEQ ID NO: 28380 - RNA, 19 nt, Artificial Sequence
  Antisense Oligo
aaugcauggccaggaagag

SEQ ID NO: 28381 - RNA, 19 nt, Artificial Sequence
  Sense Oligo
ucuuccuggccaugcauuu

SEQ ID NO: 28382 - RNA, 19 nt, Artificial Sequence
  Antisense Oligo
aaaugcauggccaggaaga

SEQ ID NO: 28383 - RNA, 19 nt, Artificial Sequence
  Sense Oligo
cuuccuggccaugcauuuu

SEQ ID NO: 28384 - RNA, 19 nt, Artificial Sequence
  Antisense Oligo
aaaaugcauggccaggaag

SEQ ID NO: 28385 - RNA, 19 nt, Artificial Sequence
  Sense Oligo
uuccuggccaugcauuuug

SEQ ID NO: 28386 - RNA, 19 nt, Artificial Sequence
  Antisense Oligo
caaaaugcauggccaggaa

SEQ ID NO: 28387 - RNA, 19 nt, Artificial Sequence
  Sense Oligo
uccuggccaugcauuuugg

SEQ ID NO: 28388 - RNA, 19 nt, Artificial Sequence
  Antisense Oligo
ccaaaaugcauggccagga

SEQ ID NO: 28389 - RNA, 19 nt, Artificial Sequence
  Sense Oligo
cuggccaugcauuuuggug

SEQ ID NO: 28390 - RNA, 19 nt, Artificial Sequence
  Antisense Oligo
caccaaaaugcauggccag

SEQ ID NO: 28391 - RNA, 19 nt, Artificial Sequence
  Sense Oligo
uggccaugcauuuuggugu

SEQ ID NO: 28392 - RNA, 19 nt, Artificial Sequence
  Antisense Oligo
acaccaaaaugcauggcca

SEQ ID NO: 28393 - RNA, 19 nt, Artificial Sequence
  Sense Oligo
ggccaugcauuuugguguc

SEQ ID NO: 28394 - RNA, 19 nt, Artificial Sequence
  Antisense Oligo
gacaccaaaaugcauggcc

SEQ ID NO: 28395 - RNA, 19 nt, Artificial Sequence
  Sense Oligo
gccaugcauuuugguguca

SEQ ID NO: 28396 - RNA, 19 nt, Artificial Sequence
  Antisense Oligo
ugacaccaaaaugcauggc

SEQ ID NO: 28397 - RNA, 19 nt, Artificial Sequence
  Sense Oligo
cauuuuggugucauauucc

SEQ ID NO: 28398 - RNA, 19 nt, Artificial Sequence
  Antisense Oligo
ggaauaugacaccaaaaug

SEQ ID NO: 28399 - RNA, 19 nt, Artificial Sequence
  Sense Oligo
uuuggugucauauuccauc

SEQ ID NO: 28400 - RNA, 19 nt, Artificial Sequence
  Antisense Oligo
gauggaauaugacaccaaa

SEQ ID NO: 28401 - RNA, 19 nt, Artificial Sequence
  Sense Oligo
uuggugucauauuccauca

SEQ ID NO: 28402 - RNA, 19 nt, Artificial Sequence
  Antisense Oligo
ugauggaauaugacaccaa

SEQ ID NO: 28403 - RNA, 19 nt, Artificial Sequence
  Sense Oligo
uggugucauauuccaucau

SEQ ID NO: 28404 - RNA, 19 nt, Artificial Sequence
  Antisense Oligo
augauggaauaugacacca

SEQ ID NO: 28405 - RNA, 19 nt, Artificial Sequence
  Sense Oligo
ggugucauauuccaucaug

SEQ ID NO: 28406 - RNA, 19 nt, Artificial Sequence
  Antisense Oligo
caugauggaauaugacacc

SEQ ID NO: 28407 - RNA, 19 nt, Artificial Sequence
  Sense Oligo
gugucauauuccaucaugg

SEQ ID NO: 28408 - RNA, 19 nt, Artificial Sequence
  Antisense Oligo
ccaugauggaauaugacac

SEQ ID NO: 28409 - RNA, 19 nt, Artificial Sequence
  Sense Oligo
uaggcuggagugcaaucau

SEQ ID NO: 28410 - RNA, 19 nt, Artificial Sequence
  Antisense Oligo
augauugcacuccagccua

SEQ ID NO: 28411 - RNA, 19 nt, Artificial Sequence
  Sense Oligo
aggcuggagugcaaucaug

SEQ ID NO: 28412 - RNA, 19 nt, Artificial Sequence
  Antisense Oligo
caugauugcacuccagccu

SEQ ID NO: 28413 - RNA, 19 nt, Artificial Sequence
  Sense Oligo
gacucacugcagccucaau

SEQ ID NO: 28414 - RNA, 19 nt, Artificial Sequence
  Antisense Oligo
auugaggcugcagugaguc

SEQ ID NO: 28415 - RNA, 19 nt, Artificial Sequence
  Sense Oligo
acucacugcagccucaauc

SEQ ID NO: 28416 - RNA, 19 nt, Artificial Sequence
  Antisense Oligo
gauugaggcugcagugagu

SEQ ID NO: 28417 - RNA, 19 nt, Artificial Sequence
  Sense Oligo
cucacugcagccucaaucu

SEQ ID NO: 28418 - RNA, 19 nt, Artificial Sequence
  Antisense Oligo
agauugaggcugcagugag

SEQ ID NO: 28419 - RNA, 19 nt, Artificial Sequence
  Sense Oligo
ucacugcagccucaaucuc

SEQ ID NO: 28420 - RNA, 19 nt, Artificial Sequence
  Antisense Oligo
gagauugaggcugcaguga

SEQ ID NO: 28421 - RNA, 19 nt, Artificial Sequence
  Sense Oligo
cacugcagccucaaucucc

SEQ ID NO: 28422 - RNA, 19 nt, Artificial Sequence
  Antisense Oligo
ggagauugaggcugcagug

SEQ ID NO: 28423 - RNA, 19 nt, Artificial Sequence
  Sense Oligo
acugcagccucaaucuccu

SEQ ID NO: 28424 - RNA, 19 nt, Artificial Sequence
  Antisense Oligo
aggagauugaggcugcagu

SEQ ID NO: 28425 - RNA, 19 nt, Artificial Sequence
  Sense Oligo
cugcagccucaaucuccug

SEQ ID NO: 28426 - RNA, 19 nt, Artificial Sequence
  Antisense Oligo
caggagauugaggcugcag

SEQ ID NO: 28427 - RNA, 19 nt, Artificial Sequence
  Sense Oligo
ucaaucuccugggccauca

SEQ ID NO: 28428 - RNA, 19 nt, Artificial Sequence
  Antisense Oligo
ugauggcccaggagauuga

SEQ ID NO: 28429 - RNA, 19 nt, Artificial Sequence
  Sense Oligo
caaucuccugggccaucau

SEQ ID NO: 28430 - RNA, 19 nt, Artificial Sequence
  Antisense Oligo
augauggcccaggagauug

SEQ ID NO: 28431 - RNA, 19 nt, Artificial Sequence
  Sense Oligo
aaucuccugggccaucaug

SEQ ID NO: 28432 - RNA, 19 nt, Artificial Sequence
  Antisense Oligo
caugauggcccaggagauu

SEQ ID NO: 28433 - RNA, 19 nt, Artificial Sequence
  Sense Oligo
aucuccugggccaucaugc

SEQ ID NO: 28434 - RNA, 19 nt, Artificial Sequence
  Antisense Oligo
gcaugauggcccaggagau

SEQ ID NO: 28435 - RNA, 19 nt, Artificial Sequence
  Sense Oligo
ucuccugggccaucaugcc

SEQ ID NO: 28436 - RNA, 19 nt, Artificial Sequence
  Antisense Oligo
ggcaugauggcccaggaga

SEQ ID NO: 28437 - RNA, 19 nt, Artificial Sequence
  Sense Oligo
caugcccagcuuuguuuau

SEQ ID NO: 28438 - RNA, 19 nt, Artificial Sequence
  Antisense Oligo
auaaacaaagcugggcaug

SEQ ID NO: 28439 - RNA, 19 nt, Artificial Sequence
  Sense Oligo
augcccagcuuuguuuauc

SEQ ID NO: 28440 - RNA, 19 nt, Artificial Sequence
  Antisense Oligo
gauaaacaaagcugggcau

SEQ ID NO: 28441 - RNA, 19 nt, Artificial Sequence
  Sense Oligo
ugcccagcuuuguuuaucu

SEQ ID NO: 28442 - RNA, 19 nt, Artificial Sequence
  Antisense Oligo
agauaaacaaagcugggca

SEQ ID NO: 28443 - RNA, 19 nt, Artificial Sequence
  Sense Oligo
cccagcuuuguuuaucuga

SEQ ID NO: 28444 - RNA, 19 nt, Artificial Sequence
  Antisense Oligo
ucagauaaacaaagcuggg

SEQ ID NO: 28445 - RNA, 19 nt, Artificial Sequence
  Sense Oligo
ccagcuuuguuuaucugag

SEQ ID NO: 28446 - RNA, 19 nt, Artificial Sequence
  Antisense Oligo
cucagauaaacaaagcugg

SEQ ID NO: 28447 - RNA, 19 nt, Artificial Sequence
  Sense Oligo
agucuugcucugucaccca

SEQ ID NO: 28448 - RNA, 19 nt, Artificial Sequence
  Antisense Oligo
ugggugacagagcaagacu

SEQ ID NO: 28449 - RNA, 19 nt, Artificial Sequence
  Sense Oligo
gugggaucacaggucaaug

SEQ ID NO: 28450 - RNA, 19 nt, Artificial Sequence
  Antisense Oligo
cauugaccugugaucccac

SEQ ID NO: 28451 - RNA, 19 nt, Artificial Sequence
  Sense Oligo
ugggaucacaggucaaugc

SEQ ID NO: 28452 - RNA, 19 nt, Artificial Sequence
  Antisense Oligo
gcauugaccugugauccca

SEQ ID NO: 28453 - RNA, 19 nt, Artificial Sequence
  Sense Oligo
ugguguugggauuucaggc

SEQ ID NO: 28454 - RNA, 19 nt, Artificial Sequence
  Antisense Oligo
gccugaaaucccaacacca

SEQ ID NO: 28455 - RNA, 19 nt, Artificial Sequence
  Sense Oligo
cccagccuugccacaucaa

SEQ ID NO: 28456 - RNA, 19 nt, Artificial Sequence
  Antisense Oligo
uugauguggcaaggcuggg

SEQ ID NO: 28457 - RNA, 19 nt, Artificial Sequence
  Sense Oligo
ccagccuugccacaucaac

SEQ ID NO: 28458 - RNA, 19 nt, Artificial Sequence
  Antisense Oligo
guugauguggcaaggcugg

SEQ ID NO: 28459 - RNA, 19 nt, Artificial Sequence
  Sense Oligo
cagccuugccacaucaacu

SEQ ID NO: 28460 - RNA, 19 nt, Artificial Sequence
  Antisense Oligo
aguugauguggcaaggcug

SEQ ID NO: 28461 - RNA, 19 nt, Artificial Sequence
  Sense Oligo
cuugccacaucaacuuaua

SEQ ID NO: 28462 - RNA, 19 nt, Artificial Sequence
  Antisense Oligo
uauaaguugauguggcaag

SEQ ID NO: 28463 - RNA, 19 nt, Artificial Sequence
  Sense Oligo
uugccacaucaacuuauag

SEQ ID NO: 28464 - RNA, 19 nt, Artificial Sequence
  Antisense Oligo
cuauaaguugauguggcaa

SEQ ID NO: 28465 - RNA, 19 nt, Artificial Sequence
  Sense Oligo
ugccacaucaacuuauagc

SEQ ID NO: 28466 - RNA, 19 nt, Artificial Sequence
  Antisense Oligo
gcuauaaguugauguggca

SEQ ID NO: 28467 - RNA, 19 nt, Artificial Sequence
  Sense Oligo
gccacaucaacuuauagcu

SEQ ID NO: 28468 - RNA, 19 nt, Artificial Sequence
  Antisense Oligo
agcuauaaguugauguggc

SEQ ID NO: 28469 - RNA, 19 nt, Artificial Sequence
  Sense Oligo
ccacaucaacuuauagcuu

SEQ ID NO: 28470 - RNA, 19 nt, Artificial Sequence
  Antisense Oligo
aagcuauaaguugaugugg

SEQ ID NO: 28471 - RNA, 19 nt, Artificial Sequence
  Sense Oligo
agcuuugcacuccaugcua

SEQ ID NO: 28472 - RNA, 19 nt, Artificial Sequence
  Antisense Oligo
uagcauggagugcaaagcu

SEQ ID NO: 28473 - RNA, 19 nt, Artificial Sequence
  Sense Oligo
gcuuugcacuccaugcuac

SEQ ID NO: 28474 - RNA, 19 nt, Artificial Sequence
  Antisense Oligo
guagcauggagugcaaagc

SEQ ID NO: 28475 - RNA, 19 nt, Artificial Sequence
  Sense Oligo
cuuugcacuccaugcuacg

SEQ ID NO: 28476 - RNA, 19 nt, Artificial Sequence
  Antisense Oligo
cguagcauggagugcaaag

SEQ ID NO: 28477 - RNA, 19 nt, Artificial Sequence
  Sense Oligo
gcacuccaugcuacguuug

SEQ ID NO: 28478 - RNA, 19 nt, Artificial Sequence
  Antisense Oligo
caaacguagcauggagugc

SEQ ID NO: 28479 - RNA, 19 nt, Artificial Sequence
  Sense Oligo
cacuccaugcuacguuuga

SEQ ID NO: 28480 - RNA, 19 nt, Artificial Sequence
  Antisense Oligo
ucaaacguagcauggagug

SEQ ID NO: 28481 - RNA, 19 nt, Artificial Sequence
  Sense Oligo
gaauaacuaaaauuuccgg

SEQ ID NO: 28482 - RNA, 19 nt, Artificial Sequence
  Antisense Oligo
ccggaaauuuuaguuauuc

SEQ ID NO: 28483 - RNA, 19 nt, Artificial Sequence
  Sense Oligo
aauaacuaaaauuuccggg

SEQ ID NO: 28484 - RNA, 19 nt, Artificial Sequence
  Antisense Oligo
cccggaaauuuuaguuauu

SEQ ID NO: 28485 - RNA, 19 nt, Artificial Sequence
  Sense Oligo
ggguaggaauuuuggauag

SEQ ID NO: 28486 - RNA, 19 nt, Artificial Sequence
  Antisense Oligo
cuauccaaaauuccuaccc

SEQ ID NO: 28487 - RNA, 19 nt, Artificial Sequence
  Sense Oligo
gguaggaauuuuggauagc

SEQ ID NO: 28488 - RNA, 19 nt, Artificial Sequence
  Antisense Oligo
gcuauccaaaauuccuacc

SEQ ID NO: 28489 - RNA, 19 nt, Artificial Sequence
  Sense Oligo
guaggaauuuuggauagcc

SEQ ID NO: 28490 - RNA, 19 nt, Artificial Sequence
  Antisense Oligo
ggcuauccaaaauuccuac

SEQ ID NO: 28491 - RNA, 19 nt, Artificial Sequence
  Sense Oligo
uaggaauuuuggauagcca

SEQ ID NO: 28492 - RNA, 19 nt, Artificial Sequence
  Antisense Oligo
uggcuauccaaaauuccua

SEQ ID NO: 28493 - RNA, 19 nt, Artificial Sequence
  Sense Oligo
auagccaaccguauccugu

SEQ ID NO: 28494 - RNA, 19 nt, Artificial Sequence
  Antisense Oligo
acaggauacgguuggcuau

SEQ ID NO: 28495 - RNA, 19 nt, Artificial Sequence
  Sense Oligo
uagccaaccguauccuguu

SEQ ID NO: 28496 - RNA, 19 nt, Artificial Sequence
  Antisense Oligo
aacaggauacgguuggcua

SEQ ID NO: 28497 - RNA, 19 nt, Artificial Sequence
  Sense Oligo
agccaaccguauccuguuc

SEQ ID NO: 28498 - RNA, 19 nt, Artificial Sequence
  Antisense Oligo
gaacaggauacgguuggcu

SEQ ID NO: 28499 - RNA, 19 nt, Artificial Sequence
  Sense Oligo
gccaaccguauccuguuca

SEQ ID NO: 28500 - RNA, 19 nt, Artificial Sequence
  Antisense Oligo
ugaacaggauacgguuggc

SEQ ID NO: 28501 - RNA, 19 nt, Artificial Sequence
  Sense Oligo
ccaaccguauccuguucau

SEQ ID NO: 28502 - RNA, 19 nt, Artificial Sequence
  Antisense Oligo
augaacaggauacgguugg

SEQ ID NO: 28503 - RNA, 19 nt, Artificial Sequence
  Sense Oligo
caaccguauccuguucauu

SEQ ID NO: 28504 - RNA, 19 nt, Artificial Sequence
  Antisense Oligo
aaugaacaggauacgguug

SEQ ID NO: 28505 - RNA, 19 nt, Artificial Sequence
  Sense Oligo
aaccguauccuguucauuc

SEQ ID NO: 28506 - RNA, 19 nt, Artificial Sequence
  Antisense Oligo
gaaugaacaggauacgguu

SEQ ID NO: 28507 - RNA, 19 nt, Artificial Sequence
  Sense Oligo
accguauccuguucauuca

SEQ ID NO: 28508 - RNA, 19 nt, Artificial Sequence
  Antisense Oligo
ugaaugaacaggauacggu

SEQ ID NO: 28509 - RNA, 19 nt, Artificial Sequence
  Sense Oligo
agacuugggucaugaccgc

SEQ ID NO: 28510 - RNA, 19 nt, Artificial Sequence
  Antisense Oligo
gcggucaugacccaagucu

SEQ ID NO: 28511 - RNA, 19 nt, Artificial Sequence
  Sense Oligo
gacuugggucaugaccgcg

SEQ ID NO: 28512 - RNA, 19 nt, Artificial Sequence
  Antisense Oligo
cgcggucaugacccaaguc

SEQ ID NO: 28513 - RNA, 19 nt, Artificial Sequence
  Sense Oligo
acuugggucaugaccgcgu

SEQ ID NO: 28514 - RNA, 19 nt, Artificial Sequence
  Antisense Oligo
acgcggucaugacccaagu

SEQ ID NO: 28515 - RNA, 19 nt, Artificial Sequence
  Sense Oligo
cuugggucaugaccgcguu

SEQ ID NO: 28516 - RNA, 19 nt, Artificial Sequence
  Antisense Oligo
aacgcggucaugacccaag

SEQ ID NO: 28517 - RNA, 19 nt, Artificial Sequence
  Sense Oligo
uugggucaugaccgcguuc

SEQ ID NO: 28518 - RNA, 19 nt, Artificial Sequence
  Antisense Oligo
gaacgcggucaugacccaa

SEQ ID NO: 28519 - RNA, 19 nt, Artificial Sequence
  Sense Oligo
ugggucaugaccgcguucu

SEQ ID NO: 28520 - RNA, 19 nt, Artificial Sequence
  Antisense Oligo
agaacgcggucaugaccca

SEQ ID NO: 28521 - RNA, 19 nt, Artificial Sequence
  Sense Oligo
gggucaugaccgcguucuu

SEQ ID NO: 28522 - RNA, 19 nt, Artificial Sequence
  Antisense Oligo
aagaacgcggucaugaccc

SEQ ID NO: 28523 - RNA, 19 nt, Artificial Sequence
  Sense Oligo
ggucaugaccgcguucuug

SEQ ID NO: 28524 - RNA, 19 nt, Artificial Sequence
  Antisense Oligo
caagaacgcggucaugacc

SEQ ID NO: 28525 - RNA, 19 nt, Artificial Sequence
  Sense Oligo
gucaugaccgcguucuugu

SEQ ID NO: 28526 - RNA, 19 nt, Artificial Sequence
  Antisense Oligo
acaagaacgcggucaugac

SEQ ID NO: 28527 - RNA, 19 nt, Artificial Sequence
  Sense Oligo
ucaugaccgcguucuuguu

SEQ ID NO: 28528 - RNA, 19 nt, Artificial Sequence
  Antisense Oligo
aacaagaacgcggucauga

SEQ ID NO: 28529 - RNA, 19 nt, Artificial Sequence
  Sense Oligo
ucuuguugaaggcauuguc

SEQ ID NO: 28530 - RNA, 19 nt, Artificial Sequence
  Antisense Oligo
gacaaugccuucaacaaga

SEQ ID NO: 28531 - RNA, 19 nt, Artificial Sequence
  Sense Oligo
cuuguugaaggcauugucu

SEQ ID NO: 28532 - RNA, 19 nt, Artificial Sequence
  Antisense Oligo
agacaaugccuucaacaag

SEQ ID NO: 28533 - RNA, 19 nt, Artificial Sequence
  Sense Oligo
uuguugaaggcauugucug

SEQ ID NO: 28534 - RNA, 19 nt, Artificial Sequence
  Antisense Oligo
cagacaaugccuucaacaa

SEQ ID NO: 28535 - RNA, 19 nt, Artificial Sequence
  Sense Oligo
uguugaaggcauugucugc

SEQ ID NO: 28536 - RNA, 19 nt, Artificial Sequence
  Antisense Oligo
gcagacaaugccuucaaca

SEQ ID NO: 28537 - RNA, 19 nt, Artificial Sequence
  Sense Oligo
gaaggcauugucugcauuu

SEQ ID NO: 28538 - RNA, 19 nt, Artificial Sequence
  Antisense Oligo
aaaugcagacaaugccuuc

SEQ ID NO: 28539 - RNA, 19 nt, Artificial Sequence
  Sense Oligo
aaggcauugucugcauuuc

SEQ ID NO: 28540 - RNA, 19 nt, Artificial Sequence
  Antisense Oligo
gaaaugcagacaaugccuu

SEQ ID NO: 28541 - RNA, 19 nt, Artificial Sequence
  Sense Oligo
aggcauugucugcauuucc

SEQ ID NO: 28542 - RNA, 19 nt, Artificial Sequence
  Antisense Oligo
ggaaaugcagacaaugccu

SEQ ID NO: 28543 - RNA, 19 nt, Artificial Sequence
  Sense Oligo
ggcauugucugcauuucca

SEQ ID NO: 28544 - RNA, 19 nt, Artificial Sequence
  Antisense Oligo
uggaaaugcagacaaugcc

SEQ ID NO: 28545 - RNA, 19 nt, Artificial Sequence
  Sense Oligo
gcauugucugcauuuccaa

SEQ ID NO: 28546 - RNA, 19 nt, Artificial Sequence
  Antisense Oligo
uuggaaaugcagacaaugc

SEQ ID NO: 28547 - RNA, 19 nt, Artificial Sequence
  Sense Oligo
cauugucugcauuuccaag

SEQ ID NO: 28548 - RNA, 19 nt, Artificial Sequence
  Antisense Oligo
cuuggaaaugcagacaaug

SEQ ID NO: 28549 - RNA, 19 nt, Artificial Sequence
  Sense Oligo
auugucugcauuuccaaga

SEQ ID NO: 28550 - RNA, 19 nt, Artificial Sequence
  Antisense Oligo
ucuuggaaaugcagacaau

SEQ ID NO: 28551 - RNA, 19 nt, Artificial Sequence
  Sense Oligo
auuuccaagaagcaccuag

SEQ ID NO: 28552 - RNA, 19 nt, Artificial Sequence
  Antisense Oligo
cuaggugcuucuuggaaau

SEQ ID NO: 28553 - RNA, 19 nt, Artificial Sequence
  Sense Oligo
uuuccaagaagcaccuaga

SEQ ID NO: 28554 - RNA, 19 nt, Artificial Sequence
  Antisense Oligo
ucuaggugcuucuuggaaa

SEQ ID NO: 28555 - RNA, 19 nt, Artificial Sequence
  Sense Oligo
uuccaagaagcaccuagau

SEQ ID NO: 28556 - RNA, 19 nt, Artificial Sequence
  Antisense Oligo
aucuaggugcuucuuggaa

SEQ ID NO: 28557 - RNA, 19 nt, Artificial Sequence
  Sense Oligo
uccaagaagcaccuagaua

SEQ ID NO: 28558 - RNA, 19 nt, Artificial Sequence
  Antisense Oligo
uaucuaggugcuucuugga

SEQ ID NO: 28559 - RNA, 19 nt, Artificial Sequence
  Sense Oligo
ccaagaagcaccuagauaa

SEQ ID NO: 28560 - RNA, 19 nt, Artificial Sequence
  Antisense Oligo
uuaucuaggugcuucuugg

SEQ ID NO: 28561 - RNA, 19 nt, Artificial Sequence
  Sense Oligo
caagaagcaccuagauaaa

SEQ ID NO: 28562 - RNA, 19 nt, Artificial Sequence
  Antisense Oligo
uuuaucuaggugcuucuug

SEQ ID NO: 28563 - RNA, 19 nt, Artificial Sequence
  Sense Oligo
aagaagcaccuagauaaau

SEQ ID NO: 28564 - RNA, 19 nt, Artificial Sequence
  Antisense Oligo
auuuaucuaggugcuucuu

SEQ ID NO: 28565 - RNA, 19 nt, Artificial Sequence
  Sense Oligo
agaagcaccuagauaaaua

SEQ ID NO: 28566 - RNA, 19 nt, Artificial Sequence
  Antisense Oligo
uauuuaucuaggugcuucu

SEQ ID NO: 28567 - RNA, 19 nt, Artificial Sequence
  Sense Oligo
agcaccuagauaaauacau

SEQ ID NO: 28568 - RNA, 19 nt, Artificial Sequence
  Antisense Oligo
auguauuuaucuaggugcu

SEQ ID NO: 28569 - RNA, 19 nt, Artificial Sequence
  Sense Oligo
gcaccuagauaaauacauu

SEQ ID NO: 28570 - RNA, 19 nt, Artificial Sequence
  Antisense Oligo
aauguauuuaucuaggugc

SEQ ID NO: 28571 - RNA, 19 nt, Artificial Sequence
  Sense Oligo
caccuagauaaauacauuc

SEQ ID NO: 28572 - RNA, 19 nt, Artificial Sequence
  Antisense Oligo
gaauguauuuaucuaggug

SEQ ID NO: 28573 - RNA, 19 nt, Artificial Sequence
  Sense Oligo
gggaaucuuuugaguauga

SEQ ID NO: 28574 - RNA, 19 nt, Artificial Sequence
  Antisense Oligo
ucauacucaaaagauuccc

SEQ ID NO: 28575 - RNA, 19 nt, Artificial Sequence
  Sense Oligo
ggaaucuuuugaguaugag

SEQ ID NO: 28576 - RNA, 19 nt, Artificial Sequence
  Antisense Oligo
cucauacucaaaagauucc

SEQ ID NO: 28577 - RNA, 19 nt, Artificial Sequence
  Sense Oligo
gaaucuuuugaguaugagu

SEQ ID NO: 28578 - RNA, 19 nt, Artificial Sequence
  Antisense Oligo
acucauacucaaaagauuc

SEQ ID NO: 28579 - RNA, 19 nt, Artificial Sequence
  Sense Oligo
aucuuuugaguaugaguuc

SEQ ID NO: 28580 - RNA, 19 nt, Artificial Sequence
  Antisense Oligo
gaacucauacucaaaagau

SEQ ID NO: 28581 - RNA, 19 nt, Artificial Sequence
  Sense Oligo
ugaguaugaguucauuuac

SEQ ID NO: 28582 - RNA, 19 nt, Artificial Sequence
  Antisense Oligo
guaaaugaacucauacuca

SEQ ID NO: 28583 - RNA, 19 nt, Artificial Sequence
  Sense Oligo
gaguaugaguucauuuaca

SEQ ID NO: 28584 - RNA, 19 nt, Artificial Sequence
  Antisense Oligo
uguaaaugaacucauacuc

SEQ ID NO: 28585 - RNA, 19 nt, Artificial Sequence
  Sense Oligo
cagaagaagggcgaguacg

SEQ ID NO: 28586 - RNA, 19 nt, Artificial Sequence
  Antisense Oligo
cguacucgcccuucuucug

SEQ ID NO: 28587 - RNA, 19 nt, Artificial Sequence
  Sense Oligo
agaagaagggcgaguacgu

SEQ ID NO: 28588 - RNA, 19 nt, Artificial Sequence
  Antisense Oligo
acguacucgcccuucuucu

SEQ ID NO: 28589 - RNA, 19 nt, Artificial Sequence
  Sense Oligo
gaagaagggcgaguacguc

SEQ ID NO: 28590 - RNA, 19 nt, Artificial Sequence
  Antisense Oligo
gacguacucgcccuucuuc

SEQ ID NO: 28591 - RNA, 19 nt, Artificial Sequence
  Sense Oligo
aagaagggcgaguacguca

SEQ ID NO: 28592 - RNA, 19 nt, Artificial Sequence
  Antisense Oligo
ugacguacucgcccuucuu

SEQ ID NO: 28593 - RNA, 19 nt, Artificial Sequence
  Sense Oligo
agaagggcgaguacgucaa

SEQ ID NO: 28594 - RNA, 19 nt, Artificial Sequence
  Antisense Oligo
uugacguacucgcccuucu

SEQ ID NO: 28595 - RNA, 19 nt, Artificial Sequence
  Sense Oligo
gaagggcgaguacgucaac

SEQ ID NO: 28596 - RNA, 19 nt, Artificial Sequence
  Antisense Oligo
guugacguacucgcccuuc

SEQ ID NO: 28597 - RNA, 19 nt, Artificial Sequence
  Sense Oligo
ggcgaguacgucaaccgcu

SEQ ID NO: 28598 - RNA, 19 nt, Artificial Sequence
  Antisense Oligo
agcgguugacguacucgcc

SEQ ID NO: 28599 - RNA, 19 nt, Artificial Sequence
  Sense Oligo
gcgaguacgucaaccgcug

SEQ ID NO: 28600 - RNA, 19 nt, Artificial Sequence
  Antisense Oligo
cagcgguugacguacucgc

SEQ ID NO: 28601 - RNA, 19 nt, Artificial Sequence
  Sense Oligo
cgaguacgucaaccgcugu

SEQ ID NO: 28602 - RNA, 19 nt, Artificial Sequence
  Antisense Oligo
acagcgguugacguacucg

SEQ ID NO: 28603 - RNA, 19 nt, Artificial Sequence
  Sense Oligo
gaguacgucaaccgcuguc

SEQ ID NO: 28604 - RNA, 19 nt, Artificial Sequence
  Antisense Oligo
gacagcgguugacguacuc

SEQ ID NO: 28605 - RNA, 19 nt, Artificial Sequence
  Sense Oligo
aguacgucaaccgcugucu

SEQ ID NO: 28606 - RNA, 19 nt, Artificial Sequence
  Antisense Oligo
agacagcgguugacguacu

SEQ ID NO: 28607 - RNA, 19 nt, Artificial Sequence
  Sense Oligo
guacgucaaccgcugucug

SEQ ID NO: 28608 - RNA, 19 nt, Artificial Sequence
  Antisense Oligo
cagacagcgguugacguac

SEQ ID NO: 28609 - RNA, 19 nt, Artificial Sequence
  Sense Oligo
uacgucaaccgcugucugu

SEQ ID NO: 28610 - RNA, 19 nt, Artificial Sequence
  Antisense Oligo
acagacagcgguugacgua

SEQ ID NO: 28611 - RNA, 19 nt, Artificial Sequence
  Sense Oligo
acgucaaccgcugucuguu

SEQ ID NO: 28612 - RNA, 19 nt, Artificial Sequence
  Antisense Oligo
aacagacagcgguugacgu

SEQ ID NO: 28613 - RNA, 19 nt, Artificial Sequence
  Sense Oligo
cgucaaccgcugucuguuc

SEQ ID NO: 28614 - RNA, 19 nt, Artificial Sequence
  Antisense Oligo
gaacagacagcgguugacg

SEQ ID NO: 28615 - RNA, 19 nt, Artificial Sequence
  Sense Oligo
gucaaccgcugucuguuca

SEQ ID NO: 28616 - RNA, 19 nt, Artificial Sequence
  Antisense Oligo
ugaacagacagcgguugac

SEQ ID NO: 28617 - RNA, 19 nt, Artificial Sequence
  Sense Oligo
ucaaccgcugucuguucau

SEQ ID NO: 28618 - RNA, 19 nt, Artificial Sequence
  Antisense Oligo
augaacagacagcgguuga

SEQ ID NO: 28619 - RNA, 19 nt, Artificial Sequence
  Sense Oligo
caaccgcugucuguucaua

SEQ ID NO: 28620 - RNA, 19 nt, Artificial Sequence
  Antisense Oligo
uaugaacagacagcgguug

SEQ ID NO: 28621 - RNA, 19 nt, Artificial Sequence
  Sense Oligo
aaccgcugucuguucauaa

SEQ ID NO: 28622 - RNA, 19 nt, Artificial Sequence
  Antisense Oligo
uuaugaacagacagcgguu

SEQ ID NO: 28623 - RNA, 19 nt, Artificial Sequence
  Sense Oligo
accgcugucuguucauaaa

SEQ ID NO: 28624 - RNA, 19 nt, Artificial Sequence
  Antisense Oligo
uuuaugaacagacagcggu

SEQ ID NO: 28625 - RNA, 19 nt, Artificial Sequence
  Sense Oligo
ccgcugucuguucauaaaa

SEQ ID NO: 28626 - RNA, 19 nt, Artificial Sequence
  Antisense Oligo
uuuuaugaacagacagcgg

SEQ ID NO: 28627 - RNA, 19 nt, Artificial Sequence
  Sense Oligo
cgcugucuguucauaaaau

SEQ ID NO: 28628 - RNA, 19 nt, Artificial Sequence
  Antisense Oligo
auuuuaugaacagacagcg

SEQ ID NO: 28629 - RNA, 19 nt, Artificial Sequence
  Sense Oligo
gcugucuguucauaaaauc

SEQ ID NO: 28630 - RNA, 19 nt, Artificial Sequence
  Antisense Oligo
gauuuuaugaacagacagc

SEQ ID NO: 28631 - RNA, 19 nt, Artificial Sequence
  Sense Oligo
cugucuguucauaaaaucu

SEQ ID NO: 28632 - RNA, 19 nt, Artificial Sequence
  Antisense Oligo
agauuuuaugaacagacag

SEQ ID NO: 28633 - RNA, 19 nt, Artificial Sequence
  Sense Oligo
gucuguucauaaaaucuuc

SEQ ID NO: 28634 - RNA, 19 nt, Artificial Sequence
  Antisense Oligo
gaagauuuuaugaacagac

SEQ ID NO: 28635 - RNA, 19 nt, Artificial Sequence
  Sense Oligo
cauaaaaucuucacuucug

SEQ ID NO: 28636 - RNA, 19 nt, Artificial Sequence
  Antisense Oligo
cagaagugaagauuuuaug

SEQ ID NO: 28637 - RNA, 19 nt, Artificial Sequence
  Sense Oligo
auaaaaucuucacuucugg

SEQ ID NO: 28638 - RNA, 19 nt, Artificial Sequence
  Antisense Oligo
ccagaagugaagauuuuau

SEQ ID NO: 28639 - RNA, 19 nt, Artificial Sequence
  Sense Oligo
uaaaaucuucacuucuggg

SEQ ID NO: 28640 - RNA, 19 nt, Artificial Sequence
  Antisense Oligo
cccagaagugaagauuuua

SEQ ID NO: 28641 - RNA, 19 nt, Artificial Sequence
  Sense Oligo
aaaaucuucacuucugggc

SEQ ID NO: 28642 - RNA, 19 nt, Artificial Sequence
  Antisense Oligo
gcccagaagugaagauuuu

SEQ ID NO: 28643 - RNA, 19 nt, Artificial Sequence
  Sense Oligo
aggagguaagucguggcag

SEQ ID NO: 28644 - RNA, 19 nt, Artificial Sequence
  Antisense Oligo
cugccacgacuuaccuccu

SEQ ID NO: 28645 - RNA, 19 nt, Artificial Sequence
  Sense Oligo
ggagguaagucguggcagc

SEQ ID NO: 28646 - RNA, 19 nt, Artificial Sequence
  Antisense Oligo
gcugccacgacuuaccucc

SEQ ID NO: 28647 - RNA, 19 nt, Artificial Sequence
  Sense Oligo
gagguaagucguggcagca

SEQ ID NO: 28648 - RNA, 19 nt, Artificial Sequence
  Antisense Oligo
ugcugccacgacuuaccuc

SEQ ID NO: 28649 - RNA, 19 nt, Artificial Sequence
  Sense Oligo
aagucguggcagcaggcug

SEQ ID NO: 28650 - RNA, 19 nt, Artificial Sequence
  Antisense Oligo
cagccugcugccacgacuu

SEQ ID NO: 28651 - RNA, 19 nt, Artificial Sequence
  Sense Oligo
agucguggcagcaggcugu

SEQ ID NO: 28652 - RNA, 19 nt, Artificial Sequence
  Antisense Oligo
acagccugcugccacgacu

SEQ ID NO: 28653 - RNA, 19 nt, Artificial Sequence
  Sense Oligo
ucguggcagcaggcugucu

SEQ ID NO: 28654 - RNA, 19 nt, Artificial Sequence
  Antisense Oligo
agacagccugcugccacga

SEQ ID NO: 28655 - RNA, 19 nt, Artificial Sequence
  Sense Oligo
gguacuggacgcgucucuc

SEQ ID NO: 28656 - RNA, 19 nt, Artificial Sequence
  Antisense Oligo
gagagacgcguccaguacc

SEQ ID NO: 28657 - RNA, 19 nt, Artificial Sequence
  Sense Oligo
guacuggacgcgucucucu

SEQ ID NO: 28658 - RNA, 19 nt, Artificial Sequence
  Antisense Oligo
agagagacgcguccaguac

SEQ ID NO: 28659 - RNA, 19 nt, Artificial Sequence
  Sense Oligo
uacuggacgcgucucucug

SEQ ID NO: 28660 - RNA, 19 nt, Artificial Sequence
  Antisense Oligo
cagagagacgcguccagua

SEQ ID NO: 28661 - RNA, 19 nt, Artificial Sequence
  Sense Oligo
acuggacgcgucucucugg

SEQ ID NO: 28662 - RNA, 19 nt, Artificial Sequence
  Antisense Oligo
ccagagagacgcguccagu

SEQ ID NO: 28663 - RNA, 19 nt, Artificial Sequence
  Sense Oligo
cuggacgcgucucucugga

SEQ ID NO: 28664 - RNA, 19 nt, Artificial Sequence
  Antisense Oligo
uccagagagacgcguccag

SEQ ID NO: 28665 - RNA, 19 nt, Artificial Sequence
  Sense Oligo
uggacgcgucucucuggag

SEQ ID NO: 28666 - RNA, 19 nt, Artificial Sequence
  Antisense Oligo
cuccagagagacgcgucca

SEQ ID NO: 28667 - RNA, 19 nt, Artificial Sequence
  Sense Oligo
gagcacagacuuugccugg

SEQ ID NO: 28668 - RNA, 19 nt, Artificial Sequence
  Antisense Oligo
ccaggcaaagucugugcuc

SEQ ID NO: 28669 - RNA, 19 nt, Artificial Sequence
  Sense Oligo
gcacagacuuugccugggc

SEQ ID NO: 28670 - RNA, 19 nt, Artificial Sequence
  Antisense Oligo
gcccaggcaaagucugugc

SEQ ID NO: 28671 - RNA, 19 nt, Artificial Sequence
  Sense Oligo
cacagacuuugccugggca

SEQ ID NO: 28672 - RNA, 19 nt, Artificial Sequence
  Antisense Oligo
ugcccaggcaaagucugug

SEQ ID NO: 28673 - RNA, 19 nt, Artificial Sequence
  Sense Oligo
uuugccugggcagugaggu

SEQ ID NO: 28674 - RNA, 19 nt, Artificial Sequence
  Antisense Oligo
accucacugcccaggcaaa

SEQ ID NO: 28675 - RNA, 19 nt, Artificial Sequence
  Sense Oligo
uugccugggcagugagguc

SEQ ID NO: 28676 - RNA, 19 nt, Artificial Sequence
  Antisense Oligo
gaccucacugcccaggcaa

SEQ ID NO: 28677 - RNA, 19 nt, Artificial Sequence
  Sense Oligo
ugggcagugagguccucuu

SEQ ID NO: 28678 - RNA, 19 nt, Artificial Sequence
  Antisense Oligo
aagaggaccucacugccca

SEQ ID NO: 28679 - RNA, 19 nt, Artificial Sequence
  Sense Oligo
gggcagugagguccucuuu

SEQ ID NO: 28680 - RNA, 19 nt, Artificial Sequence
  Antisense Oligo
aaagaggaccucacugccc

SEQ ID NO: 28681 - RNA, 19 nt, Artificial Sequence
  Sense Oligo
ggcagugagguccucuuug

SEQ ID NO: 28682 - RNA, 19 nt, Artificial Sequence
  Antisense Oligo
caaagaggaccucacugcc

SEQ ID NO: 28683 - RNA, 19 nt, Artificial Sequence
  Sense Oligo
gcagugagguccucuuugc

SEQ ID NO: 28684 - RNA, 19 nt, Artificial Sequence
  Antisense Oligo
gcaaagaggaccucacugc

SEQ ID NO: 28685 - RNA, 19 nt, Artificial Sequence
  Sense Oligo
cagugagguccucuuugcu

SEQ ID NO: 28686 - RNA, 19 nt, Artificial Sequence
  Antisense Oligo
agcaaagaggaccucacug

SEQ ID NO: 28687 - RNA, 19 nt, Artificial Sequence
  Sense Oligo
agugagguccucuuugcuc

SEQ ID NO: 28688 - RNA, 19 nt, Artificial Sequence
  Antisense Oligo
gagcaaagaggaccucacu

SEQ ID NO: 28689 - RNA, 19 nt, Artificial Sequence
  Sense Oligo
gugagguccucuuugcucu

SEQ ID NO: 28690 - RNA, 19 nt, Artificial Sequence
  Antisense Oligo
agagcaaagaggaccucac

SEQ ID NO: 28691 - RNA, 19 nt, Artificial Sequence
  Sense Oligo
ugagguccucuuugcucug

SEQ ID NO: 28692 - RNA, 19 nt, Artificial Sequence
  Antisense Oligo
cagagcaaagaggaccuca

SEQ ID NO: 28693 - RNA, 19 nt, Artificial Sequence
  Sense Oligo
cccagccuccagguucagu

SEQ ID NO: 28694 - RNA, 19 nt, Artificial Sequence
  Antisense Oligo
acugaaccuggaggcuggg

SEQ ID NO: 28695 - RNA, 19 nt, Artificial Sequence
  Sense Oligo
ccagccuccagguucagug

SEQ ID NO: 28696 - RNA, 19 nt, Artificial Sequence
  Antisense Oligo
cacugaaccuggaggcugg

SEQ ID NO: 28697 - RNA, 19 nt, Artificial Sequence
  Sense Oligo
cuccagguucagugacacu

SEQ ID NO: 28698 - RNA, 19 nt, Artificial Sequence
  Antisense Oligo
agugucacugaaccuggag

SEQ ID NO: 28699 - RNA, 19 nt, Artificial Sequence
  Sense Oligo
agugacacugacucugggu

SEQ ID NO: 28700 - RNA, 19 nt, Artificial Sequence
  Antisense Oligo
acccagagucagugucacu

SEQ ID NO: 28701 - RNA, 19 nt, Artificial Sequence
  Sense Oligo
gugacacugacucuggguu

SEQ ID NO: 28702 - RNA, 19 nt, Artificial Sequence
  Antisense Oligo
aacccagagucagugucac

SEQ ID NO: 28703 - RNA, 19 nt, Artificial Sequence
  Sense Oligo
ugacacugacucuggguug

SEQ ID NO: 28704 - RNA, 19 nt, Artificial Sequence
  Antisense Oligo
caacccagagucaguguca

SEQ ID NO: 28705 - RNA, 19 nt, Artificial Sequence
  Sense Oligo
gacacugacucuggguugu

SEQ ID NO: 28706 - RNA, 19 nt, Artificial Sequence
  Antisense Oligo
acaacccagagucaguguc

SEQ ID NO: 28707 - RNA, 19 nt, Artificial Sequence
  Sense Oligo
acacugacucuggguugug

SEQ ID NO: 28708 - RNA, 19 nt, Artificial Sequence
  Antisense Oligo
cacaacccagagucagugu

SEQ ID NO: 28709 - RNA, 19 nt, Artificial Sequence
  Sense Oligo
cacugacucuggguugugu

SEQ ID NO: 28710 - RNA, 19 nt, Artificial Sequence
  Antisense Oligo
acacaacccagagucagug

SEQ ID NO: 28711 - RNA, 19 nt, Artificial Sequence
  Sense Oligo
acugacucuggguuguguc

SEQ ID NO: 28712 - RNA, 19 nt, Artificial Sequence
  Antisense Oligo
gacacaacccagagucagu

SEQ ID NO: 28713 - RNA, 19 nt, Artificial Sequence
  Sense Oligo
ugacucuggguugugucuc

SEQ ID NO: 28714 - RNA, 19 nt, Artificial Sequence
  Antisense Oligo
gagacacaacccagaguca

SEQ ID NO: 28715 - RNA, 19 nt, Artificial Sequence
  Sense Oligo
gacucuggguugugucucu

SEQ ID NO: 28716 - RNA, 19 nt, Artificial Sequence
  Antisense Oligo
agagacacaacccagaguc

SEQ ID NO: 28717 - RNA, 19 nt, Artificial Sequence
  Sense Oligo
cucuggguugugucucugg

SEQ ID NO: 28718 - RNA, 19 nt, Artificial Sequence
  Antisense Oligo
ccagagacacaacccagag

SEQ ID NO: 28719 - RNA, 19 nt, Artificial Sequence
  Sense Oligo
ucuggguugugucucuggu

SEQ ID NO: 28720 - RNA, 19 nt, Artificial Sequence
  Antisense Oligo
accagagacacaacccaga

SEQ ID NO: 28721 - RNA, 19 nt, Artificial Sequence
  Sense Oligo
cuggguugugucucugguu

SEQ ID NO: 28722 - RNA, 19 nt, Artificial Sequence
  Antisense Oligo
aaccagagacacaacccag

SEQ ID NO: 28723 - RNA, 19 nt, Artificial Sequence
  Sense Oligo
uggguugugucucugguug

SEQ ID NO: 28724 - RNA, 19 nt, Artificial Sequence
  Antisense Oligo
caaccagagacacaaccca

SEQ ID NO: 28725 - RNA, 19 nt, Artificial Sequence
  Sense Oligo
ggguugugucucugguugg

SEQ ID NO: 28726 - RNA, 19 nt, Artificial Sequence
  Antisense Oligo
ccaaccagagacacaaccc

SEQ ID NO: 28727 - RNA, 19 nt, Artificial Sequence
  Sense Oligo
gguugugucucugguuggu

SEQ ID NO: 28728 - RNA, 19 nt, Artificial Sequence
  Antisense Oligo
accaaccagagacacaacc

SEQ ID NO: 28729 - RNA, 19 nt, Artificial Sequence
  Sense Oligo
guugugucucugguugguu

SEQ ID NO: 28730 - RNA, 19 nt, Artificial Sequence
  Antisense Oligo
aaccaaccagagacacaac

SEQ ID NO: 28731 - RNA, 19 nt, Artificial Sequence
  Sense Oligo
uugugucucugguugguua

SEQ ID NO: 28732 - RNA, 19 nt, Artificial Sequence
  Antisense Oligo
uaaccaaccagagacacaa

SEQ ID NO: 28733 - RNA, 19 nt, Artificial Sequence
  Sense Oligo
ugugucucugguugguuaa

SEQ ID NO: 28734 - RNA, 19 nt, Artificial Sequence
  Antisense Oligo
uuaaccaaccagagacaca

SEQ ID NO: 28735 - RNA, 19 nt, Artificial Sequence
  Sense Oligo
gugucucugguugguuaaa

SEQ ID NO: 28736 - RNA, 19 nt, Artificial Sequence
  Antisense Oligo
uuuaaccaaccagagacac

SEQ ID NO: 28737 - RNA, 19 nt, Artificial Sequence
  Sense Oligo
ugucucugguugguuaaag

SEQ ID NO: 28738 - RNA, 19 nt, Artificial Sequence
  Antisense Oligo
cuuuaaccaaccagagaca

SEQ ID NO: 28739 - RNA, 19 nt, Artificial Sequence
  Sense Oligo
gucucugguugguuaaaga

SEQ ID NO: 28740 - RNA, 19 nt, Artificial Sequence
  Antisense Oligo
ucuuuaaccaaccagagac

SEQ ID NO: 28741 - RNA, 19 nt, Artificial Sequence
  Sense Oligo
ucucugguugguuaaagau

SEQ ID NO: 28742 - RNA, 19 nt, Artificial Sequence
  Antisense Oligo
aucuuuaaccaaccagaga

SEQ ID NO: 28743 - RNA, 19 nt, Artificial Sequence
  Sense Oligo
cucugguugguuaaagaug

SEQ ID NO: 28744 - RNA, 19 nt, Artificial Sequence
  Antisense Oligo
caucuuuaaccaaccagag

SEQ ID NO: 28745 - RNA, 19 nt, Artificial Sequence
  Sense Oligo
ucugguugguuaaagaugu

SEQ ID NO: 28746 - RNA, 19 nt, Artificial Sequence
  Antisense Oligo
acaucuuuaaccaaccaga

SEQ ID NO: 28747 - RNA, 19 nt, Artificial Sequence
  Sense Oligo
cugguugguuaaagaugug

SEQ ID NO: 28748 - RNA, 19 nt, Artificial Sequence
  Antisense Oligo
cacaucuuuaaccaaccag

SEQ ID NO: 28749 - RNA, 19 nt, Artificial Sequence
  Sense Oligo
ugguugguuaaagaugugu

SEQ ID NO: 28750 - RNA, 19 nt, Artificial Sequence
  Antisense Oligo
acacaucuuuaaccaacca

SEQ ID NO: 28751 - RNA, 19 nt, Artificial Sequence
  Sense Oligo
gguugguuaaagauguguu

SEQ ID NO: 28752 - RNA, 19 nt, Artificial Sequence
  Antisense Oligo
aacacaucuuuaaccaacc

SEQ ID NO: 28753 - RNA, 19 nt, Artificial Sequence
  Sense Oligo
uugguuaaagauguguugg

SEQ ID NO: 28754 - RNA, 19 nt, Artificial Sequence
  Antisense Oligo
ccaacacaucuuuaaccaa

SEQ ID NO: 28755 - RNA, 19 nt, Artificial Sequence
  Sense Oligo
ugguuaaagauguguuggc

SEQ ID NO: 28756 - RNA, 19 nt, Artificial Sequence
  Antisense Oligo
gccaacacaucuuuaacca

SEQ ID NO: 28757 - RNA, 19 nt, Artificial Sequence
  Sense Oligo
gguuaaagauguguuggcu

SEQ ID NO: 28758 - RNA, 19 nt, Artificial Sequence
  Antisense Oligo
agccaacacaucuuuaacc

SEQ ID NO: 28759 - RNA, 19 nt, Artificial Sequence
  Sense Oligo
guuaaagauguguuggcuu

SEQ ID NO: 28760 - RNA, 19 nt, Artificial Sequence
  Antisense Oligo
aagccaacacaucuuuaac

SEQ ID NO: 28761 - RNA, 19 nt, Artificial Sequence
  Sense Oligo
uuaaagauguguuggcuuc

SEQ ID NO: 28762 - RNA, 19 nt, Artificial Sequence
  Antisense Oligo
gaagccaacacaucuuuaa

SEQ ID NO: 28763 - RNA, 19 nt, Artificial Sequence
  Sense Oligo
aaagauguguuggcuucuc

SEQ ID NO: 28764 - RNA, 19 nt, Artificial Sequence
  Antisense Oligo
gagaagccaacacaucuuu

SEQ ID NO: 28765 - RNA, 19 nt, Artificial Sequence
  Sense Oligo
aagauguguuggcuucucc

SEQ ID NO: 28766 - RNA, 19 nt, Artificial Sequence
  Antisense Oligo
ggagaagccaacacaucuu

SEQ ID NO: 28767 - RNA, 19 nt, Artificial Sequence
  Sense Oligo
agauguguuggcuucuccu

SEQ ID NO: 28768 - RNA, 19 nt, Artificial Sequence
  Antisense Oligo
aggagaagccaacacaucu

SEQ ID NO: 28769 - RNA, 19 nt, Artificial Sequence
  Sense Oligo
gauguguuggcuucuccuu

SEQ ID NO: 28770 - RNA, 19 nt, Artificial Sequence
  Antisense Oligo
aaggagaagccaacacauc

SEQ ID NO: 28771 - RNA, 19 nt, Artificial Sequence
  Sense Oligo
auguguuggcuucuccuuu

SEQ ID NO: 28772 - RNA, 19 nt, Artificial Sequence
  Antisense Oligo
aaaggagaagccaacacau

SEQ ID NO: 28773 - RNA, 19 nt, Artificial Sequence
  Sense Oligo
uguguuggcuucuccuuug

SEQ ID NO: 28774 - RNA, 19 nt, Artificial Sequence
  Antisense Oligo
caaaggagaagccaacaca

SEQ ID NO: 28775 - RNA, 19 nt, Artificial Sequence
  Sense Oligo
uggcuucuccuuugagcuc

SEQ ID NO: 28776 - RNA, 19 nt, Artificial Sequence
  Antisense Oligo
gagcucaaaggagaagcca

SEQ ID NO: 28777 - RNA, 19 nt, Artificial Sequence
  Sense Oligo
ugacuuaccuacucacuug

SEQ ID NO: 28778 - RNA, 19 nt, Artificial Sequence
  Antisense Oligo
caagugaguagguaaguca

SEQ ID NO: 28779 - RNA, 19 nt, Artificial Sequence
  Sense Oligo
gacuuaccuacucacuugc

SEQ ID NO: 28780 - RNA, 19 nt, Artificial Sequence
  Antisense Oligo
gcaagugaguagguaaguc

SEQ ID NO: 28781 - RNA, 19 nt, Artificial Sequence
  Sense Oligo
acuuaccuacucacuugca

SEQ ID NO: 28782 - RNA, 19 nt, Artificial Sequence
  Antisense Oligo
ugcaagugaguagguaagu

SEQ ID NO: 28783 - RNA, 19 nt, Artificial Sequence
  Sense Oligo
cuuaccuacucacuugcag

SEQ ID NO: 28784 - RNA, 19 nt, Artificial Sequence
  Antisense Oligo
cugcaagugaguagguaag

SEQ ID NO: 28785 - RNA, 19 nt, Artificial Sequence
  Sense Oligo
uuaccuacucacuugcagg

SEQ ID NO: 28786 - RNA, 19 nt, Artificial Sequence
  Antisense Oligo
ccugcaagugaguagguaa

SEQ ID NO: 28787 - RNA, 19 nt, Artificial Sequence
  Sense Oligo
uaccuacucacuugcagga

SEQ ID NO: 28788 - RNA, 19 nt, Artificial Sequence
  Antisense Oligo
uccugcaagugaguaggua

SEQ ID NO: 28789 - RNA, 19 nt, Artificial Sequence
  Sense Oligo
accuacucacuugcaggag

SEQ ID NO: 28790 - RNA, 19 nt, Artificial Sequence
  Antisense Oligo
cuccugcaagugaguaggu

SEQ ID NO: 28791 - RNA, 19 nt, Artificial Sequence
  Sense Oligo
ccuacucacuugcaggagg

SEQ ID NO: 28792 - RNA, 19 nt, Artificial Sequence
  Antisense Oligo
ccuccugcaagugaguagg

SEQ ID NO: 28793 - RNA, 19 nt, Artificial Sequence
  Sense Oligo
cuacucacuugcaggagga

SEQ ID NO: 28794 - RNA, 19 nt, Artificial Sequence
  Antisense Oligo
uccuccugcaagugaguag

SEQ ID NO: 28795 - RNA, 19 nt, Artificial Sequence
  Sense Oligo
uguuuguuuguuuucugag

SEQ ID NO: 28796 - RNA, 19 nt, Artificial Sequence
  Antisense Oligo
cucagaaaacaaacaaaca

SEQ ID NO: 28797 - RNA, 19 nt, Artificial Sequence
  Sense Oligo
cucaggcuggaguacagug

SEQ ID NO: 28798 - RNA, 19 nt, Artificial Sequence
  Antisense Oligo
cacuguacuccagccugag

SEQ ID NO: 28799 - RNA, 19 nt, Artificial Sequence
  Sense Oligo
ucaggcuggaguacagugg

SEQ ID NO: 28800 - RNA, 19 nt, Artificial Sequence
  Antisense Oligo
ccacuguacuccagccuga

SEQ ID NO: 28801 - RNA, 19 nt, Artificial Sequence
  Sense Oligo
caggcuggaguacaguggu

SEQ ID NO: 28802 - RNA, 19 nt, Artificial Sequence
  Antisense Oligo
accacuguacuccagccug

SEQ ID NO: 28803 - RNA, 19 nt, Artificial Sequence
  Sense Oligo
aggcuggaguacaguggug

SEQ ID NO: 28804 - RNA, 19 nt, Artificial Sequence
  Antisense Oligo
caccacuguacuccagccu

SEQ ID NO: 28805 - RNA, 19 nt, Artificial Sequence
  Sense Oligo
uggaguacaguggugcgau

SEQ ID NO: 28806 - RNA, 19 nt, Artificial Sequence
  Antisense Oligo
aucgcaccacuguacucca

SEQ ID NO: 28807 - RNA, 19 nt, Artificial Sequence
  Sense Oligo
ggaguacaguggugcgauc

SEQ ID NO: 28808 - RNA, 19 nt, Artificial Sequence
  Antisense Oligo
gaucgcaccacuguacucc

SEQ ID NO: 28809 - RNA, 19 nt, Artificial Sequence
  Sense Oligo
gaguacaguggugcgaucu

SEQ ID NO: 28810 - RNA, 19 nt, Artificial Sequence
  Antisense Oligo
agaucgcaccacuguacuc

SEQ ID NO: 28811 - RNA, 19 nt, Artificial Sequence
  Sense Oligo
aguacaguggugcgaucuc

SEQ ID NO: 28812 - RNA, 19 nt, Artificial Sequence
  Antisense Oligo
gagaucgcaccacuguacu

SEQ ID NO: 28813 - RNA, 19 nt, Artificial Sequence
  Sense Oligo
guacaguggugcgaucucg

SEQ ID NO: 28814 - RNA, 19 nt, Artificial Sequence
  Antisense Oligo
cgagaucgcaccacuguac

SEQ ID NO: 28815 - RNA, 19 nt, Artificial Sequence
  Sense Oligo
uacaguggugcgaucucgg

SEQ ID NO: 28816 - RNA, 19 nt, Artificial Sequence
  Antisense Oligo
ccgagaucgcaccacugua

SEQ ID NO: 28817 - RNA, 19 nt, Artificial Sequence
  Sense Oligo
acaguggugcgaucucggc

SEQ ID NO: 28818 - RNA, 19 nt, Artificial Sequence
  Antisense Oligo
gccgagaucgcaccacugu

SEQ ID NO: 28819 - RNA, 19 nt, Artificial Sequence
  Sense Oligo
caguggugcgaucucggcu

SEQ ID NO: 28820 - RNA, 19 nt, Artificial Sequence
  Antisense Oligo
agccgagaucgcaccacug

SEQ ID NO: 28821 - RNA, 19 nt, Artificial Sequence
  Sense Oligo
aguggugcgaucucggcuc

SEQ ID NO: 28822 - RNA, 19 nt, Artificial Sequence
  Antisense Oligo
gagccgagaucgcaccacu

SEQ ID NO: 28823 - RNA, 19 nt, Artificial Sequence
  Sense Oligo
guggugcgaucucggcuca

SEQ ID NO: 28824 - RNA, 19 nt, Artificial Sequence
  Antisense Oligo
ugagccgagaucgcaccac

SEQ ID NO: 28825 - RNA, 19 nt, Artificial Sequence
  Sense Oligo
uggugcgaucucggcucac

SEQ ID NO: 28826 - RNA, 19 nt, Artificial Sequence
  Antisense Oligo
gugagccgagaucgcacca

SEQ ID NO: 28827 - RNA, 19 nt, Artificial Sequence
  Sense Oligo
ggugcgaucucggcucacu

SEQ ID NO: 28828 - RNA, 19 nt, Artificial Sequence
  Antisense Oligo
agugagccgagaucgcacc

SEQ ID NO: 28829 - RNA, 19 nt, Artificial Sequence
  Sense Oligo
gugcgaucucggcucacug

SEQ ID NO: 28830 - RNA, 19 nt, Artificial Sequence
  Antisense Oligo
cagugagccgagaucgcac

SEQ ID NO: 28831 - RNA, 19 nt, Artificial Sequence
  Sense Oligo
ugcgaucucggcucacugc

SEQ ID NO: 28832 - RNA, 19 nt, Artificial Sequence
  Antisense Oligo
gcagugagccgagaucgca

SEQ ID NO: 28833 - RNA, 19 nt, Artificial Sequence
  Sense Oligo
gcgaucucggcucacugca

SEQ ID NO: 28834 - RNA, 19 nt, Artificial Sequence
  Antisense Oligo
ugcagugagccgagaucgc

SEQ ID NO: 28835 - RNA, 19 nt, Artificial Sequence
  Sense Oligo
cucagccucccgaguagcu

SEQ ID NO: 28836 - RNA, 19 nt, Artificial Sequence
  Antisense Oligo
agcuacucgggaggcugag

SEQ ID NO: 28837 - RNA, 19 nt, Artificial Sequence
  Sense Oligo
cccgaguagcugggauuac

SEQ ID NO: 28838 - RNA, 19 nt, Artificial Sequence
  Antisense Oligo
guaaucccagcuacucggg

SEQ ID NO: 28839 - RNA, 19 nt, Artificial Sequence
  Sense Oligo
ccgaguagcugggauuaca

SEQ ID NO: 28840 - RNA, 19 nt, Artificial Sequence
  Antisense Oligo
uguaaucccagcuacucgg

SEQ ID NO: 28841 - RNA, 19 nt, Artificial Sequence
  Sense Oligo
cgaguagcugggauuacag

SEQ ID NO: 28842 - RNA, 19 nt, Artificial Sequence
  Antisense Oligo
cuguaaucccagcuacucg

SEQ ID NO: 28843 - RNA, 19 nt, Artificial Sequence
  Sense Oligo
uagcugggauuacaggagc

SEQ ID NO: 28844 - RNA, 19 nt, Artificial Sequence
  Antisense Oligo
gcuccuguaaucccagcua

SEQ ID NO: 28845 - RNA, 19 nt, Artificial Sequence
  Sense Oligo
agcugggauuacaggagcc

SEQ ID NO: 28846 - RNA, 19 nt, Artificial Sequence
  Antisense Oligo
ggcuccuguaaucccagcu

SEQ ID NO: 28847 - RNA, 19 nt, Artificial Sequence
  Sense Oligo
gcugggauuacaggagccu

SEQ ID NO: 28848 - RNA, 19 nt, Artificial Sequence
  Antisense Oligo
aggcuccuguaaucccagc

SEQ ID NO: 28849 - RNA, 19 nt, Artificial Sequence
  Sense Oligo
agacaggguuucaccaugu

SEQ ID NO: 28850 - RNA, 19 nt, Artificial Sequence
  Antisense Oligo
acauggugaaacccugucu

SEQ ID NO: 28851 - RNA, 19 nt, Artificial Sequence
  Sense Oligo
gacaggguuucaccauguu

SEQ ID NO: 28852 - RNA, 19 nt, Artificial Sequence
  Antisense Oligo
aacauggugaaacccuguc

SEQ ID NO: 28853 - RNA, 19 nt, Artificial Sequence
  Sense Oligo
acaggguuucaccauguug

SEQ ID NO: 28854 - RNA, 19 nt, Artificial Sequence
  Antisense Oligo
caacauggugaaacccugu

SEQ ID NO: 28855 - RNA, 19 nt, Artificial Sequence
  Sense Oligo
caggguuucaccauguugg

SEQ ID NO: 28856 - RNA, 19 nt, Artificial Sequence
  Antisense Oligo
ccaacauggugaaacccug

SEQ ID NO: 28857 - RNA, 19 nt, Artificial Sequence
  Sense Oligo
aggguuucaccauguugga

SEQ ID NO: 28858 - RNA, 19 nt, Artificial Sequence
  Antisense Oligo
uccaacauggugaaacccu

SEQ ID NO: 28859 - RNA, 19 nt, Artificial Sequence
  Sense Oligo
ggguuucaccauguuggac

SEQ ID NO: 28860 - RNA, 19 nt, Artificial Sequence
  Antisense Oligo
guccaacauggugaaaccc

SEQ ID NO: 28861 - RNA, 19 nt, Artificial Sequence
  Sense Oligo
gguuucaccauguuggacc

SEQ ID NO: 28862 - RNA, 19 nt, Artificial Sequence
  Antisense Oligo
gguccaacauggugaaacc

SEQ ID NO: 28863 - RNA, 19 nt, Artificial Sequence
  Sense Oligo
guuucaccauguuggaccu

SEQ ID NO: 28864 - RNA, 19 nt, Artificial Sequence
  Antisense Oligo
agguccaacauggugaaac

SEQ ID NO: 28865 - RNA, 19 nt, Artificial Sequence
  Sense Oligo
uuucaccauguuggaccuu

SEQ ID NO: 28866 - RNA, 19 nt, Artificial Sequence
  Antisense Oligo
aagguccaacauggugaaa

SEQ ID NO: 28867 - RNA, 19 nt, Artificial Sequence
  Sense Oligo
uucaccauguuggaccuug

SEQ ID NO: 28868 - RNA, 19 nt, Artificial Sequence
  Antisense Oligo
caagguccaacauggugaa

SEQ ID NO: 28869 - RNA, 19 nt, Artificial Sequence
  Sense Oligo
ucaccauguuggaccuuga

SEQ ID NO: 28870 - RNA, 19 nt, Artificial Sequence
  Antisense Oligo
ucaagguccaacaugguga

SEQ ID NO: 28871 - RNA, 19 nt, Artificial Sequence
  Sense Oligo
caccauguuggaccuugac

SEQ ID NO: 28872 - RNA, 19 nt, Artificial Sequence
  Antisense Oligo
gucaagguccaacauggug

SEQ ID NO: 28873 - RNA, 19 nt, Artificial Sequence
  Sense Oligo
accauguuggaccuugacc

SEQ ID NO: 28874 - RNA, 19 nt, Artificial Sequence
  Antisense Oligo
ggucaagguccaacauggu

SEQ ID NO: 28875 - RNA, 19 nt, Artificial Sequence
  Sense Oligo
uguuggaccuugaccucag

SEQ ID NO: 28876 - RNA, 19 nt, Artificial Sequence
  Antisense Oligo
cugaggucaagguccaaca

SEQ ID NO: 28877 - RNA, 19 nt, Artificial Sequence
  Sense Oligo
guuggaccuugaccucagg

SEQ ID NO: 28878 - RNA, 19 nt, Artificial Sequence
  Antisense Oligo
ccugaggucaagguccaac

SEQ ID NO: 28879 - RNA, 19 nt, Artificial Sequence
  Sense Oligo
ccuugaccucaggugaucu

SEQ ID NO: 28880 - RNA, 19 nt, Artificial Sequence
  Antisense Oligo
agaucaccugaggucaagg

SEQ ID NO: 28881 - RNA, 19 nt, Artificial Sequence
  Sense Oligo
cuugaccucaggugaucug

SEQ ID NO: 28882 - RNA, 19 nt, Artificial Sequence
  Antisense Oligo
cagaucaccugaggucaag

SEQ ID NO: 28883 - RNA, 19 nt, Artificial Sequence
  Sense Oligo
uugaccucaggugaucugc

SEQ ID NO: 28884 - RNA, 19 nt, Artificial Sequence
  Antisense Oligo
gcagaucaccugaggucaa

SEQ ID NO: 28885 - RNA, 19 nt, Artificial Sequence
  Sense Oligo
ugaccucaggugaucugcc

SEQ ID NO: 28886 - RNA, 19 nt, Artificial Sequence
  Antisense Oligo
ggcagaucaccugagguca

SEQ ID NO: 28887 - RNA, 19 nt, Artificial Sequence
  Sense Oligo
gaccucaggugaucugccc

SEQ ID NO: 28888 - RNA, 19 nt, Artificial Sequence
  Antisense Oligo
gggcagaucaccugagguc

SEQ ID NO: 28889 - RNA, 19 nt, Artificial Sequence
  Sense Oligo
accucaggugaucugcccu

SEQ ID NO: 28890 - RNA, 19 nt, Artificial Sequence
  Antisense Oligo
agggcagaucaccugaggu

SEQ ID NO: 28891 - RNA, 19 nt, Artificial Sequence
  Sense Oligo
ccucaggugaucugcccuc

SEQ ID NO: 28892 - RNA, 19 nt, Artificial Sequence
  Antisense Oligo
gagggcagaucaccugagg

SEQ ID NO: 28893 - RNA, 19 nt, Artificial Sequence
  Sense Oligo
cucaggugaucugcccucc

SEQ ID NO: 28894 - RNA, 19 nt, Artificial Sequence
  Antisense Oligo
ggagggcagaucaccugag

SEQ ID NO: 28895 - RNA, 19 nt, Artificial Sequence
  Sense Oligo
cagaagaagggcugcggcu

SEQ ID NO: 28896 - RNA, 19 nt, Artificial Sequence
  Antisense Oligo
agccgcagcccuucuucug

SEQ ID NO: 28897 - RNA, 19 nt, Artificial Sequence
  Sense Oligo
agaagaagggcugcggcug

SEQ ID NO: 28898 - RNA, 19 nt, Artificial Sequence
  Antisense Oligo
cagccgcagcccuucuucu

SEQ ID NO: 28899 - RNA, 19 nt, Artificial Sequence
  Sense Oligo
agcaaaggccugggagcug

SEQ ID NO: 28900 - RNA, 19 nt, Artificial Sequence
  Antisense Oligo
cagcucccaggccuuugcu

SEQ ID NO: 28901 - RNA, 19 nt, Artificial Sequence
  Sense Oligo
aaaggccugggagcugggu

SEQ ID NO: 28902 - RNA, 19 nt, Artificial Sequence
  Antisense Oligo
acccagcucccaggccuuu

SEQ ID NO: 28903 - RNA, 19 nt, Artificial Sequence
  Sense Oligo
caagugcagugaccaggag

SEQ ID NO: 28904 - RNA, 19 nt, Artificial Sequence
  Antisense Oligo
cuccuggucacugcacuug

SEQ ID NO: 28905 - RNA, 19 nt, Artificial Sequence
  Sense Oligo
aagugcagugaccaggagg

SEQ ID NO: 28906 - RNA, 19 nt, Artificial Sequence
  Antisense Oligo
ccuccuggucacugcacuu

SEQ ID NO: 28907 - RNA, 19 nt, Artificial Sequence
  Sense Oligo
agugcagugaccaggaggc

SEQ ID NO: 28908 - RNA, 19 nt, Artificial Sequence
  Antisense Oligo
gccuccuggucacugcacu

SEQ ID NO: 28909 - RNA, 19 nt, Artificial Sequence
  Sense Oligo
ugcagugaccaggaggcca

SEQ ID NO: 28910 - RNA, 19 nt, Artificial Sequence
  Antisense Oligo
uggccuccuggucacugca

SEQ ID NO: 28911 - RNA, 19 nt, Artificial Sequence
  Sense Oligo
caggaggccacugggacuu

SEQ ID NO: 28912 - RNA, 19 nt, Artificial Sequence
  Antisense Oligo
aagucccaguggccuccug

SEQ ID NO: 28913 - RNA, 19 nt, Artificial Sequence
  Sense Oligo
aggccacugggacuugucc

SEQ ID NO: 28914 - RNA, 19 nt, Artificial Sequence
  Antisense Oligo
ggacaagucccaguggccu

SEQ ID NO: 28915 - RNA, 19 nt, Artificial Sequence
  Sense Oligo
ggacuugucccuucucuag

SEQ ID NO: 28916 - RNA, 19 nt, Artificial Sequence
  Antisense Oligo
cuagagaagggacaagucc

SEQ ID NO: 28917 - RNA, 19 nt, Artificial Sequence
  Sense Oligo
gacuugucccuucucuaga

SEQ ID NO: 28918 - RNA, 19 nt, Artificial Sequence
  Antisense Oligo
ucuagagaagggacaaguc

SEQ ID NO: 28919 - RNA, 19 nt, Artificial Sequence
  Sense Oligo
acuugucccuucucuagag

SEQ ID NO: 28920 - RNA, 19 nt, Artificial Sequence
  Antisense Oligo
cucuagagaagggacaagu

SEQ ID NO: 28921 - RNA, 19 nt, Artificial Sequence
  Sense Oligo
agauuuucagaugguugac

SEQ ID NO: 28922 - RNA, 19 nt, Artificial Sequence
  Antisense Oligo
gucaaccaucugaaaaucu

SEQ ID NO: 28923 - RNA, 19 nt, Artificial Sequence
  Sense Oligo
gauuuucagaugguugacu

SEQ ID NO: 28924 - RNA, 19 nt, Artificial Sequence
  Antisense Oligo
agucaaccaucugaaaauc

SEQ ID NO: 28925 - RNA, 19 nt, Artificial Sequence
  Sense Oligo
auuuucagaugguugacug

SEQ ID NO: 28926 - RNA, 19 nt, Artificial Sequence
  Antisense Oligo
cagucaaccaucugaaaau

SEQ ID NO: 28927 - RNA, 19 nt, Artificial Sequence
  Sense Oligo
uuuucagaugguugacugg

SEQ ID NO: 28928 - RNA, 19 nt, Artificial Sequence
  Antisense Oligo
ccagucaaccaucugaaaa

SEQ ID NO: 28929 - RNA, 19 nt, Artificial Sequence
  Sense Oligo
aggcuccugcuggcuguca

SEQ ID NO: 28930 - RNA, 19 nt, Artificial Sequence
  Antisense Oligo
ugacagccagcaggagccu

SEQ ID NO: 28931 - RNA, 19 nt, Artificial Sequence
  Sense Oligo
uccugcuggcugucauccu

SEQ ID NO: 28932 - RNA, 19 nt, Artificial Sequence
  Antisense Oligo
aggaugacagccagcagga

SEQ ID NO: 28933 - RNA, 19 nt, Artificial Sequence
  Sense Oligo
ccugcuggcugucauccuc

SEQ ID NO: 28934 - RNA, 19 nt, Artificial Sequence
  Antisense Oligo
gaggaugacagccagcagg

SEQ ID NO: 28935 - RNA, 19 nt, Artificial Sequence
  Sense Oligo
auccucagcacaucagccc

SEQ ID NO: 28936 - RNA, 19 nt, Artificial Sequence
  Antisense Oligo
gggcugaugugcugaggau

SEQ ID NO: 28937 - RNA, 19 nt, Artificial Sequence
  Sense Oligo
cccuucaugccucucucgg

SEQ ID NO: 28938 - RNA, 19 nt, Artificial Sequence
  Antisense Oligo
ccgagagaggcaugaaggg

SEQ ID NO: 28939 - RNA, 19 nt, Artificial Sequence
  Sense Oligo
ccuucaugccucucucggg

SEQ ID NO: 28940 - RNA, 19 nt, Artificial Sequence
  Antisense Oligo
cccgagagaggcaugaagg

SEQ ID NO: 28941 - RNA, 19 nt, Artificial Sequence
  Sense Oligo
cccaccuggguucucuguc

SEQ ID NO: 28942 - RNA, 19 nt, Artificial Sequence
  Antisense Oligo
gacagagaacccagguggg

SEQ ID NO: 28943 - RNA, 19 nt, Artificial Sequence
  Sense Oligo
ccaccuggguucucugucu

SEQ ID NO: 28944 - RNA, 19 nt, Artificial Sequence
  Antisense Oligo
agacagagaacccaggugg

SEQ ID NO: 28945 - RNA, 19 nt, Artificial Sequence
  Sense Oligo
caccuggguucucugucug

SEQ ID NO: 28946 - RNA, 19 nt, Artificial Sequence
  Antisense Oligo
cagacagagaacccaggug

SEQ ID NO: 28947 - RNA, 19 nt, Artificial Sequence
  Sense Oligo
accuggguucucugucugc

SEQ ID NO: 28948 - RNA, 19 nt, Artificial Sequence
  Antisense Oligo
gcagacagagaacccaggu

SEQ ID NO: 28949 - RNA, 19 nt, Artificial Sequence
  Sense Oligo
ccuggguucucugucugca

SEQ ID NO: 28950 - RNA, 19 nt, Artificial Sequence
  Antisense Oligo
ugcagacagagaacccagg

SEQ ID NO: 28951 - RNA, 19 nt, Artificial Sequence
  Sense Oligo
cuggguucucugucugcaa

SEQ ID NO: 28952 - RNA, 19 nt, Artificial Sequence
  Antisense Oligo
uugcagacagagaacccag

SEQ ID NO: 28953 - RNA, 19 nt, Artificial Sequence
  Sense Oligo
uggguucucugucugcaaa

SEQ ID NO: 28954 - RNA, 19 nt, Artificial Sequence
  Antisense Oligo
uuugcagacagagaaccca

SEQ ID NO: 28955 - RNA, 19 nt, Artificial Sequence
  Sense Oligo
gacuugacuguguugauca

SEQ ID NO: 28956 - RNA, 19 nt, Artificial Sequence
  Antisense Oligo
ugaucaacacagucaaguc

SEQ ID NO: 28957 - RNA, 19 nt, Artificial Sequence
  Sense Oligo
cuugacuguguugaucacc

SEQ ID NO: 28958 - RNA, 19 nt, Artificial Sequence
  Antisense Oligo
ggugaucaacacagucaag

SEQ ID NO: 28959 - RNA, 19 nt, Artificial Sequence
  Sense Oligo
uugacuguguugaucaccu

SEQ ID NO: 28960 - RNA, 19 nt, Artificial Sequence
  Antisense Oligo
aggugaucaacacagucaa

SEQ ID NO: 28961 - RNA, 19 nt, Artificial Sequence
  Sense Oligo
uguugaucaccuggacucc

SEQ ID NO: 28962 - RNA, 19 nt, Artificial Sequence
  Antisense Oligo
ggaguccaggugaucaaca

SEQ ID NO: 28963 - RNA, 19 nt, Artificial Sequence
  Sense Oligo
guugaucaccuggacuccc

SEQ ID NO: 28964 - RNA, 19 nt, Artificial Sequence
  Antisense Oligo
gggaguccaggugaucaac

SEQ ID NO: 28965 - RNA, 19 nt, Artificial Sequence
  Sense Oligo
gguuguugcuuucccuugg

SEQ ID NO: 28966 - RNA, 19 nt, Artificial Sequence
  Antisense Oligo
ccaagggaaagcaacaacc

SEQ ID NO: 28967 - RNA, 19 nt, Artificial Sequence
  Sense Oligo
guuguugcuuucccuuggc

SEQ ID NO: 28968 - RNA, 19 nt, Artificial Sequence
  Antisense Oligo
gccaagggaaagcaacaac

SEQ ID NO: 28969 - RNA, 19 nt, Artificial Sequence
  Sense Oligo
uuguugcuuucccuuggca

SEQ ID NO: 28970 - RNA, 19 nt, Artificial Sequence
  Antisense Oligo
ugccaagggaaagcaacaa

SEQ ID NO: 28971 - RNA, 19 nt, Artificial Sequence
  Sense Oligo
gcuuucccuuggcaaccag

SEQ ID NO: 28972 - RNA, 19 nt, Artificial Sequence
  Antisense Oligo
cugguugccaagggaaagc

SEQ ID NO: 28973 - RNA, 19 nt, Artificial Sequence
  Sense Oligo
acuguuuauguuguucaug

SEQ ID NO: 28974 - RNA, 19 nt, Artificial Sequence
  Antisense Oligo
caugaacaacauaaacagu

SEQ ID NO: 28975 - RNA, 19 nt, Artificial Sequence
  Sense Oligo
cuguuuauguuguucaugu

SEQ ID NO: 28976 - RNA, 19 nt, Artificial Sequence
  Antisense Oligo
acaugaacaacauaaacag

SEQ ID NO: 28977 - RNA, 19 nt, Artificial Sequence
  Sense Oligo
guuuauguuguucaugugu

SEQ ID NO: 28978 - RNA, 19 nt, Artificial Sequence
  Antisense Oligo
acacaugaacaacauaaac

SEQ ID NO: 28979 - RNA, 19 nt, Artificial Sequence
  Sense Oligo
uuauguuguucauguguug

SEQ ID NO: 28980 - RNA, 19 nt, Artificial Sequence
  Antisense Oligo
caacacaugaacaacauaa

SEQ ID NO: 28981 - RNA, 19 nt, Artificial Sequence
  Sense Oligo
uauguuguucauguguugu

SEQ ID NO: 28982 - RNA, 19 nt, Artificial Sequence
  Antisense Oligo
acaacacaugaacaacaua

SEQ ID NO: 28983 - RNA, 19 nt, Artificial Sequence
  Sense Oligo
auguuguucauguguuguu

SEQ ID NO: 28984 - RNA, 19 nt, Artificial Sequence
  Antisense Oligo
aacaacacaugaacaacau

SEQ ID NO: 28985 - RNA, 19 nt, Artificial Sequence
  Sense Oligo
uguuguucauguguuguuu

SEQ ID NO: 28986 - RNA, 19 nt, Artificial Sequence
  Antisense Oligo
aaacaacacaugaacaaca

SEQ ID NO: 28987 - RNA, 19 nt, Artificial Sequence
  Sense Oligo
guucauguguuguuuuagg

SEQ ID NO: 28988 - RNA, 19 nt, Artificial Sequence
  Antisense Oligo
ccuaaaacaacacaugaac

SEQ ID NO: 28989 - RNA, 19 nt, Artificial Sequence
  Sense Oligo
cauguguuguuuuaggcag

SEQ ID NO: 28990 - RNA, 19 nt, Artificial Sequence
  Antisense Oligo
cugccuaaaacaacacaug

SEQ ID NO: 28991 - RNA, 19 nt, Artificial Sequence
  Sense Oligo
agaauguaaauuuaguccc

SEQ ID NO: 28992 - RNA, 19 nt, Artificial Sequence
  Antisense Oligo
gggacuaaauuuacauucu

SEQ ID NO: 28993 - RNA, 19 nt, Artificial Sequence
  Sense Oligo
gaauguaaauuuagucccu

SEQ ID NO: 28994 - RNA, 19 nt, Artificial Sequence
  Antisense Oligo
agggacuaaauuuacauuc

SEQ ID NO: 28995 - RNA, 19 nt, Artificial Sequence
  Sense Oligo
aagacagaaguccuaagaa

SEQ ID NO: 28996 - RNA, 19 nt, Artificial Sequence
  Antisense Oligo
uucuuaggacuucugucuu

SEQ ID NO: 28997 - RNA, 19 nt, Artificial Sequence
  Sense Oligo
gaucucgcucugucaccca

SEQ ID NO: 28998 - RNA, 19 nt, Artificial Sequence
  Antisense Oligo
ugggugacagagcgagauc

SEQ ID NO: 28999 - RNA, 19 nt, Artificial Sequence
  Sense Oligo
aucucgcucugucacccaa

SEQ ID NO: 29000 - RNA, 19 nt, Artificial Sequence
  Antisense Oligo
uugggugacagagcgagau

SEQ ID NO: 29001 - RNA, 19 nt, Artificial Sequence
  Sense Oligo
ucucgcucugucacccaag

SEQ ID NO: 29002 - RNA, 19 nt, Artificial Sequence
  Antisense Oligo
cuugggugacagagcgaga

SEQ ID NO: 29003 - RNA, 19 nt, Artificial Sequence
  Sense Oligo
cucgcucugucacccaagc

SEQ ID NO: 29004 - RNA, 19 nt, Artificial Sequence
  Antisense Oligo
gcuugggugacagagcgag

SEQ ID NO: 29005 - RNA, 19 nt, Artificial Sequence
  Sense Oligo
ucgcucugucacccaagcu

SEQ ID NO: 29006 - RNA, 19 nt, Artificial Sequence
  Antisense Oligo
agcuugggugacagagcga

SEQ ID NO: 29007 - RNA, 19 nt, Artificial Sequence
  Sense Oligo
cgcucugucacccaagcug

SEQ ID NO: 29008 - RNA, 19 nt, Artificial Sequence
  Antisense Oligo
cagcuugggugacagagcg

SEQ ID NO: 29009 - RNA, 19 nt, Artificial Sequence
  Sense Oligo
ugcaguggcacgaucucgg

SEQ ID NO: 29010 - RNA, 19 nt, Artificial Sequence
  Antisense Oligo
ccgagaucgugccacugca

SEQ ID NO: 29011 - RNA, 19 nt, Artificial Sequence
  Sense Oligo
caguggcacgaucucggcu

SEQ ID NO: 29012 - RNA, 19 nt, Artificial Sequence
  Antisense Oligo
agccgagaucgugccacug

SEQ ID NO: 29013 - RNA, 19 nt, Artificial Sequence
  Sense Oligo
aguggcacgaucucggcuc

SEQ ID NO: 29014 - RNA, 19 nt, Artificial Sequence
  Antisense Oligo
gagccgagaucgugccacu

SEQ ID NO: 29015 - RNA, 19 nt, Artificial Sequence
  Sense Oligo
guggcacgaucucggcuca

SEQ ID NO: 29016 - RNA, 19 nt, Artificial Sequence
  Antisense Oligo
ugagccgagaucgugccac

SEQ ID NO: 29017 - RNA, 19 nt, Artificial Sequence
  Sense Oligo
uggcacgaucucggcucac

SEQ ID NO: 29018 - RNA, 19 nt, Artificial Sequence
  Antisense Oligo
gugagccgagaucgugcca

SEQ ID NO: 29019 - RNA, 19 nt, Artificial Sequence
  Sense Oligo
ggcacgaucucggcucacu

SEQ ID NO: 29020 - RNA, 19 nt, Artificial Sequence
  Antisense Oligo
agugagccgagaucgugcc

SEQ ID NO: 29021 - RNA, 19 nt, Artificial Sequence
  Sense Oligo
gcacgaucucggcucacua

SEQ ID NO: 29022 - RNA, 19 nt, Artificial Sequence
  Antisense Oligo
uagugagccgagaucgugc

SEQ ID NO: 29023 - RNA, 19 nt, Artificial Sequence
  Sense Oligo
gaucucggcucacuacagc

SEQ ID NO: 29024 - RNA, 19 nt, Artificial Sequence
  Antisense Oligo
gcuguagugagccgagauc

SEQ ID NO: 29025 - RNA, 19 nt, Artificial Sequence
  Sense Oligo
agacuggucuugcuguguu

SEQ ID NO: 29026 - RNA, 19 nt, Artificial Sequence
  Antisense Oligo
aacacagcaagaccagucu

SEQ ID NO: 29027 - RNA, 19 nt, Artificial Sequence
  Sense Oligo
aacuccugggcucaagcaa

SEQ ID NO: 29028 - RNA, 19 nt, Artificial Sequence
  Antisense Oligo
uugcuugagcccaggaguu

SEQ ID NO: 29029 - RNA, 19 nt, Artificial Sequence
  Sense Oligo
acuccugggcucaagcaau

SEQ ID NO: 29030 - RNA, 19 nt, Artificial Sequence
  Antisense Oligo
auugcuugagcccaggagu

SEQ ID NO: 29031 - RNA, 19 nt, Artificial Sequence
  Sense Oligo
cuccugggcucaagcaauc

SEQ ID NO: 29032 - RNA, 19 nt, Artificial Sequence
  Antisense Oligo
gauugcuugagcccaggag

SEQ ID NO: 29033 - RNA, 19 nt, Artificial Sequence
  Sense Oligo
uccugggcucaagcaaucc

SEQ ID NO: 29034 - RNA, 19 nt, Artificial Sequence
  Antisense Oligo
ggauugcuugagcccagga

SEQ ID NO: 29035 - RNA, 19 nt, Artificial Sequence
  Sense Oligo
ccugggcucaagcaauccg

SEQ ID NO: 29036 - RNA, 19 nt, Artificial Sequence
  Antisense Oligo
cggauugcuugagcccagg

SEQ ID NO: 29037 - RNA, 19 nt, Artificial Sequence
  Sense Oligo
cugggcucaagcaauccgc

SEQ ID NO: 29038 - RNA, 19 nt, Artificial Sequence
  Antisense Oligo
gcggauugcuugagcccag

SEQ ID NO: 29039 - RNA, 19 nt, Artificial Sequence
  Sense Oligo
ccaaagugcugggauuaag

SEQ ID NO: 29040 - RNA, 19 nt, Artificial Sequence
  Antisense Oligo
cuuaaucccagcacuuugg

SEQ ID NO: 29041 - RNA, 19 nt, Artificial Sequence
  Sense Oligo
caaagugcugggauuaaga

SEQ ID NO: 29042 - RNA, 19 nt, Artificial Sequence
  Antisense Oligo
ucuuaaucccagcacuuug

SEQ ID NO: 29043 - RNA, 19 nt, Artificial Sequence
  Sense Oligo
aaagaauaggcauuagucc

SEQ ID NO: 29044 - RNA, 19 nt, Artificial Sequence
  Antisense Oligo
ggacuaaugccuauucuuu

SEQ ID NO: 29045 - RNA, 19 nt, Artificial Sequence
  Sense Oligo
aaauauggaauuccugcuc

SEQ ID NO: 29046 - RNA, 19 nt, Artificial Sequence
  Antisense Oligo
gagcaggaauuccauauuu

SEQ ID NO: 29047 - RNA, 19 nt, Artificial Sequence
  Sense Oligo
aauauggaauuccugcucu

SEQ ID NO: 29048 - RNA, 19 nt, Artificial Sequence
  Antisense Oligo
agagcaggaauuccauauu

SEQ ID NO: 29049 - RNA, 19 nt, Artificial Sequence
  Sense Oligo
auauggaauuccugcucug

SEQ ID NO: 29050 - RNA, 19 nt, Artificial Sequence
  Antisense Oligo
cagagcaggaauuccauau

SEQ ID NO: 29051 - RNA, 19 nt, Artificial Sequence
  Sense Oligo
uauggaauuccugcucuga

SEQ ID NO: 29052 - RNA, 19 nt, Artificial Sequence
  Antisense Oligo
ucagagcaggaauuccaua

SEQ ID NO: 29053 - RNA, 19 nt, Artificial Sequence
  Sense Oligo
auggaauuccugcucugau

SEQ ID NO: 29054 - RNA, 19 nt, Artificial Sequence
  Antisense Oligo
aucagagcaggaauuccau

SEQ ID NO: 29055 - RNA, 19 nt, Artificial Sequence
  Sense Oligo
auuccugcucugauaaaug

SEQ ID NO: 29056 - RNA, 19 nt, Artificial Sequence
  Antisense Oligo
cauuuaucagagcaggaau

SEQ ID NO: 29057 - RNA, 19 nt, Artificial Sequence
  Sense Oligo
uuccugcucugauaaaugc

SEQ ID NO: 29058 - RNA, 19 nt, Artificial Sequence
  Antisense Oligo
gcauuuaucagagcaggaa

SEQ ID NO: 29059 - RNA, 19 nt, Artificial Sequence
  Sense Oligo
uccugcucugauaaaugcc

SEQ ID NO: 29060 - RNA, 19 nt, Artificial Sequence
  Antisense Oligo
ggcauuuaucagagcagga

SEQ ID NO: 29061 - RNA, 19 nt, Artificial Sequence
  Sense Oligo
ccugcucugauaaaugcca

SEQ ID NO: 29062 - RNA, 19 nt, Artificial Sequence
  Antisense Oligo
uggcauuuaucagagcagg

SEQ ID NO: 29063 - RNA, 19 nt, Artificial Sequence
  Sense Oligo
cucugauaaaugccauggc

SEQ ID NO: 29064 - RNA, 19 nt, Artificial Sequence
  Antisense Oligo
gccauggcauuuaucagag

SEQ ID NO: 29065 - RNA, 19 nt, Artificial Sequence
  Sense Oligo
ucugauaaaugccauggca

SEQ ID NO: 29066 - RNA, 19 nt, Artificial Sequence
  Antisense Oligo
ugccauggcauuuaucaga

SEQ ID NO: 29067 - RNA, 19 nt, Artificial Sequence
  Sense Oligo
cauggcauugauggcucgg

SEQ ID NO: 29068 - RNA, 19 nt, Artificial Sequence
  Antisense Oligo
ccgagccaucaaugccaug

SEQ ID NO: 29069 - RNA, 19 nt, Artificial Sequence
  Sense Oligo
auggcauugauggcucggu

SEQ ID NO: 29070 - RNA, 19 nt, Artificial Sequence
  Antisense Oligo
accgagccaucaaugccau

SEQ ID NO: 29071 - RNA, 19 nt, Artificial Sequence
  Sense Oligo
uggcauugauggcucgguu

SEQ ID NO: 29072 - RNA, 19 nt, Artificial Sequence
  Antisense Oligo
aaccgagccaucaaugcca

SEQ ID NO: 29073 - RNA, 19 nt, Artificial Sequence
  Sense Oligo
ggcauugauggcucgguua

SEQ ID NO: 29074 - RNA, 19 nt, Artificial Sequence
  Antisense Oligo
uaaccgagccaucaaugcc

SEQ ID NO: 29075 - RNA, 19 nt, Artificial Sequence
  Sense Oligo
gcauugauggcucgguuaa

SEQ ID NO: 29076 - RNA, 19 nt, Artificial Sequence
  Antisense Oligo
uuaaccgagccaucaaugc

SEQ ID NO: 29077 - RNA, 19 nt, Artificial Sequence
  Sense Oligo
cauugauggcucgguuaaa

SEQ ID NO: 29078 - RNA, 19 nt, Artificial Sequence
  Antisense Oligo
uuuaaccgagccaucaaug

SEQ ID NO: 29079 - RNA, 19 nt, Artificial Sequence
  Sense Oligo
auugauggcucgguuaaaa

SEQ ID NO: 29080 - RNA, 19 nt, Artificial Sequence
  Antisense Oligo
uuuuaaccgagccaucaau

SEQ ID NO: 29081 - RNA, 19 nt, Artificial Sequence
  Sense Oligo
uugauggcucgguuaaaag

SEQ ID NO: 29082 - RNA, 19 nt, Artificial Sequence
  Antisense Oligo
cuuuuaaccgagccaucaa

SEQ ID NO: 29083 - RNA, 19 nt, Artificial Sequence
  Sense Oligo
ugauggcucgguuaaaagg

SEQ ID NO: 29084 - RNA, 19 nt, Artificial Sequence
  Antisense Oligo
ccuuuuaaccgagccauca

SEQ ID NO: 29085 - RNA, 19 nt, Artificial Sequence
  Sense Oligo
gauggcucgguuaaaaggg

SEQ ID NO: 29086 - RNA, 19 nt, Artificial Sequence
  Antisense Oligo
cccuuuuaaccgagccauc

SEQ ID NO: 29087 - RNA, 19 nt, Artificial Sequence
  Sense Oligo
auggcucgguuaaaagggc

SEQ ID NO: 29088 - RNA, 19 nt, Artificial Sequence
  Antisense Oligo
gcccuuuuaaccgagccau

SEQ ID NO: 29089 - RNA, 19 nt, Artificial Sequence
  Sense Oligo
cucgguuaaaagggcacgu

SEQ ID NO: 29090 - RNA, 19 nt, Artificial Sequence
  Antisense Oligo
acgugcccuuuuaaccgag

SEQ ID NO: 29091 - RNA, 19 nt, Artificial Sequence
  Sense Oligo
ucgguuaaaagggcacgug

SEQ ID NO: 29092 - RNA, 19 nt, Artificial Sequence
  Antisense Oligo
cacgugcccuuuuaaccga

SEQ ID NO: 29093 - RNA, 19 nt, Artificial Sequence
  Sense Oligo
cgguuaaaagggcacgugg

SEQ ID NO: 29094 - RNA, 19 nt, Artificial Sequence
  Antisense Oligo
ccacgugcccuuuuaaccg

SEQ ID NO: 29095 - RNA, 19 nt, Artificial Sequence
  Sense Oligo
gguuaaaagggcacguggu

SEQ ID NO: 29096 - RNA, 19 nt, Artificial Sequence
  Antisense Oligo
accacgugcccuuuuaacc

SEQ ID NO: 29097 - RNA, 19 nt, Artificial Sequence
  Sense Oligo
guuaaaagggcacguggug

SEQ ID NO: 29098 - RNA, 19 nt, Artificial Sequence
  Antisense Oligo
caccacgugcccuuuuaac

SEQ ID NO: 29099 - RNA, 19 nt, Artificial Sequence
  Sense Oligo
uuaaaagggcacguggugg

SEQ ID NO: 29100 - RNA, 19 nt, Artificial Sequence
  Antisense Oligo
ccaccacgugcccuuuuaa

SEQ ID NO: 29101 - RNA, 19 nt, Artificial Sequence
  Sense Oligo
uaaaagggcacgugguggc

SEQ ID NO: 29102 - RNA, 19 nt, Artificial Sequence
  Antisense Oligo
gccaccacgugcccuuuua

SEQ ID NO: 29103 - RNA, 19 nt, Artificial Sequence
  Sense Oligo
aaaagggcacgugguggcu

SEQ ID NO: 29104 - RNA, 19 nt, Artificial Sequence
  Antisense Oligo
agccaccacgugcccuuuu

SEQ ID NO: 29105 - RNA, 19 nt, Artificial Sequence
  Sense Oligo
gugguggcucacgccugua

SEQ ID NO: 29106 - RNA, 19 nt, Artificial Sequence
  Antisense Oligo
uacaggcgugagccaccac

SEQ ID NO: 29107 - RNA, 19 nt, Artificial Sequence
  Sense Oligo
ugguggcucacgccuguaa

SEQ ID NO: 29108 - RNA, 19 nt, Artificial Sequence
  Antisense Oligo
uuacaggcgugagccacca

SEQ ID NO: 29109 - RNA, 19 nt, Artificial Sequence
  Sense Oligo
gguggcucacgccuguaau

SEQ ID NO: 29110 - RNA, 19 nt, Artificial Sequence
  Antisense Oligo
auuacaggcgugagccacc

SEQ ID NO: 29111 - RNA, 19 nt, Artificial Sequence
  Sense Oligo
guggcucacgccuguaauc

SEQ ID NO: 29112 - RNA, 19 nt, Artificial Sequence
  Antisense Oligo
gauuacaggcgugagccac

SEQ ID NO: 29113 - RNA, 19 nt, Artificial Sequence
  Sense Oligo
uggcucacgccuguaaucc

SEQ ID NO: 29114 - RNA, 19 nt, Artificial Sequence
  Antisense Oligo
ggauuacaggcgugagcca

SEQ ID NO: 29115 - RNA, 19 nt, Artificial Sequence
  Sense Oligo
ggcucacgccuguaauccc

SEQ ID NO: 29116 - RNA, 19 nt, Artificial Sequence
  Antisense Oligo
gggauuacaggcgugagcc

SEQ ID NO: 29117 - RNA, 19 nt, Artificial Sequence
  Sense Oligo
acgccuguaaucccagcau

SEQ ID NO: 29118 - RNA, 19 nt, Artificial Sequence
  Antisense Oligo
augcugggauuacaggcgu

SEQ ID NO: 29119 - RNA, 19 nt, Artificial Sequence
  Sense Oligo
cgccuguaaucccagcauu

SEQ ID NO: 29120 - RNA, 19 nt, Artificial Sequence
  Antisense Oligo
aaugcugggauuacaggcg

SEQ ID NO: 29121 - RNA, 19 nt, Artificial Sequence
  Sense Oligo
gccuguaaucccagcauuu

SEQ ID NO: 29122 - RNA, 19 nt, Artificial Sequence
  Antisense Oligo
aaaugcugggauuacaggc

SEQ ID NO: 29123 - RNA, 19 nt, Artificial Sequence
  Sense Oligo
ccuguaaucccagcauuuu

SEQ ID NO: 29124 - RNA, 19 nt, Artificial Sequence
  Antisense Oligo
aaaaugcugggauuacagg

SEQ ID NO: 29125 - RNA, 19 nt, Artificial Sequence
  Sense Oligo
cuguaaucccagcauuuug

SEQ ID NO: 29126 - RNA, 19 nt, Artificial Sequence
  Antisense Oligo
caaaaugcugggauuacag

SEQ ID NO: 29127 - RNA, 19 nt, Artificial Sequence
  Sense Oligo
uguaaucccagcauuuugg

SEQ ID NO: 29128 - RNA, 19 nt, Artificial Sequence
  Antisense Oligo
ccaaaaugcugggauuaca

SEQ ID NO: 29129 - RNA, 19 nt, Artificial Sequence
  Sense Oligo
ccagcauuuugggaggccg

SEQ ID NO: 29130 - RNA, 19 nt, Artificial Sequence
  Antisense Oligo
cggccucccaaaaugcugg

SEQ ID NO: 29131 - RNA, 19 nt, Artificial Sequence
  Sense Oligo
cagcauuuugggaggccga

SEQ ID NO: 29132 - RNA, 19 nt, Artificial Sequence
  Antisense Oligo
ucggccucccaaaaugcug

SEQ ID NO: 29133 - RNA, 19 nt, Artificial Sequence
  Sense Oligo
agcauuuugggaggccgag

SEQ ID NO: 29134 - RNA, 19 nt, Artificial Sequence
  Antisense Oligo
cucggccucccaaaaugcu

SEQ ID NO: 29135 - RNA, 19 nt, Artificial Sequence
  Sense Oligo
gcauuuugggaggccgagg

SEQ ID NO: 29136 - RNA, 19 nt, Artificial Sequence
  Antisense Oligo
ccucggccucccaaaaugc

SEQ ID NO: 29137 - RNA, 19 nt, Artificial Sequence
  Sense Oligo
cauuuugggaggccgaggc

SEQ ID NO: 29138 - RNA, 19 nt, Artificial Sequence
  Antisense Oligo
gccucggccucccaaaaug

SEQ ID NO: 29139 - RNA, 19 nt, Artificial Sequence
  Sense Oligo
auuuugggaggccgaggcg

SEQ ID NO: 29140 - RNA, 19 nt, Artificial Sequence
  Antisense Oligo
cgccucggccucccaaaau

SEQ ID NO: 29141 - RNA, 19 nt, Artificial Sequence
  Sense Oligo
gcgccuguagucccagcua

SEQ ID NO: 29142 - RNA, 19 nt, Artificial Sequence
  Antisense Oligo
uagcugggacuacaggcgc

SEQ ID NO: 29143 - RNA, 19 nt, Artificial Sequence
  Sense Oligo
agugagccaagaucgugcc

SEQ ID NO: 29144 - RNA, 19 nt, Artificial Sequence
  Antisense Oligo
ggcacgaucuuggcucacu

SEQ ID NO: 29145 - RNA, 19 nt, Artificial Sequence
  Sense Oligo
gugagccaagaucgugcca

SEQ ID NO: 29146 - RNA, 19 nt, Artificial Sequence
  Antisense Oligo
uggcacgaucuuggcucac

SEQ ID NO: 29147 - RNA, 19 nt, Artificial Sequence
  Sense Oligo
ugagccaagaucgugccac

SEQ ID NO: 29148 - RNA, 19 nt, Artificial Sequence
  Antisense Oligo
guggcacgaucuuggcuca

SEQ ID NO: 29149 - RNA, 19 nt, Artificial Sequence
  Sense Oligo
gagccaagaucgugccacu

SEQ ID NO: 29150 - RNA, 19 nt, Artificial Sequence
  Antisense Oligo
aguggcacgaucuuggcuc

SEQ ID NO: 29151 - RNA, 19 nt, Artificial Sequence
  Sense Oligo
ggaggucggcagaagcuuc

SEQ ID NO: 29152 - RNA, 19 nt, Artificial Sequence
  Antisense Oligo
gaagcuucugccgaccucc

SEQ ID NO: 29153 - RNA, 19 nt, Artificial Sequence
  Sense Oligo
gaggucggcagaagcuucc

SEQ ID NO: 29154 - RNA, 19 nt, Artificial Sequence
  Antisense Oligo
ggaagcuucugccgaccuc

SEQ ID NO: 29155 - RNA, 19 nt, Artificial Sequence
  Sense Oligo
aggucggcagaagcuucca

SEQ ID NO: 29156 - RNA, 19 nt, Artificial Sequence
  Antisense Oligo
uggaagcuucugccgaccu

SEQ ID NO: 29157 - RNA, 19 nt, Artificial Sequence
  Sense Oligo
ggucggcagaagcuuccac

SEQ ID NO: 29158 - RNA, 19 nt, Artificial Sequence
  Antisense Oligo
guggaagcuucugccgacc

SEQ ID NO: 29159 - RNA, 19 nt, Artificial Sequence
  Sense Oligo
gucggcagaagcuuccaca

SEQ ID NO: 29160 - RNA, 19 nt, Artificial Sequence
  Antisense Oligo
uguggaagcuucugccgac

SEQ ID NO: 29161 - RNA, 19 nt, Artificial Sequence
  Sense Oligo
caaggaggugaugaccgag

SEQ ID NO: 29162 - RNA, 19 nt, Artificial Sequence
  Antisense Oligo
cucggucaucaccuccuug

SEQ ID NO: 29163 - RNA, 19 nt, Artificial Sequence
  Sense Oligo
aaggaggugaugaccgagu

SEQ ID NO: 29164 - RNA, 19 nt, Artificial Sequence
  Antisense Oligo
acucggucaucaccuccuu

SEQ ID NO: 29165 - RNA, 19 nt, Artificial Sequence
  Sense Oligo
aggaggugaugaccgaguu

SEQ ID NO: 29166 - RNA, 19 nt, Artificial Sequence
  Antisense Oligo
aacucggucaucaccuccu

SEQ ID NO: 29167 - RNA, 19 nt, Artificial Sequence
  Sense Oligo
ggaggugaugaccgaguug

SEQ ID NO: 29168 - RNA, 19 nt, Artificial Sequence
  Antisense Oligo
caacucggucaucaccucc

SEQ ID NO: 29169 - RNA, 19 nt, Artificial Sequence
  Sense Oligo
gaggugaugaccgaguuga

SEQ ID NO: 29170 - RNA, 19 nt, Artificial Sequence
  Antisense Oligo
ucaacucggucaucaccuc

SEQ ID NO: 29171 - RNA, 19 nt, Artificial Sequence
  Sense Oligo
aggugaugaccgaguugag

SEQ ID NO: 29172 - RNA, 19 nt, Artificial Sequence
  Antisense Oligo
cucaacucggucaucaccu

SEQ ID NO: 29173 - RNA, 19 nt, Artificial Sequence
  Sense Oligo
gggccugccagucuagaca

SEQ ID NO: 29174 - RNA, 19 nt, Artificial Sequence
  Antisense Oligo
ugucuagacuggcaggccc

SEQ ID NO: 29175 - RNA, 19 nt, Artificial Sequence
  Sense Oligo
ggcgcuucccauuucugcc

SEQ ID NO: 29176 - RNA, 19 nt, Artificial Sequence
  Antisense Oligo
ggcagaaaugggaagcgcc

SEQ ID NO: 29177 - RNA, 19 nt, Artificial Sequence
  Sense Oligo
gcgcuucccauuucugccu

SEQ ID NO: 29178 - RNA, 19 nt, Artificial Sequence
  Antisense Oligo
aggcagaaaugggaagcgc

SEQ ID NO: 29179 - RNA, 19 nt, Artificial Sequence
  Sense Oligo
cgcuucccauuucugccug

SEQ ID NO: 29180 - RNA, 19 nt, Artificial Sequence
  Antisense Oligo
caggcagaaaugggaagcg

SEQ ID NO: 29181 - RNA, 19 nt, Artificial Sequence
  Sense Oligo
cuucccauuucugccugau

SEQ ID NO: 29182 - RNA, 19 nt, Artificial Sequence
  Antisense Oligo
aucaggcagaaaugggaag

SEQ ID NO: 29183 - RNA, 19 nt, Artificial Sequence
  Sense Oligo
gucuucacguggccucuga

SEQ ID NO: 29184 - RNA, 19 nt, Artificial Sequence
  Antisense Oligo
ucagaggccacgugaagac

SEQ ID NO: 29185 - RNA, 19 nt, Artificial Sequence
  Sense Oligo
ucuucacguggccucugac

SEQ ID NO: 29186 - RNA, 19 nt, Artificial Sequence
  Antisense Oligo
gucagaggccacgugaaga

SEQ ID NO: 29187 - RNA, 19 nt, Artificial Sequence
  Sense Oligo
acguggccucugacccugu

SEQ ID NO: 29188 - RNA, 19 nt, Artificial Sequence
  Antisense Oligo
acagggucagaggccacgu

SEQ ID NO: 29189 - RNA, 19 nt, Artificial Sequence
  Sense Oligo
gucauugacaucuuggguu

SEQ ID NO: 29190 - RNA, 19 nt, Artificial Sequence
  Antisense Oligo
aacccaagaugucaaugac

SEQ ID NO: 29191 - RNA, 19 nt, Artificial Sequence
  Sense Oligo
ucauugacaucuuggguuu

SEQ ID NO: 29192 - RNA, 19 nt, Artificial Sequence
  Antisense Oligo
aaacccaagaugucaauga

SEQ ID NO: 29193 - RNA, 19 nt, Artificial Sequence
  Sense Oligo
cauugacaucuuggguuuu

SEQ ID NO: 29194 - RNA, 19 nt, Artificial Sequence
  Antisense Oligo
aaaacccaagaugucaaug

SEQ ID NO: 29195 - RNA, 19 nt, Artificial Sequence
  Sense Oligo
uugacaucuuggguuuucu

SEQ ID NO: 29196 - RNA, 19 nt, Artificial Sequence
  Antisense Oligo
agaaaacccaagaugucaa

SEQ ID NO: 29197 - RNA, 19 nt, Artificial Sequence
  Sense Oligo
gacaucuuggguuuucuaa

SEQ ID NO: 29198 - RNA, 19 nt, Artificial Sequence
  Antisense Oligo
uuagaaaacccaagauguc

SEQ ID NO: 29199 - RNA, 19 nt, Artificial Sequence
  Sense Oligo
acaucuuggguuuucuaau

SEQ ID NO: 29200 - RNA, 19 nt, Artificial Sequence
  Antisense Oligo
auuagaaaacccaagaugu

SEQ ID NO: 29201 - RNA, 19 nt, Artificial Sequence
  Sense Oligo
caucuuggguuuucuaauu

SEQ ID NO: 29202 - RNA, 19 nt, Artificial Sequence
  Antisense Oligo
aauuagaaaacccaagaug

SEQ ID NO: 29203 - RNA, 19 nt, Artificial Sequence
  Sense Oligo
uuuuacagucaaccucacu

SEQ ID NO: 29204 - RNA, 19 nt, Artificial Sequence
  Antisense Oligo
agugagguugacuguaaaa

SEQ ID NO: 29205 - RNA, 19 nt, Artificial Sequence
  Sense Oligo
accucacuggguuuucugc

SEQ ID NO: 29206 - RNA, 19 nt, Artificial Sequence
  Antisense Oligo
gcagaaaacccagugaggu

SEQ ID NO: 29207 - RNA, 19 nt, Artificial Sequence
  Sense Oligo
ccucacuggguuuucugca

SEQ ID NO: 29208 - RNA, 19 nt, Artificial Sequence
  Antisense Oligo
ugcagaaaacccagugagg

SEQ ID NO: 29209 - RNA, 19 nt, Artificial Sequence
  Sense Oligo
cucacuggguuuucugcaa

SEQ ID NO: 29210 - RNA, 19 nt, Artificial Sequence
  Antisense Oligo
uugcagaaaacccagugag

SEQ ID NO: 29211 - RNA, 19 nt, Artificial Sequence
  Sense Oligo
cuggguuuucugcaaugag

SEQ ID NO: 29212 - RNA, 19 nt, Artificial Sequence
  Antisense Oligo
cucauugcagaaaacccag

SEQ ID NO: 29213 - RNA, 19 nt, Artificial Sequence
  Sense Oligo
uggguuuucugcaaugagg

SEQ ID NO: 29214 - RNA, 19 nt, Artificial Sequence
  Antisense Oligo
ccucauugcagaaaaccca

SEQ ID NO: 29215 - RNA, 19 nt, Artificial Sequence
  Sense Oligo
ggguuuucugcaaugaggu

SEQ ID NO: 29216 - RNA, 19 nt, Artificial Sequence
  Antisense Oligo
accucauugcagaaaaccc

SEQ ID NO: 29217 - RNA, 19 nt, Artificial Sequence
  Sense Oligo
gguuuucugcaaugagguc

SEQ ID NO: 29218 - RNA, 19 nt, Artificial Sequence
  Antisense Oligo
gaccucauugcagaaaacc

SEQ ID NO: 29219 - RNA, 19 nt, Artificial Sequence
  Sense Oligo
guuuucugcaaugaggucu

SEQ ID NO: 29220 - RNA, 19 nt, Artificial Sequence
  Antisense Oligo
agaccucauugcagaaaac

SEQ ID NO: 29221 - RNA, 19 nt, Artificial Sequence
  Sense Oligo
uuuucugcaaugaggucug

SEQ ID NO: 29222 - RNA, 19 nt, Artificial Sequence
  Antisense Oligo
cagaccucauugcagaaaa

SEQ ID NO: 29223 - RNA, 19 nt, Artificial Sequence
  Sense Oligo
uuucugcaaugaggucugc

SEQ ID NO: 29224 - RNA, 19 nt, Artificial Sequence
  Antisense Oligo
gcagaccucauugcagaaa

SEQ ID NO: 29225 - RNA, 19 nt, Artificial Sequence
  Sense Oligo
ggucugcacucauaucguu

SEQ ID NO: 29226 - RNA, 19 nt, Artificial Sequence
  Antisense Oligo
aacgauaugagugcagacc

SEQ ID NO: 29227 - RNA, 19 nt, Artificial Sequence
  Sense Oligo
gucugcacucauaucguuu

SEQ ID NO: 29228 - RNA, 19 nt, Artificial Sequence
  Antisense Oligo
aaacgauaugagugcagac

SEQ ID NO: 29229 - RNA, 19 nt, Artificial Sequence
  Sense Oligo
ucugcacucauaucguuug

SEQ ID NO: 29230 - RNA, 19 nt, Artificial Sequence
  Antisense Oligo
caaacgauaugagugcaga

SEQ ID NO: 29231 - RNA, 19 nt, Artificial Sequence
  Sense Oligo
cugcacucauaucguuugc

SEQ ID NO: 29232 - RNA, 19 nt, Artificial Sequence
  Antisense Oligo
gcaaacgauaugagugcag

SEQ ID NO: 29233 - RNA, 19 nt, Artificial Sequence
  Sense Oligo
gcacucauaucguuugcaa

SEQ ID NO: 29234 - RNA, 19 nt, Artificial Sequence
  Antisense Oligo
uugcaaacgauaugagugc

SEQ ID NO: 29235 - RNA, 19 nt, Artificial Sequence
  Sense Oligo
ucauaucguuugcaaugga

SEQ ID NO: 29236 - RNA, 19 nt, Artificial Sequence
  Antisense Oligo
uccauugcaaacgauauga

SEQ ID NO: 29237 - RNA, 19 nt, Artificial Sequence
  Sense Oligo
aucguuugcaauggagccu

SEQ ID NO: 29238 - RNA, 19 nt, Artificial Sequence
  Antisense Oligo
aggcuccauugcaaacgau

SEQ ID NO: 29239 - RNA, 19 nt, Artificial Sequence
  Sense Oligo
ucguuugcaauggagccua

SEQ ID NO: 29240 - RNA, 19 nt, Artificial Sequence
  Antisense Oligo
uaggcuccauugcaaacga

SEQ ID NO: 29241 - RNA, 19 nt, Artificial Sequence
  Sense Oligo
cguuugcaauggagccuaa

SEQ ID NO: 29242 - RNA, 19 nt, Artificial Sequence
  Antisense Oligo
uuaggcuccauugcaaacg

SEQ ID NO: 29243 - RNA, 19 nt, Artificial Sequence
  Sense Oligo
guuugcaauggagccuaag

SEQ ID NO: 29244 - RNA, 19 nt, Artificial Sequence
  Antisense Oligo
cuuaggcuccauugcaaac

SEQ ID NO: 29245 - RNA, 19 nt, Artificial Sequence
  Sense Oligo
acagucacgaauucagccc

SEQ ID NO: 29246 - RNA, 19 nt, Artificial Sequence
  Antisense Oligo
gggcugaauucgugacugu

SEQ ID NO: 29247 - RNA, 19 nt, Artificial Sequence
  Sense Oligo
cagucacgaauucagcccu

SEQ ID NO: 29248 - RNA, 19 nt, Artificial Sequence
  Antisense Oligo
agggcugaauucgugacug

SEQ ID NO: 29249 - RNA, 19 nt, Artificial Sequence
  Sense Oligo
agucacgaauucagcccuu

SEQ ID NO: 29250 - RNA, 19 nt, Artificial Sequence
  Antisense Oligo
aagggcugaauucgugacu

SEQ ID NO: 29251 - RNA, 19 nt, Artificial Sequence
  Sense Oligo
gucacgaauucagcccuug

SEQ ID NO: 29252 - RNA, 19 nt, Artificial Sequence
  Antisense Oligo
caagggcugaauucgugac

SEQ ID NO: 29253 - RNA, 19 nt, Artificial Sequence
  Sense Oligo
gaauucagcccuugcccug

SEQ ID NO: 29254 - RNA, 19 nt, Artificial Sequence
  Antisense Oligo
cagggcaagggcugaauuc

SEQ ID NO: 29255 - RNA, 19 nt, Artificial Sequence
  Sense Oligo
aauucagcccuugcccugu

SEQ ID NO: 29256 - RNA, 19 nt, Artificial Sequence
  Antisense Oligo
acagggcaagggcugaauu

SEQ ID NO: 29257 - RNA, 19 nt, Artificial Sequence
  Sense Oligo
auucagcccuugcccugug

SEQ ID NO: 29258 - RNA, 19 nt, Artificial Sequence
  Antisense Oligo
cacagggcaagggcugaau

SEQ ID NO: 29259 - RNA, 19 nt, Artificial Sequence
  Sense Oligo
uucagcccuugcccugugu

SEQ ID NO: 29260 - RNA, 19 nt, Artificial Sequence
  Antisense Oligo
acacagggcaagggcugaa

SEQ ID NO: 29261 - RNA, 19 nt, Artificial Sequence
  Sense Oligo
ucagcccuugcccuguguc

SEQ ID NO: 29262 - RNA, 19 nt, Artificial Sequence
  Antisense Oligo
gacacagggcaagggcuga

SEQ ID NO: 29263 - RNA, 19 nt, Artificial Sequence
  Sense Oligo
cagcccuugcccuguguca

SEQ ID NO: 29264 - RNA, 19 nt, Artificial Sequence
  Antisense Oligo
ugacacagggcaagggcug

SEQ ID NO: 29265 - RNA, 19 nt, Artificial Sequence
  Sense Oligo
ccugugucagccaccaugc

SEQ ID NO: 29266 - RNA, 19 nt, Artificial Sequence
  Antisense Oligo
gcaugguggcugacacagg

SEQ ID NO: 29267 - RNA, 19 nt, Artificial Sequence
  Sense Oligo
cugugucagccaccaugcc

SEQ ID NO: 29268 - RNA, 19 nt, Artificial Sequence
  Antisense Oligo
ggcaugguggcugacacag

SEQ ID NO: 29269 - RNA, 19 nt, Artificial Sequence
  Sense Oligo
accaugccaagggccaucu

SEQ ID NO: 29270 - RNA, 19 nt, Artificial Sequence
  Antisense Oligo
agauggcccuuggcauggu

SEQ ID NO: 29271 - RNA, 19 nt, Artificial Sequence
  Sense Oligo
gggcugugucccguuccua

SEQ ID NO: 29272 - RNA, 19 nt, Artificial Sequence
  Antisense Oligo
uaggaacgggacacagccc

SEQ ID NO: 29273 - RNA, 19 nt, Artificial Sequence
  Sense Oligo
ggcugugucccguuccuag

SEQ ID NO: 29274 - RNA, 19 nt, Artificial Sequence
  Antisense Oligo
cuaggaacgggacacagcc

SEQ ID NO: 29275 - RNA, 19 nt, Artificial Sequence
  Sense Oligo
gcugugucccguuccuagu

SEQ ID NO: 29276 - RNA, 19 nt, Artificial Sequence
  Antisense Oligo
acuaggaacgggacacagc

SEQ ID NO: 29277 - RNA, 19 nt, Artificial Sequence
  Sense Oligo
cugugucccguuccuagua

SEQ ID NO: 29278 - RNA, 19 nt, Artificial Sequence
  Antisense Oligo
uacuaggaacgggacacag

SEQ ID NO: 29279 - RNA, 19 nt, Artificial Sequence
  Sense Oligo
ugugucccguuccuaguac

SEQ ID NO: 29280 - RNA, 19 nt, Artificial Sequence
  Antisense Oligo
guacuaggaacgggacaca

SEQ ID NO: 29281 - RNA, 19 nt, Artificial Sequence
  Sense Oligo
gugucccguuccuaguaca

SEQ ID NO: 29282 - RNA, 19 nt, Artificial Sequence
  Antisense Oligo
uguacuaggaacgggacac

SEQ ID NO: 29283 - RNA, 19 nt, Artificial Sequence
  Sense Oligo
ugucccguuccuaguacag

SEQ ID NO: 29284 - RNA, 19 nt, Artificial Sequence
  Antisense Oligo
cuguacuaggaacgggaca

SEQ ID NO: 29285 - RNA, 19 nt, Artificial Sequence
  Sense Oligo
gucccguuccuaguacaga

SEQ ID NO: 29286 - RNA, 19 nt, Artificial Sequence
  Antisense Oligo
ucuguacuaggaacgggac

SEQ ID NO: 29287 - RNA, 19 nt, Artificial Sequence
  Sense Oligo
ucccguuccuaguacagag

SEQ ID NO: 29288 - RNA, 19 nt, Artificial Sequence
  Antisense Oligo
cucuguacuaggaacggga

SEQ ID NO: 29289 - RNA, 19 nt, Artificial Sequence
  Sense Oligo
cccguuccuaguacagagg

SEQ ID NO: 29290 - RNA, 19 nt, Artificial Sequence
  Antisense Oligo
ccucuguacuaggaacggg

SEQ ID NO: 29291 - RNA, 19 nt, Artificial Sequence
  Sense Oligo
ccaacucagugauugacca

SEQ ID NO: 29292 - RNA, 19 nt, Artificial Sequence
  Antisense Oligo
uggucaaucacugaguugg

SEQ ID NO: 29293 - RNA, 19 nt, Artificial Sequence
  Sense Oligo
ucagugauugaccaggaca

SEQ ID NO: 29294 - RNA, 19 nt, Artificial Sequence
  Antisense Oligo
uguccuggucaaucacuga

SEQ ID NO: 29295 - RNA, 19 nt, Artificial Sequence
  Sense Oligo
cagugauugaccaggacag

SEQ ID NO: 29296 - RNA, 19 nt, Artificial Sequence
  Antisense Oligo
cuguccuggucaaucacug

SEQ ID NO: 29297 - RNA, 19 nt, Artificial Sequence
  Sense Oligo
agugauugaccaggacagu

SEQ ID NO: 29298 - RNA, 19 nt, Artificial Sequence
  Antisense Oligo
acuguccuggucaaucacu

SEQ ID NO: 29299 - RNA, 19 nt, Artificial Sequence
  Sense Oligo
gugauugaccaggacagug

SEQ ID NO: 29300 - RNA, 19 nt, Artificial Sequence
  Antisense Oligo
cacuguccuggucaaucac

SEQ ID NO: 29301 - RNA, 19 nt, Artificial Sequence
  Sense Oligo
ugauugaccaggacagugc

SEQ ID NO: 29302 - RNA, 19 nt, Artificial Sequence
  Antisense Oligo
gcacuguccuggucaauca

SEQ ID NO: 29303 - RNA, 19 nt, Artificial Sequence
  Sense Oligo
gauugaccaggacagugcu

SEQ ID NO: 29304 - RNA, 19 nt, Artificial Sequence
  Antisense Oligo
agcacuguccuggucaauc

SEQ ID NO: 29305 - RNA, 19 nt, Artificial Sequence
  Sense Oligo
accaggacagugcucacuu

SEQ ID NO: 29306 - RNA, 19 nt, Artificial Sequence
  Antisense Oligo
aagugagcacuguccuggu

SEQ ID NO: 29307 - RNA, 19 nt, Artificial Sequence
  Sense Oligo
ccaggacagugcucacuug

SEQ ID NO: 29308 - RNA, 19 nt, Artificial Sequence
  Antisense Oligo
caagugagcacuguccugg

SEQ ID NO: 29309 - RNA, 19 nt, Artificial Sequence
  Sense Oligo
caggacagugcucacuugc

SEQ ID NO: 29310 - RNA, 19 nt, Artificial Sequence
  Antisense Oligo
gcaagugagcacuguccug

SEQ ID NO: 29311 - RNA, 19 nt, Artificial Sequence
  Sense Oligo
aggacagugcucacuugcu

SEQ ID NO: 29312 - RNA, 19 nt, Artificial Sequence
  Antisense Oligo
agcaagugagcacuguccu

SEQ ID NO: 29313 - RNA, 19 nt, Artificial Sequence
  Sense Oligo
ggacagugcucacuugcua

SEQ ID NO: 29314 - RNA, 19 nt, Artificial Sequence
  Antisense Oligo
uagcaagugagcacugucc

SEQ ID NO: 29315 - RNA, 19 nt, Artificial Sequence
  Sense Oligo
gacagugcucacuugcuag

SEQ ID NO: 29316 - RNA, 19 nt, Artificial Sequence
  Antisense Oligo
cuagcaagugagcacuguc

SEQ ID NO: 29317 - RNA, 19 nt, Artificial Sequence
  Sense Oligo
acagugcucacuugcuagu

SEQ ID NO: 29318 - RNA, 19 nt, Artificial Sequence
  Antisense Oligo
acuagcaagugagcacugu

SEQ ID NO: 29319 - RNA, 19 nt, Artificial Sequence
  Sense Oligo
gggaugcgguuucuguaug

SEQ ID NO: 29320 - RNA, 19 nt, Artificial Sequence
  Antisense Oligo
cauacagaaaccgcauccc

SEQ ID NO: 29321 - RNA, 19 nt, Artificial Sequence
  Sense Oligo
ggaugcgguuucuguauga

SEQ ID NO: 29322 - RNA, 19 nt, Artificial Sequence
  Antisense Oligo
ucauacagaaaccgcaucc

SEQ ID NO: 29323 - RNA, 19 nt, Artificial Sequence
  Sense Oligo
gaugcgguuucuguaugac

SEQ ID NO: 29324 - RNA, 19 nt, Artificial Sequence
  Antisense Oligo
gucauacagaaaccgcauc

SEQ ID NO: 29325 - RNA, 19 nt, Artificial Sequence
  Sense Oligo
augcgguuucuguaugaca

SEQ ID NO: 29326 - RNA, 19 nt, Artificial Sequence
  Antisense Oligo
ugucauacagaaaccgcau

SEQ ID NO: 29327 - RNA, 19 nt, Artificial Sequence
  Sense Oligo
ugcgguuucuguaugacac

SEQ ID NO: 29328 - RNA, 19 nt, Artificial Sequence
  Antisense Oligo
gugucauacagaaaccgca

SEQ ID NO: 29329 - RNA, 19 nt, Artificial Sequence
  Sense Oligo
uccaccuccuugugaugau

SEQ ID NO: 29330 - RNA, 19 nt, Artificial Sequence
  Antisense Oligo
aucaucacaaggaggugga

SEQ ID NO: 29331 - RNA, 19 nt, Artificial Sequence
  Sense Oligo
ccaccuccuugugaugaug

SEQ ID NO: 29332 - RNA, 19 nt, Artificial Sequence
  Antisense Oligo
caucaucacaaggaggugg

SEQ ID NO: 29333 - RNA, 19 nt, Artificial Sequence
  Sense Oligo
caccuccuugugaugaugu

SEQ ID NO: 29334 - RNA, 19 nt, Artificial Sequence
  Antisense Oligo
acaucaucacaaggaggug

SEQ ID NO: 29335 - RNA, 19 nt, Artificial Sequence
  Sense Oligo
accuccuugugaugauguu

SEQ ID NO: 29336 - RNA, 19 nt, Artificial Sequence
  Antisense Oligo
aacaucaucacaaggaggu

SEQ ID NO: 29337 - RNA, 19 nt, Artificial Sequence
  Sense Oligo
ccuccuugugaugauguuu

SEQ ID NO: 29338 - RNA, 19 nt, Artificial Sequence
  Antisense Oligo
aaacaucaucacaaggagg

SEQ ID NO: 29339 - RNA, 19 nt, Artificial Sequence
  Sense Oligo
cuccuugugaugauguuua

SEQ ID NO: 29340 - RNA, 19 nt, Artificial Sequence
  Antisense Oligo
uaaacaucaucacaaggag

SEQ ID NO: 29341 - RNA, 19 nt, Artificial Sequence
  Sense Oligo
uccuugugaugauguuuaa

SEQ ID NO: 29342 - RNA, 19 nt, Artificial Sequence
  Antisense Oligo
uuaaacaucaucacaagga

SEQ ID NO: 29343 - RNA, 19 nt, Artificial Sequence
  Sense Oligo
ccuugugaugauguuuaag

SEQ ID NO: 29344 - RNA, 19 nt, Artificial Sequence
  Antisense Oligo
cuuaaacaucaucacaagg

SEQ ID NO: 29345 - RNA, 19 nt, Artificial Sequence
  Sense Oligo
cuugugaugauguuuaagg

SEQ ID NO: 29346 - RNA, 19 nt, Artificial Sequence
  Antisense Oligo
ccuuaaacaucaucacaag

SEQ ID NO: 29347 - RNA, 19 nt, Artificial Sequence
  Sense Oligo
uugugaugauguuuaagga

SEQ ID NO: 29348 - RNA, 19 nt, Artificial Sequence
  Antisense Oligo
uccuuaaacaucaucacaa

SEQ ID NO: 29349 - RNA, 19 nt, Artificial Sequence
  Sense Oligo
ugugaugauguuuaaggaa

SEQ ID NO: 29350 - RNA, 19 nt, Artificial Sequence
  Antisense Oligo
uuccuuaaacaucaucaca

SEQ ID NO: 29351 - RNA, 19 nt, Artificial Sequence
  Sense Oligo
ugaugauguuuaaggaagu

SEQ ID NO: 29352 - RNA, 19 nt, Artificial Sequence
  Antisense Oligo
acuuccuuaaacaucauca

SEQ ID NO: 29353 - RNA, 19 nt, Artificial Sequence
  Sense Oligo
gaugauguuuaaggaaguu

SEQ ID NO: 29354 - RNA, 19 nt, Artificial Sequence
  Antisense Oligo
aacuuccuuaaacaucauc

SEQ ID NO: 29355 - RNA, 19 nt, Artificial Sequence
  Sense Oligo
augauguuuaaggaaguug

SEQ ID NO: 29356 - RNA, 19 nt, Artificial Sequence
  Antisense Oligo
caacuuccuuaaacaucau

SEQ ID NO: 29357 - RNA, 19 nt, Artificial Sequence
  Sense Oligo
gauguuuaaggaaguuguu

SEQ ID NO: 29358 - RNA, 19 nt, Artificial Sequence
  Antisense Oligo
aacaacuuccuuaaacauc

SEQ ID NO: 29359 - RNA, 19 nt, Artificial Sequence
  Sense Oligo
uuaaggaaguuguugauca

SEQ ID NO: 29360 - RNA, 19 nt, Artificial Sequence
  Antisense Oligo
ugaucaacaacuuccuuaa

SEQ ID NO: 29361 - RNA, 19 nt, Artificial Sequence
  Sense Oligo
uaaggaaguuguugaucaa

SEQ ID NO: 29362 - RNA, 19 nt, Artificial Sequence
  Antisense Oligo
uugaucaacaacuuccuua

SEQ ID NO: 29363 - RNA, 19 nt, Artificial Sequence
  Sense Oligo
aaggaaguuguugaucaag

SEQ ID NO: 29364 - RNA, 19 nt, Artificial Sequence
  Antisense Oligo
cuugaucaacaacuuccuu

SEQ ID NO: 29365 - RNA, 19 nt, Artificial Sequence
  Sense Oligo
aggaaguuguugaucaagu

SEQ ID NO: 29366 - RNA, 19 nt, Artificial Sequence
  Antisense Oligo
acuugaucaacaacuuccu

SEQ ID NO: 29367 - RNA, 19 nt, Artificial Sequence
  Sense Oligo
ggaaguuguugaucaaguu

SEQ ID NO: 29368 - RNA, 19 nt, Artificial Sequence
  Antisense Oligo
aacuugaucaacaacuucc

SEQ ID NO: 29369 - RNA, 19 nt, Artificial Sequence
  Sense Oligo
gaaguuguugaucaaguuu

SEQ ID NO: 29370 - RNA, 19 nt, Artificial Sequence
  Antisense Oligo
aaacuugaucaacaacuuc

SEQ ID NO: 29371 - RNA, 19 nt, Artificial Sequence
  Sense Oligo
aaguuguugaucaaguuug

SEQ ID NO: 29372 - RNA, 19 nt, Artificial Sequence
  Antisense Oligo
caaacuugaucaacaacuu

SEQ ID NO: 29373 - RNA, 19 nt, Artificial Sequence
  Sense Oligo
aguuguugaucaaguuugc

SEQ ID NO: 29374 - RNA, 19 nt, Artificial Sequence
  Antisense Oligo
gcaaacuugaucaacaacu

SEQ ID NO: 29375 - RNA, 19 nt, Artificial Sequence
  Sense Oligo
guuguugaucaaguuugcu

SEQ ID NO: 29376 - RNA, 19 nt, Artificial Sequence
  Antisense Oligo
agcaaacuugaucaacaac

SEQ ID NO: 29377 - RNA, 19 nt, Artificial Sequence
  Sense Oligo
uuguugaucaaguuugcug

SEQ ID NO: 29378 - RNA, 19 nt, Artificial Sequence
  Antisense Oligo
cagcaaacuugaucaacaa

SEQ ID NO: 29379 - RNA, 19 nt, Artificial Sequence
  Sense Oligo
uguugaucaaguuugcuga

SEQ ID NO: 29380 - RNA, 19 nt, Artificial Sequence
  Antisense Oligo
ucagcaaacuugaucaaca

SEQ ID NO: 29381 - RNA, 19 nt, Artificial Sequence
  Sense Oligo
guugaucaaguuugcugag

SEQ ID NO: 29382 - RNA, 19 nt, Artificial Sequence
  Antisense Oligo
cucagcaaacuugaucaac

SEQ ID NO: 29383 - RNA, 19 nt, Artificial Sequence
  Sense Oligo
uugaucaaguuugcugagc

SEQ ID NO: 29384 - RNA, 19 nt, Artificial Sequence
  Antisense Oligo
gcucagcaaacuugaucaa

SEQ ID NO: 29385 - RNA, 19 nt, Artificial Sequence
  Sense Oligo
ugaucaaguuugcugagcu

SEQ ID NO: 29386 - RNA, 19 nt, Artificial Sequence
  Antisense Oligo
agcucagcaaacuugauca

SEQ ID NO: 29387 - RNA, 19 nt, Artificial Sequence
  Sense Oligo
gaucaaguuugcugagcua

SEQ ID NO: 29388 - RNA, 19 nt, Artificial Sequence
  Antisense Oligo
uagcucagcaaacuugauc

SEQ ID NO: 29389 - RNA, 19 nt, Artificial Sequence
  Sense Oligo
aucaaguuugcugagcuac

SEQ ID NO: 29390 - RNA, 19 nt, Artificial Sequence
  Antisense Oligo
guagcucagcaaacuugau

SEQ ID NO: 29391 - RNA, 19 nt, Artificial Sequence
  Sense Oligo
ucaaguuugcugagcuaca

SEQ ID NO: 29392 - RNA, 19 nt, Artificial Sequence
  Antisense Oligo
uguagcucagcaaacuuga

SEQ ID NO: 29393 - RNA, 19 nt, Artificial Sequence
  Sense Oligo
guuugcugagcuacauagu

SEQ ID NO: 29394 - RNA, 19 nt, Artificial Sequence
  Antisense Oligo
acuauguagcucagcaaac

SEQ ID NO: 29395 - RNA, 19 nt, Artificial Sequence
  Sense Oligo
uuugcugagcuacauaguu

SEQ ID NO: 29396 - RNA, 19 nt, Artificial Sequence
  Antisense Oligo
aacuauguagcucagcaaa

SEQ ID NO: 29397 - RNA, 19 nt, Artificial Sequence
  Sense Oligo
uugcugagcuacauaguua

SEQ ID NO: 29398 - RNA, 19 nt, Artificial Sequence
  Antisense Oligo
uaacuauguagcucagcaa

SEQ ID NO: 29399 - RNA, 19 nt, Artificial Sequence
  Sense Oligo
ugcugagcuacauaguuag

SEQ ID NO: 29400 - RNA, 19 nt, Artificial Sequence
  Antisense Oligo
cuaacuauguagcucagca

SEQ ID NO: 29401 - RNA, 19 nt, Artificial Sequence
  Sense Oligo
gcugagcuacauaguuaga

SEQ ID NO: 29402 - RNA, 19 nt, Artificial Sequence
  Antisense Oligo
ucuaacuauguagcucagc

SEQ ID NO: 29403 - RNA, 19 nt, Artificial Sequence
  Sense Oligo
cugagcuacauaguuagag

SEQ ID NO: 29404 - RNA, 19 nt, Artificial Sequence
  Antisense Oligo
cucuaacuauguagcucag

SEQ ID NO: 29405 - RNA, 19 nt, Artificial Sequence
  Sense Oligo
cgcugcaucccaugacccu

SEQ ID NO: 29406 - RNA, 19 nt, Artificial Sequence
  Antisense Oligo
agggucaugggaugcagcg

SEQ ID NO: 29407 - RNA, 19 nt, Artificial Sequence
  Sense Oligo
gcugcaucccaugacccug

SEQ ID NO: 29408 - RNA, 19 nt, Artificial Sequence
  Antisense Oligo
cagggucaugggaugcagc

SEQ ID NO: 29409 - RNA, 19 nt, Artificial Sequence
  Sense Oligo
ccaugacccugggcuuucc

SEQ ID NO: 29410 - RNA, 19 nt, Artificial Sequence
  Antisense Oligo
ggaaagcccagggucaugg

SEQ ID NO: 29411 - RNA, 19 nt, Artificial Sequence
  Sense Oligo
caugacccugggcuuucca

SEQ ID NO: 29412 - RNA, 19 nt, Artificial Sequence
  Antisense Oligo
uggaaagcccagggucaug

SEQ ID NO: 29413 - RNA, 19 nt, Artificial Sequence
  Sense Oligo
augacccugggcuuuccac

SEQ ID NO: 29414 - RNA, 19 nt, Artificial Sequence
  Antisense Oligo
guggaaagcccagggucau

SEQ ID NO: 29415 - RNA, 19 nt, Artificial Sequence
  Sense Oligo
ugacccugggcuuuccacu

SEQ ID NO: 29416 - RNA, 19 nt, Artificial Sequence
  Antisense Oligo
aguggaaagcccaggguca

SEQ ID NO: 29417 - RNA, 19 nt, Artificial Sequence
  Sense Oligo
gacccugggcuuuccacuc

SEQ ID NO: 29418 - RNA, 19 nt, Artificial Sequence
  Antisense Oligo
gaguggaaagcccaggguc

SEQ ID NO: 29419 - RNA, 19 nt, Artificial Sequence
  Sense Oligo
cugggcuuuccacucauua

SEQ ID NO: 29420 - RNA, 19 nt, Artificial Sequence
  Antisense Oligo
uaaugaguggaaagcccag

SEQ ID NO: 29421 - RNA, 19 nt, Artificial Sequence
  Sense Oligo
ugggcuuuccacucauuac

SEQ ID NO: 29422 - RNA, 19 nt, Artificial Sequence
  Antisense Oligo
guaaugaguggaaagccca

SEQ ID NO: 29423 - RNA, 19 nt, Artificial Sequence
  Sense Oligo
gggcuuuccacucauuacu

SEQ ID NO: 29424 - RNA, 19 nt, Artificial Sequence
  Antisense Oligo
aguaaugaguggaaagccc

SEQ ID NO: 29425 - RNA, 19 nt, Artificial Sequence
  Sense Oligo
ggacgucuaggaugucugu

SEQ ID NO: 29426 - RNA, 19 nt, Artificial Sequence
  Antisense Oligo
acagacauccuagacgucc

SEQ ID NO: 29427 - RNA, 19 nt, Artificial Sequence
  Sense Oligo
gacgucuaggaugucuguu

SEQ ID NO: 29428 - RNA, 19 nt, Artificial Sequence
  Antisense Oligo
aacagacauccuagacguc

SEQ ID NO: 29429 - RNA, 19 nt, Artificial Sequence
  Sense Oligo
acgucuaggaugucuguuu

SEQ ID NO: 29430 - RNA, 19 nt, Artificial Sequence
  Antisense Oligo
aaacagacauccuagacgu

SEQ ID NO: 29431 - RNA, 19 nt, Artificial Sequence
  Sense Oligo
cgucuaggaugucuguuug

SEQ ID NO: 29432 - RNA, 19 nt, Artificial Sequence
  Antisense Oligo
caaacagacauccuagacg

SEQ ID NO: 29433 - RNA, 19 nt, Artificial Sequence
  Sense Oligo
gucuaggaugucuguuugc

SEQ ID NO: 29434 - RNA, 19 nt, Artificial Sequence
  Antisense Oligo
gcaaacagacauccuagac

SEQ ID NO: 29435 - RNA, 19 nt, Artificial Sequence
  Sense Oligo
ggaugucuguuugcacggg

SEQ ID NO: 29436 - RNA, 19 nt, Artificial Sequence
  Antisense Oligo
cccgugcaaacagacaucc

SEQ ID NO: 29437 - RNA, 19 nt, Artificial Sequence
  Sense Oligo
gaagucaguuggaggaguc

SEQ ID NO: 29438 - RNA, 19 nt, Artificial Sequence
  Antisense Oligo
gacuccuccaacugacuuc

SEQ ID NO: 29439 - RNA, 19 nt, Artificial Sequence
  Sense Oligo
aagucaguuggaggagucu

SEQ ID NO: 29440 - RNA, 19 nt, Artificial Sequence
  Antisense Oligo
agacuccuccaacugacuu

SEQ ID NO: 29441 - RNA, 19 nt, Artificial Sequence
  Sense Oligo
agucaguuggaggagucug

SEQ ID NO: 29442 - RNA, 19 nt, Artificial Sequence
  Antisense Oligo
cagacuccuccaacugacu

SEQ ID NO: 29443 - RNA, 19 nt, Artificial Sequence
  Sense Oligo
gucaguuggaggagucugg

SEQ ID NO: 29444 - RNA, 19 nt, Artificial Sequence
  Antisense Oligo
ccagacuccuccaacugac

SEQ ID NO: 29445 - RNA, 19 nt, Artificial Sequence
  Sense Oligo
ucaguuggaggagucuggc

SEQ ID NO: 29446 - RNA, 19 nt, Artificial Sequence
  Antisense Oligo
gccagacuccuccaacuga

SEQ ID NO: 29447 - RNA, 19 nt, Artificial Sequence
  Sense Oligo
caguuggaggagucuggcu

SEQ ID NO: 29448 - RNA, 19 nt, Artificial Sequence
  Antisense Oligo
agccagacuccuccaacug

SEQ ID NO: 29449 - RNA, 19 nt, Artificial Sequence
  Sense Oligo
aguuggaggagucuggcug

SEQ ID NO: 29450 - RNA, 19 nt, Artificial Sequence
  Antisense Oligo
cagccagacuccuccaacu

SEQ ID NO: 29451 - RNA, 19 nt, Artificial Sequence
  Sense Oligo
guuggaggagucuggcugu

SEQ ID NO: 29452 - RNA, 19 nt, Artificial Sequence
  Antisense Oligo
acagccagacuccuccaac

SEQ ID NO: 29453 - RNA, 19 nt, Artificial Sequence
  Sense Oligo
uuggaggagucuggcuguc

SEQ ID NO: 29454 - RNA, 19 nt, Artificial Sequence
  Antisense Oligo
gacagccagacuccuccaa

SEQ ID NO: 29455 - RNA, 19 nt, Artificial Sequence
  Sense Oligo
aggagucuggcugucguca

SEQ ID NO: 29456 - RNA, 19 nt, Artificial Sequence
  Antisense Oligo
ugacgacagccagacuccu

SEQ ID NO: 29457 - RNA, 19 nt, Artificial Sequence
  Sense Oligo
ggagucuggcugucgucag

SEQ ID NO: 29458 - RNA, 19 nt, Artificial Sequence
  Antisense Oligo
cugacgacagccagacucc

SEQ ID NO: 29459 - RNA, 19 nt, Artificial Sequence
  Sense Oligo
gagucuggcugucgucagu

SEQ ID NO: 29460 - RNA, 19 nt, Artificial Sequence
  Antisense Oligo
acugacgacagccagacuc

SEQ ID NO: 29461 - RNA, 19 nt, Artificial Sequence
  Sense Oligo
agucuggcugucgucagug

SEQ ID NO: 29462 - RNA, 19 nt, Artificial Sequence
  Antisense Oligo
cacugacgacagccagacu

SEQ ID NO: 29463 - RNA, 19 nt, Artificial Sequence
  Sense Oligo
gucuggcugucgucagugu

SEQ ID NO: 29464 - RNA, 19 nt, Artificial Sequence
  Antisense Oligo
acacugacgacagccagac

SEQ ID NO: 29465 - RNA, 19 nt, Artificial Sequence
  Sense Oligo
ucuggcugucgucagugug

SEQ ID NO: 29466 - RNA, 19 nt, Artificial Sequence
  Antisense Oligo
cacacugacgacagccaga

SEQ ID NO: 29467 - RNA, 19 nt, Artificial Sequence
  Sense Oligo
gcugucgucaguguguggg

SEQ ID NO: 29468 - RNA, 19 nt, Artificial Sequence
  Antisense Oligo
cccacacacugacgacagc

SEQ ID NO: 29469 - RNA, 19 nt, Artificial Sequence
  Sense Oligo
cugucgucagugugugggu

SEQ ID NO: 29470 - RNA, 19 nt, Artificial Sequence
  Antisense Oligo
acccacacacugacgacag

SEQ ID NO: 29471 - RNA, 19 nt, Artificial Sequence
  Sense Oligo
ugucgucaguguguggguu

SEQ ID NO: 29472 - RNA, 19 nt, Artificial Sequence
  Antisense Oligo
aacccacacacugacgaca

SEQ ID NO: 29473 - RNA, 19 nt, Artificial Sequence
  Sense Oligo
gucgucaguguguggguuu

SEQ ID NO: 29474 - RNA, 19 nt, Artificial Sequence
  Antisense Oligo
aaacccacacacugacgac

SEQ ID NO: 29475 - RNA, 19 nt, Artificial Sequence
  Sense Oligo
ucgucaguguguggguuuu

SEQ ID NO: 29476 - RNA, 19 nt, Artificial Sequence
  Antisense Oligo
aaaacccacacacugacga

SEQ ID NO: 29477 - RNA, 19 nt, Artificial Sequence
  Sense Oligo
ccauuuacuccauaucugu

SEQ ID NO: 29478 - RNA, 19 nt, Artificial Sequence
  Antisense Oligo
acagauauggaguaaaugg

SEQ ID NO: 29479 - RNA, 19 nt, Artificial Sequence
  Sense Oligo
cauuuacuccauaucugua

SEQ ID NO: 29480 - RNA, 19 nt, Artificial Sequence
  Antisense Oligo
uacagauauggaguaaaug

SEQ ID NO: 29481 - RNA, 19 nt, Artificial Sequence
  Sense Oligo
uuuacuccauaucuguacc

SEQ ID NO: 29482 - RNA, 19 nt, Artificial Sequence
  Antisense Oligo
gguacagauauggaguaaa

SEQ ID NO: 29483 - RNA, 19 nt, Artificial Sequence
  Sense Oligo
cuccauaucuguaccaguc

SEQ ID NO: 29484 - RNA, 19 nt, Artificial Sequence
  Antisense Oligo
gacugguacagauauggag

SEQ ID NO: 29485 - RNA, 19 nt, Artificial Sequence
  Sense Oligo
uccauaucuguaccagucg

SEQ ID NO: 29486 - RNA, 19 nt, Artificial Sequence
  Antisense Oligo
cgacugguacagauaugga

SEQ ID NO: 29487 - RNA, 19 nt, Artificial Sequence
  Sense Oligo
ccauaucuguaccagucgu

SEQ ID NO: 29488 - RNA, 19 nt, Artificial Sequence
  Antisense Oligo
acgacugguacagauaugg

SEQ ID NO: 29489 - RNA, 19 nt, Artificial Sequence
  Sense Oligo
cauaucuguaccagucgug

SEQ ID NO: 29490 - RNA, 19 nt, Artificial Sequence
  Antisense Oligo
cacgacugguacagauaug

SEQ ID NO: 29491 - RNA, 19 nt, Artificial Sequence
  Sense Oligo
auaucuguaccagucguga

SEQ ID NO: 29492 - RNA, 19 nt, Artificial Sequence
  Antisense Oligo
ucacgacugguacagauau

SEQ ID NO: 29493 - RNA, 19 nt, Artificial Sequence
  Sense Oligo
uaucuguaccagucgugau

SEQ ID NO: 29494 - RNA, 19 nt, Artificial Sequence
  Antisense Oligo
aucacgacugguacagaua

SEQ ID NO: 29495 - RNA, 19 nt, Artificial Sequence
  Sense Oligo
aucuguaccagucgugauc

SEQ ID NO: 29496 - RNA, 19 nt, Artificial Sequence
  Antisense Oligo
gaucacgacugguacagau

SEQ ID NO: 29497 - RNA, 19 nt, Artificial Sequence
  Sense Oligo
ucuguaccagucgugauca

SEQ ID NO: 29498 - RNA, 19 nt, Artificial Sequence
  Antisense Oligo
ugaucacgacugguacaga

SEQ ID NO: 29499 - RNA, 19 nt, Artificial Sequence
  Sense Oligo
cagucgugaucagccuucu

SEQ ID NO: 29500 - RNA, 19 nt, Artificial Sequence
  Antisense Oligo
agaaggcugaucacgacug

SEQ ID NO: 29501 - RNA, 19 nt, Artificial Sequence
  Sense Oligo
agucgugaucagccuucua

SEQ ID NO: 29502 - RNA, 19 nt, Artificial Sequence
  Antisense Oligo
uagaaggcugaucacgacu

SEQ ID NO: 29503 - RNA, 19 nt, Artificial Sequence
  Sense Oligo
gucgugaucagccuucuag

SEQ ID NO: 29504 - RNA, 19 nt, Artificial Sequence
  Antisense Oligo
cuagaaggcugaucacgac

SEQ ID NO: 29505 - RNA, 19 nt, Artificial Sequence
  Sense Oligo
ucgugaucagccuucuagg

SEQ ID NO: 29506 - RNA, 19 nt, Artificial Sequence
  Antisense Oligo
ccuagaaggcugaucacga

SEQ ID NO: 29507 - RNA, 19 nt, Artificial Sequence
  Sense Oligo
ccuucuaggcuagugucua

SEQ ID NO: 29508 - RNA, 19 nt, Artificial Sequence
  Antisense Oligo
uagacacuagccuagaagg

SEQ ID NO: 29509 - RNA, 19 nt, Artificial Sequence
  Sense Oligo
uagugucuaggucuccagg

SEQ ID NO: 29510 - RNA, 19 nt, Artificial Sequence
  Antisense Oligo
ccuggagaccuagacacua

SEQ ID NO: 29511 - RNA, 19 nt, Artificial Sequence
  Sense Oligo
agugucuaggucuccaggg

SEQ ID NO: 29512 - RNA, 19 nt, Artificial Sequence
  Antisense Oligo
cccuggagaccuagacacu

SEQ ID NO: 29513 - RNA, 19 nt, Artificial Sequence
  Sense Oligo
ucuaggucuccaggguuuu

SEQ ID NO: 29514 - RNA, 19 nt, Artificial Sequence
  Antisense Oligo
aaaacccuggagaccuaga

SEQ ID NO: 29515 - RNA, 19 nt, Artificial Sequence
  Sense Oligo
cuaggucuccaggguuuug

SEQ ID NO: 29516 - RNA, 19 nt, Artificial Sequence
  Antisense Oligo
caaaacccuggagaccuag

SEQ ID NO: 29517 - RNA, 19 nt, Artificial Sequence
  Sense Oligo
uaggucuccaggguuuuga

SEQ ID NO: 29518 - RNA, 19 nt, Artificial Sequence
  Antisense Oligo
ucaaaacccuggagaccua

SEQ ID NO: 29519 - RNA, 19 nt, Artificial Sequence
  Sense Oligo
aggucuccaggguuuugau

SEQ ID NO: 29520 - RNA, 19 nt, Artificial Sequence
  Antisense Oligo
aucaaaacccuggagaccu

SEQ ID NO: 29521 - RNA, 19 nt, Artificial Sequence
  Sense Oligo
ggucuccaggguuuugaug

SEQ ID NO: 29522 - RNA, 19 nt, Artificial Sequence
  Antisense Oligo
caucaaaacccuggagacc

SEQ ID NO: 29523 - RNA, 19 nt, Artificial Sequence
  Sense Oligo
ucuccaggguuuugauggu

SEQ ID NO: 29524 - RNA, 19 nt, Artificial Sequence
  Antisense Oligo
accaucaaaacccuggaga

SEQ ID NO: 29525 - RNA, 19 nt, Artificial Sequence
  Sense Oligo
cuccaggguuuugaugguc

SEQ ID NO: 29526 - RNA, 19 nt, Artificial Sequence
  Antisense Oligo
gaccaucaaaacccuggag

SEQ ID NO: 29527 - RNA, 19 nt, Artificial Sequence
  Sense Oligo
uccaggguuuugauggucu

SEQ ID NO: 29528 - RNA, 19 nt, Artificial Sequence
  Antisense Oligo
agaccaucaaaacccugga

SEQ ID NO: 29529 - RNA, 19 nt, Artificial Sequence
  Sense Oligo
ccaggguuuugauggucuu

SEQ ID NO: 29530 - RNA, 19 nt, Artificial Sequence
  Antisense Oligo
aagaccaucaaaacccugg

SEQ ID NO: 29531 - RNA, 19 nt, Artificial Sequence
  Sense Oligo
gguuuugauggucuuaggu

SEQ ID NO: 29532 - RNA, 19 nt, Artificial Sequence
  Antisense Oligo
accuaagaccaucaaaacc

SEQ ID NO: 29533 - RNA, 19 nt, Artificial Sequence
  Sense Oligo
guuuugauggucuuaggua

SEQ ID NO: 29534 - RNA, 19 nt, Artificial Sequence
  Antisense Oligo
uaccuaagaccaucaaaac

SEQ ID NO: 29535 - RNA, 19 nt, Artificial Sequence
  Sense Oligo
uuuugauggucuuagguag

SEQ ID NO: 29536 - RNA, 19 nt, Artificial Sequence
  Antisense Oligo
cuaccuaagaccaucaaaa

SEQ ID NO: 29537 - RNA, 19 nt, Artificial Sequence
  Sense Oligo
uuugauggucuuagguagg

SEQ ID NO: 29538 - RNA, 19 nt, Artificial Sequence
  Antisense Oligo
ccuaccuaagaccaucaaa

SEQ ID NO: 29539 - RNA, 19 nt, Artificial Sequence
  Sense Oligo
uugauggucuuagguaggc

SEQ ID NO: 29540 - RNA, 19 nt, Artificial Sequence
  Antisense Oligo
gccuaccuaagaccaucaa

SEQ ID NO: 29541 - RNA, 19 nt, Artificial Sequence
  Sense Oligo
ugauggucuuagguaggcu

SEQ ID NO: 29542 - RNA, 19 nt, Artificial Sequence
  Antisense Oligo
agccuaccuaagaccauca

SEQ ID NO: 29543 - RNA, 19 nt, Artificial Sequence
  Sense Oligo
uuguuccuucugucccucu

SEQ ID NO: 29544 - RNA, 19 nt, Artificial Sequence
  Antisense Oligo
agagggacagaaggaacaa

SEQ ID NO: 29545 - RNA, 19 nt, Artificial Sequence
  Sense Oligo
uuccuucugucccucuuag

SEQ ID NO: 29546 - RNA, 19 nt, Artificial Sequence
  Antisense Oligo
cuaagagggacagaaggaa

SEQ ID NO: 29547 - RNA, 19 nt, Artificial Sequence
  Sense Oligo
uccuucugucccucuuaga

SEQ ID NO: 29548 - RNA, 19 nt, Artificial Sequence
  Antisense Oligo
ucuaagagggacagaagga

SEQ ID NO: 29549 - RNA, 19 nt, Artificial Sequence
  Sense Oligo
ccuucugucccucuuagac

SEQ ID NO: 29550 - RNA, 19 nt, Artificial Sequence
  Antisense Oligo
gucuaagagggacagaagg

SEQ ID NO: 29551 - RNA, 19 nt, Artificial Sequence
  Sense Oligo
cuucugucccucuuagacu

SEQ ID NO: 29552 - RNA, 19 nt, Artificial Sequence
  Antisense Oligo
agucuaagagggacagaag

SEQ ID NO: 29553 - RNA, 19 nt, Artificial Sequence
  Sense Oligo
ugucccucuuagacuggca

SEQ ID NO: 29554 - RNA, 19 nt, Artificial Sequence
  Antisense Oligo
ugccagucuaagagggaca

SEQ ID NO: 29555 - RNA, 19 nt, Artificial Sequence
  Sense Oligo
gucccucuuagacuggcau

SEQ ID NO: 29556 - RNA, 19 nt, Artificial Sequence
  Antisense Oligo
augccagucuaagagggac

SEQ ID NO: 29557 - RNA, 19 nt, Artificial Sequence
  Sense Oligo
ucccucuuagacuggcauc

SEQ ID NO: 29558 - RNA, 19 nt, Artificial Sequence
  Antisense Oligo
gaugccagucuaagaggga

SEQ ID NO: 29559 - RNA, 19 nt, Artificial Sequence
  Sense Oligo
cccucuuagacuggcauca

SEQ ID NO: 29560 - RNA, 19 nt, Artificial Sequence
  Antisense Oligo
ugaugccagucuaagaggg

SEQ ID NO: 29561 - RNA, 19 nt, Artificial Sequence
  Sense Oligo
ggcaucaguacuaugacau

SEQ ID NO: 29562 - RNA, 19 nt, Artificial Sequence
  Antisense Oligo
augucauaguacugaugcc

SEQ ID NO: 29563 - RNA, 19 nt, Artificial Sequence
  Sense Oligo
gcaucaguacuaugacaua

SEQ ID NO: 29564 - RNA, 19 nt, Artificial Sequence
  Antisense Oligo
uaugucauaguacugaugc

SEQ ID NO: 29565 - RNA, 19 nt, Artificial Sequence
  Sense Oligo
cgaggaaggaccuggugaa

SEQ ID NO: 29566 - RNA, 19 nt, Artificial Sequence
  Antisense Oligo
uucaccagguccuuccucg

SEQ ID NO: 29567 - RNA, 19 nt, Artificial Sequence
  Sense Oligo
gaggaaggaccuggugaag

SEQ ID NO: 29568 - RNA, 19 nt, Artificial Sequence
  Antisense Oligo
cuucaccagguccuuccuc

SEQ ID NO: 29569 - RNA, 19 nt, Artificial Sequence
  Sense Oligo
gggaagcagauugccgcug

SEQ ID NO: 29570 - RNA, 19 nt, Artificial Sequence
  Antisense Oligo
cagcggcaaucugcuuccc

SEQ ID NO: 29571 - RNA, 19 nt, Artificial Sequence
  Sense Oligo
gauugccgcugcgcucaug

SEQ ID NO: 29572 - RNA, 19 nt, Artificial Sequence
  Antisense Oligo
caugagcgcagcggcaauc

SEQ ID NO: 29573 - RNA, 19 nt, Artificial Sequence
  Sense Oligo
auugccgcugcgcucaugc

SEQ ID NO: 29574 - RNA, 19 nt, Artificial Sequence
  Antisense Oligo
gcaugagcgcagcggcaau

SEQ ID NO: 29575 - RNA, 19 nt, Artificial Sequence
  Sense Oligo
uugccgcugcgcucaugcu

SEQ ID NO: 29576 - RNA, 19 nt, Artificial Sequence
  Antisense Oligo
agcaugagcgcagcggcaa

SEQ ID NO: 29577 - RNA, 19 nt, Artificial Sequence
  Sense Oligo
ugcgcucaugcuggacagc

SEQ ID NO: 29578 - RNA, 19 nt, Artificial Sequence
  Antisense Oligo
gcuguccagcaugagcgca

SEQ ID NO: 29579 - RNA, 19 nt, Artificial Sequence
  Sense Oligo
gacagcaccuucagcaucc

SEQ ID NO: 29580 - RNA, 19 nt, Artificial Sequence
  Antisense Oligo
ggaugcugaaggugcuguc

SEQ ID NO: 29581 - RNA, 19 nt, Artificial Sequence
  Sense Oligo
acagcaccuucagcauccu

SEQ ID NO: 29582 - RNA, 19 nt, Artificial Sequence
  Antisense Oligo
aggaugcugaaggugcugu

SEQ ID NO: 29583 - RNA, 19 nt, Artificial Sequence
  Sense Oligo
cagcaccuucagcauccug

SEQ ID NO: 29584 - RNA, 19 nt, Artificial Sequence
  Antisense Oligo
caggaugcugaaggugcug

SEQ ID NO: 29585 - RNA, 19 nt, Artificial Sequence
  Sense Oligo
agcaccuucagcauccugc

SEQ ID NO: 29586 - RNA, 19 nt, Artificial Sequence
  Antisense Oligo
gcaggaugcugaaggugcu

SEQ ID NO: 29587 - RNA, 19 nt, Artificial Sequence
  Sense Oligo
gcaccuucagcauccugca

SEQ ID NO: 29588 - RNA, 19 nt, Artificial Sequence
  Antisense Oligo
ugcaggaugcugaaggugc

SEQ ID NO: 29589 - RNA, 19 nt, Artificial Sequence
  Sense Oligo
ucagcauccugcagaccug

SEQ ID NO: 29590 - RNA, 19 nt, Artificial Sequence
  Antisense Oligo
caggucugcaggaugcuga

SEQ ID NO: 29591 - RNA, 19 nt, Artificial Sequence
  Sense Oligo
cagcauccugcagaccugg

SEQ ID NO: 29592 - RNA, 19 nt, Artificial Sequence
  Antisense Oligo
ccaggucugcaggaugcug

SEQ ID NO: 29593 - RNA, 19 nt, Artificial Sequence
  Sense Oligo
agcauccugcagaccuggg

SEQ ID NO: 29594 - RNA, 19 nt, Artificial Sequence
  Antisense Oligo
cccaggucugcaggaugcu

SEQ ID NO: 29595 - RNA, 19 nt, Artificial Sequence
  Sense Oligo
gcauccugcagaccuggga

SEQ ID NO: 29596 - RNA, 19 nt, Artificial Sequence
  Antisense Oligo
ucccaggucugcaggaugc

SEQ ID NO: 29597 - RNA, 19 nt, Artificial Sequence
  Sense Oligo
cauccugcagaccugggac

SEQ ID NO: 29598 - RNA, 19 nt, Artificial Sequence
  Antisense Oligo
gucccaggucugcaggaug

SEQ ID NO: 29599 - RNA, 19 nt, Artificial Sequence
  Sense Oligo
auccugcagaccugggaca

SEQ ID NO: 29600 - RNA, 19 nt, Artificial Sequence
  Antisense Oligo
ugucccaggucugcaggau

SEQ ID NO: 29601 - RNA, 19 nt, Artificial Sequence
  Sense Oligo
uccugcagaccugggacac

SEQ ID NO: 29602 - RNA, 19 nt, Artificial Sequence
  Antisense Oligo
gugucccaggucugcagga

SEQ ID NO: 29603 - RNA, 19 nt, Artificial Sequence
  Sense Oligo
cugcagaccugggacacca

SEQ ID NO: 29604 - RNA, 19 nt, Artificial Sequence
  Antisense Oligo
uggugucccaggucugcag

SEQ ID NO: 29605 - RNA, 19 nt, Artificial Sequence
  Sense Oligo
gcagaccugggacaccauc

SEQ ID NO: 29606 - RNA, 19 nt, Artificial Sequence
  Antisense Oligo
gauggugucccaggucugc

SEQ ID NO: 29607 - RNA, 19 nt, Artificial Sequence
  Sense Oligo
cagaccugggacaccauca

SEQ ID NO: 29608 - RNA, 19 nt, Artificial Sequence
  Antisense Oligo
ugauggugucccaggucug

SEQ ID NO: 29609 - RNA, 19 nt, Artificial Sequence
  Sense Oligo
agaccugggacaccaucaa

SEQ ID NO: 29610 - RNA, 19 nt, Artificial Sequence
  Antisense Oligo
uugauggugucccaggucu

SEQ ID NO: 29611 - RNA, 19 nt, Artificial Sequence
  Sense Oligo
gaccugggacaccaucaac

SEQ ID NO: 29612 - RNA, 19 nt, Artificial Sequence
  Antisense Oligo
guugauggugucccagguc

SEQ ID NO: 29613 - RNA, 19 nt, Artificial Sequence
  Sense Oligo
ugggacaccaucaaccuga

SEQ ID NO: 29614 - RNA, 19 nt, Artificial Sequence
  Antisense Oligo
ucagguugaugguguccca

SEQ ID NO: 29615 - RNA, 19 nt, Artificial Sequence
  Sense Oligo
gggacaccaucaaccugaa

SEQ ID NO: 29616 - RNA, 19 nt, Artificial Sequence
  Antisense Oligo
uucagguugaugguguccc

SEQ ID NO: 29617 - RNA, 19 nt, Artificial Sequence
  Sense Oligo
acagcuucuucacccaguu

SEQ ID NO: 29618 - RNA, 19 nt, Artificial Sequence
  Antisense Oligo
aacugggugaagaagcugu

SEQ ID NO: 29619 - RNA, 19 nt, Artificial Sequence
  Sense Oligo
cagcuucuucacccaguuc

SEQ ID NO: 29620 - RNA, 19 nt, Artificial Sequence
  Antisense Oligo
gaacugggugaagaagcug

SEQ ID NO: 29621 - RNA, 19 nt, Artificial Sequence
  Sense Oligo
agcuucuucacccaguucg

SEQ ID NO: 29622 - RNA, 19 nt, Artificial Sequence
  Antisense Oligo
cgaacugggugaagaagcu

SEQ ID NO: 29623 - RNA, 19 nt, Artificial Sequence
  Sense Oligo
gcuucuucacccaguucga

SEQ ID NO: 29624 - RNA, 19 nt, Artificial Sequence
  Antisense Oligo
ucgaacugggugaagaagc

SEQ ID NO: 29625 - RNA, 19 nt, Artificial Sequence
  Sense Oligo
cuucuucacccaguucgag

SEQ ID NO: 29626 - RNA, 19 nt, Artificial Sequence
  Antisense Oligo
cucgaacugggugaagaag

SEQ ID NO: 29627 - RNA, 19 nt, Artificial Sequence
  Sense Oligo
uucuucacccaguucgagc

SEQ ID NO: 29628 - RNA, 19 nt, Artificial Sequence
  Antisense Oligo
gcucgaacugggugaagaa

SEQ ID NO: 29629 - RNA, 19 nt, Artificial Sequence
  Sense Oligo
ucuucacccaguucgagca

SEQ ID NO: 29630 - RNA, 19 nt, Artificial Sequence
  Antisense Oligo
ugcucgaacugggugaaga

SEQ ID NO: 29631 - RNA, 19 nt, Artificial Sequence
  Sense Oligo
uucacccaguucgagcagu

SEQ ID NO: 29632 - RNA, 19 nt, Artificial Sequence
  Antisense Oligo
acugcucgaacugggugaa

SEQ ID NO: 29633 - RNA, 19 nt, Artificial Sequence
  Sense Oligo
ucacccaguucgagcaguu

SEQ ID NO: 29634 - RNA, 19 nt, Artificial Sequence
  Antisense Oligo
aacugcucgaacuggguga

SEQ ID NO: 29635 - RNA, 19 nt, Artificial Sequence
  Sense Oligo
cacccaguucgagcaguuu

SEQ ID NO: 29636 - RNA, 19 nt, Artificial Sequence
  Antisense Oligo
aaacugcucgaacugggug

SEQ ID NO: 29637 - RNA, 19 nt, Artificial Sequence
  Sense Oligo
acccaguucgagcaguuuu

SEQ ID NO: 29638 - RNA, 19 nt, Artificial Sequence
  Antisense Oligo
aaaacugcucgaacugggu

SEQ ID NO: 29639 - RNA, 19 nt, Artificial Sequence
  Sense Oligo
cccaguucgagcaguuuug

SEQ ID NO: 29640 - RNA, 19 nt, Artificial Sequence
  Antisense Oligo
caaaacugcucgaacuggg

SEQ ID NO: 29641 - RNA, 19 nt, Artificial Sequence
  Sense Oligo
ccaguucgagcaguuuugc

SEQ ID NO: 29642 - RNA, 19 nt, Artificial Sequence
  Antisense Oligo
gcaaaacugcucgaacugg

SEQ ID NO: 29643 - RNA, 19 nt, Artificial Sequence
  Sense Oligo
gcaguuuugcuuuguccug

SEQ ID NO: 29644 - RNA, 19 nt, Artificial Sequence
  Antisense Oligo
caggacaaagcaaaacugc

SEQ ID NO: 29645 - RNA, 19 nt, Artificial Sequence
  Sense Oligo
caguuuugcuuuguccugc

SEQ ID NO: 29646 - RNA, 19 nt, Artificial Sequence
  Antisense Oligo
gcaggacaaagcaaaacug

SEQ ID NO: 29647 - RNA, 19 nt, Artificial Sequence
  Sense Oligo
aguuuugcuuuguccugca

SEQ ID NO: 29648 - RNA, 19 nt, Artificial Sequence
  Antisense Oligo
ugcaggacaaagcaaaacu

SEQ ID NO: 29649 - RNA, 19 nt, Artificial Sequence
  Sense Oligo
acagccuaugauuuaugaa

SEQ ID NO: 29650 - RNA, 19 nt, Artificial Sequence
  Antisense Oligo
uucauaaaucauaggcugu

SEQ ID NO: 29651 - RNA, 19 nt, Artificial Sequence
  Sense Oligo
cagccuaugauuuaugaag

SEQ ID NO: 29652 - RNA, 19 nt, Artificial Sequence
  Antisense Oligo
cuucauaaaucauaggcug

SEQ ID NO: 29653 - RNA, 19 nt, Artificial Sequence
  Sense Oligo
augauuuaugaaggacagg

SEQ ID NO: 29654 - RNA, 19 nt, Artificial Sequence
  Antisense Oligo
ccuguccuucauaaaucau

SEQ ID NO: 29655 - RNA, 19 nt, Artificial Sequence
  Sense Oligo
ugauuuaugaaggacaggc

SEQ ID NO: 29656 - RNA, 19 nt, Artificial Sequence
  Antisense Oligo
gccuguccuucauaaauca

SEQ ID NO: 29657 - RNA, 19 nt, Artificial Sequence
  Sense Oligo
uuaugaaggacaggcacag

SEQ ID NO: 29658 - RNA, 19 nt, Artificial Sequence
  Antisense Oligo
cugugccuguccuucauaa

SEQ ID NO: 29659 - RNA, 19 nt, Artificial Sequence
  Sense Oligo
aggcacagcuguggaccga

SEQ ID NO: 29660 - RNA, 19 nt, Artificial Sequence
  Antisense Oligo
ucgguccacagcugugccu

SEQ ID NO: 29661 - RNA, 19 nt, Artificial Sequence
  Sense Oligo
ggcacagcuguggaccgau

SEQ ID NO: 29662 - RNA, 19 nt, Artificial Sequence
  Antisense Oligo
aucgguccacagcugugcc

SEQ ID NO: 29663 - RNA, 19 nt, Artificial Sequence
  Sense Oligo
gcacagcuguggaccgauu

SEQ ID NO: 29664 - RNA, 19 nt, Artificial Sequence
  Antisense Oligo
aaucgguccacagcugugc

SEQ ID NO: 29665 - RNA, 19 nt, Artificial Sequence
  Sense Oligo
cacagcuguggaccgauuu

SEQ ID NO: 29666 - RNA, 19 nt, Artificial Sequence
  Antisense Oligo
aaaucgguccacagcugug

SEQ ID NO: 29667 - RNA, 19 nt, Artificial Sequence
  Sense Oligo
acagcuguggaccgauuug

SEQ ID NO: 29668 - RNA, 19 nt, Artificial Sequence
  Antisense Oligo
caaaucgguccacagcugu

SEQ ID NO: 29669 - RNA, 19 nt, Artificial Sequence
  Sense Oligo
cagcuguggaccgauuugc

SEQ ID NO: 29670 - RNA, 19 nt, Artificial Sequence
  Antisense Oligo
gcaaaucgguccacagcug

SEQ ID NO: 29671 - RNA, 19 nt, Artificial Sequence
  Sense Oligo
agcuguggaccgauuugca

SEQ ID NO: 29672 - RNA, 19 nt, Artificial Sequence
  Antisense Oligo
ugcaaaucgguccacagcu

SEQ ID NO: 29673 - RNA, 19 nt, Artificial Sequence
  Sense Oligo
gcuguggaccgauuugcag

SEQ ID NO: 29674 - RNA, 19 nt, Artificial Sequence
  Antisense Oligo
cugcaaaucgguccacagc

SEQ ID NO: 29675 - RNA, 19 nt, Artificial Sequence
  Sense Oligo
uggaccgauuugcaguaca

SEQ ID NO: 29676 - RNA, 19 nt, Artificial Sequence
  Antisense Oligo
uguacugcaaaucggucca

SEQ ID NO: 29677 - RNA, 19 nt, Artificial Sequence
  Sense Oligo
ggaccgauuugcaguacag

SEQ ID NO: 29678 - RNA, 19 nt, Artificial Sequence
  Antisense Oligo
cuguacugcaaaucggucc

SEQ ID NO: 29679 - RNA, 19 nt, Artificial Sequence
  Sense Oligo
aaagagguaucaggcuugc

SEQ ID NO: 29680 - RNA, 19 nt, Artificial Sequence
  Antisense Oligo
gcaagccugauaccucuuu

SEQ ID NO: 29681 - RNA, 19 nt, Artificial Sequence
  Sense Oligo
agguaucaggcuugccacc

SEQ ID NO: 29682 - RNA, 19 nt, Artificial Sequence
  Antisense Oligo
gguggcaagccugauaccu

SEQ ID NO: 29683 - RNA, 19 nt, Artificial Sequence
  Sense Oligo
gguaucaggcuugccacca

SEQ ID NO: 29684 - RNA, 19 nt, Artificial Sequence
  Antisense Oligo
ugguggcaagccugauacc

SEQ ID NO: 29685 - RNA, 19 nt, Artificial Sequence
  Sense Oligo
guaucaggcuugccaccag

SEQ ID NO: 29686 - RNA, 19 nt, Artificial Sequence
  Antisense Oligo
cugguggcaagccugauac

SEQ ID NO: 29687 - RNA, 19 nt, Artificial Sequence
  Sense Oligo
cuugccaccagcugcucua

SEQ ID NO: 29688 - RNA, 19 nt, Artificial Sequence
  Antisense Oligo
uagagcagcugguggcaag

SEQ ID NO: 29689 - RNA, 19 nt, Artificial Sequence
  Sense Oligo
uugccaccagcugcucuac

SEQ ID NO: 29690 - RNA, 19 nt, Artificial Sequence
  Antisense Oligo
guagagcagcugguggcaa

SEQ ID NO: 29691 - RNA, 19 nt, Artificial Sequence
  Sense Oligo
accagcugcucuaccugcu

SEQ ID NO: 29692 - RNA, 19 nt, Artificial Sequence
  Antisense Oligo
agcagguagagcagcuggu

SEQ ID NO: 29693 - RNA, 19 nt, Artificial Sequence
  Sense Oligo
cugcucuaccugcugggca

SEQ ID NO: 29694 - RNA, 19 nt, Artificial Sequence
  Antisense Oligo
ugcccagcagguagagcag

SEQ ID NO: 29695 - RNA, 19 nt, Artificial Sequence
  Sense Oligo
gagccacaccugaccugcu

SEQ ID NO: 29696 - RNA, 19 nt, Artificial Sequence
  Antisense Oligo
agcaggucagguguggcuc

SEQ ID NO: 29697 - RNA, 19 nt, Artificial Sequence
  Sense Oligo
agccacaccugaccugcua

SEQ ID NO: 29698 - RNA, 19 nt, Artificial Sequence
  Antisense Oligo
uagcaggucagguguggcu

SEQ ID NO: 29699 - RNA, 19 nt, Artificial Sequence
  Sense Oligo
gccacaccugaccugcuag

SEQ ID NO: 29700 - RNA, 19 nt, Artificial Sequence
  Antisense Oligo
cuagcaggucagguguggc

SEQ ID NO: 29701 - RNA, 19 nt, Artificial Sequence
  Sense Oligo
ccacaccugaccugcuagu

SEQ ID NO: 29702 - RNA, 19 nt, Artificial Sequence
  Antisense Oligo
acuagcaggucaggugugg

SEQ ID NO: 29703 - RNA, 19 nt, Artificial Sequence
  Sense Oligo
cacaccugaccugcuagug

SEQ ID NO: 29704 - RNA, 19 nt, Artificial Sequence
  Antisense Oligo
cacuagcaggucaggugug

SEQ ID NO: 29705 - RNA, 19 nt, Artificial Sequence
  Sense Oligo
acaccugaccugcuagugg

SEQ ID NO: 29706 - RNA, 19 nt, Artificial Sequence
  Antisense Oligo
ccacuagcaggucaggugu

SEQ ID NO: 29707 - RNA, 19 nt, Artificial Sequence
  Sense Oligo
ugggccagguugcaaaugg

SEQ ID NO: 29708 - RNA, 19 nt, Artificial Sequence
  Antisense Oligo
ccauuugcaaccuggccca

SEQ ID NO: 29709 - RNA, 19 nt, Artificial Sequence
  Sense Oligo
gggccagguugcaaauggg

SEQ ID NO: 29710 - RNA, 19 nt, Artificial Sequence
  Antisense Oligo
cccauuugcaaccuggccc

SEQ ID NO: 29711 - RNA, 19 nt, Artificial Sequence
  Sense Oligo
gccagguugcaaaugggaa

SEQ ID NO: 29712 - RNA, 19 nt, Artificial Sequence
  Antisense Oligo
uucccauuugcaaccuggc

SEQ ID NO: 29713 - RNA, 19 nt, Artificial Sequence
  Sense Oligo
ccagguugcaaaugggaau

SEQ ID NO: 29714 - RNA, 19 nt, Artificial Sequence
  Antisense Oligo
auucccauuugcaaccugg

SEQ ID NO: 29715 - RNA, 19 nt, Artificial Sequence
  Sense Oligo
cagguugcaaaugggaaug

SEQ ID NO: 29716 - RNA, 19 nt, Artificial Sequence
  Antisense Oligo
cauucccauuugcaaccug

SEQ ID NO: 29717 - RNA, 19 nt, Artificial Sequence
  Sense Oligo
uugcaaaugggaaugugua

SEQ ID NO: 29718 - RNA, 19 nt, Artificial Sequence
  Antisense Oligo
uacacauucccauuugcaa

SEQ ID NO: 29719 - RNA, 19 nt, Artificial Sequence
  Sense Oligo
gcaaaugggaauguguaga

SEQ ID NO: 29720 - RNA, 19 nt, Artificial Sequence
  Antisense Oligo
ucuacacauucccauuugc

SEQ ID NO: 29721 - RNA, 19 nt, Artificial Sequence
  Sense Oligo
caaaugggaauguguagaa

SEQ ID NO: 29722 - RNA, 19 nt, Artificial Sequence
  Antisense Oligo
uucuacacauucccauuug

SEQ ID NO: 29723 - RNA, 19 nt, Artificial Sequence
  Sense Oligo
uccagccuuuucuccuacc

SEQ ID NO: 29724 - RNA, 19 nt, Artificial Sequence
  Antisense Oligo
gguaggagaaaaggcugga

SEQ ID NO: 29725 - RNA, 19 nt, Artificial Sequence
  Sense Oligo
cagccuuuucuccuaccac

SEQ ID NO: 29726 - RNA, 19 nt, Artificial Sequence
  Antisense Oligo
gugguaggagaaaaggcug

SEQ ID NO: 29727 - RNA, 19 nt, Artificial Sequence
  Sense Oligo
uucuccuaccacugucucu

SEQ ID NO: 29728 - RNA, 19 nt, Artificial Sequence
  Antisense Oligo
agagacagugguaggagaa

SEQ ID NO: 29729 - RNA, 19 nt, Artificial Sequence
  Sense Oligo
ucuccuaccacugucucuu

SEQ ID NO: 29730 - RNA, 19 nt, Artificial Sequence
  Antisense Oligo
aagagacagugguaggaga

SEQ ID NO: 29731 - RNA, 19 nt, Artificial Sequence
  Sense Oligo
cuaccacugucucuuggga

SEQ ID NO: 29732 - RNA, 19 nt, Artificial Sequence
  Antisense Oligo
ucccaagagacagugguag

SEQ ID NO: 29733 - RNA, 19 nt, Artificial Sequence
  Sense Oligo
uaccacugucucuugggau

SEQ ID NO: 29734 - RNA, 19 nt, Artificial Sequence
  Antisense Oligo
aucccaagagacaguggua

SEQ ID NO: 29735 - RNA, 19 nt, Artificial Sequence
  Sense Oligo
accacugucucuugggauu

SEQ ID NO: 29736 - RNA, 19 nt, Artificial Sequence
  Antisense Oligo
aaucccaagagacaguggu

SEQ ID NO: 29737 - RNA, 19 nt, Artificial Sequence
  Sense Oligo
ccacugucucuugggauuu

SEQ ID NO: 29738 - RNA, 19 nt, Artificial Sequence
  Antisense Oligo
aaaucccaagagacagugg

SEQ ID NO: 29739 - RNA, 19 nt, Artificial Sequence
  Sense Oligo
cuugggauuucucugcccu

SEQ ID NO: 29740 - RNA, 19 nt, Artificial Sequence
  Antisense Oligo
agggcagagaaaucccaag

SEQ ID NO: 29741 - RNA, 19 nt, Artificial Sequence
  Sense Oligo
uugggauuucucugcccuc

SEQ ID NO: 29742 - RNA, 19 nt, Artificial Sequence
  Antisense Oligo
gagggcagagaaaucccaa

SEQ ID NO: 29743 - RNA, 19 nt, Artificial Sequence
  Sense Oligo
ugggauuucucugcccucc

SEQ ID NO: 29744 - RNA, 19 nt, Artificial Sequence
  Antisense Oligo
ggagggcagagaaauccca

SEQ ID NO: 29745 - RNA, 19 nt, Artificial Sequence
  Sense Oligo
uuccuccuuuuacugguug

SEQ ID NO: 29746 - RNA, 19 nt, Artificial Sequence
  Antisense Oligo
caaccaguaaaaggaggaa

SEQ ID NO: 29747 - RNA, 19 nt, Artificial Sequence
  Sense Oligo
uccuccuuuuacugguugu

SEQ ID NO: 29748 - RNA, 19 nt, Artificial Sequence
  Antisense Oligo
acaaccaguaaaaggagga

SEQ ID NO: 29749 - RNA, 19 nt, Artificial Sequence
  Sense Oligo
ccuccuuuuacugguugua

SEQ ID NO: 29750 - RNA, 19 nt, Artificial Sequence
  Antisense Oligo
uacaaccaguaaaaggagg

SEQ ID NO: 29751 - RNA, 19 nt, Artificial Sequence
  Sense Oligo
agcaccaguccugaguccu

SEQ ID NO: 29752 - RNA, 19 nt, Artificial Sequence
  Antisense Oligo
aggacucaggacuggugcu

SEQ ID NO: 29753 - RNA, 19 nt, Artificial Sequence
  Sense Oligo
gcaccaguccugaguccuc

SEQ ID NO: 29754 - RNA, 19 nt, Artificial Sequence
  Antisense Oligo
gaggacucaggacuggugc

SEQ ID NO: 29755 - RNA, 19 nt, Artificial Sequence
  Sense Oligo
ggcacccucugucacugca

SEQ ID NO: 29756 - RNA, 19 nt, Artificial Sequence
  Antisense Oligo
ugcagugacagagggugcc

SEQ ID NO: 29757 - RNA, 19 nt, Artificial Sequence
  Sense Oligo
ucugucacugcaccuuuac

SEQ ID NO: 29758 - RNA, 19 nt, Artificial Sequence
  Antisense Oligo
guaaaggugcagugacaga

SEQ ID NO: 29759 - RNA, 19 nt, Artificial Sequence
  Sense Oligo
cugucacugcaccuuuacc

SEQ ID NO: 29760 - RNA, 19 nt, Artificial Sequence
  Antisense Oligo
gguaaaggugcagugacag

SEQ ID NO: 29761 - RNA, 19 nt, Artificial Sequence
  Sense Oligo
ugucacugcaccuuuaccc

SEQ ID NO: 29762 - RNA, 19 nt, Artificial Sequence
  Antisense Oligo
ggguaaaggugcagugaca

SEQ ID NO: 29763 - RNA, 19 nt, Artificial Sequence
  Sense Oligo
gucacugcaccuuuaccca

SEQ ID NO: 29764 - RNA, 19 nt, Artificial Sequence
  Antisense Oligo
uggguaaaggugcagugac

SEQ ID NO: 29765 - RNA, 19 nt, Artificial Sequence
  Sense Oligo
ucacugcaccuuuacccac

SEQ ID NO: 29766 - RNA, 19 nt, Artificial Sequence
  Antisense Oligo
guggguaaaggugcaguga

SEQ ID NO: 29767 - RNA, 19 nt, Artificial Sequence
  Sense Oligo
ugcaccuuuacccacacug

SEQ ID NO: 29768 - RNA, 19 nt, Artificial Sequence
  Antisense Oligo
caguguggguaaaggugca

SEQ ID NO: 29769 - RNA, 19 nt, Artificial Sequence
  Sense Oligo
gcaccuuuacccacacugc

SEQ ID NO: 29770 - RNA, 19 nt, Artificial Sequence
  Antisense Oligo
gcaguguggguaaaggugc

SEQ ID NO: 29771 - RNA, 19 nt, Artificial Sequence
  Sense Oligo
caccuuuacccacacugcg

SEQ ID NO: 29772 - RNA, 19 nt, Artificial Sequence
  Antisense Oligo
cgcaguguggguaaaggug

SEQ ID NO: 29773 - RNA, 19 nt, Artificial Sequence
  Sense Oligo
accuuuacccacacugcgg

SEQ ID NO: 29774 - RNA, 19 nt, Artificial Sequence
  Antisense Oligo
ccgcaguguggguaaaggu

SEQ ID NO: 29775 - RNA, 19 nt, Artificial Sequence
  Sense Oligo
ccuuuacccacacugcggu

SEQ ID NO: 29776 - RNA, 19 nt, Artificial Sequence
  Antisense Oligo
accgcaguguggguaaagg

SEQ ID NO: 29777 - RNA, 19 nt, Artificial Sequence
  Sense Oligo
cuuuacccacacugcggug

SEQ ID NO: 29778 - RNA, 19 nt, Artificial Sequence
  Antisense Oligo
caccgcaguguggguaaag

SEQ ID NO: 29779 - RNA, 19 nt, Artificial Sequence
  Sense Oligo
uuuacccacacugcggugc

SEQ ID NO: 29780 - RNA, 19 nt, Artificial Sequence
  Antisense Oligo
gcaccgcaguguggguaaa

SEQ ID NO: 29781 - RNA, 19 nt, Artificial Sequence
  Sense Oligo
uuacccacacugcggugca

SEQ ID NO: 29782 - RNA, 19 nt, Artificial Sequence
  Antisense Oligo
ugcaccgcaguguggguaa

SEQ ID NO: 29783 - RNA, 19 nt, Artificial Sequence
  Sense Oligo
gccuggagcuguuucugag

SEQ ID NO: 29784 - RNA, 19 nt, Artificial Sequence
  Antisense Oligo
cucagaaacagcuccaggc

SEQ ID NO: 29785 - RNA, 19 nt, Artificial Sequence
  Sense Oligo
ccuggagcuguuucugagc

SEQ ID NO: 29786 - RNA, 19 nt, Artificial Sequence
  Antisense Oligo
gcucagaaacagcuccagg

SEQ ID NO: 29787 - RNA, 19 nt, Artificial Sequence
  Sense Oligo
gcuguuucugagcugaagc

SEQ ID NO: 29788 - RNA, 19 nt, Artificial Sequence
  Antisense Oligo
gcuucagcucagaaacagc

SEQ ID NO: 29789 - RNA, 19 nt, Artificial Sequence
  Sense Oligo
cuguuucugagcugaagcu

SEQ ID NO: 29790 - RNA, 19 nt, Artificial Sequence
  Antisense Oligo
agcuucagcucagaaacag

SEQ ID NO: 29791 - RNA, 19 nt, Artificial Sequence
  Sense Oligo
uguuucugagcugaagcug

SEQ ID NO: 29792 - RNA, 19 nt, Artificial Sequence
  Antisense Oligo
cagcuucagcucagaaaca

SEQ ID NO: 29793 - RNA, 19 nt, Artificial Sequence
  Sense Oligo
guuucugagcugaagcuga

SEQ ID NO: 29794 - RNA, 19 nt, Artificial Sequence
  Antisense Oligo
ucagcuucagcucagaaac

SEQ ID NO: 29795 - RNA, 19 nt, Artificial Sequence
  Sense Oligo
gagcugaagcugagcccug

SEQ ID NO: 29796 - RNA, 19 nt, Artificial Sequence
  Antisense Oligo
cagggcucagcuucagcuc

SEQ ID NO: 29797 - RNA, 19 nt, Artificial Sequence
  Sense Oligo
gcugaagcugagcccugau

SEQ ID NO: 29798 - RNA, 19 nt, Artificial Sequence
  Antisense Oligo
aucagggcucagcuucagc

SEQ ID NO: 29799 - RNA, 19 nt, Artificial Sequence
  Sense Oligo
ugaagcugagcccugauga

SEQ ID NO: 29800 - RNA, 19 nt, Artificial Sequence
  Antisense Oligo
ucaucagggcucagcuuca

SEQ ID NO: 29801 - RNA, 19 nt, Artificial Sequence
  Sense Oligo
gaagcugagcccugaugag

SEQ ID NO: 29802 - RNA, 19 nt, Artificial Sequence
  Antisense Oligo
cucaucagggcucagcuuc

SEQ ID NO: 29803 - RNA, 19 nt, Artificial Sequence
  Sense Oligo
ccucaugccagggucuugg

SEQ ID NO: 29804 - RNA, 19 nt, Artificial Sequence
  Antisense Oligo
ccaagacccuggcaugagg

SEQ ID NO: 29805 - RNA, 19 nt, Artificial Sequence
  Sense Oligo
cacugcagcuccuccugug

SEQ ID NO: 29806 - RNA, 19 nt, Artificial Sequence
  Antisense Oligo
cacaggaggagcugcagug

SEQ ID NO: 29807 - RNA, 19 nt, Artificial Sequence
  Sense Oligo
acugcagcuccuccugugg

SEQ ID NO: 29808 - RNA, 19 nt, Artificial Sequence
  Antisense Oligo
ccacaggaggagcugcagu

SEQ ID NO: 29809 - RNA, 19 nt, Artificial Sequence
  Sense Oligo
ugcagcuccuccuguggcu

SEQ ID NO: 29810 - RNA, 19 nt, Artificial Sequence
  Antisense Oligo
agccacaggaggagcugca

SEQ ID NO: 29811 - RNA, 19 nt, Artificial Sequence
  Sense Oligo
cagcuccuccuguggcucu

SEQ ID NO: 29812 - RNA, 19 nt, Artificial Sequence
  Antisense Oligo
agagccacaggaggagcug

SEQ ID NO: 29813 - RNA, 19 nt, Artificial Sequence
  Sense Oligo
agcuccuccuguggcucuc

SEQ ID NO: 29814 - RNA, 19 nt, Artificial Sequence
  Antisense Oligo
gagagccacaggaggagcu

SEQ ID NO: 29815 - RNA, 19 nt, Artificial Sequence
  Sense Oligo
gcuccuccuguggcucuca

SEQ ID NO: 29816 - RNA, 19 nt, Artificial Sequence
  Antisense Oligo
ugagagccacaggaggagc

SEQ ID NO: 29817 - RNA, 19 nt, Artificial Sequence
  Sense Oligo
cuccuccuguggcucucac

SEQ ID NO: 29818 - RNA, 19 nt, Artificial Sequence
  Antisense Oligo
gugagagccacaggaggag

SEQ ID NO: 29819 - RNA, 19 nt, Artificial Sequence
  Sense Oligo
guggcucucacaggugugg

SEQ ID NO: 29820 - RNA, 19 nt, Artificial Sequence
  Antisense Oligo
ccacaccugugagagccac

SEQ ID NO: 29821 - RNA, 19 nt, Artificial Sequence
  Sense Oligo
ggucugcugcccuagcugu

SEQ ID NO: 29822 - RNA, 19 nt, Artificial Sequence
  Antisense Oligo
acagcuagggcagcagacc

SEQ ID NO: 29823 - RNA, 19 nt, Artificial Sequence
  Sense Oligo
gucugcugcccuagcugug

SEQ ID NO: 29824 - RNA, 19 nt, Artificial Sequence
  Antisense Oligo
cacagcuagggcagcagac

SEQ ID NO: 29825 - RNA, 19 nt, Artificial Sequence
  Sense Oligo
ucugcugcccuagcugugg

SEQ ID NO: 29826 - RNA, 19 nt, Artificial Sequence
  Antisense Oligo
ccacagcuagggcagcaga

SEQ ID NO: 29827 - RNA, 19 nt, Artificial Sequence
  Sense Oligo
agcucuggacacugccggu

SEQ ID NO: 29828 - RNA, 19 nt, Artificial Sequence
  Antisense Oligo
accggcaguguccagagcu

SEQ ID NO: 29829 - RNA, 19 nt, Artificial Sequence
  Sense Oligo
cucuggacacugccgguga

SEQ ID NO: 29830 - RNA, 19 nt, Artificial Sequence
  Antisense Oligo
ucaccggcaguguccagag

SEQ ID NO: 29831 - RNA, 19 nt, Artificial Sequence
  Sense Oligo
ucuggacacugccggugaa

SEQ ID NO: 29832 - RNA, 19 nt, Artificial Sequence
  Antisense Oligo
uucaccggcaguguccaga

SEQ ID NO: 29833 - RNA, 19 nt, Artificial Sequence
  Sense Oligo
cuggacacugccggugaau

SEQ ID NO: 29834 - RNA, 19 nt, Artificial Sequence
  Antisense Oligo
auucaccggcaguguccag

SEQ ID NO: 29835 - RNA, 19 nt, Artificial Sequence
  Sense Oligo
uggacacugccggugaauu

SEQ ID NO: 29836 - RNA, 19 nt, Artificial Sequence
  Antisense Oligo
aauucaccggcagugucca

SEQ ID NO: 29837 - RNA, 19 nt, Artificial Sequence
  Sense Oligo
ggacacugccggugaauuc

SEQ ID NO: 29838 - RNA, 19 nt, Artificial Sequence
  Antisense Oligo
gaauucaccggcagugucc

SEQ ID NO: 29839 - RNA, 19 nt, Artificial Sequence
  Sense Oligo
gacacugccggugaauuca

SEQ ID NO: 29840 - RNA, 19 nt, Artificial Sequence
  Antisense Oligo
ugaauucaccggcaguguc

SEQ ID NO: 29841 - RNA, 19 nt, Artificial Sequence
  Sense Oligo
acacugccggugaauucaa

SEQ ID NO: 29842 - RNA, 19 nt, Artificial Sequence
  Antisense Oligo
uugaauucaccggcagugu

SEQ ID NO: 29843 - RNA, 19 nt, Artificial Sequence
  Sense Oligo
cacugccggugaauucaag

SEQ ID NO: 29844 - RNA, 19 nt, Artificial Sequence
  Antisense Oligo
cuugaauucaccggcagug

SEQ ID NO: 29845 - RNA, 19 nt, Artificial Sequence
  Sense Oligo
acugccggugaauucaagu

SEQ ID NO: 29846 - RNA, 19 nt, Artificial Sequence
  Antisense Oligo
acuugaauucaccggcagu

SEQ ID NO: 29847 - RNA, 19 nt, Artificial Sequence
  Sense Oligo
cugccggugaauucaaguc

SEQ ID NO: 29848 - RNA, 19 nt, Artificial Sequence
  Antisense Oligo
gacuugaauucaccggcag

SEQ ID NO: 29849 - RNA, 19 nt, Artificial Sequence
  Sense Oligo
ugccggugaauucaagucc

SEQ ID NO: 29850 - RNA, 19 nt, Artificial Sequence
  Antisense Oligo
ggacuugaauucaccggca

SEQ ID NO: 29851 - RNA, 19 nt, Artificial Sequence
  Sense Oligo
gccggugaauucaagucca

SEQ ID NO: 29852 - RNA, 19 nt, Artificial Sequence
  Antisense Oligo
uggacuugaauucaccggc

SEQ ID NO: 29853 - RNA, 19 nt, Artificial Sequence
  Sense Oligo
ccggugaauucaaguccau

SEQ ID NO: 29854 - RNA, 19 nt, Artificial Sequence
  Antisense Oligo
auggacuugaauucaccgg

SEQ ID NO: 29855 - RNA, 19 nt, Artificial Sequence
  Sense Oligo
ugaauucaaguccaugguu

SEQ ID NO: 29856 - RNA, 19 nt, Artificial Sequence
  Antisense Oligo
aaccauggacuugaauuca

SEQ ID NO: 29857 - RNA, 19 nt, Artificial Sequence
  Sense Oligo
aauucaaguccaugguuca

SEQ ID NO: 29858 - RNA, 19 nt, Artificial Sequence
  Antisense Oligo
ugaaccauggacuugaauu

SEQ ID NO: 29859 - RNA, 19 nt, Artificial Sequence
  Sense Oligo
auucaaguccaugguucau

SEQ ID NO: 29860 - RNA, 19 nt, Artificial Sequence
  Antisense Oligo
augaaccauggacuugaau

SEQ ID NO: 29861 - RNA, 19 nt, Artificial Sequence
  Sense Oligo
gguucaugcaucuuccucu

SEQ ID NO: 29862 - RNA, 19 nt, Artificial Sequence
  Antisense Oligo
agaggaagaugcaugaacc

SEQ ID NO: 29863 - RNA, 19 nt, Artificial Sequence
  Sense Oligo
guucaugcaucuuccucuu

SEQ ID NO: 29864 - RNA, 19 nt, Artificial Sequence
  Antisense Oligo
aagaggaagaugcaugaac

SEQ ID NO: 29865 - RNA, 19 nt, Artificial Sequence
  Sense Oligo
uucaugcaucuuccucuuc

SEQ ID NO: 29866 - RNA, 19 nt, Artificial Sequence
  Antisense Oligo
gaagaggaagaugcaugaa

SEQ ID NO: 29867 - RNA, 19 nt, Artificial Sequence
  Sense Oligo
ucaugcaucuuccucuucu

SEQ ID NO: 29868 - RNA, 19 nt, Artificial Sequence
  Antisense Oligo
agaagaggaagaugcauga

SEQ ID NO: 29869 - RNA, 19 nt, Artificial Sequence
  Sense Oligo
caugcaucuuccucuucuc

SEQ ID NO: 29870 - RNA, 19 nt, Artificial Sequence
  Antisense Oligo
gagaagaggaagaugcaug

SEQ ID NO: 29871 - RNA, 19 nt, Artificial Sequence
  Sense Oligo
augcaucuuccucuucucc

SEQ ID NO: 29872 - RNA, 19 nt, Artificial Sequence
  Antisense Oligo
ggagaagaggaagaugcau

SEQ ID NO: 29873 - RNA, 19 nt, Artificial Sequence
  Sense Oligo
uccucuucucccaccauca

SEQ ID NO: 29874 - RNA, 19 nt, Artificial Sequence
  Antisense Oligo
ugauggugggagaagagga

SEQ ID NO: 29875 - RNA, 19 nt, Artificial Sequence
  Sense Oligo
acacgugguaccauugccg

SEQ ID NO: 29876 - RNA, 19 nt, Artificial Sequence
  Antisense Oligo
cggcaaugguaccacgugu

SEQ ID NO: 29877 - RNA, 19 nt, Artificial Sequence
  Sense Oligo
cacgugguaccauugccgg

SEQ ID NO: 29878 - RNA, 19 nt, Artificial Sequence
  Antisense Oligo
ccggcaaugguaccacgug

SEQ ID NO: 29879 - RNA, 19 nt, Artificial Sequence
  Sense Oligo
acgugguaccauugccgga

SEQ ID NO: 29880 - RNA, 19 nt, Artificial Sequence
  Antisense Oligo
uccggcaaugguaccacgu

SEQ ID NO: 29881 - RNA, 19 nt, Artificial Sequence
  Sense Oligo
cgugguaccauugccggac

SEQ ID NO: 29882 - RNA, 19 nt, Artificial Sequence
  Antisense Oligo
guccggcaaugguaccacg

SEQ ID NO: 29883 - RNA, 19 nt, Artificial Sequence
  Sense Oligo
gugguaccauugccggacg

SEQ ID NO: 29884 - RNA, 19 nt, Artificial Sequence
  Antisense Oligo
cguccggcaaugguaccac

SEQ ID NO: 29885 - RNA, 19 nt, Artificial Sequence
  Sense Oligo
ugguaccauugccggacgg

SEQ ID NO: 29886 - RNA, 19 nt, Artificial Sequence
  Antisense Oligo
ccguccggcaaugguacca

SEQ ID NO: 29887 - RNA, 19 nt, Artificial Sequence
  Sense Oligo
gguaccauugccggacgga

SEQ ID NO: 29888 - RNA, 19 nt, Artificial Sequence
  Antisense Oligo
uccguccggcaaugguacc

SEQ ID NO: 29889 - RNA, 19 nt, Artificial Sequence
  Sense Oligo
guaccauugccggacggaa

SEQ ID NO: 29890 - RNA, 19 nt, Artificial Sequence
  Antisense Oligo
uuccguccggcaaugguac

SEQ ID NO: 29891 - RNA, 19 nt, Artificial Sequence
  Sense Oligo
guggacugcccagugagga

SEQ ID NO: 29892 - RNA, 19 nt, Artificial Sequence
  Antisense Oligo
uccucacugggcaguccac

SEQ ID NO: 29893 - RNA, 19 nt, Artificial Sequence
  Sense Oligo
uggacugcccagugaggag

SEQ ID NO: 29894 - RNA, 19 nt, Artificial Sequence
  Antisense Oligo
cuccucacugggcagucca

SEQ ID NO: 29895 - RNA, 19 nt, Artificial Sequence
  Sense Oligo
ggacugcccagugaggagu

SEQ ID NO: 29896 - RNA, 19 nt, Artificial Sequence
  Antisense Oligo
acuccucacugggcagucc

SEQ ID NO: 29897 - RNA, 19 nt, Artificial Sequence
  Sense Oligo
gacugcccagugaggagua

SEQ ID NO: 29898 - RNA, 19 nt, Artificial Sequence
  Antisense Oligo
uacuccucacugggcaguc

SEQ ID NO: 29899 - RNA, 19 nt, Artificial Sequence
  Sense Oligo
cugcccagugaggaguaaa

SEQ ID NO: 29900 - RNA, 19 nt, Artificial Sequence
  Antisense Oligo
uuuacuccucacugggcag

SEQ ID NO: 29901 - RNA, 19 nt, Artificial Sequence
  Sense Oligo
acaggccugauuguccuuu

SEQ ID NO: 29902 - RNA, 19 nt, Artificial Sequence
  Antisense Oligo
aaaggacaaucaggccugu

SEQ ID NO: 29903 - RNA, 19 nt, Artificial Sequence
  Sense Oligo
caggccugauuguccuuuu

SEQ ID NO: 29904 - RNA, 19 nt, Artificial Sequence
  Antisense Oligo
aaaaggacaaucaggccug

SEQ ID NO: 29905 - RNA, 19 nt, Artificial Sequence
  Sense Oligo
agcuuuuauuagaaggcag

SEQ ID NO: 29906 - RNA, 19 nt, Artificial Sequence
  Antisense Oligo
cugccuucuaauaaaagcu

SEQ ID NO: 29907 - RNA, 19 nt, Artificial Sequence
  Sense Oligo
gcuuuuauuagaaggcagc

SEQ ID NO: 29908 - RNA, 19 nt, Artificial Sequence
  Antisense Oligo
gcugccuucuaauaaaagc

SEQ ID NO: 29909 - RNA, 19 nt, Artificial Sequence
  Sense Oligo
aggcagccuggacugguug

SEQ ID NO: 29910 - RNA, 19 nt, Artificial Sequence
  Antisense Oligo
caaccaguccaggcugccu

SEQ ID NO: 29911 - RNA, 19 nt, Artificial Sequence
  Sense Oligo
ggcagccuggacugguugu

SEQ ID NO: 29912 - RNA, 19 nt, Artificial Sequence
  Antisense Oligo
acaaccaguccaggcugcc

SEQ ID NO: 29913 - RNA, 19 nt, Artificial Sequence
  Sense Oligo
gcagccuggacugguugug

SEQ ID NO: 29914 - RNA, 19 nt, Artificial Sequence
  Antisense Oligo
cacaaccaguccaggcugc

SEQ ID NO: 29915 - RNA, 19 nt, Artificial Sequence
  Sense Oligo
cagccuggacugguugugu

SEQ ID NO: 29916 - RNA, 19 nt, Artificial Sequence
  Antisense Oligo
acacaaccaguccaggcug

SEQ ID NO: 29917 - RNA, 19 nt, Artificial Sequence
  Sense Oligo
agccuggacugguuguguc

SEQ ID NO: 29918 - RNA, 19 nt, Artificial Sequence
  Antisense Oligo
gacacaaccaguccaggcu

SEQ ID NO: 29919 - RNA, 19 nt, Artificial Sequence
  Sense Oligo
gccuggacugguuguguca

SEQ ID NO: 29920 - RNA, 19 nt, Artificial Sequence
  Antisense Oligo
ugacacaaccaguccaggc

SEQ ID NO: 29921 - RNA, 19 nt, Artificial Sequence
  Sense Oligo
ggacugguugugucaccuc

SEQ ID NO: 29922 - RNA, 19 nt, Artificial Sequence
  Antisense Oligo
gaggugacacaaccagucc

SEQ ID NO: 29923 - RNA, 19 nt, Artificial Sequence
  Sense Oligo
gacugguugugucaccucc

SEQ ID NO: 29924 - RNA, 19 nt, Artificial Sequence
  Antisense Oligo
ggaggugacacaaccaguc

SEQ ID NO: 29925 - RNA, 19 nt, Artificial Sequence
  Sense Oligo
gguugugucaccuccuaac

SEQ ID NO: 29926 - RNA, 19 nt, Artificial Sequence
  Antisense Oligo
guuaggaggugacacaacc

SEQ ID NO: 29927 - RNA, 19 nt, Artificial Sequence
  Sense Oligo
ucaccuccuaaccucagau

SEQ ID NO: 29928 - RNA, 19 nt, Artificial Sequence
  Antisense Oligo
aucugagguuaggagguga

SEQ ID NO: 29929 - RNA, 19 nt, Artificial Sequence
  Sense Oligo
caccuccuaaccucagaug

SEQ ID NO: 29930 - RNA, 19 nt, Artificial Sequence
  Antisense Oligo
caucugagguuaggaggug

SEQ ID NO: 29931 - RNA, 19 nt, Artificial Sequence
  Sense Oligo
ccuccuaaccucagaugcc

SEQ ID NO: 29932 - RNA, 19 nt, Artificial Sequence
  Antisense Oligo
ggcaucugagguuaggagg

SEQ ID NO: 29933 - RNA, 19 nt, Artificial Sequence
  Sense Oligo
cuccuaaccucagaugcca

SEQ ID NO: 29934 - RNA, 19 nt, Artificial Sequence
  Antisense Oligo
uggcaucugagguuaggag

SEQ ID NO: 29935 - RNA, 19 nt, Artificial Sequence
  Sense Oligo
ccuaaccucagaugccagc

SEQ ID NO: 29936 - RNA, 19 nt, Artificial Sequence
  Antisense Oligo
gcuggcaucugagguuagg

SEQ ID NO: 29937 - RNA, 19 nt, Artificial Sequence
  Sense Oligo
cuaaccucagaugccagcu

SEQ ID NO: 29938 - RNA, 19 nt, Artificial Sequence
  Antisense Oligo
agcuggcaucugagguuag

SEQ ID NO: 29939 - RNA, 19 nt, Artificial Sequence
  Sense Oligo
uaaccucagaugccagcuc

SEQ ID NO: 29940 - RNA, 19 nt, Artificial Sequence
  Antisense Oligo
gagcuggcaucugagguua

SEQ ID NO: 29941 - RNA, 19 nt, Artificial Sequence
  Sense Oligo
aaccucagaugccagcuca

SEQ ID NO: 29942 - RNA, 19 nt, Artificial Sequence
  Antisense Oligo
ugagcuggcaucugagguu

SEQ ID NO: 29943 - RNA, 19 nt, Artificial Sequence
  Sense Oligo
accucagaugccagcucac

SEQ ID NO: 29944 - RNA, 19 nt, Artificial Sequence
  Antisense Oligo
gugagcuggcaucugaggu

SEQ ID NO: 29945 - RNA, 19 nt, Artificial Sequence
  Sense Oligo
ccucagaugccagcucacc

SEQ ID NO: 29946 - RNA, 19 nt, Artificial Sequence
  Antisense Oligo
ggugagcuggcaucugagg

SEQ ID NO: 29947 - RNA, 19 nt, Artificial Sequence
  Sense Oligo
ucagaugccagcucaccag

SEQ ID NO: 29948 - RNA, 19 nt, Artificial Sequence
  Antisense Oligo
cuggugagcuggcaucuga

SEQ ID NO: 29949 - RNA, 19 nt, Artificial Sequence
  Sense Oligo
cagaugccagcucaccaga

SEQ ID NO: 29950 - RNA, 19 nt, Artificial Sequence
  Antisense Oligo
ucuggugagcuggcaucug

SEQ ID NO: 29951 - RNA, 19 nt, Artificial Sequence
  Sense Oligo
agaugccagcucaccagau

SEQ ID NO: 29952 - RNA, 19 nt, Artificial Sequence
  Antisense Oligo
aucuggugagcuggcaucu

SEQ ID NO: 29953 - RNA, 19 nt, Artificial Sequence
  Sense Oligo
gaugccagcucaccagaug

SEQ ID NO: 29954 - RNA, 19 nt, Artificial Sequence
  Antisense Oligo
caucuggugagcuggcauc

SEQ ID NO: 29955 - RNA, 19 nt, Artificial Sequence
  Sense Oligo
augccagcucaccagauga

SEQ ID NO: 29956 - RNA, 19 nt, Artificial Sequence
  Antisense Oligo
ucaucuggugagcuggcau

SEQ ID NO: 29957 - RNA, 19 nt, Artificial Sequence
  Sense Oligo
ucaccagaugaguuucacc

SEQ ID NO: 29958 - RNA, 19 nt, Artificial Sequence
  Antisense Oligo
ggugaaacucaucugguga

SEQ ID NO: 29959 - RNA, 19 nt, Artificial Sequence
  Sense Oligo
agaugaguuucaccgugac

SEQ ID NO: 29960 - RNA, 19 nt, Artificial Sequence
  Antisense Oligo
gucacggugaaacucaucu

SEQ ID NO: 29961 - RNA, 19 nt, Artificial Sequence
  Sense Oligo
gaugaguuucaccgugacc

SEQ ID NO: 29962 - RNA, 19 nt, Artificial Sequence
  Antisense Oligo
ggucacggugaaacucauc

SEQ ID NO: 29963 - RNA, 19 nt, Artificial Sequence
  Sense Oligo
aguuucaccgugaccuaag

SEQ ID NO: 29964 - RNA, 19 nt, Artificial Sequence
  Antisense Oligo
cuuaggucacggugaaacu

SEQ ID NO: 29965 - RNA, 19 nt, Artificial Sequence
  Sense Oligo
guuucaccgugaccuaagc

SEQ ID NO: 29966 - RNA, 19 nt, Artificial Sequence
  Antisense Oligo
gcuuaggucacggugaaac

SEQ ID NO: 29967 - RNA, 19 nt, Artificial Sequence
  Sense Oligo
uuucaccgugaccuaagcc

SEQ ID NO: 29968 - RNA, 19 nt, Artificial Sequence
  Antisense Oligo
ggcuuaggucacggugaaa

SEQ ID NO: 29969 - RNA, 19 nt, Artificial Sequence
  Sense Oligo
uucaccgugaccuaagcca

SEQ ID NO: 29970 - RNA, 19 nt, Artificial Sequence
  Antisense Oligo
uggcuuaggucacggugaa

SEQ ID NO: 29971 - RNA, 19 nt, Artificial Sequence
  Sense Oligo
caccgugaccuaagccaca

SEQ ID NO: 29972 - RNA, 19 nt, Artificial Sequence
  Antisense Oligo
uguggcuuaggucacggug

SEQ ID NO: 29973 - RNA, 19 nt, Artificial Sequence
  Sense Oligo
gugaccuaagccacauccu

SEQ ID NO: 29974 - RNA, 19 nt, Artificial Sequence
  Antisense Oligo
aggauguggcuuaggucac

SEQ ID NO: 29975 - RNA, 19 nt, Artificial Sequence
  Sense Oligo
ugaccuaagccacauccuu

SEQ ID NO: 29976 - RNA, 19 nt, Artificial Sequence
  Antisense Oligo
aaggauguggcuuagguca

SEQ ID NO: 29977 - RNA, 19 nt, Artificial Sequence
  Sense Oligo
gaccuaagccacauccuug

SEQ ID NO: 29978 - RNA, 19 nt, Artificial Sequence
  Antisense Oligo
caaggauguggcuuagguc

SEQ ID NO: 29979 - RNA, 19 nt, Artificial Sequence
  Sense Oligo
accuaagccacauccuugg

SEQ ID NO: 29980 - RNA, 19 nt, Artificial Sequence
  Antisense Oligo
ccaaggauguggcuuaggu

SEQ ID NO: 29981 - RNA, 19 nt, Artificial Sequence
  Sense Oligo
cuaagccacauccuuggga

SEQ ID NO: 29982 - RNA, 19 nt, Artificial Sequence
  Antisense Oligo
ucccaaggauguggcuuag

SEQ ID NO: 29983 - RNA, 19 nt, Artificial Sequence
  Sense Oligo
augauuuucucugauugca

SEQ ID NO: 29984 - RNA, 19 nt, Artificial Sequence
  Antisense Oligo
ugcaaucagagaaaaucau

SEQ ID NO: 29985 - RNA, 19 nt, Artificial Sequence
  Sense Oligo
ugauuuucucugauugcaa

SEQ ID NO: 29986 - RNA, 19 nt, Artificial Sequence
  Antisense Oligo
uugcaaucagagaaaauca

SEQ ID NO: 29987 - RNA, 19 nt, Artificial Sequence
  Sense Oligo
gauuuucucugauugcaaa

SEQ ID NO: 29988 - RNA, 19 nt, Artificial Sequence
  Antisense Oligo
uuugcaaucagagaaaauc

SEQ ID NO: 29989 - RNA, 19 nt, Artificial Sequence
  Sense Oligo
aaaauaagugcuugacuag

SEQ ID NO: 29990 - RNA, 19 nt, Artificial Sequence
  Antisense Oligo
cuagucaagcacuuauuuu

SEQ ID NO: 29991 - RNA, 19 nt, Artificial Sequence
  Sense Oligo
aaauaagugcuugacuaga

SEQ ID NO: 29992 - RNA, 19 nt, Artificial Sequence
  Antisense Oligo
ucuagucaagcacuuauuu

SEQ ID NO: 29993 - RNA, 19 nt, Artificial Sequence
  Sense Oligo
aauaagugcuugacuagag

SEQ ID NO: 29994 - RNA, 19 nt, Artificial Sequence
  Antisense Oligo
cucuagucaagcacuuauu

SEQ ID NO: 29995 - RNA, 19 nt, Artificial Sequence
  Sense Oligo
auaagugcuugacuagagu

SEQ ID NO: 29996 - RNA, 19 nt, Artificial Sequence
  Antisense Oligo
acucuagucaagcacuuau

SEQ ID NO: 29997 - RNA, 19 nt, Artificial Sequence
  Sense Oligo
uaagugcuugacuagagug

SEQ ID NO: 29998 - RNA, 19 nt, Artificial Sequence
  Antisense Oligo
cacucuagucaagcacuua

SEQ ID NO: 29999 - RNA, 19 nt, Artificial Sequence
  Sense Oligo
aagugcuugacuagaguga

SEQ ID NO: 30000 - RNA, 19 nt, Artificial Sequence
  Antisense Oligo
ucacucuagucaagcacuu

SEQ ID NO: 30001 - RNA, 19 nt, Artificial Sequence
  Sense Oligo
gcuugacuagagugacuga

SEQ ID NO: 30002 - RNA, 19 nt, Artificial Sequence
  Antisense Oligo
ucagucacucuagucaagc

SEQ ID NO: 30003 - RNA, 19 nt, Artificial Sequence
  Sense Oligo
aaccacccgugauuuuacc

SEQ ID NO: 30004 - RNA, 19 nt, Artificial Sequence
  Antisense Oligo
gguaaaaucacgggugguu

SEQ ID NO: 30005 - RNA, 19 nt, Artificial Sequence
  Sense Oligo
accacccgugauuuuacca

SEQ ID NO: 30006 - RNA, 19 nt, Artificial Sequence
  Antisense Oligo
ugguaaaaucacggguggu

SEQ ID NO: 30007 - RNA, 19 nt, Artificial Sequence
  Sense Oligo
ccacccgugauuuuaccac

SEQ ID NO: 30008 - RNA, 19 nt, Artificial Sequence
  Antisense Oligo
gugguaaaaucacgggugg

SEQ ID NO: 30009 - RNA, 19 nt, Artificial Sequence
  Sense Oligo
guggucaugucaguaguuu

SEQ ID NO: 30010 - RNA, 19 nt, Artificial Sequence
  Antisense Oligo
aaacuacugacaugaccac

SEQ ID NO: 30011 - RNA, 19 nt, Artificial Sequence
  Sense Oligo
uggucaugucaguaguuuu

SEQ ID NO: 30012 - RNA, 19 nt, Artificial Sequence
  Antisense Oligo
aaaacuacugacaugacca

SEQ ID NO: 30013 - RNA, 19 nt, Artificial Sequence
  Sense Oligo
uuuuccuagcaucugucuu

SEQ ID NO: 30014 - RNA, 19 nt, Artificial Sequence
  Antisense Oligo
aagacagaugcuaggaaaa

SEQ ID NO: 30015 - RNA, 19 nt, Artificial Sequence
  Sense Oligo
ccuagcaucugucuuauuu

SEQ ID NO: 30016 - RNA, 19 nt, Artificial Sequence
  Antisense Oligo
aaauaagacagaugcuagg

SEQ ID NO: 30017 - RNA, 19 nt, Artificial Sequence
  Sense Oligo
cuagcaucugucuuauuuu

SEQ ID NO: 30018 - RNA, 19 nt, Artificial Sequence
  Antisense Oligo
aaaauaagacagaugcuag

SEQ ID NO: 30019 - RNA, 19 nt, Artificial Sequence
  Sense Oligo
guccucuguugaauucccu

SEQ ID NO: 30020 - RNA, 19 nt, Artificial Sequence
  Antisense Oligo
agggaauucaacagaggac

SEQ ID NO: 30021 - RNA, 19 nt, Artificial Sequence
  Sense Oligo
uccucuguugaauucccug

SEQ ID NO: 30022 - RNA, 19 nt, Artificial Sequence
  Antisense Oligo
cagggaauucaacagagga

SEQ ID NO: 30023 - RNA, 19 nt, Artificial Sequence
  Sense Oligo
uugaauucccugccuuuug

SEQ ID NO: 30024 - RNA, 19 nt, Artificial Sequence
  Antisense Oligo
caaaaggcagggaauucaa

SEQ ID NO: 30025 - RNA, 19 nt, Artificial Sequence
  Sense Oligo
ugaauucccugccuuuugu

SEQ ID NO: 30026 - RNA, 19 nt, Artificial Sequence
  Antisense Oligo
acaaaaggcagggaauuca

SEQ ID NO: 30027 - RNA, 19 nt, Artificial Sequence
  Sense Oligo
acggcgucucacucugugg

SEQ ID NO: 30028 - RNA, 19 nt, Artificial Sequence
  Antisense Oligo
ccacagagugagacgccgu

SEQ ID NO: 30029 - RNA, 19 nt, Artificial Sequence
  Sense Oligo
uggcccaggcuggaguaca

SEQ ID NO: 30030 - RNA, 19 nt, Artificial Sequence
  Antisense Oligo
uguacuccagccugggcca

SEQ ID NO: 30031 - RNA, 19 nt, Artificial Sequence
  Sense Oligo
gcccaggcuggaguacagu

SEQ ID NO: 30032 - RNA, 19 nt, Artificial Sequence
  Antisense Oligo
acuguacuccagccugggc

SEQ ID NO: 30033 - RNA, 19 nt, Artificial Sequence
  Sense Oligo
cccaggcuggaguacagug

SEQ ID NO: 30034 - RNA, 19 nt, Artificial Sequence
  Antisense Oligo
cacuguacuccagccuggg

SEQ ID NO: 30035 - RNA, 19 nt, Artificial Sequence
  Sense Oligo
ccaggcuggaguacagugg

SEQ ID NO: 30036 - RNA, 19 nt, Artificial Sequence
  Antisense Oligo
ccacuguacuccagccugg

SEQ ID NO: 30037 - RNA, 19 nt, Artificial Sequence
  Sense Oligo
gcuggaguacaguggcgca

SEQ ID NO: 30038 - RNA, 19 nt, Artificial Sequence
  Antisense Oligo
ugcgccacuguacuccagc

SEQ ID NO: 30039 - RNA, 19 nt, Artificial Sequence
  Sense Oligo
cuggaguacaguggcgcaa

SEQ ID NO: 30040 - RNA, 19 nt, Artificial Sequence
  Antisense Oligo
uugcgccacuguacuccag

SEQ ID NO: 30041 - RNA, 19 nt, Artificial Sequence
  Sense Oligo
uggaguacaguggcgcaau

SEQ ID NO: 30042 - RNA, 19 nt, Artificial Sequence
  Antisense Oligo
auugcgccacuguacucca

SEQ ID NO: 30043 - RNA, 19 nt, Artificial Sequence
  Sense Oligo
ggaguacaguggcgcaauc

SEQ ID NO: 30044 - RNA, 19 nt, Artificial Sequence
  Antisense Oligo
gauugcgccacuguacucc

SEQ ID NO: 30045 - RNA, 19 nt, Artificial Sequence
  Sense Oligo
gaguacaguggcgcaaucu

SEQ ID NO: 30046 - RNA, 19 nt, Artificial Sequence
  Antisense Oligo
agauugcgccacuguacuc

SEQ ID NO: 30047 - RNA, 19 nt, Artificial Sequence
  Sense Oligo
caguggcgcaaucuuggcu

SEQ ID NO: 30048 - RNA, 19 nt, Artificial Sequence
  Antisense Oligo
agccaagauugcgccacug

SEQ ID NO: 30049 - RNA, 19 nt, Artificial Sequence
  Sense Oligo
aguggcgcaaucuuggcuc

SEQ ID NO: 30050 - RNA, 19 nt, Artificial Sequence
  Antisense Oligo
gagccaagauugcgccacu

SEQ ID NO: 30051 - RNA, 19 nt, Artificial Sequence
  Sense Oligo
guggcgcaaucuuggcuca

SEQ ID NO: 30052 - RNA, 19 nt, Artificial Sequence
  Antisense Oligo
ugagccaagauugcgccac

SEQ ID NO: 30053 - RNA, 19 nt, Artificial Sequence
  Sense Oligo
uggcgcaaucuuggcucac

SEQ ID NO: 30054 - RNA, 19 nt, Artificial Sequence
  Antisense Oligo
gugagccaagauugcgcca

SEQ ID NO: 30055 - RNA, 19 nt, Artificial Sequence
  Sense Oligo
ggcgcaaucuuggcucacu

SEQ ID NO: 30056 - RNA, 19 nt, Artificial Sequence
  Antisense Oligo
agugagccaagauugcgcc

SEQ ID NO: 30057 - RNA, 19 nt, Artificial Sequence
  Sense Oligo
gcgcaaucuuggcucacug

SEQ ID NO: 30058 - RNA, 19 nt, Artificial Sequence
  Antisense Oligo
cagugagccaagauugcgc

SEQ ID NO: 30059 - RNA, 19 nt, Artificial Sequence
  Sense Oligo
cgcaaucuuggcucacugc

SEQ ID NO: 30060 - RNA, 19 nt, Artificial Sequence
  Antisense Oligo
gcagugagccaagauugcg

SEQ ID NO: 30061 - RNA, 19 nt, Artificial Sequence
  Sense Oligo
gcaaucuuggcucacugca

SEQ ID NO: 30062 - RNA, 19 nt, Artificial Sequence
  Antisense Oligo
ugcagugagccaagauugc

SEQ ID NO: 30063 - RNA, 19 nt, Artificial Sequence
  Sense Oligo
cucacugcagccuccaccu

SEQ ID NO: 30064 - RNA, 19 nt, Artificial Sequence
  Antisense Oligo
agguggaggcugcagugag

SEQ ID NO: 30065 - RNA, 19 nt, Artificial Sequence
  Sense Oligo
ucacugcagccuccaccuc

SEQ ID NO: 30066 - RNA, 19 nt, Artificial Sequence
  Antisense Oligo
gagguggaggcugcaguga

SEQ ID NO: 30067 - RNA, 19 nt, Artificial Sequence
  Sense Oligo
caauucuccugcuucagcc

SEQ ID NO: 30068 - RNA, 19 nt, Artificial Sequence
  Antisense Oligo
ggcugaagcaggagaauug

SEQ ID NO: 30069 - RNA, 19 nt, Artificial Sequence
  Sense Oligo
ccugcuucagccuccuuag

SEQ ID NO: 30070 - RNA, 19 nt, Artificial Sequence
  Antisense Oligo
cuaaggaggcugaagcagg

SEQ ID NO: 30071 - RNA, 19 nt, Artificial Sequence
  Sense Oligo
cugcuucagccuccuuagu

SEQ ID NO: 30072 - RNA, 19 nt, Artificial Sequence
  Antisense Oligo
acuaaggaggcugaagcag

SEQ ID NO: 30073 - RNA, 19 nt, Artificial Sequence
  Sense Oligo
ccauuuuggccaggcuggu

SEQ ID NO: 30074 - RNA, 19 nt, Artificial Sequence
  Antisense Oligo
accagccuggccaaaaugg

SEQ ID NO: 30075 - RNA, 19 nt, Artificial Sequence
  Sense Oligo
uuggccaggcugguuucga

SEQ ID NO: 30076 - RNA, 19 nt, Artificial Sequence
  Antisense Oligo
ucgaaaccagccuggccaa

SEQ ID NO: 30077 - RNA, 19 nt, Artificial Sequence
  Sense Oligo
aacuccugaccucaaguga

SEQ ID NO: 30078 - RNA, 19 nt, Artificial Sequence
  Antisense Oligo
ucacuugaggucaggaguu

SEQ ID NO: 30079 - RNA, 19 nt, Artificial Sequence
  Sense Oligo
ccugaccucaagugaucca

SEQ ID NO: 30080 - RNA, 19 nt, Artificial Sequence
  Antisense Oligo
uggaucacuugaggucagg

SEQ ID NO: 30081 - RNA, 19 nt, Artificial Sequence
  Sense Oligo
cugaccucaagugauccac

SEQ ID NO: 30082 - RNA, 19 nt, Artificial Sequence
  Antisense Oligo
guggaucacuugaggucag

SEQ ID NO: 30083 - RNA, 19 nt, Artificial Sequence
  Sense Oligo
ugaccucaagugauccacc

SEQ ID NO: 30084 - RNA, 19 nt, Artificial Sequence
  Antisense Oligo
gguggaucacuugagguca

SEQ ID NO: 30085 - RNA, 19 nt, Artificial Sequence
  Sense Oligo
aagugauccacccaccucg

SEQ ID NO: 30086 - RNA, 19 nt, Artificial Sequence
  Antisense Oligo
cgagguggguggaucacuu

SEQ ID NO: 30087 - RNA, 19 nt, Artificial Sequence
  Sense Oligo
agugauccacccaccucgg

SEQ ID NO: 30088 - RNA, 19 nt, Artificial Sequence
  Antisense Oligo
ccgagguggguggaucacu

SEQ ID NO: 30089 - RNA, 19 nt, Artificial Sequence
  Sense Oligo
cucggccucccaaagugcu

SEQ ID NO: 30090 - RNA, 19 nt, Artificial Sequence
  Antisense Oligo
agcacuuugggaggccgag

SEQ ID NO: 30091 - RNA, 19 nt, Artificial Sequence
  Sense Oligo
ucggccucccaaagugcua

SEQ ID NO: 30092 - RNA, 19 nt, Artificial Sequence
  Antisense Oligo
uagcacuuugggaggccga

SEQ ID NO: 30093 - RNA, 19 nt, Artificial Sequence
  Sense Oligo
cggccucccaaagugcuag

SEQ ID NO: 30094 - RNA, 19 nt, Artificial Sequence
  Antisense Oligo
cuagcacuuugggaggccg

SEQ ID NO: 30095 - RNA, 19 nt, Artificial Sequence
  Sense Oligo
ggccucccaaagugcuagg

SEQ ID NO: 30096 - RNA, 19 nt, Artificial Sequence
  Antisense Oligo
ccuagcacuuugggaggcc

SEQ ID NO: 30097 - RNA, 19 nt, Artificial Sequence
  Sense Oligo
gccucccaaagugcuagga

SEQ ID NO: 30098 - RNA, 19 nt, Artificial Sequence
  Antisense Oligo
uccuagcacuuugggaggc

SEQ ID NO: 30099 - RNA, 19 nt, Artificial Sequence
  Sense Oligo
ccucccaaagugcuaggau

SEQ ID NO: 30100 - RNA, 19 nt, Artificial Sequence
  Antisense Oligo
auccuagcacuuugggagg

SEQ ID NO: 30101 - RNA, 19 nt, Artificial Sequence
  Sense Oligo
cucccaaagugcuaggauu

SEQ ID NO: 30102 - RNA, 19 nt, Artificial Sequence
  Antisense Oligo
aauccuagcacuuugggag

SEQ ID NO: 30103 - RNA, 19 nt, Artificial Sequence
  Sense Oligo
ucccaaagugcuaggauug

SEQ ID NO: 30104 - RNA, 19 nt, Artificial Sequence
  Antisense Oligo
caauccuagcacuuuggga

SEQ ID NO: 30105 - RNA, 19 nt, Artificial Sequence
  Sense Oligo
cccaaagugcuaggauugu

SEQ ID NO: 30106 - RNA, 19 nt, Artificial Sequence
  Antisense Oligo
acaauccuagcacuuuggg

SEQ ID NO: 30107 - RNA, 19 nt, Artificial Sequence
  Sense Oligo
ccaaagugcuaggauugua

SEQ ID NO: 30108 - RNA, 19 nt, Artificial Sequence
  Antisense Oligo
uacaauccuagcacuuugg

SEQ ID NO: 30109 - RNA, 19 nt, Artificial Sequence
  Sense Oligo
caaagugcuaggauuguag

SEQ ID NO: 30110 - RNA, 19 nt, Artificial Sequence
  Antisense Oligo
cuacaauccuagcacuuug

SEQ ID NO: 30111 - RNA, 19 nt, Artificial Sequence
  Sense Oligo
aaagugcuaggauuguagg

SEQ ID NO: 30112 - RNA, 19 nt, Artificial Sequence
  Antisense Oligo
ccuacaauccuagcacuuu

SEQ ID NO: 30113 - RNA, 19 nt, Artificial Sequence
  Sense Oligo
auuguaggcgugagccacc

SEQ ID NO: 30114 - RNA, 19 nt, Artificial Sequence
  Antisense Oligo
gguggcucacgccuacaau

SEQ ID NO: 30115 - RNA, 19 nt, Artificial Sequence
  Sense Oligo
uuguaggcgugagccaccg

SEQ ID NO: 30116 - RNA, 19 nt, Artificial Sequence
  Antisense Oligo
cgguggcucacgccuacaa

SEQ ID NO: 30117 - RNA, 19 nt, Artificial Sequence
  Sense Oligo
ccaccgugcugggucugaa

SEQ ID NO: 30118 - RNA, 19 nt, Artificial Sequence
  Antisense Oligo
uucagacccagcacggugg

SEQ ID NO: 30119 - RNA, 19 nt, Artificial Sequence
  Sense Oligo
cgugcugggucugaauacc

SEQ ID NO: 30120 - RNA, 19 nt, Artificial Sequence
  Antisense Oligo
gguauucagacccagcacg

SEQ ID NO: 30121 - RNA, 19 nt, Artificial Sequence
  Sense Oligo
ggucugaauacccugcuuu

SEQ ID NO: 30122 - RNA, 19 nt, Artificial Sequence
  Antisense Oligo
aaagcaggguauucagacc

SEQ ID NO: 30123 - RNA, 19 nt, Artificial Sequence
  Sense Oligo
gucugaauacccugcuuuu

SEQ ID NO: 30124 - RNA, 19 nt, Artificial Sequence
  Antisense Oligo
aaaagcaggguauucagac

SEQ ID NO: 30125 - RNA, 19 nt, Artificial Sequence
  Sense Oligo
ugaagcuucgugugguauc

SEQ ID NO: 30126 - RNA, 19 nt, Artificial Sequence
  Antisense Oligo
gauaccacacgaagcuuca

SEQ ID NO: 30127 - RNA, 19 nt, Artificial Sequence
  Sense Oligo
gaagcuucgugugguauca

SEQ ID NO: 30128 - RNA, 19 nt, Artificial Sequence
  Antisense Oligo
ugauaccacacgaagcuuc

SEQ ID NO: 30129 - RNA, 19 nt, Artificial Sequence
  Sense Oligo
aagcuucgugugguaucau

SEQ ID NO: 30130 - RNA, 19 nt, Artificial Sequence
  Antisense Oligo
augauaccacacgaagcuu

SEQ ID NO: 30131 - RNA, 19 nt, Artificial Sequence
  Sense Oligo
agcuucgugugguaucaug

SEQ ID NO: 30132 - RNA, 19 nt, Artificial Sequence
  Antisense Oligo
caugauaccacacgaagcu

SEQ ID NO: 30133 - RNA, 19 nt, Artificial Sequence
  Sense Oligo
gugugguaucaugagcagc

SEQ ID NO: 30134 - RNA, 19 nt, Artificial Sequence
  Antisense Oligo
gcugcucaugauaccacac

SEQ ID NO: 30135 - RNA, 19 nt, Artificial Sequence
  Sense Oligo
aucaugagcagccucugug

SEQ ID NO: 30136 - RNA, 19 nt, Artificial Sequence
  Antisense Oligo
cacagaggcugcucaugau

SEQ ID NO: 30137 - RNA, 19 nt, Artificial Sequence
  Sense Oligo
caugagcagccucugugug

SEQ ID NO: 30138 - RNA, 19 nt, Artificial Sequence
  Antisense Oligo
cacacagaggcugcucaug

SEQ ID NO: 30139 - RNA, 19 nt, Artificial Sequence
  Sense Oligo
agccucugugugcgcgugu

SEQ ID NO: 30140 - RNA, 19 nt, Artificial Sequence
  Antisense Oligo
acacgcgcacacagaggcu

SEQ ID NO: 30141 - RNA, 19 nt, Artificial Sequence
  Sense Oligo
gccucugugugcgcguguu

SEQ ID NO: 30142 - RNA, 19 nt, Artificial Sequence
  Antisense Oligo
aacacgcgcacacagaggc

SEQ ID NO: 30143 - RNA, 19 nt, Artificial Sequence
  Sense Oligo
ccucugugugcgcguguuu

SEQ ID NO: 30144 - RNA, 19 nt, Artificial Sequence
  Antisense Oligo
aaacacgcgcacacagagg

SEQ ID NO: 30145 - RNA, 19 nt, Artificial Sequence
  Sense Oligo
cucugugugcgcguguuua

SEQ ID NO: 30146 - RNA, 19 nt, Artificial Sequence
  Antisense Oligo
uaaacacgcgcacacagag

SEQ ID NO: 30147 - RNA, 19 nt, Artificial Sequence
  Sense Oligo
ucugugugcgcguguuuag

SEQ ID NO: 30148 - RNA, 19 nt, Artificial Sequence
  Antisense Oligo
cuaaacacgcgcacacaga

SEQ ID NO: 30149 - RNA, 19 nt, Artificial Sequence
  Sense Oligo
cugugugcgcguguuuagg

SEQ ID NO: 30150 - RNA, 19 nt, Artificial Sequence
  Antisense Oligo
ccuaaacacgcgcacacag

SEQ ID NO: 30151 - RNA, 19 nt, Artificial Sequence
  Sense Oligo
ugugugcgcguguuuagga

SEQ ID NO: 30152 - RNA, 19 nt, Artificial Sequence
  Antisense Oligo
uccuaaacacgcgcacaca

SEQ ID NO: 30153 - RNA, 19 nt, Artificial Sequence
  Sense Oligo
gugugcgcguguuuaggag

SEQ ID NO: 30154 - RNA, 19 nt, Artificial Sequence
  Antisense Oligo
cuccuaaacacgcgcacac

SEQ ID NO: 30155 - RNA, 19 nt, Artificial Sequence
  Sense Oligo
ugugcgcguguuuaggagg

SEQ ID NO: 30156 - RNA, 19 nt, Artificial Sequence
  Antisense Oligo
ccuccuaaacacgcgcaca

SEQ ID NO: 30157 - RNA, 19 nt, Artificial Sequence
  Sense Oligo
gugcgcguguuuaggaggu

SEQ ID NO: 30158 - RNA, 19 nt, Artificial Sequence
  Antisense Oligo
accuccuaaacacgcgcac

SEQ ID NO: 30159 - RNA, 19 nt, Artificial Sequence
  Sense Oligo
ugcgcguguuuaggagguu

SEQ ID NO: 30160 - RNA, 19 nt, Artificial Sequence
  Antisense Oligo
aaccuccuaaacacgcgca

SEQ ID NO: 30161 - RNA, 19 nt, Artificial Sequence
  Sense Oligo
gcgcguguuuaggagguug

SEQ ID NO: 30162 - RNA, 19 nt, Artificial Sequence
  Antisense Oligo
caaccuccuaaacacgcgc

SEQ ID NO: 30163 - RNA, 19 nt, Artificial Sequence
  Sense Oligo
cgcguguuuaggagguugu

SEQ ID NO: 30164 - RNA, 19 nt, Artificial Sequence
  Antisense Oligo
acaaccuccuaaacacgcg

SEQ ID NO: 30165 - RNA, 19 nt, Artificial Sequence
  Sense Oligo
gcguguuuaggagguugug

SEQ ID NO: 30166 - RNA, 19 nt, Artificial Sequence
  Antisense Oligo
cacaaccuccuaaacacgc

SEQ ID NO: 30167 - RNA, 19 nt, Artificial Sequence
  Sense Oligo
guguuuaggagguuguggc

SEQ ID NO: 30168 - RNA, 19 nt, Artificial Sequence
  Antisense Oligo
gccacaaccuccuaaacac

SEQ ID NO: 30169 - RNA, 19 nt, Artificial Sequence
  Sense Oligo
ugcagaagcagcgugaaug

SEQ ID NO: 30170 - RNA, 19 nt, Artificial Sequence
  Antisense Oligo
cauucacgcugcuucugca

SEQ ID NO: 30171 - RNA, 19 nt, Artificial Sequence
  Sense Oligo
ccugccugugccgugucua

SEQ ID NO: 30172 - RNA, 19 nt, Artificial Sequence
  Antisense Oligo
uagacacggcacaggcagg

SEQ ID NO: 30173 - RNA, 19 nt, Artificial Sequence
  Sense Oligo
agugugacuguccugggcc

SEQ ID NO: 30174 - RNA, 19 nt, Artificial Sequence
  Antisense Oligo
ggcccaggacagucacacu

SEQ ID NO: 30175 - RNA, 19 nt, Artificial Sequence
  Sense Oligo
gugugacuguccugggccu

SEQ ID NO: 30176 - RNA, 19 nt, Artificial Sequence
  Antisense Oligo
aggcccaggacagucacac

SEQ ID NO: 30177 - RNA, 19 nt, Artificial Sequence
  Sense Oligo
ugugacuguccugggccug

SEQ ID NO: 30178 - RNA, 19 nt, Artificial Sequence
  Antisense Oligo
caggcccaggacagucaca

SEQ ID NO: 30179 - RNA, 19 nt, Artificial Sequence
  Sense Oligo
gugacuguccugggccuga

SEQ ID NO: 30180 - RNA, 19 nt, Artificial Sequence
  Antisense Oligo
ucaggcccaggacagucac

SEQ ID NO: 30181 - RNA, 19 nt, Artificial Sequence
  Sense Oligo
ugacuguccugggccugaa

SEQ ID NO: 30182 - RNA, 19 nt, Artificial Sequence
  Antisense Oligo
uucaggcccaggacaguca

SEQ ID NO: 30183 - RNA, 19 nt, Artificial Sequence
  Sense Oligo
gauggccuuugacuuggua

SEQ ID NO: 30184 - RNA, 19 nt, Artificial Sequence
  Antisense Oligo
uaccaagucaaaggccauc

SEQ ID NO: 30185 - RNA, 19 nt, Artificial Sequence
  Sense Oligo
auggccuuugacuugguac

SEQ ID NO: 30186 - RNA, 19 nt, Artificial Sequence
  Antisense Oligo
guaccaagucaaaggccau

SEQ ID NO: 30187 - RNA, 19 nt, Artificial Sequence
  Sense Oligo
uggccuuugacuugguacc

SEQ ID NO: 30188 - RNA, 19 nt, Artificial Sequence
  Antisense Oligo
gguaccaagucaaaggcca

SEQ ID NO: 30189 - RNA, 19 nt, Artificial Sequence
  Sense Oligo
ggccuuugacuugguaccu

SEQ ID NO: 30190 - RNA, 19 nt, Artificial Sequence
  Antisense Oligo
agguaccaagucaaaggcc

SEQ ID NO: 30191 - RNA, 19 nt, Artificial Sequence
  Sense Oligo
gccuuugacuugguaccug

SEQ ID NO: 30192 - RNA, 19 nt, Artificial Sequence
  Antisense Oligo
cagguaccaagucaaaggc

SEQ ID NO: 30193 - RNA, 19 nt, Artificial Sequence
  Sense Oligo
ccuuugacuugguaccugc

SEQ ID NO: 30194 - RNA, 19 nt, Artificial Sequence
  Antisense Oligo
gcagguaccaagucaaagg

SEQ ID NO: 30195 - RNA, 19 nt, Artificial Sequence
  Sense Oligo
cuuugacuugguaccugcu

SEQ ID NO: 30196 - RNA, 19 nt, Artificial Sequence
  Antisense Oligo
agcagguaccaagucaaag

SEQ ID NO: 30197 - RNA, 19 nt, Artificial Sequence
  Sense Oligo
uuugacuugguaccugcuc

SEQ ID NO: 30198 - RNA, 19 nt, Artificial Sequence
  Antisense Oligo
gagcagguaccaagucaaa

SEQ ID NO: 30199 - RNA, 19 nt, Artificial Sequence
  Sense Oligo
uugacuugguaccugcuca

SEQ ID NO: 30200 - RNA, 19 nt, Artificial Sequence
  Antisense Oligo
ugagcagguaccaagucaa

SEQ ID NO: 30201 - RNA, 19 nt, Artificial Sequence
  Sense Oligo
ugacuugguaccugcucag

SEQ ID NO: 30202 - RNA, 19 nt, Artificial Sequence
  Antisense Oligo
cugagcagguaccaaguca

SEQ ID NO: 30203 - RNA, 19 nt, Artificial Sequence
  Sense Oligo
acuugguaccugcucagac

SEQ ID NO: 30204 - RNA, 19 nt, Artificial Sequence
  Antisense Oligo
gucugagcagguaccaagu

SEQ ID NO: 30205 - RNA, 19 nt, Artificial Sequence
  Sense Oligo
cuugguaccugcucagacc

SEQ ID NO: 30206 - RNA, 19 nt, Artificial Sequence
  Antisense Oligo
ggucugagcagguaccaag

SEQ ID NO: 30207 - RNA, 19 nt, Artificial Sequence
  Sense Oligo
cacugagcucugcacucuc

SEQ ID NO: 30208 - RNA, 19 nt, Artificial Sequence
  Antisense Oligo
gagagugcagagcucagug

SEQ ID NO: 30209 - RNA, 19 nt, Artificial Sequence
  Sense Oligo
acugagcucugcacucucu

SEQ ID NO: 30210 - RNA, 19 nt, Artificial Sequence
  Antisense Oligo
agagagugcagagcucagu

SEQ ID NO: 30211 - RNA, 19 nt, Artificial Sequence
  Sense Oligo
cugagcucugcacucucuc

SEQ ID NO: 30212 - RNA, 19 nt, Artificial Sequence
  Antisense Oligo
gagagagugcagagcucag

SEQ ID NO: 30213 - RNA, 19 nt, Artificial Sequence
  Sense Oligo
gagcucugcacucucucug

SEQ ID NO: 30214 - RNA, 19 nt, Artificial Sequence
  Antisense Oligo
cagagagagugcagagcuc

SEQ ID NO: 30215 - RNA, 19 nt, Artificial Sequence
  Sense Oligo
cugcacucucucugcgugu

SEQ ID NO: 30216 - RNA, 19 nt, Artificial Sequence
  Antisense Oligo
acacgcagagagagugcag

SEQ ID NO: 30217 - RNA, 19 nt, Artificial Sequence
  Sense Oligo
ugcacucucucugcgugug

SEQ ID NO: 30218 - RNA, 19 nt, Artificial Sequence
  Antisense Oligo
cacacgcagagagagugca

SEQ ID NO: 30219 - RNA, 19 nt, Artificial Sequence
  Sense Oligo
cugcguguguugauuugaa

SEQ ID NO: 30220 - RNA, 19 nt, Artificial Sequence
  Antisense Oligo
uucaaaucaacacacgcag

SEQ ID NO: 30221 - RNA, 19 nt, Artificial Sequence
  Sense Oligo
agaaugacauuagguagcc

SEQ ID NO: 30222 - RNA, 19 nt, Artificial Sequence
  Antisense Oligo
ggcuaccuaaugucauucu

SEQ ID NO: 30223 - RNA, 19 nt, Artificial Sequence
  Sense Oligo
gaaugacauuagguagccu

SEQ ID NO: 30224 - RNA, 19 nt, Artificial Sequence
  Antisense Oligo
aggcuaccuaaugucauuc

SEQ ID NO: 30225 - RNA, 19 nt, Artificial Sequence
  Sense Oligo
aaugacauuagguagccuu

SEQ ID NO: 30226 - RNA, 19 nt, Artificial Sequence
  Antisense Oligo
aaggcuaccuaaugucauu

SEQ ID NO: 30227 - RNA, 19 nt, Artificial Sequence
  Sense Oligo
augacauuagguagccuuu

SEQ ID NO: 30228 - RNA, 19 nt, Artificial Sequence
  Antisense Oligo
aaaggcuaccuaaugucau

SEQ ID NO: 30229 - RNA, 19 nt, Artificial Sequence
  Sense Oligo
gccuuuccugaccagcaug

SEQ ID NO: 30230 - RNA, 19 nt, Artificial Sequence
  Antisense Oligo
caugcuggucaggaaaggc

SEQ ID NO: 30231 - RNA, 19 nt, Artificial Sequence
  Sense Oligo
ccuuuccugaccagcaugu

SEQ ID NO: 30232 - RNA, 19 nt, Artificial Sequence
  Antisense Oligo
acaugcuggucaggaaagg

SEQ ID NO: 30233 - RNA, 19 nt, Artificial Sequence
  Sense Oligo
uuuccugaccagcaugucu

SEQ ID NO: 30234 - RNA, 19 nt, Artificial Sequence
  Antisense Oligo
agacaugcuggucaggaaa

SEQ ID NO: 30235 - RNA, 19 nt, Artificial Sequence
  Sense Oligo
ugaccagcaugucuuauca

SEQ ID NO: 30236 - RNA, 19 nt, Artificial Sequence
  Antisense Oligo
ugauaagacaugcugguca

SEQ ID NO: 30237 - RNA, 19 nt, Artificial Sequence
  Sense Oligo
gaccagcaugucuuaucac

SEQ ID NO: 30238 - RNA, 19 nt, Artificial Sequence
  Antisense Oligo
gugauaagacaugcugguc

SEQ ID NO: 30239 - RNA, 19 nt, Artificial Sequence
  Sense Oligo
accagcaugucuuaucacg

SEQ ID NO: 30240 - RNA, 19 nt, Artificial Sequence
  Antisense Oligo
cgugauaagacaugcuggu

SEQ ID NO: 30241 - RNA, 19 nt, Artificial Sequence
  Sense Oligo
ccagcaugucuuaucacga

SEQ ID NO: 30242 - RNA, 19 nt, Artificial Sequence
  Antisense Oligo
ucgugauaagacaugcugg

SEQ ID NO: 30243 - RNA, 19 nt, Artificial Sequence
  Sense Oligo
cagcaugucuuaucacgac

SEQ ID NO: 30244 - RNA, 19 nt, Artificial Sequence
  Antisense Oligo
gucgugauaagacaugcug

SEQ ID NO: 30245 - RNA, 19 nt, Artificial Sequence
  Sense Oligo
gucuuaucacgacaucugc

SEQ ID NO: 30246 - RNA, 19 nt, Artificial Sequence
  Antisense Oligo
gcagaugucgugauaagac

SEQ ID NO: 30247 - RNA, 19 nt, Artificial Sequence
  Sense Oligo
ucuuaucacgacaucugcc

SEQ ID NO: 30248 - RNA, 19 nt, Artificial Sequence
  Antisense Oligo
ggcagaugucgugauaaga

SEQ ID NO: 30249 - RNA, 19 nt, Artificial Sequence
  Sense Oligo
cuuaucacgacaucugccu

SEQ ID NO: 30250 - RNA, 19 nt, Artificial Sequence
  Antisense Oligo
aggcagaugucgugauaag

SEQ ID NO: 30251 - RNA, 19 nt, Artificial Sequence
  Sense Oligo
ucacgacaucugccucuca

SEQ ID NO: 30252 - RNA, 19 nt, Artificial Sequence
  Antisense Oligo
ugagaggcagaugucguga

SEQ ID NO: 30253 - RNA, 19 nt, Artificial Sequence
  Sense Oligo
cacgacaucugccucucag

SEQ ID NO: 30254 - RNA, 19 nt, Artificial Sequence
  Antisense Oligo
cugagaggcagaugucgug

SEQ ID NO: 30255 - RNA, 19 nt, Artificial Sequence
  Sense Oligo
acgacaucugccucucagu

SEQ ID NO: 30256 - RNA, 19 nt, Artificial Sequence
  Antisense Oligo
acugagaggcagaugucgu

SEQ ID NO: 30257 - RNA, 19 nt, Artificial Sequence
  Sense Oligo
cgacaucugccucucaguu

SEQ ID NO: 30258 - RNA, 19 nt, Artificial Sequence
  Antisense Oligo
aacugagaggcagaugucg

SEQ ID NO: 30259 - RNA, 19 nt, Artificial Sequence
  Sense Oligo
gacaucugccucucaguuu

SEQ ID NO: 30260 - RNA, 19 nt, Artificial Sequence
  Antisense Oligo
aaacugagaggcagauguc

SEQ ID NO: 30261 - RNA, 19 nt, Artificial Sequence
  Sense Oligo
acaucugccucucaguuuu

SEQ ID NO: 30262 - RNA, 19 nt, Artificial Sequence
  Antisense Oligo
aaaacugagaggcagaugu

SEQ ID NO: 30263 - RNA, 19 nt, Artificial Sequence
  Sense Oligo
aucugccucucaguuuuac

SEQ ID NO: 30264 - RNA, 19 nt, Artificial Sequence
  Antisense Oligo
guaaaacugagaggcagau

SEQ ID NO: 30265 - RNA, 19 nt, Artificial Sequence
  Sense Oligo
cugccucucaguuuuacac

SEQ ID NO: 30266 - RNA, 19 nt, Artificial Sequence
  Antisense Oligo
guguaaaacugagaggcag

SEQ ID NO: 30267 - RNA, 19 nt, Artificial Sequence
  Sense Oligo
cuggagugcaguggagcaa

SEQ ID NO: 30268 - RNA, 19 nt, Artificial Sequence
  Antisense Oligo
uugcuccacugcacuccag

SEQ ID NO: 30269 - RNA, 19 nt, Artificial Sequence
  Sense Oligo
cugcagcuucagccucaca

SEQ ID NO: 30270 - RNA, 19 nt, Artificial Sequence
  Antisense Oligo
ugugaggcugaagcugcag

SEQ ID NO: 30271 - RNA, 19 nt, Artificial Sequence
  Sense Oligo
ugcagcuucagccucacag

SEQ ID NO: 30272 - RNA, 19 nt, Artificial Sequence
  Antisense Oligo
cugugaggcugaagcugca

SEQ ID NO: 30273 - RNA, 19 nt, Artificial Sequence
  Sense Oligo
gcagcuucagccucacaga

SEQ ID NO: 30274 - RNA, 19 nt, Artificial Sequence
  Antisense Oligo
ucugugaggcugaagcugc

SEQ ID NO: 30275 - RNA, 19 nt, Artificial Sequence
  Sense Oligo
cagcuucagccucacagac

SEQ ID NO: 30276 - RNA, 19 nt, Artificial Sequence
  Antisense Oligo
gucugugaggcugaagcug

SEQ ID NO: 30277 - RNA, 19 nt, Artificial Sequence
  Sense Oligo
gcuucagccucacagacuc

SEQ ID NO: 30278 - RNA, 19 nt, Artificial Sequence
  Antisense Oligo
gagucugugaggcugaagc

SEQ ID NO: 30279 - RNA, 19 nt, Artificial Sequence
  Sense Oligo
cuucagccucacagacuca

SEQ ID NO: 30280 - RNA, 19 nt, Artificial Sequence
  Antisense Oligo
ugagucugugaggcugaag

SEQ ID NO: 30281 - RNA, 19 nt, Artificial Sequence
  Sense Oligo
agccucacagacucaggug

SEQ ID NO: 30282 - RNA, 19 nt, Artificial Sequence
  Antisense Oligo
caccugagucugugaggcu

SEQ ID NO: 30283 - RNA, 19 nt, Artificial Sequence
  Sense Oligo
gccucacagacucaggugg

SEQ ID NO: 30284 - RNA, 19 nt, Artificial Sequence
  Antisense Oligo
ccaccugagucugugaggc

SEQ ID NO: 30285 - RNA, 19 nt, Artificial Sequence
  Sense Oligo
ccucacagacucagguggu

SEQ ID NO: 30286 - RNA, 19 nt, Artificial Sequence
  Antisense Oligo
accaccugagucugugagg

SEQ ID NO: 30287 - RNA, 19 nt, Artificial Sequence
  Sense Oligo
cucacagacucaggugguu

SEQ ID NO: 30288 - RNA, 19 nt, Artificial Sequence
  Antisense Oligo
aaccaccugagucugugag

SEQ ID NO: 30289 - RNA, 19 nt, Artificial Sequence
  Sense Oligo
ucacagacucaggugguuc

SEQ ID NO: 30290 - RNA, 19 nt, Artificial Sequence
  Antisense Oligo
gaaccaccugagucuguga

SEQ ID NO: 30291 - RNA, 19 nt, Artificial Sequence
  Sense Oligo
cacagacucaggugguucu

SEQ ID NO: 30292 - RNA, 19 nt, Artificial Sequence
  Antisense Oligo
agaaccaccugagucugug

SEQ ID NO: 30293 - RNA, 19 nt, Artificial Sequence
  Sense Oligo
agccuccugaguagcuggg

SEQ ID NO: 30294 - RNA, 19 nt, Artificial Sequence
  Antisense Oligo
cccagcuacucaggaggcu

SEQ ID NO: 30295 - RNA, 19 nt, Artificial Sequence
  Sense Oligo
gccuccugaguagcuggga

SEQ ID NO: 30296 - RNA, 19 nt, Artificial Sequence
  Antisense Oligo
ucccagcuacucaggaggc

SEQ ID NO: 30297 - RNA, 19 nt, Artificial Sequence
  Sense Oligo
ccuccugaguagcugggac

SEQ ID NO: 30298 - RNA, 19 nt, Artificial Sequence
  Antisense Oligo
gucccagcuacucaggagg

SEQ ID NO: 30299 - RNA, 19 nt, Artificial Sequence
  Sense Oligo
cuccugaguagcugggacu

SEQ ID NO: 30300 - RNA, 19 nt, Artificial Sequence
  Antisense Oligo
agucccagcuacucaggag

SEQ ID NO: 30301 - RNA, 19 nt, Artificial Sequence
  Sense Oligo
ccauguugccacggugguc

SEQ ID NO: 30302 - RNA, 19 nt, Artificial Sequence
  Antisense Oligo
gaccaccguggcaacaugg

SEQ ID NO: 30303 - RNA, 19 nt, Artificial Sequence
  Sense Oligo
cauguugccacgguggucu

SEQ ID NO: 30304 - RNA, 19 nt, Artificial Sequence
  Antisense Oligo
agaccaccguggcaacaug

SEQ ID NO: 30305 - RNA, 19 nt, Artificial Sequence
  Sense Oligo
auguugccacgguggucuu

SEQ ID NO: 30306 - RNA, 19 nt, Artificial Sequence
  Antisense Oligo
aagaccaccguggcaacau

SEQ ID NO: 30307 - RNA, 19 nt, Artificial Sequence
  Sense Oligo
uguugccacgguggucuug

SEQ ID NO: 30308 - RNA, 19 nt, Artificial Sequence
  Antisense Oligo
caagaccaccguggcaaca

SEQ ID NO: 30309 - RNA, 19 nt, Artificial Sequence
  Sense Oligo
guugccacgguggucuuga

SEQ ID NO: 30310 - RNA, 19 nt, Artificial Sequence
  Antisense Oligo
ucaagaccaccguggcaac

SEQ ID NO: 30311 - RNA, 19 nt, Artificial Sequence
  Sense Oligo
uugccacgguggucuugag

SEQ ID NO: 30312 - RNA, 19 nt, Artificial Sequence
  Antisense Oligo
cucaagaccaccguggcaa

SEQ ID NO: 30313 - RNA, 19 nt, Artificial Sequence
  Sense Oligo
ccacgguggucuugagcuc

SEQ ID NO: 30314 - RNA, 19 nt, Artificial Sequence
  Antisense Oligo
gagcucaagaccaccgugg

SEQ ID NO: 30315 - RNA, 19 nt, Artificial Sequence
  Sense Oligo
uugagcuccugaccuugug

SEQ ID NO: 30316 - RNA, 19 nt, Artificial Sequence
  Antisense Oligo
cacaaggucaggagcucaa

SEQ ID NO: 30317 - RNA, 19 nt, Artificial Sequence
  Sense Oligo
gcuccugaccuugugaucc

SEQ ID NO: 30318 - RNA, 19 nt, Artificial Sequence
  Antisense Oligo
ggaucacaaggucaggagc

SEQ ID NO: 30319 - RNA, 19 nt, Artificial Sequence
  Sense Oligo
gaccuugugauccgccugc

SEQ ID NO: 30320 - RNA, 19 nt, Artificial Sequence
  Antisense Oligo
gcaggcggaucacaagguc

SEQ ID NO: 30321 - RNA, 19 nt, Artificial Sequence
  Sense Oligo
accuugugauccgccugcc

SEQ ID NO: 30322 - RNA, 19 nt, Artificial Sequence
  Antisense Oligo
ggcaggcggaucacaaggu

SEQ ID NO: 30323 - RNA, 19 nt, Artificial Sequence
  Sense Oligo
ccuugugauccgccugccu

SEQ ID NO: 30324 - RNA, 19 nt, Artificial Sequence
  Antisense Oligo
aggcaggcggaucacaagg

SEQ ID NO: 30325 - RNA, 19 nt, Artificial Sequence
  Sense Oligo
ccucgaccucccaaagugc

SEQ ID NO: 30326 - RNA, 19 nt, Artificial Sequence
  Antisense Oligo
gcacuuugggaggucgagg

SEQ ID NO: 30327 - RNA, 19 nt, Artificial Sequence
  Sense Oligo
cucgaccucccaaagugcu

SEQ ID NO: 30328 - RNA, 19 nt, Artificial Sequence
  Antisense Oligo
agcacuuugggaggucgag

SEQ ID NO: 30329 - RNA, 19 nt, Artificial Sequence
  Sense Oligo
aagugcugggauuauagac

SEQ ID NO: 30330 - RNA, 19 nt, Artificial Sequence
  Antisense Oligo
gucuauaaucccagcacuu

SEQ ID NO: 30331 - RNA, 19 nt, Artificial Sequence
  Sense Oligo
agugcugggauuauagaca

SEQ ID NO: 30332 - RNA, 19 nt, Artificial Sequence
  Antisense Oligo
ugucuauaaucccagcacu

SEQ ID NO: 30333 - RNA, 19 nt, Artificial Sequence
  Sense Oligo
gacaugagccacugugccu

SEQ ID NO: 30334 - RNA, 19 nt, Artificial Sequence
  Antisense Oligo
aggcacaguggcucauguc

SEQ ID NO: 30335 - RNA, 19 nt, Artificial Sequence
  Sense Oligo
acaugagccacugugccug

SEQ ID NO: 30336 - RNA, 19 nt, Artificial Sequence
  Antisense Oligo
caggcacaguggcucaugu

SEQ ID NO: 30337 - RNA, 19 nt, Artificial Sequence
  Sense Oligo
caugagccacugugccugg

SEQ ID NO: 30338 - RNA, 19 nt, Artificial Sequence
  Antisense Oligo
ccaggcacaguggcucaug

SEQ ID NO: 30339 - RNA, 19 nt, Artificial Sequence
  Sense Oligo
cacugugccuggccugguu

SEQ ID NO: 30340 - RNA, 19 nt, Artificial Sequence
  Antisense Oligo
aaccaggccaggcacagug

SEQ ID NO: 30341 - RNA, 19 nt, Artificial Sequence
  Sense Oligo
caaagaggaggaguggagg

SEQ ID NO: 30342 - RNA, 19 nt, Artificial Sequence
  Antisense Oligo
ccuccacuccuccucuuug

SEQ ID NO: 30343 - RNA, 19 nt, Artificial Sequence
  Sense Oligo
aagaggaggaguggaggca

SEQ ID NO: 30344 - RNA, 19 nt, Artificial Sequence
  Antisense Oligo
ugccuccacuccuccucuu

SEQ ID NO: 30345 - RNA, 19 nt, Artificial Sequence
  Sense Oligo
aggaggaguggaggcaaag

SEQ ID NO: 30346 - RNA, 19 nt, Artificial Sequence
  Antisense Oligo
cuuugccuccacuccuccu

SEQ ID NO: 30347 - RNA, 19 nt, Artificial Sequence
  Sense Oligo
gaggaguggaggcaaaggc

SEQ ID NO: 30348 - RNA, 19 nt, Artificial Sequence
  Antisense Oligo
gccuuugccuccacuccuc

SEQ ID NO: 30349 - RNA, 19 nt, Artificial Sequence
  Sense Oligo
gaguggaggcaaaggcaau

SEQ ID NO: 30350 - RNA, 19 nt, Artificial Sequence
  Antisense Oligo
auugccuuugccuccacuc

SEQ ID NO: 30351 - RNA, 19 nt, Artificial Sequence
  Sense Oligo
guggaggcaaaggcaaugu

SEQ ID NO: 30352 - RNA, 19 nt, Artificial Sequence
  Antisense Oligo
acauugccuuugccuccac

SEQ ID NO: 30353 - RNA, 19 nt, Artificial Sequence
  Sense Oligo
uggaggcaaaggcaaugua

SEQ ID NO: 30354 - RNA, 19 nt, Artificial Sequence
  Antisense Oligo
uacauugccuuugccucca

SEQ ID NO: 30355 - RNA, 19 nt, Artificial Sequence
  Sense Oligo
ggaggcaaaggcaauguac

SEQ ID NO: 30356 - RNA, 19 nt, Artificial Sequence
  Antisense Oligo
guacauugccuuugccucc

SEQ ID NO: 30357 - RNA, 19 nt, Artificial Sequence
  Sense Oligo
gcaaaggcaauguacagag

SEQ ID NO: 30358 - RNA, 19 nt, Artificial Sequence
  Antisense Oligo
cucuguacauugccuuugc

SEQ ID NO: 30359 - RNA, 19 nt, Artificial Sequence
  Sense Oligo
caaaggcaauguacagagu

SEQ ID NO: 30360 - RNA, 19 nt, Artificial Sequence
  Antisense Oligo
acucuguacauugccuuug

SEQ ID NO: 30361 - RNA, 19 nt, Artificial Sequence
  Sense Oligo
aaaggcaauguacagaguu

SEQ ID NO: 30362 - RNA, 19 nt, Artificial Sequence
  Antisense Oligo
aacucuguacauugccuuu

SEQ ID NO: 30363 - RNA, 19 nt, Artificial Sequence
  Sense Oligo
aaggcaauguacagaguua

SEQ ID NO: 30364 - RNA, 19 nt, Artificial Sequence
  Antisense Oligo
uaacucuguacauugccuu

SEQ ID NO: 30365 - RNA, 19 nt, Artificial Sequence
  Sense Oligo
aggcaauguacagaguuag

SEQ ID NO: 30366 - RNA, 19 nt, Artificial Sequence
  Antisense Oligo
cuaacucuguacauugccu

SEQ ID NO: 30367 - RNA, 19 nt, Artificial Sequence
  Sense Oligo
ggcaauguacagaguuagu

SEQ ID NO: 30368 - RNA, 19 nt, Artificial Sequence
  Antisense Oligo
acuaacucuguacauugcc

SEQ ID NO: 30369 - RNA, 19 nt, Artificial Sequence
  Sense Oligo
gcaauguacagaguuagug

SEQ ID NO: 30370 - RNA, 19 nt, Artificial Sequence
  Antisense Oligo
cacuaacucuguacauugc

SEQ ID NO: 30371 - RNA, 19 nt, Artificial Sequence
  Sense Oligo
caauguacagaguuagugc

SEQ ID NO: 30372 - RNA, 19 nt, Artificial Sequence
  Antisense Oligo
gcacuaacucuguacauug

SEQ ID NO: 30373 - RNA, 19 nt, Artificial Sequence
  Sense Oligo
aauguacagaguuagugcc

SEQ ID NO: 30374 - RNA, 19 nt, Artificial Sequence
  Antisense Oligo
ggcacuaacucuguacauu

SEQ ID NO: 30375 - RNA, 19 nt, Artificial Sequence
  Sense Oligo
auguacagaguuagugccg

SEQ ID NO: 30376 - RNA, 19 nt, Artificial Sequence
  Antisense Oligo
cggcacuaacucuguacau

SEQ ID NO: 30377 - RNA, 19 nt, Artificial Sequence
  Sense Oligo
uguacagaguuagugccgg

SEQ ID NO: 30378 - RNA, 19 nt, Artificial Sequence
  Antisense Oligo
ccggcacuaacucuguaca

SEQ ID NO: 30379 - RNA, 19 nt, Artificial Sequence
  Sense Oligo
cuuaaaguaugaggaauca

SEQ ID NO: 30380 - RNA, 19 nt, Artificial Sequence
  Antisense Oligo
ugauuccucauacuuuaag

SEQ ID NO: 30381 - RNA, 19 nt, Artificial Sequence
  Sense Oligo
ccauguauuguuuauaggc

SEQ ID NO: 30382 - RNA, 19 nt, Artificial Sequence
  Antisense Oligo
gccuauaaacaauacaugg

SEQ ID NO: 30383 - RNA, 19 nt, Artificial Sequence
  Sense Oligo
cauguauuguuuauaggcu

SEQ ID NO: 30384 - RNA, 19 nt, Artificial Sequence
  Antisense Oligo
agccuauaaacaauacaug

SEQ ID NO: 30385 - RNA, 19 nt, Artificial Sequence
  Sense Oligo
uguauuguuuauaggcuca

SEQ ID NO: 30386 - RNA, 19 nt, Artificial Sequence
  Antisense Oligo
ugagccuauaaacaauaca

SEQ ID NO: 30387 - RNA, 19 nt, Artificial Sequence
  Sense Oligo
guauuguuuauaggcucaa

SEQ ID NO: 30388 - RNA, 19 nt, Artificial Sequence
  Antisense Oligo
uugagccuauaaacaauac

SEQ ID NO: 30389 - RNA, 19 nt, Artificial Sequence
  Sense Oligo
uauuguuuauaggcucaac

SEQ ID NO: 30390 - RNA, 19 nt, Artificial Sequence
  Antisense Oligo
guugagccuauaaacaaua

SEQ ID NO: 30391 - RNA, 19 nt, Artificial Sequence
  Sense Oligo
uuauaggcucaacccuuac

SEQ ID NO: 30392 - RNA, 19 nt, Artificial Sequence
  Antisense Oligo
guaaggguugagccuauaa

SEQ ID NO: 30393 - RNA, 19 nt, Artificial Sequence
  Sense Oligo
cgugguggugcaugccugu

SEQ ID NO: 30394 - RNA, 19 nt, Artificial Sequence
  Antisense Oligo
acaggcaugcaccaccacg

SEQ ID NO: 30395 - RNA, 19 nt, Artificial Sequence
  Sense Oligo
gugguggugcaugccugua

SEQ ID NO: 30396 - RNA, 19 nt, Artificial Sequence
  Antisense Oligo
uacaggcaugcaccaccac

SEQ ID NO: 30397 - RNA, 19 nt, Artificial Sequence
  Sense Oligo
ugguggugcaugccuguaa

SEQ ID NO: 30398 - RNA, 19 nt, Artificial Sequence
  Antisense Oligo
uuacaggcaugcaccacca

SEQ ID NO: 30399 - RNA, 19 nt, Artificial Sequence
  Sense Oligo
gguggugcaugccuguaau

SEQ ID NO: 30400 - RNA, 19 nt, Artificial Sequence
  Antisense Oligo
auuacaggcaugcaccacc

SEQ ID NO: 30401 - RNA, 19 nt, Artificial Sequence
  Sense Oligo
guggugcaugccuguaauc

SEQ ID NO: 30402 - RNA, 19 nt, Artificial Sequence
  Antisense Oligo
gauuacaggcaugcaccac

SEQ ID NO: 30403 - RNA, 19 nt, Artificial Sequence
  Sense Oligo
uggugcaugccuguaaucc

SEQ ID NO: 30404 - RNA, 19 nt, Artificial Sequence
  Antisense Oligo
ggauuacaggcaugcacca

SEQ ID NO: 30405 - RNA, 19 nt, Artificial Sequence
  Sense Oligo
ggugcaugccuguaauccc

SEQ ID NO: 30406 - RNA, 19 nt, Artificial Sequence
  Antisense Oligo
gggauuacaggcaugcacc

SEQ ID NO: 30407 - RNA, 19 nt, Artificial Sequence
  Sense Oligo
augccuguaaucccagcua

SEQ ID NO: 30408 - RNA, 19 nt, Artificial Sequence
  Antisense Oligo
uagcugggauuacaggcau

SEQ ID NO: 30409 - RNA, 19 nt, Artificial Sequence
  Sense Oligo
ugccuguaaucccagcuac

SEQ ID NO: 30410 - RNA, 19 nt, Artificial Sequence
  Antisense Oligo
guagcugggauuacaggca

SEQ ID NO: 30411 - RNA, 19 nt, Artificial Sequence
  Sense Oligo
gccuguaaucccagcuacu

SEQ ID NO: 30412 - RNA, 19 nt, Artificial Sequence
  Antisense Oligo
aguagcugggauuacaggc

SEQ ID NO: 30413 - RNA, 19 nt, Artificial Sequence
  Sense Oligo
ccuguaaucccagcuacuc

SEQ ID NO: 30414 - RNA, 19 nt, Artificial Sequence
  Antisense Oligo
gaguagcugggauuacagg

SEQ ID NO: 30415 - RNA, 19 nt, Artificial Sequence
  Sense Oligo
cuguaaucccagcuacuca

SEQ ID NO: 30416 - RNA, 19 nt, Artificial Sequence
  Antisense Oligo
ugaguagcugggauuacag

SEQ ID NO: 30417 - RNA, 19 nt, Artificial Sequence
  Sense Oligo
ucccagcuacucaggaggc

SEQ ID NO: 30418 - RNA, 19 nt, Artificial Sequence
  Antisense Oligo
gccuccugaguagcuggga

SEQ ID NO: 30419 - RNA, 19 nt, Artificial Sequence
  Sense Oligo
cccagcuacucaggaggcu

SEQ ID NO: 30420 - RNA, 19 nt, Artificial Sequence
  Antisense Oligo
agccuccugaguagcuggg

SEQ ID NO: 30421 - RNA, 19 nt, Artificial Sequence
  Sense Oligo
gagguugcagugagccgag

SEQ ID NO: 30422 - RNA, 19 nt, Artificial Sequence
  Antisense Oligo
cucggcucacugcaaccuc

SEQ ID NO: 30423 - RNA, 19 nt, Artificial Sequence
  Sense Oligo
uuauggcucacaccuguaa

SEQ ID NO: 30424 - RNA, 19 nt, Artificial Sequence
  Antisense Oligo
uuacaggugugagccauaa

SEQ ID NO: 30425 - RNA, 19 nt, Artificial Sequence
  Sense Oligo
uauggcucacaccuguaau

SEQ ID NO: 30426 - RNA, 19 nt, Artificial Sequence
  Antisense Oligo
auuacaggugugagccaua

SEQ ID NO: 30427 - RNA, 19 nt, Artificial Sequence
  Sense Oligo
auggcucacaccuguaauc

SEQ ID NO: 30428 - RNA, 19 nt, Artificial Sequence
  Antisense Oligo
gauuacaggugugagccau

SEQ ID NO: 30429 - RNA, 19 nt, Artificial Sequence
  Sense Oligo
uggcucacaccuguaaucc

SEQ ID NO: 30430 - RNA, 19 nt, Artificial Sequence
  Antisense Oligo
ggauuacaggugugagcca

SEQ ID NO: 30431 - RNA, 19 nt, Artificial Sequence
  Sense Oligo
ggcucacaccuguaauccc

SEQ ID NO: 30432 - RNA, 19 nt, Artificial Sequence
  Antisense Oligo
gggauuacaggugugagcc

SEQ ID NO: 30433 - RNA, 19 nt, Artificial Sequence
  Sense Oligo
acaccuguaaucccagugc

SEQ ID NO: 30434 - RNA, 19 nt, Artificial Sequence
  Antisense Oligo
gcacugggauuacaggugu

SEQ ID NO: 30435 - RNA, 19 nt, Artificial Sequence
  Sense Oligo
caccuguaaucccagugcu

SEQ ID NO: 30436 - RNA, 19 nt, Artificial Sequence
  Antisense Oligo
agcacugggauuacaggug

SEQ ID NO: 30437 - RNA, 19 nt, Artificial Sequence
  Sense Oligo
accuguaaucccagugcuu

SEQ ID NO: 30438 - RNA, 19 nt, Artificial Sequence
  Antisense Oligo
aagcacugggauuacaggu

SEQ ID NO: 30439 - RNA, 19 nt, Artificial Sequence
  Sense Oligo
ccuguaaucccagugcuuu

SEQ ID NO: 30440 - RNA, 19 nt, Artificial Sequence
  Antisense Oligo
aaagcacugggauuacagg

SEQ ID NO: 30441 - RNA, 19 nt, Artificial Sequence
  Sense Oligo
cagugcuuugggaggcuga

SEQ ID NO: 30442 - RNA, 19 nt, Artificial Sequence
  Antisense Oligo
ucagccucccaaagcacug

SEQ ID NO: 30443 - RNA, 19 nt, Artificial Sequence
  Sense Oligo
agugcuuugggaggcugag

SEQ ID NO: 30444 - RNA, 19 nt, Artificial Sequence
  Antisense Oligo
cucagccucccaaagcacu

SEQ ID NO: 30445 - RNA, 19 nt, Artificial Sequence
  Sense Oligo
gugcuuugggaggcugagg

SEQ ID NO: 30446 - RNA, 19 nt, Artificial Sequence
  Antisense Oligo
ccucagccucccaaagcac

SEQ ID NO: 30447 - RNA, 19 nt, Artificial Sequence
  Sense Oligo
ugcuuugggaggcugaggc

SEQ ID NO: 30448 - RNA, 19 nt, Artificial Sequence
  Antisense Oligo
gccucagccucccaaagca

SEQ ID NO: 30449 - RNA, 19 nt, Artificial Sequence
  Sense Oligo
gcuuugggaggcugaggca

SEQ ID NO: 30450 - RNA, 19 nt, Artificial Sequence
  Antisense Oligo
ugccucagccucccaaagc

SEQ ID NO: 30451 - RNA, 19 nt, Artificial Sequence
  Sense Oligo
cuuugggaggcugaggcag

SEQ ID NO: 30452 - RNA, 19 nt, Artificial Sequence
  Antisense Oligo
cugccucagccucccaaag

SEQ ID NO: 30453 - RNA, 19 nt, Artificial Sequence
  Sense Oligo
uuugggaggcugaggcagg

SEQ ID NO: 30454 - RNA, 19 nt, Artificial Sequence
  Antisense Oligo
ccugccucagccucccaaa

SEQ ID NO: 30455 - RNA, 19 nt, Artificial Sequence
  Sense Oligo
uugggaggcugaggcagga

SEQ ID NO: 30456 - RNA, 19 nt, Artificial Sequence
  Antisense Oligo
uccugccucagccucccaa

SEQ ID NO: 30457 - RNA, 19 nt, Artificial Sequence
  Sense Oligo
aacuagccaggcauggugg

SEQ ID NO: 30458 - RNA, 19 nt, Artificial Sequence
  Antisense Oligo
ccaccaugccuggcuaguu

SEQ ID NO: 30459 - RNA, 19 nt, Artificial Sequence
  Sense Oligo
gcaccuguagucccagcua

SEQ ID NO: 30460 - RNA, 19 nt, Artificial Sequence
  Antisense Oligo
uagcugggacuacaggugc

SEQ ID NO: 30461 - RNA, 19 nt, Artificial Sequence
  Sense Oligo
uugcagugagccaagaucg

SEQ ID NO: 30462 - RNA, 19 nt, Artificial Sequence
  Antisense Oligo
cgaucuuggcucacugcaa

SEQ ID NO: 30463 - RNA, 19 nt, Artificial Sequence
  Sense Oligo
ugcagugagccaagaucgu

SEQ ID NO: 30464 - RNA, 19 nt, Artificial Sequence
  Antisense Oligo
acgaucuuggcucacugca

SEQ ID NO: 30465 - RNA, 19 nt, Artificial Sequence
  Sense Oligo
gcagugagccaagaucgug

SEQ ID NO: 30466 - RNA, 19 nt, Artificial Sequence
  Antisense Oligo
cacgaucuuggcucacugc

SEQ ID NO: 30467 - RNA, 19 nt, Artificial Sequence
  Sense Oligo
cagugagccaagaucgugc

SEQ ID NO: 30468 - RNA, 19 nt, Artificial Sequence
  Antisense Oligo
gcacgaucuuggcucacug

SEQ ID NO: 30469 - RNA, 19 nt, Artificial Sequence
  Sense Oligo
agugagccaagaucgugcc

SEQ ID NO: 30470 - RNA, 19 nt, Artificial Sequence
  Antisense Oligo
ggcacgaucuuggcucacu

SEQ ID NO: 30471 - RNA, 19 nt, Artificial Sequence
  Sense Oligo
gugagccaagaucgugcca

SEQ ID NO: 30472 - RNA, 19 nt, Artificial Sequence
  Antisense Oligo
uggcacgaucuuggcucac

SEQ ID NO: 30473 - RNA, 19 nt, Artificial Sequence
  Sense Oligo
ugagccaagaucgugccac

SEQ ID NO: 30474 - RNA, 19 nt, Artificial Sequence
  Antisense Oligo
guggcacgaucuuggcuca

SEQ ID NO: 30475 - RNA, 19 nt, Artificial Sequence
  Sense Oligo
gagccaagaucgugccacu

SEQ ID NO: 30476 - RNA, 19 nt, Artificial Sequence
  Antisense Oligo
aguggcacgaucuuggcuc

SEQ ID NO: 30477 - RNA, 19 nt, Artificial Sequence
  Sense Oligo
caagaucgugccacugcgc

SEQ ID NO: 30478 - RNA, 19 nt, Artificial Sequence
  Antisense Oligo
gcgcaguggcacgaucuug

SEQ ID NO: 30479 - RNA, 19 nt, Artificial Sequence
  Sense Oligo
aagaucgugccacugcgcu

SEQ ID NO: 30480 - RNA, 19 nt, Artificial Sequence
  Antisense Oligo
agcgcaguggcacgaucuu

SEQ ID NO: 30481 - RNA, 19 nt, Artificial Sequence
  Sense Oligo
agaggcugaggcaggagga

SEQ ID NO: 30482 - RNA, 19 nt, Artificial Sequence
  Antisense Oligo
uccuccugccucagccucu

SEQ ID NO: 30483 - RNA, 19 nt, Artificial Sequence
  Sense Oligo
gaggcugaggcaggaggau

SEQ ID NO: 30484 - RNA, 19 nt, Artificial Sequence
  Antisense Oligo
auccuccugccucagccuc

SEQ ID NO: 30485 - RNA, 19 nt, Artificial Sequence
  Sense Oligo
aggcugaggcaggaggauc

SEQ ID NO: 30486 - RNA, 19 nt, Artificial Sequence
  Antisense Oligo
gauccuccugccucagccu

SEQ ID NO: 30487 - RNA, 19 nt, Artificial Sequence
  Sense Oligo
guucgagguuauaaugauc

SEQ ID NO: 30488 - RNA, 19 nt, Artificial Sequence
  Antisense Oligo
gaucauuauaaccucgaac

SEQ ID NO: 30489 - RNA, 19 nt, Artificial Sequence
  Sense Oligo
uucgagguuauaaugaucg

SEQ ID NO: 30490 - RNA, 19 nt, Artificial Sequence
  Antisense Oligo
cgaucauuauaaccucgaa

SEQ ID NO: 30491 - RNA, 19 nt, Artificial Sequence
  Sense Oligo
ucgagguuauaaugaucgc

SEQ ID NO: 30492 - RNA, 19 nt, Artificial Sequence
  Antisense Oligo
gcgaucauuauaaccucga

SEQ ID NO: 30493 - RNA, 19 nt, Artificial Sequence
  Sense Oligo
cgagguuauaaugaucgca

SEQ ID NO: 30494 - RNA, 19 nt, Artificial Sequence
  Antisense Oligo
ugcgaucauuauaaccucg

SEQ ID NO: 30495 - RNA, 19 nt, Artificial Sequence
  Sense Oligo
gagguuauaaugaucgcac

SEQ ID NO: 30496 - RNA, 19 nt, Artificial Sequence
  Antisense Oligo
gugcgaucauuauaaccuc

SEQ ID NO: 30497 - RNA, 19 nt, Artificial Sequence
  Sense Oligo
gcugccuugaugacagagu

SEQ ID NO: 30498 - RNA, 19 nt, Artificial Sequence
  Antisense Oligo
acucugucaucaaggcagc

SEQ ID NO: 30499 - RNA, 19 nt, Artificial Sequence
  Sense Oligo
auuuagauuuacuguugcc

SEQ ID NO: 30500 - RNA, 19 nt, Artificial Sequence
  Antisense Oligo
ggcaacaguaaaucuaaau

SEQ ID NO: 30501 - RNA, 19 nt, Artificial Sequence
  Sense Oligo
uuuagauuuacuguugcca

SEQ ID NO: 30502 - RNA, 19 nt, Artificial Sequence
  Antisense Oligo
uggcaacaguaaaucuaaa

SEQ ID NO: 30503 - RNA, 19 nt, Artificial Sequence
  Sense Oligo
uuagauuuacuguugccag

SEQ ID NO: 30504 - RNA, 19 nt, Artificial Sequence
  Antisense Oligo
cuggcaacaguaaaucuaa

SEQ ID NO: 30505 - RNA, 19 nt, Artificial Sequence
  Sense Oligo
uagauuuacuguugccaga

SEQ ID NO: 30506 - RNA, 19 nt, Artificial Sequence
  Antisense Oligo
ucuggcaacaguaaaucua

SEQ ID NO: 30507 - RNA, 19 nt, Artificial Sequence
  Sense Oligo
agauuuacuguugccagau

SEQ ID NO: 30508 - RNA, 19 nt, Artificial Sequence
  Antisense Oligo
aucuggcaacaguaaaucu

SEQ ID NO: 30509 - RNA, 19 nt, Artificial Sequence
  Sense Oligo
gauuuacuguugccagaug

SEQ ID NO: 30510 - RNA, 19 nt, Artificial Sequence
  Antisense Oligo
caucuggcaacaguaaauc

SEQ ID NO: 30511 - RNA, 19 nt, Artificial Sequence
  Sense Oligo
auuuacuguugccagaugg

SEQ ID NO: 30512 - RNA, 19 nt, Artificial Sequence
  Antisense Oligo
ccaucuggcaacaguaaau

SEQ ID NO: 30513 - RNA, 19 nt, Artificial Sequence
  Sense Oligo
uuuacuguugccagauggc

SEQ ID NO: 30514 - RNA, 19 nt, Artificial Sequence
  Antisense Oligo
gccaucuggcaacaguaaa

SEQ ID NO: 30515 - RNA, 19 nt, Artificial Sequence
  Sense Oligo
uuacuguugccagauggcc

SEQ ID NO: 30516 - RNA, 19 nt, Artificial Sequence
  Antisense Oligo
ggccaucuggcaacaguaa

SEQ ID NO: 30517 - RNA, 19 nt, Artificial Sequence
  Sense Oligo
uacuguugccagauggccu

SEQ ID NO: 30518 - RNA, 19 nt, Artificial Sequence
  Antisense Oligo
aggccaucuggcaacagua

SEQ ID NO: 30519 - RNA, 19 nt, Artificial Sequence
  Sense Oligo
acuguugccagauggccug

SEQ ID NO: 30520 - RNA, 19 nt, Artificial Sequence
  Antisense Oligo
caggccaucuggcaacagu

SEQ ID NO: 30521 - RNA, 19 nt, Artificial Sequence
  Sense Oligo
ucagucaggacccugcguu

SEQ ID NO: 30522 - RNA, 19 nt, Artificial Sequence
  Antisense Oligo
aacgcaggguccugacuga

SEQ ID NO: 30523 - RNA, 19 nt, Artificial Sequence
  Sense Oligo
cagucaggacccugcguug

SEQ ID NO: 30524 - RNA, 19 nt, Artificial Sequence
  Antisense Oligo
caacgcaggguccugacug

SEQ ID NO: 30525 - RNA, 19 nt, Artificial Sequence
  Sense Oligo
agucaggacccugcguuga

SEQ ID NO: 30526 - RNA, 19 nt, Artificial Sequence
  Antisense Oligo
ucaacgcaggguccugacu

SEQ ID NO: 30527 - RNA, 19 nt, Artificial Sequence
  Sense Oligo
ucaggacccugcguugacu

SEQ ID NO: 30528 - RNA, 19 nt, Artificial Sequence
  Antisense Oligo
agucaacgcaggguccuga

SEQ ID NO: 30529 - RNA, 19 nt, Artificial Sequence
  Sense Oligo
ccugggaguuuguuguggg

SEQ ID NO: 30530 - RNA, 19 nt, Artificial Sequence
  Antisense Oligo
cccacaacaaacucccagg

SEQ ID NO: 30531 - RNA, 19 nt, Artificial Sequence
  Sense Oligo
gauucggugagggccugca

SEQ ID NO: 30532 - RNA, 19 nt, Artificial Sequence
  Antisense Oligo
ugcaggcccucaccgaauc

SEQ ID NO: 30533 - RNA, 19 nt, Artificial Sequence
  Sense Oligo
auucggugagggccugcaa

SEQ ID NO: 30534 - RNA, 19 nt, Artificial Sequence
  Antisense Oligo
uugcaggcccucaccgaau

SEQ ID NO: 30535 - RNA, 19 nt, Artificial Sequence
  Sense Oligo
uucggugagggccugcaaa

SEQ ID NO: 30536 - RNA, 19 nt, Artificial Sequence
  Antisense Oligo
uuugcaggcccucaccgaa

SEQ ID NO: 30537 - RNA, 19 nt, Artificial Sequence
  Sense Oligo
ucggugagggccugcaaag

SEQ ID NO: 30538 - RNA, 19 nt, Artificial Sequence
  Antisense Oligo
cuuugcaggcccucaccga

SEQ ID NO: 30539 - RNA, 19 nt, Artificial Sequence
  Sense Oligo
ggugagggccugcaaagga

SEQ ID NO: 30540 - RNA, 19 nt, Artificial Sequence
  Antisense Oligo
uccuuugcaggcccucacc

SEQ ID NO: 30541 - RNA, 19 nt, Artificial Sequence
  Sense Oligo
gugagggccugcaaaggag

SEQ ID NO: 30542 - RNA, 19 nt, Artificial Sequence
  Antisense Oligo
cuccuuugcaggcccucac

SEQ ID NO: 30543 - RNA, 19 nt, Artificial Sequence
  Sense Oligo
ugagggccugcaaaggagc

SEQ ID NO: 30544 - RNA, 19 nt, Artificial Sequence
  Antisense Oligo
gcuccuuugcaggcccuca

SEQ ID NO: 30545 - RNA, 19 nt, Artificial Sequence
  Sense Oligo
gagggccugcaaaggagcu

SEQ ID NO: 30546 - RNA, 19 nt, Artificial Sequence
  Antisense Oligo
agcuccuuugcaggcccuc

SEQ ID NO: 30547 - RNA, 19 nt, Artificial Sequence
  Sense Oligo
agggccugcaaaggagcug

SEQ ID NO: 30548 - RNA, 19 nt, Artificial Sequence
  Antisense Oligo
cagcuccuuugcaggcccu

SEQ ID NO: 30549 - RNA, 19 nt, Artificial Sequence
  Sense Oligo
gggccugcaaaggagcuga

SEQ ID NO: 30550 - RNA, 19 nt, Artificial Sequence
  Antisense Oligo
ucagcuccuuugcaggccc

SEQ ID NO: 30551 - RNA, 19 nt, Artificial Sequence
  Sense Oligo
ggccugcaaaggagcugac

SEQ ID NO: 30552 - RNA, 19 nt, Artificial Sequence
  Antisense Oligo
gucagcuccuuugcaggcc

SEQ ID NO: 30553 - RNA, 19 nt, Artificial Sequence
  Sense Oligo
gccugcaaaggagcugacg

SEQ ID NO: 30554 - RNA, 19 nt, Artificial Sequence
  Antisense Oligo
cgucagcuccuuugcaggc

SEQ ID NO: 30555 - RNA, 19 nt, Artificial Sequence
  Sense Oligo
ccugcaaaggagcugacgc

SEQ ID NO: 30556 - RNA, 19 nt, Artificial Sequence
  Antisense Oligo
gcgucagcuccuuugcagg

SEQ ID NO: 30557 - RNA, 19 nt, Artificial Sequence
  Sense Oligo
cugcaaaggagcugacgcc

SEQ ID NO: 30558 - RNA, 19 nt, Artificial Sequence
  Antisense Oligo
ggcgucagcuccuuugcag

SEQ ID NO: 30559 - RNA, 19 nt, Artificial Sequence
  Sense Oligo
ugcaaaggagcugacgccc

SEQ ID NO: 30560 - RNA, 19 nt, Artificial Sequence
  Antisense Oligo
gggcgucagcuccuuugca

SEQ ID NO: 30561 - RNA, 19 nt, Artificial Sequence
  Sense Oligo
gcaaaggagcugacgcccu

SEQ ID NO: 30562 - RNA, 19 nt, Artificial Sequence
  Antisense Oligo
agggcgucagcuccuuugc

SEQ ID NO: 30563 - RNA, 19 nt, Artificial Sequence
  Sense Oligo
caaaggagcugacgcccua

SEQ ID NO: 30564 - RNA, 19 nt, Artificial Sequence
  Antisense Oligo
uagggcgucagcuccuuug

SEQ ID NO: 30565 - RNA, 19 nt, Artificial Sequence
  Sense Oligo
aaaggagcugacgcccuag

SEQ ID NO: 30566 - RNA, 19 nt, Artificial Sequence
  Antisense Oligo
cuagggcgucagcuccuuu

SEQ ID NO: 30567 - RNA, 19 nt, Artificial Sequence
  Sense Oligo
aaggagcugacgcccuagg

SEQ ID NO: 30568 - RNA, 19 nt, Artificial Sequence
  Antisense Oligo
ccuagggcgucagcuccuu

SEQ ID NO: 30569 - RNA, 19 nt, Artificial Sequence
  Sense Oligo
gaagcccugucuccugcgu

SEQ ID NO: 30570 - RNA, 19 nt, Artificial Sequence
  Antisense Oligo
acgcaggagacagggcuuc

SEQ ID NO: 30571 - RNA, 19 nt, Artificial Sequence
  Sense Oligo
aagcccugucuccugcgug

SEQ ID NO: 30572 - RNA, 19 nt, Artificial Sequence
  Antisense Oligo
cacgcaggagacagggcuu

SEQ ID NO: 30573 - RNA, 19 nt, Artificial Sequence
  Sense Oligo
ugucuccugcgugaguuaa

SEQ ID NO: 30574 - RNA, 19 nt, Artificial Sequence
  Antisense Oligo
uuaacucacgcaggagaca

SEQ ID NO: 30575 - RNA, 19 nt, Artificial Sequence
  Sense Oligo
gucuccugcgugaguuaaa

SEQ ID NO: 30576 - RNA, 19 nt, Artificial Sequence
  Antisense Oligo
uuuaacucacgcaggagac

SEQ ID NO: 30577 - RNA, 19 nt, Artificial Sequence
  Sense Oligo
aacucugcucagccacgcg

SEQ ID NO: 30578 - RNA, 19 nt, Artificial Sequence
  Antisense Oligo
cgcguggcugagcagaguu

SEQ ID NO: 30579 - RNA, 19 nt, Artificial Sequence
  Sense Oligo
gcggugcuccucuugcucu

SEQ ID NO: 30580 - RNA, 19 nt, Artificial Sequence
  Antisense Oligo
agagcaagaggagcaccgc

SEQ ID NO: 30581 - RNA, 19 nt, Artificial Sequence
  Sense Oligo
cggugcuccucuugcucug

SEQ ID NO: 30582 - RNA, 19 nt, Artificial Sequence
  Antisense Oligo
cagagcaagaggagcaccg

SEQ ID NO: 30583 - RNA, 19 nt, Artificial Sequence
  Sense Oligo
ggugcuccucuugcucugu

SEQ ID NO: 30584 - RNA, 19 nt, Artificial Sequence
  Antisense Oligo
acagagcaagaggagcacc

SEQ ID NO: 30585 - RNA, 19 nt, Artificial Sequence
  Sense Oligo
gugcuccucuugcucugug

SEQ ID NO: 30586 - RNA, 19 nt, Artificial Sequence
  Antisense Oligo
cacagagcaagaggagcac

SEQ ID NO: 30587 - RNA, 19 nt, Artificial Sequence
  Sense Oligo
gcuccucuugcucugugug

SEQ ID NO: 30588 - RNA, 19 nt, Artificial Sequence
  Antisense Oligo
cacacagagcaagaggagc

SEQ ID NO: 30589 - RNA, 19 nt, Artificial Sequence
  Sense Oligo
uccucuugcucugugugca

SEQ ID NO: 30590 - RNA, 19 nt, Artificial Sequence
  Antisense Oligo
ugcacacagagcaagagga

SEQ ID NO: 30591 - RNA, 19 nt, Artificial Sequence
  Sense Oligo
ccucuugcucugugugcac

SEQ ID NO: 30592 - RNA, 19 nt, Artificial Sequence
  Antisense Oligo
gugcacacagagcaagagg

SEQ ID NO: 30593 - RNA, 19 nt, Artificial Sequence
  Sense Oligo
cucuugcucugugugcacg

SEQ ID NO: 30594 - RNA, 19 nt, Artificial Sequence
  Antisense Oligo
cgugcacacagagcaagag

SEQ ID NO: 30595 - RNA, 19 nt, Artificial Sequence
  Sense Oligo
ucuugcucugugugcacgg

SEQ ID NO: 30596 - RNA, 19 nt, Artificial Sequence
  Antisense Oligo
ccgugcacacagagcaaga

SEQ ID NO: 30597 - RNA, 19 nt, Artificial Sequence
  Sense Oligo
cuugcucugugugcacggu

SEQ ID NO: 30598 - RNA, 19 nt, Artificial Sequence
  Antisense Oligo
accgugcacacagagcaag

SEQ ID NO: 30599 - RNA, 19 nt, Artificial Sequence
  Sense Oligo
uugcucugugugcacggug

SEQ ID NO: 30600 - RNA, 19 nt, Artificial Sequence
  Antisense Oligo
caccgugcacacagagcaa

SEQ ID NO: 30601 - RNA, 19 nt, Artificial Sequence
  Sense Oligo
ugcucugugugcacggugc

SEQ ID NO: 30602 - RNA, 19 nt, Artificial Sequence
  Antisense Oligo
gcaccgugcacacagagca

SEQ ID NO: 30603 - RNA, 19 nt, Artificial Sequence
  Sense Oligo
cugugugcacggugcuugc

SEQ ID NO: 30604 - RNA, 19 nt, Artificial Sequence
  Antisense Oligo
gcaagcaccgugcacacag

SEQ ID NO: 30605 - RNA, 19 nt, Artificial Sequence
  Sense Oligo
ugugugcacggugcuugcu

SEQ ID NO: 30606 - RNA, 19 nt, Artificial Sequence
  Antisense Oligo
agcaagcaccgugcacaca

SEQ ID NO: 30607 - RNA, 19 nt, Artificial Sequence
  Sense Oligo
gugugcacggugcuugcuu

SEQ ID NO: 30608 - RNA, 19 nt, Artificial Sequence
  Antisense Oligo
aagcaagcaccgugcacac

SEQ ID NO: 30609 - RNA, 19 nt, Artificial Sequence
  Sense Oligo
ugugcacggugcuugcuuc

SEQ ID NO: 30610 - RNA, 19 nt, Artificial Sequence
  Antisense Oligo
gaagcaagcaccgugcaca

SEQ ID NO: 30611 - RNA, 19 nt, Artificial Sequence
  Sense Oligo
gugcacggugcuugcuucc

SEQ ID NO: 30612 - RNA, 19 nt, Artificial Sequence
  Antisense Oligo
ggaagcaagcaccgugcac

SEQ ID NO: 30613 - RNA, 19 nt, Artificial Sequence
  Sense Oligo
ugcacggugcuugcuuccu

SEQ ID NO: 30614 - RNA, 19 nt, Artificial Sequence
  Antisense Oligo
aggaagcaagcaccgugca

SEQ ID NO: 30615 - RNA, 19 nt, Artificial Sequence
  Sense Oligo
ggugcuugcuuccuguugg

SEQ ID NO: 30616 - RNA, 19 nt, Artificial Sequence
  Antisense Oligo
ccaacaggaagcaagcacc

SEQ ID NO: 30617 - RNA, 19 nt, Artificial Sequence
  Sense Oligo
ugcuugcuuccuguuggga

SEQ ID NO: 30618 - RNA, 19 nt, Artificial Sequence
  Antisense Oligo
ucccaacaggaagcaagca

SEQ ID NO: 30619 - RNA, 19 nt, Artificial Sequence
  Sense Oligo
gcuugcuuccuguugggac

SEQ ID NO: 30620 - RNA, 19 nt, Artificial Sequence
  Antisense Oligo
gucccaacaggaagcaagc

SEQ ID NO: 30621 - RNA, 19 nt, Artificial Sequence
  Sense Oligo
cuugcuuccuguugggacu

SEQ ID NO: 30622 - RNA, 19 nt, Artificial Sequence
  Antisense Oligo
agucccaacaggaagcaag

SEQ ID NO: 30623 - RNA, 19 nt, Artificial Sequence
  Sense Oligo
uugcuuccuguugggacuc

SEQ ID NO: 30624 - RNA, 19 nt, Artificial Sequence
  Antisense Oligo
gagucccaacaggaagcaa

SEQ ID NO: 30625 - RNA, 19 nt, Artificial Sequence
  Sense Oligo
ugcuuccuguugggacucc

SEQ ID NO: 30626 - RNA, 19 nt, Artificial Sequence
  Antisense Oligo
ggagucccaacaggaagca

SEQ ID NO: 30627 - RNA, 19 nt, Artificial Sequence
  Sense Oligo
uccuguugggacuccagac

SEQ ID NO: 30628 - RNA, 19 nt, Artificial Sequence
  Antisense Oligo
gucuggagucccaacagga

SEQ ID NO: 30629 - RNA, 19 nt, Artificial Sequence
  Sense Oligo
ccuguugggacuccagacu

SEQ ID NO: 30630 - RNA, 19 nt, Artificial Sequence
  Antisense Oligo
agucuggagucccaacagg

SEQ ID NO: 30631 - RNA, 19 nt, Artificial Sequence
  Sense Oligo
cuguugggacuccagacuc

SEQ ID NO: 30632 - RNA, 19 nt, Artificial Sequence
  Antisense Oligo
gagucuggagucccaacag

SEQ ID NO: 30633 - RNA, 19 nt, Artificial Sequence
  Sense Oligo
uguugggacuccagacucc

SEQ ID NO: 30634 - RNA, 19 nt, Artificial Sequence
  Antisense Oligo
ggagucuggagucccaaca

SEQ ID NO: 30635 - RNA, 19 nt, Artificial Sequence
  Sense Oligo
gacuccagacucccaggga

SEQ ID NO: 30636 - RNA, 19 nt, Artificial Sequence
  Antisense Oligo
ucccugggagucuggaguc

SEQ ID NO: 30637 - RNA, 19 nt, Artificial Sequence
  Sense Oligo
agaugacucccuggccagc

SEQ ID NO: 30638 - RNA, 19 nt, Artificial Sequence
  Antisense Oligo
gcuggccagggagucaucu

SEQ ID NO: 30639 - RNA, 19 nt, Artificial Sequence
  Sense Oligo
augacucccuggccagcuc

SEQ ID NO: 30640 - RNA, 19 nt, Artificial Sequence
  Antisense Oligo
gagcuggccagggagucau

SEQ ID NO: 30641 - RNA, 19 nt, Artificial Sequence
  Sense Oligo
ugacucccuggccagcuca

SEQ ID NO: 30642 - RNA, 19 nt, Artificial Sequence
  Antisense Oligo
ugagcuggccagggaguca

SEQ ID NO: 30643 - RNA, 19 nt, Artificial Sequence
  Sense Oligo
cuggccagcucagcucacu

SEQ ID NO: 30644 - RNA, 19 nt, Artificial Sequence
  Antisense Oligo
agugagcugagcuggccag

SEQ ID NO: 30645 - RNA, 19 nt, Artificial Sequence
  Sense Oligo
uggccagcucagcucacug

SEQ ID NO: 30646 - RNA, 19 nt, Artificial Sequence
  Antisense Oligo
cagugagcugagcuggcca

SEQ ID NO: 30647 - RNA, 19 nt, Artificial Sequence
  Sense Oligo
agcucagcucacugcggga

SEQ ID NO: 30648 - RNA, 19 nt, Artificial Sequence
  Antisense Oligo
ucccgcagugagcugagcu

SEQ ID NO: 30649 - RNA, 19 nt, Artificial Sequence
  Sense Oligo
gcucagcucacugcgggau

SEQ ID NO: 30650 - RNA, 19 nt, Artificial Sequence
  Antisense Oligo
aucccgcagugagcugagc

SEQ ID NO: 30651 - RNA, 19 nt, Artificial Sequence
  Sense Oligo
cucagcucacugcgggauc

SEQ ID NO: 30652 - RNA, 19 nt, Artificial Sequence
  Antisense Oligo
gaucccgcagugagcugag

SEQ ID NO: 30653 - RNA, 19 nt, Artificial Sequence
  Sense Oligo
ucagcucacugcgggaucu

SEQ ID NO: 30654 - RNA, 19 nt, Artificial Sequence
  Antisense Oligo
agaucccgcagugagcuga

SEQ ID NO: 30655 - RNA, 19 nt, Artificial Sequence
  Sense Oligo
cagcucacugcgggaucuu

SEQ ID NO: 30656 - RNA, 19 nt, Artificial Sequence
  Antisense Oligo
aagaucccgcagugagcug

SEQ ID NO: 30657 - RNA, 19 nt, Artificial Sequence
  Sense Oligo
agcucacugcgggaucuuu

SEQ ID NO: 30658 - RNA, 19 nt, Artificial Sequence
  Antisense Oligo
aaagaucccgcagugagcu

SEQ ID NO: 30659 - RNA, 19 nt, Artificial Sequence
  Sense Oligo
gcucacugcgggaucuuua

SEQ ID NO: 30660 - RNA, 19 nt, Artificial Sequence
  Antisense Oligo
uaaagaucccgcagugagc

SEQ ID NO: 30661 - RNA, 19 nt, Artificial Sequence
  Sense Oligo
acugcgggaucuuuauucc

SEQ ID NO: 30662 - RNA, 19 nt, Artificial Sequence
  Antisense Oligo
ggaauaaagaucccgcagu

SEQ ID NO: 30663 - RNA, 19 nt, Artificial Sequence
  Sense Oligo
ggaucuuuauucccuucca

SEQ ID NO: 30664 - RNA, 19 nt, Artificial Sequence
  Antisense Oligo
uggaagggaauaaagaucc

SEQ ID NO: 30665 - RNA, 19 nt, Artificial Sequence
  Sense Oligo
gaucuuuauucccuuccag

SEQ ID NO: 30666 - RNA, 19 nt, Artificial Sequence
  Antisense Oligo
cuggaagggaauaaagauc

SEQ ID NO: 30667 - RNA, 19 nt, Artificial Sequence
  Sense Oligo
aucuuuauucccuuccagc

SEQ ID NO: 30668 - RNA, 19 nt, Artificial Sequence
  Antisense Oligo
gcuggaagggaauaaagau

SEQ ID NO: 30669 - RNA, 19 nt, Artificial Sequence
  Sense Oligo
uuauucccuuccagcuggc

SEQ ID NO: 30670 - RNA, 19 nt, Artificial Sequence
  Antisense Oligo
gccagcuggaagggaauaa

SEQ ID NO: 30671 - RNA, 19 nt, Artificial Sequence
  Sense Oligo
uauucccuuccagcuggcg

SEQ ID NO: 30672 - RNA, 19 nt, Artificial Sequence
  Antisense Oligo
cgccagcuggaagggaaua

SEQ ID NO: 30673 - RNA, 19 nt, Artificial Sequence
  Sense Oligo
auucccuuccagcuggcgg

SEQ ID NO: 30674 - RNA, 19 nt, Artificial Sequence
  Antisense Oligo
ccgccagcuggaagggaau

SEQ ID NO: 30675 - RNA, 19 nt, Artificial Sequence
  Sense Oligo
aaccugugccaaagaugca

SEQ ID NO: 30676 - RNA, 19 nt, Artificial Sequence
  Antisense Oligo
ugcaucuuuggcacagguu

SEQ ID NO: 30677 - RNA, 19 nt, Artificial Sequence
  Sense Oligo
accugugccaaagaugcau

SEQ ID NO: 30678 - RNA, 19 nt, Artificial Sequence
  Antisense Oligo
augcaucuuuggcacaggu

SEQ ID NO: 30679 - RNA, 19 nt, Artificial Sequence
  Sense Oligo
ccugugccaaagaugcaug

SEQ ID NO: 30680 - RNA, 19 nt, Artificial Sequence
  Antisense Oligo
caugcaucuuuggcacagg

SEQ ID NO: 30681 - RNA, 19 nt, Artificial Sequence
  Sense Oligo
cugugccaaagaugcaugg

SEQ ID NO: 30682 - RNA, 19 nt, Artificial Sequence
  Antisense Oligo
ccaugcaucuuuggcacag

SEQ ID NO: 30683 - RNA, 19 nt, Artificial Sequence
  Sense Oligo
ugugccaaagaugcaugga

SEQ ID NO: 30684 - RNA, 19 nt, Artificial Sequence
  Antisense Oligo
uccaugcaucuuuggcaca

SEQ ID NO: 30685 - RNA, 19 nt, Artificial Sequence
  Sense Oligo
gugccaaagaugcauggac

SEQ ID NO: 30686 - RNA, 19 nt, Artificial Sequence
  Antisense Oligo
guccaugcaucuuuggcac

SEQ ID NO: 30687 - RNA, 19 nt, Artificial Sequence
  Sense Oligo
ugccaaagaugcauggaca

SEQ ID NO: 30688 - RNA, 19 nt, Artificial Sequence
  Antisense Oligo
uguccaugcaucuuuggca

SEQ ID NO: 30689 - RNA, 19 nt, Artificial Sequence
  Sense Oligo
gccaaagaugcauggacac

SEQ ID NO: 30690 - RNA, 19 nt, Artificial Sequence
  Antisense Oligo
guguccaugcaucuuuggc

SEQ ID NO: 30691 - RNA, 19 nt, Artificial Sequence
  Sense Oligo
caaggacguacaccuggcu

SEQ ID NO: 30692 - RNA, 19 nt, Artificial Sequence
  Antisense Oligo
agccagguguacguccuug

SEQ ID NO: 30693 - RNA, 19 nt, Artificial Sequence
  Sense Oligo
aaggacguacaccuggcug

SEQ ID NO: 30694 - RNA, 19 nt, Artificial Sequence
  Antisense Oligo
cagccagguguacguccuu

SEQ ID NO: 30695 - RNA, 19 nt, Artificial Sequence
  Sense Oligo
aggacguacaccuggcugg

SEQ ID NO: 30696 - RNA, 19 nt, Artificial Sequence
  Antisense Oligo
ccagccagguguacguccu

SEQ ID NO: 30697 - RNA, 19 nt, Artificial Sequence
  Sense Oligo
cuguccugcacugcuguau

SEQ ID NO: 30698 - RNA, 19 nt, Artificial Sequence
  Antisense Oligo
auacagcagugcaggacag

SEQ ID NO: 30699 - RNA, 19 nt, Artificial Sequence
  Sense Oligo
uguccugcacugcuguaug

SEQ ID NO: 30700 - RNA, 19 nt, Artificial Sequence
  Antisense Oligo
cauacagcagugcaggaca

SEQ ID NO: 30701 - RNA, 19 nt, Artificial Sequence
  Sense Oligo
guccugcacugcuguaugg

SEQ ID NO: 30702 - RNA, 19 nt, Artificial Sequence
  Antisense Oligo
ccauacagcagugcaggac

SEQ ID NO: 30703 - RNA, 19 nt, Artificial Sequence
  Sense Oligo
uccugcacugcuguaugga

SEQ ID NO: 30704 - RNA, 19 nt, Artificial Sequence
  Antisense Oligo
uccauacagcagugcagga

SEQ ID NO: 30705 - RNA, 19 nt, Artificial Sequence
  Sense Oligo
gcacugcuguauggagcug

SEQ ID NO: 30706 - RNA, 19 nt, Artificial Sequence
  Antisense Oligo
cagcuccauacagcagugc

SEQ ID NO: 30707 - RNA, 19 nt, Artificial Sequence
  Sense Oligo
cacugcuguauggagcugg

SEQ ID NO: 30708 - RNA, 19 nt, Artificial Sequence
  Antisense Oligo
ccagcuccauacagcagug

SEQ ID NO: 30709 - RNA, 19 nt, Artificial Sequence
  Sense Oligo
acugcuguauggagcuggc

SEQ ID NO: 30710 - RNA, 19 nt, Artificial Sequence
  Antisense Oligo
gccagcuccauacagcagu

SEQ ID NO: 30711 - RNA, 19 nt, Artificial Sequence
  Sense Oligo
cugcuguauggagcuggcc

SEQ ID NO: 30712 - RNA, 19 nt, Artificial Sequence
  Antisense Oligo
ggccagcuccauacagcag

SEQ ID NO: 30713 - RNA, 19 nt, Artificial Sequence
  Sense Oligo
agacagccugaggacaccu

SEQ ID NO: 30714 - RNA, 19 nt, Artificial Sequence
  Antisense Oligo
agguguccucaggcugucu

SEQ ID NO: 30715 - RNA, 19 nt, Artificial Sequence
  Sense Oligo
gagggacucuccuucucac

SEQ ID NO: 30716 - RNA, 19 nt, Artificial Sequence
  Antisense Oligo
gugagaaggagagucccuc

SEQ ID NO: 30717 - RNA, 19 nt, Artificial Sequence
  Sense Oligo
caaaugcuagauacguaag

SEQ ID NO: 30718 - RNA, 19 nt, Artificial Sequence
  Antisense Oligo
cuuacguaucuagcauuug

SEQ ID NO: 30719 - RNA, 19 nt, Artificial Sequence
  Sense Oligo
aaaugcuagauacguaagu

SEQ ID NO: 30720 - RNA, 19 nt, Artificial Sequence
  Antisense Oligo
acuuacguaucuagcauuu

SEQ ID NO: 30721 - RNA, 19 nt, Artificial Sequence
  Sense Oligo
aaugcuagauacguaaguc

SEQ ID NO: 30722 - RNA, 19 nt, Artificial Sequence
  Antisense Oligo
gacuuacguaucuagcauu

SEQ ID NO: 30723 - RNA, 19 nt, Artificial Sequence
  Sense Oligo
augcuagauacguaagucg

SEQ ID NO: 30724 - RNA, 19 nt, Artificial Sequence
  Antisense Oligo
cgacuuacguaucuagcau

SEQ ID NO: 30725 - RNA, 19 nt, Artificial Sequence
  Sense Oligo
ugcuagauacguaagucgu

SEQ ID NO: 30726 - RNA, 19 nt, Artificial Sequence
  Antisense Oligo
acgacuuacguaucuagca

SEQ ID NO: 30727 - RNA, 19 nt, Artificial Sequence
  Sense Oligo
acguaagucguagaguugu

SEQ ID NO: 30728 - RNA, 19 nt, Artificial Sequence
  Antisense Oligo
acaacucuacgacuuacgu

SEQ ID NO: 30729 - RNA, 19 nt, Artificial Sequence
  Sense Oligo
cguaagucguagaguugug

SEQ ID NO: 30730 - RNA, 19 nt, Artificial Sequence
  Antisense Oligo
cacaacucuacgacuuacg

SEQ ID NO: 30731 - RNA, 19 nt, Artificial Sequence
  Sense Oligo
guaagucguagaguugugc

SEQ ID NO: 30732 - RNA, 19 nt, Artificial Sequence
  Antisense Oligo
gcacaacucuacgacuuac

SEQ ID NO: 30733 - RNA, 19 nt, Artificial Sequence
  Sense Oligo
uaagucguagaguugugcu

SEQ ID NO: 30734 - RNA, 19 nt, Artificial Sequence
  Antisense Oligo
agcacaacucuacgacuua

SEQ ID NO: 30735 - RNA, 19 nt, Artificial Sequence
  Sense Oligo
aagucguagaguugugcuu

SEQ ID NO: 30736 - RNA, 19 nt, Artificial Sequence
  Antisense Oligo
aagcacaacucuacgacuu

SEQ ID NO: 30737 - RNA, 19 nt, Artificial Sequence
  Sense Oligo
agucguagaguugugcuua

SEQ ID NO: 30738 - RNA, 19 nt, Artificial Sequence
  Antisense Oligo
uaagcacaacucuacgacu

SEQ ID NO: 30739 - RNA, 19 nt, Artificial Sequence
  Sense Oligo
gucguagaguugugcuuau

SEQ ID NO: 30740 - RNA, 19 nt, Artificial Sequence
  Antisense Oligo
auaagcacaacucuacgac

SEQ ID NO: 30741 - RNA, 19 nt, Artificial Sequence
  Sense Oligo
ucguagaguugugcuuauc

SEQ ID NO: 30742 - RNA, 19 nt, Artificial Sequence
  Antisense Oligo
gauaagcacaacucuacga

SEQ ID NO: 30743 - RNA, 19 nt, Artificial Sequence
  Sense Oligo
cguagaguugugcuuaucu

SEQ ID NO: 30744 - RNA, 19 nt, Artificial Sequence
  Antisense Oligo
agauaagcacaacucuacg

SEQ ID NO: 30745 - RNA, 19 nt, Artificial Sequence
  Sense Oligo
uugugcuuaucuacaugaa

SEQ ID NO: 30746 - RNA, 19 nt, Artificial Sequence
  Antisense Oligo
uucauguagauaagcacaa

SEQ ID NO: 30747 - RNA, 19 nt, Artificial Sequence
  Sense Oligo
ucuacaugaaucugggaag

SEQ ID NO: 30748 - RNA, 19 nt, Artificial Sequence
  Antisense Oligo
cuucccagauucauguaga

SEQ ID NO: 30749 - RNA, 19 nt, Artificial Sequence
  Sense Oligo
cuacaugaaucugggaaga

SEQ ID NO: 30750 - RNA, 19 nt, Artificial Sequence
  Antisense Oligo
ucuucccagauucauguag

SEQ ID NO: 30751 - RNA, 19 nt, Artificial Sequence
  Sense Oligo
uacaugaaucugggaagac

SEQ ID NO: 30752 - RNA, 19 nt, Artificial Sequence
  Antisense Oligo
gucuucccagauucaugua

SEQ ID NO: 30753 - RNA, 19 nt, Artificial Sequence
  Sense Oligo
acaugaaucugggaagacu

SEQ ID NO: 30754 - RNA, 19 nt, Artificial Sequence
  Antisense Oligo
agucuucccagauucaugu

SEQ ID NO: 30755 - RNA, 19 nt, Artificial Sequence
  Sense Oligo
aucugggaagacugacucc

SEQ ID NO: 30756 - RNA, 19 nt, Artificial Sequence
  Antisense Oligo
ggagucagucuucccagau

SEQ ID NO: 30757 - RNA, 19 nt, Artificial Sequence
  Sense Oligo
cugggaagacugacuccua

SEQ ID NO: 30758 - RNA, 19 nt, Artificial Sequence
  Antisense Oligo
uaggagucagucuucccag

SEQ ID NO: 30759 - RNA, 19 nt, Artificial Sequence
  Sense Oligo
ugggaagacugacuccuac

SEQ ID NO: 30760 - RNA, 19 nt, Artificial Sequence
  Antisense Oligo
guaggagucagucuuccca

SEQ ID NO: 30761 - RNA, 19 nt, Artificial Sequence
  Sense Oligo
gacugacuccuacauugug

SEQ ID NO: 30762 - RNA, 19 nt, Artificial Sequence
  Antisense Oligo
cacaauguaggagucaguc

SEQ ID NO: 30763 - RNA, 19 nt, Artificial Sequence
  Sense Oligo
acugacuccuacauugugc

SEQ ID NO: 30764 - RNA, 19 nt, Artificial Sequence
  Antisense Oligo
gcacaauguaggagucagu

SEQ ID NO: 30765 - RNA, 19 nt, Artificial Sequence
  Sense Oligo
cugacuccuacauugugca

SEQ ID NO: 30766 - RNA, 19 nt, Artificial Sequence
  Antisense Oligo
ugcacaauguaggagucag

SEQ ID NO: 30767 - RNA, 19 nt, Artificial Sequence
  Sense Oligo
ugacuccuacauugugcac

SEQ ID NO: 30768 - RNA, 19 nt, Artificial Sequence
  Antisense Oligo
gugcacaauguaggaguca

SEQ ID NO: 30769 - RNA, 19 nt, Artificial Sequence
  Sense Oligo
gacuccuacauugugcacc

SEQ ID NO: 30770 - RNA, 19 nt, Artificial Sequence
  Antisense Oligo
ggugcacaauguaggaguc

SEQ ID NO: 30771 - RNA, 19 nt, Artificial Sequence
  Sense Oligo
acuccuacauugugcaccc

SEQ ID NO: 30772 - RNA, 19 nt, Artificial Sequence
  Antisense Oligo
gggugcacaauguaggagu

SEQ ID NO: 30773 - RNA, 19 nt, Artificial Sequence
  Sense Oligo
cuccuacauugugcacccg

SEQ ID NO: 30774 - RNA, 19 nt, Artificial Sequence
  Antisense Oligo
cgggugcacaauguaggag

SEQ ID NO: 30775 - RNA, 19 nt, Artificial Sequence
  Sense Oligo
uccuacauugugcacccgg

SEQ ID NO: 30776 - RNA, 19 nt, Artificial Sequence
  Antisense Oligo
ccgggugcacaauguagga

SEQ ID NO: 30777 - RNA, 19 nt, Artificial Sequence
  Sense Oligo
ccuacauugugcacccgga

SEQ ID NO: 30778 - RNA, 19 nt, Artificial Sequence
  Antisense Oligo
uccgggugcacaauguagg

SEQ ID NO: 30779 - RNA, 19 nt, Artificial Sequence
  Sense Oligo
cuacauugugcacccggag

SEQ ID NO: 30780 - RNA, 19 nt, Artificial Sequence
  Antisense Oligo
cuccgggugcacaauguag

SEQ ID NO: 30781 - RNA, 19 nt, Artificial Sequence
  Sense Oligo
uacauugugcacccggagu

SEQ ID NO: 30782 - RNA, 19 nt, Artificial Sequence
  Antisense Oligo
acuccgggugcacaaugua

SEQ ID NO: 30783 - RNA, 19 nt, Artificial Sequence
  Sense Oligo
acauugugcacccggaguc

SEQ ID NO: 30784 - RNA, 19 nt, Artificial Sequence
  Antisense Oligo
gacuccgggugcacaaugu

SEQ ID NO: 30785 - RNA, 19 nt, Artificial Sequence
  Sense Oligo
cauugugcacccggagucc

SEQ ID NO: 30786 - RNA, 19 nt, Artificial Sequence
  Antisense Oligo
ggacuccgggugcacaaug

SEQ ID NO: 30787 - RNA, 19 nt, Artificial Sequence
  Sense Oligo
auugugcacccggaguccc

SEQ ID NO: 30788 - RNA, 19 nt, Artificial Sequence
  Antisense Oligo
gggacuccgggugcacaau

SEQ ID NO: 30789 - RNA, 19 nt, Artificial Sequence
  Sense Oligo
ugggcucugcagugacucc

SEQ ID NO: 30790 - RNA, 19 nt, Artificial Sequence
  Antisense Oligo
ggagucacugcagagccca

SEQ ID NO: 30791 - RNA, 19 nt, Artificial Sequence
  Sense Oligo
agugacuccauuccugauu

SEQ ID NO: 30792 - RNA, 19 nt, Artificial Sequence
  Antisense Oligo
aaucaggaauggagucacu

SEQ ID NO: 30793 - RNA, 19 nt, Artificial Sequence
  Sense Oligo
acuccauuccugauucuaa

SEQ ID NO: 30794 - RNA, 19 nt, Artificial Sequence
  Antisense Oligo
uuagaaucaggaauggagu

SEQ ID NO: 30795 - RNA, 19 nt, Artificial Sequence
  Sense Oligo
auuccugauucuaaugaca

SEQ ID NO: 30796 - RNA, 19 nt, Artificial Sequence
  Antisense Oligo
ugucauuagaaucaggaau

SEQ ID NO: 30797 - RNA, 19 nt, Artificial Sequence
  Sense Oligo
aacugucaagaauaggcug

SEQ ID NO: 30798 - RNA, 19 nt, Artificial Sequence
  Antisense Oligo
cagccuauucuugacaguu

SEQ ID NO: 30799 - RNA, 19 nt, Artificial Sequence
  Sense Oligo
acugucaagaauaggcugu

SEQ ID NO: 30800 - RNA, 19 nt, Artificial Sequence
  Antisense Oligo
acagccuauucuugacagu

SEQ ID NO: 30801 - RNA, 19 nt, Artificial Sequence
  Sense Oligo
cugucaagaauaggcugug

SEQ ID NO: 30802 - RNA, 19 nt, Artificial Sequence
  Antisense Oligo
cacagccuauucuugacag

SEQ ID NO: 30803 - RNA, 19 nt, Artificial Sequence
  Sense Oligo
ugucaagaauaggcugugc

SEQ ID NO: 30804 - RNA, 19 nt, Artificial Sequence
  Antisense Oligo
gcacagccuauucuugaca

SEQ ID NO: 30805 - RNA, 19 nt, Artificial Sequence
  Sense Oligo
gucaagaauaggcugugca

SEQ ID NO: 30806 - RNA, 19 nt, Artificial Sequence
  Antisense Oligo
ugcacagccuauucuugac

SEQ ID NO: 30807 - RNA, 19 nt, Artificial Sequence
  Sense Oligo
ucaagaauaggcugugcac

SEQ ID NO: 30808 - RNA, 19 nt, Artificial Sequence
  Antisense Oligo
gugcacagccuauucuuga

SEQ ID NO: 30809 - RNA, 19 nt, Artificial Sequence
  Sense Oligo
caagaauaggcugugcaca

SEQ ID NO: 30810 - RNA, 19 nt, Artificial Sequence
  Antisense Oligo
ugugcacagccuauucuug

SEQ ID NO: 30811 - RNA, 19 nt, Artificial Sequence
  Sense Oligo
aagaauaggcugugcacag

SEQ ID NO: 30812 - RNA, 19 nt, Artificial Sequence
  Antisense Oligo
cugugcacagccuauucuu

SEQ ID NO: 30813 - RNA, 19 nt, Artificial Sequence
  Sense Oligo
agaauaggcugugcacagu

SEQ ID NO: 30814 - RNA, 19 nt, Artificial Sequence
  Antisense Oligo
acugugcacagccuauucu

SEQ ID NO: 30815 - RNA, 19 nt, Artificial Sequence
  Sense Oligo
gaauaggcugugcacagug

SEQ ID NO: 30816 - RNA, 19 nt, Artificial Sequence
  Antisense Oligo
cacugugcacagccuauuc

SEQ ID NO: 30817 - RNA, 19 nt, Artificial Sequence
  Sense Oligo
gcugugcacaguggcucac

SEQ ID NO: 30818 - RNA, 19 nt, Artificial Sequence
  Antisense Oligo
gugagccacugugcacagc

SEQ ID NO: 30819 - RNA, 19 nt, Artificial Sequence
  Sense Oligo
cugugcacaguggcucacg

SEQ ID NO: 30820 - RNA, 19 nt, Artificial Sequence
  Antisense Oligo
cgugagccacugugcacag

SEQ ID NO: 30821 - RNA, 19 nt, Artificial Sequence
  Sense Oligo
ugugcacaguggcucacgc

SEQ ID NO: 30822 - RNA, 19 nt, Artificial Sequence
  Antisense Oligo
gcgugagccacugugcaca

SEQ ID NO: 30823 - RNA, 19 nt, Artificial Sequence
  Sense Oligo
ugcacaguggcucacgccu

SEQ ID NO: 30824 - RNA, 19 nt, Artificial Sequence
  Antisense Oligo
aggcgugagccacugugca

SEQ ID NO: 30825 - RNA, 19 nt, Artificial Sequence
  Sense Oligo
caguggcucacgccuguaa

SEQ ID NO: 30826 - RNA, 19 nt, Artificial Sequence
  Antisense Oligo
uuacaggcgugagccacug

SEQ ID NO: 30827 - RNA, 19 nt, Artificial Sequence
  Sense Oligo
aguggcucacgccuguaau

SEQ ID NO: 30828 - RNA, 19 nt, Artificial Sequence
  Antisense Oligo
auuacaggcgugagccacu

SEQ ID NO: 30829 - RNA, 19 nt, Artificial Sequence
  Sense Oligo
guggcucacgccuguaauc

SEQ ID NO: 30830 - RNA, 19 nt, Artificial Sequence
  Antisense Oligo
gauuacaggcgugagccac

SEQ ID NO: 30831 - RNA, 19 nt, Artificial Sequence
  Sense Oligo
uggcucacgccuguaaucc

SEQ ID NO: 30832 - RNA, 19 nt, Artificial Sequence
  Antisense Oligo
ggauuacaggcgugagcca

SEQ ID NO: 30833 - RNA, 19 nt, Artificial Sequence
  Sense Oligo
ggcucacgccuguaauccc

SEQ ID NO: 30834 - RNA, 19 nt, Artificial Sequence
  Antisense Oligo
gggauuacaggcgugagcc

SEQ ID NO: 30835 - RNA, 19 nt, Artificial Sequence
  Sense Oligo
acgccuguaaucccagcac

SEQ ID NO: 30836 - RNA, 19 nt, Artificial Sequence
  Antisense Oligo
gugcugggauuacaggcgu

SEQ ID NO: 30837 - RNA, 19 nt, Artificial Sequence
  Sense Oligo
agcacuuugggaggcugag

SEQ ID NO: 30838 - RNA, 19 nt, Artificial Sequence
  Antisense Oligo
cucagccucccaaagugcu

SEQ ID NO: 30839 - RNA, 19 nt, Artificial Sequence
  Sense Oligo
cugaggucaggaguucgag

SEQ ID NO: 30840 - RNA, 19 nt, Artificial Sequence
  Antisense Oligo
cucgaacuccugaccucag

SEQ ID NO: 30841 - RNA, 19 nt, Artificial Sequence
  Sense Oligo
ccaggugugguggcaugug

SEQ ID NO: 30842 - RNA, 19 nt, Artificial Sequence
  Antisense Oligo
cacaugccaccacaccugg

SEQ ID NO: 30843 - RNA, 19 nt, Artificial Sequence
  Sense Oligo
caggugugguggcaugugc

SEQ ID NO: 30844 - RNA, 19 nt, Artificial Sequence
  Antisense Oligo
gcacaugccaccacaccug

SEQ ID NO: 30845 - RNA, 19 nt, Artificial Sequence
  Sense Oligo
uacucuggaggcugaggua

SEQ ID NO: 30846 - RNA, 19 nt, Artificial Sequence
  Antisense Oligo
uaccucagccuccagagua

SEQ ID NO: 30847 - RNA, 19 nt, Artificial Sequence
  Sense Oligo
acucuggaggcugagguag

SEQ ID NO: 30848 - RNA, 19 nt, Artificial Sequence
  Antisense Oligo
cuaccucagccuccagagu

SEQ ID NO: 30849 - RNA, 19 nt, Artificial Sequence
  Sense Oligo
cucuggaggcugagguagg

SEQ ID NO: 30850 - RNA, 19 nt, Artificial Sequence
  Antisense Oligo
ccuaccucagccuccagag

SEQ ID NO: 30851 - RNA, 19 nt, Artificial Sequence
  Sense Oligo
guggagguugcagugagcu

SEQ ID NO: 30852 - RNA, 19 nt, Artificial Sequence
  Antisense Oligo
agcucacugcaaccuccac

SEQ ID NO: 30853 - RNA, 19 nt, Artificial Sequence
  Sense Oligo
uggagguugcagugagcug

SEQ ID NO: 30854 - RNA, 19 nt, Artificial Sequence
  Antisense Oligo
cagcucacugcaaccucca

SEQ ID NO: 30855 - RNA, 19 nt, Artificial Sequence
  Sense Oligo
ggagguugcagugagcugg

SEQ ID NO: 30856 - RNA, 19 nt, Artificial Sequence
  Antisense Oligo
ccagcucacugcaaccucc

SEQ ID NO: 30857 - RNA, 19 nt, Artificial Sequence
  Sense Oligo
gagguugcagugagcuggg

SEQ ID NO: 30858 - RNA, 19 nt, Artificial Sequence
  Antisense Oligo
cccagcucacugcaaccuc

SEQ ID NO: 30859 - RNA, 19 nt, Artificial Sequence
  Sense Oligo
agguugcagugagcuggga

SEQ ID NO: 30860 - RNA, 19 nt, Artificial Sequence
  Antisense Oligo
ucccagcucacugcaaccu

SEQ ID NO: 30861 - RNA, 19 nt, Artificial Sequence
  Sense Oligo
gguugcagugagcugggau

SEQ ID NO: 30862 - RNA, 19 nt, Artificial Sequence
  Antisense Oligo
aucccagcucacugcaacc

SEQ ID NO: 30863 - RNA, 19 nt, Artificial Sequence
  Sense Oligo
guugcagugagcugggauc

SEQ ID NO: 30864 - RNA, 19 nt, Artificial Sequence
  Antisense Oligo
gaucccagcucacugcaac

SEQ ID NO: 30865 - RNA, 19 nt, Artificial Sequence
  Sense Oligo
acuuguaaccucagaggca

SEQ ID NO: 30866 - RNA, 19 nt, Artificial Sequence
  Antisense Oligo
ugccucugagguuacaagu

SEQ ID NO: 30867 - RNA, 19 nt, Artificial Sequence
  Sense Oligo
aaccucagaggcagccguu

SEQ ID NO: 30868 - RNA, 19 nt, Artificial Sequence
  Antisense Oligo
aacggcugccucugagguu

SEQ ID NO: 30869 - RNA, 19 nt, Artificial Sequence
  Sense Oligo
accucagaggcagccguug

SEQ ID NO: 30870 - RNA, 19 nt, Artificial Sequence
  Antisense Oligo
caacggcugccucugaggu

SEQ ID NO: 30871 - RNA, 19 nt, Artificial Sequence
  Sense Oligo
ccucagaggcagccguugu

SEQ ID NO: 30872 - RNA, 19 nt, Artificial Sequence
  Antisense Oligo
acaacggcugccucugagg

SEQ ID NO: 30873 - RNA, 19 nt, Artificial Sequence
  Sense Oligo
cucagaggcagccguuguu

SEQ ID NO: 30874 - RNA, 19 nt, Artificial Sequence
  Antisense Oligo
aacaacggcugccucugag

SEQ ID NO: 30875 - RNA, 19 nt, Artificial Sequence
  Sense Oligo
ucagaggcagccguuguua

SEQ ID NO: 30876 - RNA, 19 nt, Artificial Sequence
  Antisense Oligo
uaacaacggcugccucuga

SEQ ID NO: 30877 - RNA, 19 nt, Artificial Sequence
  Sense Oligo
cagaggcagccguuguuag

SEQ ID NO: 30878 - RNA, 19 nt, Artificial Sequence
  Antisense Oligo
cuaacaacggcugccucug

SEQ ID NO: 30879 - RNA, 19 nt, Artificial Sequence
  Sense Oligo
agaggcagccguuguuagc

SEQ ID NO: 30880 - RNA, 19 nt, Artificial Sequence
  Antisense Oligo
gcuaacaacggcugccucu

SEQ ID NO: 30881 - RNA, 19 nt, Artificial Sequence
  Sense Oligo
gaggcagccguuguuagca

SEQ ID NO: 30882 - RNA, 19 nt, Artificial Sequence
  Antisense Oligo
ugcuaacaacggcugccuc

SEQ ID NO: 30883 - RNA, 19 nt, Artificial Sequence
  Sense Oligo
aggcagccguuguuagcac

SEQ ID NO: 30884 - RNA, 19 nt, Artificial Sequence
  Antisense Oligo
gugcuaacaacggcugccu

SEQ ID NO: 30885 - RNA, 19 nt, Artificial Sequence
  Sense Oligo
ggcagccguuguuagcacg

SEQ ID NO: 30886 - RNA, 19 nt, Artificial Sequence
  Antisense Oligo
cgugcuaacaacggcugcc

SEQ ID NO: 30887 - RNA, 19 nt, Artificial Sequence
  Sense Oligo
cguuguuagcacgguggca

SEQ ID NO: 30888 - RNA, 19 nt, Artificial Sequence
  Antisense Oligo
ugccaccgugcuaacaacg

SEQ ID NO: 30889 - RNA, 19 nt, Artificial Sequence
  Sense Oligo
guuguuagcacgguggcau

SEQ ID NO: 30890 - RNA, 19 nt, Artificial Sequence
  Antisense Oligo
augccaccgugcuaacaac

SEQ ID NO: 30891 - RNA, 19 nt, Artificial Sequence
  Sense Oligo
uuguuagcacgguggcaua

SEQ ID NO: 30892 - RNA, 19 nt, Artificial Sequence
  Antisense Oligo
uaugccaccgugcuaacaa

SEQ ID NO: 30893 - RNA, 19 nt, Artificial Sequence
  Sense Oligo
uguuagcacgguggcauac

SEQ ID NO: 30894 - RNA, 19 nt, Artificial Sequence
  Antisense Oligo
guaugccaccgugcuaaca

SEQ ID NO: 30895 - RNA, 19 nt, Artificial Sequence
  Sense Oligo
guuagcacgguggcauacc

SEQ ID NO: 30896 - RNA, 19 nt, Artificial Sequence
  Antisense Oligo
gguaugccaccgugcuaac

SEQ ID NO: 30897 - RNA, 19 nt, Artificial Sequence
  Sense Oligo
uuagcacgguggcauaccu

SEQ ID NO: 30898 - RNA, 19 nt, Artificial Sequence
  Antisense Oligo
agguaugccaccgugcuaa

SEQ ID NO: 30899 - RNA, 19 nt, Artificial Sequence
  Sense Oligo
uagcacgguggcauaccua

SEQ ID NO: 30900 - RNA, 19 nt, Artificial Sequence
  Antisense Oligo
uagguaugccaccgugcua

SEQ ID NO: 30901 - RNA, 19 nt, Artificial Sequence
  Sense Oligo
agcacgguggcauaccuau

SEQ ID NO: 30902 - RNA, 19 nt, Artificial Sequence
  Antisense Oligo
auagguaugccaccgugcu

SEQ ID NO: 30903 - RNA, 19 nt, Artificial Sequence
  Sense Oligo
gcacgguggcauaccuauu

SEQ ID NO: 30904 - RNA, 19 nt, Artificial Sequence
  Antisense Oligo
aauagguaugccaccgugc

SEQ ID NO: 30905 - RNA, 19 nt, Artificial Sequence
  Sense Oligo
cacgguggcauaccuauuu

SEQ ID NO: 30906 - RNA, 19 nt, Artificial Sequence
  Antisense Oligo
aaauagguaugccaccgug

SEQ ID NO: 30907 - RNA, 19 nt, Artificial Sequence
  Sense Oligo
acgguggcauaccuauuug

SEQ ID NO: 30908 - RNA, 19 nt, Artificial Sequence
  Antisense Oligo
caaauagguaugccaccgu

SEQ ID NO: 30909 - RNA, 19 nt, Artificial Sequence
  Sense Oligo
cgguggcauaccuauuugu

SEQ ID NO: 30910 - RNA, 19 nt, Artificial Sequence
  Antisense Oligo
acaaauagguaugccaccg

SEQ ID NO: 30911 - RNA, 19 nt, Artificial Sequence
  Sense Oligo
gguggcauaccuauuugug

SEQ ID NO: 30912 - RNA, 19 nt, Artificial Sequence
  Antisense Oligo
cacaaauagguaugccacc

SEQ ID NO: 30913 - RNA, 19 nt, Artificial Sequence
  Sense Oligo
guggcauaccuauuugugg

SEQ ID NO: 30914 - RNA, 19 nt, Artificial Sequence
  Antisense Oligo
ccacaaauagguaugccac

SEQ ID NO: 30915 - RNA, 19 nt, Artificial Sequence
  Sense Oligo
uaccuauuugugguuuugu

SEQ ID NO: 30916 - RNA, 19 nt, Artificial Sequence
  Antisense Oligo
acaaaaccacaaauaggua

SEQ ID NO: 30917 - RNA, 19 nt, Artificial Sequence
  Sense Oligo
accuauuugugguuuuguc

SEQ ID NO: 30918 - RNA, 19 nt, Artificial Sequence
  Antisense Oligo
gacaaaaccacaaauaggu

SEQ ID NO: 30919 - RNA, 19 nt, Artificial Sequence
  Sense Oligo
ccuauuugugguuuugucc

SEQ ID NO: 30920 - RNA, 19 nt, Artificial Sequence
  Antisense Oligo
ggacaaaaccacaaauagg

SEQ ID NO: 30921 - RNA, 19 nt, Artificial Sequence
  Sense Oligo
cuauuugugguuuugucca

SEQ ID NO: 30922 - RNA, 19 nt, Artificial Sequence
  Antisense Oligo
uggacaaaaccacaaauag

SEQ ID NO: 30923 - RNA, 19 nt, Artificial Sequence
  Sense Oligo
uauuugugguuuuguccaa

SEQ ID NO: 30924 - RNA, 19 nt, Artificial Sequence
  Antisense Oligo
uuggacaaaaccacaaaua

SEQ ID NO: 30925 - RNA, 19 nt, Artificial Sequence
  Sense Oligo
gugguuuuguccaaauaug

SEQ ID NO: 30926 - RNA, 19 nt, Artificial Sequence
  Antisense Oligo
cauauuuggacaaaaccac

SEQ ID NO: 30927 - RNA, 19 nt, Artificial Sequence
  Sense Oligo
ugguuuuguccaaauaugg

SEQ ID NO: 30928 - RNA, 19 nt, Artificial Sequence
  Antisense Oligo
ccauauuuggacaaaacca

SEQ ID NO: 30929 - RNA, 19 nt, Artificial Sequence
  Sense Oligo
ccaaauauggauucguggg

SEQ ID NO: 30930 - RNA, 19 nt, Artificial Sequence
  Antisense Oligo
cccacgaauccauauuugg

SEQ ID NO: 30931 - RNA, 19 nt, Artificial Sequence
  Sense Oligo
caaauauggauucgugggu

SEQ ID NO: 30932 - RNA, 19 nt, Artificial Sequence
  Antisense Oligo
acccacgaauccauauuug

SEQ ID NO: 30933 - RNA, 19 nt, Artificial Sequence
  Sense Oligo
aaauauggauucgugggug

SEQ ID NO: 30934 - RNA, 19 nt, Artificial Sequence
  Antisense Oligo
cacccacgaauccauauuu

SEQ ID NO: 30935 - RNA, 19 nt, Artificial Sequence
  Sense Oligo
aauauggauucgugggugu

SEQ ID NO: 30936 - RNA, 19 nt, Artificial Sequence
  Antisense Oligo
acacccacgaauccauauu

SEQ ID NO: 30937 - RNA, 19 nt, Artificial Sequence
  Sense Oligo
auauggauucguggguguu

SEQ ID NO: 30938 - RNA, 19 nt, Artificial Sequence
  Antisense Oligo
aacacccacgaauccauau

SEQ ID NO: 30939 - RNA, 19 nt, Artificial Sequence
  Sense Oligo
uauggauucguggguguuu

SEQ ID NO: 30940 - RNA, 19 nt, Artificial Sequence
  Antisense Oligo
aaacacccacgaauccaua

SEQ ID NO: 30941 - RNA, 19 nt, Artificial Sequence
  Sense Oligo
auggauucguggguguuuu

SEQ ID NO: 30942 - RNA, 19 nt, Artificial Sequence
  Antisense Oligo
aaaacacccacgaauccau

SEQ ID NO: 30943 - RNA, 19 nt, Artificial Sequence
  Sense Oligo
uggauucguggguguuuua

SEQ ID NO: 30944 - RNA, 19 nt, Artificial Sequence
  Antisense Oligo
uaaaacacccacgaaucca

SEQ ID NO: 30945 - RNA, 19 nt, Artificial Sequence
  Sense Oligo
ggauucguggguguuuuau

SEQ ID NO: 30946 - RNA, 19 nt, Artificial Sequence
  Antisense Oligo
auaaaacacccacgaaucc

SEQ ID NO: 30947 - RNA, 19 nt, Artificial Sequence
  Sense Oligo
gauucguggguguuuuaug

SEQ ID NO: 30948 - RNA, 19 nt, Artificial Sequence
  Antisense Oligo
cauaaaacacccacgaauc

SEQ ID NO: 30949 - RNA, 19 nt, Artificial Sequence
  Sense Oligo
auucguggguguuuuaugu

SEQ ID NO: 30950 - RNA, 19 nt, Artificial Sequence
  Antisense Oligo
acauaaaacacccacgaau

SEQ ID NO: 30951 - RNA, 19 nt, Artificial Sequence
  Sense Oligo
uucguggguguuuuaugua

SEQ ID NO: 30952 - RNA, 19 nt, Artificial Sequence
  Antisense Oligo
uacauaaaacacccacgaa

SEQ ID NO: 30953 - RNA, 19 nt, Artificial Sequence
  Sense Oligo
ucguggguguuuuauguac

SEQ ID NO: 30954 - RNA, 19 nt, Artificial Sequence
  Antisense Oligo
guacauaaaacacccacga

SEQ ID NO: 30955 - RNA, 19 nt, Artificial Sequence
  Sense Oligo
cguggguguuuuauguacu

SEQ ID NO: 30956 - RNA, 19 nt, Artificial Sequence
  Antisense Oligo
aguacauaaaacacccacg

SEQ ID NO: 30957 - RNA, 19 nt, Artificial Sequence
  Sense Oligo
uggguguuuuauguacuua

SEQ ID NO: 30958 - RNA, 19 nt, Artificial Sequence
  Antisense Oligo
uaaguacauaaaacaccca

SEQ ID NO: 30959 - RNA, 19 nt, Artificial Sequence
  Sense Oligo
ggguguuuuauguacuuaa

SEQ ID NO: 30960 - RNA, 19 nt, Artificial Sequence
  Antisense Oligo
uuaaguacauaaaacaccc

SEQ ID NO: 30961 - RNA, 19 nt, Artificial Sequence
  Sense Oligo
gauguguuauuuauucugg

SEQ ID NO: 30962 - RNA, 19 nt, Artificial Sequence
  Antisense Oligo
ccagaauaaauaacacauc

SEQ ID NO: 30963 - RNA, 19 nt, Artificial Sequence
  Sense Oligo
ccaucagcaaauucuuguc

SEQ ID NO: 30964 - RNA, 19 nt, Artificial Sequence
  Antisense Oligo
gacaagaauuugcugaugg

SEQ ID NO: 30965 - RNA, 19 nt, Artificial Sequence
  Sense Oligo
caucagcaaauucuugucu

SEQ ID NO: 30966 - RNA, 19 nt, Artificial Sequence
  Antisense Oligo
agacaagaauuugcugaug

SEQ ID NO: 30967 - RNA, 19 nt, Artificial Sequence
  Sense Oligo
aucagcaaauucuugucua

SEQ ID NO: 30968 - RNA, 19 nt, Artificial Sequence
  Antisense Oligo
uagacaagaauuugcugau

SEQ ID NO: 30969 - RNA, 19 nt, Artificial Sequence
  Sense Oligo
ucagcaaauucuugucuau

SEQ ID NO: 30970 - RNA, 19 nt, Artificial Sequence
  Antisense Oligo
auagacaagaauuugcuga

SEQ ID NO: 30971 - RNA, 19 nt, Artificial Sequence
  Sense Oligo
cagcaaauucuugucuaug

SEQ ID NO: 30972 - RNA, 19 nt, Artificial Sequence
  Antisense Oligo
cauagacaagaauuugcug

SEQ ID NO: 30973 - RNA, 19 nt, Artificial Sequence
  Sense Oligo
ucuugucuaugucuuagcg

SEQ ID NO: 30974 - RNA, 19 nt, Artificial Sequence
  Antisense Oligo
cgcuaagacauagacaaga

SEQ ID NO: 30975 - RNA, 19 nt, Artificial Sequence
  Sense Oligo
cuugucuaugucuuagcgu

SEQ ID NO: 30976 - RNA, 19 nt, Artificial Sequence
  Antisense Oligo
acgcuaagacauagacaag

SEQ ID NO: 30977 - RNA, 19 nt, Artificial Sequence
  Sense Oligo
uugucuaugucuuagcguu

SEQ ID NO: 30978 - RNA, 19 nt, Artificial Sequence
  Antisense Oligo
aacgcuaagacauagacaa

SEQ ID NO: 30979 - RNA, 19 nt, Artificial Sequence
  Sense Oligo
ugucuaugucuuagcguuc

SEQ ID NO: 30980 - RNA, 19 nt, Artificial Sequence
  Antisense Oligo
gaacgcuaagacauagaca

SEQ ID NO: 30981 - RNA, 19 nt, Artificial Sequence
  Sense Oligo
gucuaugucuuagcguucc

SEQ ID NO: 30982 - RNA, 19 nt, Artificial Sequence
  Antisense Oligo
ggaacgcuaagacauagac

SEQ ID NO: 30983 - RNA, 19 nt, Artificial Sequence
  Sense Oligo
ucuaugucuuagcguucca

SEQ ID NO: 30984 - RNA, 19 nt, Artificial Sequence
  Antisense Oligo
uggaacgcuaagacauaga

SEQ ID NO: 30985 - RNA, 19 nt, Artificial Sequence
  Sense Oligo
cuaugucuuagcguuccag

SEQ ID NO: 30986 - RNA, 19 nt, Artificial Sequence
  Antisense Oligo
cuggaacgcuaagacauag

SEQ ID NO: 30987 - RNA, 19 nt, Artificial Sequence
  Sense Oligo
uaugucuuagcguuccagc

SEQ ID NO: 30988 - RNA, 19 nt, Artificial Sequence
  Antisense Oligo
gcuggaacgcuaagacaua

SEQ ID NO: 30989 - RNA, 19 nt, Artificial Sequence
  Sense Oligo
gugccagccuuguauugag

SEQ ID NO: 30990 - RNA, 19 nt, Artificial Sequence
  Antisense Oligo
cucaauacaaggcuggcac

SEQ ID NO: 30991 - RNA, 19 nt, Artificial Sequence
  Sense Oligo
ugccagccuuguauugagc

SEQ ID NO: 30992 - RNA, 19 nt, Artificial Sequence
  Antisense Oligo
gcucaauacaaggcuggca

SEQ ID NO: 30993 - RNA, 19 nt, Artificial Sequence
  Sense Oligo
cuuguauugagccaguucu

SEQ ID NO: 30994 - RNA, 19 nt, Artificial Sequence
  Antisense Oligo
agaacuggcucaauacaag

SEQ ID NO: 30995 - RNA, 19 nt, Artificial Sequence
  Sense Oligo
uauugagccaguucucugu

SEQ ID NO: 30996 - RNA, 19 nt, Artificial Sequence
  Antisense Oligo
acagagaacuggcucaaua

SEQ ID NO: 30997 - RNA, 19 nt, Artificial Sequence
  Sense Oligo
auugagccaguucucuguu

SEQ ID NO: 30998 - RNA, 19 nt, Artificial Sequence
  Antisense Oligo
aacagagaacuggcucaau

SEQ ID NO: 30999 - RNA, 19 nt, Artificial Sequence
  Sense Oligo
uugagccaguucucuguua

SEQ ID NO: 31000 - RNA, 19 nt, Artificial Sequence
  Antisense Oligo
uaacagagaacuggcucaa

SEQ ID NO: 31001 - RNA, 19 nt, Artificial Sequence
  Sense Oligo
aguucucuguuacaggaca

SEQ ID NO: 31002 - RNA, 19 nt, Artificial Sequence
  Antisense Oligo
uguccuguaacagagaacu

SEQ ID NO: 31003 - RNA, 19 nt, Artificial Sequence
  Sense Oligo
guucucuguuacaggacau

SEQ ID NO: 31004 - RNA, 19 nt, Artificial Sequence
  Antisense Oligo
auguccuguaacagagaac

SEQ ID NO: 31005 - RNA, 19 nt, Artificial Sequence
  Sense Oligo
uucucuguuacaggacauu

SEQ ID NO: 31006 - RNA, 19 nt, Artificial Sequence
  Antisense Oligo
aauguccuguaacagagaa

SEQ ID NO: 31007 - RNA, 19 nt, Artificial Sequence
  Sense Oligo
ucucuguuacaggacauuu

SEQ ID NO: 31008 - RNA, 19 nt, Artificial Sequence
  Antisense Oligo
aaauguccuguaacagaga

SEQ ID NO: 31009 - RNA, 19 nt, Artificial Sequence
  Sense Oligo
cucuguuacaggacauuug

SEQ ID NO: 31010 - RNA, 19 nt, Artificial Sequence
  Antisense Oligo
caaauguccuguaacagag

SEQ ID NO: 31011 - RNA, 19 nt, Artificial Sequence
  Sense Oligo
ucuguuacaggacauuugg

SEQ ID NO: 31012 - RNA, 19 nt, Artificial Sequence
  Antisense Oligo
ccaaauguccuguaacaga

SEQ ID NO: 31013 - RNA, 19 nt, Artificial Sequence
  Sense Oligo
cuguuacaggacauuuggu

SEQ ID NO: 31014 - RNA, 19 nt, Artificial Sequence
  Antisense Oligo
accaaauguccuguaacag

SEQ ID NO: 31015 - RNA, 19 nt, Artificial Sequence
  Sense Oligo
uguuacaggacauuugguu

SEQ ID NO: 31016 - RNA, 19 nt, Artificial Sequence
  Antisense Oligo
aaccaaauguccuguaaca

SEQ ID NO: 31017 - RNA, 19 nt, Artificial Sequence
  Sense Oligo
uacaggacauuugguuggu

SEQ ID NO: 31018 - RNA, 19 nt, Artificial Sequence
  Antisense Oligo
accaaccaaauguccugua

SEQ ID NO: 31019 - RNA, 19 nt, Artificial Sequence
  Sense Oligo
acaggacauuugguugguu

SEQ ID NO: 31020 - RNA, 19 nt, Artificial Sequence
  Antisense Oligo
aaccaaccaaauguccugu

SEQ ID NO: 31021 - RNA, 19 nt, Artificial Sequence
  Sense Oligo
ggacauuugguugguugug

SEQ ID NO: 31022 - RNA, 19 nt, Artificial Sequence
  Antisense Oligo
cacaaccaaccaaaugucc

SEQ ID NO: 31023 - RNA, 19 nt, Artificial Sequence
  Sense Oligo
acauuugguugguugugca

SEQ ID NO: 31024 - RNA, 19 nt, Artificial Sequence
  Antisense Oligo
ugcacaaccaaccaaaugu

SEQ ID NO: 31025 - RNA, 19 nt, Artificial Sequence
  Sense Oligo
ugguugguugugcaguuuc

SEQ ID NO: 31026 - RNA, 19 nt, Artificial Sequence
  Antisense Oligo
gaaacugcacaaccaacca

SEQ ID NO: 31027 - RNA, 19 nt, Artificial Sequence
  Sense Oligo
gguugguugugcaguuucg

SEQ ID NO: 31028 - RNA, 19 nt, Artificial Sequence
  Antisense Oligo
cgaaacugcacaaccaacc

SEQ ID NO: 31029 - RNA, 19 nt, Artificial Sequence
  Sense Oligo
guugguugugcaguuucgu

SEQ ID NO: 31030 - RNA, 19 nt, Artificial Sequence
  Antisense Oligo
acgaaacugcacaaccaac

SEQ ID NO: 31031 - RNA, 19 nt, Artificial Sequence
  Sense Oligo
uugguugugcaguuucguu

SEQ ID NO: 31032 - RNA, 19 nt, Artificial Sequence
  Antisense Oligo
aacgaaacugcacaaccaa

SEQ ID NO: 31033 - RNA, 19 nt, Artificial Sequence
  Sense Oligo
ugguugugcaguuucguuu

SEQ ID NO: 31034 - RNA, 19 nt, Artificial Sequence
  Antisense Oligo
aaacgaaacugcacaacca

SEQ ID NO: 31035 - RNA, 19 nt, Artificial Sequence
  Sense Oligo
uucagcgugcuuucauaag

SEQ ID NO: 31036 - RNA, 19 nt, Artificial Sequence
  Antisense Oligo
cuuaugaaagcacgcugaa

SEQ ID NO: 31037 - RNA, 19 nt, Artificial Sequence
  Sense Oligo
auccuuagcuuucucuguc

SEQ ID NO: 31038 - RNA, 19 nt, Artificial Sequence
  Antisense Oligo
gacagagaaagcuaaggau

SEQ ID NO: 31039 - RNA, 19 nt, Artificial Sequence
  Sense Oligo
uccuuagcuuucucugucc

SEQ ID NO: 31040 - RNA, 19 nt, Artificial Sequence
  Antisense Oligo
ggacagagaaagcuaagga

SEQ ID NO: 31041 - RNA, 19 nt, Artificial Sequence
  Sense Oligo
ccuuagcuuucucuguccc

SEQ ID NO: 31042 - RNA, 19 nt, Artificial Sequence
  Antisense Oligo
gggacagagaaagcuaagg

SEQ ID NO: 31043 - RNA, 19 nt, Artificial Sequence
  Sense Oligo
cuuagcuuucucuguccca

SEQ ID NO: 31044 - RNA, 19 nt, Artificial Sequence
  Antisense Oligo
ugggacagagaaagcuaag

SEQ ID NO: 31045 - RNA, 19 nt, Artificial Sequence
  Sense Oligo
uuagcuuucucugucccau

SEQ ID NO: 31046 - RNA, 19 nt, Artificial Sequence
  Antisense Oligo
augggacagagaaagcuaa

SEQ ID NO: 31047 - RNA, 19 nt, Artificial Sequence
  Sense Oligo
agcuuucucugucccauaa

SEQ ID NO: 31048 - RNA, 19 nt, Artificial Sequence
  Antisense Oligo
uuaugggacagagaaagcu

SEQ ID NO: 31049 - RNA, 19 nt, Artificial Sequence
  Sense Oligo
uucucugucccauaacuuc

SEQ ID NO: 31050 - RNA, 19 nt, Artificial Sequence
  Antisense Oligo
gaaguuaugggacagagaa

SEQ ID NO: 31051 - RNA, 19 nt, Artificial Sequence
  Sense Oligo
ucucugucccauaacuuca

SEQ ID NO: 31052 - RNA, 19 nt, Artificial Sequence
  Antisense Oligo
ugaaguuaugggacagaga

SEQ ID NO: 31053 - RNA, 19 nt, Artificial Sequence
  Sense Oligo
cucugucccauaacuucau

SEQ ID NO: 31054 - RNA, 19 nt, Artificial Sequence
  Antisense Oligo
augaaguuaugggacagag

SEQ ID NO: 31055 - RNA, 19 nt, Artificial Sequence
  Sense Oligo
ucugucccauaacuucauu

SEQ ID NO: 31056 - RNA, 19 nt, Artificial Sequence
  Antisense Oligo
aaugaaguuaugggacaga

SEQ ID NO: 31057 - RNA, 19 nt, Artificial Sequence
  Sense Oligo
cugucccauaacuucauug

SEQ ID NO: 31058 - RNA, 19 nt, Artificial Sequence
  Antisense Oligo
caaugaaguuaugggacag

SEQ ID NO: 31059 - RNA, 19 nt, Artificial Sequence
  Sense Oligo
aacugcuaggucaaaggca

SEQ ID NO: 31060 - RNA, 19 nt, Artificial Sequence
  Antisense Oligo
ugccuuugaccuagcaguu

SEQ ID NO: 31061 - RNA, 19 nt, Artificial Sequence
  Sense Oligo
aaccauuuauaccuuugca

SEQ ID NO: 31062 - RNA, 19 nt, Artificial Sequence
  Antisense Oligo
ugcaaagguauaaaugguu

SEQ ID NO: 31063 - RNA, 19 nt, Artificial Sequence
  Sense Oligo
accauuuauaccuuugcau

SEQ ID NO: 31064 - RNA, 19 nt, Artificial Sequence
  Antisense Oligo
augcaaagguauaaauggu

SEQ ID NO: 31065 - RNA, 19 nt, Artificial Sequence
  Sense Oligo
ccauuuauaccuuugcaua

SEQ ID NO: 31066 - RNA, 19 nt, Artificial Sequence
  Antisense Oligo
uaugcaaagguauaaaugg

SEQ ID NO: 31067 - RNA, 19 nt, Artificial Sequence
  Sense Oligo
uauaccuuugcauaaugcu

SEQ ID NO: 31068 - RNA, 19 nt, Artificial Sequence
  Antisense Oligo
agcauuaugcaaagguaua

SEQ ID NO: 31069 - RNA, 19 nt, Artificial Sequence
  Sense Oligo
auaccuuugcauaaugcug

SEQ ID NO: 31070 - RNA, 19 nt, Artificial Sequence
  Antisense Oligo
cagcauuaugcaaagguau

SEQ ID NO: 31071 - RNA, 19 nt, Artificial Sequence
  Sense Oligo
cuuugcauaaugcuggcuu

SEQ ID NO: 31072 - RNA, 19 nt, Artificial Sequence
  Antisense Oligo
aagccagcauuaugcaaag

SEQ ID NO: 31073 - RNA, 19 nt, Artificial Sequence
  Sense Oligo
uugcauaaugcuggcuuaa

SEQ ID NO: 31074 - RNA, 19 nt, Artificial Sequence
  Antisense Oligo
uuaagccagcauuaugcaa

SEQ ID NO: 31075 - RNA, 19 nt, Artificial Sequence
  Sense Oligo
ugcauaaugcuggcuuaaa

SEQ ID NO: 31076 - RNA, 19 nt, Artificial Sequence
  Antisense Oligo
uuuaagccagcauuaugca

SEQ ID NO: 31077 - RNA, 19 nt, Artificial Sequence
  Sense Oligo
gcauaaugcuggcuuaaag

SEQ ID NO: 31078 - RNA, 19 nt, Artificial Sequence
  Antisense Oligo
cuuuaagccagcauuaugc

SEQ ID NO: 31079 - RNA, 19 nt, Artificial Sequence
  Sense Oligo
cauaaugcuggcuuaaagg

SEQ ID NO: 31080 - RNA, 19 nt, Artificial Sequence
  Antisense Oligo
ccuuuaagccagcauuaug

SEQ ID NO: 31081 - RNA, 19 nt, Artificial Sequence
  Sense Oligo
auaaugcuggcuuaaagga

SEQ ID NO: 31082 - RNA, 19 nt, Artificial Sequence
  Antisense Oligo
uccuuuaagccagcauuau

SEQ ID NO: 31083 - RNA, 19 nt, Artificial Sequence
  Sense Oligo
uaaugcuggcuuaaaggag

SEQ ID NO: 31084 - RNA, 19 nt, Artificial Sequence
  Antisense Oligo
cuccuuuaagccagcauua

SEQ ID NO: 31085 - RNA, 19 nt, Artificial Sequence
  Sense Oligo
ggcaauauauauaauccug

SEQ ID NO: 31086 - RNA, 19 nt, Artificial Sequence
  Antisense Oligo
caggauuauauauauugcc

SEQ ID NO: 31087 - RNA, 19 nt, Artificial Sequence
  Sense Oligo
uauauaauccugaucucug

SEQ ID NO: 31088 - RNA, 19 nt, Artificial Sequence
  Antisense Oligo
cagagaucaggauuauaua

SEQ ID NO: 31089 - RNA, 19 nt, Artificial Sequence
  Sense Oligo
uccugaucucugauucaaa

SEQ ID NO: 31090 - RNA, 19 nt, Artificial Sequence
  Antisense Oligo
uuugaaucagagaucagga

SEQ ID NO: 31091 - RNA, 19 nt, Artificial Sequence
  Sense Oligo
ccugaucucugauucaaau

SEQ ID NO: 31092 - RNA, 19 nt, Artificial Sequence
  Antisense Oligo
auuugaaucagagaucagg

SEQ ID NO: 31093 - RNA, 19 nt, Artificial Sequence
  Sense Oligo
cugaucucugauucaaaua

SEQ ID NO: 31094 - RNA, 19 nt, Artificial Sequence
  Antisense Oligo
uauuugaaucagagaucag

SEQ ID NO: 31095 - RNA, 19 nt, Artificial Sequence
  Sense Oligo
ucaaauauaaugaccucuc

SEQ ID NO: 31096 - RNA, 19 nt, Artificial Sequence
  Antisense Oligo
gagaggucauuauauuuga

SEQ ID NO: 31097 - RNA, 19 nt, Artificial Sequence
  Sense Oligo
auauaaugaccucuccuuu

SEQ ID NO: 31098 - RNA, 19 nt, Artificial Sequence
  Antisense Oligo
aaaggagaggucauuauau

SEQ ID NO: 31099 - RNA, 19 nt, Artificial Sequence
  Sense Oligo
augaccucuccuuuaucac

SEQ ID NO: 31100 - RNA, 19 nt, Artificial Sequence
  Antisense Oligo
gugauaaaggagaggucau

SEQ ID NO: 31101 - RNA, 19 nt, Artificial Sequence
  Sense Oligo
ugaccucuccuuuaucaca

SEQ ID NO: 31102 - RNA, 19 nt, Artificial Sequence
  Antisense Oligo
ugugauaaaggagagguca

SEQ ID NO: 31103 - RNA, 19 nt, Artificial Sequence
  Sense Oligo
caucauccaaauauuaagc

SEQ ID NO: 31104 - RNA, 19 nt, Artificial Sequence
  Antisense Oligo
gcuuaauauuuggaugaug

SEQ ID NO: 31105 - RNA, 19 nt, Artificial Sequence
  Sense Oligo
auccaaauauuaagccuag

SEQ ID NO: 31106 - RNA, 19 nt, Artificial Sequence
  Antisense Oligo
cuaggcuuaauauuuggau

SEQ ID NO: 31107 - RNA, 19 nt, Artificial Sequence
  Sense Oligo
uccaaauauuaagccuagu

SEQ ID NO: 31108 - RNA, 19 nt, Artificial Sequence
  Antisense Oligo
acuaggcuuaauauuugga

SEQ ID NO: 31109 - RNA, 19 nt, Artificial Sequence
  Sense Oligo
gguauuugguucucguucc

SEQ ID NO: 31110 - RNA, 19 nt, Artificial Sequence
  Antisense Oligo
ggaacgagaaccaaauacc

SEQ ID NO: 31111 - RNA, 19 nt, Artificial Sequence
  Sense Oligo
guauuugguucucguuccu

SEQ ID NO: 31112 - RNA, 19 nt, Artificial Sequence
  Antisense Oligo
aggaacgagaaccaaauac

SEQ ID NO: 31113 - RNA, 19 nt, Artificial Sequence
  Sense Oligo
guucucguuccugaguuaa

SEQ ID NO: 31114 - RNA, 19 nt, Artificial Sequence
  Antisense Oligo
uuaacucaggaacgagaac

SEQ ID NO: 31115 - RNA, 19 nt, Artificial Sequence
  Sense Oligo
uucucguuccugaguuaau

SEQ ID NO: 31116 - RNA, 19 nt, Artificial Sequence
  Antisense Oligo
auuaacucaggaacgagaa

SEQ ID NO: 31117 - RNA, 19 nt, Artificial Sequence
  Sense Oligo
ucucguuccugaguuaauu

SEQ ID NO: 31118 - RNA, 19 nt, Artificial Sequence
  Antisense Oligo
aauuaacucaggaacgaga

SEQ ID NO: 31119 - RNA, 19 nt, Artificial Sequence
  Sense Oligo
cucguuccugaguuaauuu

SEQ ID NO: 31120 - RNA, 19 nt, Artificial Sequence
  Antisense Oligo
aaauuaacucaggaacgag

SEQ ID NO: 31121 - RNA, 19 nt, Artificial Sequence
  Sense Oligo
auggcugcauaguauucca

SEQ ID NO: 31122 - RNA, 19 nt, Artificial Sequence
  Antisense Oligo
uggaauacuaugcagccau

SEQ ID NO: 31123 - RNA, 19 nt, Artificial Sequence
  Sense Oligo
uggcugcauaguauuccau

SEQ ID NO: 31124 - RNA, 19 nt, Artificial Sequence
  Antisense Oligo
auggaauacuaugcagcca

SEQ ID NO: 31125 - RNA, 19 nt, Artificial Sequence
  Sense Oligo
ugcauaguauuccauggug

SEQ ID NO: 31126 - RNA, 19 nt, Artificial Sequence
  Antisense Oligo
caccauggaauacuaugca

SEQ ID NO: 31127 - RNA, 19 nt, Artificial Sequence
  Sense Oligo
gcauaguauuccauggugu

SEQ ID NO: 31128 - RNA, 19 nt, Artificial Sequence
  Antisense Oligo
acaccauggaauacuaugc

SEQ ID NO: 31129 - RNA, 19 nt, Artificial Sequence
  Sense Oligo
cauaguauuccauggugug

SEQ ID NO: 31130 - RNA, 19 nt, Artificial Sequence
  Antisense Oligo
cacaccauggaauacuaug

SEQ ID NO: 31131 - RNA, 19 nt, Artificial Sequence
  Sense Oligo
guauuccaugguguguaug

SEQ ID NO: 31132 - RNA, 19 nt, Artificial Sequence
  Antisense Oligo
cauacacaccauggaauac

SEQ ID NO: 31133 - RNA, 19 nt, Artificial Sequence
  Sense Oligo
acauuuucuuuauccaguc

SEQ ID NO: 31134 - RNA, 19 nt, Artificial Sequence
  Antisense Oligo
gacuggauaaagaaaaugu

SEQ ID NO: 31135 - RNA, 19 nt, Artificial Sequence
  Sense Oligo
gcauugaguuugauuccau

SEQ ID NO: 31136 - RNA, 19 nt, Artificial Sequence
  Antisense Oligo
auggaaucaaacucaaugc

SEQ ID NO: 31137 - RNA, 19 nt, Artificial Sequence
  Sense Oligo
gucuuugcuauugugaauu

SEQ ID NO: 31138 - RNA, 19 nt, Artificial Sequence
  Antisense Oligo
aauucacaauagcaaagac

SEQ ID NO: 31139 - RNA, 19 nt, Artificial Sequence
  Sense Oligo
ucuuugcuauugugaauug

SEQ ID NO: 31140 - RNA, 19 nt, Artificial Sequence
  Antisense Oligo
caauucacaauagcaaaga

SEQ ID NO: 31141 - RNA, 19 nt, Artificial Sequence
  Sense Oligo
cuuugcuauugugaauugu

SEQ ID NO: 31142 - RNA, 19 nt, Artificial Sequence
  Antisense Oligo
acaauucacaauagcaaag

SEQ ID NO: 31143 - RNA, 19 nt, Artificial Sequence
  Sense Oligo
uuugcuauugugaauugug

SEQ ID NO: 31144 - RNA, 19 nt, Artificial Sequence
  Antisense Oligo
cacaauucacaauagcaaa

SEQ ID NO: 31145 - RNA, 19 nt, Artificial Sequence
  Sense Oligo
uugcuauugugaauugugc

SEQ ID NO: 31146 - RNA, 19 nt, Artificial Sequence
  Antisense Oligo
gcacaauucacaauagcaa

SEQ ID NO: 31147 - RNA, 19 nt, Artificial Sequence
  Sense Oligo
aaugggauugcugcgguga

SEQ ID NO: 31148 - RNA, 19 nt, Artificial Sequence
  Antisense Oligo
ucaccgcagcaaucccauu

SEQ ID NO: 31149 - RNA, 19 nt, Artificial Sequence
  Sense Oligo
gggauugcugcggugaaug

SEQ ID NO: 31150 - RNA, 19 nt, Artificial Sequence
  Antisense Oligo
cauucaccgcagcaauccc

SEQ ID NO: 31151 - RNA, 19 nt, Artificial Sequence
  Sense Oligo
ggauugcugcggugaaugg

SEQ ID NO: 31152 - RNA, 19 nt, Artificial Sequence
  Antisense Oligo
ccauucaccgcagcaaucc

SEQ ID NO: 31153 - RNA, 19 nt, Artificial Sequence
  Sense Oligo
gauugcugcggugaauggu

SEQ ID NO: 31154 - RNA, 19 nt, Artificial Sequence
  Antisense Oligo
accauucaccgcagcaauc

SEQ ID NO: 31155 - RNA, 19 nt, Artificial Sequence
  Sense Oligo
auugcugcggugaauggua

SEQ ID NO: 31156 - RNA, 19 nt, Artificial Sequence
  Antisense Oligo
uaccauucaccgcagcaau

SEQ ID NO: 31157 - RNA, 19 nt, Artificial Sequence
  Sense Oligo
uugcugcggugaaugguau

SEQ ID NO: 31158 - RNA, 19 nt, Artificial Sequence
  Antisense Oligo
auaccauucaccgcagcaa

SEQ ID NO: 31159 - RNA, 19 nt, Artificial Sequence
  Sense Oligo
ugcugcggugaaugguauu

SEQ ID NO: 31160 - RNA, 19 nt, Artificial Sequence
  Antisense Oligo
aauaccauucaccgcagca

SEQ ID NO: 31161 - RNA, 19 nt, Artificial Sequence
  Sense Oligo
gcugcggugaaugguauuu

SEQ ID NO: 31162 - RNA, 19 nt, Artificial Sequence
  Antisense Oligo
aaauaccauucaccgcagc

SEQ ID NO: 31163 - RNA, 19 nt, Artificial Sequence
  Sense Oligo
cugcggugaaugguauuug

SEQ ID NO: 31164 - RNA, 19 nt, Artificial Sequence
  Antisense Oligo
caaauaccauucaccgcag

SEQ ID NO: 31165 - RNA, 19 nt, Artificial Sequence
  Sense Oligo
ugcggugaaugguauuugu

SEQ ID NO: 31166 - RNA, 19 nt, Artificial Sequence
  Antisense Oligo
acaaauaccauucaccgca

SEQ ID NO: 31167 - RNA, 19 nt, Artificial Sequence
  Sense Oligo
gcggugaaugguauuugug

SEQ ID NO: 31168 - RNA, 19 nt, Artificial Sequence
  Antisense Oligo
cacaaauaccauucaccgc

SEQ ID NO: 31169 - RNA, 19 nt, Artificial Sequence
  Sense Oligo
cggugaaugguauuugugg

SEQ ID NO: 31170 - RNA, 19 nt, Artificial Sequence
  Antisense Oligo
ccacaaauaccauucaccg

SEQ ID NO: 31171 - RNA, 19 nt, Artificial Sequence
  Sense Oligo
ggugaaugguauuugugga

SEQ ID NO: 31172 - RNA, 19 nt, Artificial Sequence
  Antisense Oligo
uccacaaauaccauucacc

SEQ ID NO: 31173 - RNA, 19 nt, Artificial Sequence
  Sense Oligo
gugaaugguauuuguggaa

SEQ ID NO: 31174 - RNA, 19 nt, Artificial Sequence
  Antisense Oligo
uuccacaaauaccauucac

SEQ ID NO: 31175 - RNA, 19 nt, Artificial Sequence
  Sense Oligo
ugaaugguauuuguggaau

SEQ ID NO: 31176 - RNA, 19 nt, Artificial Sequence
  Antisense Oligo
auuccacaaauaccauuca

SEQ ID NO: 31177 - RNA, 19 nt, Artificial Sequence
  Sense Oligo
gaaugguauuuguggaauu

SEQ ID NO: 31178 - RNA, 19 nt, Artificial Sequence
  Antisense Oligo
aauuccacaaauaccauuc

SEQ ID NO: 31179 - RNA, 19 nt, Artificial Sequence
  Sense Oligo
augguauuuguggaauugc

SEQ ID NO: 31180 - RNA, 19 nt, Artificial Sequence
  Antisense Oligo
gcaauuccacaaauaccau

SEQ ID NO: 31181 - RNA, 19 nt, Artificial Sequence
  Sense Oligo
ugguauuuguggaauugcc

SEQ ID NO: 31182 - RNA, 19 nt, Artificial Sequence
  Antisense Oligo
ggcaauuccacaaauacca

SEQ ID NO: 31183 - RNA, 19 nt, Artificial Sequence
  Sense Oligo
uggcucugucacccaggcu

SEQ ID NO: 31184 - RNA, 19 nt, Artificial Sequence
  Antisense Oligo
agccugggugacagagcca

SEQ ID NO: 31185 - RNA, 19 nt, Artificial Sequence
  Sense Oligo
cucugucacccaggcugga

SEQ ID NO: 31186 - RNA, 19 nt, Artificial Sequence
  Antisense Oligo
uccagccugggugacagag

SEQ ID NO: 31187 - RNA, 19 nt, Artificial Sequence
  Sense Oligo
gguugcaccauguuggcca

SEQ ID NO: 31188 - RNA, 19 nt, Artificial Sequence
  Antisense Oligo
uggccaacauggugcaacc

SEQ ID NO: 31189 - RNA, 19 nt, Artificial Sequence
  Sense Oligo
guugcaccauguuggccag

SEQ ID NO: 31190 - RNA, 19 nt, Artificial Sequence
  Antisense Oligo
cuggccaacauggugcaac

SEQ ID NO: 31191 - RNA, 19 nt, Artificial Sequence
  Sense Oligo
caccauguuggccaggcug

SEQ ID NO: 31192 - RNA, 19 nt, Artificial Sequence
  Antisense Oligo
cagccuggccaacauggug

SEQ ID NO: 31193 - RNA, 19 nt, Artificial Sequence
  Sense Oligo
accauguuggccaggcugu

SEQ ID NO: 31194 - RNA, 19 nt, Artificial Sequence
  Antisense Oligo
acagccuggccaacauggu

SEQ ID NO: 31195 - RNA, 19 nt, Artificial Sequence
  Sense Oligo
ccauguuggccaggcuguu

SEQ ID NO: 31196 - RNA, 19 nt, Artificial Sequence
  Antisense Oligo
aacagccuggccaacaugg

SEQ ID NO: 31197 - RNA, 19 nt, Artificial Sequence
  Sense Oligo
cauguuggccaggcuguuc

SEQ ID NO: 31198 - RNA, 19 nt, Artificial Sequence
  Antisense Oligo
gaacagccuggccaacaug

SEQ ID NO: 31199 - RNA, 19 nt, Artificial Sequence
  Sense Oligo
auguuggccaggcuguucu

SEQ ID NO: 31200 - RNA, 19 nt, Artificial Sequence
  Antisense Oligo
agaacagccuggccaacau

SEQ ID NO: 31201 - RNA, 19 nt, Artificial Sequence
  Sense Oligo
uguuggccaggcuguucuu

SEQ ID NO: 31202 - RNA, 19 nt, Artificial Sequence
  Antisense Oligo
aagaacagccuggccaaca

SEQ ID NO: 31203 - RNA, 19 nt, Artificial Sequence
  Sense Oligo
guuggccaggcuguucuuc

SEQ ID NO: 31204 - RNA, 19 nt, Artificial Sequence
  Antisense Oligo
gaagaacagccuggccaac

SEQ ID NO: 31205 - RNA, 19 nt, Artificial Sequence
  Sense Oligo
cuucaacuccugaccucaa

SEQ ID NO: 31206 - RNA, 19 nt, Artificial Sequence
  Antisense Oligo
uugaggucaggaguugaag

SEQ ID NO: 31207 - RNA, 19 nt, Artificial Sequence
  Sense Oligo
uucaacuccugaccucaag

SEQ ID NO: 31208 - RNA, 19 nt, Artificial Sequence
  Antisense Oligo
cuugaggucaggaguugaa

SEQ ID NO: 31209 - RNA, 19 nt, Artificial Sequence
  Sense Oligo
ucaacuccugaccucaagu

SEQ ID NO: 31210 - RNA, 19 nt, Artificial Sequence
  Antisense Oligo
acuugaggucaggaguuga

SEQ ID NO: 31211 - RNA, 19 nt, Artificial Sequence
  Sense Oligo
caacuccugaccucaagug

SEQ ID NO: 31212 - RNA, 19 nt, Artificial Sequence
  Antisense Oligo
cacuugaggucaggaguug

SEQ ID NO: 31213 - RNA, 19 nt, Artificial Sequence
  Sense Oligo
aacuccugaccucaaguga

SEQ ID NO: 31214 - RNA, 19 nt, Artificial Sequence
  Antisense Oligo
ucacuugaggucaggaguu

SEQ ID NO: 31215 - RNA, 19 nt, Artificial Sequence
  Sense Oligo
ccugaccucaagugaucca

SEQ ID NO: 31216 - RNA, 19 nt, Artificial Sequence
  Antisense Oligo
uggaucacuugaggucagg

SEQ ID NO: 31217 - RNA, 19 nt, Artificial Sequence
  Sense Oligo
cugaccucaagugauccac

SEQ ID NO: 31218 - RNA, 19 nt, Artificial Sequence
  Antisense Oligo
guggaucacuugaggucag

SEQ ID NO: 31219 - RNA, 19 nt, Artificial Sequence
  Sense Oligo
ugaccucaagugauccacc

SEQ ID NO: 31220 - RNA, 19 nt, Artificial Sequence
  Antisense Oligo
gguggaucacuugagguca

SEQ ID NO: 31221 - RNA, 19 nt, Artificial Sequence
  Sense Oligo
gaccucaagugauccaccu

SEQ ID NO: 31222 - RNA, 19 nt, Artificial Sequence
  Antisense Oligo
agguggaucacuugagguc

SEQ ID NO: 31223 - RNA, 19 nt, Artificial Sequence
  Sense Oligo
ucaagugauccaccugccu

SEQ ID NO: 31224 - RNA, 19 nt, Artificial Sequence
  Antisense Oligo
aggcagguggaucacuuga

SEQ ID NO: 31225 - RNA, 19 nt, Artificial Sequence
  Sense Oligo
ccucggccucccaaaguuc

SEQ ID NO: 31226 - RNA, 19 nt, Artificial Sequence
  Antisense Oligo
gaacuuugggaggccgagg

SEQ ID NO: 31227 - RNA, 19 nt, Artificial Sequence
  Sense Oligo
cucggccucccaaaguucu

SEQ ID NO: 31228 - RNA, 19 nt, Artificial Sequence
  Antisense Oligo
agaacuuugggaggccgag

SEQ ID NO: 31229 - RNA, 19 nt, Artificial Sequence
  Sense Oligo
ucggccucccaaaguucua

SEQ ID NO: 31230 - RNA, 19 nt, Artificial Sequence
  Antisense Oligo
uagaacuuugggaggccga

SEQ ID NO: 31231 - RNA, 19 nt, Artificial Sequence
  Sense Oligo
cggccucccaaaguucuag

SEQ ID NO: 31232 - RNA, 19 nt, Artificial Sequence
  Antisense Oligo
cuagaacuuugggaggccg

SEQ ID NO: 31233 - RNA, 19 nt, Artificial Sequence
  Sense Oligo
cuggccucauugugguuuu

SEQ ID NO: 31234 - RNA, 19 nt, Artificial Sequence
  Antisense Oligo
aaaaccacaaugaggccag

SEQ ID NO: 31235 - RNA, 19 nt, Artificial Sequence
  Sense Oligo
uggaguuucgcuuuaucac

SEQ ID NO: 31236 - RNA, 19 nt, Artificial Sequence
  Antisense Oligo
gugauaaagcgaaacucca

SEQ ID NO: 31237 - RNA, 19 nt, Artificial Sequence
  Sense Oligo
ggaguuucgcuuuaucacc

SEQ ID NO: 31238 - RNA, 19 nt, Artificial Sequence
  Antisense Oligo
ggugauaaagcgaaacucc

SEQ ID NO: 31239 - RNA, 19 nt, Artificial Sequence
  Sense Oligo
gaguuucgcuuuaucaccc

SEQ ID NO: 31240 - RNA, 19 nt, Artificial Sequence
  Antisense Oligo
gggugauaaagcgaaacuc

SEQ ID NO: 31241 - RNA, 19 nt, Artificial Sequence
  Sense Oligo
aguuucgcuuuaucaccca

SEQ ID NO: 31242 - RNA, 19 nt, Artificial Sequence
  Antisense Oligo
ugggugauaaagcgaaacu

SEQ ID NO: 31243 - RNA, 19 nt, Artificial Sequence
  Sense Oligo
cuuuaucacccaggcugga

SEQ ID NO: 31244 - RNA, 19 nt, Artificial Sequence
  Antisense Oligo
uccagccugggugauaaag

SEQ ID NO: 31245 - RNA, 19 nt, Artificial Sequence
  Sense Oligo
ucacccaggcuggauugca

SEQ ID NO: 31246 - RNA, 19 nt, Artificial Sequence
  Antisense Oligo
ugcaauccagccuggguga

SEQ ID NO: 31247 - RNA, 19 nt, Artificial Sequence
  Sense Oligo
cucugccucccagguucaa

SEQ ID NO: 31248 - RNA, 19 nt, Artificial Sequence
  Antisense Oligo
uugaaccugggaggcagag

SEQ ID NO: 31249 - RNA, 19 nt, Artificial Sequence
  Sense Oligo
ucugccucccagguucaag

SEQ ID NO: 31250 - RNA, 19 nt, Artificial Sequence
  Antisense Oligo
cuugaaccugggaggcaga

SEQ ID NO: 31251 - RNA, 19 nt, Artificial Sequence
  Sense Oligo
cugccucccagguucaagu

SEQ ID NO: 31252 - RNA, 19 nt, Artificial Sequence
  Antisense Oligo
acuugaaccugggaggcag

SEQ ID NO: 31253 - RNA, 19 nt, Artificial Sequence
  Sense Oligo
ugccucccagguucaagug

SEQ ID NO: 31254 - RNA, 19 nt, Artificial Sequence
  Antisense Oligo
cacuugaaccugggaggca

SEQ ID NO: 31255 - RNA, 19 nt, Artificial Sequence
  Sense Oligo
gccucccagguucaaguga

SEQ ID NO: 31256 - RNA, 19 nt, Artificial Sequence
  Antisense Oligo
ucacuugaaccugggaggc

SEQ ID NO: 31257 - RNA, 19 nt, Artificial Sequence
  Sense Oligo
cccagguucaagugauugu

SEQ ID NO: 31258 - RNA, 19 nt, Artificial Sequence
  Antisense Oligo
acaaucacuugaaccuggg

SEQ ID NO: 31259 - RNA, 19 nt, Artificial Sequence
  Sense Oligo
ccagguucaagugauuguc

SEQ ID NO: 31260 - RNA, 19 nt, Artificial Sequence
  Antisense Oligo
gacaaucacuugaaccugg

SEQ ID NO: 31261 - RNA, 19 nt, Artificial Sequence
  Sense Oligo
cagguucaagugauugucc

SEQ ID NO: 31262 - RNA, 19 nt, Artificial Sequence
  Antisense Oligo
ggacaaucacuugaaccug

SEQ ID NO: 31263 - RNA, 19 nt, Artificial Sequence
  Sense Oligo
agguucaagugauuguccu

SEQ ID NO: 31264 - RNA, 19 nt, Artificial Sequence
  Antisense Oligo
aggacaaucacuugaaccu

SEQ ID NO: 31265 - RNA, 19 nt, Artificial Sequence
  Sense Oligo
uguccugccucagucuucu

SEQ ID NO: 31266 - RNA, 19 nt, Artificial Sequence
  Antisense Oligo
agaagacugaggcaggaca

SEQ ID NO: 31267 - RNA, 19 nt, Artificial Sequence
  Sense Oligo
guccugccucagucuucug

SEQ ID NO: 31268 - RNA, 19 nt, Artificial Sequence
  Antisense Oligo
cagaagacugaggcaggac

SEQ ID NO: 31269 - RNA, 19 nt, Artificial Sequence
  Sense Oligo
uccugccucagucuucugg

SEQ ID NO: 31270 - RNA, 19 nt, Artificial Sequence
  Antisense Oligo
ccagaagacugaggcagga

SEQ ID NO: 31271 - RNA, 19 nt, Artificial Sequence
  Sense Oligo
ccugccucagucuucuggg

SEQ ID NO: 31272 - RNA, 19 nt, Artificial Sequence
  Antisense Oligo
cccagaagacugaggcagg

SEQ ID NO: 31273 - RNA, 19 nt, Artificial Sequence
  Sense Oligo
ucuggguagcugggaccac

SEQ ID NO: 31274 - RNA, 19 nt, Artificial Sequence
  Antisense Oligo
guggucccagcuacccaga

SEQ ID NO: 31275 - RNA, 19 nt, Artificial Sequence
  Sense Oligo
cuggguagcugggaccaca

SEQ ID NO: 31276 - RNA, 19 nt, Artificial Sequence
  Antisense Oligo
uguggucccagcuacccag

SEQ ID NO: 31277 - RNA, 19 nt, Artificial Sequence
  Sense Oligo
cccaccaugccuggcuaau

SEQ ID NO: 31278 - RNA, 19 nt, Artificial Sequence
  Antisense Oligo
auuagccaggcaugguggg

SEQ ID NO: 31279 - RNA, 19 nt, Artificial Sequence
  Sense Oligo
ccaccaugccuggcuaauu

SEQ ID NO: 31280 - RNA, 19 nt, Artificial Sequence
  Antisense Oligo
aauuagccaggcauggugg

SEQ ID NO: 31281 - RNA, 19 nt, Artificial Sequence
  Sense Oligo
caccaugccuggcuaauuu

SEQ ID NO: 31282 - RNA, 19 nt, Artificial Sequence
  Antisense Oligo
aaauuagccaggcauggug

SEQ ID NO: 31283 - RNA, 19 nt, Artificial Sequence
  Sense Oligo
accaugccuggcuaauuuu

SEQ ID NO: 31284 - RNA, 19 nt, Artificial Sequence
  Antisense Oligo
aaaauuagccaggcauggu

SEQ ID NO: 31285 - RNA, 19 nt, Artificial Sequence
  Sense Oligo
ggguuucaccauguuggcc

SEQ ID NO: 31286 - RNA, 19 nt, Artificial Sequence
  Antisense Oligo
ggccaacauggugaaaccc

SEQ ID NO: 31287 - RNA, 19 nt, Artificial Sequence
  Sense Oligo
gguuucaccauguuggcca

SEQ ID NO: 31288 - RNA, 19 nt, Artificial Sequence
  Antisense Oligo
uggccaacauggugaaacc

SEQ ID NO: 31289 - RNA, 19 nt, Artificial Sequence
  Sense Oligo
guuucaccauguuggccag

SEQ ID NO: 31290 - RNA, 19 nt, Artificial Sequence
  Antisense Oligo
cuggccaacauggugaaac

SEQ ID NO: 31291 - RNA, 19 nt, Artificial Sequence
  Sense Oligo
caccauguuggccaggcug

SEQ ID NO: 31292 - RNA, 19 nt, Artificial Sequence
  Antisense Oligo
cagccuggccaacauggug

SEQ ID NO: 31293 - RNA, 19 nt, Artificial Sequence
  Sense Oligo
accauguuggccaggcugg

SEQ ID NO: 31294 - RNA, 19 nt, Artificial Sequence
  Antisense Oligo
ccagccuggccaacauggu

SEQ ID NO: 31295 - RNA, 19 nt, Artificial Sequence
  Sense Oligo
ccauguuggccaggcuggu

SEQ ID NO: 31296 - RNA, 19 nt, Artificial Sequence
  Antisense Oligo
accagccuggccaacaugg

SEQ ID NO: 31297 - RNA, 19 nt, Artificial Sequence
  Sense Oligo
cauguuggccaggcugguc

SEQ ID NO: 31298 - RNA, 19 nt, Artificial Sequence
  Antisense Oligo
gaccagccuggccaacaug

SEQ ID NO: 31299 - RNA, 19 nt, Artificial Sequence
  Sense Oligo
auguuggccaggcuggucu

SEQ ID NO: 31300 - RNA, 19 nt, Artificial Sequence
  Antisense Oligo
agaccagccuggccaacau

SEQ ID NO: 31301 - RNA, 19 nt, Artificial Sequence
  Sense Oligo
uguuggccaggcuggucuc

SEQ ID NO: 31302 - RNA, 19 nt, Artificial Sequence
  Antisense Oligo
gagaccagccuggccaaca

SEQ ID NO: 31303 - RNA, 19 nt, Artificial Sequence
  Sense Oligo
guuggccaggcuggucuca

SEQ ID NO: 31304 - RNA, 19 nt, Artificial Sequence
  Antisense Oligo
ugagaccagccuggccaac

SEQ ID NO: 31305 - RNA, 19 nt, Artificial Sequence
  Sense Oligo
uuggccaggcuggucucaa

SEQ ID NO: 31306 - RNA, 19 nt, Artificial Sequence
  Antisense Oligo
uugagaccagccuggccaa

SEQ ID NO: 31307 - RNA, 19 nt, Artificial Sequence
  Sense Oligo
uggccaggcuggucucaaa

SEQ ID NO: 31308 - RNA, 19 nt, Artificial Sequence
  Antisense Oligo
uuugagaccagccuggcca

SEQ ID NO: 31309 - RNA, 19 nt, Artificial Sequence
  Sense Oligo
uugcaugugugagccacca

SEQ ID NO: 31310 - RNA, 19 nt, Artificial Sequence
  Antisense Oligo
ugguggcucacacaugcaa

SEQ ID NO: 31311 - RNA, 19 nt, Artificial Sequence
  Sense Oligo
ugcaugugugagccaccau

SEQ ID NO: 31312 - RNA, 19 nt, Artificial Sequence
  Antisense Oligo
augguggcucacacaugca

SEQ ID NO: 31313 - RNA, 19 nt, Artificial Sequence
  Sense Oligo
augugugagccaccaugcc

SEQ ID NO: 31314 - RNA, 19 nt, Artificial Sequence
  Antisense Oligo
ggcaugguggcucacacau

SEQ ID NO: 31315 - RNA, 19 nt, Artificial Sequence
  Sense Oligo
ugugugagccaccaugccc

SEQ ID NO: 31316 - RNA, 19 nt, Artificial Sequence
  Antisense Oligo
gggcaugguggcucacaca

SEQ ID NO: 31317 - RNA, 19 nt, Artificial Sequence
  Sense Oligo
cauaugccuguuagccaca

SEQ ID NO: 31318 - RNA, 19 nt, Artificial Sequence
  Antisense Oligo
uguggcuaacaggcauaug

SEQ ID NO: 31319 - RNA, 19 nt, Artificial Sequence
  Sense Oligo
aagugucuguucauguccu

SEQ ID NO: 31320 - RNA, 19 nt, Artificial Sequence
  Antisense Oligo
aggacaugaacagacacuu

SEQ ID NO: 31321 - RNA, 19 nt, Artificial Sequence
  Sense Oligo
agugucuguucauguccuu

SEQ ID NO: 31322 - RNA, 19 nt, Artificial Sequence
  Antisense Oligo
aaggacaugaacagacacu

SEQ ID NO: 31323 - RNA, 19 nt, Artificial Sequence
  Sense Oligo
gugucuguucauguccuuu

SEQ ID NO: 31324 - RNA, 19 nt, Artificial Sequence
  Antisense Oligo
aaaggacaugaacagacac

SEQ ID NO: 31325 - RNA, 19 nt, Artificial Sequence
  Sense Oligo
ugucuguucauguccuuug

SEQ ID NO: 31326 - RNA, 19 nt, Artificial Sequence
  Antisense Oligo
caaaggacaugaacagaca

SEQ ID NO: 31327 - RNA, 19 nt, Artificial Sequence
  Sense Oligo
gucuguucauguccuuugc

SEQ ID NO: 31328 - RNA, 19 nt, Artificial Sequence
  Antisense Oligo
gcaaaggacaugaacagac

SEQ ID NO: 31329 - RNA, 19 nt, Artificial Sequence
  Sense Oligo
ucuguucauguccuuugcc

SEQ ID NO: 31330 - RNA, 19 nt, Artificial Sequence
  Antisense Oligo
ggcaaaggacaugaacaga

SEQ ID NO: 31331 - RNA, 19 nt, Artificial Sequence
  Sense Oligo
cuguucauguccuuugccc

SEQ ID NO: 31332 - RNA, 19 nt, Artificial Sequence
  Antisense Oligo
gggcaaaggacaugaacag

SEQ ID NO: 31333 - RNA, 19 nt, Artificial Sequence
  Sense Oligo
uguucauguccuuugccca

SEQ ID NO: 31334 - RNA, 19 nt, Artificial Sequence
  Antisense Oligo
ugggcaaaggacaugaaca

SEQ ID NO: 31335 - RNA, 19 nt, Artificial Sequence
  Sense Oligo
guucauguccuuugcccac

SEQ ID NO: 31336 - RNA, 19 nt, Artificial Sequence
  Antisense Oligo
gugggcaaaggacaugaac

SEQ ID NO: 31337 - RNA, 19 nt, Artificial Sequence
  Sense Oligo
uucauguccuuugcccacu

SEQ ID NO: 31338 - RNA, 19 nt, Artificial Sequence
  Antisense Oligo
agugggcaaaggacaugaa

SEQ ID NO: 31339 - RNA, 19 nt, Artificial Sequence
  Sense Oligo
guaaauuuguguauguucc

SEQ ID NO: 31340 - RNA, 19 nt, Artificial Sequence
  Antisense Oligo
ggaacauacacaaauuuac

SEQ ID NO: 31341 - RNA, 19 nt, Artificial Sequence
  Sense Oligo
aaaauuuucucccauucug

SEQ ID NO: 31342 - RNA, 19 nt, Artificial Sequence
  Antisense Oligo
cagaaugggagaaaauuuu

SEQ ID NO: 31343 - RNA, 19 nt, Artificial Sequence
  Sense Oligo
aaauuuucucccauucugu

SEQ ID NO: 31344 - RNA, 19 nt, Artificial Sequence
  Antisense Oligo
acagaaugggagaaaauuu

SEQ ID NO: 31345 - RNA, 19 nt, Artificial Sequence
  Sense Oligo
aauuuucucccauucugug

SEQ ID NO: 31346 - RNA, 19 nt, Artificial Sequence
  Antisense Oligo
cacagaaugggagaaaauu

SEQ ID NO: 31347 - RNA, 19 nt, Artificial Sequence
  Sense Oligo
auuuucucccauucugugg

SEQ ID NO: 31348 - RNA, 19 nt, Artificial Sequence
  Antisense Oligo
ccacagaaugggagaaaau

SEQ ID NO: 31349 - RNA, 19 nt, Artificial Sequence
  Sense Oligo
guugauaguuucuuuugcu

SEQ ID NO: 31350 - RNA, 19 nt, Artificial Sequence
  Antisense Oligo
agcaaaagaaacuaucaac

SEQ ID NO: 31351 - RNA, 19 nt, Artificial Sequence
  Sense Oligo
uugauaguuucuuuugcug

SEQ ID NO: 31352 - RNA, 19 nt, Artificial Sequence
  Antisense Oligo
cagcaaaagaaacuaucaa

SEQ ID NO: 31353 - RNA, 19 nt, Artificial Sequence
  Sense Oligo
ugauaguuucuuuugcugu

SEQ ID NO: 31354 - RNA, 19 nt, Artificial Sequence
  Antisense Oligo
acagcaaaagaaacuauca

SEQ ID NO: 31355 - RNA, 19 nt, Artificial Sequence
  Sense Oligo
gauaguuucuuuugcugug

SEQ ID NO: 31356 - RNA, 19 nt, Artificial Sequence
  Antisense Oligo
cacagcaaaagaaacuauc

SEQ ID NO: 31357 - RNA, 19 nt, Artificial Sequence
  Sense Oligo
auaguuucuuuugcugugc

SEQ ID NO: 31358 - RNA, 19 nt, Artificial Sequence
  Antisense Oligo
gcacagcaaaagaaacuau

SEQ ID NO: 31359 - RNA, 19 nt, Artificial Sequence
  Sense Oligo
uaguuucuuuugcugugca

SEQ ID NO: 31360 - RNA, 19 nt, Artificial Sequence
  Antisense Oligo
ugcacagcaaaagaaacua

SEQ ID NO: 31361 - RNA, 19 nt, Artificial Sequence
  Sense Oligo
cuccucaguuuaauuaguu

SEQ ID NO: 31362 - RNA, 19 nt, Artificial Sequence
  Antisense Oligo
aacuaauuaaacugaggag

SEQ ID NO: 31363 - RNA, 19 nt, Artificial Sequence
  Sense Oligo
ucuugugauugcuuuuggu

SEQ ID NO: 31364 - RNA, 19 nt, Artificial Sequence
  Antisense Oligo
accaaaagcaaucacaaga

SEQ ID NO: 31365 - RNA, 19 nt, Artificial Sequence
  Sense Oligo
ugguauugccuaggucugg

SEQ ID NO: 31366 - RNA, 19 nt, Artificial Sequence
  Antisense Oligo
ccagaccuaggcaauacca

SEQ ID NO: 31367 - RNA, 19 nt, Artificial Sequence
  Sense Oligo
gguauugccuaggucuggg

SEQ ID NO: 31368 - RNA, 19 nt, Artificial Sequence
  Antisense Oligo
cccagaccuaggcaauacc

SEQ ID NO: 31369 - RNA, 19 nt, Artificial Sequence
  Sense Oligo
guauugccuaggucugggc

SEQ ID NO: 31370 - RNA, 19 nt, Artificial Sequence
  Antisense Oligo
gcccagaccuaggcaauac

SEQ ID NO: 31371 - RNA, 19 nt, Artificial Sequence
  Sense Oligo
aggucugggcaaagauugg

SEQ ID NO: 31372 - RNA, 19 nt, Artificial Sequence
  Antisense Oligo
ccaaucuuugcccagaccu

SEQ ID NO: 31373 - RNA, 19 nt, Artificial Sequence
  Sense Oligo
ggucugggcaaagauugga

SEQ ID NO: 31374 - RNA, 19 nt, Artificial Sequence
  Antisense Oligo
uccaaucuuugcccagacc

SEQ ID NO: 31375 - RNA, 19 nt, Artificial Sequence
  Sense Oligo
gucugggcaaagauuggag

SEQ ID NO: 31376 - RNA, 19 nt, Artificial Sequence
  Antisense Oligo
cuccaaucuuugcccagac

SEQ ID NO: 31377 - RNA, 19 nt, Artificial Sequence
  Sense Oligo
cuuaaaagcacaggcgaca

SEQ ID NO: 31378 - RNA, 19 nt, Artificial Sequence
  Antisense Oligo
ugucgccugugcuuuuaag

SEQ ID NO: 31379 - RNA, 19 nt, Artificial Sequence
  Sense Oligo
agacaguccacggaauggg

SEQ ID NO: 31380 - RNA, 19 nt, Artificial Sequence
  Antisense Oligo
cccauuccguggacugucu

SEQ ID NO: 31381 - RNA, 19 nt, Artificial Sequence
  Sense Oligo
aauauuugucaucuacacg

SEQ ID NO: 31382 - RNA, 19 nt, Artificial Sequence
  Antisense Oligo
cguguagaugacaaauauu

SEQ ID NO: 31383 - RNA, 19 nt, Artificial Sequence
  Sense Oligo
auauuugucaucuacacgu

SEQ ID NO: 31384 - RNA, 19 nt, Artificial Sequence
  Antisense Oligo
acguguagaugacaaauau

SEQ ID NO: 31385 - RNA, 19 nt, Artificial Sequence
  Sense Oligo
uauuugucaucuacacguu

SEQ ID NO: 31386 - RNA, 19 nt, Artificial Sequence
  Antisense Oligo
aacguguagaugacaaaua

SEQ ID NO: 31387 - RNA, 19 nt, Artificial Sequence
  Sense Oligo
auuugucaucuacacguug

SEQ ID NO: 31388 - RNA, 19 nt, Artificial Sequence
  Antisense Oligo
caacguguagaugacaaau

SEQ ID NO: 31389 - RNA, 19 nt, Artificial Sequence
  Sense Oligo
uuugucaucuacacguugg

SEQ ID NO: 31390 - RNA, 19 nt, Artificial Sequence
  Antisense Oligo
ccaacguguagaugacaaa

SEQ ID NO: 31391 - RNA, 19 nt, Artificial Sequence
  Sense Oligo
uugucaucuacacguugga

SEQ ID NO: 31392 - RNA, 19 nt, Artificial Sequence
  Antisense Oligo
uccaacguguagaugacaa

SEQ ID NO: 31393 - RNA, 19 nt, Artificial Sequence
  Sense Oligo
ugucaucuacacguuggau

SEQ ID NO: 31394 - RNA, 19 nt, Artificial Sequence
  Antisense Oligo
auccaacguguagaugaca

SEQ ID NO: 31395 - RNA, 19 nt, Artificial Sequence
  Sense Oligo
gucaucuacacguuggaua

SEQ ID NO: 31396 - RNA, 19 nt, Artificial Sequence
  Antisense Oligo
uauccaacguguagaugac

SEQ ID NO: 31397 - RNA, 19 nt, Artificial Sequence
  Sense Oligo
ucaucuacacguuggauag

SEQ ID NO: 31398 - RNA, 19 nt, Artificial Sequence
  Antisense Oligo
cuauccaacguguagauga

SEQ ID NO: 31399 - RNA, 19 nt, Artificial Sequence
  Sense Oligo
caucuacacguuggauagg

SEQ ID NO: 31400 - RNA, 19 nt, Artificial Sequence
  Antisense Oligo
ccuauccaacguguagaug

SEQ ID NO: 31401 - RNA, 19 nt, Artificial Sequence
  Sense Oligo
aucuacacguuggauaggg

SEQ ID NO: 31402 - RNA, 19 nt, Artificial Sequence
  Antisense Oligo
cccuauccaacguguagau

SEQ ID NO: 31403 - RNA, 19 nt, Artificial Sequence
  Sense Oligo
caaaugaguugaguaguca

SEQ ID NO: 31404 - RNA, 19 nt, Artificial Sequence
  Antisense Oligo
ugacuacucaacucauuug

SEQ ID NO: 31405 - RNA, 19 nt, Artificial Sequence
  Sense Oligo
gaguugaguagucaucuaa

SEQ ID NO: 31406 - RNA, 19 nt, Artificial Sequence
  Antisense Oligo
uuagaugacuacucaacuc

SEQ ID NO: 31407 - RNA, 19 nt, Artificial Sequence
  Sense Oligo
aguugaguagucaucuaaa

SEQ ID NO: 31408 - RNA, 19 nt, Artificial Sequence
  Antisense Oligo
uuuagaugacuacucaacu

SEQ ID NO: 31409 - RNA, 19 nt, Artificial Sequence
  Sense Oligo
guugaguagucaucuaaaa

SEQ ID NO: 31410 - RNA, 19 nt, Artificial Sequence
  Antisense Oligo
uuuuagaugacuacucaac

SEQ ID NO: 31411 - RNA, 19 nt, Artificial Sequence
  Sense Oligo
agauauggucuuacccaag

SEQ ID NO: 31412 - RNA, 19 nt, Artificial Sequence
  Antisense Oligo
cuuggguaagaccauaucu

SEQ ID NO: 31413 - RNA, 19 nt, Artificial Sequence
  Sense Oligo
gauauggucuuacccaagu

SEQ ID NO: 31414 - RNA, 19 nt, Artificial Sequence
  Antisense Oligo
acuuggguaagaccauauc

SEQ ID NO: 31415 - RNA, 19 nt, Artificial Sequence
  Sense Oligo
auauggucuuacccaaguu

SEQ ID NO: 31416 - RNA, 19 nt, Artificial Sequence
  Antisense Oligo
aacuuggguaagaccauau

SEQ ID NO: 31417 - RNA, 19 nt, Artificial Sequence
  Sense Oligo
uauggucuuacccaaguua

SEQ ID NO: 31418 - RNA, 19 nt, Artificial Sequence
  Antisense Oligo
uaacuuggguaagaccaua

SEQ ID NO: 31419 - RNA, 19 nt, Artificial Sequence
  Sense Oligo
auggucuuacccaaguuag

SEQ ID NO: 31420 - RNA, 19 nt, Artificial Sequence
  Antisense Oligo
cuaacuuggguaagaccau

SEQ ID NO: 31421 - RNA, 19 nt, Artificial Sequence
  Sense Oligo
uggucuuacccaaguuaga

SEQ ID NO: 31422 - RNA, 19 nt, Artificial Sequence
  Antisense Oligo
ucuaacuuggguaagacca

SEQ ID NO: 31423 - RNA, 19 nt, Artificial Sequence
  Sense Oligo
ggucuuacccaaguuagaa

SEQ ID NO: 31424 - RNA, 19 nt, Artificial Sequence
  Antisense Oligo
uucuaacuuggguaagacc

SEQ ID NO: 31425 - RNA, 19 nt, Artificial Sequence
  Sense Oligo
acccaaguuagaauagcug

SEQ ID NO: 31426 - RNA, 19 nt, Artificial Sequence
  Antisense Oligo
cagcuauucuaacuugggu

SEQ ID NO: 31427 - RNA, 19 nt, Artificial Sequence
  Sense Oligo
cccaaguuagaauagcugu

SEQ ID NO: 31428 - RNA, 19 nt, Artificial Sequence
  Antisense Oligo
acagcuauucuaacuuggg

SEQ ID NO: 31429 - RNA, 19 nt, Artificial Sequence
  Sense Oligo
ccaaguuagaauagcugug

SEQ ID NO: 31430 - RNA, 19 nt, Artificial Sequence
  Antisense Oligo
cacagcuauucuaacuugg

SEQ ID NO: 31431 - RNA, 19 nt, Artificial Sequence
  Sense Oligo
uuagaauagcugugaucaa

SEQ ID NO: 31432 - RNA, 19 nt, Artificial Sequence
  Antisense Oligo
uugaucacagcuauucuaa

SEQ ID NO: 31433 - RNA, 19 nt, Artificial Sequence
  Sense Oligo
uagaauagcugugaucaaa

SEQ ID NO: 31434 - RNA, 19 nt, Artificial Sequence
  Antisense Oligo
uuugaucacagcuauucua

SEQ ID NO: 31435 - RNA, 19 nt, Artificial Sequence
  Sense Oligo
agaauagcugugaucaaaa

SEQ ID NO: 31436 - RNA, 19 nt, Artificial Sequence
  Antisense Oligo
uuuugaucacagcuauucu

SEQ ID NO: 31437 - RNA, 19 nt, Artificial Sequence
  Sense Oligo
acugccacuauggaggaca

SEQ ID NO: 31438 - RNA, 19 nt, Artificial Sequence
  Antisense Oligo
uguccuccauaguggcagu

SEQ ID NO: 31439 - RNA, 19 nt, Artificial Sequence
  Sense Oligo
ugccacuauggaggacagu

SEQ ID NO: 31440 - RNA, 19 nt, Artificial Sequence
  Antisense Oligo
acuguccuccauaguggca

SEQ ID NO: 31441 - RNA, 19 nt, Artificial Sequence
  Sense Oligo
cacuauggaggacaguaua

SEQ ID NO: 31442 - RNA, 19 nt, Artificial Sequence
  Antisense Oligo
uauacuguccuccauagug

SEQ ID NO: 31443 - RNA, 19 nt, Artificial Sequence
  Sense Oligo
acuauggaggacaguauaa

SEQ ID NO: 31444 - RNA, 19 nt, Artificial Sequence
  Antisense Oligo
uuauacuguccuccauagu

SEQ ID NO: 31445 - RNA, 19 nt, Artificial Sequence
  Sense Oligo
cuauggaggacaguauaaa

SEQ ID NO: 31446 - RNA, 19 nt, Artificial Sequence
  Antisense Oligo
uuuauacuguccuccauag

SEQ ID NO: 31447 - RNA, 19 nt, Artificial Sequence
  Sense Oligo
uauggaggacaguauaaag

SEQ ID NO: 31448 - RNA, 19 nt, Artificial Sequence
  Antisense Oligo
cuuuauacuguccuccaua

SEQ ID NO: 31449 - RNA, 19 nt, Artificial Sequence
  Sense Oligo
auggaggacaguauaaagg

SEQ ID NO: 31450 - RNA, 19 nt, Artificial Sequence
  Antisense Oligo
ccuuuauacuguccuccau

SEQ ID NO: 31451 - RNA, 19 nt, Artificial Sequence
  Sense Oligo
uggaggacaguauaaaggu

SEQ ID NO: 31452 - RNA, 19 nt, Artificial Sequence
  Antisense Oligo
accuuuauacuguccucca

SEQ ID NO: 31453 - RNA, 19 nt, Artificial Sequence
  Sense Oligo
ggaggacaguauaaagguu

SEQ ID NO: 31454 - RNA, 19 nt, Artificial Sequence
  Antisense Oligo
aaccuuuauacuguccucc

SEQ ID NO: 31455 - RNA, 19 nt, Artificial Sequence
  Sense Oligo
gaggacaguauaaagguuc

SEQ ID NO: 31456 - RNA, 19 nt, Artificial Sequence
  Antisense Oligo
gaaccuuuauacuguccuc

SEQ ID NO: 31457 - RNA, 19 nt, Artificial Sequence
  Sense Oligo
aggacaguauaaagguucc

SEQ ID NO: 31458 - RNA, 19 nt, Artificial Sequence
  Antisense Oligo
ggaaccuuuauacuguccu

SEQ ID NO: 31459 - RNA, 19 nt, Artificial Sequence
  Sense Oligo
ggacaguauaaagguuccu

SEQ ID NO: 31460 - RNA, 19 nt, Artificial Sequence
  Antisense Oligo
aggaaccuuuauacugucc

SEQ ID NO: 31461 - RNA, 19 nt, Artificial Sequence
  Sense Oligo
aguauaaagguuccugaag

SEQ ID NO: 31462 - RNA, 19 nt, Artificial Sequence
  Antisense Oligo
cuucaggaaccuuuauacu

SEQ ID NO: 31463 - RNA, 19 nt, Artificial Sequence
  Sense Oligo
uauaaagguuccugaagaa

SEQ ID NO: 31464 - RNA, 19 nt, Artificial Sequence
  Antisense Oligo
uucuucaggaaccuuuaua

SEQ ID NO: 31465 - RNA, 19 nt, Artificial Sequence
  Sense Oligo
ugauccagcaaucguacug

SEQ ID NO: 31466 - RNA, 19 nt, Artificial Sequence
  Antisense Oligo
caguacgauugcuggauca

SEQ ID NO: 31467 - RNA, 19 nt, Artificial Sequence
  Sense Oligo
gcacuccuauauuuaucgu

SEQ ID NO: 31468 - RNA, 19 nt, Artificial Sequence
  Antisense Oligo
acgauaaauauaggagugc

SEQ ID NO: 31469 - RNA, 19 nt, Artificial Sequence
  Sense Oligo
cacuccuauauuuaucgua

SEQ ID NO: 31470 - RNA, 19 nt, Artificial Sequence
  Antisense Oligo
uacgauaaauauaggagug

SEQ ID NO: 31471 - RNA, 19 nt, Artificial Sequence
  Sense Oligo
cuccuauauuuaucguaac

SEQ ID NO: 31472 - RNA, 19 nt, Artificial Sequence
  Antisense Oligo
guuacgauaaauauaggag

SEQ ID NO: 31473 - RNA, 19 nt, Artificial Sequence
  Sense Oligo
acacucaauagccauaaua

SEQ ID NO: 31474 - RNA, 19 nt, Artificial Sequence
  Antisense Oligo
uauuauggcuauugagugu

SEQ ID NO: 31475 - RNA, 19 nt, Artificial Sequence
  Sense Oligo
cacucaauagccauaauau

SEQ ID NO: 31476 - RNA, 19 nt, Artificial Sequence
  Antisense Oligo
auauuauggcuauugagug

SEQ ID NO: 31477 - RNA, 19 nt, Artificial Sequence
  Sense Oligo
acucaauagccauaauaug

SEQ ID NO: 31478 - RNA, 19 nt, Artificial Sequence
  Antisense Oligo
cauauuauggcuauugagu

SEQ ID NO: 31479 - RNA, 19 nt, Artificial Sequence
  Sense Oligo
cauaauauggaaucauccu

SEQ ID NO: 31480 - RNA, 19 nt, Artificial Sequence
  Antisense Oligo
aggaugauuccauauuaug

SEQ ID NO: 31481 - RNA, 19 nt, Artificial Sequence
  Sense Oligo
auaauauggaaucauccug

SEQ ID NO: 31482 - RNA, 19 nt, Artificial Sequence
  Antisense Oligo
caggaugauuccauauuau

SEQ ID NO: 31483 - RNA, 19 nt, Artificial Sequence
  Sense Oligo
uaauauggaaucauccuga

SEQ ID NO: 31484 - RNA, 19 nt, Artificial Sequence
  Antisense Oligo
ucaggaugauuccauauua

SEQ ID NO: 31485 - RNA, 19 nt, Artificial Sequence
  Sense Oligo
aauauggaaucauccugag

SEQ ID NO: 31486 - RNA, 19 nt, Artificial Sequence
  Antisense Oligo
cucaggaugauuccauauu

SEQ ID NO: 31487 - RNA, 19 nt, Artificial Sequence
  Sense Oligo
uccugaguguccacccgca

SEQ ID NO: 31488 - RNA, 19 nt, Artificial Sequence
  Antisense Oligo
ugcggguggacacucagga

SEQ ID NO: 31489 - RNA, 19 nt, Artificial Sequence
  Sense Oligo
cugaguguccacccgcaga

SEQ ID NO: 31490 - RNA, 19 nt, Artificial Sequence
  Antisense Oligo
ucugcggguggacacucag

SEQ ID NO: 31491 - RNA, 19 nt, Artificial Sequence
  Sense Oligo
ugaguguccacccgcagau

SEQ ID NO: 31492 - RNA, 19 nt, Artificial Sequence
  Antisense Oligo
aucugcggguggacacuca

SEQ ID NO: 31493 - RNA, 19 nt, Artificial Sequence
  Sense Oligo
gaguguccacccgcagaug

SEQ ID NO: 31494 - RNA, 19 nt, Artificial Sequence
  Antisense Oligo
caucugcggguggacacuc

SEQ ID NO: 31495 - RNA, 19 nt, Artificial Sequence
  Sense Oligo
aguguccacccgcagauga

SEQ ID NO: 31496 - RNA, 19 nt, Artificial Sequence
  Antisense Oligo
ucaucugcggguggacacu

SEQ ID NO: 31497 - RNA, 19 nt, Artificial Sequence
  Sense Oligo
guguccacccgcagaugag

SEQ ID NO: 31498 - RNA, 19 nt, Artificial Sequence
  Antisense Oligo
cucaucugcggguggacac

SEQ ID NO: 31499 - RNA, 19 nt, Artificial Sequence
  Sense Oligo
uguccacccgcagaugagu

SEQ ID NO: 31500 - RNA, 19 nt, Artificial Sequence
  Antisense Oligo
acucaucugcggguggaca

SEQ ID NO: 31501 - RNA, 19 nt, Artificial Sequence
  Sense Oligo
guccacccgcagaugagug

SEQ ID NO: 31502 - RNA, 19 nt, Artificial Sequence
  Antisense Oligo
cacucaucugcggguggac

SEQ ID NO: 31503 - RNA, 19 nt, Artificial Sequence
  Sense Oligo
cacccgcagaugaguggau

SEQ ID NO: 31504 - RNA, 19 nt, Artificial Sequence
  Antisense Oligo
auccacucaucugcgggug

SEQ ID NO: 31505 - RNA, 19 nt, Artificial Sequence
  Sense Oligo
cccgcagaugaguggauga

SEQ ID NO: 31506 - RNA, 19 nt, Artificial Sequence
  Antisense Oligo
ucauccacucaucugcggg

SEQ ID NO: 31507 - RNA, 19 nt, Artificial Sequence
  Sense Oligo
ccgcagaugaguggaugaa

SEQ ID NO: 31508 - RNA, 19 nt, Artificial Sequence
  Antisense Oligo
uucauccacucaucugcgg

SEQ ID NO: 31509 - RNA, 19 nt, Artificial Sequence
  Sense Oligo
cgcagaugaguggaugaag

SEQ ID NO: 31510 - RNA, 19 nt, Artificial Sequence
  Antisense Oligo
cuucauccacucaucugcg

SEQ ID NO: 31511 - RNA, 19 nt, Artificial Sequence
  Sense Oligo
agaauacuauuuggccacc

SEQ ID NO: 31512 - RNA, 19 nt, Artificial Sequence
  Antisense Oligo
gguggccaaauaguauucu

SEQ ID NO: 31513 - RNA, 19 nt, Artificial Sequence
  Sense Oligo
aaauucugucuuucgcagc

SEQ ID NO: 31514 - RNA, 19 nt, Artificial Sequence
  Antisense Oligo
gcugcgaaagacagaauuu

SEQ ID NO: 31515 - RNA, 19 nt, Artificial Sequence
  Sense Oligo
aauucugucuuucgcagca

SEQ ID NO: 31516 - RNA, 19 nt, Artificial Sequence
  Antisense Oligo
ugcugcgaaagacagaauu

SEQ ID NO: 31517 - RNA, 19 nt, Artificial Sequence
  Sense Oligo
auucugucuuucgcagcaa

SEQ ID NO: 31518 - RNA, 19 nt, Artificial Sequence
  Antisense Oligo
uugcugcgaaagacagaau

SEQ ID NO: 31519 - RNA, 19 nt, Artificial Sequence
  Sense Oligo
agaguugaucuucuagaag

SEQ ID NO: 31520 - RNA, 19 nt, Artificial Sequence
  Antisense Oligo
cuucuagaagaucaacucu

SEQ ID NO: 31521 - RNA, 19 nt, Artificial Sequence
  Sense Oligo
agagggcuagccaaagguu

SEQ ID NO: 31522 - RNA, 19 nt, Artificial Sequence
  Antisense Oligo
aaccuuuggcuagcccucu

SEQ ID NO: 31523 - RNA, 19 nt, Artificial Sequence
  Sense Oligo
gagggcuagccaaagguug

SEQ ID NO: 31524 - RNA, 19 nt, Artificial Sequence
  Antisense Oligo
caaccuuuggcuagcccuc

SEQ ID NO: 31525 - RNA, 19 nt, Artificial Sequence
  Sense Oligo
caaagguuggcuaguggau

SEQ ID NO: 31526 - RNA, 19 nt, Artificial Sequence
  Antisense Oligo
auccacuagccaaccuuug

SEQ ID NO: 31527 - RNA, 19 nt, Artificial Sequence
  Sense Oligo
aaagguuggcuaguggaua

SEQ ID NO: 31528 - RNA, 19 nt, Artificial Sequence
  Antisense Oligo
uauccacuagccaaccuuu

SEQ ID NO: 31529 - RNA, 19 nt, Artificial Sequence
  Sense Oligo
aagguuggcuaguggauac

SEQ ID NO: 31530 - RNA, 19 nt, Artificial Sequence
  Antisense Oligo
guauccacuagccaaccuu

SEQ ID NO: 31531 - RNA, 19 nt, Artificial Sequence
  Sense Oligo
agguuggcuaguggauaca

SEQ ID NO: 31532 - RNA, 19 nt, Artificial Sequence
  Antisense Oligo
uguauccacuagccaaccu

SEQ ID NO: 31533 - RNA, 19 nt, Artificial Sequence
  Sense Oligo
guauggcuagauaggacga

SEQ ID NO: 31534 - RNA, 19 nt, Artificial Sequence
  Antisense Oligo
ucguccuaucuagccauac

SEQ ID NO: 31535 - RNA, 19 nt, Artificial Sequence
  Sense Oligo
uauggcuagauaggacgag

SEQ ID NO: 31536 - RNA, 19 nt, Artificial Sequence
  Antisense Oligo
cucguccuaucuagccaua

SEQ ID NO: 31537 - RNA, 19 nt, Artificial Sequence
  Sense Oligo
auggcuagauaggacgagu

SEQ ID NO: 31538 - RNA, 19 nt, Artificial Sequence
  Antisense Oligo
acucguccuaucuagccau

SEQ ID NO: 31539 - RNA, 19 nt, Artificial Sequence
  Sense Oligo
uggcuagauaggacgagua

SEQ ID NO: 31540 - RNA, 19 nt, Artificial Sequence
  Antisense Oligo
uacucguccuaucuagcca

SEQ ID NO: 31541 - RNA, 19 nt, Artificial Sequence
  Sense Oligo
ggcuagauaggacgaguaa

SEQ ID NO: 31542 - RNA, 19 nt, Artificial Sequence
  Antisense Oligo
uuacucguccuaucuagcc

SEQ ID NO: 31543 - RNA, 19 nt, Artificial Sequence
  Sense Oligo
gcuagauaggacgaguaag

SEQ ID NO: 31544 - RNA, 19 nt, Artificial Sequence
  Antisense Oligo
cuuacucguccuaucuagc

SEQ ID NO: 31545 - RNA, 19 nt, Artificial Sequence
  Sense Oligo
cuagauaggacgaguaagu

SEQ ID NO: 31546 - RNA, 19 nt, Artificial Sequence
  Antisense Oligo
acuuacucguccuaucuag

SEQ ID NO: 31547 - RNA, 19 nt, Artificial Sequence
  Sense Oligo
uagauaggacgaguaaguu

SEQ ID NO: 31548 - RNA, 19 nt, Artificial Sequence
  Antisense Oligo
aacuuacucguccuaucua

SEQ ID NO: 31549 - RNA, 19 nt, Artificial Sequence
  Sense Oligo
agauaggacgaguaaguuc

SEQ ID NO: 31550 - RNA, 19 nt, Artificial Sequence
  Antisense Oligo
gaacuuacucguccuaucu

SEQ ID NO: 31551 - RNA, 19 nt, Artificial Sequence
  Sense Oligo
auaggacgaguaaguucua

SEQ ID NO: 31552 - RNA, 19 nt, Artificial Sequence
  Antisense Oligo
uagaacuuacucguccuau

SEQ ID NO: 31553 - RNA, 19 nt, Artificial Sequence
  Sense Oligo
uaggacgaguaaguucuag

SEQ ID NO: 31554 - RNA, 19 nt, Artificial Sequence
  Antisense Oligo
cuagaacuuacucguccua

SEQ ID NO: 31555 - RNA, 19 nt, Artificial Sequence
  Sense Oligo
aggacgaguaaguucuagg

SEQ ID NO: 31556 - RNA, 19 nt, Artificial Sequence
  Antisense Oligo
ccuagaacuuacucguccu

SEQ ID NO: 31557 - RNA, 19 nt, Artificial Sequence
  Sense Oligo
ggacgaguaaguucuaggg

SEQ ID NO: 31558 - RNA, 19 nt, Artificial Sequence
  Antisense Oligo
cccuagaacuuacucgucc

SEQ ID NO: 31559 - RNA, 19 nt, Artificial Sequence
  Sense Oligo
gacgaguaaguucuagggu

SEQ ID NO: 31560 - RNA, 19 nt, Artificial Sequence
  Antisense Oligo
acccuagaacuuacucguc

SEQ ID NO: 31561 - RNA, 19 nt, Artificial Sequence
  Sense Oligo
uaggguccuagagcaguau

SEQ ID NO: 31562 - RNA, 19 nt, Artificial Sequence
  Antisense Oligo
auacugcucuaggacccua

SEQ ID NO: 31563 - RNA, 19 nt, Artificial Sequence
  Sense Oligo
aggguccuagagcaguaug

SEQ ID NO: 31564 - RNA, 19 nt, Artificial Sequence
  Antisense Oligo
cauacugcucuaggacccu

SEQ ID NO: 31565 - RNA, 19 nt, Artificial Sequence
  Sense Oligo
ggguccuagagcaguaugg

SEQ ID NO: 31566 - RNA, 19 nt, Artificial Sequence
  Antisense Oligo
ccauacugcucuaggaccc

SEQ ID NO: 31567 - RNA, 19 nt, Artificial Sequence
  Sense Oligo
gguccuagagcaguaugga

SEQ ID NO: 31568 - RNA, 19 nt, Artificial Sequence
  Antisense Oligo
uccauacugcucuaggacc

SEQ ID NO: 31569 - RNA, 19 nt, Artificial Sequence
  Sense Oligo
guccuagagcaguauggaa

SEQ ID NO: 31570 - RNA, 19 nt, Artificial Sequence
  Antisense Oligo
uuccauacugcucuaggac

SEQ ID NO: 31571 - RNA, 19 nt, Artificial Sequence
  Sense Oligo
aaauagcuggaagagugga

SEQ ID NO: 31572 - RNA, 19 nt, Artificial Sequence
  Antisense Oligo
uccacucuuccagcuauuu

SEQ ID NO: 31573 - RNA, 19 nt, Artificial Sequence
  Sense Oligo
aauagcuggaagaguggag

SEQ ID NO: 31574 - RNA, 19 nt, Artificial Sequence
  Antisense Oligo
cuccacucuuccagcuauu

SEQ ID NO: 31575 - RNA, 19 nt, Artificial Sequence
  Sense Oligo
cuggaagaguggaguuuga

SEQ ID NO: 31576 - RNA, 19 nt, Artificial Sequence
  Antisense Oligo
ucaaacuccacucuuccag

SEQ ID NO: 31577 - RNA, 19 nt, Artificial Sequence
  Sense Oligo
uggaagaguggaguuugaa

SEQ ID NO: 31578 - RNA, 19 nt, Artificial Sequence
  Antisense Oligo
uucaaacuccacucuucca

SEQ ID NO: 31579 - RNA, 19 nt, Artificial Sequence
  Sense Oligo
ggaagaguggaguuugaau

SEQ ID NO: 31580 - RNA, 19 nt, Artificial Sequence
  Antisense Oligo
auucaaacuccacucuucc

SEQ ID NO: 31581 - RNA, 19 nt, Artificial Sequence
  Sense Oligo
ggaguuugaauguuuccaa

SEQ ID NO: 31582 - RNA, 19 nt, Artificial Sequence
  Antisense Oligo
uuggaaacauucaaacucc

SEQ ID NO: 31583 - RNA, 19 nt, Artificial Sequence
  Sense Oligo
acagacuguauacuuugua

SEQ ID NO: 31584 - RNA, 19 nt, Artificial Sequence
  Antisense Oligo
uacaaaguauacagucugu

SEQ ID NO: 31585 - RNA, 19 nt, Artificial Sequence
  Sense Oligo
cagacuguauacuuuguac

SEQ ID NO: 31586 - RNA, 19 nt, Artificial Sequence
  Antisense Oligo
guacaaaguauacagucug

SEQ ID NO: 31587 - RNA, 19 nt, Artificial Sequence
  Sense Oligo
cauaguauacauuguagac

SEQ ID NO: 31588 - RNA, 19 nt, Artificial Sequence
  Antisense Oligo
gucuacaauguauacuaug

SEQ ID NO: 31589 - RNA, 19 nt, Artificial Sequence
  Sense Oligo
aaauguauucucuguaugc

SEQ ID NO: 31590 - RNA, 19 nt, Artificial Sequence
  Antisense Oligo
gcauacagagaauacauuu

SEQ ID NO: 31591 - RNA, 19 nt, Artificial Sequence
  Sense Oligo
guauucucuguaugcauuu

SEQ ID NO: 31592 - RNA, 19 nt, Artificial Sequence
  Antisense Oligo
aaaugcauacagagaauac

SEQ ID NO: 31593 - RNA, 19 nt, Artificial Sequence
  Sense Oligo
auucucuguaugcauuugu

SEQ ID NO: 31594 - RNA, 19 nt, Artificial Sequence
  Antisense Oligo
acaaaugcauacagagaau

SEQ ID NO: 31595 - RNA, 19 nt, Artificial Sequence
  Sense Oligo
aauaauaaaagcagcuggg

SEQ ID NO: 31596 - RNA, 19 nt, Artificial Sequence
  Antisense Oligo
cccagcugcuuuuauuauu

SEQ ID NO: 31597 - RNA, 19 nt, Artificial Sequence
  Sense Oligo
auaauaaaagcagcugggc

SEQ ID NO: 31598 - RNA, 19 nt, Artificial Sequence
  Antisense Oligo
gcccagcugcuuuuauuau

SEQ ID NO: 31599 - RNA, 19 nt, Artificial Sequence
  Sense Oligo
uaauaaaagcagcugggcu

SEQ ID NO: 31600 - RNA, 19 nt, Artificial Sequence
  Antisense Oligo
agcccagcugcuuuuauua

SEQ ID NO: 31601 - RNA, 19 nt, Artificial Sequence
  Sense Oligo
ggcuugguggcucaugccu

SEQ ID NO: 31602 - RNA, 19 nt, Artificial Sequence
  Antisense Oligo
aggcaugagccaccaagcc

SEQ ID NO: 31603 - RNA, 19 nt, Artificial Sequence
  Sense Oligo
gcuugguggcucaugccua

SEQ ID NO: 31604 - RNA, 19 nt, Artificial Sequence
  Antisense Oligo
uaggcaugagccaccaagc

SEQ ID NO: 31605 - RNA, 19 nt, Artificial Sequence
  Sense Oligo
cuugguggcucaugccuau

SEQ ID NO: 31606 - RNA, 19 nt, Artificial Sequence
  Antisense Oligo
auaggcaugagccaccaag

SEQ ID NO: 31607 - RNA, 19 nt, Artificial Sequence
  Sense Oligo
uugguggcucaugccuaua

SEQ ID NO: 31608 - RNA, 19 nt, Artificial Sequence
  Antisense Oligo
uauaggcaugagccaccaa

SEQ ID NO: 31609 - RNA, 19 nt, Artificial Sequence
  Sense Oligo
ugguggcucaugccuauaa

SEQ ID NO: 31610 - RNA, 19 nt, Artificial Sequence
  Antisense Oligo
uuauaggcaugagccacca

SEQ ID NO: 31611 - RNA, 19 nt, Artificial Sequence
  Sense Oligo
gguggcucaugccuauaau

SEQ ID NO: 31612 - RNA, 19 nt, Artificial Sequence
  Antisense Oligo
auuauaggcaugagccacc

SEQ ID NO: 31613 - RNA, 19 nt, Artificial Sequence
  Sense Oligo
guggcucaugccuauaauc

SEQ ID NO: 31614 - RNA, 19 nt, Artificial Sequence
  Antisense Oligo
gauuauaggcaugagccac

SEQ ID NO: 31615 - RNA, 19 nt, Artificial Sequence
  Sense Oligo
uggcucaugccuauaaucc

SEQ ID NO: 31616 - RNA, 19 nt, Artificial Sequence
  Antisense Oligo
ggauuauaggcaugagcca

SEQ ID NO: 31617 - RNA, 19 nt, Artificial Sequence
  Sense Oligo
ggcucaugccuauaauccc

SEQ ID NO: 31618 - RNA, 19 nt, Artificial Sequence
  Antisense Oligo
gggauuauaggcaugagcc

SEQ ID NO: 31619 - RNA, 19 nt, Artificial Sequence
  Sense Oligo
augccuauaaucccaguac

SEQ ID NO: 31620 - RNA, 19 nt, Artificial Sequence
  Antisense Oligo
guacugggauuauaggcau

SEQ ID NO: 31621 - RNA, 19 nt, Artificial Sequence
  Sense Oligo
ugccuauaaucccaguacu

SEQ ID NO: 31622 - RNA, 19 nt, Artificial Sequence
  Antisense Oligo
aguacugggauuauaggca

SEQ ID NO: 31623 - RNA, 19 nt, Artificial Sequence
  Sense Oligo
gccuauaaucccaguacuu

SEQ ID NO: 31624 - RNA, 19 nt, Artificial Sequence
  Antisense Oligo
aaguacugggauuauaggc

SEQ ID NO: 31625 - RNA, 19 nt, Artificial Sequence
  Sense Oligo
ugaggccaggaguucaaga

SEQ ID NO: 31626 - RNA, 19 nt, Artificial Sequence
  Antisense Oligo
ucuugaacuccuggccuca

SEQ ID NO: 31627 - RNA, 19 nt, Artificial Sequence
  Sense Oligo
ccugcagucccagcuacuu

SEQ ID NO: 31628 - RNA, 19 nt, Artificial Sequence
  Antisense Oligo
aaguagcugggacugcagg

SEQ ID NO: 31629 - RNA, 19 nt, Artificial Sequence
  Sense Oligo
cugcagucccagcuacuug

SEQ ID NO: 31630 - RNA, 19 nt, Artificial Sequence
  Antisense Oligo
caaguagcugggacugcag

SEQ ID NO: 31631 - RNA, 19 nt, Artificial Sequence
  Sense Oligo
ugcagucccagcuacuugg

SEQ ID NO: 31632 - RNA, 19 nt, Artificial Sequence
  Antisense Oligo
ccaaguagcugggacugca

SEQ ID NO: 31633 - RNA, 19 nt, Artificial Sequence
  Sense Oligo
ccagcuacuugggaggcuu

SEQ ID NO: 31634 - RNA, 19 nt, Artificial Sequence
  Antisense Oligo
aagccucccaaguagcugg

SEQ ID NO: 31635 - RNA, 19 nt, Artificial Sequence
  Sense Oligo
cagcuacuugggaggcuua

SEQ ID NO: 31636 - RNA, 19 nt, Artificial Sequence
  Antisense Oligo
uaagccucccaaguagcug

SEQ ID NO: 31637 - RNA, 19 nt, Artificial Sequence
  Sense Oligo
agcuacuugggaggcuuac

SEQ ID NO: 31638 - RNA, 19 nt, Artificial Sequence
  Antisense Oligo
guaagccucccaaguagcu

SEQ ID NO: 31639 - RNA, 19 nt, Artificial Sequence
  Sense Oligo
gcuacuugggaggcuuaca

SEQ ID NO: 31640 - RNA, 19 nt, Artificial Sequence
  Antisense Oligo
uguaagccucccaaguagc

SEQ ID NO: 31641 - RNA, 19 nt, Artificial Sequence
  Sense Oligo
cuugggaggcuuacaugag

SEQ ID NO: 31642 - RNA, 19 nt, Artificial Sequence
  Antisense Oligo
cucauguaagccucccaag

SEQ ID NO: 31643 - RNA, 19 nt, Artificial Sequence
  Sense Oligo
ggucaaggcugcaguggua

SEQ ID NO: 31644 - RNA, 19 nt, Artificial Sequence
  Antisense Oligo
uaccacugcagccuugacc

SEQ ID NO: 31645 - RNA, 19 nt, Artificial Sequence
  Sense Oligo
gucaaggcugcagugguag

SEQ ID NO: 31646 - RNA, 19 nt, Artificial Sequence
  Antisense Oligo
cuaccacugcagccuugac

SEQ ID NO: 31647 - RNA, 19 nt, Artificial Sequence
  Sense Oligo
ucaaggcugcagugguaga

SEQ ID NO: 31648 - RNA, 19 nt, Artificial Sequence
  Antisense Oligo
ucuaccacugcagccuuga

SEQ ID NO: 31649 - RNA, 19 nt, Artificial Sequence
  Sense Oligo
caaggcugcagugguagaa

SEQ ID NO: 31650 - RNA, 19 nt, Artificial Sequence
  Antisense Oligo
uucuaccacugcagccuug

SEQ ID NO: 31651 - RNA, 19 nt, Artificial Sequence
  Sense Oligo
aaggcugcagugguagaag

SEQ ID NO: 31652 - RNA, 19 nt, Artificial Sequence
  Antisense Oligo
cuucuaccacugcagccuu

SEQ ID NO: 31653 - RNA, 19 nt, Artificial Sequence
  Sense Oligo
aggcugcagugguagaagu

SEQ ID NO: 31654 - RNA, 19 nt, Artificial Sequence
  Antisense Oligo
acuucuaccacugcagccu

SEQ ID NO: 31655 - RNA, 19 nt, Artificial Sequence
  Sense Oligo
ggcugcagugguagaaguc

SEQ ID NO: 31656 - RNA, 19 nt, Artificial Sequence
  Antisense Oligo
gacuucuaccacugcagcc

SEQ ID NO: 31657 - RNA, 19 nt, Artificial Sequence
  Sense Oligo
gcugcagugguagaagucc

SEQ ID NO: 31658 - RNA, 19 nt, Artificial Sequence
  Antisense Oligo
ggacuucuaccacugcagc

SEQ ID NO: 31659 - RNA, 19 nt, Artificial Sequence
  Sense Oligo
cugcagugguagaagucca

SEQ ID NO: 31660 - RNA, 19 nt, Artificial Sequence
  Antisense Oligo
uggacuucuaccacugcag

SEQ ID NO: 31661 - RNA, 19 nt, Artificial Sequence
  Sense Oligo
agugguagaaguccagauu

SEQ ID NO: 31662 - RNA, 19 nt, Artificial Sequence
  Antisense Oligo
aaucuggacuucuaccacu

SEQ ID NO: 31663 - RNA, 19 nt, Artificial Sequence
  Sense Oligo
gugguagaaguccagauuc

SEQ ID NO: 31664 - RNA, 19 nt, Artificial Sequence
  Antisense Oligo
gaaucuggacuucuaccac

SEQ ID NO: 31665 - RNA, 19 nt, Artificial Sequence
  Sense Oligo
ugguagaaguccagauucc

SEQ ID NO: 31666 - RNA, 19 nt, Artificial Sequence
  Antisense Oligo
ggaaucuggacuucuacca

SEQ ID NO: 31667 - RNA, 19 nt, Artificial Sequence
  Sense Oligo
agaaguccagauucccuag

SEQ ID NO: 31668 - RNA, 19 nt, Artificial Sequence
  Antisense Oligo
cuagggaaucuggacuucu

SEQ ID NO: 31669 - RNA, 19 nt, Artificial Sequence
  Sense Oligo
gaaguccagauucccuaga

SEQ ID NO: 31670 - RNA, 19 nt, Artificial Sequence
  Antisense Oligo
ucuagggaaucuggacuuc

SEQ ID NO: 31671 - RNA, 19 nt, Artificial Sequence
  Sense Oligo
aaguccagauucccuagaa

SEQ ID NO: 31672 - RNA, 19 nt, Artificial Sequence
  Antisense Oligo
uucuagggaaucuggacuu

SEQ ID NO: 31673 - RNA, 19 nt, Artificial Sequence
  Sense Oligo
aguccagauucccuagaag

SEQ ID NO: 31674 - RNA, 19 nt, Artificial Sequence
  Antisense Oligo
cuucuagggaaucuggacu

SEQ ID NO: 31675 - RNA, 19 nt, Artificial Sequence
  Sense Oligo
guccagauucccuagaagu

SEQ ID NO: 31676 - RNA, 19 nt, Artificial Sequence
  Antisense Oligo
acuucuagggaaucuggac

SEQ ID NO: 31677 - RNA, 19 nt, Artificial Sequence
  Sense Oligo
uccagauucccuagaaguu

SEQ ID NO: 31678 - RNA, 19 nt, Artificial Sequence
  Antisense Oligo
aacuucuagggaaucugga

SEQ ID NO: 31679 - RNA, 19 nt, Artificial Sequence
  Sense Oligo
ccagauucccuagaaguug

SEQ ID NO: 31680 - RNA, 19 nt, Artificial Sequence
  Antisense Oligo
caacuucuagggaaucugg

SEQ ID NO: 31681 - RNA, 19 nt, Artificial Sequence
  Sense Oligo
cagauucccuagaaguuga

SEQ ID NO: 31682 - RNA, 19 nt, Artificial Sequence
  Antisense Oligo
ucaacuucuagggaaucug

SEQ ID NO: 31683 - RNA, 19 nt, Artificial Sequence
  Sense Oligo
agauucccuagaaguugaa

SEQ ID NO: 31684 - RNA, 19 nt, Artificial Sequence
  Antisense Oligo
uucaacuucuagggaaucu

SEQ ID NO: 31685 - RNA, 19 nt, Artificial Sequence
  Sense Oligo
auuuucagauucuugacag

SEQ ID NO: 31686 - RNA, 19 nt, Artificial Sequence
  Antisense Oligo
cugucaagaaucugaaaau

SEQ ID NO: 31687 - RNA, 19 nt, Artificial Sequence
  Sense Oligo
uuuucagauucuugacagg

SEQ ID NO: 31688 - RNA, 19 nt, Artificial Sequence
  Antisense Oligo
ccugucaagaaucugaaaa

SEQ ID NO: 31689 - RNA, 19 nt, Artificial Sequence
  Sense Oligo
ucagauucuugacagguaa

SEQ ID NO: 31690 - RNA, 19 nt, Artificial Sequence
  Antisense Oligo
uuaccugucaagaaucuga

SEQ ID NO: 31691 - RNA, 19 nt, Artificial Sequence
  Sense Oligo
aaauacugaauacuggguu

SEQ ID NO: 31692 - RNA, 19 nt, Artificial Sequence
  Antisense Oligo
aacccaguauucaguauuu

SEQ ID NO: 31693 - RNA, 19 nt, Artificial Sequence
  Sense Oligo
aauacugaauacuggguua

SEQ ID NO: 31694 - RNA, 19 nt, Artificial Sequence
  Antisense Oligo
uaacccaguauucaguauu

SEQ ID NO: 31695 - RNA, 19 nt, Artificial Sequence
  Sense Oligo
auacugaauacuggguuau

SEQ ID NO: 31696 - RNA, 19 nt, Artificial Sequence
  Antisense Oligo
auaacccaguauucaguau

SEQ ID NO: 31697 - RNA, 19 nt, Artificial Sequence
  Sense Oligo
aaugaccacagauuaaccc

SEQ ID NO: 31698 - RNA, 19 nt, Artificial Sequence
  Antisense Oligo
ggguuaaucuguggucauu

SEQ ID NO: 31699 - RNA, 19 nt, Artificial Sequence
  Sense Oligo
accacagauuaacccuucu

SEQ ID NO: 31700 - RNA, 19 nt, Artificial Sequence
  Antisense Oligo
agaaggguuaaucuguggu

SEQ ID NO: 31701 - RNA, 19 nt, Artificial Sequence
  Sense Oligo
ccacagauuaacccuucua

SEQ ID NO: 31702 - RNA, 19 nt, Artificial Sequence
  Antisense Oligo
uagaaggguuaaucugugg

SEQ ID NO: 31703 - RNA, 19 nt, Artificial Sequence
  Sense Oligo
cacagauuaacccuucuaa

SEQ ID NO: 31704 - RNA, 19 nt, Artificial Sequence
  Antisense Oligo
uuagaaggguuaaucugug

SEQ ID NO: 31705 - RNA, 19 nt, Artificial Sequence
  Sense Oligo
acagauuaacccuucuaag

SEQ ID NO: 31706 - RNA, 19 nt, Artificial Sequence
  Antisense Oligo
cuuagaaggguuaaucugu

SEQ ID NO: 31707 - RNA, 19 nt, Artificial Sequence
  Sense Oligo
cagauuaacccuucuaagc

SEQ ID NO: 31708 - RNA, 19 nt, Artificial Sequence
  Antisense Oligo
gcuuagaaggguuaaucug

SEQ ID NO: 31709 - RNA, 19 nt, Artificial Sequence
  Sense Oligo
agauuaacccuucuaagca

SEQ ID NO: 31710 - RNA, 19 nt, Artificial Sequence
  Antisense Oligo
ugcuuagaaggguuaaucu

SEQ ID NO: 31711 - RNA, 19 nt, Artificial Sequence
  Sense Oligo
gauuaacccuucuaagcaa

SEQ ID NO: 31712 - RNA, 19 nt, Artificial Sequence
  Antisense Oligo
uugcuuagaaggguuaauc

SEQ ID NO: 31713 - RNA, 19 nt, Artificial Sequence
  Sense Oligo
auuaacccuucuaagcaaa

SEQ ID NO: 31714 - RNA, 19 nt, Artificial Sequence
  Antisense Oligo
uuugcuuagaaggguuaau

SEQ ID NO: 31715 - RNA, 19 nt, Artificial Sequence
  Sense Oligo
uuaacccuucuaagcaaaa

SEQ ID NO: 31716 - RNA, 19 nt, Artificial Sequence
  Antisense Oligo
uuuugcuuagaaggguuaa

SEQ ID NO: 31717 - RNA, 19 nt, Artificial Sequence
  Sense Oligo
uaacccuucuaagcaaaau

SEQ ID NO: 31718 - RNA, 19 nt, Artificial Sequence
  Antisense Oligo
auuuugcuuagaaggguua

SEQ ID NO: 31719 - RNA, 19 nt, Artificial Sequence
  Sense Oligo
ggucuuucucuuauuaaug

SEQ ID NO: 31720 - RNA, 19 nt, Artificial Sequence
  Antisense Oligo
cauuaauaagagaaagacc

SEQ ID NO: 31721 - RNA, 19 nt, Artificial Sequence
  Sense Oligo
ucucuuauuaaugugcuag

SEQ ID NO: 31722 - RNA, 19 nt, Artificial Sequence
  Antisense Oligo
cuagcacauuaauaagaga

SEQ ID NO: 31723 - RNA, 19 nt, Artificial Sequence
  Sense Oligo
aaugugcuagaauguauuc

SEQ ID NO: 31724 - RNA, 19 nt, Artificial Sequence
  Antisense Oligo
gaauacauucuagcacauu

SEQ ID NO: 31725 - RNA, 19 nt, Artificial Sequence
  Sense Oligo
augugcuagaauguauuca

SEQ ID NO: 31726 - RNA, 19 nt, Artificial Sequence
  Antisense Oligo
ugaauacauucuagcacau

SEQ ID NO: 31727 - RNA, 19 nt, Artificial Sequence
  Sense Oligo
ugugcuagaauguauucau

SEQ ID NO: 31728 - RNA, 19 nt, Artificial Sequence
  Antisense Oligo
augaauacauucuagcaca

SEQ ID NO: 31729 - RNA, 19 nt, Artificial Sequence
  Sense Oligo
cuggaugaauacuugaaga

SEQ ID NO: 31730 - RNA, 19 nt, Artificial Sequence
  Antisense Oligo
ucuucaaguauucauccag

SEQ ID NO: 31731 - RNA, 19 nt, Artificial Sequence
  Sense Oligo
uggaugaauacuugaagag

SEQ ID NO: 31732 - RNA, 19 nt, Artificial Sequence
  Antisense Oligo
cucuucaaguauucaucca

SEQ ID NO: 31733 - RNA, 19 nt, Artificial Sequence
  Sense Oligo
ggaugaauacuugaagagc

SEQ ID NO: 31734 - RNA, 19 nt, Artificial Sequence
  Antisense Oligo
gcucuucaaguauucaucc

SEQ ID NO: 31735 - RNA, 19 nt, Artificial Sequence
  Sense Oligo
gaugaauacuugaagagca

SEQ ID NO: 31736 - RNA, 19 nt, Artificial Sequence
  Antisense Oligo
ugcucuucaaguauucauc

SEQ ID NO: 31737 - RNA, 19 nt, Artificial Sequence
  Sense Oligo
augaauacuugaagagcac

SEQ ID NO: 31738 - RNA, 19 nt, Artificial Sequence
  Antisense Oligo
gugcucuucaaguauucau

SEQ ID NO: 31739 - RNA, 19 nt, Artificial Sequence
  Sense Oligo
ccuugugccaggaaguacu

SEQ ID NO: 31740 - RNA, 19 nt, Artificial Sequence
  Antisense Oligo
aguacuuccuggcacaagg

SEQ ID NO: 31741 - RNA, 19 nt, Artificial Sequence
  Sense Oligo
cuugugccaggaaguacua

SEQ ID NO: 31742 - RNA, 19 nt, Artificial Sequence
  Antisense Oligo
uaguacuuccuggcacaag

SEQ ID NO: 31743 - RNA, 19 nt, Artificial Sequence
  Sense Oligo
uugugccaggaaguacuac

SEQ ID NO: 31744 - RNA, 19 nt, Artificial Sequence
  Antisense Oligo
guaguacuuccuggcacaa

SEQ ID NO: 31745 - RNA, 19 nt, Artificial Sequence
  Sense Oligo
ugugccaggaaguacuacu

SEQ ID NO: 31746 - RNA, 19 nt, Artificial Sequence
  Antisense Oligo
aguaguacuuccuggcaca

SEQ ID NO: 31747 - RNA, 19 nt, Artificial Sequence
  Sense Oligo
gugccaggaaguacuacuc

SEQ ID NO: 31748 - RNA, 19 nt, Artificial Sequence
  Antisense Oligo
gaguaguacuuccuggcac

SEQ ID NO: 31749 - RNA, 19 nt, Artificial Sequence
  Sense Oligo
ugccaggaaguacuacuca

SEQ ID NO: 31750 - RNA, 19 nt, Artificial Sequence
  Antisense Oligo
ugaguaguacuuccuggca

SEQ ID NO: 31751 - RNA, 19 nt, Artificial Sequence
  Sense Oligo
gccaggaaguacuacucaa

SEQ ID NO: 31752 - RNA, 19 nt, Artificial Sequence
  Antisense Oligo
uugaguaguacuuccuggc

SEQ ID NO: 31753 - RNA, 19 nt, Artificial Sequence
  Sense Oligo
ccaggaaguacuacucaag

SEQ ID NO: 31754 - RNA, 19 nt, Artificial Sequence
  Antisense Oligo
cuugaguaguacuuccugg

SEQ ID NO: 31755 - RNA, 19 nt, Artificial Sequence
  Sense Oligo
caggaaguacuacucaagg

SEQ ID NO: 31756 - RNA, 19 nt, Artificial Sequence
  Antisense Oligo
ccuugaguaguacuuccug

SEQ ID NO: 31757 - RNA, 19 nt, Artificial Sequence
  Sense Oligo
aggaaguacuacucaaggc

SEQ ID NO: 31758 - RNA, 19 nt, Artificial Sequence
  Antisense Oligo
gccuugaguaguacuuccu

SEQ ID NO: 31759 - RNA, 19 nt, Artificial Sequence
  Sense Oligo
ggaaguacuacucaaggca

SEQ ID NO: 31760 - RNA, 19 nt, Artificial Sequence
  Antisense Oligo
ugccuugaguaguacuucc

SEQ ID NO: 31761 - RNA, 19 nt, Artificial Sequence
  Sense Oligo
gaaguacuacucaaggcac

SEQ ID NO: 31762 - RNA, 19 nt, Artificial Sequence
  Antisense Oligo
gugccuugaguaguacuuc

SEQ ID NO: 31763 - RNA, 19 nt, Artificial Sequence
  Sense Oligo
aaguacuacucaaggcaca

SEQ ID NO: 31764 - RNA, 19 nt, Artificial Sequence
  Antisense Oligo
ugugccuugaguaguacuu

SEQ ID NO: 31765 - RNA, 19 nt, Artificial Sequence
  Sense Oligo
aguacuacucaaggcacag

SEQ ID NO: 31766 - RNA, 19 nt, Artificial Sequence
  Antisense Oligo
cugugccuugaguaguacu

SEQ ID NO: 31767 - RNA, 19 nt, Artificial Sequence
  Sense Oligo
guacuacucaaggcacagc

SEQ ID NO: 31768 - RNA, 19 nt, Artificial Sequence
  Antisense Oligo
gcugugccuugaguaguac

SEQ ID NO: 31769 - RNA, 19 nt, Artificial Sequence
  Sense Oligo
uacuacucaaggcacagcg

SEQ ID NO: 31770 - RNA, 19 nt, Artificial Sequence
  Antisense Oligo
cgcugugccuugaguagua

SEQ ID NO: 31771 - RNA, 19 nt, Artificial Sequence
  Sense Oligo
acuacucaaggcacagcgu

SEQ ID NO: 31772 - RNA, 19 nt, Artificial Sequence
  Antisense Oligo
acgcugugccuugaguagu

SEQ ID NO: 31773 - RNA, 19 nt, Artificial Sequence
  Sense Oligo
cuacucaaggcacagcgug

SEQ ID NO: 31774 - RNA, 19 nt, Artificial Sequence
  Antisense Oligo
cacgcugugccuugaguag

SEQ ID NO: 31775 - RNA, 19 nt, Artificial Sequence
  Sense Oligo
uacucaaggcacagcgugu

SEQ ID NO: 31776 - RNA, 19 nt, Artificial Sequence
  Antisense Oligo
acacgcugugccuugagua

SEQ ID NO: 31777 - RNA, 19 nt, Artificial Sequence
  Sense Oligo
acucaaggcacagcgugua

SEQ ID NO: 31778 - RNA, 19 nt, Artificial Sequence
  Antisense Oligo
uacacgcugugccuugagu

SEQ ID NO: 31779 - RNA, 19 nt, Artificial Sequence
  Sense Oligo
cucaaggcacagcguguac

SEQ ID NO: 31780 - RNA, 19 nt, Artificial Sequence
  Antisense Oligo
guacacgcugugccuugag

SEQ ID NO: 31781 - RNA, 19 nt, Artificial Sequence
  Sense Oligo
aggcacagcguguacagca

SEQ ID NO: 31782 - RNA, 19 nt, Artificial Sequence
  Antisense Oligo
ugcuguacacgcugugccu

SEQ ID NO: 31783 - RNA, 19 nt, Artificial Sequence
  Sense Oligo
ggcacagcguguacagcac

SEQ ID NO: 31784 - RNA, 19 nt, Artificial Sequence
  Antisense Oligo
gugcuguacacgcugugcc

SEQ ID NO: 31785 - RNA, 19 nt, Artificial Sequence
  Sense Oligo
agcguguacagcacugcuc

SEQ ID NO: 31786 - RNA, 19 nt, Artificial Sequence
  Antisense Oligo
gagcagugcuguacacgcu

SEQ ID NO: 31787 - RNA, 19 nt, Artificial Sequence
  Sense Oligo
gcguguacagcacugcuca

SEQ ID NO: 31788 - RNA, 19 nt, Artificial Sequence
  Antisense Oligo
ugagcagugcuguacacgc

SEQ ID NO: 31789 - RNA, 19 nt, Artificial Sequence
  Sense Oligo
cguguacagcacugcucaa

SEQ ID NO: 31790 - RNA, 19 nt, Artificial Sequence
  Antisense Oligo
uugagcagugcuguacacg

SEQ ID NO: 31791 - RNA, 19 nt, Artificial Sequence
  Sense Oligo
guguacagcacugcucaaa

SEQ ID NO: 31792 - RNA, 19 nt, Artificial Sequence
  Antisense Oligo
uuugagcagugcuguacac

SEQ ID NO: 31793 - RNA, 19 nt, Artificial Sequence
  Sense Oligo
uguacagcacugcucaaaa

SEQ ID NO: 31794 - RNA, 19 nt, Artificial Sequence
  Antisense Oligo
uuuugagcagugcuguaca

SEQ ID NO: 31795 - RNA, 19 nt, Artificial Sequence
  Sense Oligo
cugcuccuggccuugugga

SEQ ID NO: 31796 - RNA, 19 nt, Artificial Sequence
  Antisense Oligo
uccacaaggccaggagcag

SEQ ID NO: 31797 - RNA, 19 nt, Artificial Sequence
  Sense Oligo
agaggcaggcaguuaauac

SEQ ID NO: 31798 - RNA, 19 nt, Artificial Sequence
  Antisense Oligo
guauuaacugccugccucu

SEQ ID NO: 31799 - RNA, 19 nt, Artificial Sequence
  Sense Oligo
gaggcaggcaguuaauaca

SEQ ID NO: 31800 - RNA, 19 nt, Artificial Sequence
  Antisense Oligo
uguauuaacugccugccuc

SEQ ID NO: 31801 - RNA, 19 nt, Artificial Sequence
  Sense Oligo
aggcaggcaguuaauacau

SEQ ID NO: 31802 - RNA, 19 nt, Artificial Sequence
  Antisense Oligo
auguauuaacugccugccu

SEQ ID NO: 31803 - RNA, 19 nt, Artificial Sequence
  Sense Oligo
ggcaggcaguuaauacauc

SEQ ID NO: 31804 - RNA, 19 nt, Artificial Sequence
  Antisense Oligo
gauguauuaacugccugcc

SEQ ID NO: 31805 - RNA, 19 nt, Artificial Sequence
  Sense Oligo
gcaggcaguuaauacauca

SEQ ID NO: 31806 - RNA, 19 nt, Artificial Sequence
  Antisense Oligo
ugauguauuaacugccugc

SEQ ID NO: 31807 - RNA, 19 nt, Artificial Sequence
  Sense Oligo
caguuaauacaucaguaag

SEQ ID NO: 31808 - RNA, 19 nt, Artificial Sequence
  Antisense Oligo
cuuacugauguauuaacug

SEQ ID NO: 31809 - RNA, 19 nt, Artificial Sequence
  Sense Oligo
guuaauacaucaguaaguc

SEQ ID NO: 31810 - RNA, 19 nt, Artificial Sequence
  Antisense Oligo
gacuuacugauguauuaac

SEQ ID NO: 31811 - RNA, 19 nt, Artificial Sequence
  Sense Oligo
uuaauacaucaguaagucc

SEQ ID NO: 31812 - RNA, 19 nt, Artificial Sequence
  Antisense Oligo
ggacuuacugauguauuaa

SEQ ID NO: 31813 - RNA, 19 nt, Artificial Sequence
  Sense Oligo
uaauacaucaguaaguccu

SEQ ID NO: 31814 - RNA, 19 nt, Artificial Sequence
  Antisense Oligo
aggacuuacugauguauua

SEQ ID NO: 31815 - RNA, 19 nt, Artificial Sequence
  Sense Oligo
aauacaucaguaaguccua

SEQ ID NO: 31816 - RNA, 19 nt, Artificial Sequence
  Antisense Oligo
uaggacuuacugauguauu

SEQ ID NO: 31817 - RNA, 19 nt, Artificial Sequence
  Sense Oligo
uacaucaguaaguccuauu

SEQ ID NO: 31818 - RNA, 19 nt, Artificial Sequence
  Antisense Oligo
aauaggacuuacugaugua

SEQ ID NO: 31819 - RNA, 19 nt, Artificial Sequence
  Sense Oligo
ucaguaaguccuauugaug

SEQ ID NO: 31820 - RNA, 19 nt, Artificial Sequence
  Antisense Oligo
caucaauaggacuuacuga

SEQ ID NO: 31821 - RNA, 19 nt, Artificial Sequence
  Sense Oligo
caguaaguccuauugauga

SEQ ID NO: 31822 - RNA, 19 nt, Artificial Sequence
  Antisense Oligo
ucaucaauaggacuuacug

SEQ ID NO: 31823 - RNA, 19 nt, Artificial Sequence
  Sense Oligo
aguaaguccuauugaugag

SEQ ID NO: 31824 - RNA, 19 nt, Artificial Sequence
  Antisense Oligo
cucaucaauaggacuuacu

SEQ ID NO: 31825 - RNA, 19 nt, Artificial Sequence
  Sense Oligo
gaggcucaggccacagaau

SEQ ID NO: 31826 - RNA, 19 nt, Artificial Sequence
  Antisense Oligo
auucuguggccugagccuc

SEQ ID NO: 31827 - RNA, 19 nt, Artificial Sequence
  Sense Oligo
aggcucaggccacagaauc

SEQ ID NO: 31828 - RNA, 19 nt, Artificial Sequence
  Antisense Oligo
gauucuguggccugagccu

SEQ ID NO: 31829 - RNA, 19 nt, Artificial Sequence
  Sense Oligo
ggcucaggccacagaaucu

SEQ ID NO: 31830 - RNA, 19 nt, Artificial Sequence
  Antisense Oligo
agauucuguggccugagcc

SEQ ID NO: 31831 - RNA, 19 nt, Artificial Sequence
  Sense Oligo
gcucaggccacagaaucug

SEQ ID NO: 31832 - RNA, 19 nt, Artificial Sequence
  Antisense Oligo
cagauucuguggccugagc

SEQ ID NO: 31833 - RNA, 19 nt, Artificial Sequence
  Sense Oligo
cucaggccacagaaucugc

SEQ ID NO: 31834 - RNA, 19 nt, Artificial Sequence
  Antisense Oligo
gcagauucuguggccugag

SEQ ID NO: 31835 - RNA, 19 nt, Artificial Sequence
  Sense Oligo
ucaggccacagaaucugcu

SEQ ID NO: 31836 - RNA, 19 nt, Artificial Sequence
  Antisense Oligo
agcagauucuguggccuga

SEQ ID NO: 31837 - RNA, 19 nt, Artificial Sequence
  Sense Oligo
caggccacagaaucugcua

SEQ ID NO: 31838 - RNA, 19 nt, Artificial Sequence
  Antisense Oligo
uagcagauucuguggccug

SEQ ID NO: 31839 - RNA, 19 nt, Artificial Sequence
  Sense Oligo
aggccacagaaucugcuaa

SEQ ID NO: 31840 - RNA, 19 nt, Artificial Sequence
  Antisense Oligo
uuagcagauucuguggccu

SEQ ID NO: 31841 - RNA, 19 nt, Artificial Sequence
  Sense Oligo
ggccacagaaucugcuaag

SEQ ID NO: 31842 - RNA, 19 nt, Artificial Sequence
  Antisense Oligo
cuuagcagauucuguggcc

SEQ ID NO: 31843 - RNA, 19 nt, Artificial Sequence
  Sense Oligo
gccacagaaucugcuaagg

SEQ ID NO: 31844 - RNA, 19 nt, Artificial Sequence
  Antisense Oligo
ccuuagcagauucuguggc

SEQ ID NO: 31845 - RNA, 19 nt, Artificial Sequence
  Sense Oligo
ccacagaaucugcuaaggu

SEQ ID NO: 31846 - RNA, 19 nt, Artificial Sequence
  Antisense Oligo
accuuagcagauucugugg

SEQ ID NO: 31847 - RNA, 19 nt, Artificial Sequence
  Sense Oligo
cacagaaucugcuaagguc

SEQ ID NO: 31848 - RNA, 19 nt, Artificial Sequence
  Antisense Oligo
gaccuuagcagauucugug

SEQ ID NO: 31849 - RNA, 19 nt, Artificial Sequence
  Sense Oligo
agaaucugcuaaggucuga

SEQ ID NO: 31850 - RNA, 19 nt, Artificial Sequence
  Antisense Oligo
ucagaccuuagcagauucu

SEQ ID NO: 31851 - RNA, 19 nt, Artificial Sequence
  Sense Oligo
aaucugcuaaggucugaag

SEQ ID NO: 31852 - RNA, 19 nt, Artificial Sequence
  Antisense Oligo
cuucagaccuuagcagauu

SEQ ID NO: 31853 - RNA, 19 nt, Artificial Sequence
  Sense Oligo
ugcuaaggucugaagguag

SEQ ID NO: 31854 - RNA, 19 nt, Artificial Sequence
  Antisense Oligo
cuaccuucagaccuuagca

SEQ ID NO: 31855 - RNA, 19 nt, Artificial Sequence
  Sense Oligo
gcuaaggucugaagguagg

SEQ ID NO: 31856 - RNA, 19 nt, Artificial Sequence
  Antisense Oligo
ccuaccuucagaccuuagc

SEQ ID NO: 31857 - RNA, 19 nt, Artificial Sequence
  Sense Oligo
cuaaggucugaagguaggg

SEQ ID NO: 31858 - RNA, 19 nt, Artificial Sequence
  Antisense Oligo
cccuaccuucagaccuuag

SEQ ID NO: 31859 - RNA, 19 nt, Artificial Sequence
  Sense Oligo
uaaggucugaagguagggu

SEQ ID NO: 31860 - RNA, 19 nt, Artificial Sequence
  Antisense Oligo
acccuaccuucagaccuua

SEQ ID NO: 31861 - RNA, 19 nt, Artificial Sequence
  Sense Oligo
aaggucugaagguagggua

SEQ ID NO: 31862 - RNA, 19 nt, Artificial Sequence
  Antisense Oligo
uacccuaccuucagaccuu

SEQ ID NO: 31863 - RNA, 19 nt, Artificial Sequence
  Sense Oligo
aggucugaagguaggguag

SEQ ID NO: 31864 - RNA, 19 nt, Artificial Sequence
  Antisense Oligo
cuacccuaccuucagaccu

SEQ ID NO: 31865 - RNA, 19 nt, Artificial Sequence
  Sense Oligo
ggucugaagguaggguagg

SEQ ID NO: 31866 - RNA, 19 nt, Artificial Sequence
  Antisense Oligo
ccuacccuaccuucagacc

SEQ ID NO: 31867 - RNA, 19 nt, Artificial Sequence
  Sense Oligo
ugacugcagcacucugggc

SEQ ID NO: 31868 - RNA, 19 nt, Artificial Sequence
  Antisense Oligo
gcccagagugcugcaguca

SEQ ID NO: 31869 - RNA, 19 nt, Artificial Sequence
  Sense Oligo
acugcagcacucugggccu

SEQ ID NO: 31870 - RNA, 19 nt, Artificial Sequence
  Antisense Oligo
aggcccagagugcugcagu

SEQ ID NO: 31871 - RNA, 19 nt, Artificial Sequence
  Sense Oligo
cugcagcacucugggccuu

SEQ ID NO: 31872 - RNA, 19 nt, Artificial Sequence
  Antisense Oligo
aaggcccagagugcugcag

SEQ ID NO: 31873 - RNA, 19 nt, Artificial Sequence
  Sense Oligo
ugcagcacucugggccuug

SEQ ID NO: 31874 - RNA, 19 nt, Artificial Sequence
  Antisense Oligo
caaggcccagagugcugca

SEQ ID NO: 31875 - RNA, 19 nt, Artificial Sequence
  Sense Oligo
caagacagugaccauccaa

SEQ ID NO: 31876 - RNA, 19 nt, Artificial Sequence
  Antisense Oligo
uuggauggucacugucuug

SEQ ID NO: 31877 - RNA, 19 nt, Artificial Sequence
  Sense Oligo
aagacagugaccauccaau

SEQ ID NO: 31878 - RNA, 19 nt, Artificial Sequence
  Antisense Oligo
auuggauggucacugucuu

SEQ ID NO: 31879 - RNA, 19 nt, Artificial Sequence
  Sense Oligo
agacagugaccauccaauu

SEQ ID NO: 31880 - RNA, 19 nt, Artificial Sequence
  Antisense Oligo
aauuggauggucacugucu

SEQ ID NO: 31881 - RNA, 19 nt, Artificial Sequence
  Sense Oligo
gacagugaccauccaauug

SEQ ID NO: 31882 - RNA, 19 nt, Artificial Sequence
  Antisense Oligo
caauuggauggucacuguc

SEQ ID NO: 31883 - RNA, 19 nt, Artificial Sequence
  Sense Oligo
acagugaccauccaauugg

SEQ ID NO: 31884 - RNA, 19 nt, Artificial Sequence
  Antisense Oligo
ccaauuggauggucacugu

SEQ ID NO: 31885 - RNA, 19 nt, Artificial Sequence
  Sense Oligo
cagugaccauccaauuggg

SEQ ID NO: 31886 - RNA, 19 nt, Artificial Sequence
  Antisense Oligo
cccaauuggauggucacug

SEQ ID NO: 31887 - RNA, 19 nt, Artificial Sequence
  Sense Oligo
agugaccauccaauuggga

SEQ ID NO: 31888 - RNA, 19 nt, Artificial Sequence
  Antisense Oligo
ucccaauuggauggucacu

SEQ ID NO: 31889 - RNA, 19 nt, Artificial Sequence
  Sense Oligo
gugaccauccaauugggaa

SEQ ID NO: 31890 - RNA, 19 nt, Artificial Sequence
  Antisense Oligo
uucccaauuggauggucac

SEQ ID NO: 31891 - RNA, 19 nt, Artificial Sequence
  Sense Oligo
ugaugcucagagccugcca

SEQ ID NO: 31892 - RNA, 19 nt, Artificial Sequence
  Antisense Oligo
uggcaggcucugagcauca

SEQ ID NO: 31893 - RNA, 19 nt, Artificial Sequence
  Sense Oligo
gcucagagccugccaaaug

SEQ ID NO: 31894 - RNA, 19 nt, Artificial Sequence
  Antisense Oligo
cauuuggcaggcucugagc

SEQ ID NO: 31895 - RNA, 19 nt, Artificial Sequence
  Sense Oligo
cucagagccugccaaaugc

SEQ ID NO: 31896 - RNA, 19 nt, Artificial Sequence
  Antisense Oligo
gcauuuggcaggcucugag

SEQ ID NO: 31897 - RNA, 19 nt, Artificial Sequence
  Sense Oligo
ucagagccugccaaaugcc

SEQ ID NO: 31898 - RNA, 19 nt, Artificial Sequence
  Antisense Oligo
ggcauuuggcaggcucuga

SEQ ID NO: 31899 - RNA, 19 nt, Artificial Sequence
  Sense Oligo
cagagccugccaaaugcca

SEQ ID NO: 31900 - RNA, 19 nt, Artificial Sequence
  Antisense Oligo
uggcauuuggcaggcucug

SEQ ID NO: 31901 - RNA, 19 nt, Artificial Sequence
  Sense Oligo
cugccaaaugccaaagacu

SEQ ID NO: 31902 - RNA, 19 nt, Artificial Sequence
  Antisense Oligo
agucuuuggcauuuggcag

SEQ ID NO: 31903 - RNA, 19 nt, Artificial Sequence
  Sense Oligo
aaaaugaggcaguugcucu

SEQ ID NO: 31904 - RNA, 19 nt, Artificial Sequence
  Antisense Oligo
agagcaacugccucauuuu

SEQ ID NO: 31905 - RNA, 19 nt, Artificial Sequence
  Sense Oligo
aaaugaggcaguugcucug

SEQ ID NO: 31906 - RNA, 19 nt, Artificial Sequence
  Antisense Oligo
cagagcaacugccucauuu

SEQ ID NO: 31907 - RNA, 19 nt, Artificial Sequence
  Sense Oligo
aaugaggcaguugcucugu

SEQ ID NO: 31908 - RNA, 19 nt, Artificial Sequence
  Antisense Oligo
acagagcaacugccucauu

SEQ ID NO: 31909 - RNA, 19 nt, Artificial Sequence
  Sense Oligo
augaggcaguugcucugug

SEQ ID NO: 31910 - RNA, 19 nt, Artificial Sequence
  Antisense Oligo
cacagagcaacugccucau

SEQ ID NO: 31911 - RNA, 19 nt, Artificial Sequence
  Sense Oligo
ugaggcaguugcucugugc

SEQ ID NO: 31912 - RNA, 19 nt, Artificial Sequence
  Antisense Oligo
gcacagagcaacugccuca

SEQ ID NO: 31913 - RNA, 19 nt, Artificial Sequence
  Sense Oligo
cccuggaucccaacuucug

SEQ ID NO: 31914 - RNA, 19 nt, Artificial Sequence
  Antisense Oligo
cagaaguugggauccaggg

SEQ ID NO: 31915 - RNA, 19 nt, Artificial Sequence
  Sense Oligo
ccuggaucccaacuucugc

SEQ ID NO: 31916 - RNA, 19 nt, Artificial Sequence
  Antisense Oligo
gcagaaguugggauccagg

SEQ ID NO: 31917 - RNA, 19 nt, Artificial Sequence
  Sense Oligo
uggaucccaacuucugcua

SEQ ID NO: 31918 - RNA, 19 nt, Artificial Sequence
  Antisense Oligo
uagcagaaguugggaucca

SEQ ID NO: 31919 - RNA, 19 nt, Artificial Sequence
  Sense Oligo
ggaucccaacuucugcuaa

SEQ ID NO: 31920 - RNA, 19 nt, Artificial Sequence
  Antisense Oligo
uuagcagaaguugggaucc

SEQ ID NO: 31921 - RNA, 19 nt, Artificial Sequence
  Sense Oligo
gaucccaacuucugcuaaa

SEQ ID NO: 31922 - RNA, 19 nt, Artificial Sequence
  Antisense Oligo
uuuagcagaaguugggauc

SEQ ID NO: 31923 - RNA, 19 nt, Artificial Sequence
  Sense Oligo
aucccaacuucugcuaaag

SEQ ID NO: 31924 - RNA, 19 nt, Artificial Sequence
  Antisense Oligo
cuuuagcagaaguugggau

SEQ ID NO: 31925 - RNA, 19 nt, Artificial Sequence
  Sense Oligo
ucccaacuucugcuaaagg

SEQ ID NO: 31926 - RNA, 19 nt, Artificial Sequence
  Antisense Oligo
ccuuuagcagaaguuggga

SEQ ID NO: 31927 - RNA, 19 nt, Artificial Sequence
  Sense Oligo
cccaacuucugcuaaaggc

SEQ ID NO: 31928 - RNA, 19 nt, Artificial Sequence
  Antisense Oligo
gccuuuagcagaaguuggg

SEQ ID NO: 31929 - RNA, 19 nt, Artificial Sequence
  Sense Oligo
guuacggucuugccuuuag

SEQ ID NO: 31930 - RNA, 19 nt, Artificial Sequence
  Antisense Oligo
cuaaaggcaagaccguaac

SEQ ID NO: 31931 - RNA, 19 nt, Artificial Sequence
  Sense Oligo
uuacggucuugccuuuaga

SEQ ID NO: 31932 - RNA, 19 nt, Artificial Sequence
  Antisense Oligo
ucuaaaggcaagaccguaa

SEQ ID NO: 31933 - RNA, 19 nt, Artificial Sequence
  Sense Oligo
uacggucuugccuuuagaa

SEQ ID NO: 31934 - RNA, 19 nt, Artificial Sequence
  Antisense Oligo
uucuaaaggcaagaccgua

SEQ ID NO: 31935 - RNA, 19 nt, Artificial Sequence
  Sense Oligo
acggucuugccuuuagaag

SEQ ID NO: 31936 - RNA, 19 nt, Artificial Sequence
  Antisense Oligo
cuucuaaaggcaagaccgu

SEQ ID NO: 31937 - RNA, 19 nt, Artificial Sequence
  Sense Oligo
accaauucuauuccuuuuc

SEQ ID NO: 31938 - RNA, 19 nt, Artificial Sequence
  Antisense Oligo
gaaaaggaauagaauuggu

SEQ ID NO: 31939 - RNA, 19 nt, Artificial Sequence
  Sense Oligo
aguccugcucugucgccca

SEQ ID NO: 31940 - RNA, 19 nt, Artificial Sequence
  Antisense Oligo
ugggcgacagagcaggacu

SEQ ID NO: 31941 - RNA, 19 nt, Artificial Sequence
  Sense Oligo
ucgcccaggcuggaguaca

SEQ ID NO: 31942 - RNA, 19 nt, Artificial Sequence
  Antisense Oligo
uguacuccagccugggcga

SEQ ID NO: 31943 - RNA, 19 nt, Artificial Sequence
  Sense Oligo
cuucgccucccagguucaa

SEQ ID NO: 31944 - RNA, 19 nt, Artificial Sequence
  Antisense Oligo
uugaaccugggaggcgaag

SEQ ID NO: 31945 - RNA, 19 nt, Artificial Sequence
  Sense Oligo
uucgccucccagguucaag

SEQ ID NO: 31946 - RNA, 19 nt, Artificial Sequence
  Antisense Oligo
cuugaaccugggaggcgaa

SEQ ID NO: 31947 - RNA, 19 nt, Artificial Sequence
  Sense Oligo
ucgccucccagguucaagu

SEQ ID NO: 31948 - RNA, 19 nt, Artificial Sequence
  Antisense Oligo
acuugaaccugggaggcga

SEQ ID NO: 31949 - RNA, 19 nt, Artificial Sequence
  Sense Oligo
cgccucccagguucaagug

SEQ ID NO: 31950 - RNA, 19 nt, Artificial Sequence
  Antisense Oligo
cacuugaaccugggaggcg

SEQ ID NO: 31951 - RNA, 19 nt, Artificial Sequence
  Sense Oligo
gccucccagguucaaguga

SEQ ID NO: 31952 - RNA, 19 nt, Artificial Sequence
  Antisense Oligo
ucacuugaaccugggaggc

SEQ ID NO: 31953 - RNA, 19 nt, Artificial Sequence
  Sense Oligo
gugccucagccucccaagu

SEQ ID NO: 31954 - RNA, 19 nt, Artificial Sequence
  Antisense Oligo
acuugggaggcugaggcac

SEQ ID NO: 31955 - RNA, 19 nt, Artificial Sequence
  Sense Oligo
ugccucagccucccaagua

SEQ ID NO: 31956 - RNA, 19 nt, Artificial Sequence
  Antisense Oligo
uacuugggaggcugaggca

SEQ ID NO: 31957 - RNA, 19 nt, Artificial Sequence
  Sense Oligo
gccucagccucccaaguag

SEQ ID NO: 31958 - RNA, 19 nt, Artificial Sequence
  Antisense Oligo
cuacuugggaggcugaggc

SEQ ID NO: 31959 - RNA, 19 nt, Artificial Sequence
  Sense Oligo
ccucagccucccaaguagc

SEQ ID NO: 31960 - RNA, 19 nt, Artificial Sequence
  Antisense Oligo
gcuacuugggaggcugagg

SEQ ID NO: 31961 - RNA, 19 nt, Artificial Sequence
  Sense Oligo
cucagccucccaaguagcu

SEQ ID NO: 31962 - RNA, 19 nt, Artificial Sequence
  Antisense Oligo
agcuacuugggaggcugag

SEQ ID NO: 31963 - RNA, 19 nt, Artificial Sequence
  Sense Oligo
uagcugggacuacaggugc

SEQ ID NO: 31964 - RNA, 19 nt, Artificial Sequence
  Antisense Oligo
gcaccuguagucccagcua

SEQ ID NO: 31965 - RNA, 19 nt, Artificial Sequence
  Sense Oligo
agcugggacuacaggugca

SEQ ID NO: 31966 - RNA, 19 nt, Artificial Sequence
  Antisense Oligo
ugcaccuguagucccagcu

SEQ ID NO: 31967 - RNA, 19 nt, Artificial Sequence
  Sense Oligo
gggacuacaggugcauguc

SEQ ID NO: 31968 - RNA, 19 nt, Artificial Sequence
  Antisense Oligo
gacaugcaccuguaguccc

SEQ ID NO: 31969 - RNA, 19 nt, Artificial Sequence
  Sense Oligo
ggacuacaggugcauguca

SEQ ID NO: 31970 - RNA, 19 nt, Artificial Sequence
  Antisense Oligo
ugacaugcaccuguagucc

SEQ ID NO: 31971 - RNA, 19 nt, Artificial Sequence
  Sense Oligo
ccauguuggccaggcuggu

SEQ ID NO: 31972 - RNA, 19 nt, Artificial Sequence
  Antisense Oligo
accagccuggccaacaugg

SEQ ID NO: 31973 - RNA, 19 nt, Artificial Sequence
  Sense Oligo
cauguuggccaggcugguc

SEQ ID NO: 31974 - RNA, 19 nt, Artificial Sequence
  Antisense Oligo
gaccagccuggccaacaug

SEQ ID NO: 31975 - RNA, 19 nt, Artificial Sequence
  Sense Oligo
auguuggccaggcuggucu

SEQ ID NO: 31976 - RNA, 19 nt, Artificial Sequence
  Antisense Oligo
agaccagccuggccaacau

SEQ ID NO: 31977 - RNA, 19 nt, Artificial Sequence
  Sense Oligo
uguuggccaggcuggucuu

SEQ ID NO: 31978 - RNA, 19 nt, Artificial Sequence
  Antisense Oligo
aagaccagccuggccaaca

SEQ ID NO: 31979 - RNA, 19 nt, Artificial Sequence
  Sense Oligo
guuggccaggcuggucuug

SEQ ID NO: 31980 - RNA, 19 nt, Artificial Sequence
  Antisense Oligo
caagaccagccuggccaac

SEQ ID NO: 31981 - RNA, 19 nt, Artificial Sequence
  Sense Oligo
uuggccaggcuggucuuga

SEQ ID NO: 31982 - RNA, 19 nt, Artificial Sequence
  Antisense Oligo
ucaagaccagccuggccaa

SEQ ID NO: 31983 - RNA, 19 nt, Artificial Sequence
  Sense Oligo
uggccaggcuggucuugaa

SEQ ID NO: 31984 - RNA, 19 nt, Artificial Sequence
  Antisense Oligo
uucaagaccagccuggcca

SEQ ID NO: 31985 - RNA, 19 nt, Artificial Sequence
  Sense Oligo
aacuccuggccucaaguga

SEQ ID NO: 31986 - RNA, 19 nt, Artificial Sequence
  Antisense Oligo
ucacuugaggccaggaguu

SEQ ID NO: 31987 - RNA, 19 nt, Artificial Sequence
  Sense Oligo
ccuggccucaagugaucug

SEQ ID NO: 31988 - RNA, 19 nt, Artificial Sequence
  Antisense Oligo
cagaucacuugaggccagg

SEQ ID NO: 31989 - RNA, 19 nt, Artificial Sequence
  Sense Oligo
cuggccucaagugaucugc

SEQ ID NO: 31990 - RNA, 19 nt, Artificial Sequence
  Antisense Oligo
gcagaucacuugaggccag

SEQ ID NO: 31991 - RNA, 19 nt, Artificial Sequence
  Sense Oligo
uggccucaagugaucugcc

SEQ ID NO: 31992 - RNA, 19 nt, Artificial Sequence
  Antisense Oligo
ggcagaucacuugaggcca

SEQ ID NO: 31993 - RNA, 19 nt, Artificial Sequence
  Sense Oligo
ggccucaagugaucugccc

SEQ ID NO: 31994 - RNA, 19 nt, Artificial Sequence
  Antisense Oligo
gggcagaucacuugaggcc

SEQ ID NO: 31995 - RNA, 19 nt, Artificial Sequence
  Sense Oligo
gccucaagugaucugcccg

SEQ ID NO: 31996 - RNA, 19 nt, Artificial Sequence
  Antisense Oligo
cgggcagaucacuugaggc

SEQ ID NO: 31997 - RNA, 19 nt, Artificial Sequence
  Sense Oligo
ccucagccuuccaaagugc

SEQ ID NO: 31998 - RNA, 19 nt, Artificial Sequence
  Antisense Oligo
gcacuuuggaaggcugagg

SEQ ID NO: 31999 - RNA, 19 nt, Artificial Sequence
  Sense Oligo
cucagccuuccaaagugcu

SEQ ID NO: 32000 - RNA, 19 nt, Artificial Sequence
  Antisense Oligo
agcacuuuggaaggcugag

SEQ ID NO: 32001 - RNA, 19 nt, Artificial Sequence
  Sense Oligo
ccuuccaaagugcugggau

SEQ ID NO: 32002 - RNA, 19 nt, Artificial Sequence
  Antisense Oligo
aucccagcacuuuggaagg

SEQ ID NO: 32003 - RNA, 19 nt, Artificial Sequence
  Sense Oligo
cuuccaaagugcugggauu

SEQ ID NO: 32004 - RNA, 19 nt, Artificial Sequence
  Antisense Oligo
aaucccagcacuuuggaag

SEQ ID NO: 32005 - RNA, 19 nt, Artificial Sequence
  Sense Oligo
uuccaaagugcugggauua

SEQ ID NO: 32006 - RNA, 19 nt, Artificial Sequence
  Antisense Oligo
uaaucccagcacuuuggaa

SEQ ID NO: 32007 - RNA, 19 nt, Artificial Sequence
  Sense Oligo
uccaaagugcugggauuac

SEQ ID NO: 32008 - RNA, 19 nt, Artificial Sequence
  Antisense Oligo
guaaucccagcacuuugga

SEQ ID NO: 32009 - RNA, 19 nt, Artificial Sequence
  Sense Oligo
ccaaagugcugggauuaca

SEQ ID NO: 32010 - RNA, 19 nt, Artificial Sequence
  Antisense Oligo
uguaaucccagcacuuugg

SEQ ID NO: 32011 - RNA, 19 nt, Artificial Sequence
  Sense Oligo
caaagugcugggauuacag

SEQ ID NO: 32012 - RNA, 19 nt, Artificial Sequence
  Antisense Oligo
cuguaaucccagcacuuug

SEQ ID NO: 32013 - RNA, 19 nt, Artificial Sequence
  Sense Oligo
caaagcuguaguucaucua

SEQ ID NO: 32014 - RNA, 19 nt, Artificial Sequence
  Antisense Oligo
uagaugaacuacagcuuug

SEQ ID NO: 32015 - RNA, 19 nt, Artificial Sequence
  Sense Oligo
aaagcuguaguucaucuaa

SEQ ID NO: 32016 - RNA, 19 nt, Artificial Sequence
  Antisense Oligo
uuagaugaacuacagcuuu

SEQ ID NO: 32017 - RNA, 19 nt, Artificial Sequence
  Sense Oligo
aagcuguaguucaucuaaa

SEQ ID NO: 32018 - RNA, 19 nt, Artificial Sequence
  Antisense Oligo
uuuagaugaacuacagcuu

SEQ ID NO: 32019 - RNA, 19 nt, Artificial Sequence
  Sense Oligo
cagaagaggccacuagaug

SEQ ID NO: 32020 - RNA, 19 nt, Artificial Sequence
  Antisense Oligo
caucuaguggccucuucug

SEQ ID NO: 32021 - RNA, 19 nt, Artificial Sequence
  Sense Oligo
agaagaggccacuagauga

SEQ ID NO: 32022 - RNA, 19 nt, Artificial Sequence
  Antisense Oligo
ucaucuaguggccucuucu

SEQ ID NO: 32023 - RNA, 19 nt, Artificial Sequence
  Sense Oligo
gaagaggccacuagaugau

SEQ ID NO: 32024 - RNA, 19 nt, Artificial Sequence
  Antisense Oligo
aucaucuaguggccucuuc

SEQ ID NO: 32025 - RNA, 19 nt, Artificial Sequence
  Sense Oligo
aagaggccacuagaugauc

SEQ ID NO: 32026 - RNA, 19 nt, Artificial Sequence
  Antisense Oligo
gaucaucuaguggccucuu

SEQ ID NO: 32027 - RNA, 19 nt, Artificial Sequence
  Sense Oligo
agaggccacuagaugauca

SEQ ID NO: 32028 - RNA, 19 nt, Artificial Sequence
  Antisense Oligo
ugaucaucuaguggccucu

SEQ ID NO: 32029 - RNA, 19 nt, Artificial Sequence
  Sense Oligo
gaggccacuagaugaucaa

SEQ ID NO: 32030 - RNA, 19 nt, Artificial Sequence
  Antisense Oligo
uugaucaucuaguggccuc

SEQ ID NO: 32031 - RNA, 19 nt, Artificial Sequence
  Sense Oligo
aggccacuagaugaucaag

SEQ ID NO: 32032 - RNA, 19 nt, Artificial Sequence
  Antisense Oligo
cuugaucaucuaguggccu

SEQ ID NO: 32033 - RNA, 19 nt, Artificial Sequence
  Sense Oligo
ggccacuagaugaucaaga

SEQ ID NO: 32034 - RNA, 19 nt, Artificial Sequence
  Antisense Oligo
ucuugaucaucuaguggcc

SEQ ID NO: 32035 - RNA, 19 nt, Artificial Sequence
  Sense Oligo
gccacuagaugaucaagag

SEQ ID NO: 32036 - RNA, 19 nt, Artificial Sequence
  Antisense Oligo
cucuugaucaucuaguggc

SEQ ID NO: 32037 - RNA, 19 nt, Artificial Sequence
  Sense Oligo
cagucaauauagucagacc

SEQ ID NO: 32038 - RNA, 19 nt, Artificial Sequence
  Antisense Oligo
ggucugacuauauugacug

SEQ ID NO: 32039 - RNA, 19 nt, Artificial Sequence
  Sense Oligo
caauauagucagacccaug

SEQ ID NO: 32040 - RNA, 19 nt, Artificial Sequence
  Antisense Oligo
caugggucugacuauauug

SEQ ID NO: 32041 - RNA, 19 nt, Artificial Sequence
  Sense Oligo
aauauagucagacccaugg

SEQ ID NO: 32042 - RNA, 19 nt, Artificial Sequence
  Antisense Oligo
ccaugggucugacuauauu

SEQ ID NO: 32043 - RNA, 19 nt, Artificial Sequence
  Sense Oligo
auauagucagacccaugga

SEQ ID NO: 32044 - RNA, 19 nt, Artificial Sequence
  Antisense Oligo
uccaugggucugacuauau

SEQ ID NO: 32045 - RNA, 19 nt, Artificial Sequence
  Sense Oligo
uauagucagacccauggau

SEQ ID NO: 32046 - RNA, 19 nt, Artificial Sequence
  Antisense Oligo
auccaugggucugacuaua

SEQ ID NO: 32047 - RNA, 19 nt, Artificial Sequence
  Sense Oligo
auagucagacccauggaug

SEQ ID NO: 32048 - RNA, 19 nt, Artificial Sequence
  Antisense Oligo
cauccaugggucugacuau

SEQ ID NO: 32049 - RNA, 19 nt, Artificial Sequence
  Sense Oligo
uagucagacccauggaugg

SEQ ID NO: 32050 - RNA, 19 nt, Artificial Sequence
  Antisense Oligo
ccauccaugggucugacua

SEQ ID NO: 32051 - RNA, 19 nt, Artificial Sequence
  Sense Oligo
agucagacccauggauggu

SEQ ID NO: 32052 - RNA, 19 nt, Artificial Sequence
  Antisense Oligo
accauccaugggucugacu

SEQ ID NO: 32053 - RNA, 19 nt, Artificial Sequence
  Sense Oligo
ggaugguccauauuuaccu

SEQ ID NO: 32054 - RNA, 19 nt, Artificial Sequence
  Antisense Oligo
agguaaauauggaccaucc

SEQ ID NO: 32055 - RNA, 19 nt, Artificial Sequence
  Sense Oligo
gaugguccauauuuaccua

SEQ ID NO: 32056 - RNA, 19 nt, Artificial Sequence
  Antisense Oligo
uagguaaauauggaccauc

SEQ ID NO: 32057 - RNA, 19 nt, Artificial Sequence
  Sense Oligo
augguccauauuuaccuag

SEQ ID NO: 32058 - RNA, 19 nt, Artificial Sequence
  Antisense Oligo
cuagguaaauauggaccau

SEQ ID NO: 32059 - RNA, 19 nt, Artificial Sequence
  Sense Oligo
ugguccauauuuaccuaga

SEQ ID NO: 32060 - RNA, 19 nt, Artificial Sequence
  Antisense Oligo
ucuagguaaauauggacca

SEQ ID NO: 32061 - RNA, 19 nt, Artificial Sequence
  Sense Oligo
gguccauauuuaccuagaa

SEQ ID NO: 32062 - RNA, 19 nt, Artificial Sequence
  Antisense Oligo
uucuagguaaauauggacc

SEQ ID NO: 32063 - RNA, 19 nt, Artificial Sequence
  Sense Oligo
aaaggcuagauauaguaga

SEQ ID NO: 32064 - RNA, 19 nt, Artificial Sequence
  Antisense Oligo
ucuacuauaucuagccuuu

SEQ ID NO: 32065 - RNA, 19 nt, Artificial Sequence
  Sense Oligo
aaggcuagauauaguagaa

SEQ ID NO: 32066 - RNA, 19 nt, Artificial Sequence
  Antisense Oligo
uucuacuauaucuagccuu

SEQ ID NO: 32067 - RNA, 19 nt, Artificial Sequence
  Sense Oligo
aaaagucugcaguagcauu

SEQ ID NO: 32068 - RNA, 19 nt, Artificial Sequence
  Antisense Oligo
aaugcuacugcagacuuuu

SEQ ID NO: 32069 - RNA, 19 nt, Artificial Sequence
  Sense Oligo
aaagucugcaguagcauug

SEQ ID NO: 32070 - RNA, 19 nt, Artificial Sequence
  Antisense Oligo
caaugcuacugcagacuuu

SEQ ID NO: 32071 - RNA, 19 nt, Artificial Sequence
  Sense Oligo
aagucugcaguagcauugu

SEQ ID NO: 32072 - RNA, 19 nt, Artificial Sequence
  Antisense Oligo
acaaugcuacugcagacuu

SEQ ID NO: 32073 - RNA, 19 nt, Artificial Sequence
  Sense Oligo
agucugcaguagcauuguu

SEQ ID NO: 32074 - RNA, 19 nt, Artificial Sequence
  Antisense Oligo
aacaaugcuacugcagacu

SEQ ID NO: 32075 - RNA, 19 nt, Artificial Sequence
  Sense Oligo
uucagguaaaaguggccuu

SEQ ID NO: 32076 - RNA, 19 nt, Artificial Sequence
  Antisense Oligo
aaggccacuuuuaccugaa

SEQ ID NO: 32077 - RNA, 19 nt, Artificial Sequence
  Sense Oligo
aacuucuguuacuucuagg

SEQ ID NO: 32078 - RNA, 19 nt, Artificial Sequence
  Antisense Oligo
ccuagaaguaacagaaguu

SEQ ID NO: 32079 - RNA, 19 nt, Artificial Sequence
  Sense Oligo
acuucuguuacuucuaggg

SEQ ID NO: 32080 - RNA, 19 nt, Artificial Sequence
  Antisense Oligo
cccuagaaguaacagaagu

SEQ ID NO: 32081 - RNA, 19 nt, Artificial Sequence
  Sense Oligo
cuucuguuacuucuaggga

SEQ ID NO: 32082 - RNA, 19 nt, Artificial Sequence
  Antisense Oligo
ucccuagaaguaacagaag

SEQ ID NO: 32083 - RNA, 19 nt, Artificial Sequence
  Sense Oligo
uguuacuucuagggagccu

SEQ ID NO: 32084 - RNA, 19 nt, Artificial Sequence
  Antisense Oligo
aggcucccuagaaguaaca

SEQ ID NO: 32085 - RNA, 19 nt, Artificial Sequence
  Sense Oligo
guuacuucuagggagccuu

SEQ ID NO: 32086 - RNA, 19 nt, Artificial Sequence
  Antisense Oligo
aaggcucccuagaaguaac

SEQ ID NO: 32087 - RNA, 19 nt, Artificial Sequence
  Sense Oligo
uuacuucuagggagccuug

SEQ ID NO: 32088 - RNA, 19 nt, Artificial Sequence
  Antisense Oligo
caaggcucccuagaaguaa

SEQ ID NO: 32089 - RNA, 19 nt, Artificial Sequence
  Sense Oligo
gggagccuugcuuuauuuc

SEQ ID NO: 32090 - RNA, 19 nt, Artificial Sequence
  Antisense Oligo
gaaauaaagcaaggcuccc

SEQ ID NO: 32091 - RNA, 19 nt, Artificial Sequence
  Sense Oligo
ggagccuugcuuuauuucu

SEQ ID NO: 32092 - RNA, 19 nt, Artificial Sequence
  Antisense Oligo
agaaauaaagcaaggcucc

SEQ ID NO: 32093 - RNA, 19 nt, Artificial Sequence
  Sense Oligo
gagccuugcuuuauuucuu

SEQ ID NO: 32094 - RNA, 19 nt, Artificial Sequence
  Antisense Oligo
aagaaauaaagcaaggcuc

SEQ ID NO: 32095 - RNA, 19 nt, Artificial Sequence
  Sense Oligo
acauuuugggucuccagua

SEQ ID NO: 32096 - RNA, 19 nt, Artificial Sequence
  Antisense Oligo
uacuggagacccaaaaugu

SEQ ID NO: 32097 - RNA, 19 nt, Artificial Sequence
  Sense Oligo
cauuuugggucuccaguac

SEQ ID NO: 32098 - RNA, 19 nt, Artificial Sequence
  Antisense Oligo
guacuggagacccaaaaug

SEQ ID NO: 32099 - RNA, 19 nt, Artificial Sequence
  Sense Oligo
ggucuccaguacuguguuc

SEQ ID NO: 32100 - RNA, 19 nt, Artificial Sequence
  Antisense Oligo
gaacacaguacuggagacc

SEQ ID NO: 32101 - RNA, 19 nt, Artificial Sequence
  Sense Oligo
ucuccaguacuguguucca

SEQ ID NO: 32102 - RNA, 19 nt, Artificial Sequence
  Antisense Oligo
uggaacacaguacuggaga

SEQ ID NO: 32103 - RNA, 19 nt, Artificial Sequence
  Sense Oligo
cuccaguacuguguuccag

SEQ ID NO: 32104 - RNA, 19 nt, Artificial Sequence
  Antisense Oligo
cuggaacacaguacuggag

SEQ ID NO: 32105 - RNA, 19 nt, Artificial Sequence
  Sense Oligo
uccaguacuguguuccaga

SEQ ID NO: 32106 - RNA, 19 nt, Artificial Sequence
  Antisense Oligo
ucuggaacacaguacugga

SEQ ID NO: 32107 - RNA, 19 nt, Artificial Sequence
  Sense Oligo
ccaguacuguguuccagaa

SEQ ID NO: 32108 - RNA, 19 nt, Artificial Sequence
  Antisense Oligo
uucuggaacacaguacugg

SEQ ID NO: 32109 - RNA, 19 nt, Artificial Sequence
  Sense Oligo
caguacuguguuccagaau

SEQ ID NO: 32110 - RNA, 19 nt, Artificial Sequence
  Antisense Oligo
auucuggaacacaguacug

SEQ ID NO: 32111 - RNA, 19 nt, Artificial Sequence
  Sense Oligo
aguacuguguuccagaauc

SEQ ID NO: 32112 - RNA, 19 nt, Artificial Sequence
  Antisense Oligo
gauucuggaacacaguacu

SEQ ID NO: 32113 - RNA, 19 nt, Artificial Sequence
  Sense Oligo
guacuguguuccagaauca

SEQ ID NO: 32114 - RNA, 19 nt, Artificial Sequence
  Antisense Oligo
ugauucuggaacacaguac

SEQ ID NO: 32115 - RNA, 19 nt, Artificial Sequence
  Sense Oligo
uccagaaucagcauuauuu

SEQ ID NO: 32116 - RNA, 19 nt, Artificial Sequence
  Antisense Oligo
aaauaaugcugauucugga

SEQ ID NO: 32117 - RNA, 19 nt, Artificial Sequence
  Sense Oligo
ccagaaucagcauuauuua

SEQ ID NO: 32118 - RNA, 19 nt, Artificial Sequence
  Antisense Oligo
uaaauaaugcugauucugg

SEQ ID NO: 32119 - RNA, 19 nt, Artificial Sequence
  Sense Oligo
gaaucagcauuauuuaagg

SEQ ID NO: 32120 - RNA, 19 nt, Artificial Sequence
  Antisense Oligo
ccuuaaauaaugcugauuc

SEQ ID NO: 32121 - RNA, 19 nt, Artificial Sequence
  Sense Oligo
aaucagcauuauuuaaggg

SEQ ID NO: 32122 - RNA, 19 nt, Artificial Sequence
  Antisense Oligo
cccuuaaauaaugcugauu

SEQ ID NO: 32123 - RNA, 19 nt, Artificial Sequence
  Sense Oligo
aucagcauuauuuaagggc

SEQ ID NO: 32124 - RNA, 19 nt, Artificial Sequence
  Antisense Oligo
gcccuuaaauaaugcugau

SEQ ID NO: 32125 - RNA, 19 nt, Artificial Sequence
  Sense Oligo
ucagcauuauuuaagggcc

SEQ ID NO: 32126 - RNA, 19 nt, Artificial Sequence
  Antisense Oligo
ggcccuuaaauaaugcuga

SEQ ID NO: 32127 - RNA, 19 nt, Artificial Sequence
  Sense Oligo
cagcauuauuuaagggccu

SEQ ID NO: 32128 - RNA, 19 nt, Artificial Sequence
  Antisense Oligo
aggcccuuaaauaaugcug

SEQ ID NO: 32129 - RNA, 19 nt, Artificial Sequence
  Sense Oligo
agcauuauuuaagggccuu

SEQ ID NO: 32130 - RNA, 19 nt, Artificial Sequence
  Antisense Oligo
aaggcccuuaaauaaugcu

SEQ ID NO: 32131 - RNA, 19 nt, Artificial Sequence
  Sense Oligo
gcauuauuuaagggccuuc

SEQ ID NO: 32132 - RNA, 19 nt, Artificial Sequence
  Antisense Oligo
gaaggcccuuaaauaaugc

SEQ ID NO: 32133 - RNA, 19 nt, Artificial Sequence
  Sense Oligo
cccacuugggcuguuugau

SEQ ID NO: 32134 - RNA, 19 nt, Artificial Sequence
  Antisense Oligo
aucaaacagcccaaguggg

SEQ ID NO: 32135 - RNA, 19 nt, Artificial Sequence
  Sense Oligo
cacuugggcuguuugaucc

SEQ ID NO: 32136 - RNA, 19 nt, Artificial Sequence
  Antisense Oligo
ggaucaaacagcccaagug

SEQ ID NO: 32137 - RNA, 19 nt, Artificial Sequence
  Sense Oligo
acuugggcuguuugauccu

SEQ ID NO: 32138 - RNA, 19 nt, Artificial Sequence
  Antisense Oligo
aggaucaaacagcccaagu

SEQ ID NO: 32139 - RNA, 19 nt, Artificial Sequence
  Sense Oligo
cuugggcuguuugauccug

SEQ ID NO: 32140 - RNA, 19 nt, Artificial Sequence
  Antisense Oligo
caggaucaaacagcccaag

SEQ ID NO: 32141 - RNA, 19 nt, Artificial Sequence
  Sense Oligo
cuguuugauccuggacacu

SEQ ID NO: 32142 - RNA, 19 nt, Artificial Sequence
  Antisense Oligo
aguguccaggaucaaacag

SEQ ID NO: 32143 - RNA, 19 nt, Artificial Sequence
  Sense Oligo
uguuugauccuggacacuc

SEQ ID NO: 32144 - RNA, 19 nt, Artificial Sequence
  Antisense Oligo
gaguguccaggaucaaaca

SEQ ID NO: 32145 - RNA, 19 nt, Artificial Sequence
  Sense Oligo
guuugauccuggacacucg

SEQ ID NO: 32146 - RNA, 19 nt, Artificial Sequence
  Antisense Oligo
cgaguguccaggaucaaac

SEQ ID NO: 32147 - RNA, 19 nt, Artificial Sequence
  Sense Oligo
uuugauccuggacacucgu

SEQ ID NO: 32148 - RNA, 19 nt, Artificial Sequence
  Antisense Oligo
acgaguguccaggaucaaa

SEQ ID NO: 32149 - RNA, 19 nt, Artificial Sequence
  Sense Oligo
uugauccuggacacucguu

SEQ ID NO: 32150 - RNA, 19 nt, Artificial Sequence
  Antisense Oligo
aacgaguguccaggaucaa

SEQ ID NO: 32151 - RNA, 19 nt, Artificial Sequence
  Sense Oligo
ugauccuggacacucguua

SEQ ID NO: 32152 - RNA, 19 nt, Artificial Sequence
  Antisense Oligo
uaacgaguguccaggauca

SEQ ID NO: 32153 - RNA, 19 nt, Artificial Sequence
  Sense Oligo
gauccuggacacucguuaa

SEQ ID NO: 32154 - RNA, 19 nt, Artificial Sequence
  Antisense Oligo
uuaacgaguguccaggauc

SEQ ID NO: 32155 - RNA, 19 nt, Artificial Sequence
  Sense Oligo
auccuggacacucguuaau

SEQ ID NO: 32156 - RNA, 19 nt, Artificial Sequence
  Antisense Oligo
auuaacgaguguccaggau

SEQ ID NO: 32157 - RNA, 19 nt, Artificial Sequence
  Sense Oligo
uccuggacacucguuaaua

SEQ ID NO: 32158 - RNA, 19 nt, Artificial Sequence
  Antisense Oligo
uauuaacgaguguccagga

SEQ ID NO: 32159 - RNA, 19 nt, Artificial Sequence
  Sense Oligo
ccuggacacucguuaauaa

SEQ ID NO: 32160 - RNA, 19 nt, Artificial Sequence
  Antisense Oligo
uuauuaacgaguguccagg

SEQ ID NO: 32161 - RNA, 19 nt, Artificial Sequence
  Sense Oligo
uaauaauuaagaggcuugg

SEQ ID NO: 32162 - RNA, 19 nt, Artificial Sequence
  Antisense Oligo
ccaagccucuuaauuauua

SEQ ID NO: 32163 - RNA, 19 nt, Artificial Sequence
  Sense Oligo
aauaauuaagaggcuuggc

SEQ ID NO: 32164 - RNA, 19 nt, Artificial Sequence
  Antisense Oligo
gccaagccucuuaauuauu

SEQ ID NO: 32165 - RNA, 19 nt, Artificial Sequence
  Sense Oligo
uaauuaagaggcuuggcug

SEQ ID NO: 32166 - RNA, 19 nt, Artificial Sequence
  Antisense Oligo
cagccaagccucuuaauua

SEQ ID NO: 32167 - RNA, 19 nt, Artificial Sequence
  Sense Oligo
aauuaagaggcuuggcugg

SEQ ID NO: 32168 - RNA, 19 nt, Artificial Sequence
  Antisense Oligo
ccagccaagccucuuaauu

SEQ ID NO: 32169 - RNA, 19 nt, Artificial Sequence
  Sense Oligo
auuaagaggcuuggcuggg

SEQ ID NO: 32170 - RNA, 19 nt, Artificial Sequence
  Antisense Oligo
cccagccaagccucuuaau

SEQ ID NO: 32171 - RNA, 19 nt, Artificial Sequence
  Sense Oligo
uuaagaggcuuggcugggu

SEQ ID NO: 32172 - RNA, 19 nt, Artificial Sequence
  Antisense Oligo
acccagccaagccucuuaa

SEQ ID NO: 32173 - RNA, 19 nt, Artificial Sequence
  Sense Oligo
uaagaggcuuggcugggug

SEQ ID NO: 32174 - RNA, 19 nt, Artificial Sequence
  Antisense Oligo
cacccagccaagccucuua

SEQ ID NO: 32175 - RNA, 19 nt, Artificial Sequence
  Sense Oligo
aagaggcuuggcugggugc

SEQ ID NO: 32176 - RNA, 19 nt, Artificial Sequence
  Antisense Oligo
gcacccagccaagccucuu

SEQ ID NO: 32177 - RNA, 19 nt, Artificial Sequence
  Sense Oligo
cugggugcaguggcucaca

SEQ ID NO: 32178 - RNA, 19 nt, Artificial Sequence
  Antisense Oligo
ugugagccacugcacccag

SEQ ID NO: 32179 - RNA, 19 nt, Artificial Sequence
  Sense Oligo
ugggugcaguggcucacac

SEQ ID NO: 32180 - RNA, 19 nt, Artificial Sequence
  Antisense Oligo
gugugagccacugcaccca

SEQ ID NO: 32181 - RNA, 19 nt, Artificial Sequence
  Sense Oligo
caguggcucacaccuguaa

SEQ ID NO: 32182 - RNA, 19 nt, Artificial Sequence
  Antisense Oligo
uuacaggugugagccacug

SEQ ID NO: 32183 - RNA, 19 nt, Artificial Sequence
  Sense Oligo
aguggcucacaccuguaau

SEQ ID NO: 32184 - RNA, 19 nt, Artificial Sequence
  Antisense Oligo
auuacaggugugagccacu

SEQ ID NO: 32185 - RNA, 19 nt, Artificial Sequence
  Sense Oligo
guggcucacaccuguaauc

SEQ ID NO: 32186 - RNA, 19 nt, Artificial Sequence
  Antisense Oligo
gauuacaggugugagccac

SEQ ID NO: 32187 - RNA, 19 nt, Artificial Sequence
  Sense Oligo
uggcucacaccuguaaucc

SEQ ID NO: 32188 - RNA, 19 nt, Artificial Sequence
  Antisense Oligo
ggauuacaggugugagcca

SEQ ID NO: 32189 - RNA, 19 nt, Artificial Sequence
  Sense Oligo
ggcucacaccuguaauccc

SEQ ID NO: 32190 - RNA, 19 nt, Artificial Sequence
  Antisense Oligo
gggauuacaggugugagcc

SEQ ID NO: 32191 - RNA, 19 nt, Artificial Sequence
  Sense Oligo
acaccuguaaucccagcac

SEQ ID NO: 32192 - RNA, 19 nt, Artificial Sequence
  Antisense Oligo
gugcugggauuacaggugu

SEQ ID NO: 32193 - RNA, 19 nt, Artificial Sequence
  Sense Oligo
cugguaggcagagcuugca

SEQ ID NO: 32194 - RNA, 19 nt, Artificial Sequence
  Antisense Oligo
ugcaagcucugccuaccag

SEQ ID NO: 32195 - RNA, 19 nt, Artificial Sequence
  Sense Oligo
ugguaggcagagcuugcag

SEQ ID NO: 32196 - RNA, 19 nt, Artificial Sequence
  Antisense Oligo
cugcaagcucugccuacca

SEQ ID NO: 32197 - RNA, 19 nt, Artificial Sequence
  Sense Oligo
ggguauaucccuuuuauug

SEQ ID NO: 32198 - RNA, 19 nt, Artificial Sequence
  Antisense Oligo
caauaaaagggauauaccc

SEQ ID NO: 32199 - RNA, 19 nt, Artificial Sequence
  Sense Oligo
auaaucuccaguuuaccau

SEQ ID NO: 32200 - RNA, 19 nt, Artificial Sequence
  Antisense Oligo
augguaaacuggagauuau

SEQ ID NO: 32201 - RNA, 19 nt, Artificial Sequence
  Sense Oligo
uaaucuccaguuuaccaug

SEQ ID NO: 32202 - RNA, 19 nt, Artificial Sequence
  Antisense Oligo
caugguaaacuggagauua

SEQ ID NO: 32203 - RNA, 19 nt, Artificial Sequence
  Sense Oligo
aaucuccaguuuaccaugu

SEQ ID NO: 32204 - RNA, 19 nt, Artificial Sequence
  Antisense Oligo
acaugguaaacuggagauu

SEQ ID NO: 32205 - RNA, 19 nt, Artificial Sequence
  Sense Oligo
aucuccaguuuaccauguu

SEQ ID NO: 32206 - RNA, 19 nt, Artificial Sequence
  Antisense Oligo
aacaugguaaacuggagau

SEQ ID NO: 32207 - RNA, 19 nt, Artificial Sequence
  Sense Oligo
ucuccaguuuaccauguua

SEQ ID NO: 32208 - RNA, 19 nt, Artificial Sequence
  Antisense Oligo
uaacaugguaaacuggaga

SEQ ID NO: 32209 - RNA, 19 nt, Artificial Sequence
  Sense Oligo
cuccaguuuaccauguuaa

SEQ ID NO: 32210 - RNA, 19 nt, Artificial Sequence
  Antisense Oligo
uuaacaugguaaacuggag

SEQ ID NO: 32211 - RNA, 19 nt, Artificial Sequence
  Sense Oligo
uccaguuuaccauguuaac

SEQ ID NO: 32212 - RNA, 19 nt, Artificial Sequence
  Antisense Oligo
guuaacaugguaaacugga

SEQ ID NO: 32213 - RNA, 19 nt, Artificial Sequence
  Sense Oligo
guuuaccauguuaacuccu

SEQ ID NO: 32214 - RNA, 19 nt, Artificial Sequence
  Antisense Oligo
aggaguuaacaugguaaac

SEQ ID NO: 32215 - RNA, 19 nt, Artificial Sequence
  Sense Oligo
uaccauguuaacuccuuuu

SEQ ID NO: 32216 - RNA, 19 nt, Artificial Sequence
  Antisense Oligo
aaaaggaguuaacauggua

SEQ ID NO: 32217 - RNA, 19 nt, Artificial Sequence
  Sense Oligo
accauguuaacuccuuuuc

SEQ ID NO: 32218 - RNA, 19 nt, Artificial Sequence
  Antisense Oligo
gaaaaggaguuaacauggu

SEQ ID NO: 32219 - RNA, 19 nt, Artificial Sequence
  Sense Oligo
ccauguuaacuccuuuuca

SEQ ID NO: 32220 - RNA, 19 nt, Artificial Sequence
  Antisense Oligo
ugaaaaggaguuaacaugg

SEQ ID NO: 32221 - RNA, 19 nt, Artificial Sequence
  Sense Oligo
cauguuaacuccuuuucaa

SEQ ID NO: 32222 - RNA, 19 nt, Artificial Sequence
  Antisense Oligo
uugaaaaggaguuaacaug

SEQ ID NO: 32223 - RNA, 19 nt, Artificial Sequence
  Sense Oligo
cuuuucaaggcacaguucc

SEQ ID NO: 32224 - RNA, 19 nt, Artificial Sequence
  Antisense Oligo
ggaacugugccuugaaaag

SEQ ID NO: 32225 - RNA, 19 nt, Artificial Sequence
  Sense Oligo
aggcacaguucccuggcac

SEQ ID NO: 32226 - RNA, 19 nt, Artificial Sequence
  Antisense Oligo
gugccagggaacugugccu

SEQ ID NO: 32227 - RNA, 19 nt, Artificial Sequence
  Sense Oligo
gcacaguucccuggcacca

SEQ ID NO: 32228 - RNA, 19 nt, Artificial Sequence
  Antisense Oligo
uggugccagggaacugugc

SEQ ID NO: 32229 - RNA, 19 nt, Artificial Sequence
  Sense Oligo
acaguucccuggcaccaag

SEQ ID NO: 32230 - RNA, 19 nt, Artificial Sequence
  Antisense Oligo
cuuggugccagggaacugu

SEQ ID NO: 32231 - RNA, 19 nt, Artificial Sequence
  Sense Oligo
caguucccuggcaccaagc

SEQ ID NO: 32232 - RNA, 19 nt, Artificial Sequence
  Antisense Oligo
gcuuggugccagggaacug

SEQ ID NO: 32233 - RNA, 19 nt, Artificial Sequence
  Sense Oligo
aguucccuggcaccaagca

SEQ ID NO: 32234 - RNA, 19 nt, Artificial Sequence
  Antisense Oligo
ugcuuggugccagggaacu

SEQ ID NO: 32235 - RNA, 19 nt, Artificial Sequence
  Sense Oligo
guucccuggcaccaagcac

SEQ ID NO: 32236 - RNA, 19 nt, Artificial Sequence
  Antisense Oligo
gugcuuggugccagggaac

SEQ ID NO: 32237 - RNA, 19 nt, Artificial Sequence
  Sense Oligo
caccaagcacauucacacu

SEQ ID NO: 32238 - RNA, 19 nt, Artificial Sequence
  Antisense Oligo
agugugaaugugcuuggug

SEQ ID NO: 32239 - RNA, 19 nt, Artificial Sequence
  Sense Oligo
ccaagcacauucacacugc

SEQ ID NO: 32240 - RNA, 19 nt, Artificial Sequence
  Antisense Oligo
gcagugugaaugugcuugg

SEQ ID NO: 32241 - RNA, 19 nt, Artificial Sequence
  Sense Oligo
cacugcuguguagccguca

SEQ ID NO: 32242 - RNA, 19 nt, Artificial Sequence
  Antisense Oligo
ugacggcuacacagcagug

SEQ ID NO: 32243 - RNA, 19 nt, Artificial Sequence
  Sense Oligo
uguagccgucagcaccauc

SEQ ID NO: 32244 - RNA, 19 nt, Artificial Sequence
  Antisense Oligo
gauggugcugacggcuaca

SEQ ID NO: 32245 - RNA, 19 nt, Artificial Sequence
  Sense Oligo
guagccgucagcaccaucc

SEQ ID NO: 32246 - RNA, 19 nt, Artificial Sequence
  Antisense Oligo
ggauggugcugacggcuac

SEQ ID NO: 32247 - RNA, 19 nt, Artificial Sequence
  Sense Oligo
uagccgucagcaccaucca

SEQ ID NO: 32248 - RNA, 19 nt, Artificial Sequence
  Antisense Oligo
uggauggugcugacggcua

SEQ ID NO: 32249 - RNA, 19 nt, Artificial Sequence
  Sense Oligo
agccgucagcaccauccac

SEQ ID NO: 32250 - RNA, 19 nt, Artificial Sequence
  Antisense Oligo
guggauggugcugacggcu

SEQ ID NO: 32251 - RNA, 19 nt, Artificial Sequence
  Sense Oligo
ccgucagcaccauccaccu

SEQ ID NO: 32252 - RNA, 19 nt, Artificial Sequence
  Antisense Oligo
agguggauggugcugacgg

SEQ ID NO: 32253 - RNA, 19 nt, Artificial Sequence
  Sense Oligo
cacuguucuccucucuguc

SEQ ID NO: 32254 - RNA, 19 nt, Artificial Sequence
  Antisense Oligo
gacagagaggagaacagug

SEQ ID NO: 32255 - RNA, 19 nt, Artificial Sequence
  Sense Oligo
acuguucuccucucugucu

SEQ ID NO: 32256 - RNA, 19 nt, Artificial Sequence
  Antisense Oligo
agacagagaggagaacagu

SEQ ID NO: 32257 - RNA, 19 nt, Artificial Sequence
  Sense Oligo
uguucuccucucugucucu

SEQ ID NO: 32258 - RNA, 19 nt, Artificial Sequence
  Antisense Oligo
agagacagagaggagaaca

SEQ ID NO: 32259 - RNA, 19 nt, Artificial Sequence
  Sense Oligo
ccucucugucucuaggauu

SEQ ID NO: 32260 - RNA, 19 nt, Artificial Sequence
  Antisense Oligo
aauccuagagacagagagg

SEQ ID NO: 32261 - RNA, 19 nt, Artificial Sequence
  Sense Oligo
ucugucucuaggauuuuga

SEQ ID NO: 32262 - RNA, 19 nt, Artificial Sequence
  Antisense Oligo
ucaaaauccuagagacaga

SEQ ID NO: 32263 - RNA, 19 nt, Artificial Sequence
  Sense Oligo
cugucucuaggauuuugac

SEQ ID NO: 32264 - RNA, 19 nt, Artificial Sequence
  Antisense Oligo
gucaaaauccuagagacag

SEQ ID NO: 32265 - RNA, 19 nt, Artificial Sequence
  Sense Oligo
gucucuaggauuuugacuu

SEQ ID NO: 32266 - RNA, 19 nt, Artificial Sequence
  Antisense Oligo
aagucaaaauccuagagac

SEQ ID NO: 32267 - RNA, 19 nt, Artificial Sequence
  Sense Oligo
uaggauuuugacuucucug

SEQ ID NO: 32268 - RNA, 19 nt, Artificial Sequence
  Antisense Oligo
cagagaagucaaaauccua

SEQ ID NO: 32269 - RNA, 19 nt, Artificial Sequence
  Sense Oligo
aggauuuugacuucucugg

SEQ ID NO: 32270 - RNA, 19 nt, Artificial Sequence
  Antisense Oligo
ccagagaagucaaaauccu

SEQ ID NO: 32271 - RNA, 19 nt, Artificial Sequence
  Sense Oligo
ggauuuugacuucucuggg

SEQ ID NO: 32272 - RNA, 19 nt, Artificial Sequence
  Antisense Oligo
cccagagaagucaaaaucc

SEQ ID NO: 32273 - RNA, 19 nt, Artificial Sequence
  Sense Oligo
cugagcauaaugucaagau

SEQ ID NO: 32274 - RNA, 19 nt, Artificial Sequence
  Antisense Oligo
aucuugacauuaugcucag

SEQ ID NO: 32275 - RNA, 19 nt, Artificial Sequence
  Sense Oligo
gagcauaaugucaagauuc

SEQ ID NO: 32276 - RNA, 19 nt, Artificial Sequence
  Antisense Oligo
gaaucuugacauuaugcuc

SEQ ID NO: 32277 - RNA, 19 nt, Artificial Sequence
  Sense Oligo
augucaagauucauccauc

SEQ ID NO: 32278 - RNA, 19 nt, Artificial Sequence
  Antisense Oligo
gauggaugaaucuugacau

SEQ ID NO: 32279 - RNA, 19 nt, Artificial Sequence
  Sense Oligo
aucuugcuauguugcccag

SEQ ID NO: 32280 - RNA, 19 nt, Artificial Sequence
  Antisense Oligo
cugggcaacauagcaagau

SEQ ID NO: 32281 - RNA, 19 nt, Artificial Sequence
  Sense Oligo
ucuugcuauguugcccagg

SEQ ID NO: 32282 - RNA, 19 nt, Artificial Sequence
  Antisense Oligo
ccugggcaacauagcaaga

SEQ ID NO: 32283 - RNA, 19 nt, Artificial Sequence
  Sense Oligo
cuugcuauguugcccaggu

SEQ ID NO: 32284 - RNA, 19 nt, Artificial Sequence
  Antisense Oligo
accugggcaacauagcaag

SEQ ID NO: 32285 - RNA, 19 nt, Artificial Sequence
  Sense Oligo
cuauguugcccagguuggu

SEQ ID NO: 32286 - RNA, 19 nt, Artificial Sequence
  Antisense Oligo
accaaccugggcaacauag

SEQ ID NO: 32287 - RNA, 19 nt, Artificial Sequence
  Sense Oligo
agcuauccauccuccugcu

SEQ ID NO: 32288 - RNA, 19 nt, Artificial Sequence
  Antisense Oligo
agcaggaggauggauagcu

SEQ ID NO: 32289 - RNA, 19 nt, Artificial Sequence
  Sense Oligo
gcuauccauccuccugcuu

SEQ ID NO: 32290 - RNA, 19 nt, Artificial Sequence
  Antisense Oligo
aagcaggaggauggauagc

SEQ ID NO: 32291 - RNA, 19 nt, Artificial Sequence
  Sense Oligo
cuauccauccuccugcuuu

SEQ ID NO: 32292 - RNA, 19 nt, Artificial Sequence
  Antisense Oligo
aaagcaggaggauggauag

SEQ ID NO: 32293 - RNA, 19 nt, Artificial Sequence
  Sense Oligo
acaugagccacugcaccca

SEQ ID NO: 32294 - RNA, 19 nt, Artificial Sequence
  Antisense Oligo
ugggugcaguggcucaugu

SEQ ID NO: 32295 - RNA, 19 nt, Artificial Sequence
  Sense Oligo
caugagccacugcacccag

SEQ ID NO: 32296 - RNA, 19 nt, Artificial Sequence
  Antisense Oligo
cugggugcaguggcucaug

SEQ ID NO: 32297 - RNA, 19 nt, Artificial Sequence
  Sense Oligo
augagccacugcacccagc

SEQ ID NO: 32298 - RNA, 19 nt, Artificial Sequence
  Antisense Oligo
gcugggugcaguggcucau

SEQ ID NO: 32299 - RNA, 19 nt, Artificial Sequence
  Sense Oligo
ugagccacugcacccagca

SEQ ID NO: 32300 - RNA, 19 nt, Artificial Sequence
  Antisense Oligo
ugcugggugcaguggcuca

SEQ ID NO: 32301 - RNA, 19 nt, Artificial Sequence
  Sense Oligo
gacaguuuuggucucauug

SEQ ID NO: 32302 - RNA, 19 nt, Artificial Sequence
  Antisense Oligo
caaugagaccaaaacuguc

SEQ ID NO: 32303 - RNA, 19 nt, Artificial Sequence
  Sense Oligo
acaguuuuggucucauugc

SEQ ID NO: 32304 - RNA, 19 nt, Artificial Sequence
  Antisense Oligo
gcaaugagaccaaaacugu

SEQ ID NO: 32305 - RNA, 19 nt, Artificial Sequence
  Sense Oligo
caguuuuggucucauugcc

SEQ ID NO: 32306 - RNA, 19 nt, Artificial Sequence
  Antisense Oligo
ggcaaugagaccaaaacug

SEQ ID NO: 32307 - RNA, 19 nt, Artificial Sequence
  Sense Oligo
uuuuggucucauugccuau

SEQ ID NO: 32308 - RNA, 19 nt, Artificial Sequence
  Antisense Oligo
auaggcaaugagaccaaaa

SEQ ID NO: 32309 - RNA, 19 nt, Artificial Sequence
  Sense Oligo
uuuggucucauugccuaug

SEQ ID NO: 32310 - RNA, 19 nt, Artificial Sequence
  Antisense Oligo
cauaggcaaugagaccaaa

SEQ ID NO: 32311 - RNA, 19 nt, Artificial Sequence
  Sense Oligo
uuggucucauugccuaugc

SEQ ID NO: 32312 - RNA, 19 nt, Artificial Sequence
  Antisense Oligo
gcauaggcaaugagaccaa

SEQ ID NO: 32313 - RNA, 19 nt, Artificial Sequence
  Sense Oligo
uggucucauugccuaugcu

SEQ ID NO: 32314 - RNA, 19 nt, Artificial Sequence
  Antisense Oligo
agcauaggcaaugagacca

SEQ ID NO: 32315 - RNA, 19 nt, Artificial Sequence
  Sense Oligo
ggucucauugccuaugcug

SEQ ID NO: 32316 - RNA, 19 nt, Artificial Sequence
  Antisense Oligo
cagcauaggcaaugagacc

SEQ ID NO: 32317 - RNA, 19 nt, Artificial Sequence
  Sense Oligo
uggcacgaucuuggcucac

SEQ ID NO: 32318 - RNA, 19 nt, Artificial Sequence
  Antisense Oligo
gugagccaagaucgugcca

SEQ ID NO: 32319 - RNA, 19 nt, Artificial Sequence
  Sense Oligo
cgaucuuggcucaccgcaa

SEQ ID NO: 32320 - RNA, 19 nt, Artificial Sequence
  Antisense Oligo
uugcggugagccaagaucg

SEQ ID NO: 32321 - RNA, 19 nt, Artificial Sequence
  Sense Oligo
accucugccuccuggguuc

SEQ ID NO: 32322 - RNA, 19 nt, Artificial Sequence
  Antisense Oligo
gaacccaggaggcagaggu

SEQ ID NO: 32323 - RNA, 19 nt, Artificial Sequence
  Sense Oligo
ccucugccuccuggguuca

SEQ ID NO: 32324 - RNA, 19 nt, Artificial Sequence
  Antisense Oligo
ugaacccaggaggcagagg

SEQ ID NO: 32325 - RNA, 19 nt, Artificial Sequence
  Sense Oligo
cucugccuccuggguucaa

SEQ ID NO: 32326 - RNA, 19 nt, Artificial Sequence
  Antisense Oligo
uugaacccaggaggcagag

SEQ ID NO: 32327 - RNA, 19 nt, Artificial Sequence
  Sense Oligo
ucugccuccuggguucaag

SEQ ID NO: 32328 - RNA, 19 nt, Artificial Sequence
  Antisense Oligo
cuugaacccaggaggcaga

SEQ ID NO: 32329 - RNA, 19 nt, Artificial Sequence
  Sense Oligo
cugccuccuggguucaagu

SEQ ID NO: 32330 - RNA, 19 nt, Artificial Sequence
  Antisense Oligo
acuugaacccaggaggcag

SEQ ID NO: 32331 - RNA, 19 nt, Artificial Sequence
  Sense Oligo
ugccuccuggguucaagug

SEQ ID NO: 32332 - RNA, 19 nt, Artificial Sequence
  Antisense Oligo
cacuugaacccaggaggca

SEQ ID NO: 32333 - RNA, 19 nt, Artificial Sequence
  Sense Oligo
gccuccuggguucaaguga

SEQ ID NO: 32334 - RNA, 19 nt, Artificial Sequence
  Antisense Oligo
ucacuugaacccaggaggc

SEQ ID NO: 32335 - RNA, 19 nt, Artificial Sequence
  Sense Oligo
cugccucagccucccaagu

SEQ ID NO: 32336 - RNA, 19 nt, Artificial Sequence
  Antisense Oligo
acuugggaggcugaggcag

SEQ ID NO: 32337 - RNA, 19 nt, Artificial Sequence
  Sense Oligo
ugccucagccucccaagua

SEQ ID NO: 32338 - RNA, 19 nt, Artificial Sequence
  Antisense Oligo
uacuugggaggcugaggca

SEQ ID NO: 32339 - RNA, 19 nt, Artificial Sequence
  Sense Oligo
gccucagccucccaaguag

SEQ ID NO: 32340 - RNA, 19 nt, Artificial Sequence
  Antisense Oligo
cuacuugggaggcugaggc

SEQ ID NO: 32341 - RNA, 19 nt, Artificial Sequence
  Sense Oligo
ccucagccucccaaguagc

SEQ ID NO: 32342 - RNA, 19 nt, Artificial Sequence
  Antisense Oligo
gcuacuugggaggcugagg

SEQ ID NO: 32343 - RNA, 19 nt, Artificial Sequence
  Sense Oligo
cucagccucccaaguagcu

SEQ ID NO: 32344 - RNA, 19 nt, Artificial Sequence
  Antisense Oligo
agcuacuugggaggcugag

SEQ ID NO: 32345 - RNA, 19 nt, Artificial Sequence
  Sense Oligo
ccaaguagcugggauuaca

SEQ ID NO: 32346 - RNA, 19 nt, Artificial Sequence
  Antisense Oligo
uguaaucccagcuacuugg

SEQ ID NO: 32347 - RNA, 19 nt, Artificial Sequence
  Sense Oligo
caaguagcugggauuacag

SEQ ID NO: 32348 - RNA, 19 nt, Artificial Sequence
  Antisense Oligo
cuguaaucccagcuacuug

SEQ ID NO: 32349 - RNA, 19 nt, Artificial Sequence
  Sense Oligo
uagcugggauuacaggugu

SEQ ID NO: 32350 - RNA, 19 nt, Artificial Sequence
  Antisense Oligo
acaccuguaaucccagcua

SEQ ID NO: 32351 - RNA, 19 nt, Artificial Sequence
  Sense Oligo
agcugggauuacaggugug

SEQ ID NO: 32352 - RNA, 19 nt, Artificial Sequence
  Antisense Oligo
cacaccuguaaucccagcu

SEQ ID NO: 32353 - RNA, 19 nt, Artificial Sequence
  Sense Oligo
gcugggauuacaggugugc

SEQ ID NO: 32354 - RNA, 19 nt, Artificial Sequence
  Antisense Oligo
gcacaccuguaaucccagc

SEQ ID NO: 32355 - RNA, 19 nt, Artificial Sequence
  Sense Oligo
cugggauuacaggugugcg

SEQ ID NO: 32356 - RNA, 19 nt, Artificial Sequence
  Antisense Oligo
cgcacaccuguaaucccag

SEQ ID NO: 32357 - RNA, 19 nt, Artificial Sequence
  Sense Oligo
ugggauuacaggugugcgc

SEQ ID NO: 32358 - RNA, 19 nt, Artificial Sequence
  Antisense Oligo
gcgcacaccuguaauccca

SEQ ID NO: 32359 - RNA, 19 nt, Artificial Sequence
  Sense Oligo
gggauuacaggugugcgcc

SEQ ID NO: 32360 - RNA, 19 nt, Artificial Sequence
  Antisense Oligo
ggcgcacaccuguaauccc

SEQ ID NO: 32361 - RNA, 19 nt, Artificial Sequence
  Sense Oligo
ggauuacaggugugcgcca

SEQ ID NO: 32362 - RNA, 19 nt, Artificial Sequence
  Antisense Oligo
uggcgcacaccuguaaucc

SEQ ID NO: 32363 - RNA, 19 nt, Artificial Sequence
  Sense Oligo
gauuacaggugugcgccac

SEQ ID NO: 32364 - RNA, 19 nt, Artificial Sequence
  Antisense Oligo
guggcgcacaccuguaauc

SEQ ID NO: 32365 - RNA, 19 nt, Artificial Sequence
  Sense Oligo
ccaccacgccuggcuaauu

SEQ ID NO: 32366 - RNA, 19 nt, Artificial Sequence
  Antisense Oligo
aauuagccaggcguggugg

SEQ ID NO: 32367 - RNA, 19 nt, Artificial Sequence
  Sense Oligo
caccacgccuggcuaauuu

SEQ ID NO: 32368 - RNA, 19 nt, Artificial Sequence
  Antisense Oligo
aaauuagccaggcguggug

SEQ ID NO: 32369 - RNA, 19 nt, Artificial Sequence
  Sense Oligo
accacgccuggcuaauuua

SEQ ID NO: 32370 - RNA, 19 nt, Artificial Sequence
  Antisense Oligo
uaaauuagccaggcguggu

SEQ ID NO: 32371 - RNA, 19 nt, Artificial Sequence
  Sense Oligo
ccacgccuggcuaauuuag

SEQ ID NO: 32372 - RNA, 19 nt, Artificial Sequence
  Antisense Oligo
cuaaauuagccaggcgugg

SEQ ID NO: 32373 - RNA, 19 nt, Artificial Sequence
  Sense Oligo
cacgccuggcuaauuuagg

SEQ ID NO: 32374 - RNA, 19 nt, Artificial Sequence
  Antisense Oligo
ccuaaauuagccaggcgug

SEQ ID NO: 32375 - RNA, 19 nt, Artificial Sequence
  Sense Oligo
acgccuggcuaauuuagga

SEQ ID NO: 32376 - RNA, 19 nt, Artificial Sequence
  Antisense Oligo
uccuaaauuagccaggcgu

SEQ ID NO: 32377 - RNA, 19 nt, Artificial Sequence
  Sense Oligo
cgccuggcuaauuuaggau

SEQ ID NO: 32378 - RNA, 19 nt, Artificial Sequence
  Antisense Oligo
auccuaaauuagccaggcg

SEQ ID NO: 32379 - RNA, 19 nt, Artificial Sequence
  Sense Oligo
gccuggcuaauuuaggauu

SEQ ID NO: 32380 - RNA, 19 nt, Artificial Sequence
  Antisense Oligo
aauccuaaauuagccaggc

SEQ ID NO: 32381 - RNA, 19 nt, Artificial Sequence
  Sense Oligo
ccuggcuaauuuaggauuu

SEQ ID NO: 32382 - RNA, 19 nt, Artificial Sequence
  Antisense Oligo
aaauccuaaauuagccagg

SEQ ID NO: 32383 - RNA, 19 nt, Artificial Sequence
  Sense Oligo
cuggcuaauuuaggauuuu

SEQ ID NO: 32384 - RNA, 19 nt, Artificial Sequence
  Antisense Oligo
aaaauccuaaauuagccag

SEQ ID NO: 32385 - RNA, 19 nt, Artificial Sequence
  Sense Oligo
cgggauuucuccauguugg

SEQ ID NO: 32386 - RNA, 19 nt, Artificial Sequence
  Antisense Oligo
ccaacauggagaaaucccg

SEQ ID NO: 32387 - RNA, 19 nt, Artificial Sequence
  Sense Oligo
gggauuucuccauguuggu

SEQ ID NO: 32388 - RNA, 19 nt, Artificial Sequence
  Antisense Oligo
accaacauggagaaauccc

SEQ ID NO: 32389 - RNA, 19 nt, Artificial Sequence
  Sense Oligo
ggauuucuccauguugguc

SEQ ID NO: 32390 - RNA, 19 nt, Artificial Sequence
  Antisense Oligo
gaccaacauggagaaaucc

SEQ ID NO: 32391 - RNA, 19 nt, Artificial Sequence
  Sense Oligo
gauuucuccauguugguca

SEQ ID NO: 32392 - RNA, 19 nt, Artificial Sequence
  Antisense Oligo
ugaccaacauggagaaauc

SEQ ID NO: 32393 - RNA, 19 nt, Artificial Sequence
  Sense Oligo
auuucuccauguuggucag

SEQ ID NO: 32394 - RNA, 19 nt, Artificial Sequence
  Antisense Oligo
cugaccaacauggagaaau

SEQ ID NO: 32395 - RNA, 19 nt, Artificial Sequence
  Sense Oligo
uuucuccauguuggucagg

SEQ ID NO: 32396 - RNA, 19 nt, Artificial Sequence
  Antisense Oligo
ccugaccaacauggagaaa

SEQ ID NO: 32397 - RNA, 19 nt, Artificial Sequence
  Sense Oligo
uucuccauguuggucaggc

SEQ ID NO: 32398 - RNA, 19 nt, Artificial Sequence
  Antisense Oligo
gccugaccaacauggagaa

SEQ ID NO: 32399 - RNA, 19 nt, Artificial Sequence
  Sense Oligo
ucuccauguuggucaggcu

SEQ ID NO: 32400 - RNA, 19 nt, Artificial Sequence
  Antisense Oligo
agccugaccaacauggaga

SEQ ID NO: 32401 - RNA, 19 nt, Artificial Sequence
  Sense Oligo
cuccauguuggucaggcug

SEQ ID NO: 32402 - RNA, 19 nt, Artificial Sequence
  Antisense Oligo
cagccugaccaacauggag

SEQ ID NO: 32403 - RNA, 19 nt, Artificial Sequence
  Sense Oligo
uccauguuggucaggcugg

SEQ ID NO: 32404 - RNA, 19 nt, Artificial Sequence
  Antisense Oligo
ccagccugaccaacaugga

SEQ ID NO: 32405 - RNA, 19 nt, Artificial Sequence
  Sense Oligo
ccauguuggucaggcuggu

SEQ ID NO: 32406 - RNA, 19 nt, Artificial Sequence
  Antisense Oligo
accagccugaccaacaugg

SEQ ID NO: 32407 - RNA, 19 nt, Artificial Sequence
  Sense Oligo
cauguuggucaggcugguc

SEQ ID NO: 32408 - RNA, 19 nt, Artificial Sequence
  Antisense Oligo
gaccagccugaccaacaug

SEQ ID NO: 32409 - RNA, 19 nt, Artificial Sequence
  Sense Oligo
auguuggucaggcuggucu

SEQ ID NO: 32410 - RNA, 19 nt, Artificial Sequence
  Antisense Oligo
agaccagccugaccaacau

SEQ ID NO: 32411 - RNA, 19 nt, Artificial Sequence
  Sense Oligo
uguuggucaggcuggucuu

SEQ ID NO: 32412 - RNA, 19 nt, Artificial Sequence
  Antisense Oligo
aagaccagccugaccaaca

SEQ ID NO: 32413 - RNA, 19 nt, Artificial Sequence
  Sense Oligo
guuggucaggcuggucuug

SEQ ID NO: 32414 - RNA, 19 nt, Artificial Sequence
  Antisense Oligo
caagaccagccugaccaac

SEQ ID NO: 32415 - RNA, 19 nt, Artificial Sequence
  Sense Oligo
uuggucaggcuggucuuga

SEQ ID NO: 32416 - RNA, 19 nt, Artificial Sequence
  Antisense Oligo
ucaagaccagccugaccaa

SEQ ID NO: 32417 - RNA, 19 nt, Artificial Sequence
  Sense Oligo
uggucaggcuggucuugaa

SEQ ID NO: 32418 - RNA, 19 nt, Artificial Sequence
  Antisense Oligo
uucaagaccagccugacca

SEQ ID NO: 32419 - RNA, 19 nt, Artificial Sequence
  Sense Oligo
ucccaaccucaggugaucu

SEQ ID NO: 32420 - RNA, 19 nt, Artificial Sequence
  Antisense Oligo
agaucaccugagguuggga

SEQ ID NO: 32421 - RNA, 19 nt, Artificial Sequence
  Sense Oligo
cccaaccucaggugaucug

SEQ ID NO: 32422 - RNA, 19 nt, Artificial Sequence
  Antisense Oligo
cagaucaccugagguuggg

SEQ ID NO: 32423 - RNA, 19 nt, Artificial Sequence
  Sense Oligo
ccaaccucaggugaucugc

SEQ ID NO: 32424 - RNA, 19 nt, Artificial Sequence
  Antisense Oligo
gcagaucaccugagguugg

SEQ ID NO: 32425 - RNA, 19 nt, Artificial Sequence
  Sense Oligo
caaccucaggugaucugcc

SEQ ID NO: 32426 - RNA, 19 nt, Artificial Sequence
  Antisense Oligo
ggcagaucaccugagguug

SEQ ID NO: 32427 - RNA, 19 nt, Artificial Sequence
  Sense Oligo
aaccucaggugaucugccu

SEQ ID NO: 32428 - RNA, 19 nt, Artificial Sequence
  Antisense Oligo
aggcagaucaccugagguu

SEQ ID NO: 32429 - RNA, 19 nt, Artificial Sequence
  Sense Oligo
ccaaagugcugggauuaca

SEQ ID NO: 32430 - RNA, 19 nt, Artificial Sequence
  Antisense Oligo
uguaaucccagcacuuugg

SEQ ID NO: 32431 - RNA, 19 nt, Artificial Sequence
  Sense Oligo
caaagugcugggauuacag

SEQ ID NO: 32432 - RNA, 19 nt, Artificial Sequence
  Antisense Oligo
cuguaaucccagcacuuug

SEQ ID NO: 32433 - RNA, 19 nt, Artificial Sequence
  Sense Oligo
aaagugcugggauuacaga

SEQ ID NO: 32434 - RNA, 19 nt, Artificial Sequence
  Antisense Oligo
ucuguaaucccagcacuuu

SEQ ID NO: 32435 - RNA, 19 nt, Artificial Sequence
  Sense Oligo
cggccugauuuuauuacua

SEQ ID NO: 32436 - RNA, 19 nt, Artificial Sequence
  Antisense Oligo
uaguaauaaaaucaggccg

SEQ ID NO: 32437 - RNA, 19 nt, Artificial Sequence
  Sense Oligo
ggccugauuuuauuacuau

SEQ ID NO: 32438 - RNA, 19 nt, Artificial Sequence
  Antisense Oligo
auaguaauaaaaucaggcc

SEQ ID NO: 32439 - RNA, 19 nt, Artificial Sequence
  Sense Oligo
uaauauuacugcuccuugu

SEQ ID NO: 32440 - RNA, 19 nt, Artificial Sequence
  Antisense Oligo
acaaggagcaguaauauua

SEQ ID NO: 32441 - RNA, 19 nt, Artificial Sequence
  Sense Oligo
aauauuacugcuccuugua

SEQ ID NO: 32442 - RNA, 19 nt, Artificial Sequence
  Antisense Oligo
uacaaggagcaguaauauu

SEQ ID NO: 32443 - RNA, 19 nt, Artificial Sequence
  Sense Oligo
auuacugcuccuuguagaa

SEQ ID NO: 32444 - RNA, 19 nt, Artificial Sequence
  Antisense Oligo
uucuacaaggagcaguaau

SEQ ID NO: 32445 - RNA, 19 nt, Artificial Sequence
  Sense Oligo
gaauggccagcagugaauu

SEQ ID NO: 32446 - RNA, 19 nt, Artificial Sequence
  Antisense Oligo
aauucacugcuggccauuc

SEQ ID NO: 32447 - RNA, 19 nt, Artificial Sequence
  Sense Oligo
aauggccagcagugaauuc

SEQ ID NO: 32448 - RNA, 19 nt, Artificial Sequence
  Antisense Oligo
gaauucacugcuggccauu

SEQ ID NO: 32449 - RNA, 19 nt, Artificial Sequence
  Sense Oligo
auggccagcagugaauucu

SEQ ID NO: 32450 - RNA, 19 nt, Artificial Sequence
  Antisense Oligo
agaauucacugcuggccau

SEQ ID NO: 32451 - RNA, 19 nt, Artificial Sequence
  Sense Oligo
uggccagcagugaauucuu

SEQ ID NO: 32452 - RNA, 19 nt, Artificial Sequence
  Antisense Oligo
aagaauucacugcuggcca

SEQ ID NO: 32453 - RNA, 19 nt, Artificial Sequence
  Sense Oligo
gccagcagugaauucuuau

SEQ ID NO: 32454 - RNA, 19 nt, Artificial Sequence
  Antisense Oligo
auaagaauucacugcuggc

SEQ ID NO: 32455 - RNA, 19 nt, Artificial Sequence
  Sense Oligo
ucuuauuccguauucugaa

SEQ ID NO: 32456 - RNA, 19 nt, Artificial Sequence
  Antisense Oligo
uucagaauacggaauaaga

SEQ ID NO: 32457 - RNA, 19 nt, Artificial Sequence
  Sense Oligo
agucucacucuguugccca

SEQ ID NO: 32458 - RNA, 19 nt, Artificial Sequence
  Antisense Oligo
ugggcaacagagugagacu

SEQ ID NO: 32459 - RNA, 19 nt, Artificial Sequence
  Sense Oligo
gucucacucuguugcccag

SEQ ID NO: 32460 - RNA, 19 nt, Artificial Sequence
  Antisense Oligo
cugggcaacagagugagac

SEQ ID NO: 32461 - RNA, 19 nt, Artificial Sequence
  Sense Oligo
ucucacucuguugcccagg

SEQ ID NO: 32462 - RNA, 19 nt, Artificial Sequence
  Antisense Oligo
ccugggcaacagagugaga

SEQ ID NO: 32463 - RNA, 19 nt, Artificial Sequence
  Sense Oligo
cucacucuguugcccaggc

SEQ ID NO: 32464 - RNA, 19 nt, Artificial Sequence
  Antisense Oligo
gccugggcaacagagugag

SEQ ID NO: 32465 - RNA, 19 nt, Artificial Sequence
  Sense Oligo
ucacucuguugcccaggcu

SEQ ID NO: 32466 - RNA, 19 nt, Artificial Sequence
  Antisense Oligo
agccugggcaacagaguga

SEQ ID NO: 32467 - RNA, 19 nt, Artificial Sequence
  Sense Oligo
cacucuguugcccaggcug

SEQ ID NO: 32468 - RNA, 19 nt, Artificial Sequence
  Antisense Oligo
cagccugggcaacagagug

SEQ ID NO: 32469 - RNA, 19 nt, Artificial Sequence
  Sense Oligo
acucuguugcccaggcugg

SEQ ID NO: 32470 - RNA, 19 nt, Artificial Sequence
  Antisense Oligo
ccagccugggcaacagagu

SEQ ID NO: 32471 - RNA, 19 nt, Artificial Sequence
  Sense Oligo
cucuguugcccaggcugga

SEQ ID NO: 32472 - RNA, 19 nt, Artificial Sequence
  Antisense Oligo
uccagccugggcaacagag

SEQ ID NO: 32473 - RNA, 19 nt, Artificial Sequence
  Sense Oligo
ucuguugcccaggcuggag

SEQ ID NO: 32474 - RNA, 19 nt, Artificial Sequence
  Antisense Oligo
cuccagccugggcaacaga

SEQ ID NO: 32475 - RNA, 19 nt, Artificial Sequence
  Sense Oligo
uugcccaggcuggagugca

SEQ ID NO: 32476 - RNA, 19 nt, Artificial Sequence
  Antisense Oligo
ugcacuccagccugggcaa

SEQ ID NO: 32477 - RNA, 19 nt, Artificial Sequence
  Sense Oligo
cuggagugcaguggcguga

SEQ ID NO: 32478 - RNA, 19 nt, Artificial Sequence
  Antisense Oligo
ucacgccacugcacuccag

SEQ ID NO: 32479 - RNA, 19 nt, Artificial Sequence
  Sense Oligo
uggagugcaguggcgugau

SEQ ID NO: 32480 - RNA, 19 nt, Artificial Sequence
  Antisense Oligo
aucacgccacugcacucca

SEQ ID NO: 32481 - RNA, 19 nt, Artificial Sequence
  Sense Oligo
ggagugcaguggcgugauc

SEQ ID NO: 32482 - RNA, 19 nt, Artificial Sequence
  Antisense Oligo
gaucacgccacugcacucc

SEQ ID NO: 32483 - RNA, 19 nt, Artificial Sequence
  Sense Oligo
gagugcaguggcgugaucu

SEQ ID NO: 32484 - RNA, 19 nt, Artificial Sequence
  Antisense Oligo
agaucacgccacugcacuc

SEQ ID NO: 32485 - RNA, 19 nt, Artificial Sequence
  Sense Oligo
agugcaguggcgugaucuc

SEQ ID NO: 32486 - RNA, 19 nt, Artificial Sequence
  Antisense Oligo
gagaucacgccacugcacu

SEQ ID NO: 32487 - RNA, 19 nt, Artificial Sequence
  Sense Oligo
gugcaguggcgugaucucg

SEQ ID NO: 32488 - RNA, 19 nt, Artificial Sequence
  Antisense Oligo
cgagaucacgccacugcac

SEQ ID NO: 32489 - RNA, 19 nt, Artificial Sequence
  Sense Oligo
ugcaguggcgugaucucgg

SEQ ID NO: 32490 - RNA, 19 nt, Artificial Sequence
  Antisense Oligo
ccgagaucacgccacugca

SEQ ID NO: 32491 - RNA, 19 nt, Artificial Sequence
  Sense Oligo
caguggcgugaucucggcu

SEQ ID NO: 32492 - RNA, 19 nt, Artificial Sequence
  Antisense Oligo
agccgagaucacgccacug

SEQ ID NO: 32493 - RNA, 19 nt, Artificial Sequence
  Sense Oligo
aguggcgugaucucggcuc

SEQ ID NO: 32494 - RNA, 19 nt, Artificial Sequence
  Antisense Oligo
gagccgagaucacgccacu

SEQ ID NO: 32495 - RNA, 19 nt, Artificial Sequence
  Sense Oligo
guggcgugaucucggcuca

SEQ ID NO: 32496 - RNA, 19 nt, Artificial Sequence
  Antisense Oligo
ugagccgagaucacgccac

SEQ ID NO: 32497 - RNA, 19 nt, Artificial Sequence
  Sense Oligo
ugaucucggcucacugcaa

SEQ ID NO: 32498 - RNA, 19 nt, Artificial Sequence
  Antisense Oligo
uugcagugagccgagauca

SEQ ID NO: 32499 - RNA, 19 nt, Artificial Sequence
  Sense Oligo
cucggcucacugcaaucuc

SEQ ID NO: 32500 - RNA, 19 nt, Artificial Sequence
  Antisense Oligo
gagauugcagugagccgag

SEQ ID NO: 32501 - RNA, 19 nt, Artificial Sequence
  Sense Oligo
ucggcucacugcaaucucu

SEQ ID NO: 32502 - RNA, 19 nt, Artificial Sequence
  Antisense Oligo
agagauugcagugagccga

SEQ ID NO: 32503 - RNA, 19 nt, Artificial Sequence
  Sense Oligo
ucaagugauucuucugccu

SEQ ID NO: 32504 - RNA, 19 nt, Artificial Sequence
  Antisense Oligo
aggcagaagaaucacuuga

SEQ ID NO: 32505 - RNA, 19 nt, Artificial Sequence
  Sense Oligo
agccuccugaguagcuggg

SEQ ID NO: 32506 - RNA, 19 nt, Artificial Sequence
  Antisense Oligo
cccagcuacucaggaggcu

SEQ ID NO: 32507 - RNA, 19 nt, Artificial Sequence
  Sense Oligo
gccuccugaguagcuggga

SEQ ID NO: 32508 - RNA, 19 nt, Artificial Sequence
  Antisense Oligo
ucccagcuacucaggaggc

SEQ ID NO: 32509 - RNA, 19 nt, Artificial Sequence
  Sense Oligo
ccuccugaguagcugggau

SEQ ID NO: 32510 - RNA, 19 nt, Artificial Sequence
  Antisense Oligo
aucccagcuacucaggagg

SEQ ID NO: 32511 - RNA, 19 nt, Artificial Sequence
  Sense Oligo
cuccugaguagcugggauu

SEQ ID NO: 32512 - RNA, 19 nt, Artificial Sequence
  Antisense Oligo
aaucccagcuacucaggag

SEQ ID NO: 32513 - RNA, 19 nt, Artificial Sequence
  Sense Oligo
uccugaguagcugggauua

SEQ ID NO: 32514 - RNA, 19 nt, Artificial Sequence
  Antisense Oligo
uaaucccagcuacucagga

SEQ ID NO: 32515 - RNA, 19 nt, Artificial Sequence
  Sense Oligo
ccugaguagcugggauuac

SEQ ID NO: 32516 - RNA, 19 nt, Artificial Sequence
  Antisense Oligo
guaaucccagcuacucagg

SEQ ID NO: 32517 - RNA, 19 nt, Artificial Sequence
  Sense Oligo
cugaguagcugggauuaca

SEQ ID NO: 32518 - RNA, 19 nt, Artificial Sequence
  Antisense Oligo
uguaaucccagcuacucag

SEQ ID NO: 32519 - RNA, 19 nt, Artificial Sequence
  Sense Oligo
ugaguagcugggauuacag

SEQ ID NO: 32520 - RNA, 19 nt, Artificial Sequence
  Antisense Oligo
cuguaaucccagcuacuca

SEQ ID NO: 32521 - RNA, 19 nt, Artificial Sequence
  Sense Oligo
uagcugggauuacaggauu

SEQ ID NO: 32522 - RNA, 19 nt, Artificial Sequence
  Antisense Oligo
aauccuguaaucccagcua

SEQ ID NO: 32523 - RNA, 19 nt, Artificial Sequence
  Sense Oligo
agcugggauuacaggauua

SEQ ID NO: 32524 - RNA, 19 nt, Artificial Sequence
  Antisense Oligo
uaauccuguaaucccagcu

SEQ ID NO: 32525 - RNA, 19 nt, Artificial Sequence
  Sense Oligo
gcugggauuacaggauuac

SEQ ID NO: 32526 - RNA, 19 nt, Artificial Sequence
  Antisense Oligo
guaauccuguaaucccagc

SEQ ID NO: 32527 - RNA, 19 nt, Artificial Sequence
  Sense Oligo
acaggauuacaggcaugug

SEQ ID NO: 32528 - RNA, 19 nt, Artificial Sequence
  Antisense Oligo
cacaugccuguaauccugu

SEQ ID NO: 32529 - RNA, 19 nt, Artificial Sequence
  Sense Oligo
caggauuacaggcaugugc

SEQ ID NO: 32530 - RNA, 19 nt, Artificial Sequence
  Antisense Oligo
gcacaugccuguaauccug

SEQ ID NO: 32531 - RNA, 19 nt, Artificial Sequence
  Sense Oligo
aggauuacaggcaugugcc

SEQ ID NO: 32532 - RNA, 19 nt, Artificial Sequence
  Antisense Oligo
ggcacaugccuguaauccu

SEQ ID NO: 32533 - RNA, 19 nt, Artificial Sequence
  Sense Oligo
ggauuacaggcaugugcca

SEQ ID NO: 32534 - RNA, 19 nt, Artificial Sequence
  Antisense Oligo
uggcacaugccuguaaucc

SEQ ID NO: 32535 - RNA, 19 nt, Artificial Sequence
  Sense Oligo
gauuacaggcaugugccac

SEQ ID NO: 32536 - RNA, 19 nt, Artificial Sequence
  Antisense Oligo
guggcacaugccuguaauc

SEQ ID NO: 32537 - RNA, 19 nt, Artificial Sequence
  Sense Oligo
auuacaggcaugugccacc

SEQ ID NO: 32538 - RNA, 19 nt, Artificial Sequence
  Antisense Oligo
gguggcacaugccuguaau

SEQ ID NO: 32539 - RNA, 19 nt, Artificial Sequence
  Sense Oligo
uuacaggcaugugccacca

SEQ ID NO: 32540 - RNA, 19 nt, Artificial Sequence
  Antisense Oligo
ugguggcacaugccuguaa

SEQ ID NO: 32541 - RNA, 19 nt, Artificial Sequence
  Sense Oligo
uacaggcaugugccaccau

SEQ ID NO: 32542 - RNA, 19 nt, Artificial Sequence
  Antisense Oligo
augguggcacaugccugua

SEQ ID NO: 32543 - RNA, 19 nt, Artificial Sequence
  Sense Oligo
cguguuggccaggcugguu

SEQ ID NO: 32544 - RNA, 19 nt, Artificial Sequence
  Antisense Oligo
aaccagccuggccaacacg

SEQ ID NO: 32545 - RNA, 19 nt, Artificial Sequence
  Sense Oligo
guguuggccaggcugguug

SEQ ID NO: 32546 - RNA, 19 nt, Artificial Sequence
  Antisense Oligo
caaccagccuggccaacac

SEQ ID NO: 32547 - RNA, 19 nt, Artificial Sequence
  Sense Oligo
uguuggccaggcugguugc

SEQ ID NO: 32548 - RNA, 19 nt, Artificial Sequence
  Antisense Oligo
gcaaccagccuggccaaca

SEQ ID NO: 32549 - RNA, 19 nt, Artificial Sequence
  Sense Oligo
guuggccaggcugguugca

SEQ ID NO: 32550 - RNA, 19 nt, Artificial Sequence
  Antisense Oligo
ugcaaccagccuggccaac

SEQ ID NO: 32551 - RNA, 19 nt, Artificial Sequence
  Sense Oligo
uuggccaggcugguugcaa

SEQ ID NO: 32552 - RNA, 19 nt, Artificial Sequence
  Antisense Oligo
uugcaaccagccuggccaa

SEQ ID NO: 32553 - RNA, 19 nt, Artificial Sequence
  Sense Oligo
acuucuaaccucaacugau

SEQ ID NO: 32554 - RNA, 19 nt, Artificial Sequence
  Antisense Oligo
aucaguugagguuagaagu

SEQ ID NO: 32555 - RNA, 19 nt, Artificial Sequence
  Sense Oligo
ucaacugauccaccugccu

SEQ ID NO: 32556 - RNA, 19 nt, Artificial Sequence
  Antisense Oligo
aggcagguggaucaguuga

SEQ ID NO: 32557 - RNA, 19 nt, Artificial Sequence
  Sense Oligo
ccucagccucccaaagugc

SEQ ID NO: 32558 - RNA, 19 nt, Artificial Sequence
  Antisense Oligo
gcacuuugggaggcugagg

SEQ ID NO: 32559 - RNA, 19 nt, Artificial Sequence
  Sense Oligo
cucagccucccaaagugcu

SEQ ID NO: 32560 - RNA, 19 nt, Artificial Sequence
  Antisense Oligo
agcacuuugggaggcugag

SEQ ID NO: 32561 - RNA, 19 nt, Artificial Sequence
  Sense Oligo
gauucaggcgugagccacc

SEQ ID NO: 32562 - RNA, 19 nt, Artificial Sequence
  Antisense Oligo
gguggcucacgccugaauc

SEQ ID NO: 32563 - RNA, 19 nt, Artificial Sequence
  Sense Oligo
auucaggcgugagccacca

SEQ ID NO: 32564 - RNA, 19 nt, Artificial Sequence
  Antisense Oligo
ugguggcucacgccugaau

SEQ ID NO: 32565 - RNA, 19 nt, Artificial Sequence
  Sense Oligo
uucaggcgugagccaccac

SEQ ID NO: 32566 - RNA, 19 nt, Artificial Sequence
  Antisense Oligo
gugguggcucacgccugaa

SEQ ID NO: 32567 - RNA, 19 nt, Artificial Sequence
  Sense Oligo
uaaguuaauucucaguagg

SEQ ID NO: 32568 - RNA, 19 nt, Artificial Sequence
  Antisense Oligo
ccuacugagaauuaacuua

SEQ ID NO: 32569 - RNA, 19 nt, Artificial Sequence
  Sense Oligo
aaguuaauucucaguaggu

SEQ ID NO: 32570 - RNA, 19 nt, Artificial Sequence
  Antisense Oligo
accuacugagaauuaacuu

SEQ ID NO: 32571 - RNA, 19 nt, Artificial Sequence
  Sense Oligo
aguuaauucucaguagguu

SEQ ID NO: 32572 - RNA, 19 nt, Artificial Sequence
  Antisense Oligo
aaccuacugagaauuaacu

SEQ ID NO: 32573 - RNA, 19 nt, Artificial Sequence
  Sense Oligo
guuaauucucaguagguug

SEQ ID NO: 32574 - RNA, 19 nt, Artificial Sequence
  Antisense Oligo
caaccuacugagaauuaac

SEQ ID NO: 32575 - RNA, 19 nt, Artificial Sequence
  Sense Oligo
uaauucucaguagguuguu

SEQ ID NO: 32576 - RNA, 19 nt, Artificial Sequence
  Antisense Oligo
aacaaccuacugagaauua

SEQ ID NO: 32577 - RNA, 19 nt, Artificial Sequence
  Sense Oligo
aauucucaguagguuguuc

SEQ ID NO: 32578 - RNA, 19 nt, Artificial Sequence
  Antisense Oligo
gaacaaccuacugagaauu

SEQ ID NO: 32579 - RNA, 19 nt, Artificial Sequence
  Sense Oligo
auucucaguagguuguucu

SEQ ID NO: 32580 - RNA, 19 nt, Artificial Sequence
  Antisense Oligo
agaacaaccuacugagaau

SEQ ID NO: 32581 - RNA, 19 nt, Artificial Sequence
  Sense Oligo
uucucaguagguuguucug

SEQ ID NO: 32582 - RNA, 19 nt, Artificial Sequence
  Antisense Oligo
cagaacaaccuacugagaa

SEQ ID NO: 32583 - RNA, 19 nt, Artificial Sequence
  Sense Oligo
ucucaguagguuguucugu

SEQ ID NO: 32584 - RNA, 19 nt, Artificial Sequence
  Antisense Oligo
acagaacaaccuacugaga

SEQ ID NO: 32585 - RNA, 19 nt, Artificial Sequence
  Sense Oligo
cucaguagguuguucugua

SEQ ID NO: 32586 - RNA, 19 nt, Artificial Sequence
  Antisense Oligo
uacagaacaaccuacugag

SEQ ID NO: 32587 - RNA, 19 nt, Artificial Sequence
  Sense Oligo
ucaguagguuguucuguac

SEQ ID NO: 32588 - RNA, 19 nt, Artificial Sequence
  Antisense Oligo
guacagaacaaccuacuga

SEQ ID NO: 32589 - RNA, 19 nt, Artificial Sequence
  Sense Oligo
agguuguucuguacuuuuc

SEQ ID NO: 32590 - RNA, 19 nt, Artificial Sequence
  Antisense Oligo
gaaaaguacagaacaaccu

SEQ ID NO: 32591 - RNA, 19 nt, Artificial Sequence
  Sense Oligo
gguuguucuguacuuuuca

SEQ ID NO: 32592 - RNA, 19 nt, Artificial Sequence
  Antisense Oligo
ugaaaaguacagaacaacc

SEQ ID NO: 32593 - RNA, 19 nt, Artificial Sequence
  Sense Oligo
guucuguacuuuucauuug

SEQ ID NO: 32594 - RNA, 19 nt, Artificial Sequence
  Antisense Oligo
caaaugaaaaguacagaac

SEQ ID NO: 32595 - RNA, 19 nt, Artificial Sequence
  Sense Oligo
uuuucauuugauucacugc

SEQ ID NO: 32596 - RNA, 19 nt, Artificial Sequence
  Antisense Oligo
gcagugaaucaaaugaaaa

SEQ ID NO: 32597 - RNA, 19 nt, Artificial Sequence
  Sense Oligo
uuucauuugauucacugca

SEQ ID NO: 32598 - RNA, 19 nt, Artificial Sequence
  Antisense Oligo
ugcagugaaucaaaugaaa

SEQ ID NO: 32599 - RNA, 19 nt, Artificial Sequence
  Sense Oligo
uucauuugauucacugcau

SEQ ID NO: 32600 - RNA, 19 nt, Artificial Sequence
  Antisense Oligo
augcagugaaucaaaugaa

SEQ ID NO: 32601 - RNA, 19 nt, Artificial Sequence
  Sense Oligo
ucauuugauucacugcaua

SEQ ID NO: 32602 - RNA, 19 nt, Artificial Sequence
  Antisense Oligo
uaugcagugaaucaaauga

SEQ ID NO: 32603 - RNA, 19 nt, Artificial Sequence
  Sense Oligo
cauuugauucacugcauau

SEQ ID NO: 32604 - RNA, 19 nt, Artificial Sequence
  Antisense Oligo
auaugcagugaaucaaaug

SEQ ID NO: 32605 - RNA, 19 nt, Artificial Sequence
  Sense Oligo
uuguuuuccacauagccuu

SEQ ID NO: 32606 - RNA, 19 nt, Artificial Sequence
  Antisense Oligo
aaggcuauguggaaaacaa

SEQ ID NO: 32607 - RNA, 19 nt, Artificial Sequence
  Sense Oligo
uguuuuccacauagccuuu

SEQ ID NO: 32608 - RNA, 19 nt, Artificial Sequence
  Antisense Oligo
aaaggcuauguggaaaaca

SEQ ID NO: 32609 - RNA, 19 nt, Artificial Sequence
  Sense Oligo
guuuuccacauagccuuua

SEQ ID NO: 32610 - RNA, 19 nt, Artificial Sequence
  Antisense Oligo
uaaaggcuauguggaaaac

SEQ ID NO: 32611 - RNA, 19 nt, Artificial Sequence
  Sense Oligo
uccacauagccuuuauuuu

SEQ ID NO: 32612 - RNA, 19 nt, Artificial Sequence
  Antisense Oligo
aaaauaaaggcuaugugga

SEQ ID NO: 32613 - RNA, 19 nt, Artificial Sequence
  Sense Oligo
ccacauagccuuuauuuua

SEQ ID NO: 32614 - RNA, 19 nt, Artificial Sequence
  Antisense Oligo
uaaaauaaaggcuaugugg

SEQ ID NO: 32615 - RNA, 19 nt, Artificial Sequence
  Sense Oligo
acagggccucacuagguuc

SEQ ID NO: 32616 - RNA, 19 nt, Artificial Sequence
  Antisense Oligo
gaaccuagugaggcccugu

SEQ ID NO: 32617 - RNA, 19 nt, Artificial Sequence
  Sense Oligo
cagggccucacuagguucc

SEQ ID NO: 32618 - RNA, 19 nt, Artificial Sequence
  Antisense Oligo
ggaaccuagugaggcccug

SEQ ID NO: 32619 - RNA, 19 nt, Artificial Sequence
  Sense Oligo
ucaagcuccugggcucaag

SEQ ID NO: 32620 - RNA, 19 nt, Artificial Sequence
  Antisense Oligo
cuugagcccaggagcuuga

SEQ ID NO: 32621 - RNA, 19 nt, Artificial Sequence
  Sense Oligo
caagcuccugggcucaagu

SEQ ID NO: 32622 - RNA, 19 nt, Artificial Sequence
  Antisense Oligo
acuugagcccaggagcuug

SEQ ID NO: 32623 - RNA, 19 nt, Artificial Sequence
  Sense Oligo
aagcuccugggcucaagug

SEQ ID NO: 32624 - RNA, 19 nt, Artificial Sequence
  Antisense Oligo
cacuugagcccaggagcuu

SEQ ID NO: 32625 - RNA, 19 nt, Artificial Sequence
  Sense Oligo
agcuccugggcucaaguga

SEQ ID NO: 32626 - RNA, 19 nt, Artificial Sequence
  Antisense Oligo
ucacuugagcccaggagcu

SEQ ID NO: 32627 - RNA, 19 nt, Artificial Sequence
  Sense Oligo
ccugggcucaagugauccu

SEQ ID NO: 32628 - RNA, 19 nt, Artificial Sequence
  Antisense Oligo
aggaucacuugagcccagg

SEQ ID NO: 32629 - RNA, 19 nt, Artificial Sequence
  Sense Oligo
cugggcucaagugauccuc

SEQ ID NO: 32630 - RNA, 19 nt, Artificial Sequence
  Antisense Oligo
gaggaucacuugagcccag

SEQ ID NO: 32631 - RNA, 19 nt, Artificial Sequence
  Sense Oligo
caagugauccucccgaguc

SEQ ID NO: 32632 - RNA, 19 nt, Artificial Sequence
  Antisense Oligo
gacucgggaggaucacuug

SEQ ID NO: 32633 - RNA, 19 nt, Artificial Sequence
  Sense Oligo
aagugauccucccgaguca

SEQ ID NO: 32634 - RNA, 19 nt, Artificial Sequence
  Antisense Oligo
ugacucgggaggaucacuu

SEQ ID NO: 32635 - RNA, 19 nt, Artificial Sequence
  Sense Oligo
aaguauugggauucaggug

SEQ ID NO: 32636 - RNA, 19 nt, Artificial Sequence
  Antisense Oligo
caccugaaucccaauacuu

SEQ ID NO: 32637 - RNA, 19 nt, Artificial Sequence
  Sense Oligo
aguauugggauucaggugu

SEQ ID NO: 32638 - RNA, 19 nt, Artificial Sequence
  Antisense Oligo
acaccugaaucccaauacu

SEQ ID NO: 32639 - RNA, 19 nt, Artificial Sequence
  Sense Oligo
guauugggauucaggugug

SEQ ID NO: 32640 - RNA, 19 nt, Artificial Sequence
  Antisense Oligo
cacaccugaaucccaauac

SEQ ID NO: 32641 - RNA, 19 nt, Artificial Sequence
  Sense Oligo
uauugggauucagguguga

SEQ ID NO: 32642 - RNA, 19 nt, Artificial Sequence
  Antisense Oligo
ucacaccugaaucccaaua

SEQ ID NO: 32643 - RNA, 19 nt, Artificial Sequence
  Sense Oligo
accacgccugcccucaagu

SEQ ID NO: 32644 - RNA, 19 nt, Artificial Sequence
  Antisense Oligo
acuugagggcaggcguggu

SEQ ID NO: 32645 - RNA, 19 nt, Artificial Sequence
  Sense Oligo
acgccugcccucaaguagu

SEQ ID NO: 32646 - RNA, 19 nt, Artificial Sequence
  Antisense Oligo
acuacuugagggcaggcgu

SEQ ID NO: 32647 - RNA, 19 nt, Artificial Sequence
  Sense Oligo
cgccugcccucaaguagua

SEQ ID NO: 32648 - RNA, 19 nt, Artificial Sequence
  Antisense Oligo
uacuacuugagggcaggcg

SEQ ID NO: 32649 - RNA, 19 nt, Artificial Sequence
  Sense Oligo
gccugcccucaaguaguau

SEQ ID NO: 32650 - RNA, 19 nt, Artificial Sequence
  Antisense Oligo
auacuacuugagggcaggc

SEQ ID NO: 32651 - RNA, 19 nt, Artificial Sequence
  Sense Oligo
gcccucaaguaguauuuaa

SEQ ID NO: 32652 - RNA, 19 nt, Artificial Sequence
  Antisense Oligo
uuaaauacuacuugagggc

SEQ ID NO: 32653 - RNA, 19 nt, Artificial Sequence
  Sense Oligo
cccucaaguaguauuuaaa

SEQ ID NO: 32654 - RNA, 19 nt, Artificial Sequence
  Antisense Oligo
uuuaaauacuacuugaggg

SEQ ID NO: 32655 - RNA, 19 nt, Artificial Sequence
  Sense Oligo
aauucgggacuguuucugu

SEQ ID NO: 32656 - RNA, 19 nt, Artificial Sequence
  Antisense Oligo
acagaaacagucccgaauu

SEQ ID NO: 32657 - RNA, 19 nt, Artificial Sequence
  Sense Oligo
auucgggacuguuucuguc

SEQ ID NO: 32658 - RNA, 19 nt, Artificial Sequence
  Antisense Oligo
gacagaaacagucccgaau

SEQ ID NO: 32659 - RNA, 19 nt, Artificial Sequence
  Sense Oligo
uucugucccuccagcauug

SEQ ID NO: 32660 - RNA, 19 nt, Artificial Sequence
  Antisense Oligo
caaugcuggagggacagaa

SEQ ID NO: 32661 - RNA, 19 nt, Artificial Sequence
  Sense Oligo
ucugucccuccagcauugg

SEQ ID NO: 32662 - RNA, 19 nt, Artificial Sequence
  Antisense Oligo
ccaaugcuggagggacaga

SEQ ID NO: 32663 - RNA, 19 nt, Artificial Sequence
  Sense Oligo
cugucccuccagcauuggu

SEQ ID NO: 32664 - RNA, 19 nt, Artificial Sequence
  Antisense Oligo
accaaugcuggagggacag

SEQ ID NO: 32665 - RNA, 19 nt, Artificial Sequence
  Sense Oligo
ugucccuccagcauugguu

SEQ ID NO: 32666 - RNA, 19 nt, Artificial Sequence
  Antisense Oligo
aaccaaugcuggagggaca

SEQ ID NO: 32667 - RNA, 19 nt, Artificial Sequence
  Sense Oligo
gucccuccagcauugguuu

SEQ ID NO: 32668 - RNA, 19 nt, Artificial Sequence
  Antisense Oligo
aaaccaaugcuggagggac

SEQ ID NO: 32669 - RNA, 19 nt, Artificial Sequence
  Sense Oligo
ucccuccagcauugguuuc

SEQ ID NO: 32670 - RNA, 19 nt, Artificial Sequence
  Antisense Oligo
gaaaccaaugcuggaggga

SEQ ID NO: 32671 - RNA, 19 nt, Artificial Sequence
  Sense Oligo
cccuccagcauugguuucc

SEQ ID NO: 32672 - RNA, 19 nt, Artificial Sequence
  Antisense Oligo
ggaaaccaaugcuggaggg

SEQ ID NO: 32673 - RNA, 19 nt, Artificial Sequence
  Sense Oligo
cauugguuuccuccauuuu

SEQ ID NO: 32674 - RNA, 19 nt, Artificial Sequence
  Antisense Oligo
aaaauggaggaaaccaaug

SEQ ID NO: 32675 - RNA, 19 nt, Artificial Sequence
  Sense Oligo
auugguuuccuccauuuuc

SEQ ID NO: 32676 - RNA, 19 nt, Artificial Sequence
  Antisense Oligo
gaaaauggaggaaaccaau

SEQ ID NO: 32677 - RNA, 19 nt, Artificial Sequence
  Sense Oligo
uugguuuccuccauuuucc

SEQ ID NO: 32678 - RNA, 19 nt, Artificial Sequence
  Antisense Oligo
ggaaaauggaggaaaccaa

SEQ ID NO: 32679 - RNA, 19 nt, Artificial Sequence
  Sense Oligo
uuccuccauuuucccucac

SEQ ID NO: 32680 - RNA, 19 nt, Artificial Sequence
  Antisense Oligo
gugagggaaaauggaggaa

SEQ ID NO: 32681 - RNA, 19 nt, Artificial Sequence
  Sense Oligo
uuucccucacugaucucac

SEQ ID NO: 32682 - RNA, 19 nt, Artificial Sequence
  Antisense Oligo
gugagaucagugagggaaa

SEQ ID NO: 32683 - RNA, 19 nt, Artificial Sequence
  Sense Oligo
uucccucacugaucucacu

SEQ ID NO: 32684 - RNA, 19 nt, Artificial Sequence
  Antisense Oligo
agugagaucagugagggaa

SEQ ID NO: 32685 - RNA, 19 nt, Artificial Sequence
  Sense Oligo
ucccucacugaucucacug

SEQ ID NO: 32686 - RNA, 19 nt, Artificial Sequence
  Antisense Oligo
cagugagaucagugaggga

SEQ ID NO: 32687 - RNA, 19 nt, Artificial Sequence
  Sense Oligo
cccucacugaucucacugc

SEQ ID NO: 32688 - RNA, 19 nt, Artificial Sequence
  Antisense Oligo
gcagugagaucagugaggg

SEQ ID NO: 32689 - RNA, 19 nt, Artificial Sequence
  Sense Oligo
ccucacugaucucacugcg

SEQ ID NO: 32690 - RNA, 19 nt, Artificial Sequence
  Antisense Oligo
cgcagugagaucagugagg

SEQ ID NO: 32691 - RNA, 19 nt, Artificial Sequence
  Sense Oligo
cucacugaucucacugcgu

SEQ ID NO: 32692 - RNA, 19 nt, Artificial Sequence
  Antisense Oligo
acgcagugagaucagugag

SEQ ID NO: 32693 - RNA, 19 nt, Artificial Sequence
  Sense Oligo
ucacugaucucacugcguc

SEQ ID NO: 32694 - RNA, 19 nt, Artificial Sequence
  Antisense Oligo
gacgcagugagaucaguga

SEQ ID NO: 32695 - RNA, 19 nt, Artificial Sequence
  Sense Oligo
cacugaucucacugcgucu

SEQ ID NO: 32696 - RNA, 19 nt, Artificial Sequence
  Antisense Oligo
agacgcagugagaucagug

SEQ ID NO: 32697 - RNA, 19 nt, Artificial Sequence
  Sense Oligo
acugaucucacugcgucuc

SEQ ID NO: 32698 - RNA, 19 nt, Artificial Sequence
  Antisense Oligo
gagacgcagugagaucagu

SEQ ID NO: 32699 - RNA, 19 nt, Artificial Sequence
  Sense Oligo
cugaucucacugcgucucu

SEQ ID NO: 32700 - RNA, 19 nt, Artificial Sequence
  Antisense Oligo
agagacgcagugagaucag

SEQ ID NO: 32701 - RNA, 19 nt, Artificial Sequence
  Sense Oligo
ugaucucacugcgucucuu

SEQ ID NO: 32702 - RNA, 19 nt, Artificial Sequence
  Antisense Oligo
aagagacgcagugagauca

SEQ ID NO: 32703 - RNA, 19 nt, Artificial Sequence
  Sense Oligo
gaucucacugcgucucuuu

SEQ ID NO: 32704 - RNA, 19 nt, Artificial Sequence
  Antisense Oligo
aaagagacgcagugagauc

SEQ ID NO: 32705 - RNA, 19 nt, Artificial Sequence
  Sense Oligo
aucucacugcgucucuuuu

SEQ ID NO: 32706 - RNA, 19 nt, Artificial Sequence
  Antisense Oligo
aaaagagacgcagugagau

SEQ ID NO: 32707 - RNA, 19 nt, Artificial Sequence
  Sense Oligo
ucucacugcgucucuuuuc

SEQ ID NO: 32708 - RNA, 19 nt, Artificial Sequence
  Antisense Oligo
gaaaagagacgcagugaga

SEQ ID NO: 32709 - RNA, 19 nt, Artificial Sequence
  Sense Oligo
cucacugcgucucuuuucu

SEQ ID NO: 32710 - RNA, 19 nt, Artificial Sequence
  Antisense Oligo
agaaaagagacgcagugag

SEQ ID NO: 32711 - RNA, 19 nt, Artificial Sequence
  Sense Oligo
gucccuauuucucuuaugc

SEQ ID NO: 32712 - RNA, 19 nt, Artificial Sequence
  Antisense Oligo
gcauaagagaaauagggac

SEQ ID NO: 32713 - RNA, 19 nt, Artificial Sequence
  Sense Oligo
auuucucuuaugcaggagu

SEQ ID NO: 32714 - RNA, 19 nt, Artificial Sequence
  Antisense Oligo
acuccugcauaagagaaau

SEQ ID NO: 32715 - RNA, 19 nt, Artificial Sequence
  Sense Oligo
uuucucuuaugcaggaguu

SEQ ID NO: 32716 - RNA, 19 nt, Artificial Sequence
  Antisense Oligo
aacuccugcauaagagaaa

SEQ ID NO: 32717 - RNA, 19 nt, Artificial Sequence
  Sense Oligo
uucucuuaugcaggaguuc

SEQ ID NO: 32718 - RNA, 19 nt, Artificial Sequence
  Antisense Oligo
gaacuccugcauaagagaa

SEQ ID NO: 32719 - RNA, 19 nt, Artificial Sequence
  Sense Oligo
ucucuuaugcaggaguucc

SEQ ID NO: 32720 - RNA, 19 nt, Artificial Sequence
  Antisense Oligo
ggaacuccugcauaagaga

SEQ ID NO: 32721 - RNA, 19 nt, Artificial Sequence
  Sense Oligo
uuaugcaggaguucccuac

SEQ ID NO: 32722 - RNA, 19 nt, Artificial Sequence
  Antisense Oligo
guagggaacuccugcauaa

SEQ ID NO: 32723 - RNA, 19 nt, Artificial Sequence
  Sense Oligo
uaugcaggaguucccuacu

SEQ ID NO: 32724 - RNA, 19 nt, Artificial Sequence
  Antisense Oligo
aguagggaacuccugcaua

SEQ ID NO: 32725 - RNA, 19 nt, Artificial Sequence
  Sense Oligo
augcaggaguucccuacuu

SEQ ID NO: 32726 - RNA, 19 nt, Artificial Sequence
  Antisense Oligo
aaguagggaacuccugcau

SEQ ID NO: 32727 - RNA, 19 nt, Artificial Sequence
  Sense Oligo
agcauuugcugagcauaga

SEQ ID NO: 32728 - RNA, 19 nt, Artificial Sequence
  Antisense Oligo
ucuaugcucagcaaaugcu

SEQ ID NO: 32729 - RNA, 19 nt, Artificial Sequence
  Sense Oligo
gcauuugcugagcauagac

SEQ ID NO: 32730 - RNA, 19 nt, Artificial Sequence
  Antisense Oligo
gucuaugcucagcaaaugc

SEQ ID NO: 32731 - RNA, 19 nt, Artificial Sequence
  Sense Oligo
cauuugcugagcauagacg

SEQ ID NO: 32732 - RNA, 19 nt, Artificial Sequence
  Antisense Oligo
cgucuaugcucagcaaaug

SEQ ID NO: 32733 - RNA, 19 nt, Artificial Sequence
  Sense Oligo
auuugcugagcauagacga

SEQ ID NO: 32734 - RNA, 19 nt, Artificial Sequence
  Antisense Oligo
ucgucuaugcucagcaaau

SEQ ID NO: 32735 - RNA, 19 nt, Artificial Sequence
  Sense Oligo
uuugcugagcauagacgag

SEQ ID NO: 32736 - RNA, 19 nt, Artificial Sequence
  Antisense Oligo
cucgucuaugcucagcaaa

SEQ ID NO: 32737 - RNA, 19 nt, Artificial Sequence
  Sense Oligo
uugcugagcauagacgagc

SEQ ID NO: 32738 - RNA, 19 nt, Artificial Sequence
  Antisense Oligo
gcucgucuaugcucagcaa

SEQ ID NO: 32739 - RNA, 19 nt, Artificial Sequence
  Sense Oligo
ugcugagcauagacgagcc

SEQ ID NO: 32740 - RNA, 19 nt, Artificial Sequence
  Antisense Oligo
ggcucgucuaugcucagca

SEQ ID NO: 32741 - RNA, 19 nt, Artificial Sequence
  Sense Oligo
gcugagcauagacgagccu

SEQ ID NO: 32742 - RNA, 19 nt, Artificial Sequence
  Antisense Oligo
aggcucgucuaugcucagc

SEQ ID NO: 32743 - RNA, 19 nt, Artificial Sequence
  Sense Oligo
agcauagacgagccucucu

SEQ ID NO: 32744 - RNA, 19 nt, Artificial Sequence
  Antisense Oligo
agagaggcucgucuaugcu

SEQ ID NO: 32745 - RNA, 19 nt, Artificial Sequence
  Sense Oligo
gcauagacgagccucucuu

SEQ ID NO: 32746 - RNA, 19 nt, Artificial Sequence
  Antisense Oligo
aagagaggcucgucuaugc

SEQ ID NO: 32747 - RNA, 19 nt, Artificial Sequence
  Sense Oligo
cauagacgagccucucuuc

SEQ ID NO: 32748 - RNA, 19 nt, Artificial Sequence
  Antisense Oligo
gaagagaggcucgucuaug

SEQ ID NO: 32749 - RNA, 19 nt, Artificial Sequence
  Sense Oligo
gacgagccucucuuccggu

SEQ ID NO: 32750 - RNA, 19 nt, Artificial Sequence
  Antisense Oligo
accggaagagaggcucguc

SEQ ID NO: 32751 - RNA, 19 nt, Artificial Sequence
  Sense Oligo
acgagccucucuuccgguc

SEQ ID NO: 32752 - RNA, 19 nt, Artificial Sequence
  Antisense Oligo
gaccggaagagaggcucgu

SEQ ID NO: 32753 - RNA, 19 nt, Artificial Sequence
  Sense Oligo
gagccucucuuccgguccu

SEQ ID NO: 32754 - RNA, 19 nt, Artificial Sequence
  Antisense Oligo
aggaccggaagagaggcuc

SEQ ID NO: 32755 - RNA, 19 nt, Artificial Sequence
  Sense Oligo
agccucucuuccgguccug

SEQ ID NO: 32756 - RNA, 19 nt, Artificial Sequence
  Antisense Oligo
caggaccggaagagaggcu

SEQ ID NO: 32757 - RNA, 19 nt, Artificial Sequence
  Sense Oligo
ucucuuccgguccugguuu

SEQ ID NO: 32758 - RNA, 19 nt, Artificial Sequence
  Antisense Oligo
aaaccaggaccggaagaga

SEQ ID NO: 32759 - RNA, 19 nt, Artificial Sequence
  Sense Oligo
cucuuccgguccugguuua

SEQ ID NO: 32760 - RNA, 19 nt, Artificial Sequence
  Antisense Oligo
uaaaccaggaccggaagag

SEQ ID NO: 32761 - RNA, 19 nt, Artificial Sequence
  Sense Oligo
ucuuccgguccugguuuag

SEQ ID NO: 32762 - RNA, 19 nt, Artificial Sequence
  Antisense Oligo
cuaaaccaggaccggaaga

SEQ ID NO: 32763 - RNA, 19 nt, Artificial Sequence
  Sense Oligo
cuuccgguccugguuuagu

SEQ ID NO: 32764 - RNA, 19 nt, Artificial Sequence
  Antisense Oligo
acuaaaccaggaccggaag

SEQ ID NO: 32765 - RNA, 19 nt, Artificial Sequence
  Sense Oligo
uuccgguccugguuuaguc

SEQ ID NO: 32766 - RNA, 19 nt, Artificial Sequence
  Antisense Oligo
gacuaaaccaggaccggaa

SEQ ID NO: 32767 - RNA, 19 nt, Artificial Sequence
  Sense Oligo
ccgguccugguuuagucug

SEQ ID NO: 32768 - RNA, 19 nt, Artificial Sequence
  Antisense Oligo
cagacuaaaccaggaccgg

SEQ ID NO: 32769 - RNA, 19 nt, Artificial Sequence
  Sense Oligo
cgguccugguuuagucugc

SEQ ID NO: 32770 - RNA, 19 nt, Artificial Sequence
  Antisense Oligo
gcagacuaaaccaggaccg

SEQ ID NO: 32771 - RNA, 19 nt, Artificial Sequence
  Sense Oligo
gguccugguuuagucugcu

SEQ ID NO: 32772 - RNA, 19 nt, Artificial Sequence
  Antisense Oligo
agcagacuaaaccaggacc

SEQ ID NO: 32773 - RNA, 19 nt, Artificial Sequence
  Sense Oligo
guccugguuuagucugcua

SEQ ID NO: 32774 - RNA, 19 nt, Artificial Sequence
  Antisense Oligo
uagcagacuaaaccaggac

SEQ ID NO: 32775 - RNA, 19 nt, Artificial Sequence
  Sense Oligo
uccugguuuagucugcuac

SEQ ID NO: 32776 - RNA, 19 nt, Artificial Sequence
  Antisense Oligo
guagcagacuaaaccagga

SEQ ID NO: 32777 - RNA, 19 nt, Artificial Sequence
  Sense Oligo
ccugguuuagucugcuacc

SEQ ID NO: 32778 - RNA, 19 nt, Artificial Sequence
  Antisense Oligo
gguagcagacuaaaccagg

SEQ ID NO: 32779 - RNA, 19 nt, Artificial Sequence
  Sense Oligo
uuuagucugcuaccucuga

SEQ ID NO: 32780 - RNA, 19 nt, Artificial Sequence
  Antisense Oligo
ucagagguagcagacuaaa

SEQ ID NO: 32781 - RNA, 19 nt, Artificial Sequence
  Sense Oligo
uuagucugcuaccucugag

SEQ ID NO: 32782 - RNA, 19 nt, Artificial Sequence
  Antisense Oligo
cucagagguagcagacuaa

SEQ ID NO: 32783 - RNA, 19 nt, Artificial Sequence
  Sense Oligo
accucugagucaccugguu

SEQ ID NO: 32784 - RNA, 19 nt, Artificial Sequence
  Antisense Oligo
aaccaggugacucagaggu

SEQ ID NO: 32785 - RNA, 19 nt, Artificial Sequence
  Sense Oligo
ccucugagucaccugguua

SEQ ID NO: 32786 - RNA, 19 nt, Artificial Sequence
  Antisense Oligo
uaaccaggugacucagagg

SEQ ID NO: 32787 - RNA, 19 nt, Artificial Sequence
  Sense Oligo
ucugagucaccugguuaug

SEQ ID NO: 32788 - RNA, 19 nt, Artificial Sequence
  Antisense Oligo
cauaaccaggugacucaga

SEQ ID NO: 32789 - RNA, 19 nt, Artificial Sequence
  Sense Oligo
cugagucaccugguuaugu

SEQ ID NO: 32790 - RNA, 19 nt, Artificial Sequence
  Antisense Oligo
acauaaccaggugacucag

SEQ ID NO: 32791 - RNA, 19 nt, Artificial Sequence
  Sense Oligo
ugagucaccugguuaugua

SEQ ID NO: 32792 - RNA, 19 nt, Artificial Sequence
  Antisense Oligo
uacauaaccaggugacuca

SEQ ID NO: 32793 - RNA, 19 nt, Artificial Sequence
  Sense Oligo
gagucaccugguuauguau

SEQ ID NO: 32794 - RNA, 19 nt, Artificial Sequence
  Antisense Oligo
auacauaaccaggugacuc

SEQ ID NO: 32795 - RNA, 19 nt, Artificial Sequence
  Sense Oligo
caccugguuauguauaugg

SEQ ID NO: 32796 - RNA, 19 nt, Artificial Sequence
  Antisense Oligo
ccauauacauaaccaggug

SEQ ID NO: 32797 - RNA, 19 nt, Artificial Sequence
  Sense Oligo
accugguuauguauaugga

SEQ ID NO: 32798 - RNA, 19 nt, Artificial Sequence
  Antisense Oligo
uccauauacauaaccaggu

SEQ ID NO: 32799 - RNA, 19 nt, Artificial Sequence
  Sense Oligo
ccugguuauguauauggaa

SEQ ID NO: 32800 - RNA, 19 nt, Artificial Sequence
  Antisense Oligo
uuccauauacauaaccagg

SEQ ID NO: 32801 - RNA, 19 nt, Artificial Sequence
  Sense Oligo
cuucauugagcaccugggu

SEQ ID NO: 32802 - RNA, 19 nt, Artificial Sequence
  Antisense Oligo
acccaggugcucaaugaag

SEQ ID NO: 32803 - RNA, 19 nt, Artificial Sequence
  Sense Oligo
uucauugagcaccuggguc

SEQ ID NO: 32804 - RNA, 19 nt, Artificial Sequence
  Antisense Oligo
gacccaggugcucaaugaa

SEQ ID NO: 32805 - RNA, 19 nt, Artificial Sequence
  Sense Oligo
ucauugagcaccugggucg

SEQ ID NO: 32806 - RNA, 19 nt, Artificial Sequence
  Antisense Oligo
cgacccaggugcucaauga

SEQ ID NO: 32807 - RNA, 19 nt, Artificial Sequence
  Sense Oligo
cauugagcaccugggucgu

SEQ ID NO: 32808 - RNA, 19 nt, Artificial Sequence
  Antisense Oligo
acgacccaggugcucaaug

SEQ ID NO: 32809 - RNA, 19 nt, Artificial Sequence
  Sense Oligo
auugagcaccugggucguu

SEQ ID NO: 32810 - RNA, 19 nt, Artificial Sequence
  Antisense Oligo
aacgacccaggugcucaau

SEQ ID NO: 32811 - RNA, 19 nt, Artificial Sequence
  Sense Oligo
uugagcaccugggucguuu

SEQ ID NO: 32812 - RNA, 19 nt, Artificial Sequence
  Antisense Oligo
aaacgacccaggugcucaa

SEQ ID NO: 32813 - RNA, 19 nt, Artificial Sequence
  Sense Oligo
ugagcaccugggucguuuu

SEQ ID NO: 32814 - RNA, 19 nt, Artificial Sequence
  Antisense Oligo
aaaacgacccaggugcuca

SEQ ID NO: 32815 - RNA, 19 nt, Artificial Sequence
  Sense Oligo
gagcaccugggucguuuuc

SEQ ID NO: 32816 - RNA, 19 nt, Artificial Sequence
  Antisense Oligo
gaaaacgacccaggugcuc

SEQ ID NO: 32817 - RNA, 19 nt, Artificial Sequence
  Sense Oligo
agcaccugggucguuuucc

SEQ ID NO: 32818 - RNA, 19 nt, Artificial Sequence
  Antisense Oligo
ggaaaacgacccaggugcu

SEQ ID NO: 32819 - RNA, 19 nt, Artificial Sequence
  Sense Oligo
cugggucguuuuccugcuc

SEQ ID NO: 32820 - RNA, 19 nt, Artificial Sequence
  Antisense Oligo
gagcaggaaaacgacccag

SEQ ID NO: 32821 - RNA, 19 nt, Artificial Sequence
  Sense Oligo
ugggucguuuuccugcuca

SEQ ID NO: 32822 - RNA, 19 nt, Artificial Sequence
  Antisense Oligo
ugagcaggaaaacgaccca

SEQ ID NO: 32823 - RNA, 19 nt, Artificial Sequence
  Sense Oligo
gggucguuuuccugcucau

SEQ ID NO: 32824 - RNA, 19 nt, Artificial Sequence
  Antisense Oligo
augagcaggaaaacgaccc

SEQ ID NO: 32825 - RNA, 19 nt, Artificial Sequence
  Sense Oligo
ggucguuuuccugcucaua

SEQ ID NO: 32826 - RNA, 19 nt, Artificial Sequence
  Antisense Oligo
uaugagcaggaaaacgacc

SEQ ID NO: 32827 - RNA, 19 nt, Artificial Sequence
  Sense Oligo
gucguuuuccugcucauau

SEQ ID NO: 32828 - RNA, 19 nt, Artificial Sequence
  Antisense Oligo
auaugagcaggaaaacgac

SEQ ID NO: 32829 - RNA, 19 nt, Artificial Sequence
  Sense Oligo
uuuuccugcucauauccug

SEQ ID NO: 32830 - RNA, 19 nt, Artificial Sequence
  Antisense Oligo
caggauaugagcaggaaaa

SEQ ID NO: 32831 - RNA, 19 nt, Artificial Sequence
  Sense Oligo
cucauauccuggacugucu

SEQ ID NO: 32832 - RNA, 19 nt, Artificial Sequence
  Antisense Oligo
agacaguccaggauaugag

SEQ ID NO: 32833 - RNA, 19 nt, Artificial Sequence
  Sense Oligo
ucauauccuggacugucuu

SEQ ID NO: 32834 - RNA, 19 nt, Artificial Sequence
  Antisense Oligo
aagacaguccaggauauga

SEQ ID NO: 32835 - RNA, 19 nt, Artificial Sequence
  Sense Oligo
acugucuuucagggauuua

SEQ ID NO: 32836 - RNA, 19 nt, Artificial Sequence
  Antisense Oligo
uaaaucccugaaagacagu

SEQ ID NO: 32837 - RNA, 19 nt, Artificial Sequence
  Sense Oligo
cugucuuucagggauuuac

SEQ ID NO: 32838 - RNA, 19 nt, Artificial Sequence
  Antisense Oligo
guaaaucccugaaagacag

SEQ ID NO: 32839 - RNA, 19 nt, Artificial Sequence
  Sense Oligo
ugucuuucagggauuuacu

SEQ ID NO: 32840 - RNA, 19 nt, Artificial Sequence
  Antisense Oligo
aguaaaucccugaaagaca

SEQ ID NO: 32841 - RNA, 19 nt, Artificial Sequence
  Sense Oligo
gucuuucagggauuuacua

SEQ ID NO: 32842 - RNA, 19 nt, Artificial Sequence
  Antisense Oligo
uaguaaaucccugaaagac

SEQ ID NO: 32843 - RNA, 19 nt, Artificial Sequence
  Sense Oligo
ucuuucagggauuuacuac

SEQ ID NO: 32844 - RNA, 19 nt, Artificial Sequence
  Antisense Oligo
guaguaaaucccugaaaga

SEQ ID NO: 32845 - RNA, 19 nt, Artificial Sequence
  Sense Oligo
cuuucagggauuuacuacc

SEQ ID NO: 32846 - RNA, 19 nt, Artificial Sequence
  Antisense Oligo
gguaguaaaucccugaaag

SEQ ID NO: 32847 - RNA, 19 nt, Artificial Sequence
  Sense Oligo
uuucagggauuuacuaccg

SEQ ID NO: 32848 - RNA, 19 nt, Artificial Sequence
  Antisense Oligo
cgguaguaaaucccugaaa

SEQ ID NO: 32849 - RNA, 19 nt, Artificial Sequence
  Sense Oligo
uucagggauuuacuaccgg

SEQ ID NO: 32850 - RNA, 19 nt, Artificial Sequence
  Antisense Oligo
ccgguaguaaaucccugaa

SEQ ID NO: 32851 - RNA, 19 nt, Artificial Sequence
  Sense Oligo
ucagggauuuacuaccggc

SEQ ID NO: 32852 - RNA, 19 nt, Artificial Sequence
  Antisense Oligo
gccgguaguaaaucccuga

SEQ ID NO: 32853 - RNA, 19 nt, Artificial Sequence
  Sense Oligo
cagggauuuacuaccggcu

SEQ ID NO: 32854 - RNA, 19 nt, Artificial Sequence
  Antisense Oligo
agccgguaguaaaucccug

SEQ ID NO: 32855 - RNA, 19 nt, Artificial Sequence
  Sense Oligo
agggauuuacuaccggcuu

SEQ ID NO: 32856 - RNA, 19 nt, Artificial Sequence
  Antisense Oligo
aagccgguaguaaaucccu

SEQ ID NO: 32857 - RNA, 19 nt, Artificial Sequence
  Sense Oligo
gggauuuacuaccggcuuc

SEQ ID NO: 32858 - RNA, 19 nt, Artificial Sequence
  Antisense Oligo
gaagccgguaguaaauccc

SEQ ID NO: 32859 - RNA, 19 nt, Artificial Sequence
  Sense Oligo
ggauuuacuaccggcuucc

SEQ ID NO: 32860 - RNA, 19 nt, Artificial Sequence
  Antisense Oligo
ggaagccgguaguaaaucc

SEQ ID NO: 32861 - RNA, 19 nt, Artificial Sequence
  Sense Oligo
gauuuacuaccggcuuccg

SEQ ID NO: 32862 - RNA, 19 nt, Artificial Sequence
  Antisense Oligo
cggaagccgguaguaaauc

SEQ ID NO: 32863 - RNA, 19 nt, Artificial Sequence
  Sense Oligo
ggcuuccgggacuugagca

SEQ ID NO: 32864 - RNA, 19 nt, Artificial Sequence
  Antisense Oligo
ugcucaagucccggaagcc

SEQ ID NO: 32865 - RNA, 19 nt, Artificial Sequence
  Sense Oligo
gcuuccgggacuugagcaa

SEQ ID NO: 32866 - RNA, 19 nt, Artificial Sequence
  Antisense Oligo
uugcucaagucccggaagc

SEQ ID NO: 32867 - RNA, 19 nt, Artificial Sequence
  Sense Oligo
cuuccgggacuugagcaag

SEQ ID NO: 32868 - RNA, 19 nt, Artificial Sequence
  Antisense Oligo
cuugcucaagucccggaag

SEQ ID NO: 32869 - RNA, 19 nt, Artificial Sequence
  Sense Oligo
cuugagcaagucuugaaua

SEQ ID NO: 32870 - RNA, 19 nt, Artificial Sequence
  Antisense Oligo
uauucaagacuugcucaag

SEQ ID NO: 32871 - RNA, 19 nt, Artificial Sequence
  Sense Oligo
gcagguuugugucugaagu

SEQ ID NO: 32872 - RNA, 19 nt, Artificial Sequence
  Antisense Oligo
acuucagacacaaaccugc

SEQ ID NO: 32873 - RNA, 19 nt, Artificial Sequence
  Sense Oligo
cagguuugugucugaaguc

SEQ ID NO: 32874 - RNA, 19 nt, Artificial Sequence
  Antisense Oligo
gacuucagacacaaaccug

SEQ ID NO: 32875 - RNA, 19 nt, Artificial Sequence
  Sense Oligo
agguuugugucugaagucg

SEQ ID NO: 32876 - RNA, 19 nt, Artificial Sequence
  Antisense Oligo
cgacuucagacacaaaccu

SEQ ID NO: 32877 - RNA, 19 nt, Artificial Sequence
  Sense Oligo
gguuugugucugaagucgg

SEQ ID NO: 32878 - RNA, 19 nt, Artificial Sequence
  Antisense Oligo
ccgacuucagacacaaacc

SEQ ID NO: 32879 - RNA, 19 nt, Artificial Sequence
  Sense Oligo
guuugugucugaagucggc

SEQ ID NO: 32880 - RNA, 19 nt, Artificial Sequence
  Antisense Oligo
gccgacuucagacacaaac

SEQ ID NO: 32881 - RNA, 19 nt, Artificial Sequence
  Sense Oligo
uuugugucugaagucggcu

SEQ ID NO: 32882 - RNA, 19 nt, Artificial Sequence
  Antisense Oligo
agccgacuucagacacaaa

SEQ ID NO: 32883 - RNA, 19 nt, Artificial Sequence
  Sense Oligo
uugugucugaagucggcuc

SEQ ID NO: 32884 - RNA, 19 nt, Artificial Sequence
  Antisense Oligo
gagccgacuucagacacaa

SEQ ID NO: 32885 - RNA, 19 nt, Artificial Sequence
  Sense Oligo
ugugucugaagucggcucu

SEQ ID NO: 32886 - RNA, 19 nt, Artificial Sequence
  Antisense Oligo
agagccgacuucagacaca

SEQ ID NO: 32887 - RNA, 19 nt, Artificial Sequence
  Sense Oligo
gugucugaagucggcucug

SEQ ID NO: 32888 - RNA, 19 nt, Artificial Sequence
  Antisense Oligo
cagagccgacuucagacac

SEQ ID NO: 32889 - RNA, 19 nt, Artificial Sequence
  Sense Oligo
ugucugaagucggcucugg

SEQ ID NO: 32890 - RNA, 19 nt, Artificial Sequence
  Antisense Oligo
ccagagccgacuucagaca

SEQ ID NO: 32891 - RNA, 19 nt, Artificial Sequence
  Sense Oligo
gucugaagucggcucugga

SEQ ID NO: 32892 - RNA, 19 nt, Artificial Sequence
  Antisense Oligo
uccagagccgacuucagac

SEQ ID NO: 32893 - RNA, 19 nt, Artificial Sequence
  Sense Oligo
ucugaagucggcucuggag

SEQ ID NO: 32894 - RNA, 19 nt, Artificial Sequence
  Antisense Oligo
cuccagagccgacuucaga

SEQ ID NO: 32895 - RNA, 19 nt, Artificial Sequence
  Sense Oligo
agucggcucuggaguccug

SEQ ID NO: 32896 - RNA, 19 nt, Artificial Sequence
  Antisense Oligo
caggacuccagagccgacu

SEQ ID NO: 32897 - RNA, 19 nt, Artificial Sequence
  Sense Oligo
gcucuggaguccuggcuua

SEQ ID NO: 32898 - RNA, 19 nt, Artificial Sequence
  Antisense Oligo
uaagccaggacuccagagc

SEQ ID NO: 32899 - RNA, 19 nt, Artificial Sequence
  Sense Oligo
cucuggaguccuggcuuag

SEQ ID NO: 32900 - RNA, 19 nt, Artificial Sequence
  Antisense Oligo
cuaagccaggacuccagag

SEQ ID NO: 32901 - RNA, 19 nt, Artificial Sequence
  Sense Oligo
ucuggaguccuggcuuagc

SEQ ID NO: 32902 - RNA, 19 nt, Artificial Sequence
  Antisense Oligo
gcuaagccaggacuccaga

SEQ ID NO: 32903 - RNA, 19 nt, Artificial Sequence
  Sense Oligo
cuggaguccuggcuuagca

SEQ ID NO: 32904 - RNA, 19 nt, Artificial Sequence
  Antisense Oligo
ugcuaagccaggacuccag

SEQ ID NO: 32905 - RNA, 19 nt, Artificial Sequence
  Sense Oligo
uggaguccuggcuuagcaa

SEQ ID NO: 32906 - RNA, 19 nt, Artificial Sequence
  Antisense Oligo
uugcuaagccaggacucca

SEQ ID NO: 32907 - RNA, 19 nt, Artificial Sequence
  Sense Oligo
ggaguccuggcuuagcaaa

SEQ ID NO: 32908 - RNA, 19 nt, Artificial Sequence
  Antisense Oligo
uuugcuaagccaggacucc

SEQ ID NO: 32909 - RNA, 19 nt, Artificial Sequence
  Sense Oligo
gaguccuggcuuagcaaaa

SEQ ID NO: 32910 - RNA, 19 nt, Artificial Sequence
  Antisense Oligo
uuuugcuaagccaggacuc

SEQ ID NO: 32911 - RNA, 19 nt, Artificial Sequence
  Sense Oligo
aguccuggcuuagcaaaag

SEQ ID NO: 32912 - RNA, 19 nt, Artificial Sequence
  Antisense Oligo
cuuuugcuaagccaggacu

SEQ ID NO: 32913 - RNA, 19 nt, Artificial Sequence
  Sense Oligo
cuuagcaaaagcagacuag

SEQ ID NO: 32914 - RNA, 19 nt, Artificial Sequence
  Antisense Oligo
cuagucugcuuuugcuaag

SEQ ID NO: 32915 - RNA, 19 nt, Artificial Sequence
  Sense Oligo
uuagcaaaagcagacuaga

SEQ ID NO: 32916 - RNA, 19 nt, Artificial Sequence
  Antisense Oligo
ucuagucugcuuuugcuaa

SEQ ID NO: 32917 - RNA, 19 nt, Artificial Sequence
  Sense Oligo
uagcaaaagcagacuagau

SEQ ID NO: 32918 - RNA, 19 nt, Artificial Sequence
  Antisense Oligo
aucuagucugcuuuugcua

SEQ ID NO: 32919 - RNA, 19 nt, Artificial Sequence
  Sense Oligo
agcaaaagcagacuagaua

SEQ ID NO: 32920 - RNA, 19 nt, Artificial Sequence
  Antisense Oligo
uaucuagucugcuuuugcu

SEQ ID NO: 32921 - RNA, 19 nt, Artificial Sequence
  Sense Oligo
gcaaaagcagacuagauaa

SEQ ID NO: 32922 - RNA, 19 nt, Artificial Sequence
  Antisense Oligo
uuaucuagucugcuuuugc

SEQ ID NO: 32923 - RNA, 19 nt, Artificial Sequence
  Sense Oligo
caaaagcagacuagauaac

SEQ ID NO: 32924 - RNA, 19 nt, Artificial Sequence
  Antisense Oligo
guuaucuagucugcuuuug

SEQ ID NO: 32925 - RNA, 19 nt, Artificial Sequence
  Sense Oligo
aaaagcagacuagauaacu

SEQ ID NO: 32926 - RNA, 19 nt, Artificial Sequence
  Antisense Oligo
aguuaucuagucugcuuuu

SEQ ID NO: 32927 - RNA, 19 nt, Artificial Sequence
  Sense Oligo
aaagcagacuagauaacua

SEQ ID NO: 32928 - RNA, 19 nt, Artificial Sequence
  Antisense Oligo
uaguuaucuagucugcuuu

SEQ ID NO: 32929 - RNA, 19 nt, Artificial Sequence
  Sense Oligo
aagcagacuagauaacuaa

SEQ ID NO: 32930 - RNA, 19 nt, Artificial Sequence
  Antisense Oligo
uuaguuaucuagucugcuu

SEQ ID NO: 32931 - RNA, 19 nt, Artificial Sequence
  Sense Oligo
agcagacuagauaacuaaa

SEQ ID NO: 32932 - RNA, 19 nt, Artificial Sequence
  Antisense Oligo
uuuaguuaucuagucugcu

SEQ ID NO: 32933 - RNA, 19 nt, Artificial Sequence
  Sense Oligo
cagcacuuugggaggccga

SEQ ID NO: 32934 - RNA, 19 nt, Artificial Sequence
  Antisense Oligo
ucggccucccaaagugcug

SEQ ID NO: 32935 - RNA, 19 nt, Artificial Sequence
  Sense Oligo
agcacuuugggaggccgag

SEQ ID NO: 32936 - RNA, 19 nt, Artificial Sequence
  Antisense Oligo
cucggccucccaaagugcu

SEQ ID NO: 32937 - RNA, 19 nt, Artificial Sequence
  Sense Oligo
aaaauuagcugggcguggu

SEQ ID NO: 32938 - RNA, 19 nt, Artificial Sequence
  Antisense Oligo
accacgcccagcuaauuuu

SEQ ID NO: 32939 - RNA, 19 nt, Artificial Sequence
  Sense Oligo
aaauuagcugggcguggug

SEQ ID NO: 32940 - RNA, 19 nt, Artificial Sequence
  Antisense Oligo
caccacgcccagcuaauuu

SEQ ID NO: 32941 - RNA, 19 nt, Artificial Sequence
  Sense Oligo
aauuagcugggcguggugg

SEQ ID NO: 32942 - RNA, 19 nt, Artificial Sequence
  Antisense Oligo
ccaccacgcccagcuaauu

SEQ ID NO: 32943 - RNA, 19 nt, Artificial Sequence
  Sense Oligo
auuagcugggcgugguggu

SEQ ID NO: 32944 - RNA, 19 nt, Artificial Sequence
  Antisense Oligo
accaccacgcccagcuaau

SEQ ID NO: 32945 - RNA, 19 nt, Artificial Sequence
  Sense Oligo
uuagcugggcgugguggug

SEQ ID NO: 32946 - RNA, 19 nt, Artificial Sequence
  Antisense Oligo
caccaccacgcccagcuaa

SEQ ID NO: 32947 - RNA, 19 nt, Artificial Sequence
  Sense Oligo
guaccuguagucccagcua

SEQ ID NO: 32948 - RNA, 19 nt, Artificial Sequence
  Antisense Oligo
uagcugggacuacagguac

SEQ ID NO: 32949 - RNA, 19 nt, Artificial Sequence
  Sense Oligo
ucccagcuacucaggaggc

SEQ ID NO: 32950 - RNA, 19 nt, Artificial Sequence
  Antisense Oligo
gccuccugaguagcuggga

SEQ ID NO: 32951 - RNA, 19 nt, Artificial Sequence
  Sense Oligo
cccagcuacucaggaggcu

SEQ ID NO: 32952 - RNA, 19 nt, Artificial Sequence
  Antisense Oligo
agccuccugaguagcuggg

SEQ ID NO: 32953 - RNA, 19 nt, Artificial Sequence
  Sense Oligo
uccagccugggugacagag

SEQ ID NO: 32954 - RNA, 19 nt, Artificial Sequence
  Antisense Oligo
cucugucacccaggcugga

SEQ ID NO: 32955 - RNA, 19 nt, Artificial Sequence
  Sense Oligo
aaaagaaggcgucucaugu

SEQ ID NO: 32956 - RNA, 19 nt, Artificial Sequence
  Antisense Oligo
acaugagacgccuucuuuu

SEQ ID NO: 32957 - RNA, 19 nt, Artificial Sequence
  Sense Oligo
aaagaaggcgucucaugug

SEQ ID NO: 32958 - RNA, 19 nt, Artificial Sequence
  Antisense Oligo
cacaugagacgccuucuuu

SEQ ID NO: 32959 - RNA, 19 nt, Artificial Sequence
  Sense Oligo
aaggcgucucaugugaugc

SEQ ID NO: 32960 - RNA, 19 nt, Artificial Sequence
  Antisense Oligo
gcaucacaugagacgccuu

SEQ ID NO: 32961 - RNA, 19 nt, Artificial Sequence
  Sense Oligo
aggcgucucaugugaugca

SEQ ID NO: 32962 - RNA, 19 nt, Artificial Sequence
  Antisense Oligo
ugcaucacaugagacgccu

SEQ ID NO: 32963 - RNA, 19 nt, Artificial Sequence
  Sense Oligo
ggcgucucaugugaugcac

SEQ ID NO: 32964 - RNA, 19 nt, Artificial Sequence
  Antisense Oligo
gugcaucacaugagacgcc

SEQ ID NO: 32965 - RNA, 19 nt, Artificial Sequence
  Sense Oligo
cucaugugaugcacuucgu

SEQ ID NO: 32966 - RNA, 19 nt, Artificial Sequence
  Antisense Oligo
acgaagugcaucacaugag

SEQ ID NO: 32967 - RNA, 19 nt, Artificial Sequence
  Sense Oligo
ucaugugaugcacuucgua

SEQ ID NO: 32968 - RNA, 19 nt, Artificial Sequence
  Antisense Oligo
uacgaagugcaucacauga

SEQ ID NO: 32969 - RNA, 19 nt, Artificial Sequence
  Sense Oligo
caugugaugcacuucguag

SEQ ID NO: 32970 - RNA, 19 nt, Artificial Sequence
  Antisense Oligo
cuacgaagugcaucacaug

SEQ ID NO: 32971 - RNA, 19 nt, Artificial Sequence
  Sense Oligo
augugaugcacuucguagc

SEQ ID NO: 32972 - RNA, 19 nt, Artificial Sequence
  Antisense Oligo
gcuacgaagugcaucacau

SEQ ID NO: 32973 - RNA, 19 nt, Artificial Sequence
  Sense Oligo
ugugaugcacuucguagcu

SEQ ID NO: 32974 - RNA, 19 nt, Artificial Sequence
  Antisense Oligo
agcuacgaagugcaucaca

SEQ ID NO: 32975 - RNA, 19 nt, Artificial Sequence
  Sense Oligo
gugaugcacuucguagcug

SEQ ID NO: 32976 - RNA, 19 nt, Artificial Sequence
  Antisense Oligo
cagcuacgaagugcaucac

SEQ ID NO: 32977 - RNA, 19 nt, Artificial Sequence
  Sense Oligo
ugaugcacuucguagcugc

SEQ ID NO: 32978 - RNA, 19 nt, Artificial Sequence
  Antisense Oligo
gcagcuacgaagugcauca

SEQ ID NO: 32979 - RNA, 19 nt, Artificial Sequence
  Sense Oligo
gaugcacuucguagcugcc

SEQ ID NO: 32980 - RNA, 19 nt, Artificial Sequence
  Antisense Oligo
ggcagcuacgaagugcauc

SEQ ID NO: 32981 - RNA, 19 nt, Artificial Sequence
  Sense Oligo
augcacuucguagcugcca

SEQ ID NO: 32982 - RNA, 19 nt, Artificial Sequence
  Antisense Oligo
uggcagcuacgaagugcau

SEQ ID NO: 32983 - RNA, 19 nt, Artificial Sequence
  Sense Oligo
acuucguagcugccauucu

SEQ ID NO: 32984 - RNA, 19 nt, Artificial Sequence
  Antisense Oligo
agaauggcagcuacgaagu

SEQ ID NO: 32985 - RNA, 19 nt, Artificial Sequence
  Sense Oligo
cuucguagcugccauucuu

SEQ ID NO: 32986 - RNA, 19 nt, Artificial Sequence
  Antisense Oligo
aagaauggcagcuacgaag

SEQ ID NO: 32987 - RNA, 19 nt, Artificial Sequence
  Sense Oligo
uucguagcugccauucuuc

SEQ ID NO: 32988 - RNA, 19 nt, Artificial Sequence
  Antisense Oligo
gaagaauggcagcuacgaa

SEQ ID NO: 32989 - RNA, 19 nt, Artificial Sequence
  Sense Oligo
uagcugccauucuuccuuu

SEQ ID NO: 32990 - RNA, 19 nt, Artificial Sequence
  Antisense Oligo
aaaggaagaauggcagcua

SEQ ID NO: 32991 - RNA, 19 nt, Artificial Sequence
  Sense Oligo
cauucuuccuuucacauuu

SEQ ID NO: 32992 - RNA, 19 nt, Artificial Sequence
  Antisense Oligo
aaaugugaaaggaagaaug

SEQ ID NO: 32993 - RNA, 19 nt, Artificial Sequence
  Sense Oligo
aaauccugaguuuuaucug

SEQ ID NO: 32994 - RNA, 19 nt, Artificial Sequence
  Antisense Oligo
cagauaaaacucaggauuu

SEQ ID NO: 32995 - RNA, 19 nt, Artificial Sequence
  Sense Oligo
aauccugaguuuuaucugu

SEQ ID NO: 32996 - RNA, 19 nt, Artificial Sequence
  Antisense Oligo
acagauaaaacucaggauu

SEQ ID NO: 32997 - RNA, 19 nt, Artificial Sequence
  Sense Oligo
auccugaguuuuaucugua

SEQ ID NO: 32998 - RNA, 19 nt, Artificial Sequence
  Antisense Oligo
uacagauaaaacucaggau

SEQ ID NO: 32999 - RNA, 19 nt, Artificial Sequence
  Sense Oligo
aguaugugagcaccuuaaa

SEQ ID NO: 33000 - RNA, 19 nt, Artificial Sequence
  Antisense Oligo
uuuaaggugcucacauacu

SEQ ID NO: 33001 - RNA, 19 nt, Artificial Sequence
  Sense Oligo
guaugugagcaccuuaaaa

SEQ ID NO: 33002 - RNA, 19 nt, Artificial Sequence
  Antisense Oligo
uuuuaaggugcucacauac

SEQ ID NO: 33003 - RNA, 19 nt, Artificial Sequence
  Sense Oligo
augugagcaccuuaaaauu

SEQ ID NO: 33004 - RNA, 19 nt, Artificial Sequence
  Antisense Oligo
aauuuuaaggugcucacau

SEQ ID NO: 33005 - RNA, 19 nt, Artificial Sequence
  Sense Oligo
ugugagcaccuuaaaauuu

SEQ ID NO: 33006 - RNA, 19 nt, Artificial Sequence
  Antisense Oligo
aaauuuuaaggugcucaca

SEQ ID NO: 33007 - RNA, 19 nt, Artificial Sequence
  Sense Oligo
gugagcaccuuaaaauuug

SEQ ID NO: 33008 - RNA, 19 nt, Artificial Sequence
  Antisense Oligo
caaauuuuaaggugcucac

SEQ ID NO: 33009 - RNA, 19 nt, Artificial Sequence
  Sense Oligo
ugagcaccuuaaaauuugu

SEQ ID NO: 33010 - RNA, 19 nt, Artificial Sequence
  Antisense Oligo
acaaauuuuaaggugcuca

SEQ ID NO: 33011 - RNA, 19 nt, Artificial Sequence
  Sense Oligo
guauaccauauugauguug

SEQ ID NO: 33012 - RNA, 19 nt, Artificial Sequence
  Antisense Oligo
caacaucaauaugguauac

SEQ ID NO: 33013 - RNA, 19 nt, Artificial Sequence
  Sense Oligo
uauaccauauugauguugg

SEQ ID NO: 33014 - RNA, 19 nt, Artificial Sequence
  Antisense Oligo
ccaacaucaauaugguaua

SEQ ID NO: 33015 - RNA, 19 nt, Artificial Sequence
  Sense Oligo
auaccauauugauguugga

SEQ ID NO: 33016 - RNA, 19 nt, Artificial Sequence
  Antisense Oligo
uccaacaucaauaugguau

SEQ ID NO: 33017 - RNA, 19 nt, Artificial Sequence
  Sense Oligo
uaccauauugauguuggau

SEQ ID NO: 33018 - RNA, 19 nt, Artificial Sequence
  Antisense Oligo
auccaacaucaauauggua

SEQ ID NO: 33019 - RNA, 19 nt, Artificial Sequence
  Sense Oligo
accauauugauguuggauu

SEQ ID NO: 33020 - RNA, 19 nt, Artificial Sequence
  Antisense Oligo
aauccaacaucaauauggu

SEQ ID NO: 33021 - RNA, 19 nt, Artificial Sequence
  Sense Oligo
ccauauugauguuggauuu

SEQ ID NO: 33022 - RNA, 19 nt, Artificial Sequence
  Antisense Oligo
aaauccaacaucaauaugg

SEQ ID NO: 33023 - RNA, 19 nt, Artificial Sequence
  Sense Oligo
uuuucagcucuguuuuagc

SEQ ID NO: 33024 - RNA, 19 nt, Artificial Sequence
  Antisense Oligo
gcuaaaacagagcugaaaa

SEQ ID NO: 33025 - RNA, 19 nt, Artificial Sequence
  Sense Oligo
uuucagcucuguuuuagca

SEQ ID NO: 33026 - RNA, 19 nt, Artificial Sequence
  Antisense Oligo
ugcuaaaacagagcugaaa

SEQ ID NO: 33027 - RNA, 19 nt, Artificial Sequence
  Sense Oligo
uucagcucuguuuuagcaa

SEQ ID NO: 33028 - RNA, 19 nt, Artificial Sequence
  Antisense Oligo
uugcuaaaacagagcugaa

SEQ ID NO: 33029 - RNA, 19 nt, Artificial Sequence
  Sense Oligo
ucagcucuguuuuagcaau

SEQ ID NO: 33030 - RNA, 19 nt, Artificial Sequence
  Antisense Oligo
auugcuaaaacagagcuga

SEQ ID NO: 33031 - RNA, 19 nt, Artificial Sequence
  Sense Oligo
cagcucuguuuuagcaaug

SEQ ID NO: 33032 - RNA, 19 nt, Artificial Sequence
  Antisense Oligo
cauugcuaaaacagagcug

SEQ ID NO: 33033 - RNA, 19 nt, Artificial Sequence
  Sense Oligo
agcucuguuuuagcaauga

SEQ ID NO: 33034 - RNA, 19 nt, Artificial Sequence
  Antisense Oligo
ucauugcuaaaacagagcu

SEQ ID NO: 33035 - RNA, 19 nt, Artificial Sequence
  Sense Oligo
gcucuguuuuagcaaugac

SEQ ID NO: 33036 - RNA, 19 nt, Artificial Sequence
  Antisense Oligo
gucauugcuaaaacagagc

SEQ ID NO: 33037 - RNA, 19 nt, Artificial Sequence
  Sense Oligo
cucuguuuuagcaaugaca

SEQ ID NO: 33038 - RNA, 19 nt, Artificial Sequence
  Antisense Oligo
ugucauugcuaaaacagag

SEQ ID NO: 33039 - RNA, 19 nt, Artificial Sequence
  Sense Oligo
uguuuuagcaaugacagug

SEQ ID NO: 33040 - RNA, 19 nt, Artificial Sequence
  Antisense Oligo
cacugucauugcuaaaaca

SEQ ID NO: 33041 - RNA, 19 nt, Artificial Sequence
  Sense Oligo
guuuuagcaaugacagugg

SEQ ID NO: 33042 - RNA, 19 nt, Artificial Sequence
  Antisense Oligo
ccacugucauugcuaaaac

SEQ ID NO: 33043 - RNA, 19 nt, Artificial Sequence
  Sense Oligo
ugugauucaaucuuuuguc

SEQ ID NO: 33044 - RNA, 19 nt, Artificial Sequence
  Antisense Oligo
gacaaaagauugaaucaca

SEQ ID NO: 33045 - RNA, 19 nt, Artificial Sequence
  Sense Oligo
gugauucaaucuuuugucc

SEQ ID NO: 33046 - RNA, 19 nt, Artificial Sequence
  Antisense Oligo
ggacaaaagauugaaucac

SEQ ID NO: 33047 - RNA, 19 nt, Artificial Sequence
  Sense Oligo
ugauucaaucuuuuguccu

SEQ ID NO: 33048 - RNA, 19 nt, Artificial Sequence
  Antisense Oligo
aggacaaaagauugaauca

SEQ ID NO: 33049 - RNA, 19 nt, Artificial Sequence
  Sense Oligo
gauucaaucuuuuguccug

SEQ ID NO: 33050 - RNA, 19 nt, Artificial Sequence
  Antisense Oligo
caggacaaaagauugaauc

SEQ ID NO: 33051 - RNA, 19 nt, Artificial Sequence
  Sense Oligo
auucaaucuuuuguccugu

SEQ ID NO: 33052 - RNA, 19 nt, Artificial Sequence
  Antisense Oligo
acaggacaaaagauugaau

SEQ ID NO: 33053 - RNA, 19 nt, Artificial Sequence
  Sense Oligo
uucaaucuuuuguccuguu

SEQ ID NO: 33054 - RNA, 19 nt, Artificial Sequence
  Antisense Oligo
aacaggacaaaagauugaa

SEQ ID NO: 33055 - RNA, 19 nt, Artificial Sequence
  Sense Oligo
ucaaucuuuuguccuguuu

SEQ ID NO: 33056 - RNA, 19 nt, Artificial Sequence
  Antisense Oligo
aaacaggacaaaagauuga

SEQ ID NO: 33057 - RNA, 19 nt, Artificial Sequence
  Sense Oligo
caaucuuuuguccuguuuu

SEQ ID NO: 33058 - RNA, 19 nt, Artificial Sequence
  Antisense Oligo
aaaacaggacaaaagauug

SEQ ID NO: 33059 - RNA, 19 nt, Artificial Sequence
  Sense Oligo
uuucucugccuuaggaugu

SEQ ID NO: 33060 - RNA, 19 nt, Artificial Sequence
  Antisense Oligo
acauccuaaggcagagaaa

SEQ ID NO: 33061 - RNA, 19 nt, Artificial Sequence
  Sense Oligo
uucucugccuuaggauguu

SEQ ID NO: 33062 - RNA, 19 nt, Artificial Sequence
  Antisense Oligo
aacauccuaaggcagagaa

SEQ ID NO: 33063 - RNA, 19 nt, Artificial Sequence
  Sense Oligo
ucucugccuuaggauguuc

SEQ ID NO: 33064 - RNA, 19 nt, Artificial Sequence
  Antisense Oligo
gaacauccuaaggcagaga

SEQ ID NO: 33065 - RNA, 19 nt, Artificial Sequence
  Sense Oligo
cucugccuuaggauguuca

SEQ ID NO: 33066 - RNA, 19 nt, Artificial Sequence
  Antisense Oligo
ugaacauccuaaggcagag

SEQ ID NO: 33067 - RNA, 19 nt, Artificial Sequence
  Sense Oligo
ucugccuuaggauguucag

SEQ ID NO: 33068 - RNA, 19 nt, Artificial Sequence
  Antisense Oligo
cugaacauccuaaggcaga

SEQ ID NO: 33069 - RNA, 19 nt, Artificial Sequence
  Sense Oligo
cugccuuaggauguucagg

SEQ ID NO: 33070 - RNA, 19 nt, Artificial Sequence
  Antisense Oligo
ccugaacauccuaaggcag

SEQ ID NO: 33071 - RNA, 19 nt, Artificial Sequence
  Sense Oligo
cuuaggauguucaggaugu

SEQ ID NO: 33072 - RNA, 19 nt, Artificial Sequence
  Antisense Oligo
acauccugaacauccuaag

SEQ ID NO: 33073 - RNA, 19 nt, Artificial Sequence
  Sense Oligo
uuaggauguucaggauguu

SEQ ID NO: 33074 - RNA, 19 nt, Artificial Sequence
  Antisense Oligo
aacauccugaacauccuaa

SEQ ID NO: 33075 - RNA, 19 nt, Artificial Sequence
  Sense Oligo
uaggauguucaggauguuc

SEQ ID NO: 33076 - RNA, 19 nt, Artificial Sequence
  Antisense Oligo
gaacauccugaacauccua

SEQ ID NO: 33077 - RNA, 19 nt, Artificial Sequence
  Sense Oligo
ggauguucaggauguucag

SEQ ID NO: 33078 - RNA, 19 nt, Artificial Sequence
  Antisense Oligo
cugaacauccugaacaucc

SEQ ID NO: 33079 - RNA, 19 nt, Artificial Sequence
  Sense Oligo
auguucaggauguucagaa

SEQ ID NO: 33080 - RNA, 19 nt, Artificial Sequence
  Antisense Oligo
uucugaacauccugaacau

SEQ ID NO: 33081 - RNA, 19 nt, Artificial Sequence
  Sense Oligo
aaaugcuguugcgacuccu

SEQ ID NO: 33082 - RNA, 19 nt, Artificial Sequence
  Antisense Oligo
aggagucgcaacagcauuu

SEQ ID NO: 33083 - RNA, 19 nt, Artificial Sequence
  Sense Oligo
aaugcuguugcgacuccug

SEQ ID NO: 33084 - RNA, 19 nt, Artificial Sequence
  Antisense Oligo
caggagucgcaacagcauu

SEQ ID NO: 33085 - RNA, 19 nt, Artificial Sequence
  Sense Oligo
guugcgacuccuggacacu

SEQ ID NO: 33086 - RNA, 19 nt, Artificial Sequence
  Antisense Oligo
aguguccaggagucgcaac

SEQ ID NO: 33087 - RNA, 19 nt, Artificial Sequence
  Sense Oligo
uugcgacuccuggacacuu

SEQ ID NO: 33088 - RNA, 19 nt, Artificial Sequence
  Antisense Oligo
aaguguccaggagucgcaa

SEQ ID NO: 33089 - RNA, 19 nt, Artificial Sequence
  Sense Oligo
ugcgacuccuggacacuua

SEQ ID NO: 33090 - RNA, 19 nt, Artificial Sequence
  Antisense Oligo
uaaguguccaggagucgca

SEQ ID NO: 33091 - RNA, 19 nt, Artificial Sequence
  Sense Oligo
gcgacuccuggacacuuac

SEQ ID NO: 33092 - RNA, 19 nt, Artificial Sequence
  Antisense Oligo
guaaguguccaggagucgc

SEQ ID NO: 33093 - RNA, 19 nt, Artificial Sequence
  Sense Oligo
cgacuccuggacacuuacc

SEQ ID NO: 33094 - RNA, 19 nt, Artificial Sequence
  Antisense Oligo
gguaaguguccaggagucg

SEQ ID NO: 33095 - RNA, 19 nt, Artificial Sequence
  Sense Oligo
gacuccuggacacuuaccg

SEQ ID NO: 33096 - RNA, 19 nt, Artificial Sequence
  Antisense Oligo
cgguaaguguccaggaguc

SEQ ID NO: 33097 - RNA, 19 nt, Artificial Sequence
  Sense Oligo
acuccuggacacuuaccgg

SEQ ID NO: 33098 - RNA, 19 nt, Artificial Sequence
  Antisense Oligo
ccgguaaguguccaggagu

SEQ ID NO: 33099 - RNA, 19 nt, Artificial Sequence
  Sense Oligo
cuccuggacacuuaccggg

SEQ ID NO: 33100 - RNA, 19 nt, Artificial Sequence
  Antisense Oligo
cccgguaaguguccaggag

SEQ ID NO: 33101 - RNA, 19 nt, Artificial Sequence
  Sense Oligo
uccuggacacuuaccggga

SEQ ID NO: 33102 - RNA, 19 nt, Artificial Sequence
  Antisense Oligo
ucccgguaaguguccagga

SEQ ID NO: 33103 - RNA, 19 nt, Artificial Sequence
  Sense Oligo
ccuggacacuuaccgggac

SEQ ID NO: 33104 - RNA, 19 nt, Artificial Sequence
  Antisense Oligo
gucccgguaaguguccagg

SEQ ID NO: 33105 - RNA, 19 nt, Artificial Sequence
  Sense Oligo
cuggacacuuaccgggaca

SEQ ID NO: 33106 - RNA, 19 nt, Artificial Sequence
  Antisense Oligo
ugucccgguaaguguccag

SEQ ID NO: 33107 - RNA, 19 nt, Artificial Sequence
  Sense Oligo
aagcacgaugcagucucuc

SEQ ID NO: 33108 - RNA, 19 nt, Artificial Sequence
  Antisense Oligo
gagagacugcaucgugcuu

SEQ ID NO: 33109 - RNA, 19 nt, Artificial Sequence
  Sense Oligo
acgaugcagucucucccuc

SEQ ID NO: 33110 - RNA, 19 nt, Artificial Sequence
  Antisense Oligo
gagggagagacugcaucgu

SEQ ID NO: 33111 - RNA, 19 nt, Artificial Sequence
  Sense Oligo
cgaugcagucucucccuca

SEQ ID NO: 33112 - RNA, 19 nt, Artificial Sequence
  Antisense Oligo
ugagggagagacugcaucg

SEQ ID NO: 33113 - RNA, 19 nt, Artificial Sequence
  Sense Oligo
gaugcagucucucccucac

SEQ ID NO: 33114 - RNA, 19 nt, Artificial Sequence
  Antisense Oligo
gugagggagagacugcauc

SEQ ID NO: 33115 - RNA, 19 nt, Artificial Sequence
  Sense Oligo
augcagucucucccucaca

SEQ ID NO: 33116 - RNA, 19 nt, Artificial Sequence
  Antisense Oligo
ugugagggagagacugcau

SEQ ID NO: 33117 - RNA, 19 nt, Artificial Sequence
  Sense Oligo
ugcagucucucccucacau

SEQ ID NO: 33118 - RNA, 19 nt, Artificial Sequence
  Antisense Oligo
augugagggagagacugca

SEQ ID NO: 33119 - RNA, 19 nt, Artificial Sequence
  Sense Oligo
gcagucucucccucacaug

SEQ ID NO: 33120 - RNA, 19 nt, Artificial Sequence
  Antisense Oligo
caugugagggagagacugc

SEQ ID NO: 33121 - RNA, 19 nt, Artificial Sequence
  Sense Oligo
agucucucccucacaugcg

SEQ ID NO: 33122 - RNA, 19 nt, Artificial Sequence
  Antisense Oligo
cgcaugugagggagagacu

SEQ ID NO: 33123 - RNA, 19 nt, Artificial Sequence
  Sense Oligo
gucucucccucacaugcgg

SEQ ID NO: 33124 - RNA, 19 nt, Artificial Sequence
  Antisense Oligo
ccgcaugugagggagagac

SEQ ID NO: 33125 - RNA, 19 nt, Artificial Sequence
  Sense Oligo
ucucucccucacaugcggc

SEQ ID NO: 33126 - RNA, 19 nt, Artificial Sequence
  Antisense Oligo
gccgcaugugagggagaga

SEQ ID NO: 33127 - RNA, 19 nt, Artificial Sequence
  Sense Oligo
cccuauaauuggccgugac

SEQ ID NO: 33128 - RNA, 19 nt, Artificial Sequence
  Antisense Oligo
gucacggccaauuauaggg

SEQ ID NO: 33129 - RNA, 19 nt, Artificial Sequence
  Sense Oligo
ccuauaauuggccgugacc

SEQ ID NO: 33130 - RNA, 19 nt, Artificial Sequence
  Antisense Oligo
ggucacggccaauuauagg

SEQ ID NO: 33131 - RNA, 19 nt, Artificial Sequence
  Sense Oligo
cuauaauuggccgugaccc

SEQ ID NO: 33132 - RNA, 19 nt, Artificial Sequence
  Antisense Oligo
gggucacggccaauuauag

SEQ ID NO: 33133 - RNA, 19 nt, Artificial Sequence
  Sense Oligo
uauaauuggccgugaccca

SEQ ID NO: 33134 - RNA, 19 nt, Artificial Sequence
  Antisense Oligo
ugggucacggccaauuaua

SEQ ID NO: 33135 - RNA, 19 nt, Artificial Sequence
  Sense Oligo
auaauuggccgugacccac

SEQ ID NO: 33136 - RNA, 19 nt, Artificial Sequence
  Antisense Oligo
gugggucacggccaauuau

SEQ ID NO: 33137 - RNA, 19 nt, Artificial Sequence
  Sense Oligo
acagcaaggucauaaauua

SEQ ID NO: 33138 - RNA, 19 nt, Artificial Sequence
  Antisense Oligo
uaauuuaugaccuugcugu

SEQ ID NO: 33139 - RNA, 19 nt, Artificial Sequence
  Sense Oligo
cagcaaggucauaaauuaa

SEQ ID NO: 33140 - RNA, 19 nt, Artificial Sequence
  Antisense Oligo
uuaauuuaugaccuugcug

SEQ ID NO: 33141 - RNA, 19 nt, Artificial Sequence
  Sense Oligo
aaauuaauauguggcccac

SEQ ID NO: 33142 - RNA, 19 nt, Artificial Sequence
  Antisense Oligo
gugggccacauauuaauuu

SEQ ID NO: 33143 - RNA, 19 nt, Artificial Sequence
  Sense Oligo
aauuaauauguggcccacu

SEQ ID NO: 33144 - RNA, 19 nt, Artificial Sequence
  Antisense Oligo
agugggccacauauuaauu

SEQ ID NO: 33145 - RNA, 19 nt, Artificial Sequence
  Sense Oligo
auuaauauguggcccacuu

SEQ ID NO: 33146 - RNA, 19 nt, Artificial Sequence
  Antisense Oligo
aagugggccacauauuaau

SEQ ID NO: 33147 - RNA, 19 nt, Artificial Sequence
  Sense Oligo
uuaauauguggcccacuuc

SEQ ID NO: 33148 - RNA, 19 nt, Artificial Sequence
  Antisense Oligo
gaagugggccacauauuaa

SEQ ID NO: 33149 - RNA, 19 nt, Artificial Sequence
  Sense Oligo
uaauauguggcccacuucu

SEQ ID NO: 33150 - RNA, 19 nt, Artificial Sequence
  Antisense Oligo
agaagugggccacauauua

SEQ ID NO: 33151 - RNA, 19 nt, Artificial Sequence
  Sense Oligo
aauauguggcccacuucuc

SEQ ID NO: 33152 - RNA, 19 nt, Artificial Sequence
  Antisense Oligo
gagaagugggccacauauu

SEQ ID NO: 33153 - RNA, 19 nt, Artificial Sequence
  Sense Oligo
auauguggcccacuucucu

SEQ ID NO: 33154 - RNA, 19 nt, Artificial Sequence
  Antisense Oligo
agagaagugggccacauau

SEQ ID NO: 33155 - RNA, 19 nt, Artificial Sequence
  Sense Oligo
uauguggcccacuucucuu

SEQ ID NO: 33156 - RNA, 19 nt, Artificial Sequence
  Antisense Oligo
aagagaagugggccacaua

SEQ ID NO: 33157 - RNA, 19 nt, Artificial Sequence
  Sense Oligo
auguggcccacuucucuuc

SEQ ID NO: 33158 - RNA, 19 nt, Artificial Sequence
  Antisense Oligo
gaagagaagugggccacau

SEQ ID NO: 33159 - RNA, 19 nt, Artificial Sequence
  Sense Oligo
uguggcccacuucucuucu

SEQ ID NO: 33160 - RNA, 19 nt, Artificial Sequence
  Antisense Oligo
agaagagaagugggccaca

SEQ ID NO: 33161 - RNA, 19 nt, Artificial Sequence
  Sense Oligo
guggcccacuucucuucuc

SEQ ID NO: 33162 - RNA, 19 nt, Artificial Sequence
  Antisense Oligo
gagaagagaagugggccac

SEQ ID NO: 33163 - RNA, 19 nt, Artificial Sequence
  Sense Oligo
cccacuucucuucucaggu

SEQ ID NO: 33164 - RNA, 19 nt, Artificial Sequence
  Antisense Oligo
accugagaagagaaguggg

SEQ ID NO: 33165 - RNA, 19 nt, Artificial Sequence
  Sense Oligo
cuucucuucucagguuauu

SEQ ID NO: 33166 - RNA, 19 nt, Artificial Sequence
  Antisense Oligo
aauaaccugagaagagaag

SEQ ID NO: 33167 - RNA, 19 nt, Artificial Sequence
  Sense Oligo
uucucuucucagguuauua

SEQ ID NO: 33168 - RNA, 19 nt, Artificial Sequence
  Antisense Oligo
uaauaaccugagaagagaa

SEQ ID NO: 33169 - RNA, 19 nt, Artificial Sequence
  Sense Oligo
ucucuucucagguuauuaa

SEQ ID NO: 33170 - RNA, 19 nt, Artificial Sequence
  Antisense Oligo
uuaauaaccugagaagaga

SEQ ID NO: 33171 - RNA, 19 nt, Artificial Sequence
  Sense Oligo
cucuucucagguuauuaau

SEQ ID NO: 33172 - RNA, 19 nt, Artificial Sequence
  Antisense Oligo
auuaauaaccugagaagag

SEQ ID NO: 33173 - RNA, 19 nt, Artificial Sequence
  Sense Oligo
gguuauuaauauugucguc

SEQ ID NO: 33174 - RNA, 19 nt, Artificial Sequence
  Antisense Oligo
gacgacaauauuaauaacc

SEQ ID NO: 33175 - RNA, 19 nt, Artificial Sequence
  Sense Oligo
gucuuacucuguugcccag

SEQ ID NO: 33176 - RNA, 19 nt, Artificial Sequence
  Antisense Oligo
cugggcaacagaguaagac

SEQ ID NO: 33177 - RNA, 19 nt, Artificial Sequence
  Sense Oligo
ucuuacucuguugcccagg

SEQ ID NO: 33178 - RNA, 19 nt, Artificial Sequence
  Antisense Oligo
ccugggcaacagaguaaga

SEQ ID NO: 33179 - RNA, 19 nt, Artificial Sequence
  Sense Oligo
cuuacucuguugcccaggc

SEQ ID NO: 33180 - RNA, 19 nt, Artificial Sequence
  Antisense Oligo
gccugggcaacagaguaag

SEQ ID NO: 33181 - RNA, 19 nt, Artificial Sequence
  Sense Oligo
uuacucuguugcccaggcu

SEQ ID NO: 33182 - RNA, 19 nt, Artificial Sequence
  Antisense Oligo
agccugggcaacagaguaa

SEQ ID NO: 33183 - RNA, 19 nt, Artificial Sequence
  Sense Oligo
uacucuguugcccaggcug

SEQ ID NO: 33184 - RNA, 19 nt, Artificial Sequence
  Antisense Oligo
cagccugggcaacagagua

SEQ ID NO: 33185 - RNA, 19 nt, Artificial Sequence
  Sense Oligo
acucuguugcccaggcugg

SEQ ID NO: 33186 - RNA, 19 nt, Artificial Sequence
  Antisense Oligo
ccagccugggcaacagagu

SEQ ID NO: 33187 - RNA, 19 nt, Artificial Sequence
  Sense Oligo
cucuguugcccaggcugga

SEQ ID NO: 33188 - RNA, 19 nt, Artificial Sequence
  Antisense Oligo
uccagccugggcaacagag

SEQ ID NO: 33189 - RNA, 19 nt, Artificial Sequence
  Sense Oligo
ucuguugcccaggcuggag

SEQ ID NO: 33190 - RNA, 19 nt, Artificial Sequence
  Antisense Oligo
cuccagccugggcaacaga

SEQ ID NO: 33191 - RNA, 19 nt, Artificial Sequence
  Sense Oligo
uugcccaggcuggagugca

SEQ ID NO: 33192 - RNA, 19 nt, Artificial Sequence
  Antisense Oligo
ugcacuccagccugggcaa

SEQ ID NO: 33193 - RNA, 19 nt, Artificial Sequence
  Sense Oligo
gcuggagugcagugacgca

SEQ ID NO: 33194 - RNA, 19 nt, Artificial Sequence
  Antisense Oligo
ugcgucacugcacuccagc

SEQ ID NO: 33195 - RNA, 19 nt, Artificial Sequence
  Sense Oligo
cuggagugcagugacgcaa

SEQ ID NO: 33196 - RNA, 19 nt, Artificial Sequence
  Antisense Oligo
uugcgucacugcacuccag

SEQ ID NO: 33197 - RNA, 19 nt, Artificial Sequence
  Sense Oligo
aacuucuaucuccugguuc

SEQ ID NO: 33198 - RNA, 19 nt, Artificial Sequence
  Antisense Oligo
gaaccaggagauagaaguu

SEQ ID NO: 33199 - RNA, 19 nt, Artificial Sequence
  Sense Oligo
acuucuaucuccugguuca

SEQ ID NO: 33200 - RNA, 19 nt, Artificial Sequence
  Antisense Oligo
ugaaccaggagauagaagu

SEQ ID NO: 33201 - RNA, 19 nt, Artificial Sequence
  Sense Oligo
cuucuaucuccugguucaa

SEQ ID NO: 33202 - RNA, 19 nt, Artificial Sequence
  Antisense Oligo
uugaaccaggagauagaag

SEQ ID NO: 33203 - RNA, 19 nt, Artificial Sequence
  Sense Oligo
cugguucaagugauucucc

SEQ ID NO: 33204 - RNA, 19 nt, Artificial Sequence
  Antisense Oligo
ggagaaucacuugaaccag

SEQ ID NO: 33205 - RNA, 19 nt, Artificial Sequence
  Sense Oligo
ugguucaagugauucuccu

SEQ ID NO: 33206 - RNA, 19 nt, Artificial Sequence
  Antisense Oligo
aggagaaucacuugaacca

SEQ ID NO: 33207 - RNA, 19 nt, Artificial Sequence
  Sense Oligo
gguucaagugauucuccug

SEQ ID NO: 33208 - RNA, 19 nt, Artificial Sequence
  Antisense Oligo
caggagaaucacuugaacc

SEQ ID NO: 33209 - RNA, 19 nt, Artificial Sequence
  Sense Oligo
guucaagugauucuccugu

SEQ ID NO: 33210 - RNA, 19 nt, Artificial Sequence
  Antisense Oligo
acaggagaaucacuugaac

SEQ ID NO: 33211 - RNA, 19 nt, Artificial Sequence
  Sense Oligo
uucaagugauucuccuguc

SEQ ID NO: 33212 - RNA, 19 nt, Artificial Sequence
  Antisense Oligo
gacaggagaaucacuugaa

SEQ ID NO: 33213 - RNA, 19 nt, Artificial Sequence
  Sense Oligo
ucaagugauucuccugucu

SEQ ID NO: 33214 - RNA, 19 nt, Artificial Sequence
  Antisense Oligo
agacaggagaaucacuuga

SEQ ID NO: 33215 - RNA, 19 nt, Artificial Sequence
  Sense Oligo
caagugauucuccugucuc

SEQ ID NO: 33216 - RNA, 19 nt, Artificial Sequence
  Antisense Oligo
gagacaggagaaucacuug

SEQ ID NO: 33217 - RNA, 19 nt, Artificial Sequence
  Sense Oligo
aagugauucuccugucuca

SEQ ID NO: 33218 - RNA, 19 nt, Artificial Sequence
  Antisense Oligo
ugagacaggagaaucacuu

SEQ ID NO: 33219 - RNA, 19 nt, Artificial Sequence
  Sense Oligo
agugauucuccugucucag

SEQ ID NO: 33220 - RNA, 19 nt, Artificial Sequence
  Antisense Oligo
cugagacaggagaaucacu

SEQ ID NO: 33221 - RNA, 19 nt, Artificial Sequence
  Sense Oligo
ugucucagccucccgagua

SEQ ID NO: 33222 - RNA, 19 nt, Artificial Sequence
  Antisense Oligo
uacucgggaggcugagaca

SEQ ID NO: 33223 - RNA, 19 nt, Artificial Sequence
  Sense Oligo
gucucagccucccgaguag

SEQ ID NO: 33224 - RNA, 19 nt, Artificial Sequence
  Antisense Oligo
cuacucgggaggcugagac

SEQ ID NO: 33225 - RNA, 19 nt, Artificial Sequence
  Sense Oligo
ucucagccucccgaguagc

SEQ ID NO: 33226 - RNA, 19 nt, Artificial Sequence
  Antisense Oligo
gcuacucgggaggcugaga

SEQ ID NO: 33227 - RNA, 19 nt, Artificial Sequence
  Sense Oligo
cucagccucccgaguagcu

SEQ ID NO: 33228 - RNA, 19 nt, Artificial Sequence
  Antisense Oligo
agcuacucgggaggcugag

SEQ ID NO: 33229 - RNA, 19 nt, Artificial Sequence
  Sense Oligo
cccgaguagcugggauuac

SEQ ID NO: 33230 - RNA, 19 nt, Artificial Sequence
  Antisense Oligo
guaaucccagcuacucggg

SEQ ID NO: 33231 - RNA, 19 nt, Artificial Sequence
  Sense Oligo
ccgaguagcugggauuaca

SEQ ID NO: 33232 - RNA, 19 nt, Artificial Sequence
  Antisense Oligo
uguaaucccagcuacucgg

SEQ ID NO: 33233 - RNA, 19 nt, Artificial Sequence
  Sense Oligo
cgaguagcugggauuacag

SEQ ID NO: 33234 - RNA, 19 nt, Artificial Sequence
  Antisense Oligo
cuguaaucccagcuacucg

SEQ ID NO: 33235 - RNA, 19 nt, Artificial Sequence
  Sense Oligo
uagcugggauuacaggcgc

SEQ ID NO: 33236 - RNA, 19 nt, Artificial Sequence
  Antisense Oligo
gcgccuguaaucccagcua

SEQ ID NO: 33237 - RNA, 19 nt, Artificial Sequence
  Sense Oligo
agcugggauuacaggcgca

SEQ ID NO: 33238 - RNA, 19 nt, Artificial Sequence
  Antisense Oligo
ugcgccuguaaucccagcu

SEQ ID NO: 33239 - RNA, 19 nt, Artificial Sequence
  Sense Oligo
gcugggauuacaggcgcac

SEQ ID NO: 33240 - RNA, 19 nt, Artificial Sequence
  Antisense Oligo
gugcgccuguaaucccagc

SEQ ID NO: 33241 - RNA, 19 nt, Artificial Sequence
  Sense Oligo
cccaccacgcccagcuaau

SEQ ID NO: 33242 - RNA, 19 nt, Artificial Sequence
  Antisense Oligo
auuagcugggcgugguggg

SEQ ID NO: 33243 - RNA, 19 nt, Artificial Sequence
  Sense Oligo
ccaccacgcccagcuaauu

SEQ ID NO: 33244 - RNA, 19 nt, Artificial Sequence
  Antisense Oligo
aauuagcugggcguggugg

SEQ ID NO: 33245 - RNA, 19 nt, Artificial Sequence
  Sense Oligo
caccacgcccagcuaauuu

SEQ ID NO: 33246 - RNA, 19 nt, Artificial Sequence
  Antisense Oligo
aaauuagcugggcguggug

SEQ ID NO: 33247 - RNA, 19 nt, Artificial Sequence
  Sense Oligo
accacgcccagcuaauuuu

SEQ ID NO: 33248 - RNA, 19 nt, Artificial Sequence
  Antisense Oligo
aaaauuagcugggcguggu

SEQ ID NO: 33249 - RNA, 19 nt, Artificial Sequence
  Sense Oligo
uguugguuuguuuguuugu

SEQ ID NO: 33250 - RNA, 19 nt, Artificial Sequence
  Antisense Oligo
acaaacaaacaaaccaaca

SEQ ID NO: 33251 - RNA, 19 nt, Artificial Sequence
  Sense Oligo
gguuuguuuguuuguuugu

SEQ ID NO: 33252 - RNA, 19 nt, Artificial Sequence
  Antisense Oligo
acaaacaaacaaacaaacc

SEQ ID NO: 33253 - RNA, 19 nt, Artificial Sequence
  Sense Oligo
agucucacucuuguugccc

SEQ ID NO: 33254 - RNA, 19 nt, Artificial Sequence
  Antisense Oligo
gggcaacaagagugagacu

SEQ ID NO: 33255 - RNA, 19 nt, Artificial Sequence
  Sense Oligo
gucucacucuuguugccca

SEQ ID NO: 33256 - RNA, 19 nt, Artificial Sequence
  Antisense Oligo
ugggcaacaagagugagac

SEQ ID NO: 33257 - RNA, 19 nt, Artificial Sequence
  Sense Oligo
ucucacucuuguugcccaa

SEQ ID NO: 33258 - RNA, 19 nt, Artificial Sequence
  Antisense Oligo
uugggcaacaagagugaga

SEQ ID NO: 33259 - RNA, 19 nt, Artificial Sequence
  Sense Oligo
caagcuggagugcaauggc

SEQ ID NO: 33260 - RNA, 19 nt, Artificial Sequence
  Antisense Oligo
gccauugcacuccagcuug

SEQ ID NO: 33261 - RNA, 19 nt, Artificial Sequence
  Sense Oligo
aagcuggagugcaauggca

SEQ ID NO: 33262 - RNA, 19 nt, Artificial Sequence
  Antisense Oligo
ugccauugcacuccagcuu

SEQ ID NO: 33263 - RNA, 19 nt, Artificial Sequence
  Sense Oligo
gcaccaucuuggcucacug

SEQ ID NO: 33264 - RNA, 19 nt, Artificial Sequence
  Antisense Oligo
cagugagccaagauggugc

SEQ ID NO: 33265 - RNA, 19 nt, Artificial Sequence
  Sense Oligo
ugcuucccagguucaagug

SEQ ID NO: 33266 - RNA, 19 nt, Artificial Sequence
  Antisense Oligo
cacuugaaccugggaagca

SEQ ID NO: 33267 - RNA, 19 nt, Artificial Sequence
  Sense Oligo
gcuucccagguucaaguga

SEQ ID NO: 33268 - RNA, 19 nt, Artificial Sequence
  Antisense Oligo
ucacuugaaccugggaagc

SEQ ID NO: 33269 - RNA, 19 nt, Artificial Sequence
  Sense Oligo
cagguucaagugauucucc

SEQ ID NO: 33270 - RNA, 19 nt, Artificial Sequence
  Antisense Oligo
ggagaaucacuugaaccug

SEQ ID NO: 33271 - RNA, 19 nt, Artificial Sequence
  Sense Oligo
agguucaagugauucuccu

SEQ ID NO: 33272 - RNA, 19 nt, Artificial Sequence
  Antisense Oligo
aggagaaucacuugaaccu

SEQ ID NO: 33273 - RNA, 19 nt, Artificial Sequence
  Sense Oligo
gguucaagugauucuccuu

SEQ ID NO: 33274 - RNA, 19 nt, Artificial Sequence
  Antisense Oligo
aaggagaaucacuugaacc

SEQ ID NO: 33275 - RNA, 19 nt, Artificial Sequence
  Sense Oligo
guucaagugauucuccuuc

SEQ ID NO: 33276 - RNA, 19 nt, Artificial Sequence
  Antisense Oligo
gaaggagaaucacuugaac

SEQ ID NO: 33277 - RNA, 19 nt, Artificial Sequence
  Sense Oligo
uucaagugauucuccuucc

SEQ ID NO: 33278 - RNA, 19 nt, Artificial Sequence
  Antisense Oligo
ggaaggagaaucacuugaa

SEQ ID NO: 33279 - RNA, 19 nt, Artificial Sequence
  Sense Oligo
ucaagugauucuccuuccu

SEQ ID NO: 33280 - RNA, 19 nt, Artificial Sequence
  Antisense Oligo
aggaaggagaaucacuuga

SEQ ID NO: 33281 - RNA, 19 nt, Artificial Sequence
  Sense Oligo
caagugauucuccuuccuc

SEQ ID NO: 33282 - RNA, 19 nt, Artificial Sequence
  Antisense Oligo
gaggaaggagaaucacuug

SEQ ID NO: 33283 - RNA, 19 nt, Artificial Sequence
  Sense Oligo
agccuccugaguagcuggg

SEQ ID NO: 33284 - RNA, 19 nt, Artificial Sequence
  Antisense Oligo
cccagcuacucaggaggcu

SEQ ID NO: 33285 - RNA, 19 nt, Artificial Sequence
  Sense Oligo
gccuccugaguagcuggga

SEQ ID NO: 33286 - RNA, 19 nt, Artificial Sequence
  Antisense Oligo
ucccagcuacucaggaggc

SEQ ID NO: 33287 - RNA, 19 nt, Artificial Sequence
  Sense Oligo
ccuccugaguagcugggau

SEQ ID NO: 33288 - RNA, 19 nt, Artificial Sequence
  Antisense Oligo
aucccagcuacucaggagg

SEQ ID NO: 33289 - RNA, 19 nt, Artificial Sequence
  Sense Oligo
cuccugaguagcugggauu

SEQ ID NO: 33290 - RNA, 19 nt, Artificial Sequence
  Antisense Oligo
aaucccagcuacucaggag

SEQ ID NO: 33291 - RNA, 19 nt, Artificial Sequence
  Sense Oligo
uccugaguagcugggauua

SEQ ID NO: 33292 - RNA, 19 nt, Artificial Sequence
  Antisense Oligo
uaaucccagcuacucagga

SEQ ID NO: 33293 - RNA, 19 nt, Artificial Sequence
  Sense Oligo
ccugaguagcugggauuac

SEQ ID NO: 33294 - RNA, 19 nt, Artificial Sequence
  Antisense Oligo
guaaucccagcuacucagg

SEQ ID NO: 33295 - RNA, 19 nt, Artificial Sequence
  Sense Oligo
cugaguagcugggauuaca

SEQ ID NO: 33296 - RNA, 19 nt, Artificial Sequence
  Antisense Oligo
uguaaucccagcuacucag

SEQ ID NO: 33297 - RNA, 19 nt, Artificial Sequence
  Sense Oligo
ugaguagcugggauuacag

SEQ ID NO: 33298 - RNA, 19 nt, Artificial Sequence
  Antisense Oligo
cuguaaucccagcuacuca

SEQ ID NO: 33299 - RNA, 19 nt, Artificial Sequence
  Sense Oligo
uagcugggauuacaggcgc

SEQ ID NO: 33300 - RNA, 19 nt, Artificial Sequence
  Antisense Oligo
gcgccuguaaucccagcua

SEQ ID NO: 33301 - RNA, 19 nt, Artificial Sequence
  Sense Oligo
agcugggauuacaggcgca

SEQ ID NO: 33302 - RNA, 19 nt, Artificial Sequence
  Antisense Oligo
ugcgccuguaaucccagcu

SEQ ID NO: 33303 - RNA, 19 nt, Artificial Sequence
  Sense Oligo
gcugggauuacaggcgcau

SEQ ID NO: 33304 - RNA, 19 nt, Artificial Sequence
  Antisense Oligo
augcgccuguaaucccagc

SEQ ID NO: 33305 - RNA, 19 nt, Artificial Sequence
  Sense Oligo
cugggauuacaggcgcaug

SEQ ID NO: 33306 - RNA, 19 nt, Artificial Sequence
  Antisense Oligo
caugcgccuguaaucccag

SEQ ID NO: 33307 - RNA, 19 nt, Artificial Sequence
  Sense Oligo
ugggauuacaggcgcaugc

SEQ ID NO: 33308 - RNA, 19 nt, Artificial Sequence
  Antisense Oligo
gcaugcgccuguaauccca

SEQ ID NO: 33309 - RNA, 19 nt, Artificial Sequence
  Sense Oligo
gggauuacaggcgcaugcc

SEQ ID NO: 33310 - RNA, 19 nt, Artificial Sequence
  Antisense Oligo
ggcaugcgccuguaauccc

SEQ ID NO: 33311 - RNA, 19 nt, Artificial Sequence
  Sense Oligo
ggguuucaccauguuggcc

SEQ ID NO: 33312 - RNA, 19 nt, Artificial Sequence
  Antisense Oligo
ggccaacauggugaaaccc

SEQ ID NO: 33313 - RNA, 19 nt, Artificial Sequence
  Sense Oligo
gguuucaccauguuggcca

SEQ ID NO: 33314 - RNA, 19 nt, Artificial Sequence
  Antisense Oligo
uggccaacauggugaaacc

SEQ ID NO: 33315 - RNA, 19 nt, Artificial Sequence
  Sense Oligo
guuucaccauguuggccag

SEQ ID NO: 33316 - RNA, 19 nt, Artificial Sequence
  Antisense Oligo
cuggccaacauggugaaac

SEQ ID NO: 33317 - RNA, 19 nt, Artificial Sequence
  Sense Oligo
caccauguuggccaggcug

SEQ ID NO: 33318 - RNA, 19 nt, Artificial Sequence
  Antisense Oligo
cagccuggccaacauggug

SEQ ID NO: 33319 - RNA, 19 nt, Artificial Sequence
  Sense Oligo
accauguuggccaggcugg

SEQ ID NO: 33320 - RNA, 19 nt, Artificial Sequence
  Antisense Oligo
ccagccuggccaacauggu

SEQ ID NO: 33321 - RNA, 19 nt, Artificial Sequence
  Sense Oligo
ccauguuggccaggcuggu

SEQ ID NO: 33322 - RNA, 19 nt, Artificial Sequence
  Antisense Oligo
accagccuggccaacaugg

SEQ ID NO: 33323 - RNA, 19 nt, Artificial Sequence
  Sense Oligo
cauguuggccaggcugguc

SEQ ID NO: 33324 - RNA, 19 nt, Artificial Sequence
  Antisense Oligo
gaccagccuggccaacaug

SEQ ID NO: 33325 - RNA, 19 nt, Artificial Sequence
  Sense Oligo
auguuggccaggcuggucu

SEQ ID NO: 33326 - RNA, 19 nt, Artificial Sequence
  Antisense Oligo
agaccagccuggccaacau

SEQ ID NO: 33327 - RNA, 19 nt, Artificial Sequence
  Sense Oligo
uguuggccaggcuggucuu

SEQ ID NO: 33328 - RNA, 19 nt, Artificial Sequence
  Antisense Oligo
aagaccagccuggccaaca

SEQ ID NO: 33329 - RNA, 19 nt, Artificial Sequence
  Sense Oligo
guuggccaggcuggucuug

SEQ ID NO: 33330 - RNA, 19 nt, Artificial Sequence
  Antisense Oligo
caagaccagccuggccaac

SEQ ID NO: 33331 - RNA, 19 nt, Artificial Sequence
  Sense Oligo
uuggccaggcuggucuuga

SEQ ID NO: 33332 - RNA, 19 nt, Artificial Sequence
  Antisense Oligo
ucaagaccagccuggccaa

SEQ ID NO: 33333 - RNA, 19 nt, Artificial Sequence
  Sense Oligo
uggccaggcuggucuugaa

SEQ ID NO: 33334 - RNA, 19 nt, Artificial Sequence
  Antisense Oligo
uucaagaccagccuggcca

SEQ ID NO: 33335 - RNA, 19 nt, Artificial Sequence
  Sense Oligo
aggugauccgccugucugg

SEQ ID NO: 33336 - RNA, 19 nt, Artificial Sequence
  Antisense Oligo
ccagacaggcggaucaccu

SEQ ID NO: 33337 - RNA, 19 nt, Artificial Sequence
  Sense Oligo
ccaaagugcugggauuaca

SEQ ID NO: 33338 - RNA, 19 nt, Artificial Sequence
  Antisense Oligo
uguaaucccagcacuuugg

SEQ ID NO: 33339 - RNA, 19 nt, Artificial Sequence
  Sense Oligo
caaagugcugggauuacag

SEQ ID NO: 33340 - RNA, 19 nt, Artificial Sequence
  Antisense Oligo
cuguaaucccagcacuuug

SEQ ID NO: 33341 - RNA, 19 nt, Artificial Sequence
  Sense Oligo
gugcugggauuacaggcgu

SEQ ID NO: 33342 - RNA, 19 nt, Artificial Sequence
  Antisense Oligo
acgccuguaaucccagcac

SEQ ID NO: 33343 - RNA, 19 nt, Artificial Sequence
  Sense Oligo
ugcugggauuacaggcgug

SEQ ID NO: 33344 - RNA, 19 nt, Artificial Sequence
  Antisense Oligo
cacgccuguaaucccagca

SEQ ID NO: 33345 - RNA, 19 nt, Artificial Sequence
  Sense Oligo
gcugggauuacaggcguga

SEQ ID NO: 33346 - RNA, 19 nt, Artificial Sequence
  Antisense Oligo
ucacgccuguaaucccagc

SEQ ID NO: 33347 - RNA, 19 nt, Artificial Sequence
  Sense Oligo
cugggauuacaggcgugag

SEQ ID NO: 33348 - RNA, 19 nt, Artificial Sequence
  Antisense Oligo
cucacgccuguaaucccag

SEQ ID NO: 33349 - RNA, 19 nt, Artificial Sequence
  Sense Oligo
ugggauuacaggcgugagc

SEQ ID NO: 33350 - RNA, 19 nt, Artificial Sequence
  Antisense Oligo
gcucacgccuguaauccca

SEQ ID NO: 33351 - RNA, 19 nt, Artificial Sequence
  Sense Oligo
auuacaggcgugagccacc

SEQ ID NO: 33352 - RNA, 19 nt, Artificial Sequence
  Antisense Oligo
gguggcucacgccuguaau

SEQ ID NO: 33353 - RNA, 19 nt, Artificial Sequence
  Sense Oligo
uuacaggcgugagccacca

SEQ ID NO: 33354 - RNA, 19 nt, Artificial Sequence
  Antisense Oligo
ugguggcucacgccuguaa

SEQ ID NO: 33355 - RNA, 19 nt, Artificial Sequence
  Sense Oligo
uacaggcgugagccaccau

SEQ ID NO: 33356 - RNA, 19 nt, Artificial Sequence
  Antisense Oligo
augguggcucacgccugua

SEQ ID NO: 33357 - RNA, 19 nt, Artificial Sequence
  Sense Oligo
acaggcgugagccaccaug

SEQ ID NO: 33358 - RNA, 19 nt, Artificial Sequence
  Antisense Oligo
caugguggcucacgccugu

SEQ ID NO: 33359 - RNA, 19 nt, Artificial Sequence
  Sense Oligo
caugccuggccgucuguuu

SEQ ID NO: 33360 - RNA, 19 nt, Artificial Sequence
  Antisense Oligo
aaacagacggccaggcaug

SEQ ID NO: 33361 - RNA, 19 nt, Artificial Sequence
  Sense Oligo
aauaauagauaucagcugc

SEQ ID NO: 33362 - RNA, 19 nt, Artificial Sequence
  Antisense Oligo
gcagcugauaucuauuauu

SEQ ID NO: 33363 - RNA, 19 nt, Artificial Sequence
  Sense Oligo
auagauaucagcugcuaag

SEQ ID NO: 33364 - RNA, 19 nt, Artificial Sequence
  Antisense Oligo
cuuagcagcugauaucuau

SEQ ID NO: 33365 - RNA, 19 nt, Artificial Sequence
  Sense Oligo
uagauaucagcugcuaaga

SEQ ID NO: 33366 - RNA, 19 nt, Artificial Sequence
  Antisense Oligo
ucuuagcagcugauaucua

SEQ ID NO: 33367 - RNA, 19 nt, Artificial Sequence
  Sense Oligo
agcugcuaagauuuggguu

SEQ ID NO: 33368 - RNA, 19 nt, Artificial Sequence
  Antisense Oligo
aacccaaaucuuagcagcu

SEQ ID NO: 33369 - RNA, 19 nt, Artificial Sequence
  Sense Oligo
gcugcuaagauuuggguuu

SEQ ID NO: 33370 - RNA, 19 nt, Artificial Sequence
  Antisense Oligo
aaacccaaaucuuagcagc

SEQ ID NO: 33371 - RNA, 19 nt, Artificial Sequence
  Sense Oligo
cugcuaagauuuggguuua

SEQ ID NO: 33372 - RNA, 19 nt, Artificial Sequence
  Antisense Oligo
uaaacccaaaucuuagcag

SEQ ID NO: 33373 - RNA, 19 nt, Artificial Sequence
  Sense Oligo
gcuaagauuuggguuuauc

SEQ ID NO: 33374 - RNA, 19 nt, Artificial Sequence
  Antisense Oligo
gauaaacccaaaucuuagc

SEQ ID NO: 33375 - RNA, 19 nt, Artificial Sequence
  Sense Oligo
ccuuacuuguaaauaguca

SEQ ID NO: 33376 - RNA, 19 nt, Artificial Sequence
  Antisense Oligo
ugacuauuuacaaguaagg

SEQ ID NO: 33377 - RNA, 19 nt, Artificial Sequence
  Sense Oligo
gauacugcauaugccuggu

SEQ ID NO: 33378 - RNA, 19 nt, Artificial Sequence
  Antisense Oligo
accaggcauaugcaguauc

SEQ ID NO: 33379 - RNA, 19 nt, Artificial Sequence
  Sense Oligo
auacugcauaugccuggug

SEQ ID NO: 33380 - RNA, 19 nt, Artificial Sequence
  Antisense Oligo
caccaggcauaugcaguau

SEQ ID NO: 33381 - RNA, 19 nt, Artificial Sequence
  Sense Oligo
uacugcauaugccuggugg

SEQ ID NO: 33382 - RNA, 19 nt, Artificial Sequence
  Antisense Oligo
ccaccaggcauaugcagua

SEQ ID NO: 33383 - RNA, 19 nt, Artificial Sequence
  Sense Oligo
acugcauaugccugguggg

SEQ ID NO: 33384 - RNA, 19 nt, Artificial Sequence
  Antisense Oligo
cccaccaggcauaugcagu

SEQ ID NO: 33385 - RNA, 19 nt, Artificial Sequence
  Sense Oligo
cugcauaugccuggugggc

SEQ ID NO: 33386 - RNA, 19 nt, Artificial Sequence
  Antisense Oligo
gcccaccaggcauaugcag

SEQ ID NO: 33387 - RNA, 19 nt, Artificial Sequence
  Sense Oligo
ugcauaugccuggugggcg

SEQ ID NO: 33388 - RNA, 19 nt, Artificial Sequence
  Antisense Oligo
cgcccaccaggcauaugca

SEQ ID NO: 33389 - RNA, 19 nt, Artificial Sequence
  Sense Oligo
gcauaugccuggugggcgu

SEQ ID NO: 33390 - RNA, 19 nt, Artificial Sequence
  Antisense Oligo
acgcccaccaggcauaugc

SEQ ID NO: 33391 - RNA, 19 nt, Artificial Sequence
  Sense Oligo
cauaugccuggugggcguu

SEQ ID NO: 33392 - RNA, 19 nt, Artificial Sequence
  Antisense Oligo
aacgcccaccaggcauaug

SEQ ID NO: 33393 - RNA, 19 nt, Artificial Sequence
  Sense Oligo
auaugccuggugggcguuc

SEQ ID NO: 33394 - RNA, 19 nt, Artificial Sequence
  Antisense Oligo
gaacgcccaccaggcauau

SEQ ID NO: 33395 - RNA, 19 nt, Artificial Sequence
  Sense Oligo
uaugccuggugggcguucu

SEQ ID NO: 33396 - RNA, 19 nt, Artificial Sequence
  Antisense Oligo
agaacgcccaccaggcaua

SEQ ID NO: 33397 - RNA, 19 nt, Artificial Sequence
  Sense Oligo
augccuggugggcguucug

SEQ ID NO: 33398 - RNA, 19 nt, Artificial Sequence
  Antisense Oligo
cagaacgcccaccaggcau

SEQ ID NO: 33399 - RNA, 19 nt, Artificial Sequence
  Sense Oligo
ccuggugggcguucugcau

SEQ ID NO: 33400 - RNA, 19 nt, Artificial Sequence
  Antisense Oligo
augcagaacgcccaccagg

SEQ ID NO: 33401 - RNA, 19 nt, Artificial Sequence
  Sense Oligo
cuggugggcguucugcauu

SEQ ID NO: 33402 - RNA, 19 nt, Artificial Sequence
  Antisense Oligo
aaugcagaacgcccaccag

SEQ ID NO: 33403 - RNA, 19 nt, Artificial Sequence
  Sense Oligo
uggugggcguucugcauuu

SEQ ID NO: 33404 - RNA, 19 nt, Artificial Sequence
  Antisense Oligo
aaaugcagaacgcccacca

SEQ ID NO: 33405 - RNA, 19 nt, Artificial Sequence
  Sense Oligo
ggugggcguucugcauuuu

SEQ ID NO: 33406 - RNA, 19 nt, Artificial Sequence
  Antisense Oligo
aaaaugcagaacgcccacc

SEQ ID NO: 33407 - RNA, 19 nt, Artificial Sequence
  Sense Oligo
uugugaccucugauacccu

SEQ ID NO: 33408 - RNA, 19 nt, Artificial Sequence
  Antisense Oligo
aggguaucagaggucacaa

SEQ ID NO: 33409 - RNA, 19 nt, Artificial Sequence
  Sense Oligo
ugugaccucugauacccug

SEQ ID NO: 33410 - RNA, 19 nt, Artificial Sequence
  Antisense Oligo
caggguaucagaggucaca

SEQ ID NO: 33411 - RNA, 19 nt, Artificial Sequence
  Sense Oligo
gugaccucugauacccuga

SEQ ID NO: 33412 - RNA, 19 nt, Artificial Sequence
  Antisense Oligo
ucaggguaucagaggucac

SEQ ID NO: 33413 - RNA, 19 nt, Artificial Sequence
  Sense Oligo
gggucagcagacagaaugc

SEQ ID NO: 33414 - RNA, 19 nt, Artificial Sequence
  Antisense Oligo
gcauucugucugcugaccc

SEQ ID NO: 33415 - RNA, 19 nt, Artificial Sequence
  Sense Oligo
aaaugugccagugagcgau

SEQ ID NO: 33416 - RNA, 19 nt, Artificial Sequence
  Antisense Oligo
aucgcucacuggcacauuu

SEQ ID NO: 33417 - RNA, 19 nt, Artificial Sequence
  Sense Oligo
aaugugccagugagcgaug

SEQ ID NO: 33418 - RNA, 19 nt, Artificial Sequence
  Antisense Oligo
caucgcucacuggcacauu

SEQ ID NO: 33419 - RNA, 19 nt, Artificial Sequence
  Sense Oligo
ugccagugagcgaugggau

SEQ ID NO: 33420 - RNA, 19 nt, Artificial Sequence
  Antisense Oligo
aucccaucgcucacuggca

SEQ ID NO: 33421 - RNA, 19 nt, Artificial Sequence
  Sense Oligo
gccagugagcgaugggaug

SEQ ID NO: 33422 - RNA, 19 nt, Artificial Sequence
  Antisense Oligo
caucccaucgcucacuggc

SEQ ID NO: 33423 - RNA, 19 nt, Artificial Sequence
  Sense Oligo
ccagugagcgaugggaugg

SEQ ID NO: 33424 - RNA, 19 nt, Artificial Sequence
  Antisense Oligo
ccaucccaucgcucacugg

SEQ ID NO: 33425 - RNA, 19 nt, Artificial Sequence
  Sense Oligo
cagugagcgaugggauggg

SEQ ID NO: 33426 - RNA, 19 nt, Artificial Sequence
  Antisense Oligo
cccaucccaucgcucacug

SEQ ID NO: 33427 - RNA, 19 nt, Artificial Sequence
  Sense Oligo
agugagcgaugggaugggu

SEQ ID NO: 33428 - RNA, 19 nt, Artificial Sequence
  Antisense Oligo
acccaucccaucgcucacu

SEQ ID NO: 33429 - RNA, 19 nt, Artificial Sequence
  Sense Oligo
gugagcgaugggaugggug

SEQ ID NO: 33430 - RNA, 19 nt, Artificial Sequence
  Antisense Oligo
cacccaucccaucgcucac

SEQ ID NO: 33431 - RNA, 19 nt, Artificial Sequence
  Sense Oligo
ugagcgaugggaugggugu

SEQ ID NO: 33432 - RNA, 19 nt, Artificial Sequence
  Antisense Oligo
acacccaucccaucgcuca

SEQ ID NO: 33433 - RNA, 19 nt, Artificial Sequence
  Sense Oligo
gagcgaugggauggguguu

SEQ ID NO: 33434 - RNA, 19 nt, Artificial Sequence
  Antisense Oligo
aacacccaucccaucgcuc

SEQ ID NO: 33435 - RNA, 19 nt, Artificial Sequence
  Sense Oligo
agcgaugggauggguguug

SEQ ID NO: 33436 - RNA, 19 nt, Artificial Sequence
  Antisense Oligo
caacacccaucccaucgcu

SEQ ID NO: 33437 - RNA, 19 nt, Artificial Sequence
  Sense Oligo
gcgaugggauggguguugu

SEQ ID NO: 33438 - RNA, 19 nt, Artificial Sequence
  Antisense Oligo
acaacacccaucccaucgc

SEQ ID NO: 33439 - RNA, 19 nt, Artificial Sequence
  Sense Oligo
cgaugggauggguguuguc

SEQ ID NO: 33440 - RNA, 19 nt, Artificial Sequence
  Antisense Oligo
gacaacacccaucccaucg

SEQ ID NO: 33441 - RNA, 19 nt, Artificial Sequence
  Sense Oligo
gaugggauggguguugucu

SEQ ID NO: 33442 - RNA, 19 nt, Artificial Sequence
  Antisense Oligo
agacaacacccaucccauc

SEQ ID NO: 33443 - RNA, 19 nt, Artificial Sequence
  Sense Oligo
augggauggguguugucug

SEQ ID NO: 33444 - RNA, 19 nt, Artificial Sequence
  Antisense Oligo
cagacaacacccaucccau

SEQ ID NO: 33445 - RNA, 19 nt, Artificial Sequence
  Sense Oligo
ugggauggguguugucuga

SEQ ID NO: 33446 - RNA, 19 nt, Artificial Sequence
  Antisense Oligo
ucagacaacacccauccca

SEQ ID NO: 33447 - RNA, 19 nt, Artificial Sequence
  Sense Oligo
gggauggguguugucugag

SEQ ID NO: 33448 - RNA, 19 nt, Artificial Sequence
  Antisense Oligo
cucagacaacacccauccc

SEQ ID NO: 33449 - RNA, 19 nt, Artificial Sequence
  Sense Oligo
ggauggguguugucugagc

SEQ ID NO: 33450 - RNA, 19 nt, Artificial Sequence
  Antisense Oligo
gcucagacaacacccaucc

SEQ ID NO: 33451 - RNA, 19 nt, Artificial Sequence
  Sense Oligo
gauggguguugucugagcu

SEQ ID NO: 33452 - RNA, 19 nt, Artificial Sequence
  Antisense Oligo
agcucagacaacacccauc

SEQ ID NO: 33453 - RNA, 19 nt, Artificial Sequence
  Sense Oligo
auggguguugucugagcug

SEQ ID NO: 33454 - RNA, 19 nt, Artificial Sequence
  Antisense Oligo
cagcucagacaacacccau

SEQ ID NO: 33455 - RNA, 19 nt, Artificial Sequence
  Sense Oligo
uggguguugucugagcugu

SEQ ID NO: 33456 - RNA, 19 nt, Artificial Sequence
  Antisense Oligo
acagcucagacaacaccca

SEQ ID NO: 33457 - RNA, 19 nt, Artificial Sequence
  Sense Oligo
ggguguugucugagcuguu

SEQ ID NO: 33458 - RNA, 19 nt, Artificial Sequence
  Antisense Oligo
aacagcucagacaacaccc

SEQ ID NO: 33459 - RNA, 19 nt, Artificial Sequence
  Sense Oligo
gguguugucugagcuguuc

SEQ ID NO: 33460 - RNA, 19 nt, Artificial Sequence
  Antisense Oligo
gaacagcucagacaacacc

SEQ ID NO: 33461 - RNA, 19 nt, Artificial Sequence
  Sense Oligo
ugucugagcuguucucuga

SEQ ID NO: 33462 - RNA, 19 nt, Artificial Sequence
  Antisense Oligo
ucagagaacagcucagaca

SEQ ID NO: 33463 - RNA, 19 nt, Artificial Sequence
  Sense Oligo
gucugagcuguucucugag

SEQ ID NO: 33464 - RNA, 19 nt, Artificial Sequence
  Antisense Oligo
cucagagaacagcucagac

SEQ ID NO: 33465 - RNA, 19 nt, Artificial Sequence
  Sense Oligo
ucugagcuguucucugagc

SEQ ID NO: 33466 - RNA, 19 nt, Artificial Sequence
  Antisense Oligo
gcucagagaacagcucaga

SEQ ID NO: 33467 - RNA, 19 nt, Artificial Sequence
  Sense Oligo
cugagcuguucucugagcg

SEQ ID NO: 33468 - RNA, 19 nt, Artificial Sequence
  Antisense Oligo
cgcucagagaacagcucag

SEQ ID NO: 33469 - RNA, 19 nt, Artificial Sequence
  Sense Oligo
ugagcuguucucugagcgg

SEQ ID NO: 33470 - RNA, 19 nt, Artificial Sequence
  Antisense Oligo
ccgcucagagaacagcuca

SEQ ID NO: 33471 - RNA, 19 nt, Artificial Sequence
  Sense Oligo
gagcuguucucugagcggc

SEQ ID NO: 33472 - RNA, 19 nt, Artificial Sequence
  Antisense Oligo
gccgcucagagaacagcuc

SEQ ID NO: 33473 - RNA, 19 nt, Artificial Sequence
  Sense Oligo
agcuguucucugagcggcu

SEQ ID NO: 33474 - RNA, 19 nt, Artificial Sequence
  Antisense Oligo
agccgcucagagaacagcu

SEQ ID NO: 33475 - RNA, 19 nt, Artificial Sequence
  Sense Oligo
gcuguucucugagcggcuc

SEQ ID NO: 33476 - RNA, 19 nt, Artificial Sequence
  Antisense Oligo
gagccgcucagagaacagc

SEQ ID NO: 33477 - RNA, 19 nt, Artificial Sequence
  Sense Oligo
cuguucucugagcggcucg

SEQ ID NO: 33478 - RNA, 19 nt, Artificial Sequence
  Antisense Oligo
cgagccgcucagagaacag

SEQ ID NO: 33479 - RNA, 19 nt, Artificial Sequence
  Sense Oligo
uguucucugagcggcucgg

SEQ ID NO: 33480 - RNA, 19 nt, Artificial Sequence
  Antisense Oligo
ccgagccgcucagagaaca

SEQ ID NO: 33481 - RNA, 19 nt, Artificial Sequence
  Sense Oligo
cgggcacuuccagucuucg

SEQ ID NO: 33482 - RNA, 19 nt, Artificial Sequence
  Antisense Oligo
cgaagacuggaagugcccg

SEQ ID NO: 33483 - RNA, 19 nt, Artificial Sequence
  Sense Oligo
gggcacuuccagucuucgu

SEQ ID NO: 33484 - RNA, 19 nt, Artificial Sequence
  Antisense Oligo
acgaagacuggaagugccc

SEQ ID NO: 33485 - RNA, 19 nt, Artificial Sequence
  Sense Oligo
ggcacuuccagucuucguu

SEQ ID NO: 33486 - RNA, 19 nt, Artificial Sequence
  Antisense Oligo
aacgaagacuggaagugcc

SEQ ID NO: 33487 - RNA, 19 nt, Artificial Sequence
  Sense Oligo
gcacuuccagucuucguuc

SEQ ID NO: 33488 - RNA, 19 nt, Artificial Sequence
  Antisense Oligo
gaacgaagacuggaagugc

SEQ ID NO: 33489 - RNA, 19 nt, Artificial Sequence
  Sense Oligo
cacuuccagucuucguuca

SEQ ID NO: 33490 - RNA, 19 nt, Artificial Sequence
  Antisense Oligo
ugaacgaagacuggaagug

SEQ ID NO: 33491 - RNA, 19 nt, Artificial Sequence
  Sense Oligo
acuuccagucuucguucac

SEQ ID NO: 33492 - RNA, 19 nt, Artificial Sequence
  Antisense Oligo
gugaacgaagacuggaagu

SEQ ID NO: 33493 - RNA, 19 nt, Artificial Sequence
  Sense Oligo
cuuccagucuucguucacc

SEQ ID NO: 33494 - RNA, 19 nt, Artificial Sequence
  Antisense Oligo
ggugaacgaagacuggaag

SEQ ID NO: 33495 - RNA, 19 nt, Artificial Sequence
  Sense Oligo
uuccagucuucguucaccu

SEQ ID NO: 33496 - RNA, 19 nt, Artificial Sequence
  Antisense Oligo
aggugaacgaagacuggaa

SEQ ID NO: 33497 - RNA, 19 nt, Artificial Sequence
  Sense Oligo
uccagucuucguucaccuc

SEQ ID NO: 33498 - RNA, 19 nt, Artificial Sequence
  Antisense Oligo
gaggugaacgaagacugga

SEQ ID NO: 33499 - RNA, 19 nt, Artificial Sequence
  Sense Oligo
ccagucuucguucaccucc

SEQ ID NO: 33500 - RNA, 19 nt, Artificial Sequence
  Antisense Oligo
ggaggugaacgaagacugg

SEQ ID NO: 33501 - RNA, 19 nt, Artificial Sequence
  Sense Oligo
ucuucguucaccuccuuug

SEQ ID NO: 33502 - RNA, 19 nt, Artificial Sequence
  Antisense Oligo
caaaggaggugaacgaaga

SEQ ID NO: 33503 - RNA, 19 nt, Artificial Sequence
  Sense Oligo
cuucguucaccuccuuugu

SEQ ID NO: 33504 - RNA, 19 nt, Artificial Sequence
  Antisense Oligo
acaaaggaggugaacgaag

SEQ ID NO: 33505 - RNA, 19 nt, Artificial Sequence
  Sense Oligo
guucaccuccuuuguucac

SEQ ID NO: 33506 - RNA, 19 nt, Artificial Sequence
  Antisense Oligo
gugaacaaaggaggugaac

SEQ ID NO: 33507 - RNA, 19 nt, Artificial Sequence
  Sense Oligo
gauccagcaccugugacuu

SEQ ID NO: 33508 - RNA, 19 nt, Artificial Sequence
  Antisense Oligo
aagucacaggugcuggauc

SEQ ID NO: 33509 - RNA, 19 nt, Artificial Sequence
  Sense Oligo
agcaccugugacuugagga

SEQ ID NO: 33510 - RNA, 19 nt, Artificial Sequence
  Antisense Oligo
uccucaagucacaggugcu

SEQ ID NO: 33511 - RNA, 19 nt, Artificial Sequence
  Sense Oligo
gcaccugugacuugaggau

SEQ ID NO: 33512 - RNA, 19 nt, Artificial Sequence
  Antisense Oligo
auccucaagucacaggugc

SEQ ID NO: 33513 - RNA, 19 nt, Artificial Sequence
  Sense Oligo
caccugugacuugaggauc

SEQ ID NO: 33514 - RNA, 19 nt, Artificial Sequence
  Antisense Oligo
gauccucaagucacaggug

SEQ ID NO: 33515 - RNA, 19 nt, Artificial Sequence
  Sense Oligo
accugugacuugaggaucc

SEQ ID NO: 33516 - RNA, 19 nt, Artificial Sequence
  Antisense Oligo
ggauccucaagucacaggu

SEQ ID NO: 33517 - RNA, 19 nt, Artificial Sequence
  Sense Oligo
ccugugacuugaggauccc

SEQ ID NO: 33518 - RNA, 19 nt, Artificial Sequence
  Antisense Oligo
gggauccucaagucacagg

SEQ ID NO: 33519 - RNA, 19 nt, Artificial Sequence
  Sense Oligo
gugucacauucucagccca

SEQ ID NO: 33520 - RNA, 19 nt, Artificial Sequence
  Antisense Oligo
ugggcugagaaugugacac

SEQ ID NO: 33521 - RNA, 19 nt, Artificial Sequence
  Sense Oligo
ugucacauucucagcccag

SEQ ID NO: 33522 - RNA, 19 nt, Artificial Sequence
  Antisense Oligo
cugggcugagaaugugaca

SEQ ID NO: 33523 - RNA, 19 nt, Artificial Sequence
  Sense Oligo
gucacauucucagcccagg

SEQ ID NO: 33524 - RNA, 19 nt, Artificial Sequence
  Antisense Oligo
ccugggcugagaaugugac

SEQ ID NO: 33525 - RNA, 19 nt, Artificial Sequence
  Sense Oligo
ucacauucucagcccaggg

SEQ ID NO: 33526 - RNA, 19 nt, Artificial Sequence
  Antisense Oligo
cccugggcugagaauguga

SEQ ID NO: 33527 - RNA, 19 nt, Artificial Sequence
  Sense Oligo
uucucagcccagggagucc

SEQ ID NO: 33528 - RNA, 19 nt, Artificial Sequence
  Antisense Oligo
ggacucccugggcugagaa

SEQ ID NO: 33529 - RNA, 19 nt, Artificial Sequence
  Sense Oligo
ucucagcccagggaguccu

SEQ ID NO: 33530 - RNA, 19 nt, Artificial Sequence
  Antisense Oligo
aggacucccugggcugaga

SEQ ID NO: 33531 - RNA, 19 nt, Artificial Sequence
  Sense Oligo
cucagcccagggaguccuu

SEQ ID NO: 33532 - RNA, 19 nt, Artificial Sequence
  Antisense Oligo
aaggacucccugggcugag

SEQ ID NO: 33533 - RNA, 19 nt, Artificial Sequence
  Sense Oligo
ucagcccagggaguccuuu

SEQ ID NO: 33534 - RNA, 19 nt, Artificial Sequence
  Antisense Oligo
aaaggacucccugggcuga

SEQ ID NO: 33535 - RNA, 19 nt, Artificial Sequence
  Sense Oligo
cccagggaguccuuucuua

SEQ ID NO: 33536 - RNA, 19 nt, Artificial Sequence
  Antisense Oligo
uaagaaaggacucccuggg

SEQ ID NO: 33537 - RNA, 19 nt, Artificial Sequence
  Sense Oligo
ccagggaguccuuucuuac

SEQ ID NO: 33538 - RNA, 19 nt, Artificial Sequence
  Antisense Oligo
guaagaaaggacucccugg

SEQ ID NO: 33539 - RNA, 19 nt, Artificial Sequence
  Sense Oligo
cagggaguccuuucuuaca

SEQ ID NO: 33540 - RNA, 19 nt, Artificial Sequence
  Antisense Oligo
uguaagaaaggacucccug

SEQ ID NO: 33541 - RNA, 19 nt, Artificial Sequence
  Sense Oligo
agggaguccuuucuuacac

SEQ ID NO: 33542 - RNA, 19 nt, Artificial Sequence
  Antisense Oligo
guguaagaaaggacucccu

SEQ ID NO: 33543 - RNA, 19 nt, Artificial Sequence
  Sense Oligo
ccuccaucaacucuccucu

SEQ ID NO: 33544 - RNA, 19 nt, Artificial Sequence
  Antisense Oligo
agaggagaguugauggagg

SEQ ID NO: 33545 - RNA, 19 nt, Artificial Sequence
  Sense Oligo
cuccaucaacucuccucuu

SEQ ID NO: 33546 - RNA, 19 nt, Artificial Sequence
  Antisense Oligo
aagaggagaguugauggag

SEQ ID NO: 33547 - RNA, 19 nt, Artificial Sequence
  Sense Oligo
uccaucaacucuccucuua

SEQ ID NO: 33548 - RNA, 19 nt, Artificial Sequence
  Antisense Oligo
uaagaggagaguugaugga

SEQ ID NO: 33549 - RNA, 19 nt, Artificial Sequence
  Sense Oligo
ccaucaacucuccucuuaa

SEQ ID NO: 33550 - RNA, 19 nt, Artificial Sequence
  Antisense Oligo
uuaagaggagaguugaugg

SEQ ID NO: 33551 - RNA, 19 nt, Artificial Sequence
  Sense Oligo
caucaacucuccucuuaag

SEQ ID NO: 33552 - RNA, 19 nt, Artificial Sequence
  Antisense Oligo
cuuaagaggagaguugaug

SEQ ID NO: 33553 - RNA, 19 nt, Artificial Sequence
  Sense Oligo
aucaacucuccucuuaagc

SEQ ID NO: 33554 - RNA, 19 nt, Artificial Sequence
  Antisense Oligo
gcuuaagaggagaguugau

SEQ ID NO: 33555 - RNA, 19 nt, Artificial Sequence
  Sense Oligo
uuaagcuccuccuaagugu

SEQ ID NO: 33556 - RNA, 19 nt, Artificial Sequence
  Antisense Oligo
acacuuaggaggagcuuaa

SEQ ID NO: 33557 - RNA, 19 nt, Artificial Sequence
  Sense Oligo
uaagcuccuccuaaguguc

SEQ ID NO: 33558 - RNA, 19 nt, Artificial Sequence
  Antisense Oligo
gacacuuaggaggagcuua

SEQ ID NO: 33559 - RNA, 19 nt, Artificial Sequence
  Sense Oligo
aagcuccuccuaagugucc

SEQ ID NO: 33560 - RNA, 19 nt, Artificial Sequence
  Antisense Oligo
ggacacuuaggaggagcuu

SEQ ID NO: 33561 - RNA, 19 nt, Artificial Sequence
  Sense Oligo
agcuccuccuaaguguccu

SEQ ID NO: 33562 - RNA, 19 nt, Artificial Sequence
  Antisense Oligo
aggacacuuaggaggagcu

SEQ ID NO: 33563 - RNA, 19 nt, Artificial Sequence
  Sense Oligo
gcuccuccuaaguguccuc

SEQ ID NO: 33564 - RNA, 19 nt, Artificial Sequence
  Antisense Oligo
gaggacacuuaggaggagc

SEQ ID NO: 33565 - RNA, 19 nt, Artificial Sequence
  Sense Oligo
cuccuccuaaguguccucu

SEQ ID NO: 33566 - RNA, 19 nt, Artificial Sequence
  Antisense Oligo
agaggacacuuaggaggag

SEQ ID NO: 33567 - RNA, 19 nt, Artificial Sequence
  Sense Oligo
aaguguccucuuaagucuc

SEQ ID NO: 33568 - RNA, 19 nt, Artificial Sequence
  Antisense Oligo
gagacuuaagaggacacuu

SEQ ID NO: 33569 - RNA, 19 nt, Artificial Sequence
  Sense Oligo
aguguccucuuaagucucu

SEQ ID NO: 33570 - RNA, 19 nt, Artificial Sequence
  Antisense Oligo
agagacuuaagaggacacu

SEQ ID NO: 33571 - RNA, 19 nt, Artificial Sequence
  Sense Oligo
guguccucuuaagucucuc

SEQ ID NO: 33572 - RNA, 19 nt, Artificial Sequence
  Antisense Oligo
gagagacuuaagaggacac

SEQ ID NO: 33573 - RNA, 19 nt, Artificial Sequence
  Sense Oligo
ccucuuaagucucuccuga

SEQ ID NO: 33574 - RNA, 19 nt, Artificial Sequence
  Antisense Oligo
ucaggagagacuuaagagg

SEQ ID NO: 33575 - RNA, 19 nt, Artificial Sequence
  Sense Oligo
cucuuaagucucuccugag

SEQ ID NO: 33576 - RNA, 19 nt, Artificial Sequence
  Antisense Oligo
cucaggagagacuuaagag

SEQ ID NO: 33577 - RNA, 19 nt, Artificial Sequence
  Sense Oligo
ugagucccucccaaggcuc

SEQ ID NO: 33578 - RNA, 19 nt, Artificial Sequence
  Antisense Oligo
gagccuugggagggacuca

SEQ ID NO: 33579 - RNA, 19 nt, Artificial Sequence
  Sense Oligo
ucccaaggcuccuccugag

SEQ ID NO: 33580 - RNA, 19 nt, Artificial Sequence
  Antisense Oligo
cucaggaggagccuuggga

SEQ ID NO: 33581 - RNA, 19 nt, Artificial Sequence
  Sense Oligo
aaggcuccuccugaguccc

SEQ ID NO: 33582 - RNA, 19 nt, Artificial Sequence
  Antisense Oligo
gggacucaggaggagccuu

SEQ ID NO: 33583 - RNA, 19 nt, Artificial Sequence
  Sense Oligo
aggcuccuccugagucccu

SEQ ID NO: 33584 - RNA, 19 nt, Artificial Sequence
  Antisense Oligo
agggacucaggaggagccu

SEQ ID NO: 33585 - RNA, 19 nt, Artificial Sequence
  Sense Oligo
cuccugagucccuccuaag

SEQ ID NO: 33586 - RNA, 19 nt, Artificial Sequence
  Antisense Oligo
cuuaggagggacucaggag

SEQ ID NO: 33587 - RNA, 19 nt, Artificial Sequence
  Sense Oligo
uccugagucccuccuaagc

SEQ ID NO: 33588 - RNA, 19 nt, Artificial Sequence
  Antisense Oligo
gcuuaggagggacucagga

SEQ ID NO: 33589 - RNA, 19 nt, Artificial Sequence
  Sense Oligo
ccugagucccuccuaagcc

SEQ ID NO: 33590 - RNA, 19 nt, Artificial Sequence
  Antisense Oligo
ggcuuaggagggacucagg

SEQ ID NO: 33591 - RNA, 19 nt, Artificial Sequence
  Sense Oligo
cugagucccuccuaagccu

SEQ ID NO: 33592 - RNA, 19 nt, Artificial Sequence
  Antisense Oligo
aggcuuaggagggacucag

SEQ ID NO: 33593 - RNA, 19 nt, Artificial Sequence
  Sense Oligo
cuccuaagccuccuucuga

SEQ ID NO: 33594 - RNA, 19 nt, Artificial Sequence
  Antisense Oligo
ucagaaggaggcuuaggag

SEQ ID NO: 33595 - RNA, 19 nt, Artificial Sequence
  Sense Oligo
uccuaagccuccuucugag

SEQ ID NO: 33596 - RNA, 19 nt, Artificial Sequence
  Antisense Oligo
cucagaaggaggcuuagga

SEQ ID NO: 33597 - RNA, 19 nt, Artificial Sequence
  Sense Oligo
aagccuccuucugaguccc

SEQ ID NO: 33598 - RNA, 19 nt, Artificial Sequence
  Antisense Oligo
gggacucagaaggaggcuu

SEQ ID NO: 33599 - RNA, 19 nt, Artificial Sequence
  Sense Oligo
agccuccuucugagucccu

SEQ ID NO: 33600 - RNA, 19 nt, Artificial Sequence
  Antisense Oligo
agggacucagaaggaggcu

SEQ ID NO: 33601 - RNA, 19 nt, Artificial Sequence
  Sense Oligo
gccuccuucugagucccuc

SEQ ID NO: 33602 - RNA, 19 nt, Artificial Sequence
  Antisense Oligo
gagggacucagaaggaggc

SEQ ID NO: 33603 - RNA, 19 nt, Artificial Sequence
  Sense Oligo
cuucugagucccuccuaag

SEQ ID NO: 33604 - RNA, 19 nt, Artificial Sequence
  Antisense Oligo
cuuaggagggacucagaag

SEQ ID NO: 33605 - RNA, 19 nt, Artificial Sequence
  Sense Oligo
uucugagucccuccuaagc

SEQ ID NO: 33606 - RNA, 19 nt, Artificial Sequence
  Antisense Oligo
gcuuaggagggacucagaa

SEQ ID NO: 33607 - RNA, 19 nt, Artificial Sequence
  Sense Oligo
ucugagucccuccuaagcc

SEQ ID NO: 33608 - RNA, 19 nt, Artificial Sequence
  Antisense Oligo
ggcuuaggagggacucaga

SEQ ID NO: 33609 - RNA, 19 nt, Artificial Sequence
  Sense Oligo
cugagucccuccuaagccu

SEQ ID NO: 33610 - RNA, 19 nt, Artificial Sequence
  Antisense Oligo
aggcuuaggagggacucag

SEQ ID NO: 33611 - RNA, 19 nt, Artificial Sequence
  Sense Oligo
uccuaagccuccuccuaag

SEQ ID NO: 33612 - RNA, 19 nt, Artificial Sequence
  Antisense Oligo
cuuaggaggaggcuuagga

SEQ ID NO: 33613 - RNA, 19 nt, Artificial Sequence
  Sense Oligo
ccuaagccuccuccuaagu

SEQ ID NO: 33614 - RNA, 19 nt, Artificial Sequence
  Antisense Oligo
acuuaggaggaggcuuagg

SEQ ID NO: 33615 - RNA, 19 nt, Artificial Sequence
  Sense Oligo
cuaagccuccuccuaaguc

SEQ ID NO: 33616 - RNA, 19 nt, Artificial Sequence
  Antisense Oligo
gacuuaggaggaggcuuag

SEQ ID NO: 33617 - RNA, 19 nt, Artificial Sequence
  Sense Oligo
uaagccuccuccuaagucc

SEQ ID NO: 33618 - RNA, 19 nt, Artificial Sequence
  Antisense Oligo
ggacuuaggaggaggcuua

SEQ ID NO: 33619 - RNA, 19 nt, Artificial Sequence
  Sense Oligo
aagccuccuccuaaguccc

SEQ ID NO: 33620 - RNA, 19 nt, Artificial Sequence
  Antisense Oligo
gggacuuaggaggaggcuu

SEQ ID NO: 33621 - RNA, 19 nt, Artificial Sequence
  Sense Oligo
gagucccuaccgagucccu

SEQ ID NO: 33622 - RNA, 19 nt, Artificial Sequence
  Antisense Oligo
agggacucgguagggacuc

SEQ ID NO: 33623 - RNA, 19 nt, Artificial Sequence
  Sense Oligo
agucccuaccgagucccuc

SEQ ID NO: 33624 - RNA, 19 nt, Artificial Sequence
  Antisense Oligo
gagggacucgguagggacu

SEQ ID NO: 33625 - RNA, 19 nt, Artificial Sequence
  Sense Oligo
cuaccgagucccuccuaag

SEQ ID NO: 33626 - RNA, 19 nt, Artificial Sequence
  Antisense Oligo
cuuaggagggacucgguag

SEQ ID NO: 33627 - RNA, 19 nt, Artificial Sequence
  Sense Oligo
uaccgagucccuccuaagg

SEQ ID NO: 33628 - RNA, 19 nt, Artificial Sequence
  Antisense Oligo
ccuuaggagggacucggua

SEQ ID NO: 33629 - RNA, 19 nt, Artificial Sequence
  Sense Oligo
accgagucccuccuaaggc

SEQ ID NO: 33630 - RNA, 19 nt, Artificial Sequence
  Antisense Oligo
gccuuaggagggacucggu

SEQ ID NO: 33631 - RNA, 19 nt, Artificial Sequence
  Sense Oligo
ccgagucccuccuaaggcu

SEQ ID NO: 33632 - RNA, 19 nt, Artificial Sequence
  Antisense Oligo
agccuuaggagggacucgg

SEQ ID NO: 33633 - RNA, 19 nt, Artificial Sequence
  Sense Oligo
cgagucccuccuaaggcuc

SEQ ID NO: 33634 - RNA, 19 nt, Artificial Sequence
  Antisense Oligo
gagccuuaggagggacucg

SEQ ID NO: 33635 - RNA, 19 nt, Artificial Sequence
  Sense Oligo
uccuaaggcuccuccuaag

SEQ ID NO: 33636 - RNA, 19 nt, Artificial Sequence
  Antisense Oligo
cuuaggaggagccuuagga

SEQ ID NO: 33637 - RNA, 19 nt, Artificial Sequence
  Sense Oligo
ccuaaggcuccuccuaagu

SEQ ID NO: 33638 - RNA, 19 nt, Artificial Sequence
  Antisense Oligo
acuuaggaggagccuuagg

SEQ ID NO: 33639 - RNA, 19 nt, Artificial Sequence
  Sense Oligo
cuaaggcuccuccuaaguc

SEQ ID NO: 33640 - RNA, 19 nt, Artificial Sequence
  Antisense Oligo
gacuuaggaggagccuuag

SEQ ID NO: 33641 - RNA, 19 nt, Artificial Sequence
  Sense Oligo
uaaggcuccuccuaagucc

SEQ ID NO: 33642 - RNA, 19 nt, Artificial Sequence
  Antisense Oligo
ggacuuaggaggagccuua

SEQ ID NO: 33643 - RNA, 19 nt, Artificial Sequence
  Sense Oligo
aaggcuccuccuaaguccc

SEQ ID NO: 33644 - RNA, 19 nt, Artificial Sequence
  Antisense Oligo
gggacuuaggaggagccuu

SEQ ID NO: 33645 - RNA, 19 nt, Artificial Sequence
  Sense Oligo
aggcuccuccuaagucccu

SEQ ID NO: 33646 - RNA, 19 nt, Artificial Sequence
  Antisense Oligo
agggacuuaggaggagccu

SEQ ID NO: 33647 - RNA, 19 nt, Artificial Sequence
  Sense Oligo
ggcuccuccuaagucccug

SEQ ID NO: 33648 - RNA, 19 nt, Artificial Sequence
  Antisense Oligo
cagggacuuaggaggagcc

SEQ ID NO: 33649 - RNA, 19 nt, Artificial Sequence
  Sense Oligo
ccuccuaagucccugcucu

SEQ ID NO: 33650 - RNA, 19 nt, Artificial Sequence
  Antisense Oligo
agagcagggacuuaggagg

SEQ ID NO: 33651 - RNA, 19 nt, Artificial Sequence
  Sense Oligo
cuccuaagucccugcucug

SEQ ID NO: 33652 - RNA, 19 nt, Artificial Sequence
  Antisense Oligo
cagagcagggacuuaggag

SEQ ID NO: 33653 - RNA, 19 nt, Artificial Sequence
  Sense Oligo
ccuaagucccugcucuguc

SEQ ID NO: 33654 - RNA, 19 nt, Artificial Sequence
  Antisense Oligo
gacagagcagggacuuagg

SEQ ID NO: 33655 - RNA, 19 nt, Artificial Sequence
  Sense Oligo
uaagucccugcucugucca

SEQ ID NO: 33656 - RNA, 19 nt, Artificial Sequence
  Antisense Oligo
uggacagagcagggacuua

SEQ ID NO: 33657 - RNA, 19 nt, Artificial Sequence
  Sense Oligo
aagucccugcucuguccau

SEQ ID NO: 33658 - RNA, 19 nt, Artificial Sequence
  Antisense Oligo
auggacagagcagggacuu

SEQ ID NO: 33659 - RNA, 19 nt, Artificial Sequence
  Sense Oligo
cugcucuguccaugugucc

SEQ ID NO: 33660 - RNA, 19 nt, Artificial Sequence
  Antisense Oligo
ggacacauggacagagcag

SEQ ID NO: 33661 - RNA, 19 nt, Artificial Sequence
  Sense Oligo
ugcucuguccauguguccc

SEQ ID NO: 33662 - RNA, 19 nt, Artificial Sequence
  Antisense Oligo
gggacacauggacagagca

SEQ ID NO: 33663 - RNA, 19 nt, Artificial Sequence
  Sense Oligo
gcucuguccaugugucccu

SEQ ID NO: 33664 - RNA, 19 nt, Artificial Sequence
  Antisense Oligo
agggacacauggacagagc

SEQ ID NO: 33665 - RNA, 19 nt, Artificial Sequence
  Sense Oligo
cucuguccaugugucccuc

SEQ ID NO: 33666 - RNA, 19 nt, Artificial Sequence
  Antisense Oligo
gagggacacauggacagag

SEQ ID NO: 33667 - RNA, 19 nt, Artificial Sequence
  Sense Oligo
ucuguccaugugucccuca

SEQ ID NO: 33668 - RNA, 19 nt, Artificial Sequence
  Antisense Oligo
ugagggacacauggacaga

SEQ ID NO: 33669 - RNA, 19 nt, Artificial Sequence
  Sense Oligo
cuguccaugugucccucag

SEQ ID NO: 33670 - RNA, 19 nt, Artificial Sequence
  Antisense Oligo
cugagggacacauggacag

SEQ ID NO: 33671 - RNA, 19 nt, Artificial Sequence
  Sense Oligo
uguccaugugucccucaga

SEQ ID NO: 33672 - RNA, 19 nt, Artificial Sequence
  Antisense Oligo
ucugagggacacauggaca

SEQ ID NO: 33673 - RNA, 19 nt, Artificial Sequence
  Sense Oligo
guccaugugucccucagaa

SEQ ID NO: 33674 - RNA, 19 nt, Artificial Sequence
  Antisense Oligo
uucugagggacacauggac

SEQ ID NO: 33675 - RNA, 19 nt, Artificial Sequence
  Sense Oligo
cggcagagcuggagccaau

SEQ ID NO: 33676 - RNA, 19 nt, Artificial Sequence
  Antisense Oligo
auuggcuccagcucugccg

SEQ ID NO: 33677 - RNA, 19 nt, Artificial Sequence
  Sense Oligo
ggcagagcuggagccaauu

SEQ ID NO: 33678 - RNA, 19 nt, Artificial Sequence
  Antisense Oligo
aauuggcuccagcucugcc

SEQ ID NO: 33679 - RNA, 19 nt, Artificial Sequence
  Sense Oligo
ggagccaauuccacacggg

SEQ ID NO: 33680 - RNA, 19 nt, Artificial Sequence
  Antisense Oligo
cccguguggaauuggcucc

SEQ ID NO: 33681 - RNA, 19 nt, Artificial Sequence
  Sense Oligo
gagccaauuccacacgggc

SEQ ID NO: 33682 - RNA, 19 nt, Artificial Sequence
  Antisense Oligo
gcccguguggaauuggcuc

SEQ ID NO: 33683 - RNA, 19 nt, Artificial Sequence
  Sense Oligo
gccaauuccacacgggcug

SEQ ID NO: 33684 - RNA, 19 nt, Artificial Sequence
  Antisense Oligo
cagcccguguggaauuggc

SEQ ID NO: 33685 - RNA, 19 nt, Artificial Sequence
  Sense Oligo
ccaauuccacacgggcugc

SEQ ID NO: 33686 - RNA, 19 nt, Artificial Sequence
  Antisense Oligo
gcagcccguguggaauugg

SEQ ID NO: 33687 - RNA, 19 nt, Artificial Sequence
  Sense Oligo
caauuccacacgggcugca

SEQ ID NO: 33688 - RNA, 19 nt, Artificial Sequence
  Antisense Oligo
ugcagcccguguggaauug

SEQ ID NO: 33689 - RNA, 19 nt, Artificial Sequence
  Sense Oligo
cuacuauuucuuucucuuc

SEQ ID NO: 33690 - RNA, 19 nt, Artificial Sequence
  Antisense Oligo
gaagagaaagaaauaguag

SEQ ID NO: 33691 - RNA, 19 nt, Artificial Sequence
  Sense Oligo
acugaggaguguuuggacu

SEQ ID NO: 33692 - RNA, 19 nt, Artificial Sequence
  Antisense Oligo
aguccaaacacuccucagu

SEQ ID NO: 33693 - RNA, 19 nt, Artificial Sequence
  Sense Oligo
cugaggaguguuuggacuu

SEQ ID NO: 33694 - RNA, 19 nt, Artificial Sequence
  Antisense Oligo
aaguccaaacacuccucag

SEQ ID NO: 33695 - RNA, 19 nt, Artificial Sequence
  Sense Oligo
ggaguguuuggacuugcuu

SEQ ID NO: 33696 - RNA, 19 nt, Artificial Sequence
  Antisense Oligo
aagcaaguccaaacacucc

SEQ ID NO: 33697 - RNA, 19 nt, Artificial Sequence
  Sense Oligo
guuuggacuugcuuugguu

SEQ ID NO: 33698 - RNA, 19 nt, Artificial Sequence
  Antisense Oligo
aaccaaagcaaguccaaac

SEQ ID NO: 33699 - RNA, 19 nt, Artificial Sequence
  Sense Oligo
uuuggacuugcuuugguua

SEQ ID NO: 33700 - RNA, 19 nt, Artificial Sequence
  Antisense Oligo
uaaccaaagcaaguccaaa

SEQ ID NO: 33701 - RNA, 19 nt, Artificial Sequence
  Sense Oligo
uuggacuugcuuugguuag

SEQ ID NO: 33702 - RNA, 19 nt, Artificial Sequence
  Antisense Oligo
cuaaccaaagcaaguccaa

SEQ ID NO: 33703 - RNA, 19 nt, Artificial Sequence
  Sense Oligo
uggacuugcuuugguuaga

SEQ ID NO: 33704 - RNA, 19 nt, Artificial Sequence
  Antisense Oligo
ucuaaccaaagcaagucca

SEQ ID NO: 33705 - RNA, 19 nt, Artificial Sequence
  Sense Oligo
caaaugcccuguugguagu

SEQ ID NO: 33706 - RNA, 19 nt, Artificial Sequence
  Antisense Oligo
acuaccaacagggcauuug

SEQ ID NO: 33707 - RNA, 19 nt, Artificial Sequence
  Sense Oligo
aaaugcccuguugguaguu

SEQ ID NO: 33708 - RNA, 19 nt, Artificial Sequence
  Antisense Oligo
aacuaccaacagggcauuu

SEQ ID NO: 33709 - RNA, 19 nt, Artificial Sequence
  Sense Oligo
aaugcccuguugguaguua

SEQ ID NO: 33710 - RNA, 19 nt, Artificial Sequence
  Antisense Oligo
uaacuaccaacagggcauu

SEQ ID NO: 33711 - RNA, 19 nt, Artificial Sequence
  Sense Oligo
augcccuguugguaguuau

SEQ ID NO: 33712 - RNA, 19 nt, Artificial Sequence
  Antisense Oligo
auaacuaccaacagggcau

SEQ ID NO: 33713 - RNA, 19 nt, Artificial Sequence
  Sense Oligo
ugcccuguugguaguuauu

SEQ ID NO: 33714 - RNA, 19 nt, Artificial Sequence
  Antisense Oligo
aauaacuaccaacagggca

SEQ ID NO: 33715 - RNA, 19 nt, Artificial Sequence
  Sense Oligo
gcccuguugguaguuauuu

SEQ ID NO: 33716 - RNA, 19 nt, Artificial Sequence
  Antisense Oligo
aaauaacuaccaacagggc

SEQ ID NO: 33717 - RNA, 19 nt, Artificial Sequence
  Sense Oligo
cccuguugguaguuauuuu

SEQ ID NO: 33718 - RNA, 19 nt, Artificial Sequence
  Antisense Oligo
aaaauaacuaccaacaggg

SEQ ID NO: 33719 - RNA, 19 nt, Artificial Sequence
  Sense Oligo
cuguugguaguuauuuuga

SEQ ID NO: 33720 - RNA, 19 nt, Artificial Sequence
  Antisense Oligo
ucaaaauaacuaccaacag

SEQ ID NO: 33721 - RNA, 19 nt, Artificial Sequence
  Sense Oligo
guugguaguuauuuugaag

SEQ ID NO: 33722 - RNA, 19 nt, Artificial Sequence
  Antisense Oligo
cuucaaaauaacuaccaac

SEQ ID NO: 33723 - RNA, 19 nt, Artificial Sequence
  Sense Oligo
guaguuauuuugaaggaag

SEQ ID NO: 33724 - RNA, 19 nt, Artificial Sequence
  Antisense Oligo
cuuccuucaaaauaacuac

SEQ ID NO: 33725 - RNA, 19 nt, Artificial Sequence
  Sense Oligo
aguuauuuugaaggaagga

SEQ ID NO: 33726 - RNA, 19 nt, Artificial Sequence
  Antisense Oligo
uccuuccuucaaaauaacu

SEQ ID NO: 33727 - RNA, 19 nt, Artificial Sequence
  Sense Oligo
guuauuuugaaggaaggag

SEQ ID NO: 33728 - RNA, 19 nt, Artificial Sequence
  Antisense Oligo
cuccuuccuucaaaauaac

SEQ ID NO: 33729 - RNA, 19 nt, Artificial Sequence
  Sense Oligo
uuauuuugaaggaaggagc

SEQ ID NO: 33730 - RNA, 19 nt, Artificial Sequence
  Antisense Oligo
gcuccuuccuucaaaauaa

SEQ ID NO: 33731 - RNA, 19 nt, Artificial Sequence
  Sense Oligo
uauuuugaaggaaggagcu

SEQ ID NO: 33732 - RNA, 19 nt, Artificial Sequence
  Antisense Oligo
agcuccuuccuucaaaaua

SEQ ID NO: 33733 - RNA, 19 nt, Artificial Sequence
  Sense Oligo
auuuugaaggaaggagcua

SEQ ID NO: 33734 - RNA, 19 nt, Artificial Sequence
  Antisense Oligo
uagcuccuuccuucaaaau

SEQ ID NO: 33735 - RNA, 19 nt, Artificial Sequence
  Sense Oligo
uuuugaaggaaggagcuag

SEQ ID NO: 33736 - RNA, 19 nt, Artificial Sequence
  Antisense Oligo
cuagcuccuuccuucaaaa

SEQ ID NO: 33737 - RNA, 19 nt, Artificial Sequence
  Sense Oligo
uuugaaggaaggagcuagu

SEQ ID NO: 33738 - RNA, 19 nt, Artificial Sequence
  Antisense Oligo
acuagcuccuuccuucaaa

SEQ ID NO: 33739 - RNA, 19 nt, Artificial Sequence
  Sense Oligo
uugaaggaaggagcuaguc

SEQ ID NO: 33740 - RNA, 19 nt, Artificial Sequence
  Antisense Oligo
gacuagcuccuuccuucaa

SEQ ID NO: 33741 - RNA, 19 nt, Artificial Sequence
  Sense Oligo
ugaaggaaggagcuaguca

SEQ ID NO: 33742 - RNA, 19 nt, Artificial Sequence
  Antisense Oligo
ugacuagcuccuuccuuca

SEQ ID NO: 33743 - RNA, 19 nt, Artificial Sequence
  Sense Oligo
gaaggaaggagcuagucau

SEQ ID NO: 33744 - RNA, 19 nt, Artificial Sequence
  Antisense Oligo
augacuagcuccuuccuuc

SEQ ID NO: 33745 - RNA, 19 nt, Artificial Sequence
  Sense Oligo
aaggaaggagcuagucauc

SEQ ID NO: 33746 - RNA, 19 nt, Artificial Sequence
  Antisense Oligo
gaugacuagcuccuuccuu

SEQ ID NO: 33747 - RNA, 19 nt, Artificial Sequence
  Sense Oligo
aggaaggagcuagucauca

SEQ ID NO: 33748 - RNA, 19 nt, Artificial Sequence
  Antisense Oligo
ugaugacuagcuccuuccu

SEQ ID NO: 33749 - RNA, 19 nt, Artificial Sequence
  Sense Oligo
ggaaggagcuagucaucaa

SEQ ID NO: 33750 - RNA, 19 nt, Artificial Sequence
  Antisense Oligo
uugaugacuagcuccuucc

SEQ ID NO: 33751 - RNA, 19 nt, Artificial Sequence
  Sense Oligo
gaaggagcuagucaucaau

SEQ ID NO: 33752 - RNA, 19 nt, Artificial Sequence
  Antisense Oligo
auugaugacuagcuccuuc

SEQ ID NO: 33753 - RNA, 19 nt, Artificial Sequence
  Sense Oligo
aaggagcuagucaucaaug

SEQ ID NO: 33754 - RNA, 19 nt, Artificial Sequence
  Antisense Oligo
cauugaugacuagcuccuu

SEQ ID NO: 33755 - RNA, 19 nt, Artificial Sequence
  Sense Oligo
aggagcuagucaucaaugg

SEQ ID NO: 33756 - RNA, 19 nt, Artificial Sequence
  Antisense Oligo
ccauugaugacuagcuccu

SEQ ID NO: 33757 - RNA, 19 nt, Artificial Sequence
  Sense Oligo
ggagcuagucaucaauggu

SEQ ID NO: 33758 - RNA, 19 nt, Artificial Sequence
  Antisense Oligo
accauugaugacuagcucc

SEQ ID NO: 33759 - RNA, 19 nt, Artificial Sequence
  Sense Oligo
ccgggauuucucuuaacuc

SEQ ID NO: 33760 - RNA, 19 nt, Artificial Sequence
  Antisense Oligo
gaguuaagagaaaucccgg

SEQ ID NO: 33761 - RNA, 19 nt, Artificial Sequence
  Sense Oligo
cgggauuucucuuaacucu

SEQ ID NO: 33762 - RNA, 19 nt, Artificial Sequence
  Antisense Oligo
agaguuaagagaaaucccg

SEQ ID NO: 33763 - RNA, 19 nt, Artificial Sequence
  Sense Oligo
gggauuucucuuaacucuu

SEQ ID NO: 33764 - RNA, 19 nt, Artificial Sequence
  Antisense Oligo
aagaguuaagagaaauccc

SEQ ID NO: 33765 - RNA, 19 nt, Artificial Sequence
  Sense Oligo
auuucucuuaacucuuugc

SEQ ID NO: 33766 - RNA, 19 nt, Artificial Sequence
  Antisense Oligo
gcaaagaguuaagagaaau

SEQ ID NO: 33767 - RNA, 19 nt, Artificial Sequence
  Sense Oligo
uuucucuuaacucuuugcg

SEQ ID NO: 33768 - RNA, 19 nt, Artificial Sequence
  Antisense Oligo
cgcaaagaguuaagagaaa

SEQ ID NO: 33769 - RNA, 19 nt, Artificial Sequence
  Sense Oligo
uucucuuaacucuuugcgg

SEQ ID NO: 33770 - RNA, 19 nt, Artificial Sequence
  Antisense Oligo
ccgcaaagaguuaagagaa

SEQ ID NO: 33771 - RNA, 19 nt, Artificial Sequence
  Sense Oligo
ucucuuaacucuuugcggg

SEQ ID NO: 33772 - RNA, 19 nt, Artificial Sequence
  Antisense Oligo
cccgcaaagaguuaagaga

SEQ ID NO: 33773 - RNA, 19 nt, Artificial Sequence
  Sense Oligo
aggauucccgaggaggccu

SEQ ID NO: 33774 - RNA, 19 nt, Artificial Sequence
  Antisense Oligo
aggccuccucgggaauccu

SEQ ID NO: 33775 - RNA, 19 nt, Artificial Sequence
  Sense Oligo
ggauucccgaggaggccuu

SEQ ID NO: 33776 - RNA, 19 nt, Artificial Sequence
  Antisense Oligo
aaggccuccucgggaaucc

SEQ ID NO: 33777 - RNA, 19 nt, Artificial Sequence
  Sense Oligo
gauucccgaggaggccuug

SEQ ID NO: 33778 - RNA, 19 nt, Artificial Sequence
  Antisense Oligo
caaggccuccucgggaauc

SEQ ID NO: 33779 - RNA, 19 nt, Artificial Sequence
  Sense Oligo
auucccgaggaggccuugu

SEQ ID NO: 33780 - RNA, 19 nt, Artificial Sequence
  Antisense Oligo
acaaggccuccucgggaau

SEQ ID NO: 33781 - RNA, 19 nt, Artificial Sequence
  Sense Oligo
uucccgaggaggccuuguc

SEQ ID NO: 33782 - RNA, 19 nt, Artificial Sequence
  Antisense Oligo
gacaaggccuccucgggaa

SEQ ID NO: 33783 - RNA, 19 nt, Artificial Sequence
  Sense Oligo
ucccgaggaggccuuguca

SEQ ID NO: 33784 - RNA, 19 nt, Artificial Sequence
  Antisense Oligo
ugacaaggccuccucggga

SEQ ID NO: 33785 - RNA, 19 nt, Artificial Sequence
  Sense Oligo
gaggaggccuugucaccau

SEQ ID NO: 33786 - RNA, 19 nt, Artificial Sequence
  Antisense Oligo
auggugacaaggccuccuc

SEQ ID NO: 33787 - RNA, 19 nt, Artificial Sequence
  Sense Oligo
aggaggccuugucaccauc

SEQ ID NO: 33788 - RNA, 19 nt, Artificial Sequence
  Antisense Oligo
gauggugacaaggccuccu

SEQ ID NO: 33789 - RNA, 19 nt, Artificial Sequence
  Sense Oligo
ggaggccuugucaccaucc

SEQ ID NO: 33790 - RNA, 19 nt, Artificial Sequence
  Antisense Oligo
ggauggugacaaggccucc

SEQ ID NO: 33791 - RNA, 19 nt, Artificial Sequence
  Sense Oligo
gaggccuugucaccauccu

SEQ ID NO: 33792 - RNA, 19 nt, Artificial Sequence
  Antisense Oligo
aggauggugacaaggccuc

SEQ ID NO: 33793 - RNA, 19 nt, Artificial Sequence
  Sense Oligo
aggccuugucaccauccua

SEQ ID NO: 33794 - RNA, 19 nt, Artificial Sequence
  Antisense Oligo
uaggauggugacaaggccu

SEQ ID NO: 33795 - RNA, 19 nt, Artificial Sequence
  Sense Oligo
ggccuugucaccauccuac

SEQ ID NO: 33796 - RNA, 19 nt, Artificial Sequence
  Antisense Oligo
guaggauggugacaaggcc

SEQ ID NO: 33797 - RNA, 19 nt, Artificial Sequence
  Sense Oligo
gccuugucaccauccuacc

SEQ ID NO: 33798 - RNA, 19 nt, Artificial Sequence
  Antisense Oligo
gguaggauggugacaaggc

SEQ ID NO: 33799 - RNA, 19 nt, Artificial Sequence
  Sense Oligo
ucaccauccuaccugacug

SEQ ID NO: 33800 - RNA, 19 nt, Artificial Sequence
  Antisense Oligo
cagucagguaggaugguga

SEQ ID NO: 33801 - RNA, 19 nt, Artificial Sequence
  Sense Oligo
caccauccuaccugacugu

SEQ ID NO: 33802 - RNA, 19 nt, Artificial Sequence
  Antisense Oligo
acagucagguaggauggug

SEQ ID NO: 33803 - RNA, 19 nt, Artificial Sequence
  Sense Oligo
uaccugacugugugucuga

SEQ ID NO: 33804 - RNA, 19 nt, Artificial Sequence
  Antisense Oligo
ucagacacacagucaggua

SEQ ID NO: 33805 - RNA, 19 nt, Artificial Sequence
  Sense Oligo
accugacugugugucugaa

SEQ ID NO: 33806 - RNA, 19 nt, Artificial Sequence
  Antisense Oligo
uucagacacacagucaggu

SEQ ID NO: 33807 - RNA, 19 nt, Artificial Sequence
  Sense Oligo
aacugcaugaagccaucug

SEQ ID NO: 33808 - RNA, 19 nt, Artificial Sequence
  Antisense Oligo
cagauggcuucaugcaguu

SEQ ID NO: 33809 - RNA, 19 nt, Artificial Sequence
  Sense Oligo
acugcaugaagccaucugc

SEQ ID NO: 33810 - RNA, 19 nt, Artificial Sequence
  Antisense Oligo
gcagauggcuucaugcagu

SEQ ID NO: 33811 - RNA, 19 nt, Artificial Sequence
  Sense Oligo
aagccaucugcagcagcac

SEQ ID NO: 33812 - RNA, 19 nt, Artificial Sequence
  Antisense Oligo
gugcugcugcagauggcuu

SEQ ID NO: 33813 - RNA, 19 nt, Artificial Sequence
  Sense Oligo
aagcuacuuaaguuuuacg

SEQ ID NO: 33814 - RNA, 19 nt, Artificial Sequence
  Antisense Oligo
cguaaaacuuaaguagcuu

SEQ ID NO: 33815 - RNA, 19 nt, Artificial Sequence
  Sense Oligo
agcuacuuaaguuuuacga

SEQ ID NO: 33816 - RNA, 19 nt, Artificial Sequence
  Antisense Oligo
ucguaaaacuuaaguagcu

SEQ ID NO: 33817 - RNA, 19 nt, Artificial Sequence
  Sense Oligo
gcuacuuaaguuuuacgag

SEQ ID NO: 33818 - RNA, 19 nt, Artificial Sequence
  Antisense Oligo
cucguaaaacuuaaguagc

SEQ ID NO: 33819 - RNA, 19 nt, Artificial Sequence
  Sense Oligo
cuacuuaaguuuuacgagc

SEQ ID NO: 33820 - RNA, 19 nt, Artificial Sequence
  Antisense Oligo
gcucguaaaacuuaaguag

SEQ ID NO: 33821 - RNA, 19 nt, Artificial Sequence
  Sense Oligo
uacuuaaguuuuacgagcu

SEQ ID NO: 33822 - RNA, 19 nt, Artificial Sequence
  Antisense Oligo
agcucguaaaacuuaagua

SEQ ID NO: 33823 - RNA, 19 nt, Artificial Sequence
  Sense Oligo
acuuaaguuuuacgagcug

SEQ ID NO: 33824 - RNA, 19 nt, Artificial Sequence
  Antisense Oligo
cagcucguaaaacuuaagu

SEQ ID NO: 33825 - RNA, 19 nt, Artificial Sequence
  Sense Oligo
cuuaaguuuuacgagcugc

SEQ ID NO: 33826 - RNA, 19 nt, Artificial Sequence
  Antisense Oligo
gcagcucguaaaacuuaag

SEQ ID NO: 33827 - RNA, 19 nt, Artificial Sequence
  Sense Oligo
uuaaguuuuacgagcugcc

SEQ ID NO: 33828 - RNA, 19 nt, Artificial Sequence
  Antisense Oligo
ggcagcucguaaaacuuaa

SEQ ID NO: 33829 - RNA, 19 nt, Artificial Sequence
  Sense Oligo
uaaguuuuacgagcugcca

SEQ ID NO: 33830 - RNA, 19 nt, Artificial Sequence
  Antisense Oligo
uggcagcucguaaaacuua

SEQ ID NO: 33831 - RNA, 19 nt, Artificial Sequence
  Sense Oligo
aaguuuuacgagcugccag

SEQ ID NO: 33832 - RNA, 19 nt, Artificial Sequence
  Antisense Oligo
cuggcagcucguaaaacuu

SEQ ID NO: 33833 - RNA, 19 nt, Artificial Sequence
  Sense Oligo
aguuuuacgagcugccagc

SEQ ID NO: 33834 - RNA, 19 nt, Artificial Sequence
  Antisense Oligo
gcuggcagcucguaaaacu

SEQ ID NO: 33835 - RNA, 19 nt, Artificial Sequence
  Sense Oligo
uacgagcugccagccuuau

SEQ ID NO: 33836 - RNA, 19 nt, Artificial Sequence
  Antisense Oligo
auaaggcuggcagcucgua

SEQ ID NO: 33837 - RNA, 19 nt, Artificial Sequence
  Sense Oligo
acgagcugccagccuuauc

SEQ ID NO: 33838 - RNA, 19 nt, Artificial Sequence
  Antisense Oligo
gauaaggcuggcagcucgu

SEQ ID NO: 33839 - RNA, 19 nt, Artificial Sequence
  Sense Oligo
cgagcugccagccuuaucu

SEQ ID NO: 33840 - RNA, 19 nt, Artificial Sequence
  Antisense Oligo
agauaaggcuggcagcucg

SEQ ID NO: 33841 - RNA, 19 nt, Artificial Sequence
  Sense Oligo
gagcugccagccuuaucug

SEQ ID NO: 33842 - RNA, 19 nt, Artificial Sequence
  Antisense Oligo
cagauaaggcuggcagcuc

SEQ ID NO: 33843 - RNA, 19 nt, Artificial Sequence
  Sense Oligo
agcugccagccuuaucugc

SEQ ID NO: 33844 - RNA, 19 nt, Artificial Sequence
  Antisense Oligo
gcagauaaggcuggcagcu

SEQ ID NO: 33845 - RNA, 19 nt, Artificial Sequence
  Sense Oligo
gcugccagccuuaucugcc

SEQ ID NO: 33846 - RNA, 19 nt, Artificial Sequence
  Antisense Oligo
ggcagauaaggcuggcagc

SEQ ID NO: 33847 - RNA, 19 nt, Artificial Sequence
  Sense Oligo
cugccagccuuaucugccg

SEQ ID NO: 33848 - RNA, 19 nt, Artificial Sequence
  Antisense Oligo
cggcagauaaggcuggcag

SEQ ID NO: 33849 - RNA, 19 nt, Artificial Sequence
  Sense Oligo
ugccagccuuaucugccga

SEQ ID NO: 33850 - RNA, 19 nt, Artificial Sequence
  Antisense Oligo
ucggcagauaaggcuggca

SEQ ID NO: 33851 - RNA, 19 nt, Artificial Sequence
  Sense Oligo
gccagccuuaucugccgag

SEQ ID NO: 33852 - RNA, 19 nt, Artificial Sequence
  Antisense Oligo
cucggcagauaaggcuggc

SEQ ID NO: 33853 - RNA, 19 nt, Artificial Sequence
  Sense Oligo
auugucugcagaaugauua

SEQ ID NO: 33854 - RNA, 19 nt, Artificial Sequence
  Antisense Oligo
uaaucauucugcagacaau

SEQ ID NO: 33855 - RNA, 19 nt, Artificial Sequence
  Sense Oligo
uugucugcagaaugauuag

SEQ ID NO: 33856 - RNA, 19 nt, Artificial Sequence
  Antisense Oligo
cuaaucauucugcagacaa

SEQ ID NO: 33857 - RNA, 19 nt, Artificial Sequence
  Sense Oligo
ugucugcagaaugauuaga

SEQ ID NO: 33858 - RNA, 19 nt, Artificial Sequence
  Antisense Oligo
ucuaaucauucugcagaca

SEQ ID NO: 33859 - RNA, 19 nt, Artificial Sequence
  Sense Oligo
ucugcagaaugauuagacu

SEQ ID NO: 33860 - RNA, 19 nt, Artificial Sequence
  Antisense Oligo
agucuaaucauucugcaga

SEQ ID NO: 33861 - RNA, 19 nt, Artificial Sequence
  Sense Oligo
cugcagaaugauuagacuu

SEQ ID NO: 33862 - RNA, 19 nt, Artificial Sequence
  Antisense Oligo
aagucuaaucauucugcag

SEQ ID NO: 33863 - RNA, 19 nt, Artificial Sequence
  Sense Oligo
ugcagaaugauuagacuuc

SEQ ID NO: 33864 - RNA, 19 nt, Artificial Sequence
  Antisense Oligo
gaagucuaaucauucugca

SEQ ID NO: 33865 - RNA, 19 nt, Artificial Sequence
  Sense Oligo
gaaugauuagacuucuauc

SEQ ID NO: 33866 - RNA, 19 nt, Artificial Sequence
  Antisense Oligo
gauagaagucuaaucauuc

SEQ ID NO: 33867 - RNA, 19 nt, Artificial Sequence
  Sense Oligo
augauuagacuucuaucuc

SEQ ID NO: 33868 - RNA, 19 nt, Artificial Sequence
  Antisense Oligo
gagauagaagucuaaucau

SEQ ID NO: 33869 - RNA, 19 nt, Artificial Sequence
  Sense Oligo
ugauuagacuucuaucucu

SEQ ID NO: 33870 - RNA, 19 nt, Artificial Sequence
  Antisense Oligo
agagauagaagucuaauca

SEQ ID NO: 33871 - RNA, 19 nt, Artificial Sequence
  Sense Oligo
gauuagacuucuaucucug

SEQ ID NO: 33872 - RNA, 19 nt, Artificial Sequence
  Antisense Oligo
cagagauagaagucuaauc

SEQ ID NO: 33873 - RNA, 19 nt, Artificial Sequence
  Sense Oligo
auuagacuucuaucucugg

SEQ ID NO: 33874 - RNA, 19 nt, Artificial Sequence
  Antisense Oligo
ccagagauagaagucuaau

SEQ ID NO: 33875 - RNA, 19 nt, Artificial Sequence
  Sense Oligo
uuagacuucuaucucuggu

SEQ ID NO: 33876 - RNA, 19 nt, Artificial Sequence
  Antisense Oligo
accagagauagaagucuaa

SEQ ID NO: 33877 - RNA, 19 nt, Artificial Sequence
  Sense Oligo
uagacuucuaucucuggug

SEQ ID NO: 33878 - RNA, 19 nt, Artificial Sequence
  Antisense Oligo
caccagagauagaagucua

SEQ ID NO: 33879 - RNA, 19 nt, Artificial Sequence
  Sense Oligo
agacuucuaucucuggugg

SEQ ID NO: 33880 - RNA, 19 nt, Artificial Sequence
  Antisense Oligo
ccaccagagauagaagucu

SEQ ID NO: 33881 - RNA, 19 nt, Artificial Sequence
  Sense Oligo
gacuucuaucucugguggu

SEQ ID NO: 33882 - RNA, 19 nt, Artificial Sequence
  Antisense Oligo
accaccagagauagaaguc

SEQ ID NO: 33883 - RNA, 19 nt, Artificial Sequence
  Sense Oligo
acuucuaucucugguggua

SEQ ID NO: 33884 - RNA, 19 nt, Artificial Sequence
  Antisense Oligo
uaccaccagagauagaagu

SEQ ID NO: 33885 - RNA, 19 nt, Artificial Sequence
  Sense Oligo
cuucuaucucuggugguaa

SEQ ID NO: 33886 - RNA, 19 nt, Artificial Sequence
  Antisense Oligo
uuaccaccagagauagaag

SEQ ID NO: 33887 - RNA, 19 nt, Artificial Sequence
  Sense Oligo
uucuaucucuggugguaag

SEQ ID NO: 33888 - RNA, 19 nt, Artificial Sequence
  Antisense Oligo
cuuaccaccagagauagaa

SEQ ID NO: 33889 - RNA, 19 nt, Artificial Sequence
  Sense Oligo
ucuaucucuggugguaagu

SEQ ID NO: 33890 - RNA, 19 nt, Artificial Sequence
  Antisense Oligo
acuuaccaccagagauaga

SEQ ID NO: 33891 - RNA, 19 nt, Artificial Sequence
  Sense Oligo
cuaucucuggugguaagug

SEQ ID NO: 33892 - RNA, 19 nt, Artificial Sequence
  Antisense Oligo
cacuuaccaccagagauag

SEQ ID NO: 33893 - RNA, 19 nt, Artificial Sequence
  Sense Oligo
uaucucuggugguaagugg

SEQ ID NO: 33894 - RNA, 19 nt, Artificial Sequence
  Antisense Oligo
ccacuuaccaccagagaua

SEQ ID NO: 33895 - RNA, 19 nt, Artificial Sequence
  Sense Oligo
aucucuggugguaagugga

SEQ ID NO: 33896 - RNA, 19 nt, Artificial Sequence
  Antisense Oligo
uccacuuaccaccagagau

SEQ ID NO: 33897 - RNA, 19 nt, Artificial Sequence
  Sense Oligo
uggugguaaguggagucaa

SEQ ID NO: 33898 - RNA, 19 nt, Artificial Sequence
  Antisense Oligo
uugacuccacuuaccacca

SEQ ID NO: 33899 - RNA, 19 nt, Artificial Sequence
  Sense Oligo
ggugguaaguggagucaac

SEQ ID NO: 33900 - RNA, 19 nt, Artificial Sequence
  Antisense Oligo
guugacuccacuuaccacc

SEQ ID NO: 33901 - RNA, 19 nt, Artificial Sequence
  Sense Oligo
ccgggauaggugcggaauu

SEQ ID NO: 33902 - RNA, 19 nt, Artificial Sequence
  Antisense Oligo
aauuccgcaccuaucccgg

SEQ ID NO: 33903 - RNA, 19 nt, Artificial Sequence
  Sense Oligo
uaggugcggaauuucaagc

SEQ ID NO: 33904 - RNA, 19 nt, Artificial Sequence
  Antisense Oligo
gcuugaaauuccgcaccua

SEQ ID NO: 33905 - RNA, 19 nt, Artificial Sequence
  Sense Oligo
aggugcggaauuucaagca

SEQ ID NO: 33906 - RNA, 19 nt, Artificial Sequence
  Antisense Oligo
ugcuugaaauuccgcaccu

SEQ ID NO: 33907 - RNA, 19 nt, Artificial Sequence
  Sense Oligo
ggugcggaauuucaagcag

SEQ ID NO: 33908 - RNA, 19 nt, Artificial Sequence
  Antisense Oligo
cugcuugaaauuccgcacc

SEQ ID NO: 33909 - RNA, 19 nt, Artificial Sequence
  Sense Oligo
gugcggaauuucaagcagc

SEQ ID NO: 33910 - RNA, 19 nt, Artificial Sequence
  Antisense Oligo
gcugcuugaaauuccgcac

SEQ ID NO: 33911 - RNA, 19 nt, Artificial Sequence
  Sense Oligo
aauuucaagcagccucaau

SEQ ID NO: 33912 - RNA, 19 nt, Artificial Sequence
  Antisense Oligo
auugaggcugcuugaaauu

SEQ ID NO: 33913 - RNA, 19 nt, Artificial Sequence
  Sense Oligo
auuucaagcagccucaauu

SEQ ID NO: 33914 - RNA, 19 nt, Artificial Sequence
  Antisense Oligo
aauugaggcugcuugaaau

SEQ ID NO: 33915 - RNA, 19 nt, Artificial Sequence
  Sense Oligo
uuucaagcagccucaauuu

SEQ ID NO: 33916 - RNA, 19 nt, Artificial Sequence
  Antisense Oligo
aaauugaggcugcuugaaa

SEQ ID NO: 33917 - RNA, 19 nt, Artificial Sequence
  Sense Oligo
uucaagcagccucaauuug

SEQ ID NO: 33918 - RNA, 19 nt, Artificial Sequence
  Antisense Oligo
caaauugaggcugcuugaa

SEQ ID NO: 33919 - RNA, 19 nt, Artificial Sequence
  Sense Oligo
ucaagcagccucaauuugg

SEQ ID NO: 33920 - RNA, 19 nt, Artificial Sequence
  Antisense Oligo
ccaaauugaggcugcuuga

SEQ ID NO: 33921 - RNA, 19 nt, Artificial Sequence
  Sense Oligo
caagcagccucaauuugga

SEQ ID NO: 33922 - RNA, 19 nt, Artificial Sequence
  Antisense Oligo
uccaaauugaggcugcuug

SEQ ID NO: 33923 - RNA, 19 nt, Artificial Sequence
  Sense Oligo
aagcagccucaauuuggaa

SEQ ID NO: 33924 - RNA, 19 nt, Artificial Sequence
  Antisense Oligo
uuccaaauugaggcugcuu

SEQ ID NO: 33925 - RNA, 19 nt, Artificial Sequence
  Sense Oligo
gugguuucagcaguggaca

SEQ ID NO: 33926 - RNA, 19 nt, Artificial Sequence
  Antisense Oligo
uguccacugcugaaaccac

SEQ ID NO: 33927 - RNA, 19 nt, Artificial Sequence
  Sense Oligo
ugguuucagcaguggacau

SEQ ID NO: 33928 - RNA, 19 nt, Artificial Sequence
  Antisense Oligo
auguccacugcugaaacca

SEQ ID NO: 33929 - RNA, 19 nt, Artificial Sequence
  Sense Oligo
gguuucagcaguggacauu

SEQ ID NO: 33930 - RNA, 19 nt, Artificial Sequence
  Antisense Oligo
aauguccacugcugaaacc

SEQ ID NO: 33931 - RNA, 19 nt, Artificial Sequence
  Sense Oligo
guuucagcaguggacauuu

SEQ ID NO: 33932 - RNA, 19 nt, Artificial Sequence
  Antisense Oligo
aaauguccacugcugaaac

SEQ ID NO: 33933 - RNA, 19 nt, Artificial Sequence
  Sense Oligo
uuucagcaguggacauuuc

SEQ ID NO: 33934 - RNA, 19 nt, Artificial Sequence
  Antisense Oligo
gaaauguccacugcugaaa

SEQ ID NO: 33935 - RNA, 19 nt, Artificial Sequence
  Sense Oligo
uucagcaguggacauuucu

SEQ ID NO: 33936 - RNA, 19 nt, Artificial Sequence
  Antisense Oligo
agaaauguccacugcugaa

SEQ ID NO: 33937 - RNA, 19 nt, Artificial Sequence
  Sense Oligo
ucagcaguggacauuucuu

SEQ ID NO: 33938 - RNA, 19 nt, Artificial Sequence
  Antisense Oligo
aagaaauguccacugcuga

SEQ ID NO: 33939 - RNA, 19 nt, Artificial Sequence
  Sense Oligo
cagcaguggacauuucuug

SEQ ID NO: 33940 - RNA, 19 nt, Artificial Sequence
  Antisense Oligo
caagaaauguccacugcug

SEQ ID NO: 33941 - RNA, 19 nt, Artificial Sequence
  Sense Oligo
agcaguggacauuucuugu

SEQ ID NO: 33942 - RNA, 19 nt, Artificial Sequence
  Antisense Oligo
acaagaaauguccacugcu

SEQ ID NO: 33943 - RNA, 19 nt, Artificial Sequence
  Sense Oligo
gcaguggacauuucuugug

SEQ ID NO: 33944 - RNA, 19 nt, Artificial Sequence
  Antisense Oligo
cacaagaaauguccacugc

SEQ ID NO: 33945 - RNA, 19 nt, Artificial Sequence
  Sense Oligo
caguggacauuucuugugc

SEQ ID NO: 33946 - RNA, 19 nt, Artificial Sequence
  Antisense Oligo
gcacaagaaauguccacug

SEQ ID NO: 33947 - RNA, 19 nt, Artificial Sequence
  Sense Oligo
aguggacauuucuugugca

SEQ ID NO: 33948 - RNA, 19 nt, Artificial Sequence
  Antisense Oligo
ugcacaagaaauguccacu

SEQ ID NO: 33949 - RNA, 19 nt, Artificial Sequence
  Sense Oligo
guggacauuucuugugcac

SEQ ID NO: 33950 - RNA, 19 nt, Artificial Sequence
  Antisense Oligo
gugcacaagaaauguccac

SEQ ID NO: 33951 - RNA, 19 nt, Artificial Sequence
  Sense Oligo
ggacauuucuugugcaccu

SEQ ID NO: 33952 - RNA, 19 nt, Artificial Sequence
  Antisense Oligo
aggugcacaagaaaugucc

SEQ ID NO: 33953 - RNA, 19 nt, Artificial Sequence
  Sense Oligo
uuucuugugcaccugcuug

SEQ ID NO: 33954 - RNA, 19 nt, Artificial Sequence
  Antisense Oligo
caagcaggugcacaagaaa

SEQ ID NO: 33955 - RNA, 19 nt, Artificial Sequence
  Sense Oligo
ucuugugcaccugcuugau

SEQ ID NO: 33956 - RNA, 19 nt, Artificial Sequence
  Antisense Oligo
aucaagcaggugcacaaga

SEQ ID NO: 33957 - RNA, 19 nt, Artificial Sequence
  Sense Oligo
cuugugcaccugcuugaug

SEQ ID NO: 33958 - RNA, 19 nt, Artificial Sequence
  Antisense Oligo
caucaagcaggugcacaag

SEQ ID NO: 33959 - RNA, 19 nt, Artificial Sequence
  Sense Oligo
uugugcaccugcuugaugc

SEQ ID NO: 33960 - RNA, 19 nt, Artificial Sequence
  Antisense Oligo
gcaucaagcaggugcacaa

SEQ ID NO: 33961 - RNA, 19 nt, Artificial Sequence
  Sense Oligo
ugugcaccugcuugaugcu

SEQ ID NO: 33962 - RNA, 19 nt, Artificial Sequence
  Antisense Oligo
agcaucaagcaggugcaca

SEQ ID NO: 33963 - RNA, 19 nt, Artificial Sequence
  Sense Oligo
gugcaccugcuugaugcug

SEQ ID NO: 33964 - RNA, 19 nt, Artificial Sequence
  Antisense Oligo
cagcaucaagcaggugcac

SEQ ID NO: 33965 - RNA, 19 nt, Artificial Sequence
  Sense Oligo
ccugcuugaugcuggguuc

SEQ ID NO: 33966 - RNA, 19 nt, Artificial Sequence
  Antisense Oligo
gaacccagcaucaagcagg

SEQ ID NO: 33967 - RNA, 19 nt, Artificial Sequence
  Sense Oligo
ugcuugaugcuggguucug

SEQ ID NO: 33968 - RNA, 19 nt, Artificial Sequence
  Antisense Oligo
cagaacccagcaucaagca

SEQ ID NO: 33969 - RNA, 19 nt, Artificial Sequence
  Sense Oligo
gcuugaugcuggguucugu

SEQ ID NO: 33970 - RNA, 19 nt, Artificial Sequence
  Antisense Oligo
acagaacccagcaucaagc

SEQ ID NO: 33971 - RNA, 19 nt, Artificial Sequence
  Sense Oligo
cuugaugcuggguucuguu

SEQ ID NO: 33972 - RNA, 19 nt, Artificial Sequence
  Antisense Oligo
aacagaacccagcaucaag

SEQ ID NO: 33973 - RNA, 19 nt, Artificial Sequence
  Sense Oligo
uugaugcuggguucuguuc

SEQ ID NO: 33974 - RNA, 19 nt, Artificial Sequence
  Antisense Oligo
gaacagaacccagcaucaa

SEQ ID NO: 33975 - RNA, 19 nt, Artificial Sequence
  Sense Oligo
ugaugcuggguucuguucu

SEQ ID NO: 33976 - RNA, 19 nt, Artificial Sequence
  Antisense Oligo
agaacagaacccagcauca

SEQ ID NO: 33977 - RNA, 19 nt, Artificial Sequence
  Sense Oligo
gaugcuggguucuguucug

SEQ ID NO: 33978 - RNA, 19 nt, Artificial Sequence
  Antisense Oligo
cagaacagaacccagcauc

SEQ ID NO: 33979 - RNA, 19 nt, Artificial Sequence
  Sense Oligo
augcuggguucuguucugg

SEQ ID NO: 33980 - RNA, 19 nt, Artificial Sequence
  Antisense Oligo
ccagaacagaacccagcau

SEQ ID NO: 33981 - RNA, 19 nt, Artificial Sequence
  Sense Oligo
ugcuggguucuguucuggg

SEQ ID NO: 33982 - RNA, 19 nt, Artificial Sequence
  Antisense Oligo
cccagaacagaacccagca

SEQ ID NO: 33983 - RNA, 19 nt, Artificial Sequence
  Sense Oligo
gcuggguucuguucugggu

SEQ ID NO: 33984 - RNA, 19 nt, Artificial Sequence
  Antisense Oligo
acccagaacagaacccagc

SEQ ID NO: 33985 - RNA, 19 nt, Artificial Sequence
  Sense Oligo
cuggguucuguucugggug

SEQ ID NO: 33986 - RNA, 19 nt, Artificial Sequence
  Antisense Oligo
cacccagaacagaacccag

SEQ ID NO: 33987 - RNA, 19 nt, Artificial Sequence
  Sense Oligo
uggguucuguucugggugu

SEQ ID NO: 33988 - RNA, 19 nt, Artificial Sequence
  Antisense Oligo
acacccagaacagaaccca

SEQ ID NO: 33989 - RNA, 19 nt, Artificial Sequence
  Sense Oligo
ggguucuguucugggugug

SEQ ID NO: 33990 - RNA, 19 nt, Artificial Sequence
  Antisense Oligo
cacacccagaacagaaccc

SEQ ID NO: 33991 - RNA, 19 nt, Artificial Sequence
  Sense Oligo
guucuguucuggguguggg

SEQ ID NO: 33992 - RNA, 19 nt, Artificial Sequence
  Antisense Oligo
cccacacccagaacagaac

SEQ ID NO: 33993 - RNA, 19 nt, Artificial Sequence
  Sense Oligo
gucugcccuucugccaccu

SEQ ID NO: 33994 - RNA, 19 nt, Artificial Sequence
  Antisense Oligo
agguggcagaagggcagac

SEQ ID NO: 33995 - RNA, 19 nt, Artificial Sequence
  Sense Oligo
ccuucugccaccuugggcu

SEQ ID NO: 33996 - RNA, 19 nt, Artificial Sequence
  Antisense Oligo
agcccaagguggcagaagg

SEQ ID NO: 33997 - RNA, 19 nt, Artificial Sequence
  Sense Oligo
cuucugccaccuugggcuu

SEQ ID NO: 33998 - RNA, 19 nt, Artificial Sequence
  Antisense Oligo
aagcccaagguggcagaag

SEQ ID NO: 33999 - RNA, 19 nt, Artificial Sequence
  Sense Oligo
uucugccaccuugggcuuu

SEQ ID NO: 34000 - RNA, 19 nt, Artificial Sequence
  Antisense Oligo
aaagcccaagguggcagaa

SEQ ID NO: 34001 - RNA, 19 nt, Artificial Sequence
  Sense Oligo
ucugccaccuugggcuuuc

SEQ ID NO: 34002 - RNA, 19 nt, Artificial Sequence
  Antisense Oligo
gaaagcccaagguggcaga

SEQ ID NO: 34003 - RNA, 19 nt, Artificial Sequence
  Sense Oligo
cugccaccuugggcuuucc

SEQ ID NO: 34004 - RNA, 19 nt, Artificial Sequence
  Antisense Oligo
ggaaagcccaagguggcag

SEQ ID NO: 34005 - RNA, 19 nt, Artificial Sequence
  Sense Oligo
cuuuccugggagggaggca

SEQ ID NO: 34006 - RNA, 19 nt, Artificial Sequence
  Antisense Oligo
ugccucccucccaggaaag

SEQ ID NO: 34007 - RNA, 19 nt, Artificial Sequence
  Sense Oligo
aguuaauguguggccauca

SEQ ID NO: 34008 - RNA, 19 nt, Artificial Sequence
  Antisense Oligo
ugauggccacacauuaacu

SEQ ID NO: 34009 - RNA, 19 nt, Artificial Sequence
  Sense Oligo
ucuugauucuguuguuugc

SEQ ID NO: 34010 - RNA, 19 nt, Artificial Sequence
  Antisense Oligo
gcaaacaacagaaucaaga

SEQ ID NO: 34011 - RNA, 19 nt, Artificial Sequence
  Sense Oligo
cuugauucuguuguuugca

SEQ ID NO: 34012 - RNA, 19 nt, Artificial Sequence
  Antisense Oligo
ugcaaacaacagaaucaag

SEQ ID NO: 34013 - RNA, 19 nt, Artificial Sequence
  Sense Oligo
ucuuucccaccuucuugac

SEQ ID NO: 34014 - RNA, 19 nt, Artificial Sequence
  Antisense Oligo
gucaagaaggugggaaaga

SEQ ID NO: 34015 - RNA, 19 nt, Artificial Sequence
  Sense Oligo
cuuucccaccuucuugaca

SEQ ID NO: 34016 - RNA, 19 nt, Artificial Sequence
  Antisense Oligo
ugucaagaaggugggaaag

SEQ ID NO: 34017 - RNA, 19 nt, Artificial Sequence
  Sense Oligo
uuucccaccuucuugacau

SEQ ID NO: 34018 - RNA, 19 nt, Artificial Sequence
  Antisense Oligo
augucaagaaggugggaaa

SEQ ID NO: 34019 - RNA, 19 nt, Artificial Sequence
  Sense Oligo
uucccaccuucuugacauu

SEQ ID NO: 34020 - RNA, 19 nt, Artificial Sequence
  Antisense Oligo
aaugucaagaaggugggaa

SEQ ID NO: 34021 - RNA, 19 nt, Artificial Sequence
  Sense Oligo
ucccaccuucuugacauug

SEQ ID NO: 34022 - RNA, 19 nt, Artificial Sequence
  Antisense Oligo
caaugucaagaagguggga

SEQ ID NO: 34023 - RNA, 19 nt, Artificial Sequence
  Sense Oligo
cccaccuucuugacauugu

SEQ ID NO: 34024 - RNA, 19 nt, Artificial Sequence
  Antisense Oligo
acaaugucaagaagguggg

SEQ ID NO: 34025 - RNA, 19 nt, Artificial Sequence
  Sense Oligo
ccaccuucuugacauugua

SEQ ID NO: 34026 - RNA, 19 nt, Artificial Sequence
  Antisense Oligo
uacaaugucaagaaggugg

SEQ ID NO: 34027 - RNA, 19 nt, Artificial Sequence
  Sense Oligo
caccuucuugacauuguag

SEQ ID NO: 34028 - RNA, 19 nt, Artificial Sequence
  Antisense Oligo
cuacaaugucaagaaggug

SEQ ID NO: 34029 - RNA, 19 nt, Artificial Sequence
  Sense Oligo
uucuugacauuguagcuug

SEQ ID NO: 34030 - RNA, 19 nt, Artificial Sequence
  Antisense Oligo
caagcuacaaugucaagaa

SEQ ID NO: 34031 - RNA, 19 nt, Artificial Sequence
  Sense Oligo
ucuugacauuguagcuuga

SEQ ID NO: 34032 - RNA, 19 nt, Artificial Sequence
  Antisense Oligo
ucaagcuacaaugucaaga

SEQ ID NO: 34033 - RNA, 19 nt, Artificial Sequence
  Sense Oligo
cuugacauuguagcuugaa

SEQ ID NO: 34034 - RNA, 19 nt, Artificial Sequence
  Antisense Oligo
uucaagcuacaaugucaag

SEQ ID NO: 34035 - RNA, 19 nt, Artificial Sequence
  Sense Oligo
uugacauuguagcuugaau

SEQ ID NO: 34036 - RNA, 19 nt, Artificial Sequence
  Antisense Oligo
auucaagcuacaaugucaa

SEQ ID NO: 34037 - RNA, 19 nt, Artificial Sequence
  Sense Oligo
ugacauuguagcuugaaua

SEQ ID NO: 34038 - RNA, 19 nt, Artificial Sequence
  Antisense Oligo
uauucaagcuacaauguca

SEQ ID NO: 34039 - RNA, 19 nt, Artificial Sequence
  Sense Oligo
gacauuguagcuugaauac

SEQ ID NO: 34040 - RNA, 19 nt, Artificial Sequence
  Antisense Oligo
guauucaagcuacaauguc

SEQ ID NO: 34041 - RNA, 19 nt, Artificial Sequence
  Sense Oligo
guagcuugaauacaguaac

SEQ ID NO: 34042 - RNA, 19 nt, Artificial Sequence
  Antisense Oligo
guuacuguauucaagcuac

SEQ ID NO: 34043 - RNA, 19 nt, Artificial Sequence
  Sense Oligo
caaaggccauagcgccaca

SEQ ID NO: 34044 - RNA, 19 nt, Artificial Sequence
  Antisense Oligo
uguggcgcuauggccuuug

SEQ ID NO: 34045 - RNA, 19 nt, Artificial Sequence
  Sense Oligo
aaaggccauagcgccacac

SEQ ID NO: 34046 - RNA, 19 nt, Artificial Sequence
  Antisense Oligo
guguggcgcuauggccuuu

SEQ ID NO: 34047 - RNA, 19 nt, Artificial Sequence
  Sense Oligo
cgcugcaugucguguccca

SEQ ID NO: 34048 - RNA, 19 nt, Artificial Sequence
  Antisense Oligo
ugggacacgacaugcagcg

SEQ ID NO: 34049 - RNA, 19 nt, Artificial Sequence
  Sense Oligo
gcaugucgugucccagguc

SEQ ID NO: 34050 - RNA, 19 nt, Artificial Sequence
  Antisense Oligo
gaccugggacacgacaugc

SEQ ID NO: 34051 - RNA, 19 nt, Artificial Sequence
  Sense Oligo
caugucgugucccaggucu

SEQ ID NO: 34052 - RNA, 19 nt, Artificial Sequence
  Antisense Oligo
agaccugggacacgacaug

SEQ ID NO: 34053 - RNA, 19 nt, Artificial Sequence
  Sense Oligo
augucgugucccaggucug

SEQ ID NO: 34054 - RNA, 19 nt, Artificial Sequence
  Antisense Oligo
cagaccugggacacgacau

SEQ ID NO: 34055 - RNA, 19 nt, Artificial Sequence
  Sense Oligo
ugucgugucccaggucuga

SEQ ID NO: 34056 - RNA, 19 nt, Artificial Sequence
  Antisense Oligo
ucagaccugggacacgaca

SEQ ID NO: 34057 - RNA, 19 nt, Artificial Sequence
  Sense Oligo
gucgugucccaggucugau

SEQ ID NO: 34058 - RNA, 19 nt, Artificial Sequence
  Antisense Oligo
aucagaccugggacacgac

SEQ ID NO: 34059 - RNA, 19 nt, Artificial Sequence
  Sense Oligo
ucgugucccaggucugaug

SEQ ID NO: 34060 - RNA, 19 nt, Artificial Sequence
  Antisense Oligo
caucagaccugggacacga

SEQ ID NO: 34061 - RNA, 19 nt, Artificial Sequence
  Sense Oligo
cgugucccaggucugaugg

SEQ ID NO: 34062 - RNA, 19 nt, Artificial Sequence
  Antisense Oligo
ccaucagaccugggacacg

SEQ ID NO: 34063 - RNA, 19 nt, Artificial Sequence
  Sense Oligo
gugucccaggucugauggc

SEQ ID NO: 34064 - RNA, 19 nt, Artificial Sequence
  Antisense Oligo
gccaucagaccugggacac

SEQ ID NO: 34065 - RNA, 19 nt, Artificial Sequence
  Sense Oligo
ugucccaggucugauggca

SEQ ID NO: 34066 - RNA, 19 nt, Artificial Sequence
  Antisense Oligo
ugccaucagaccugggaca

SEQ ID NO: 34067 - RNA, 19 nt, Artificial Sequence
  Sense Oligo
gucccaggucugauggcag

SEQ ID NO: 34068 - RNA, 19 nt, Artificial Sequence
  Antisense Oligo
cugccaucagaccugggac

SEQ ID NO: 34069 - RNA, 19 nt, Artificial Sequence
  Sense Oligo
cccaggucugauggcagga

SEQ ID NO: 34070 - RNA, 19 nt, Artificial Sequence
  Antisense Oligo
uccugccaucagaccuggg

SEQ ID NO: 34071 - RNA, 19 nt, Artificial Sequence
  Sense Oligo
ccaggucugauggcaggau

SEQ ID NO: 34072 - RNA, 19 nt, Artificial Sequence
  Antisense Oligo
auccugccaucagaccugg

SEQ ID NO: 34073 - RNA, 19 nt, Artificial Sequence
  Sense Oligo
caggucugauggcaggaug

SEQ ID NO: 34074 - RNA, 19 nt, Artificial Sequence
  Antisense Oligo
cauccugccaucagaccug

SEQ ID NO: 34075 - RNA, 19 nt, Artificial Sequence
  Sense Oligo
aggucugauggcaggauga

SEQ ID NO: 34076 - RNA, 19 nt, Artificial Sequence
  Antisense Oligo
ucauccugccaucagaccu

SEQ ID NO: 34077 - RNA, 19 nt, Artificial Sequence
  Sense Oligo
ggucugauggcaggaugac

SEQ ID NO: 34078 - RNA, 19 nt, Artificial Sequence
  Antisense Oligo
gucauccugccaucagacc

SEQ ID NO: 34079 - RNA, 19 nt, Artificial Sequence
  Sense Oligo
gucugauggcaggaugacc

SEQ ID NO: 34080 - RNA, 19 nt, Artificial Sequence
  Antisense Oligo
ggucauccugccaucagac

SEQ ID NO: 34081 - RNA, 19 nt, Artificial Sequence
  Sense Oligo
ucugauggcaggaugaccc

SEQ ID NO: 34082 - RNA, 19 nt, Artificial Sequence
  Antisense Oligo
gggucauccugccaucaga

SEQ ID NO: 34083 - RNA, 19 nt, Artificial Sequence
  Sense Oligo
cugauggcaggaugacccg

SEQ ID NO: 34084 - RNA, 19 nt, Artificial Sequence
  Antisense Oligo
cgggucauccugccaucag

SEQ ID NO: 34085 - RNA, 19 nt, Artificial Sequence
  Sense Oligo
ugauggcaggaugacccgg

SEQ ID NO: 34086 - RNA, 19 nt, Artificial Sequence
  Antisense Oligo
ccgggucauccugccauca

SEQ ID NO: 34087 - RNA, 19 nt, Artificial Sequence
  Sense Oligo
aaagccacuguugugacuu

SEQ ID NO: 34088 - RNA, 19 nt, Artificial Sequence
  Antisense Oligo
aagucacaacaguggcuuu

SEQ ID NO: 34089 - RNA, 19 nt, Artificial Sequence
  Sense Oligo
aagccacuguugugacuuc

SEQ ID NO: 34090 - RNA, 19 nt, Artificial Sequence
  Antisense Oligo
gaagucacaacaguggcuu

SEQ ID NO: 34091 - RNA, 19 nt, Artificial Sequence
  Sense Oligo
agccacuguugugacuucu

SEQ ID NO: 34092 - RNA, 19 nt, Artificial Sequence
  Antisense Oligo
agaagucacaacaguggcu

SEQ ID NO: 34093 - RNA, 19 nt, Artificial Sequence
  Sense Oligo
gccacuguugugacuucuc

SEQ ID NO: 34094 - RNA, 19 nt, Artificial Sequence
  Antisense Oligo
gagaagucacaacaguggc

SEQ ID NO: 34095 - RNA, 19 nt, Artificial Sequence
  Sense Oligo
ccacuguugugacuucucc

SEQ ID NO: 34096 - RNA, 19 nt, Artificial Sequence
  Antisense Oligo
ggagaagucacaacagugg

SEQ ID NO: 34097 - RNA, 19 nt, Artificial Sequence
  Sense Oligo
cacuguugugacuucuccc

SEQ ID NO: 34098 - RNA, 19 nt, Artificial Sequence
  Antisense Oligo
gggagaagucacaacagug

SEQ ID NO: 34099 - RNA, 19 nt, Artificial Sequence
  Sense Oligo
guugugacuucucccaugg

SEQ ID NO: 34100 - RNA, 19 nt, Artificial Sequence
  Antisense Oligo
ccaugggagaagucacaac

SEQ ID NO: 34101 - RNA, 19 nt, Artificial Sequence
  Sense Oligo
uugugacuucucccaugga

SEQ ID NO: 34102 - RNA, 19 nt, Artificial Sequence
  Antisense Oligo
uccaugggagaagucacaa

SEQ ID NO: 34103 - RNA, 19 nt, Artificial Sequence
  Sense Oligo
ugugacuucucccauggau

SEQ ID NO: 34104 - RNA, 19 nt, Artificial Sequence
  Antisense Oligo
auccaugggagaagucaca

SEQ ID NO: 34105 - RNA, 19 nt, Artificial Sequence
  Sense Oligo
gugacuucucccauggauc

SEQ ID NO: 34106 - RNA, 19 nt, Artificial Sequence
  Antisense Oligo
gauccaugggagaagucac

SEQ ID NO: 34107 - RNA, 19 nt, Artificial Sequence
  Sense Oligo
ugacuucucccauggauca

SEQ ID NO: 34108 - RNA, 19 nt, Artificial Sequence
  Antisense Oligo
ugauccaugggagaaguca

SEQ ID NO: 34109 - RNA, 19 nt, Artificial Sequence
  Sense Oligo
uucucccauggaucaguuu

SEQ ID NO: 34110 - RNA, 19 nt, Artificial Sequence
  Antisense Oligo
aaacugauccaugggagaa

SEQ ID NO: 34111 - RNA, 19 nt, Artificial Sequence
  Sense Oligo
ucucccauggaucaguuuu

SEQ ID NO: 34112 - RNA, 19 nt, Artificial Sequence
  Antisense Oligo
aaaacugauccaugggaga

SEQ ID NO: 34113 - RNA, 19 nt, Artificial Sequence
  Sense Oligo
ggucucacucugucaccca

SEQ ID NO: 34114 - RNA, 19 nt, Artificial Sequence
  Antisense Oligo
ugggugacagagugagacc

SEQ ID NO: 34115 - RNA, 19 nt, Artificial Sequence
  Sense Oligo
gucucacucugucacccag

SEQ ID NO: 34116 - RNA, 19 nt, Artificial Sequence
  Antisense Oligo
cugggugacagagugagac

SEQ ID NO: 34117 - RNA, 19 nt, Artificial Sequence
  Sense Oligo
ucucacucugucacccagg

SEQ ID NO: 34118 - RNA, 19 nt, Artificial Sequence
  Antisense Oligo
ccugggugacagagugaga

SEQ ID NO: 34119 - RNA, 19 nt, Artificial Sequence
  Sense Oligo
cucacucugucacccaggc

SEQ ID NO: 34120 - RNA, 19 nt, Artificial Sequence
  Antisense Oligo
gccugggugacagagugag

SEQ ID NO: 34121 - RNA, 19 nt, Artificial Sequence
  Sense Oligo
ucacucugucacccaggcu

SEQ ID NO: 34122 - RNA, 19 nt, Artificial Sequence
  Antisense Oligo
agccugggugacagaguga

SEQ ID NO: 34123 - RNA, 19 nt, Artificial Sequence
  Sense Oligo
cacucugucacccaggcug

SEQ ID NO: 34124 - RNA, 19 nt, Artificial Sequence
  Antisense Oligo
cagccugggugacagagug

SEQ ID NO: 34125 - RNA, 19 nt, Artificial Sequence
  Sense Oligo
acucugucacccaggcugg

SEQ ID NO: 34126 - RNA, 19 nt, Artificial Sequence
  Antisense Oligo
ccagccugggugacagagu

SEQ ID NO: 34127 - RNA, 19 nt, Artificial Sequence
  Sense Oligo
cucugucacccaggcugga

SEQ ID NO: 34128 - RNA, 19 nt, Artificial Sequence
  Antisense Oligo
uccagccugggugacagag

SEQ ID NO: 34129 - RNA, 19 nt, Artificial Sequence
  Sense Oligo
ucugucacccaggcuggag

SEQ ID NO: 34130 - RNA, 19 nt, Artificial Sequence
  Antisense Oligo
cuccagccugggugacaga

SEQ ID NO: 34131 - RNA, 19 nt, Artificial Sequence
  Sense Oligo
ucacccaggcuggagugca

SEQ ID NO: 34132 - RNA, 19 nt, Artificial Sequence
  Antisense Oligo
ugcacuccagccuggguga

SEQ ID NO: 34133 - RNA, 19 nt, Artificial Sequence
  Sense Oligo
cuggagugcaguggcguga

SEQ ID NO: 34134 - RNA, 19 nt, Artificial Sequence
  Antisense Oligo
ucacgccacugcacuccag

SEQ ID NO: 34135 - RNA, 19 nt, Artificial Sequence
  Sense Oligo
uggagugcaguggcgugau

SEQ ID NO: 34136 - RNA, 19 nt, Artificial Sequence
  Antisense Oligo
aucacgccacugcacucca

SEQ ID NO: 34137 - RNA, 19 nt, Artificial Sequence
  Sense Oligo
ggagugcaguggcgugauc

SEQ ID NO: 34138 - RNA, 19 nt, Artificial Sequence
  Antisense Oligo
gaucacgccacugcacucc

SEQ ID NO: 34139 - RNA, 19 nt, Artificial Sequence
  Sense Oligo
gagugcaguggcgugaucu

SEQ ID NO: 34140 - RNA, 19 nt, Artificial Sequence
  Antisense Oligo
agaucacgccacugcacuc

SEQ ID NO: 34141 - RNA, 19 nt, Artificial Sequence
  Sense Oligo
agugcaguggcgugaucuc

SEQ ID NO: 34142 - RNA, 19 nt, Artificial Sequence
  Antisense Oligo
gagaucacgccacugcacu

SEQ ID NO: 34143 - RNA, 19 nt, Artificial Sequence
  Sense Oligo
gugcaguggcgugaucucg

SEQ ID NO: 34144 - RNA, 19 nt, Artificial Sequence
  Antisense Oligo
cgagaucacgccacugcac

SEQ ID NO: 34145 - RNA, 19 nt, Artificial Sequence
  Sense Oligo
ugcaguggcgugaucucgg

SEQ ID NO: 34146 - RNA, 19 nt, Artificial Sequence
  Antisense Oligo
ccgagaucacgccacugca

SEQ ID NO: 34147 - RNA, 19 nt, Artificial Sequence
  Sense Oligo
caguggcgugaucucggcu

SEQ ID NO: 34148 - RNA, 19 nt, Artificial Sequence
  Antisense Oligo
agccgagaucacgccacug

SEQ ID NO: 34149 - RNA, 19 nt, Artificial Sequence
  Sense Oligo
aguggcgugaucucggcuu

SEQ ID NO: 34150 - RNA, 19 nt, Artificial Sequence
  Antisense Oligo
aagccgagaucacgccacu

SEQ ID NO: 34151 - RNA, 19 nt, Artificial Sequence
  Sense Oligo
guggcgugaucucggcuua

SEQ ID NO: 34152 - RNA, 19 nt, Artificial Sequence
  Antisense Oligo
uaagccgagaucacgccac

SEQ ID NO: 34153 - RNA, 19 nt, Artificial Sequence
  Sense Oligo
uggcgugaucucggcuuac

SEQ ID NO: 34154 - RNA, 19 nt, Artificial Sequence
  Antisense Oligo
guaagccgagaucacgcca

SEQ ID NO: 34155 - RNA, 19 nt, Artificial Sequence
  Sense Oligo
ggcgugaucucggcuuacu

SEQ ID NO: 34156 - RNA, 19 nt, Artificial Sequence
  Antisense Oligo
aguaagccgagaucacgcc

SEQ ID NO: 34157 - RNA, 19 nt, Artificial Sequence
  Sense Oligo
uacugcaagcuccgccucc

SEQ ID NO: 34158 - RNA, 19 nt, Artificial Sequence
  Antisense Oligo
ggaggcggagcuugcagua

SEQ ID NO: 34159 - RNA, 19 nt, Artificial Sequence
  Sense Oligo
aagcuccgccuccuggguu

SEQ ID NO: 34160 - RNA, 19 nt, Artificial Sequence
  Antisense Oligo
aacccaggaggcggagcuu

SEQ ID NO: 34161 - RNA, 19 nt, Artificial Sequence
  Sense Oligo
ccuggguucacgccauucu

SEQ ID NO: 34162 - RNA, 19 nt, Artificial Sequence
  Antisense Oligo
agaauggcgugaacccagg

SEQ ID NO: 34163 - RNA, 19 nt, Artificial Sequence
  Sense Oligo
cuggguucacgccauucuc

SEQ ID NO: 34164 - RNA, 19 nt, Artificial Sequence
  Antisense Oligo
gagaauggcgugaacccag

SEQ ID NO: 34165 - RNA, 19 nt, Artificial Sequence
  Sense Oligo
uggguucacgccauucucc

SEQ ID NO: 34166 - RNA, 19 nt, Artificial Sequence
  Antisense Oligo
ggagaauggcgugaaccca

SEQ ID NO: 34167 - RNA, 19 nt, Artificial Sequence
  Sense Oligo
ggguucacgccauucuccu

SEQ ID NO: 34168 - RNA, 19 nt, Artificial Sequence
  Antisense Oligo
aggagaauggcgugaaccc

SEQ ID NO: 34169 - RNA, 19 nt, Artificial Sequence
  Sense Oligo
gguucacgccauucuccug

SEQ ID NO: 34170 - RNA, 19 nt, Artificial Sequence
  Antisense Oligo
caggagaauggcgugaacc

SEQ ID NO: 34171 - RNA, 19 nt, Artificial Sequence
  Sense Oligo
guucacgccauucuccugu

SEQ ID NO: 34172 - RNA, 19 nt, Artificial Sequence
  Antisense Oligo
acaggagaauggcgugaac

SEQ ID NO: 34173 - RNA, 19 nt, Artificial Sequence
  Sense Oligo
uucacgccauucuccuguc

SEQ ID NO: 34174 - RNA, 19 nt, Artificial Sequence
  Antisense Oligo
gacaggagaauggcgugaa

SEQ ID NO: 34175 - RNA, 19 nt, Artificial Sequence
  Sense Oligo
ucacgccauucuccugucu

SEQ ID NO: 34176 - RNA, 19 nt, Artificial Sequence
  Antisense Oligo
agacaggagaauggcguga

SEQ ID NO: 34177 - RNA, 19 nt, Artificial Sequence
  Sense Oligo
cacgccauucuccugucuc

SEQ ID NO: 34178 - RNA, 19 nt, Artificial Sequence
  Antisense Oligo
gagacaggagaauggcgug

SEQ ID NO: 34179 - RNA, 19 nt, Artificial Sequence
  Sense Oligo
acgccauucuccugucuca

SEQ ID NO: 34180 - RNA, 19 nt, Artificial Sequence
  Antisense Oligo
ugagacaggagaauggcgu

SEQ ID NO: 34181 - RNA, 19 nt, Artificial Sequence
  Sense Oligo
cucaaccucccaaguagcu

SEQ ID NO: 34182 - RNA, 19 nt, Artificial Sequence
  Antisense Oligo
agcuacuugggagguugag

SEQ ID NO: 34183 - RNA, 19 nt, Artificial Sequence
  Sense Oligo
ucaaccucccaaguagcug

SEQ ID NO: 34184 - RNA, 19 nt, Artificial Sequence
  Antisense Oligo
cagcuacuugggagguuga

SEQ ID NO: 34185 - RNA, 19 nt, Artificial Sequence
  Sense Oligo
caaccucccaaguagcugg

SEQ ID NO: 34186 - RNA, 19 nt, Artificial Sequence
  Antisense Oligo
ccagcuacuugggagguug

SEQ ID NO: 34187 - RNA, 19 nt, Artificial Sequence
  Sense Oligo
ccaccacgccuggcuaauu

SEQ ID NO: 34188 - RNA, 19 nt, Artificial Sequence
  Antisense Oligo
aauuagccaggcguggugg

SEQ ID NO: 34189 - RNA, 19 nt, Artificial Sequence
  Sense Oligo
caccacgccuggcuaauuu

SEQ ID NO: 34190 - RNA, 19 nt, Artificial Sequence
  Antisense Oligo
aaauuagccaggcguggug

SEQ ID NO: 34191 - RNA, 19 nt, Artificial Sequence
  Sense Oligo
accacgccuggcuaauuuu

SEQ ID NO: 34192 - RNA, 19 nt, Artificial Sequence
  Antisense Oligo
aaaauuagccaggcguggu

SEQ ID NO: 34193 - RNA, 19 nt, Artificial Sequence
  Sense Oligo
ggguuucaccguguuagcc

SEQ ID NO: 34194 - RNA, 19 nt, Artificial Sequence
  Antisense Oligo
ggcuaacacggugaaaccc

SEQ ID NO: 34195 - RNA, 19 nt, Artificial Sequence
  Sense Oligo
gguuucaccguguuagcca

SEQ ID NO: 34196 - RNA, 19 nt, Artificial Sequence
  Antisense Oligo
uggcuaacacggugaaacc

SEQ ID NO: 34197 - RNA, 19 nt, Artificial Sequence
  Sense Oligo
caccguguuagccaggaug

SEQ ID NO: 34198 - RNA, 19 nt, Artificial Sequence
  Antisense Oligo
cauccuggcuaacacggug

SEQ ID NO: 34199 - RNA, 19 nt, Artificial Sequence
  Sense Oligo
accguguuagccaggaugg

SEQ ID NO: 34200 - RNA, 19 nt, Artificial Sequence
  Antisense Oligo
ccauccuggcuaacacggu

SEQ ID NO: 34201 - RNA, 19 nt, Artificial Sequence
  Sense Oligo
ccguguuagccaggauggu

SEQ ID NO: 34202 - RNA, 19 nt, Artificial Sequence
  Antisense Oligo
accauccuggcuaacacgg

SEQ ID NO: 34203 - RNA, 19 nt, Artificial Sequence
  Sense Oligo
cguguuagccaggaugguc

SEQ ID NO: 34204 - RNA, 19 nt, Artificial Sequence
  Antisense Oligo
gaccauccuggcuaacacg

SEQ ID NO: 34205 - RNA, 19 nt, Artificial Sequence
  Sense Oligo
guguuagccaggauggucu

SEQ ID NO: 34206 - RNA, 19 nt, Artificial Sequence
  Antisense Oligo
agaccauccuggcuaacac

SEQ ID NO: 34207 - RNA, 19 nt, Artificial Sequence
  Sense Oligo
uguuagccaggauggucuc

SEQ ID NO: 34208 - RNA, 19 nt, Artificial Sequence
  Antisense Oligo
gagaccauccuggcuaaca

SEQ ID NO: 34209 - RNA, 19 nt, Artificial Sequence
  Sense Oligo
guuagccaggauggucucg

SEQ ID NO: 34210 - RNA, 19 nt, Artificial Sequence
  Antisense Oligo
cgagaccauccuggcuaac

SEQ ID NO: 34211 - RNA, 19 nt, Artificial Sequence
  Sense Oligo
uuagccaggauggucucga

SEQ ID NO: 34212 - RNA, 19 nt, Artificial Sequence
  Antisense Oligo
ucgagaccauccuggcuaa

SEQ ID NO: 34213 - RNA, 19 nt, Artificial Sequence
  Sense Oligo
uagccaggauggucucgau

SEQ ID NO: 34214 - RNA, 19 nt, Artificial Sequence
  Antisense Oligo
aucgagaccauccuggcua

SEQ ID NO: 34215 - RNA, 19 nt, Artificial Sequence
  Sense Oligo
caggauggucucgaucuca

SEQ ID NO: 34216 - RNA, 19 nt, Artificial Sequence
  Antisense Oligo
ugagaucgagaccauccug

SEQ ID NO: 34217 - RNA, 19 nt, Artificial Sequence
  Sense Oligo
aggauggucucgaucucau

SEQ ID NO: 34218 - RNA, 19 nt, Artificial Sequence
  Antisense Oligo
augagaucgagaccauccu

SEQ ID NO: 34219 - RNA, 19 nt, Artificial Sequence
  Sense Oligo
ggauggucucgaucucaug

SEQ ID NO: 34220 - RNA, 19 nt, Artificial Sequence
  Antisense Oligo
caugagaucgagaccaucc

SEQ ID NO: 34221 - RNA, 19 nt, Artificial Sequence
  Sense Oligo
gaccucaugauccgccugc

SEQ ID NO: 34222 - RNA, 19 nt, Artificial Sequence
  Antisense Oligo
gcaggcggaucaugagguc

SEQ ID NO: 34223 - RNA, 19 nt, Artificial Sequence
  Sense Oligo
accucaugauccgccugcc

SEQ ID NO: 34224 - RNA, 19 nt, Artificial Sequence
  Antisense Oligo
ggcaggcggaucaugaggu

SEQ ID NO: 34225 - RNA, 19 nt, Artificial Sequence
  Sense Oligo
ccucaugauccgccugccu

SEQ ID NO: 34226 - RNA, 19 nt, Artificial Sequence
  Antisense Oligo
aggcaggcggaucaugagg

SEQ ID NO: 34227 - RNA, 19 nt, Artificial Sequence
  Sense Oligo
gccuccaaagugcugggau

SEQ ID NO: 34228 - RNA, 19 nt, Artificial Sequence
  Antisense Oligo
aucccagcacuuuggaggc

SEQ ID NO: 34229 - RNA, 19 nt, Artificial Sequence
  Sense Oligo
ccuccaaagugcugggauu

SEQ ID NO: 34230 - RNA, 19 nt, Artificial Sequence
  Antisense Oligo
aaucccagcacuuuggagg

SEQ ID NO: 34231 - RNA, 19 nt, Artificial Sequence
  Sense Oligo
cuccaaagugcugggauua

SEQ ID NO: 34232 - RNA, 19 nt, Artificial Sequence
  Antisense Oligo
uaaucccagcacuuuggag

SEQ ID NO: 34233 - RNA, 19 nt, Artificial Sequence
  Sense Oligo
uccaaagugcugggauuac

SEQ ID NO: 34234 - RNA, 19 nt, Artificial Sequence
  Antisense Oligo
guaaucccagcacuuugga

SEQ ID NO: 34235 - RNA, 19 nt, Artificial Sequence
  Sense Oligo
ccaaagugcugggauuaca

SEQ ID NO: 34236 - RNA, 19 nt, Artificial Sequence
  Antisense Oligo
uguaaucccagcacuuugg

SEQ ID NO: 34237 - RNA, 19 nt, Artificial Sequence
  Sense Oligo
caaagugcugggauuacag

SEQ ID NO: 34238 - RNA, 19 nt, Artificial Sequence
  Antisense Oligo
cuguaaucccagcacuuug

SEQ ID NO: 34239 - RNA, 19 nt, Artificial Sequence
  Sense Oligo
gugcugggauuacaggcuu

SEQ ID NO: 34240 - RNA, 19 nt, Artificial Sequence
  Antisense Oligo
aagccuguaaucccagcac

SEQ ID NO: 34241 - RNA, 19 nt, Artificial Sequence
  Sense Oligo
ugcugggauuacaggcuua

SEQ ID NO: 34242 - RNA, 19 nt, Artificial Sequence
  Antisense Oligo
uaagccuguaaucccagca

SEQ ID NO: 34243 - RNA, 19 nt, Artificial Sequence
  Sense Oligo
gcugggauuacaggcuuaa

SEQ ID NO: 34244 - RNA, 19 nt, Artificial Sequence
  Antisense Oligo
uuaagccuguaaucccagc

SEQ ID NO: 34245 - RNA, 19 nt, Artificial Sequence
  Sense Oligo
cugggauuacaggcuuaaa

SEQ ID NO: 34246 - RNA, 19 nt, Artificial Sequence
  Antisense Oligo
uuuaagccuguaaucccag

SEQ ID NO: 34247 - RNA, 19 nt, Artificial Sequence
  Sense Oligo
gccucccauggaucaguuu

SEQ ID NO: 34248 - RNA, 19 nt, Artificial Sequence
  Antisense Oligo
aaacugauccaugggaggc

SEQ ID NO: 34249 - RNA, 19 nt, Artificial Sequence
  Sense Oligo
ccucccauggaucaguuuu

SEQ ID NO: 34250 - RNA, 19 nt, Artificial Sequence
  Antisense Oligo
aaaacugauccaugggagg

SEQ ID NO: 34251 - RNA, 19 nt, Artificial Sequence
  Sense Oligo
ucccauggaucaguuuuac

SEQ ID NO: 34252 - RNA, 19 nt, Artificial Sequence
  Antisense Oligo
guaaaacugauccauggga

SEQ ID NO: 34253 - RNA, 19 nt, Artificial Sequence
  Sense Oligo
cccauggaucaguuuuacc

SEQ ID NO: 34254 - RNA, 19 nt, Artificial Sequence
  Antisense Oligo
gguaaaacugauccauggg

SEQ ID NO: 34255 - RNA, 19 nt, Artificial Sequence
  Sense Oligo
ccauggaucaguuuuaccu

SEQ ID NO: 34256 - RNA, 19 nt, Artificial Sequence
  Antisense Oligo
agguaaaacugauccaugg

SEQ ID NO: 34257 - RNA, 19 nt, Artificial Sequence
  Sense Oligo
auggaucaguuuuaccugu

SEQ ID NO: 34258 - RNA, 19 nt, Artificial Sequence
  Antisense Oligo
acagguaaaacugauccau

SEQ ID NO: 34259 - RNA, 19 nt, Artificial Sequence
  Sense Oligo
ggaucaguuuuaccugucu

SEQ ID NO: 34260 - RNA, 19 nt, Artificial Sequence
  Antisense Oligo
agacagguaaaacugaucc

SEQ ID NO: 34261 - RNA, 19 nt, Artificial Sequence
  Sense Oligo
gaucaguuuuaccugucuu

SEQ ID NO: 34262 - RNA, 19 nt, Artificial Sequence
  Antisense Oligo
aagacagguaaaacugauc

SEQ ID NO: 34263 - RNA, 19 nt, Artificial Sequence
  Sense Oligo
aucaguuuuaccugucuuc

SEQ ID NO: 34264 - RNA, 19 nt, Artificial Sequence
  Antisense Oligo
gaagacagguaaaacugau

SEQ ID NO: 34265 - RNA, 19 nt, Artificial Sequence
  Sense Oligo
uuuuaccugucuuccagcu

SEQ ID NO: 34266 - RNA, 19 nt, Artificial Sequence
  Antisense Oligo
agcuggaagacagguaaaa

SEQ ID NO: 34267 - RNA, 19 nt, Artificial Sequence
  Sense Oligo
uuuaccugucuuccagcuu

SEQ ID NO: 34268 - RNA, 19 nt, Artificial Sequence
  Antisense Oligo
aagcuggaagacagguaaa

SEQ ID NO: 34269 - RNA, 19 nt, Artificial Sequence
  Sense Oligo
cugucuuccagcuuugacc

SEQ ID NO: 34270 - RNA, 19 nt, Artificial Sequence
  Antisense Oligo
ggucaaagcuggaagacag

SEQ ID NO: 34271 - RNA, 19 nt, Artificial Sequence
  Sense Oligo
ccagcuuugaccuuucugc

SEQ ID NO: 34272 - RNA, 19 nt, Artificial Sequence
  Antisense Oligo
gcagaaaggucaaagcugg

SEQ ID NO: 34273 - RNA, 19 nt, Artificial Sequence
  Sense Oligo
cagcuuugaccuuucugcc

SEQ ID NO: 34274 - RNA, 19 nt, Artificial Sequence
  Antisense Oligo
ggcagaaaggucaaagcug

SEQ ID NO: 34275 - RNA, 19 nt, Artificial Sequence
  Sense Oligo
agcuuugaccuuucugccu

SEQ ID NO: 34276 - RNA, 19 nt, Artificial Sequence
  Antisense Oligo
aggcagaaaggucaaagcu

SEQ ID NO: 34277 - RNA, 19 nt, Artificial Sequence
  Sense Oligo
uugaccuuucugccuccga

SEQ ID NO: 34278 - RNA, 19 nt, Artificial Sequence
  Antisense Oligo
ucggaggcagaaaggucaa

SEQ ID NO: 34279 - RNA, 19 nt, Artificial Sequence
  Sense Oligo
ugaccuuucugccuccgac

SEQ ID NO: 34280 - RNA, 19 nt, Artificial Sequence
  Antisense Oligo
gucggaggcagaaagguca

SEQ ID NO: 34281 - RNA, 19 nt, Artificial Sequence
  Sense Oligo
gaccuuucugccuccgacu

SEQ ID NO: 34282 - RNA, 19 nt, Artificial Sequence
  Antisense Oligo
agucggaggcagaaagguc

SEQ ID NO: 34283 - RNA, 19 nt, Artificial Sequence
  Sense Oligo
accuuucugccuccgacuu

SEQ ID NO: 34284 - RNA, 19 nt, Artificial Sequence
  Antisense Oligo
aagucggaggcagaaaggu

SEQ ID NO: 34285 - RNA, 19 nt, Artificial Sequence
  Sense Oligo
ccuuucugccuccgacuuu

SEQ ID NO: 34286 - RNA, 19 nt, Artificial Sequence
  Antisense Oligo
aaagucggaggcagaaagg

SEQ ID NO: 34287 - RNA, 19 nt, Artificial Sequence
  Sense Oligo
cuuucugccuccgacuuuc

SEQ ID NO: 34288 - RNA, 19 nt, Artificial Sequence
  Antisense Oligo
gaaagucggaggcagaaag

SEQ ID NO: 34289 - RNA, 19 nt, Artificial Sequence
  Sense Oligo
uuucugccuccgacuuucc

SEQ ID NO: 34290 - RNA, 19 nt, Artificial Sequence
  Antisense Oligo
ggaaagucggaggcagaaa

SEQ ID NO: 34291 - RNA, 19 nt, Artificial Sequence
  Sense Oligo
agaucggcaauuccuucuu

SEQ ID NO: 34292 - RNA, 19 nt, Artificial Sequence
  Antisense Oligo
aagaaggaauugccgaucu

SEQ ID NO: 34293 - RNA, 19 nt, Artificial Sequence
  Sense Oligo
caauuccuucuuucccguc

SEQ ID NO: 34294 - RNA, 19 nt, Artificial Sequence
  Antisense Oligo
gacgggaaagaaggaauug

SEQ ID NO: 34295 - RNA, 19 nt, Artificial Sequence
  Sense Oligo
cuucuuucccgucucugug

SEQ ID NO: 34296 - RNA, 19 nt, Artificial Sequence
  Antisense Oligo
cacagagacgggaaagaag

SEQ ID NO: 34297 - RNA, 19 nt, Artificial Sequence
  Sense Oligo
ucuuucccgucucugugca

SEQ ID NO: 34298 - RNA, 19 nt, Artificial Sequence
  Antisense Oligo
ugcacagagacgggaaaga

SEQ ID NO: 34299 - RNA, 19 nt, Artificial Sequence
  Sense Oligo
ugaguucaugaguuucagu

SEQ ID NO: 34300 - RNA, 19 nt, Artificial Sequence
  Antisense Oligo
acugaaacucaugaacuca

SEQ ID NO: 34301 - RNA, 19 nt, Artificial Sequence
  Sense Oligo
gaguucaugaguuucaguu

SEQ ID NO: 34302 - RNA, 19 nt, Artificial Sequence
  Antisense Oligo
aacugaaacucaugaacuc

SEQ ID NO: 34303 - RNA, 19 nt, Artificial Sequence
  Sense Oligo
guucaugaguuucaguuug

SEQ ID NO: 34304 - RNA, 19 nt, Artificial Sequence
  Antisense Oligo
caaacugaaacucaugaac

SEQ ID NO: 34305 - RNA, 19 nt, Artificial Sequence
  Sense Oligo
agacugaucauuuguuugu

SEQ ID NO: 34306 - RNA, 19 nt, Artificial Sequence
  Antisense Oligo
acaaacaaaugaucagucu

SEQ ID NO: 34307 - RNA, 19 nt, Artificial Sequence
  Sense Oligo
aguuuugcucuuguugccc

SEQ ID NO: 34308 - RNA, 19 nt, Artificial Sequence
  Antisense Oligo
gggcaacaagagcaaaacu

SEQ ID NO: 34309 - RNA, 19 nt, Artificial Sequence
  Sense Oligo
guuuugcucuuguugccca

SEQ ID NO: 34310 - RNA, 19 nt, Artificial Sequence
  Antisense Oligo
ugggcaacaagagcaaaac

SEQ ID NO: 34311 - RNA, 19 nt, Artificial Sequence
  Sense Oligo
uuuugcucuuguugcccag

SEQ ID NO: 34312 - RNA, 19 nt, Artificial Sequence
  Antisense Oligo
cugggcaacaagagcaaaa

SEQ ID NO: 34313 - RNA, 19 nt, Artificial Sequence
  Sense Oligo
uuugcucuuguugcccagg

SEQ ID NO: 34314 - RNA, 19 nt, Artificial Sequence
  Antisense Oligo
ccugggcaacaagagcaaa

SEQ ID NO: 34315 - RNA, 19 nt, Artificial Sequence
  Sense Oligo
uugcucuuguugcccaggc

SEQ ID NO: 34316 - RNA, 19 nt, Artificial Sequence
  Antisense Oligo
gccugggcaacaagagcaa

SEQ ID NO: 34317 - RNA, 19 nt, Artificial Sequence
  Sense Oligo
ugcucuuguugcccaggcu

SEQ ID NO: 34318 - RNA, 19 nt, Artificial Sequence
  Antisense Oligo
agccugggcaacaagagca

SEQ ID NO: 34319 - RNA, 19 nt, Artificial Sequence
  Sense Oligo
gcucuuguugcccaggcug

SEQ ID NO: 34320 - RNA, 19 nt, Artificial Sequence
  Antisense Oligo
cagccugggcaacaagagc

SEQ ID NO: 34321 - RNA, 19 nt, Artificial Sequence
  Sense Oligo
cucuuguugcccaggcugg

SEQ ID NO: 34322 - RNA, 19 nt, Artificial Sequence
  Antisense Oligo
ccagccugggcaacaagag

SEQ ID NO: 34323 - RNA, 19 nt, Artificial Sequence
  Sense Oligo
ucuuguugcccaggcugga

SEQ ID NO: 34324 - RNA, 19 nt, Artificial Sequence
  Antisense Oligo
uccagccugggcaacaaga

SEQ ID NO: 34325 - RNA, 19 nt, Artificial Sequence
  Sense Oligo
cuuguugcccaggcuggag

SEQ ID NO: 34326 - RNA, 19 nt, Artificial Sequence
  Antisense Oligo
cuccagccugggcaacaag

SEQ ID NO: 34327 - RNA, 19 nt, Artificial Sequence
  Sense Oligo
ccaucucagcucacugcaa

SEQ ID NO: 34328 - RNA, 19 nt, Artificial Sequence
  Antisense Oligo
uugcagugagcugagaugg

SEQ ID NO: 34329 - RNA, 19 nt, Artificial Sequence
  Sense Oligo
cucagcucacugcaaucuc

SEQ ID NO: 34330 - RNA, 19 nt, Artificial Sequence
  Antisense Oligo
gagauugcagugagcugag

SEQ ID NO: 34331 - RNA, 19 nt, Artificial Sequence
  Sense Oligo
uagguucaagugauucucc

SEQ ID NO: 34332 - RNA, 19 nt, Artificial Sequence
  Antisense Oligo
ggagaaucacuugaaccua

SEQ ID NO: 34333 - RNA, 19 nt, Artificial Sequence
  Sense Oligo
agguucaagugauucuccu

SEQ ID NO: 34334 - RNA, 19 nt, Artificial Sequence
  Antisense Oligo
aggagaaucacuugaaccu

SEQ ID NO: 34335 - RNA, 19 nt, Artificial Sequence
  Sense Oligo
gguucaagugauucuccug

SEQ ID NO: 34336 - RNA, 19 nt, Artificial Sequence
  Antisense Oligo
caggagaaucacuugaacc

SEQ ID NO: 34337 - RNA, 19 nt, Artificial Sequence
  Sense Oligo
guucaagugauucuccugc

SEQ ID NO: 34338 - RNA, 19 nt, Artificial Sequence
  Antisense Oligo
gcaggagaaucacuugaac

SEQ ID NO: 34339 - RNA, 19 nt, Artificial Sequence
  Sense Oligo
uucaagugauucuccugcc

SEQ ID NO: 34340 - RNA, 19 nt, Artificial Sequence
  Antisense Oligo
ggcaggagaaucacuugaa

SEQ ID NO: 34341 - RNA, 19 nt, Artificial Sequence
  Sense Oligo
ucaagugauucuccugccu

SEQ ID NO: 34342 - RNA, 19 nt, Artificial Sequence
  Antisense Oligo
aggcaggagaaucacuuga

SEQ ID NO: 34343 - RNA, 19 nt, Artificial Sequence
  Sense Oligo
cugccucagccucccaagu

SEQ ID NO: 34344 - RNA, 19 nt, Artificial Sequence
  Antisense Oligo
acuugggaggcugaggcag

SEQ ID NO: 34345 - RNA, 19 nt, Artificial Sequence
  Sense Oligo
ugccucagccucccaagug

SEQ ID NO: 34346 - RNA, 19 nt, Artificial Sequence
  Antisense Oligo
cacuugggaggcugaggca

SEQ ID NO: 34347 - RNA, 19 nt, Artificial Sequence
  Sense Oligo
uggcugggacuacaggugu

SEQ ID NO: 34348 - RNA, 19 nt, Artificial Sequence
  Antisense Oligo
acaccuguagucccagcca

SEQ ID NO: 34349 - RNA, 19 nt, Artificial Sequence
  Sense Oligo
ggcugggacuacaggugug

SEQ ID NO: 34350 - RNA, 19 nt, Artificial Sequence
  Antisense Oligo
cacaccuguagucccagcc

SEQ ID NO: 34351 - RNA, 19 nt, Artificial Sequence
  Sense Oligo
gcugggacuacaggugugc

SEQ ID NO: 34352 - RNA, 19 nt, Artificial Sequence
  Antisense Oligo
gcacaccuguagucccagc

SEQ ID NO: 34353 - RNA, 19 nt, Artificial Sequence
  Sense Oligo
cugggacuacaggugugca

SEQ ID NO: 34354 - RNA, 19 nt, Artificial Sequence
  Antisense Oligo
ugcacaccuguagucccag

SEQ ID NO: 34355 - RNA, 19 nt, Artificial Sequence
  Sense Oligo
ugggacuacaggugugcac

SEQ ID NO: 34356 - RNA, 19 nt, Artificial Sequence
  Antisense Oligo
gugcacaccuguaguccca

SEQ ID NO: 34357 - RNA, 19 nt, Artificial Sequence
  Sense Oligo
gggacuacaggugugcacc

SEQ ID NO: 34358 - RNA, 19 nt, Artificial Sequence
  Antisense Oligo
ggugcacaccuguaguccc

SEQ ID NO: 34359 - RNA, 19 nt, Artificial Sequence
  Sense Oligo
ggacuacaggugugcacca

SEQ ID NO: 34360 - RNA, 19 nt, Artificial Sequence
  Antisense Oligo
uggugcacaccuguagucc

SEQ ID NO: 34361 - RNA, 19 nt, Artificial Sequence
  Sense Oligo
gacuacaggugugcaccac

SEQ ID NO: 34362 - RNA, 19 nt, Artificial Sequence
  Antisense Oligo
guggugcacaccuguaguc

SEQ ID NO: 34363 - RNA, 19 nt, Artificial Sequence
  Sense Oligo
ugcaccaccacacccagcu

SEQ ID NO: 34364 - RNA, 19 nt, Artificial Sequence
  Antisense Oligo
agcugggugugguggugca

SEQ ID NO: 34365 - RNA, 19 nt, Artificial Sequence
  Sense Oligo
gcaccaccacacccagcua

SEQ ID NO: 34366 - RNA, 19 nt, Artificial Sequence
  Antisense Oligo
uagcugggugugguggugc

SEQ ID NO: 34367 - RNA, 19 nt, Artificial Sequence
  Sense Oligo
caccaccacacccagcuaa

SEQ ID NO: 34368 - RNA, 19 nt, Artificial Sequence
  Antisense Oligo
uuagcugggugugguggug

SEQ ID NO: 34369 - RNA, 19 nt, Artificial Sequence
  Sense Oligo
accaccacacccagcuaau

SEQ ID NO: 34370 - RNA, 19 nt, Artificial Sequence
  Antisense Oligo
auuagcugggugugguggu

SEQ ID NO: 34371 - RNA, 19 nt, Artificial Sequence
  Sense Oligo
ccaccacacccagcuaauu

SEQ ID NO: 34372 - RNA, 19 nt, Artificial Sequence
  Antisense Oligo
aauuagcuggguguggugg

SEQ ID NO: 34373 - RNA, 19 nt, Artificial Sequence
  Sense Oligo
caccacacccagcuaauuu

SEQ ID NO: 34374 - RNA, 19 nt, Artificial Sequence
  Antisense Oligo
aaauuagcuggguguggug

SEQ ID NO: 34375 - RNA, 19 nt, Artificial Sequence
  Sense Oligo
accacacccagcuaauuuu

SEQ ID NO: 34376 - RNA, 19 nt, Artificial Sequence
  Antisense Oligo
aaaauuagcuggguguggu

SEQ ID NO: 34377 - RNA, 19 nt, Artificial Sequence
  Sense Oligo
ucacgugauccaccugccu

SEQ ID NO: 34378 - RNA, 19 nt, Artificial Sequence
  Antisense Oligo
aggcagguggaucacguga

SEQ ID NO: 34379 - RNA, 19 nt, Artificial Sequence
  Sense Oligo
gugauccaccugccuuggc

SEQ ID NO: 34380 - RNA, 19 nt, Artificial Sequence
  Antisense Oligo
gccaaggcagguggaucac

SEQ ID NO: 34381 - RNA, 19 nt, Artificial Sequence
  Sense Oligo
ugauccaccugccuuggcc

SEQ ID NO: 34382 - RNA, 19 nt, Artificial Sequence
  Antisense Oligo
ggccaaggcagguggauca

SEQ ID NO: 34383 - RNA, 19 nt, Artificial Sequence
  Sense Oligo
gauccaccugccuuggccu

SEQ ID NO: 34384 - RNA, 19 nt, Artificial Sequence
  Antisense Oligo
aggccaaggcagguggauc

SEQ ID NO: 34385 - RNA, 19 nt, Artificial Sequence
  Sense Oligo
auccaccugccuuggccuc

SEQ ID NO: 34386 - RNA, 19 nt, Artificial Sequence
  Antisense Oligo
gaggccaaggcagguggau

SEQ ID NO: 34387 - RNA, 19 nt, Artificial Sequence
  Sense Oligo
agagugcugggauugccga

SEQ ID NO: 34388 - RNA, 19 nt, Artificial Sequence
  Antisense Oligo
ucggcaaucccagcacucu

SEQ ID NO: 34389 - RNA, 19 nt, Artificial Sequence
  Sense Oligo
gagugcugggauugccgau

SEQ ID NO: 34390 - RNA, 19 nt, Artificial Sequence
  Antisense Oligo
aucggcaaucccagcacuc

SEQ ID NO: 34391 - RNA, 19 nt, Artificial Sequence
  Sense Oligo
agugcugggauugccgaug

SEQ ID NO: 34392 - RNA, 19 nt, Artificial Sequence
  Antisense Oligo
caucggcaaucccagcacu

SEQ ID NO: 34393 - RNA, 19 nt, Artificial Sequence
  Sense Oligo
gugcugggauugccgaugu

SEQ ID NO: 34394 - RNA, 19 nt, Artificial Sequence
  Antisense Oligo
acaucggcaaucccagcac

SEQ ID NO: 34395 - RNA, 19 nt, Artificial Sequence
  Sense Oligo
ugcugggauugccgaugug

SEQ ID NO: 34396 - RNA, 19 nt, Artificial Sequence
  Antisense Oligo
cacaucggcaaucccagca

SEQ ID NO: 34397 - RNA, 19 nt, Artificial Sequence
  Sense Oligo
auugccgaugugagccacu

SEQ ID NO: 34398 - RNA, 19 nt, Artificial Sequence
  Antisense Oligo
aguggcucacaucggcaau

SEQ ID NO: 34399 - RNA, 19 nt, Artificial Sequence
  Sense Oligo
augugagccacugcaccca

SEQ ID NO: 34400 - RNA, 19 nt, Artificial Sequence
  Antisense Oligo
ugggugcaguggcucacau

SEQ ID NO: 34401 - RNA, 19 nt, Artificial Sequence
  Sense Oligo
ugugagccacugcacccag

SEQ ID NO: 34402 - RNA, 19 nt, Artificial Sequence
  Antisense Oligo
cugggugcaguggcucaca

SEQ ID NO: 34403 - RNA, 19 nt, Artificial Sequence
  Sense Oligo
ugagccacugcacccagca

SEQ ID NO: 34404 - RNA, 19 nt, Artificial Sequence
  Antisense Oligo
ugcugggugcaguggcuca

SEQ ID NO: 34405 - RNA, 19 nt, Artificial Sequence
  Sense Oligo
uuucacucuuguugcccag

SEQ ID NO: 34406 - RNA, 19 nt, Artificial Sequence
  Antisense Oligo
cugggcaacaagagugaaa

SEQ ID NO: 34407 - RNA, 19 nt, Artificial Sequence
  Sense Oligo
uucacucuuguugcccagg

SEQ ID NO: 34408 - RNA, 19 nt, Artificial Sequence
  Antisense Oligo
ccugggcaacaagagugaa

SEQ ID NO: 34409 - RNA, 19 nt, Artificial Sequence
  Sense Oligo
ucacucuuguugcccaggc

SEQ ID NO: 34410 - RNA, 19 nt, Artificial Sequence
  Antisense Oligo
gccugggcaacaagaguga

SEQ ID NO: 34411 - RNA, 19 nt, Artificial Sequence
  Sense Oligo
cacucuuguugcccaggcu

SEQ ID NO: 34412 - RNA, 19 nt, Artificial Sequence
  Antisense Oligo
agccugggcaacaagagug

SEQ ID NO: 34413 - RNA, 19 nt, Artificial Sequence
  Sense Oligo
acucuuguugcccaggcug

SEQ ID NO: 34414 - RNA, 19 nt, Artificial Sequence
  Antisense Oligo
cagccugggcaacaagagu

SEQ ID NO: 34415 - RNA, 19 nt, Artificial Sequence
  Sense Oligo
cucuuguugcccaggcugu

SEQ ID NO: 34416 - RNA, 19 nt, Artificial Sequence
  Antisense Oligo
acagccugggcaacaagag

SEQ ID NO: 34417 - RNA, 19 nt, Artificial Sequence
  Sense Oligo
ucuuguugcccaggcugua

SEQ ID NO: 34418 - RNA, 19 nt, Artificial Sequence
  Antisense Oligo
uacagccugggcaacaaga

SEQ ID NO: 34419 - RNA, 19 nt, Artificial Sequence
  Sense Oligo
agugcaauggcgugaucuc

SEQ ID NO: 34420 - RNA, 19 nt, Artificial Sequence
  Antisense Oligo
gagaucacgccauugcacu

SEQ ID NO: 34421 - RNA, 19 nt, Artificial Sequence
  Sense Oligo
gugcaauggcgugaucucg

SEQ ID NO: 34422 - RNA, 19 nt, Artificial Sequence
  Antisense Oligo
cgagaucacgccauugcac

SEQ ID NO: 34423 - RNA, 19 nt, Artificial Sequence
  Sense Oligo
ugcaauggcgugaucucgg

SEQ ID NO: 34424 - RNA, 19 nt, Artificial Sequence
  Antisense Oligo
ccgagaucacgccauugca

SEQ ID NO: 34425 - RNA, 19 nt, Artificial Sequence
  Sense Oligo
gcaauggcgugaucucggc

SEQ ID NO: 34426 - RNA, 19 nt, Artificial Sequence
  Antisense Oligo
gccgagaucacgccauugc

SEQ ID NO: 34427 - RNA, 19 nt, Artificial Sequence
  Sense Oligo
caauggcgugaucucggcu

SEQ ID NO: 34428 - RNA, 19 nt, Artificial Sequence
  Antisense Oligo
agccgagaucacgccauug

SEQ ID NO: 34429 - RNA, 19 nt, Artificial Sequence
  Sense Oligo
aauggcgugaucucggcuc

SEQ ID NO: 34430 - RNA, 19 nt, Artificial Sequence
  Antisense Oligo
gagccgagaucacgccauu

SEQ ID NO: 34431 - RNA, 19 nt, Artificial Sequence
  Sense Oligo
auggcgugaucucggcuca

SEQ ID NO: 34432 - RNA, 19 nt, Artificial Sequence
  Antisense Oligo
ugagccgagaucacgccau

SEQ ID NO: 34433 - RNA, 19 nt, Artificial Sequence
  Sense Oligo
cuccgccuccuggguucaa

SEQ ID NO: 34434 - RNA, 19 nt, Artificial Sequence
  Antisense Oligo
uugaacccaggaggcggag

SEQ ID NO: 34435 - RNA, 19 nt, Artificial Sequence
  Sense Oligo
uccgccuccuggguucaag

SEQ ID NO: 34436 - RNA, 19 nt, Artificial Sequence
  Antisense Oligo
cuugaacccaggaggcgga

SEQ ID NO: 34437 - RNA, 19 nt, Artificial Sequence
  Sense Oligo
ccgccuccuggguucaagu

SEQ ID NO: 34438 - RNA, 19 nt, Artificial Sequence
  Antisense Oligo
acuugaacccaggaggcgg

SEQ ID NO: 34439 - RNA, 19 nt, Artificial Sequence
  Sense Oligo
cgccuccuggguucaagug

SEQ ID NO: 34440 - RNA, 19 nt, Artificial Sequence
  Antisense Oligo
cacuugaacccaggaggcg

SEQ ID NO: 34441 - RNA, 19 nt, Artificial Sequence
  Sense Oligo
gccuccuggguucaaguga

SEQ ID NO: 34442 - RNA, 19 nt, Artificial Sequence
  Antisense Oligo
ucacuugaacccaggaggc

SEQ ID NO: 34443 - RNA, 19 nt, Artificial Sequence
  Sense Oligo
uggguucaagugauucucc

SEQ ID NO: 34444 - RNA, 19 nt, Artificial Sequence
  Antisense Oligo
ggagaaucacuugaaccca

SEQ ID NO: 34445 - RNA, 19 nt, Artificial Sequence
  Sense Oligo
ggguucaagugauucuccu

SEQ ID NO: 34446 - RNA, 19 nt, Artificial Sequence
  Antisense Oligo
aggagaaucacuugaaccc

SEQ ID NO: 34447 - RNA, 19 nt, Artificial Sequence
  Sense Oligo
gguucaagugauucuccug

SEQ ID NO: 34448 - RNA, 19 nt, Artificial Sequence
  Antisense Oligo
caggagaaucacuugaacc

SEQ ID NO: 34449 - RNA, 19 nt, Artificial Sequence
  Sense Oligo
guucaagugauucuccugc

SEQ ID NO: 34450 - RNA, 19 nt, Artificial Sequence
  Antisense Oligo
gcaggagaaucacuugaac

SEQ ID NO: 34451 - RNA, 19 nt, Artificial Sequence
  Sense Oligo
uucaagugauucuccugcc

SEQ ID NO: 34452 - RNA, 19 nt, Artificial Sequence
  Antisense Oligo
ggcaggagaaucacuugaa

SEQ ID NO: 34453 - RNA, 19 nt, Artificial Sequence
  Sense Oligo
ucaagugauucuccugccu

SEQ ID NO: 34454 - RNA, 19 nt, Artificial Sequence
  Antisense Oligo
aggcaggagaaucacuuga

SEQ ID NO: 34455 - RNA, 19 nt, Artificial Sequence
  Sense Oligo
ugccucagccucccgagua

SEQ ID NO: 34456 - RNA, 19 nt, Artificial Sequence
  Antisense Oligo
uacucgggaggcugaggca

SEQ ID NO: 34457 - RNA, 19 nt, Artificial Sequence
  Sense Oligo
cucagccucccgaguagcu

SEQ ID NO: 34458 - RNA, 19 nt, Artificial Sequence
  Antisense Oligo
agcuacucgggaggcugag

SEQ ID NO: 34459 - RNA, 19 nt, Artificial Sequence
  Sense Oligo
cccgaguagcugggauuac

SEQ ID NO: 34460 - RNA, 19 nt, Artificial Sequence
  Antisense Oligo
guaaucccagcuacucggg

SEQ ID NO: 34461 - RNA, 19 nt, Artificial Sequence
  Sense Oligo
ccgaguagcugggauuaca

SEQ ID NO: 34462 - RNA, 19 nt, Artificial Sequence
  Antisense Oligo
uguaaucccagcuacucgg

SEQ ID NO: 34463 - RNA, 19 nt, Artificial Sequence
  Sense Oligo
cgaguagcugggauuacag

SEQ ID NO: 34464 - RNA, 19 nt, Artificial Sequence
  Antisense Oligo
cuguaaucccagcuacucg

SEQ ID NO: 34465 - RNA, 19 nt, Artificial Sequence
  Sense Oligo
cugggauuacaggcaugug

SEQ ID NO: 34466 - RNA, 19 nt, Artificial Sequence
  Antisense Oligo
cacaugccuguaaucccag

SEQ ID NO: 34467 - RNA, 19 nt, Artificial Sequence
  Sense Oligo
ugggauuacaggcaugugc

SEQ ID NO: 34468 - RNA, 19 nt, Artificial Sequence
  Antisense Oligo
gcacaugccuguaauccca

SEQ ID NO: 34469 - RNA, 19 nt, Artificial Sequence
  Sense Oligo
gggauuacaggcaugugcc

SEQ ID NO: 34470 - RNA, 19 nt, Artificial Sequence
  Antisense Oligo
ggcacaugccuguaauccc

SEQ ID NO: 34471 - RNA, 19 nt, Artificial Sequence
  Sense Oligo
ggauuacaggcaugugcca

SEQ ID NO: 34472 - RNA, 19 nt, Artificial Sequence
  Antisense Oligo
uggcacaugccuguaaucc

SEQ ID NO: 34473 - RNA, 19 nt, Artificial Sequence
  Sense Oligo
gauuacaggcaugugccac

SEQ ID NO: 34474 - RNA, 19 nt, Artificial Sequence
  Antisense Oligo
guggcacaugccuguaauc

SEQ ID NO: 34475 - RNA, 19 nt, Artificial Sequence
  Sense Oligo
auuacaggcaugugccacu

SEQ ID NO: 34476 - RNA, 19 nt, Artificial Sequence
  Antisense Oligo
aguggcacaugccuguaau

SEQ ID NO: 34477 - RNA, 19 nt, Artificial Sequence
  Sense Oligo
uuacaggcaugugccacua

SEQ ID NO: 34478 - RNA, 19 nt, Artificial Sequence
  Antisense Oligo
uaguggcacaugccuguaa

SEQ ID NO: 34479 - RNA, 19 nt, Artificial Sequence
  Sense Oligo
uacaggcaugugccacuaa

SEQ ID NO: 34480 - RNA, 19 nt, Artificial Sequence
  Antisense Oligo
uuaguggcacaugccugua

SEQ ID NO: 34481 - RNA, 19 nt, Artificial Sequence
  Sense Oligo
acaggcaugugccacuaaa

SEQ ID NO: 34482 - RNA, 19 nt, Artificial Sequence
  Antisense Oligo
uuuaguggcacaugccugu

SEQ ID NO: 34483 - RNA, 19 nt, Artificial Sequence
  Sense Oligo
uucuacauguuggucaggc

SEQ ID NO: 34484 - RNA, 19 nt, Artificial Sequence
  Antisense Oligo
gccugaccaacauguagaa

SEQ ID NO: 34485 - RNA, 19 nt, Artificial Sequence
  Sense Oligo
ucuacauguuggucaggcu

SEQ ID NO: 34486 - RNA, 19 nt, Artificial Sequence
  Antisense Oligo
agccugaccaacauguaga

SEQ ID NO: 34487 - RNA, 19 nt, Artificial Sequence
  Sense Oligo
cuacauguuggucaggcug

SEQ ID NO: 34488 - RNA, 19 nt, Artificial Sequence
  Antisense Oligo
cagccugaccaacauguag

SEQ ID NO: 34489 - RNA, 19 nt, Artificial Sequence
  Sense Oligo
uacauguuggucaggcugg

SEQ ID NO: 34490 - RNA, 19 nt, Artificial Sequence
  Antisense Oligo
ccagccugaccaacaugua

SEQ ID NO: 34491 - RNA, 19 nt, Artificial Sequence
  Sense Oligo
acauguuggucaggcuggc

SEQ ID NO: 34492 - RNA, 19 nt, Artificial Sequence
  Antisense Oligo
gccagccugaccaacaugu

SEQ ID NO: 34493 - RNA, 19 nt, Artificial Sequence
  Sense Oligo
cauguuggucaggcuggcc

SEQ ID NO: 34494 - RNA, 19 nt, Artificial Sequence
  Antisense Oligo
ggccagccugaccaacaug

SEQ ID NO: 34495 - RNA, 19 nt, Artificial Sequence
  Sense Oligo
auguuggucaggcuggccu

SEQ ID NO: 34496 - RNA, 19 nt, Artificial Sequence
  Antisense Oligo
aggccagccugaccaacau

SEQ ID NO: 34497 - RNA, 19 nt, Artificial Sequence
  Sense Oligo
uguuggucaggcuggccuu

SEQ ID NO: 34498 - RNA, 19 nt, Artificial Sequence
  Antisense Oligo
aaggccagccugaccaaca

SEQ ID NO: 34499 - RNA, 19 nt, Artificial Sequence
  Sense Oligo
guuggucaggcuggccuug

SEQ ID NO: 34500 - RNA, 19 nt, Artificial Sequence
  Antisense Oligo
caaggccagccugaccaac

SEQ ID NO: 34501 - RNA, 19 nt, Artificial Sequence
  Sense Oligo
ugaccucaggugauucgcc

SEQ ID NO: 34502 - RNA, 19 nt, Artificial Sequence
  Antisense Oligo
ggcgaaucaccugagguca

SEQ ID NO: 34503 - RNA, 19 nt, Artificial Sequence
  Sense Oligo
ccucagccucccaaagugc

SEQ ID NO: 34504 - RNA, 19 nt, Artificial Sequence
  Antisense Oligo
gcacuuugggaggcugagg

SEQ ID NO: 34505 - RNA, 19 nt, Artificial Sequence
  Sense Oligo
cucagccucccaaagugcu

SEQ ID NO: 34506 - RNA, 19 nt, Artificial Sequence
  Antisense Oligo
agcacuuugggaggcugag

SEQ ID NO: 34507 - RNA, 19 nt, Artificial Sequence
  Sense Oligo
ucagccucccaaagugcua

SEQ ID NO: 34508 - RNA, 19 nt, Artificial Sequence
  Antisense Oligo
uagcacuuugggaggcuga

SEQ ID NO: 34509 - RNA, 19 nt, Artificial Sequence
  Sense Oligo
cagccucccaaagugcuag

SEQ ID NO: 34510 - RNA, 19 nt, Artificial Sequence
  Antisense Oligo
cuagcacuuugggaggcug

SEQ ID NO: 34511 - RNA, 19 nt, Artificial Sequence
  Sense Oligo
agccucccaaagugcuagg

SEQ ID NO: 34512 - RNA, 19 nt, Artificial Sequence
  Antisense Oligo
ccuagcacuuugggaggcu

SEQ ID NO: 34513 - RNA, 19 nt, Artificial Sequence
  Sense Oligo
gccucccaaagugcuagga

SEQ ID NO: 34514 - RNA, 19 nt, Artificial Sequence
  Antisense Oligo
uccuagcacuuugggaggc

SEQ ID NO: 34515 - RNA, 19 nt, Artificial Sequence
  Sense Oligo
ccucccaaagugcuaggau

SEQ ID NO: 34516 - RNA, 19 nt, Artificial Sequence
  Antisense Oligo
auccuagcacuuugggagg

SEQ ID NO: 34517 - RNA, 19 nt, Artificial Sequence
  Sense Oligo
cucccaaagugcuaggauu

SEQ ID NO: 34518 - RNA, 19 nt, Artificial Sequence
  Antisense Oligo
aauccuagcacuuugggag

SEQ ID NO: 34519 - RNA, 19 nt, Artificial Sequence
  Sense Oligo
ucccaaagugcuaggauua

SEQ ID NO: 34520 - RNA, 19 nt, Artificial Sequence
  Antisense Oligo
uaauccuagcacuuuggga

SEQ ID NO: 34521 - RNA, 19 nt, Artificial Sequence
  Sense Oligo
cccaaagugcuaggauuac

SEQ ID NO: 34522 - RNA, 19 nt, Artificial Sequence
  Antisense Oligo
guaauccuagcacuuuggg

SEQ ID NO: 34523 - RNA, 19 nt, Artificial Sequence
  Sense Oligo
ccaaagugcuaggauuaca

SEQ ID NO: 34524 - RNA, 19 nt, Artificial Sequence
  Antisense Oligo
uguaauccuagcacuuugg

SEQ ID NO: 34525 - RNA, 19 nt, Artificial Sequence
  Sense Oligo
caaagugcuaggauuacag

SEQ ID NO: 34526 - RNA, 19 nt, Artificial Sequence
  Antisense Oligo
cuguaauccuagcacuuug

SEQ ID NO: 34527 - RNA, 19 nt, Artificial Sequence
  Sense Oligo
cuaggauuacaggcaugag

SEQ ID NO: 34528 - RNA, 19 nt, Artificial Sequence
  Antisense Oligo
cucaugccuguaauccuag

SEQ ID NO: 34529 - RNA, 19 nt, Artificial Sequence
  Sense Oligo
gauuacaggcaugagcuac

SEQ ID NO: 34530 - RNA, 19 nt, Artificial Sequence
  Antisense Oligo
guagcucaugccuguaauc

SEQ ID NO: 34531 - RNA, 19 nt, Artificial Sequence
  Sense Oligo
auuacaggcaugagcuacu

SEQ ID NO: 34532 - RNA, 19 nt, Artificial Sequence
  Antisense Oligo
aguagcucaugccuguaau

SEQ ID NO: 34533 - RNA, 19 nt, Artificial Sequence
  Sense Oligo
cugugacguuagugauaga

SEQ ID NO: 34534 - RNA, 19 nt, Artificial Sequence
  Antisense Oligo
ucuaucacuaacgucacag

SEQ ID NO: 34535 - RNA, 19 nt, Artificial Sequence
  Sense Oligo
ugugacguuagugauagaa

SEQ ID NO: 34536 - RNA, 19 nt, Artificial Sequence
  Antisense Oligo
uucuaucacuaacgucaca

SEQ ID NO: 34537 - RNA, 19 nt, Artificial Sequence
  Sense Oligo
cuuucuuccuuucaguuuu

SEQ ID NO: 34538 - RNA, 19 nt, Artificial Sequence
  Antisense Oligo
aaaacugaaaggaagaaag

SEQ ID NO: 34539 - RNA, 19 nt, Artificial Sequence
  Sense Oligo
uuucuuguguuaaaguacc

SEQ ID NO: 34540 - RNA, 19 nt, Artificial Sequence
  Antisense Oligo
gguacuuuaacacaagaaa

SEQ ID NO: 34541 - RNA, 19 nt, Artificial Sequence
  Sense Oligo
uguuaaaguaccacagaca

SEQ ID NO: 34542 - RNA, 19 nt, Artificial Sequence
  Antisense Oligo
ugucugugguacuuuaaca

SEQ ID NO: 34543 - RNA, 19 nt, Artificial Sequence
  Sense Oligo
guuaaaguaccacagacac

SEQ ID NO: 34544 - RNA, 19 nt, Artificial Sequence
  Antisense Oligo
gugucugugguacuuuaac

SEQ ID NO: 34545 - RNA, 19 nt, Artificial Sequence
  Sense Oligo
agaauaaaugucauuggug

SEQ ID NO: 34546 - RNA, 19 nt, Artificial Sequence
  Antisense Oligo
caccaaugacauuuauucu

SEQ ID NO: 34547 - RNA, 19 nt, Artificial Sequence
  Sense Oligo
gaauaaaugucauugguga

SEQ ID NO: 34548 - RNA, 19 nt, Artificial Sequence
  Antisense Oligo
ucaccaaugacauuuauuc

SEQ ID NO: 34549 - RNA, 19 nt, Artificial Sequence
  Sense Oligo
aauaaaugucauuggugag

SEQ ID NO: 34550 - RNA, 19 nt, Artificial Sequence
  Antisense Oligo
cucaccaaugacauuuauu

SEQ ID NO: 34551 - RNA, 19 nt, Artificial Sequence
  Sense Oligo
agaugaucacguucucugg

SEQ ID NO: 34552 - RNA, 19 nt, Artificial Sequence
  Antisense Oligo
ccagagaacgugaucaucu

SEQ ID NO: 34553 - RNA, 19 nt, Artificial Sequence
  Sense Oligo
gaugaucacguucucugga

SEQ ID NO: 34554 - RNA, 19 nt, Artificial Sequence
  Antisense Oligo
uccagagaacgugaucauc

SEQ ID NO: 34555 - RNA, 19 nt, Artificial Sequence
  Sense Oligo
augaucacguucucuggag

SEQ ID NO: 34556 - RNA, 19 nt, Artificial Sequence
  Antisense Oligo
cuccagagaacgugaucau

SEQ ID NO: 34557 - RNA, 19 nt, Artificial Sequence
  Sense Oligo
aggcagcugccaacuucca

SEQ ID NO: 34558 - RNA, 19 nt, Artificial Sequence
  Antisense Oligo
uggaaguuggcagcugccu

SEQ ID NO: 34559 - RNA, 19 nt, Artificial Sequence
  Sense Oligo
ggcagcugccaacuuccac

SEQ ID NO: 34560 - RNA, 19 nt, Artificial Sequence
  Antisense Oligo
guggaaguuggcagcugcc

SEQ ID NO: 34561 - RNA, 19 nt, Artificial Sequence
  Sense Oligo
gcagcugccaacuuccaca

SEQ ID NO: 34562 - RNA, 19 nt, Artificial Sequence
  Antisense Oligo
uguggaaguuggcagcugc

SEQ ID NO: 34563 - RNA, 19 nt, Artificial Sequence
  Sense Oligo
uguguuuaaggaauuuguc

SEQ ID NO: 34564 - RNA, 19 nt, Artificial Sequence
  Antisense Oligo
gacaaauuccuuaaacaca

SEQ ID NO: 34565 - RNA, 19 nt, Artificial Sequence
  Sense Oligo
guguuuaaggaauuuguca

SEQ ID NO: 34566 - RNA, 19 nt, Artificial Sequence
  Antisense Oligo
ugacaaauuccuuaaacac

SEQ ID NO: 34567 - RNA, 19 nt, Artificial Sequence
  Sense Oligo
uguuuaaggaauuugucag

SEQ ID NO: 34568 - RNA, 19 nt, Artificial Sequence
  Antisense Oligo
cugacaaauuccuuaaaca

SEQ ID NO: 34569 - RNA, 19 nt, Artificial Sequence
  Sense Oligo
guuuaaggaauuugucagu

SEQ ID NO: 34570 - RNA, 19 nt, Artificial Sequence
  Antisense Oligo
acugacaaauuccuuaaac

SEQ ID NO: 34571 - RNA, 19 nt, Artificial Sequence
  Sense Oligo
aaggaauuugucaguuacu

SEQ ID NO: 34572 - RNA, 19 nt, Artificial Sequence
  Antisense Oligo
aguaacugacaaauuccuu

SEQ ID NO: 34573 - RNA, 19 nt, Artificial Sequence
  Sense Oligo
aggaauuugucaguuacuu

SEQ ID NO: 34574 - RNA, 19 nt, Artificial Sequence
  Antisense Oligo
aaguaacugacaaauuccu

SEQ ID NO: 34575 - RNA, 19 nt, Artificial Sequence
  Sense Oligo
ggaauuugucaguuacuua

SEQ ID NO: 34576 - RNA, 19 nt, Artificial Sequence
  Antisense Oligo
uaaguaacugacaaauucc

SEQ ID NO: 34577 - RNA, 19 nt, Artificial Sequence
  Sense Oligo
gaauuugucaguuacuuag

SEQ ID NO: 34578 - RNA, 19 nt, Artificial Sequence
  Antisense Oligo
cuaaguaacugacaaauuc

SEQ ID NO: 34579 - RNA, 19 nt, Artificial Sequence
  Sense Oligo
aauuugucaguuacuuagg

SEQ ID NO: 34580 - RNA, 19 nt, Artificial Sequence
  Antisense Oligo
ccuaaguaacugacaaauu

SEQ ID NO: 34581 - RNA, 19 nt, Artificial Sequence
  Sense Oligo
auuugucaguuacuuagga

SEQ ID NO: 34582 - RNA, 19 nt, Artificial Sequence
  Antisense Oligo
uccuaaguaacugacaaau

SEQ ID NO: 34583 - RNA, 19 nt, Artificial Sequence
  Sense Oligo
uuugucaguuacuuaggau

SEQ ID NO: 34584 - RNA, 19 nt, Artificial Sequence
  Antisense Oligo
auccuaaguaacugacaaa

SEQ ID NO: 34585 - RNA, 19 nt, Artificial Sequence
  Sense Oligo
uugucaguuacuuaggauu

SEQ ID NO: 34586 - RNA, 19 nt, Artificial Sequence
  Antisense Oligo
aauccuaaguaacugacaa

SEQ ID NO: 34587 - RNA, 19 nt, Artificial Sequence
  Sense Oligo
ugucaguuacuuaggauuu

SEQ ID NO: 34588 - RNA, 19 nt, Artificial Sequence
  Antisense Oligo
aaauccuaaguaacugaca

SEQ ID NO: 34589 - RNA, 19 nt, Artificial Sequence
  Sense Oligo
gucaguuacuuaggauuua

SEQ ID NO: 34590 - RNA, 19 nt, Artificial Sequence
  Antisense Oligo
uaaauccuaaguaacugac

SEQ ID NO: 34591 - RNA, 19 nt, Artificial Sequence
  Sense Oligo
aacuaucuuaaauguuggc

SEQ ID NO: 34592 - RNA, 19 nt, Artificial Sequence
  Antisense Oligo
gccaacauuuaagauaguu

SEQ ID NO: 34593 - RNA, 19 nt, Artificial Sequence
  Sense Oligo
acuaucuuaaauguuggcu

SEQ ID NO: 34594 - RNA, 19 nt, Artificial Sequence
  Antisense Oligo
agccaacauuuaagauagu

SEQ ID NO: 34595 - RNA, 19 nt, Artificial Sequence
  Sense Oligo
cuaucuuaaauguuggcug

SEQ ID NO: 34596 - RNA, 19 nt, Artificial Sequence
  Antisense Oligo
cagccaacauuuaagauag

SEQ ID NO: 34597 - RNA, 19 nt, Artificial Sequence
  Sense Oligo
uaucuuaaauguuggcugg

SEQ ID NO: 34598 - RNA, 19 nt, Artificial Sequence
  Antisense Oligo
ccagccaacauuuaagaua

SEQ ID NO: 34599 - RNA, 19 nt, Artificial Sequence
  Sense Oligo
aucuuaaauguuggcuggg

SEQ ID NO: 34600 - RNA, 19 nt, Artificial Sequence
  Antisense Oligo
cccagccaacauuuaagau

SEQ ID NO: 34601 - RNA, 19 nt, Artificial Sequence
  Sense Oligo
cuuaaauguuggcugggau

SEQ ID NO: 34602 - RNA, 19 nt, Artificial Sequence
  Antisense Oligo
aucccagccaacauuuaag

SEQ ID NO: 34603 - RNA, 19 nt, Artificial Sequence
  Sense Oligo
uuaaauguuggcugggauc

SEQ ID NO: 34604 - RNA, 19 nt, Artificial Sequence
  Antisense Oligo
gaucccagccaacauuuaa

SEQ ID NO: 34605 - RNA, 19 nt, Artificial Sequence
  Sense Oligo
uaaauguuggcugggaucu

SEQ ID NO: 34606 - RNA, 19 nt, Artificial Sequence
  Antisense Oligo
agaucccagccaacauuua

SEQ ID NO: 34607 - RNA, 19 nt, Artificial Sequence
  Sense Oligo
aaauguuggcugggaucuc

SEQ ID NO: 34608 - RNA, 19 nt, Artificial Sequence
  Antisense Oligo
gagaucccagccaacauuu

SEQ ID NO: 34609 - RNA, 19 nt, Artificial Sequence
  Sense Oligo
aauguuggcugggaucuca

SEQ ID NO: 34610 - RNA, 19 nt, Artificial Sequence
  Antisense Oligo
ugagaucccagccaacauu

SEQ ID NO: 34611 - RNA, 19 nt, Artificial Sequence
  Sense Oligo
auguuggcugggaucucag

SEQ ID NO: 34612 - RNA, 19 nt, Artificial Sequence
  Antisense Oligo
cugagaucccagccaacau

SEQ ID NO: 34613 - RNA, 19 nt, Artificial Sequence
  Sense Oligo
uuggcugggaucucagaua

SEQ ID NO: 34614 - RNA, 19 nt, Artificial Sequence
  Antisense Oligo
uaucugagaucccagccaa

SEQ ID NO: 34615 - RNA, 19 nt, Artificial Sequence
  Sense Oligo
uggcugggaucucagauaa

SEQ ID NO: 34616 - RNA, 19 nt, Artificial Sequence
  Antisense Oligo
uuaucugagaucccagcca

SEQ ID NO: 34617 - RNA, 19 nt, Artificial Sequence
  Sense Oligo
gcugggaucucagauaagu

SEQ ID NO: 34618 - RNA, 19 nt, Artificial Sequence
  Antisense Oligo
acuuaucugagaucccagc

SEQ ID NO: 34619 - RNA, 19 nt, Artificial Sequence
  Sense Oligo
ugggaucucagauaaguuu

SEQ ID NO: 34620 - RNA, 19 nt, Artificial Sequence
  Antisense Oligo
aaacuuaucugagauccca

SEQ ID NO: 34621 - RNA, 19 nt, Artificial Sequence
  Sense Oligo
gggaucucagauaaguuua

SEQ ID NO: 34622 - RNA, 19 nt, Artificial Sequence
  Antisense Oligo
uaaacuuaucugagauccc

SEQ ID NO: 34623 - RNA, 19 nt, Artificial Sequence
  Sense Oligo
ggaucucagauaaguuuaa

SEQ ID NO: 34624 - RNA, 19 nt, Artificial Sequence
  Antisense Oligo
uuaaacuuaucugagaucc

SEQ ID NO: 34625 - RNA, 19 nt, Artificial Sequence
  Sense Oligo
ucucagauaaguuuaaucc

SEQ ID NO: 34626 - RNA, 19 nt, Artificial Sequence
  Antisense Oligo
ggauuaaacuuaucugaga

SEQ ID NO: 34627 - RNA, 19 nt, Artificial Sequence
  Sense Oligo
cucagauaaguuuaaucca

SEQ ID NO: 34628 - RNA, 19 nt, Artificial Sequence
  Antisense Oligo
uggauuaaacuuaucugag

SEQ ID NO: 34629 - RNA, 19 nt, Artificial Sequence
  Sense Oligo
aaaauacucucuaccugug

SEQ ID NO: 34630 - RNA, 19 nt, Artificial Sequence
  Antisense Oligo
cacagguagagaguauuuu

SEQ ID NO: 34631 - RNA, 19 nt, Artificial Sequence
  Sense Oligo
aauacucucuaccugugcc

SEQ ID NO: 34632 - RNA, 19 nt, Artificial Sequence
  Antisense Oligo
ggcacagguagagaguauu

SEQ ID NO: 34633 - RNA, 19 nt, Artificial Sequence
  Sense Oligo
auacucucuaccugugcca

SEQ ID NO: 34634 - RNA, 19 nt, Artificial Sequence
  Antisense Oligo
uggcacagguagagaguau

SEQ ID NO: 34635 - RNA, 19 nt, Artificial Sequence
  Sense Oligo
ucucuaccugugccauaaa

SEQ ID NO: 34636 - RNA, 19 nt, Artificial Sequence
  Antisense Oligo
uuuauggcacagguagaga

SEQ ID NO: 34637 - RNA, 19 nt, Artificial Sequence
  Sense Oligo
cucuaccugugccauaaaa

SEQ ID NO: 34638 - RNA, 19 nt, Artificial Sequence
  Antisense Oligo
uuuuauggcacagguagag

SEQ ID NO: 34639 - RNA, 19 nt, Artificial Sequence
  Sense Oligo
ucuaccugugccauaaaag

SEQ ID NO: 34640 - RNA, 19 nt, Artificial Sequence
  Antisense Oligo
cuuuuauggcacagguaga

SEQ ID NO: 34641 - RNA, 19 nt, Artificial Sequence
  Sense Oligo
cuaccugugccauaaaagc

SEQ ID NO: 34642 - RNA, 19 nt, Artificial Sequence
  Antisense Oligo
gcuuuuauggcacagguag

SEQ ID NO: 34643 - RNA, 19 nt, Artificial Sequence
  Sense Oligo
uaccugugccauaaaagca

SEQ ID NO: 34644 - RNA, 19 nt, Artificial Sequence
  Antisense Oligo
ugcuuuuauggcacaggua

SEQ ID NO: 34645 - RNA, 19 nt, Artificial Sequence
  Sense Oligo
accugugccauaaaagcaa

SEQ ID NO: 34646 - RNA, 19 nt, Artificial Sequence
  Antisense Oligo
uugcuuuuauggcacaggu

SEQ ID NO: 34647 - RNA, 19 nt, Artificial Sequence
  Sense Oligo
ccugugccauaaaagcaaa

SEQ ID NO: 34648 - RNA, 19 nt, Artificial Sequence
  Antisense Oligo
uuugcuuuuauggcacagg

SEQ ID NO: 34649 - RNA, 19 nt, Artificial Sequence
  Sense Oligo
ucugcugcugugaaggcuc

SEQ ID NO: 34650 - RNA, 19 nt, Artificial Sequence
  Antisense Oligo
gagccuucacagcagcaga

SEQ ID NO: 34651 - RNA, 19 nt, Artificial Sequence
  Sense Oligo
cugcugugaaggcuccagg

SEQ ID NO: 34652 - RNA, 19 nt, Artificial Sequence
  Antisense Oligo
ccuggagccuucacagcag

SEQ ID NO: 34653 - RNA, 19 nt, Artificial Sequence
  Sense Oligo
gugaaggcuccaggguuga

SEQ ID NO: 34654 - RNA, 19 nt, Artificial Sequence
  Antisense Oligo
ucaacccuggagccuucac

SEQ ID NO: 34655 - RNA, 19 nt, Artificial Sequence
  Sense Oligo
ugaaggcuccaggguugac

SEQ ID NO: 34656 - RNA, 19 nt, Artificial Sequence
  Antisense Oligo
gucaacccuggagccuuca

SEQ ID NO: 34657 - RNA, 19 nt, Artificial Sequence
  Sense Oligo
gaaggcuccaggguugacg

SEQ ID NO: 34658 - RNA, 19 nt, Artificial Sequence
  Antisense Oligo
cgucaacccuggagccuuc

SEQ ID NO: 34659 - RNA, 19 nt, Artificial Sequence
  Sense Oligo
aaggcuccaggguugacgg

SEQ ID NO: 34660 - RNA, 19 nt, Artificial Sequence
  Antisense Oligo
ccgucaacccuggagccuu

SEQ ID NO: 34661 - RNA, 19 nt, Artificial Sequence
  Sense Oligo
aggcuccaggguugacgga

SEQ ID NO: 34662 - RNA, 19 nt, Artificial Sequence
  Antisense Oligo
uccgucaacccuggagccu

SEQ ID NO: 34663 - RNA, 19 nt, Artificial Sequence
  Sense Oligo
gcuccaggguugacggaca

SEQ ID NO: 34664 - RNA, 19 nt, Artificial Sequence
  Antisense Oligo
uguccgucaacccuggagc

SEQ ID NO: 34665 - RNA, 19 nt, Artificial Sequence
  Sense Oligo
cuccaggguugacggacac

SEQ ID NO: 34666 - RNA, 19 nt, Artificial Sequence
  Antisense Oligo
guguccgucaacccuggag

SEQ ID NO: 34667 - RNA, 19 nt, Artificial Sequence
  Sense Oligo
uccaggguugacggacacu

SEQ ID NO: 34668 - RNA, 19 nt, Artificial Sequence
  Antisense Oligo
aguguccgucaacccugga

SEQ ID NO: 34669 - RNA, 19 nt, Artificial Sequence
  Sense Oligo
ccaggguugacggacacuu

SEQ ID NO: 34670 - RNA, 19 nt, Artificial Sequence
  Antisense Oligo
aaguguccgucaacccugg

SEQ ID NO: 34671 - RNA, 19 nt, Artificial Sequence
  Sense Oligo
caggguugacggacacuug

SEQ ID NO: 34672 - RNA, 19 nt, Artificial Sequence
  Antisense Oligo
caaguguccgucaacccug

SEQ ID NO: 34673 - RNA, 19 nt, Artificial Sequence
  Sense Oligo
aggguugacggacacuugg

SEQ ID NO: 34674 - RNA, 19 nt, Artificial Sequence
  Antisense Oligo
ccaaguguccgucaacccu

SEQ ID NO: 34675 - RNA, 19 nt, Artificial Sequence
  Sense Oligo
ggguugacggacacuugga

SEQ ID NO: 34676 - RNA, 19 nt, Artificial Sequence
  Antisense Oligo
uccaaguguccgucaaccc

SEQ ID NO: 34677 - RNA, 19 nt, Artificial Sequence
  Sense Oligo
gguugacggacacuuggag

SEQ ID NO: 34678 - RNA, 19 nt, Artificial Sequence
  Antisense Oligo
cuccaaguguccgucaacc

SEQ ID NO: 34679 - RNA, 19 nt, Artificial Sequence
  Sense Oligo
aaggugcccgugucaggcu

SEQ ID NO: 34680 - RNA, 19 nt, Artificial Sequence
  Antisense Oligo
agccugacacgggcaccuu

SEQ ID NO: 34681 - RNA, 19 nt, Artificial Sequence
  Sense Oligo
aggucugugcagccucuga

SEQ ID NO: 34682 - RNA, 19 nt, Artificial Sequence
  Antisense Oligo
ucagaggcugcacagaccu

SEQ ID NO: 34683 - RNA, 19 nt, Artificial Sequence
  Sense Oligo
ggucugugcagccucugag

SEQ ID NO: 34684 - RNA, 19 nt, Artificial Sequence
  Antisense Oligo
cucagaggcugcacagacc

SEQ ID NO: 34685 - RNA, 19 nt, Artificial Sequence
  Sense Oligo
gucugugcagccucugagc

SEQ ID NO: 34686 - RNA, 19 nt, Artificial Sequence
  Antisense Oligo
gcucagaggcugcacagac

SEQ ID NO: 34687 - RNA, 19 nt, Artificial Sequence
  Sense Oligo
ucugugcagccucugagcg

SEQ ID NO: 34688 - RNA, 19 nt, Artificial Sequence
  Antisense Oligo
cgcucagaggcugcacaga

SEQ ID NO: 34689 - RNA, 19 nt, Artificial Sequence
  Sense Oligo
ugugcagccucugagcggu

SEQ ID NO: 34690 - RNA, 19 nt, Artificial Sequence
  Antisense Oligo
accgcucagaggcugcaca

SEQ ID NO: 34691 - RNA, 19 nt, Artificial Sequence
  Sense Oligo
gcagccucugagcggucau

SEQ ID NO: 34692 - RNA, 19 nt, Artificial Sequence
  Antisense Oligo
augaccgcucagaggcugc

SEQ ID NO: 34693 - RNA, 19 nt, Artificial Sequence
  Sense Oligo
cagccucugagcggucauu

SEQ ID NO: 34694 - RNA, 19 nt, Artificial Sequence
  Antisense Oligo
aaugaccgcucagaggcug

SEQ ID NO: 34695 - RNA, 19 nt, Artificial Sequence
  Sense Oligo
agccucugagcggucauuc

SEQ ID NO: 34696 - RNA, 19 nt, Artificial Sequence
  Antisense Oligo
gaaugaccgcucagaggcu

SEQ ID NO: 34697 - RNA, 19 nt, Artificial Sequence
  Sense Oligo
gccucugagcggucauuca

SEQ ID NO: 34698 - RNA, 19 nt, Artificial Sequence
  Antisense Oligo
ugaaugaccgcucagaggc

SEQ ID NO: 34699 - RNA, 19 nt, Artificial Sequence
  Sense Oligo
uuuguuguuauuggccauc

SEQ ID NO: 34700 - RNA, 19 nt, Artificial Sequence
  Antisense Oligo
gauggccaauaacaacaaa

SEQ ID NO: 34701 - RNA, 19 nt, Artificial Sequence
  Sense Oligo
uuguuguuauuggccaucg

SEQ ID NO: 34702 - RNA, 19 nt, Artificial Sequence
  Antisense Oligo
cgauggccaauaacaacaa

SEQ ID NO: 34703 - RNA, 19 nt, Artificial Sequence
  Sense Oligo
uguuguuauuggccaucgc

SEQ ID NO: 34704 - RNA, 19 nt, Artificial Sequence
  Antisense Oligo
gcgauggccaauaacaaca

SEQ ID NO: 34705 - RNA, 19 nt, Artificial Sequence
  Sense Oligo
guuguuauuggccaucgcu

SEQ ID NO: 34706 - RNA, 19 nt, Artificial Sequence
  Antisense Oligo
agcgauggccaauaacaac

SEQ ID NO: 34707 - RNA, 19 nt, Artificial Sequence
  Sense Oligo
uuguuauuggccaucgcug

SEQ ID NO: 34708 - RNA, 19 nt, Artificial Sequence
  Antisense Oligo
cagcgauggccaauaacaa

SEQ ID NO: 34709 - RNA, 19 nt, Artificial Sequence
  Sense Oligo
uguuauuggccaucgcugu

SEQ ID NO: 34710 - RNA, 19 nt, Artificial Sequence
  Antisense Oligo
acagcgauggccaauaaca

SEQ ID NO: 34711 - RNA, 19 nt, Artificial Sequence
  Sense Oligo
guuauuggccaucgcuguc

SEQ ID NO: 34712 - RNA, 19 nt, Artificial Sequence
  Antisense Oligo
gacagcgauggccaauaac

SEQ ID NO: 34713 - RNA, 19 nt, Artificial Sequence
  Sense Oligo
uuauuggccaucgcugucc

SEQ ID NO: 34714 - RNA, 19 nt, Artificial Sequence
  Antisense Oligo
ggacagcgauggccaauaa

SEQ ID NO: 34715 - RNA, 19 nt, Artificial Sequence
  Sense Oligo
uauuggccaucgcugucca

SEQ ID NO: 34716 - RNA, 19 nt, Artificial Sequence
  Antisense Oligo
uggacagcgauggccaaua

SEQ ID NO: 34717 - RNA, 19 nt, Artificial Sequence
  Sense Oligo
caucgcuguccagcccugu

SEQ ID NO: 34718 - RNA, 19 nt, Artificial Sequence
  Antisense Oligo
acagggcuggacagcgaug

SEQ ID NO: 34719 - RNA, 19 nt, Artificial Sequence
  Sense Oligo
cugcuggauuguucuagaa

SEQ ID NO: 34720 - RNA, 19 nt, Artificial Sequence
  Antisense Oligo
uucuagaacaauccagcag

SEQ ID NO: 34721 - RNA, 19 nt, Artificial Sequence
  Sense Oligo
gggaccuucagcagugccu

SEQ ID NO: 34722 - RNA, 19 nt, Artificial Sequence
  Antisense Oligo
aggcacugcugaagguccc

SEQ ID NO: 34723 - RNA, 19 nt, Artificial Sequence
  Sense Oligo
ggaccuucagcagugccug

SEQ ID NO: 34724 - RNA, 19 nt, Artificial Sequence
  Antisense Oligo
caggcacugcugaaggucc

SEQ ID NO: 34725 - RNA, 19 nt, Artificial Sequence
  Sense Oligo
ccuucagcagugccuguuu

SEQ ID NO: 34726 - RNA, 19 nt, Artificial Sequence
  Antisense Oligo
aaacaggcacugcugaagg

SEQ ID NO: 34727 - RNA, 19 nt, Artificial Sequence
  Sense Oligo
ccugcgugcugugcucuag

SEQ ID NO: 34728 - RNA, 19 nt, Artificial Sequence
  Antisense Oligo
cuagagcacagcacgcagg

SEQ ID NO: 34729 - RNA, 19 nt, Artificial Sequence
  Sense Oligo
cgggcucucuuucacagca

SEQ ID NO: 34730 - RNA, 19 nt, Artificial Sequence
  Antisense Oligo
ugcugugaaagagagcccg

SEQ ID NO: 34731 - RNA, 19 nt, Artificial Sequence
  Sense Oligo
cucucuuucacagcagcac

SEQ ID NO: 34732 - RNA, 19 nt, Artificial Sequence
  Antisense Oligo
gugcugcugugaaagagag

SEQ ID NO: 34733 - RNA, 19 nt, Artificial Sequence
  Sense Oligo
agcuccugccuguaucuuc

SEQ ID NO: 34734 - RNA, 19 nt, Artificial Sequence
  Antisense Oligo
gaagauacaggcaggagcu

SEQ ID NO: 34735 - RNA, 19 nt, Artificial Sequence
  Sense Oligo
ccugccuguaucuucccgc

SEQ ID NO: 34736 - RNA, 19 nt, Artificial Sequence
  Antisense Oligo
gcgggaagauacaggcagg

SEQ ID NO: 34737 - RNA, 19 nt, Artificial Sequence
  Sense Oligo
ggcccuucccagguauagu

SEQ ID NO: 34738 - RNA, 19 nt, Artificial Sequence
  Antisense Oligo
acuauaccugggaagggcc

SEQ ID NO: 34739 - RNA, 19 nt, Artificial Sequence
  Sense Oligo
gcccuucccagguauagug

SEQ ID NO: 34740 - RNA, 19 nt, Artificial Sequence
  Antisense Oligo
cacuauaccugggaagggc

SEQ ID NO: 34741 - RNA, 19 nt, Artificial Sequence
  Sense Oligo
cccuucccagguauaguga

SEQ ID NO: 34742 - RNA, 19 nt, Artificial Sequence
  Antisense Oligo
ucacuauaccugggaaggg

SEQ ID NO: 34743 - RNA, 19 nt, Artificial Sequence
  Sense Oligo
ucccagguauagugacgcu

SEQ ID NO: 34744 - RNA, 19 nt, Artificial Sequence
  Antisense Oligo
agcgucacuauaccuggga

SEQ ID NO: 34745 - RNA, 19 nt, Artificial Sequence
  Sense Oligo
cccagguauagugacgcug

SEQ ID NO: 34746 - RNA, 19 nt, Artificial Sequence
  Antisense Oligo
cagcgucacuauaccuggg

SEQ ID NO: 34747 - RNA, 19 nt, Artificial Sequence
  Sense Oligo
ccagguauagugacgcugu

SEQ ID NO: 34748 - RNA, 19 nt, Artificial Sequence
  Antisense Oligo
acagcgucacuauaccugg

SEQ ID NO: 34749 - RNA, 19 nt, Artificial Sequence
  Sense Oligo
cagguauagugacgcugug

SEQ ID NO: 34750 - RNA, 19 nt, Artificial Sequence
  Antisense Oligo
cacagcgucacuauaccug

SEQ ID NO: 34751 - RNA, 19 nt, Artificial Sequence
  Sense Oligo
agguauagugacgcugugu

SEQ ID NO: 34752 - RNA, 19 nt, Artificial Sequence
  Antisense Oligo
acacagcgucacuauaccu

SEQ ID NO: 34753 - RNA, 19 nt, Artificial Sequence
  Sense Oligo
gguauagugacgcuguguu

SEQ ID NO: 34754 - RNA, 19 nt, Artificial Sequence
  Antisense Oligo
aacacagcgucacuauacc

SEQ ID NO: 34755 - RNA, 19 nt, Artificial Sequence
  Sense Oligo
guauagugacgcuguguuc

SEQ ID NO: 34756 - RNA, 19 nt, Artificial Sequence
  Antisense Oligo
gaacacagcgucacuauac

SEQ ID NO: 34757 - RNA, 19 nt, Artificial Sequence
  Sense Oligo
uauagugacgcuguguucc

SEQ ID NO: 34758 - RNA, 19 nt, Artificial Sequence
  Antisense Oligo
ggaacacagcgucacuaua

SEQ ID NO: 34759 - RNA, 19 nt, Artificial Sequence
  Sense Oligo
gcugugggcuuuuccucuc

SEQ ID NO: 34760 - RNA, 19 nt, Artificial Sequence
  Antisense Oligo
gagaggaaaagcccacagc

SEQ ID NO: 34761 - RNA, 19 nt, Artificial Sequence
  Sense Oligo
cugugggcuuuuccucucu

SEQ ID NO: 34762 - RNA, 19 nt, Artificial Sequence
  Antisense Oligo
agagaggaaaagcccacag

SEQ ID NO: 34763 - RNA, 19 nt, Artificial Sequence
  Sense Oligo
ccagcagcagccuuguccu

SEQ ID NO: 34764 - RNA, 19 nt, Artificial Sequence
  Antisense Oligo
aggacaaggcugcugcugg

SEQ ID NO: 34765 - RNA, 19 nt, Artificial Sequence
  Sense Oligo
gcagcagccuuguccucuu

SEQ ID NO: 34766 - RNA, 19 nt, Artificial Sequence
  Antisense Oligo
aagaggacaaggcugcugc

SEQ ID NO: 34767 - RNA, 19 nt, Artificial Sequence
  Sense Oligo
ccuuguccucuugcccagc

SEQ ID NO: 34768 - RNA, 19 nt, Artificial Sequence
  Antisense Oligo
gcugggcaagaggacaagg

SEQ ID NO: 34769 - RNA, 19 nt, Artificial Sequence
  Sense Oligo
cuuguccucuugcccagcu

SEQ ID NO: 34770 - RNA, 19 nt, Artificial Sequence
  Antisense Oligo
agcugggcaagaggacaag

SEQ ID NO: 34771 - RNA, 19 nt, Artificial Sequence
  Sense Oligo
uuguccucuugcccagcug

SEQ ID NO: 34772 - RNA, 19 nt, Artificial Sequence
  Antisense Oligo
cagcugggcaagaggacaa

SEQ ID NO: 34773 - RNA, 19 nt, Artificial Sequence
  Sense Oligo
gccucucggugcuuccagu

SEQ ID NO: 34774 - RNA, 19 nt, Artificial Sequence
  Antisense Oligo
acuggaagcaccgagaggc

SEQ ID NO: 34775 - RNA, 19 nt, Artificial Sequence
  Sense Oligo
ccucucggugcuuccagug

SEQ ID NO: 34776 - RNA, 19 nt, Artificial Sequence
  Antisense Oligo
cacuggaagcaccgagagg

SEQ ID NO: 34777 - RNA, 19 nt, Artificial Sequence
  Sense Oligo
uuccagugagcaccugagc

SEQ ID NO: 34778 - RNA, 19 nt, Artificial Sequence
  Antisense Oligo
gcucaggugcucacuggaa

SEQ ID NO: 34779 - RNA, 19 nt, Artificial Sequence
  Sense Oligo
uccagugagcaccugagcg

SEQ ID NO: 34780 - RNA, 19 nt, Artificial Sequence
  Antisense Oligo
cgcucaggugcucacugga

SEQ ID NO: 34781 - RNA, 19 nt, Artificial Sequence
  Sense Oligo
ccagugagcaccugagcgu

SEQ ID NO: 34782 - RNA, 19 nt, Artificial Sequence
  Antisense Oligo
acgcucaggugcucacugg

SEQ ID NO: 34783 - RNA, 19 nt, Artificial Sequence
  Sense Oligo
cagugagcaccugagcgua

SEQ ID NO: 34784 - RNA, 19 nt, Artificial Sequence
  Antisense Oligo
uacgcucaggugcucacug

SEQ ID NO: 34785 - RNA, 19 nt, Artificial Sequence
  Sense Oligo
agugagcaccugagcguau

SEQ ID NO: 34786 - RNA, 19 nt, Artificial Sequence
  Antisense Oligo
auacgcucaggugcucacu

SEQ ID NO: 34787 - RNA, 19 nt, Artificial Sequence
  Sense Oligo
gugagcaccugagcguauc

SEQ ID NO: 34788 - RNA, 19 nt, Artificial Sequence
  Antisense Oligo
gauacgcucaggugcucac

SEQ ID NO: 34789 - RNA, 19 nt, Artificial Sequence
  Sense Oligo
ugagcaccugagcguaucc

SEQ ID NO: 34790 - RNA, 19 nt, Artificial Sequence
  Antisense Oligo
ggauacgcucaggugcuca

SEQ ID NO: 34791 - RNA, 19 nt, Artificial Sequence
  Sense Oligo
ugagcguauccagguucug

SEQ ID NO: 34792 - RNA, 19 nt, Artificial Sequence
  Antisense Oligo
cagaaccuggauacgcuca

SEQ ID NO: 34793 - RNA, 19 nt, Artificial Sequence
  Sense Oligo
gagcguauccagguucugu

SEQ ID NO: 34794 - RNA, 19 nt, Artificial Sequence
  Antisense Oligo
acagaaccuggauacgcuc

SEQ ID NO: 34795 - RNA, 19 nt, Artificial Sequence
  Sense Oligo
agcguauccagguucugug

SEQ ID NO: 34796 - RNA, 19 nt, Artificial Sequence
  Antisense Oligo
cacagaaccuggauacgcu

SEQ ID NO: 34797 - RNA, 19 nt, Artificial Sequence
  Sense Oligo
gcguauccagguucugugg

SEQ ID NO: 34798 - RNA, 19 nt, Artificial Sequence
  Antisense Oligo
ccacagaaccuggauacgc

SEQ ID NO: 34799 - RNA, 19 nt, Artificial Sequence
  Sense Oligo
cguauccagguucuguggc

SEQ ID NO: 34800 - RNA, 19 nt, Artificial Sequence
  Antisense Oligo
gccacagaaccuggauacg

SEQ ID NO: 34801 - RNA, 19 nt, Artificial Sequence
  Sense Oligo
guauccagguucuguggcu

SEQ ID NO: 34802 - RNA, 19 nt, Artificial Sequence
  Antisense Oligo
agccacagaaccuggauac

SEQ ID NO: 34803 - RNA, 19 nt, Artificial Sequence
  Sense Oligo
agguucuguggcuccugac

SEQ ID NO: 34804 - RNA, 19 nt, Artificial Sequence
  Antisense Oligo
gucaggagccacagaaccu

SEQ ID NO: 34805 - RNA, 19 nt, Artificial Sequence
  Sense Oligo
guucuguggcuccugacac

SEQ ID NO: 34806 - RNA, 19 nt, Artificial Sequence
  Antisense Oligo
gugucaggagccacagaac

SEQ ID NO: 34807 - RNA, 19 nt, Artificial Sequence
  Sense Oligo
ucuguggcuccugacacuu

SEQ ID NO: 34808 - RNA, 19 nt, Artificial Sequence
  Antisense Oligo
aagugucaggagccacaga

SEQ ID NO: 34809 - RNA, 19 nt, Artificial Sequence
  Sense Oligo
cuguggcuccugacacuug

SEQ ID NO: 34810 - RNA, 19 nt, Artificial Sequence
  Antisense Oligo
caagugucaggagccacag

SEQ ID NO: 34811 - RNA, 19 nt, Artificial Sequence
  Sense Oligo
uguggcuccugacacuugc

SEQ ID NO: 34812 - RNA, 19 nt, Artificial Sequence
  Antisense Oligo
gcaagugucaggagccaca

SEQ ID NO: 34813 - RNA, 19 nt, Artificial Sequence
  Sense Oligo
guggcuccugacacuugca

SEQ ID NO: 34814 - RNA, 19 nt, Artificial Sequence
  Antisense Oligo
ugcaagugucaggagccac

SEQ ID NO: 34815 - RNA, 19 nt, Artificial Sequence
  Sense Oligo
cuccugacacuugcacgau

SEQ ID NO: 34816 - RNA, 19 nt, Artificial Sequence
  Antisense Oligo
aucgugcaagugucaggag

SEQ ID NO: 34817 - RNA, 19 nt, Artificial Sequence
  Sense Oligo
uaguagcucacaccuguaa

SEQ ID NO: 34818 - RNA, 19 nt, Artificial Sequence
  Antisense Oligo
uuacaggugugagcuacua

SEQ ID NO: 34819 - RNA, 19 nt, Artificial Sequence
  Sense Oligo
aguagcucacaccuguaau

SEQ ID NO: 34820 - RNA, 19 nt, Artificial Sequence
  Antisense Oligo
auuacaggugugagcuacu

SEQ ID NO: 34821 - RNA, 19 nt, Artificial Sequence
  Sense Oligo
guagcucacaccuguaauc

SEQ ID NO: 34822 - RNA, 19 nt, Artificial Sequence
  Antisense Oligo
gauuacaggugugagcuac

SEQ ID NO: 34823 - RNA, 19 nt, Artificial Sequence
  Sense Oligo
uagcucacaccuguaaucc

SEQ ID NO: 34824 - RNA, 19 nt, Artificial Sequence
  Antisense Oligo
ggauuacaggugugagcua

SEQ ID NO: 34825 - RNA, 19 nt, Artificial Sequence
  Sense Oligo
agcucacaccuguaauccc

SEQ ID NO: 34826 - RNA, 19 nt, Artificial Sequence
  Antisense Oligo
gggauuacaggugugagcu

SEQ ID NO: 34827 - RNA, 19 nt, Artificial Sequence
  Sense Oligo
acaccuguaaucccagcac

SEQ ID NO: 34828 - RNA, 19 nt, Artificial Sequence
  Antisense Oligo
gugcugggauuacaggugu

SEQ ID NO: 34829 - RNA, 19 nt, Artificial Sequence
  Sense Oligo
guaaucccagcacuuugga

SEQ ID NO: 34830 - RNA, 19 nt, Artificial Sequence
  Antisense Oligo
uccaaagugcugggauuac

SEQ ID NO: 34831 - RNA, 19 nt, Artificial Sequence
  Sense Oligo
uaaucccagcacuuuggaa

SEQ ID NO: 34832 - RNA, 19 nt, Artificial Sequence
  Antisense Oligo
uuccaaagugcugggauua

SEQ ID NO: 34833 - RNA, 19 nt, Artificial Sequence
  Sense Oligo
aaucccagcacuuuggaag

SEQ ID NO: 34834 - RNA, 19 nt, Artificial Sequence
  Antisense Oligo
cuuccaaagugcugggauu

SEQ ID NO: 34835 - RNA, 19 nt, Artificial Sequence
  Sense Oligo
aucccagcacuuuggaagg

SEQ ID NO: 34836 - RNA, 19 nt, Artificial Sequence
  Antisense Oligo
ccuuccaaagugcugggau

SEQ ID NO: 34837 - RNA, 19 nt, Artificial Sequence
  Sense Oligo
ucccagcacuuuggaaggc

SEQ ID NO: 34838 - RNA, 19 nt, Artificial Sequence
  Antisense Oligo
gccuuccaaagugcuggga

SEQ ID NO: 34839 - RNA, 19 nt, Artificial Sequence
  Sense Oligo
cccagcacuuuggaaggcc

SEQ ID NO: 34840 - RNA, 19 nt, Artificial Sequence
  Antisense Oligo
ggccuuccaaagugcuggg

SEQ ID NO: 34841 - RNA, 19 nt, Artificial Sequence
  Sense Oligo
ccagcacuuuggaaggcca

SEQ ID NO: 34842 - RNA, 19 nt, Artificial Sequence
  Antisense Oligo
uggccuuccaaagugcugg

SEQ ID NO: 34843 - RNA, 19 nt, Artificial Sequence
  Sense Oligo
aacccugucucuacuaaaa

SEQ ID NO: 34844 - RNA, 19 nt, Artificial Sequence
  Antisense Oligo
uuuuaguagagacaggguu

SEQ ID NO: 34845 - RNA, 19 nt, Artificial Sequence
  Sense Oligo
aaaauuagccagguauggu

SEQ ID NO: 34846 - RNA, 19 nt, Artificial Sequence
  Antisense Oligo
accauaccuggcuaauuuu

SEQ ID NO: 34847 - RNA, 19 nt, Artificial Sequence
  Sense Oligo
gcacuuguaaucccagcua

SEQ ID NO: 34848 - RNA, 19 nt, Artificial Sequence
  Antisense Oligo
uagcugggauuacaagugc

SEQ ID NO: 34849 - RNA, 19 nt, Artificial Sequence
  Sense Oligo
cacuuguaaucccagcuac

SEQ ID NO: 34850 - RNA, 19 nt, Artificial Sequence
  Antisense Oligo
guagcugggauuacaagug

SEQ ID NO: 34851 - RNA, 19 nt, Artificial Sequence
  Sense Oligo
acuuguaaucccagcuacu

SEQ ID NO: 34852 - RNA, 19 nt, Artificial Sequence
  Antisense Oligo
aguagcugggauuacaagu

SEQ ID NO: 34853 - RNA, 19 nt, Artificial Sequence
  Sense Oligo
cuuguaaucccagcuacuu

SEQ ID NO: 34854 - RNA, 19 nt, Artificial Sequence
  Antisense Oligo
aaguagcugggauuacaag

SEQ ID NO: 34855 - RNA, 19 nt, Artificial Sequence
  Sense Oligo
uuguaaucccagcuacuug

SEQ ID NO: 34856 - RNA, 19 nt, Artificial Sequence
  Antisense Oligo
caaguagcugggauuacaa

SEQ ID NO: 34857 - RNA, 19 nt, Artificial Sequence
  Sense Oligo
uguaaucccagcuacuugg

SEQ ID NO: 34858 - RNA, 19 nt, Artificial Sequence
  Antisense Oligo
ccaaguagcugggauuaca

SEQ ID NO: 34859 - RNA, 19 nt, Artificial Sequence
  Sense Oligo
agcuacuugggaggcugaa

SEQ ID NO: 34860 - RNA, 19 nt, Artificial Sequence
  Antisense Oligo
uucagccucccaaguagcu

SEQ ID NO: 34861 - RNA, 19 nt, Artificial Sequence
  Sense Oligo
gcuacuugggaggcugaag

SEQ ID NO: 34862 - RNA, 19 nt, Artificial Sequence
  Antisense Oligo
cuucagccucccaaguagc

SEQ ID NO: 34863 - RNA, 19 nt, Artificial Sequence
  Sense Oligo
cuacuugggaggcugaagc

SEQ ID NO: 34864 - RNA, 19 nt, Artificial Sequence
  Antisense Oligo
gcuucagccucccaaguag

SEQ ID NO: 34865 - RNA, 19 nt, Artificial Sequence
  Sense Oligo
uacuugggaggcugaagca

SEQ ID NO: 34866 - RNA, 19 nt, Artificial Sequence
  Antisense Oligo
ugcuucagccucccaagua

SEQ ID NO: 34867 - RNA, 19 nt, Artificial Sequence
  Sense Oligo
acuugggaggcugaagcag

SEQ ID NO: 34868 - RNA, 19 nt, Artificial Sequence
  Antisense Oligo
cugcuucagccucccaagu

SEQ ID NO: 34869 - RNA, 19 nt, Artificial Sequence
  Sense Oligo
ggaggcugaagcaggagga

SEQ ID NO: 34870 - RNA, 19 nt, Artificial Sequence
  Antisense Oligo
uccuccugcuucagccucc

SEQ ID NO: 34871 - RNA, 19 nt, Artificial Sequence
  Sense Oligo
gaggcugaagcaggaggau

SEQ ID NO: 34872 - RNA, 19 nt, Artificial Sequence
  Antisense Oligo
auccuccugcuucagccuc

SEQ ID NO: 34873 - RNA, 19 nt, Artificial Sequence
  Sense Oligo
aggcugaagcaggaggauc

SEQ ID NO: 34874 - RNA, 19 nt, Artificial Sequence
  Antisense Oligo
gauccuccugcuucagccu

SEQ ID NO: 34875 - RNA, 19 nt, Artificial Sequence
  Sense Oligo
ggcugaagcaggaggauca

SEQ ID NO: 34876 - RNA, 19 nt, Artificial Sequence
  Antisense Oligo
ugauccuccugcuucagcc

SEQ ID NO: 34877 - RNA, 19 nt, Artificial Sequence
  Sense Oligo
gcugaagcaggaggaucac

SEQ ID NO: 34878 - RNA, 19 nt, Artificial Sequence
  Antisense Oligo
gugauccuccugcuucagc

SEQ ID NO: 34879 - RNA, 19 nt, Artificial Sequence
  Sense Oligo
cugaagcaggaggaucacu

SEQ ID NO: 34880 - RNA, 19 nt, Artificial Sequence
  Antisense Oligo
agugauccuccugcuucag

SEQ ID NO: 34881 - RNA, 19 nt, Artificial Sequence
  Sense Oligo
ugaagcaggaggaucacuu

SEQ ID NO: 34882 - RNA, 19 nt, Artificial Sequence
  Antisense Oligo
aagugauccuccugcuuca

SEQ ID NO: 34883 - RNA, 19 nt, Artificial Sequence
  Sense Oligo
gaagcaggaggaucacuug

SEQ ID NO: 34884 - RNA, 19 nt, Artificial Sequence
  Antisense Oligo
caagugauccuccugcuuc

SEQ ID NO: 34885 - RNA, 19 nt, Artificial Sequence
  Sense Oligo
caggagguggagguugcag

SEQ ID NO: 34886 - RNA, 19 nt, Artificial Sequence
  Antisense Oligo
cugcaaccuccaccuccug

SEQ ID NO: 34887 - RNA, 19 nt, Artificial Sequence
  Sense Oligo
gagguugcagugagccaag

SEQ ID NO: 34888 - RNA, 19 nt, Artificial Sequence
  Antisense Oligo
cuuggcucacugcaaccuc

SEQ ID NO: 34889 - RNA, 19 nt, Artificial Sequence
  Sense Oligo
agguugcagugagccaaga

SEQ ID NO: 34890 - RNA, 19 nt, Artificial Sequence
  Antisense Oligo
ucuuggcucacugcaaccu

SEQ ID NO: 34891 - RNA, 19 nt, Artificial Sequence
  Sense Oligo
gguugcagugagccaagau

SEQ ID NO: 34892 - RNA, 19 nt, Artificial Sequence
  Antisense Oligo
aucuuggcucacugcaacc

SEQ ID NO: 34893 - RNA, 19 nt, Artificial Sequence
  Sense Oligo
guugcagugagccaagauc

SEQ ID NO: 34894 - RNA, 19 nt, Artificial Sequence
  Antisense Oligo
gaucuuggcucacugcaac

SEQ ID NO: 34895 - RNA, 19 nt, Artificial Sequence
  Sense Oligo
uugcagugagccaagaucg

SEQ ID NO: 34896 - RNA, 19 nt, Artificial Sequence
  Antisense Oligo
cgaucuuggcucacugcaa

SEQ ID NO: 34897 - RNA, 19 nt, Artificial Sequence
  Sense Oligo
ugcagugagccaagaucgc

SEQ ID NO: 34898 - RNA, 19 nt, Artificial Sequence
  Antisense Oligo
gcgaucuuggcucacugca

SEQ ID NO: 34899 - RNA, 19 nt, Artificial Sequence
  Sense Oligo
gcagugagccaagaucgcg

SEQ ID NO: 34900 - RNA, 19 nt, Artificial Sequence
  Antisense Oligo
cgcgaucuuggcucacugc

SEQ ID NO: 34901 - RNA, 19 nt, Artificial Sequence
  Sense Oligo
cagugagccaagaucgcgc

SEQ ID NO: 34902 - RNA, 19 nt, Artificial Sequence
  Antisense Oligo
gcgcgaucuuggcucacug

SEQ ID NO: 34903 - RNA, 19 nt, Artificial Sequence
  Sense Oligo
acuguacuccagccugggu

SEQ ID NO: 34904 - RNA, 19 nt, Artificial Sequence
  Antisense Oligo
acccaggcuggaguacagu

SEQ ID NO: 34905 - RNA, 19 nt, Artificial Sequence
  Sense Oligo
cuguacuccagccuggguu

SEQ ID NO: 34906 - RNA, 19 nt, Artificial Sequence
  Antisense Oligo
aacccaggcuggaguacag

SEQ ID NO: 34907 - RNA, 19 nt, Artificial Sequence
  Sense Oligo
uguacuccagccuggguua

SEQ ID NO: 34908 - RNA, 19 nt, Artificial Sequence
  Antisense Oligo
uaacccaggcuggaguaca

SEQ ID NO: 34909 - RNA, 19 nt, Artificial Sequence
  Sense Oligo
guacuccagccuggguuac

SEQ ID NO: 34910 - RNA, 19 nt, Artificial Sequence
  Antisense Oligo
guaacccaggcuggaguac

SEQ ID NO: 34911 - RNA, 19 nt, Artificial Sequence
  Sense Oligo
uacuccagccuggguuaca

SEQ ID NO: 34912 - RNA, 19 nt, Artificial Sequence
  Antisense Oligo
uguaacccaggcuggagua

SEQ ID NO: 34913 - RNA, 19 nt, Artificial Sequence
  Sense Oligo
acuccagccuggguuacag

SEQ ID NO: 34914 - RNA, 19 nt, Artificial Sequence
  Antisense Oligo
cuguaacccaggcuggagu

SEQ ID NO: 34915 - RNA, 19 nt, Artificial Sequence
  Sense Oligo
cccugaccuguaugcuucc

SEQ ID NO: 34916 - RNA, 19 nt, Artificial Sequence
  Antisense Oligo
ggaagcauacaggucaggg

SEQ ID NO: 34917 - RNA, 19 nt, Artificial Sequence
  Sense Oligo
ccugaccuguaugcuuccu

SEQ ID NO: 34918 - RNA, 19 nt, Artificial Sequence
  Antisense Oligo
aggaagcauacaggucagg

SEQ ID NO: 34919 - RNA, 19 nt, Artificial Sequence
  Sense Oligo
gaggaagaggaaggcaggg

SEQ ID NO: 34920 - RNA, 19 nt, Artificial Sequence
  Antisense Oligo
cccugccuuccucuuccuc

SEQ ID NO: 34921 - RNA, 19 nt, Artificial Sequence
  Sense Oligo
agggaggcauuacaggagg

SEQ ID NO: 34922 - RNA, 19 nt, Artificial Sequence
  Antisense Oligo
ccuccuguaaugccucccu

SEQ ID NO: 34923 - RNA, 19 nt, Artificial Sequence
  Sense Oligo
gggaggcauuacaggaggc

SEQ ID NO: 34924 - RNA, 19 nt, Artificial Sequence
  Antisense Oligo
gccuccuguaaugccuccc

SEQ ID NO: 34925 - RNA, 19 nt, Artificial Sequence
  Sense Oligo
ggaggcauuacaggaggcu

SEQ ID NO: 34926 - RNA, 19 nt, Artificial Sequence
  Antisense Oligo
agccuccuguaaugccucc

SEQ ID NO: 34927 - RNA, 19 nt, Artificial Sequence
  Sense Oligo
gaggcauuacaggaggcuu

SEQ ID NO: 34928 - RNA, 19 nt, Artificial Sequence
  Antisense Oligo
aagccuccuguaaugccuc

SEQ ID NO: 34929 - RNA, 19 nt, Artificial Sequence
  Sense Oligo
aggcauuacaggaggcuuu

SEQ ID NO: 34930 - RNA, 19 nt, Artificial Sequence
  Antisense Oligo
aaagccuccuguaaugccu

SEQ ID NO: 34931 - RNA, 19 nt, Artificial Sequence
  Sense Oligo
ggguuuucccucuggucug

SEQ ID NO: 34932 - RNA, 19 nt, Artificial Sequence
  Antisense Oligo
cagaccagagggaaaaccc

SEQ ID NO: 34933 - RNA, 19 nt, Artificial Sequence
  Sense Oligo
gguuuucccucuggucugg

SEQ ID NO: 34934 - RNA, 19 nt, Artificial Sequence
  Antisense Oligo
ccagaccagagggaaaacc

SEQ ID NO: 34935 - RNA, 19 nt, Artificial Sequence
  Sense Oligo
guuuucccucuggucuggu

SEQ ID NO: 34936 - RNA, 19 nt, Artificial Sequence
  Antisense Oligo
accagaccagagggaaaac

SEQ ID NO: 34937 - RNA, 19 nt, Artificial Sequence
  Sense Oligo
uuuucccucuggucuggug

SEQ ID NO: 34938 - RNA, 19 nt, Artificial Sequence
  Antisense Oligo
caccagaccagagggaaaa

SEQ ID NO: 34939 - RNA, 19 nt, Artificial Sequence
  Sense Oligo
uuucccucuggucuggugg

SEQ ID NO: 34940 - RNA, 19 nt, Artificial Sequence
  Antisense Oligo
ccaccagaccagagggaaa

SEQ ID NO: 34941 - RNA, 19 nt, Artificial Sequence
  Sense Oligo
uucccucuggucugguggg

SEQ ID NO: 34942 - RNA, 19 nt, Artificial Sequence
  Antisense Oligo
cccaccagaccagagggaa

SEQ ID NO: 34943 - RNA, 19 nt, Artificial Sequence
  Sense Oligo
ucccucuggucuggugggu

SEQ ID NO: 34944 - RNA, 19 nt, Artificial Sequence
  Antisense Oligo
acccaccagaccagaggga

SEQ ID NO: 34945 - RNA, 19 nt, Artificial Sequence
  Sense Oligo
gcaugaugggagcacagug

SEQ ID NO: 34946 - RNA, 19 nt, Artificial Sequence
  Antisense Oligo
cacugugcucccaucaugc

SEQ ID NO: 34947 - RNA, 19 nt, Artificial Sequence
  Sense Oligo
caugaugggagcacagugg

SEQ ID NO: 34948 - RNA, 19 nt, Artificial Sequence
  Antisense Oligo
ccacugugcucccaucaug

SEQ ID NO: 34949 - RNA, 19 nt, Artificial Sequence
  Sense Oligo
augaugggagcacaguggg

SEQ ID NO: 34950 - RNA, 19 nt, Artificial Sequence
  Antisense Oligo
cccacugugcucccaucau

SEQ ID NO: 34951 - RNA, 19 nt, Artificial Sequence
  Sense Oligo
gacccagguuuaccuccgg

SEQ ID NO: 34952 - RNA, 19 nt, Artificial Sequence
  Antisense Oligo
ccggagguaaaccuggguc

SEQ ID NO: 34953 - RNA, 19 nt, Artificial Sequence
  Sense Oligo
acccagguuuaccuccggg

SEQ ID NO: 34954 - RNA, 19 nt, Artificial Sequence
  Antisense Oligo
cccggagguaaaccugggu

SEQ ID NO: 34955 - RNA, 19 nt, Artificial Sequence
  Sense Oligo
cccagguuuaccuccgggu

SEQ ID NO: 34956 - RNA, 19 nt, Artificial Sequence
  Antisense Oligo
acccggagguaaaccuggg

SEQ ID NO: 34957 - RNA, 19 nt, Artificial Sequence
  Sense Oligo
ccagguuuaccuccggguc

SEQ ID NO: 34958 - RNA, 19 nt, Artificial Sequence
  Antisense Oligo
gacccggagguaaaccugg

SEQ ID NO: 34959 - RNA, 19 nt, Artificial Sequence
  Sense Oligo
cagguuuaccuccggguca

SEQ ID NO: 34960 - RNA, 19 nt, Artificial Sequence
  Antisense Oligo
ugacccggagguaaaccug

SEQ ID NO: 34961 - RNA, 19 nt, Artificial Sequence
  Sense Oligo
agguuuaccuccgggucag

SEQ ID NO: 34962 - RNA, 19 nt, Artificial Sequence
  Antisense Oligo
cugacccggagguaaaccu

SEQ ID NO: 34963 - RNA, 19 nt, Artificial Sequence
  Sense Oligo
gguuuaccuccgggucagg

SEQ ID NO: 34964 - RNA, 19 nt, Artificial Sequence
  Antisense Oligo
ccugacccggagguaaacc

SEQ ID NO: 34965 - RNA, 19 nt, Artificial Sequence
  Sense Oligo
ccuggcuguggucuggcau

SEQ ID NO: 34966 - RNA, 19 nt, Artificial Sequence
  Antisense Oligo
augccagaccacagccagg

SEQ ID NO: 34967 - RNA, 19 nt, Artificial Sequence
  Sense Oligo
cuggcuguggucuggcaug

SEQ ID NO: 34968 - RNA, 19 nt, Artificial Sequence
  Antisense Oligo
caugccagaccacagccag

SEQ ID NO: 34969 - RNA, 19 nt, Artificial Sequence
  Sense Oligo
uggcuguggucuggcaugg

SEQ ID NO: 34970 - RNA, 19 nt, Artificial Sequence
  Antisense Oligo
ccaugccagaccacagcca

SEQ ID NO: 34971 - RNA, 19 nt, Artificial Sequence
  Sense Oligo
ggcuguggucuggcaugga

SEQ ID NO: 34972 - RNA, 19 nt, Artificial Sequence
  Antisense Oligo
uccaugccagaccacagcc

SEQ ID NO: 34973 - RNA, 19 nt, Artificial Sequence
  Sense Oligo
guggucuggcauggaggca

SEQ ID NO: 34974 - RNA, 19 nt, Artificial Sequence
  Antisense Oligo
ugccuccaugccagaccac

SEQ ID NO: 34975 - RNA, 19 nt, Artificial Sequence
  Sense Oligo
uggucuggcauggaggcag

SEQ ID NO: 34976 - RNA, 19 nt, Artificial Sequence
  Antisense Oligo
cugccuccaugccagacca

SEQ ID NO: 34977 - RNA, 19 nt, Artificial Sequence
  Sense Oligo
gcaugaugggagcacagug

SEQ ID NO: 34978 - RNA, 19 nt, Artificial Sequence
  Antisense Oligo
cacugugcucccaucaugc

SEQ ID NO: 34979 - RNA, 19 nt, Artificial Sequence
  Sense Oligo
caugaugggagcacagugg

SEQ ID NO: 34980 - RNA, 19 nt, Artificial Sequence
  Antisense Oligo
ccacugugcucccaucaug

SEQ ID NO: 34981 - RNA, 19 nt, Artificial Sequence
  Sense Oligo
augaugggagcacaguggg

SEQ ID NO: 34982 - RNA, 19 nt, Artificial Sequence
  Antisense Oligo
cccacugugcucccaucau

SEQ ID NO: 34983 - RNA, 19 nt, Artificial Sequence
  Sense Oligo
gacccagguuuaccuccgg

SEQ ID NO: 34984 - RNA, 19 nt, Artificial Sequence
  Antisense Oligo
ccggagguaaaccuggguc

SEQ ID NO: 34985 - RNA, 19 nt, Artificial Sequence
  Sense Oligo
acccagguuuaccuccggg

SEQ ID NO: 34986 - RNA, 19 nt, Artificial Sequence
  Antisense Oligo
cccggagguaaaccugggu

SEQ ID NO: 34987 - RNA, 19 nt, Artificial Sequence
  Sense Oligo
cccagguuuaccuccgggu

SEQ ID NO: 34988 - RNA, 19 nt, Artificial Sequence
  Antisense Oligo
acccggagguaaaccuggg

SEQ ID NO: 34989 - RNA, 19 nt, Artificial Sequence
  Sense Oligo
ccagguuuaccuccggguc

SEQ ID NO: 34990 - RNA, 19 nt, Artificial Sequence
  Antisense Oligo
gacccggagguaaaccugg

SEQ ID NO: 34991 - RNA, 19 nt, Artificial Sequence
  Sense Oligo
cagguuuaccuccggguca

SEQ ID NO: 34992 - RNA, 19 nt, Artificial Sequence
  Antisense Oligo
ugacccggagguaaaccug

SEQ ID NO: 34993 - RNA, 19 nt, Artificial Sequence
  Sense Oligo
agguuuaccuccgggucag

SEQ ID NO: 34994 - RNA, 19 nt, Artificial Sequence
  Antisense Oligo
cugacccggagguaaaccu

SEQ ID NO: 34995 - RNA, 19 nt, Artificial Sequence
  Sense Oligo
gguuuaccuccgggucagg

SEQ ID NO: 34996 - RNA, 19 nt, Artificial Sequence
  Antisense Oligo
ccugacccggagguaaacc

SEQ ID NO: 34997 - RNA, 19 nt, Artificial Sequence
  Sense Oligo
ccuggcuguggucuggcau

SEQ ID NO: 34998 - RNA, 19 nt, Artificial Sequence
  Antisense Oligo
augccagaccacagccagg

SEQ ID NO: 34999 - RNA, 19 nt, Artificial Sequence
  Sense Oligo
cuggcuguggucuggcaug

SEQ ID NO: 35000 - RNA, 19 nt, Artificial Sequence
  Antisense Oligo
caugccagaccacagccag

SEQ ID NO: 35001 - RNA, 19 nt, Artificial Sequence
  Sense Oligo
uggcuguggucuggcaugg

SEQ ID NO: 35002 - RNA, 19 nt, Artificial Sequence
  Antisense Oligo
ccaugccagaccacagcca

SEQ ID NO: 35003 - RNA, 19 nt, Artificial Sequence
  Sense Oligo
ggcuguggucuggcaugga

SEQ ID NO: 35004 - RNA, 19 nt, Artificial Sequence
  Antisense Oligo
uccaugccagaccacagcc

SEQ ID NO: 35005 - RNA, 19 nt, Artificial Sequence
  Sense Oligo
guggucuggcauggaggca

SEQ ID NO: 35006 - RNA, 19 nt, Artificial Sequence
  Antisense Oligo
ugccuccaugccagaccac

SEQ ID NO: 35007 - RNA, 19 nt, Artificial Sequence
  Sense Oligo
uggucuggcauggaggcag

SEQ ID NO: 35008 - RNA, 19 nt, Artificial Sequence
  Antisense Oligo
cugccuccaugccagacca

SEQ ID NO: 35009 - RNA, 19 nt, Artificial Sequence
  Sense Oligo
gcaugaugggagcacagug

SEQ ID NO: 35010 - RNA, 19 nt, Artificial Sequence
  Antisense Oligo
cacugugcucccaucaugc

SEQ ID NO: 35011 - RNA, 19 nt, Artificial Sequence
  Sense Oligo
caugaugggagcacagugg

SEQ ID NO: 35012 - RNA, 19 nt, Artificial Sequence
  Antisense Oligo
ccacugugcucccaucaug

SEQ ID NO: 35013 - RNA, 19 nt, Artificial Sequence
  Sense Oligo
augaugggagcacaguggg

SEQ ID NO: 35014 - RNA, 19 nt, Artificial Sequence
  Antisense Oligo
cccacugugcucccaucau

SEQ ID NO: 35015 - RNA, 19 nt, Artificial Sequence
  Sense Oligo
gacccagguuuaccuccgg

SEQ ID NO: 35016 - RNA, 19 nt, Artificial Sequence
  Antisense Oligo
ccggagguaaaccuggguc

SEQ ID NO: 35017 - RNA, 19 nt, Artificial Sequence
  Sense Oligo
acccagguuuaccuccggg

SEQ ID NO: 35018 - RNA, 19 nt, Artificial Sequence
  Antisense Oligo
cccggagguaaaccugggu

SEQ ID NO: 35019 - RNA, 19 nt, Artificial Sequence
  Sense Oligo
cccagguuuaccuccgggu

SEQ ID NO: 35020 - RNA, 19 nt, Artificial Sequence
  Antisense Oligo
acccggagguaaaccuggg

SEQ ID NO: 35021 - RNA, 19 nt, Artificial Sequence
  Sense Oligo
ccagguuuaccuccggguc

SEQ ID NO: 35022 - RNA, 19 nt, Artificial Sequence
  Antisense Oligo
gacccggagguaaaccugg

SEQ ID NO: 35023 - RNA, 19 nt, Artificial Sequence
  Sense Oligo
cagguuuaccuccggguca

SEQ ID NO: 35024 - RNA, 19 nt, Artificial Sequence
  Antisense Oligo
ugacccggagguaaaccug

SEQ ID NO: 35025 - RNA, 19 nt, Artificial Sequence
  Sense Oligo
agguuuaccuccgggucag

SEQ ID NO: 35026 - RNA, 19 nt, Artificial Sequence
  Antisense Oligo
cugacccggagguaaaccu

SEQ ID NO: 35027 - RNA, 19 nt, Artificial Sequence
  Sense Oligo
gguuuaccuccgggucagg

SEQ ID NO: 35028 - RNA, 19 nt, Artificial Sequence
  Antisense Oligo
ccugacccggagguaaacc

SEQ ID NO: 35029 - RNA, 19 nt, Artificial Sequence
  Sense Oligo
gucaggagccuggcugucu

SEQ ID NO: 35030 - RNA, 19 nt, Artificial Sequence
  Antisense Oligo
agacagccaggcuccugac

SEQ ID NO: 35031 - RNA, 19 nt, Artificial Sequence
  Sense Oligo
ucagucuccugggcacagc

SEQ ID NO: 35032 - RNA, 19 nt, Artificial Sequence
  Antisense Oligo
gcugugcccaggagacuga

SEQ ID NO: 35033 - RNA, 19 nt, Artificial Sequence
  Sense Oligo
ugcucauuggcaggacaga

SEQ ID NO: 35034 - RNA, 19 nt, Artificial Sequence
  Antisense Oligo
ucuguccugccaaugagca

SEQ ID NO: 35035 - RNA, 19 nt, Artificial Sequence
  Sense Oligo
gcucauuggcaggacagag

SEQ ID NO: 35036 - RNA, 19 nt, Artificial Sequence
  Antisense Oligo
cucuguccugccaaugagc

SEQ ID NO: 35037 - RNA, 19 nt, Artificial Sequence
  Sense Oligo
cucauuggcaggacagagg

SEQ ID NO: 35038 - RNA, 19 nt, Artificial Sequence
  Antisense Oligo
ccucuguccugccaaugag

SEQ ID NO: 35039 - RNA, 19 nt, Artificial Sequence
  Sense Oligo
ucauuggcaggacagaggc

SEQ ID NO: 35040 - RNA, 19 nt, Artificial Sequence
  Antisense Oligo
gccucuguccugccaauga

SEQ ID NO: 35041 - RNA, 19 nt, Artificial Sequence
  Sense Oligo
cauuggcaggacagaggcu

SEQ ID NO: 35042 - RNA, 19 nt, Artificial Sequence
  Antisense Oligo
agccucuguccugccaaug

SEQ ID NO: 35043 - RNA, 19 nt, Artificial Sequence
  Sense Oligo
auuggcaggacagaggcug

SEQ ID NO: 35044 - RNA, 19 nt, Artificial Sequence
  Antisense Oligo
cagccucuguccugccaau

SEQ ID NO: 35045 - RNA, 19 nt, Artificial Sequence
  Sense Oligo
acagaggcugccugggcuu

SEQ ID NO: 35046 - RNA, 19 nt, Artificial Sequence
  Antisense Oligo
aagcccaggcagccucugu

SEQ ID NO: 35047 - RNA, 19 nt, Artificial Sequence
  Sense Oligo
cagaggcugccugggcuuu

SEQ ID NO: 35048 - RNA, 19 nt, Artificial Sequence
  Antisense Oligo
aaagcccaggcagccucug

SEQ ID NO: 35049 - RNA, 19 nt, Artificial Sequence
  Sense Oligo
agaggcugccugggcuuuc

SEQ ID NO: 35050 - RNA, 19 nt, Artificial Sequence
  Antisense Oligo
gaaagcccaggcagccucu

SEQ ID NO: 35051 - RNA, 19 nt, Artificial Sequence
  Sense Oligo
cccucccucuuuucucccg

SEQ ID NO: 35052 - RNA, 19 nt, Artificial Sequence
  Antisense Oligo
cgggagaaaagagggaggg

SEQ ID NO: 35053 - RNA, 19 nt, Artificial Sequence
  Sense Oligo
cucccucuuuucucccgua

SEQ ID NO: 35054 - RNA, 19 nt, Artificial Sequence
  Antisense Oligo
uacgggagaaaagagggag

SEQ ID NO: 35055 - RNA, 19 nt, Artificial Sequence
  Sense Oligo
ucccucuuuucucccguau

SEQ ID NO: 35056 - RNA, 19 nt, Artificial Sequence
  Antisense Oligo
auacgggagaaaagaggga

SEQ ID NO: 35057 - RNA, 19 nt, Artificial Sequence
  Sense Oligo
cccucuuuucucccguauc

SEQ ID NO: 35058 - RNA, 19 nt, Artificial Sequence
  Antisense Oligo
gauacgggagaaaagaggg

SEQ ID NO: 35059 - RNA, 19 nt, Artificial Sequence
  Sense Oligo
ccucuuuucucccguaucu

SEQ ID NO: 35060 - RNA, 19 nt, Artificial Sequence
  Antisense Oligo
agauacgggagaaaagagg

SEQ ID NO: 35061 - RNA, 19 nt, Artificial Sequence
  Sense Oligo
cucuuuucucccguaucuc

SEQ ID NO: 35062 - RNA, 19 nt, Artificial Sequence
  Antisense Oligo
gagauacgggagaaaagag

SEQ ID NO: 35063 - RNA, 19 nt, Artificial Sequence
  Sense Oligo
ucuuuucucccguaucucc

SEQ ID NO: 35064 - RNA, 19 nt, Artificial Sequence
  Antisense Oligo
ggagauacgggagaaaaga

SEQ ID NO: 35065 - RNA, 19 nt, Artificial Sequence
  Sense Oligo
cuuuucucccguaucuccc

SEQ ID NO: 35066 - RNA, 19 nt, Artificial Sequence
  Antisense Oligo
gggagauacgggagaaaag

SEQ ID NO: 35067 - RNA, 19 nt, Artificial Sequence
  Sense Oligo
ucucccguaucucccacgu

SEQ ID NO: 35068 - RNA, 19 nt, Artificial Sequence
  Antisense Oligo
acgugggagauacgggaga

SEQ ID NO: 35069 - RNA, 19 nt, Artificial Sequence
  Sense Oligo
cucccguaucucccacguu

SEQ ID NO: 35070 - RNA, 19 nt, Artificial Sequence
  Antisense Oligo
aacgugggagauacgggag

SEQ ID NO: 35071 - RNA, 19 nt, Artificial Sequence
  Sense Oligo
ucccguaucucccacguuc

SEQ ID NO: 35072 - RNA, 19 nt, Artificial Sequence
  Antisense Oligo
gaacgugggagauacggga

SEQ ID NO: 35073 - RNA, 19 nt, Artificial Sequence
  Sense Oligo
cccguaucucccacguuca

SEQ ID NO: 35074 - RNA, 19 nt, Artificial Sequence
  Antisense Oligo
ugaacgugggagauacggg

SEQ ID NO: 35075 - RNA, 19 nt, Artificial Sequence
  Sense Oligo
ccguaucucccacguucag

SEQ ID NO: 35076 - RNA, 19 nt, Artificial Sequence
  Antisense Oligo
cugaacgugggagauacgg

SEQ ID NO: 35077 - RNA, 19 nt, Artificial Sequence
  Sense Oligo
cguaucucccacguucagg

SEQ ID NO: 35078 - RNA, 19 nt, Artificial Sequence
  Antisense Oligo
ccugaacgugggagauacg

SEQ ID NO: 35079 - RNA, 19 nt, Artificial Sequence
  Sense Oligo
gaauggaagugcuuuggga

SEQ ID NO: 35080 - RNA, 19 nt, Artificial Sequence
  Antisense Oligo
ucccaaagcacuuccauuc

SEQ ID NO: 35081 - RNA, 19 nt, Artificial Sequence
  Sense Oligo
auggaagugcuuugggaau

SEQ ID NO: 35082 - RNA, 19 nt, Artificial Sequence
  Antisense Oligo
auucccaaagcacuuccau

SEQ ID NO: 35083 - RNA, 19 nt, Artificial Sequence
  Sense Oligo
uggaagugcuuugggaaug

SEQ ID NO: 35084 - RNA, 19 nt, Artificial Sequence
  Antisense Oligo
cauucccaaagcacuucca

SEQ ID NO: 35085 - RNA, 19 nt, Artificial Sequence
  Sense Oligo
agugcuuugggaauguggg

SEQ ID NO: 35086 - RNA, 19 nt, Artificial Sequence
  Antisense Oligo
cccacauucccaaagcacu

SEQ ID NO: 35087 - RNA, 19 nt, Artificial Sequence
  Sense Oligo
gugcuuugggaaugugggc

SEQ ID NO: 35088 - RNA, 19 nt, Artificial Sequence
  Antisense Oligo
gcccacauucccaaagcac

SEQ ID NO: 35089 - RNA, 19 nt, Artificial Sequence
  Sense Oligo
ugcuuugggaaugugggcu

SEQ ID NO: 35090 - RNA, 19 nt, Artificial Sequence
  Antisense Oligo
agcccacauucccaaagca

SEQ ID NO: 35091 - RNA, 19 nt, Artificial Sequence
  Sense Oligo
gcuuugggaaugugggcuu

SEQ ID NO: 35092 - RNA, 19 nt, Artificial Sequence
  Antisense Oligo
aagcccacauucccaaagc

SEQ ID NO: 35093 - RNA, 19 nt, Artificial Sequence
  Sense Oligo
cuuugggaaugugggcuuc

SEQ ID NO: 35094 - RNA, 19 nt, Artificial Sequence
  Antisense Oligo
gaagcccacauucccaaag

SEQ ID NO: 35095 - RNA, 19 nt, Artificial Sequence
  Sense Oligo
uuugggaaugugggcuucu

SEQ ID NO: 35096 - RNA, 19 nt, Artificial Sequence
  Antisense Oligo
agaagcccacauucccaaa

SEQ ID NO: 35097 - RNA, 19 nt, Artificial Sequence
  Sense Oligo
uugggaaugugggcuucug

SEQ ID NO: 35098 - RNA, 19 nt, Artificial Sequence
  Antisense Oligo
cagaagcccacauucccaa

SEQ ID NO: 35099 - RNA, 19 nt, Artificial Sequence
  Sense Oligo
ugggaaugugggcuucugc

SEQ ID NO: 35100 - RNA, 19 nt, Artificial Sequence
  Antisense Oligo
gcagaagcccacauuccca

SEQ ID NO: 35101 - RNA, 19 nt, Artificial Sequence
  Sense Oligo
gggaaugugggcuucugcc

SEQ ID NO: 35102 - RNA, 19 nt, Artificial Sequence
  Antisense Oligo
ggcagaagcccacauuccc

SEQ ID NO: 35103 - RNA, 19 nt, Artificial Sequence
  Sense Oligo
ggaaugugggcuucugcca

SEQ ID NO: 35104 - RNA, 19 nt, Artificial Sequence
  Antisense Oligo
uggcagaagcccacauucc

SEQ ID NO: 35105 - RNA, 19 nt, Artificial Sequence
  Sense Oligo
ugggcuucugccaaggccu

SEQ ID NO: 35106 - RNA, 19 nt, Artificial Sequence
  Antisense Oligo
aggccuuggcagaagccca

SEQ ID NO: 35107 - RNA, 19 nt, Artificial Sequence
  Sense Oligo
ggcuucugccaaggccugu

SEQ ID NO: 35108 - RNA, 19 nt, Artificial Sequence
  Antisense Oligo
acaggccuuggcagaagcc

SEQ ID NO: 35109 - RNA, 19 nt, Artificial Sequence
  Sense Oligo
gcuucugccaaggccugug

SEQ ID NO: 35110 - RNA, 19 nt, Artificial Sequence
  Antisense Oligo
cacaggccuuggcagaagc

SEQ ID NO: 35111 - RNA, 19 nt, Artificial Sequence
  Sense Oligo
cuucugccaaggccugugg

SEQ ID NO: 35112 - RNA, 19 nt, Artificial Sequence
  Antisense Oligo
ccacaggccuuggcagaag

SEQ ID NO: 35113 - RNA, 19 nt, Artificial Sequence
  Sense Oligo
ccuguggucccuccaucgu

SEQ ID NO: 35114 - RNA, 19 nt, Artificial Sequence
  Antisense Oligo
acgauggagggaccacagg

SEQ ID NO: 35115 - RNA, 19 nt, Artificial Sequence
  Sense Oligo
cuguggucccuccaucgua

SEQ ID NO: 35116 - RNA, 19 nt, Artificial Sequence
  Antisense Oligo
uacgauggagggaccacag

SEQ ID NO: 35117 - RNA, 19 nt, Artificial Sequence
  Sense Oligo
uguggucccuccaucguag

SEQ ID NO: 35118 - RNA, 19 nt, Artificial Sequence
  Antisense Oligo
cuacgauggagggaccaca

SEQ ID NO: 35119 - RNA, 19 nt, Artificial Sequence
  Sense Oligo
guggucccuccaucguagc

SEQ ID NO: 35120 - RNA, 19 nt, Artificial Sequence
  Antisense Oligo
gcuacgauggagggaccac

SEQ ID NO: 35121 - RNA, 19 nt, Artificial Sequence
  Sense Oligo
uggucccuccaucguagcc

SEQ ID NO: 35122 - RNA, 19 nt, Artificial Sequence
  Antisense Oligo
ggcuacgauggagggacca

SEQ ID NO: 35123 - RNA, 19 nt, Artificial Sequence
  Sense Oligo
ggucccuccaucguagcca

SEQ ID NO: 35124 - RNA, 19 nt, Artificial Sequence
  Antisense Oligo
uggcuacgauggagggacc

SEQ ID NO: 35125 - RNA, 19 nt, Artificial Sequence
  Sense Oligo
gucccuccaucguagccac

SEQ ID NO: 35126 - RNA, 19 nt, Artificial Sequence
  Antisense Oligo
guggcuacgauggagggac

SEQ ID NO: 35127 - RNA, 19 nt, Artificial Sequence
  Sense Oligo
ucccuccaucguagccacu

SEQ ID NO: 35128 - RNA, 19 nt, Artificial Sequence
  Antisense Oligo
aguggcuacgauggaggga

SEQ ID NO: 35129 - RNA, 19 nt, Artificial Sequence
  Sense Oligo
cccuccaucguagccacuc

SEQ ID NO: 35130 - RNA, 19 nt, Artificial Sequence
  Antisense Oligo
gaguggcuacgauggaggg

SEQ ID NO: 35131 - RNA, 19 nt, Artificial Sequence
  Sense Oligo
ccaucguagccacuccuug

SEQ ID NO: 35132 - RNA, 19 nt, Artificial Sequence
  Antisense Oligo
caaggaguggcuacgaugg

SEQ ID NO: 35133 - RNA, 19 nt, Artificial Sequence
  Sense Oligo
caucguagccacuccuuga

SEQ ID NO: 35134 - RNA, 19 nt, Artificial Sequence
  Antisense Oligo
ucaaggaguggcuacgaug

SEQ ID NO: 35135 - RNA, 19 nt, Artificial Sequence
  Sense Oligo
aucguagccacuccuugag

SEQ ID NO: 35136 - RNA, 19 nt, Artificial Sequence
  Antisense Oligo
cucaaggaguggcuacgau

SEQ ID NO: 35137 - RNA, 19 nt, Artificial Sequence
  Sense Oligo
ucguagccacuccuugagc

SEQ ID NO: 35138 - RNA, 19 nt, Artificial Sequence
  Antisense Oligo
gcucaaggaguggcuacga

SEQ ID NO: 35139 - RNA, 19 nt, Artificial Sequence
  Sense Oligo
cguagccacuccuugagca

SEQ ID NO: 35140 - RNA, 19 nt, Artificial Sequence
  Antisense Oligo
ugcucaaggaguggcuacg

SEQ ID NO: 35141 - RNA, 19 nt, Artificial Sequence
  Sense Oligo
guagccacuccuugagcag

SEQ ID NO: 35142 - RNA, 19 nt, Artificial Sequence
  Antisense Oligo
cugcucaaggaguggcuac

SEQ ID NO: 35143 - RNA, 19 nt, Artificial Sequence
  Sense Oligo
uagccacuccuugagcagc

SEQ ID NO: 35144 - RNA, 19 nt, Artificial Sequence
  Antisense Oligo
gcugcucaaggaguggcua

SEQ ID NO: 35145 - RNA, 19 nt, Artificial Sequence
  Sense Oligo
cuccuugagcagccugugc

SEQ ID NO: 35146 - RNA, 19 nt, Artificial Sequence
  Antisense Oligo
gcacaggcugcucaaggag

SEQ ID NO: 35147 - RNA, 19 nt, Artificial Sequence
  Sense Oligo
uccuugagcagccugugcc

SEQ ID NO: 35148 - RNA, 19 nt, Artificial Sequence
  Antisense Oligo
ggcacaggcugcucaagga

SEQ ID NO: 35149 - RNA, 19 nt, Artificial Sequence
  Sense Oligo
ccuugagcagccugugcca

SEQ ID NO: 35150 - RNA, 19 nt, Artificial Sequence
  Antisense Oligo
uggcacaggcugcucaagg

SEQ ID NO: 35151 - RNA, 19 nt, Artificial Sequence
  Sense Oligo
cuugagcagccugugccag

SEQ ID NO: 35152 - RNA, 19 nt, Artificial Sequence
  Antisense Oligo
cuggcacaggcugcucaag

SEQ ID NO: 35153 - RNA, 19 nt, Artificial Sequence
  Sense Oligo
uugagcagccugugccagc

SEQ ID NO: 35154 - RNA, 19 nt, Artificial Sequence
  Antisense Oligo
gcuggcacaggcugcucaa

SEQ ID NO: 35155 - RNA, 19 nt, Artificial Sequence
  Sense Oligo
ugagcagccugugccagca

SEQ ID NO: 35156 - RNA, 19 nt, Artificial Sequence
  Antisense Oligo
ugcuggcacaggcugcuca

SEQ ID NO: 35157 - RNA, 19 nt, Artificial Sequence
  Sense Oligo
accugaguccacagccgag

SEQ ID NO: 35158 - RNA, 19 nt, Artificial Sequence
  Antisense Oligo
cucggcuguggacucaggu

SEQ ID NO: 35159 - RNA, 19 nt, Artificial Sequence
  Sense Oligo
cugaguccacagccgagga

SEQ ID NO: 35160 - RNA, 19 nt, Artificial Sequence
  Antisense Oligo
uccucggcuguggacucag

SEQ ID NO: 35161 - RNA, 19 nt, Artificial Sequence
  Sense Oligo
ugaguccacagccgaggau

SEQ ID NO: 35162 - RNA, 19 nt, Artificial Sequence
  Antisense Oligo
auccucggcuguggacuca

SEQ ID NO: 35163 - RNA, 19 nt, Artificial Sequence
  Sense Oligo
gaguccacagccgaggaug

SEQ ID NO: 35164 - RNA, 19 nt, Artificial Sequence
  Antisense Oligo
cauccucggcuguggacuc

SEQ ID NO: 35165 - RNA, 19 nt, Artificial Sequence
  Sense Oligo
aguccacagccgaggauga

SEQ ID NO: 35166 - RNA, 19 nt, Artificial Sequence
  Antisense Oligo
ucauccucggcuguggacu

SEQ ID NO: 35167 - RNA, 19 nt, Artificial Sequence
  Sense Oligo
guccacagccgaggaugac

SEQ ID NO: 35168 - RNA, 19 nt, Artificial Sequence
  Antisense Oligo
gucauccucggcuguggac

SEQ ID NO: 35169 - RNA, 19 nt, Artificial Sequence
  Sense Oligo
uccacagccgaggaugacu

SEQ ID NO: 35170 - RNA, 19 nt, Artificial Sequence
  Antisense Oligo
agucauccucggcugugga

SEQ ID NO: 35171 - RNA, 19 nt, Artificial Sequence
  Sense Oligo
ccacagccgaggaugacug

SEQ ID NO: 35172 - RNA, 19 nt, Artificial Sequence
  Antisense Oligo
cagucauccucggcugugg

SEQ ID NO: 35173 - RNA, 19 nt, Artificial Sequence
  Sense Oligo
cacagccgaggaugacuga

SEQ ID NO: 35174 - RNA, 19 nt, Artificial Sequence
  Antisense Oligo
ucagucauccucggcugug

SEQ ID NO: 35175 - RNA, 19 nt, Artificial Sequence
  Sense Oligo
aggaugacugacccucccu

SEQ ID NO: 35176 - RNA, 19 nt, Artificial Sequence
  Antisense Oligo
agggagggucagucauccu

SEQ ID NO: 35177 - RNA, 19 nt, Artificial Sequence
  Sense Oligo
ggaugacugacccucccuc

SEQ ID NO: 35178 - RNA, 19 nt, Artificial Sequence
  Antisense Oligo
gagggagggucagucaucc

SEQ ID NO: 35179 - RNA, 19 nt, Artificial Sequence
  Sense Oligo
gaugacugacccucccucu

SEQ ID NO: 35180 - RNA, 19 nt, Artificial Sequence
  Antisense Oligo
agagggagggucagucauc

SEQ ID NO: 35181 - RNA, 19 nt, Artificial Sequence
  Sense Oligo
augacugacccucccucuu

SEQ ID NO: 35182 - RNA, 19 nt, Artificial Sequence
  Antisense Oligo
aagagggagggucagucau

SEQ ID NO: 35183 - RNA, 19 nt, Artificial Sequence
  Sense Oligo
ugacccucccucuugugug

SEQ ID NO: 35184 - RNA, 19 nt, Artificial Sequence
  Antisense Oligo
cacacaagagggaggguca

SEQ ID NO: 35185 - RNA, 19 nt, Artificial Sequence
  Sense Oligo
gacccucccucuuguguga

SEQ ID NO: 35186 - RNA, 19 nt, Artificial Sequence
  Antisense Oligo
ucacacaagagggaggguc

SEQ ID NO: 35187 - RNA, 19 nt, Artificial Sequence
  Sense Oligo
acccucccucuugugugac

SEQ ID NO: 35188 - RNA, 19 nt, Artificial Sequence
  Antisense Oligo
gucacacaagagggagggu

SEQ ID NO: 35189 - RNA, 19 nt, Artificial Sequence
  Sense Oligo
cccucccucuugugugaca

SEQ ID NO: 35190 - RNA, 19 nt, Artificial Sequence
  Antisense Oligo
ugucacacaagagggaggg

SEQ ID NO: 35191 - RNA, 19 nt, Artificial Sequence
  Sense Oligo
acagucuuccaagggaccc

SEQ ID NO: 35192 - RNA, 19 nt, Artificial Sequence
  Antisense Oligo
gggucccuuggaagacugu

SEQ ID NO: 35193 - RNA, 19 nt, Artificial Sequence
  Sense Oligo
cagucuuccaagggacccu

SEQ ID NO: 35194 - RNA, 19 nt, Artificial Sequence
  Antisense Oligo
agggucccuuggaagacug

SEQ ID NO: 35195 - RNA, 19 nt, Artificial Sequence
  Sense Oligo
agggacccuugcugcuacg

SEQ ID NO: 35196 - RNA, 19 nt, Artificial Sequence
  Antisense Oligo
cguagcagcaagggucccu

SEQ ID NO: 35197 - RNA, 19 nt, Artificial Sequence
  Sense Oligo
gggacccuugcugcuacga

SEQ ID NO: 35198 - RNA, 19 nt, Artificial Sequence
  Antisense Oligo
ucguagcagcaaggguccc

SEQ ID NO: 35199 - RNA, 19 nt, Artificial Sequence
  Sense Oligo
ggacccuugcugcuacgaa

SEQ ID NO: 35200 - RNA, 19 nt, Artificial Sequence
  Antisense Oligo
uucguagcagcaagggucc

SEQ ID NO: 35201 - RNA, 19 nt, Artificial Sequence
  Sense Oligo
augcucacaucuucaggug

SEQ ID NO: 35202 - RNA, 19 nt, Artificial Sequence
  Antisense Oligo
caccugaagaugugagcau

SEQ ID NO: 35203 - RNA, 19 nt, Artificial Sequence
  Sense Oligo
ugcucacaucuucaggugc

SEQ ID NO: 35204 - RNA, 19 nt, Artificial Sequence
  Antisense Oligo
gcaccugaagaugugagca

SEQ ID NO: 35205 - RNA, 19 nt, Artificial Sequence
  Sense Oligo
gcucacaucuucaggugcc

SEQ ID NO: 35206 - RNA, 19 nt, Artificial Sequence
  Antisense Oligo
ggcaccugaagaugugagc

SEQ ID NO: 35207 - RNA, 19 nt, Artificial Sequence
  Sense Oligo
cucacaucuucaggugccu

SEQ ID NO: 35208 - RNA, 19 nt, Artificial Sequence
  Antisense Oligo
aggcaccugaagaugugag

SEQ ID NO: 35209 - RNA, 19 nt, Artificial Sequence
  Sense Oligo
caucuucaggugccucauu

SEQ ID NO: 35210 - RNA, 19 nt, Artificial Sequence
  Antisense Oligo
aaugaggcaccugaagaug

SEQ ID NO: 35211 - RNA, 19 nt, Artificial Sequence
  Sense Oligo
aucuucaggugccucauuc

SEQ ID NO: 35212 - RNA, 19 nt, Artificial Sequence
  Antisense Oligo
gaaugaggcaccugaagau

SEQ ID NO: 35213 - RNA, 19 nt, Artificial Sequence
  Sense Oligo
ucuucaggugccucauuca

SEQ ID NO: 35214 - RNA, 19 nt, Artificial Sequence
  Antisense Oligo
ugaaugaggcaccugaaga

SEQ ID NO: 35215 - RNA, 19 nt, Artificial Sequence
  Sense Oligo
caggugccucauucacaua

SEQ ID NO: 35216 - RNA, 19 nt, Artificial Sequence
  Antisense Oligo
uaugugaaugaggcaccug

SEQ ID NO: 35217 - RNA, 19 nt, Artificial Sequence
  Sense Oligo
ggugccucauucacauacg

SEQ ID NO: 35218 - RNA, 19 nt, Artificial Sequence
  Antisense Oligo
cguaugugaaugaggcacc

SEQ ID NO: 35219 - RNA, 19 nt, Artificial Sequence
  Sense Oligo
gugccucauucacauacgu

SEQ ID NO: 35220 - RNA, 19 nt, Artificial Sequence
  Antisense Oligo
acguaugugaaugaggcac

SEQ ID NO: 35221 - RNA, 19 nt, Artificial Sequence
  Sense Oligo
ugccucauucacauacguc

SEQ ID NO: 35222 - RNA, 19 nt, Artificial Sequence
  Antisense Oligo
gacguaugugaaugaggca

SEQ ID NO: 35223 - RNA, 19 nt, Artificial Sequence
  Sense Oligo
gccucauucacauacguca

SEQ ID NO: 35224 - RNA, 19 nt, Artificial Sequence
  Antisense Oligo
ugacguaugugaaugaggc

SEQ ID NO: 35225 - RNA, 19 nt, Artificial Sequence
  Sense Oligo
ccucauucacauacgucaa

SEQ ID NO: 35226 - RNA, 19 nt, Artificial Sequence
  Antisense Oligo
uugacguaugugaaugagg

SEQ ID NO: 35227 - RNA, 19 nt, Artificial Sequence
  Sense Oligo
cucauucacauacgucaag

SEQ ID NO: 35228 - RNA, 19 nt, Artificial Sequence
  Antisense Oligo
cuugacguaugugaaugag

SEQ ID NO: 35229 - RNA, 19 nt, Artificial Sequence
  Sense Oligo
ucauucacauacgucaagg

SEQ ID NO: 35230 - RNA, 19 nt, Artificial Sequence
  Antisense Oligo
ccuugacguaugugaauga

SEQ ID NO: 35231 - RNA, 19 nt, Artificial Sequence
  Sense Oligo
cauucacauacgucaagga

SEQ ID NO: 35232 - RNA, 19 nt, Artificial Sequence
  Antisense Oligo
uccuugacguaugugaaug

SEQ ID NO: 35233 - RNA, 19 nt, Artificial Sequence
  Sense Oligo
auucacauacgucaaggaa

SEQ ID NO: 35234 - RNA, 19 nt, Artificial Sequence
  Antisense Oligo
uuccuugacguaugugaau

SEQ ID NO: 35235 - RNA, 19 nt, Artificial Sequence
  Sense Oligo
aauugagguaggcauuugg

SEQ ID NO: 35236 - RNA, 19 nt, Artificial Sequence
  Antisense Oligo
ccaaaugccuaccucaauu

SEQ ID NO: 35237 - RNA, 19 nt, Artificial Sequence
  Sense Oligo
auugagguaggcauuuggc

SEQ ID NO: 35238 - RNA, 19 nt, Artificial Sequence
  Antisense Oligo
gccaaaugccuaccucaau

SEQ ID NO: 35239 - RNA, 19 nt, Artificial Sequence
  Sense Oligo
ugagguaggcauuuggccg

SEQ ID NO: 35240 - RNA, 19 nt, Artificial Sequence
  Antisense Oligo
cggccaaaugccuaccuca

SEQ ID NO: 35241 - RNA, 19 nt, Artificial Sequence
  Sense Oligo
gagguaggcauuuggccga

SEQ ID NO: 35242 - RNA, 19 nt, Artificial Sequence
  Antisense Oligo
ucggccaaaugccuaccuc

SEQ ID NO: 35243 - RNA, 19 nt, Artificial Sequence
  Sense Oligo
agguaggcauuuggccgaa

SEQ ID NO: 35244 - RNA, 19 nt, Artificial Sequence
  Antisense Oligo
uucggccaaaugccuaccu

SEQ ID NO: 35245 - RNA, 19 nt, Artificial Sequence
  Sense Oligo
gguaggcauuuggccgaag

SEQ ID NO: 35246 - RNA, 19 nt, Artificial Sequence
  Antisense Oligo
cuucggccaaaugccuacc

SEQ ID NO: 35247 - RNA, 19 nt, Artificial Sequence
  Sense Oligo
cuggguagggaugugacug

SEQ ID NO: 35248 - RNA, 19 nt, Artificial Sequence
  Antisense Oligo
cagucacaucccuacccag

SEQ ID NO: 35249 - RNA, 19 nt, Artificial Sequence
  Sense Oligo
uggguagggaugugacuga

SEQ ID NO: 35250 - RNA, 19 nt, Artificial Sequence
  Antisense Oligo
ucagucacaucccuaccca

SEQ ID NO: 35251 - RNA, 19 nt, Artificial Sequence
  Sense Oligo
ggguagggaugugacugau

SEQ ID NO: 35252 - RNA, 19 nt, Artificial Sequence
  Antisense Oligo
aucagucacaucccuaccc

SEQ ID NO: 35253 - RNA, 19 nt, Artificial Sequence
  Sense Oligo
agggaugugacugaucgug

SEQ ID NO: 35254 - RNA, 19 nt, Artificial Sequence
  Antisense Oligo
cacgaucagucacaucccu

SEQ ID NO: 35255 - RNA, 19 nt, Artificial Sequence
  Sense Oligo
gggaugugacugaucguga

SEQ ID NO: 35256 - RNA, 19 nt, Artificial Sequence
  Antisense Oligo
ucacgaucagucacauccc

SEQ ID NO: 35257 - RNA, 19 nt, Artificial Sequence
  Sense Oligo
ggaugugacugaucgugau

SEQ ID NO: 35258 - RNA, 19 nt, Artificial Sequence
  Antisense Oligo
aucacgaucagucacaucc

SEQ ID NO: 35259 - RNA, 19 nt, Artificial Sequence
  Sense Oligo
gaugugacugaucgugauu

SEQ ID NO: 35260 - RNA, 19 nt, Artificial Sequence
  Antisense Oligo
aaucacgaucagucacauc

SEQ ID NO: 35261 - RNA, 19 nt, Artificial Sequence
  Sense Oligo
ugacugaucgugauuccuc

SEQ ID NO: 35262 - RNA, 19 nt, Artificial Sequence
  Antisense Oligo
gaggaaucacgaucaguca

SEQ ID NO: 35263 - RNA, 19 nt, Artificial Sequence
  Sense Oligo
ugaucgugauuccucaugg

SEQ ID NO: 35264 - RNA, 19 nt, Artificial Sequence
  Antisense Oligo
ccaugaggaaucacgauca

SEQ ID NO: 35265 - RNA, 19 nt, Artificial Sequence
  Sense Oligo
gaucgugauuccucauggc

SEQ ID NO: 35266 - RNA, 19 nt, Artificial Sequence
  Antisense Oligo
gccaugaggaaucacgauc

SEQ ID NO: 35267 - RNA, 19 nt, Artificial Sequence
  Sense Oligo
aucgugauuccucauggcc

SEQ ID NO: 35268 - RNA, 19 nt, Artificial Sequence
  Antisense Oligo
ggccaugaggaaucacgau

SEQ ID NO: 35269 - RNA, 19 nt, Artificial Sequence
  Sense Oligo
ucgugauuccucauggccu

SEQ ID NO: 35270 - RNA, 19 nt, Artificial Sequence
  Antisense Oligo
aggccaugaggaaucacga

SEQ ID NO: 35271 - RNA, 19 nt, Artificial Sequence
  Sense Oligo
cgugauuccucauggccuc

SEQ ID NO: 35272 - RNA, 19 nt, Artificial Sequence
  Antisense Oligo
gaggccaugaggaaucacg

SEQ ID NO: 35273 - RNA, 19 nt, Artificial Sequence
  Sense Oligo
gugauuccucauggccuca

SEQ ID NO: 35274 - RNA, 19 nt, Artificial Sequence
  Antisense Oligo
ugaggccaugaggaaucac

SEQ ID NO: 35275 - RNA, 19 nt, Artificial Sequence
  Sense Oligo
ugauuccucauggccucaa

SEQ ID NO: 35276 - RNA, 19 nt, Artificial Sequence
  Antisense Oligo
uugaggccaugaggaauca

SEQ ID NO: 35277 - RNA, 19 nt, Artificial Sequence
  Sense Oligo
gauuccucauggccucaaa

SEQ ID NO: 35278 - RNA, 19 nt, Artificial Sequence
  Antisense Oligo
uuugaggccaugaggaauc

SEQ ID NO: 35279 - RNA, 19 nt, Artificial Sequence
  Sense Oligo
auuccucauggccucaaau

SEQ ID NO: 35280 - RNA, 19 nt, Artificial Sequence
  Antisense Oligo
auuugaggccaugaggaau

SEQ ID NO: 35281 - RNA, 19 nt, Artificial Sequence
  Sense Oligo
uccucauggccucaaauca

SEQ ID NO: 35282 - RNA, 19 nt, Artificial Sequence
  Antisense Oligo
ugauuugaggccaugagga

SEQ ID NO: 35283 - RNA, 19 nt, Artificial Sequence
  Sense Oligo
gggcaguuguuggccuuca

SEQ ID NO: 35284 - RNA, 19 nt, Artificial Sequence
  Antisense Oligo
ugaaggccaacaacugccc

SEQ ID NO: 35285 - RNA, 19 nt, Artificial Sequence
  Sense Oligo
ggcaguuguuggccuucac

SEQ ID NO: 35286 - RNA, 19 nt, Artificial Sequence
  Antisense Oligo
gugaaggccaacaacugcc

SEQ ID NO: 35287 - RNA, 19 nt, Artificial Sequence
  Sense Oligo
gcaguuguuggccuucacc

SEQ ID NO: 35288 - RNA, 19 nt, Artificial Sequence
  Antisense Oligo
ggugaaggccaacaacugc

SEQ ID NO: 35289 - RNA, 19 nt, Artificial Sequence
  Sense Oligo
caguuguuggccuucaccu

SEQ ID NO: 35290 - RNA, 19 nt, Artificial Sequence
  Antisense Oligo
aggugaaggccaacaacug

SEQ ID NO: 35291 - RNA, 19 nt, Artificial Sequence
  Sense Oligo
uguuggccuucaccugagc

SEQ ID NO: 35292 - RNA, 19 nt, Artificial Sequence
  Antisense Oligo
gcucaggugaaggccaaca

SEQ ID NO: 35293 - RNA, 19 nt, Artificial Sequence
  Sense Oligo
uugcuccugucuaccuggc

SEQ ID NO: 35294 - RNA, 19 nt, Artificial Sequence
  Antisense Oligo
gccagguagacaggagcaa

SEQ ID NO: 35295 - RNA, 19 nt, Artificial Sequence
  Sense Oligo
ugcuccugucuaccuggca

SEQ ID NO: 35296 - RNA, 19 nt, Artificial Sequence
  Antisense Oligo
ugccagguagacaggagca

SEQ ID NO: 35297 - RNA, 19 nt, Artificial Sequence
  Sense Oligo
gcuccugucuaccuggcag

SEQ ID NO: 35298 - RNA, 19 nt, Artificial Sequence
  Antisense Oligo
cugccagguagacaggagc

SEQ ID NO: 35299 - RNA, 19 nt, Artificial Sequence
  Sense Oligo
uaccuggcaggguggcucu

SEQ ID NO: 35300 - RNA, 19 nt, Artificial Sequence
  Antisense Oligo
agagccacccugccaggua

SEQ ID NO: 35301 - RNA, 19 nt, Artificial Sequence
  Sense Oligo
cugcugcacugccucgugu

SEQ ID NO: 35302 - RNA, 19 nt, Artificial Sequence
  Antisense Oligo
acacgaggcagugcagcag

SEQ ID NO: 35303 - RNA, 19 nt, Artificial Sequence
  Sense Oligo
ugcugcacugccucguguc

SEQ ID NO: 35304 - RNA, 19 nt, Artificial Sequence
  Antisense Oligo
gacacgaggcagugcagca

SEQ ID NO: 35305 - RNA, 19 nt, Artificial Sequence
  Sense Oligo
cagucccuguggugaugga

SEQ ID NO: 35306 - RNA, 19 nt, Artificial Sequence
  Antisense Oligo
uccaucaccacagggacug

SEQ ID NO: 35307 - RNA, 19 nt, Artificial Sequence
  Sense Oligo
cccuguggugauggaggug

SEQ ID NO: 35308 - RNA, 19 nt, Artificial Sequence
  Antisense Oligo
caccuccaucaccacaggg

SEQ ID NO: 35309 - RNA, 19 nt, Artificial Sequence
  Sense Oligo
ccuguggugauggaggugu

SEQ ID NO: 35310 - RNA, 19 nt, Artificial Sequence
  Antisense Oligo
acaccuccaucaccacagg

SEQ ID NO: 35311 - RNA, 19 nt, Artificial Sequence
  Sense Oligo
cuguggugauggaggugug

SEQ ID NO: 35312 - RNA, 19 nt, Artificial Sequence
  Antisense Oligo
cacaccuccaucaccacag

SEQ ID NO: 35313 - RNA, 19 nt, Artificial Sequence
  Sense Oligo
uguggugauggaggugugg

SEQ ID NO: 35314 - RNA, 19 nt, Artificial Sequence
  Antisense Oligo
ccacaccuccaucaccaca

SEQ ID NO: 35315 - RNA, 19 nt, Artificial Sequence
  Sense Oligo
guggugauggaggugugga

SEQ ID NO: 35316 - RNA, 19 nt, Artificial Sequence
  Antisense Oligo
uccacaccuccaucaccac

SEQ ID NO: 35317 - RNA, 19 nt, Artificial Sequence
  Sense Oligo
gugauggagguguggaggu

SEQ ID NO: 35318 - RNA, 19 nt, Artificial Sequence
  Antisense Oligo
accuccacaccuccaucac

SEQ ID NO: 35319 - RNA, 19 nt, Artificial Sequence
  Sense Oligo
auggagguguggaggugau

SEQ ID NO: 35320 - RNA, 19 nt, Artificial Sequence
  Antisense Oligo
aucaccuccacaccuccau

SEQ ID NO: 35321 - RNA, 19 nt, Artificial Sequence
  Sense Oligo
agguguggaggugauggug

SEQ ID NO: 35322 - RNA, 19 nt, Artificial Sequence
  Antisense Oligo
caccaucaccuccacaccu

SEQ ID NO: 35323 - RNA, 19 nt, Artificial Sequence
  Sense Oligo
auggugaugguugguggug

SEQ ID NO: 35324 - RNA, 19 nt, Artificial Sequence
  Antisense Oligo
caccaccaaccaucaccau

SEQ ID NO: 35325 - RNA, 19 nt, Artificial Sequence
  Sense Oligo
gaugguugguggugguggu

SEQ ID NO: 35326 - RNA, 19 nt, Artificial Sequence
  Antisense Oligo
accaccaccaccaaccauc

SEQ ID NO: 35327 - RNA, 19 nt, Artificial Sequence
  Sense Oligo
augguugguggugguggug

SEQ ID NO: 35328 - RNA, 19 nt, Artificial Sequence
  Antisense Oligo
caccaccaccaccaaccau

SEQ ID NO: 35329 - RNA, 19 nt, Artificial Sequence
  Sense Oligo
ugguugguggugguggugg

SEQ ID NO: 35330 - RNA, 19 nt, Artificial Sequence
  Antisense Oligo
ccaccaccaccaccaacca

SEQ ID NO: 35331 - RNA, 19 nt, Artificial Sequence
  Sense Oligo
gguuggugguggugguggu

SEQ ID NO: 35332 - RNA, 19 nt, Artificial Sequence
  Antisense Oligo
accaccaccaccaccaacc

SEQ ID NO: 35333 - RNA, 19 nt, Artificial Sequence
  Sense Oligo
guuggugguggugguggua

SEQ ID NO: 35334 - RNA, 19 nt, Artificial Sequence
  Antisense Oligo
uaccaccaccaccaccaac

SEQ ID NO: 35335 - RNA, 19 nt, Artificial Sequence
  Sense Oligo
uugguggugguggugguag

SEQ ID NO: 35336 - RNA, 19 nt, Artificial Sequence
  Antisense Oligo
cuaccaccaccaccaccaa

SEQ ID NO: 35337 - RNA, 19 nt, Artificial Sequence
  Sense Oligo
ugguggugguggugguaga

SEQ ID NO: 35338 - RNA, 19 nt, Artificial Sequence
  Antisense Oligo
ucuaccaccaccaccacca

SEQ ID NO: 35339 - RNA, 19 nt, Artificial Sequence
  Sense Oligo
gguggugguggugguagag

SEQ ID NO: 35340 - RNA, 19 nt, Artificial Sequence
  Antisense Oligo
cucuaccaccaccaccacc

SEQ ID NO: 35341 - RNA, 19 nt, Artificial Sequence
  Sense Oligo
guggugguggugguagagg

SEQ ID NO: 35342 - RNA, 19 nt, Artificial Sequence
  Antisense Oligo
ccucuaccaccaccaccac

SEQ ID NO: 35343 - RNA, 19 nt, Artificial Sequence
  Sense Oligo
auggugaugguugguggug

SEQ ID NO: 35344 - RNA, 19 nt, Artificial Sequence
  Antisense Oligo
caccaccaaccaucaccau

SEQ ID NO: 35345 - RNA, 19 nt, Artificial Sequence
  Sense Oligo
gaugguugguggugguggu

SEQ ID NO: 35346 - RNA, 19 nt, Artificial Sequence
  Antisense Oligo
accaccaccaccaaccauc

SEQ ID NO: 35347 - RNA, 19 nt, Artificial Sequence
  Sense Oligo
augguugguggugguggug

SEQ ID NO: 35348 - RNA, 19 nt, Artificial Sequence
  Antisense Oligo
caccaccaccaccaaccau

SEQ ID NO: 35349 - RNA, 19 nt, Artificial Sequence
  Sense Oligo
ugguugguggugguggugg

SEQ ID NO: 35350 - RNA, 19 nt, Artificial Sequence
  Antisense Oligo
ccaccaccaccaccaacca

SEQ ID NO: 35351 - RNA, 19 nt, Artificial Sequence
  Sense Oligo
gguuggugguggugguggu

SEQ ID NO: 35352 - RNA, 19 nt, Artificial Sequence
  Antisense Oligo
accaccaccaccaccaacc

SEQ ID NO: 35353 - RNA, 19 nt, Artificial Sequence
  Sense Oligo
guuggugguggugguggua

SEQ ID NO: 35354 - RNA, 19 nt, Artificial Sequence
  Antisense Oligo
uaccaccaccaccaccaac

SEQ ID NO: 35355 - RNA, 19 nt, Artificial Sequence
  Sense Oligo
uugguggugguggugguag

SEQ ID NO: 35356 - RNA, 19 nt, Artificial Sequence
  Antisense Oligo
cuaccaccaccaccaccaa

SEQ ID NO: 35357 - RNA, 19 nt, Artificial Sequence
  Sense Oligo
ugguggugguggugguaga

SEQ ID NO: 35358 - RNA, 19 nt, Artificial Sequence
  Antisense Oligo
ucuaccaccaccaccacca

SEQ ID NO: 35359 - RNA, 19 nt, Artificial Sequence
  Sense Oligo
gguggugguggugguagag

SEQ ID NO: 35360 - RNA, 19 nt, Artificial Sequence
  Antisense Oligo
cucuaccaccaccaccacc

SEQ ID NO: 35361 - RNA, 19 nt, Artificial Sequence
  Sense Oligo
guggugguggugguagagg

SEQ ID NO: 35362 - RNA, 19 nt, Artificial Sequence
  Antisense Oligo
ccucuaccaccaccaccac

SEQ ID NO: 35363 - RNA, 19 nt, Artificial Sequence
  Sense Oligo
guagaggugauggugguga

SEQ ID NO: 35364 - RNA, 19 nt, Artificial Sequence
  Antisense Oligo
ucaccaccaucaccucuac

SEQ ID NO: 35365 - RNA, 19 nt, Artificial Sequence
  Sense Oligo
gugauggugaugguggacg

SEQ ID NO: 35366 - RNA, 19 nt, Artificial Sequence
  Antisense Oligo
cguccaccaucaccaucac

SEQ ID NO: 35367 - RNA, 19 nt, Artificial Sequence
  Sense Oligo
ugauggugaugguggacgu

SEQ ID NO: 35368 - RNA, 19 nt, Artificial Sequence
  Antisense Oligo
acguccaccaucaccauca

SEQ ID NO: 35369 - RNA, 19 nt, Artificial Sequence
  Sense Oligo
gauggugaugguggacgua

SEQ ID NO: 35370 - RNA, 19 nt, Artificial Sequence
  Antisense Oligo
uacguccaccaucaccauc

SEQ ID NO: 35371 - RNA, 19 nt, Artificial Sequence
  Sense Oligo
auggugaugguggacguaa

SEQ ID NO: 35372 - RNA, 19 nt, Artificial Sequence
  Antisense Oligo
uuacguccaccaucaccau

SEQ ID NO: 35373 - RNA, 19 nt, Artificial Sequence
  Sense Oligo
uggugaugguggacguaau

SEQ ID NO: 35374 - RNA, 19 nt, Artificial Sequence
  Antisense Oligo
auuacguccaccaucacca

SEQ ID NO: 35375 - RNA, 19 nt, Artificial Sequence
  Sense Oligo
ggugaugguggacguaaug

SEQ ID NO: 35376 - RNA, 19 nt, Artificial Sequence
  Antisense Oligo
cauuacguccaccaucacc

SEQ ID NO: 35377 - RNA, 19 nt, Artificial Sequence
  Sense Oligo
gugaugguggacguaaugg

SEQ ID NO: 35378 - RNA, 19 nt, Artificial Sequence
  Antisense Oligo
ccauuacguccaccaucac

SEQ ID NO: 35379 - RNA, 19 nt, Artificial Sequence
  Sense Oligo
ugaugguggacguaaugga

SEQ ID NO: 35380 - RNA, 19 nt, Artificial Sequence
  Antisense Oligo
uccauuacguccaccauca

SEQ ID NO: 35381 - RNA, 19 nt, Artificial Sequence
  Sense Oligo
gguggacguaauggaggug

SEQ ID NO: 35382 - RNA, 19 nt, Artificial Sequence
  Antisense Oligo
caccuccauuacguccacc

SEQ ID NO: 35383 - RNA, 19 nt, Artificial Sequence
  Sense Oligo
guggacguaauggagguga

SEQ ID NO: 35384 - RNA, 19 nt, Artificial Sequence
  Antisense Oligo
ucaccuccauuacguccac

SEQ ID NO: 35385 - RNA, 19 nt, Artificial Sequence
  Sense Oligo
uggacguaauggaggugau

SEQ ID NO: 35386 - RNA, 19 nt, Artificial Sequence
  Antisense Oligo
aucaccuccauuacgucca

SEQ ID NO: 35387 - RNA, 19 nt, Artificial Sequence
  Sense Oligo
ggacguaauggaggugaug

SEQ ID NO: 35388 - RNA, 19 nt, Artificial Sequence
  Antisense Oligo
caucaccuccauuacgucc

SEQ ID NO: 35389 - RNA, 19 nt, Artificial Sequence
  Sense Oligo
gacguaauggaggugaugg

SEQ ID NO: 35390 - RNA, 19 nt, Artificial Sequence
  Antisense Oligo
ccaucaccuccauuacguc

SEQ ID NO: 35391 - RNA, 19 nt, Artificial Sequence
  Sense Oligo
acguaauggaggugauggu

SEQ ID NO: 35392 - RNA, 19 nt, Artificial Sequence
  Antisense Oligo
accaucaccuccauuacgu

SEQ ID NO: 35393 - RNA, 19 nt, Artificial Sequence
  Sense Oligo
cguaauggaggugauggug

SEQ ID NO: 35394 - RNA, 19 nt, Artificial Sequence
  Antisense Oligo
caccaucaccuccauuacg

SEQ ID NO: 35395 - RNA, 19 nt, Artificial Sequence
  Sense Oligo
ggaggugauggugauugug

SEQ ID NO: 35396 - RNA, 19 nt, Artificial Sequence
  Antisense Oligo
cacaaucaccaucaccucc

SEQ ID NO: 35397 - RNA, 19 nt, Artificial Sequence
  Sense Oligo
uggugauugugguggaggu

SEQ ID NO: 35398 - RNA, 19 nt, Artificial Sequence
  Antisense Oligo
accuccaccacaaucacca

SEQ ID NO: 35399 - RNA, 19 nt, Artificial Sequence
  Sense Oligo
ggugauugugguggaggug

SEQ ID NO: 35400 - RNA, 19 nt, Artificial Sequence
  Antisense Oligo
caccuccaccacaaucacc

SEQ ID NO: 35401 - RNA, 19 nt, Artificial Sequence
  Sense Oligo
ggugaugguuguggaggug

SEQ ID NO: 35402 - RNA, 19 nt, Artificial Sequence
  Antisense Oligo
caccuccacaaccaucacc

SEQ ID NO: 35403 - RNA, 19 nt, Artificial Sequence
  Sense Oligo
gugaugguuguggagguga

SEQ ID NO: 35404 - RNA, 19 nt, Artificial Sequence
  Antisense Oligo
ucaccuccacaaccaucac

SEQ ID NO: 35405 - RNA, 19 nt, Artificial Sequence
  Sense Oligo
gaugguuguggaggugaug

SEQ ID NO: 35406 - RNA, 19 nt, Artificial Sequence
  Antisense Oligo
caucaccuccacaaccauc

SEQ ID NO: 35407 - RNA, 19 nt, Artificial Sequence
  Sense Oligo
augguuguggaggugaugg

SEQ ID NO: 35408 - RNA, 19 nt, Artificial Sequence
  Antisense Oligo
ccaucaccuccacaaccau

SEQ ID NO: 35409 - RNA, 19 nt, Artificial Sequence
  Sense Oligo
ugguuguggaggugauggu

SEQ ID NO: 35410 - RNA, 19 nt, Artificial Sequence
  Antisense Oligo
accaucaccuccacaacca

SEQ ID NO: 35411 - RNA, 19 nt, Artificial Sequence
  Sense Oligo
uuguggaggugauggugga

SEQ ID NO: 35412 - RNA, 19 nt, Artificial Sequence
  Antisense Oligo
uccaccaucaccuccacaa

SEQ ID NO: 35413 - RNA, 19 nt, Artificial Sequence
  Sense Oligo
ggugaugguggugguggug

SEQ ID NO: 35414 - RNA, 19 nt, Artificial Sequence
  Antisense Oligo
caccaccaccaccaucacc

SEQ ID NO: 35415 - RNA, 19 nt, Artificial Sequence
  Sense Oligo
gugaugguggugguggugg

SEQ ID NO: 35416 - RNA, 19 nt, Artificial Sequence
  Antisense Oligo
ccaccaccaccaccaucac

SEQ ID NO: 35417 - RNA, 19 nt, Artificial Sequence
  Sense Oligo
ugauggugguggugguggu

SEQ ID NO: 35418 - RNA, 19 nt, Artificial Sequence
  Antisense Oligo
accaccaccaccaccauca

SEQ ID NO: 35419 - RNA, 19 nt, Artificial Sequence
  Sense Oligo
gauggugguggugguggug

SEQ ID NO: 35420 - RNA, 19 nt, Artificial Sequence
  Antisense Oligo
caccaccaccaccaccauc

SEQ ID NO: 35421 - RNA, 19 nt, Artificial Sequence
  Sense Oligo
augguggugguggugguga

SEQ ID NO: 35422 - RNA, 19 nt, Artificial Sequence
  Antisense Oligo
ucaccaccaccaccaccau

SEQ ID NO: 35423 - RNA, 19 nt, Artificial Sequence
  Sense Oligo
uggugguggugguggugau

SEQ ID NO: 35424 - RNA, 19 nt, Artificial Sequence
  Antisense Oligo
aucaccaccaccaccacca

SEQ ID NO: 35425 - RNA, 19 nt, Artificial Sequence
  Sense Oligo
ggugguggugguggugaug

SEQ ID NO: 35426 - RNA, 19 nt, Artificial Sequence
  Antisense Oligo
caucaccaccaccaccacc

SEQ ID NO: 35427 - RNA, 19 nt, Artificial Sequence
  Sense Oligo
gugguggugguggugaugg

SEQ ID NO: 35428 - RNA, 19 nt, Artificial Sequence
  Antisense Oligo
ccaucaccaccaccaccac

SEQ ID NO: 35429 - RNA, 19 nt, Artificial Sequence
  Sense Oligo
ugguggugguggugauggu

SEQ ID NO: 35430 - RNA, 19 nt, Artificial Sequence
  Antisense Oligo
accaucaccaccaccacca

SEQ ID NO: 35431 - RNA, 19 nt, Artificial Sequence
  Sense Oligo
ggaggugguggagguaaug

SEQ ID NO: 35432 - RNA, 19 nt, Artificial Sequence
  Antisense Oligo
cauuaccuccaccaccucc

SEQ ID NO: 35433 - RNA, 19 nt, Artificial Sequence
  Sense Oligo
aggugguggagguaaugga

SEQ ID NO: 35434 - RNA, 19 nt, Artificial Sequence
  Antisense Oligo
uccauuaccuccaccaccu

SEQ ID NO: 35435 - RNA, 19 nt, Artificial Sequence
  Sense Oligo
ggugaugguggugguggug

SEQ ID NO: 35436 - RNA, 19 nt, Artificial Sequence
  Antisense Oligo
caccaccaccaccaucacc

SEQ ID NO: 35437 - RNA, 19 nt, Artificial Sequence
  Sense Oligo
gugaugguggugguggugg

SEQ ID NO: 35438 - RNA, 19 nt, Artificial Sequence
  Antisense Oligo
ccaccaccaccaccaucac

SEQ ID NO: 35439 - RNA, 19 nt, Artificial Sequence
  Sense Oligo
ugauggugguggugguggu

SEQ ID NO: 35440 - RNA, 19 nt, Artificial Sequence
  Antisense Oligo
accaccaccaccaccauca

SEQ ID NO: 35441 - RNA, 19 nt, Artificial Sequence
  Sense Oligo
gauggugguggugguggug

SEQ ID NO: 35442 - RNA, 19 nt, Artificial Sequence
  Antisense Oligo
caccaccaccaccaccauc

SEQ ID NO: 35443 - RNA, 19 nt, Artificial Sequence
  Sense Oligo
augguggugguggugguga

SEQ ID NO: 35444 - RNA, 19 nt, Artificial Sequence
  Antisense Oligo
ucaccaccaccaccaccau

SEQ ID NO: 35445 - RNA, 19 nt, Artificial Sequence
  Sense Oligo
uggugguggugguggugau

SEQ ID NO: 35446 - RNA, 19 nt, Artificial Sequence
  Antisense Oligo
aucaccaccaccaccacca

SEQ ID NO: 35447 - RNA, 19 nt, Artificial Sequence
  Sense Oligo
ggugguggugguggugaug

SEQ ID NO: 35448 - RNA, 19 nt, Artificial Sequence
  Antisense Oligo
caucaccaccaccaccacc

SEQ ID NO: 35449 - RNA, 19 nt, Artificial Sequence
  Sense Oligo
gugguggugguggugaugg

SEQ ID NO: 35450 - RNA, 19 nt, Artificial Sequence
  Antisense Oligo
ccaucaccaccaccaccac

SEQ ID NO: 35451 - RNA, 19 nt, Artificial Sequence
  Sense Oligo
ugguggugguggugauggu

SEQ ID NO: 35452 - RNA, 19 nt, Artificial Sequence
  Antisense Oligo
accaucaccaccaccacca

SEQ ID NO: 35453 - RNA, 19 nt, Artificial Sequence
  Sense Oligo
ggaggugguggagguaaug

SEQ ID NO: 35454 - RNA, 19 nt, Artificial Sequence
  Antisense Oligo
cauuaccuccaccaccucc

SEQ ID NO: 35455 - RNA, 19 nt, Artificial Sequence
  Sense Oligo
aggugguggagguaaugga

SEQ ID NO: 35456 - RNA, 19 nt, Artificial Sequence
  Antisense Oligo
uccauuaccuccaccaccu

SEQ ID NO: 35457 - RNA, 19 nt, Artificial Sequence
  Sense Oligo
gaugguggugguguaggug

SEQ ID NO: 35458 - RNA, 19 nt, Artificial Sequence
  Antisense Oligo
caccuacaccaccaccauc

SEQ ID NO: 35459 - RNA, 19 nt, Artificial Sequence
  Sense Oligo
augguggugguguagguga

SEQ ID NO: 35460 - RNA, 19 nt, Artificial Sequence
  Antisense Oligo
ucaccuacaccaccaccau

SEQ ID NO: 35461 - RNA, 19 nt, Artificial Sequence
  Sense Oligo
uggugguguaggugauggu

SEQ ID NO: 35462 - RNA, 19 nt, Artificial Sequence
  Antisense Oligo
accaucaccuacaccacca

SEQ ID NO: 35463 - RNA, 19 nt, Artificial Sequence
  Sense Oligo
ggugguguaggugauggug

SEQ ID NO: 35464 - RNA, 19 nt, Artificial Sequence
  Antisense Oligo
caccaucaccuacaccacc

SEQ ID NO: 35465 - RNA, 19 nt, Artificial Sequence
  Sense Oligo
gugguguaggugauggugg

SEQ ID NO: 35466 - RNA, 19 nt, Artificial Sequence
  Antisense Oligo
ccaccaucaccuacaccac

SEQ ID NO: 35467 - RNA, 19 nt, Artificial Sequence
  Sense Oligo
ugguguaggugauggugga

SEQ ID NO: 35468 - RNA, 19 nt, Artificial Sequence
  Antisense Oligo
uccaccaucaccuacacca

SEQ ID NO: 35469 - RNA, 19 nt, Artificial Sequence
  Sense Oligo
gguguaggugaugguggag

SEQ ID NO: 35470 - RNA, 19 nt, Artificial Sequence
  Antisense Oligo
cuccaccaucaccuacacc

SEQ ID NO: 35471 - RNA, 19 nt, Artificial Sequence
  Sense Oligo
guguaggugaugguggagg

SEQ ID NO: 35472 - RNA, 19 nt, Artificial Sequence
  Antisense Oligo
ccuccaccaucaccuacac

SEQ ID NO: 35473 - RNA, 19 nt, Artificial Sequence
  Sense Oligo
auggugguggacgugaugg

SEQ ID NO: 35474 - RNA, 19 nt, Artificial Sequence
  Antisense Oligo
ccaucacguccaccaccau

SEQ ID NO: 35475 - RNA, 19 nt, Artificial Sequence
  Sense Oligo
gguggacgugaugguggag

SEQ ID NO: 35476 - RNA, 19 nt, Artificial Sequence
  Antisense Oligo
cuccaccaucacguccacc

SEQ ID NO: 35477 - RNA, 19 nt, Artificial Sequence
  Sense Oligo
ggugaugguggugguggug

SEQ ID NO: 35478 - RNA, 19 nt, Artificial Sequence
  Antisense Oligo
caccaccaccaccaucacc

SEQ ID NO: 35479 - RNA, 19 nt, Artificial Sequence
  Sense Oligo
gugaugguggugguggugg

SEQ ID NO: 35480 - RNA, 19 nt, Artificial Sequence
  Antisense Oligo
ccaccaccaccaccaucac

SEQ ID NO: 35481 - RNA, 19 nt, Artificial Sequence
  Sense Oligo
ugauggugguggugguggu

SEQ ID NO: 35482 - RNA, 19 nt, Artificial Sequence
  Antisense Oligo
accaccaccaccaccauca

SEQ ID NO: 35483 - RNA, 19 nt, Artificial Sequence
  Sense Oligo
gauggugguggugguggug

SEQ ID NO: 35484 - RNA, 19 nt, Artificial Sequence
  Antisense Oligo
caccaccaccaccaccauc

SEQ ID NO: 35485 - RNA, 19 nt, Artificial Sequence
  Sense Oligo
auggugguggugguggugg

SEQ ID NO: 35486 - RNA, 19 nt, Artificial Sequence
  Antisense Oligo
ccaccaccaccaccaccau

SEQ ID NO: 35487 - RNA, 19 nt, Artificial Sequence
  Sense Oligo
ugguggugguggugguggu

SEQ ID NO: 35488 - RNA, 19 nt, Artificial Sequence
  Antisense Oligo
accaccaccaccaccacca

SEQ ID NO: 35489 - RNA, 19 nt, Artificial Sequence
  Sense Oligo
uggugguggugguggugga

SEQ ID NO: 35490 - RNA, 19 nt, Artificial Sequence
  Antisense Oligo
uccaccaccaccaccacca

SEQ ID NO: 35491 - RNA, 19 nt, Artificial Sequence
  Sense Oligo
uggugguggugguggaggu

SEQ ID NO: 35492 - RNA, 19 nt, Artificial Sequence
  Antisense Oligo
accuccaccaccaccacca

SEQ ID NO: 35493 - RNA, 19 nt, Artificial Sequence
  Sense Oligo
ggugguggugguggaggua

SEQ ID NO: 35494 - RNA, 19 nt, Artificial Sequence
  Antisense Oligo
uaccuccaccaccaccacc

SEQ ID NO: 35495 - RNA, 19 nt, Artificial Sequence
  Sense Oligo
gugguggugguggagguac

SEQ ID NO: 35496 - RNA, 19 nt, Artificial Sequence
  Antisense Oligo
guaccuccaccaccaccac

SEQ ID NO: 35497 - RNA, 19 nt, Artificial Sequence
  Sense Oligo
uggaggugauggcggucgu

SEQ ID NO: 35498 - RNA, 19 nt, Artificial Sequence
  Antisense Oligo
acgaccgccaucaccucca

SEQ ID NO: 35499 - RNA, 19 nt, Artificial Sequence
  Sense Oligo
auggagguggugguggugg

SEQ ID NO: 35500 - RNA, 19 nt, Artificial Sequence
  Antisense Oligo
ccaccaccaccaccuccau

SEQ ID NO: 35501 - RNA, 19 nt, Artificial Sequence
  Sense Oligo
uggaggugguggugguggu

SEQ ID NO: 35502 - RNA, 19 nt, Artificial Sequence
  Antisense Oligo
accaccaccaccaccucca

SEQ ID NO: 35503 - RNA, 19 nt, Artificial Sequence
  Sense Oligo
agguggugguggugguggu

SEQ ID NO: 35504 - RNA, 19 nt, Artificial Sequence
  Antisense Oligo
accaccaccaccaccaccu

SEQ ID NO: 35505 - RNA, 19 nt, Artificial Sequence
  Sense Oligo
ugguggugguggugguggu

SEQ ID NO: 35506 - RNA, 19 nt, Artificial Sequence
  Antisense Oligo
accaccaccaccaccacca

SEQ ID NO: 35507 - RNA, 19 nt, Artificial Sequence
  Sense Oligo
uggugguggugguggugga

SEQ ID NO: 35508 - RNA, 19 nt, Artificial Sequence
  Antisense Oligo
uccaccaccaccaccacca

SEQ ID NO: 35509 - RNA, 19 nt, Artificial Sequence
  Sense Oligo
uggugguggugguggaggu

SEQ ID NO: 35510 - RNA, 19 nt, Artificial Sequence
  Antisense Oligo
accuccaccaccaccacca

SEQ ID NO: 35511 - RNA, 19 nt, Artificial Sequence
  Sense Oligo
ggugguggugguggaggua

SEQ ID NO: 35512 - RNA, 19 nt, Artificial Sequence
  Antisense Oligo
uaccuccaccaccaccacc

SEQ ID NO: 35513 - RNA, 19 nt, Artificial Sequence
  Sense Oligo
gugguggugguggagguac

SEQ ID NO: 35514 - RNA, 19 nt, Artificial Sequence
  Antisense Oligo
guaccuccaccaccaccac

SEQ ID NO: 35515 - RNA, 19 nt, Artificial Sequence
  Sense Oligo
ggugaugguggugguggug

SEQ ID NO: 35516 - RNA, 19 nt, Artificial Sequence
  Antisense Oligo
caccaccaccaccaucacc

SEQ ID NO: 35517 - RNA, 19 nt, Artificial Sequence
  Sense Oligo
gugaugguggugguggugg

SEQ ID NO: 35518 - RNA, 19 nt, Artificial Sequence
  Antisense Oligo
ccaccaccaccaccaucac

SEQ ID NO: 35519 - RNA, 19 nt, Artificial Sequence
  Sense Oligo
ugaugguggugguggugga

SEQ ID NO: 35520 - RNA, 19 nt, Artificial Sequence
  Antisense Oligo
uccaccaccaccaccauca

SEQ ID NO: 35521 - RNA, 19 nt, Artificial Sequence
  Sense Oligo
gauggugguggugguggag

SEQ ID NO: 35522 - RNA, 19 nt, Artificial Sequence
  Antisense Oligo
cuccaccaccaccaccauc

SEQ ID NO: 35523 - RNA, 19 nt, Artificial Sequence
  Sense Oligo
auggugguggugguggagg

SEQ ID NO: 35524 - RNA, 19 nt, Artificial Sequence
  Antisense Oligo
ccuccaccaccaccaccau

SEQ ID NO: 35525 - RNA, 19 nt, Artificial Sequence
  Sense Oligo
uggugguggugguggaggu

SEQ ID NO: 35526 - RNA, 19 nt, Artificial Sequence
  Antisense Oligo
accuccaccaccaccacca

SEQ ID NO: 35527 - RNA, 19 nt, Artificial Sequence
  Sense Oligo
ggugguggugguggaggua

SEQ ID NO: 35528 - RNA, 19 nt, Artificial Sequence
  Antisense Oligo
uaccuccaccaccaccacc

SEQ ID NO: 35529 - RNA, 19 nt, Artificial Sequence
  Sense Oligo
gugguggugguggagguaa

SEQ ID NO: 35530 - RNA, 19 nt, Artificial Sequence
  Antisense Oligo
uuaccuccaccaccaccac

SEQ ID NO: 35531 - RNA, 19 nt, Artificial Sequence
  Sense Oligo
ugguggugguggagguaau

SEQ ID NO: 35532 - RNA, 19 nt, Artificial Sequence
  Antisense Oligo
auuaccuccaccaccacca

SEQ ID NO: 35533 - RNA, 19 nt, Artificial Sequence
  Sense Oligo
ggugaugguggugguggug

SEQ ID NO: 35534 - RNA, 19 nt, Artificial Sequence
  Antisense Oligo
caccaccaccaccaucacc

SEQ ID NO: 35535 - RNA, 19 nt, Artificial Sequence
  Sense Oligo
gugaugguggugguggugg

SEQ ID NO: 35536 - RNA, 19 nt, Artificial Sequence
  Antisense Oligo
ccaccaccaccaccaucac

SEQ ID NO: 35537 - RNA, 19 nt, Artificial Sequence
  Sense Oligo
ugauggugguggugguggu

SEQ ID NO: 35538 - RNA, 19 nt, Artificial Sequence
  Antisense Oligo
accaccaccaccaccauca

SEQ ID NO: 35539 - RNA, 19 nt, Artificial Sequence
  Sense Oligo
gauggugguggugguggug

SEQ ID NO: 35540 - RNA, 19 nt, Artificial Sequence
  Antisense Oligo
caccaccaccaccaccauc

SEQ ID NO: 35541 - RNA, 19 nt, Artificial Sequence
  Sense Oligo
auggugguggugguggugg

SEQ ID NO: 35542 - RNA, 19 nt, Artificial Sequence
  Antisense Oligo
ccaccaccaccaccaccau

SEQ ID NO: 35543 - RNA, 19 nt, Artificial Sequence
  Sense Oligo
ugguggugguggugguggu

SEQ ID NO: 35544 - RNA, 19 nt, Artificial Sequence
  Antisense Oligo
accaccaccaccaccacca

SEQ ID NO: 35545 - RNA, 19 nt, Artificial Sequence
  Sense Oligo
ugguggugguggugguggu

SEQ ID NO: 35546 - RNA, 19 nt, Artificial Sequence
  Antisense Oligo
accaccaccaccaccacca

SEQ ID NO: 35547 - RNA, 19 nt, Artificial Sequence
  Sense Oligo
uggugguggugguggugga

SEQ ID NO: 35548 - RNA, 19 nt, Artificial Sequence
  Antisense Oligo
uccaccaccaccaccacca

SEQ ID NO: 35549 - RNA, 19 nt, Artificial Sequence
  Sense Oligo
uggugguggugguggaggu

SEQ ID NO: 35550 - RNA, 19 nt, Artificial Sequence
  Antisense Oligo
accuccaccaccaccacca

SEQ ID NO: 35551 - RNA, 19 nt, Artificial Sequence
  Sense Oligo
ggugguggugguggaggua

SEQ ID NO: 35552 - RNA, 19 nt, Artificial Sequence
  Antisense Oligo
uaccuccaccaccaccacc

SEQ ID NO: 35553 - RNA, 19 nt, Artificial Sequence
  Sense Oligo
gugguggugguggagguaa

SEQ ID NO: 35554 - RNA, 19 nt, Artificial Sequence
  Antisense Oligo
uuaccuccaccaccaccac

SEQ ID NO: 35555 - RNA, 19 nt, Artificial Sequence
  Sense Oligo
ugguggugguggagguaau

SEQ ID NO: 35556 - RNA, 19 nt, Artificial Sequence
  Antisense Oligo
auuaccuccaccaccacca

SEQ ID NO: 35557 - RNA, 19 nt, Artificial Sequence
  Sense Oligo
ggugaugguggugguggug

SEQ ID NO: 35558 - RNA, 19 nt, Artificial Sequence
  Antisense Oligo
caccaccaccaccaucacc

SEQ ID NO: 35559 - RNA, 19 nt, Artificial Sequence
  Sense Oligo
gugaugguggugguggugg

SEQ ID NO: 35560 - RNA, 19 nt, Artificial Sequence
  Antisense Oligo
ccaccaccaccaccaucac

SEQ ID NO: 35561 - RNA, 19 nt, Artificial Sequence
  Sense Oligo
ugauggugguggugguggu

SEQ ID NO: 35562 - RNA, 19 nt, Artificial Sequence
  Antisense Oligo
accaccaccaccaccauca

SEQ ID NO: 35563 - RNA, 19 nt, Artificial Sequence
  Sense Oligo
gauggugguggugguggug

SEQ ID NO: 35564 - RNA, 19 nt, Artificial Sequence
  Antisense Oligo
caccaccaccaccaccauc

SEQ ID NO: 35565 - RNA, 19 nt, Artificial Sequence
  Sense Oligo
auggugguggugguggugg

SEQ ID NO: 35566 - RNA, 19 nt, Artificial Sequence
  Antisense Oligo
ccaccaccaccaccaccau

SEQ ID NO: 35567 - RNA, 19 nt, Artificial Sequence
  Sense Oligo
ugguggugguggugguggu

SEQ ID NO: 35568 - RNA, 19 nt, Artificial Sequence
  Antisense Oligo
accaccaccaccaccacca

SEQ ID NO: 35569 - RNA, 19 nt, Artificial Sequence
  Sense Oligo
ugguggugguggugguggu

SEQ ID NO: 35570 - RNA, 19 nt, Artificial Sequence
  Antisense Oligo
accaccaccaccaccacca

SEQ ID NO: 35571 - RNA, 19 nt, Artificial Sequence
  Sense Oligo
uggugguggugguggugga

SEQ ID NO: 35572 - RNA, 19 nt, Artificial Sequence
  Antisense Oligo
uccaccaccaccaccacca

SEQ ID NO: 35573 - RNA, 19 nt, Artificial Sequence
  Sense Oligo
uggugguggugguggaggu

SEQ ID NO: 35574 - RNA, 19 nt, Artificial Sequence
  Antisense Oligo
accuccaccaccaccacca

SEQ ID NO: 35575 - RNA, 19 nt, Artificial Sequence
  Sense Oligo
ggugguggugguggaggua

SEQ ID NO: 35576 - RNA, 19 nt, Artificial Sequence
  Antisense Oligo
uaccuccaccaccaccacc

SEQ ID NO: 35577 - RNA, 19 nt, Artificial Sequence
  Sense Oligo
gugguggugguggagguac

SEQ ID NO: 35578 - RNA, 19 nt, Artificial Sequence
  Antisense Oligo
guaccuccaccaccaccac

SEQ ID NO: 35579 - RNA, 19 nt, Artificial Sequence
  Sense Oligo
uggaggugauggcggucgu

SEQ ID NO: 35580 - RNA, 19 nt, Artificial Sequence
  Antisense Oligo
acgaccgccaucaccucca

SEQ ID NO: 35581 - RNA, 19 nt, Artificial Sequence
  Sense Oligo
auggagguggugguggugg

SEQ ID NO: 35582 - RNA, 19 nt, Artificial Sequence
  Antisense Oligo
ccaccaccaccaccuccau

SEQ ID NO: 35583 - RNA, 19 nt, Artificial Sequence
  Sense Oligo
uggaggugguggugguggu

SEQ ID NO: 35584 - RNA, 19 nt, Artificial Sequence
  Antisense Oligo
accaccaccaccaccucca

SEQ ID NO: 35585 - RNA, 19 nt, Artificial Sequence
  Sense Oligo
agguggugguggugguggu

SEQ ID NO: 35586 - RNA, 19 nt, Artificial Sequence
  Antisense Oligo
accaccaccaccaccaccu

SEQ ID NO: 35587 - RNA, 19 nt, Artificial Sequence
  Sense Oligo
ugguggugguggugguggu

SEQ ID NO: 35588 - RNA, 19 nt, Artificial Sequence
  Antisense Oligo
accaccaccaccaccacca

SEQ ID NO: 35589 - RNA, 19 nt, Artificial Sequence
  Sense Oligo
uggugguggugguggugga

SEQ ID NO: 35590 - RNA, 19 nt, Artificial Sequence
  Antisense Oligo
uccaccaccaccaccacca

SEQ ID NO: 35591 - RNA, 19 nt, Artificial Sequence
  Sense Oligo
uggugguggugguggaggu

SEQ ID NO: 35592 - RNA, 19 nt, Artificial Sequence
  Antisense Oligo
accuccaccaccaccacca

SEQ ID NO: 35593 - RNA, 19 nt, Artificial Sequence
  Sense Oligo
ggugguggugguggaggua

SEQ ID NO: 35594 - RNA, 19 nt, Artificial Sequence
  Antisense Oligo
uaccuccaccaccaccacc

SEQ ID NO: 35595 - RNA, 19 nt, Artificial Sequence
  Sense Oligo
gugguggugguggagguac

SEQ ID NO: 35596 - RNA, 19 nt, Artificial Sequence
  Antisense Oligo
guaccuccaccaccaccac

SEQ ID NO: 35597 - RNA, 19 nt, Artificial Sequence
  Sense Oligo
ggugaugguggugguggug

SEQ ID NO: 35598 - RNA, 19 nt, Artificial Sequence
  Antisense Oligo
caccaccaccaccaucacc

SEQ ID NO: 35599 - RNA, 19 nt, Artificial Sequence
  Sense Oligo
gugaugguggugguggugg

SEQ ID NO: 35600 - RNA, 19 nt, Artificial Sequence
  Antisense Oligo
ccaccaccaccaccaucac

SEQ ID NO: 35601 - RNA, 19 nt, Artificial Sequence
  Sense Oligo
ugaugguggugguggugga

SEQ ID NO: 35602 - RNA, 19 nt, Artificial Sequence
  Antisense Oligo
uccaccaccaccaccauca

SEQ ID NO: 35603 - RNA, 19 nt, Artificial Sequence
  Sense Oligo
gauggugguggugguggag

SEQ ID NO: 35604 - RNA, 19 nt, Artificial Sequence
  Antisense Oligo
cuccaccaccaccaccauc

SEQ ID NO: 35605 - RNA, 19 nt, Artificial Sequence
  Sense Oligo
auggugguggugguggagg

SEQ ID NO: 35606 - RNA, 19 nt, Artificial Sequence
  Antisense Oligo
ccuccaccaccaccaccau

SEQ ID NO: 35607 - RNA, 19 nt, Artificial Sequence
  Sense Oligo
uggugguggugguggaggu

SEQ ID NO: 35608 - RNA, 19 nt, Artificial Sequence
  Antisense Oligo
accuccaccaccaccacca

SEQ ID NO: 35609 - RNA, 19 nt, Artificial Sequence
  Sense Oligo
ggugguggugguggaggua

SEQ ID NO: 35610 - RNA, 19 nt, Artificial Sequence
  Antisense Oligo
uaccuccaccaccaccacc

SEQ ID NO: 35611 - RNA, 19 nt, Artificial Sequence
  Sense Oligo
gugguggugguggagguaa

SEQ ID NO: 35612 - RNA, 19 nt, Artificial Sequence
  Antisense Oligo
uuaccuccaccaccaccac

SEQ ID NO: 35613 - RNA, 19 nt, Artificial Sequence
  Sense Oligo
ugguggugguggagguaau

SEQ ID NO: 35614 - RNA, 19 nt, Artificial Sequence
  Antisense Oligo
auuaccuccaccaccacca

SEQ ID NO: 35615 - RNA, 19 nt, Artificial Sequence
  Sense Oligo
ggugaugguggugguggug

SEQ ID NO: 35616 - RNA, 19 nt, Artificial Sequence
  Antisense Oligo
caccaccaccaccaucacc

SEQ ID NO: 35617 - RNA, 19 nt, Artificial Sequence
  Sense Oligo
gugaugguggugguggugg

SEQ ID NO: 35618 - RNA, 19 nt, Artificial Sequence
  Antisense Oligo
ccaccaccaccaccaucac

SEQ ID NO: 35619 - RNA, 19 nt, Artificial Sequence
  Sense Oligo
ugauggugguggugguggu

SEQ ID NO: 35620 - RNA, 19 nt, Artificial Sequence
  Antisense Oligo
accaccaccaccaccauca

SEQ ID NO: 35621 - RNA, 19 nt, Artificial Sequence
  Sense Oligo
gauggugguggugguggug

SEQ ID NO: 35622 - RNA, 19 nt, Artificial Sequence
  Antisense Oligo
caccaccaccaccaccauc

SEQ ID NO: 35623 - RNA, 19 nt, Artificial Sequence
  Sense Oligo
auggugguggugguggugg

SEQ ID NO: 35624 - RNA, 19 nt, Artificial Sequence
  Antisense Oligo
ccaccaccaccaccaccau

SEQ ID NO: 35625 - RNA, 19 nt, Artificial Sequence
  Sense Oligo
ugguggugguggugguggu

SEQ ID NO: 35626 - RNA, 19 nt, Artificial Sequence
  Antisense Oligo
accaccaccaccaccacca

SEQ ID NO: 35627 - RNA, 19 nt, Artificial Sequence
  Sense Oligo
ugguggugguggugguggu

SEQ ID NO: 35628 - RNA, 19 nt, Artificial Sequence
  Antisense Oligo
accaccaccaccaccacca

SEQ ID NO: 35629 - RNA, 19 nt, Artificial Sequence
  Sense Oligo
uggugguggugguggugga

SEQ ID NO: 35630 - RNA, 19 nt, Artificial Sequence
  Antisense Oligo
uccaccaccaccaccacca

SEQ ID NO: 35631 - RNA, 19 nt, Artificial Sequence
  Sense Oligo
uggugguggugguggaggu

SEQ ID NO: 35632 - RNA, 19 nt, Artificial Sequence
  Antisense Oligo
accuccaccaccaccacca

SEQ ID NO: 35633 - RNA, 19 nt, Artificial Sequence
  Sense Oligo
ggugguggugguggaggua

SEQ ID NO: 35634 - RNA, 19 nt, Artificial Sequence
  Antisense Oligo
uaccuccaccaccaccacc

SEQ ID NO: 35635 - RNA, 19 nt, Artificial Sequence
  Sense Oligo
gugguggugguggagguaa

SEQ ID NO: 35636 - RNA, 19 nt, Artificial Sequence
  Antisense Oligo
uuaccuccaccaccaccac

SEQ ID NO: 35637 - RNA, 19 nt, Artificial Sequence
  Sense Oligo
ugguggugguggagguaau

SEQ ID NO: 35638 - RNA, 19 nt, Artificial Sequence
  Antisense Oligo
auuaccuccaccaccacca

SEQ ID NO: 35639 - RNA, 19 nt, Artificial Sequence
  Sense Oligo
ggugaagguguugguggag

SEQ ID NO: 35640 - RNA, 19 nt, Artificial Sequence
  Antisense Oligo
cuccaccaacaccuucacc

SEQ ID NO: 35641 - RNA, 19 nt, Artificial Sequence
  Sense Oligo
ugaagguguugguggaggu

SEQ ID NO: 35642 - RNA, 19 nt, Artificial Sequence
  Antisense Oligo
accuccaccaacaccuuca

SEQ ID NO: 35643 - RNA, 19 nt, Artificial Sequence
  Sense Oligo
gaagguguugguggaggua

SEQ ID NO: 35644 - RNA, 19 nt, Artificial Sequence
  Antisense Oligo
uaccuccaccaacaccuuc

SEQ ID NO: 35645 - RNA, 19 nt, Artificial Sequence
  Sense Oligo
agguguugguggagguacu

SEQ ID NO: 35646 - RNA, 19 nt, Artificial Sequence
  Antisense Oligo
aguaccuccaccaacaccu

SEQ ID NO: 35647 - RNA, 19 nt, Artificial Sequence
  Sense Oligo
gguguugguggagguacug

SEQ ID NO: 35648 - RNA, 19 nt, Artificial Sequence
  Antisense Oligo
caguaccuccaccaacacc

SEQ ID NO: 35649 - RNA, 19 nt, Artificial Sequence
  Sense Oligo
guguugguggagguacugg

SEQ ID NO: 35650 - RNA, 19 nt, Artificial Sequence
  Antisense Oligo
ccaguaccuccaccaacac

SEQ ID NO: 35651 - RNA, 19 nt, Artificial Sequence
  Sense Oligo
gaggugaugguggucgugu

SEQ ID NO: 35652 - RNA, 19 nt, Artificial Sequence
  Antisense Oligo
acacgaccaccaucaccuc

SEQ ID NO: 35653 - RNA, 19 nt, Artificial Sequence
  Sense Oligo
aggugaugguggucgugua

SEQ ID NO: 35654 - RNA, 19 nt, Artificial Sequence
  Antisense Oligo
uacacgaccaccaucaccu

SEQ ID NO: 35655 - RNA, 19 nt, Artificial Sequence
  Sense Oligo
ggugaugguggucguguag

SEQ ID NO: 35656 - RNA, 19 nt, Artificial Sequence
  Antisense Oligo
cuacacgaccaccaucacc

SEQ ID NO: 35657 - RNA, 19 nt, Artificial Sequence
  Sense Oligo
gugaugguggucguguagg

SEQ ID NO: 35658 - RNA, 19 nt, Artificial Sequence
  Antisense Oligo
ccuacacgaccaccaucac

SEQ ID NO: 35659 - RNA, 19 nt, Artificial Sequence
  Sense Oligo
ugaugguggucguguaggu

SEQ ID NO: 35660 - RNA, 19 nt, Artificial Sequence
  Antisense Oligo
accuacacgaccaccauca

SEQ ID NO: 35661 - RNA, 19 nt, Artificial Sequence
  Sense Oligo
gaugguggucguguaggug

SEQ ID NO: 35662 - RNA, 19 nt, Artificial Sequence
  Antisense Oligo
caccuacacgaccaccauc

SEQ ID NO: 35663 - RNA, 19 nt, Artificial Sequence
  Sense Oligo
augguggucguguagguga

SEQ ID NO: 35664 - RNA, 19 nt, Artificial Sequence
  Antisense Oligo
ucaccuacacgaccaccau

SEQ ID NO: 35665 - RNA, 19 nt, Artificial Sequence
  Sense Oligo
ugguggucguguaggugau

SEQ ID NO: 35666 - RNA, 19 nt, Artificial Sequence
  Antisense Oligo
aucaccuacacgaccacca

SEQ ID NO: 35667 - RNA, 19 nt, Artificial Sequence
  Sense Oligo
gguggucguguaggugaug

SEQ ID NO: 35668 - RNA, 19 nt, Artificial Sequence
  Antisense Oligo
caucaccuacacgaccacc

SEQ ID NO: 35669 - RNA, 19 nt, Artificial Sequence
  Sense Oligo
guggucguguaggugaugg

SEQ ID NO: 35670 - RNA, 19 nt, Artificial Sequence
  Antisense Oligo
ccaucaccuacacgaccac

SEQ ID NO: 35671 - RNA, 19 nt, Artificial Sequence
  Sense Oligo
uggucguguaggugauggu

SEQ ID NO: 35672 - RNA, 19 nt, Artificial Sequence
  Antisense Oligo
accaucaccuacacgacca

SEQ ID NO: 35673 - RNA, 19 nt, Artificial Sequence
  Sense Oligo
ggucguguaggugauggug

SEQ ID NO: 35674 - RNA, 19 nt, Artificial Sequence
  Antisense Oligo
caccaucaccuacacgacc

SEQ ID NO: 35675 - RNA, 19 nt, Artificial Sequence
  Sense Oligo
gucguguaggugauggugg

SEQ ID NO: 35676 - RNA, 19 nt, Artificial Sequence
  Antisense Oligo
ccaccaucaccuacacgac

SEQ ID NO: 35677 - RNA, 19 nt, Artificial Sequence
  Sense Oligo
ucguguaggugauggugga

SEQ ID NO: 35678 - RNA, 19 nt, Artificial Sequence
  Antisense Oligo
uccaccaucaccuacacga

SEQ ID NO: 35679 - RNA, 19 nt, Artificial Sequence
  Sense Oligo
cguguaggugaugguggag

SEQ ID NO: 35680 - RNA, 19 nt, Artificial Sequence
  Antisense Oligo
cuccaccaucaccuacacg

SEQ ID NO: 35681 - RNA, 19 nt, Artificial Sequence
  Sense Oligo
guguaggugaugguggagg

SEQ ID NO: 35682 - RNA, 19 nt, Artificial Sequence
  Antisense Oligo
ccuccaccaucaccuacac

SEQ ID NO: 35683 - RNA, 19 nt, Artificial Sequence
  Sense Oligo
auggugguggacgugaugg

SEQ ID NO: 35684 - RNA, 19 nt, Artificial Sequence
  Antisense Oligo
ccaucacguccaccaccau

SEQ ID NO: 35685 - RNA, 19 nt, Artificial Sequence
  Sense Oligo
gguggacgugaugguggag

SEQ ID NO: 35686 - RNA, 19 nt, Artificial Sequence
  Antisense Oligo
cuccaccaucacguccacc

SEQ ID NO: 35687 - RNA, 19 nt, Artificial Sequence
  Sense Oligo
ggugaugguggugguggug

SEQ ID NO: 35688 - RNA, 19 nt, Artificial Sequence
  Antisense Oligo
caccaccaccaccaucacc

SEQ ID NO: 35689 - RNA, 19 nt, Artificial Sequence
  Sense Oligo
gugaugguggugguggugg

SEQ ID NO: 35690 - RNA, 19 nt, Artificial Sequence
  Antisense Oligo
ccaccaccaccaccaucac

SEQ ID NO: 35691 - RNA, 19 nt, Artificial Sequence
  Sense Oligo
ugauggugguggugguggu

SEQ ID NO: 35692 - RNA, 19 nt, Artificial Sequence
  Antisense Oligo
accaccaccaccaccauca

SEQ ID NO: 35693 - RNA, 19 nt, Artificial Sequence
  Sense Oligo
gauggugguggugguggug

SEQ ID NO: 35694 - RNA, 19 nt, Artificial Sequence
  Antisense Oligo
caccaccaccaccaccauc

SEQ ID NO: 35695 - RNA, 19 nt, Artificial Sequence
  Sense Oligo
auggugguggugguggugg

SEQ ID NO: 35696 - RNA, 19 nt, Artificial Sequence
  Antisense Oligo
ccaccaccaccaccaccau

SEQ ID NO: 35697 - RNA, 19 nt, Artificial Sequence
  Sense Oligo
uggugguggugguggugga

SEQ ID NO: 35698 - RNA, 19 nt, Artificial Sequence
  Antisense Oligo
uccaccaccaccaccacca

SEQ ID NO: 35699 - RNA, 19 nt, Artificial Sequence
  Sense Oligo
uggugguggugguggaggu

SEQ ID NO: 35700 - RNA, 19 nt, Artificial Sequence
  Antisense Oligo
accuccaccaccaccacca

SEQ ID NO: 35701 - RNA, 19 nt, Artificial Sequence
  Sense Oligo
ggugguggugguggaggua

SEQ ID NO: 35702 - RNA, 19 nt, Artificial Sequence
  Antisense Oligo
uaccuccaccaccaccacc

SEQ ID NO: 35703 - RNA, 19 nt, Artificial Sequence
  Sense Oligo
gugguggugguggagguac

SEQ ID NO: 35704 - RNA, 19 nt, Artificial Sequence
  Antisense Oligo
guaccuccaccaccaccac

SEQ ID NO: 35705 - RNA, 19 nt, Artificial Sequence
  Sense Oligo
auggugguggacgugaugg

SEQ ID NO: 35706 - RNA, 19 nt, Artificial Sequence
  Antisense Oligo
ccaucacguccaccaccau

SEQ ID NO: 35707 - RNA, 19 nt, Artificial Sequence
  Sense Oligo
gguggacgugaugguggag

SEQ ID NO: 35708 - RNA, 19 nt, Artificial Sequence
  Antisense Oligo
cuccaccaucacguccacc

SEQ ID NO: 35709 - RNA, 19 nt, Artificial Sequence
  Sense Oligo
ggugaugguggugguggug

SEQ ID NO: 35710 - RNA, 19 nt, Artificial Sequence
  Antisense Oligo
caccaccaccaccaucacc

SEQ ID NO: 35711 - RNA, 19 nt, Artificial Sequence
  Sense Oligo
gugaugguggugguggugg

SEQ ID NO: 35712 - RNA, 19 nt, Artificial Sequence
  Antisense Oligo
ccaccaccaccaccaucac

SEQ ID NO: 35713 - RNA, 19 nt, Artificial Sequence
  Sense Oligo
ugauggugguggugguggu

SEQ ID NO: 35714 - RNA, 19 nt, Artificial Sequence
  Antisense Oligo
accaccaccaccaccauca

SEQ ID NO: 35715 - RNA, 19 nt, Artificial Sequence
  Sense Oligo
gauggugguggugguggug

SEQ ID NO: 35716 - RNA, 19 nt, Artificial Sequence
  Antisense Oligo
caccaccaccaccaccauc

SEQ ID NO: 35717 - RNA, 19 nt, Artificial Sequence
  Sense Oligo
auggugguggugguggugg

SEQ ID NO: 35718 - RNA, 19 nt, Artificial Sequence
  Antisense Oligo
ccaccaccaccaccaccau

SEQ ID NO: 35719 - RNA, 19 nt, Artificial Sequence
  Sense Oligo
uggugguggugguggugga

SEQ ID NO: 35720 - RNA, 19 nt, Artificial Sequence
  Antisense Oligo
uccaccaccaccaccacca

SEQ ID NO: 35721 - RNA, 19 nt, Artificial Sequence
  Sense Oligo
uggugguggugguggaggu

SEQ ID NO: 35722 - RNA, 19 nt, Artificial Sequence
  Antisense Oligo
accuccaccaccaccacca

SEQ ID NO: 35723 - RNA, 19 nt, Artificial Sequence
  Sense Oligo
ggugguggugguggaggua

SEQ ID NO: 35724 - RNA, 19 nt, Artificial Sequence
  Antisense Oligo
uaccuccaccaccaccacc

SEQ ID NO: 35725 - RNA, 19 nt, Artificial Sequence
  Sense Oligo
gugguggugguggagguaa

SEQ ID NO: 35726 - RNA, 19 nt, Artificial Sequence
  Antisense Oligo
uuaccuccaccaccaccac

SEQ ID NO: 35727 - RNA, 19 nt, Artificial Sequence
  Sense Oligo
ugguggugguggagguaau

SEQ ID NO: 35728 - RNA, 19 nt, Artificial Sequence
  Antisense Oligo
auuaccuccaccaccacca

SEQ ID NO: 35729 - RNA, 19 nt, Artificial Sequence
  Sense Oligo
ggugaugguggugguggug

SEQ ID NO: 35730 - RNA, 19 nt, Artificial Sequence
  Antisense Oligo
caccaccaccaccaucacc

SEQ ID NO: 35731 - RNA, 19 nt, Artificial Sequence
  Sense Oligo
ugguggugguggugauggu

SEQ ID NO: 35732 - RNA, 19 nt, Artificial Sequence
  Antisense Oligo
accaucaccaccaccacca

SEQ ID NO: 35733 - RNA, 19 nt, Artificial Sequence
  Sense Oligo
augguggagguacuagagg

SEQ ID NO: 35734 - RNA, 19 nt, Artificial Sequence
  Antisense Oligo
ccucuaguaccuccaccau

SEQ ID NO: 35735 - RNA, 19 nt, Artificial Sequence
  Sense Oligo
ugguggagguacuagaggu

SEQ ID NO: 35736 - RNA, 19 nt, Artificial Sequence
  Antisense Oligo
accucuaguaccuccacca

SEQ ID NO: 35737 - RNA, 19 nt, Artificial Sequence
  Sense Oligo
gguggagguacuagaggug

SEQ ID NO: 35738 - RNA, 19 nt, Artificial Sequence
  Antisense Oligo
caccucuaguaccuccacc

SEQ ID NO: 35739 - RNA, 19 nt, Artificial Sequence
  Sense Oligo
guggagguacuagagguga

SEQ ID NO: 35740 - RNA, 19 nt, Artificial Sequence
  Antisense Oligo
ucaccucuaguaccuccac

SEQ ID NO: 35741 - RNA, 19 nt, Artificial Sequence
  Sense Oligo
uggagguacuagaggugau

SEQ ID NO: 35742 - RNA, 19 nt, Artificial Sequence
  Antisense Oligo
aucaccucuaguaccucca

SEQ ID NO: 35743 - RNA, 19 nt, Artificial Sequence
  Sense Oligo
ggagguacuagaggugaug

SEQ ID NO: 35744 - RNA, 19 nt, Artificial Sequence
  Antisense Oligo
caucaccucuaguaccucc

SEQ ID NO: 35745 - RNA, 19 nt, Artificial Sequence
  Sense Oligo
gagguacuagaggugaugg

SEQ ID NO: 35746 - RNA, 19 nt, Artificial Sequence
  Antisense Oligo
ccaucaccucuaguaccuc

SEQ ID NO: 35747 - RNA, 19 nt, Artificial Sequence
  Sense Oligo
agguacuagaggugauggc

SEQ ID NO: 35748 - RNA, 19 nt, Artificial Sequence
  Antisense Oligo
gccaucaccucuaguaccu

SEQ ID NO: 35749 - RNA, 19 nt, Artificial Sequence
  Sense Oligo
gguacuagaggugauggcg

SEQ ID NO: 35750 - RNA, 19 nt, Artificial Sequence
  Antisense Oligo
cgccaucaccucuaguacc

SEQ ID NO: 35751 - RNA, 19 nt, Artificial Sequence
  Sense Oligo
guacuagaggugauggcgg

SEQ ID NO: 35752 - RNA, 19 nt, Artificial Sequence
  Antisense Oligo
ccgccaucaccucuaguac

SEQ ID NO: 35753 - RNA, 19 nt, Artificial Sequence
  Sense Oligo
uacuagaggugauggcggu

SEQ ID NO: 35754 - RNA, 19 nt, Artificial Sequence
  Antisense Oligo
accgccaucaccucuagua

SEQ ID NO: 35755 - RNA, 19 nt, Artificial Sequence
  Sense Oligo
acuagaggugauggcgguc

SEQ ID NO: 35756 - RNA, 19 nt, Artificial Sequence
  Antisense Oligo
gaccgccaucaccucuagu

SEQ ID NO: 35757 - RNA, 19 nt, Artificial Sequence
  Sense Oligo
cuagaggugauggcggucg

SEQ ID NO: 35758 - RNA, 19 nt, Artificial Sequence
  Antisense Oligo
cgaccgccaucaccucuag

SEQ ID NO: 35759 - RNA, 19 nt, Artificial Sequence
  Sense Oligo
uagaggugauggcggucgu

SEQ ID NO: 35760 - RNA, 19 nt, Artificial Sequence
  Antisense Oligo
acgaccgccaucaccucua

SEQ ID NO: 35761 - RNA, 19 nt, Artificial Sequence
  Sense Oligo
agaggugauggcggucgug

SEQ ID NO: 35762 - RNA, 19 nt, Artificial Sequence
  Antisense Oligo
cacgaccgccaucaccucu

SEQ ID NO: 35763 - RNA, 19 nt, Artificial Sequence
  Sense Oligo
ggugaugguggugguggug

SEQ ID NO: 35764 - RNA, 19 nt, Artificial Sequence
  Antisense Oligo
caccaccaccaccaucacc

SEQ ID NO: 35765 - RNA, 19 nt, Artificial Sequence
  Sense Oligo
gugaugguggugguggugg

SEQ ID NO: 35766 - RNA, 19 nt, Artificial Sequence
  Antisense Oligo
ccaccaccaccaccaucac

SEQ ID NO: 35767 - RNA, 19 nt, Artificial Sequence
  Sense Oligo
ugauggugguggugguggu

SEQ ID NO: 35768 - RNA, 19 nt, Artificial Sequence
  Antisense Oligo
accaccaccaccaccauca

SEQ ID NO: 35769 - RNA, 19 nt, Artificial Sequence
  Sense Oligo
gauggugguggugguggug

SEQ ID NO: 35770 - RNA, 19 nt, Artificial Sequence
  Antisense Oligo
caccaccaccaccaccauc

SEQ ID NO: 35771 - RNA, 19 nt, Artificial Sequence
  Sense Oligo
auggugguggugguggugg

SEQ ID NO: 35772 - RNA, 19 nt, Artificial Sequence
  Antisense Oligo
ccaccaccaccaccaccau

SEQ ID NO: 35773 - RNA, 19 nt, Artificial Sequence
  Sense Oligo
ugguggugguggugguggu

SEQ ID NO: 35774 - RNA, 19 nt, Artificial Sequence
  Antisense Oligo
accaccaccaccaccacca

SEQ ID NO: 35775 - RNA, 19 nt, Artificial Sequence
  Sense Oligo
gguggugguggugguggua

SEQ ID NO: 35776 - RNA, 19 nt, Artificial Sequence
  Antisense Oligo
uaccaccaccaccaccacc

SEQ ID NO: 35777 - RNA, 19 nt, Artificial Sequence
  Sense Oligo
gugguggugguggugguac

SEQ ID NO: 35778 - RNA, 19 nt, Artificial Sequence
  Antisense Oligo
guaccaccaccaccaccac

SEQ ID NO: 35779 - RNA, 19 nt, Artificial Sequence
  Sense Oligo
ugguggugguggugguacu

SEQ ID NO: 35780 - RNA, 19 nt, Artificial Sequence
  Antisense Oligo
aguaccaccaccaccacca

SEQ ID NO: 35781 - RNA, 19 nt, Artificial Sequence
  Sense Oligo
gguggugguggugguacug

SEQ ID NO: 35782 - RNA, 19 nt, Artificial Sequence
  Antisense Oligo
caguaccaccaccaccacc

SEQ ID NO: 35783 - RNA, 19 nt, Artificial Sequence
  Sense Oligo
guggugguggugguacugg

SEQ ID NO: 35784 - RNA, 19 nt, Artificial Sequence
  Antisense Oligo
ccaguaccaccaccaccac

SEQ ID NO: 35785 - RNA, 19 nt, Artificial Sequence
  Sense Oligo
gguggugguacuggaggug

SEQ ID NO: 35786 - RNA, 19 nt, Artificial Sequence
  Antisense Oligo
caccuccaguaccaccacc

SEQ ID NO: 35787 - RNA, 19 nt, Artificial Sequence
  Sense Oligo
ugguacuggaggugauggu

SEQ ID NO: 35788 - RNA, 19 nt, Artificial Sequence
  Antisense Oligo
accaucaccuccaguacca

SEQ ID NO: 35789 - RNA, 19 nt, Artificial Sequence
  Sense Oligo
ggugaugguggugguggug

SEQ ID NO: 35790 - RNA, 19 nt, Artificial Sequence
  Antisense Oligo
caccaccaccaccaucacc

SEQ ID NO: 35791 - RNA, 19 nt, Artificial Sequence
  Sense Oligo
gugaugguggugguggugg

SEQ ID NO: 35792 - RNA, 19 nt, Artificial Sequence
  Antisense Oligo
ccaccaccaccaccaucac

SEQ ID NO: 35793 - RNA, 19 nt, Artificial Sequence
  Sense Oligo
ugauggugguggugguggu

SEQ ID NO: 35794 - RNA, 19 nt, Artificial Sequence
  Antisense Oligo
accaccaccaccaccauca

SEQ ID NO: 35795 - RNA, 19 nt, Artificial Sequence
  Sense Oligo
gauggugguggugguggug

SEQ ID NO: 35796 - RNA, 19 nt, Artificial Sequence
  Antisense Oligo
caccaccaccaccaccauc

SEQ ID NO: 35797 - RNA, 19 nt, Artificial Sequence
  Sense Oligo
auggugguggugguggugg

SEQ ID NO: 35798 - RNA, 19 nt, Artificial Sequence
  Antisense Oligo
ccaccaccaccaccaccau

SEQ ID NO: 35799 - RNA, 19 nt, Artificial Sequence
  Sense Oligo
ugguggugguggugguggu

SEQ ID NO: 35800 - RNA, 19 nt, Artificial Sequence
  Antisense Oligo
accaccaccaccaccacca

SEQ ID NO: 35801 - RNA, 19 nt, Artificial Sequence
  Sense Oligo
gguggugguggugguggua

SEQ ID NO: 35802 - RNA, 19 nt, Artificial Sequence
  Antisense Oligo
uaccaccaccaccaccacc

SEQ ID NO: 35803 - RNA, 19 nt, Artificial Sequence
  Sense Oligo
gugguggugguggugguac

SEQ ID NO: 35804 - RNA, 19 nt, Artificial Sequence
  Antisense Oligo
guaccaccaccaccaccac

SEQ ID NO: 35805 - RNA, 19 nt, Artificial Sequence
  Sense Oligo
ugguggugguggugguacu

SEQ ID NO: 35806 - RNA, 19 nt, Artificial Sequence
  Antisense Oligo
aguaccaccaccaccacca

SEQ ID NO: 35807 - RNA, 19 nt, Artificial Sequence
  Sense Oligo
gguggugguggugguacug

SEQ ID NO: 35808 - RNA, 19 nt, Artificial Sequence
  Antisense Oligo
caguaccaccaccaccacc

SEQ ID NO: 35809 - RNA, 19 nt, Artificial Sequence
  Sense Oligo
guggugguggugguacugg

SEQ ID NO: 35810 - RNA, 19 nt, Artificial Sequence
  Antisense Oligo
ccaguaccaccaccaccac

SEQ ID NO: 35811 - RNA, 19 nt, Artificial Sequence
  Sense Oligo
gguggugguacuggaggug

SEQ ID NO: 35812 - RNA, 19 nt, Artificial Sequence
  Antisense Oligo
caccuccaguaccaccacc

SEQ ID NO: 35813 - RNA, 19 nt, Artificial Sequence
  Sense Oligo
ugguacuggaggugauggu

SEQ ID NO: 35814 - RNA, 19 nt, Artificial Sequence
  Antisense Oligo
accaucaccuccaguacca

SEQ ID NO: 35815 - RNA, 19 nt, Artificial Sequence
  Sense Oligo
auggagguggugguggugg

SEQ ID NO: 35816 - RNA, 19 nt, Artificial Sequence
  Antisense Oligo
ccaccaccaccaccuccau

SEQ ID NO: 35817 - RNA, 19 nt, Artificial Sequence
  Sense Oligo
uggaggugguggugguggu

SEQ ID NO: 35818 - RNA, 19 nt, Artificial Sequence
  Antisense Oligo
accaccaccaccaccucca

SEQ ID NO: 35819 - RNA, 19 nt, Artificial Sequence
  Sense Oligo
agguggugguggugguggu

SEQ ID NO: 35820 - RNA, 19 nt, Artificial Sequence
  Antisense Oligo
accaccaccaccaccaccu

SEQ ID NO: 35821 - RNA, 19 nt, Artificial Sequence
  Sense Oligo
ugguggugguggugguggu

SEQ ID NO: 35822 - RNA, 19 nt, Artificial Sequence
  Antisense Oligo
accaccaccaccaccacca

SEQ ID NO: 35823 - RNA, 19 nt, Artificial Sequence
  Sense Oligo
uggugguggugguggugga

SEQ ID NO: 35824 - RNA, 19 nt, Artificial Sequence
  Antisense Oligo
uccaccaccaccaccacca

SEQ ID NO: 35825 - RNA, 19 nt, Artificial Sequence
  Sense Oligo
uggugguggugguggaggu

SEQ ID NO: 35826 - RNA, 19 nt, Artificial Sequence
  Antisense Oligo
accuccaccaccaccacca

SEQ ID NO: 35827 - RNA, 19 nt, Artificial Sequence
  Sense Oligo
ggugguggugguggaggua

SEQ ID NO: 35828 - RNA, 19 nt, Artificial Sequence
  Antisense Oligo
uaccuccaccaccaccacc

SEQ ID NO: 35829 - RNA, 19 nt, Artificial Sequence
  Sense Oligo
gugguggugguggagguac

SEQ ID NO: 35830 - RNA, 19 nt, Artificial Sequence
  Antisense Oligo
guaccuccaccaccaccac

SEQ ID NO: 35831 - RNA, 19 nt, Artificial Sequence
  Sense Oligo
gaggugaugguggucgugg

SEQ ID NO: 35832 - RNA, 19 nt, Artificial Sequence
  Antisense Oligo
ccacgaccaccaucaccuc

SEQ ID NO: 35833 - RNA, 19 nt, Artificial Sequence
  Sense Oligo
gugaugguggucguggagg

SEQ ID NO: 35834 - RNA, 19 nt, Artificial Sequence
  Antisense Oligo
ccuccacgaccaccaucac

SEQ ID NO: 35835 - RNA, 19 nt, Artificial Sequence
  Sense Oligo
augguggucguggagguga

SEQ ID NO: 35836 - RNA, 19 nt, Artificial Sequence
  Antisense Oligo
ucaccuccacgaccaccau

SEQ ID NO: 35837 - RNA, 19 nt, Artificial Sequence
  Sense Oligo
gguggucguggaggugaug

SEQ ID NO: 35838 - RNA, 19 nt, Artificial Sequence
  Antisense Oligo
caucaccuccacgaccacc

SEQ ID NO: 35839 - RNA, 19 nt, Artificial Sequence
  Sense Oligo
guggucguggaggugaugg

SEQ ID NO: 35840 - RNA, 19 nt, Artificial Sequence
  Antisense Oligo
ccaucaccuccacgaccac

SEQ ID NO: 35841 - RNA, 19 nt, Artificial Sequence
  Sense Oligo
uggucguggaggugauggu

SEQ ID NO: 35842 - RNA, 19 nt, Artificial Sequence
  Antisense Oligo
accaucaccuccacgacca

SEQ ID NO: 35843 - RNA, 19 nt, Artificial Sequence
  Sense Oligo
ggugaugguggugguggug

SEQ ID NO: 35844 - RNA, 19 nt, Artificial Sequence
  Antisense Oligo
caccaccaccaccaucacc

SEQ ID NO: 35845 - RNA, 19 nt, Artificial Sequence
  Sense Oligo
gugaugguggugguggugg

SEQ ID NO: 35846 - RNA, 19 nt, Artificial Sequence
  Antisense Oligo
ccaccaccaccaccaucac

SEQ ID NO: 35847 - RNA, 19 nt, Artificial Sequence
  Sense Oligo
ugauggugguggugguggu

SEQ ID NO: 35848 - RNA, 19 nt, Artificial Sequence
  Antisense Oligo
accaccaccaccaccauca

SEQ ID NO: 35849 - RNA, 19 nt, Artificial Sequence
  Sense Oligo
gauggugguggugguggug

SEQ ID NO: 35850 - RNA, 19 nt, Artificial Sequence
  Antisense Oligo
caccaccaccaccaccauc

SEQ ID NO: 35851 - RNA, 19 nt, Artificial Sequence
  Sense Oligo
auggugguggugguggugg

SEQ ID NO: 35852 - RNA, 19 nt, Artificial Sequence
  Antisense Oligo
ccaccaccaccaccaccau

SEQ ID NO: 35853 - RNA, 19 nt, Artificial Sequence
  Sense Oligo
ugguggugguggugguggu

SEQ ID NO: 35854 - RNA, 19 nt, Artificial Sequence
  Antisense Oligo
accaccaccaccaccacca

SEQ ID NO: 35855 - RNA, 19 nt, Artificial Sequence
  Sense Oligo
gguggugguggugguggua

SEQ ID NO: 35856 - RNA, 19 nt, Artificial Sequence
  Antisense Oligo
uaccaccaccaccaccacc

SEQ ID NO: 35857 - RNA, 19 nt, Artificial Sequence
  Sense Oligo
gugguggugguggugguac

SEQ ID NO: 35858 - RNA, 19 nt, Artificial Sequence
  Antisense Oligo
guaccaccaccaccaccac

SEQ ID NO: 35859 - RNA, 19 nt, Artificial Sequence
  Sense Oligo
ugguggugguggugguacu

SEQ ID NO: 35860 - RNA, 19 nt, Artificial Sequence
  Antisense Oligo
aguaccaccaccaccacca

SEQ ID NO: 35861 - RNA, 19 nt, Artificial Sequence
  Sense Oligo
gguggugguggugguacug

SEQ ID NO: 35862 - RNA, 19 nt, Artificial Sequence
  Antisense Oligo
caguaccaccaccaccacc

SEQ ID NO: 35863 - RNA, 19 nt, Artificial Sequence
  Sense Oligo
guggugguggugguacugg

SEQ ID NO: 35864 - RNA, 19 nt, Artificial Sequence
  Antisense Oligo
ccaguaccaccaccaccac

SEQ ID NO: 35865 - RNA, 19 nt, Artificial Sequence
  Sense Oligo
gguggugguacuggaggug

SEQ ID NO: 35866 - RNA, 19 nt, Artificial Sequence
  Antisense Oligo
caccuccaguaccaccacc

SEQ ID NO: 35867 - RNA, 19 nt, Artificial Sequence
  Sense Oligo
ugguacuggaggugauggu

SEQ ID NO: 35868 - RNA, 19 nt, Artificial Sequence
  Antisense Oligo
accaucaccuccaguacca

SEQ ID NO: 35869 - RNA, 19 nt, Artificial Sequence
  Sense Oligo
uggaggugauggugguccg

SEQ ID NO: 35870 - RNA, 19 nt, Artificial Sequence
  Antisense Oligo
cggaccaccaucaccucca

SEQ ID NO: 35871 - RNA, 19 nt, Artificial Sequence
  Sense Oligo
ggaggugauggugguccgu

SEQ ID NO: 35872 - RNA, 19 nt, Artificial Sequence
  Antisense Oligo
acggaccaccaucaccucc

SEQ ID NO: 35873 - RNA, 19 nt, Artificial Sequence
  Sense Oligo
gaggugauggugguccgug

SEQ ID NO: 35874 - RNA, 19 nt, Artificial Sequence
  Antisense Oligo
cacggaccaccaucaccuc

SEQ ID NO: 35875 - RNA, 19 nt, Artificial Sequence
  Sense Oligo
aggugauggugguccgugg

SEQ ID NO: 35876 - RNA, 19 nt, Artificial Sequence
  Antisense Oligo
ccacggaccaccaucaccu

SEQ ID NO: 35877 - RNA, 19 nt, Artificial Sequence
  Sense Oligo
ggugauggugguccgugga

SEQ ID NO: 35878 - RNA, 19 nt, Artificial Sequence
  Antisense Oligo
uccacggaccaccaucacc

SEQ ID NO: 35879 - RNA, 19 nt, Artificial Sequence
  Sense Oligo
gugauggugguccguggag

SEQ ID NO: 35880 - RNA, 19 nt, Artificial Sequence
  Antisense Oligo
cuccacggaccaccaucac

SEQ ID NO: 35881 - RNA, 19 nt, Artificial Sequence
  Sense Oligo
ugauggugguccguggagg

SEQ ID NO: 35882 - RNA, 19 nt, Artificial Sequence
  Antisense Oligo
ccuccacggaccaccauca

SEQ ID NO: 35883 - RNA, 19 nt, Artificial Sequence
  Sense Oligo
gauggugguccguggaggu

SEQ ID NO: 35884 - RNA, 19 nt, Artificial Sequence
  Antisense Oligo
accuccacggaccaccauc

SEQ ID NO: 35885 - RNA, 19 nt, Artificial Sequence
  Sense Oligo
auggugguccguggaggug

SEQ ID NO: 35886 - RNA, 19 nt, Artificial Sequence
  Antisense Oligo
caccuccacggaccaccau

SEQ ID NO: 35887 - RNA, 19 nt, Artificial Sequence
  Sense Oligo
uggugguccguggagguga

SEQ ID NO: 35888 - RNA, 19 nt, Artificial Sequence
  Antisense Oligo
ucaccuccacggaccacca

SEQ ID NO: 35889 - RNA, 19 nt, Artificial Sequence
  Sense Oligo
ggugguccguggaggugau

SEQ ID NO: 35890 - RNA, 19 nt, Artificial Sequence
  Antisense Oligo
aucaccuccacggaccacc

SEQ ID NO: 35891 - RNA, 19 nt, Artificial Sequence
  Sense Oligo
gugguccguggaggugaug

SEQ ID NO: 35892 - RNA, 19 nt, Artificial Sequence
  Antisense Oligo
caucaccuccacggaccac

SEQ ID NO: 35893 - RNA, 19 nt, Artificial Sequence
  Sense Oligo
ugguccguggaggugaugg

SEQ ID NO: 35894 - RNA, 19 nt, Artificial Sequence
  Antisense Oligo
ccaucaccuccacggacca

SEQ ID NO: 35895 - RNA, 19 nt, Artificial Sequence
  Sense Oligo
gguccguggaggugauggu

SEQ ID NO: 35896 - RNA, 19 nt, Artificial Sequence
  Antisense Oligo
accaucaccuccacggacc

SEQ ID NO: 35897 - RNA, 19 nt, Artificial Sequence
  Sense Oligo
guccguggaggugauggug

SEQ ID NO: 35898 - RNA, 19 nt, Artificial Sequence
  Antisense Oligo
caccaucaccuccacggac

SEQ ID NO: 35899 - RNA, 19 nt, Artificial Sequence
  Sense Oligo
uccguggaggugauggugg

SEQ ID NO: 35900 - RNA, 19 nt, Artificial Sequence
  Antisense Oligo
ccaccaucaccuccacgga

SEQ ID NO: 35901 - RNA, 19 nt, Artificial Sequence
  Sense Oligo
uggugguggugguaaugga

SEQ ID NO: 35902 - RNA, 19 nt, Artificial Sequence
  Antisense Oligo
uccauuaccaccaccacca

SEQ ID NO: 35903 - RNA, 19 nt, Artificial Sequence
  Sense Oligo
guggugguaauggagguga

SEQ ID NO: 35904 - RNA, 19 nt, Artificial Sequence
  Antisense Oligo
ucaccuccauuaccaccac

SEQ ID NO: 35905 - RNA, 19 nt, Artificial Sequence
  Sense Oligo
gguggugguacuggaggug

SEQ ID NO: 35906 - RNA, 19 nt, Artificial Sequence
  Antisense Oligo
caccuccaguaccaccacc

SEQ ID NO: 35907 - RNA, 19 nt, Artificial Sequence
  Sense Oligo
ugaaggugaugguagaggu

SEQ ID NO: 35908 - RNA, 19 nt, Artificial Sequence
  Antisense Oligo
accucuaccaucaccuuca

SEQ ID NO: 35909 - RNA, 19 nt, Artificial Sequence
  Sense Oligo
gaaggugaugguagaggua

SEQ ID NO: 35910 - RNA, 19 nt, Artificial Sequence
  Antisense Oligo
uaccucuaccaucaccuuc

SEQ ID NO: 35911 - RNA, 19 nt, Artificial Sequence
  Sense Oligo
aaggugaugguagagguaa

SEQ ID NO: 35912 - RNA, 19 nt, Artificial Sequence
  Antisense Oligo
uuaccucuaccaucaccuu

SEQ ID NO: 35913 - RNA, 19 nt, Artificial Sequence
  Sense Oligo
aggugaugguagagguaau

SEQ ID NO: 35914 - RNA, 19 nt, Artificial Sequence
  Antisense Oligo
auuaccucuaccaucaccu

SEQ ID NO: 35915 - RNA, 19 nt, Artificial Sequence
  Sense Oligo
ggugaugguagagguaaug

SEQ ID NO: 35916 - RNA, 19 nt, Artificial Sequence
  Antisense Oligo
cauuaccucuaccaucacc

SEQ ID NO: 35917 - RNA, 19 nt, Artificial Sequence
  Sense Oligo
gugaugguagagguaaugg

SEQ ID NO: 35918 - RNA, 19 nt, Artificial Sequence
  Antisense Oligo
ccauuaccucuaccaucac

SEQ ID NO: 35919 - RNA, 19 nt, Artificial Sequence
  Sense Oligo
ugaugguagagguaaugga

SEQ ID NO: 35920 - RNA, 19 nt, Artificial Sequence
  Antisense Oligo
uccauuaccucuaccauca

SEQ ID NO: 35921 - RNA, 19 nt, Artificial Sequence
  Sense Oligo
augguagagguaauggaag

SEQ ID NO: 35922 - RNA, 19 nt, Artificial Sequence
  Antisense Oligo
cuuccauuaccucuaccau

SEQ ID NO: 35923 - RNA, 19 nt, Artificial Sequence
  Sense Oligo
ugguagagguaauggaagu

SEQ ID NO: 35924 - RNA, 19 nt, Artificial Sequence
  Antisense Oligo
acuuccauuaccucuacca

SEQ ID NO: 35925 - RNA, 19 nt, Artificial Sequence
  Sense Oligo
gguagagguaauggaagug

SEQ ID NO: 35926 - RNA, 19 nt, Artificial Sequence
  Antisense Oligo
cacuuccauuaccucuacc

SEQ ID NO: 35927 - RNA, 19 nt, Artificial Sequence
  Sense Oligo
guagagguaauggaaguga

SEQ ID NO: 35928 - RNA, 19 nt, Artificial Sequence
  Antisense Oligo
ucacuuccauuaccucuac

SEQ ID NO: 35929 - RNA, 19 nt, Artificial Sequence
  Sense Oligo
agguaauggaagugauggu

SEQ ID NO: 35930 - RNA, 19 nt, Artificial Sequence
  Antisense Oligo
accaucacuuccauuaccu

SEQ ID NO: 35931 - RNA, 19 nt, Artificial Sequence
  Sense Oligo
gguaauggaagugauggug

SEQ ID NO: 35932 - RNA, 19 nt, Artificial Sequence
  Antisense Oligo
caccaucacuuccauuacc

SEQ ID NO: 35933 - RNA, 19 nt, Artificial Sequence
  Sense Oligo
guaauggaagugauggugg

SEQ ID NO: 35934 - RNA, 19 nt, Artificial Sequence
  Antisense Oligo
ccaccaucacuuccauuac

SEQ ID NO: 35935 - RNA, 19 nt, Artificial Sequence
  Sense Oligo
uaauggaagugauggugga

SEQ ID NO: 35936 - RNA, 19 nt, Artificial Sequence
  Antisense Oligo
uccaccaucacuuccauua

SEQ ID NO: 35937 - RNA, 19 nt, Artificial Sequence
  Sense Oligo
aauggaagugaugguggag

SEQ ID NO: 35938 - RNA, 19 nt, Artificial Sequence
  Antisense Oligo
cuccaccaucacuuccauu

SEQ ID NO: 35939 - RNA, 19 nt, Artificial Sequence
  Sense Oligo
auggaagugaugguggagg

SEQ ID NO: 35940 - RNA, 19 nt, Artificial Sequence
  Antisense Oligo
ccuccaccaucacuuccau

SEQ ID NO: 35941 - RNA, 19 nt, Artificial Sequence
  Sense Oligo
uggaagugaugguggaggu

SEQ ID NO: 35942 - RNA, 19 nt, Artificial Sequence
  Antisense Oligo
accuccaccaucacuucca

SEQ ID NO: 35943 - RNA, 19 nt, Artificial Sequence
  Sense Oligo
ggaagugaugguggaggua

SEQ ID NO: 35944 - RNA, 19 nt, Artificial Sequence
  Antisense Oligo
uaccuccaccaucacuucc

SEQ ID NO: 35945 - RNA, 19 nt, Artificial Sequence
  Sense Oligo
gaagugaugguggagguac

SEQ ID NO: 35946 - RNA, 19 nt, Artificial Sequence
  Antisense Oligo
guaccuccaccaucacuuc

SEQ ID NO: 35947 - RNA, 19 nt, Artificial Sequence
  Sense Oligo
aagugaugguggagguacu

SEQ ID NO: 35948 - RNA, 19 nt, Artificial Sequence
  Antisense Oligo
aguaccuccaccaucacuu

SEQ ID NO: 35949 - RNA, 19 nt, Artificial Sequence
  Sense Oligo
agugaugguggagguacug

SEQ ID NO: 35950 - RNA, 19 nt, Artificial Sequence
  Antisense Oligo
caguaccuccaccaucacu

SEQ ID NO: 35951 - RNA, 19 nt, Artificial Sequence
  Sense Oligo
uggaggugacaguggugau

SEQ ID NO: 35952 - RNA, 19 nt, Artificial Sequence
  Antisense Oligo
aucaccacugucaccucca

SEQ ID NO: 35953 - RNA, 19 nt, Artificial Sequence
  Sense Oligo
gaggugacaguggugaugc

SEQ ID NO: 35954 - RNA, 19 nt, Artificial Sequence
  Antisense Oligo
gcaucaccacugucaccuc

SEQ ID NO: 35955 - RNA, 19 nt, Artificial Sequence
  Sense Oligo
gaugcugguggugguggug

SEQ ID NO: 35956 - RNA, 19 nt, Artificial Sequence
  Antisense Oligo
caccaccaccaccagcauc

SEQ ID NO: 35957 - RNA, 19 nt, Artificial Sequence
  Sense Oligo
augcugguggugguggugg

SEQ ID NO: 35958 - RNA, 19 nt, Artificial Sequence
  Antisense Oligo
ccaccaccaccaccagcau

SEQ ID NO: 35959 - RNA, 19 nt, Artificial Sequence
  Sense Oligo
ugcuggugguggugguggu

SEQ ID NO: 35960 - RNA, 19 nt, Artificial Sequence
  Antisense Oligo
accaccaccaccaccagca

SEQ ID NO: 35961 - RNA, 19 nt, Artificial Sequence
  Sense Oligo
ugguggugguggugguggu

SEQ ID NO: 35962 - RNA, 19 nt, Artificial Sequence
  Antisense Oligo
accaccaccaccaccacca

SEQ ID NO: 35963 - RNA, 19 nt, Artificial Sequence
  Sense Oligo
ugguggugguggugguggu

SEQ ID NO: 35964 - RNA, 19 nt, Artificial Sequence
  Antisense Oligo
accaccaccaccaccacca

SEQ ID NO: 35965 - RNA, 19 nt, Artificial Sequence
  Sense Oligo
ugguggugguggugguggu

SEQ ID NO: 35966 - RNA, 19 nt, Artificial Sequence
  Antisense Oligo
accaccaccaccaccacca

SEQ ID NO: 35967 - RNA, 19 nt, Artificial Sequence
  Sense Oligo
ugguggugguggugguggu

SEQ ID NO: 35968 - RNA, 19 nt, Artificial Sequence
  Antisense Oligo
accaccaccaccaccacca

SEQ ID NO: 35969 - RNA, 19 nt, Artificial Sequence
  Sense Oligo
ugguggugguggugguggu

SEQ ID NO: 35970 - RNA, 19 nt, Artificial Sequence
  Antisense Oligo
accaccaccaccaccacca

SEQ ID NO: 35971 - RNA, 19 nt, Artificial Sequence
  Sense Oligo
uggugguggugguggugga

SEQ ID NO: 35972 - RNA, 19 nt, Artificial Sequence
  Antisense Oligo
uccaccaccaccaccacca

SEQ ID NO: 35973 - RNA, 19 nt, Artificial Sequence
  Sense Oligo
uggugguggugguggaggu

SEQ ID NO: 35974 - RNA, 19 nt, Artificial Sequence
  Antisense Oligo
accuccaccaccaccacca

SEQ ID NO: 35975 - RNA, 19 nt, Artificial Sequence
  Sense Oligo
uggaggugguggugguggu

SEQ ID NO: 35976 - RNA, 19 nt, Artificial Sequence
  Antisense Oligo
accaccaccaccaccucca

SEQ ID NO: 35977 - RNA, 19 nt, Artificial Sequence
  Sense Oligo
agguggugguggugguggu

SEQ ID NO: 35978 - RNA, 19 nt, Artificial Sequence
  Antisense Oligo
accaccaccaccaccaccu

SEQ ID NO: 35979 - RNA, 19 nt, Artificial Sequence
  Sense Oligo
ugguggugguggugguggu

SEQ ID NO: 35980 - RNA, 19 nt, Artificial Sequence
  Antisense Oligo
accaccaccaccaccacca

SEQ ID NO: 35981 - RNA, 19 nt, Artificial Sequence
  Sense Oligo
ugguggugguggugguggu

SEQ ID NO: 35982 - RNA, 19 nt, Artificial Sequence
  Antisense Oligo
accaccaccaccaccacca

SEQ ID NO: 35983 - RNA, 19 nt, Artificial Sequence
  Sense Oligo
gugguggugguggugguga

SEQ ID NO: 35984 - RNA, 19 nt, Artificial Sequence
  Antisense Oligo
ucaccaccaccaccaccac

SEQ ID NO: 35985 - RNA, 19 nt, Artificial Sequence
  Sense Oligo
uggugguggugguggugau

SEQ ID NO: 35986 - RNA, 19 nt, Artificial Sequence
  Antisense Oligo
aucaccaccaccaccacca

SEQ ID NO: 35987 - RNA, 19 nt, Artificial Sequence
  Sense Oligo
ggugguggugguggugaug

SEQ ID NO: 35988 - RNA, 19 nt, Artificial Sequence
  Antisense Oligo
caucaccaccaccaccacc

SEQ ID NO: 35989 - RNA, 19 nt, Artificial Sequence
  Sense Oligo
gugguggugguggugaugg

SEQ ID NO: 35990 - RNA, 19 nt, Artificial Sequence
  Antisense Oligo
ccaucaccaccaccaccac

SEQ ID NO: 35991 - RNA, 19 nt, Artificial Sequence
  Sense Oligo
ugguggugguggugauggu

SEQ ID NO: 35992 - RNA, 19 nt, Artificial Sequence
  Antisense Oligo
accaucaccaccaccacca

SEQ ID NO: 35993 - RNA, 19 nt, Artificial Sequence
  Sense Oligo
auggagguggugguggugg

SEQ ID NO: 35994 - RNA, 19 nt, Artificial Sequence
  Antisense Oligo
ccaccaccaccaccuccau

SEQ ID NO: 35995 - RNA, 19 nt, Artificial Sequence
  Sense Oligo
uggaggugacaguggugau

SEQ ID NO: 35996 - RNA, 19 nt, Artificial Sequence
  Antisense Oligo
aucaccacugucaccucca

SEQ ID NO: 35997 - RNA, 19 nt, Artificial Sequence
  Sense Oligo
gaggugacaguggugaugc

SEQ ID NO: 35998 - RNA, 19 nt, Artificial Sequence
  Antisense Oligo
gcaucaccacugucaccuc

SEQ ID NO: 35999 - RNA, 19 nt, Artificial Sequence
  Sense Oligo
gagguacuggaggucaugg

SEQ ID NO: 36000 - RNA, 19 nt, Artificial Sequence
  Antisense Oligo
ccaugaccuccaguaccuc

SEQ ID NO: 36001 - RNA, 19 nt, Artificial Sequence
  Sense Oligo
agguacuggaggucauggu

SEQ ID NO: 36002 - RNA, 19 nt, Artificial Sequence
  Antisense Oligo
accaugaccuccaguaccu

SEQ ID NO: 36003 - RNA, 19 nt, Artificial Sequence
  Sense Oligo
gguacuggaggucauggug

SEQ ID NO: 36004 - RNA, 19 nt, Artificial Sequence
  Antisense Oligo
caccaugaccuccaguacc

SEQ ID NO: 36005 - RNA, 19 nt, Artificial Sequence
  Sense Oligo
guacuggaggucauggugg

SEQ ID NO: 36006 - RNA, 19 nt, Artificial Sequence
  Antisense Oligo
ccaccaugaccuccaguac

SEQ ID NO: 36007 - RNA, 19 nt, Artificial Sequence
  Sense Oligo
uacuggaggucaugguggu

SEQ ID NO: 36008 - RNA, 19 nt, Artificial Sequence
  Antisense Oligo
accaccaugaccuccagua

SEQ ID NO: 36009 - RNA, 19 nt, Artificial Sequence
  Sense Oligo
uggaggucauggugguggu

SEQ ID NO: 36010 - RNA, 19 nt, Artificial Sequence
  Antisense Oligo
accaccaccaugaccucca

SEQ ID NO: 36011 - RNA, 19 nt, Artificial Sequence
  Sense Oligo
ggaggucauggugguggug

SEQ ID NO: 36012 - RNA, 19 nt, Artificial Sequence
  Antisense Oligo
caccaccaccaugaccucc

SEQ ID NO: 36013 - RNA, 19 nt, Artificial Sequence
  Sense Oligo
gaggucauggugguggugg

SEQ ID NO: 36014 - RNA, 19 nt, Artificial Sequence
  Antisense Oligo
ccaccaccaccaugaccuc

SEQ ID NO: 36015 - RNA, 19 nt, Artificial Sequence
  Sense Oligo
aggucauggugguggugga

SEQ ID NO: 36016 - RNA, 19 nt, Artificial Sequence
  Antisense Oligo
uccaccaccaccaugaccu

SEQ ID NO: 36017 - RNA, 19 nt, Artificial Sequence
  Sense Oligo
ggucaugguggugguggag

SEQ ID NO: 36018 - RNA, 19 nt, Artificial Sequence
  Antisense Oligo
cuccaccaccaccaugacc

SEQ ID NO: 36019 - RNA, 19 nt, Artificial Sequence
  Sense Oligo
gucaugguggugguggagg

SEQ ID NO: 36020 - RNA, 19 nt, Artificial Sequence
  Antisense Oligo
ccuccaccaccaccaugac

SEQ ID NO: 36021 - RNA, 19 nt, Artificial Sequence
  Sense Oligo
ucaugguggugguggaggu

SEQ ID NO: 36022 - RNA, 19 nt, Artificial Sequence
  Antisense Oligo
accuccaccaccaccauga

SEQ ID NO: 36023 - RNA, 19 nt, Artificial Sequence
  Sense Oligo
gguggaggugauaguggug

SEQ ID NO: 36024 - RNA, 19 nt, Artificial Sequence
  Antisense Oligo
caccacuaucaccuccacc

SEQ ID NO: 36025 - RNA, 19 nt, Artificial Sequence
  Sense Oligo
gugauaguggugaagguga

SEQ ID NO: 36026 - RNA, 19 nt, Artificial Sequence
  Antisense Oligo
ucaccuucaccacuaucac

SEQ ID NO: 36027 - RNA, 19 nt, Artificial Sequence
  Sense Oligo
gauaguggugaaggugaug

SEQ ID NO: 36028 - RNA, 19 nt, Artificial Sequence
  Antisense Oligo
caucaccuucaccacuauc

SEQ ID NO: 36029 - RNA, 19 nt, Artificial Sequence
  Sense Oligo
auaguggugaaggugaugg

SEQ ID NO: 36030 - RNA, 19 nt, Artificial Sequence
  Antisense Oligo
ccaucaccuucaccacuau

SEQ ID NO: 36031 - RNA, 19 nt, Artificial Sequence
  Sense Oligo
ggugaaggugauggaggug

SEQ ID NO: 36032 - RNA, 19 nt, Artificial Sequence
  Antisense Oligo
caccuccaucaccuucacc

SEQ ID NO: 36033 - RNA, 19 nt, Artificial Sequence
  Sense Oligo
gugaaggugauggaggugg

SEQ ID NO: 36034 - RNA, 19 nt, Artificial Sequence
  Antisense Oligo
ccaccuccaucaccuucac

SEQ ID NO: 36035 - RNA, 19 nt, Artificial Sequence
  Sense Oligo
ugaaggugauggagguggu

SEQ ID NO: 36036 - RNA, 19 nt, Artificial Sequence
  Antisense Oligo
accaccuccaucaccuuca

SEQ ID NO: 36037 - RNA, 19 nt, Artificial Sequence
  Sense Oligo
ggaggugguggagguuaug

SEQ ID NO: 36038 - RNA, 19 nt, Artificial Sequence
  Antisense Oligo
cauaaccuccaccaccucc

SEQ ID NO: 36039 - RNA, 19 nt, Artificial Sequence
  Sense Oligo
gaggugguggagguuaugg

SEQ ID NO: 36040 - RNA, 19 nt, Artificial Sequence
  Antisense Oligo
ccauaaccuccaccaccuc

SEQ ID NO: 36041 - RNA, 19 nt, Artificial Sequence
  Sense Oligo
aggugguggagguuaugga

SEQ ID NO: 36042 - RNA, 19 nt, Artificial Sequence
  Antisense Oligo
uccauaaccuccaccaccu

SEQ ID NO: 36043 - RNA, 19 nt, Artificial Sequence
  Sense Oligo
agauaauggugguggugga

SEQ ID NO: 36044 - RNA, 19 nt, Artificial Sequence
  Antisense Oligo
uccaccaccaccauuaucu

SEQ ID NO: 36045 - RNA, 19 nt, Artificial Sequence
  Sense Oligo
gauaaugguggugguggag

SEQ ID NO: 36046 - RNA, 19 nt, Artificial Sequence
  Antisense Oligo
cuccaccaccaccauuauc

SEQ ID NO: 36047 - RNA, 19 nt, Artificial Sequence
  Sense Oligo
auaaugguggugguggagg

SEQ ID NO: 36048 - RNA, 19 nt, Artificial Sequence
  Antisense Oligo
ccuccaccaccaccauuau

SEQ ID NO: 36049 - RNA, 19 nt, Artificial Sequence
  Sense Oligo
uaaugguggugguggaggu

SEQ ID NO: 36050 - RNA, 19 nt, Artificial Sequence
  Antisense Oligo
accuccaccaccaccauua

SEQ ID NO: 36051 - RNA, 19 nt, Artificial Sequence
  Sense Oligo
aaugguggugguggaggug

SEQ ID NO: 36052 - RNA, 19 nt, Artificial Sequence
  Antisense Oligo
caccuccaccaccaccauu

SEQ ID NO: 36053 - RNA, 19 nt, Artificial Sequence
  Sense Oligo
ugguggaggugauagauau

SEQ ID NO: 36054 - RNA, 19 nt, Artificial Sequence
  Antisense Oligo
auaucuaucaccuccacca

SEQ ID NO: 36055 - RNA, 19 nt, Artificial Sequence
  Sense Oligo
gguggaggugauagauauu

SEQ ID NO: 36056 - RNA, 19 nt, Artificial Sequence
  Antisense Oligo
aauaucuaucaccuccacc

SEQ ID NO: 36057 - RNA, 19 nt, Artificial Sequence
  Sense Oligo
guggaggugauagauauuu

SEQ ID NO: 36058 - RNA, 19 nt, Artificial Sequence
  Antisense Oligo
aaauaucuaucaccuccac

SEQ ID NO: 36059 - RNA, 19 nt, Artificial Sequence
  Sense Oligo
uggaggugauagauauuug

SEQ ID NO: 36060 - RNA, 19 nt, Artificial Sequence
  Antisense Oligo
caaauaucuaucaccucca

SEQ ID NO: 36061 - RNA, 19 nt, Artificial Sequence
  Sense Oligo
ggaggugauagauauuuga

SEQ ID NO: 36062 - RNA, 19 nt, Artificial Sequence
  Antisense Oligo
ucaaauaucuaucaccucc

SEQ ID NO: 36063 - RNA, 19 nt, Artificial Sequence
  Sense Oligo
cacuauggcugaugccugu

SEQ ID NO: 36064 - RNA, 19 nt, Artificial Sequence
  Antisense Oligo
acaggcaucagccauagug

SEQ ID NO: 36065 - RNA, 19 nt, Artificial Sequence
  Sense Oligo
cccaacucuuuaggaagcc

SEQ ID NO: 36066 - RNA, 19 nt, Artificial Sequence
  Antisense Oligo
ggcuuccuaaagaguuggg

SEQ ID NO: 36067 - RNA, 19 nt, Artificial Sequence
  Sense Oligo
ccaacucuuuaggaagccu

SEQ ID NO: 36068 - RNA, 19 nt, Artificial Sequence
  Antisense Oligo
aggcuuccuaaagaguugg

SEQ ID NO: 36069 - RNA, 19 nt, Artificial Sequence
  Sense Oligo
aggaagccuagguggaagg

SEQ ID NO: 36070 - RNA, 19 nt, Artificial Sequence
  Antisense Oligo
ccuuccaccuaggcuuccu

SEQ ID NO: 36071 - RNA, 19 nt, Artificial Sequence
  Sense Oligo
ccuagguggaaggguggcu

SEQ ID NO: 36072 - RNA, 19 nt, Artificial Sequence
  Antisense Oligo
agccacccuuccaccuagg

SEQ ID NO: 36073 - RNA, 19 nt, Artificial Sequence
  Sense Oligo
cuagguggaaggguggcuu

SEQ ID NO: 36074 - RNA, 19 nt, Artificial Sequence
  Antisense Oligo
aagccacccuuccaccuag

SEQ ID NO: 36075 - RNA, 19 nt, Artificial Sequence
  Sense Oligo
uagguggaaggguggcuug

SEQ ID NO: 36076 - RNA, 19 nt, Artificial Sequence
  Antisense Oligo
caagccacccuuccaccua

SEQ ID NO: 36077 - RNA, 19 nt, Artificial Sequence
  Sense Oligo
gucagggcugcagugagcu

SEQ ID NO: 36078 - RNA, 19 nt, Artificial Sequence
  Antisense Oligo
agcucacugcagcccugac

SEQ ID NO: 36079 - RNA, 19 nt, Artificial Sequence
  Sense Oligo
ucagggcugcagugagcua

SEQ ID NO: 36080 - RNA, 19 nt, Artificial Sequence
  Antisense Oligo
uagcucacugcagcccuga

SEQ ID NO: 36081 - RNA, 19 nt, Artificial Sequence
  Sense Oligo
cagggcugcagugagcuau

SEQ ID NO: 36082 - RNA, 19 nt, Artificial Sequence
  Antisense Oligo
auagcucacugcagcccug

SEQ ID NO: 36083 - RNA, 19 nt, Artificial Sequence
  Sense Oligo
agggcugcagugagcuaug

SEQ ID NO: 36084 - RNA, 19 nt, Artificial Sequence
  Antisense Oligo
cauagcucacugcagcccu

SEQ ID NO: 36085 - RNA, 19 nt, Artificial Sequence
  Sense Oligo
uacagugcauuuucaugug

SEQ ID NO: 36086 - RNA, 19 nt, Artificial Sequence
  Antisense Oligo
cacaugaaaaugcacugua

SEQ ID NO: 36087 - RNA, 19 nt, Artificial Sequence
  Sense Oligo
acagugcauuuucaugugu

SEQ ID NO: 36088 - RNA, 19 nt, Artificial Sequence
  Antisense Oligo
acacaugaaaaugcacugu

SEQ ID NO: 36089 - RNA, 19 nt, Artificial Sequence
  Sense Oligo
aaucugaaucaaaucaugg

SEQ ID NO: 36090 - RNA, 19 nt, Artificial Sequence
  Antisense Oligo
ccaugauuugauucagauu

SEQ ID NO: 36091 - RNA, 19 nt, Artificial Sequence
  Sense Oligo
aucugaaucaaaucauggg

SEQ ID NO: 36092 - RNA, 19 nt, Artificial Sequence
  Antisense Oligo
cccaugauuugauucagau

SEQ ID NO: 36093 - RNA, 19 nt, Artificial Sequence
  Sense Oligo
caaaucaggucaaaagaca

SEQ ID NO: 36094 - RNA, 19 nt, Artificial Sequence
  Antisense Oligo
ugucuuuugaccugauuug

SEQ ID NO: 36095 - RNA, 19 nt, Artificial Sequence
  Sense Oligo
aaaucaggucaaaagacag

SEQ ID NO: 36096 - RNA, 19 nt, Artificial Sequence
  Antisense Oligo
cugucuuuugaccugauuu

SEQ ID NO: 36097 - RNA, 19 nt, Artificial Sequence
  Sense Oligo
aaucaggucaaaagacagu

SEQ ID NO: 36098 - RNA, 19 nt, Artificial Sequence
  Antisense Oligo
acugucuuuugaccugauu

SEQ ID NO: 36099 - RNA, 19 nt, Artificial Sequence
  Sense Oligo
aucaggucaaaagacaguu

SEQ ID NO: 36100 - RNA, 19 nt, Artificial Sequence
  Antisense Oligo
aacugucuuuugaccugau

SEQ ID NO: 36101 - RNA, 19 nt, Artificial Sequence
  Sense Oligo
ucaggucaaaagacaguuu

SEQ ID NO: 36102 - RNA, 19 nt, Artificial Sequence
  Antisense Oligo
aaacugucuuuugaccuga

SEQ ID NO: 36103 - RNA, 19 nt, Artificial Sequence
  Sense Oligo
caggucaaaagacaguuua

SEQ ID NO: 36104 - RNA, 19 nt, Artificial Sequence
  Antisense Oligo
uaaacugucuuuugaccug

SEQ ID NO: 36105 - RNA, 19 nt, Artificial Sequence
  Sense Oligo
agaugugauaaguaaaugc

SEQ ID NO: 36106 - RNA, 19 nt, Artificial Sequence
  Antisense Oligo
gcauuuacuuaucacaucu

SEQ ID NO: 36107 - RNA, 19 nt, Artificial Sequence
  Sense Oligo
agacgugauaaguaaguac

SEQ ID NO: 36108 - RNA, 19 nt, Artificial Sequence
  Antisense Oligo
guacuuacuuaucacgucu

SEQ ID NO: 36109 - RNA, 19 nt, Artificial Sequence
  Sense Oligo
gacgugauaaguaaguaca

SEQ ID NO: 36110 - RNA, 19 nt, Artificial Sequence
  Antisense Oligo
uguacuuacuuaucacguc

SEQ ID NO: 36111 - RNA, 19 nt, Artificial Sequence
  Sense Oligo
acgugauaaguaaguacag

SEQ ID NO: 36112 - RNA, 19 nt, Artificial Sequence
  Antisense Oligo
cuguacuuacuuaucacgu

SEQ ID NO: 36113 - RNA, 19 nt, Artificial Sequence
  Sense Oligo
cgugauaaguaaguacagc

SEQ ID NO: 36114 - RNA, 19 nt, Artificial Sequence
  Antisense Oligo
gcuguacuuacuuaucacg

SEQ ID NO: 36115 - RNA, 19 nt, Artificial Sequence
  Sense Oligo
ugugucccaggaggaucua

SEQ ID NO: 36116 - RNA, 19 nt, Artificial Sequence
  Antisense Oligo
uagauccuccugggacaca

SEQ ID NO: 36117 - RNA, 19 nt, Artificial Sequence
  Sense Oligo
gugucccaggaggaucuag

SEQ ID NO: 36118 - RNA, 19 nt, Artificial Sequence
  Antisense Oligo
cuagauccuccugggacac

SEQ ID NO: 36119 - RNA, 19 nt, Artificial Sequence
  Sense Oligo
ucccaggaggaucuaggau

SEQ ID NO: 36120 - RNA, 19 nt, Artificial Sequence
  Antisense Oligo
auccuagauccuccuggga

SEQ ID NO: 36121 - RNA, 19 nt, Artificial Sequence
  Sense Oligo
uaggauccagucaggacag

SEQ ID NO: 36122 - RNA, 19 nt, Artificial Sequence
  Antisense Oligo
cuguccugacuggauccua

SEQ ID NO: 36123 - RNA, 19 nt, Artificial Sequence
  Sense Oligo
aggauccagucaggacagg

SEQ ID NO: 36124 - RNA, 19 nt, Artificial Sequence
  Antisense Oligo
ccuguccugacuggauccu

SEQ ID NO: 36125 - RNA, 19 nt, Artificial Sequence
  Sense Oligo
ggauccagucaggacagga

SEQ ID NO: 36126 - RNA, 19 nt, Artificial Sequence
  Antisense Oligo
uccuguccugacuggaucc

SEQ ID NO: 36127 - RNA, 19 nt, Artificial Sequence
  Sense Oligo
gauccagucaggacaggag

SEQ ID NO: 36128 - RNA, 19 nt, Artificial Sequence
  Antisense Oligo
cuccuguccugacuggauc

SEQ ID NO: 36129 - RNA, 19 nt, Artificial Sequence
  Sense Oligo
auccagucaggacaggagc

SEQ ID NO: 36130 - RNA, 19 nt, Artificial Sequence
  Antisense Oligo
gcuccuguccugacuggau

SEQ ID NO: 36131 - RNA, 19 nt, Artificial Sequence
  Sense Oligo
uccagucaggacaggagcu

SEQ ID NO: 36132 - RNA, 19 nt, Artificial Sequence
  Antisense Oligo
agcuccuguccugacugga

SEQ ID NO: 36133 - RNA, 19 nt, Artificial Sequence
  Sense Oligo
ccagucaggacaggagcug

SEQ ID NO: 36134 - RNA, 19 nt, Artificial Sequence
  Antisense Oligo
cagcuccuguccugacugg

SEQ ID NO: 36135 - RNA, 19 nt, Artificial Sequence
  Sense Oligo
cagucaggacaggagcugg

SEQ ID NO: 36136 - RNA, 19 nt, Artificial Sequence
  Antisense Oligo
ccagcuccuguccugacug

SEQ ID NO: 36137 - RNA, 19 nt, Artificial Sequence
  Sense Oligo
agucaggacaggagcugga

SEQ ID NO: 36138 - RNA, 19 nt, Artificial Sequence
  Antisense Oligo
uccagcuccuguccugacu

SEQ ID NO: 36139 - RNA, 19 nt, Artificial Sequence
  Sense Oligo
gucaggacaggagcuggag

SEQ ID NO: 36140 - RNA, 19 nt, Artificial Sequence
  Antisense Oligo
cuccagcuccuguccugac

SEQ ID NO: 36141 - RNA, 19 nt, Artificial Sequence
  Sense Oligo
ucaggacaggagcuggagc

SEQ ID NO: 36142 - RNA, 19 nt, Artificial Sequence
  Antisense Oligo
gcuccagcuccuguccuga

SEQ ID NO: 36143 - RNA, 19 nt, Artificial Sequence
  Sense Oligo
caggacaggagcuggagca

SEQ ID NO: 36144 - RNA, 19 nt, Artificial Sequence
  Antisense Oligo
ugcuccagcuccuguccug

SEQ ID NO: 36145 - RNA, 19 nt, Artificial Sequence
  Sense Oligo
gaguguccuccucuccacg

SEQ ID NO: 36146 - RNA, 19 nt, Artificial Sequence
  Antisense Oligo
cguggagaggaggacacuc

SEQ ID NO: 36147 - RNA, 19 nt, Artificial Sequence
  Sense Oligo
aguguccuccucuccacgu

SEQ ID NO: 36148 - RNA, 19 nt, Artificial Sequence
  Antisense Oligo
acguggagaggaggacacu

SEQ ID NO: 36149 - RNA, 19 nt, Artificial Sequence
  Sense Oligo
guguccuccucuccacguu

SEQ ID NO: 36150 - RNA, 19 nt, Artificial Sequence
  Antisense Oligo
aacguggagaggaggacac

SEQ ID NO: 36151 - RNA, 19 nt, Artificial Sequence
  Sense Oligo
uguccuccucuccacguug

SEQ ID NO: 36152 - RNA, 19 nt, Artificial Sequence
  Antisense Oligo
caacguggagaggaggaca

SEQ ID NO: 36153 - RNA, 19 nt, Artificial Sequence
  Sense Oligo
guccuccucuccacguugc

SEQ ID NO: 36154 - RNA, 19 nt, Artificial Sequence
  Antisense Oligo
gcaacguggagaggaggac

SEQ ID NO: 36155 - RNA, 19 nt, Artificial Sequence
  Sense Oligo
uccuccucuccacguugca

SEQ ID NO: 36156 - RNA, 19 nt, Artificial Sequence
  Antisense Oligo
ugcaacguggagaggagga

SEQ ID NO: 36157 - RNA, 19 nt, Artificial Sequence
  Sense Oligo
guugcacguccugaguggg

SEQ ID NO: 36158 - RNA, 19 nt, Artificial Sequence
  Antisense Oligo
cccacucaggacgugcaac

SEQ ID NO: 36159 - RNA, 19 nt, Artificial Sequence
  Sense Oligo
uggaguugcacagggaagg

SEQ ID NO: 36160 - RNA, 19 nt, Artificial Sequence
  Antisense Oligo
ccuucccugugcaacucca

SEQ ID NO: 36161 - RNA, 19 nt, Artificial Sequence
  Sense Oligo
ugcacagggaagggcuagg

SEQ ID NO: 36162 - RNA, 19 nt, Artificial Sequence
  Antisense Oligo
ccuagcccuucccugugca

SEQ ID NO: 36163 - RNA, 19 nt, Artificial Sequence
  Sense Oligo
cacagggaagggcuagggu

SEQ ID NO: 36164 - RNA, 19 nt, Artificial Sequence
  Antisense Oligo
acccuagcccuucccugug

SEQ ID NO: 36165 - RNA, 19 nt, Artificial Sequence
  Sense Oligo
aagggcuagggucuuagga

SEQ ID NO: 36166 - RNA, 19 nt, Artificial Sequence
  Antisense Oligo
uccuaagacccuagcccuu

SEQ ID NO: 36167 - RNA, 19 nt, Artificial Sequence
  Sense Oligo
agggcuagggucuuaggag

SEQ ID NO: 36168 - RNA, 19 nt, Artificial Sequence
  Antisense Oligo
cuccuaagacccuagcccu

SEQ ID NO: 36169 - RNA, 19 nt, Artificial Sequence
  Sense Oligo
gacccugcccagguaugua

SEQ ID NO: 36170 - RNA, 19 nt, Artificial Sequence
  Antisense Oligo
uacauaccugggcaggguc

SEQ ID NO: 36171 - RNA, 19 nt, Artificial Sequence
  Sense Oligo
acccugcccagguauguag

SEQ ID NO: 36172 - RNA, 19 nt, Artificial Sequence
  Antisense Oligo
cuacauaccugggcagggu

SEQ ID NO: 36173 - RNA, 19 nt, Artificial Sequence
  Sense Oligo
gcaaggugccaugaugccu

SEQ ID NO: 36174 - RNA, 19 nt, Artificial Sequence
  Antisense Oligo
aggcaucauggcaccuugc

SEQ ID NO: 36175 - RNA, 19 nt, Artificial Sequence
  Sense Oligo
caaggugccaugaugccug

SEQ ID NO: 36176 - RNA, 19 nt, Artificial Sequence
  Antisense Oligo
caggcaucauggcaccuug

SEQ ID NO: 36177 - RNA, 19 nt, Artificial Sequence
  Sense Oligo
aaggugccaugaugccugc

SEQ ID NO: 36178 - RNA, 19 nt, Artificial Sequence
  Antisense Oligo
gcaggcaucauggcaccuu

SEQ ID NO: 36179 - RNA, 19 nt, Artificial Sequence
  Sense Oligo
ggugccaugaugccugcaa

SEQ ID NO: 36180 - RNA, 19 nt, Artificial Sequence
  Antisense Oligo
uugcaggcaucauggcacc

SEQ ID NO: 36181 - RNA, 19 nt, Artificial Sequence
  Sense Oligo
cugcaacuuacuuuccaac

SEQ ID NO: 36182 - RNA, 19 nt, Artificial Sequence
  Antisense Oligo
guuggaaaguaaguugcag

SEQ ID NO: 36183 - RNA, 19 nt, Artificial Sequence
  Sense Oligo
ugcaacuuacuuuccaacg

SEQ ID NO: 36184 - RNA, 19 nt, Artificial Sequence
  Antisense Oligo
cguuggaaaguaaguugca

SEQ ID NO: 36185 - RNA, 19 nt, Artificial Sequence
  Sense Oligo
gcaacuuacuuuccaacgg

SEQ ID NO: 36186 - RNA, 19 nt, Artificial Sequence
  Antisense Oligo
ccguuggaaaguaaguugc

SEQ ID NO: 36187 - RNA, 19 nt, Artificial Sequence
  Sense Oligo
caacuuacuuuccaacggu

SEQ ID NO: 36188 - RNA, 19 nt, Artificial Sequence
  Antisense Oligo
accguuggaaaguaaguug

SEQ ID NO: 36189 - RNA, 19 nt, Artificial Sequence
  Sense Oligo
augcucauuugugcagagu

SEQ ID NO: 36190 - RNA, 19 nt, Artificial Sequence
  Antisense Oligo
acucugcacaaaugagcau

SEQ ID NO: 36191 - RNA, 19 nt, Artificial Sequence
  Sense Oligo
ugcucauuugugcagaguc

SEQ ID NO: 36192 - RNA, 19 nt, Artificial Sequence
  Antisense Oligo
gacucugcacaaaugagca

SEQ ID NO: 36193 - RNA, 19 nt, Artificial Sequence
  Sense Oligo
gcucauuugugcagagucc

SEQ ID NO: 36194 - RNA, 19 nt, Artificial Sequence
  Antisense Oligo
ggacucugcacaaaugagc

SEQ ID NO: 36195 - RNA, 19 nt, Artificial Sequence
  Sense Oligo
cucauuugugcagaguccg

SEQ ID NO: 36196 - RNA, 19 nt, Artificial Sequence
  Antisense Oligo
cggacucugcacaaaugag

SEQ ID NO: 36197 - RNA, 19 nt, Artificial Sequence
  Sense Oligo
ucauuugugcagaguccga

SEQ ID NO: 36198 - RNA, 19 nt, Artificial Sequence
  Antisense Oligo
ucggacucugcacaaauga

SEQ ID NO: 36199 - RNA, 19 nt, Artificial Sequence
  Sense Oligo
cauuugugcagaguccgaa

SEQ ID NO: 36200 - RNA, 19 nt, Artificial Sequence
  Antisense Oligo
uucggacucugcacaaaug

SEQ ID NO: 36201 - RNA, 19 nt, Artificial Sequence
  Sense Oligo
auuugugcagaguccgaag

SEQ ID NO: 36202 - RNA, 19 nt, Artificial Sequence
  Antisense Oligo
cuucggacucugcacaaau

SEQ ID NO: 36203 - RNA, 19 nt, Artificial Sequence
  Sense Oligo
uuugugcagaguccgaaga

SEQ ID NO: 36204 - RNA, 19 nt, Artificial Sequence
  Antisense Oligo
ucuucggacucugcacaaa

SEQ ID NO: 36205 - RNA, 19 nt, Artificial Sequence
  Sense Oligo
uugugcagaguccgaagag

SEQ ID NO: 36206 - RNA, 19 nt, Artificial Sequence
  Antisense Oligo
cucuucggacucugcacaa

SEQ ID NO: 36207 - RNA, 19 nt, Artificial Sequence
  Sense Oligo
ugugcagaguccgaagagg

SEQ ID NO: 36208 - RNA, 19 nt, Artificial Sequence
  Antisense Oligo
ccucuucggacucugcaca

SEQ ID NO: 36209 - RNA, 19 nt, Artificial Sequence
  Sense Oligo
gugcagaguccgaagaggg

SEQ ID NO: 36210 - RNA, 19 nt, Artificial Sequence
  Antisense Oligo
cccucuucggacucugcac

SEQ ID NO: 36211 - RNA, 19 nt, Artificial Sequence
  Sense Oligo
ugcagaguccgaagaggga

SEQ ID NO: 36212 - RNA, 19 nt, Artificial Sequence
  Antisense Oligo
ucccucuucggacucugca

SEQ ID NO: 36213 - RNA, 19 nt, Artificial Sequence
  Sense Oligo
gaguccgaagagggagcac

SEQ ID NO: 36214 - RNA, 19 nt, Artificial Sequence
  Antisense Oligo
gugcucccucuucggacuc

SEQ ID NO: 36215 - RNA, 19 nt, Artificial Sequence
  Sense Oligo
ccgaagagggagcacagag

SEQ ID NO: 36216 - RNA, 19 nt, Artificial Sequence
  Antisense Oligo
cucugugcucccucuucgg

SEQ ID NO: 36217 - RNA, 19 nt, Artificial Sequence
  Sense Oligo
gaagagggagcacagagga

SEQ ID NO: 36218 - RNA, 19 nt, Artificial Sequence
  Antisense Oligo
uccucugugcucccucuuc

SEQ ID NO: 36219 - RNA, 19 nt, Artificial Sequence
  Sense Oligo
aaagcagcugugugaagcg

SEQ ID NO: 36220 - RNA, 19 nt, Artificial Sequence
  Antisense Oligo
cgcuucacacagcugcuuu

SEQ ID NO: 36221 - RNA, 19 nt, Artificial Sequence
  Sense Oligo
aagcagcugugugaagcgu

SEQ ID NO: 36222 - RNA, 19 nt, Artificial Sequence
  Antisense Oligo
acgcuucacacagcugcuu

SEQ ID NO: 36223 - RNA, 19 nt, Artificial Sequence
  Sense Oligo
agcagcugugugaagcgug

SEQ ID NO: 36224 - RNA, 19 nt, Artificial Sequence
  Antisense Oligo
cacgcuucacacagcugcu

SEQ ID NO: 36225 - RNA, 19 nt, Artificial Sequence
  Sense Oligo
gcagcugugugaagcguga

SEQ ID NO: 36226 - RNA, 19 nt, Artificial Sequence
  Antisense Oligo
ucacgcuucacacagcugc

SEQ ID NO: 36227 - RNA, 19 nt, Artificial Sequence
  Sense Oligo
cagcugugugaagcgugaa

SEQ ID NO: 36228 - RNA, 19 nt, Artificial Sequence
  Antisense Oligo
uucacgcuucacacagcug

SEQ ID NO: 36229 - RNA, 19 nt, Artificial Sequence
  Sense Oligo
agcugugugaagcgugaau

SEQ ID NO: 36230 - RNA, 19 nt, Artificial Sequence
  Antisense Oligo
auucacgcuucacacagcu

SEQ ID NO: 36231 - RNA, 19 nt, Artificial Sequence
  Sense Oligo
gcugugugaagcgugaauc

SEQ ID NO: 36232 - RNA, 19 nt, Artificial Sequence
  Antisense Oligo
gauucacgcuucacacagc

SEQ ID NO: 36233 - RNA, 19 nt, Artificial Sequence
  Sense Oligo
cugugugaagcgugaaucg

SEQ ID NO: 36234 - RNA, 19 nt, Artificial Sequence
  Antisense Oligo
cgauucacgcuucacacag

SEQ ID NO: 36235 - RNA, 19 nt, Artificial Sequence
  Sense Oligo
ugugugaagcgugaaucgc

SEQ ID NO: 36236 - RNA, 19 nt, Artificial Sequence
  Antisense Oligo
gcgauucacgcuucacaca

SEQ ID NO: 36237 - RNA, 19 nt, Artificial Sequence
  Sense Oligo
gugugaagcgugaaucgca

SEQ ID NO: 36238 - RNA, 19 nt, Artificial Sequence
  Antisense Oligo
ugcgauucacgcuucacac

SEQ ID NO: 36239 - RNA, 19 nt, Artificial Sequence
  Sense Oligo
ugugaagcgugaaucgcac

SEQ ID NO: 36240 - RNA, 19 nt, Artificial Sequence
  Antisense Oligo
gugcgauucacgcuucaca

SEQ ID NO: 36241 - RNA, 19 nt, Artificial Sequence
  Sense Oligo
aagcgugaaucgcacagga

SEQ ID NO: 36242 - RNA, 19 nt, Artificial Sequence
  Antisense Oligo
uccugugcgauucacgcuu

SEQ ID NO: 36243 - RNA, 19 nt, Artificial Sequence
  Sense Oligo
agcgugaaucgcacaggac

SEQ ID NO: 36244 - RNA, 19 nt, Artificial Sequence
  Antisense Oligo
guccugugcgauucacgcu

SEQ ID NO: 36245 - RNA, 19 nt, Artificial Sequence
  Sense Oligo
gcgugaaucgcacaggacu

SEQ ID NO: 36246 - RNA, 19 nt, Artificial Sequence
  Antisense Oligo
aguccugugcgauucacgc

SEQ ID NO: 36247 - RNA, 19 nt, Artificial Sequence
  Sense Oligo
cgcacaggacuggaguuga

SEQ ID NO: 36248 - RNA, 19 nt, Artificial Sequence
  Antisense Oligo
ucaacuccaguccugugcg

SEQ ID NO: 36249 - RNA, 19 nt, Artificial Sequence
  Sense Oligo
gcacaggacuggaguugaa

SEQ ID NO: 36250 - RNA, 19 nt, Artificial Sequence
  Antisense Oligo
uucaacuccaguccugugc

SEQ ID NO: 36251 - RNA, 19 nt, Artificial Sequence
  Sense Oligo
cacaggacuggaguugaau

SEQ ID NO: 36252 - RNA, 19 nt, Artificial Sequence
  Antisense Oligo
auucaacuccaguccugug

SEQ ID NO: 36253 - RNA, 19 nt, Artificial Sequence
  Sense Oligo
acaggacuggaguugaaug

SEQ ID NO: 36254 - RNA, 19 nt, Artificial Sequence
  Antisense Oligo
cauucaacuccaguccugu

SEQ ID NO: 36255 - RNA, 19 nt, Artificial Sequence
  Sense Oligo
ggaguugaaugaauguggg

SEQ ID NO: 36256 - RNA, 19 nt, Artificial Sequence
  Antisense Oligo
cccacauucauucaacucc

SEQ ID NO: 36257 - RNA, 19 nt, Artificial Sequence
  Sense Oligo
gaguugaaugaaugugggu

SEQ ID NO: 36258 - RNA, 19 nt, Artificial Sequence
  Antisense Oligo
acccacauucauucaacuc

SEQ ID NO: 36259 - RNA, 19 nt, Artificial Sequence
  Sense Oligo
aguugaaugaaugugggug

SEQ ID NO: 36260 - RNA, 19 nt, Artificial Sequence
  Antisense Oligo
cacccacauucauucaacu

SEQ ID NO: 36261 - RNA, 19 nt, Artificial Sequence
  Sense Oligo
uugaaugaauguggguggu

SEQ ID NO: 36262 - RNA, 19 nt, Artificial Sequence
  Antisense Oligo
accacccacauucauucaa

SEQ ID NO: 36263 - RNA, 19 nt, Artificial Sequence
  Sense Oligo
ugaaugaauguggguggug

SEQ ID NO: 36264 - RNA, 19 nt, Artificial Sequence
  Antisense Oligo
caccacccacauucauuca

SEQ ID NO: 36265 - RNA, 19 nt, Artificial Sequence
  Sense Oligo
gaaugaauguggguggugg

SEQ ID NO: 36266 - RNA, 19 nt, Artificial Sequence
  Antisense Oligo
ccaccacccacauucauuc

SEQ ID NO: 36267 - RNA, 19 nt, Artificial Sequence
  Sense Oligo
augaaugugggugguggug

SEQ ID NO: 36268 - RNA, 19 nt, Artificial Sequence
  Antisense Oligo
caccaccacccacauucau

SEQ ID NO: 36269 - RNA, 19 nt, Artificial Sequence
  Sense Oligo
ugaaugugggugguggugu

SEQ ID NO: 36270 - RNA, 19 nt, Artificial Sequence
  Antisense Oligo
acaccaccacccacauuca

SEQ ID NO: 36271 - RNA, 19 nt, Artificial Sequence
  Sense Oligo
gaaugugggugguggugug

SEQ ID NO: 36272 - RNA, 19 nt, Artificial Sequence
  Antisense Oligo
cacaccaccacccacauuc

SEQ ID NO: 36273 - RNA, 19 nt, Artificial Sequence
  Sense Oligo
aaugugggugguggugugc

SEQ ID NO: 36274 - RNA, 19 nt, Artificial Sequence
  Antisense Oligo
gcacaccaccacccacauu

SEQ ID NO: 36275 - RNA, 19 nt, Artificial Sequence
  Sense Oligo
augugggugguggugugcu

SEQ ID NO: 36276 - RNA, 19 nt, Artificial Sequence
  Antisense Oligo
agcacaccaccacccacau

SEQ ID NO: 36277 - RNA, 19 nt, Artificial Sequence
  Sense Oligo
ugugggugguggugugcua

SEQ ID NO: 36278 - RNA, 19 nt, Artificial Sequence
  Antisense Oligo
uagcacaccaccacccaca

SEQ ID NO: 36279 - RNA, 19 nt, Artificial Sequence
  Sense Oligo
gugggugguggugugcuau

SEQ ID NO: 36280 - RNA, 19 nt, Artificial Sequence
  Antisense Oligo
auagcacaccaccacccac

SEQ ID NO: 36281 - RNA, 19 nt, Artificial Sequence
  Sense Oligo
ugggugguggugugcuauu

SEQ ID NO: 36282 - RNA, 19 nt, Artificial Sequence
  Antisense Oligo
aauagcacaccaccaccca

SEQ ID NO: 36283 - RNA, 19 nt, Artificial Sequence
  Sense Oligo
gggugguggugugcuauuc

SEQ ID NO: 36284 - RNA, 19 nt, Artificial Sequence
  Antisense Oligo
gaauagcacaccaccaccc

SEQ ID NO: 36285 - RNA, 19 nt, Artificial Sequence
  Sense Oligo
ggugguggugugcuauucu

SEQ ID NO: 36286 - RNA, 19 nt, Artificial Sequence
  Antisense Oligo
agaauagcacaccaccacc

SEQ ID NO: 36287 - RNA, 19 nt, Artificial Sequence
  Sense Oligo
gugguggugugcuauucuu

SEQ ID NO: 36288 - RNA, 19 nt, Artificial Sequence
  Antisense Oligo
aagaauagcacaccaccac

SEQ ID NO: 36289 - RNA, 19 nt, Artificial Sequence
  Sense Oligo
ugguggugugcuauucuug

SEQ ID NO: 36290 - RNA, 19 nt, Artificial Sequence
  Antisense Oligo
caagaauagcacaccacca

SEQ ID NO: 36291 - RNA, 19 nt, Artificial Sequence
  Sense Oligo
gguggugugcuauucuugc

SEQ ID NO: 36292 - RNA, 19 nt, Artificial Sequence
  Antisense Oligo
gcaagaauagcacaccacc

SEQ ID NO: 36293 - RNA, 19 nt, Artificial Sequence
  Sense Oligo
guggugugcuauucuugcg

SEQ ID NO: 36294 - RNA, 19 nt, Artificial Sequence
  Antisense Oligo
cgcaagaauagcacaccac

SEQ ID NO: 36295 - RNA, 19 nt, Artificial Sequence
  Sense Oligo
uggugugcuauucuugcga

SEQ ID NO: 36296 - RNA, 19 nt, Artificial Sequence
  Antisense Oligo
ucgcaagaauagcacacca

SEQ ID NO: 36297 - RNA, 19 nt, Artificial Sequence
  Sense Oligo
ggugugcuauucuugcgac

SEQ ID NO: 36298 - RNA, 19 nt, Artificial Sequence
  Antisense Oligo
gucgcaagaauagcacacc

SEQ ID NO: 36299 - RNA, 19 nt, Artificial Sequence
  Sense Oligo
gugugcuauucuugcgacc

SEQ ID NO: 36300 - RNA, 19 nt, Artificial Sequence
  Antisense Oligo
ggucgcaagaauagcacac

SEQ ID NO: 36301 - RNA, 19 nt, Artificial Sequence
  Sense Oligo
ugugcuauucuugcgaccu

SEQ ID NO: 36302 - RNA, 19 nt, Artificial Sequence
  Antisense Oligo
aggucgcaagaauagcaca

SEQ ID NO: 36303 - RNA, 19 nt, Artificial Sequence
  Sense Oligo
gugcuauucuugcgaccuu

SEQ ID NO: 36304 - RNA, 19 nt, Artificial Sequence
  Antisense Oligo
aaggucgcaagaauagcac

SEQ ID NO: 36305 - RNA, 19 nt, Artificial Sequence
  Sense Oligo
ugcuauucuugcgaccuuu

SEQ ID NO: 36306 - RNA, 19 nt, Artificial Sequence
  Antisense Oligo
aaaggucgcaagaauagca

SEQ ID NO: 36307 - RNA, 19 nt, Artificial Sequence
  Sense Oligo
gcuauucuugcgaccuuuu

SEQ ID NO: 36308 - RNA, 19 nt, Artificial Sequence
  Antisense Oligo
aaaaggucgcaagaauagc

SEQ ID NO: 36309 - RNA, 19 nt, Artificial Sequence
  Sense Oligo
agauaaguccuuucagaau

SEQ ID NO: 36310 - RNA, 19 nt, Artificial Sequence
  Antisense Oligo
auucugaaaggacuuaucu

SEQ ID NO: 36311 - RNA, 19 nt, Artificial Sequence
  Sense Oligo
gauaaguccuuucagaaua

SEQ ID NO: 36312 - RNA, 19 nt, Artificial Sequence
  Antisense Oligo
uauucugaaaggacuuauc

SEQ ID NO: 36313 - RNA, 19 nt, Artificial Sequence
  Sense Oligo
gguugugcaguaggaggac

SEQ ID NO: 36314 - RNA, 19 nt, Artificial Sequence
  Antisense Oligo
guccuccuacugcacaacc

SEQ ID NO: 36315 - RNA, 19 nt, Artificial Sequence
  Sense Oligo
guugugcaguaggaggacc

SEQ ID NO: 36316 - RNA, 19 nt, Artificial Sequence
  Antisense Oligo
gguccuccuacugcacaac

SEQ ID NO: 36317 - RNA, 19 nt, Artificial Sequence
  Sense Oligo
uugugcaguaggaggacca

SEQ ID NO: 36318 - RNA, 19 nt, Artificial Sequence
  Antisense Oligo
ugguccuccuacugcacaa

SEQ ID NO: 36319 - RNA, 19 nt, Artificial Sequence
  Sense Oligo
gcaguaggaggaccaguag

SEQ ID NO: 36320 - RNA, 19 nt, Artificial Sequence
  Antisense Oligo
cuacugguccuccuacugc

SEQ ID NO: 36321 - RNA, 19 nt, Artificial Sequence
  Sense Oligo
caguaggaggaccaguagu

SEQ ID NO: 36322 - RNA, 19 nt, Artificial Sequence
  Antisense Oligo
acuacugguccuccuacug

SEQ ID NO: 36323 - RNA, 19 nt, Artificial Sequence
  Sense Oligo
aguaggaggaccaguagug

SEQ ID NO: 36324 - RNA, 19 nt, Artificial Sequence
  Antisense Oligo
cacuacugguccuccuacu

SEQ ID NO: 36325 - RNA, 19 nt, Artificial Sequence
  Sense Oligo
guaggaggaccaguagugg

SEQ ID NO: 36326 - RNA, 19 nt, Artificial Sequence
  Antisense Oligo
ccacuacugguccuccuac

SEQ ID NO: 36327 - RNA, 19 nt, Artificial Sequence
  Sense Oligo
cccugguugggucucugau

SEQ ID NO: 36328 - RNA, 19 nt, Artificial Sequence
  Antisense Oligo
aucagagacccaaccaggg

SEQ ID NO: 36329 - RNA, 19 nt, Artificial Sequence
  Sense Oligo
ccugguugggucucugauu

SEQ ID NO: 36330 - RNA, 19 nt, Artificial Sequence
  Antisense Oligo
aaucagagacccaaccagg

SEQ ID NO: 36331 - RNA, 19 nt, Artificial Sequence
  Sense Oligo
guugggucucugauucuag

SEQ ID NO: 36332 - RNA, 19 nt, Artificial Sequence
  Antisense Oligo
cuagaaucagagacccaac

SEQ ID NO: 36333 - RNA, 19 nt, Artificial Sequence
  Sense Oligo
uugggucucugauucuaga

SEQ ID NO: 36334 - RNA, 19 nt, Artificial Sequence
  Antisense Oligo
ucuagaaucagagacccaa

SEQ ID NO: 36335 - RNA, 19 nt, Artificial Sequence
  Sense Oligo
ccacuagcauggcugacug

SEQ ID NO: 36336 - RNA, 19 nt, Artificial Sequence
  Antisense Oligo
cagucagccaugcuagugg

SEQ ID NO: 36337 - RNA, 19 nt, Artificial Sequence
  Sense Oligo
cacuagcauggcugacugu

SEQ ID NO: 36338 - RNA, 19 nt, Artificial Sequence
  Antisense Oligo
acagucagccaugcuagug

SEQ ID NO: 36339 - RNA, 19 nt, Artificial Sequence
  Sense Oligo
cauggcugacuguugauga

SEQ ID NO: 36340 - RNA, 19 nt, Artificial Sequence
  Antisense Oligo
ucaucaacagucagccaug

SEQ ID NO: 36341 - RNA, 19 nt, Artificial Sequence
  Sense Oligo
auggcugacuguugaugaa

SEQ ID NO: 36342 - RNA, 19 nt, Artificial Sequence
  Antisense Oligo
uucaucaacagucagccau

SEQ ID NO: 36343 - RNA, 19 nt, Artificial Sequence
  Sense Oligo
uggcugacuguugaugaag

SEQ ID NO: 36344 - RNA, 19 nt, Artificial Sequence
  Antisense Oligo
cuucaucaacagucagcca

SEQ ID NO: 36345 - RNA, 19 nt, Artificial Sequence
  Sense Oligo
ugacuguugaugaagguug

SEQ ID NO: 36346 - RNA, 19 nt, Artificial Sequence
  Antisense Oligo
caaccuucaucaacaguca

SEQ ID NO: 36347 - RNA, 19 nt, Artificial Sequence
  Sense Oligo
gacuguugaugaagguugg

SEQ ID NO: 36348 - RNA, 19 nt, Artificial Sequence
  Antisense Oligo
ccaaccuucaucaacaguc

SEQ ID NO: 36349 - RNA, 19 nt, Artificial Sequence
  Sense Oligo
acuguugaugaagguuggg

SEQ ID NO: 36350 - RNA, 19 nt, Artificial Sequence
  Antisense Oligo
cccaaccuucaucaacagu

SEQ ID NO: 36351 - RNA, 19 nt, Artificial Sequence
  Sense Oligo
cgcucucuguauugccgua

SEQ ID NO: 36352 - RNA, 19 nt, Artificial Sequence
  Antisense Oligo
uacggcaauacagagagcg

SEQ ID NO: 36353 - RNA, 19 nt, Artificial Sequence
  Sense Oligo
gcucucuguauugccguaa

SEQ ID NO: 36354 - RNA, 19 nt, Artificial Sequence
  Antisense Oligo
uuacggcaauacagagagc

SEQ ID NO: 36355 - RNA, 19 nt, Artificial Sequence
  Sense Oligo
cucucuguauugccguaau

SEQ ID NO: 36356 - RNA, 19 nt, Artificial Sequence
  Antisense Oligo
auuacggcaauacagagag

SEQ ID NO: 36357 - RNA, 19 nt, Artificial Sequence
  Sense Oligo
ucucuguauugccguaaug

SEQ ID NO: 36358 - RNA, 19 nt, Artificial Sequence
  Antisense Oligo
cauuacggcaauacagaga

SEQ ID NO: 36359 - RNA, 19 nt, Artificial Sequence
  Sense Oligo
cucuguauugccguaaugc

SEQ ID NO: 36360 - RNA, 19 nt, Artificial Sequence
  Antisense Oligo
gcauuacggcaauacagag

SEQ ID NO: 36361 - RNA, 19 nt, Artificial Sequence
  Sense Oligo
ucuguauugccguaaugcu

SEQ ID NO: 36362 - RNA, 19 nt, Artificial Sequence
  Antisense Oligo
agcauuacggcaauacaga

SEQ ID NO: 36363 - RNA, 19 nt, Artificial Sequence
  Sense Oligo
cuguauugccguaaugcuc

SEQ ID NO: 36364 - RNA, 19 nt, Artificial Sequence
  Antisense Oligo
gagcauuacggcaauacag

SEQ ID NO: 36365 - RNA, 19 nt, Artificial Sequence
  Sense Oligo
uguauugccguaaugcucu

SEQ ID NO: 36366 - RNA, 19 nt, Artificial Sequence
  Antisense Oligo
agagcauuacggcaauaca

SEQ ID NO: 36367 - RNA, 19 nt, Artificial Sequence
  Sense Oligo
guauugccguaaugcucug

SEQ ID NO: 36368 - RNA, 19 nt, Artificial Sequence
  Antisense Oligo
cagagcauuacggcaauac

SEQ ID NO: 36369 - RNA, 19 nt, Artificial Sequence
  Sense Oligo
uauugccguaaugcucugu

SEQ ID NO: 36370 - RNA, 19 nt, Artificial Sequence
  Antisense Oligo
acagagcauuacggcaaua

SEQ ID NO: 36371 - RNA, 19 nt, Artificial Sequence
  Sense Oligo
auugccguaaugcucuguc

SEQ ID NO: 36372 - RNA, 19 nt, Artificial Sequence
  Antisense Oligo
gacagagcauuacggcaau

SEQ ID NO: 36373 - RNA, 19 nt, Artificial Sequence
  Sense Oligo
uugccguaaugcucugucu

SEQ ID NO: 36374 - RNA, 19 nt, Artificial Sequence
  Antisense Oligo
agacagagcauuacggcaa

SEQ ID NO: 36375 - RNA, 19 nt, Artificial Sequence
  Sense Oligo
ugccguaaugcucugucuu

SEQ ID NO: 36376 - RNA, 19 nt, Artificial Sequence
  Antisense Oligo
aagacagagcauuacggca

SEQ ID NO: 36377 - RNA, 19 nt, Artificial Sequence
  Sense Oligo
ugucuuucuccuuucaugg

SEQ ID NO: 36378 - RNA, 19 nt, Artificial Sequence
  Antisense Oligo
ccaugaaaggagaaagaca

SEQ ID NO: 36379 - RNA, 19 nt, Artificial Sequence
  Sense Oligo
gucuuucuccuuucauggg

SEQ ID NO: 36380 - RNA, 19 nt, Artificial Sequence
  Antisense Oligo
cccaugaaaggagaaagac

SEQ ID NO: 36381 - RNA, 19 nt, Artificial Sequence
  Sense Oligo
ucuuucuccuuucauggga

SEQ ID NO: 36382 - RNA, 19 nt, Artificial Sequence
  Antisense Oligo
ucccaugaaaggagaaaga

SEQ ID NO: 36383 - RNA, 19 nt, Artificial Sequence
  Sense Oligo
uccuuucaugggagugugc

SEQ ID NO: 36384 - RNA, 19 nt, Artificial Sequence
  Antisense Oligo
gcacacucccaugaaagga

SEQ ID NO: 36385 - RNA, 19 nt, Artificial Sequence
  Sense Oligo
cuuucaugggagugugccg

SEQ ID NO: 36386 - RNA, 19 nt, Artificial Sequence
  Antisense Oligo
cggcacacucccaugaaag

SEQ ID NO: 36387 - RNA, 19 nt, Artificial Sequence
  Sense Oligo
uuucaugggagugugccgu

SEQ ID NO: 36388 - RNA, 19 nt, Artificial Sequence
  Antisense Oligo
acggcacacucccaugaaa

SEQ ID NO: 36389 - RNA, 19 nt, Artificial Sequence
  Sense Oligo
uucaugggagugugccgug

SEQ ID NO: 36390 - RNA, 19 nt, Artificial Sequence
  Antisense Oligo
cacggcacacucccaugaa

SEQ ID NO: 36391 - RNA, 19 nt, Artificial Sequence
  Sense Oligo
ucaugggagugugccgugg

SEQ ID NO: 36392 - RNA, 19 nt, Artificial Sequence
  Antisense Oligo
ccacggcacacucccauga

SEQ ID NO: 36393 - RNA, 19 nt, Artificial Sequence
  Sense Oligo
augggagugugccguggca

SEQ ID NO: 36394 - RNA, 19 nt, Artificial Sequence
  Antisense Oligo
ugccacggcacacucccau

SEQ ID NO: 36395 - RNA, 19 nt, Artificial Sequence
  Sense Oligo
ugggagugugccguggcau

SEQ ID NO: 36396 - RNA, 19 nt, Artificial Sequence
  Antisense Oligo
augccacggcacacuccca

SEQ ID NO: 36397 - RNA, 19 nt, Artificial Sequence
  Sense Oligo
agugugccguggcauuuag

SEQ ID NO: 36398 - RNA, 19 nt, Artificial Sequence
  Antisense Oligo
cuaaaugccacggcacacu

SEQ ID NO: 36399 - RNA, 19 nt, Artificial Sequence
  Sense Oligo
gugugccguggcauuuagu

SEQ ID NO: 36400 - RNA, 19 nt, Artificial Sequence
  Antisense Oligo
acuaaaugccacggcacac

SEQ ID NO: 36401 - RNA, 19 nt, Artificial Sequence
  Sense Oligo
ugugccguggcauuuaguc

SEQ ID NO: 36402 - RNA, 19 nt, Artificial Sequence
  Antisense Oligo
gacuaaaugccacggcaca

SEQ ID NO: 36403 - RNA, 19 nt, Artificial Sequence
  Sense Oligo
gugccguggcauuuagucg

SEQ ID NO: 36404 - RNA, 19 nt, Artificial Sequence
  Antisense Oligo
cgacuaaaugccacggcac

SEQ ID NO: 36405 - RNA, 19 nt, Artificial Sequence
  Sense Oligo
ugccguggcauuuagucgu

SEQ ID NO: 36406 - RNA, 19 nt, Artificial Sequence
  Antisense Oligo
acgacuaaaugccacggca

SEQ ID NO: 36407 - RNA, 19 nt, Artificial Sequence
  Sense Oligo
gccguggcauuuagucgug

SEQ ID NO: 36408 - RNA, 19 nt, Artificial Sequence
  Antisense Oligo
cacgacuaaaugccacggc

SEQ ID NO: 36409 - RNA, 19 nt, Artificial Sequence
  Sense Oligo
ccguggcauuuagucguga

SEQ ID NO: 36410 - RNA, 19 nt, Artificial Sequence
  Antisense Oligo
ucacgacuaaaugccacgg

SEQ ID NO: 36411 - RNA, 19 nt, Artificial Sequence
  Sense Oligo
cguggcauuuagucgugag

SEQ ID NO: 36412 - RNA, 19 nt, Artificial Sequence
  Antisense Oligo
cucacgacuaaaugccacg

SEQ ID NO: 36413 - RNA, 19 nt, Artificial Sequence
  Sense Oligo
agagugggugugaccugug

SEQ ID NO: 36414 - RNA, 19 nt, Artificial Sequence
  Antisense Oligo
cacaggucacacccacucu

SEQ ID NO: 36415 - RNA, 19 nt, Artificial Sequence
  Sense Oligo
gagugggugugaccugugu

SEQ ID NO: 36416 - RNA, 19 nt, Artificial Sequence
  Antisense Oligo
acacaggucacacccacuc

SEQ ID NO: 36417 - RNA, 19 nt, Artificial Sequence
  Sense Oligo
agugggugugaccugugug

SEQ ID NO: 36418 - RNA, 19 nt, Artificial Sequence
  Antisense Oligo
cacacaggucacacccacu

SEQ ID NO: 36419 - RNA, 19 nt, Artificial Sequence
  Sense Oligo
gugggugugaccugugugc

SEQ ID NO: 36420 - RNA, 19 nt, Artificial Sequence
  Antisense Oligo
gcacacaggucacacccac

SEQ ID NO: 36421 - RNA, 19 nt, Artificial Sequence
  Sense Oligo
ugggugugaccugugugcg

SEQ ID NO: 36422 - RNA, 19 nt, Artificial Sequence
  Antisense Oligo
cgcacacaggucacaccca

SEQ ID NO: 36423 - RNA, 19 nt, Artificial Sequence
  Sense Oligo
gugugaccugugugcgggu

SEQ ID NO: 36424 - RNA, 19 nt, Artificial Sequence
  Antisense Oligo
acccgcacacaggucacac

SEQ ID NO: 36425 - RNA, 19 nt, Artificial Sequence
  Sense Oligo
ugugaccugugugcggguu

SEQ ID NO: 36426 - RNA, 19 nt, Artificial Sequence
  Antisense Oligo
aacccgcacacaggucaca

SEQ ID NO: 36427 - RNA, 19 nt, Artificial Sequence
  Sense Oligo
gugaccugugugcggguuu

SEQ ID NO: 36428 - RNA, 19 nt, Artificial Sequence
  Antisense Oligo
aaacccgcacacaggucac

SEQ ID NO: 36429 - RNA, 19 nt, Artificial Sequence
  Sense Oligo
ugaccugugugcggguuuu

SEQ ID NO: 36430 - RNA, 19 nt, Artificial Sequence
  Antisense Oligo
aaaacccgcacacagguca

SEQ ID NO: 36431 - RNA, 19 nt, Artificial Sequence
  Sense Oligo
gaccugugugcggguuuug

SEQ ID NO: 36432 - RNA, 19 nt, Artificial Sequence
  Antisense Oligo
caaaacccgcacacagguc

SEQ ID NO: 36433 - RNA, 19 nt, Artificial Sequence
  Sense Oligo
accugugugcggguuuugc

SEQ ID NO: 36434 - RNA, 19 nt, Artificial Sequence
  Antisense Oligo
gcaaaacccgcacacaggu

SEQ ID NO: 36435 - RNA, 19 nt, Artificial Sequence
  Sense Oligo
ccugugugcggguuuugca

SEQ ID NO: 36436 - RNA, 19 nt, Artificial Sequence
  Antisense Oligo
ugcaaaacccgcacacagg

SEQ ID NO: 36437 - RNA, 19 nt, Artificial Sequence
  Sense Oligo
cugugugcggguuuugcag

SEQ ID NO: 36438 - RNA, 19 nt, Artificial Sequence
  Antisense Oligo
cugcaaaacccgcacacag

SEQ ID NO: 36439 - RNA, 19 nt, Artificial Sequence
  Sense Oligo
ugugugcggguuuugcagg

SEQ ID NO: 36440 - RNA, 19 nt, Artificial Sequence
  Antisense Oligo
ccugcaaaacccgcacaca

SEQ ID NO: 36441 - RNA, 19 nt, Artificial Sequence
  Sense Oligo
gugugcggguuuugcaggu

SEQ ID NO: 36442 - RNA, 19 nt, Artificial Sequence
  Antisense Oligo
accugcaaaacccgcacac

SEQ ID NO: 36443 - RNA, 19 nt, Artificial Sequence
  Sense Oligo
ugugcggguuuugcagguc

SEQ ID NO: 36444 - RNA, 19 nt, Artificial Sequence
  Antisense Oligo
gaccugcaaaacccgcaca

SEQ ID NO: 36445 - RNA, 19 nt, Artificial Sequence
  Sense Oligo
gugcggguuuugcaggucu

SEQ ID NO: 36446 - RNA, 19 nt, Artificial Sequence
  Antisense Oligo
agaccugcaaaacccgcac

SEQ ID NO: 36447 - RNA, 19 nt, Artificial Sequence
  Sense Oligo
ugcggguuuugcaggucug

SEQ ID NO: 36448 - RNA, 19 nt, Artificial Sequence
  Antisense Oligo
cagaccugcaaaacccgca

SEQ ID NO: 36449 - RNA, 19 nt, Artificial Sequence
  Sense Oligo
gcggguuuugcaggucugg

SEQ ID NO: 36450 - RNA, 19 nt, Artificial Sequence
  Antisense Oligo
ccagaccugcaaaacccgc

SEQ ID NO: 36451 - RNA, 19 nt, Artificial Sequence
  Sense Oligo
cggguuuugcaggucugga

SEQ ID NO: 36452 - RNA, 19 nt, Artificial Sequence
  Antisense Oligo
uccagaccugcaaaacccg

SEQ ID NO: 36453 - RNA, 19 nt, Artificial Sequence
  Sense Oligo
ggguuuugcaggucuggag

SEQ ID NO: 36454 - RNA, 19 nt, Artificial Sequence
  Antisense Oligo
cuccagaccugcaaaaccc

SEQ ID NO: 36455 - RNA, 19 nt, Artificial Sequence
  Sense Oligo
gguuuugcaggucuggagg

SEQ ID NO: 36456 - RNA, 19 nt, Artificial Sequence
  Antisense Oligo
ccuccagaccugcaaaacc

SEQ ID NO: 36457 - RNA, 19 nt, Artificial Sequence
  Sense Oligo
guuuugcaggucuggaggc

SEQ ID NO: 36458 - RNA, 19 nt, Artificial Sequence
  Antisense Oligo
gccuccagaccugcaaaac

SEQ ID NO: 36459 - RNA, 19 nt, Artificial Sequence
  Sense Oligo
uuuugcaggucuggaggcg

SEQ ID NO: 36460 - RNA, 19 nt, Artificial Sequence
  Antisense Oligo
cgccuccagaccugcaaaa

SEQ ID NO: 36461 - RNA, 19 nt, Artificial Sequence
  Sense Oligo
gagcauggcuggaaggagu

SEQ ID NO: 36462 - RNA, 19 nt, Artificial Sequence
  Antisense Oligo
acuccuuccagccaugcuc

SEQ ID NO: 36463 - RNA, 19 nt, Artificial Sequence
  Sense Oligo
agcauggcuggaaggaguc

SEQ ID NO: 36464 - RNA, 19 nt, Artificial Sequence
  Antisense Oligo
gacuccuuccagccaugcu

SEQ ID NO: 36465 - RNA, 19 nt, Artificial Sequence
  Sense Oligo
gcauggcuggaaggagucg

SEQ ID NO: 36466 - RNA, 19 nt, Artificial Sequence
  Antisense Oligo
cgacuccuuccagccaugc

SEQ ID NO: 36467 - RNA, 19 nt, Artificial Sequence
  Sense Oligo
cauggcuggaaggagucgu

SEQ ID NO: 36468 - RNA, 19 nt, Artificial Sequence
  Antisense Oligo
acgacuccuuccagccaug

SEQ ID NO: 36469 - RNA, 19 nt, Artificial Sequence
  Sense Oligo
auggcuggaaggagucguu

SEQ ID NO: 36470 - RNA, 19 nt, Artificial Sequence
  Antisense Oligo
aacgacuccuuccagccau

SEQ ID NO: 36471 - RNA, 19 nt, Artificial Sequence
  Sense Oligo
uggcuggaaggagucguug

SEQ ID NO: 36472 - RNA, 19 nt, Artificial Sequence
  Antisense Oligo
caacgacuccuuccagcca

SEQ ID NO: 36473 - RNA, 19 nt, Artificial Sequence
  Sense Oligo
ggcuggaaggagucguugc

SEQ ID NO: 36474 - RNA, 19 nt, Artificial Sequence
  Antisense Oligo
gcaacgacuccuuccagcc

SEQ ID NO: 36475 - RNA, 19 nt, Artificial Sequence
  Sense Oligo
gcuggaaggagucguugcu

SEQ ID NO: 36476 - RNA, 19 nt, Artificial Sequence
  Antisense Oligo
agcaacgacuccuuccagc

SEQ ID NO: 36477 - RNA, 19 nt, Artificial Sequence
  Sense Oligo
cuggaaggagucguugcug

SEQ ID NO: 36478 - RNA, 19 nt, Artificial Sequence
  Antisense Oligo
cagcaacgacuccuuccag

SEQ ID NO: 36479 - RNA, 19 nt, Artificial Sequence
  Sense Oligo
agacauggaauggaggcuc

SEQ ID NO: 36480 - RNA, 19 nt, Artificial Sequence
  Antisense Oligo
gagccuccauuccaugucu

SEQ ID NO: 36481 - RNA, 19 nt, Artificial Sequence
  Sense Oligo
gacauggaauggaggcuca

SEQ ID NO: 36482 - RNA, 19 nt, Artificial Sequence
  Antisense Oligo
ugagccuccauuccauguc

SEQ ID NO: 36483 - RNA, 19 nt, Artificial Sequence
  Sense Oligo
acauggaauggaggcucac

SEQ ID NO: 36484 - RNA, 19 nt, Artificial Sequence
  Antisense Oligo
gugagccuccauuccaugu

SEQ ID NO: 36485 - RNA, 19 nt, Artificial Sequence
  Sense Oligo
cauggaauggaggcucaca

SEQ ID NO: 36486 - RNA, 19 nt, Artificial Sequence
  Antisense Oligo
ugugagccuccauuccaug

SEQ ID NO: 36487 - RNA, 19 nt, Artificial Sequence
  Sense Oligo
cagucuuuucagggcguga

SEQ ID NO: 36488 - RNA, 19 nt, Artificial Sequence
  Antisense Oligo
ucacgcccugaaaagacug

SEQ ID NO: 36489 - RNA, 19 nt, Artificial Sequence
  Sense Oligo
ucagggcgugaaggcaagc

SEQ ID NO: 36490 - RNA, 19 nt, Artificial Sequence
  Antisense Oligo
gcuugccuucacgcccuga

SEQ ID NO: 36491 - RNA, 19 nt, Artificial Sequence
  Sense Oligo
cagggcgugaaggcaagcu

SEQ ID NO: 36492 - RNA, 19 nt, Artificial Sequence
  Antisense Oligo
agcuugccuucacgcccug

SEQ ID NO: 36493 - RNA, 19 nt, Artificial Sequence
  Sense Oligo
agggcgugaaggcaagcug

SEQ ID NO: 36494 - RNA, 19 nt, Artificial Sequence
  Antisense Oligo
cagcuugccuucacgcccu

SEQ ID NO: 36495 - RNA, 19 nt, Artificial Sequence
  Sense Oligo
ggcgugaaggcaagcugga

SEQ ID NO: 36496 - RNA, 19 nt, Artificial Sequence
  Antisense Oligo
uccagcuugccuucacgcc

SEQ ID NO: 36497 - RNA, 19 nt, Artificial Sequence
  Sense Oligo
gcgugaaggcaagcuggag

SEQ ID NO: 36498 - RNA, 19 nt, Artificial Sequence
  Antisense Oligo
cuccagcuugccuucacgc

SEQ ID NO: 36499 - RNA, 19 nt, Artificial Sequence
  Sense Oligo
cccagaccauuagcgacag

SEQ ID NO: 36500 - RNA, 19 nt, Artificial Sequence
  Antisense Oligo
cugucgcuaauggucuggg

SEQ ID NO: 36501 - RNA, 19 nt, Artificial Sequence
  Sense Oligo
ccagaccauuagcgacagc

SEQ ID NO: 36502 - RNA, 19 nt, Artificial Sequence
  Antisense Oligo
gcugucgcuaauggucugg

SEQ ID NO: 36503 - RNA, 19 nt, Artificial Sequence
  Sense Oligo
uccguguuucuguuucuga

SEQ ID NO: 36504 - RNA, 19 nt, Artificial Sequence
  Antisense Oligo
ucagaaacagaaacacgga

SEQ ID NO: 36505 - RNA, 19 nt, Artificial Sequence
  Sense Oligo
ccguguuucuguuucugau

SEQ ID NO: 36506 - RNA, 19 nt, Artificial Sequence
  Antisense Oligo
aucagaaacagaaacacgg

SEQ ID NO: 36507 - RNA, 19 nt, Artificial Sequence
  Sense Oligo
uuucuguuucugauccagc

SEQ ID NO: 36508 - RNA, 19 nt, Artificial Sequence
  Antisense Oligo
gcuggaucagaaacagaaa

SEQ ID NO: 36509 - RNA, 19 nt, Artificial Sequence
  Sense Oligo
uguuucugauccagcccuu

SEQ ID NO: 36510 - RNA, 19 nt, Artificial Sequence
  Antisense Oligo
aagggcuggaucagaaaca

SEQ ID NO: 36511 - RNA, 19 nt, Artificial Sequence
  Sense Oligo
guuucugauccagcccuua

SEQ ID NO: 36512 - RNA, 19 nt, Artificial Sequence
  Antisense Oligo
uaagggcuggaucagaaac

SEQ ID NO: 36513 - RNA, 19 nt, Artificial Sequence
  Sense Oligo
uuucugauccagcccuuau

SEQ ID NO: 36514 - RNA, 19 nt, Artificial Sequence
  Antisense Oligo
auaagggcuggaucagaaa

SEQ ID NO: 36515 - RNA, 19 nt, Artificial Sequence
  Sense Oligo
uucugauccagcccuuaua

SEQ ID NO: 36516 - RNA, 19 nt, Artificial Sequence
  Antisense Oligo
uauaagggcuggaucagaa

SEQ ID NO: 36517 - RNA, 19 nt, Artificial Sequence
  Sense Oligo
ucugucccuagaagagcgc

SEQ ID NO: 36518 - RNA, 19 nt, Artificial Sequence
  Antisense Oligo
gcgcucuucuagggacaga

SEQ ID NO: 36519 - RNA, 19 nt, Artificial Sequence
  Sense Oligo
cugucccuagaagagcgcu

SEQ ID NO: 36520 - RNA, 19 nt, Artificial Sequence
  Antisense Oligo
agcgcucuucuagggacag

SEQ ID NO: 36521 - RNA, 19 nt, Artificial Sequence
  Sense Oligo
ugucccuagaagagcgcuu

SEQ ID NO: 36522 - RNA, 19 nt, Artificial Sequence
  Antisense Oligo
aagcgcucuucuagggaca

SEQ ID NO: 36523 - RNA, 19 nt, Artificial Sequence
  Sense Oligo
gcccaggaucucaccauca

SEQ ID NO: 36524 - RNA, 19 nt, Artificial Sequence
  Antisense Oligo
ugauggugagauccugggc

SEQ ID NO: 36525 - RNA, 19 nt, Artificial Sequence
  Sense Oligo
cccaggaucucaccaucau

SEQ ID NO: 36526 - RNA, 19 nt, Artificial Sequence
  Antisense Oligo
augauggugagauccuggg

SEQ ID NO: 36527 - RNA, 19 nt, Artificial Sequence
  Sense Oligo
ccaggaucucaccaucaug

SEQ ID NO: 36528 - RNA, 19 nt, Artificial Sequence
  Antisense Oligo
caugauggugagauccugg

SEQ ID NO: 36529 - RNA, 19 nt, Artificial Sequence
  Sense Oligo
caggaucucaccaucaugg

SEQ ID NO: 36530 - RNA, 19 nt, Artificial Sequence
  Antisense Oligo
ccaugauggugagauccug

SEQ ID NO: 36531 - RNA, 19 nt, Artificial Sequence
  Sense Oligo
aggaucucaccaucauggg

SEQ ID NO: 36532 - RNA, 19 nt, Artificial Sequence
  Antisense Oligo
cccaugauggugagauccu

SEQ ID NO: 36533 - RNA, 19 nt, Artificial Sequence
  Sense Oligo
cuucguuggacuugcgaca

SEQ ID NO: 36534 - RNA, 19 nt, Artificial Sequence
  Antisense Oligo
ugucgcaaguccaacgaag

SEQ ID NO: 36535 - RNA, 19 nt, Artificial Sequence
  Sense Oligo
uucguuggacuugcgacag

SEQ ID NO: 36536 - RNA, 19 nt, Artificial Sequence
  Antisense Oligo
cugucgcaaguccaacgaa

SEQ ID NO: 36537 - RNA, 19 nt, Artificial Sequence
  Sense Oligo
ucguuggacuugcgacagg

SEQ ID NO: 36538 - RNA, 19 nt, Artificial Sequence
  Antisense Oligo
ccugucgcaaguccaacga

SEQ ID NO: 36539 - RNA, 19 nt, Artificial Sequence
  Sense Oligo
gaugcuguguuuacuuggc

SEQ ID NO: 36540 - RNA, 19 nt, Artificial Sequence
  Antisense Oligo
gccaaguaaacacagcauc

SEQ ID NO: 36541 - RNA, 19 nt, Artificial Sequence
  Sense Oligo
augcuguguuuacuuggcc

SEQ ID NO: 36542 - RNA, 19 nt, Artificial Sequence
  Antisense Oligo
ggccaaguaaacacagcau

SEQ ID NO: 36543 - RNA, 19 nt, Artificial Sequence
  Sense Oligo
acgugagugaguguggcau

SEQ ID NO: 36544 - RNA, 19 nt, Artificial Sequence
  Antisense Oligo
augccacacucacucacgu

SEQ ID NO: 36545 - RNA, 19 nt, Artificial Sequence
  Sense Oligo
cgugagugaguguggcauc

SEQ ID NO: 36546 - RNA, 19 nt, Artificial Sequence
  Antisense Oligo
gaugccacacucacucacg

SEQ ID NO: 36547 - RNA, 19 nt, Artificial Sequence
  Sense Oligo
gugagugaguguggcaucu

SEQ ID NO: 36548 - RNA, 19 nt, Artificial Sequence
  Antisense Oligo
agaugccacacucacucac

SEQ ID NO: 36549 - RNA, 19 nt, Artificial Sequence
  Sense Oligo
cuggccagcugcuuuggga

SEQ ID NO: 36550 - RNA, 19 nt, Artificial Sequence
  Antisense Oligo
ucccaaagcagcuggccag

SEQ ID NO: 36551 - RNA, 19 nt, Artificial Sequence
  Sense Oligo
gcugcuuugggagcuggca

SEQ ID NO: 36552 - RNA, 19 nt, Artificial Sequence
  Antisense Oligo
ugccagcucccaaagcagc

SEQ ID NO: 36553 - RNA, 19 nt, Artificial Sequence
  Sense Oligo
ugcuuugggagcuggcagg

SEQ ID NO: 36554 - RNA, 19 nt, Artificial Sequence
  Antisense Oligo
ccugccagcucccaaagca

SEQ ID NO: 36555 - RNA, 19 nt, Artificial Sequence
  Sense Oligo
cuuugggagcuggcaggag

SEQ ID NO: 36556 - RNA, 19 nt, Artificial Sequence
  Antisense Oligo
cuccugccagcucccaaag

SEQ ID NO: 36557 - RNA, 19 nt, Artificial Sequence
  Sense Oligo
uuugggagcuggcaggagc

SEQ ID NO: 36558 - RNA, 19 nt, Artificial Sequence
  Antisense Oligo
gcuccugccagcucccaaa

SEQ ID NO: 36559 - RNA, 19 nt, Artificial Sequence
  Sense Oligo
cugcagcagugcccagauu

SEQ ID NO: 36560 - RNA, 19 nt, Artificial Sequence
  Antisense Oligo
aaucugggcacugcugcag

SEQ ID NO: 36561 - RNA, 19 nt, Artificial Sequence
  Sense Oligo
ugcagcagugcccagauug

SEQ ID NO: 36562 - RNA, 19 nt, Artificial Sequence
  Antisense Oligo
caaucugggcacugcugca

SEQ ID NO: 36563 - RNA, 19 nt, Artificial Sequence
  Sense Oligo
gcagcagugcccagauuga

SEQ ID NO: 36564 - RNA, 19 nt, Artificial Sequence
  Antisense Oligo
ucaaucugggcacugcugc

SEQ ID NO: 36565 - RNA, 19 nt, Artificial Sequence
  Sense Oligo
cagcagugcccagauugag

SEQ ID NO: 36566 - RNA, 19 nt, Artificial Sequence
  Antisense Oligo
cucaaucugggcacugcug

SEQ ID NO: 36567 - RNA, 19 nt, Artificial Sequence
  Sense Oligo
agcagugcccagauugagg

SEQ ID NO: 36568 - RNA, 19 nt, Artificial Sequence
  Antisense Oligo
ccucaaucugggcacugcu

SEQ ID NO: 36569 - RNA, 19 nt, Artificial Sequence
  Sense Oligo
gcagugcccagauugaggu

SEQ ID NO: 36570 - RNA, 19 nt, Artificial Sequence
  Antisense Oligo
accucaaucugggcacugc

SEQ ID NO: 36571 - RNA, 19 nt, Artificial Sequence
  Sense Oligo
cagugcccagauugaggug

SEQ ID NO: 36572 - RNA, 19 nt, Artificial Sequence
  Antisense Oligo
caccucaaucugggcacug

SEQ ID NO: 36573 - RNA, 19 nt, Artificial Sequence
  Sense Oligo
agugcccagauugaggugc

SEQ ID NO: 36574 - RNA, 19 nt, Artificial Sequence
  Antisense Oligo
gcaccucaaucugggcacu

SEQ ID NO: 36575 - RNA, 19 nt, Artificial Sequence
  Sense Oligo
gugcccagauugaggugcc

SEQ ID NO: 36576 - RNA, 19 nt, Artificial Sequence
  Antisense Oligo
ggcaccucaaucugggcac

SEQ ID NO: 36577 - RNA, 19 nt, Artificial Sequence
  Sense Oligo
ugcccagauugaggugccu

SEQ ID NO: 36578 - RNA, 19 nt, Artificial Sequence
  Antisense Oligo
aggcaccucaaucugggca

SEQ ID NO: 36579 - RNA, 19 nt, Artificial Sequence
  Sense Oligo
gcccagauugaggugccug

SEQ ID NO: 36580 - RNA, 19 nt, Artificial Sequence
  Antisense Oligo
caggcaccucaaucugggc

SEQ ID NO: 36581 - RNA, 19 nt, Artificial Sequence
  Sense Oligo
cccagauugaggugccugc

SEQ ID NO: 36582 - RNA, 19 nt, Artificial Sequence
  Antisense Oligo
gcaggcaccucaaucuggg

SEQ ID NO: 36583 - RNA, 19 nt, Artificial Sequence
  Sense Oligo
ccagauugaggugccugca

SEQ ID NO: 36584 - RNA, 19 nt, Artificial Sequence
  Antisense Oligo
ugcaggcaccucaaucugg

SEQ ID NO: 36585 - RNA, 19 nt, Artificial Sequence
  Sense Oligo
cagauugaggugccugcaa

SEQ ID NO: 36586 - RNA, 19 nt, Artificial Sequence
  Antisense Oligo
uugcaggcaccucaaucug

SEQ ID NO: 36587 - RNA, 19 nt, Artificial Sequence
  Sense Oligo
agauugaggugccugcaac

SEQ ID NO: 36588 - RNA, 19 nt, Artificial Sequence
  Antisense Oligo
guugcaggcaccucaaucu

SEQ ID NO: 36589 - RNA, 19 nt, Artificial Sequence
  Sense Oligo
gauugaggugccugcaacc

SEQ ID NO: 36590 - RNA, 19 nt, Artificial Sequence
  Antisense Oligo
gguugcaggcaccucaauc

SEQ ID NO: 36591 - RNA, 19 nt, Artificial Sequence
  Sense Oligo
auugaggugccugcaaccc

SEQ ID NO: 36592 - RNA, 19 nt, Artificial Sequence
  Antisense Oligo
ggguugcaggcaccucaau

SEQ ID NO: 36593 - RNA, 19 nt, Artificial Sequence
  Sense Oligo
agugcucucuuagcuccgc

SEQ ID NO: 36594 - RNA, 19 nt, Artificial Sequence
  Antisense Oligo
gcggagcuaagagagcacu

SEQ ID NO: 36595 - RNA, 19 nt, Artificial Sequence
  Sense Oligo
ucagcucagugggucccuu

SEQ ID NO: 36596 - RNA, 19 nt, Artificial Sequence
  Antisense Oligo
aagggacccacugagcuga

SEQ ID NO: 36597 - RNA, 19 nt, Artificial Sequence
  Sense Oligo
cagcucagugggucccuug

SEQ ID NO: 36598 - RNA, 19 nt, Artificial Sequence
  Antisense Oligo
caagggacccacugagcug

SEQ ID NO: 36599 - RNA, 19 nt, Artificial Sequence
  Sense Oligo
gugggucccuugccuuguu

SEQ ID NO: 36600 - RNA, 19 nt, Artificial Sequence
  Antisense Oligo
aacaaggcaagggacccac

SEQ ID NO: 36601 - RNA, 19 nt, Artificial Sequence
  Sense Oligo
gucccuugccuuguugccu

SEQ ID NO: 36602 - RNA, 19 nt, Artificial Sequence
  Antisense Oligo
aggcaacaaggcaagggac

SEQ ID NO: 36603 - RNA, 19 nt, Artificial Sequence
  Sense Oligo
ucccuugccuuguugccua

SEQ ID NO: 36604 - RNA, 19 nt, Artificial Sequence
  Antisense Oligo
uaggcaacaaggcaaggga

SEQ ID NO: 36605 - RNA, 19 nt, Artificial Sequence
  Sense Oligo
cccuugccuuguugccuag

SEQ ID NO: 36606 - RNA, 19 nt, Artificial Sequence
  Antisense Oligo
cuaggcaacaaggcaaggg

SEQ ID NO: 36607 - RNA, 19 nt, Artificial Sequence
  Sense Oligo
cuuguugccuaggguggcu

SEQ ID NO: 36608 - RNA, 19 nt, Artificial Sequence
  Antisense Oligo
agccacccuaggcaacaag

SEQ ID NO: 36609 - RNA, 19 nt, Artificial Sequence
  Sense Oligo
uuguugccuaggguggcug

SEQ ID NO: 36610 - RNA, 19 nt, Artificial Sequence
  Antisense Oligo
cagccacccuaggcaacaa

SEQ ID NO: 36611 - RNA, 19 nt, Artificial Sequence
  Sense Oligo
uguugccuaggguggcugc

SEQ ID NO: 36612 - RNA, 19 nt, Artificial Sequence
  Antisense Oligo
gcagccacccuaggcaaca

SEQ ID NO: 36613 - RNA, 19 nt, Artificial Sequence
  Sense Oligo
cucugccagggccaaugug

SEQ ID NO: 36614 - RNA, 19 nt, Artificial Sequence
  Antisense Oligo
cacauuggcccuggcagag

SEQ ID NO: 36615 - RNA, 19 nt, Artificial Sequence
  Sense Oligo
gccagggccaaugugacag

SEQ ID NO: 36616 - RNA, 19 nt, Artificial Sequence
  Antisense Oligo
cugucacauuggcccuggc

SEQ ID NO: 36617 - RNA, 19 nt, Artificial Sequence
  Sense Oligo
ccagggccaaugugacagc

SEQ ID NO: 36618 - RNA, 19 nt, Artificial Sequence
  Antisense Oligo
gcugucacauuggcccugg

SEQ ID NO: 36619 - RNA, 19 nt, Artificial Sequence
  Sense Oligo
aaugugacagccucuuuua

SEQ ID NO: 36620 - RNA, 19 nt, Artificial Sequence
  Antisense Oligo
uaaaagaggcugucacauu

SEQ ID NO: 36621 - RNA, 19 nt, Artificial Sequence
  Sense Oligo
augugacagccucuuuuag

SEQ ID NO: 36622 - RNA, 19 nt, Artificial Sequence
  Antisense Oligo
cuaaaagaggcugucacau

SEQ ID NO: 36623 - RNA, 19 nt, Artificial Sequence
  Sense Oligo
ugugacagccucuuuuagg

SEQ ID NO: 36624 - RNA, 19 nt, Artificial Sequence
  Antisense Oligo
ccuaaaagaggcugucaca

SEQ ID NO: 36625 - RNA, 19 nt, Artificial Sequence
  Sense Oligo
gacagccucuuuuagguac

SEQ ID NO: 36626 - RNA, 19 nt, Artificial Sequence
  Antisense Oligo
guaccuaaaagaggcuguc

SEQ ID NO: 36627 - RNA, 19 nt, Artificial Sequence
  Sense Oligo
acagccucuuuuagguacc

SEQ ID NO: 36628 - RNA, 19 nt, Artificial Sequence
  Antisense Oligo
gguaccuaaaagaggcugu

SEQ ID NO: 36629 - RNA, 19 nt, Artificial Sequence
  Sense Oligo
cagccucuuuuagguaccc

SEQ ID NO: 36630 - RNA, 19 nt, Artificial Sequence
  Antisense Oligo
ggguaccuaaaagaggcug

SEQ ID NO: 36631 - RNA, 19 nt, Artificial Sequence
  Sense Oligo
agccucuuuuagguaccca

SEQ ID NO: 36632 - RNA, 19 nt, Artificial Sequence
  Antisense Oligo
uggguaccuaaaagaggcu

SEQ ID NO: 36633 - RNA, 19 nt, Artificial Sequence
  Sense Oligo
gccucuuuuagguacccac

SEQ ID NO: 36634 - RNA, 19 nt, Artificial Sequence
  Antisense Oligo
guggguaccuaaaagaggc

SEQ ID NO: 36635 - RNA, 19 nt, Artificial Sequence
  Sense Oligo
cuuuuagguacccacacuc

SEQ ID NO: 36636 - RNA, 19 nt, Artificial Sequence
  Antisense Oligo
gaguguggguaccuaaaag

SEQ ID NO: 36637 - RNA, 19 nt, Artificial Sequence
  Sense Oligo
uuuuagguacccacacucg

SEQ ID NO: 36638 - RNA, 19 nt, Artificial Sequence
  Antisense Oligo
cgaguguggguaccuaaaa

SEQ ID NO: 36639 - RNA, 19 nt, Artificial Sequence
  Sense Oligo
uuuagguacccacacucgg

SEQ ID NO: 36640 - RNA, 19 nt, Artificial Sequence
  Antisense Oligo
ccgaguguggguaccuaaa

SEQ ID NO: 36641 - RNA, 19 nt, Artificial Sequence
  Sense Oligo
uuagguacccacacucggu

SEQ ID NO: 36642 - RNA, 19 nt, Artificial Sequence
  Antisense Oligo
accgaguguggguaccuaa

SEQ ID NO: 36643 - RNA, 19 nt, Artificial Sequence
  Sense Oligo
uagguacccacacucggug

SEQ ID NO: 36644 - RNA, 19 nt, Artificial Sequence
  Antisense Oligo
caccgaguguggguaccua

SEQ ID NO: 36645 - RNA, 19 nt, Artificial Sequence
  Sense Oligo
gggaaucuuccucuggucc

SEQ ID NO: 36646 - RNA, 19 nt, Artificial Sequence
  Antisense Oligo
ggaccagaggaagauuccc

SEQ ID NO: 36647 - RNA, 19 nt, Artificial Sequence
  Sense Oligo
ggaaucuuccucuggucca

SEQ ID NO: 36648 - RNA, 19 nt, Artificial Sequence
  Antisense Oligo
uggaccagaggaagauucc

SEQ ID NO: 36649 - RNA, 19 nt, Artificial Sequence
  Sense Oligo
ucuuccucugguccaggug

SEQ ID NO: 36650 - RNA, 19 nt, Artificial Sequence
  Antisense Oligo
caccuggaccagaggaaga

SEQ ID NO: 36651 - RNA, 19 nt, Artificial Sequence
  Sense Oligo
uccucugguccaggugucu

SEQ ID NO: 36652 - RNA, 19 nt, Artificial Sequence
  Antisense Oligo
agacaccuggaccagagga

SEQ ID NO: 36653 - RNA, 19 nt, Artificial Sequence
  Sense Oligo
ccucugguccaggugucug

SEQ ID NO: 36654 - RNA, 19 nt, Artificial Sequence
  Antisense Oligo
cagacaccuggaccagagg

SEQ ID NO: 36655 - RNA, 19 nt, Artificial Sequence
  Sense Oligo
aaccgucucuccuuggaag

SEQ ID NO: 36656 - RNA, 19 nt, Artificial Sequence
  Antisense Oligo
cuuccaaggagagacgguu

SEQ ID NO: 36657 - RNA, 19 nt, Artificial Sequence
  Sense Oligo
accgucucuccuuggaagu

SEQ ID NO: 36658 - RNA, 19 nt, Artificial Sequence
  Antisense Oligo
acuuccaaggagagacggu

SEQ ID NO: 36659 - RNA, 19 nt, Artificial Sequence
  Sense Oligo
ccgucucuccuuggaaguc

SEQ ID NO: 36660 - RNA, 19 nt, Artificial Sequence
  Antisense Oligo
gacuuccaaggagagacgg

SEQ ID NO: 36661 - RNA, 19 nt, Artificial Sequence
  Sense Oligo
cgucucuccuuggaagucc

SEQ ID NO: 36662 - RNA, 19 nt, Artificial Sequence
  Antisense Oligo
ggacuuccaaggagagacg

SEQ ID NO: 36663 - RNA, 19 nt, Artificial Sequence
  Sense Oligo
uuggaaguccagccauccc

SEQ ID NO: 36664 - RNA, 19 nt, Artificial Sequence
  Antisense Oligo
gggauggcuggacuuccaa

SEQ ID NO: 36665 - RNA, 19 nt, Artificial Sequence
  Sense Oligo
caagucaccuguuuccagu

SEQ ID NO: 36666 - RNA, 19 nt, Artificial Sequence
  Antisense Oligo
acuggaaacaggugacuug

SEQ ID NO: 36667 - RNA, 19 nt, Artificial Sequence
  Sense Oligo
aagucaccuguuuccagug

SEQ ID NO: 36668 - RNA, 19 nt, Artificial Sequence
  Antisense Oligo
cacuggaaacaggugacuu

SEQ ID NO: 36669 - RNA, 19 nt, Artificial Sequence
  Sense Oligo
caccuguuuccagugaagc

SEQ ID NO: 36670 - RNA, 19 nt, Artificial Sequence
  Antisense Oligo
gcuucacuggaaacaggug

SEQ ID NO: 36671 - RNA, 19 nt, Artificial Sequence
  Sense Oligo
accuguuuccagugaagcu

SEQ ID NO: 36672 - RNA, 19 nt, Artificial Sequence
  Antisense Oligo
agcuucacuggaaacaggu

SEQ ID NO: 36673 - RNA, 19 nt, Artificial Sequence
  Sense Oligo
ccuguuuccagugaagcua

SEQ ID NO: 36674 - RNA, 19 nt, Artificial Sequence
  Antisense Oligo
uagcuucacuggaaacagg

SEQ ID NO: 36675 - RNA, 19 nt, Artificial Sequence
  Sense Oligo
cuguuuccagugaagcuac

SEQ ID NO: 36676 - RNA, 19 nt, Artificial Sequence
  Antisense Oligo
guagcuucacuggaaacag

SEQ ID NO: 36677 - RNA, 19 nt, Artificial Sequence
  Sense Oligo
uguuuccagugaagcuacu

SEQ ID NO: 36678 - RNA, 19 nt, Artificial Sequence
  Antisense Oligo
aguagcuucacuggaaaca

SEQ ID NO: 36679 - RNA, 19 nt, Artificial Sequence
  Sense Oligo
aagcuacuucucucucacu

SEQ ID NO: 36680 - RNA, 19 nt, Artificial Sequence
  Antisense Oligo
agugagagagaaguagcuu

SEQ ID NO: 36681 - RNA, 19 nt, Artificial Sequence
  Sense Oligo
agcuacuucucucucacua

SEQ ID NO: 36682 - RNA, 19 nt, Artificial Sequence
  Antisense Oligo
uagugagagagaaguagcu

SEQ ID NO: 36683 - RNA, 19 nt, Artificial Sequence
  Sense Oligo
acuucucucucacuaccaa

SEQ ID NO: 36684 - RNA, 19 nt, Artificial Sequence
  Antisense Oligo
uugguagugagagagaagu

SEQ ID NO: 36685 - RNA, 19 nt, Artificial Sequence
  Sense Oligo
cuucucucucacuaccaag

SEQ ID NO: 36686 - RNA, 19 nt, Artificial Sequence
  Antisense Oligo
cuugguagugagagagaag

SEQ ID NO: 36687 - RNA, 19 nt, Artificial Sequence
  Sense Oligo
uucucucucacuaccaagu

SEQ ID NO: 36688 - RNA, 19 nt, Artificial Sequence
  Antisense Oligo
acuugguagugagagagaa

SEQ ID NO: 36689 - RNA, 19 nt, Artificial Sequence
  Sense Oligo
ucucucucacuaccaaguc

SEQ ID NO: 36690 - RNA, 19 nt, Artificial Sequence
  Antisense Oligo
gacuugguagugagagaga

SEQ ID NO: 36691 - RNA, 19 nt, Artificial Sequence
  Sense Oligo
cucucucacuaccaagucu

SEQ ID NO: 36692 - RNA, 19 nt, Artificial Sequence
  Antisense Oligo
agacuugguagugagagag

SEQ ID NO: 36693 - RNA, 19 nt, Artificial Sequence
  Sense Oligo
ucucucacuaccaagucug

SEQ ID NO: 36694 - RNA, 19 nt, Artificial Sequence
  Antisense Oligo
cagacuugguagugagaga

SEQ ID NO: 36695 - RNA, 19 nt, Artificial Sequence
  Sense Oligo
cucucacuaccaagucugg

SEQ ID NO: 36696 - RNA, 19 nt, Artificial Sequence
  Antisense Oligo
ccagacuugguagugagag

SEQ ID NO: 36697 - RNA, 19 nt, Artificial Sequence
  Sense Oligo
ucucacuaccaagucuggg

SEQ ID NO: 36698 - RNA, 19 nt, Artificial Sequence
  Antisense Oligo
cccagacuugguagugaga

SEQ ID NO: 36699 - RNA, 19 nt, Artificial Sequence
  Sense Oligo
ggcccuagguaguuuugga

SEQ ID NO: 36700 - RNA, 19 nt, Artificial Sequence
  Antisense Oligo
uccaaaacuaccuagggcc

SEQ ID NO: 36701 - RNA, 19 nt, Artificial Sequence
  Sense Oligo
gcccuagguaguuuuggaa

SEQ ID NO: 36702 - RNA, 19 nt, Artificial Sequence
  Antisense Oligo
uuccaaaacuaccuagggc

SEQ ID NO: 36703 - RNA, 19 nt, Artificial Sequence
  Sense Oligo
ccugucugcguaggauuuc

SEQ ID NO: 36704 - RNA, 19 nt, Artificial Sequence
  Antisense Oligo
gaaauccuacgcagacagg

SEQ ID NO: 36705 - RNA, 19 nt, Artificial Sequence
  Sense Oligo
cugucugcguaggauuucu

SEQ ID NO: 36706 - RNA, 19 nt, Artificial Sequence
  Antisense Oligo
agaaauccuacgcagacag

SEQ ID NO: 36707 - RNA, 19 nt, Artificial Sequence
  Sense Oligo
ccuccugccuccaucaaug

SEQ ID NO: 36708 - RNA, 19 nt, Artificial Sequence
  Antisense Oligo
cauugauggaggcaggagg

SEQ ID NO: 36709 - RNA, 19 nt, Artificial Sequence
  Sense Oligo
cuccugccuccaucaaugg

SEQ ID NO: 36710 - RNA, 19 nt, Artificial Sequence
  Antisense Oligo
ccauugauggaggcaggag

SEQ ID NO: 36711 - RNA, 19 nt, Artificial Sequence
  Sense Oligo
uccugccuccaucaauggg

SEQ ID NO: 36712 - RNA, 19 nt, Artificial Sequence
  Antisense Oligo
cccauugauggaggcagga

SEQ ID NO: 36713 - RNA, 19 nt, Artificial Sequence
  Sense Oligo
uaggcaggaagucuaagug

SEQ ID NO: 36714 - RNA, 19 nt, Artificial Sequence
  Antisense Oligo
cacuuagacuuccugccua

SEQ ID NO: 36715 - RNA, 19 nt, Artificial Sequence
  Sense Oligo
aggcaggaagucuaagugg

SEQ ID NO: 36716 - RNA, 19 nt, Artificial Sequence
  Antisense Oligo
ccacuuagacuuccugccu

SEQ ID NO: 36717 - RNA, 19 nt, Artificial Sequence
  Sense Oligo
aggaagucuaaguggccug

SEQ ID NO: 36718 - RNA, 19 nt, Artificial Sequence
  Antisense Oligo
caggccacuuagacuuccu

SEQ ID NO: 36719 - RNA, 19 nt, Artificial Sequence
  Sense Oligo
ggaagucuaaguggccugu

SEQ ID NO: 36720 - RNA, 19 nt, Artificial Sequence
  Antisense Oligo
acaggccacuuagacuucc

SEQ ID NO: 36721 - RNA, 19 nt, Artificial Sequence
  Sense Oligo
gaagucuaaguggccuguu

SEQ ID NO: 36722 - RNA, 19 nt, Artificial Sequence
  Antisense Oligo
aacaggccacuuagacuuc

SEQ ID NO: 36723 - RNA, 19 nt, Artificial Sequence
  Sense Oligo
aagucuaaguggccuguug

SEQ ID NO: 36724 - RNA, 19 nt, Artificial Sequence
  Antisense Oligo
caacaggccacuuagacuu

SEQ ID NO: 36725 - RNA, 19 nt, Artificial Sequence
  Sense Oligo
agucuaaguggccuguugg

SEQ ID NO: 36726 - RNA, 19 nt, Artificial Sequence
  Antisense Oligo
ccaacaggccacuuagacu

SEQ ID NO: 36727 - RNA, 19 nt, Artificial Sequence
  Sense Oligo
gucuaaguggccuguuggu

SEQ ID NO: 36728 - RNA, 19 nt, Artificial Sequence
  Antisense Oligo
accaacaggccacuuagac

SEQ ID NO: 36729 - RNA, 19 nt, Artificial Sequence
  Sense Oligo
ucuaaguggccuguuggug

SEQ ID NO: 36730 - RNA, 19 nt, Artificial Sequence
  Antisense Oligo
caccaacaggccacuuaga

SEQ ID NO: 36731 - RNA, 19 nt, Artificial Sequence
  Sense Oligo
cuaaguggccuguugguga

SEQ ID NO: 36732 - RNA, 19 nt, Artificial Sequence
  Antisense Oligo
ucaccaacaggccacuuag

SEQ ID NO: 36733 - RNA, 19 nt, Artificial Sequence
  Sense Oligo
uaaguggccuguuggugac

SEQ ID NO: 36734 - RNA, 19 nt, Artificial Sequence
  Antisense Oligo
gucaccaacaggccacuua

SEQ ID NO: 36735 - RNA, 19 nt, Artificial Sequence
  Sense Oligo
aaguggccuguuggugaca

SEQ ID NO: 36736 - RNA, 19 nt, Artificial Sequence
  Antisense Oligo
ugucaccaacaggccacuu

SEQ ID NO: 36737 - RNA, 19 nt, Artificial Sequence
  Sense Oligo
cccucaugcugaauuaagg

SEQ ID NO: 36738 - RNA, 19 nt, Artificial Sequence
  Antisense Oligo
ccuuaauucagcaugaggg

SEQ ID NO: 36739 - RNA, 19 nt, Artificial Sequence
  Sense Oligo
ccucaugcugaauuaaggc

SEQ ID NO: 36740 - RNA, 19 nt, Artificial Sequence
  Antisense Oligo
gccuuaauucagcaugagg

SEQ ID NO: 36741 - RNA, 19 nt, Artificial Sequence
  Sense Oligo
cucaugcugaauuaaggcc

SEQ ID NO: 36742 - RNA, 19 nt, Artificial Sequence
  Antisense Oligo
ggccuuaauucagcaugag

SEQ ID NO: 36743 - RNA, 19 nt, Artificial Sequence
  Sense Oligo
ucaugcugaauuaaggccu

SEQ ID NO: 36744 - RNA, 19 nt, Artificial Sequence
  Antisense Oligo
aggccuuaauucagcauga

SEQ ID NO: 36745 - RNA, 19 nt, Artificial Sequence
  Sense Oligo
caugcugaauuaaggccug

SEQ ID NO: 36746 - RNA, 19 nt, Artificial Sequence
  Antisense Oligo
caggccuuaauucagcaug

SEQ ID NO: 36747 - RNA, 19 nt, Artificial Sequence
  Sense Oligo
augcugaauuaaggccuga

SEQ ID NO: 36748 - RNA, 19 nt, Artificial Sequence
  Antisense Oligo
ucaggccuuaauucagcau

SEQ ID NO: 36749 - RNA, 19 nt, Artificial Sequence
  Sense Oligo
ugcugaauuaaggccugag

SEQ ID NO: 36750 - RNA, 19 nt, Artificial Sequence
  Antisense Oligo
cucaggccuuaauucagca

SEQ ID NO: 36751 - RNA, 19 nt, Artificial Sequence
  Sense Oligo
gcugaauuaaggccugagg

SEQ ID NO: 36752 - RNA, 19 nt, Artificial Sequence
  Antisense Oligo
ccucaggccuuaauucagc

SEQ ID NO: 36753 - RNA, 19 nt, Artificial Sequence
  Sense Oligo
cugaauuaaggccugaggc

SEQ ID NO: 36754 - RNA, 19 nt, Artificial Sequence
  Antisense Oligo
gccucaggccuuaauucag

SEQ ID NO: 36755 - RNA, 19 nt, Artificial Sequence
  Sense Oligo
ugaauuaaggccugaggcu

SEQ ID NO: 36756 - RNA, 19 nt, Artificial Sequence
  Antisense Oligo
agccucaggccuuaauuca

SEQ ID NO: 36757 - RNA, 19 nt, Artificial Sequence
  Sense Oligo
gaauuaaggccugaggcuc

SEQ ID NO: 36758 - RNA, 19 nt, Artificial Sequence
  Antisense Oligo
gagccucaggccuuaauuc

SEQ ID NO: 36759 - RNA, 19 nt, Artificial Sequence
  Sense Oligo
aauuaaggccugaggcuca

SEQ ID NO: 36760 - RNA, 19 nt, Artificial Sequence
  Antisense Oligo
ugagccucaggccuuaauu

SEQ ID NO: 36761 - RNA, 19 nt, Artificial Sequence
  Sense Oligo
auuaaggccugaggcucaa

SEQ ID NO: 36762 - RNA, 19 nt, Artificial Sequence
  Antisense Oligo
uugagccucaggccuuaau

SEQ ID NO: 36763 - RNA, 19 nt, Artificial Sequence
  Sense Oligo
uuaaggccugaggcucaag

SEQ ID NO: 36764 - RNA, 19 nt, Artificial Sequence
  Antisense Oligo
cuugagccucaggccuuaa

SEQ ID NO: 36765 - RNA, 19 nt, Artificial Sequence
  Sense Oligo
uaaggccugaggcucaagg

SEQ ID NO: 36766 - RNA, 19 nt, Artificial Sequence
  Antisense Oligo
ccuugagccucaggccuua

SEQ ID NO: 36767 - RNA, 19 nt, Artificial Sequence
  Sense Oligo
aaggccugaggcucaagga

SEQ ID NO: 36768 - RNA, 19 nt, Artificial Sequence
  Antisense Oligo
uccuugagccucaggccuu

SEQ ID NO: 36769 - RNA, 19 nt, Artificial Sequence
  Sense Oligo
aggccugaggcucaaggaa

SEQ ID NO: 36770 - RNA, 19 nt, Artificial Sequence
  Antisense Oligo
uuccuugagccucaggccu

SEQ ID NO: 36771 - RNA, 19 nt, Artificial Sequence
  Sense Oligo
cucuaucgcccaggcugga

SEQ ID NO: 36772 - RNA, 19 nt, Artificial Sequence
  Antisense Oligo
uccagccugggcgauagag

SEQ ID NO: 36773 - RNA, 19 nt, Artificial Sequence
  Sense Oligo
ucuaucgcccaggcuggag

SEQ ID NO: 36774 - RNA, 19 nt, Artificial Sequence
  Antisense Oligo
cuccagccugggcgauaga

SEQ ID NO: 36775 - RNA, 19 nt, Artificial Sequence
  Sense Oligo
uagcugggacuacaggcgc

SEQ ID NO: 36776 - RNA, 19 nt, Artificial Sequence
  Antisense Oligo
gcgccuguagucccagcua

SEQ ID NO: 36777 - RNA, 19 nt, Artificial Sequence
  Sense Oligo
ggguuucaccguguuagcc

SEQ ID NO: 36778 - RNA, 19 nt, Artificial Sequence
  Antisense Oligo
ggcuaacacggugaaaccc

SEQ ID NO: 36779 - RNA, 19 nt, Artificial Sequence
  Sense Oligo
gguuucaccguguuagcca

SEQ ID NO: 36780 - RNA, 19 nt, Artificial Sequence
  Antisense Oligo
uggcuaacacggugaaacc

SEQ ID NO: 36781 - RNA, 19 nt, Artificial Sequence
  Sense Oligo
caccguguuagccaggaug

SEQ ID NO: 36782 - RNA, 19 nt, Artificial Sequence
  Antisense Oligo
cauccuggcuaacacggug

SEQ ID NO: 36783 - RNA, 19 nt, Artificial Sequence
  Sense Oligo
accguguuagccaggaugg

SEQ ID NO: 36784 - RNA, 19 nt, Artificial Sequence
  Antisense Oligo
ccauccuggcuaacacggu

SEQ ID NO: 36785 - RNA, 19 nt, Artificial Sequence
  Sense Oligo
ccguguuagccaggauggu

SEQ ID NO: 36786 - RNA, 19 nt, Artificial Sequence
  Antisense Oligo
accauccuggcuaacacgg

SEQ ID NO: 36787 - RNA, 19 nt, Artificial Sequence
  Sense Oligo
cguguuagccaggaugguc

SEQ ID NO: 36788 - RNA, 19 nt, Artificial Sequence
  Antisense Oligo
gaccauccuggcuaacacg

SEQ ID NO: 36789 - RNA, 19 nt, Artificial Sequence
  Sense Oligo
guguuagccaggauggucu

SEQ ID NO: 36790 - RNA, 19 nt, Artificial Sequence
  Antisense Oligo
agaccauccuggcuaacac

SEQ ID NO: 36791 - RNA, 19 nt, Artificial Sequence
  Sense Oligo
uguuagccaggauggucuc

SEQ ID NO: 36792 - RNA, 19 nt, Artificial Sequence
  Antisense Oligo
gagaccauccuggcuaaca

SEQ ID NO: 36793 - RNA, 19 nt, Artificial Sequence
  Sense Oligo
guuagccaggauggucucg

SEQ ID NO: 36794 - RNA, 19 nt, Artificial Sequence
  Antisense Oligo
cgagaccauccuggcuaac

SEQ ID NO: 36795 - RNA, 19 nt, Artificial Sequence
  Sense Oligo
uuagccaggauggucucga

SEQ ID NO: 36796 - RNA, 19 nt, Artificial Sequence
  Antisense Oligo
ucgagaccauccuggcuaa

SEQ ID NO: 36797 - RNA, 19 nt, Artificial Sequence
  Sense Oligo
uagccaggauggucucgau

SEQ ID NO: 36798 - RNA, 19 nt, Artificial Sequence
  Antisense Oligo
aucgagaccauccuggcua

SEQ ID NO: 36799 - RNA, 19 nt, Artificial Sequence
  Sense Oligo
caggauggucucgaucucc

SEQ ID NO: 36800 - RNA, 19 nt, Artificial Sequence
  Antisense Oligo
ggagaucgagaccauccug

SEQ ID NO: 36801 - RNA, 19 nt, Artificial Sequence
  Sense Oligo
ggauggucucgaucuccug

SEQ ID NO: 36802 - RNA, 19 nt, Artificial Sequence
  Antisense Oligo
caggagaucgagaccaucc

SEQ ID NO: 36803 - RNA, 19 nt, Artificial Sequence
  Sense Oligo
gauggucucgaucuccuga

SEQ ID NO: 36804 - RNA, 19 nt, Artificial Sequence
  Antisense Oligo
ucaggagaucgagaccauc

SEQ ID NO: 36805 - RNA, 19 nt, Artificial Sequence
  Sense Oligo
auggucucgaucuccugac

SEQ ID NO: 36806 - RNA, 19 nt, Artificial Sequence
  Antisense Oligo
gucaggagaucgagaccau

SEQ ID NO: 36807 - RNA, 19 nt, Artificial Sequence
  Sense Oligo
cucgaucuccugaccucgu

SEQ ID NO: 36808 - RNA, 19 nt, Artificial Sequence
  Antisense Oligo
acgaggucaggagaucgag

SEQ ID NO: 36809 - RNA, 19 nt, Artificial Sequence
  Sense Oligo
ucgaucuccugaccucgug

SEQ ID NO: 36810 - RNA, 19 nt, Artificial Sequence
  Antisense Oligo
cacgaggucaggagaucga

SEQ ID NO: 36811 - RNA, 19 nt, Artificial Sequence
  Sense Oligo
cgaucuccugaccucguga

SEQ ID NO: 36812 - RNA, 19 nt, Artificial Sequence
  Antisense Oligo
ucacgaggucaggagaucg

SEQ ID NO: 36813 - RNA, 19 nt, Artificial Sequence
  Sense Oligo
gaucuccugaccucgugau

SEQ ID NO: 36814 - RNA, 19 nt, Artificial Sequence
  Antisense Oligo
aucacgaggucaggagauc

SEQ ID NO: 36815 - RNA, 19 nt, Artificial Sequence
  Sense Oligo
aucuccugaccucgugauc

SEQ ID NO: 36816 - RNA, 19 nt, Artificial Sequence
  Antisense Oligo
gaucacgaggucaggagau

SEQ ID NO: 36817 - RNA, 19 nt, Artificial Sequence
  Sense Oligo
ucuccugaccucgugaucc

SEQ ID NO: 36818 - RNA, 19 nt, Artificial Sequence
  Antisense Oligo
ggaucacgaggucaggaga

SEQ ID NO: 36819 - RNA, 19 nt, Artificial Sequence
  Sense Oligo
cuccugaccucgugaucca

SEQ ID NO: 36820 - RNA, 19 nt, Artificial Sequence
  Antisense Oligo
uggaucacgaggucaggag

SEQ ID NO: 36821 - RNA, 19 nt, Artificial Sequence
  Sense Oligo
uccugaccucgugauccac

SEQ ID NO: 36822 - RNA, 19 nt, Artificial Sequence
  Antisense Oligo
guggaucacgaggucagga

SEQ ID NO: 36823 - RNA, 19 nt, Artificial Sequence
  Sense Oligo
ccugaccucgugauccacc

SEQ ID NO: 36824 - RNA, 19 nt, Artificial Sequence
  Antisense Oligo
gguggaucacgaggucagg

SEQ ID NO: 36825 - RNA, 19 nt, Artificial Sequence
  Sense Oligo
uguaacuguuaaauggauc

SEQ ID NO: 36826 - RNA, 19 nt, Artificial Sequence
  Antisense Oligo
gauccauuuaacaguuaca

SEQ ID NO: 36827 - RNA, 19 nt, Artificial Sequence
  Sense Oligo
guaacuguuaaauggaucu

SEQ ID NO: 36828 - RNA, 19 nt, Artificial Sequence
  Antisense Oligo
agauccauuuaacaguuac

SEQ ID NO: 36829 - RNA, 19 nt, Artificial Sequence
  Sense Oligo
augucucauaacuuaccug

SEQ ID NO: 36830 - RNA, 19 nt, Artificial Sequence
  Antisense Oligo
cagguaaguuaugagacau

SEQ ID NO: 36831 - RNA, 19 nt, Artificial Sequence
  Sense Oligo
ugucucauaacuuaccugu

SEQ ID NO: 36832 - RNA, 19 nt, Artificial Sequence
  Antisense Oligo
acagguaaguuaugagaca

SEQ ID NO: 36833 - RNA, 19 nt, Artificial Sequence
  Sense Oligo
gucucauaacuuaccuguu

SEQ ID NO: 36834 - RNA, 19 nt, Artificial Sequence
  Antisense Oligo
aacagguaaguuaugagac

SEQ ID NO: 36835 - RNA, 19 nt, Artificial Sequence
  Sense Oligo
ucucauaacuuaccuguuu

SEQ ID NO: 36836 - RNA, 19 nt, Artificial Sequence
  Antisense Oligo
aaacagguaaguuaugaga

SEQ ID NO: 36837 - RNA, 19 nt, Artificial Sequence
  Sense Oligo
cucauaacuuaccuguuuu

SEQ ID NO: 36838 - RNA, 19 nt, Artificial Sequence
  Antisense Oligo
aaaacagguaaguuaugag

SEQ ID NO: 36839 - RNA, 19 nt, Artificial Sequence
  Sense Oligo
uaaauuuuagccuuugguc

SEQ ID NO: 36840 - RNA, 19 nt, Artificial Sequence
  Antisense Oligo
gaccaaaggcuaaaauuua

SEQ ID NO: 36841 - RNA, 19 nt, Artificial Sequence
  Sense Oligo
aaauuuuagccuuuggucu

SEQ ID NO: 36842 - RNA, 19 nt, Artificial Sequence
  Antisense Oligo
agaccaaaggcuaaaauuu

SEQ ID NO: 36843 - RNA, 19 nt, Artificial Sequence
  Sense Oligo
aauuuuagccuuuggucua

SEQ ID NO: 36844 - RNA, 19 nt, Artificial Sequence
  Antisense Oligo
uagaccaaaggcuaaaauu

SEQ ID NO: 36845 - RNA, 19 nt, Artificial Sequence
  Sense Oligo
auuuuagccuuuggucuac

SEQ ID NO: 36846 - RNA, 19 nt, Artificial Sequence
  Antisense Oligo
guagaccaaaggcuaaaau

SEQ ID NO: 36847 - RNA, 19 nt, Artificial Sequence
  Sense Oligo
agccuuuggucuacuggug

SEQ ID NO: 36848 - RNA, 19 nt, Artificial Sequence
  Antisense Oligo
caccaguagaccaaaggcu

SEQ ID NO: 36849 - RNA, 19 nt, Artificial Sequence
  Sense Oligo
gccuuuggucuacuggugg

SEQ ID NO: 36850 - RNA, 19 nt, Artificial Sequence
  Antisense Oligo
ccaccaguagaccaaaggc

SEQ ID NO: 36851 - RNA, 19 nt, Artificial Sequence
  Sense Oligo
ccuuuggucuacugguggg

SEQ ID NO: 36852 - RNA, 19 nt, Artificial Sequence
  Antisense Oligo
cccaccaguagaccaaagg

SEQ ID NO: 36853 - RNA, 19 nt, Artificial Sequence
  Sense Oligo
gggcagggaggacaugcuu

SEQ ID NO: 36854 - RNA, 19 nt, Artificial Sequence
  Antisense Oligo
aagcauguccucccugccc

SEQ ID NO: 36855 - RNA, 19 nt, Artificial Sequence
  Sense Oligo
ggcagggaggacaugcuuu

SEQ ID NO: 36856 - RNA, 19 nt, Artificial Sequence
  Antisense Oligo
aaagcauguccucccugcc

SEQ ID NO: 36857 - RNA, 19 nt, Artificial Sequence
  Sense Oligo
gggaggacaugcuuugcgu

SEQ ID NO: 36858 - RNA, 19 nt, Artificial Sequence
  Antisense Oligo
acgcaaagcauguccuccc

SEQ ID NO: 36859 - RNA, 19 nt, Artificial Sequence
  Sense Oligo
ggaggacaugcuuugcgug

SEQ ID NO: 36860 - RNA, 19 nt, Artificial Sequence
  Antisense Oligo
cacgcaaagcauguccucc

SEQ ID NO: 36861 - RNA, 19 nt, Artificial Sequence
  Sense Oligo
gaggacaugcuuugcgugg

SEQ ID NO: 36862 - RNA, 19 nt, Artificial Sequence
  Antisense Oligo
ccacgcaaagcauguccuc

SEQ ID NO: 36863 - RNA, 19 nt, Artificial Sequence
  Sense Oligo
aggacaugcuuugcguggg

SEQ ID NO: 36864 - RNA, 19 nt, Artificial Sequence
  Antisense Oligo
cccacgcaaagcauguccu

SEQ ID NO: 36865 - RNA, 19 nt, Artificial Sequence
  Sense Oligo
ggacaugcuuugcgugggc

SEQ ID NO: 36866 - RNA, 19 nt, Artificial Sequence
  Antisense Oligo
gcccacgcaaagcaugucc

SEQ ID NO: 36867 - RNA, 19 nt, Artificial Sequence
  Sense Oligo
gacaugcuuugcgugggcc

SEQ ID NO: 36868 - RNA, 19 nt, Artificial Sequence
  Antisense Oligo
ggcccacgcaaagcauguc

SEQ ID NO: 36869 - RNA, 19 nt, Artificial Sequence
  Sense Oligo
aagaauuuucaucccauag

SEQ ID NO: 36870 - RNA, 19 nt, Artificial Sequence
  Antisense Oligo
cuaugggaugaaaauucuu

SEQ ID NO: 36871 - RNA, 19 nt, Artificial Sequence
  Sense Oligo
gaauuuucaucccauagag

SEQ ID NO: 36872 - RNA, 19 nt, Artificial Sequence
  Antisense Oligo
cucuaugggaugaaaauuc

SEQ ID NO: 36873 - RNA, 19 nt, Artificial Sequence
  Sense Oligo
aauuuucaucccauagagc

SEQ ID NO: 36874 - RNA, 19 nt, Artificial Sequence
  Antisense Oligo
gcucuaugggaugaaaauu

SEQ ID NO: 36875 - RNA, 19 nt, Artificial Sequence
  Sense Oligo
auuuucaucccauagagca

SEQ ID NO: 36876 - RNA, 19 nt, Artificial Sequence
  Antisense Oligo
ugcucuaugggaugaaaau

SEQ ID NO: 36877 - RNA, 19 nt, Artificial Sequence
  Sense Oligo
uuuucaucccauagagcac

SEQ ID NO: 36878 - RNA, 19 nt, Artificial Sequence
  Antisense Oligo
gugcucuaugggaugaaaa

SEQ ID NO: 36879 - RNA, 19 nt, Artificial Sequence
  Sense Oligo
cccucucccagaucacugc

SEQ ID NO: 36880 - RNA, 19 nt, Artificial Sequence
  Antisense Oligo
gcagugaucugggagaggg

SEQ ID NO: 36881 - RNA, 19 nt, Artificial Sequence
  Sense Oligo
ucccagaucacugccuacu

SEQ ID NO: 36882 - RNA, 19 nt, Artificial Sequence
  Antisense Oligo
aguaggcagugaucuggga

SEQ ID NO: 36883 - RNA, 19 nt, Artificial Sequence
  Sense Oligo
acugccuacugcaauaguu

SEQ ID NO: 36884 - RNA, 19 nt, Artificial Sequence
  Antisense Oligo
aacuauugcaguaggcagu

SEQ ID NO: 36885 - RNA, 19 nt, Artificial Sequence
  Sense Oligo
cugccuacugcaauaguug

SEQ ID NO: 36886 - RNA, 19 nt, Artificial Sequence
  Antisense Oligo
caacuauugcaguaggcag

SEQ ID NO: 36887 - RNA, 19 nt, Artificial Sequence
  Sense Oligo
caauaguugcugggacacc

SEQ ID NO: 36888 - RNA, 19 nt, Artificial Sequence
  Antisense Oligo
ggugucccagcaacuauug

SEQ ID NO: 36889 - RNA, 19 nt, Artificial Sequence
  Sense Oligo
aauaguugcugggacacca

SEQ ID NO: 36890 - RNA, 19 nt, Artificial Sequence
  Antisense Oligo
uggugucccagcaacuauu

SEQ ID NO: 36891 - RNA, 19 nt, Artificial Sequence
  Sense Oligo
auaguugcugggacaccaa

SEQ ID NO: 36892 - RNA, 19 nt, Artificial Sequence
  Antisense Oligo
uuggugucccagcaacuau

SEQ ID NO: 36893 - RNA, 19 nt, Artificial Sequence
  Sense Oligo
uaguugcugggacaccaaa

SEQ ID NO: 36894 - RNA, 19 nt, Artificial Sequence
  Antisense Oligo
uuuggugucccagcaacua

SEQ ID NO: 36895 - RNA, 19 nt, Artificial Sequence
  Sense Oligo
ugcugggacaccaaaggcu

SEQ ID NO: 36896 - RNA, 19 nt, Artificial Sequence
  Antisense Oligo
agccuuuggugucccagca

SEQ ID NO: 36897 - RNA, 19 nt, Artificial Sequence
  Sense Oligo
gcugggacaccaaaggcuu

SEQ ID NO: 36898 - RNA, 19 nt, Artificial Sequence
  Antisense Oligo
aagccuuuggugucccagc

SEQ ID NO: 36899 - RNA, 19 nt, Artificial Sequence
  Sense Oligo
cugggacaccaaaggcuua

SEQ ID NO: 36900 - RNA, 19 nt, Artificial Sequence
  Antisense Oligo
uaagccuuuggugucccag

SEQ ID NO: 36901 - RNA, 19 nt, Artificial Sequence
  Sense Oligo
ugggacaccaaaggcuuag

SEQ ID NO: 36902 - RNA, 19 nt, Artificial Sequence
  Antisense Oligo
cuaagccuuugguguccca

SEQ ID NO: 36903 - RNA, 19 nt, Artificial Sequence
  Sense Oligo
gggacaccaaaggcuuaga

SEQ ID NO: 36904 - RNA, 19 nt, Artificial Sequence
  Antisense Oligo
ucuaagccuuugguguccc

SEQ ID NO: 36905 - RNA, 19 nt, Artificial Sequence
  Sense Oligo
ggacaccaaaggcuuagag

SEQ ID NO: 36906 - RNA, 19 nt, Artificial Sequence
  Antisense Oligo
cucuaagccuuuggugucc

SEQ ID NO: 36907 - RNA, 19 nt, Artificial Sequence
  Sense Oligo
gacaccaaaggcuuagagg

SEQ ID NO: 36908 - RNA, 19 nt, Artificial Sequence
  Antisense Oligo
ccucuaagccuuugguguc

SEQ ID NO: 36909 - RNA, 19 nt, Artificial Sequence
  Sense Oligo
acaccaaaggcuuagagga

SEQ ID NO: 36910 - RNA, 19 nt, Artificial Sequence
  Antisense Oligo
uccucuaagccuuuggugu

SEQ ID NO: 36911 - RNA, 19 nt, Artificial Sequence
  Sense Oligo
caccaaaggcuuagaggac

SEQ ID NO: 36912 - RNA, 19 nt, Artificial Sequence
  Antisense Oligo
guccucuaagccuuuggug

SEQ ID NO: 36913 - RNA, 19 nt, Artificial Sequence
  Sense Oligo
accaaaggcuuagaggaca

SEQ ID NO: 36914 - RNA, 19 nt, Artificial Sequence
  Antisense Oligo
uguccucuaagccuuuggu

SEQ ID NO: 36915 - RNA, 19 nt, Artificial Sequence
  Sense Oligo
ccaaaggcuuagaggacag

SEQ ID NO: 36916 - RNA, 19 nt, Artificial Sequence
  Antisense Oligo
cuguccucuaagccuuugg

SEQ ID NO: 36917 - RNA, 19 nt, Artificial Sequence
  Sense Oligo
caaaggcuuagaggacagu

SEQ ID NO: 36918 - RNA, 19 nt, Artificial Sequence
  Antisense Oligo
acuguccucuaagccuuug

SEQ ID NO: 36919 - RNA, 19 nt, Artificial Sequence
  Sense Oligo
aaaggcuuagaggacagug

SEQ ID NO: 36920 - RNA, 19 nt, Artificial Sequence
  Antisense Oligo
cacuguccucuaagccuuu

SEQ ID NO: 36921 - RNA, 19 nt, Artificial Sequence
  Sense Oligo
aaggcuuagaggacagugu

SEQ ID NO: 36922 - RNA, 19 nt, Artificial Sequence
  Antisense Oligo
acacuguccucuaagccuu

SEQ ID NO: 36923 - RNA, 19 nt, Artificial Sequence
  Sense Oligo
aggcuuagaggacagugug

SEQ ID NO: 36924 - RNA, 19 nt, Artificial Sequence
  Antisense Oligo
cacacuguccucuaagccu

SEQ ID NO: 36925 - RNA, 19 nt, Artificial Sequence
  Sense Oligo
ggcuuagaggacagugugg

SEQ ID NO: 36926 - RNA, 19 nt, Artificial Sequence
  Antisense Oligo
ccacacuguccucuaagcc

SEQ ID NO: 36927 - RNA, 19 nt, Artificial Sequence
  Sense Oligo
gcuuagaggacaguguggc

SEQ ID NO: 36928 - RNA, 19 nt, Artificial Sequence
  Antisense Oligo
gccacacuguccucuaagc

SEQ ID NO: 36929 - RNA, 19 nt, Artificial Sequence
  Sense Oligo
uuagaggacaguguggcca

SEQ ID NO: 36930 - RNA, 19 nt, Artificial Sequence
  Antisense Oligo
uggccacacuguccucuaa

SEQ ID NO: 36931 - RNA, 19 nt, Artificial Sequence
  Sense Oligo
uguggccaagaccuucgag

SEQ ID NO: 36932 - RNA, 19 nt, Artificial Sequence
  Antisense Oligo
cucgaaggucuuggccaca

SEQ ID NO: 36933 - RNA, 19 nt, Artificial Sequence
  Sense Oligo
augcaucauugaagccgug

SEQ ID NO: 36934 - RNA, 19 nt, Artificial Sequence
  Antisense Oligo
cacggcuucaaugaugcau

SEQ ID NO: 36935 - RNA, 19 nt, Artificial Sequence
  Sense Oligo
ugcaucauugaagccguga

SEQ ID NO: 36936 - RNA, 19 nt, Artificial Sequence
  Antisense Oligo
ucacggcuucaaugaugca

SEQ ID NO: 36937 - RNA, 19 nt, Artificial Sequence
  Sense Oligo
gcaucauugaagccgugag

SEQ ID NO: 36938 - RNA, 19 nt, Artificial Sequence
  Antisense Oligo
cucacggcuucaaugaugc

SEQ ID NO: 36939 - RNA, 19 nt, Artificial Sequence
  Sense Oligo
caucauugaagccgugagc

SEQ ID NO: 36940 - RNA, 19 nt, Artificial Sequence
  Antisense Oligo
gcucacggcuucaaugaug

SEQ ID NO: 36941 - RNA, 19 nt, Artificial Sequence
  Sense Oligo
ucauugaagccgugagcuc

SEQ ID NO: 36942 - RNA, 19 nt, Artificial Sequence
  Antisense Oligo
gagcucacggcuucaauga

SEQ ID NO: 36943 - RNA, 19 nt, Artificial Sequence
  Sense Oligo
cauugaagccgugagcuca

SEQ ID NO: 36944 - RNA, 19 nt, Artificial Sequence
  Antisense Oligo
ugagcucacggcuucaaug

SEQ ID NO: 36945 - RNA, 19 nt, Artificial Sequence
  Sense Oligo
auugaagccgugagcucag

SEQ ID NO: 36946 - RNA, 19 nt, Artificial Sequence
  Antisense Oligo
cugagcucacggcuucaau

SEQ ID NO: 36947 - RNA, 19 nt, Artificial Sequence
  Sense Oligo
agcucagccugccagguga

SEQ ID NO: 36948 - RNA, 19 nt, Artificial Sequence
  Antisense Oligo
ucaccuggcaggcugagcu

SEQ ID NO: 36949 - RNA, 19 nt, Artificial Sequence
  Sense Oligo
gcucagccugccaggugaa

SEQ ID NO: 36950 - RNA, 19 nt, Artificial Sequence
  Antisense Oligo
uucaccuggcaggcugagc

SEQ ID NO: 36951 - RNA, 19 nt, Artificial Sequence
  Sense Oligo
caaucucuccuccugggaa

SEQ ID NO: 36952 - RNA, 19 nt, Artificial Sequence
  Antisense Oligo
uucccaggaggagagauug

SEQ ID NO: 36953 - RNA, 19 nt, Artificial Sequence
  Sense Oligo
gcucacagcuguguucugc

SEQ ID NO: 36954 - RNA, 19 nt, Artificial Sequence
  Antisense Oligo
gcagaacacagcugugagc

SEQ ID NO: 36955 - RNA, 19 nt, Artificial Sequence
  Sense Oligo
cucacagcuguguucugcc

SEQ ID NO: 36956 - RNA, 19 nt, Artificial Sequence
  Antisense Oligo
ggcagaacacagcugugag

SEQ ID NO: 36957 - RNA, 19 nt, Artificial Sequence
  Sense Oligo
agcuguguucugccaugac

SEQ ID NO: 36958 - RNA, 19 nt, Artificial Sequence
  Antisense Oligo
gucauggcagaacacagcu

SEQ ID NO: 36959 - RNA, 19 nt, Artificial Sequence
  Sense Oligo
gcuguguucugccaugacc

SEQ ID NO: 36960 - RNA, 19 nt, Artificial Sequence
  Antisense Oligo
ggucauggcagaacacagc

SEQ ID NO: 36961 - RNA, 19 nt, Artificial Sequence
  Sense Oligo
cuguguucugccaugaccc

SEQ ID NO: 36962 - RNA, 19 nt, Artificial Sequence
  Antisense Oligo
gggucauggcagaacacag

SEQ ID NO: 36963 - RNA, 19 nt, Artificial Sequence
  Sense Oligo
uguguucugccaugaccca

SEQ ID NO: 36964 - RNA, 19 nt, Artificial Sequence
  Antisense Oligo
ugggucauggcagaacaca

SEQ ID NO: 36965 - RNA, 19 nt, Artificial Sequence
  Sense Oligo
guguucugccaugacccag

SEQ ID NO: 36966 - RNA, 19 nt, Artificial Sequence
  Antisense Oligo
cugggucauggcagaacac

SEQ ID NO: 36967 - RNA, 19 nt, Artificial Sequence
  Sense Oligo
uguucugccaugacccagc

SEQ ID NO: 36968 - RNA, 19 nt, Artificial Sequence
  Antisense Oligo
gcugggucauggcagaaca

SEQ ID NO: 36969 - RNA, 19 nt, Artificial Sequence
  Sense Oligo
guucugccaugacccagcu

SEQ ID NO: 36970 - RNA, 19 nt, Artificial Sequence
  Antisense Oligo
agcugggucauggcagaac

SEQ ID NO: 36971 - RNA, 19 nt, Artificial Sequence
  Sense Oligo
uucugccaugacccagcua

SEQ ID NO: 36972 - RNA, 19 nt, Artificial Sequence
  Antisense Oligo
uagcugggucauggcagaa

SEQ ID NO: 36973 - RNA, 19 nt, Artificial Sequence
  Sense Oligo
ucugccaugacccagcuaa

SEQ ID NO: 36974 - RNA, 19 nt, Artificial Sequence
  Antisense Oligo
uuagcugggucauggcaga

SEQ ID NO: 36975 - RNA, 19 nt, Artificial Sequence
  Sense Oligo
cugccaugacccagcuaag

SEQ ID NO: 36976 - RNA, 19 nt, Artificial Sequence
  Antisense Oligo
cuuagcugggucauggcag

SEQ ID NO: 36977 - RNA, 19 nt, Artificial Sequence
  Sense Oligo
ugccaugacccagcuaagg

SEQ ID NO: 36978 - RNA, 19 nt, Artificial Sequence
  Antisense Oligo
ccuuagcugggucauggca

SEQ ID NO: 36979 - RNA, 19 nt, Artificial Sequence
  Sense Oligo
gccaugacccagcuaaggg

SEQ ID NO: 36980 - RNA, 19 nt, Artificial Sequence
  Antisense Oligo
cccuuagcugggucauggc

SEQ ID NO: 36981 - RNA, 19 nt, Artificial Sequence
  Sense Oligo
gacccagcuaagggcuaug

SEQ ID NO: 36982 - RNA, 19 nt, Artificial Sequence
  Antisense Oligo
cauagcccuuagcuggguc

SEQ ID NO: 36983 - RNA, 19 nt, Artificial Sequence
  Sense Oligo
ggucucagcuccuccgcua

SEQ ID NO: 36984 - RNA, 19 nt, Artificial Sequence
  Antisense Oligo
uagcggaggagcugagacc

SEQ ID NO: 36985 - RNA, 19 nt, Artificial Sequence
  Sense Oligo
gucucagcuccuccgcuaa

SEQ ID NO: 36986 - RNA, 19 nt, Artificial Sequence
  Antisense Oligo
uuagcggaggagcugagac

SEQ ID NO: 36987 - RNA, 19 nt, Artificial Sequence
  Sense Oligo
ucucagcuccuccgcuaac

SEQ ID NO: 36988 - RNA, 19 nt, Artificial Sequence
  Antisense Oligo
guuagcggaggagcugaga

SEQ ID NO: 36989 - RNA, 19 nt, Artificial Sequence
  Sense Oligo
cucagcuccuccgcuaacu

SEQ ID NO: 36990 - RNA, 19 nt, Artificial Sequence
  Antisense Oligo
aguuagcggaggagcugag

SEQ ID NO: 36991 - RNA, 19 nt, Artificial Sequence
  Sense Oligo
ucagcuccuccgcuaacuc

SEQ ID NO: 36992 - RNA, 19 nt, Artificial Sequence
  Antisense Oligo
gaguuagcggaggagcuga

SEQ ID NO: 36993 - RNA, 19 nt, Artificial Sequence
  Sense Oligo
cagcuccuccgcuaacuca

SEQ ID NO: 36994 - RNA, 19 nt, Artificial Sequence
  Antisense Oligo
ugaguuagcggaggagcug

SEQ ID NO: 36995 - RNA, 19 nt, Artificial Sequence
  Sense Oligo
gauugggaagugggcaccc

SEQ ID NO: 36996 - RNA, 19 nt, Artificial Sequence
  Antisense Oligo
gggugcccacuucccaauc

SEQ ID NO: 36997 - RNA, 19 nt, Artificial Sequence
  Sense Oligo
uugggaagugggcacccuc

SEQ ID NO: 36998 - RNA, 19 nt, Artificial Sequence
  Antisense Oligo
gagggugcccacuucccaa

SEQ ID NO: 36999 - RNA, 19 nt, Artificial Sequence
  Sense Oligo
ccaagggcaauggcgcuga

SEQ ID NO: 37000 - RNA, 19 nt, Artificial Sequence
  Antisense Oligo
ucagcgccauugcccuugg

SEQ ID NO: 37001 - RNA, 19 nt, Artificial Sequence
  Sense Oligo
caagggcaauggcgcugaa

SEQ ID NO: 37002 - RNA, 19 nt, Artificial Sequence
  Antisense Oligo
uucagcgccauugcccuug

SEQ ID NO: 37003 - RNA, 19 nt, Artificial Sequence
  Sense Oligo
aaucuaguucucuccggau

SEQ ID NO: 37004 - RNA, 19 nt, Artificial Sequence
  Antisense Oligo
auccggagagaacuagauu

SEQ ID NO: 37005 - RNA, 19 nt, Artificial Sequence
  Sense Oligo
aucuaguucucuccggauu

SEQ ID NO: 37006 - RNA, 19 nt, Artificial Sequence
  Antisense Oligo
aauccggagagaacuagau

SEQ ID NO: 37007 - RNA, 19 nt, Artificial Sequence
  Sense Oligo
ucuaguucucuccggauuc

SEQ ID NO: 37008 - RNA, 19 nt, Artificial Sequence
  Antisense Oligo
gaauccggagagaacuaga

SEQ ID NO: 37009 - RNA, 19 nt, Artificial Sequence
  Sense Oligo
cuaguucucuccggauucc

SEQ ID NO: 37010 - RNA, 19 nt, Artificial Sequence
  Antisense Oligo
ggaauccggagagaacuag

SEQ ID NO: 37011 - RNA, 19 nt, Artificial Sequence
  Sense Oligo
uaguucucuccggauuccu

SEQ ID NO: 37012 - RNA, 19 nt, Artificial Sequence
  Antisense Oligo
aggaauccggagagaacua

SEQ ID NO: 37013 - RNA, 19 nt, Artificial Sequence
  Sense Oligo
aguucucuccggauuccuc

SEQ ID NO: 37014 - RNA, 19 nt, Artificial Sequence
  Antisense Oligo
gaggaauccggagagaacu

SEQ ID NO: 37015 - RNA, 19 nt, Artificial Sequence
  Sense Oligo
cucuccggauuccucagug

SEQ ID NO: 37016 - RNA, 19 nt, Artificial Sequence
  Antisense Oligo
cacugaggaauccggagag

SEQ ID NO: 37017 - RNA, 19 nt, Artificial Sequence
  Sense Oligo
ucuccggauuccucagugu

SEQ ID NO: 37018 - RNA, 19 nt, Artificial Sequence
  Antisense Oligo
acacugaggaauccggaga

SEQ ID NO: 37019 - RNA, 19 nt, Artificial Sequence
  Sense Oligo
cuccggauuccucagugug

SEQ ID NO: 37020 - RNA, 19 nt, Artificial Sequence
  Antisense Oligo
cacacugaggaauccggag

SEQ ID NO: 37021 - RNA, 19 nt, Artificial Sequence
  Sense Oligo
uccggauuccucagugugc

SEQ ID NO: 37022 - RNA, 19 nt, Artificial Sequence
  Antisense Oligo
gcacacugaggaauccgga

SEQ ID NO: 37023 - RNA, 19 nt, Artificial Sequence
  Sense Oligo
ccggauuccucagugugcu

SEQ ID NO: 37024 - RNA, 19 nt, Artificial Sequence
  Antisense Oligo
agcacacugaggaauccgg

SEQ ID NO: 37025 - RNA, 19 nt, Artificial Sequence
  Sense Oligo
acagucccugcugcucgca

SEQ ID NO: 37026 - RNA, 19 nt, Artificial Sequence
  Antisense Oligo
ugcgagcagcagggacugu

SEQ ID NO: 37027 - RNA, 19 nt, Artificial Sequence
  Sense Oligo
cugcugcucgcaccauccu

SEQ ID NO: 37028 - RNA, 19 nt, Artificial Sequence
  Antisense Oligo
aggauggugcgagcagcag

SEQ ID NO: 37029 - RNA, 19 nt, Artificial Sequence
  Sense Oligo
ugcugcucgcaccauccug

SEQ ID NO: 37030 - RNA, 19 nt, Artificial Sequence
  Antisense Oligo
caggauggugcgagcagca

SEQ ID NO: 37031 - RNA, 19 nt, Artificial Sequence
  Sense Oligo
cugcucgcaccauccugca

SEQ ID NO: 37032 - RNA, 19 nt, Artificial Sequence
  Antisense Oligo
ugcaggauggugcgagcag

SEQ ID NO: 37033 - RNA, 19 nt, Artificial Sequence
  Sense Oligo
gcucgcaccauccugcaug

SEQ ID NO: 37034 - RNA, 19 nt, Artificial Sequence
  Antisense Oligo
caugcaggauggugcgagc

SEQ ID NO: 37035 - RNA, 19 nt, Artificial Sequence
  Sense Oligo
cucgcaccauccugcaugu

SEQ ID NO: 37036 - RNA, 19 nt, Artificial Sequence
  Antisense Oligo
acaugcaggauggugcgag

SEQ ID NO: 37037 - RNA, 19 nt, Artificial Sequence
  Sense Oligo
ucgcaccauccugcaugug

SEQ ID NO: 37038 - RNA, 19 nt, Artificial Sequence
  Antisense Oligo
cacaugcaggauggugcga

SEQ ID NO: 37039 - RNA, 19 nt, Artificial Sequence
  Sense Oligo
cgcaccauccugcaugugu

SEQ ID NO: 37040 - RNA, 19 nt, Artificial Sequence
  Antisense Oligo
acacaugcaggauggugcg

SEQ ID NO: 37041 - RNA, 19 nt, Artificial Sequence
  Sense Oligo
gcaccauccugcauguguu

SEQ ID NO: 37042 - RNA, 19 nt, Artificial Sequence
  Antisense Oligo
aacacaugcaggauggugc

SEQ ID NO: 37043 - RNA, 19 nt, Artificial Sequence
  Sense Oligo
caccauccugcauguguuc

SEQ ID NO: 37044 - RNA, 19 nt, Artificial Sequence
  Antisense Oligo
gaacacaugcaggauggug

SEQ ID NO: 37045 - RNA, 19 nt, Artificial Sequence
  Sense Oligo
accauccugcauguguucc

SEQ ID NO: 37046 - RNA, 19 nt, Artificial Sequence
  Antisense Oligo
ggaacacaugcaggauggu

SEQ ID NO: 37047 - RNA, 19 nt, Artificial Sequence
  Sense Oligo
ccauccugcauguguucca

SEQ ID NO: 37048 - RNA, 19 nt, Artificial Sequence
  Antisense Oligo
uggaacacaugcaggaugg

SEQ ID NO: 37049 - RNA, 19 nt, Artificial Sequence
  Sense Oligo
cauccugcauguguuccau

SEQ ID NO: 37050 - RNA, 19 nt, Artificial Sequence
  Antisense Oligo
auggaacacaugcaggaug

SEQ ID NO: 37051 - RNA, 19 nt, Artificial Sequence
  Sense Oligo
auccugcauguguuccaua

SEQ ID NO: 37052 - RNA, 19 nt, Artificial Sequence
  Antisense Oligo
uauggaacacaugcaggau

SEQ ID NO: 37053 - RNA, 19 nt, Artificial Sequence
  Sense Oligo
uccugcauguguuccauau

SEQ ID NO: 37054 - RNA, 19 nt, Artificial Sequence
  Antisense Oligo
auauggaacacaugcagga

SEQ ID NO: 37055 - RNA, 19 nt, Artificial Sequence
  Sense Oligo
cugcauguguuccauaugg

SEQ ID NO: 37056 - RNA, 19 nt, Artificial Sequence
  Antisense Oligo
ccauauggaacacaugcag

SEQ ID NO: 37057 - RNA, 19 nt, Artificial Sequence
  Sense Oligo
uccauauggaaucacggcc

SEQ ID NO: 37058 - RNA, 19 nt, Artificial Sequence
  Antisense Oligo
ggccgugauuccauaugga

SEQ ID NO: 37059 - RNA, 19 nt, Artificial Sequence
  Sense Oligo
aagucacacgggcuugcag

SEQ ID NO: 37060 - RNA, 19 nt, Artificial Sequence
  Antisense Oligo
cugcaagcccgugugacuu

SEQ ID NO: 37061 - RNA, 19 nt, Artificial Sequence
  Sense Oligo
agucacacgggcuugcagg

SEQ ID NO: 37062 - RNA, 19 nt, Artificial Sequence
  Antisense Oligo
ccugcaagcccgugugacu

SEQ ID NO: 37063 - RNA, 19 nt, Artificial Sequence
  Sense Oligo
ugcaggccguuccucagau

SEQ ID NO: 37064 - RNA, 19 nt, Artificial Sequence
  Antisense Oligo
aucugaggaacggccugca

SEQ ID NO: 37065 - RNA, 19 nt, Artificial Sequence
  Sense Oligo
gcaggccguuccucagaug

SEQ ID NO: 37066 - RNA, 19 nt, Artificial Sequence
  Antisense Oligo
caucugaggaacggccugc

SEQ ID NO: 37067 - RNA, 19 nt, Artificial Sequence
  Sense Oligo
caggccguuccucagaugg

SEQ ID NO: 37068 - RNA, 19 nt, Artificial Sequence
  Antisense Oligo
ccaucugaggaacggccug

SEQ ID NO: 37069 - RNA, 19 nt, Artificial Sequence
  Sense Oligo
aggccguuccucagauggc

SEQ ID NO: 37070 - RNA, 19 nt, Artificial Sequence
  Antisense Oligo
gccaucugaggaacggccu

SEQ ID NO: 37071 - RNA, 19 nt, Artificial Sequence
  Sense Oligo
ccguuccucagauggcccu

SEQ ID NO: 37072 - RNA, 19 nt, Artificial Sequence
  Antisense Oligo
agggccaucugaggaacgg

SEQ ID NO: 37073 - RNA, 19 nt, Artificial Sequence
  Sense Oligo
cguuccucagauggcccug

SEQ ID NO: 37074 - RNA, 19 nt, Artificial Sequence
  Antisense Oligo
cagggccaucugaggaacg

SEQ ID NO: 37075 - RNA, 19 nt, Artificial Sequence
  Sense Oligo
guuccucagauggcccugu

SEQ ID NO: 37076 - RNA, 19 nt, Artificial Sequence
  Antisense Oligo
acagggccaucugaggaac

SEQ ID NO: 37077 - RNA, 19 nt, Artificial Sequence
  Sense Oligo
auggcccugucaucacugu

SEQ ID NO: 37078 - RNA, 19 nt, Artificial Sequence
  Antisense Oligo
acagugaugacagggccau

SEQ ID NO: 37079 - RNA, 19 nt, Artificial Sequence
  Sense Oligo
cccugucaucacuguggcu

SEQ ID NO: 37080 - RNA, 19 nt, Artificial Sequence
  Antisense Oligo
agccacagugaugacaggg

SEQ ID NO: 37081 - RNA, 19 nt, Artificial Sequence
  Sense Oligo
ccugucaucacuguggcug

SEQ ID NO: 37082 - RNA, 19 nt, Artificial Sequence
  Antisense Oligo
cagccacagugaugacagg

SEQ ID NO: 37083 - RNA, 19 nt, Artificial Sequence
  Sense Oligo
uguggcugcugguuugauu

SEQ ID NO: 37084 - RNA, 19 nt, Artificial Sequence
  Antisense Oligo
aaucaaaccagcagccaca

SEQ ID NO: 37085 - RNA, 19 nt, Artificial Sequence
  Sense Oligo
guggcugcugguuugauug

SEQ ID NO: 37086 - RNA, 19 nt, Artificial Sequence
  Antisense Oligo
caaucaaaccagcagccac

SEQ ID NO: 37087 - RNA, 19 nt, Artificial Sequence
  Sense Oligo
uggcugcugguuugauuga

SEQ ID NO: 37088 - RNA, 19 nt, Artificial Sequence
  Antisense Oligo
ucaaucaaaccagcagcca

SEQ ID NO: 37089 - RNA, 19 nt, Artificial Sequence
  Sense Oligo
gcugcugguuugauugauu

SEQ ID NO: 37090 - RNA, 19 nt, Artificial Sequence
  Antisense Oligo
aaucaaucaaaccagcagc

SEQ ID NO: 37091 - RNA, 19 nt, Artificial Sequence
  Sense Oligo
cugcugguuugauugauug

SEQ ID NO: 37092 - RNA, 19 nt, Artificial Sequence
  Antisense Oligo
caaucaaucaaaccagcag

SEQ ID NO: 37093 - RNA, 19 nt, Artificial Sequence
  Sense Oligo
ugcugguuugauugauugu

SEQ ID NO: 37094 - RNA, 19 nt, Artificial Sequence
  Antisense Oligo
acaaucaaucaaaccagca

SEQ ID NO: 37095 - RNA, 19 nt, Artificial Sequence
  Sense Oligo
gcugguuugauugauuguu

SEQ ID NO: 37096 - RNA, 19 nt, Artificial Sequence
  Antisense Oligo
aacaaucaaucaaaccagc

SEQ ID NO: 37097 - RNA, 19 nt, Artificial Sequence
  Sense Oligo
cugguuugauugauuguua

SEQ ID NO: 37098 - RNA, 19 nt, Artificial Sequence
  Antisense Oligo
uaacaaucaaucaaaccag

SEQ ID NO: 37099 - RNA, 19 nt, Artificial Sequence
  Sense Oligo
agacuccaaagguugacag

SEQ ID NO: 37100 - RNA, 19 nt, Artificial Sequence
  Antisense Oligo
cugucaaccuuuggagucu

SEQ ID NO: 37101 - RNA, 19 nt, Artificial Sequence
  Sense Oligo
gacuccaaagguugacaga

SEQ ID NO: 37102 - RNA, 19 nt, Artificial Sequence
  Antisense Oligo
ucugucaaccuuuggaguc

SEQ ID NO: 37103 - RNA, 19 nt, Artificial Sequence
  Sense Oligo
acuccaaagguugacagaa

SEQ ID NO: 37104 - RNA, 19 nt, Artificial Sequence
  Antisense Oligo
uucugucaaccuuuggagu

SEQ ID NO: 37105 - RNA, 19 nt, Artificial Sequence
  Sense Oligo
uauggaagcaaaauaugug

SEQ ID NO: 37106 - RNA, 19 nt, Artificial Sequence
  Antisense Oligo
cacauauuuugcuuccaua

SEQ ID NO: 37107 - RNA, 19 nt, Artificial Sequence
  Sense Oligo
uuauuuagcucuuuucggc

SEQ ID NO: 37108 - RNA, 19 nt, Artificial Sequence
  Antisense Oligo
gccgaaaagagcuaaauaa

SEQ ID NO: 37109 - RNA, 19 nt, Artificial Sequence
  Sense Oligo
uauuuagcucuuuucggca

SEQ ID NO: 37110 - RNA, 19 nt, Artificial Sequence
  Antisense Oligo
ugccgaaaagagcuaaaua

SEQ ID NO: 37111 - RNA, 19 nt, Artificial Sequence
  Sense Oligo
auuuagcucuuuucggcaa

SEQ ID NO: 37112 - RNA, 19 nt, Artificial Sequence
  Antisense Oligo
uugccgaaaagagcuaaau

SEQ ID NO: 37113 - RNA, 19 nt, Artificial Sequence
  Sense Oligo
uuuagcucuuuucggcaaa

SEQ ID NO: 37114 - RNA, 19 nt, Artificial Sequence
  Antisense Oligo
uuugccgaaaagagcuaaa

SEQ ID NO: 37115 - RNA, 19 nt, Artificial Sequence
  Sense Oligo
cagucucgcaggcaaugcc

SEQ ID NO: 37116 - RNA, 19 nt, Artificial Sequence
  Antisense Oligo
ggcauugccugcgagacug

SEQ ID NO: 37117 - RNA, 19 nt, Artificial Sequence
  Sense Oligo
agucucgcaggcaaugcca

SEQ ID NO: 37118 - RNA, 19 nt, Artificial Sequence
  Antisense Oligo
uggcauugccugcgagacu

SEQ ID NO: 37119 - RNA, 19 nt, Artificial Sequence
  Sense Oligo
gucucgcaggcaaugccac

SEQ ID NO: 37120 - RNA, 19 nt, Artificial Sequence
  Antisense Oligo
guggcauugccugcgagac

SEQ ID NO: 37121 - RNA, 19 nt, Artificial Sequence
  Sense Oligo
ucucgcaggcaaugccaca

SEQ ID NO: 37122 - RNA, 19 nt, Artificial Sequence
  Antisense Oligo
uguggcauugccugcgaga

SEQ ID NO: 37123 - RNA, 19 nt, Artificial Sequence
  Sense Oligo
gcaggcaaugccacaugag

SEQ ID NO: 37124 - RNA, 19 nt, Artificial Sequence
  Antisense Oligo
cucauguggcauugccugc

SEQ ID NO: 37125 - RNA, 19 nt, Artificial Sequence
  Sense Oligo
caggcaaugccacaugagg

SEQ ID NO: 37126 - RNA, 19 nt, Artificial Sequence
  Antisense Oligo
ccucauguggcauugccug

SEQ ID NO: 37127 - RNA, 19 nt, Artificial Sequence
  Sense Oligo
aggcaaugccacaugagga

SEQ ID NO: 37128 - RNA, 19 nt, Artificial Sequence
  Antisense Oligo
uccucauguggcauugccu

SEQ ID NO: 37129 - RNA, 19 nt, Artificial Sequence
  Sense Oligo
aaugccacaugaggaagcu

SEQ ID NO: 37130 - RNA, 19 nt, Artificial Sequence
  Antisense Oligo
agcuuccucauguggcauu

SEQ ID NO: 37131 - RNA, 19 nt, Artificial Sequence
  Sense Oligo
cugcccugcucacauuucc

SEQ ID NO: 37132 - RNA, 19 nt, Artificial Sequence
  Antisense Oligo
ggaaaugugagcagggcag

SEQ ID NO: 37133 - RNA, 19 nt, Artificial Sequence
  Sense Oligo
ccugcucacauuuccuaau

SEQ ID NO: 37134 - RNA, 19 nt, Artificial Sequence
  Antisense Oligo
auuaggaaaugugagcagg

SEQ ID NO: 37135 - RNA, 19 nt, Artificial Sequence
  Sense Oligo
cugcucacauuuccuaauu

SEQ ID NO: 37136 - RNA, 19 nt, Artificial Sequence
  Antisense Oligo
aauuaggaaaugugagcag

SEQ ID NO: 37137 - RNA, 19 nt, Artificial Sequence
  Sense Oligo
gcucacauuuccuaauugg

SEQ ID NO: 37138 - RNA, 19 nt, Artificial Sequence
  Antisense Oligo
ccaauuaggaaaugugagc

SEQ ID NO: 37139 - RNA, 19 nt, Artificial Sequence
  Sense Oligo
cucacauuuccuaauugga

SEQ ID NO: 37140 - RNA, 19 nt, Artificial Sequence
  Antisense Oligo
uccaauuaggaaaugugag

SEQ ID NO: 37141 - RNA, 19 nt, Artificial Sequence
  Sense Oligo
ucacauuuccuaauuggac

SEQ ID NO: 37142 - RNA, 19 nt, Artificial Sequence
  Antisense Oligo
guccaauuaggaaauguga

SEQ ID NO: 37143 - RNA, 19 nt, Artificial Sequence
  Sense Oligo
acauuuccuaauuggacac

SEQ ID NO: 37144 - RNA, 19 nt, Artificial Sequence
  Antisense Oligo
guguccaauuaggaaaugu

SEQ ID NO: 37145 - RNA, 19 nt, Artificial Sequence
  Sense Oligo
cauuuccuaauuggacacu

SEQ ID NO: 37146 - RNA, 19 nt, Artificial Sequence
  Antisense Oligo
aguguccaauuaggaaaug

SEQ ID NO: 37147 - RNA, 19 nt, Artificial Sequence
  Sense Oligo
auuuccuaauuggacacuu

SEQ ID NO: 37148 - RNA, 19 nt, Artificial Sequence
  Antisense Oligo
aaguguccaauuaggaaau

SEQ ID NO: 37149 - RNA, 19 nt, Artificial Sequence
  Sense Oligo
uccuaauuggacacuuaac

SEQ ID NO: 37150 - RNA, 19 nt, Artificial Sequence
  Antisense Oligo
guuaaguguccaauuagga

SEQ ID NO: 37151 - RNA, 19 nt, Artificial Sequence
  Sense Oligo
ccuaauuggacacuuaacc

SEQ ID NO: 37152 - RNA, 19 nt, Artificial Sequence
  Antisense Oligo
gguuaaguguccaauuagg

SEQ ID NO: 37153 - RNA, 19 nt, Artificial Sequence
  Sense Oligo
cuaauuggacacuuaaccc

SEQ ID NO: 37154 - RNA, 19 nt, Artificial Sequence
  Antisense Oligo
ggguuaaguguccaauuag

SEQ ID NO: 37155 - RNA, 19 nt, Artificial Sequence
  Sense Oligo
acauugaggucauugaauu

SEQ ID NO: 37156 - RNA, 19 nt, Artificial Sequence
  Antisense Oligo
aauucaaugaccucaaugu

SEQ ID NO: 37157 - RNA, 19 nt, Artificial Sequence
  Sense Oligo
cauugaggucauugaauuc

SEQ ID NO: 37158 - RNA, 19 nt, Artificial Sequence
  Antisense Oligo
gaauucaaugaccucaaug

SEQ ID NO: 37159 - RNA, 19 nt, Artificial Sequence
  Sense Oligo
auugaggucauugaauucc

SEQ ID NO: 37160 - RNA, 19 nt, Artificial Sequence
  Antisense Oligo
ggaauucaaugaccucaau

SEQ ID NO: 37161 - RNA, 19 nt, Artificial Sequence
  Sense Oligo
uugaggucauugaauuccg

SEQ ID NO: 37162 - RNA, 19 nt, Artificial Sequence
  Antisense Oligo
cggaauucaaugaccucaa

SEQ ID NO: 37163 - RNA, 19 nt, Artificial Sequence
  Sense Oligo
ugaggucauugaauuccgg

SEQ ID NO: 37164 - RNA, 19 nt, Artificial Sequence
  Antisense Oligo
ccggaauucaaugaccuca

SEQ ID NO: 37165 - RNA, 19 nt, Artificial Sequence
  Sense Oligo
gaggucauugaauuccggg

SEQ ID NO: 37166 - RNA, 19 nt, Artificial Sequence
  Antisense Oligo
cccggaauucaaugaccuc

SEQ ID NO: 37167 - RNA, 19 nt, Artificial Sequence
  Sense Oligo
uuuuaagugacugauaccu

SEQ ID NO: 37168 - RNA, 19 nt, Artificial Sequence
  Antisense Oligo
agguaucagucacuuaaaa

SEQ ID NO: 37169 - RNA, 19 nt, Artificial Sequence
  Sense Oligo
uuuaagugacugauaccuu

SEQ ID NO: 37170 - RNA, 19 nt, Artificial Sequence
  Antisense Oligo
aagguaucagucacuuaaa

SEQ ID NO: 37171 - RNA, 19 nt, Artificial Sequence
  Sense Oligo
uuaagugacugauaccuuu

SEQ ID NO: 37172 - RNA, 19 nt, Artificial Sequence
  Antisense Oligo
aaagguaucagucacuuaa

SEQ ID NO: 37173 - RNA, 19 nt, Artificial Sequence
  Sense Oligo
uaagugacugauaccuuug

SEQ ID NO: 37174 - RNA, 19 nt, Artificial Sequence
  Antisense Oligo
caaagguaucagucacuua

SEQ ID NO: 37175 - RNA, 19 nt, Artificial Sequence
  Sense Oligo
aagugacugauaccuuuga

SEQ ID NO: 37176 - RNA, 19 nt, Artificial Sequence
  Antisense Oligo
ucaaagguaucagucacuu

SEQ ID NO: 37177 - RNA, 19 nt, Artificial Sequence
  Sense Oligo
agugacugauaccuuugau

SEQ ID NO: 37178 - RNA, 19 nt, Artificial Sequence
  Antisense Oligo
aucaaagguaucagucacu

SEQ ID NO: 37179 - RNA, 19 nt, Artificial Sequence
  Sense Oligo
gugacugauaccuuugaua

SEQ ID NO: 37180 - RNA, 19 nt, Artificial Sequence
  Antisense Oligo
uaucaaagguaucagucac

SEQ ID NO: 37181 - RNA, 19 nt, Artificial Sequence
  Sense Oligo
ugacugauaccuuugauaa

SEQ ID NO: 37182 - RNA, 19 nt, Artificial Sequence
  Antisense Oligo
uuaucaaagguaucaguca

SEQ ID NO: 37183 - RNA, 19 nt, Artificial Sequence
  Sense Oligo
gacugauaccuuugauaag

SEQ ID NO: 37184 - RNA, 19 nt, Artificial Sequence
  Antisense Oligo
cuuaucaaagguaucaguc

SEQ ID NO: 37185 - RNA, 19 nt, Artificial Sequence
  Sense Oligo
agguuuuccuuucccuuuu

SEQ ID NO: 37186 - RNA, 19 nt, Artificial Sequence
  Antisense Oligo
aaaagggaaaggaaaaccu

SEQ ID NO: 37187 - RNA, 19 nt, Artificial Sequence
  Sense Oligo
agauauuguucguaugcca

SEQ ID NO: 37188 - RNA, 19 nt, Artificial Sequence
  Antisense Oligo
uggcauacgaacaauaucu

SEQ ID NO: 37189 - RNA, 19 nt, Artificial Sequence
  Sense Oligo
guacaucugucaaaaguuc

SEQ ID NO: 37190 - RNA, 19 nt, Artificial Sequence
  Antisense Oligo
gaacuuuugacagauguac

SEQ ID NO: 37191 - RNA, 19 nt, Artificial Sequence
  Sense Oligo
uacaucugucaaaaguucc

SEQ ID NO: 37192 - RNA, 19 nt, Artificial Sequence
  Antisense Oligo
ggaacuuuugacagaugua

SEQ ID NO: 37193 - RNA, 19 nt, Artificial Sequence
  Sense Oligo
acaucugucaaaaguucca

SEQ ID NO: 37194 - RNA, 19 nt, Artificial Sequence
  Antisense Oligo
uggaacuuuugacagaugu

SEQ ID NO: 37195 - RNA, 19 nt, Artificial Sequence
  Sense Oligo
caucugucaaaaguuccag

SEQ ID NO: 37196 - RNA, 19 nt, Artificial Sequence
  Antisense Oligo
cuggaacuuuugacagaug

SEQ ID NO: 37197 - RNA, 19 nt, Artificial Sequence
  Sense Oligo
aucugucaaaaguuccagu

SEQ ID NO: 37198 - RNA, 19 nt, Artificial Sequence
  Antisense Oligo
acuggaacuuuugacagau

SEQ ID NO: 37199 - RNA, 19 nt, Artificial Sequence
  Sense Oligo
cugucaaaaguuccaguuc

SEQ ID NO: 37200 - RNA, 19 nt, Artificial Sequence
  Antisense Oligo
gaacuggaacuuuugacag

SEQ ID NO: 37201 - RNA, 19 nt, Artificial Sequence
  Sense Oligo
uccaguucagcagguuuug

SEQ ID NO: 37202 - RNA, 19 nt, Artificial Sequence
  Antisense Oligo
caaaaccugcugaacugga

SEQ ID NO: 37203 - RNA, 19 nt, Artificial Sequence
  Sense Oligo
ccaguucagcagguuuugg

SEQ ID NO: 37204 - RNA, 19 nt, Artificial Sequence
  Antisense Oligo
ccaaaaccugcugaacugg

SEQ ID NO: 37205 - RNA, 19 nt, Artificial Sequence
  Sense Oligo
caguucagcagguuuuggg

SEQ ID NO: 37206 - RNA, 19 nt, Artificial Sequence
  Antisense Oligo
cccaaaaccugcugaacug

SEQ ID NO: 37207 - RNA, 19 nt, Artificial Sequence
  Sense Oligo
ggguagucacagauaugua

SEQ ID NO: 37208 - RNA, 19 nt, Artificial Sequence
  Antisense Oligo
uacauaucugugacuaccc

SEQ ID NO: 37209 - RNA, 19 nt, Artificial Sequence
  Sense Oligo
gguagucacagauauguac

SEQ ID NO: 37210 - RNA, 19 nt, Artificial Sequence
  Antisense Oligo
guacauaucugugacuacc

SEQ ID NO: 37211 - RNA, 19 nt, Artificial Sequence
  Sense Oligo
gucacagauauguacaguc

SEQ ID NO: 37212 - RNA, 19 nt, Artificial Sequence
  Antisense Oligo
gacuguacauaucugugac

SEQ ID NO: 37213 - RNA, 19 nt, Artificial Sequence
  Sense Oligo
ucacagauauguacaguca

SEQ ID NO: 37214 - RNA, 19 nt, Artificial Sequence
  Antisense Oligo
ugacuguacauaucuguga

SEQ ID NO: 37215 - RNA, 19 nt, Artificial Sequence
  Sense Oligo
cacagauauguacagucau

SEQ ID NO: 37216 - RNA, 19 nt, Artificial Sequence
  Antisense Oligo
augacuguacauaucugug

SEQ ID NO: 37217 - RNA, 19 nt, Artificial Sequence
  Sense Oligo
acagauauguacagucauc

SEQ ID NO: 37218 - RNA, 19 nt, Artificial Sequence
  Antisense Oligo
gaugacuguacauaucugu

SEQ ID NO: 37219 - RNA, 19 nt, Artificial Sequence
  Sense Oligo
cagauauguacagucauca

SEQ ID NO: 37220 - RNA, 19 nt, Artificial Sequence
  Antisense Oligo
ugaugacuguacauaucug

SEQ ID NO: 37221 - RNA, 19 nt, Artificial Sequence
  Sense Oligo
agauauguacagucaucac

SEQ ID NO: 37222 - RNA, 19 nt, Artificial Sequence
  Antisense Oligo
gugaugacuguacauaucu

SEQ ID NO: 37223 - RNA, 19 nt, Artificial Sequence
  Sense Oligo
gauauguacagucaucacc

SEQ ID NO: 37224 - RNA, 19 nt, Artificial Sequence
  Antisense Oligo
ggugaugacuguacauauc

SEQ ID NO: 37225 - RNA, 19 nt, Artificial Sequence
  Sense Oligo
auauguacagucaucacca

SEQ ID NO: 37226 - RNA, 19 nt, Artificial Sequence
  Antisense Oligo
uggugaugacuguacauau

SEQ ID NO: 37227 - RNA, 19 nt, Artificial Sequence
  Sense Oligo
uauguacagucaucaccac

SEQ ID NO: 37228 - RNA, 19 nt, Artificial Sequence
  Antisense Oligo
guggugaugacuguacaua

SEQ ID NO: 37229 - RNA, 19 nt, Artificial Sequence
  Sense Oligo
auguacagucaucaccaca

SEQ ID NO: 37230 - RNA, 19 nt, Artificial Sequence
  Antisense Oligo
uguggugaugacuguacau

SEQ ID NO: 37231 - RNA, 19 nt, Artificial Sequence
  Sense Oligo
acagucaucaccacaguua

SEQ ID NO: 37232 - RNA, 19 nt, Artificial Sequence
  Antisense Oligo
uaacuguggugaugacugu

SEQ ID NO: 37233 - RNA, 19 nt, Artificial Sequence
  Sense Oligo
agucaucaccacaguuaau

SEQ ID NO: 37234 - RNA, 19 nt, Artificial Sequence
  Antisense Oligo
auuaacuguggugaugacu

SEQ ID NO: 37235 - RNA, 19 nt, Artificial Sequence
  Sense Oligo
gucaucaccacaguuaaug

SEQ ID NO: 37236 - RNA, 19 nt, Artificial Sequence
  Antisense Oligo
cauuaacuguggugaugac

SEQ ID NO: 37237 - RNA, 19 nt, Artificial Sequence
  Sense Oligo
caucaccacaguuaaugac

SEQ ID NO: 37238 - RNA, 19 nt, Artificial Sequence
  Antisense Oligo
gucauuaacuguggugaug

SEQ ID NO: 37239 - RNA, 19 nt, Artificial Sequence
  Sense Oligo
aucaccacaguuaaugaca

SEQ ID NO: 37240 - RNA, 19 nt, Artificial Sequence
  Antisense Oligo
ugucauuaacuguggugau

SEQ ID NO: 37241 - RNA, 19 nt, Artificial Sequence
  Sense Oligo
ucaccacaguuaaugacag

SEQ ID NO: 37242 - RNA, 19 nt, Artificial Sequence
  Antisense Oligo
cugucauuaacugugguga

SEQ ID NO: 37243 - RNA, 19 nt, Artificial Sequence
  Sense Oligo
caccacaguuaaugacaga

SEQ ID NO: 37244 - RNA, 19 nt, Artificial Sequence
  Antisense Oligo
ucugucauuaacuguggug

SEQ ID NO: 37245 - RNA, 19 nt, Artificial Sequence
  Sense Oligo
accacaguuaaugacagag

SEQ ID NO: 37246 - RNA, 19 nt, Artificial Sequence
  Antisense Oligo
cucugucauuaacuguggu

SEQ ID NO: 37247 - RNA, 19 nt, Artificial Sequence
  Sense Oligo
cacaguuaaugacagagca

SEQ ID NO: 37248 - RNA, 19 nt, Artificial Sequence
  Antisense Oligo
ugcucugucauuaacugug

SEQ ID NO: 37249 - RNA, 19 nt, Artificial Sequence
  Sense Oligo
acaguuaaugacagagcau

SEQ ID NO: 37250 - RNA, 19 nt, Artificial Sequence
  Antisense Oligo
augcucugucauuaacugu

SEQ ID NO: 37251 - RNA, 19 nt, Artificial Sequence
  Sense Oligo
ugacagagcauuuucauca

SEQ ID NO: 37252 - RNA, 19 nt, Artificial Sequence
  Antisense Oligo
ugaugaaaaugcucuguca

SEQ ID NO: 37253 - RNA, 19 nt, Artificial Sequence
  Sense Oligo
aacugcuucuguggcuuuc

SEQ ID NO: 37254 - RNA, 19 nt, Artificial Sequence
  Antisense Oligo
gaaagccacagaagcaguu

SEQ ID NO: 37255 - RNA, 19 nt, Artificial Sequence
  Sense Oligo
cuguucugacugucauaug

SEQ ID NO: 37256 - RNA, 19 nt, Artificial Sequence
  Antisense Oligo
cauaugacagucagaacag

SEQ ID NO: 37257 - RNA, 19 nt, Artificial Sequence
  Sense Oligo
uguucugacugucauauga

SEQ ID NO: 37258 - RNA, 19 nt, Artificial Sequence
  Antisense Oligo
ucauaugacagucagaaca

SEQ ID NO: 37259 - RNA, 19 nt, Artificial Sequence
  Sense Oligo
guucugacugucauaugaa

SEQ ID NO: 37260 - RNA, 19 nt, Artificial Sequence
  Antisense Oligo
uucauaugacagucagaac

SEQ ID NO: 37261 - RNA, 19 nt, Artificial Sequence
  Sense Oligo
ugacugucauaugaaugga

SEQ ID NO: 37262 - RNA, 19 nt, Artificial Sequence
  Antisense Oligo
uccauucauaugacaguca

SEQ ID NO: 37263 - RNA, 19 nt, Artificial Sequence
  Sense Oligo
gacugucauaugaauggaa

SEQ ID NO: 37264 - RNA, 19 nt, Artificial Sequence
  Antisense Oligo
uuccauucauaugacaguc

SEQ ID NO: 37265 - RNA, 19 nt, Artificial Sequence
  Sense Oligo
uauguggccuuuuggguau

SEQ ID NO: 37266 - RNA, 19 nt, Artificial Sequence
  Antisense Oligo
auacccaaaaggccacaua

SEQ ID NO: 37267 - RNA, 19 nt, Artificial Sequence
  Sense Oligo
uguggccuuuuggguaugg

SEQ ID NO: 37268 - RNA, 19 nt, Artificial Sequence
  Antisense Oligo
ccauacccaaaaggccaca

SEQ ID NO: 37269 - RNA, 19 nt, Artificial Sequence
  Sense Oligo
guggccuuuuggguauggc

SEQ ID NO: 37270 - RNA, 19 nt, Artificial Sequence
  Antisense Oligo
gccauacccaaaaggccac

SEQ ID NO: 37271 - RNA, 19 nt, Artificial Sequence
  Sense Oligo
ggccuuuuggguauggcuu

SEQ ID NO: 37272 - RNA, 19 nt, Artificial Sequence
  Antisense Oligo
aagccauacccaaaaggcc

SEQ ID NO: 37273 - RNA, 19 nt, Artificial Sequence
  Sense Oligo
gccuuuuggguauggcuua

SEQ ID NO: 37274 - RNA, 19 nt, Artificial Sequence
  Antisense Oligo
uaagccauacccaaaaggc

SEQ ID NO: 37275 - RNA, 19 nt, Artificial Sequence
  Sense Oligo
ccuuuuggguauggcuuau

SEQ ID NO: 37276 - RNA, 19 nt, Artificial Sequence
  Antisense Oligo
auaagccauacccaaaagg

SEQ ID NO: 37277 - RNA, 19 nt, Artificial Sequence
  Sense Oligo
cuuuuggguauggcuuauu

SEQ ID NO: 37278 - RNA, 19 nt, Artificial Sequence
  Antisense Oligo
aauaagccauacccaaaag

SEQ ID NO: 37279 - RNA, 19 nt, Artificial Sequence
  Sense Oligo
uuuggguauggcuuauuuc

SEQ ID NO: 37280 - RNA, 19 nt, Artificial Sequence
  Antisense Oligo
gaaauaagccauacccaaa

SEQ ID NO: 37281 - RNA, 19 nt, Artificial Sequence
  Sense Oligo
uugcccaggcuggagugca

SEQ ID NO: 37282 - RNA, 19 nt, Artificial Sequence
  Antisense Oligo
ugcacuccagccugggcaa

SEQ ID NO: 37283 - RNA, 19 nt, Artificial Sequence
  Sense Oligo
ugcccaggcuggagugcaa

SEQ ID NO: 37284 - RNA, 19 nt, Artificial Sequence
  Antisense Oligo
uugcacuccagccugggca

SEQ ID NO: 37285 - RNA, 19 nt, Artificial Sequence
  Sense Oligo
caggcuggagugcaauggu

SEQ ID NO: 37286 - RNA, 19 nt, Artificial Sequence
  Antisense Oligo
accauugcacuccagccug

SEQ ID NO: 37287 - RNA, 19 nt, Artificial Sequence
  Sense Oligo
aggcuggagugcaauggug

SEQ ID NO: 37288 - RNA, 19 nt, Artificial Sequence
  Antisense Oligo
caccauugcacuccagccu

SEQ ID NO: 37289 - RNA, 19 nt, Artificial Sequence
  Sense Oligo
uggagugcaauggugcgau

SEQ ID NO: 37290 - RNA, 19 nt, Artificial Sequence
  Antisense Oligo
aucgcaccauugcacucca

SEQ ID NO: 37291 - RNA, 19 nt, Artificial Sequence
  Sense Oligo
ggagugcaauggugcgauc

SEQ ID NO: 37292 - RNA, 19 nt, Artificial Sequence
  Antisense Oligo
gaucgcaccauugcacucc

SEQ ID NO: 37293 - RNA, 19 nt, Artificial Sequence
  Sense Oligo
gagugcaauggugcgaucc

SEQ ID NO: 37294 - RNA, 19 nt, Artificial Sequence
  Antisense Oligo
ggaucgcaccauugcacuc

SEQ ID NO: 37295 - RNA, 19 nt, Artificial Sequence
  Sense Oligo
gguucaagugauucuccug

SEQ ID NO: 37296 - RNA, 19 nt, Artificial Sequence
  Antisense Oligo
caggagaaucacuugaacc

SEQ ID NO: 37297 - RNA, 19 nt, Artificial Sequence
  Sense Oligo
guucaagugauucuccugc

SEQ ID NO: 37298 - RNA, 19 nt, Artificial Sequence
  Antisense Oligo
gcaggagaaucacuugaac

SEQ ID NO: 37299 - RNA, 19 nt, Artificial Sequence
  Sense Oligo
uucaagugauucuccugcc

SEQ ID NO: 37300 - RNA, 19 nt, Artificial Sequence
  Antisense Oligo
ggcaggagaaucacuugaa

SEQ ID NO: 37301 - RNA, 19 nt, Artificial Sequence
  Sense Oligo
ucaagugauucuccugccu

SEQ ID NO: 37302 - RNA, 19 nt, Artificial Sequence
  Antisense Oligo
aggcaggagaaucacuuga

SEQ ID NO: 37303 - RNA, 19 nt, Artificial Sequence
  Sense Oligo
cugccucagccucccaagu

SEQ ID NO: 37304 - RNA, 19 nt, Artificial Sequence
  Antisense Oligo
acuugggaggcugaggcag

SEQ ID NO: 37305 - RNA, 19 nt, Artificial Sequence
  Sense Oligo
ugccucagccucccaagug

SEQ ID NO: 37306 - RNA, 19 nt, Artificial Sequence
  Antisense Oligo
cacuugggaggcugaggca

SEQ ID NO: 37307 - RNA, 19 nt, Artificial Sequence
  Sense Oligo
ccucagccucccaagugcu

SEQ ID NO: 37308 - RNA, 19 nt, Artificial Sequence
  Antisense Oligo
agcacuugggaggcugagg

SEQ ID NO: 37309 - RNA, 19 nt, Artificial Sequence
  Sense Oligo
cucccaagugcuggaauua

SEQ ID NO: 37310 - RNA, 19 nt, Artificial Sequence
  Antisense Oligo
uaauuccagcacuugggag

SEQ ID NO: 37311 - RNA, 19 nt, Artificial Sequence
  Sense Oligo
ucccaagugcuggaauuac

SEQ ID NO: 37312 - RNA, 19 nt, Artificial Sequence
  Antisense Oligo
guaauuccagcacuuggga

SEQ ID NO: 37313 - RNA, 19 nt, Artificial Sequence
  Sense Oligo
cccaagugcuggaauuaca

SEQ ID NO: 37314 - RNA, 19 nt, Artificial Sequence
  Antisense Oligo
uguaauuccagcacuuggg

SEQ ID NO: 37315 - RNA, 19 nt, Artificial Sequence
  Sense Oligo
ccaagugcuggaauuacag

SEQ ID NO: 37316 - RNA, 19 nt, Artificial Sequence
  Antisense Oligo
cuguaauuccagcacuugg

SEQ ID NO: 37317 - RNA, 19 nt, Artificial Sequence
  Sense Oligo
cuggaauuacagcuacuuu

SEQ ID NO: 37318 - RNA, 19 nt, Artificial Sequence
  Antisense Oligo
aaaguagcuguaauuccag

SEQ ID NO: 37319 - RNA, 19 nt, Artificial Sequence
  Sense Oligo
ccgccacacucgguuccuu

SEQ ID NO: 37320 - RNA, 19 nt, Artificial Sequence
  Antisense Oligo
aaggaaccgaguguggcgg

SEQ ID NO: 37321 - RNA, 19 nt, Artificial Sequence
  Sense Oligo
cgccacacucgguuccuuu

SEQ ID NO: 37322 - RNA, 19 nt, Artificial Sequence
  Antisense Oligo
aaaggaaccgaguguggcg

SEQ ID NO: 37323 - RNA, 19 nt, Artificial Sequence
  Sense Oligo
gccacacucgguuccuuuu

SEQ ID NO: 37324 - RNA, 19 nt, Artificial Sequence
  Antisense Oligo
aaaaggaaccgaguguggc

SEQ ID NO: 37325 - RNA, 19 nt, Artificial Sequence
  Sense Oligo
ccacacucgguuccuuuug

SEQ ID NO: 37326 - RNA, 19 nt, Artificial Sequence
  Antisense Oligo
caaaaggaaccgagugugg

SEQ ID NO: 37327 - RNA, 19 nt, Artificial Sequence
  Sense Oligo
cacacucgguuccuuuugu

SEQ ID NO: 37328 - RNA, 19 nt, Artificial Sequence
  Antisense Oligo
acaaaaggaaccgagugug

SEQ ID NO: 37329 - RNA, 19 nt, Artificial Sequence
  Sense Oligo
acacucgguuccuuuugua

SEQ ID NO: 37330 - RNA, 19 nt, Artificial Sequence
  Antisense Oligo
uacaaaaggaaccgagugu

SEQ ID NO: 37331 - RNA, 19 nt, Artificial Sequence
  Sense Oligo
ucgguuccuuuuguauuuu

SEQ ID NO: 37332 - RNA, 19 nt, Artificial Sequence
  Antisense Oligo
aaaauacaaaaggaaccga

SEQ ID NO: 37333 - RNA, 19 nt, Artificial Sequence
  Sense Oligo
uuucuccauguuggucagg

SEQ ID NO: 37334 - RNA, 19 nt, Artificial Sequence
  Antisense Oligo
ccugaccaacauggagaaa

SEQ ID NO: 37335 - RNA, 19 nt, Artificial Sequence
  Sense Oligo
uucuccauguuggucaggc

SEQ ID NO: 37336 - RNA, 19 nt, Artificial Sequence
  Antisense Oligo
gccugaccaacauggagaa

SEQ ID NO: 37337 - RNA, 19 nt, Artificial Sequence
  Sense Oligo
ucuccauguuggucaggcu

SEQ ID NO: 37338 - RNA, 19 nt, Artificial Sequence
  Antisense Oligo
agccugaccaacauggaga

SEQ ID NO: 37339 - RNA, 19 nt, Artificial Sequence
  Sense Oligo
cuccauguuggucaggcug

SEQ ID NO: 37340 - RNA, 19 nt, Artificial Sequence
  Antisense Oligo
cagccugaccaacauggag

SEQ ID NO: 37341 - RNA, 19 nt, Artificial Sequence
  Sense Oligo
uccauguuggucaggcugg

SEQ ID NO: 37342 - RNA, 19 nt, Artificial Sequence
  Antisense Oligo
ccagccugaccaacaugga

SEQ ID NO: 37343 - RNA, 19 nt, Artificial Sequence
  Sense Oligo
ccauguuggucaggcuggu

SEQ ID NO: 37344 - RNA, 19 nt, Artificial Sequence
  Antisense Oligo
accagccugaccaacaugg

SEQ ID NO: 37345 - RNA, 19 nt, Artificial Sequence
  Sense Oligo
cauguuggucaggcugguc

SEQ ID NO: 37346 - RNA, 19 nt, Artificial Sequence
  Antisense Oligo
gaccagccugaccaacaug

SEQ ID NO: 37347 - RNA, 19 nt, Artificial Sequence
  Sense Oligo
auguuggucaggcuggucu

SEQ ID NO: 37348 - RNA, 19 nt, Artificial Sequence
  Antisense Oligo
agaccagccugaccaacau

SEQ ID NO: 37349 - RNA, 19 nt, Artificial Sequence
  Sense Oligo
cucccgaccucaggugauc

SEQ ID NO: 37350 - RNA, 19 nt, Artificial Sequence
  Antisense Oligo
gaucaccugaggucgggag

SEQ ID NO: 37351 - RNA, 19 nt, Artificial Sequence
  Sense Oligo
ucccgaccucaggugaucc

SEQ ID NO: 37352 - RNA, 19 nt, Artificial Sequence
  Antisense Oligo
ggaucaccugaggucggga

SEQ ID NO: 37353 - RNA, 19 nt, Artificial Sequence
  Sense Oligo
cccgaccucaggugaucca

SEQ ID NO: 37354 - RNA, 19 nt, Artificial Sequence
  Antisense Oligo
uggaucaccugaggucggg

SEQ ID NO: 37355 - RNA, 19 nt, Artificial Sequence
  Sense Oligo
ccgaccucaggugauccac

SEQ ID NO: 37356 - RNA, 19 nt, Artificial Sequence
  Antisense Oligo
guggaucaccugaggucgg

SEQ ID NO: 37357 - RNA, 19 nt, Artificial Sequence
  Sense Oligo
gugauccacccaccuuggc

SEQ ID NO: 37358 - RNA, 19 nt, Artificial Sequence
  Antisense Oligo
gccaagguggguggaucac

SEQ ID NO: 37359 - RNA, 19 nt, Artificial Sequence
  Sense Oligo
ugauccacccaccuuggcc

SEQ ID NO: 37360 - RNA, 19 nt, Artificial Sequence
  Antisense Oligo
ggccaagguggguggauca

SEQ ID NO: 37361 - RNA, 19 nt, Artificial Sequence
  Sense Oligo
gauccacccaccuuggccu

SEQ ID NO: 37362 - RNA, 19 nt, Artificial Sequence
  Antisense Oligo
aggccaagguggguggauc

SEQ ID NO: 37363 - RNA, 19 nt, Artificial Sequence
  Sense Oligo
auccacccaccuuggccuc

SEQ ID NO: 37364 - RNA, 19 nt, Artificial Sequence
  Antisense Oligo
gaggccaagguggguggau

SEQ ID NO: 37365 - RNA, 19 nt, Artificial Sequence
  Sense Oligo
ggccgagcauaauguuuug

SEQ ID NO: 37366 - RNA, 19 nt, Artificial Sequence
  Antisense Oligo
caaaacauuaugcucggcc

SEQ ID NO: 37367 - RNA, 19 nt, Artificial Sequence
  Sense Oligo
gccgagcauaauguuuuga

SEQ ID NO: 37368 - RNA, 19 nt, Artificial Sequence
  Antisense Oligo
ucaaaacauuaugcucggc

SEQ ID NO: 37369 - RNA, 19 nt, Artificial Sequence
  Sense Oligo
ccgagcauaauguuuugaa

SEQ ID NO: 37370 - RNA, 19 nt, Artificial Sequence
  Antisense Oligo
uucaaaacauuaugcucgg

SEQ ID NO: 37371 - RNA, 19 nt, Artificial Sequence
  Sense Oligo
aaagaccgcucaggcugga

SEQ ID NO: 37372 - RNA, 19 nt, Artificial Sequence
  Antisense Oligo
uccagccugagcggucuuu

SEQ ID NO: 37373 - RNA, 19 nt, Artificial Sequence
  Sense Oligo
ggcuggacacgguugcuca

SEQ ID NO: 37374 - RNA, 19 nt, Artificial Sequence
  Antisense Oligo
ugagcaaccguguccagcc

SEQ ID NO: 37375 - RNA, 19 nt, Artificial Sequence
  Sense Oligo
cgguugcucacgccuguaa

SEQ ID NO: 37376 - RNA, 19 nt, Artificial Sequence
  Antisense Oligo
uuacaggcgugagcaaccg

SEQ ID NO: 37377 - RNA, 19 nt, Artificial Sequence
  Sense Oligo
gguugcucacgccuguaau

SEQ ID NO: 37378 - RNA, 19 nt, Artificial Sequence
  Antisense Oligo
auuacaggcgugagcaacc

SEQ ID NO: 37379 - RNA, 19 nt, Artificial Sequence
  Sense Oligo
guugcucacgccuguaauc

SEQ ID NO: 37380 - RNA, 19 nt, Artificial Sequence
  Antisense Oligo
gauuacaggcgugagcaac

SEQ ID NO: 37381 - RNA, 19 nt, Artificial Sequence
  Sense Oligo
uugcucacgccuguaauca

SEQ ID NO: 37382 - RNA, 19 nt, Artificial Sequence
  Antisense Oligo
ugauuacaggcgugagcaa

SEQ ID NO: 37383 - RNA, 19 nt, Artificial Sequence
  Sense Oligo
ugcucacgccuguaaucac

SEQ ID NO: 37384 - RNA, 19 nt, Artificial Sequence
  Antisense Oligo
gugauuacaggcgugagca

SEQ ID NO: 37385 - RNA, 19 nt, Artificial Sequence
  Sense Oligo
gcucacgccuguaaucacg

SEQ ID NO: 37386 - RNA, 19 nt, Artificial Sequence
  Antisense Oligo
cgugauuacaggcgugagc

SEQ ID NO: 37387 - RNA, 19 nt, Artificial Sequence
  Sense Oligo
cucacgccuguaaucacgg

SEQ ID NO: 37388 - RNA, 19 nt, Artificial Sequence
  Antisense Oligo
ccgugauuacaggcgugag

SEQ ID NO: 37389 - RNA, 19 nt, Artificial Sequence
  Sense Oligo
ucacgccuguaaucacggc

SEQ ID NO: 37390 - RNA, 19 nt, Artificial Sequence
  Antisense Oligo
gccgugauuacaggcguga

SEQ ID NO: 37391 - RNA, 19 nt, Artificial Sequence
  Sense Oligo
uuugggagcccaggaguuc

SEQ ID NO: 37392 - RNA, 19 nt, Artificial Sequence
  Antisense Oligo
gaacuccugggcucccaaa

SEQ ID NO: 37393 - RNA, 19 nt, Artificial Sequence
  Sense Oligo
ggagcccaggaguucaaga

SEQ ID NO: 37394 - RNA, 19 nt, Artificial Sequence
  Antisense Oligo
ucuugaacuccugggcucc

SEQ ID NO: 37395 - RNA, 19 nt, Artificial Sequence
  Sense Oligo
acaccuguggucccagcua

SEQ ID NO: 37396 - RNA, 19 nt, Artificial Sequence
  Antisense Oligo
uagcugggaccacaggugu

SEQ ID NO: 37397 - RNA, 19 nt, Artificial Sequence
  Sense Oligo
caccuguggucccagcuac

SEQ ID NO: 37398 - RNA, 19 nt, Artificial Sequence
  Antisense Oligo
guagcugggaccacaggug

SEQ ID NO: 37399 - RNA, 19 nt, Artificial Sequence
  Sense Oligo
accuguggucccagcuacu

SEQ ID NO: 37400 - RNA, 19 nt, Artificial Sequence
  Antisense Oligo
aguagcugggaccacaggu

SEQ ID NO: 37401 - RNA, 19 nt, Artificial Sequence
  Sense Oligo
ccuguggucccagcuacuu

SEQ ID NO: 37402 - RNA, 19 nt, Artificial Sequence
  Antisense Oligo
aaguagcugggaccacagg

SEQ ID NO: 37403 - RNA, 19 nt, Artificial Sequence
  Sense Oligo
cuguggucccagcuacuug

SEQ ID NO: 37404 - RNA, 19 nt, Artificial Sequence
  Antisense Oligo
caaguagcugggaccacag

SEQ ID NO: 37405 - RNA, 19 nt, Artificial Sequence
  Sense Oligo
uguggucccagcuacuugg

SEQ ID NO: 37406 - RNA, 19 nt, Artificial Sequence
  Antisense Oligo
ccaaguagcugggaccaca

SEQ ID NO: 37407 - RNA, 19 nt, Artificial Sequence
  Sense Oligo
agcuacuugggaggcugag

SEQ ID NO: 37408 - RNA, 19 nt, Artificial Sequence
  Antisense Oligo
cucagccucccaaguagcu

SEQ ID NO: 37409 - RNA, 19 nt, Artificial Sequence
  Sense Oligo
gcuacuugggaggcugagg

SEQ ID NO: 37410 - RNA, 19 nt, Artificial Sequence
  Antisense Oligo
ccucagccucccaaguagc

SEQ ID NO: 37411 - RNA, 19 nt, Artificial Sequence
  Sense Oligo
cuacuugggaggcugaggu

SEQ ID NO: 37412 - RNA, 19 nt, Artificial Sequence
  Antisense Oligo
accucagccucccaaguag

SEQ ID NO: 37413 - RNA, 19 nt, Artificial Sequence
  Sense Oligo
uacuugggaggcugaggug

SEQ ID NO: 37414 - RNA, 19 nt, Artificial Sequence
  Antisense Oligo
caccucagccucccaagua

SEQ ID NO: 37415 - RNA, 19 nt, Artificial Sequence
  Sense Oligo
acuugggaggcugaggugg

SEQ ID NO: 37416 - RNA, 19 nt, Artificial Sequence
  Antisense Oligo
ccaccucagccucccaagu

SEQ ID NO: 37417 - RNA, 19 nt, Artificial Sequence
  Sense Oligo
ggcagcagugagccaugau

SEQ ID NO: 37418 - RNA, 19 nt, Artificial Sequence
  Antisense Oligo
aucauggcucacugcugcc

SEQ ID NO: 37419 - RNA, 19 nt, Artificial Sequence
  Sense Oligo
gcagcagugagccaugauc

SEQ ID NO: 37420 - RNA, 19 nt, Artificial Sequence
  Antisense Oligo
gaucauggcucacugcugc

SEQ ID NO: 37421 - RNA, 19 nt, Artificial Sequence
  Sense Oligo
cagcagugagccaugauca

SEQ ID NO: 37422 - RNA, 19 nt, Artificial Sequence
  Antisense Oligo
ugaucauggcucacugcug

SEQ ID NO: 37423 - RNA, 19 nt, Artificial Sequence
  Sense Oligo
ucacaccacugcacuucaa

SEQ ID NO: 37424 - RNA, 19 nt, Artificial Sequence
  Antisense Oligo
uugaagugcagugguguga

SEQ ID NO: 37425 - RNA, 19 nt, Artificial Sequence
  Sense Oligo
cacaccacugcacuucaac

SEQ ID NO: 37426 - RNA, 19 nt, Artificial Sequence
  Antisense Oligo
guugaagugcaguggugug

SEQ ID NO: 37427 - RNA, 19 nt, Artificial Sequence
  Sense Oligo
ccauccauauuguagcuug

SEQ ID NO: 37428 - RNA, 19 nt, Artificial Sequence
  Antisense Oligo
caagcuacaauauggaugg

SEQ ID NO: 37429 - RNA, 19 nt, Artificial Sequence
  Sense Oligo
uccauauuguagcuugugu

SEQ ID NO: 37430 - RNA, 19 nt, Artificial Sequence
  Antisense Oligo
acacaagcuacaauaugga

SEQ ID NO: 37431 - RNA, 19 nt, Artificial Sequence
  Sense Oligo
cauauuguagcuugugucc

SEQ ID NO: 37432 - RNA, 19 nt, Artificial Sequence
  Antisense Oligo
ggacacaagcuacaauaug

SEQ ID NO: 37433 - RNA, 19 nt, Artificial Sequence
  Sense Oligo
agaugucuuccagauggga

SEQ ID NO: 37434 - RNA, 19 nt, Artificial Sequence
  Antisense Oligo
ucccaucuggaagacaucu

SEQ ID NO: 37435 - RNA, 19 nt, Artificial Sequence
  Sense Oligo
gaugucuuccagaugggac

SEQ ID NO: 37436 - RNA, 19 nt, Artificial Sequence
  Antisense Oligo
gucccaucuggaagacauc

SEQ ID NO: 37437 - RNA, 19 nt, Artificial Sequence
  Sense Oligo
augucuuccagaugggacc

SEQ ID NO: 37438 - RNA, 19 nt, Artificial Sequence
  Antisense Oligo
ggucccaucuggaagacau

SEQ ID NO: 37439 - RNA, 19 nt, Artificial Sequence
  Sense Oligo
ugucuuccagaugggaccc

SEQ ID NO: 37440 - RNA, 19 nt, Artificial Sequence
  Antisense Oligo
gggucccaucuggaagaca

SEQ ID NO: 37441 - RNA, 19 nt, Artificial Sequence
  Sense Oligo
gucuuccagaugggaccca

SEQ ID NO: 37442 - RNA, 19 nt, Artificial Sequence
  Antisense Oligo
ugggucccaucuggaagac

SEQ ID NO: 37443 - RNA, 19 nt, Artificial Sequence
  Sense Oligo
cagaugggacccagagucu

SEQ ID NO: 37444 - RNA, 19 nt, Artificial Sequence
  Antisense Oligo
agacucugggucccaucug

SEQ ID NO: 37445 - RNA, 19 nt, Artificial Sequence
  Sense Oligo
ugggacccagagucuaacc

SEQ ID NO: 37446 - RNA, 19 nt, Artificial Sequence
  Antisense Oligo
gguuagacucuggguccca

SEQ ID NO: 37447 - RNA, 19 nt, Artificial Sequence
  Sense Oligo
gggacccagagucuaacca

SEQ ID NO: 37448 - RNA, 19 nt, Artificial Sequence
  Antisense Oligo
ugguuagacucuggguccc

SEQ ID NO: 37449 - RNA, 19 nt, Artificial Sequence
  Sense Oligo
uucacuuguggcaucauua

SEQ ID NO: 37450 - RNA, 19 nt, Artificial Sequence
  Antisense Oligo
uaaugaugccacaagugaa

SEQ ID NO: 37451 - RNA, 19 nt, Artificial Sequence
  Sense Oligo
ucacuuguggcaucauuau

SEQ ID NO: 37452 - RNA, 19 nt, Artificial Sequence
  Antisense Oligo
auaaugaugccacaaguga

SEQ ID NO: 37453 - RNA, 19 nt, Artificial Sequence
  Sense Oligo
uggcaucauuauacucaaa

SEQ ID NO: 37454 - RNA, 19 nt, Artificial Sequence
  Antisense Oligo
uuugaguauaaugaugcca

SEQ ID NO: 37455 - RNA, 19 nt, Artificial Sequence
  Sense Oligo
ggcaucauuauacucaaaa

SEQ ID NO: 37456 - RNA, 19 nt, Artificial Sequence
  Antisense Oligo
uuuugaguauaaugaugcc

SEQ ID NO: 37457 - RNA, 19 nt, Artificial Sequence
  Sense Oligo
ggauuuuguaguauuuugg

SEQ ID NO: 37458 - RNA, 19 nt, Artificial Sequence
  Antisense Oligo
ccaaaauacuacaaaaucc

SEQ ID NO: 37459 - RNA, 19 nt, Artificial Sequence
  Sense Oligo
uguaguauuuuggauuugg

SEQ ID NO: 37460 - RNA, 19 nt, Artificial Sequence
  Antisense Oligo
ccaaauccaaaauacuaca

SEQ ID NO: 37461 - RNA, 19 nt, Artificial Sequence
  Sense Oligo
uuuuccauggccaaauauu

SEQ ID NO: 37462 - RNA, 19 nt, Artificial Sequence
  Antisense Oligo
aauauuuggccauggaaaa

SEQ ID NO: 37463 - RNA, 19 nt, Artificial Sequence
  Sense Oligo
uccauggccaaauauuccc

SEQ ID NO: 37464 - RNA, 19 nt, Artificial Sequence
  Antisense Oligo
gggaauauuuggccaugga

SEQ ID NO: 37465 - RNA, 19 nt, Artificial Sequence
  Sense Oligo
uauccauguguccauugac

SEQ ID NO: 37466 - RNA, 19 nt, Artificial Sequence
  Antisense Oligo
gucaauggacacauggaua

SEQ ID NO: 37467 - RNA, 19 nt, Artificial Sequence
  Sense Oligo
auccauguguccauugacg

SEQ ID NO: 37468 - RNA, 19 nt, Artificial Sequence
  Antisense Oligo
cgucaauggacacauggau

SEQ ID NO: 37469 - RNA, 19 nt, Artificial Sequence
  Sense Oligo
uccauguguccauugacgg

SEQ ID NO: 37470 - RNA, 19 nt, Artificial Sequence
  Antisense Oligo
ccgucaauggacacaugga

SEQ ID NO: 37471 - RNA, 19 nt, Artificial Sequence
  Sense Oligo
ccauguguccauugacggc

SEQ ID NO: 37472 - RNA, 19 nt, Artificial Sequence
  Antisense Oligo
gccgucaauggacacaugg

SEQ ID NO: 37473 - RNA, 19 nt, Artificial Sequence
  Sense Oligo
cauguguccauugacggcc

SEQ ID NO: 37474 - RNA, 19 nt, Artificial Sequence
  Antisense Oligo
ggccgucaauggacacaug

SEQ ID NO: 37475 - RNA, 19 nt, Artificial Sequence
  Sense Oligo
auguguccauugacggcca

SEQ ID NO: 37476 - RNA, 19 nt, Artificial Sequence
  Antisense Oligo
uggccgucaauggacacau

SEQ ID NO: 37477 - RNA, 19 nt, Artificial Sequence
  Sense Oligo
uguguccauugacggccau

SEQ ID NO: 37478 - RNA, 19 nt, Artificial Sequence
  Antisense Oligo
auggccgucaauggacaca

SEQ ID NO: 37479 - RNA, 19 nt, Artificial Sequence
  Sense Oligo
guguccauugacggccauc

SEQ ID NO: 37480 - RNA, 19 nt, Artificial Sequence
  Antisense Oligo
gauggccgucaauggacac

SEQ ID NO: 37481 - RNA, 19 nt, Artificial Sequence
  Sense Oligo
uguccauugacggccaucu

SEQ ID NO: 37482 - RNA, 19 nt, Artificial Sequence
  Antisense Oligo
agauggccgucaauggaca

SEQ ID NO: 37483 - RNA, 19 nt, Artificial Sequence
  Sense Oligo
guccauugacggccaucua

SEQ ID NO: 37484 - RNA, 19 nt, Artificial Sequence
  Antisense Oligo
uagauggccgucaauggac

SEQ ID NO: 37485 - RNA, 19 nt, Artificial Sequence
  Sense Oligo
uccauugacggccaucuau

SEQ ID NO: 37486 - RNA, 19 nt, Artificial Sequence
  Antisense Oligo
auagauggccgucaaugga

SEQ ID NO: 37487 - RNA, 19 nt, Artificial Sequence
  Sense Oligo
ccauugacggccaucuaug

SEQ ID NO: 37488 - RNA, 19 nt, Artificial Sequence
  Antisense Oligo
cauagauggccgucaaugg

SEQ ID NO: 37489 - RNA, 19 nt, Artificial Sequence
  Sense Oligo
ugacggccaucuauguugc

SEQ ID NO: 37490 - RNA, 19 nt, Artificial Sequence
  Antisense Oligo
gcaacauagauggccguca

SEQ ID NO: 37491 - RNA, 19 nt, Artificial Sequence
  Sense Oligo
gacggccaucuauguugcu

SEQ ID NO: 37492 - RNA, 19 nt, Artificial Sequence
  Antisense Oligo
agcaacauagauggccguc

SEQ ID NO: 37493 - RNA, 19 nt, Artificial Sequence
  Sense Oligo
acggccaucuauguugcuu

SEQ ID NO: 37494 - RNA, 19 nt, Artificial Sequence
  Antisense Oligo
aagcaacauagauggccgu

SEQ ID NO: 37495 - RNA, 19 nt, Artificial Sequence
  Sense Oligo
cggccaucuauguugcuuc

SEQ ID NO: 37496 - RNA, 19 nt, Artificial Sequence
  Antisense Oligo
gaagcaacauagauggccg

SEQ ID NO: 37497 - RNA, 19 nt, Artificial Sequence
  Sense Oligo
ggccaucuauguugcuucu

SEQ ID NO: 37498 - RNA, 19 nt, Artificial Sequence
  Antisense Oligo
agaagcaacauagauggcc

SEQ ID NO: 37499 - RNA, 19 nt, Artificial Sequence
  Sense Oligo
gccaucuauguugcuucuu

SEQ ID NO: 37500 - RNA, 19 nt, Artificial Sequence
  Antisense Oligo
aagaagcaacauagauggc

SEQ ID NO: 37501 - RNA, 19 nt, Artificial Sequence
  Sense Oligo
ccaucuauguugcuucuuc

SEQ ID NO: 37502 - RNA, 19 nt, Artificial Sequence
  Antisense Oligo
gaagaagcaacauagaugg

SEQ ID NO: 37503 - RNA, 19 nt, Artificial Sequence
  Sense Oligo
caucuauguugcuucuucg

SEQ ID NO: 37504 - RNA, 19 nt, Artificial Sequence
  Antisense Oligo
cgaagaagcaacauagaug

SEQ ID NO: 37505 - RNA, 19 nt, Artificial Sequence
  Sense Oligo
aucuauguugcuucuucgg

SEQ ID NO: 37506 - RNA, 19 nt, Artificial Sequence
  Antisense Oligo
ccgaagaagcaacauagau

SEQ ID NO: 37507 - RNA, 19 nt, Artificial Sequence
  Sense Oligo
ucuauguugcuucuucggc

SEQ ID NO: 37508 - RNA, 19 nt, Artificial Sequence
  Antisense Oligo
gccgaagaagcaacauaga

SEQ ID NO: 37509 - RNA, 19 nt, Artificial Sequence
  Sense Oligo
cuauguugcuucuucggcu

SEQ ID NO: 37510 - RNA, 19 nt, Artificial Sequence
  Antisense Oligo
agccgaagaagcaacauag

SEQ ID NO: 37511 - RNA, 19 nt, Artificial Sequence
  Sense Oligo
uauguugcuucuucggcua

SEQ ID NO: 37512 - RNA, 19 nt, Artificial Sequence
  Antisense Oligo
uagccgaagaagcaacaua

SEQ ID NO: 37513 - RNA, 19 nt, Artificial Sequence
  Sense Oligo
auguugcuucuucggcuau

SEQ ID NO: 37514 - RNA, 19 nt, Artificial Sequence
  Antisense Oligo
auagccgaagaagcaacau

SEQ ID NO: 37515 - RNA, 19 nt, Artificial Sequence
  Sense Oligo
uguugcuucuucggcuauu

SEQ ID NO: 37516 - RNA, 19 nt, Artificial Sequence
  Antisense Oligo
aauagccgaagaagcaaca

SEQ ID NO: 37517 - RNA, 19 nt, Artificial Sequence
  Sense Oligo
guugcuucuucggcuauua

SEQ ID NO: 37518 - RNA, 19 nt, Artificial Sequence
  Antisense Oligo
uaauagccgaagaagcaac

SEQ ID NO: 37519 - RNA, 19 nt, Artificial Sequence
  Sense Oligo
cuucggcuauuauaaaucu

SEQ ID NO: 37520 - RNA, 19 nt, Artificial Sequence
  Antisense Oligo
agauuuauaauagccgaag

SEQ ID NO: 37521 - RNA, 19 nt, Artificial Sequence
  Sense Oligo
uucggcuauuauaaaucug

SEQ ID NO: 37522 - RNA, 19 nt, Artificial Sequence
  Antisense Oligo
cagauuuauaauagccgaa

SEQ ID NO: 37523 - RNA, 19 nt, Artificial Sequence
  Sense Oligo
cggcuauuauaaaucugcu

SEQ ID NO: 37524 - RNA, 19 nt, Artificial Sequence
  Antisense Oligo
agcagauuuauaauagccg

SEQ ID NO: 37525 - RNA, 19 nt, Artificial Sequence
  Sense Oligo
uguguggguguaugucuuc

SEQ ID NO: 37526 - RNA, 19 nt, Artificial Sequence
  Antisense Oligo
gaagacauacacccacaca

SEQ ID NO: 37527 - RNA, 19 nt, Artificial Sequence
  Sense Oligo
ggguguaugucuucauuuc

SEQ ID NO: 37528 - RNA, 19 nt, Artificial Sequence
  Antisense Oligo
gaaaugaagacauacaccc

SEQ ID NO: 37529 - RNA, 19 nt, Artificial Sequence
  Sense Oligo
gguguaugucuucauuucu

SEQ ID NO: 37530 - RNA, 19 nt, Artificial Sequence
  Antisense Oligo
agaaaugaagacauacacc

SEQ ID NO: 37531 - RNA, 19 nt, Artificial Sequence
  Sense Oligo
ggguguauaccucgaugua

SEQ ID NO: 37532 - RNA, 19 nt, Artificial Sequence
  Antisense Oligo
uacaucgagguauacaccc

SEQ ID NO: 37533 - RNA, 19 nt, Artificial Sequence
  Sense Oligo
gguguauaccucgauguag

SEQ ID NO: 37534 - RNA, 19 nt, Artificial Sequence
  Antisense Oligo
cuacaucgagguauacacc

SEQ ID NO: 37535 - RNA, 19 nt, Artificial Sequence
  Sense Oligo
guguauaccucgauguaga

SEQ ID NO: 37536 - RNA, 19 nt, Artificial Sequence
  Antisense Oligo
ucuacaucgagguauacac

SEQ ID NO: 37537 - RNA, 19 nt, Artificial Sequence
  Sense Oligo
uguauaccucgauguagaa

SEQ ID NO: 37538 - RNA, 19 nt, Artificial Sequence
  Antisense Oligo
uucuacaucgagguauaca

SEQ ID NO: 37539 - RNA, 19 nt, Artificial Sequence
  Sense Oligo
guauaccucgauguagaau

SEQ ID NO: 37540 - RNA, 19 nt, Artificial Sequence
  Antisense Oligo
auucuacaucgagguauac

SEQ ID NO: 37541 - RNA, 19 nt, Artificial Sequence
  Sense Oligo
uauaccucgauguagaauu

SEQ ID NO: 37542 - RNA, 19 nt, Artificial Sequence
  Antisense Oligo
aauucuacaucgagguaua

SEQ ID NO: 37543 - RNA, 19 nt, Artificial Sequence
  Sense Oligo
auaccucgauguagaauug

SEQ ID NO: 37544 - RNA, 19 nt, Artificial Sequence
  Antisense Oligo
caauucuacaucgagguau

SEQ ID NO: 37545 - RNA, 19 nt, Artificial Sequence
  Sense Oligo
uaccucgauguagaauugc

SEQ ID NO: 37546 - RNA, 19 nt, Artificial Sequence
  Antisense Oligo
gcaauucuacaucgaggua

SEQ ID NO: 37547 - RNA, 19 nt, Artificial Sequence
  Sense Oligo
accucgauguagaauugcu

SEQ ID NO: 37548 - RNA, 19 nt, Artificial Sequence
  Antisense Oligo
agcaauucuacaucgaggu

SEQ ID NO: 37549 - RNA, 19 nt, Artificial Sequence
  Sense Oligo
ccucgauguagaauugcug

SEQ ID NO: 37550 - RNA, 19 nt, Artificial Sequence
  Antisense Oligo
cagcaauucuacaucgagg

SEQ ID NO: 37551 - RNA, 19 nt, Artificial Sequence
  Sense Oligo
cucgauguagaauugcuga

SEQ ID NO: 37552 - RNA, 19 nt, Artificial Sequence
  Antisense Oligo
ucagcaauucuacaucgag

SEQ ID NO: 37553 - RNA, 19 nt, Artificial Sequence
  Sense Oligo
ucgauguagaauugcugaa

SEQ ID NO: 37554 - RNA, 19 nt, Artificial Sequence
  Antisense Oligo
uucagcaauucuacaucga

SEQ ID NO: 37555 - RNA, 19 nt, Artificial Sequence
  Sense Oligo
guaacuccauguuuaauug

SEQ ID NO: 37556 - RNA, 19 nt, Artificial Sequence
  Antisense Oligo
caauuaaacauggaguuac

SEQ ID NO: 37557 - RNA, 19 nt, Artificial Sequence
  Sense Oligo
gagucccacagcagcugaa

SEQ ID NO: 37558 - RNA, 19 nt, Artificial Sequence
  Antisense Oligo
uucagcugcugugggacuc

SEQ ID NO: 37559 - RNA, 19 nt, Artificial Sequence
  Sense Oligo
caaucccuccagcagcaua

SEQ ID NO: 37560 - RNA, 19 nt, Artificial Sequence
  Antisense Oligo
uaugcugcuggagggauug

SEQ ID NO: 37561 - RNA, 19 nt, Artificial Sequence
  Sense Oligo
aaucccuccagcagcauag

SEQ ID NO: 37562 - RNA, 19 nt, Artificial Sequence
  Antisense Oligo
cuaugcugcuggagggauu

SEQ ID NO: 37563 - RNA, 19 nt, Artificial Sequence
  Sense Oligo
aucccuccagcagcauagg

SEQ ID NO: 37564 - RNA, 19 nt, Artificial Sequence
  Antisense Oligo
ccuaugcugcuggagggau

SEQ ID NO: 37565 - RNA, 19 nt, Artificial Sequence
  Sense Oligo
uccagcagcauaggaggcu

SEQ ID NO: 37566 - RNA, 19 nt, Artificial Sequence
  Antisense Oligo
agccuccuaugcugcugga

SEQ ID NO: 37567 - RNA, 19 nt, Artificial Sequence
  Sense Oligo
ccagcagcauaggaggcuu

SEQ ID NO: 37568 - RNA, 19 nt, Artificial Sequence
  Antisense Oligo
aagccuccuaugcugcugg

SEQ ID NO: 37569 - RNA, 19 nt, Artificial Sequence
  Sense Oligo
cagcagcauaggaggcuuc

SEQ ID NO: 37570 - RNA, 19 nt, Artificial Sequence
  Antisense Oligo
gaagccuccuaugcugcug

SEQ ID NO: 37571 - RNA, 19 nt, Artificial Sequence
  Sense Oligo
agcagcauaggaggcuucc

SEQ ID NO: 37572 - RNA, 19 nt, Artificial Sequence
  Antisense Oligo
ggaagccuccuaugcugcu

SEQ ID NO: 37573 - RNA, 19 nt, Artificial Sequence
  Sense Oligo
gcagcauaggaggcuucca

SEQ ID NO: 37574 - RNA, 19 nt, Artificial Sequence
  Antisense Oligo
uggaagccuccuaugcugc

SEQ ID NO: 37575 - RNA, 19 nt, Artificial Sequence
  Sense Oligo
cagcauaggaggcuuccag

SEQ ID NO: 37576 - RNA, 19 nt, Artificial Sequence
  Antisense Oligo
cuggaagccuccuaugcug

SEQ ID NO: 37577 - RNA, 19 nt, Artificial Sequence
  Sense Oligo
agcauaggaggcuuccagg

SEQ ID NO: 37578 - RNA, 19 nt, Artificial Sequence
  Antisense Oligo
ccuggaagccuccuaugcu

SEQ ID NO: 37579 - RNA, 19 nt, Artificial Sequence
  Sense Oligo
gcauaggaggcuuccaggu

SEQ ID NO: 37580 - RNA, 19 nt, Artificial Sequence
  Antisense Oligo
accuggaagccuccuaugc

SEQ ID NO: 37581 - RNA, 19 nt, Artificial Sequence
  Sense Oligo
ccagguucuccacauccuc

SEQ ID NO: 37582 - RNA, 19 nt, Artificial Sequence
  Antisense Oligo
gaggauguggagaaccugg

SEQ ID NO: 37583 - RNA, 19 nt, Artificial Sequence
  Sense Oligo
guucuccacauccucacua

SEQ ID NO: 37584 - RNA, 19 nt, Artificial Sequence
  Antisense Oligo
uagugaggauguggagaac

SEQ ID NO: 37585 - RNA, 19 nt, Artificial Sequence
  Sense Oligo
uucuccacauccucacuaa

SEQ ID NO: 37586 - RNA, 19 nt, Artificial Sequence
  Antisense Oligo
uuagugaggauguggagaa

SEQ ID NO: 37587 - RNA, 19 nt, Artificial Sequence
  Sense Oligo
cauguguugucuaacuuuu

SEQ ID NO: 37588 - RNA, 19 nt, Artificial Sequence
  Antisense Oligo
aaaaguuagacaacacaug

SEQ ID NO: 37589 - RNA, 19 nt, Artificial Sequence
  Sense Oligo
agauggagucuugcccugu

SEQ ID NO: 37590 - RNA, 19 nt, Artificial Sequence
  Antisense Oligo
acagggcaagacuccaucu

SEQ ID NO: 37591 - RNA, 19 nt, Artificial Sequence
  Sense Oligo
ucacccaggcuggagugca

SEQ ID NO: 37592 - RNA, 19 nt, Artificial Sequence
  Antisense Oligo
ugcacuccagccuggguga

SEQ ID NO: 37593 - RNA, 19 nt, Artificial Sequence
  Sense Oligo
cuggagugcaguggcguga

SEQ ID NO: 37594 - RNA, 19 nt, Artificial Sequence
  Antisense Oligo
ucacgccacugcacuccag

SEQ ID NO: 37595 - RNA, 19 nt, Artificial Sequence
  Sense Oligo
uggagugcaguggcgugau

SEQ ID NO: 37596 - RNA, 19 nt, Artificial Sequence
  Antisense Oligo
aucacgccacugcacucca

SEQ ID NO: 37597 - RNA, 19 nt, Artificial Sequence
  Sense Oligo
ggagugcaguggcgugauc

SEQ ID NO: 37598 - RNA, 19 nt, Artificial Sequence
  Antisense Oligo
gaucacgccacugcacucc

SEQ ID NO: 37599 - RNA, 19 nt, Artificial Sequence
  Sense Oligo
gagugcaguggcgugaucu

SEQ ID NO: 37600 - RNA, 19 nt, Artificial Sequence
  Antisense Oligo
agaucacgccacugcacuc

SEQ ID NO: 37601 - RNA, 19 nt, Artificial Sequence
  Sense Oligo
agugcaguggcgugaucuu

SEQ ID NO: 37602 - RNA, 19 nt, Artificial Sequence
  Antisense Oligo
aagaucacgccacugcacu

SEQ ID NO: 37603 - RNA, 19 nt, Artificial Sequence
  Sense Oligo
gugcaguggcgugaucuug

SEQ ID NO: 37604 - RNA, 19 nt, Artificial Sequence
  Antisense Oligo
caagaucacgccacugcac

SEQ ID NO: 37605 - RNA, 19 nt, Artificial Sequence
  Sense Oligo
ugcaguggcgugaucuugg

SEQ ID NO: 37606 - RNA, 19 nt, Artificial Sequence
  Antisense Oligo
ccaagaucacgccacugca

SEQ ID NO: 37607 - RNA, 19 nt, Artificial Sequence
  Sense Oligo
gcaguggcgugaucuuggc

SEQ ID NO: 37608 - RNA, 19 nt, Artificial Sequence
  Antisense Oligo
gccaagaucacgccacugc

SEQ ID NO: 37609 - RNA, 19 nt, Artificial Sequence
  Sense Oligo
caguggcgugaucuuggcu

SEQ ID NO: 37610 - RNA, 19 nt, Artificial Sequence
  Antisense Oligo
agccaagaucacgccacug

SEQ ID NO: 37611 - RNA, 19 nt, Artificial Sequence
  Sense Oligo
aguggcgugaucuuggcuc

SEQ ID NO: 37612 - RNA, 19 nt, Artificial Sequence
  Antisense Oligo
gagccaagaucacgccacu

SEQ ID NO: 37613 - RNA, 19 nt, Artificial Sequence
  Sense Oligo
guggcgugaucuuggcuca

SEQ ID NO: 37614 - RNA, 19 nt, Artificial Sequence
  Antisense Oligo
ugagccaagaucacgccac

SEQ ID NO: 37615 - RNA, 19 nt, Artificial Sequence
  Sense Oligo
ugaucuuggcucacugcga

SEQ ID NO: 37616 - RNA, 19 nt, Artificial Sequence
  Antisense Oligo
ucgcagugagccaagauca

SEQ ID NO: 37617 - RNA, 19 nt, Artificial Sequence
  Sense Oligo
gaucuuggcucacugcgac

SEQ ID NO: 37618 - RNA, 19 nt, Artificial Sequence
  Antisense Oligo
gucgcagugagccaagauc

SEQ ID NO: 37619 - RNA, 19 nt, Artificial Sequence
  Sense Oligo
aucuuggcucacugcgaca

SEQ ID NO: 37620 - RNA, 19 nt, Artificial Sequence
  Antisense Oligo
ugucgcagugagccaagau

SEQ ID NO: 37621 - RNA, 19 nt, Artificial Sequence
  Sense Oligo
ucuuggcucacugcgacac

SEQ ID NO: 37622 - RNA, 19 nt, Artificial Sequence
  Antisense Oligo
gugucgcagugagccaaga

SEQ ID NO: 37623 - RNA, 19 nt, Artificial Sequence
  Sense Oligo
cuuggcucacugcgacacc

SEQ ID NO: 37624 - RNA, 19 nt, Artificial Sequence
  Antisense Oligo
ggugucgcagugagccaag

SEQ ID NO: 37625 - RNA, 19 nt, Artificial Sequence
  Sense Oligo
uuggcucacugcgacaccu

SEQ ID NO: 37626 - RNA, 19 nt, Artificial Sequence
  Antisense Oligo
aggugucgcagugagccaa

SEQ ID NO: 37627 - RNA, 19 nt, Artificial Sequence
  Sense Oligo
uggcucacugcgacaccuc

SEQ ID NO: 37628 - RNA, 19 nt, Artificial Sequence
  Antisense Oligo
gaggugucgcagugagcca

SEQ ID NO: 37629 - RNA, 19 nt, Artificial Sequence
  Sense Oligo
cacugcgacaccuccaccu

SEQ ID NO: 37630 - RNA, 19 nt, Artificial Sequence
  Antisense Oligo
agguggaggugucgcagug

SEQ ID NO: 37631 - RNA, 19 nt, Artificial Sequence
  Sense Oligo
acugcgacaccuccaccuc

SEQ ID NO: 37632 - RNA, 19 nt, Artificial Sequence
  Antisense Oligo
gagguggaggugucgcagu

SEQ ID NO: 37633 - RNA, 19 nt, Artificial Sequence
  Sense Oligo
caccuccaccuccuggguu

SEQ ID NO: 37634 - RNA, 19 nt, Artificial Sequence
  Antisense Oligo
aacccaggagguggaggug

SEQ ID NO: 37635 - RNA, 19 nt, Artificial Sequence
  Sense Oligo
accuccaccuccuggguuc

SEQ ID NO: 37636 - RNA, 19 nt, Artificial Sequence
  Antisense Oligo
gaacccaggagguggaggu

SEQ ID NO: 37637 - RNA, 19 nt, Artificial Sequence
  Sense Oligo
ccuccaccuccuggguuca

SEQ ID NO: 37638 - RNA, 19 nt, Artificial Sequence
  Antisense Oligo
ugaacccaggagguggagg

SEQ ID NO: 37639 - RNA, 19 nt, Artificial Sequence
  Sense Oligo
cuccaccuccuggguucaa

SEQ ID NO: 37640 - RNA, 19 nt, Artificial Sequence
  Antisense Oligo
uugaacccaggagguggag

SEQ ID NO: 37641 - RNA, 19 nt, Artificial Sequence
  Sense Oligo
uccaccuccuggguucaag

SEQ ID NO: 37642 - RNA, 19 nt, Artificial Sequence
  Antisense Oligo
cuugaacccaggaggugga

SEQ ID NO: 37643 - RNA, 19 nt, Artificial Sequence
  Sense Oligo
ccaccuccuggguucaagc

SEQ ID NO: 37644 - RNA, 19 nt, Artificial Sequence
  Antisense Oligo
gcuugaacccaggaggugg

SEQ ID NO: 37645 - RNA, 19 nt, Artificial Sequence
  Sense Oligo
caccuccuggguucaagca

SEQ ID NO: 37646 - RNA, 19 nt, Artificial Sequence
  Antisense Oligo
ugcuugaacccaggaggug

SEQ ID NO: 37647 - RNA, 19 nt, Artificial Sequence
  Sense Oligo
accuccuggguucaagcaa

SEQ ID NO: 37648 - RNA, 19 nt, Artificial Sequence
  Antisense Oligo
uugcuugaacccaggaggu

SEQ ID NO: 37649 - RNA, 19 nt, Artificial Sequence
  Sense Oligo
ccuccuggguucaagcaau

SEQ ID NO: 37650 - RNA, 19 nt, Artificial Sequence
  Antisense Oligo
auugcuugaacccaggagg

SEQ ID NO: 37651 - RNA, 19 nt, Artificial Sequence
  Sense Oligo
cuccuggguucaagcaauu

SEQ ID NO: 37652 - RNA, 19 nt, Artificial Sequence
  Antisense Oligo
aauugcuugaacccaggag

SEQ ID NO: 37653 - RNA, 19 nt, Artificial Sequence
  Sense Oligo
uggguucaagcaauucucc

SEQ ID NO: 37654 - RNA, 19 nt, Artificial Sequence
  Antisense Oligo
ggagaauugcuugaaccca

SEQ ID NO: 37655 - RNA, 19 nt, Artificial Sequence
  Sense Oligo
ggguucaagcaauucuccu

SEQ ID NO: 37656 - RNA, 19 nt, Artificial Sequence
  Antisense Oligo
aggagaauugcuugaaccc

SEQ ID NO: 37657 - RNA, 19 nt, Artificial Sequence
  Sense Oligo
gguucaagcaauucuccug

SEQ ID NO: 37658 - RNA, 19 nt, Artificial Sequence
  Antisense Oligo
caggagaauugcuugaacc

SEQ ID NO: 37659 - RNA, 19 nt, Artificial Sequence
  Sense Oligo
guucaagcaauucuccugc

SEQ ID NO: 37660 - RNA, 19 nt, Artificial Sequence
  Antisense Oligo
gcaggagaauugcuugaac

SEQ ID NO: 37661 - RNA, 19 nt, Artificial Sequence
  Sense Oligo
uucaagcaauucuccugcc

SEQ ID NO: 37662 - RNA, 19 nt, Artificial Sequence
  Antisense Oligo
ggcaggagaauugcuugaa

SEQ ID NO: 37663 - RNA, 19 nt, Artificial Sequence
  Sense Oligo
ucaagcaauucuccugccu

SEQ ID NO: 37664 - RNA, 19 nt, Artificial Sequence
  Antisense Oligo
aggcaggagaauugcuuga

SEQ ID NO: 37665 - RNA, 19 nt, Artificial Sequence
  Sense Oligo
gcaauucuccugccucagu

SEQ ID NO: 37666 - RNA, 19 nt, Artificial Sequence
  Antisense Oligo
acugaggcaggagaauugc

SEQ ID NO: 37667 - RNA, 19 nt, Artificial Sequence
  Sense Oligo
caauucuccugccucaguc

SEQ ID NO: 37668 - RNA, 19 nt, Artificial Sequence
  Antisense Oligo
gacugaggcaggagaauug

SEQ ID NO: 37669 - RNA, 19 nt, Artificial Sequence
  Sense Oligo
ucuccugccucagucucuc

SEQ ID NO: 37670 - RNA, 19 nt, Artificial Sequence
  Antisense Oligo
gagagacugaggcaggaga

SEQ ID NO: 37671 - RNA, 19 nt, Artificial Sequence
  Sense Oligo
cugggacuacaggcaugug

SEQ ID NO: 37672 - RNA, 19 nt, Artificial Sequence
  Antisense Oligo
cacaugccuguagucccag

SEQ ID NO: 37673 - RNA, 19 nt, Artificial Sequence
  Sense Oligo
ugggacuacaggcaugugc

SEQ ID NO: 37674 - RNA, 19 nt, Artificial Sequence
  Antisense Oligo
gcacaugccuguaguccca

SEQ ID NO: 37675 - RNA, 19 nt, Artificial Sequence
  Sense Oligo
gggacuacaggcaugugcc

SEQ ID NO: 37676 - RNA, 19 nt, Artificial Sequence
  Antisense Oligo
ggcacaugccuguaguccc

SEQ ID NO: 37677 - RNA, 19 nt, Artificial Sequence
  Sense Oligo
ggacuacaggcaugugcca

SEQ ID NO: 37678 - RNA, 19 nt, Artificial Sequence
  Antisense Oligo
uggcacaugccuguagucc

SEQ ID NO: 37679 - RNA, 19 nt, Artificial Sequence
  Sense Oligo
gacuacaggcaugugccac

SEQ ID NO: 37680 - RNA, 19 nt, Artificial Sequence
  Antisense Oligo
guggcacaugccuguaguc

SEQ ID NO: 37681 - RNA, 19 nt, Artificial Sequence
  Sense Oligo
acuacaggcaugugccacc

SEQ ID NO: 37682 - RNA, 19 nt, Artificial Sequence
  Antisense Oligo
gguggcacaugccuguagu

SEQ ID NO: 37683 - RNA, 19 nt, Artificial Sequence
  Sense Oligo
cuacaggcaugugccacca

SEQ ID NO: 37684 - RNA, 19 nt, Artificial Sequence
  Antisense Oligo
ugguggcacaugccuguag

SEQ ID NO: 37685 - RNA, 19 nt, Artificial Sequence
  Sense Oligo
uacaggcaugugccaccau

SEQ ID NO: 37686 - RNA, 19 nt, Artificial Sequence
  Antisense Oligo
augguggcacaugccugua

SEQ ID NO: 37687 - RNA, 19 nt, Artificial Sequence
  Sense Oligo
augugccaccaugcccagc

SEQ ID NO: 37688 - RNA, 19 nt, Artificial Sequence
  Antisense Oligo
gcugggcaugguggcacau

SEQ ID NO: 37689 - RNA, 19 nt, Artificial Sequence
  Sense Oligo
ugugccaccaugcccagcu

SEQ ID NO: 37690 - RNA, 19 nt, Artificial Sequence
  Antisense Oligo
agcugggcaugguggcaca

SEQ ID NO: 37691 - RNA, 19 nt, Artificial Sequence
  Sense Oligo
gugccaccaugcccagcua

SEQ ID NO: 37692 - RNA, 19 nt, Artificial Sequence
  Antisense Oligo
uagcugggcaugguggcac

SEQ ID NO: 37693 - RNA, 19 nt, Artificial Sequence
  Sense Oligo
ugccaccaugcccagcuaa

SEQ ID NO: 37694 - RNA, 19 nt, Artificial Sequence
  Antisense Oligo
uuagcugggcaugguggca

SEQ ID NO: 37695 - RNA, 19 nt, Artificial Sequence
  Sense Oligo
gccaccaugcccagcuaau

SEQ ID NO: 37696 - RNA, 19 nt, Artificial Sequence
  Antisense Oligo
auuagcugggcaugguggc

SEQ ID NO: 37697 - RNA, 19 nt, Artificial Sequence
  Sense Oligo
ccaccaugcccagcuaauu

SEQ ID NO: 37698 - RNA, 19 nt, Artificial Sequence
  Antisense Oligo
aauuagcugggcauggugg

SEQ ID NO: 37699 - RNA, 19 nt, Artificial Sequence
  Sense Oligo
caccaugcccagcuaauuu

SEQ ID NO: 37700 - RNA, 19 nt, Artificial Sequence
  Antisense Oligo
aaauuagcugggcauggug

SEQ ID NO: 37701 - RNA, 19 nt, Artificial Sequence
  Sense Oligo
accaugcccagcuaauuuu

SEQ ID NO: 37702 - RNA, 19 nt, Artificial Sequence
  Antisense Oligo
aaaauuagcugggcauggu

SEQ ID NO: 37703 - RNA, 19 nt, Artificial Sequence
  Sense Oligo
gguuuugccguguggguca

SEQ ID NO: 37704 - RNA, 19 nt, Artificial Sequence
  Antisense Oligo
ugacccacacggcaaaacc

SEQ ID NO: 37705 - RNA, 19 nt, Artificial Sequence
  Sense Oligo
guuuugccgugugggucau

SEQ ID NO: 37706 - RNA, 19 nt, Artificial Sequence
  Antisense Oligo
augacccacacggcaaaac

SEQ ID NO: 37707 - RNA, 19 nt, Artificial Sequence
  Sense Oligo
uuuugccgugugggucaug

SEQ ID NO: 37708 - RNA, 19 nt, Artificial Sequence
  Antisense Oligo
caugacccacacggcaaaa

SEQ ID NO: 37709 - RNA, 19 nt, Artificial Sequence
  Sense Oligo
gccgugugggucaugaugg

SEQ ID NO: 37710 - RNA, 19 nt, Artificial Sequence
  Antisense Oligo
ccaucaugacccacacggc

SEQ ID NO: 37711 - RNA, 19 nt, Artificial Sequence
  Sense Oligo
ccgugugggucaugauggu

SEQ ID NO: 37712 - RNA, 19 nt, Artificial Sequence
  Antisense Oligo
accaucaugacccacacgg

SEQ ID NO: 37713 - RNA, 19 nt, Artificial Sequence
  Sense Oligo
cgugugggucaugaugguc

SEQ ID NO: 37714 - RNA, 19 nt, Artificial Sequence
  Antisense Oligo
gaccaucaugacccacacg

SEQ ID NO: 37715 - RNA, 19 nt, Artificial Sequence
  Sense Oligo
gugugggucaugauggucu

SEQ ID NO: 37716 - RNA, 19 nt, Artificial Sequence
  Antisense Oligo
agaccaucaugacccacac

SEQ ID NO: 37717 - RNA, 19 nt, Artificial Sequence
  Sense Oligo
ucucuugaccucaugaucc

SEQ ID NO: 37718 - RNA, 19 nt, Artificial Sequence
  Antisense Oligo
ggaucaugaggucaagaga

SEQ ID NO: 37719 - RNA, 19 nt, Artificial Sequence
  Sense Oligo
ccaaagugcugggauuaca

SEQ ID NO: 37720 - RNA, 19 nt, Artificial Sequence
  Antisense Oligo
uguaaucccagcacuuugg

SEQ ID NO: 37721 - RNA, 19 nt, Artificial Sequence
  Sense Oligo
caaagugcugggauuacag

SEQ ID NO: 37722 - RNA, 19 nt, Artificial Sequence
  Antisense Oligo
cuguaaucccagcacuuug

SEQ ID NO: 37723 - RNA, 19 nt, Artificial Sequence
  Sense Oligo
gugcugggauuacaggcgu

SEQ ID NO: 37724 - RNA, 19 nt, Artificial Sequence
  Antisense Oligo
acgccuguaaucccagcac

SEQ ID NO: 37725 - RNA, 19 nt, Artificial Sequence
  Sense Oligo
ugcugggauuacaggcgug

SEQ ID NO: 37726 - RNA, 19 nt, Artificial Sequence
  Antisense Oligo
cacgccuguaaucccagca

SEQ ID NO: 37727 - RNA, 19 nt, Artificial Sequence
  Sense Oligo
gcugggauuacaggcguga

SEQ ID NO: 37728 - RNA, 19 nt, Artificial Sequence
  Antisense Oligo
ucacgccuguaaucccagc

SEQ ID NO: 37729 - RNA, 19 nt, Artificial Sequence
  Sense Oligo
cugggauuacaggcgugag

SEQ ID NO: 37730 - RNA, 19 nt, Artificial Sequence
  Antisense Oligo
cucacgccuguaaucccag

SEQ ID NO: 37731 - RNA, 19 nt, Artificial Sequence
  Sense Oligo
ugggauuacaggcgugagc

SEQ ID NO: 37732 - RNA, 19 nt, Artificial Sequence
  Antisense Oligo
gcucacgccuguaauccca

SEQ ID NO: 37733 - RNA, 19 nt, Artificial Sequence
  Sense Oligo
auuacaggcgugagccacu

SEQ ID NO: 37734 - RNA, 19 nt, Artificial Sequence
  Antisense Oligo
aguggcucacgccuguaau

SEQ ID NO: 37735 - RNA, 19 nt, Artificial Sequence
  Sense Oligo
uuuaacugcauuucucuga

SEQ ID NO: 37736 - RNA, 19 nt, Artificial Sequence
  Antisense Oligo
ucagagaaaugcaguuaaa

SEQ ID NO: 37737 - RNA, 19 nt, Artificial Sequence
  Sense Oligo
uuaacugcauuucucugau

SEQ ID NO: 37738 - RNA, 19 nt, Artificial Sequence
  Antisense Oligo
aucagagaaaugcaguuaa

SEQ ID NO: 37739 - RNA, 19 nt, Artificial Sequence
  Sense Oligo
ugcauuucucugauaacua

SEQ ID NO: 37740 - RNA, 19 nt, Artificial Sequence
  Antisense Oligo
uaguuaucagagaaaugca

SEQ ID NO: 37741 - RNA, 19 nt, Artificial Sequence
  Sense Oligo
cauaugcuuauuggauuug

SEQ ID NO: 37742 - RNA, 19 nt, Artificial Sequence
  Antisense Oligo
caaauccaauaagcauaug

SEQ ID NO: 37743 - RNA, 19 nt, Artificial Sequence
  Sense Oligo
uaugcuuauuggauuuguc

SEQ ID NO: 37744 - RNA, 19 nt, Artificial Sequence
  Antisense Oligo
gacaaauccaauaagcaua

SEQ ID NO: 37745 - RNA, 19 nt, Artificial Sequence
  Sense Oligo
augcuuauuggauuugucu

SEQ ID NO: 37746 - RNA, 19 nt, Artificial Sequence
  Antisense Oligo
agacaaauccaauaagcau

SEQ ID NO: 37747 - RNA, 19 nt, Artificial Sequence
  Sense Oligo
ugcuuauuggauuugucug

SEQ ID NO: 37748 - RNA, 19 nt, Artificial Sequence
  Antisense Oligo
cagacaaauccaauaagca

SEQ ID NO: 37749 - RNA, 19 nt, Artificial Sequence
  Sense Oligo
gcuuauuggauuugucugu

SEQ ID NO: 37750 - RNA, 19 nt, Artificial Sequence
  Antisense Oligo
acagacaaauccaauaagc

SEQ ID NO: 37751 - RNA, 19 nt, Artificial Sequence
  Sense Oligo
cuuauuggauuugucugua

SEQ ID NO: 37752 - RNA, 19 nt, Artificial Sequence
  Antisense Oligo
uacagacaaauccaauaag

SEQ ID NO: 37753 - RNA, 19 nt, Artificial Sequence
  Sense Oligo
uauuggauuugucuguauc

SEQ ID NO: 37754 - RNA, 19 nt, Artificial Sequence
  Antisense Oligo
gauacagacaaauccaaua

SEQ ID NO: 37755 - RNA, 19 nt, Artificial Sequence
  Sense Oligo
auuggauuugucuguaucu

SEQ ID NO: 37756 - RNA, 19 nt, Artificial Sequence
  Antisense Oligo
agauacagacaaauccaau

SEQ ID NO: 37757 - RNA, 19 nt, Artificial Sequence
  Sense Oligo
uggauuugucuguaucuuc

SEQ ID NO: 37758 - RNA, 19 nt, Artificial Sequence
  Antisense Oligo
gaagauacagacaaaucca

SEQ ID NO: 37759 - RNA, 19 nt, Artificial Sequence
  Sense Oligo
ggauuugucuguaucuucu

SEQ ID NO: 37760 - RNA, 19 nt, Artificial Sequence
  Antisense Oligo
agaagauacagacaaaucc

SEQ ID NO: 37761 - RNA, 19 nt, Artificial Sequence
  Sense Oligo
gauuugucuguaucuucuu

SEQ ID NO: 37762 - RNA, 19 nt, Artificial Sequence
  Antisense Oligo
aagaagauacagacaaauc

SEQ ID NO: 37763 - RNA, 19 nt, Artificial Sequence
  Sense Oligo
ugucuguaucuucuuugga

SEQ ID NO: 37764 - RNA, 19 nt, Artificial Sequence
  Antisense Oligo
uccaaagaagauacagaca

SEQ ID NO: 37765 - RNA, 19 nt, Artificial Sequence
  Sense Oligo
ucgcuuugucacccaggcu

SEQ ID NO: 37766 - RNA, 19 nt, Artificial Sequence
  Antisense Oligo
agccugggugacaaagcga

SEQ ID NO: 37767 - RNA, 19 nt, Artificial Sequence
  Sense Oligo
cgcuuugucacccaggcug

SEQ ID NO: 37768 - RNA, 19 nt, Artificial Sequence
  Antisense Oligo
cagccugggugacaaagcg

SEQ ID NO: 37769 - RNA, 19 nt, Artificial Sequence
  Sense Oligo
gcuuugucacccaggcugg

SEQ ID NO: 37770 - RNA, 19 nt, Artificial Sequence
  Antisense Oligo
ccagccugggugacaaagc

SEQ ID NO: 37771 - RNA, 19 nt, Artificial Sequence
  Sense Oligo
cuuugucacccaggcugga

SEQ ID NO: 37772 - RNA, 19 nt, Artificial Sequence
  Antisense Oligo
uccagccugggugacaaag

SEQ ID NO: 37773 - RNA, 19 nt, Artificial Sequence
  Sense Oligo
uuugucacccaggcuggaa

SEQ ID NO: 37774 - RNA, 19 nt, Artificial Sequence
  Antisense Oligo
uuccagccugggugacaaa

SEQ ID NO: 37775 - RNA, 19 nt, Artificial Sequence
  Sense Oligo
uugucacccaggcuggaau

SEQ ID NO: 37776 - RNA, 19 nt, Artificial Sequence
  Antisense Oligo
auuccagccugggugacaa

SEQ ID NO: 37777 - RNA, 19 nt, Artificial Sequence
  Sense Oligo
ugucacccaggcuggaaua

SEQ ID NO: 37778 - RNA, 19 nt, Artificial Sequence
  Antisense Oligo
uauuccagccugggugaca

SEQ ID NO: 37779 - RNA, 19 nt, Artificial Sequence
  Sense Oligo
gucacccaggcuggaauac

SEQ ID NO: 37780 - RNA, 19 nt, Artificial Sequence
  Antisense Oligo
guauuccagccugggugac

SEQ ID NO: 37781 - RNA, 19 nt, Artificial Sequence
  Sense Oligo
ucacccaggcuggaauaca

SEQ ID NO: 37782 - RNA, 19 nt, Artificial Sequence
  Antisense Oligo
uguauuccagccuggguga

SEQ ID NO: 37783 - RNA, 19 nt, Artificial Sequence
  Sense Oligo
cagggacuacaggcaugug

SEQ ID NO: 37784 - RNA, 19 nt, Artificial Sequence
  Antisense Oligo
cacaugccuguagucccug

SEQ ID NO: 37785 - RNA, 19 nt, Artificial Sequence
  Sense Oligo
agggacuacaggcaugugc

SEQ ID NO: 37786 - RNA, 19 nt, Artificial Sequence
  Antisense Oligo
gcacaugccuguagucccu

SEQ ID NO: 37787 - RNA, 19 nt, Artificial Sequence
  Sense Oligo
gggacuacaggcaugugcc

SEQ ID NO: 37788 - RNA, 19 nt, Artificial Sequence
  Antisense Oligo
ggcacaugccuguaguccc

SEQ ID NO: 37789 - RNA, 19 nt, Artificial Sequence
  Sense Oligo
ggacuacaggcaugugcca

SEQ ID NO: 37790 - RNA, 19 nt, Artificial Sequence
  Antisense Oligo
uggcacaugccuguagucc

SEQ ID NO: 37791 - RNA, 19 nt, Artificial Sequence
  Sense Oligo
gacuacaggcaugugccac

SEQ ID NO: 37792 - RNA, 19 nt, Artificial Sequence
  Antisense Oligo
guggcacaugccuguaguc

SEQ ID NO: 37793 - RNA, 19 nt, Artificial Sequence
  Sense Oligo
acuacaggcaugugccacc

SEQ ID NO: 37794 - RNA, 19 nt, Artificial Sequence
  Antisense Oligo
gguggcacaugccuguagu

SEQ ID NO: 37795 - RNA, 19 nt, Artificial Sequence
  Sense Oligo
cuacaggcaugugccacca

SEQ ID NO: 37796 - RNA, 19 nt, Artificial Sequence
  Antisense Oligo
ugguggcacaugccuguag

SEQ ID NO: 37797 - RNA, 19 nt, Artificial Sequence
  Sense Oligo
augguggcucaugccugua

SEQ ID NO: 37798 - RNA, 19 nt, Artificial Sequence
  Antisense Oligo
uacaggcaugagccaccau

SEQ ID NO: 37799 - RNA, 19 nt, Artificial Sequence
  Sense Oligo
uggcucaugccuguagacc

SEQ ID NO: 37800 - RNA, 19 nt, Artificial Sequence
  Antisense Oligo
ggucuacaggcaugagcca

SEQ ID NO: 37801 - RNA, 19 nt, Artificial Sequence
  Sense Oligo
ggcucaugccuguagacca

SEQ ID NO: 37802 - RNA, 19 nt, Artificial Sequence
  Antisense Oligo
uggucuacaggcaugagcc

SEQ ID NO: 37803 - RNA, 19 nt, Artificial Sequence
  Sense Oligo
gcucaugccuguagaccau

SEQ ID NO: 37804 - RNA, 19 nt, Artificial Sequence
  Antisense Oligo
auggucuacaggcaugagc

SEQ ID NO: 37805 - RNA, 19 nt, Artificial Sequence
  Sense Oligo
cucaugccuguagaccauc

SEQ ID NO: 37806 - RNA, 19 nt, Artificial Sequence
  Antisense Oligo
gauggucuacaggcaugag

SEQ ID NO: 37807 - RNA, 19 nt, Artificial Sequence
  Sense Oligo
ucaugccuguagaccaucc

SEQ ID NO: 37808 - RNA, 19 nt, Artificial Sequence
  Antisense Oligo
ggauggucuacaggcauga

SEQ ID NO: 37809 - RNA, 19 nt, Artificial Sequence
  Sense Oligo
caugccuguagaccauccu

SEQ ID NO: 37810 - RNA, 19 nt, Artificial Sequence
  Antisense Oligo
aggauggucuacaggcaug

SEQ ID NO: 37811 - RNA, 19 nt, Artificial Sequence
  Sense Oligo
augccuguagaccauccug

SEQ ID NO: 37812 - RNA, 19 nt, Artificial Sequence
  Antisense Oligo
caggauggucuacaggcau

SEQ ID NO: 37813 - RNA, 19 nt, Artificial Sequence
  Sense Oligo
cuguagaccauccuggcua

SEQ ID NO: 37814 - RNA, 19 nt, Artificial Sequence
  Antisense Oligo
uagccaggauggucuacag

SEQ ID NO: 37815 - RNA, 19 nt, Artificial Sequence
  Sense Oligo
uguagaccauccuggcuaa

SEQ ID NO: 37816 - RNA, 19 nt, Artificial Sequence
  Antisense Oligo
uuagccaggauggucuaca

SEQ ID NO: 37817 - RNA, 19 nt, Artificial Sequence
  Sense Oligo
guagaccauccuggcuaac

SEQ ID NO: 37818 - RNA, 19 nt, Artificial Sequence
  Antisense Oligo
guuagccaggauggucuac

SEQ ID NO: 37819 - RNA, 19 nt, Artificial Sequence
  Sense Oligo
acacccugucucuacuaaa

SEQ ID NO: 37820 - RNA, 19 nt, Artificial Sequence
  Antisense Oligo
uuuaguagagacagggugu

SEQ ID NO: 37821 - RNA, 19 nt, Artificial Sequence
  Sense Oligo
cacccugucucuacuaaaa

SEQ ID NO: 37822 - RNA, 19 nt, Artificial Sequence
  Antisense Oligo
uuuuaguagagacagggug

SEQ ID NO: 37823 - RNA, 19 nt, Artificial Sequence
  Sense Oligo
caauuagcugggcauggug

SEQ ID NO: 37824 - RNA, 19 nt, Artificial Sequence
  Antisense Oligo
caccaugcccagcuaauug

SEQ ID NO: 37825 - RNA, 19 nt, Artificial Sequence
  Sense Oligo
aauuagcugggcauggugg

SEQ ID NO: 37826 - RNA, 19 nt, Artificial Sequence
  Antisense Oligo
ccaccaugcccagcuaauu

SEQ ID NO: 37827 - RNA, 19 nt, Artificial Sequence
  Sense Oligo
auuagcugggcaugguggc

SEQ ID NO: 37828 - RNA, 19 nt, Artificial Sequence
  Antisense Oligo
gccaccaugcccagcuaau

SEQ ID NO: 37829 - RNA, 19 nt, Artificial Sequence
  Sense Oligo
uuagcugggcaugguggca

SEQ ID NO: 37830 - RNA, 19 nt, Artificial Sequence
  Antisense Oligo
ugccaccaugcccagcuaa

SEQ ID NO: 37831 - RNA, 19 nt, Artificial Sequence
  Sense Oligo
uagcugggcaugguggcau

SEQ ID NO: 37832 - RNA, 19 nt, Artificial Sequence
  Antisense Oligo
augccaccaugcccagcua

SEQ ID NO: 37833 - RNA, 19 nt, Artificial Sequence
  Sense Oligo
agcugcuugggaggcugag

SEQ ID NO: 37834 - RNA, 19 nt, Artificial Sequence
  Antisense Oligo
cucagccucccaagcagcu

SEQ ID NO: 37835 - RNA, 19 nt, Artificial Sequence
  Sense Oligo
uugggaggcugaggccaga

SEQ ID NO: 37836 - RNA, 19 nt, Artificial Sequence
  Antisense Oligo
ucuggccucagccucccaa

SEQ ID NO: 37837 - RNA, 19 nt, Artificial Sequence
  Sense Oligo
cacuugaagccaugaggug

SEQ ID NO: 37838 - RNA, 19 nt, Artificial Sequence
  Antisense Oligo
caccucauggcuucaagug

SEQ ID NO: 37839 - RNA, 19 nt, Artificial Sequence
  Sense Oligo
cuugaagccaugaggugga

SEQ ID NO: 37840 - RNA, 19 nt, Artificial Sequence
  Antisense Oligo
uccaccucauggcuucaag

SEQ ID NO: 37841 - RNA, 19 nt, Artificial Sequence
  Sense Oligo
uugaagccaugagguggag

SEQ ID NO: 37842 - RNA, 19 nt, Artificial Sequence
  Antisense Oligo
cuccaccucauggcuucaa

SEQ ID NO: 37843 - RNA, 19 nt, Artificial Sequence
  Sense Oligo
ugaagccaugagguggagg

SEQ ID NO: 37844 - RNA, 19 nt, Artificial Sequence
  Antisense Oligo
ccuccaccucauggcuuca

SEQ ID NO: 37845 - RNA, 19 nt, Artificial Sequence
  Sense Oligo
gaagccaugagguggaggu

SEQ ID NO: 37846 - RNA, 19 nt, Artificial Sequence
  Antisense Oligo
accuccaccucauggcuuc

SEQ ID NO: 37847 - RNA, 19 nt, Artificial Sequence
  Sense Oligo
aagccaugagguggagguu

SEQ ID NO: 37848 - RNA, 19 nt, Artificial Sequence
  Antisense Oligo
aaccuccaccucauggcuu

SEQ ID NO: 37849 - RNA, 19 nt, Artificial Sequence
  Sense Oligo
agccaugagguggagguug

SEQ ID NO: 37850 - RNA, 19 nt, Artificial Sequence
  Antisense Oligo
caaccuccaccucauggcu

SEQ ID NO: 37851 - RNA, 19 nt, Artificial Sequence
  Sense Oligo
gccaugagguggagguugc

SEQ ID NO: 37852 - RNA, 19 nt, Artificial Sequence
  Antisense Oligo
gcaaccuccaccucauggc

SEQ ID NO: 37853 - RNA, 19 nt, Artificial Sequence
  Sense Oligo
ccaugagguggagguugca

SEQ ID NO: 37854 - RNA, 19 nt, Artificial Sequence
  Antisense Oligo
ugcaaccuccaccucaugg

SEQ ID NO: 37855 - RNA, 19 nt, Artificial Sequence
  Sense Oligo
caugagguggagguugcag

SEQ ID NO: 37856 - RNA, 19 nt, Artificial Sequence
  Antisense Oligo
cugcaaccuccaccucaug

SEQ ID NO: 37857 - RNA, 19 nt, Artificial Sequence
  Sense Oligo
guggagguugcagugagcu

SEQ ID NO: 37858 - RNA, 19 nt, Artificial Sequence
  Antisense Oligo
agcucacugcaaccuccac

SEQ ID NO: 37859 - RNA, 19 nt, Artificial Sequence
  Sense Oligo
uggagguugcagugagcug

SEQ ID NO: 37860 - RNA, 19 nt, Artificial Sequence
  Antisense Oligo
cagcucacugcaaccucca

SEQ ID NO: 37861 - RNA, 19 nt, Artificial Sequence
  Sense Oligo
ggagguugcagugagcuga

SEQ ID NO: 37862 - RNA, 19 nt, Artificial Sequence
  Antisense Oligo
ucagcucacugcaaccucc

SEQ ID NO: 37863 - RNA, 19 nt, Artificial Sequence
  Sense Oligo
gagguugcagugagcugag

SEQ ID NO: 37864 - RNA, 19 nt, Artificial Sequence
  Antisense Oligo
cucagcucacugcaaccuc

SEQ ID NO: 37865 - RNA, 19 nt, Artificial Sequence
  Sense Oligo
agauguugcccaggcuggu

SEQ ID NO: 37866 - RNA, 19 nt, Artificial Sequence
  Antisense Oligo
accagccugggcaacaucu

SEQ ID NO: 37867 - RNA, 19 nt, Artificial Sequence
  Sense Oligo
gauguugcccaggcugguc

SEQ ID NO: 37868 - RNA, 19 nt, Artificial Sequence
  Antisense Oligo
gaccagccugggcaacauc

SEQ ID NO: 37869 - RNA, 19 nt, Artificial Sequence
  Sense Oligo
auguugcccaggcuggucu

SEQ ID NO: 37870 - RNA, 19 nt, Artificial Sequence
  Antisense Oligo
agaccagccugggcaacau

SEQ ID NO: 37871 - RNA, 19 nt, Artificial Sequence
  Sense Oligo
uguugcccaggcuggucuu

SEQ ID NO: 37872 - RNA, 19 nt, Artificial Sequence
  Antisense Oligo
aagaccagccugggcaaca

SEQ ID NO: 37873 - RNA, 19 nt, Artificial Sequence
  Sense Oligo
guugcccaggcuggucuug

SEQ ID NO: 37874 - RNA, 19 nt, Artificial Sequence
  Antisense Oligo
caagaccagccugggcaac

SEQ ID NO: 37875 - RNA, 19 nt, Artificial Sequence
  Sense Oligo
uugcccaggcuggucuuga

SEQ ID NO: 37876 - RNA, 19 nt, Artificial Sequence
  Antisense Oligo
ucaagaccagccugggcaa

SEQ ID NO: 37877 - RNA, 19 nt, Artificial Sequence
  Sense Oligo
ugcccaggcuggucuugaa

SEQ ID NO: 37878 - RNA, 19 nt, Artificial Sequence
  Antisense Oligo
uucaagaccagccugggca

SEQ ID NO: 37879 - RNA, 19 nt, Artificial Sequence
  Sense Oligo
caaaguguugggauugaag

SEQ ID NO: 37880 - RNA, 19 nt, Artificial Sequence
  Antisense Oligo
cuucaaucccaacacuuug

SEQ ID NO: 37881 - RNA, 19 nt, Artificial Sequence
  Sense Oligo
auugaaggcaugagccacc

SEQ ID NO: 37882 - RNA, 19 nt, Artificial Sequence
  Antisense Oligo
gguggcucaugccuucaau

SEQ ID NO: 37883 - RNA, 19 nt, Artificial Sequence
  Sense Oligo
uugaaggcaugagccaccg

SEQ ID NO: 37884 - RNA, 19 nt, Artificial Sequence
  Antisense Oligo
cgguggcucaugccuucaa

SEQ ID NO: 37885 - RNA, 19 nt, Artificial Sequence
  Sense Oligo
ugaaggcaugagccaccgc

SEQ ID NO: 37886 - RNA, 19 nt, Artificial Sequence
  Antisense Oligo
gcgguggcucaugccuuca

SEQ ID NO: 37887 - RNA, 19 nt, Artificial Sequence
  Sense Oligo
gaaggcaugagccaccgca

SEQ ID NO: 37888 - RNA, 19 nt, Artificial Sequence
  Antisense Oligo
ugcgguggcucaugccuuc

SEQ ID NO: 37889 - RNA, 19 nt, Artificial Sequence
  Sense Oligo
aaggcaugagccaccgcac

SEQ ID NO: 37890 - RNA, 19 nt, Artificial Sequence
  Antisense Oligo
gugcgguggcucaugccuu

SEQ ID NO: 37891 - RNA, 19 nt, Artificial Sequence
  Sense Oligo
auuauagaguugggagucu

SEQ ID NO: 37892 - RNA, 19 nt, Artificial Sequence
  Antisense Oligo
agacucccaacucuauaau

SEQ ID NO: 37893 - RNA, 19 nt, Artificial Sequence
  Sense Oligo
aguugggagucuuuauucu

SEQ ID NO: 37894 - RNA, 19 nt, Artificial Sequence
  Antisense Oligo
agaauaaagacucccaacu

SEQ ID NO: 37895 - RNA, 19 nt, Artificial Sequence
  Sense Oligo
guugggagucuuuauucua

SEQ ID NO: 37896 - RNA, 19 nt, Artificial Sequence
  Antisense Oligo
uagaauaaagacucccaac

SEQ ID NO: 37897 - RNA, 19 nt, Artificial Sequence
  Sense Oligo
uugggagucuuuauucuau

SEQ ID NO: 37898 - RNA, 19 nt, Artificial Sequence
  Antisense Oligo
auagaauaaagacucccaa

SEQ ID NO: 37899 - RNA, 19 nt, Artificial Sequence
  Sense Oligo
ugggagucuuuauucuaua

SEQ ID NO: 37900 - RNA, 19 nt, Artificial Sequence
  Antisense Oligo
uauagaauaaagacuccca

SEQ ID NO: 37901 - RNA, 19 nt, Artificial Sequence
  Sense Oligo
gggagucuuuauucuauau

SEQ ID NO: 37902 - RNA, 19 nt, Artificial Sequence
  Antisense Oligo
auauagaauaaagacuccc

SEQ ID NO: 37903 - RNA, 19 nt, Artificial Sequence
  Sense Oligo
agucacuugucagauauau

SEQ ID NO: 37904 - RNA, 19 nt, Artificial Sequence
  Antisense Oligo
auauaucugacaagugacu

SEQ ID NO: 37905 - RNA, 19 nt, Artificial Sequence
  Sense Oligo
caaguauuuucucccauuc

SEQ ID NO: 37906 - RNA, 19 nt, Artificial Sequence
  Antisense Oligo
gaaugggagaaaauacuug

SEQ ID NO: 37907 - RNA, 19 nt, Artificial Sequence
  Sense Oligo
aaguauuuucucccauucu

SEQ ID NO: 37908 - RNA, 19 nt, Artificial Sequence
  Antisense Oligo
agaaugggagaaaauacuu

SEQ ID NO: 37909 - RNA, 19 nt, Artificial Sequence
  Sense Oligo
aguauuuucucccauucua

SEQ ID NO: 37910 - RNA, 19 nt, Artificial Sequence
  Antisense Oligo
uagaaugggagaaaauacu

SEQ ID NO: 37911 - RNA, 19 nt, Artificial Sequence
  Sense Oligo
guauuuucucccauucuau

SEQ ID NO: 37912 - RNA, 19 nt, Artificial Sequence
  Antisense Oligo
auagaaugggagaaaauac

SEQ ID NO: 37913 - RNA, 19 nt, Artificial Sequence
  Sense Oligo
uauuuucucccauucuaug

SEQ ID NO: 37914 - RNA, 19 nt, Artificial Sequence
  Antisense Oligo
cauagaaugggagaaaaua

SEQ ID NO: 37915 - RNA, 19 nt, Artificial Sequence
  Sense Oligo
ccauucuauguguuguuuu

SEQ ID NO: 37916 - RNA, 19 nt, Artificial Sequence
  Antisense Oligo
aaaacaacacauagaaugg

SEQ ID NO: 37917 - RNA, 19 nt, Artificial Sequence
  Sense Oligo
uauugguuucuuuugaagc

SEQ ID NO: 37918 - RNA, 19 nt, Artificial Sequence
  Antisense Oligo
gcuucaaaagaaaccaaua

SEQ ID NO: 37919 - RNA, 19 nt, Artificial Sequence
  Sense Oligo
auugguuucuuuugaagca

SEQ ID NO: 37920 - RNA, 19 nt, Artificial Sequence
  Antisense Oligo
ugcuucaaaagaaaccaau

SEQ ID NO: 37921 - RNA, 19 nt, Artificial Sequence
  Sense Oligo
aagcacagaagucuuuaau

SEQ ID NO: 37922 - RNA, 19 nt, Artificial Sequence
  Antisense Oligo
auuaaagacuucugugcuu

SEQ ID NO: 37923 - RNA, 19 nt, Artificial Sequence
  Sense Oligo
agcacagaagucuuuaauu

SEQ ID NO: 37924 - RNA, 19 nt, Artificial Sequence
  Antisense Oligo
aauuaaagacuucugugcu

SEQ ID NO: 37925 - RNA, 19 nt, Artificial Sequence
  Sense Oligo
aagaaguuagcauaucugu

SEQ ID NO: 37926 - RNA, 19 nt, Artificial Sequence
  Antisense Oligo
acagauaugcuaacuucuu

SEQ ID NO: 37927 - RNA, 19 nt, Artificial Sequence
  Sense Oligo
agaaguuagcauaucuguu

SEQ ID NO: 37928 - RNA, 19 nt, Artificial Sequence
  Antisense Oligo
aacagauaugcuaacuucu

SEQ ID NO: 37929 - RNA, 19 nt, Artificial Sequence
  Sense Oligo
gaaguuagcauaucuguuu

SEQ ID NO: 37930 - RNA, 19 nt, Artificial Sequence
  Antisense Oligo
aaacagauaugcuaacuuc

SEQ ID NO: 37931 - RNA, 19 nt, Artificial Sequence
  Sense Oligo
uccuuugccaaauccuagg

SEQ ID NO: 37932 - RNA, 19 nt, Artificial Sequence
  Antisense Oligo
ccuaggauuuggcaaagga

SEQ ID NO: 37933 - RNA, 19 nt, Artificial Sequence
  Sense Oligo
ccuuugccaaauccuaggu

SEQ ID NO: 37934 - RNA, 19 nt, Artificial Sequence
  Antisense Oligo
accuaggauuuggcaaagg

SEQ ID NO: 37935 - RNA, 19 nt, Artificial Sequence
  Sense Oligo
cuuugccaaauccuaggug

SEQ ID NO: 37936 - RNA, 19 nt, Artificial Sequence
  Antisense Oligo
caccuaggauuuggcaaag

SEQ ID NO: 37937 - RNA, 19 nt, Artificial Sequence
  Sense Oligo
uuugccaaauccuagguga

SEQ ID NO: 37938 - RNA, 19 nt, Artificial Sequence
  Antisense Oligo
ucaccuaggauuuggcaaa

SEQ ID NO: 37939 - RNA, 19 nt, Artificial Sequence
  Sense Oligo
uugccaaauccuaggugau

SEQ ID NO: 37940 - RNA, 19 nt, Artificial Sequence
  Antisense Oligo
aucaccuaggauuuggcaa

SEQ ID NO: 37941 - RNA, 19 nt, Artificial Sequence
  Sense Oligo
ugccaaauccuaggugaug

SEQ ID NO: 37942 - RNA, 19 nt, Artificial Sequence
  Antisense Oligo
caucaccuaggauuuggca

SEQ ID NO: 37943 - RNA, 19 nt, Artificial Sequence
  Sense Oligo
gccaaauccuaggugauga

SEQ ID NO: 37944 - RNA, 19 nt, Artificial Sequence
  Antisense Oligo
ucaucaccuaggauuuggc

SEQ ID NO: 37945 - RNA, 19 nt, Artificial Sequence
  Sense Oligo
ccaaauccuaggugaugaa

SEQ ID NO: 37946 - RNA, 19 nt, Artificial Sequence
  Antisense Oligo
uucaucaccuaggauuugg

SEQ ID NO: 37947 - RNA, 19 nt, Artificial Sequence
  Sense Oligo
caaauccuaggugaugaag

SEQ ID NO: 37948 - RNA, 19 nt, Artificial Sequence
  Antisense Oligo
cuucaucaccuaggauuug

SEQ ID NO: 37949 - RNA, 19 nt, Artificial Sequence
  Sense Oligo
aaauccuaggugaugaaga

SEQ ID NO: 37950 - RNA, 19 nt, Artificial Sequence
  Antisense Oligo
ucuucaucaccuaggauuu

SEQ ID NO: 37951 - RNA, 19 nt, Artificial Sequence
  Sense Oligo
aauccuaggugaugaagau

SEQ ID NO: 37952 - RNA, 19 nt, Artificial Sequence
  Antisense Oligo
aucuucaucaccuaggauu

SEQ ID NO: 37953 - RNA, 19 nt, Artificial Sequence
  Sense Oligo
auccuaggugaugaagauu

SEQ ID NO: 37954 - RNA, 19 nt, Artificial Sequence
  Antisense Oligo
aaucuucaucaccuaggau

SEQ ID NO: 37955 - RNA, 19 nt, Artificial Sequence
  Sense Oligo
uccuaggugaugaagauuu

SEQ ID NO: 37956 - RNA, 19 nt, Artificial Sequence
  Antisense Oligo
aaaucuucaucaccuagga

SEQ ID NO: 37957 - RNA, 19 nt, Artificial Sequence
  Sense Oligo
cuaggugaugaagauuuac

SEQ ID NO: 37958 - RNA, 19 nt, Artificial Sequence
  Antisense Oligo
guaaaucuucaucaccuag

SEQ ID NO: 37959 - RNA, 19 nt, Artificial Sequence
  Sense Oligo
uaggugaugaagauuuacu

SEQ ID NO: 37960 - RNA, 19 nt, Artificial Sequence
  Antisense Oligo
aguaaaucuucaucaccua

SEQ ID NO: 37961 - RNA, 19 nt, Artificial Sequence
  Sense Oligo
aggugaugaagauuuacuc

SEQ ID NO: 37962 - RNA, 19 nt, Artificial Sequence
  Antisense Oligo
gaguaaaucuucaucaccu

SEQ ID NO: 37963 - RNA, 19 nt, Artificial Sequence
  Sense Oligo
uacauguaggccuuugauc

SEQ ID NO: 37964 - RNA, 19 nt, Artificial Sequence
  Antisense Oligo
gaucaaaggccuacaugua

SEQ ID NO: 37965 - RNA, 19 nt, Artificial Sequence
  Sense Oligo
uaugguguauaugguguga

SEQ ID NO: 37966 - RNA, 19 nt, Artificial Sequence
  Antisense Oligo
ucacaccauauacaccaua

SEQ ID NO: 37967 - RNA, 19 nt, Artificial Sequence
  Sense Oligo
gugagguaaggguucuguu

SEQ ID NO: 37968 - RNA, 19 nt, Artificial Sequence
  Antisense Oligo
aacagaacccuuaccucac

SEQ ID NO: 37969 - RNA, 19 nt, Artificial Sequence
  Sense Oligo
ugagguaaggguucuguuu

SEQ ID NO: 37970 - RNA, 19 nt, Artificial Sequence
  Antisense Oligo
aaacagaacccuuaccuca

SEQ ID NO: 37971 - RNA, 19 nt, Artificial Sequence
  Sense Oligo
guaaggguucuguuucauu

SEQ ID NO: 37972 - RNA, 19 nt, Artificial Sequence
  Antisense Oligo
aaugaaacagaacccuuac

SEQ ID NO: 37973 - RNA, 19 nt, Artificial Sequence
  Sense Oligo
aaggguucuguuucauucu

SEQ ID NO: 37974 - RNA, 19 nt, Artificial Sequence
  Antisense Oligo
agaaugaaacagaacccuu

SEQ ID NO: 37975 - RNA, 19 nt, Artificial Sequence
  Sense Oligo
aggguucuguuucauucuc

SEQ ID NO: 37976 - RNA, 19 nt, Artificial Sequence
  Antisense Oligo
gagaaugaaacagaacccu

SEQ ID NO: 37977 - RNA, 19 nt, Artificial Sequence
  Sense Oligo
ggguucuguuucauucucu

SEQ ID NO: 37978 - RNA, 19 nt, Artificial Sequence
  Antisense Oligo
agagaaugaaacagaaccc

SEQ ID NO: 37979 - RNA, 19 nt, Artificial Sequence
  Sense Oligo
gguucuguuucauucucuu

SEQ ID NO: 37980 - RNA, 19 nt, Artificial Sequence
  Antisense Oligo
aagagaaugaaacagaacc

SEQ ID NO: 37981 - RNA, 19 nt, Artificial Sequence
  Sense Oligo
cuguuucauucucuugcau

SEQ ID NO: 37982 - RNA, 19 nt, Artificial Sequence
  Antisense Oligo
augcaagagaaugaaacag

SEQ ID NO: 37983 - RNA, 19 nt, Artificial Sequence
  Sense Oligo
uccaguugucccagcauuu

SEQ ID NO: 37984 - RNA, 19 nt, Artificial Sequence
  Antisense Oligo
aaaugcugggacaacugga

SEQ ID NO: 37985 - RNA, 19 nt, Artificial Sequence
  Sense Oligo
ccaguugucccagcauuug

SEQ ID NO: 37986 - RNA, 19 nt, Artificial Sequence
  Antisense Oligo
caaaugcugggacaacugg

SEQ ID NO: 37987 - RNA, 19 nt, Artificial Sequence
  Sense Oligo
caguugucccagcauuugu

SEQ ID NO: 37988 - RNA, 19 nt, Artificial Sequence
  Antisense Oligo
acaaaugcugggacaacug

SEQ ID NO: 37989 - RNA, 19 nt, Artificial Sequence
  Sense Oligo
aaggacucuacauucccug

SEQ ID NO: 37990 - RNA, 19 nt, Artificial Sequence
  Antisense Oligo
cagggaauguagaguccuu

SEQ ID NO: 37991 - RNA, 19 nt, Artificial Sequence
  Sense Oligo
aggacucuacauucccugu

SEQ ID NO: 37992 - RNA, 19 nt, Artificial Sequence
  Antisense Oligo
acagggaauguagaguccu

SEQ ID NO: 37993 - RNA, 19 nt, Artificial Sequence
  Sense Oligo
ggacucuacauucccuguu

SEQ ID NO: 37994 - RNA, 19 nt, Artificial Sequence
  Antisense Oligo
aacagggaauguagagucc

SEQ ID NO: 37995 - RNA, 19 nt, Artificial Sequence
  Sense Oligo
gacucuacauucccuguug

SEQ ID NO: 37996 - RNA, 19 nt, Artificial Sequence
  Antisense Oligo
caacagggaauguagaguc

SEQ ID NO: 37997 - RNA, 19 nt, Artificial Sequence
  Sense Oligo
cuacauucccuguugagug

SEQ ID NO: 37998 - RNA, 19 nt, Artificial Sequence
  Antisense Oligo
cacucaacagggaauguag

SEQ ID NO: 37999 - RNA, 19 nt, Artificial Sequence
  Sense Oligo
uacauucccuguugaguga

SEQ ID NO: 38000 - RNA, 19 nt, Artificial Sequence
  Antisense Oligo
ucacucaacagggaaugua

SEQ ID NO: 38001 - RNA, 19 nt, Artificial Sequence
  Sense Oligo
uucccuguugagugauguu

SEQ ID NO: 38002 - RNA, 19 nt, Artificial Sequence
  Antisense Oligo
aacaucacucaacagggaa

SEQ ID NO: 38003 - RNA, 19 nt, Artificial Sequence
  Sense Oligo
ucccuguugagugauguug

SEQ ID NO: 38004 - RNA, 19 nt, Artificial Sequence
  Antisense Oligo
caacaucacucaacaggga

SEQ ID NO: 38005 - RNA, 19 nt, Artificial Sequence
  Sense Oligo
cccuguugagugauguugg

SEQ ID NO: 38006 - RNA, 19 nt, Artificial Sequence
  Antisense Oligo
ccaacaucacucaacaggg

SEQ ID NO: 38007 - RNA, 19 nt, Artificial Sequence
  Sense Oligo
ccuguugagugauguuggc

SEQ ID NO: 38008 - RNA, 19 nt, Artificial Sequence
  Antisense Oligo
gccaacaucacucaacagg

SEQ ID NO: 38009 - RNA, 19 nt, Artificial Sequence
  Sense Oligo
cuguugagugauguuggca

SEQ ID NO: 38010 - RNA, 19 nt, Artificial Sequence
  Antisense Oligo
ugccaacaucacucaacag

SEQ ID NO: 38011 - RNA, 19 nt, Artificial Sequence
  Sense Oligo
uguugagugauguuggcac

SEQ ID NO: 38012 - RNA, 19 nt, Artificial Sequence
  Antisense Oligo
gugccaacaucacucaaca

SEQ ID NO: 38013 - RNA, 19 nt, Artificial Sequence
  Sense Oligo
gauguuggcacucuuguca

SEQ ID NO: 38014 - RNA, 19 nt, Artificial Sequence
  Antisense Oligo
ugacaagagugccaacauc

SEQ ID NO: 38015 - RNA, 19 nt, Artificial Sequence
  Sense Oligo
aaaaucuguugacgauaca

SEQ ID NO: 38016 - RNA, 19 nt, Artificial Sequence
  Antisense Oligo
uguaucgucaacagauuuu

SEQ ID NO: 38017 - RNA, 19 nt, Artificial Sequence
  Sense Oligo
aaaucuguugacgauacau

SEQ ID NO: 38018 - RNA, 19 nt, Artificial Sequence
  Antisense Oligo
auguaucgucaacagauuu

SEQ ID NO: 38019 - RNA, 19 nt, Artificial Sequence
  Sense Oligo
aaucuguugacgauacaug

SEQ ID NO: 38020 - RNA, 19 nt, Artificial Sequence
  Antisense Oligo
cauguaucgucaacagauu

SEQ ID NO: 38021 - RNA, 19 nt, Artificial Sequence
  Sense Oligo
aucuguugacgauacaugu

SEQ ID NO: 38022 - RNA, 19 nt, Artificial Sequence
  Antisense Oligo
acauguaucgucaacagau

SEQ ID NO: 38023 - RNA, 19 nt, Artificial Sequence
  Sense Oligo
ucuguugacgauacaugua

SEQ ID NO: 38024 - RNA, 19 nt, Artificial Sequence
  Antisense Oligo
uacauguaucgucaacaga

SEQ ID NO: 38025 - RNA, 19 nt, Artificial Sequence
  Sense Oligo
cuguugacgauacauguau

SEQ ID NO: 38026 - RNA, 19 nt, Artificial Sequence
  Antisense Oligo
auacauguaucgucaacag

SEQ ID NO: 38027 - RNA, 19 nt, Artificial Sequence
  Sense Oligo
uguugacgauacauguaug

SEQ ID NO: 38028 - RNA, 19 nt, Artificial Sequence
  Antisense Oligo
cauacauguaucgucaaca

SEQ ID NO: 38029 - RNA, 19 nt, Artificial Sequence
  Sense Oligo
guugacgauacauguaugg

SEQ ID NO: 38030 - RNA, 19 nt, Artificial Sequence
  Antisense Oligo
ccauacauguaucgucaac

SEQ ID NO: 38031 - RNA, 19 nt, Artificial Sequence
  Sense Oligo
uugacgauacauguaugga

SEQ ID NO: 38032 - RNA, 19 nt, Artificial Sequence
  Antisense Oligo
uccauacauguaucgucaa

SEQ ID NO: 38033 - RNA, 19 nt, Artificial Sequence
  Sense Oligo
ugacgauacauguauggau

SEQ ID NO: 38034 - RNA, 19 nt, Artificial Sequence
  Antisense Oligo
auccauacauguaucguca

SEQ ID NO: 38035 - RNA, 19 nt, Artificial Sequence
  Sense Oligo
gacgauacauguauggauu

SEQ ID NO: 38036 - RNA, 19 nt, Artificial Sequence
  Antisense Oligo
aauccauacauguaucguc

SEQ ID NO: 38037 - RNA, 19 nt, Artificial Sequence
  Sense Oligo
acgauacauguauggauuu

SEQ ID NO: 38038 - RNA, 19 nt, Artificial Sequence
  Antisense Oligo
aaauccauacauguaucgu

SEQ ID NO: 38039 - RNA, 19 nt, Artificial Sequence
  Sense Oligo
cgauacauguauggauuua

SEQ ID NO: 38040 - RNA, 19 nt, Artificial Sequence
  Antisense Oligo
uaaauccauacauguaucg

SEQ ID NO: 38041 - RNA, 19 nt, Artificial Sequence
  Sense Oligo
uucaauucuauguggugau

SEQ ID NO: 38042 - RNA, 19 nt, Artificial Sequence
  Antisense Oligo
aucaccacauagaauugaa

SEQ ID NO: 38043 - RNA, 19 nt, Artificial Sequence
  Sense Oligo
ucaauucuauguggugauc

SEQ ID NO: 38044 - RNA, 19 nt, Artificial Sequence
  Antisense Oligo
gaucaccacauagaauuga

SEQ ID NO: 38045 - RNA, 19 nt, Artificial Sequence
  Sense Oligo
caauucuauguggugaucu

SEQ ID NO: 38046 - RNA, 19 nt, Artificial Sequence
  Antisense Oligo
agaucaccacauagaauug

SEQ ID NO: 38047 - RNA, 19 nt, Artificial Sequence
  Sense Oligo
aauucuauguggugaucua

SEQ ID NO: 38048 - RNA, 19 nt, Artificial Sequence
  Antisense Oligo
uagaucaccacauagaauu

SEQ ID NO: 38049 - RNA, 19 nt, Artificial Sequence
  Sense Oligo
uggugaucuacuugccuau

SEQ ID NO: 38050 - RNA, 19 nt, Artificial Sequence
  Antisense Oligo
auaggcaaguagaucacca

SEQ ID NO: 38051 - RNA, 19 nt, Artificial Sequence
  Sense Oligo
ggugaucuacuugccuauc

SEQ ID NO: 38052 - RNA, 19 nt, Artificial Sequence
  Antisense Oligo
gauaggcaaguagaucacc

SEQ ID NO: 38053 - RNA, 19 nt, Artificial Sequence
  Sense Oligo
gugaucuacuugccuaucc

SEQ ID NO: 38054 - RNA, 19 nt, Artificial Sequence
  Antisense Oligo
ggauaggcaaguagaucac

SEQ ID NO: 38055 - RNA, 19 nt, Artificial Sequence
  Sense Oligo
ugaucuacuugccuauccu

SEQ ID NO: 38056 - RNA, 19 nt, Artificial Sequence
  Antisense Oligo
aggauaggcaaguagauca

SEQ ID NO: 38057 - RNA, 19 nt, Artificial Sequence
  Sense Oligo
gaucuacuugccuauccuu

SEQ ID NO: 38058 - RNA, 19 nt, Artificial Sequence
  Antisense Oligo
aaggauaggcaaguagauc

SEQ ID NO: 38059 - RNA, 19 nt, Artificial Sequence
  Sense Oligo
aucuacuugccuauccuug

SEQ ID NO: 38060 - RNA, 19 nt, Artificial Sequence
  Antisense Oligo
caaggauaggcaaguagau

SEQ ID NO: 38061 - RNA, 19 nt, Artificial Sequence
  Sense Oligo
ucuacuugccuauccuugu

SEQ ID NO: 38062 - RNA, 19 nt, Artificial Sequence
  Antisense Oligo
acaaggauaggcaaguaga

SEQ ID NO: 38063 - RNA, 19 nt, Artificial Sequence
  Sense Oligo
cuacuugccuauccuugug

SEQ ID NO: 38064 - RNA, 19 nt, Artificial Sequence
  Antisense Oligo
cacaaggauaggcaaguag

SEQ ID NO: 38065 - RNA, 19 nt, Artificial Sequence
  Sense Oligo
uacuugccuauccuugugu

SEQ ID NO: 38066 - RNA, 19 nt, Artificial Sequence
  Antisense Oligo
acacaaggauaggcaagua

SEQ ID NO: 38067 - RNA, 19 nt, Artificial Sequence
  Sense Oligo
acuugccuauccuuguguc

SEQ ID NO: 38068 - RNA, 19 nt, Artificial Sequence
  Antisense Oligo
gacacaaggauaggcaagu

SEQ ID NO: 38069 - RNA, 19 nt, Artificial Sequence
  Sense Oligo
cuugccuauccuuguguca

SEQ ID NO: 38070 - RNA, 19 nt, Artificial Sequence
  Antisense Oligo
ugacacaaggauaggcaag

SEQ ID NO: 38071 - RNA, 19 nt, Artificial Sequence
  Sense Oligo
uugccuauccuugugucag

SEQ ID NO: 38072 - RNA, 19 nt, Artificial Sequence
  Antisense Oligo
cugacacaaggauaggcaa

SEQ ID NO: 38073 - RNA, 19 nt, Artificial Sequence
  Sense Oligo
ugccuauccuugugucagu

SEQ ID NO: 38074 - RNA, 19 nt, Artificial Sequence
  Antisense Oligo
acugacacaaggauaggca

SEQ ID NO: 38075 - RNA, 19 nt, Artificial Sequence
  Sense Oligo
gccuauccuugugucagua

SEQ ID NO: 38076 - RNA, 19 nt, Artificial Sequence
  Antisense Oligo
uacugacacaaggauaggc

SEQ ID NO: 38077 - RNA, 19 nt, Artificial Sequence
  Sense Oligo
ccuauccuugugucaguac

SEQ ID NO: 38078 - RNA, 19 nt, Artificial Sequence
  Antisense Oligo
guacugacacaaggauagg

SEQ ID NO: 38079 - RNA, 19 nt, Artificial Sequence
  Sense Oligo
cuauccuugugucaguacc

SEQ ID NO: 38080 - RNA, 19 nt, Artificial Sequence
  Antisense Oligo
gguacugacacaaggauag

SEQ ID NO: 38081 - RNA, 19 nt, Artificial Sequence
  Sense Oligo
guaccacacuguuuggacu

SEQ ID NO: 38082 - RNA, 19 nt, Artificial Sequence
  Antisense Oligo
aguccaaacagugugguac

SEQ ID NO: 38083 - RNA, 19 nt, Artificial Sequence
  Sense Oligo
uaccacacuguuuggacua

SEQ ID NO: 38084 - RNA, 19 nt, Artificial Sequence
  Antisense Oligo
uaguccaaacaguguggua

SEQ ID NO: 38085 - RNA, 19 nt, Artificial Sequence
  Sense Oligo
accacacuguuuggacuac

SEQ ID NO: 38086 - RNA, 19 nt, Artificial Sequence
  Antisense Oligo
guaguccaaacaguguggu

SEQ ID NO: 38087 - RNA, 19 nt, Artificial Sequence
  Sense Oligo
ccacacuguuuggacuacc

SEQ ID NO: 38088 - RNA, 19 nt, Artificial Sequence
  Antisense Oligo
gguaguccaaacagugugg

SEQ ID NO: 38089 - RNA, 19 nt, Artificial Sequence
  Sense Oligo
cacacuguuuggacuacca

SEQ ID NO: 38090 - RNA, 19 nt, Artificial Sequence
  Antisense Oligo
ugguaguccaaacagugug

SEQ ID NO: 38091 - RNA, 19 nt, Artificial Sequence
  Sense Oligo
acacuguuuggacuaccau

SEQ ID NO: 38092 - RNA, 19 nt, Artificial Sequence
  Antisense Oligo
augguaguccaaacagugu

SEQ ID NO: 38093 - RNA, 19 nt, Artificial Sequence
  Sense Oligo
cacuguuuggacuaccauu

SEQ ID NO: 38094 - RNA, 19 nt, Artificial Sequence
  Antisense Oligo
aaugguaguccaaacagug

SEQ ID NO: 38095 - RNA, 19 nt, Artificial Sequence
  Sense Oligo
acuguuuggacuaccauug

SEQ ID NO: 38096 - RNA, 19 nt, Artificial Sequence
  Antisense Oligo
caaugguaguccaaacagu

SEQ ID NO: 38097 - RNA, 19 nt, Artificial Sequence
  Sense Oligo
cuguuuggacuaccauugc

SEQ ID NO: 38098 - RNA, 19 nt, Artificial Sequence
  Antisense Oligo
gcaaugguaguccaaacag

SEQ ID NO: 38099 - RNA, 19 nt, Artificial Sequence
  Sense Oligo
uguuuggacuaccauugcu

SEQ ID NO: 38100 - RNA, 19 nt, Artificial Sequence
  Antisense Oligo
agcaaugguaguccaaaca

SEQ ID NO: 38101 - RNA, 19 nt, Artificial Sequence
  Sense Oligo
guuuggacuaccauugcuu

SEQ ID NO: 38102 - RNA, 19 nt, Artificial Sequence
  Antisense Oligo
aagcaaugguaguccaaac

SEQ ID NO: 38103 - RNA, 19 nt, Artificial Sequence
  Sense Oligo
uuuggacuaccauugcuuu

SEQ ID NO: 38104 - RNA, 19 nt, Artificial Sequence
  Antisense Oligo
aaagcaaugguaguccaaa

SEQ ID NO: 38105 - RNA, 19 nt, Artificial Sequence
  Sense Oligo
uuggacuaccauugcuuuc

SEQ ID NO: 38106 - RNA, 19 nt, Artificial Sequence
  Antisense Oligo
gaaagcaaugguaguccaa

SEQ ID NO: 38107 - RNA, 19 nt, Artificial Sequence
  Sense Oligo
uggacuaccauugcuuucu

SEQ ID NO: 38108 - RNA, 19 nt, Artificial Sequence
  Antisense Oligo
agaaagcaaugguagucca

SEQ ID NO: 38109 - RNA, 19 nt, Artificial Sequence
  Sense Oligo
ggacuaccauugcuuucua

SEQ ID NO: 38110 - RNA, 19 nt, Artificial Sequence
  Antisense Oligo
uagaaagcaaugguagucc

SEQ ID NO: 38111 - RNA, 19 nt, Artificial Sequence
  Sense Oligo
gacuaccauugcuuucuag

SEQ ID NO: 38112 - RNA, 19 nt, Artificial Sequence
  Antisense Oligo
cuagaaagcaaugguaguc

SEQ ID NO: 38113 - RNA, 19 nt, Artificial Sequence
  Sense Oligo
cauugcuuucuaguaaguu

SEQ ID NO: 38114 - RNA, 19 nt, Artificial Sequence
  Antisense Oligo
aacuuacuagaaagcaaug

SEQ ID NO: 38115 - RNA, 19 nt, Artificial Sequence
  Sense Oligo
ucccuugcaauuucauaag

SEQ ID NO: 38116 - RNA, 19 nt, Artificial Sequence
  Antisense Oligo
cuuaugaaauugcaaggga

SEQ ID NO: 38117 - RNA, 19 nt, Artificial Sequence
  Sense Oligo
cccuugcaauuucauaaga

SEQ ID NO: 38118 - RNA, 19 nt, Artificial Sequence
  Antisense Oligo
ucuuaugaaauugcaaggg

SEQ ID NO: 38119 - RNA, 19 nt, Artificial Sequence
  Sense Oligo
ccuugcaauuucauaagaa

SEQ ID NO: 38120 - RNA, 19 nt, Artificial Sequence
  Antisense Oligo
uucuuaugaaauugcaagg

SEQ ID NO: 38121 - RNA, 19 nt, Artificial Sequence
  Sense Oligo
gaaucaguaugucaguuuc

SEQ ID NO: 38122 - RNA, 19 nt, Artificial Sequence
  Antisense Oligo
gaaacugacauacugauuc

SEQ ID NO: 38123 - RNA, 19 nt, Artificial Sequence
  Sense Oligo
aaucaguaugucaguuucc

SEQ ID NO: 38124 - RNA, 19 nt, Artificial Sequence
  Antisense Oligo
ggaaacugacauacugauu

SEQ ID NO: 38125 - RNA, 19 nt, Artificial Sequence
  Sense Oligo
aucaguaugucaguuucca

SEQ ID NO: 38126 - RNA, 19 nt, Artificial Sequence
  Antisense Oligo
uggaaacugacauacugau

SEQ ID NO: 38127 - RNA, 19 nt, Artificial Sequence
  Sense Oligo
ucaguaugucaguuuccac

SEQ ID NO: 38128 - RNA, 19 nt, Artificial Sequence
  Antisense Oligo
guggaaacugacauacuga

SEQ ID NO: 38129 - RNA, 19 nt, Artificial Sequence
  Sense Oligo
caguaugucaguuuccacu

SEQ ID NO: 38130 - RNA, 19 nt, Artificial Sequence
  Antisense Oligo
aguggaaacugacauacug

SEQ ID NO: 38131 - RNA, 19 nt, Artificial Sequence
  Sense Oligo
caaggaagucagcugggau

SEQ ID NO: 38132 - RNA, 19 nt, Artificial Sequence
  Antisense Oligo
aucccagcugacuuccuug

SEQ ID NO: 38133 - RNA, 19 nt, Artificial Sequence
  Sense Oligo
agcugggauucugguaggg

SEQ ID NO: 38134 - RNA, 19 nt, Artificial Sequence
  Antisense Oligo
cccuaccagaaucccagcu

SEQ ID NO: 38135 - RNA, 19 nt, Artificial Sequence
  Sense Oligo
gcugggauucugguagggc

SEQ ID NO: 38136 - RNA, 19 nt, Artificial Sequence
  Antisense Oligo
gcccuaccagaaucccagc

SEQ ID NO: 38137 - RNA, 19 nt, Artificial Sequence
  Sense Oligo
ggauucugguagggcuggu

SEQ ID NO: 38138 - RNA, 19 nt, Artificial Sequence
  Antisense Oligo
accagcccuaccagaaucc

SEQ ID NO: 38139 - RNA, 19 nt, Artificial Sequence
  Sense Oligo
gauucugguagggcuggua

SEQ ID NO: 38140 - RNA, 19 nt, Artificial Sequence
  Antisense Oligo
uaccagcccuaccagaauc

SEQ ID NO: 38141 - RNA, 19 nt, Artificial Sequence
  Sense Oligo
auucugguagggcugguau

SEQ ID NO: 38142 - RNA, 19 nt, Artificial Sequence
  Antisense Oligo
auaccagcccuaccagaau

SEQ ID NO: 38143 - RNA, 19 nt, Artificial Sequence
  Sense Oligo
uucugguagggcugguauu

SEQ ID NO: 38144 - RNA, 19 nt, Artificial Sequence
  Antisense Oligo
aauaccagcccuaccagaa

SEQ ID NO: 38145 - RNA, 19 nt, Artificial Sequence
  Sense Oligo
ucugguagggcugguauuc

SEQ ID NO: 38146 - RNA, 19 nt, Artificial Sequence
  Antisense Oligo
gaauaccagcccuaccaga

SEQ ID NO: 38147 - RNA, 19 nt, Artificial Sequence
  Sense Oligo
cugguagggcugguauuca

SEQ ID NO: 38148 - RNA, 19 nt, Artificial Sequence
  Antisense Oligo
ugaauaccagcccuaccag

SEQ ID NO: 38149 - RNA, 19 nt, Artificial Sequence
  Sense Oligo
guagggcugguauucaaug

SEQ ID NO: 38150 - RNA, 19 nt, Artificial Sequence
  Antisense Oligo
cauugaauaccagcccuac

SEQ ID NO: 38151 - RNA, 19 nt, Artificial Sequence
  Sense Oligo
uagggcugguauucaaugu

SEQ ID NO: 38152 - RNA, 19 nt, Artificial Sequence
  Antisense Oligo
acauugaauaccagcccua

SEQ ID NO: 38153 - RNA, 19 nt, Artificial Sequence
  Sense Oligo
agggcugguauucaaugua

SEQ ID NO: 38154 - RNA, 19 nt, Artificial Sequence
  Antisense Oligo
uacauugaauaccagcccu

SEQ ID NO: 38155 - RNA, 19 nt, Artificial Sequence
  Sense Oligo
gggcugguauucaauguau

SEQ ID NO: 38156 - RNA, 19 nt, Artificial Sequence
  Antisense Oligo
auacauugaauaccagccc

SEQ ID NO: 38157 - RNA, 19 nt, Artificial Sequence
  Sense Oligo
caagguuaaguuggauuuc

SEQ ID NO: 38158 - RNA, 19 nt, Artificial Sequence
  Antisense Oligo
gaaauccaacuuaaccuug

SEQ ID NO: 38159 - RNA, 19 nt, Artificial Sequence
  Sense Oligo
aagguuaaguuggauuucu

SEQ ID NO: 38160 - RNA, 19 nt, Artificial Sequence
  Antisense Oligo
agaaauccaacuuaaccuu

SEQ ID NO: 38161 - RNA, 19 nt, Artificial Sequence
  Sense Oligo
agguuaaguuggauuucuu

SEQ ID NO: 38162 - RNA, 19 nt, Artificial Sequence
  Antisense Oligo
aagaaauccaacuuaaccu

SEQ ID NO: 38163 - RNA, 19 nt, Artificial Sequence
  Sense Oligo
cccaagcuggagugcccaa

SEQ ID NO: 38164 - RNA, 19 nt, Artificial Sequence
  Antisense Oligo
uugggcacuccagcuuggg

SEQ ID NO: 38165 - RNA, 19 nt, Artificial Sequence
  Sense Oligo
ccaagcuggagugcccaag

SEQ ID NO: 38166 - RNA, 19 nt, Artificial Sequence
  Antisense Oligo
cuugggcacuccagcuugg

SEQ ID NO: 38167 - RNA, 19 nt, Artificial Sequence
  Sense Oligo
caagcuggagugcccaagu

SEQ ID NO: 38168 - RNA, 19 nt, Artificial Sequence
  Antisense Oligo
acuugggcacuccagcuug

SEQ ID NO: 38169 - RNA, 19 nt, Artificial Sequence
  Sense Oligo
aagcuggagugcccaagua

SEQ ID NO: 38170 - RNA, 19 nt, Artificial Sequence
  Antisense Oligo
uacuugggcacuccagcuu

SEQ ID NO: 38171 - RNA, 19 nt, Artificial Sequence
  Sense Oligo
agcuggagugcccaaguag

SEQ ID NO: 38172 - RNA, 19 nt, Artificial Sequence
  Antisense Oligo
cuacuugggcacuccagcu

SEQ ID NO: 38173 - RNA, 19 nt, Artificial Sequence
  Sense Oligo
gcuggagugcccaaguagc

SEQ ID NO: 38174 - RNA, 19 nt, Artificial Sequence
  Antisense Oligo
gcuacuugggcacuccagc

SEQ ID NO: 38175 - RNA, 19 nt, Artificial Sequence
  Sense Oligo
cuggagugcccaaguagcu

SEQ ID NO: 38176 - RNA, 19 nt, Artificial Sequence
  Antisense Oligo
agcuacuugggcacuccag

SEQ ID NO: 38177 - RNA, 19 nt, Artificial Sequence
  Sense Oligo
uggagugcccaaguagcug

SEQ ID NO: 38178 - RNA, 19 nt, Artificial Sequence
  Antisense Oligo
cagcuacuugggcacucca

SEQ ID NO: 38179 - RNA, 19 nt, Artificial Sequence
  Sense Oligo
ggagugcccaaguagcugg

SEQ ID NO: 38180 - RNA, 19 nt, Artificial Sequence
  Antisense Oligo
ccagcuacuugggcacucc

SEQ ID NO: 38181 - RNA, 19 nt, Artificial Sequence
  Sense Oligo
uagcugggacuacaggugu

SEQ ID NO: 38182 - RNA, 19 nt, Artificial Sequence
  Antisense Oligo
acaccuguagucccagcua

SEQ ID NO: 38183 - RNA, 19 nt, Artificial Sequence
  Sense Oligo
agcugggacuacagguguc

SEQ ID NO: 38184 - RNA, 19 nt, Artificial Sequence
  Antisense Oligo
gacaccuguagucccagcu

SEQ ID NO: 38185 - RNA, 19 nt, Artificial Sequence
  Sense Oligo
guguccaccaccaugccug

SEQ ID NO: 38186 - RNA, 19 nt, Artificial Sequence
  Antisense Oligo
caggcauggugguggacac

SEQ ID NO: 38187 - RNA, 19 nt, Artificial Sequence
  Sense Oligo
uguccaccaccaugccugg

SEQ ID NO: 38188 - RNA, 19 nt, Artificial Sequence
  Antisense Oligo
ccaggcauggugguggaca

SEQ ID NO: 38189 - RNA, 19 nt, Artificial Sequence
  Sense Oligo
uccaccaccaugccuggcu

SEQ ID NO: 38190 - RNA, 19 nt, Artificial Sequence
  Antisense Oligo
agccaggcaugguggugga

SEQ ID NO: 38191 - RNA, 19 nt, Artificial Sequence
  Sense Oligo
ccaccaccaugccuggcua

SEQ ID NO: 38192 - RNA, 19 nt, Artificial Sequence
  Antisense Oligo
uagccaggcaugguggugg

SEQ ID NO: 38193 - RNA, 19 nt, Artificial Sequence
  Sense Oligo
caccaccaugccuggcuaa

SEQ ID NO: 38194 - RNA, 19 nt, Artificial Sequence
  Antisense Oligo
uuagccaggcaugguggug

SEQ ID NO: 38195 - RNA, 19 nt, Artificial Sequence
  Sense Oligo
accaccaugccuggcuaau

SEQ ID NO: 38196 - RNA, 19 nt, Artificial Sequence
  Antisense Oligo
auuagccaggcaugguggu

SEQ ID NO: 38197 - RNA, 19 nt, Artificial Sequence
  Sense Oligo
ccaccaugccuggcuaauu

SEQ ID NO: 38198 - RNA, 19 nt, Artificial Sequence
  Antisense Oligo
aauuagccaggcauggugg

SEQ ID NO: 38199 - RNA, 19 nt, Artificial Sequence
  Sense Oligo
caccaugccuggcuaauuu

SEQ ID NO: 38200 - RNA, 19 nt, Artificial Sequence
  Antisense Oligo
aaauuagccaggcauggug

SEQ ID NO: 38201 - RNA, 19 nt, Artificial Sequence
  Sense Oligo
accaugccuggcuaauuuu

SEQ ID NO: 38202 - RNA, 19 nt, Artificial Sequence
  Antisense Oligo
aaaauuagccaggcauggu

SEQ ID NO: 38203 - RNA, 19 nt, Artificial Sequence
  Sense Oligo
aacuccugaccucagauga

SEQ ID NO: 38204 - RNA, 19 nt, Artificial Sequence
  Antisense Oligo
ucaucugaggucaggaguu

SEQ ID NO: 38205 - RNA, 19 nt, Artificial Sequence
  Sense Oligo
acuccugaccucagaugau

SEQ ID NO: 38206 - RNA, 19 nt, Artificial Sequence
  Antisense Oligo
aucaucugaggucaggagu

SEQ ID NO: 38207 - RNA, 19 nt, Artificial Sequence
  Sense Oligo
cugggauuacaggcaugag

SEQ ID NO: 38208 - RNA, 19 nt, Artificial Sequence
  Antisense Oligo
cucaugccuguaaucccag

SEQ ID NO: 38209 - RNA, 19 nt, Artificial Sequence
  Sense Oligo
auuacaggcaugagccacc

SEQ ID NO: 38210 - RNA, 19 nt, Artificial Sequence
  Antisense Oligo
gguggcucaugccuguaau

SEQ ID NO: 38211 - RNA, 19 nt, Artificial Sequence
  Sense Oligo
uuacaggcaugagccacca

SEQ ID NO: 38212 - RNA, 19 nt, Artificial Sequence
  Antisense Oligo
ugguggcucaugccuguaa

SEQ ID NO: 38213 - RNA, 19 nt, Artificial Sequence
  Sense Oligo
uacaggcaugagccaccau

SEQ ID NO: 38214 - RNA, 19 nt, Artificial Sequence
  Antisense Oligo
augguggcucaugccugua

SEQ ID NO: 38215 - RNA, 19 nt, Artificial Sequence
  Sense Oligo
acaggcaugagccaccauu

SEQ ID NO: 38216 - RNA, 19 nt, Artificial Sequence
  Antisense Oligo
aaugguggcucaugccugu

SEQ ID NO: 38217 - RNA, 19 nt, Artificial Sequence
  Sense Oligo
caggcaugagccaccauuc

SEQ ID NO: 38218 - RNA, 19 nt, Artificial Sequence
  Antisense Oligo
gaaugguggcucaugccug

SEQ ID NO: 38219 - RNA, 19 nt, Artificial Sequence
  Sense Oligo
ccuggccaauuucuuuuaa

SEQ ID NO: 38220 - RNA, 19 nt, Artificial Sequence
  Antisense Oligo
uuaaaagaaauuggccagg

SEQ ID NO: 38221 - RNA, 19 nt, Artificial Sequence
  Sense Oligo
cuggccaauuucuuuuaac

SEQ ID NO: 38222 - RNA, 19 nt, Artificial Sequence
  Antisense Oligo
guuaaaagaaauuggccag

SEQ ID NO: 38223 - RNA, 19 nt, Artificial Sequence
  Sense Oligo
gggugcuauuguaauugga

SEQ ID NO: 38224 - RNA, 19 nt, Artificial Sequence
  Antisense Oligo
uccaauuacaauagcaccc

SEQ ID NO: 38225 - RNA, 19 nt, Artificial Sequence
  Sense Oligo
ggugcuauuguaauuggaa

SEQ ID NO: 38226 - RNA, 19 nt, Artificial Sequence
  Antisense Oligo
uuccaauuacaauagcacc

SEQ ID NO: 38227 - RNA, 19 nt, Artificial Sequence
  Sense Oligo
gugcuauuguaauuggaau

SEQ ID NO: 38228 - RNA, 19 nt, Artificial Sequence
  Antisense Oligo
auuccaauuacaauagcac

SEQ ID NO: 38229 - RNA, 19 nt, Artificial Sequence
  Sense Oligo
guuuccagauuguuccuug

SEQ ID NO: 38230 - RNA, 19 nt, Artificial Sequence
  Antisense Oligo
caaggaacaaucuggaaac

SEQ ID NO: 38231 - RNA, 19 nt, Artificial Sequence
  Sense Oligo
uguuccuugcuggugucua

SEQ ID NO: 38232 - RNA, 19 nt, Artificial Sequence
  Antisense Oligo
uagacaccagcaaggaaca

SEQ ID NO: 38233 - RNA, 19 nt, Artificial Sequence
  Sense Oligo
guuccuugcuggugucuag

SEQ ID NO: 38234 - RNA, 19 nt, Artificial Sequence
  Antisense Oligo
cuagacaccagcaaggaac

SEQ ID NO: 38235 - RNA, 19 nt, Artificial Sequence
  Sense Oligo
uccuugcuggugucuagac

SEQ ID NO: 38236 - RNA, 19 nt, Artificial Sequence
  Antisense Oligo
gucuagacaccagcaagga

SEQ ID NO: 38237 - RNA, 19 nt, Artificial Sequence
  Sense Oligo
ccuugcuggugucuagaca

SEQ ID NO: 38238 - RNA, 19 nt, Artificial Sequence
  Antisense Oligo
ugucuagacaccagcaagg

SEQ ID NO: 38239 - RNA, 19 nt, Artificial Sequence
  Sense Oligo
cacagugcuccaugcgucu

SEQ ID NO: 38240 - RNA, 19 nt, Artificial Sequence
  Antisense Oligo
agacgcauggagcacugug

SEQ ID NO: 38241 - RNA, 19 nt, Artificial Sequence
  Sense Oligo
acagugcuccaugcgucuu

SEQ ID NO: 38242 - RNA, 19 nt, Artificial Sequence
  Antisense Oligo
aagacgcauggagcacugu

SEQ ID NO: 38243 - RNA, 19 nt, Artificial Sequence
  Sense Oligo
cagugcuccaugcgucuug

SEQ ID NO: 38244 - RNA, 19 nt, Artificial Sequence
  Antisense Oligo
caagacgcauggagcacug

SEQ ID NO: 38245 - RNA, 19 nt, Artificial Sequence
  Sense Oligo
agugcuccaugcgucuugu

SEQ ID NO: 38246 - RNA, 19 nt, Artificial Sequence
  Antisense Oligo
acaagacgcauggagcacu

SEQ ID NO: 38247 - RNA, 19 nt, Artificial Sequence
  Sense Oligo
gugcuccaugcgucuugua

SEQ ID NO: 38248 - RNA, 19 nt, Artificial Sequence
  Antisense Oligo
uacaagacgcauggagcac

SEQ ID NO: 38249 - RNA, 19 nt, Artificial Sequence
  Sense Oligo
uccaugcgucuuguauccu

SEQ ID NO: 38250 - RNA, 19 nt, Artificial Sequence
  Antisense Oligo
aggauacaagacgcaugga

SEQ ID NO: 38251 - RNA, 19 nt, Artificial Sequence
  Sense Oligo
ccaugcgucuuguauccug

SEQ ID NO: 38252 - RNA, 19 nt, Artificial Sequence
  Antisense Oligo
caggauacaagacgcaugg

SEQ ID NO: 38253 - RNA, 19 nt, Artificial Sequence
  Sense Oligo
caugcgucuuguauccugc

SEQ ID NO: 38254 - RNA, 19 nt, Artificial Sequence
  Antisense Oligo
gcaggauacaagacgcaug

SEQ ID NO: 38255 - RNA, 19 nt, Artificial Sequence
  Sense Oligo
augcgucuuguauccugca

SEQ ID NO: 38256 - RNA, 19 nt, Artificial Sequence
  Antisense Oligo
ugcaggauacaagacgcau

SEQ ID NO: 38257 - RNA, 19 nt, Artificial Sequence
  Sense Oligo
ugcgucuuguauccugcaa

SEQ ID NO: 38258 - RNA, 19 nt, Artificial Sequence
  Antisense Oligo
uugcaggauacaagacgca

SEQ ID NO: 38259 - RNA, 19 nt, Artificial Sequence
  Sense Oligo
gcgucuuguauccugcaac

SEQ ID NO: 38260 - RNA, 19 nt, Artificial Sequence
  Antisense Oligo
guugcaggauacaagacgc

SEQ ID NO: 38261 - RNA, 19 nt, Artificial Sequence
  Sense Oligo
ugguagcucaaauugugug

SEQ ID NO: 38262 - RNA, 19 nt, Artificial Sequence
  Antisense Oligo
cacacaauuugagcuacca

SEQ ID NO: 38263 - RNA, 19 nt, Artificial Sequence
  Sense Oligo
gugugugugugugcaugag

SEQ ID NO: 38264 - RNA, 19 nt, Artificial Sequence
  Antisense Oligo
cucaugcacacacacacac

SEQ ID NO: 38265 - RNA, 19 nt, Artificial Sequence
  Sense Oligo
caucugugaauagaguuuc

SEQ ID NO: 38266 - RNA, 19 nt, Artificial Sequence
  Antisense Oligo
gaaacucuauucacagaug

SEQ ID NO: 38267 - RNA, 19 nt, Artificial Sequence
  Sense Oligo
gaguuucacuucuuccaau

SEQ ID NO: 38268 - RNA, 19 nt, Artificial Sequence
  Antisense Oligo
auuggaagaagugaaacuc

SEQ ID NO: 38269 - RNA, 19 nt, Artificial Sequence
  Sense Oligo
aguuucacuucuuccaauc

SEQ ID NO: 38270 - RNA, 19 nt, Artificial Sequence
  Antisense Oligo
gauuggaagaagugaaacu

SEQ ID NO: 38271 - RNA, 19 nt, Artificial Sequence
  Sense Oligo
uuucacuucuuccaaucug

SEQ ID NO: 38272 - RNA, 19 nt, Artificial Sequence
  Antisense Oligo
cagauuggaagaagugaaa

SEQ ID NO: 38273 - RNA, 19 nt, Artificial Sequence
  Sense Oligo
cucuugcauaacugcccug

SEQ ID NO: 38274 - RNA, 19 nt, Artificial Sequence
  Antisense Oligo
cagggcaguuaugcaagag

SEQ ID NO: 38275 - RNA, 19 nt, Artificial Sequence
  Sense Oligo
ugcauaacugcccuggcua

SEQ ID NO: 38276 - RNA, 19 nt, Artificial Sequence
  Antisense Oligo
uagccagggcaguuaugca

SEQ ID NO: 38277 - RNA, 19 nt, Artificial Sequence
  Sense Oligo
cuuguucugaucuuaagag

SEQ ID NO: 38278 - RNA, 19 nt, Artificial Sequence
  Antisense Oligo
cucuuaagaucagaacaag

SEQ ID NO: 38279 - RNA, 19 nt, Artificial Sequence
  Sense Oligo
gaagguuucagucuuuugc

SEQ ID NO: 38280 - RNA, 19 nt, Artificial Sequence
  Antisense Oligo
gcaaaagacugaaaccuuc

SEQ ID NO: 38281 - RNA, 19 nt, Artificial Sequence
  Sense Oligo
aagguuucagucuuuugcc

SEQ ID NO: 38282 - RNA, 19 nt, Artificial Sequence
  Antisense Oligo
ggcaaaagacugaaaccuu

SEQ ID NO: 38283 - RNA, 19 nt, Artificial Sequence
  Sense Oligo
agguuucagucuuuugcca

SEQ ID NO: 38284 - RNA, 19 nt, Artificial Sequence
  Antisense Oligo
uggcaaaagacugaaaccu

SEQ ID NO: 38285 - RNA, 19 nt, Artificial Sequence
  Sense Oligo
gguuucagucuuuugccac

SEQ ID NO: 38286 - RNA, 19 nt, Artificial Sequence
  Antisense Oligo
guggcaaaagacugaaacc

SEQ ID NO: 38287 - RNA, 19 nt, Artificial Sequence
  Sense Oligo
guuucagucuuuugccacc

SEQ ID NO: 38288 - RNA, 19 nt, Artificial Sequence
  Antisense Oligo
gguggcaaaagacugaaac

SEQ ID NO: 38289 - RNA, 19 nt, Artificial Sequence
  Sense Oligo
uucagucuuuugccaccag

SEQ ID NO: 38290 - RNA, 19 nt, Artificial Sequence
  Antisense Oligo
cugguggcaaaagacugaa

SEQ ID NO: 38291 - RNA, 19 nt, Artificial Sequence
  Sense Oligo
ucagucuuuugccaccagg

SEQ ID NO: 38292 - RNA, 19 nt, Artificial Sequence
  Antisense Oligo
ccugguggcaaaagacuga

SEQ ID NO: 38293 - RNA, 19 nt, Artificial Sequence
  Sense Oligo
cagucuuuugccaccaggu

SEQ ID NO: 38294 - RNA, 19 nt, Artificial Sequence
  Antisense Oligo
accugguggcaaaagacug

SEQ ID NO: 38295 - RNA, 19 nt, Artificial Sequence
  Sense Oligo
agucuuuugccaccaggug

SEQ ID NO: 38296 - RNA, 19 nt, Artificial Sequence
  Antisense Oligo
caccugguggcaaaagacu

SEQ ID NO: 38297 - RNA, 19 nt, Artificial Sequence
  Sense Oligo
gucuuuugccaccaggugu

SEQ ID NO: 38298 - RNA, 19 nt, Artificial Sequence
  Antisense Oligo
acaccugguggcaaaagac

SEQ ID NO: 38299 - RNA, 19 nt, Artificial Sequence
  Sense Oligo
ucuuuugccaccaggugug

SEQ ID NO: 38300 - RNA, 19 nt, Artificial Sequence
  Antisense Oligo
cacaccugguggcaaaaga

SEQ ID NO: 38301 - RNA, 19 nt, Artificial Sequence
  Sense Oligo
cuuuugccaccagguguga

SEQ ID NO: 38302 - RNA, 19 nt, Artificial Sequence
  Antisense Oligo
ucacaccugguggcaaaag

SEQ ID NO: 38303 - RNA, 19 nt, Artificial Sequence
  Sense Oligo
uuuugccaccaggugugau

SEQ ID NO: 38304 - RNA, 19 nt, Artificial Sequence
  Antisense Oligo
aucacaccugguggcaaaa

SEQ ID NO: 38305 - RNA, 19 nt, Artificial Sequence
  Sense Oligo
uuugccaccaggugugaug

SEQ ID NO: 38306 - RNA, 19 nt, Artificial Sequence
  Antisense Oligo
caucacaccugguggcaaa

SEQ ID NO: 38307 - RNA, 19 nt, Artificial Sequence
  Sense Oligo
uugccaccaggugugaugu

SEQ ID NO: 38308 - RNA, 19 nt, Artificial Sequence
  Antisense Oligo
acaucacaccugguggcaa

SEQ ID NO: 38309 - RNA, 19 nt, Artificial Sequence
  Sense Oligo
ugccaccaggugugauguc

SEQ ID NO: 38310 - RNA, 19 nt, Artificial Sequence
  Antisense Oligo
gacaucacaccugguggca

SEQ ID NO: 38311 - RNA, 19 nt, Artificial Sequence
  Sense Oligo
gccaccaggugugauguca

SEQ ID NO: 38312 - RNA, 19 nt, Artificial Sequence
  Antisense Oligo
ugacaucacaccugguggc

SEQ ID NO: 38313 - RNA, 19 nt, Artificial Sequence
  Sense Oligo
ccaccaggugugaugucaa

SEQ ID NO: 38314 - RNA, 19 nt, Artificial Sequence
  Antisense Oligo
uugacaucacaccuggugg

SEQ ID NO: 38315 - RNA, 19 nt, Artificial Sequence
  Sense Oligo
caccaggugugaugucaac

SEQ ID NO: 38316 - RNA, 19 nt, Artificial Sequence
  Antisense Oligo
guugacaucacaccuggug

SEQ ID NO: 38317 - RNA, 19 nt, Artificial Sequence
  Sense Oligo
accaggugugaugucaacg

SEQ ID NO: 38318 - RNA, 19 nt, Artificial Sequence
  Antisense Oligo
cguugacaucacaccuggu

SEQ ID NO: 38319 - RNA, 19 nt, Artificial Sequence
  Sense Oligo
ccaggugugaugucaacgu

SEQ ID NO: 38320 - RNA, 19 nt, Artificial Sequence
  Antisense Oligo
acguugacaucacaccugg

SEQ ID NO: 38321 - RNA, 19 nt, Artificial Sequence
  Sense Oligo
caggugugaugucaacgug

SEQ ID NO: 38322 - RNA, 19 nt, Artificial Sequence
  Antisense Oligo
cacguugacaucacaccug

SEQ ID NO: 38323 - RNA, 19 nt, Artificial Sequence
  Sense Oligo
aggugugaugucaacguga

SEQ ID NO: 38324 - RNA, 19 nt, Artificial Sequence
  Antisense Oligo
ucacguugacaucacaccu

SEQ ID NO: 38325 - RNA, 19 nt, Artificial Sequence
  Sense Oligo
ggugugaugucaacgugag

SEQ ID NO: 38326 - RNA, 19 nt, Artificial Sequence
  Antisense Oligo
cucacguugacaucacacc

SEQ ID NO: 38327 - RNA, 19 nt, Artificial Sequence
  Sense Oligo
gugugaugucaacgugagc

SEQ ID NO: 38328 - RNA, 19 nt, Artificial Sequence
  Antisense Oligo
gcucacguugacaucacac

SEQ ID NO: 38329 - RNA, 19 nt, Artificial Sequence
  Sense Oligo
ugugaugucaacgugagcu

SEQ ID NO: 38330 - RNA, 19 nt, Artificial Sequence
  Antisense Oligo
agcucacguugacaucaca

SEQ ID NO: 38331 - RNA, 19 nt, Artificial Sequence
  Sense Oligo
ugucaacgugagcuuuuca

SEQ ID NO: 38332 - RNA, 19 nt, Artificial Sequence
  Antisense Oligo
ugaaaagcucacguugaca

SEQ ID NO: 38333 - RNA, 19 nt, Artificial Sequence
  Sense Oligo
gucaacgugagcuuuucau

SEQ ID NO: 38334 - RNA, 19 nt, Artificial Sequence
  Antisense Oligo
augaaaagcucacguugac

SEQ ID NO: 38335 - RNA, 19 nt, Artificial Sequence
  Sense Oligo
ucaacgugagcuuuucaua

SEQ ID NO: 38336 - RNA, 19 nt, Artificial Sequence
  Antisense Oligo
uaugaaaagcucacguuga

SEQ ID NO: 38337 - RNA, 19 nt, Artificial Sequence
  Sense Oligo
caacgugagcuuuucauag

SEQ ID NO: 38338 - RNA, 19 nt, Artificial Sequence
  Antisense Oligo
cuaugaaaagcucacguug

SEQ ID NO: 38339 - RNA, 19 nt, Artificial Sequence
  Sense Oligo
aacgugagcuuuucauaga

SEQ ID NO: 38340 - RNA, 19 nt, Artificial Sequence
  Antisense Oligo
ucuaugaaaagcucacguu

SEQ ID NO: 38341 - RNA, 19 nt, Artificial Sequence
  Sense Oligo
acgugagcuuuucauagau

SEQ ID NO: 38342 - RNA, 19 nt, Artificial Sequence
  Antisense Oligo
aucuaugaaaagcucacgu

SEQ ID NO: 38343 - RNA, 19 nt, Artificial Sequence
  Sense Oligo
cgugagcuuuucauagaug

SEQ ID NO: 38344 - RNA, 19 nt, Artificial Sequence
  Antisense Oligo
caucuaugaaaagcucacg

SEQ ID NO: 38345 - RNA, 19 nt, Artificial Sequence
  Sense Oligo
gcccuuuaucaguuugugg

SEQ ID NO: 38346 - RNA, 19 nt, Artificial Sequence
  Antisense Oligo
ccacaaacugauaaagggc

SEQ ID NO: 38347 - RNA, 19 nt, Artificial Sequence
  Sense Oligo
cccuuuaucaguuugugga

SEQ ID NO: 38348 - RNA, 19 nt, Artificial Sequence
  Antisense Oligo
uccacaaacugauaaaggg

SEQ ID NO: 38349 - RNA, 19 nt, Artificial Sequence
  Sense Oligo
ccuuuaucaguuuguggaa

SEQ ID NO: 38350 - RNA, 19 nt, Artificial Sequence
  Antisense Oligo
uuccacaaacugauaaagg

SEQ ID NO: 38351 - RNA, 19 nt, Artificial Sequence
  Sense Oligo
cuuuaucaguuuguggaag

SEQ ID NO: 38352 - RNA, 19 nt, Artificial Sequence
  Antisense Oligo
cuuccacaaacugauaaag

SEQ ID NO: 38353 - RNA, 19 nt, Artificial Sequence
  Sense Oligo
uuuaucaguuuguggaagu

SEQ ID NO: 38354 - RNA, 19 nt, Artificial Sequence
  Antisense Oligo
acuuccacaaacugauaaa

SEQ ID NO: 38355 - RNA, 19 nt, Artificial Sequence
  Sense Oligo
aucaguuuguggaaguucc

SEQ ID NO: 38356 - RNA, 19 nt, Artificial Sequence
  Antisense Oligo
ggaacuuccacaaacugau

SEQ ID NO: 38357 - RNA, 19 nt, Artificial Sequence
  Sense Oligo
ucaguuuguggaaguuccu

SEQ ID NO: 38358 - RNA, 19 nt, Artificial Sequence
  Antisense Oligo
aggaacuuccacaaacuga

SEQ ID NO: 38359 - RNA, 19 nt, Artificial Sequence
  Sense Oligo
caguuuguggaaguuccuu

SEQ ID NO: 38360 - RNA, 19 nt, Artificial Sequence
  Antisense Oligo
aaggaacuuccacaaacug

SEQ ID NO: 38361 - RNA, 19 nt, Artificial Sequence
  Sense Oligo
aguuuguggaaguuccuuu

SEQ ID NO: 38362 - RNA, 19 nt, Artificial Sequence
  Antisense Oligo
aaaggaacuuccacaaacu

SEQ ID NO: 38363 - RNA, 19 nt, Artificial Sequence
  Sense Oligo
guuuguggaaguuccuuuu

SEQ ID NO: 38364 - RNA, 19 nt, Artificial Sequence
  Antisense Oligo
aaaaggaacuuccacaaac

SEQ ID NO: 38365 - RNA, 19 nt, Artificial Sequence
  Sense Oligo
gucaaaugcuuuucccgua

SEQ ID NO: 38366 - RNA, 19 nt, Artificial Sequence
  Antisense Oligo
uacgggaaaagcauuugac

SEQ ID NO: 38367 - RNA, 19 nt, Artificial Sequence
  Sense Oligo
ucaaaugcuuuucccguau

SEQ ID NO: 38368 - RNA, 19 nt, Artificial Sequence
  Antisense Oligo
auacgggaaaagcauuuga

SEQ ID NO: 38369 - RNA, 19 nt, Artificial Sequence
  Sense Oligo
caaaugcuuuucccguauc

SEQ ID NO: 38370 - RNA, 19 nt, Artificial Sequence
  Antisense Oligo
gauacgggaaaagcauuug

SEQ ID NO: 38371 - RNA, 19 nt, Artificial Sequence
  Sense Oligo
aaaugcuuuucccguaucu

SEQ ID NO: 38372 - RNA, 19 nt, Artificial Sequence
  Antisense Oligo
agauacgggaaaagcauuu

SEQ ID NO: 38373 - RNA, 19 nt, Artificial Sequence
  Sense Oligo
aaugcuuuucccguaucua

SEQ ID NO: 38374 - RNA, 19 nt, Artificial Sequence
  Antisense Oligo
uagauacgggaaaagcauu

SEQ ID NO: 38375 - RNA, 19 nt, Artificial Sequence
  Sense Oligo
augaucaugcgauauuuuc

SEQ ID NO: 38376 - RNA, 19 nt, Artificial Sequence
  Antisense Oligo
gaaaauaucgcaugaucau

SEQ ID NO: 38377 - RNA, 19 nt, Artificial Sequence
  Sense Oligo
ugaucaugcgauauuuucc

SEQ ID NO: 38378 - RNA, 19 nt, Artificial Sequence
  Antisense Oligo
ggaaaauaucgcaugauca

SEQ ID NO: 38379 - RNA, 19 nt, Artificial Sequence
  Sense Oligo
caugcgauauuuuccuaau

SEQ ID NO: 38380 - RNA, 19 nt, Artificial Sequence
  Antisense Oligo
auuaggaaaauaucgcaug

SEQ ID NO: 38381 - RNA, 19 nt, Artificial Sequence
  Sense Oligo
augcgauauuuuccuaaug

SEQ ID NO: 38382 - RNA, 19 nt, Artificial Sequence
  Antisense Oligo
cauuaggaaaauaucgcau

SEQ ID NO: 38383 - RNA, 19 nt, Artificial Sequence
  Sense Oligo
uuaaaucaaccuuucaucc

SEQ ID NO: 38384 - RNA, 19 nt, Artificial Sequence
  Antisense Oligo
ggaugaaagguugauuuaa

SEQ ID NO: 38385 - RNA, 19 nt, Artificial Sequence
  Sense Oligo
ucaaccuuucaucccugag

SEQ ID NO: 38386 - RNA, 19 nt, Artificial Sequence
  Antisense Oligo
cucagggaugaaagguuga

SEQ ID NO: 38387 - RNA, 19 nt, Artificial Sequence
  Sense Oligo
aaauuacacuugaucgugg

SEQ ID NO: 38388 - RNA, 19 nt, Artificial Sequence
  Antisense Oligo
ccacgaucaaguguaauuu

SEQ ID NO: 38389 - RNA, 19 nt, Artificial Sequence
  Sense Oligo
aauuacacuugaucguggu

SEQ ID NO: 38390 - RNA, 19 nt, Artificial Sequence
  Antisense Oligo
accacgaucaaguguaauu

SEQ ID NO: 38391 - RNA, 19 nt, Artificial Sequence
  Sense Oligo
auuacacuugaucguggug

SEQ ID NO: 38392 - RNA, 19 nt, Artificial Sequence
  Antisense Oligo
caccacgaucaaguguaau

SEQ ID NO: 38393 - RNA, 19 nt, Artificial Sequence
  Sense Oligo
uugaucgugguguauaguu

SEQ ID NO: 38394 - RNA, 19 nt, Artificial Sequence
  Antisense Oligo
aacuauacaccacgaucaa

SEQ ID NO: 38395 - RNA, 19 nt, Artificial Sequence
  Sense Oligo
ugaucgugguguauaguuc

SEQ ID NO: 38396 - RNA, 19 nt, Artificial Sequence
  Antisense Oligo
gaacuauacaccacgauca

SEQ ID NO: 38397 - RNA, 19 nt, Artificial Sequence
  Sense Oligo
gaucgugguguauaguucc

SEQ ID NO: 38398 - RNA, 19 nt, Artificial Sequence
  Antisense Oligo
ggaacuauacaccacgauc

SEQ ID NO: 38399 - RNA, 19 nt, Artificial Sequence
  Sense Oligo
aucgugguguauaguuccu

SEQ ID NO: 38400 - RNA, 19 nt, Artificial Sequence
  Antisense Oligo
aggaacuauacaccacgau

SEQ ID NO: 38401 - RNA, 19 nt, Artificial Sequence
  Sense Oligo
ucgugguguauaguuccuu

SEQ ID NO: 38402 - RNA, 19 nt, Artificial Sequence
  Antisense Oligo
aaggaacuauacaccacga

SEQ ID NO: 38403 - RNA, 19 nt, Artificial Sequence
  Sense Oligo
cgugguguauaguuccuuu

SEQ ID NO: 38404 - RNA, 19 nt, Artificial Sequence
  Antisense Oligo
aaaggaacuauacaccacg

SEQ ID NO: 38405 - RNA, 19 nt, Artificial Sequence
  Sense Oligo
gugguguauaguuccuuua

SEQ ID NO: 38406 - RNA, 19 nt, Artificial Sequence
  Antisense Oligo
uaaaggaacuauacaccac

SEQ ID NO: 38407 - RNA, 19 nt, Artificial Sequence
  Sense Oligo
ugguguauaguuccuuuaa

SEQ ID NO: 38408 - RNA, 19 nt, Artificial Sequence
  Antisense Oligo
uuaaaggaacuauacacca

SEQ ID NO: 38409 - RNA, 19 nt, Artificial Sequence
  Sense Oligo
gguguauaguuccuuuaac

SEQ ID NO: 38410 - RNA, 19 nt, Artificial Sequence
  Antisense Oligo
guuaaaggaacuauacacc

SEQ ID NO: 38411 - RNA, 19 nt, Artificial Sequence
  Sense Oligo
aaggaaggagggugacugg

SEQ ID NO: 38412 - RNA, 19 nt, Artificial Sequence
  Antisense Oligo
ccagucacccuccuuccuu

SEQ ID NO: 38413 - RNA, 19 nt, Artificial Sequence
  Sense Oligo
aggaaggagggugacuggu

SEQ ID NO: 38414 - RNA, 19 nt, Artificial Sequence
  Antisense Oligo
accagucacccuccuuccu

SEQ ID NO: 38415 - RNA, 19 nt, Artificial Sequence
  Sense Oligo
ggaaggagggugacugguu

SEQ ID NO: 38416 - RNA, 19 nt, Artificial Sequence
  Antisense Oligo
aaccagucacccuccuucc

SEQ ID NO: 38417 - RNA, 19 nt, Artificial Sequence
  Sense Oligo
gaaggagggugacugguua

SEQ ID NO: 38418 - RNA, 19 nt, Artificial Sequence
  Antisense Oligo
uaaccagucacccuccuuc

SEQ ID NO: 38419 - RNA, 19 nt, Artificial Sequence
  Sense Oligo
aaggagggugacugguuau

SEQ ID NO: 38420 - RNA, 19 nt, Artificial Sequence
  Antisense Oligo
auaaccagucacccuccuu

SEQ ID NO: 38421 - RNA, 19 nt, Artificial Sequence
  Sense Oligo
aggagggugacugguuaug

SEQ ID NO: 38422 - RNA, 19 nt, Artificial Sequence
  Antisense Oligo
cauaaccagucacccuccu

SEQ ID NO: 38423 - RNA, 19 nt, Artificial Sequence
  Sense Oligo
ggagggugacugguuaugu

SEQ ID NO: 38424 - RNA, 19 nt, Artificial Sequence
  Antisense Oligo
acauaaccagucacccucc

SEQ ID NO: 38425 - RNA, 19 nt, Artificial Sequence
  Sense Oligo
gagggugacugguuauguu

SEQ ID NO: 38426 - RNA, 19 nt, Artificial Sequence
  Antisense Oligo
aacauaaccagucacccuc

SEQ ID NO: 38427 - RNA, 19 nt, Artificial Sequence
  Sense Oligo
agggugacugguuauguug

SEQ ID NO: 38428 - RNA, 19 nt, Artificial Sequence
  Antisense Oligo
caacauaaccagucacccu

SEQ ID NO: 38429 - RNA, 19 nt, Artificial Sequence
  Sense Oligo
gggugacugguuauguugg

SEQ ID NO: 38430 - RNA, 19 nt, Artificial Sequence
  Antisense Oligo
ccaacauaaccagucaccc

SEQ ID NO: 38431 - RNA, 19 nt, Artificial Sequence
  Sense Oligo
ggugacugguuauguuggu

SEQ ID NO: 38432 - RNA, 19 nt, Artificial Sequence
  Antisense Oligo
accaacauaaccagucacc

SEQ ID NO: 38433 - RNA, 19 nt, Artificial Sequence
  Sense Oligo
gugacugguuauguuggug

SEQ ID NO: 38434 - RNA, 19 nt, Artificial Sequence
  Antisense Oligo
caccaacauaaccagucac

SEQ ID NO: 38435 - RNA, 19 nt, Artificial Sequence
  Sense Oligo
ugacugguuauguuggugu

SEQ ID NO: 38436 - RNA, 19 nt, Artificial Sequence
  Antisense Oligo
acaccaacauaaccaguca

SEQ ID NO: 38437 - RNA, 19 nt, Artificial Sequence
  Sense Oligo
gacugguuauguuggugug

SEQ ID NO: 38438 - RNA, 19 nt, Artificial Sequence
  Antisense Oligo
cacaccaacauaaccaguc

SEQ ID NO: 38439 - RNA, 19 nt, Artificial Sequence
  Sense Oligo
uuauguugguguguguuug

SEQ ID NO: 38440 - RNA, 19 nt, Artificial Sequence
  Antisense Oligo
caaacacacaccaacauaa

SEQ ID NO: 38441 - RNA, 19 nt, Artificial Sequence
  Sense Oligo
gugucuucacaucucuggu

SEQ ID NO: 38442 - RNA, 19 nt, Artificial Sequence
  Antisense Oligo
accagagaugugaagacac

SEQ ID NO: 38443 - RNA, 19 nt, Artificial Sequence
  Sense Oligo
ugucuucacaucucuggug

SEQ ID NO: 38444 - RNA, 19 nt, Artificial Sequence
  Antisense Oligo
caccagagaugugaagaca

SEQ ID NO: 38445 - RNA, 19 nt, Artificial Sequence
  Sense Oligo
aucucuggugcuggacacu

SEQ ID NO: 38446 - RNA, 19 nt, Artificial Sequence
  Antisense Oligo
aguguccagcaccagagau

SEQ ID NO: 38447 - RNA, 19 nt, Artificial Sequence
  Sense Oligo
ucucuggugcuggacacuu

SEQ ID NO: 38448 - RNA, 19 nt, Artificial Sequence
  Antisense Oligo
aaguguccagcaccagaga

SEQ ID NO: 38449 - RNA, 19 nt, Artificial Sequence
  Sense Oligo
cucuggugcuggacacuua

SEQ ID NO: 38450 - RNA, 19 nt, Artificial Sequence
  Antisense Oligo
uaaguguccagcaccagag

SEQ ID NO: 38451 - RNA, 19 nt, Artificial Sequence
  Sense Oligo
ucuggugcuggacacuuaa

SEQ ID NO: 38452 - RNA, 19 nt, Artificial Sequence
  Antisense Oligo
uuaaguguccagcaccaga

SEQ ID NO: 38453 - RNA, 19 nt, Artificial Sequence
  Sense Oligo
cuggugcuggacacuuaag

SEQ ID NO: 38454 - RNA, 19 nt, Artificial Sequence
  Antisense Oligo
cuuaaguguccagcaccag

SEQ ID NO: 38455 - RNA, 19 nt, Artificial Sequence
  Sense Oligo
uggugcuggacacuuaagg

SEQ ID NO: 38456 - RNA, 19 nt, Artificial Sequence
  Antisense Oligo
ccuuaaguguccagcacca

SEQ ID NO: 38457 - RNA, 19 nt, Artificial Sequence
  Sense Oligo
ugcuggacacuuaaggagg

SEQ ID NO: 38458 - RNA, 19 nt, Artificial Sequence
  Antisense Oligo
ccuccuuaaguguccagca

SEQ ID NO: 38459 - RNA, 19 nt, Artificial Sequence
  Sense Oligo
gcuggacacuuaaggaggc

SEQ ID NO: 38460 - RNA, 19 nt, Artificial Sequence
  Antisense Oligo
gccuccuuaaguguccagc

SEQ ID NO: 38461 - RNA, 19 nt, Artificial Sequence
  Sense Oligo
cuggacacuuaaggaggca

SEQ ID NO: 38462 - RNA, 19 nt, Artificial Sequence
  Antisense Oligo
ugccuccuuaaguguccag

SEQ ID NO: 38463 - RNA, 19 nt, Artificial Sequence
  Sense Oligo
uggacacuuaaggaggcag

SEQ ID NO: 38464 - RNA, 19 nt, Artificial Sequence
  Antisense Oligo
cugccuccuuaagugucca

SEQ ID NO: 38465 - RNA, 19 nt, Artificial Sequence
  Sense Oligo
gacacuuaaggaggcagua

SEQ ID NO: 38466 - RNA, 19 nt, Artificial Sequence
  Antisense Oligo
uacugccuccuuaaguguc

SEQ ID NO: 38467 - RNA, 19 nt, Artificial Sequence
  Sense Oligo
acuuaaggaggcaguauac

SEQ ID NO: 38468 - RNA, 19 nt, Artificial Sequence
  Antisense Oligo
guauacugccuccuuaagu

SEQ ID NO: 38469 - RNA, 19 nt, Artificial Sequence
  Sense Oligo
guuacaguagauuucagaa

SEQ ID NO: 38470 - RNA, 19 nt, Artificial Sequence
  Antisense Oligo
uucugaaaucuacuguaac

SEQ ID NO: 38471 - RNA, 19 nt, Artificial Sequence
  Sense Oligo
aaaugcuaucgaguaggua

SEQ ID NO: 38472 - RNA, 19 nt, Artificial Sequence
  Antisense Oligo
uaccuacucgauagcauuu

SEQ ID NO: 38473 - RNA, 19 nt, Artificial Sequence
  Sense Oligo
aaugcuaucgaguagguaa

SEQ ID NO: 38474 - RNA, 19 nt, Artificial Sequence
  Antisense Oligo
uuaccuacucgauagcauu

SEQ ID NO: 38475 - RNA, 19 nt, Artificial Sequence
  Sense Oligo
augcuaucgaguagguaau

SEQ ID NO: 38476 - RNA, 19 nt, Artificial Sequence
  Antisense Oligo
auuaccuacucgauagcau

SEQ ID NO: 38477 - RNA, 19 nt, Artificial Sequence
  Sense Oligo
ugcuaucgaguagguaauu

SEQ ID NO: 38478 - RNA, 19 nt, Artificial Sequence
  Antisense Oligo
aauuaccuacucgauagca

SEQ ID NO: 38479 - RNA, 19 nt, Artificial Sequence
  Sense Oligo
gcuaucgaguagguaauuu

SEQ ID NO: 38480 - RNA, 19 nt, Artificial Sequence
  Antisense Oligo
aaauuaccuacucgauagc

SEQ ID NO: 38481 - RNA, 19 nt, Artificial Sequence
  Sense Oligo
cuaucgaguagguaauuug

SEQ ID NO: 38482 - RNA, 19 nt, Artificial Sequence
  Antisense Oligo
caaauuaccuacucgauag

SEQ ID NO: 38483 - RNA, 19 nt, Artificial Sequence
  Sense Oligo
uaucgaguagguaauuugc

SEQ ID NO: 38484 - RNA, 19 nt, Artificial Sequence
  Antisense Oligo
gcaaauuaccuacucgaua

SEQ ID NO: 38485 - RNA, 19 nt, Artificial Sequence
  Sense Oligo
aucgaguagguaauuugcu

SEQ ID NO: 38486 - RNA, 19 nt, Artificial Sequence
  Antisense Oligo
agcaaauuaccuacucgau

SEQ ID NO: 38487 - RNA, 19 nt, Artificial Sequence
  Sense Oligo
ucgaguagguaauuugcuu

SEQ ID NO: 38488 - RNA, 19 nt, Artificial Sequence
  Antisense Oligo
aagcaaauuaccuacucga

SEQ ID NO: 38489 - RNA, 19 nt, Artificial Sequence
  Sense Oligo
cgaguagguaauuugcuuu

SEQ ID NO: 38490 - RNA, 19 nt, Artificial Sequence
  Antisense Oligo
aaagcaaauuaccuacucg

SEQ ID NO: 38491 - RNA, 19 nt, Artificial Sequence
  Sense Oligo
aguagguaauuugcuuuug

SEQ ID NO: 38492 - RNA, 19 nt, Artificial Sequence
  Antisense Oligo
caaaagcaaauuaccuacu

SEQ ID NO: 38493 - RNA, 19 nt, Artificial Sequence
  Sense Oligo
aacuucuaaaugucccucu

SEQ ID NO: 38494 - RNA, 19 nt, Artificial Sequence
  Antisense Oligo
agagggacauuuagaaguu

SEQ ID NO: 38495 - RNA, 19 nt, Artificial Sequence
  Sense Oligo
aauuuucuuguagucucag

SEQ ID NO: 38496 - RNA, 19 nt, Artificial Sequence
  Antisense Oligo
cugagacuacaagaaaauu

SEQ ID NO: 38497 - RNA, 19 nt, Artificial Sequence
  Sense Oligo
auuuucuuguagucucaga

SEQ ID NO: 38498 - RNA, 19 nt, Artificial Sequence
  Antisense Oligo
ucugagacuacaagaaaau

SEQ ID NO: 38499 - RNA, 19 nt, Artificial Sequence
  Sense Oligo
uuuucuuguagucucagac

SEQ ID NO: 38500 - RNA, 19 nt, Artificial Sequence
  Antisense Oligo
gucugagacuacaagaaaa

SEQ ID NO: 38501 - RNA, 19 nt, Artificial Sequence
  Sense Oligo
uuucuuguagucucagacc

SEQ ID NO: 38502 - RNA, 19 nt, Artificial Sequence
  Antisense Oligo
ggucugagacuacaagaaa

SEQ ID NO: 38503 - RNA, 19 nt, Artificial Sequence
  Sense Oligo
uucuuguagucucagacca

SEQ ID NO: 38504 - RNA, 19 nt, Artificial Sequence
  Antisense Oligo
uggucugagacuacaagaa

SEQ ID NO: 38505 - RNA, 19 nt, Artificial Sequence
  Sense Oligo
uguagucucagaccaguau

SEQ ID NO: 38506 - RNA, 19 nt, Artificial Sequence
  Antisense Oligo
auacuggucugagacuaca

SEQ ID NO: 38507 - RNA, 19 nt, Artificial Sequence
  Sense Oligo
uagucucagaccaguaucc

SEQ ID NO: 38508 - RNA, 19 nt, Artificial Sequence
  Antisense Oligo
ggauacuggucugagacua

SEQ ID NO: 38509 - RNA, 19 nt, Artificial Sequence
  Sense Oligo
agucucagaccaguauccu

SEQ ID NO: 38510 - RNA, 19 nt, Artificial Sequence
  Antisense Oligo
aggauacuggucugagacu

SEQ ID NO: 38511 - RNA, 19 nt, Artificial Sequence
  Sense Oligo
gucucagaccaguauccuu

SEQ ID NO: 38512 - RNA, 19 nt, Artificial Sequence
  Antisense Oligo
aaggauacuggucugagac

SEQ ID NO: 38513 - RNA, 19 nt, Artificial Sequence
  Sense Oligo
cucagaccaguauccuuca

SEQ ID NO: 38514 - RNA, 19 nt, Artificial Sequence
  Antisense Oligo
ugaaggauacuggucugag

SEQ ID NO: 38515 - RNA, 19 nt, Artificial Sequence
  Sense Oligo
ucagaccaguauccuucag

SEQ ID NO: 38516 - RNA, 19 nt, Artificial Sequence
  Antisense Oligo
cugaaggauacuggucuga

SEQ ID NO: 38517 - RNA, 19 nt, Artificial Sequence
  Sense Oligo
cagaccaguauccuucagg

SEQ ID NO: 38518 - RNA, 19 nt, Artificial Sequence
  Antisense Oligo
ccugaaggauacuggucug

SEQ ID NO: 38519 - RNA, 19 nt, Artificial Sequence
  Sense Oligo
ggguucucuuacucugauu

SEQ ID NO: 38520 - RNA, 19 nt, Artificial Sequence
  Antisense Oligo
aaucagaguaagagaaccc

SEQ ID NO: 38521 - RNA, 19 nt, Artificial Sequence
  Sense Oligo
ucucuuacucugauuugcg

SEQ ID NO: 38522 - RNA, 19 nt, Artificial Sequence
  Antisense Oligo
cgcaaaucagaguaagaga

SEQ ID NO: 38523 - RNA, 19 nt, Artificial Sequence
  Sense Oligo
cucuuacucugauuugcgg

SEQ ID NO: 38524 - RNA, 19 nt, Artificial Sequence
  Antisense Oligo
ccgcaaaucagaguaagag

SEQ ID NO: 38525 - RNA, 19 nt, Artificial Sequence
  Sense Oligo
ucuuacucugauuugcgga

SEQ ID NO: 38526 - RNA, 19 nt, Artificial Sequence
  Antisense Oligo
uccgcaaaucagaguaaga

SEQ ID NO: 38527 - RNA, 19 nt, Artificial Sequence
  Sense Oligo
cuuacucugauuugcggaa

SEQ ID NO: 38528 - RNA, 19 nt, Artificial Sequence
  Antisense Oligo
uuccgcaaaucagaguaag

SEQ ID NO: 38529 - RNA, 19 nt, Artificial Sequence
  Sense Oligo
aauuuggcaucgucuuguc

SEQ ID NO: 38530 - RNA, 19 nt, Artificial Sequence
  Antisense Oligo
gacaagacgaugccaaauu

SEQ ID NO: 38531 - RNA, 19 nt, Artificial Sequence
  Sense Oligo
auuuggcaucgucuugucu

SEQ ID NO: 38532 - RNA, 19 nt, Artificial Sequence
  Antisense Oligo
agacaagacgaugccaaau

SEQ ID NO: 38533 - RNA, 19 nt, Artificial Sequence
  Sense Oligo
uuuggcaucgucuugucug

SEQ ID NO: 38534 - RNA, 19 nt, Artificial Sequence
  Antisense Oligo
cagacaagacgaugccaaa

SEQ ID NO: 38535 - RNA, 19 nt, Artificial Sequence
  Sense Oligo
uuggcaucgucuugucugc

SEQ ID NO: 38536 - RNA, 19 nt, Artificial Sequence
  Antisense Oligo
gcagacaagacgaugccaa

SEQ ID NO: 38537 - RNA, 19 nt, Artificial Sequence
  Sense Oligo
uggcaucgucuugucugcu

SEQ ID NO: 38538 - RNA, 19 nt, Artificial Sequence
  Antisense Oligo
agcagacaagacgaugcca

SEQ ID NO: 38539 - RNA, 19 nt, Artificial Sequence
  Sense Oligo
gucuugucugcugugauca

SEQ ID NO: 38540 - RNA, 19 nt, Artificial Sequence
  Antisense Oligo
ugaucacagcagacaagac

SEQ ID NO: 38541 - RNA, 19 nt, Artificial Sequence
  Sense Oligo
ucuugucugcugugaucac

SEQ ID NO: 38542 - RNA, 19 nt, Artificial Sequence
  Antisense Oligo
gugaucacagcagacaaga

SEQ ID NO: 38543 - RNA, 19 nt, Artificial Sequence
  Sense Oligo
cuugucugcugugaucacu

SEQ ID NO: 38544 - RNA, 19 nt, Artificial Sequence
  Antisense Oligo
agugaucacagcagacaag

SEQ ID NO: 38545 - RNA, 19 nt, Artificial Sequence
  Sense Oligo
uugucugcugugaucacua

SEQ ID NO: 38546 - RNA, 19 nt, Artificial Sequence
  Antisense Oligo
uagugaucacagcagacaa

SEQ ID NO: 38547 - RNA, 19 nt, Artificial Sequence
  Sense Oligo
ugucugcugugaucacuaa

SEQ ID NO: 38548 - RNA, 19 nt, Artificial Sequence
  Antisense Oligo
uuagugaucacagcagaca

SEQ ID NO: 38549 - RNA, 19 nt, Artificial Sequence
  Sense Oligo
gucugcugugaucacuaag

SEQ ID NO: 38550 - RNA, 19 nt, Artificial Sequence
  Antisense Oligo
cuuagugaucacagcagac

SEQ ID NO: 38551 - RNA, 19 nt, Artificial Sequence
  Sense Oligo
ucugcugugaucacuaagu

SEQ ID NO: 38552 - RNA, 19 nt, Artificial Sequence
  Antisense Oligo
acuuagugaucacagcaga

SEQ ID NO: 38553 - RNA, 19 nt, Artificial Sequence
  Sense Oligo
cugcugugaucacuaaguc

SEQ ID NO: 38554 - RNA, 19 nt, Artificial Sequence
  Antisense Oligo
gacuuagugaucacagcag

SEQ ID NO: 38555 - RNA, 19 nt, Artificial Sequence
  Sense Oligo
ugcugugaucacuaagucc

SEQ ID NO: 38556 - RNA, 19 nt, Artificial Sequence
  Antisense Oligo
ggacuuagugaucacagca

SEQ ID NO: 38557 - RNA, 19 nt, Artificial Sequence
  Sense Oligo
gcugugaucacuaaguccu

SEQ ID NO: 38558 - RNA, 19 nt, Artificial Sequence
  Antisense Oligo
aggacuuagugaucacagc

SEQ ID NO: 38559 - RNA, 19 nt, Artificial Sequence
  Sense Oligo
cugugaucacuaaguccug

SEQ ID NO: 38560 - RNA, 19 nt, Artificial Sequence
  Antisense Oligo
caggacuuagugaucacag

SEQ ID NO: 38561 - RNA, 19 nt, Artificial Sequence
  Sense Oligo
gaucacuaaguccuggccu

SEQ ID NO: 38562 - RNA, 19 nt, Artificial Sequence
  Antisense Oligo
aggccaggacuuagugauc

SEQ ID NO: 38563 - RNA, 19 nt, Artificial Sequence
  Sense Oligo
aucacuaaguccuggccua

SEQ ID NO: 38564 - RNA, 19 nt, Artificial Sequence
  Antisense Oligo
uaggccaggacuuagugau

SEQ ID NO: 38565 - RNA, 19 nt, Artificial Sequence
  Sense Oligo
ucacuaaguccuggccuag

SEQ ID NO: 38566 - RNA, 19 nt, Artificial Sequence
  Antisense Oligo
cuaggccaggacuuaguga

SEQ ID NO: 38567 - RNA, 19 nt, Artificial Sequence
  Sense Oligo
cacuaaguccuggccuagg

SEQ ID NO: 38568 - RNA, 19 nt, Artificial Sequence
  Antisense Oligo
ccuaggccaggacuuagug

SEQ ID NO: 38569 - RNA, 19 nt, Artificial Sequence
  Sense Oligo
caacuucgaugacauuuua

SEQ ID NO: 38570 - RNA, 19 nt, Artificial Sequence
  Antisense Oligo
uaaaaugucaucgaaguug

SEQ ID NO: 38571 - RNA, 19 nt, Artificial Sequence
  Sense Oligo
cuucgaugacauuuuaaag

SEQ ID NO: 38572 - RNA, 19 nt, Artificial Sequence
  Antisense Oligo
cuuuaaaaugucaucgaag

SEQ ID NO: 38573 - RNA, 19 nt, Artificial Sequence
  Sense Oligo
uucgaugacauuuuaaagc

SEQ ID NO: 38574 - RNA, 19 nt, Artificial Sequence
  Antisense Oligo
gcuuuaaaaugucaucgaa

SEQ ID NO: 38575 - RNA, 19 nt, Artificial Sequence
  Sense Oligo
ucgaugacauuuuaaagca

SEQ ID NO: 38576 - RNA, 19 nt, Artificial Sequence
  Antisense Oligo
ugcuuuaaaaugucaucga

SEQ ID NO: 38577 - RNA, 19 nt, Artificial Sequence
  Sense Oligo
cgaugacauuuuaaagcau

SEQ ID NO: 38578 - RNA, 19 nt, Artificial Sequence
  Antisense Oligo
augcuuuaaaaugucaucg

SEQ ID NO: 38579 - RNA, 19 nt, Artificial Sequence
  Sense Oligo
ugacauuuuaaagcaucug

SEQ ID NO: 38580 - RNA, 19 nt, Artificial Sequence
  Antisense Oligo
cagaugcuuuaaaauguca

SEQ ID NO: 38581 - RNA, 19 nt, Artificial Sequence
  Sense Oligo
acauuuuaaagcaucugcu

SEQ ID NO: 38582 - RNA, 19 nt, Artificial Sequence
  Antisense Oligo
agcagaugcuuuaaaaugu

SEQ ID NO: 38583 - RNA, 19 nt, Artificial Sequence
  Sense Oligo
uuuuaaagcaucugcucac

SEQ ID NO: 38584 - RNA, 19 nt, Artificial Sequence
  Antisense Oligo
gugagcagaugcuuuaaaa

SEQ ID NO: 38585 - RNA, 19 nt, Artificial Sequence
  Sense Oligo
uuggcagaugucaagcacg

SEQ ID NO: 38586 - RNA, 19 nt, Artificial Sequence
  Antisense Oligo
cgugcuugacaucugccaa

SEQ ID NO: 38587 - RNA, 19 nt, Artificial Sequence
  Sense Oligo
uggcagaugucaagcacgu

SEQ ID NO: 38588 - RNA, 19 nt, Artificial Sequence
  Antisense Oligo
acgugcuugacaucugcca

SEQ ID NO: 38589 - RNA, 19 nt, Artificial Sequence
  Sense Oligo
ggcagaugucaagcacguc

SEQ ID NO: 38590 - RNA, 19 nt, Artificial Sequence
  Antisense Oligo
gacgugcuugacaucugcc

SEQ ID NO: 38591 - RNA, 19 nt, Artificial Sequence
  Sense Oligo
gcagaugucaagcacgucu

SEQ ID NO: 38592 - RNA, 19 nt, Artificial Sequence
  Antisense Oligo
agacgugcuugacaucugc

SEQ ID NO: 38593 - RNA, 19 nt, Artificial Sequence
  Sense Oligo
cagaugucaagcacgucuu

SEQ ID NO: 38594 - RNA, 19 nt, Artificial Sequence
  Antisense Oligo
aagacgugcuugacaucug

SEQ ID NO: 38595 - RNA, 19 nt, Artificial Sequence
  Sense Oligo
agaugucaagcacgucuuc

SEQ ID NO: 38596 - RNA, 19 nt, Artificial Sequence
  Antisense Oligo
gaagacgugcuugacaucu

SEQ ID NO: 38597 - RNA, 19 nt, Artificial Sequence
  Sense Oligo
gucaagcacgucuucagau

SEQ ID NO: 38598 - RNA, 19 nt, Artificial Sequence
  Antisense Oligo
aucugaagacgugcuugac

SEQ ID NO: 38599 - RNA, 19 nt, Artificial Sequence
  Sense Oligo
ucaagcacgucuucagauu

SEQ ID NO: 38600 - RNA, 19 nt, Artificial Sequence
  Antisense Oligo
aaucugaagacgugcuuga

SEQ ID NO: 38601 - RNA, 19 nt, Artificial Sequence
  Sense Oligo
caagcacgucuucagauug

SEQ ID NO: 38602 - RNA, 19 nt, Artificial Sequence
  Antisense Oligo
caaucugaagacgugcuug

SEQ ID NO: 38603 - RNA, 19 nt, Artificial Sequence
  Sense Oligo
aagcacgucuucagauugu

SEQ ID NO: 38604 - RNA, 19 nt, Artificial Sequence
  Antisense Oligo
acaaucugaagacgugcuu

SEQ ID NO: 38605 - RNA, 19 nt, Artificial Sequence
  Sense Oligo
agcacgucuucagauugug

SEQ ID NO: 38606 - RNA, 19 nt, Artificial Sequence
  Antisense Oligo
cacaaucugaagacgugcu

SEQ ID NO: 38607 - RNA, 19 nt, Artificial Sequence
  Sense Oligo
gcacgucuucagauugugu

SEQ ID NO: 38608 - RNA, 19 nt, Artificial Sequence
  Antisense Oligo
acacaaucugaagacgugc

SEQ ID NO: 38609 - RNA, 19 nt, Artificial Sequence
  Sense Oligo
cacgucuucagauugugug

SEQ ID NO: 38610 - RNA, 19 nt, Artificial Sequence
  Antisense Oligo
cacacaaucugaagacgug

SEQ ID NO: 38611 - RNA, 19 nt, Artificial Sequence
  Sense Oligo
acgucuucagauugugugg

SEQ ID NO: 38612 - RNA, 19 nt, Artificial Sequence
  Antisense Oligo
ccacacaaucugaagacgu

SEQ ID NO: 38613 - RNA, 19 nt, Artificial Sequence
  Sense Oligo
cuucagauugugugguaug

SEQ ID NO: 38614 - RNA, 19 nt, Artificial Sequence
  Antisense Oligo
cauaccacacaaucugaag

SEQ ID NO: 38615 - RNA, 19 nt, Artificial Sequence
  Sense Oligo
uucagauugugugguaugu

SEQ ID NO: 38616 - RNA, 19 nt, Artificial Sequence
  Antisense Oligo
acauaccacacaaucugaa

SEQ ID NO: 38617 - RNA, 19 nt, Artificial Sequence
  Sense Oligo
ucagauugugugguauguu

SEQ ID NO: 38618 - RNA, 19 nt, Artificial Sequence
  Antisense Oligo
aacauaccacacaaucuga

SEQ ID NO: 38619 - RNA, 19 nt, Artificial Sequence
  Sense Oligo
cagauugugugguauguuu

SEQ ID NO: 38620 - RNA, 19 nt, Artificial Sequence
  Antisense Oligo
aaacauaccacacaaucug

SEQ ID NO: 38621 - RNA, 19 nt, Artificial Sequence
  Sense Oligo
agauugugugguauguuug

SEQ ID NO: 38622 - RNA, 19 nt, Artificial Sequence
  Antisense Oligo
caaacauaccacacaaucu

SEQ ID NO: 38623 - RNA, 19 nt, Artificial Sequence
  Sense Oligo
gauugugugguauguuugc

SEQ ID NO: 38624 - RNA, 19 nt, Artificial Sequence
  Antisense Oligo
gcaaacauaccacacaauc

SEQ ID NO: 38625 - RNA, 19 nt, Artificial Sequence
  Sense Oligo
auugugugguauguuugcg

SEQ ID NO: 38626 - RNA, 19 nt, Artificial Sequence
  Antisense Oligo
cgcaaacauaccacacaau

SEQ ID NO: 38627 - RNA, 19 nt, Artificial Sequence
  Sense Oligo
uugugugguauguuugcgg

SEQ ID NO: 38628 - RNA, 19 nt, Artificial Sequence
  Antisense Oligo
ccgcaaacauaccacacaa

SEQ ID NO: 38629 - RNA, 19 nt, Artificial Sequence
  Sense Oligo
ugugugguauguuugcggg

SEQ ID NO: 38630 - RNA, 19 nt, Artificial Sequence
  Antisense Oligo
cccgcaaacauaccacaca

SEQ ID NO: 38631 - RNA, 19 nt, Artificial Sequence
  Sense Oligo
gugugguauguuugcggga

SEQ ID NO: 38632 - RNA, 19 nt, Artificial Sequence
  Antisense Oligo
ucccgcaaacauaccacac

SEQ ID NO: 38633 - RNA, 19 nt, Artificial Sequence
  Sense Oligo
ugugguauguuugcgggag

SEQ ID NO: 38634 - RNA, 19 nt, Artificial Sequence
  Antisense Oligo
cucccgcaaacauaccaca

SEQ ID NO: 38635 - RNA, 19 nt, Artificial Sequence
  Sense Oligo
gugguauguuugcgggagu

SEQ ID NO: 38636 - RNA, 19 nt, Artificial Sequence
  Antisense Oligo
acucccgcaaacauaccac

SEQ ID NO: 38637 - RNA, 19 nt, Artificial Sequence
  Sense Oligo
ugguauguuugcgggagug

SEQ ID NO: 38638 - RNA, 19 nt, Artificial Sequence
  Antisense Oligo
cacucccgcaaacauacca

SEQ ID NO: 38639 - RNA, 19 nt, Artificial Sequence
  Sense Oligo
gguauguuugcgggagugc

SEQ ID NO: 38640 - RNA, 19 nt, Artificial Sequence
  Antisense Oligo
gcacucccgcaaacauacc

SEQ ID NO: 38641 - RNA, 19 nt, Artificial Sequence
  Sense Oligo
guauguuugcgggagugcu

SEQ ID NO: 38642 - RNA, 19 nt, Artificial Sequence
  Antisense Oligo
agcacucccgcaaacauac

SEQ ID NO: 38643 - RNA, 19 nt, Artificial Sequence
  Sense Oligo
uuugcgggagugcugggaa

SEQ ID NO: 38644 - RNA, 19 nt, Artificial Sequence
  Antisense Oligo
uucccagcacucccgcaaa

SEQ ID NO: 38645 - RNA, 19 nt, Artificial Sequence
  Sense Oligo
acaucagcucaggcaaggu

SEQ ID NO: 38646 - RNA, 19 nt, Artificial Sequence
  Antisense Oligo
accuugccugagcugaugu

SEQ ID NO: 38647 - RNA, 19 nt, Artificial Sequence
  Sense Oligo
caucagcucaggcaaggug

SEQ ID NO: 38648 - RNA, 19 nt, Artificial Sequence
  Antisense Oligo
caccuugccugagcugaug

SEQ ID NO: 38649 - RNA, 19 nt, Artificial Sequence
  Sense Oligo
aucagcucaggcaaggugg

SEQ ID NO: 38650 - RNA, 19 nt, Artificial Sequence
  Antisense Oligo
ccaccuugccugagcugau

SEQ ID NO: 38651 - RNA, 19 nt, Artificial Sequence
  Sense Oligo
ucagcucaggcaagguggu

SEQ ID NO: 38652 - RNA, 19 nt, Artificial Sequence
  Antisense Oligo
accaccuugccugagcuga

SEQ ID NO: 38653 - RNA, 19 nt, Artificial Sequence
  Sense Oligo
aaggugggaggcagaagau

SEQ ID NO: 38654 - RNA, 19 nt, Artificial Sequence
  Antisense Oligo
aucuucugccucccaccuu

SEQ ID NO: 38655 - RNA, 19 nt, Artificial Sequence
  Sense Oligo
aggugggaggcagaagauu

SEQ ID NO: 38656 - RNA, 19 nt, Artificial Sequence
  Antisense Oligo
aaucuucugccucccaccu

SEQ ID NO: 38657 - RNA, 19 nt, Artificial Sequence
  Sense Oligo
ggugggaggcagaagauuu

SEQ ID NO: 38658 - RNA, 19 nt, Artificial Sequence
  Antisense Oligo
aaaucuucugccucccacc

SEQ ID NO: 38659 - RNA, 19 nt, Artificial Sequence
  Sense Oligo
ugggaggcagaagauuuga

SEQ ID NO: 38660 - RNA, 19 nt, Artificial Sequence
  Antisense Oligo
ucaaaucuucugccuccca

SEQ ID NO: 38661 - RNA, 19 nt, Artificial Sequence
  Sense Oligo
gggaggcagaagauuugac

SEQ ID NO: 38662 - RNA, 19 nt, Artificial Sequence
  Antisense Oligo
gucaaaucuucugccuccc

SEQ ID NO: 38663 - RNA, 19 nt, Artificial Sequence
  Sense Oligo
ggaggcagaagauuugaca

SEQ ID NO: 38664 - RNA, 19 nt, Artificial Sequence
  Antisense Oligo
ugucaaaucuucugccucc

SEQ ID NO: 38665 - RNA, 19 nt, Artificial Sequence
  Sense Oligo
gaggcagaagauuugacau

SEQ ID NO: 38666 - RNA, 19 nt, Artificial Sequence
  Antisense Oligo
augucaaaucuucugccuc

SEQ ID NO: 38667 - RNA, 19 nt, Artificial Sequence
  Sense Oligo
aggcagaagauuugacaug

SEQ ID NO: 38668 - RNA, 19 nt, Artificial Sequence
  Antisense Oligo
caugucaaaucuucugccu

SEQ ID NO: 38669 - RNA, 19 nt, Artificial Sequence
  Sense Oligo
ggcagaagauuugacauga

SEQ ID NO: 38670 - RNA, 19 nt, Artificial Sequence
  Antisense Oligo
ucaugucaaaucuucugcc

SEQ ID NO: 38671 - RNA, 19 nt, Artificial Sequence
  Sense Oligo
gcagaagauuugacaugau

SEQ ID NO: 38672 - RNA, 19 nt, Artificial Sequence
  Antisense Oligo
aucaugucaaaucuucugc

SEQ ID NO: 38673 - RNA, 19 nt, Artificial Sequence
  Sense Oligo
cagaagauuugacaugaug

SEQ ID NO: 38674 - RNA, 19 nt, Artificial Sequence
  Antisense Oligo
caucaugucaaaucuucug

SEQ ID NO: 38675 - RNA, 19 nt, Artificial Sequence
  Sense Oligo
agaagauuugacaugauga

SEQ ID NO: 38676 - RNA, 19 nt, Artificial Sequence
  Antisense Oligo
ucaucaugucaaaucuucu

SEQ ID NO: 38677 - RNA, 19 nt, Artificial Sequence
  Sense Oligo
gaagauuugacaugaugau

SEQ ID NO: 38678 - RNA, 19 nt, Artificial Sequence
  Antisense Oligo
aucaucaugucaaaucuuc

SEQ ID NO: 38679 - RNA, 19 nt, Artificial Sequence
  Sense Oligo
agauuugacaugaugauac

SEQ ID NO: 38680 - RNA, 19 nt, Artificial Sequence
  Antisense Oligo
guaucaucaugucaaaucu

SEQ ID NO: 38681 - RNA, 19 nt, Artificial Sequence
  Sense Oligo
gauuugacaugaugauacu

SEQ ID NO: 38682 - RNA, 19 nt, Artificial Sequence
  Antisense Oligo
aguaucaucaugucaaauc

SEQ ID NO: 38683 - RNA, 19 nt, Artificial Sequence
  Sense Oligo
auuugacaugaugauacug

SEQ ID NO: 38684 - RNA, 19 nt, Artificial Sequence
  Antisense Oligo
caguaucaucaugucaaau

SEQ ID NO: 38685 - RNA, 19 nt, Artificial Sequence
  Sense Oligo
uuugacaugaugauacuga

SEQ ID NO: 38686 - RNA, 19 nt, Artificial Sequence
  Antisense Oligo
ucaguaucaucaugucaaa

SEQ ID NO: 38687 - RNA, 19 nt, Artificial Sequence
  Sense Oligo
uugacaugaugauacugaa

SEQ ID NO: 38688 - RNA, 19 nt, Artificial Sequence
  Antisense Oligo
uucaguaucaucaugucaa

SEQ ID NO: 38689 - RNA, 19 nt, Artificial Sequence
  Sense Oligo
caugaugauacugaauugg

SEQ ID NO: 38690 - RNA, 19 nt, Artificial Sequence
  Antisense Oligo
ccaauucaguaucaucaug

SEQ ID NO: 38691 - RNA, 19 nt, Artificial Sequence
  Sense Oligo
augaugauacugaauuggg

SEQ ID NO: 38692 - RNA, 19 nt, Artificial Sequence
  Antisense Oligo
cccaauucaguaucaucau

SEQ ID NO: 38693 - RNA, 19 nt, Artificial Sequence
  Sense Oligo
ugaugauacugaauuggga

SEQ ID NO: 38694 - RNA, 19 nt, Artificial Sequence
  Antisense Oligo
ucccaauucaguaucauca

SEQ ID NO: 38695 - RNA, 19 nt, Artificial Sequence
  Sense Oligo
gaugauacugaauugggau

SEQ ID NO: 38696 - RNA, 19 nt, Artificial Sequence
  Antisense Oligo
aucccaauucaguaucauc

SEQ ID NO: 38697 - RNA, 19 nt, Artificial Sequence
  Sense Oligo
augauacugaauugggaug

SEQ ID NO: 38698 - RNA, 19 nt, Artificial Sequence
  Antisense Oligo
caucccaauucaguaucau

SEQ ID NO: 38699 - RNA, 19 nt, Artificial Sequence
  Sense Oligo
gauacugaauugggauggg

SEQ ID NO: 38700 - RNA, 19 nt, Artificial Sequence
  Antisense Oligo
cccaucccaauucaguauc

SEQ ID NO: 38701 - RNA, 19 nt, Artificial Sequence
  Sense Oligo
auacugaauugggaugggc

SEQ ID NO: 38702 - RNA, 19 nt, Artificial Sequence
  Antisense Oligo
gcccaucccaauucaguau

SEQ ID NO: 38703 - RNA, 19 nt, Artificial Sequence
  Sense Oligo
uacugaauugggaugggcu

SEQ ID NO: 38704 - RNA, 19 nt, Artificial Sequence
  Antisense Oligo
agcccaucccaauucagua

SEQ ID NO: 38705 - RNA, 19 nt, Artificial Sequence
  Sense Oligo
acugaauugggaugggcug

SEQ ID NO: 38706 - RNA, 19 nt, Artificial Sequence
  Antisense Oligo
cagcccaucccaauucagu

SEQ ID NO: 38707 - RNA, 19 nt, Artificial Sequence
  Sense Oligo
cugaauugggaugggcuga

SEQ ID NO: 38708 - RNA, 19 nt, Artificial Sequence
  Antisense Oligo
ucagcccaucccaauucag

SEQ ID NO: 38709 - RNA, 19 nt, Artificial Sequence
  Sense Oligo
auugggaugggcugauguu

SEQ ID NO: 38710 - RNA, 19 nt, Artificial Sequence
  Antisense Oligo
aacaucagcccaucccaau

SEQ ID NO: 38711 - RNA, 19 nt, Artificial Sequence
  Sense Oligo
uugggaugggcugauguuu

SEQ ID NO: 38712 - RNA, 19 nt, Artificial Sequence
  Antisense Oligo
aaacaucagcccaucccaa

SEQ ID NO: 38713 - RNA, 19 nt, Artificial Sequence
  Sense Oligo
ugggaugggcugauguuug

SEQ ID NO: 38714 - RNA, 19 nt, Artificial Sequence
  Antisense Oligo
caaacaucagcccauccca

SEQ ID NO: 38715 - RNA, 19 nt, Artificial Sequence
  Sense Oligo
gaugggcugauguuugaca

SEQ ID NO: 38716 - RNA, 19 nt, Artificial Sequence
  Antisense Oligo
ugucaaacaucagcccauc

SEQ ID NO: 38717 - RNA, 19 nt, Artificial Sequence
  Sense Oligo
aaaggcugcaguuuggaca

SEQ ID NO: 38718 - RNA, 19 nt, Artificial Sequence
  Antisense Oligo
uguccaaacugcagccuuu

SEQ ID NO: 38719 - RNA, 19 nt, Artificial Sequence
  Sense Oligo
aaggcugcaguuuggacag

SEQ ID NO: 38720 - RNA, 19 nt, Artificial Sequence
  Antisense Oligo
cuguccaaacugcagccuu

SEQ ID NO: 38721 - RNA, 19 nt, Artificial Sequence
  Sense Oligo
aggcugcaguuuggacaga

SEQ ID NO: 38722 - RNA, 19 nt, Artificial Sequence
  Antisense Oligo
ucuguccaaacugcagccu

SEQ ID NO: 38723 - RNA, 19 nt, Artificial Sequence
  Sense Oligo
ggcugcaguuuggacagag

SEQ ID NO: 38724 - RNA, 19 nt, Artificial Sequence
  Antisense Oligo
cucuguccaaacugcagcc

SEQ ID NO: 38725 - RNA, 19 nt, Artificial Sequence
  Sense Oligo
agacccuggaaggcucaga

SEQ ID NO: 38726 - RNA, 19 nt, Artificial Sequence
  Antisense Oligo
ucugagccuuccagggucu

SEQ ID NO: 38727 - RNA, 19 nt, Artificial Sequence
  Sense Oligo
ccuggaaggcucagagugu

SEQ ID NO: 38728 - RNA, 19 nt, Artificial Sequence
  Antisense Oligo
acacucugagccuuccagg

SEQ ID NO: 38729 - RNA, 19 nt, Artificial Sequence
  Sense Oligo
cuggaaggcucagaguguc

SEQ ID NO: 38730 - RNA, 19 nt, Artificial Sequence
  Antisense Oligo
gacacucugagccuuccag

SEQ ID NO: 38731 - RNA, 19 nt, Artificial Sequence
  Sense Oligo
ggaaggcucagagugucuu

SEQ ID NO: 38732 - RNA, 19 nt, Artificial Sequence
  Antisense Oligo
aagacacucugagccuucc

SEQ ID NO: 38733 - RNA, 19 nt, Artificial Sequence
  Sense Oligo
gaaggcucagagugucuug

SEQ ID NO: 38734 - RNA, 19 nt, Artificial Sequence
  Antisense Oligo
caagacacucugagccuuc

SEQ ID NO: 38735 - RNA, 19 nt, Artificial Sequence
  Sense Oligo
aaggcucagagugucuugc

SEQ ID NO: 38736 - RNA, 19 nt, Artificial Sequence
  Antisense Oligo
gcaagacacucugagccuu

SEQ ID NO: 38737 - RNA, 19 nt, Artificial Sequence
  Sense Oligo
aggcucagagugucuugcg

SEQ ID NO: 38738 - RNA, 19 nt, Artificial Sequence
  Antisense Oligo
cgcaagacacucugagccu

SEQ ID NO: 38739 - RNA, 19 nt, Artificial Sequence
  Sense Oligo
ggcucagagugucuugcgu

SEQ ID NO: 38740 - RNA, 19 nt, Artificial Sequence
  Antisense Oligo
acgcaagacacucugagcc

SEQ ID NO: 38741 - RNA, 19 nt, Artificial Sequence
  Sense Oligo
gcucagagugucuugcguu

SEQ ID NO: 38742 - RNA, 19 nt, Artificial Sequence
  Antisense Oligo
aacgcaagacacucugagc

SEQ ID NO: 38743 - RNA, 19 nt, Artificial Sequence
  Sense Oligo
cucagagugucuugcguug

SEQ ID NO: 38744 - RNA, 19 nt, Artificial Sequence
  Antisense Oligo
caacgcaagacacucugag

SEQ ID NO: 38745 - RNA, 19 nt, Artificial Sequence
  Sense Oligo
ucagagugucuugcguugu

SEQ ID NO: 38746 - RNA, 19 nt, Artificial Sequence
  Antisense Oligo
acaacgcaagacacucuga

SEQ ID NO: 38747 - RNA, 19 nt, Artificial Sequence
  Sense Oligo
cagagugucuugcguugua

SEQ ID NO: 38748 - RNA, 19 nt, Artificial Sequence
  Antisense Oligo
uacaacgcaagacacucug

SEQ ID NO: 38749 - RNA, 19 nt, Artificial Sequence
  Sense Oligo
agagugucuugcguuguaa

SEQ ID NO: 38750 - RNA, 19 nt, Artificial Sequence
  Antisense Oligo
uuacaacgcaagacacucu

SEQ ID NO: 38751 - RNA, 19 nt, Artificial Sequence
  Sense Oligo
gagugucuugcguuguaaa

SEQ ID NO: 38752 - RNA, 19 nt, Artificial Sequence
  Antisense Oligo
uuuacaacgcaagacacuc

SEQ ID NO: 38753 - RNA, 19 nt, Artificial Sequence
  Sense Oligo
agugucuugcguuguaaau

SEQ ID NO: 38754 - RNA, 19 nt, Artificial Sequence
  Antisense Oligo
auuuacaacgcaagacacu

SEQ ID NO: 38755 - RNA, 19 nt, Artificial Sequence
  Sense Oligo
gugucuugcguuguaaaua

SEQ ID NO: 38756 - RNA, 19 nt, Artificial Sequence
  Antisense Oligo
uauuuacaacgcaagacac

SEQ ID NO: 38757 - RNA, 19 nt, Artificial Sequence
  Sense Oligo
ugucuugcguuguaaauaa

SEQ ID NO: 38758 - RNA, 19 nt, Artificial Sequence
  Antisense Oligo
uuauuuacaacgcaagaca

SEQ ID NO: 38759 - RNA, 19 nt, Artificial Sequence
  Sense Oligo
gaaugcuugcuguacccua

SEQ ID NO: 38760 - RNA, 19 nt, Artificial Sequence
  Antisense Oligo
uaggguacagcaagcauuc

SEQ ID NO: 38761 - RNA, 19 nt, Artificial Sequence
  Sense Oligo
aaugcuugcuguacccuag

SEQ ID NO: 38762 - RNA, 19 nt, Artificial Sequence
  Antisense Oligo
cuaggguacagcaagcauu

SEQ ID NO: 38763 - RNA, 19 nt, Artificial Sequence
  Sense Oligo
augcuugcuguacccuagc

SEQ ID NO: 38764 - RNA, 19 nt, Artificial Sequence
  Antisense Oligo
gcuaggguacagcaagcau

SEQ ID NO: 38765 - RNA, 19 nt, Artificial Sequence
  Sense Oligo
ugcuugcuguacccuagcg

SEQ ID NO: 38766 - RNA, 19 nt, Artificial Sequence
  Antisense Oligo
cgcuaggguacagcaagca

SEQ ID NO: 38767 - RNA, 19 nt, Artificial Sequence
  Sense Oligo
gcuugcuguacccuagcga

SEQ ID NO: 38768 - RNA, 19 nt, Artificial Sequence
  Antisense Oligo
ucgcuaggguacagcaagc

SEQ ID NO: 38769 - RNA, 19 nt, Artificial Sequence
  Sense Oligo
cuugcuguacccuagcgac

SEQ ID NO: 38770 - RNA, 19 nt, Artificial Sequence
  Antisense Oligo
gucgcuaggguacagcaag

SEQ ID NO: 38771 - RNA, 19 nt, Artificial Sequence
  Sense Oligo
uugcuguacccuagcgacu

SEQ ID NO: 38772 - RNA, 19 nt, Artificial Sequence
  Antisense Oligo
agucgcuaggguacagcaa

SEQ ID NO: 38773 - RNA, 19 nt, Artificial Sequence
  Sense Oligo
ugcuguacccuagcgacug

SEQ ID NO: 38774 - RNA, 19 nt, Artificial Sequence
  Antisense Oligo
cagucgcuaggguacagca

SEQ ID NO: 38775 - RNA, 19 nt, Artificial Sequence
  Sense Oligo
gcuguacccuagcgacugu

SEQ ID NO: 38776 - RNA, 19 nt, Artificial Sequence
  Antisense Oligo
acagucgcuaggguacagc

SEQ ID NO: 38777 - RNA, 19 nt, Artificial Sequence
  Sense Oligo
cuagcgacugugcuggguc

SEQ ID NO: 38778 - RNA, 19 nt, Artificial Sequence
  Antisense Oligo
gacccagcacagucgcuag

SEQ ID NO: 38779 - RNA, 19 nt, Artificial Sequence
  Sense Oligo
gacugugcugggucgcaag

SEQ ID NO: 38780 - RNA, 19 nt, Artificial Sequence
  Antisense Oligo
cuugcgacccagcacaguc

SEQ ID NO: 38781 - RNA, 19 nt, Artificial Sequence
  Sense Oligo
acugugcugggucgcaagg

SEQ ID NO: 38782 - RNA, 19 nt, Artificial Sequence
  Antisense Oligo
ccuugcgacccagcacagu

SEQ ID NO: 38783 - RNA, 19 nt, Artificial Sequence
  Sense Oligo
gcugggucgcaagggaagu

SEQ ID NO: 38784 - RNA, 19 nt, Artificial Sequence
  Antisense Oligo
acuucccuugcgacccagc

SEQ ID NO: 38785 - RNA, 19 nt, Artificial Sequence
  Sense Oligo
cugggucgcaagggaagug

SEQ ID NO: 38786 - RNA, 19 nt, Artificial Sequence
  Antisense Oligo
cacuucccuugcgacccag

SEQ ID NO: 38787 - RNA, 19 nt, Artificial Sequence
  Sense Oligo
ugggucgcaagggaagugc

SEQ ID NO: 38788 - RNA, 19 nt, Artificial Sequence
  Antisense Oligo
gcacuucccuugcgaccca

SEQ ID NO: 38789 - RNA, 19 nt, Artificial Sequence
  Sense Oligo
acuuaccuaaggucucaaa

SEQ ID NO: 38790 - RNA, 19 nt, Artificial Sequence
  Antisense Oligo
uuugagaccuuagguaagu

SEQ ID NO: 38791 - RNA, 19 nt, Artificial Sequence
  Sense Oligo
cuuaccuaaggucucaaag

SEQ ID NO: 38792 - RNA, 19 nt, Artificial Sequence
  Antisense Oligo
cuuugagaccuuagguaag

SEQ ID NO: 38793 - RNA, 19 nt, Artificial Sequence
  Sense Oligo
uuaccuaaggucucaaaga

SEQ ID NO: 38794 - RNA, 19 nt, Artificial Sequence
  Antisense Oligo
ucuuugagaccuuagguaa

SEQ ID NO: 38795 - RNA, 19 nt, Artificial Sequence
  Sense Oligo
accuaaggucucaaagauu

SEQ ID NO: 38796 - RNA, 19 nt, Artificial Sequence
  Antisense Oligo
aaucuuugagaccuuaggu

SEQ ID NO: 38797 - RNA, 19 nt, Artificial Sequence
  Sense Oligo
ccuaaggucucaaagauua

SEQ ID NO: 38798 - RNA, 19 nt, Artificial Sequence
  Antisense Oligo
uaaucuuugagaccuuagg

SEQ ID NO: 38799 - RNA, 19 nt, Artificial Sequence
  Sense Oligo
ggucucaaagauuauaagu

SEQ ID NO: 38800 - RNA, 19 nt, Artificial Sequence
  Antisense Oligo
acuuauaaucuuugagacc

SEQ ID NO: 38801 - RNA, 19 nt, Artificial Sequence
  Sense Oligo
cuaaaauccagacccaggu

SEQ ID NO: 38802 - RNA, 19 nt, Artificial Sequence
  Antisense Oligo
accugggucuggauuuuag

SEQ ID NO: 38803 - RNA, 19 nt, Artificial Sequence
  Sense Oligo
uaaaauccagacccaggua

SEQ ID NO: 38804 - RNA, 19 nt, Artificial Sequence
  Antisense Oligo
uaccugggucuggauuuua

SEQ ID NO: 38805 - RNA, 19 nt, Artificial Sequence
  Sense Oligo
auccagacccagguauguc

SEQ ID NO: 38806 - RNA, 19 nt, Artificial Sequence
  Antisense Oligo
gacauaccugggucuggau

SEQ ID NO: 38807 - RNA, 19 nt, Artificial Sequence
  Sense Oligo
cccagguaugucuuauuug

SEQ ID NO: 38808 - RNA, 19 nt, Artificial Sequence
  Antisense Oligo
caaauaagacauaccuggg

SEQ ID NO: 38809 - RNA, 19 nt, Artificial Sequence
  Sense Oligo
ccagguaugucuuauuugg

SEQ ID NO: 38810 - RNA, 19 nt, Artificial Sequence
  Antisense Oligo
ccaaauaagacauaccugg

SEQ ID NO: 38811 - RNA, 19 nt, Artificial Sequence
  Sense Oligo
agguaugucuuauuuggag

SEQ ID NO: 38812 - RNA, 19 nt, Artificial Sequence
  Antisense Oligo
cuccaaauaagacauaccu

SEQ ID NO: 38813 - RNA, 19 nt, Artificial Sequence
  Sense Oligo
gaucaauauagaaugucca

SEQ ID NO: 38814 - RNA, 19 nt, Artificial Sequence
  Antisense Oligo
uggacauucuauauugauc

SEQ ID NO: 38815 - RNA, 19 nt, Artificial Sequence
  Sense Oligo
ucaauauagaauguccaag

SEQ ID NO: 38816 - RNA, 19 nt, Artificial Sequence
  Antisense Oligo
cuuggacauucuauauuga

SEQ ID NO: 38817 - RNA, 19 nt, Artificial Sequence
  Sense Oligo
caauauagaauguccaagc

SEQ ID NO: 38818 - RNA, 19 nt, Artificial Sequence
  Antisense Oligo
gcuuggacauucuauauug

SEQ ID NO: 38819 - RNA, 19 nt, Artificial Sequence
  Sense Oligo
aauauagaauguccaagcc

SEQ ID NO: 38820 - RNA, 19 nt, Artificial Sequence
  Antisense Oligo
ggcuuggacauucuauauu

SEQ ID NO: 38821 - RNA, 19 nt, Artificial Sequence
  Sense Oligo
auauagaauguccaagcca

SEQ ID NO: 38822 - RNA, 19 nt, Artificial Sequence
  Antisense Oligo
uggcuuggacauucuauau

SEQ ID NO: 38823 - RNA, 19 nt, Artificial Sequence
  Sense Oligo
uauagaauguccaagccaa

SEQ ID NO: 38824 - RNA, 19 nt, Artificial Sequence
  Antisense Oligo
uuggcuuggacauucuaua

SEQ ID NO: 38825 - RNA, 19 nt, Artificial Sequence
  Sense Oligo
auagaauguccaagccaac

SEQ ID NO: 38826 - RNA, 19 nt, Artificial Sequence
  Antisense Oligo
guuggcuuggacauucuau

SEQ ID NO: 38827 - RNA, 19 nt, Artificial Sequence
  Sense Oligo
gugaaguacugugcugucu

SEQ ID NO: 38828 - RNA, 19 nt, Artificial Sequence
  Antisense Oligo
agacagcacaguacuucac

SEQ ID NO: 38829 - RNA, 19 nt, Artificial Sequence
  Sense Oligo
ugaaguacugugcugucug

SEQ ID NO: 38830 - RNA, 19 nt, Artificial Sequence
  Antisense Oligo
cagacagcacaguacuuca

SEQ ID NO: 38831 - RNA, 19 nt, Artificial Sequence
  Sense Oligo
gaaguacugugcugucuga

SEQ ID NO: 38832 - RNA, 19 nt, Artificial Sequence
  Antisense Oligo
ucagacagcacaguacuuc

SEQ ID NO: 38833 - RNA, 19 nt, Artificial Sequence
  Sense Oligo
aaguacugugcugucugau

SEQ ID NO: 38834 - RNA, 19 nt, Artificial Sequence
  Antisense Oligo
aucagacagcacaguacuu

SEQ ID NO: 38835 - RNA, 19 nt, Artificial Sequence
  Sense Oligo
aguacugugcugucugauu

SEQ ID NO: 38836 - RNA, 19 nt, Artificial Sequence
  Antisense Oligo
aaucagacagcacaguacu

SEQ ID NO: 38837 - RNA, 19 nt, Artificial Sequence
  Sense Oligo
guguuuuguggucaaggag

SEQ ID NO: 38838 - RNA, 19 nt, Artificial Sequence
  Antisense Oligo
cuccuugaccacaaaacac

SEQ ID NO: 38839 - RNA, 19 nt, Artificial Sequence
  Sense Oligo
uguuuuguggucaaggagg

SEQ ID NO: 38840 - RNA, 19 nt, Artificial Sequence
  Antisense Oligo
ccuccuugaccacaaaaca

SEQ ID NO: 38841 - RNA, 19 nt, Artificial Sequence
  Sense Oligo
guuuuguggucaaggaggg

SEQ ID NO: 38842 - RNA, 19 nt, Artificial Sequence
  Antisense Oligo
cccuccuugaccacaaaac

SEQ ID NO: 38843 - RNA, 19 nt, Artificial Sequence
  Sense Oligo
uuuuguggucaaggaggga

SEQ ID NO: 38844 - RNA, 19 nt, Artificial Sequence
  Antisense Oligo
ucccuccuugaccacaaaa

SEQ ID NO: 38845 - RNA, 19 nt, Artificial Sequence
  Sense Oligo
aacguuagaguccaguugg

SEQ ID NO: 38846 - RNA, 19 nt, Artificial Sequence
  Antisense Oligo
ccaacuggacucuaacguu

SEQ ID NO: 38847 - RNA, 19 nt, Artificial Sequence
  Sense Oligo
acguuagaguccaguuggc

SEQ ID NO: 38848 - RNA, 19 nt, Artificial Sequence
  Antisense Oligo
gccaacuggacucuaacgu

SEQ ID NO: 38849 - RNA, 19 nt, Artificial Sequence
  Sense Oligo
cguuagaguccaguuggcg

SEQ ID NO: 38850 - RNA, 19 nt, Artificial Sequence
  Antisense Oligo
cgccaacuggacucuaacg

SEQ ID NO: 38851 - RNA, 19 nt, Artificial Sequence
  Sense Oligo
guuagaguccaguuggcgu

SEQ ID NO: 38852 - RNA, 19 nt, Artificial Sequence
  Antisense Oligo
acgccaacuggacucuaac

SEQ ID NO: 38853 - RNA, 19 nt, Artificial Sequence
  Sense Oligo
uuagaguccaguuggcgug

SEQ ID NO: 38854 - RNA, 19 nt, Artificial Sequence
  Antisense Oligo
cacgccaacuggacucuaa

SEQ ID NO: 38855 - RNA, 19 nt, Artificial Sequence
  Sense Oligo
uagaguccaguuggcgugu

SEQ ID NO: 38856 - RNA, 19 nt, Artificial Sequence
  Antisense Oligo
acacgccaacuggacucua

SEQ ID NO: 38857 - RNA, 19 nt, Artificial Sequence
  Sense Oligo
agaguccaguuggcgugug

SEQ ID NO: 38858 - RNA, 19 nt, Artificial Sequence
  Antisense Oligo
cacacgccaacuggacucu

SEQ ID NO: 38859 - RNA, 19 nt, Artificial Sequence
  Sense Oligo
gaguccaguuggcguguga

SEQ ID NO: 38860 - RNA, 19 nt, Artificial Sequence
  Antisense Oligo
ucacacgccaacuggacuc

SEQ ID NO: 38861 - RNA, 19 nt, Artificial Sequence
  Sense Oligo
agaaggcgcuggaugugga

SEQ ID NO: 38862 - RNA, 19 nt, Artificial Sequence
  Antisense Oligo
uccacauccagcgccuucu

SEQ ID NO: 38863 - RNA, 19 nt, Artificial Sequence
  Sense Oligo
gaaggcgcuggauguggaa

SEQ ID NO: 38864 - RNA, 19 nt, Artificial Sequence
  Antisense Oligo
uuccacauccagcgccuuc

SEQ ID NO: 38865 - RNA, 19 nt, Artificial Sequence
  Sense Oligo
gccaaaaucaaugcugagc

SEQ ID NO: 38866 - RNA, 19 nt, Artificial Sequence
  Antisense Oligo
gcucagcauugauuuuggc

SEQ ID NO: 38867 - RNA, 19 nt, Artificial Sequence
  Sense Oligo
ccaaaaucaaugcugagcu

SEQ ID NO: 38868 - RNA, 19 nt, Artificial Sequence
  Antisense Oligo
agcucagcauugauuuugg

SEQ ID NO: 38869 - RNA, 19 nt, Artificial Sequence
  Sense Oligo
aaucaaugcugagcuuccu

SEQ ID NO: 38870 - RNA, 19 nt, Artificial Sequence
  Antisense Oligo
aggaagcucagcauugauu

SEQ ID NO: 38871 - RNA, 19 nt, Artificial Sequence
  Sense Oligo
aucaaugcugagcuuccua

SEQ ID NO: 38872 - RNA, 19 nt, Artificial Sequence
  Antisense Oligo
uaggaagcucagcauugau

SEQ ID NO: 38873 - RNA, 19 nt, Artificial Sequence
  Sense Oligo
ucaaugcugagcuuccuac

SEQ ID NO: 38874 - RNA, 19 nt, Artificial Sequence
  Antisense Oligo
guaggaagcucagcauuga

SEQ ID NO: 38875 - RNA, 19 nt, Artificial Sequence
  Sense Oligo
aauuaauaugggagugcac

SEQ ID NO: 38876 - RNA, 19 nt, Artificial Sequence
  Antisense Oligo
gugcacucccauauuaauu

SEQ ID NO: 38877 - RNA, 19 nt, Artificial Sequence
  Sense Oligo
auuaauaugggagugcaca

SEQ ID NO: 38878 - RNA, 19 nt, Artificial Sequence
  Antisense Oligo
ugugcacucccauauuaau

SEQ ID NO: 38879 - RNA, 19 nt, Artificial Sequence
  Sense Oligo
cucucucacccaggcugga

SEQ ID NO: 38880 - RNA, 19 nt, Artificial Sequence
  Antisense Oligo
uccagccugggugagagag

SEQ ID NO: 38881 - RNA, 19 nt, Artificial Sequence
  Sense Oligo
ucucucacccaggcuggag

SEQ ID NO: 38882 - RNA, 19 nt, Artificial Sequence
  Antisense Oligo
cuccagccugggugagaga

SEQ ID NO: 38883 - RNA, 19 nt, Artificial Sequence
  Sense Oligo
ucacccaggcuggagugca

SEQ ID NO: 38884 - RNA, 19 nt, Artificial Sequence
  Antisense Oligo
ugcacuccagccuggguga

SEQ ID NO: 38885 - RNA, 19 nt, Artificial Sequence
  Sense Oligo
ugaucucagcucacugcaa

SEQ ID NO: 38886 - RNA, 19 nt, Artificial Sequence
  Antisense Oligo
uugcagugagcugagauca

SEQ ID NO: 38887 - RNA, 19 nt, Artificial Sequence
  Sense Oligo
gaucucagcucacugcaac

SEQ ID NO: 38888 - RNA, 19 nt, Artificial Sequence
  Antisense Oligo
guugcagugagcugagauc

SEQ ID NO: 38889 - RNA, 19 nt, Artificial Sequence
  Sense Oligo
aucucagcucacugcaacc

SEQ ID NO: 38890 - RNA, 19 nt, Artificial Sequence
  Antisense Oligo
gguugcagugagcugagau

SEQ ID NO: 38891 - RNA, 19 nt, Artificial Sequence
  Sense Oligo
ucucagcucacugcaaccu

SEQ ID NO: 38892 - RNA, 19 nt, Artificial Sequence
  Antisense Oligo
agguugcagugagcugaga

SEQ ID NO: 38893 - RNA, 19 nt, Artificial Sequence
  Sense Oligo
ccggguucaagcgauucuc

SEQ ID NO: 38894 - RNA, 19 nt, Artificial Sequence
  Antisense Oligo
gagaaucgcuugaacccgg

SEQ ID NO: 38895 - RNA, 19 nt, Artificial Sequence
  Sense Oligo
cggguucaagcgauucucc

SEQ ID NO: 38896 - RNA, 19 nt, Artificial Sequence
  Antisense Oligo
ggagaaucgcuugaacccg

SEQ ID NO: 38897 - RNA, 19 nt, Artificial Sequence
  Sense Oligo
ggguucaagcgauucuccu

SEQ ID NO: 38898 - RNA, 19 nt, Artificial Sequence
  Antisense Oligo
aggagaaucgcuugaaccc

SEQ ID NO: 38899 - RNA, 19 nt, Artificial Sequence
  Sense Oligo
gguucaagcgauucuccug

SEQ ID NO: 38900 - RNA, 19 nt, Artificial Sequence
  Antisense Oligo
caggagaaucgcuugaacc

SEQ ID NO: 38901 - RNA, 19 nt, Artificial Sequence
  Sense Oligo
guucaagcgauucuccugc

SEQ ID NO: 38902 - RNA, 19 nt, Artificial Sequence
  Antisense Oligo
gcaggagaaucgcuugaac

SEQ ID NO: 38903 - RNA, 19 nt, Artificial Sequence
  Sense Oligo
uucaagcgauucuccugcc

SEQ ID NO: 38904 - RNA, 19 nt, Artificial Sequence
  Antisense Oligo
ggcaggagaaucgcuugaa

SEQ ID NO: 38905 - RNA, 19 nt, Artificial Sequence
  Sense Oligo
ucaagcgauucuccugccu

SEQ ID NO: 38906 - RNA, 19 nt, Artificial Sequence
  Antisense Oligo
aggcaggagaaucgcuuga

SEQ ID NO: 38907 - RNA, 19 nt, Artificial Sequence
  Sense Oligo
cugccucagccucccaagu

SEQ ID NO: 38908 - RNA, 19 nt, Artificial Sequence
  Antisense Oligo
acuugggaggcugaggcag

SEQ ID NO: 38909 - RNA, 19 nt, Artificial Sequence
  Sense Oligo
ugccucagccucccaagua

SEQ ID NO: 38910 - RNA, 19 nt, Artificial Sequence
  Antisense Oligo
uacuugggaggcugaggca

SEQ ID NO: 38911 - RNA, 19 nt, Artificial Sequence
  Sense Oligo
gccucagccucccaaguag

SEQ ID NO: 38912 - RNA, 19 nt, Artificial Sequence
  Antisense Oligo
cuacuugggaggcugaggc

SEQ ID NO: 38913 - RNA, 19 nt, Artificial Sequence
  Sense Oligo
ccucagccucccaaguagc

SEQ ID NO: 38914 - RNA, 19 nt, Artificial Sequence
  Antisense Oligo
gcuacuugggaggcugagg

SEQ ID NO: 38915 - RNA, 19 nt, Artificial Sequence
  Sense Oligo
cucagccucccaaguagcu

SEQ ID NO: 38916 - RNA, 19 nt, Artificial Sequence
  Antisense Oligo
agcuacuugggaggcugag

SEQ ID NO: 38917 - RNA, 19 nt, Artificial Sequence
  Sense Oligo
ccaaguagcugggauuaca

SEQ ID NO: 38918 - RNA, 19 nt, Artificial Sequence
  Antisense Oligo
uguaaucccagcuacuugg

SEQ ID NO: 38919 - RNA, 19 nt, Artificial Sequence
  Sense Oligo
caaguagcugggauuacag

SEQ ID NO: 38920 - RNA, 19 nt, Artificial Sequence
  Antisense Oligo
cuguaaucccagcuacuug

SEQ ID NO: 38921 - RNA, 19 nt, Artificial Sequence
  Sense Oligo
aaguagcugggauuacaga

SEQ ID NO: 38922 - RNA, 19 nt, Artificial Sequence
  Antisense Oligo
ucuguaaucccagcuacuu

SEQ ID NO: 38923 - RNA, 19 nt, Artificial Sequence
  Sense Oligo
aguagcugggauuacagau

SEQ ID NO: 38924 - RNA, 19 nt, Artificial Sequence
  Antisense Oligo
aucuguaaucccagcuacu

SEQ ID NO: 38925 - RNA, 19 nt, Artificial Sequence
  Sense Oligo
guagcugggauuacagaug

SEQ ID NO: 38926 - RNA, 19 nt, Artificial Sequence
  Antisense Oligo
caucuguaaucccagcuac

SEQ ID NO: 38927 - RNA, 19 nt, Artificial Sequence
  Sense Oligo
uagcugggauuacagaugu

SEQ ID NO: 38928 - RNA, 19 nt, Artificial Sequence
  Antisense Oligo
acaucuguaaucccagcua

SEQ ID NO: 38929 - RNA, 19 nt, Artificial Sequence
  Sense Oligo
agcugggauuacagaugug

SEQ ID NO: 38930 - RNA, 19 nt, Artificial Sequence
  Antisense Oligo
cacaucuguaaucccagcu

SEQ ID NO: 38931 - RNA, 19 nt, Artificial Sequence
  Sense Oligo
gcccagcaguuuauuuaau

SEQ ID NO: 38932 - RNA, 19 nt, Artificial Sequence
  Antisense Oligo
auuaaauaaacugcugggc

SEQ ID NO: 38933 - RNA, 19 nt, Artificial Sequence
  Sense Oligo
cccagcaguuuauuuaauu

SEQ ID NO: 38934 - RNA, 19 nt, Artificial Sequence
  Antisense Oligo
aauuaaauaaacugcuggg

SEQ ID NO: 38935 - RNA, 19 nt, Artificial Sequence
  Sense Oligo
caucaucgcucaccguaag

SEQ ID NO: 38936 - RNA, 19 nt, Artificial Sequence
  Antisense Oligo
cuuacggugagcgaugaug

SEQ ID NO: 38937 - RNA, 19 nt, Artificial Sequence
  Sense Oligo
aucaucgcucaccguaagc

SEQ ID NO: 38938 - RNA, 19 nt, Artificial Sequence
  Antisense Oligo
gcuuacggugagcgaugau

SEQ ID NO: 38939 - RNA, 19 nt, Artificial Sequence
  Sense Oligo
gcucaccguaagcgcugac

SEQ ID NO: 38940 - RNA, 19 nt, Artificial Sequence
  Antisense Oligo
gucagcgcuuacggugagc

SEQ ID NO: 38941 - RNA, 19 nt, Artificial Sequence
  Sense Oligo
cucacgugauccuccugcc

SEQ ID NO: 38942 - RNA, 19 nt, Artificial Sequence
  Antisense Oligo
ggcaggaggaucacgugag

SEQ ID NO: 38943 - RNA, 19 nt, Artificial Sequence
  Sense Oligo
ucacgugauccuccugccu

SEQ ID NO: 38944 - RNA, 19 nt, Artificial Sequence
  Antisense Oligo
aggcaggaggaucacguga

SEQ ID NO: 38945 - RNA, 19 nt, Artificial Sequence
  Sense Oligo
cugccucagccucccaagu

SEQ ID NO: 38946 - RNA, 19 nt, Artificial Sequence
  Antisense Oligo
acuugggaggcugaggcag

SEQ ID NO: 38947 - RNA, 19 nt, Artificial Sequence
  Sense Oligo
ugccucagccucccaagug

SEQ ID NO: 38948 - RNA, 19 nt, Artificial Sequence
  Antisense Oligo
cacuugggaggcugaggca

SEQ ID NO: 38949 - RNA, 19 nt, Artificial Sequence
  Sense Oligo
cccagccuguuuauaaguu

SEQ ID NO: 38950 - RNA, 19 nt, Artificial Sequence
  Antisense Oligo
aacuuauaaacaggcuggg

SEQ ID NO: 38951 - RNA, 19 nt, Artificial Sequence
  Sense Oligo
ccagccuguuuauaaguug

SEQ ID NO: 38952 - RNA, 19 nt, Artificial Sequence
  Antisense Oligo
caacuuauaaacaggcugg

SEQ ID NO: 38953 - RNA, 19 nt, Artificial Sequence
  Sense Oligo
cagccuguuuauaaguugg

SEQ ID NO: 38954 - RNA, 19 nt, Artificial Sequence
  Antisense Oligo
ccaacuuauaaacaggcug

SEQ ID NO: 38955 - RNA, 19 nt, Artificial Sequence
  Sense Oligo
agccuguuuauaaguugga

SEQ ID NO: 38956 - RNA, 19 nt, Artificial Sequence
  Antisense Oligo
uccaacuuauaaacaggcu

SEQ ID NO: 38957 - RNA, 19 nt, Artificial Sequence
  Sense Oligo
gccuguuuauaaguuggau

SEQ ID NO: 38958 - RNA, 19 nt, Artificial Sequence
  Antisense Oligo
auccaacuuauaaacaggc

SEQ ID NO: 38959 - RNA, 19 nt, Artificial Sequence
  Sense Oligo
ccuguuuauaaguuggaua

SEQ ID NO: 38960 - RNA, 19 nt, Artificial Sequence
  Antisense Oligo
uauccaacuuauaaacagg

SEQ ID NO: 38961 - RNA, 19 nt, Artificial Sequence
  Sense Oligo
cuguuuauaaguuggauag

SEQ ID NO: 38962 - RNA, 19 nt, Artificial Sequence
  Antisense Oligo
cuauccaacuuauaaacag

SEQ ID NO: 38963 - RNA, 19 nt, Artificial Sequence
  Sense Oligo
ucugccaccaucacacggg

SEQ ID NO: 38964 - RNA, 19 nt, Artificial Sequence
  Antisense Oligo
cccgugugaugguggcaga

SEQ ID NO: 38965 - RNA, 19 nt, Artificial Sequence
  Sense Oligo
accaucacacgggcaguac

SEQ ID NO: 38966 - RNA, 19 nt, Artificial Sequence
  Antisense Oligo
guacugcccgugugauggu

SEQ ID NO: 38967 - RNA, 19 nt, Artificial Sequence
  Sense Oligo
ccaucacacgggcaguacc

SEQ ID NO: 38968 - RNA, 19 nt, Artificial Sequence
  Antisense Oligo
gguacugcccgugugaugg

SEQ ID NO: 38969 - RNA, 19 nt, Artificial Sequence
  Sense Oligo
caucacacgggcaguaccc

SEQ ID NO: 38970 - RNA, 19 nt, Artificial Sequence
  Antisense Oligo
ggguacugcccgugugaug

SEQ ID NO: 38971 - RNA, 19 nt, Artificial Sequence
  Sense Oligo
aucacacgggcaguacccu

SEQ ID NO: 38972 - RNA, 19 nt, Artificial Sequence
  Antisense Oligo
aggguacugcccgugugau

SEQ ID NO: 38973 - RNA, 19 nt, Artificial Sequence
  Sense Oligo
ucacacgggcaguacccug

SEQ ID NO: 38974 - RNA, 19 nt, Artificial Sequence
  Antisense Oligo
caggguacugcccguguga

SEQ ID NO: 38975 - RNA, 19 nt, Artificial Sequence
  Sense Oligo
cacacgggcaguacccugu

SEQ ID NO: 38976 - RNA, 19 nt, Artificial Sequence
  Antisense Oligo
acaggguacugcccgugug

SEQ ID NO: 38977 - RNA, 19 nt, Artificial Sequence
  Sense Oligo
acacgggcaguacccuguu

SEQ ID NO: 38978 - RNA, 19 nt, Artificial Sequence
  Antisense Oligo
aacaggguacugcccgugu

SEQ ID NO: 38979 - RNA, 19 nt, Artificial Sequence
  Sense Oligo
cacgggcaguacccuguua

SEQ ID NO: 38980 - RNA, 19 nt, Artificial Sequence
  Antisense Oligo
uaacaggguacugcccgug

SEQ ID NO: 38981 - RNA, 19 nt, Artificial Sequence
  Sense Oligo
acgggcaguacccuguuag

SEQ ID NO: 38982 - RNA, 19 nt, Artificial Sequence
  Antisense Oligo
cuaacaggguacugcccgu

SEQ ID NO: 38983 - RNA, 19 nt, Artificial Sequence
  Sense Oligo
cgggcaguacccuguuagu

SEQ ID NO: 38984 - RNA, 19 nt, Artificial Sequence
  Antisense Oligo
acuaacaggguacugcccg

SEQ ID NO: 38985 - RNA, 19 nt, Artificial Sequence
  Sense Oligo
gggcaguacccuguuagua

SEQ ID NO: 38986 - RNA, 19 nt, Artificial Sequence
  Antisense Oligo
uacuaacaggguacugccc

SEQ ID NO: 38987 - RNA, 19 nt, Artificial Sequence
  Sense Oligo
ggcaguacccuguuaguaa

SEQ ID NO: 38988 - RNA, 19 nt, Artificial Sequence
  Antisense Oligo
uuacuaacaggguacugcc

SEQ ID NO: 38989 - RNA, 19 nt, Artificial Sequence
  Sense Oligo
gcaguacccuguuaguaac

SEQ ID NO: 38990 - RNA, 19 nt, Artificial Sequence
  Antisense Oligo
guuacuaacaggguacugc

SEQ ID NO: 38991 - RNA, 19 nt, Artificial Sequence
  Sense Oligo
gcauuaguguggugcuuuu

SEQ ID NO: 38992 - RNA, 19 nt, Artificial Sequence
  Antisense Oligo
aaaagcaccacacuaaugc

SEQ ID NO: 38993 - RNA, 19 nt, Artificial Sequence
  Sense Oligo
cauuaguguggugcuuuug

SEQ ID NO: 38994 - RNA, 19 nt, Artificial Sequence
  Antisense Oligo
caaaagcaccacacuaaug

SEQ ID NO: 38995 - RNA, 19 nt, Artificial Sequence
  Sense Oligo
agaagccaauauugauaac

SEQ ID NO: 38996 - RNA, 19 nt, Artificial Sequence
  Antisense Oligo
guuaucaauauuggcuucu

SEQ ID NO: 38997 - RNA, 19 nt, Artificial Sequence
  Sense Oligo
cuaaaguccauaguucguu

SEQ ID NO: 38998 - RNA, 19 nt, Artificial Sequence
  Antisense Oligo
aacgaacuauggacuuuag

SEQ ID NO: 38999 - RNA, 19 nt, Artificial Sequence
  Sense Oligo
uaaaguccauaguucguuc

SEQ ID NO: 39000 - RNA, 19 nt, Artificial Sequence
  Antisense Oligo
gaacgaacuauggacuuua

SEQ ID NO: 39001 - RNA, 19 nt, Artificial Sequence
  Sense Oligo
aaaguccauaguucguucc

SEQ ID NO: 39002 - RNA, 19 nt, Artificial Sequence
  Antisense Oligo
ggaacgaacuauggacuuu

SEQ ID NO: 39003 - RNA, 19 nt, Artificial Sequence
  Sense Oligo
aaguccauaguucguuccu

SEQ ID NO: 39004 - RNA, 19 nt, Artificial Sequence
  Antisense Oligo
aggaacgaacuauggacuu

SEQ ID NO: 39005 - RNA, 19 nt, Artificial Sequence
  Sense Oligo
cauaguucguuccuggugu

SEQ ID NO: 39006 - RNA, 19 nt, Artificial Sequence
  Antisense Oligo
acaccaggaacgaacuaug

SEQ ID NO: 39007 - RNA, 19 nt, Artificial Sequence
  Sense Oligo
auaguucguuccugguguu

SEQ ID NO: 39008 - RNA, 19 nt, Artificial Sequence
  Antisense Oligo
aacaccaggaacgaacuau

SEQ ID NO: 39009 - RNA, 19 nt, Artificial Sequence
  Sense Oligo
uaguucguuccugguguug

SEQ ID NO: 39010 - RNA, 19 nt, Artificial Sequence
  Antisense Oligo
caacaccaggaacgaacua

SEQ ID NO: 39011 - RNA, 19 nt, Artificial Sequence
  Sense Oligo
aguucguuccugguguugu

SEQ ID NO: 39012 - RNA, 19 nt, Artificial Sequence
  Antisense Oligo
acaacaccaggaacgaacu

SEQ ID NO: 39013 - RNA, 19 nt, Artificial Sequence
  Sense Oligo
guucguuccugguguuguc

SEQ ID NO: 39014 - RNA, 19 nt, Artificial Sequence
  Antisense Oligo
gacaacaccaggaacgaac

SEQ ID NO: 39015 - RNA, 19 nt, Artificial Sequence
  Sense Oligo
uucguuccugguguugucc

SEQ ID NO: 39016 - RNA, 19 nt, Artificial Sequence
  Antisense Oligo
ggacaacaccaggaacgaa

SEQ ID NO: 39017 - RNA, 19 nt, Artificial Sequence
  Sense Oligo
ucguuccugguguugucca

SEQ ID NO: 39018 - RNA, 19 nt, Artificial Sequence
  Antisense Oligo
uggacaacaccaggaacga

SEQ ID NO: 39019 - RNA, 19 nt, Artificial Sequence
  Sense Oligo
cguuccugguguuguccau

SEQ ID NO: 39020 - RNA, 19 nt, Artificial Sequence
  Antisense Oligo
auggacaacaccaggaacg

SEQ ID NO: 39021 - RNA, 19 nt, Artificial Sequence
  Sense Oligo
guuccugguguuguccauu

SEQ ID NO: 39022 - RNA, 19 nt, Artificial Sequence
  Antisense Oligo
aauggacaacaccaggaac

SEQ ID NO: 39023 - RNA, 19 nt, Artificial Sequence
  Sense Oligo
ugguguuguccauucucug

SEQ ID NO: 39024 - RNA, 19 nt, Artificial Sequence
  Antisense Oligo
cagagaauggacaacacca

SEQ ID NO: 39025 - RNA, 19 nt, Artificial Sequence
  Sense Oligo
gguguuguccauucucuga

SEQ ID NO: 39026 - RNA, 19 nt, Artificial Sequence
  Antisense Oligo
ucagagaauggacaacacc

SEQ ID NO: 39027 - RNA, 19 nt, Artificial Sequence
  Sense Oligo
guguuguccauucucugag

SEQ ID NO: 39028 - RNA, 19 nt, Artificial Sequence
  Antisense Oligo
cucagagaauggacaacac

SEQ ID NO: 39029 - RNA, 19 nt, Artificial Sequence
  Sense Oligo
uguuguccauucucugagg

SEQ ID NO: 39030 - RNA, 19 nt, Artificial Sequence
  Antisense Oligo
ccucagagaauggacaaca

SEQ ID NO: 39031 - RNA, 19 nt, Artificial Sequence
  Sense Oligo
guuguccauucucugaggu

SEQ ID NO: 39032 - RNA, 19 nt, Artificial Sequence
  Antisense Oligo
accucagagaauggacaac

SEQ ID NO: 39033 - RNA, 19 nt, Artificial Sequence
  Sense Oligo
uuguccauucucugagguu

SEQ ID NO: 39034 - RNA, 19 nt, Artificial Sequence
  Antisense Oligo
aaccucagagaauggacaa

SEQ ID NO: 39035 - RNA, 19 nt, Artificial Sequence
  Sense Oligo
uguccauucucugagguuu

SEQ ID NO: 39036 - RNA, 19 nt, Artificial Sequence
  Antisense Oligo
aaaccucagagaauggaca

SEQ ID NO: 39037 - RNA, 19 nt, Artificial Sequence
  Sense Oligo
cauucucugagguuuggau

SEQ ID NO: 39038 - RNA, 19 nt, Artificial Sequence
  Antisense Oligo
auccaaaccucagagaaug

SEQ ID NO: 39039 - RNA, 19 nt, Artificial Sequence
  Sense Oligo
auucucugagguuuggaua

SEQ ID NO: 39040 - RNA, 19 nt, Artificial Sequence
  Antisense Oligo
uauccaaaccucagagaau

SEQ ID NO: 39041 - RNA, 19 nt, Artificial Sequence
  Sense Oligo
uucucugagguuuggauaa

SEQ ID NO: 39042 - RNA, 19 nt, Artificial Sequence
  Antisense Oligo
uuauccaaaccucagagaa

SEQ ID NO: 39043 - RNA, 19 nt, Artificial Sequence
  Sense Oligo
ucucugagguuuggauaaa

SEQ ID NO: 39044 - RNA, 19 nt, Artificial Sequence
  Antisense Oligo
uuuauccaaaccucagaga

SEQ ID NO: 39045 - RNA, 19 nt, Artificial Sequence
  Sense Oligo
uggccuguguccaccauuc

SEQ ID NO: 39046 - RNA, 19 nt, Artificial Sequence
  Antisense Oligo
gaaugguggacacaggcca

SEQ ID NO: 39047 - RNA, 19 nt, Artificial Sequence
  Sense Oligo
cuguguccaccauuccagu

SEQ ID NO: 39048 - RNA, 19 nt, Artificial Sequence
  Antisense Oligo
acuggaaugguggacacag

SEQ ID NO: 39049 - RNA, 19 nt, Artificial Sequence
  Sense Oligo
uguguccaccauuccagua

SEQ ID NO: 39050 - RNA, 19 nt, Artificial Sequence
  Antisense Oligo
uacuggaaugguggacaca

SEQ ID NO: 39051 - RNA, 19 nt, Artificial Sequence
  Sense Oligo
guguccaccauuccaguau

SEQ ID NO: 39052 - RNA, 19 nt, Artificial Sequence
  Antisense Oligo
auacuggaaugguggacac

SEQ ID NO: 39053 - RNA, 19 nt, Artificial Sequence
  Sense Oligo
uguccaccauuccaguauc

SEQ ID NO: 39054 - RNA, 19 nt, Artificial Sequence
  Antisense Oligo
gauacuggaaugguggaca

SEQ ID NO: 39055 - RNA, 19 nt, Artificial Sequence
  Sense Oligo
uccaccauuccaguaucgu

SEQ ID NO: 39056 - RNA, 19 nt, Artificial Sequence
  Antisense Oligo
acgauacuggaauggugga

SEQ ID NO: 39057 - RNA, 19 nt, Artificial Sequence
  Sense Oligo
ccaccauuccaguaucgug

SEQ ID NO: 39058 - RNA, 19 nt, Artificial Sequence
  Antisense Oligo
cacgauacuggaauggugg

SEQ ID NO: 39059 - RNA, 19 nt, Artificial Sequence
  Sense Oligo
caccauuccaguaucgugc

SEQ ID NO: 39060 - RNA, 19 nt, Artificial Sequence
  Antisense Oligo
gcacgauacuggaauggug

SEQ ID NO: 39061 - RNA, 19 nt, Artificial Sequence
  Sense Oligo
accauuccaguaucgugca

SEQ ID NO: 39062 - RNA, 19 nt, Artificial Sequence
  Antisense Oligo
ugcacgauacuggaauggu

SEQ ID NO: 39063 - RNA, 19 nt, Artificial Sequence
  Sense Oligo
guaucgugcagaauaguug

SEQ ID NO: 39064 - RNA, 19 nt, Artificial Sequence
  Antisense Oligo
caacuauucugcacgauac

SEQ ID NO: 39065 - RNA, 19 nt, Artificial Sequence
  Sense Oligo
caaaaucccaugcuccacc

SEQ ID NO: 39066 - RNA, 19 nt, Artificial Sequence
  Antisense Oligo
gguggagcaugggauuuug

SEQ ID NO: 39067 - RNA, 19 nt, Artificial Sequence
  Sense Oligo
cccucccauuuccuuuagu

SEQ ID NO: 39068 - RNA, 19 nt, Artificial Sequence
  Antisense Oligo
acuaaaggaaaugggaggg

SEQ ID NO: 39069 - RNA, 19 nt, Artificial Sequence
  Sense Oligo
cucccauuuccuuuagucu

SEQ ID NO: 39070 - RNA, 19 nt, Artificial Sequence
  Antisense Oligo
agacuaaaggaaaugggag

SEQ ID NO: 39071 - RNA, 19 nt, Artificial Sequence
  Sense Oligo
uuccuuuagucuuuuccag

SEQ ID NO: 39072 - RNA, 19 nt, Artificial Sequence
  Antisense Oligo
cuggaaaagacuaaaggaa

SEQ ID NO: 39073 - RNA, 19 nt, Artificial Sequence
  Sense Oligo
uccuuuagucuuuuccaga

SEQ ID NO: 39074 - RNA, 19 nt, Artificial Sequence
  Antisense Oligo
ucuggaaaagacuaaagga

SEQ ID NO: 39075 - RNA, 19 nt, Artificial Sequence
  Sense Oligo
ccuuuagucuuuuccagaa

SEQ ID NO: 39076 - RNA, 19 nt, Artificial Sequence
  Antisense Oligo
uucuggaaaagacuaaagg

SEQ ID NO: 39077 - RNA, 19 nt, Artificial Sequence
  Sense Oligo
uccagaauguccuaugguu

SEQ ID NO: 39078 - RNA, 19 nt, Artificial Sequence
  Antisense Oligo
aaccauaggacauucugga

SEQ ID NO: 39079 - RNA, 19 nt, Artificial Sequence
  Sense Oligo
ccagaauguccuaugguug

SEQ ID NO: 39080 - RNA, 19 nt, Artificial Sequence
  Antisense Oligo
caaccauaggacauucugg

SEQ ID NO: 39081 - RNA, 19 nt, Artificial Sequence
  Sense Oligo
cagaauguccuaugguugg

SEQ ID NO: 39082 - RNA, 19 nt, Artificial Sequence
  Antisense Oligo
ccaaccauaggacauucug

SEQ ID NO: 39083 - RNA, 19 nt, Artificial Sequence
  Sense Oligo
agaauguccuaugguugga

SEQ ID NO: 39084 - RNA, 19 nt, Artificial Sequence
  Antisense Oligo
uccaaccauaggacauucu

SEQ ID NO: 39085 - RNA, 19 nt, Artificial Sequence
  Sense Oligo
uguccuaugguuggaaucu

SEQ ID NO: 39086 - RNA, 19 nt, Artificial Sequence
  Antisense Oligo
agauuccaaccauaggaca

SEQ ID NO: 39087 - RNA, 19 nt, Artificial Sequence
  Sense Oligo
guccuaugguuggaaucuu

SEQ ID NO: 39088 - RNA, 19 nt, Artificial Sequence
  Antisense Oligo
aagauuccaaccauaggac

SEQ ID NO: 39089 - RNA, 19 nt, Artificial Sequence
  Sense Oligo
uccuaugguuggaaucuua

SEQ ID NO: 39090 - RNA, 19 nt, Artificial Sequence
  Antisense Oligo
uaagauuccaaccauagga

SEQ ID NO: 39091 - RNA, 19 nt, Artificial Sequence
  Sense Oligo
ccuaugguuggaaucuuau

SEQ ID NO: 39092 - RNA, 19 nt, Artificial Sequence
  Antisense Oligo
auaagauuccaaccauagg

SEQ ID NO: 39093 - RNA, 19 nt, Artificial Sequence
  Sense Oligo
cuaugguuggaaucuuaua

SEQ ID NO: 39094 - RNA, 19 nt, Artificial Sequence
  Antisense Oligo
uauaagauuccaaccauag

SEQ ID NO: 39095 - RNA, 19 nt, Artificial Sequence
  Sense Oligo
uaugguuggaaucuuauag

SEQ ID NO: 39096 - RNA, 19 nt, Artificial Sequence
  Antisense Oligo
cuauaagauuccaaccaua

SEQ ID NO: 39097 - RNA, 19 nt, Artificial Sequence
  Sense Oligo
augguuggaaucuuauagg

SEQ ID NO: 39098 - RNA, 19 nt, Artificial Sequence
  Antisense Oligo
ccuauaagauuccaaccau

SEQ ID NO: 39099 - RNA, 19 nt, Artificial Sequence
  Sense Oligo
uggaaucuuauaggauguc

SEQ ID NO: 39100 - RNA, 19 nt, Artificial Sequence
  Antisense Oligo
gacauccuauaagauucca

SEQ ID NO: 39101 - RNA, 19 nt, Artificial Sequence
  Sense Oligo
ggaaucuuauaggaugucg

SEQ ID NO: 39102 - RNA, 19 nt, Artificial Sequence
  Antisense Oligo
cgacauccuauaagauucc

SEQ ID NO: 39103 - RNA, 19 nt, Artificial Sequence
  Sense Oligo
gaaucuuauaggaugucgc

SEQ ID NO: 39104 - RNA, 19 nt, Artificial Sequence
  Antisense Oligo
gcgacauccuauaagauuc

SEQ ID NO: 39105 - RNA, 19 nt, Artificial Sequence
  Sense Oligo
aaucuuauaggaugucgcc

SEQ ID NO: 39106 - RNA, 19 nt, Artificial Sequence
  Antisense Oligo
ggcgacauccuauaagauu

SEQ ID NO: 39107 - RNA, 19 nt, Artificial Sequence
  Sense Oligo
aucuuauaggaugucgccu

SEQ ID NO: 39108 - RNA, 19 nt, Artificial Sequence
  Antisense Oligo
aggcgacauccuauaagau

SEQ ID NO: 39109 - RNA, 19 nt, Artificial Sequence
  Sense Oligo
ucuuauaggaugucgccuu

SEQ ID NO: 39110 - RNA, 19 nt, Artificial Sequence
  Antisense Oligo
aaggcgacauccuauaaga

SEQ ID NO: 39111 - RNA, 19 nt, Artificial Sequence
  Sense Oligo
cuuauaggaugucgccuuu

SEQ ID NO: 39112 - RNA, 19 nt, Artificial Sequence
  Antisense Oligo
aaaggcgacauccuauaag

SEQ ID NO: 39113 - RNA, 19 nt, Artificial Sequence
  Sense Oligo
uuauaggaugucgccuuua

SEQ ID NO: 39114 - RNA, 19 nt, Artificial Sequence
  Antisense Oligo
uaaaggcgacauccuauaa

SEQ ID NO: 39115 - RNA, 19 nt, Artificial Sequence
  Sense Oligo
uauaggaugucgccuuuag

SEQ ID NO: 39116 - RNA, 19 nt, Artificial Sequence
  Antisense Oligo
cuaaaggcgacauccuaua

SEQ ID NO: 39117 - RNA, 19 nt, Artificial Sequence
  Sense Oligo
auaggaugucgccuuuaga

SEQ ID NO: 39118 - RNA, 19 nt, Artificial Sequence
  Antisense Oligo
ucuaaaggcgacauccuau

SEQ ID NO: 39119 - RNA, 19 nt, Artificial Sequence
  Sense Oligo
uaggaugucgccuuuagac

SEQ ID NO: 39120 - RNA, 19 nt, Artificial Sequence
  Antisense Oligo
gucuaaaggcgacauccua

SEQ ID NO: 39121 - RNA, 19 nt, Artificial Sequence
  Sense Oligo
aggaugucgccuuuagacu

SEQ ID NO: 39122 - RNA, 19 nt, Artificial Sequence
  Antisense Oligo
agucuaaaggcgacauccu

SEQ ID NO: 39123 - RNA, 19 nt, Artificial Sequence
  Sense Oligo
ugucgccuuuagacuggcu

SEQ ID NO: 39124 - RNA, 19 nt, Artificial Sequence
  Antisense Oligo
agccagucuaaaggcgaca

SEQ ID NO: 39125 - RNA, 19 nt, Artificial Sequence
  Sense Oligo
gucgccuuuagacuggcuu

SEQ ID NO: 39126 - RNA, 19 nt, Artificial Sequence
  Antisense Oligo
aagccagucuaaaggcgac

SEQ ID NO: 39127 - RNA, 19 nt, Artificial Sequence
  Sense Oligo
ucgccuuuagacuggcuuc

SEQ ID NO: 39128 - RNA, 19 nt, Artificial Sequence
  Antisense Oligo
gaagccagucuaaaggcga

SEQ ID NO: 39129 - RNA, 19 nt, Artificial Sequence
  Sense Oligo
cgccuuuagacuggcuucc

SEQ ID NO: 39130 - RNA, 19 nt, Artificial Sequence
  Antisense Oligo
ggaagccagucuaaaggcg

SEQ ID NO: 39131 - RNA, 19 nt, Artificial Sequence
  Sense Oligo
gccuuuagacuggcuuccu

SEQ ID NO: 39132 - RNA, 19 nt, Artificial Sequence
  Antisense Oligo
aggaagccagucuaaaggc

SEQ ID NO: 39133 - RNA, 19 nt, Artificial Sequence
  Sense Oligo
ccuuuagacuggcuuccuu

SEQ ID NO: 39134 - RNA, 19 nt, Artificial Sequence
  Antisense Oligo
aaggaagccagucuaaagg

SEQ ID NO: 39135 - RNA, 19 nt, Artificial Sequence
  Sense Oligo
uauuguauggaugugcuac

SEQ ID NO: 39136 - RNA, 19 nt, Artificial Sequence
  Antisense Oligo
guagcacauccauacaaua

SEQ ID NO: 39137 - RNA, 19 nt, Artificial Sequence
  Sense Oligo
uuguauggaugugcuacca

SEQ ID NO: 39138 - RNA, 19 nt, Artificial Sequence
  Antisense Oligo
ugguagcacauccauacaa

SEQ ID NO: 39139 - RNA, 19 nt, Artificial Sequence
  Sense Oligo
uggaugugcuaccauucgc

SEQ ID NO: 39140 - RNA, 19 nt, Artificial Sequence
  Antisense Oligo
gcgaaugguagcacaucca

SEQ ID NO: 39141 - RNA, 19 nt, Artificial Sequence
  Sense Oligo
ggaugugcuaccauucgcu

SEQ ID NO: 39142 - RNA, 19 nt, Artificial Sequence
  Antisense Oligo
agcgaaugguagcacaucc

SEQ ID NO: 39143 - RNA, 19 nt, Artificial Sequence
  Sense Oligo
gaugugcuaccauucgcuu

SEQ ID NO: 39144 - RNA, 19 nt, Artificial Sequence
  Antisense Oligo
aagcgaaugguagcacauc

SEQ ID NO: 39145 - RNA, 19 nt, Artificial Sequence
  Sense Oligo
augugcuaccauucgcuua

SEQ ID NO: 39146 - RNA, 19 nt, Artificial Sequence
  Antisense Oligo
uaagcgaaugguagcacau

SEQ ID NO: 39147 - RNA, 19 nt, Artificial Sequence
  Sense Oligo
ugugcuaccauucgcuuac

SEQ ID NO: 39148 - RNA, 19 nt, Artificial Sequence
  Antisense Oligo
guaagcgaaugguagcaca

SEQ ID NO: 39149 - RNA, 19 nt, Artificial Sequence
  Sense Oligo
gugcuaccauucgcuuacc

SEQ ID NO: 39150 - RNA, 19 nt, Artificial Sequence
  Antisense Oligo
gguaagcgaaugguagcac

SEQ ID NO: 39151 - RNA, 19 nt, Artificial Sequence
  Sense Oligo
ugcuaccauucgcuuaccc

SEQ ID NO: 39152 - RNA, 19 nt, Artificial Sequence
  Antisense Oligo
ggguaagcgaaugguagca

SEQ ID NO: 39153 - RNA, 19 nt, Artificial Sequence
  Sense Oligo
accauucgcuuacccguuc

SEQ ID NO: 39154 - RNA, 19 nt, Artificial Sequence
  Antisense Oligo
gaacggguaagcgaauggu

SEQ ID NO: 39155 - RNA, 19 nt, Artificial Sequence
  Sense Oligo
ccauucgcuuacccguuca

SEQ ID NO: 39156 - RNA, 19 nt, Artificial Sequence
  Antisense Oligo
ugaacggguaagcgaaugg

SEQ ID NO: 39157 - RNA, 19 nt, Artificial Sequence
  Sense Oligo
cauucgcuuacccguucac

SEQ ID NO: 39158 - RNA, 19 nt, Artificial Sequence
  Antisense Oligo
gugaacggguaagcgaaug

SEQ ID NO: 39159 - RNA, 19 nt, Artificial Sequence
  Sense Oligo
auucgcuuacccguucacc

SEQ ID NO: 39160 - RNA, 19 nt, Artificial Sequence
  Antisense Oligo
ggugaacggguaagcgaau

SEQ ID NO: 39161 - RNA, 19 nt, Artificial Sequence
  Sense Oligo
uucgcuuacccguucaccu

SEQ ID NO: 39162 - RNA, 19 nt, Artificial Sequence
  Antisense Oligo
aggugaacggguaagcgaa

SEQ ID NO: 39163 - RNA, 19 nt, Artificial Sequence
  Sense Oligo
ucgcuuacccguucaccuc

SEQ ID NO: 39164 - RNA, 19 nt, Artificial Sequence
  Antisense Oligo
gaggugaacggguaagcga

SEQ ID NO: 39165 - RNA, 19 nt, Artificial Sequence
  Sense Oligo
cgcuuacccguucaccuca

SEQ ID NO: 39166 - RNA, 19 nt, Artificial Sequence
  Antisense Oligo
ugaggugaacggguaagcg

SEQ ID NO: 39167 - RNA, 19 nt, Artificial Sequence
  Sense Oligo
gcuuacccguucaccucau

SEQ ID NO: 39168 - RNA, 19 nt, Artificial Sequence
  Antisense Oligo
augaggugaacggguaagc

SEQ ID NO: 39169 - RNA, 19 nt, Artificial Sequence
  Sense Oligo
cuuacccguucaccucaug

SEQ ID NO: 39170 - RNA, 19 nt, Artificial Sequence
  Antisense Oligo
caugaggugaacggguaag

SEQ ID NO: 39171 - RNA, 19 nt, Artificial Sequence
  Sense Oligo
cuauguuuguuucuuaugg

SEQ ID NO: 39172 - RNA, 19 nt, Artificial Sequence
  Antisense Oligo
ccauaagaaacaaacauag

SEQ ID NO: 39173 - RNA, 19 nt, Artificial Sequence
  Sense Oligo
auguuuguuucuuauggug

SEQ ID NO: 39174 - RNA, 19 nt, Artificial Sequence
  Antisense Oligo
caccauaagaaacaaacau

SEQ ID NO: 39175 - RNA, 19 nt, Artificial Sequence
  Sense Oligo
guuucuuauggugcagaua

SEQ ID NO: 39176 - RNA, 19 nt, Artificial Sequence
  Antisense Oligo
uaucugcaccauaagaaac

SEQ ID NO: 39177 - RNA, 19 nt, Artificial Sequence
  Sense Oligo
gauaagcuucaucuucucc

SEQ ID NO: 39178 - RNA, 19 nt, Artificial Sequence
  Antisense Oligo
ggagaagaugaagcuuauc

SEQ ID NO: 39179 - RNA, 19 nt, Artificial Sequence
  Sense Oligo
auaagcuucaucuucuccu

SEQ ID NO: 39180 - RNA, 19 nt, Artificial Sequence
  Antisense Oligo
aggagaagaugaagcuuau

SEQ ID NO: 39181 - RNA, 19 nt, Artificial Sequence
  Sense Oligo
uaagcuucaucuucuccua

SEQ ID NO: 39182 - RNA, 19 nt, Artificial Sequence
  Antisense Oligo
uaggagaagaugaagcuua

SEQ ID NO: 39183 - RNA, 19 nt, Artificial Sequence
  Sense Oligo
aagcuucaucuucuccuaa

SEQ ID NO: 39184 - RNA, 19 nt, Artificial Sequence
  Antisense Oligo
uuaggagaagaugaagcuu

SEQ ID NO: 39185 - RNA, 19 nt, Artificial Sequence
  Sense Oligo
agcuucaucuucuccuaau

SEQ ID NO: 39186 - RNA, 19 nt, Artificial Sequence
  Antisense Oligo
auuaggagaagaugaagcu

SEQ ID NO: 39187 - RNA, 19 nt, Artificial Sequence
  Sense Oligo
gcuucaucuucuccuaaua

SEQ ID NO: 39188 - RNA, 19 nt, Artificial Sequence
  Antisense Oligo
uauuaggagaagaugaagc

SEQ ID NO: 39189 - RNA, 19 nt, Artificial Sequence
  Sense Oligo
cuucaucuucuccuaauau

SEQ ID NO: 39190 - RNA, 19 nt, Artificial Sequence
  Antisense Oligo
auauuaggagaagaugaag

SEQ ID NO: 39191 - RNA, 19 nt, Artificial Sequence
  Sense Oligo
ucuccuaauauuguauggc

SEQ ID NO: 39192 - RNA, 19 nt, Artificial Sequence
  Antisense Oligo
gccauacaauauuaggaga

SEQ ID NO: 39193 - RNA, 19 nt, Artificial Sequence
  Sense Oligo
cuccuaauauuguauggcu

SEQ ID NO: 39194 - RNA, 19 nt, Artificial Sequence
  Antisense Oligo
agccauacaauauuaggag

SEQ ID NO: 39195 - RNA, 19 nt, Artificial Sequence
  Sense Oligo
uccuaauauuguauggcuc

SEQ ID NO: 39196 - RNA, 19 nt, Artificial Sequence
  Antisense Oligo
gagccauacaauauuagga

SEQ ID NO: 39197 - RNA, 19 nt, Artificial Sequence
  Sense Oligo
cuaauauuguauggcucua

SEQ ID NO: 39198 - RNA, 19 nt, Artificial Sequence
  Antisense Oligo
uagagccauacaauauuag

SEQ ID NO: 39199 - RNA, 19 nt, Artificial Sequence
  Sense Oligo
uguauggcucuaauauuac

SEQ ID NO: 39200 - RNA, 19 nt, Artificial Sequence
  Antisense Oligo
guaauauuagagccauaca

SEQ ID NO: 39201 - RNA, 19 nt, Artificial Sequence
  Sense Oligo
guauggcucuaauauuacu

SEQ ID NO: 39202 - RNA, 19 nt, Artificial Sequence
  Antisense Oligo
aguaauauuagagccauac

SEQ ID NO: 39203 - RNA, 19 nt, Artificial Sequence
  Sense Oligo
aaaauucugcccucuaaau

SEQ ID NO: 39204 - RNA, 19 nt, Artificial Sequence
  Antisense Oligo
auuuagagggcagaauuuu

SEQ ID NO: 39205 - RNA, 19 nt, Artificial Sequence
  Sense Oligo
auucugcccucuaaauuua

SEQ ID NO: 39206 - RNA, 19 nt, Artificial Sequence
  Antisense Oligo
uaaauuuagagggcagaau

SEQ ID NO: 39207 - RNA, 19 nt, Artificial Sequence
  Sense Oligo
uucugcccucuaaauuuau

SEQ ID NO: 39208 - RNA, 19 nt, Artificial Sequence
  Antisense Oligo
auaaauuuagagggcagaa

SEQ ID NO: 39209 - RNA, 19 nt, Artificial Sequence
  Sense Oligo
ucugcccucuaaauuuauc

SEQ ID NO: 39210 - RNA, 19 nt, Artificial Sequence
  Antisense Oligo
gauaaauuuagagggcaga

SEQ ID NO: 39211 - RNA, 19 nt, Artificial Sequence
  Sense Oligo
cugcccucuaaauuuauca

SEQ ID NO: 39212 - RNA, 19 nt, Artificial Sequence
  Antisense Oligo
ugauaaauuuagagggcag

SEQ ID NO: 39213 - RNA, 19 nt, Artificial Sequence
  Sense Oligo
ugcccucuaaauuuaucau

SEQ ID NO: 39214 - RNA, 19 nt, Artificial Sequence
  Antisense Oligo
augauaaauuuagagggca

SEQ ID NO: 39215 - RNA, 19 nt, Artificial Sequence
  Sense Oligo
gcccucuaaauuuaucaua

SEQ ID NO: 39216 - RNA, 19 nt, Artificial Sequence
  Antisense Oligo
uaugauaaauuuagagggc

SEQ ID NO: 39217 - RNA, 19 nt, Artificial Sequence
  Sense Oligo
ucauaaaaucaguuccaag

SEQ ID NO: 39218 - RNA, 19 nt, Artificial Sequence
  Antisense Oligo
cuuggaacugauuuuauga

SEQ ID NO: 39219 - RNA, 19 nt, Artificial Sequence
  Sense Oligo
aucaguuccaagauuuugc

SEQ ID NO: 39220 - RNA, 19 nt, Artificial Sequence
  Antisense Oligo
gcaaaaucuuggaacugau

SEQ ID NO: 39221 - RNA, 19 nt, Artificial Sequence
  Sense Oligo
ucaguuccaagauuuugca

SEQ ID NO: 39222 - RNA, 19 nt, Artificial Sequence
  Antisense Oligo
ugcaaaaucuuggaacuga

SEQ ID NO: 39223 - RNA, 19 nt, Artificial Sequence
  Sense Oligo
caguuccaagauuuugcaa

SEQ ID NO: 39224 - RNA, 19 nt, Artificial Sequence
  Antisense Oligo
uugcaaaaucuuggaacug

SEQ ID NO: 39225 - RNA, 19 nt, Artificial Sequence
  Sense Oligo
aguuccaagauuuugcaag

SEQ ID NO: 39226 - RNA, 19 nt, Artificial Sequence
  Antisense Oligo
cuugcaaaaucuuggaacu

SEQ ID NO: 39227 - RNA, 19 nt, Artificial Sequence
  Sense Oligo
guuccaagauuuugcaaga

SEQ ID NO: 39228 - RNA, 19 nt, Artificial Sequence
  Antisense Oligo
ucuugcaaaaucuuggaac

SEQ ID NO: 39229 - RNA, 19 nt, Artificial Sequence
  Sense Oligo
uuccaagauuuugcaagau

SEQ ID NO: 39230 - RNA, 19 nt, Artificial Sequence
  Antisense Oligo
aucuugcaaaaucuuggaa

SEQ ID NO: 39231 - RNA, 19 nt, Artificial Sequence
  Sense Oligo
uccaagauuuugcaagaua

SEQ ID NO: 39232 - RNA, 19 nt, Artificial Sequence
  Antisense Oligo
uaucuugcaaaaucuugga

SEQ ID NO: 39233 - RNA, 19 nt, Artificial Sequence
  Sense Oligo
ccaagauuuugcaagauaa

SEQ ID NO: 39234 - RNA, 19 nt, Artificial Sequence
  Antisense Oligo
uuaucuugcaaaaucuugg

SEQ ID NO: 39235 - RNA, 19 nt, Artificial Sequence
  Sense Oligo
cagaguauaaaguuaucac

SEQ ID NO: 39236 - RNA, 19 nt, Artificial Sequence
  Antisense Oligo
gugauaacuuuauacucug

SEQ ID NO: 39237 - RNA, 19 nt, Artificial Sequence
  Sense Oligo
ucucccuaagaccauccug

SEQ ID NO: 39238 - RNA, 19 nt, Artificial Sequence
  Antisense Oligo
caggauggucuuagggaga

SEQ ID NO: 39239 - RNA, 19 nt, Artificial Sequence
  Sense Oligo
cucccuaagaccauccuga

SEQ ID NO: 39240 - RNA, 19 nt, Artificial Sequence
  Antisense Oligo
ucaggauggucuuagggag

SEQ ID NO: 39241 - RNA, 19 nt, Artificial Sequence
  Sense Oligo
ucccuaagaccauccugau

SEQ ID NO: 39242 - RNA, 19 nt, Artificial Sequence
  Antisense Oligo
aucaggauggucuuaggga

SEQ ID NO: 39243 - RNA, 19 nt, Artificial Sequence
  Sense Oligo
uaagaccauccugauagac

SEQ ID NO: 39244 - RNA, 19 nt, Artificial Sequence
  Antisense Oligo
gucuaucaggauggucuua

SEQ ID NO: 39245 - RNA, 19 nt, Artificial Sequence
  Sense Oligo
aagaccauccugauagaca

SEQ ID NO: 39246 - RNA, 19 nt, Artificial Sequence
  Antisense Oligo
ugucuaucaggauggucuu

SEQ ID NO: 39247 - RNA, 19 nt, Artificial Sequence
  Sense Oligo
ccauccugauagacauugc

SEQ ID NO: 39248 - RNA, 19 nt, Artificial Sequence
  Antisense Oligo
gcaaugucuaucaggaugg

SEQ ID NO: 39249 - RNA, 19 nt, Artificial Sequence
  Sense Oligo
cauccugauagacauugcu

SEQ ID NO: 39250 - RNA, 19 nt, Artificial Sequence
  Antisense Oligo
agcaaugucuaucaggaug

SEQ ID NO: 39251 - RNA, 19 nt, Artificial Sequence
  Sense Oligo
auccugauagacauugcua

SEQ ID NO: 39252 - RNA, 19 nt, Artificial Sequence
  Antisense Oligo
uagcaaugucuaucaggau

SEQ ID NO: 39253 - RNA, 19 nt, Artificial Sequence
  Sense Oligo
uccugauagacauugcuag

SEQ ID NO: 39254 - RNA, 19 nt, Artificial Sequence
  Antisense Oligo
cuagcaaugucuaucagga

SEQ ID NO: 39255 - RNA, 19 nt, Artificial Sequence
  Sense Oligo
ccugauagacauugcuagg

SEQ ID NO: 39256 - RNA, 19 nt, Artificial Sequence
  Antisense Oligo
ccuagcaaugucuaucagg

SEQ ID NO: 39257 - RNA, 19 nt, Artificial Sequence
  Sense Oligo
cugauagacauugcuaggu

SEQ ID NO: 39258 - RNA, 19 nt, Artificial Sequence
  Antisense Oligo
accuagcaaugucuaucag

SEQ ID NO: 39259 - RNA, 19 nt, Artificial Sequence
  Sense Oligo
cauugcuagguaugucugc

SEQ ID NO: 39260 - RNA, 19 nt, Artificial Sequence
  Antisense Oligo
gcagacauaccuagcaaug

SEQ ID NO: 39261 - RNA, 19 nt, Artificial Sequence
  Sense Oligo
auugcuagguaugucugca

SEQ ID NO: 39262 - RNA, 19 nt, Artificial Sequence
  Antisense Oligo
ugcagacauaccuagcaau

SEQ ID NO: 39263 - RNA, 19 nt, Artificial Sequence
  Sense Oligo
uugcuagguaugucugcau

SEQ ID NO: 39264 - RNA, 19 nt, Artificial Sequence
  Antisense Oligo
augcagacauaccuagcaa

SEQ ID NO: 39265 - RNA, 19 nt, Artificial Sequence
  Sense Oligo
ugcuagguaugucugcauc

SEQ ID NO: 39266 - RNA, 19 nt, Artificial Sequence
  Antisense Oligo
gaugcagacauaccuagca

SEQ ID NO: 39267 - RNA, 19 nt, Artificial Sequence
  Sense Oligo
gcuagguaugucugcaucc

SEQ ID NO: 39268 - RNA, 19 nt, Artificial Sequence
  Antisense Oligo
ggaugcagacauaccuagc

SEQ ID NO: 39269 - RNA, 19 nt, Artificial Sequence
  Sense Oligo
cuggugcaguuucuucugu

SEQ ID NO: 39270 - RNA, 19 nt, Artificial Sequence
  Antisense Oligo
acagaagaaacugcaccag

SEQ ID NO: 39271 - RNA, 19 nt, Artificial Sequence
  Sense Oligo
gugcaguuucuucuguugu

SEQ ID NO: 39272 - RNA, 19 nt, Artificial Sequence
  Antisense Oligo
acaacagaagaaacugcac

SEQ ID NO: 39273 - RNA, 19 nt, Artificial Sequence
  Sense Oligo
caguuucuucuguuguagg

SEQ ID NO: 39274 - RNA, 19 nt, Artificial Sequence
  Antisense Oligo
ccuacaacagaagaaacug

SEQ ID NO: 39275 - RNA, 19 nt, Artificial Sequence
  Sense Oligo
aguuucuucuguuguaggu

SEQ ID NO: 39276 - RNA, 19 nt, Artificial Sequence
  Antisense Oligo
accuacaacagaagaaacu

SEQ ID NO: 39277 - RNA, 19 nt, Artificial Sequence
  Sense Oligo
guuucuucuguuguaggua

SEQ ID NO: 39278 - RNA, 19 nt, Artificial Sequence
  Antisense Oligo
uaccuacaacagaagaaac

SEQ ID NO: 39279 - RNA, 19 nt, Artificial Sequence
  Sense Oligo
cuucuguuguagguauucc

SEQ ID NO: 39280 - RNA, 19 nt, Artificial Sequence
  Antisense Oligo
ggaauaccuacaacagaag

SEQ ID NO: 39281 - RNA, 19 nt, Artificial Sequence
  Sense Oligo
uucuguuguagguauuccu

SEQ ID NO: 39282 - RNA, 19 nt, Artificial Sequence
  Antisense Oligo
aggaauaccuacaacagaa

SEQ ID NO: 39283 - RNA, 19 nt, Artificial Sequence
  Sense Oligo
aagaagauucuguguauuc

SEQ ID NO: 39284 - RNA, 19 nt, Artificial Sequence
  Antisense Oligo
gaauacacagaaucuucuu

SEQ ID NO: 39285 - RNA, 19 nt, Artificial Sequence
  Sense Oligo
aaaauauacucaggccaug

SEQ ID NO: 39286 - RNA, 19 nt, Artificial Sequence
  Antisense Oligo
cauggccugaguauauuuu

SEQ ID NO: 39287 - RNA, 19 nt, Artificial Sequence
  Sense Oligo
aaauauacucaggccaugu

SEQ ID NO: 39288 - RNA, 19 nt, Artificial Sequence
  Antisense Oligo
acauggccugaguauauuu

SEQ ID NO: 39289 - RNA, 19 nt, Artificial Sequence
  Sense Oligo
aauauacucaggccaugug

SEQ ID NO: 39290 - RNA, 19 nt, Artificial Sequence
  Antisense Oligo
cacauggccugaguauauu

SEQ ID NO: 39291 - RNA, 19 nt, Artificial Sequence
  Sense Oligo
ucaggccaugugagguggu

SEQ ID NO: 39292 - RNA, 19 nt, Artificial Sequence
  Antisense Oligo
accaccucacauggccuga

SEQ ID NO: 39293 - RNA, 19 nt, Artificial Sequence
  Sense Oligo
ggccaugugaggugguuca

SEQ ID NO: 39294 - RNA, 19 nt, Artificial Sequence
  Antisense Oligo
ugaaccaccucacauggcc

SEQ ID NO: 39295 - RNA, 19 nt, Artificial Sequence
  Sense Oligo
gccaugugaggugguucau

SEQ ID NO: 39296 - RNA, 19 nt, Artificial Sequence
  Antisense Oligo
augaaccaccucacauggc

SEQ ID NO: 39297 - RNA, 19 nt, Artificial Sequence
  Sense Oligo
gugaggugguucaugcgua

SEQ ID NO: 39298 - RNA, 19 nt, Artificial Sequence
  Antisense Oligo
uacgcaugaaccaccucac

SEQ ID NO: 39299 - RNA, 19 nt, Artificial Sequence
  Sense Oligo
ugaggugguucaugcguau

SEQ ID NO: 39300 - RNA, 19 nt, Artificial Sequence
  Antisense Oligo
auacgcaugaaccaccuca

SEQ ID NO: 39301 - RNA, 19 nt, Artificial Sequence
  Sense Oligo
gugguucaugcguauaauc

SEQ ID NO: 39302 - RNA, 19 nt, Artificial Sequence
  Antisense Oligo
gauuauacgcaugaaccac

SEQ ID NO: 39303 - RNA, 19 nt, Artificial Sequence
  Sense Oligo
uucaugcguauaauccuaa

SEQ ID NO: 39304 - RNA, 19 nt, Artificial Sequence
  Antisense Oligo
uuaggauuauacgcaugaa

SEQ ID NO: 39305 - RNA, 19 nt, Artificial Sequence
  Sense Oligo
ucaugcguauaauccuaau

SEQ ID NO: 39306 - RNA, 19 nt, Artificial Sequence
  Antisense Oligo
auuaggauuauacgcauga

SEQ ID NO: 39307 - RNA, 19 nt, Artificial Sequence
  Sense Oligo
caugcguauaauccuaaug

SEQ ID NO: 39308 - RNA, 19 nt, Artificial Sequence
  Antisense Oligo
cauuaggauuauacgcaug

SEQ ID NO: 39309 - RNA, 19 nt, Artificial Sequence
  Sense Oligo
cuaauguuuugggaggcca

SEQ ID NO: 39310 - RNA, 19 nt, Artificial Sequence
  Antisense Oligo
uggccucccaaaacauuag

SEQ ID NO: 39311 - RNA, 19 nt, Artificial Sequence
  Sense Oligo
gaucucuugagcccaggag

SEQ ID NO: 39312 - RNA, 19 nt, Artificial Sequence
  Antisense Oligo
cuccugggcucaagagauc

SEQ ID NO: 39313 - RNA, 19 nt, Artificial Sequence
  Sense Oligo
aucucuugagcccaggagu

SEQ ID NO: 39314 - RNA, 19 nt, Artificial Sequence
  Antisense Oligo
acuccugggcucaagagau

SEQ ID NO: 39315 - RNA, 19 nt, Artificial Sequence
  Sense Oligo
ucucuugagcccaggaguu

SEQ ID NO: 39316 - RNA, 19 nt, Artificial Sequence
  Antisense Oligo
aacuccugggcucaagaga

SEQ ID NO: 39317 - RNA, 19 nt, Artificial Sequence
  Sense Oligo
cucuugagcccaggaguuu

SEQ ID NO: 39318 - RNA, 19 nt, Artificial Sequence
  Antisense Oligo
aaacuccugggcucaagag

SEQ ID NO: 39319 - RNA, 19 nt, Artificial Sequence
  Sense Oligo
ucuugagcccaggaguuug

SEQ ID NO: 39320 - RNA, 19 nt, Artificial Sequence
  Antisense Oligo
caaacuccugggcucaaga

SEQ ID NO: 39321 - RNA, 19 nt, Artificial Sequence
  Sense Oligo
cuugagcccaggaguuuga

SEQ ID NO: 39322 - RNA, 19 nt, Artificial Sequence
  Antisense Oligo
ucaaacuccugggcucaag

SEQ ID NO: 39323 - RNA, 19 nt, Artificial Sequence
  Sense Oligo
gcugugcaccuguguuccu

SEQ ID NO: 39324 - RNA, 19 nt, Artificial Sequence
  Antisense Oligo
aggaacacaggugcacagc

SEQ ID NO: 39325 - RNA, 19 nt, Artificial Sequence
  Sense Oligo
cugugcaccuguguuccua

SEQ ID NO: 39326 - RNA, 19 nt, Artificial Sequence
  Antisense Oligo
uaggaacacaggugcacag

SEQ ID NO: 39327 - RNA, 19 nt, Artificial Sequence
  Sense Oligo
guuccuagcuacucgggag

SEQ ID NO: 39328 - RNA, 19 nt, Artificial Sequence
  Antisense Oligo
cucccgaguagcuaggaac

SEQ ID NO: 39329 - RNA, 19 nt, Artificial Sequence
  Sense Oligo
uuccuagcuacucgggagg

SEQ ID NO: 39330 - RNA, 19 nt, Artificial Sequence
  Antisense Oligo
ccucccgaguagcuaggaa

SEQ ID NO: 39331 - RNA, 19 nt, Artificial Sequence
  Sense Oligo
uccuagcuacucgggaggc

SEQ ID NO: 39332 - RNA, 19 nt, Artificial Sequence
  Antisense Oligo
gccucccgaguagcuagga

SEQ ID NO: 39333 - RNA, 19 nt, Artificial Sequence
  Sense Oligo
ccuagcuacucgggaggcu

SEQ ID NO: 39334 - RNA, 19 nt, Artificial Sequence
  Antisense Oligo
agccucccgaguagcuagg

SEQ ID NO: 39335 - RNA, 19 nt, Artificial Sequence
  Sense Oligo
cuagcuacucgggaggcug

SEQ ID NO: 39336 - RNA, 19 nt, Artificial Sequence
  Antisense Oligo
cagccucccgaguagcuag

SEQ ID NO: 39337 - RNA, 19 nt, Artificial Sequence
  Sense Oligo
uagcuacucgggaggcuga

SEQ ID NO: 39338 - RNA, 19 nt, Artificial Sequence
  Antisense Oligo
ucagccucccgaguagcua

SEQ ID NO: 39339 - RNA, 19 nt, Artificial Sequence
  Sense Oligo
agcuacucgggaggcugag

SEQ ID NO: 39340 - RNA, 19 nt, Artificial Sequence
  Antisense Oligo
cucagccucccgaguagcu

SEQ ID NO: 39341 - RNA, 19 nt, Artificial Sequence
  Sense Oligo
uacucgggaggcugaggca

SEQ ID NO: 39342 - RNA, 19 nt, Artificial Sequence
  Antisense Oligo
ugccucagccucccgagua

SEQ ID NO: 39343 - RNA, 19 nt, Artificial Sequence
  Sense Oligo
aaaaugagguuacaguggg

SEQ ID NO: 39344 - RNA, 19 nt, Artificial Sequence
  Antisense Oligo
cccacuguaaccucauuuu

SEQ ID NO: 39345 - RNA, 19 nt, Artificial Sequence
  Sense Oligo
aaaugagguuacagugggc

SEQ ID NO: 39346 - RNA, 19 nt, Artificial Sequence
  Antisense Oligo
gcccacuguaaccucauuu

SEQ ID NO: 39347 - RNA, 19 nt, Artificial Sequence
  Sense Oligo
aaugagguuacagugggcu

SEQ ID NO: 39348 - RNA, 19 nt, Artificial Sequence
  Antisense Oligo
agcccacuguaaccucauu

SEQ ID NO: 39349 - RNA, 19 nt, Artificial Sequence
  Sense Oligo
acugcacuccagccugggu

SEQ ID NO: 39350 - RNA, 19 nt, Artificial Sequence
  Antisense Oligo
acccaggcuggagugcagu

SEQ ID NO: 39351 - RNA, 19 nt, Artificial Sequence
  Sense Oligo
ugcacuccagccuggguga

SEQ ID NO: 39352 - RNA, 19 nt, Artificial Sequence
  Antisense Oligo
ucacccaggcuggagugca

SEQ ID NO: 39353 - RNA, 19 nt, Artificial Sequence
  Sense Oligo
cacuccagccugggugaca

SEQ ID NO: 39354 - RNA, 19 nt, Artificial Sequence
  Antisense Oligo
ugucacccaggcuggagug

SEQ ID NO: 39355 - RNA, 19 nt, Artificial Sequence
  Sense Oligo
acuccagccugggugacag

SEQ ID NO: 39356 - RNA, 19 nt, Artificial Sequence
  Antisense Oligo
cugucacccaggcuggagu

SEQ ID NO: 39357 - RNA, 19 nt, Artificial Sequence
  Sense Oligo
cuccagccugggugacaga

SEQ ID NO: 39358 - RNA, 19 nt, Artificial Sequence
  Antisense Oligo
ucugucacccaggcuggag

SEQ ID NO: 39359 - RNA, 19 nt, Artificial Sequence
  Sense Oligo
uccagccugggugacagag

SEQ ID NO: 39360 - RNA, 19 nt, Artificial Sequence
  Antisense Oligo
cucugucacccaggcugga

SEQ ID NO: 39361 - RNA, 19 nt, Artificial Sequence
  Sense Oligo
aaaaggaagucaguccauc

SEQ ID NO: 39362 - RNA, 19 nt, Artificial Sequence
  Antisense Oligo
gauggacugacuuccuuuu

SEQ ID NO: 39363 - RNA, 19 nt, Artificial Sequence
  Sense Oligo
aaaggaagucaguccaucc

SEQ ID NO: 39364 - RNA, 19 nt, Artificial Sequence
  Antisense Oligo
ggauggacugacuuccuuu

SEQ ID NO: 39365 - RNA, 19 nt, Artificial Sequence
  Sense Oligo
aaggaagucaguccauccg

SEQ ID NO: 39366 - RNA, 19 nt, Artificial Sequence
  Antisense Oligo
cggauggacugacuuccuu

SEQ ID NO: 39367 - RNA, 19 nt, Artificial Sequence
  Sense Oligo
aggaagucaguccauccgu

SEQ ID NO: 39368 - RNA, 19 nt, Artificial Sequence
  Antisense Oligo
acggauggacugacuuccu

SEQ ID NO: 39369 - RNA, 19 nt, Artificial Sequence
  Sense Oligo
ggaagucaguccauccgua

SEQ ID NO: 39370 - RNA, 19 nt, Artificial Sequence
  Antisense Oligo
uacggauggacugacuucc

SEQ ID NO: 39371 - RNA, 19 nt, Artificial Sequence
  Sense Oligo
gaagucaguccauccguau

SEQ ID NO: 39372 - RNA, 19 nt, Artificial Sequence
  Antisense Oligo
auacggauggacugacuuc

SEQ ID NO: 39373 - RNA, 19 nt, Artificial Sequence
  Sense Oligo
aguccauccguauacugaa

SEQ ID NO: 39374 - RNA, 19 nt, Artificial Sequence
  Antisense Oligo
uucaguauacggauggacu

SEQ ID NO: 39375 - RNA, 19 nt, Artificial Sequence
  Sense Oligo
guccauccguauacugaag

SEQ ID NO: 39376 - RNA, 19 nt, Artificial Sequence
  Antisense Oligo
cuucaguauacggauggac

SEQ ID NO: 39377 - RNA, 19 nt, Artificial Sequence
  Sense Oligo
aaaugugucucccagcuga

SEQ ID NO: 39378 - RNA, 19 nt, Artificial Sequence
  Antisense Oligo
ucagcugggagacacauuu

SEQ ID NO: 39379 - RNA, 19 nt, Artificial Sequence
  Sense Oligo
gucucccagcugauuuugg

SEQ ID NO: 39380 - RNA, 19 nt, Artificial Sequence
  Antisense Oligo
ccaaaaucagcugggagac

SEQ ID NO: 39381 - RNA, 19 nt, Artificial Sequence
  Sense Oligo
ucucccagcugauuuuggc

SEQ ID NO: 39382 - RNA, 19 nt, Artificial Sequence
  Antisense Oligo
gccaaaaucagcugggaga

SEQ ID NO: 39383 - RNA, 19 nt, Artificial Sequence
  Sense Oligo
cucccagcugauuuuggcc

SEQ ID NO: 39384 - RNA, 19 nt, Artificial Sequence
  Antisense Oligo
ggccaaaaucagcugggag

SEQ ID NO: 39385 - RNA, 19 nt, Artificial Sequence
  Sense Oligo
ucccagcugauuuuggcca

SEQ ID NO: 39386 - RNA, 19 nt, Artificial Sequence
  Antisense Oligo
uggccaaaaucagcuggga

SEQ ID NO: 39387 - RNA, 19 nt, Artificial Sequence
  Sense Oligo
cccagcugauuuuggccau

SEQ ID NO: 39388 - RNA, 19 nt, Artificial Sequence
  Antisense Oligo
auggccaaaaucagcuggg

SEQ ID NO: 39389 - RNA, 19 nt, Artificial Sequence
  Sense Oligo
ccagcugauuuuggccauu

SEQ ID NO: 39390 - RNA, 19 nt, Artificial Sequence
  Antisense Oligo
aauggccaaaaucagcugg

SEQ ID NO: 39391 - RNA, 19 nt, Artificial Sequence
  Sense Oligo
cagcugauuuuggccauug

SEQ ID NO: 39392 - RNA, 19 nt, Artificial Sequence
  Antisense Oligo
caauggccaaaaucagcug

SEQ ID NO: 39393 - RNA, 19 nt, Artificial Sequence
  Sense Oligo
agcugauuuuggccauugc

SEQ ID NO: 39394 - RNA, 19 nt, Artificial Sequence
  Antisense Oligo
gcaauggccaaaaucagcu

SEQ ID NO: 39395 - RNA, 19 nt, Artificial Sequence
  Sense Oligo
gcugauuuuggccauugcg

SEQ ID NO: 39396 - RNA, 19 nt, Artificial Sequence
  Antisense Oligo
cgcaauggccaaaaucagc

SEQ ID NO: 39397 - RNA, 19 nt, Artificial Sequence
  Sense Oligo
cugauuuuggccauugcgg

SEQ ID NO: 39398 - RNA, 19 nt, Artificial Sequence
  Antisense Oligo
ccgcaauggccaaaaucag

SEQ ID NO: 39399 - RNA, 19 nt, Artificial Sequence
  Sense Oligo
ugauuuuggccauugcggg

SEQ ID NO: 39400 - RNA, 19 nt, Artificial Sequence
  Antisense Oligo
cccgcaauggccaaaauca

SEQ ID NO: 39401 - RNA, 19 nt, Artificial Sequence
  Sense Oligo
gauuuuggccauugcggga

SEQ ID NO: 39402 - RNA, 19 nt, Artificial Sequence
  Antisense Oligo
ucccgcaauggccaaaauc

SEQ ID NO: 39403 - RNA, 19 nt, Artificial Sequence
  Sense Oligo
gggaugaaucugggcaaga

SEQ ID NO: 39404 - RNA, 19 nt, Artificial Sequence
  Antisense Oligo
ucuugcccagauucauccc

SEQ ID NO: 39405 - RNA, 19 nt, Artificial Sequence
  Sense Oligo
aagggaguggaaugauugg

SEQ ID NO: 39406 - RNA, 19 nt, Artificial Sequence
  Antisense Oligo
ccaaucauuccacucccuu

SEQ ID NO: 39407 - RNA, 19 nt, Artificial Sequence
  Sense Oligo
agggaguggaaugauuggc

SEQ ID NO: 39408 - RNA, 19 nt, Artificial Sequence
  Antisense Oligo
gccaaucauuccacucccu

SEQ ID NO: 39409 - RNA, 19 nt, Artificial Sequence
  Sense Oligo
gacacuggccagccauugc

SEQ ID NO: 39410 - RNA, 19 nt, Artificial Sequence
  Antisense Oligo
gcaauggcuggccaguguc

SEQ ID NO: 39411 - RNA, 19 nt, Artificial Sequence
  Sense Oligo
acuggccagccauugccug

SEQ ID NO: 39412 - RNA, 19 nt, Artificial Sequence
  Antisense Oligo
caggcaauggcuggccagu

SEQ ID NO: 39413 - RNA, 19 nt, Artificial Sequence
  Sense Oligo
cuggccagccauugccugu

SEQ ID NO: 39414 - RNA, 19 nt, Artificial Sequence
  Antisense Oligo
acaggcaauggcuggccag

SEQ ID NO: 39415 - RNA, 19 nt, Artificial Sequence
  Sense Oligo
uggccagccauugccugug

SEQ ID NO: 39416 - RNA, 19 nt, Artificial Sequence
  Antisense Oligo
cacaggcaauggcuggcca

SEQ ID NO: 39417 - RNA, 19 nt, Artificial Sequence
  Sense Oligo
ggccagccauugccugugu

SEQ ID NO: 39418 - RNA, 19 nt, Artificial Sequence
  Antisense Oligo
acacaggcaauggcuggcc

SEQ ID NO: 39419 - RNA, 19 nt, Artificial Sequence
  Sense Oligo
ccagccauugccuguguuu

SEQ ID NO: 39420 - RNA, 19 nt, Artificial Sequence
  Antisense Oligo
aaacacaggcaauggcugg

SEQ ID NO: 39421 - RNA, 19 nt, Artificial Sequence
  Sense Oligo
cagccauugccuguguuug

SEQ ID NO: 39422 - RNA, 19 nt, Artificial Sequence
  Antisense Oligo
caaacacaggcaauggcug

SEQ ID NO: 39423 - RNA, 19 nt, Artificial Sequence
  Sense Oligo
agccauugccuguguuuga

SEQ ID NO: 39424 - RNA, 19 nt, Artificial Sequence
  Antisense Oligo
ucaaacacaggcaauggcu

SEQ ID NO: 39425 - RNA, 19 nt, Artificial Sequence
  Sense Oligo
ccuguguuugaggaagugg

SEQ ID NO: 39426 - RNA, 19 nt, Artificial Sequence
  Antisense Oligo
ccacuuccucaaacacagg

SEQ ID NO: 39427 - RNA, 19 nt, Artificial Sequence
  Sense Oligo
cuguguuugaggaaguggg

SEQ ID NO: 39428 - RNA, 19 nt, Artificial Sequence
  Antisense Oligo
cccacuuccucaaacacag

SEQ ID NO: 39429 - RNA, 19 nt, Artificial Sequence
  Sense Oligo
caagagguuaucuggaauu

SEQ ID NO: 39430 - RNA, 19 nt, Artificial Sequence
  Antisense Oligo
aauuccagauaaccucuug

SEQ ID NO: 39431 - RNA, 19 nt, Artificial Sequence
  Sense Oligo
aagagguuaucuggaauuc

SEQ ID NO: 39432 - RNA, 19 nt, Artificial Sequence
  Antisense Oligo
gaauuccagauaaccucuu

SEQ ID NO: 39433 - RNA, 19 nt, Artificial Sequence
  Sense Oligo
agagguuaucuggaauucc

SEQ ID NO: 39434 - RNA, 19 nt, Artificial Sequence
  Antisense Oligo
ggaauuccagauaaccucu

SEQ ID NO: 39435 - RNA, 19 nt, Artificial Sequence
  Sense Oligo
gagguuaucuggaauuccc

SEQ ID NO: 39436 - RNA, 19 nt, Artificial Sequence
  Antisense Oligo
gggaauuccagauaaccuc

SEQ ID NO: 39437 - RNA, 19 nt, Artificial Sequence
  Sense Oligo
agguuaucuggaauuccca

SEQ ID NO: 39438 - RNA, 19 nt, Artificial Sequence
  Antisense Oligo
ugggaauuccagauaaccu

SEQ ID NO: 39439 - RNA, 19 nt, Artificial Sequence
  Sense Oligo
gguuaucuggaauucccac

SEQ ID NO: 39440 - RNA, 19 nt, Artificial Sequence
  Antisense Oligo
gugggaauuccagauaacc

SEQ ID NO: 39441 - RNA, 19 nt, Artificial Sequence
  Sense Oligo
guuaucuggaauucccacg

SEQ ID NO: 39442 - RNA, 19 nt, Artificial Sequence
  Antisense Oligo
cgugggaauuccagauaac

SEQ ID NO: 39443 - RNA, 19 nt, Artificial Sequence
  Sense Oligo
ucuggaauucccacgguaa

SEQ ID NO: 39444 - RNA, 19 nt, Artificial Sequence
  Antisense Oligo
uuaccgugggaauuccaga

SEQ ID NO: 39445 - RNA, 19 nt, Artificial Sequence
  Sense Oligo
cuggaauucccacgguaac

SEQ ID NO: 39446 - RNA, 19 nt, Artificial Sequence
  Antisense Oligo
guuaccgugggaauuccag

SEQ ID NO: 39447 - RNA, 19 nt, Artificial Sequence
  Sense Oligo
uggaauucccacgguaacg

SEQ ID NO: 39448 - RNA, 19 nt, Artificial Sequence
  Antisense Oligo
cguuaccgugggaauucca

SEQ ID NO: 39449 - RNA, 19 nt, Artificial Sequence
  Sense Oligo
ggaauucccacgguaacgg

SEQ ID NO: 39450 - RNA, 19 nt, Artificial Sequence
  Antisense Oligo
ccguuaccgugggaauucc

SEQ ID NO: 39451 - RNA, 19 nt, Artificial Sequence
  Sense Oligo
gaauucccacgguaacggc

SEQ ID NO: 39452 - RNA, 19 nt, Artificial Sequence
  Antisense Oligo
gccguuaccgugggaauuc

SEQ ID NO: 39453 - RNA, 19 nt, Artificial Sequence
  Sense Oligo
aauucccacgguaacggca

SEQ ID NO: 39454 - RNA, 19 nt, Artificial Sequence
  Antisense Oligo
ugccguuaccgugggaauu

SEQ ID NO: 39455 - RNA, 19 nt, Artificial Sequence
  Sense Oligo
auucccacgguaacggcaa

SEQ ID NO: 39456 - RNA, 19 nt, Artificial Sequence
  Antisense Oligo
uugccguuaccgugggaau

SEQ ID NO: 39457 - RNA, 19 nt, Artificial Sequence
  Sense Oligo
uucccacgguaacggcaaa

SEQ ID NO: 39458 - RNA, 19 nt, Artificial Sequence
  Antisense Oligo
uuugccguuaccgugggaa

SEQ ID NO: 39459 - RNA, 19 nt, Artificial Sequence
  Sense Oligo
ucccacgguaacggcaaag

SEQ ID NO: 39460 - RNA, 19 nt, Artificial Sequence
  Antisense Oligo
cuuugccguuaccguggga

SEQ ID NO: 39461 - RNA, 19 nt, Artificial Sequence
  Sense Oligo
cccacgguaacggcaaaga

SEQ ID NO: 39462 - RNA, 19 nt, Artificial Sequence
  Antisense Oligo
ucuuugccguuaccguggg

SEQ ID NO: 39463 - RNA, 19 nt, Artificial Sequence
  Sense Oligo
cgguaacggcaaagaggca

SEQ ID NO: 39464 - RNA, 19 nt, Artificial Sequence
  Antisense Oligo
ugccucuuugccguuaccg

SEQ ID NO: 39465 - RNA, 19 nt, Artificial Sequence
  Sense Oligo
gguaacggcaaagaggcag

SEQ ID NO: 39466 - RNA, 19 nt, Artificial Sequence
  Antisense Oligo
cugccucuuugccguuacc

SEQ ID NO: 39467 - RNA, 19 nt, Artificial Sequence
  Sense Oligo
guaacggcaaagaggcagg

SEQ ID NO: 39468 - RNA, 19 nt, Artificial Sequence
  Antisense Oligo
ccugccucuuugccguuac

SEQ ID NO: 39469 - RNA, 19 nt, Artificial Sequence
  Sense Oligo
uaacggcaaagaggcagga

SEQ ID NO: 39470 - RNA, 19 nt, Artificial Sequence
  Antisense Oligo
uccugccucuuugccguua

SEQ ID NO: 39471 - RNA, 19 nt, Artificial Sequence
  Sense Oligo
aacggcaaagaggcaggag

SEQ ID NO: 39472 - RNA, 19 nt, Artificial Sequence
  Antisense Oligo
cuccugccucuuugccguu

SEQ ID NO: 39473 - RNA, 19 nt, Artificial Sequence
  Sense Oligo
acggcaaagaggcaggagg

SEQ ID NO: 39474 - RNA, 19 nt, Artificial Sequence
  Antisense Oligo
ccuccugccucuuugccgu

SEQ ID NO: 39475 - RNA, 19 nt, Artificial Sequence
  Sense Oligo
cggcaaagaggcaggaggu

SEQ ID NO: 39476 - RNA, 19 nt, Artificial Sequence
  Antisense Oligo
accuccugccucuuugccg

SEQ ID NO: 39477 - RNA, 19 nt, Artificial Sequence
  Sense Oligo
gggagcccacuguguuaac

SEQ ID NO: 39478 - RNA, 19 nt, Artificial Sequence
  Antisense Oligo
guuaacacagugggcuccc

SEQ ID NO: 39479 - RNA, 19 nt, Artificial Sequence
  Sense Oligo
ggagcccacuguguuaacu

SEQ ID NO: 39480 - RNA, 19 nt, Artificial Sequence
  Antisense Oligo
aguuaacacagugggcucc

SEQ ID NO: 39481 - RNA, 19 nt, Artificial Sequence
  Sense Oligo
acuguguuaacuguguucu

SEQ ID NO: 39482 - RNA, 19 nt, Artificial Sequence
  Antisense Oligo
agaacacaguuaacacagu

SEQ ID NO: 39483 - RNA, 19 nt, Artificial Sequence
  Sense Oligo
cuguguuaacuguguucuu

SEQ ID NO: 39484 - RNA, 19 nt, Artificial Sequence
  Antisense Oligo
aagaacacaguuaacacag

SEQ ID NO: 39485 - RNA, 19 nt, Artificial Sequence
  Sense Oligo
uguguuaacuguguucuuc

SEQ ID NO: 39486 - RNA, 19 nt, Artificial Sequence
  Antisense Oligo
gaagaacacaguuaacaca

SEQ ID NO: 39487 - RNA, 19 nt, Artificial Sequence
  Sense Oligo
uaacuguguucuucaucua

SEQ ID NO: 39488 - RNA, 19 nt, Artificial Sequence
  Antisense Oligo
uagaugaagaacacaguua

SEQ ID NO: 39489 - RNA, 19 nt, Artificial Sequence
  Sense Oligo
aacuguguucuucaucuau

SEQ ID NO: 39490 - RNA, 19 nt, Artificial Sequence
  Antisense Oligo
auagaugaagaacacaguu

SEQ ID NO: 39491 - RNA, 19 nt, Artificial Sequence
  Sense Oligo
acuguguucuucaucuauu

SEQ ID NO: 39492 - RNA, 19 nt, Artificial Sequence
  Antisense Oligo
aauagaugaagaacacagu

SEQ ID NO: 39493 - RNA, 19 nt, Artificial Sequence
  Sense Oligo
cuguguucuucaucuauuc

SEQ ID NO: 39494 - RNA, 19 nt, Artificial Sequence
  Antisense Oligo
gaauagaugaagaacacag

SEQ ID NO: 39495 - RNA, 19 nt, Artificial Sequence
  Sense Oligo
uguguucuucaucuauuca

SEQ ID NO: 39496 - RNA, 19 nt, Artificial Sequence
  Antisense Oligo
ugaauagaugaagaacaca

SEQ ID NO: 39497 - RNA, 19 nt, Artificial Sequence
  Sense Oligo
guguucuucaucuauucag

SEQ ID NO: 39498 - RNA, 19 nt, Artificial Sequence
  Antisense Oligo
cugaauagaugaagaacac

SEQ ID NO: 39499 - RNA, 19 nt, Artificial Sequence
  Sense Oligo
uguucuucaucuauucagg

SEQ ID NO: 39500 - RNA, 19 nt, Artificial Sequence
  Antisense Oligo
ccugaauagaugaagaaca

SEQ ID NO: 39501 - RNA, 19 nt, Artificial Sequence
  Sense Oligo
acuagcaaaugucacagag

SEQ ID NO: 39502 - RNA, 19 nt, Artificial Sequence
  Antisense Oligo
cucugugacauuugcuagu

SEQ ID NO: 39503 - RNA, 19 nt, Artificial Sequence
  Sense Oligo
cuagcaaaugucacagagg

SEQ ID NO: 39504 - RNA, 19 nt, Artificial Sequence
  Antisense Oligo
ccucugugacauuugcuag

SEQ ID NO: 39505 - RNA, 19 nt, Artificial Sequence
  Sense Oligo
uagcaaaugucacagagga

SEQ ID NO: 39506 - RNA, 19 nt, Artificial Sequence
  Antisense Oligo
uccucugugacauuugcua

SEQ ID NO: 39507 - RNA, 19 nt, Artificial Sequence
  Sense Oligo
agcaaaugucacagaggau

SEQ ID NO: 39508 - RNA, 19 nt, Artificial Sequence
  Antisense Oligo
auccucugugacauuugcu

SEQ ID NO: 39509 - RNA, 19 nt, Artificial Sequence
  Sense Oligo
gcaaaugucacagaggaug

SEQ ID NO: 39510 - RNA, 19 nt, Artificial Sequence
  Antisense Oligo
cauccucugugacauuugc

SEQ ID NO: 39511 - RNA, 19 nt, Artificial Sequence
  Sense Oligo
ucacagaggaugccaagag

SEQ ID NO: 39512 - RNA, 19 nt, Artificial Sequence
  Antisense Oligo
cucuuggcauccucuguga

SEQ ID NO: 39513 - RNA, 19 nt, Artificial Sequence
  Sense Oligo
cacagaggaugccaagagg

SEQ ID NO: 39514 - RNA, 19 nt, Artificial Sequence
  Antisense Oligo
ccucuuggcauccucugug

SEQ ID NO: 39515 - RNA, 19 nt, Artificial Sequence
  Sense Oligo
cagaggaugccaagaggcu

SEQ ID NO: 39516 - RNA, 19 nt, Artificial Sequence
  Antisense Oligo
agccucuuggcauccucug

SEQ ID NO: 39517 - RNA, 19 nt, Artificial Sequence
  Sense Oligo
agaggaugccaagaggcug

SEQ ID NO: 39518 - RNA, 19 nt, Artificial Sequence
  Antisense Oligo
cagccucuuggcauccucu

SEQ ID NO: 39519 - RNA, 19 nt, Artificial Sequence
  Sense Oligo
ugccaagaggcugauagcu

SEQ ID NO: 39520 - RNA, 19 nt, Artificial Sequence
  Antisense Oligo
agcuaucagccucuuggca

SEQ ID NO: 39521 - RNA, 19 nt, Artificial Sequence
  Sense Oligo
gccaagaggcugauagcug

SEQ ID NO: 39522 - RNA, 19 nt, Artificial Sequence
  Antisense Oligo
cagcuaucagccucuuggc

SEQ ID NO: 39523 - RNA, 19 nt, Artificial Sequence
  Sense Oligo
ccaagaggcugauagcugu

SEQ ID NO: 39524 - RNA, 19 nt, Artificial Sequence
  Antisense Oligo
acagcuaucagccucuugg

SEQ ID NO: 39525 - RNA, 19 nt, Artificial Sequence
  Sense Oligo
caagaggcugauagcuguu

SEQ ID NO: 39526 - RNA, 19 nt, Artificial Sequence
  Antisense Oligo
aacagcuaucagccucuug

SEQ ID NO: 39527 - RNA, 19 nt, Artificial Sequence
  Sense Oligo
aagaggcugauagcuguug

SEQ ID NO: 39528 - RNA, 19 nt, Artificial Sequence
  Antisense Oligo
caacagcuaucagccucuu

SEQ ID NO: 39529 - RNA, 19 nt, Artificial Sequence
  Sense Oligo
gaggcugauagcuguugcc

SEQ ID NO: 39530 - RNA, 19 nt, Artificial Sequence
  Antisense Oligo
ggcaacagcuaucagccuc

SEQ ID NO: 39531 - RNA, 19 nt, Artificial Sequence
  Sense Oligo
aggcugauagcuguugccg

SEQ ID NO: 39532 - RNA, 19 nt, Artificial Sequence
  Antisense Oligo
cggcaacagcuaucagccu

SEQ ID NO: 39533 - RNA, 19 nt, Artificial Sequence
  Sense Oligo
ggcugauagcuguugccga

SEQ ID NO: 39534 - RNA, 19 nt, Artificial Sequence
  Antisense Oligo
ucggcaacagcuaucagcc

SEQ ID NO: 39535 - RNA, 19 nt, Artificial Sequence
  Sense Oligo
gcugauagcuguugccgac

SEQ ID NO: 39536 - RNA, 19 nt, Artificial Sequence
  Antisense Oligo
gucggcaacagcuaucagc

SEQ ID NO: 39537 - RNA, 19 nt, Artificial Sequence
  Sense Oligo
cugauagcuguugccgacu

SEQ ID NO: 39538 - RNA, 19 nt, Artificial Sequence
  Antisense Oligo
agucggcaacagcuaucag

SEQ ID NO: 39539 - RNA, 19 nt, Artificial Sequence
  Sense Oligo
ugauagcuguugccgacuc

SEQ ID NO: 39540 - RNA, 19 nt, Artificial Sequence
  Antisense Oligo
gagucggcaacagcuauca

SEQ ID NO: 39541 - RNA, 19 nt, Artificial Sequence
  Sense Oligo
gauagcuguugccgacucu

SEQ ID NO: 39542 - RNA, 19 nt, Artificial Sequence
  Antisense Oligo
agagucggcaacagcuauc

SEQ ID NO: 39543 - RNA, 19 nt, Artificial Sequence
  Sense Oligo
gcuguugccgacucugugu

SEQ ID NO: 39544 - RNA, 19 nt, Artificial Sequence
  Antisense Oligo
acacagagucggcaacagc

SEQ ID NO: 39545 - RNA, 19 nt, Artificial Sequence
  Sense Oligo
cuguugccgacucuguguu

SEQ ID NO: 39546 - RNA, 19 nt, Artificial Sequence
  Antisense Oligo
aacacagagucggcaacag

SEQ ID NO: 39547 - RNA, 19 nt, Artificial Sequence
  Sense Oligo
uguugccgacucuguguug

SEQ ID NO: 39548 - RNA, 19 nt, Artificial Sequence
  Antisense Oligo
caacacagagucggcaaca

SEQ ID NO: 39549 - RNA, 19 nt, Artificial Sequence
  Sense Oligo
gccgacucuguguugacga

SEQ ID NO: 39550 - RNA, 19 nt, Artificial Sequence
  Antisense Oligo
ucgucaacacagagucggc

SEQ ID NO: 39551 - RNA, 19 nt, Artificial Sequence
  Sense Oligo
ccgacucuguguugacgaa

SEQ ID NO: 39552 - RNA, 19 nt, Artificial Sequence
  Antisense Oligo
uucgucaacacagagucgg

SEQ ID NO: 39553 - RNA, 19 nt, Artificial Sequence
  Sense Oligo
uuguuggugaccuccuaag

SEQ ID NO: 39554 - RNA, 19 nt, Artificial Sequence
  Antisense Oligo
cuuaggaggucaccaacaa

SEQ ID NO: 39555 - RNA, 19 nt, Artificial Sequence
  Sense Oligo
uguuggugaccuccuaagu

SEQ ID NO: 39556 - RNA, 19 nt, Artificial Sequence
  Antisense Oligo
acuuaggaggucaccaaca

SEQ ID NO: 39557 - RNA, 19 nt, Artificial Sequence
  Sense Oligo
guuggugaccuccuaagug

SEQ ID NO: 39558 - RNA, 19 nt, Artificial Sequence
  Antisense Oligo
cacuuaggaggucaccaac

SEQ ID NO: 39559 - RNA, 19 nt, Artificial Sequence
  Sense Oligo
uuggugaccuccuaagugg

SEQ ID NO: 39560 - RNA, 19 nt, Artificial Sequence
  Antisense Oligo
ccacuuaggaggucaccaa

SEQ ID NO: 39561 - RNA, 19 nt, Artificial Sequence
  Sense Oligo
ugaccuccuaaguggcacg

SEQ ID NO: 39562 - RNA, 19 nt, Artificial Sequence
  Antisense Oligo
cgugccacuuaggagguca

SEQ ID NO: 39563 - RNA, 19 nt, Artificial Sequence
  Sense Oligo
gaccuccuaaguggcacga

SEQ ID NO: 39564 - RNA, 19 nt, Artificial Sequence
  Antisense Oligo
ucgugccacuuaggagguc

SEQ ID NO: 39565 - RNA, 19 nt, Artificial Sequence
  Sense Oligo
accuccuaaguggcacgau

SEQ ID NO: 39566 - RNA, 19 nt, Artificial Sequence
  Antisense Oligo
aucgugccacuuaggaggu

SEQ ID NO: 39567 - RNA, 19 nt, Artificial Sequence
  Sense Oligo
ccuccuaaguggcacgauu

SEQ ID NO: 39568 - RNA, 19 nt, Artificial Sequence
  Antisense Oligo
aaucgugccacuuaggagg

SEQ ID NO: 39569 - RNA, 19 nt, Artificial Sequence
  Sense Oligo
cuccuaaguggcacgauuu

SEQ ID NO: 39570 - RNA, 19 nt, Artificial Sequence
  Antisense Oligo
aaaucgugccacuuaggag

SEQ ID NO: 39571 - RNA, 19 nt, Artificial Sequence
  Sense Oligo
uccuaaguggcacgauuuu

SEQ ID NO: 39572 - RNA, 19 nt, Artificial Sequence
  Antisense Oligo
aaaaucgugccacuuagga

SEQ ID NO: 39573 - RNA, 19 nt, Artificial Sequence
  Sense Oligo
ccuaaguggcacgauuuua

SEQ ID NO: 39574 - RNA, 19 nt, Artificial Sequence
  Antisense Oligo
uaaaaucgugccacuuagg

SEQ ID NO: 39575 - RNA, 19 nt, Artificial Sequence
  Sense Oligo
uaaguggcacgauuuuagu

SEQ ID NO: 39576 - RNA, 19 nt, Artificial Sequence
  Antisense Oligo
acuaaaaucgugccacuua

SEQ ID NO: 39577 - RNA, 19 nt, Artificial Sequence
  Sense Oligo
aaguggcacgauuuuaguu

SEQ ID NO: 39578 - RNA, 19 nt, Artificial Sequence
  Antisense Oligo
aacuaaaaucgugccacuu

SEQ ID NO: 39579 - RNA, 19 nt, Artificial Sequence
  Sense Oligo
aguggcacgauuuuaguug

SEQ ID NO: 39580 - RNA, 19 nt, Artificial Sequence
  Antisense Oligo
caacuaaaaucgugccacu

SEQ ID NO: 39581 - RNA, 19 nt, Artificial Sequence
  Sense Oligo
guggcacgauuuuaguugg

SEQ ID NO: 39582 - RNA, 19 nt, Artificial Sequence
  Antisense Oligo
ccaacuaaaaucgugccac

SEQ ID NO: 39583 - RNA, 19 nt, Artificial Sequence
  Sense Oligo
uggcacgauuuuaguugga

SEQ ID NO: 39584 - RNA, 19 nt, Artificial Sequence
  Antisense Oligo
uccaacuaaaaucgugcca

SEQ ID NO: 39585 - RNA, 19 nt, Artificial Sequence
  Sense Oligo
ggcacgauuuuaguuggac

SEQ ID NO: 39586 - RNA, 19 nt, Artificial Sequence
  Antisense Oligo
guccaacuaaaaucgugcc

SEQ ID NO: 39587 - RNA, 19 nt, Artificial Sequence
  Sense Oligo
gcacgauuuuaguuggaca

SEQ ID NO: 39588 - RNA, 19 nt, Artificial Sequence
  Antisense Oligo
uguccaacuaaaaucgugc

SEQ ID NO: 39589 - RNA, 19 nt, Artificial Sequence
  Sense Oligo
acuggagcugauuauaaag

SEQ ID NO: 39590 - RNA, 19 nt, Artificial Sequence
  Antisense Oligo
cuuuauaaucagcuccagu

SEQ ID NO: 39591 - RNA, 19 nt, Artificial Sequence
  Sense Oligo
cuggagcugauuauaaagc

SEQ ID NO: 39592 - RNA, 19 nt, Artificial Sequence
  Antisense Oligo
gcuuuauaaucagcuccag

SEQ ID NO: 39593 - RNA, 19 nt, Artificial Sequence
  Sense Oligo
uggagcugauuauaaagca

SEQ ID NO: 39594 - RNA, 19 nt, Artificial Sequence
  Antisense Oligo
ugcuuuauaaucagcucca

SEQ ID NO: 39595 - RNA, 19 nt, Artificial Sequence
  Sense Oligo
ggagcugauuauaaagcac

SEQ ID NO: 39596 - RNA, 19 nt, Artificial Sequence
  Antisense Oligo
gugcuuuauaaucagcucc

SEQ ID NO: 39597 - RNA, 19 nt, Artificial Sequence
  Sense Oligo
guuucuugacaucuggcaa

SEQ ID NO: 39598 - RNA, 19 nt, Artificial Sequence
  Antisense Oligo
uugccagaugucaagaaac

SEQ ID NO: 39599 - RNA, 19 nt, Artificial Sequence
  Sense Oligo
uuucuugacaucuggcaac

SEQ ID NO: 39600 - RNA, 19 nt, Artificial Sequence
  Antisense Oligo
guugccagaugucaagaaa

SEQ ID NO: 39601 - RNA, 19 nt, Artificial Sequence
  Sense Oligo
uucuugacaucuggcaacu

SEQ ID NO: 39602 - RNA, 19 nt, Artificial Sequence
  Antisense Oligo
aguugccagaugucaagaa

SEQ ID NO: 39603 - RNA, 19 nt, Artificial Sequence
  Sense Oligo
ucuugacaucuggcaacug

SEQ ID NO: 39604 - RNA, 19 nt, Artificial Sequence
  Antisense Oligo
caguugccagaugucaaga

SEQ ID NO: 39605 - RNA, 19 nt, Artificial Sequence
  Sense Oligo
cuugacaucuggcaacuga

SEQ ID NO: 39606 - RNA, 19 nt, Artificial Sequence
  Antisense Oligo
ucaguugccagaugucaag

SEQ ID NO: 39607 - RNA, 19 nt, Artificial Sequence
  Sense Oligo
uugacaucuggcaacugag

SEQ ID NO: 39608 - RNA, 19 nt, Artificial Sequence
  Antisense Oligo
cucaguugccagaugucaa

SEQ ID NO: 39609 - RNA, 19 nt, Artificial Sequence
  Sense Oligo
caucuggcaacugaguaag

SEQ ID NO: 39610 - RNA, 19 nt, Artificial Sequence
  Antisense Oligo
cuuacucaguugccagaug

SEQ ID NO: 39611 - RNA, 19 nt, Artificial Sequence
  Sense Oligo
aucuggcaacugaguaagc

SEQ ID NO: 39612 - RNA, 19 nt, Artificial Sequence
  Antisense Oligo
gcuuacucaguugccagau

SEQ ID NO: 39613 - RNA, 19 nt, Artificial Sequence
  Sense Oligo
ucuggcaacugaguaagca

SEQ ID NO: 39614 - RNA, 19 nt, Artificial Sequence
  Antisense Oligo
ugcuuacucaguugccaga

SEQ ID NO: 39615 - RNA, 19 nt, Artificial Sequence
  Sense Oligo
cuggcaacugaguaagcau

SEQ ID NO: 39616 - RNA, 19 nt, Artificial Sequence
  Antisense Oligo
augcuuacucaguugccag

SEQ ID NO: 39617 - RNA, 19 nt, Artificial Sequence
  Sense Oligo
uggcaacugaguaagcauc

SEQ ID NO: 39618 - RNA, 19 nt, Artificial Sequence
  Antisense Oligo
gaugcuuacucaguugcca

SEQ ID NO: 39619 - RNA, 19 nt, Artificial Sequence
  Sense Oligo
ggcaacugaguaagcaucg

SEQ ID NO: 39620 - RNA, 19 nt, Artificial Sequence
  Antisense Oligo
cgaugcuuacucaguugcc

SEQ ID NO: 39621 - RNA, 19 nt, Artificial Sequence
  Sense Oligo
gcaacugaguaagcaucga

SEQ ID NO: 39622 - RNA, 19 nt, Artificial Sequence
  Antisense Oligo
ucgaugcuuacucaguugc

SEQ ID NO: 39623 - RNA, 19 nt, Artificial Sequence
  Sense Oligo
caacugaguaagcaucgag

SEQ ID NO: 39624 - RNA, 19 nt, Artificial Sequence
  Antisense Oligo
cucgaugcuuacucaguug

SEQ ID NO: 39625 - RNA, 19 nt, Artificial Sequence
  Sense Oligo
aacugaguaagcaucgagu

SEQ ID NO: 39626 - RNA, 19 nt, Artificial Sequence
  Antisense Oligo
acucgaugcuuacucaguu

SEQ ID NO: 39627 - RNA, 19 nt, Artificial Sequence
  Sense Oligo
acugaguaagcaucgaguc

SEQ ID NO: 39628 - RNA, 19 nt, Artificial Sequence
  Antisense Oligo
gacucgaugcuuacucagu

SEQ ID NO: 39629 - RNA, 19 nt, Artificial Sequence
  Sense Oligo
cugaguaagcaucgagucg

SEQ ID NO: 39630 - RNA, 19 nt, Artificial Sequence
  Antisense Oligo
cgacucgaugcuuacucag

SEQ ID NO: 39631 - RNA, 19 nt, Artificial Sequence
  Sense Oligo
ugaguaagcaucgagucga

SEQ ID NO: 39632 - RNA, 19 nt, Artificial Sequence
  Antisense Oligo
ucgacucgaugcuuacuca

SEQ ID NO: 39633 - RNA, 19 nt, Artificial Sequence
  Sense Oligo
ggcuccugaggcauuaagu

SEQ ID NO: 39634 - RNA, 19 nt, Artificial Sequence
  Antisense Oligo
acuuaaugccucaggagcc

SEQ ID NO: 39635 - RNA, 19 nt, Artificial Sequence
  Sense Oligo
gcuccugaggcauuaagua

SEQ ID NO: 39636 - RNA, 19 nt, Artificial Sequence
  Antisense Oligo
uacuuaaugccucaggagc

SEQ ID NO: 39637 - RNA, 19 nt, Artificial Sequence
  Sense Oligo
uccugaggcauuaaguagc

SEQ ID NO: 39638 - RNA, 19 nt, Artificial Sequence
  Antisense Oligo
gcuacuuaaugccucagga

SEQ ID NO: 39639 - RNA, 19 nt, Artificial Sequence
  Sense Oligo
ccugaggcauuaaguagcu

SEQ ID NO: 39640 - RNA, 19 nt, Artificial Sequence
  Antisense Oligo
agcuacuuaaugccucagg

SEQ ID NO: 39641 - RNA, 19 nt, Artificial Sequence
  Sense Oligo
cugaggcauuaaguagcug

SEQ ID NO: 39642 - RNA, 19 nt, Artificial Sequence
  Antisense Oligo
cagcuacuuaaugccucag

SEQ ID NO: 39643 - RNA, 19 nt, Artificial Sequence
  Sense Oligo
ugaggcauuaaguagcugg

SEQ ID NO: 39644 - RNA, 19 nt, Artificial Sequence
  Antisense Oligo
ccagcuacuuaaugccuca

SEQ ID NO: 39645 - RNA, 19 nt, Artificial Sequence
  Sense Oligo
gaggcauuaaguagcugga

SEQ ID NO: 39646 - RNA, 19 nt, Artificial Sequence
  Antisense Oligo
uccagcuacuuaaugccuc

SEQ ID NO: 39647 - RNA, 19 nt, Artificial Sequence
  Sense Oligo
aggcauuaaguagcuggaa

SEQ ID NO: 39648 - RNA, 19 nt, Artificial Sequence
  Antisense Oligo
uuccagcuacuuaaugccu

SEQ ID NO: 39649 - RNA, 19 nt, Artificial Sequence
  Sense Oligo
ggcauuaaguagcuggaag

SEQ ID NO: 39650 - RNA, 19 nt, Artificial Sequence
  Antisense Oligo
cuuccagcuacuuaaugcc

SEQ ID NO: 39651 - RNA, 19 nt, Artificial Sequence
  Sense Oligo
gcauuaaguagcuggaaga

SEQ ID NO: 39652 - RNA, 19 nt, Artificial Sequence
  Antisense Oligo
ucuuccagcuacuuaaugc

SEQ ID NO: 39653 - RNA, 19 nt, Artificial Sequence
  Sense Oligo
cauuaaguagcuggaagac

SEQ ID NO: 39654 - RNA, 19 nt, Artificial Sequence
  Antisense Oligo
gucuuccagcuacuuaaug

SEQ ID NO: 39655 - RNA, 19 nt, Artificial Sequence
  Sense Oligo
auuaaguagcuggaagaca

SEQ ID NO: 39656 - RNA, 19 nt, Artificial Sequence
  Antisense Oligo
ugucuuccagcuacuuaau

SEQ ID NO: 39657 - RNA, 19 nt, Artificial Sequence
  Sense Oligo
uuaaguagcuggaagacac

SEQ ID NO: 39658 - RNA, 19 nt, Artificial Sequence
  Antisense Oligo
gugucuuccagcuacuuaa

SEQ ID NO: 39659 - RNA, 19 nt, Artificial Sequence
  Sense Oligo
guagcuggaagacacguuu

SEQ ID NO: 39660 - RNA, 19 nt, Artificial Sequence
  Antisense Oligo
aaacgugucuuccagcuac

SEQ ID NO: 39661 - RNA, 19 nt, Artificial Sequence
  Sense Oligo
uagcuggaagacacguuug

SEQ ID NO: 39662 - RNA, 19 nt, Artificial Sequence
  Antisense Oligo
caaacgugucuuccagcua

SEQ ID NO: 39663 - RNA, 19 nt, Artificial Sequence
  Sense Oligo
agcuggaagacacguuugu

SEQ ID NO: 39664 - RNA, 19 nt, Artificial Sequence
  Antisense Oligo
acaaacgugucuuccagcu

SEQ ID NO: 39665 - RNA, 19 nt, Artificial Sequence
  Sense Oligo
gcuggaagacacguuugug

SEQ ID NO: 39666 - RNA, 19 nt, Artificial Sequence
  Antisense Oligo
cacaaacgugucuuccagc

SEQ ID NO: 39667 - RNA, 19 nt, Artificial Sequence
  Sense Oligo
acguuuguguuugcgugug

SEQ ID NO: 39668 - RNA, 19 nt, Artificial Sequence
  Antisense Oligo
cacacgcaaacacaaacgu

SEQ ID NO: 39669 - RNA, 19 nt, Artificial Sequence
  Sense Oligo
gauaaucaucuuagccuug

SEQ ID NO: 39670 - RNA, 19 nt, Artificial Sequence
  Antisense Oligo
caaggcuaagaugauuauc

SEQ ID NO: 39671 - RNA, 19 nt, Artificial Sequence
  Sense Oligo
auaaucaucuuagccuuga

SEQ ID NO: 39672 - RNA, 19 nt, Artificial Sequence
  Antisense Oligo
ucaaggcuaagaugauuau

SEQ ID NO: 39673 - RNA, 19 nt, Artificial Sequence
  Sense Oligo
ucaucuuagccuugauaau

SEQ ID NO: 39674 - RNA, 19 nt, Artificial Sequence
  Antisense Oligo
auuaucaaggcuaagauga

SEQ ID NO: 39675 - RNA, 19 nt, Artificial Sequence
  Sense Oligo
caucuuagccuugauaaug

SEQ ID NO: 39676 - RNA, 19 nt, Artificial Sequence
  Antisense Oligo
cauuaucaaggcuaagaug

SEQ ID NO: 39677 - RNA, 19 nt, Artificial Sequence
  Sense Oligo
aucuuagccuugauaauga

SEQ ID NO: 39678 - RNA, 19 nt, Artificial Sequence
  Antisense Oligo
ucauuaucaaggcuaagau

SEQ ID NO: 39679 - RNA, 19 nt, Artificial Sequence
  Sense Oligo
ucuuagccuugauaaugag

SEQ ID NO: 39680 - RNA, 19 nt, Artificial Sequence
  Antisense Oligo
cucauuaucaaggcuaaga

SEQ ID NO: 39681 - RNA, 19 nt, Artificial Sequence
  Sense Oligo
cuuagccuugauaaugagu

SEQ ID NO: 39682 - RNA, 19 nt, Artificial Sequence
  Antisense Oligo
acucauuaucaaggcuaag

SEQ ID NO: 39683 - RNA, 19 nt, Artificial Sequence
  Sense Oligo
uuagccuugauaaugagua

SEQ ID NO: 39684 - RNA, 19 nt, Artificial Sequence
  Antisense Oligo
uacucauuaucaaggcuaa

SEQ ID NO: 39685 - RNA, 19 nt, Artificial Sequence
  Sense Oligo
uagccuugauaaugaguau

SEQ ID NO: 39686 - RNA, 19 nt, Artificial Sequence
  Antisense Oligo
auacucauuaucaaggcua

SEQ ID NO: 39687 - RNA, 19 nt, Artificial Sequence
  Sense Oligo
aaugaguaucucuucuugc

SEQ ID NO: 39688 - RNA, 19 nt, Artificial Sequence
  Antisense Oligo
gcaagaagagauacucauu

SEQ ID NO: 39689 - RNA, 19 nt, Artificial Sequence
  Sense Oligo
augaguaucucuucuugcu

SEQ ID NO: 39690 - RNA, 19 nt, Artificial Sequence
  Antisense Oligo
agcaagaagagauacucau

SEQ ID NO: 39691 - RNA, 19 nt, Artificial Sequence
  Sense Oligo
ugaguaucucuucuugcuc

SEQ ID NO: 39692 - RNA, 19 nt, Artificial Sequence
  Antisense Oligo
gagcaagaagagauacuca

SEQ ID NO: 39693 - RNA, 19 nt, Artificial Sequence
  Sense Oligo
gaguaucucuucuugcuca

SEQ ID NO: 39694 - RNA, 19 nt, Artificial Sequence
  Antisense Oligo
ugagcaagaagagauacuc

SEQ ID NO: 39695 - RNA, 19 nt, Artificial Sequence
  Sense Oligo
aguaucucuucuugcucau

SEQ ID NO: 39696 - RNA, 19 nt, Artificial Sequence
  Antisense Oligo
augagcaagaagagauacu

SEQ ID NO: 39697 - RNA, 19 nt, Artificial Sequence
  Sense Oligo
guaucucuucuugcucaua

SEQ ID NO: 39698 - RNA, 19 nt, Artificial Sequence
  Antisense Oligo
uaugagcaagaagagauac

SEQ ID NO: 39699 - RNA, 19 nt, Artificial Sequence
  Sense Oligo
uaucucuucuugcucauaa

SEQ ID NO: 39700 - RNA, 19 nt, Artificial Sequence
  Antisense Oligo
uuaugagcaagaagagaua

SEQ ID NO: 39701 - RNA, 19 nt, Artificial Sequence
  Sense Oligo
aucucuucuugcucauaag

SEQ ID NO: 39702 - RNA, 19 nt, Artificial Sequence
  Antisense Oligo
cuuaugagcaagaagagau

SEQ ID NO: 39703 - RNA, 19 nt, Artificial Sequence
  Sense Oligo
ucucuucuugcucauaagu

SEQ ID NO: 39704 - RNA, 19 nt, Artificial Sequence
  Antisense Oligo
acuuaugagcaagaagaga

SEQ ID NO: 39705 - RNA, 19 nt, Artificial Sequence
  Sense Oligo
cucuucuugcucauaaguu

SEQ ID NO: 39706 - RNA, 19 nt, Artificial Sequence
  Antisense Oligo
aacuuaugagcaagaagag

SEQ ID NO: 39707 - RNA, 19 nt, Artificial Sequence
  Sense Oligo
ucuucuugcucauaaguug

SEQ ID NO: 39708 - RNA, 19 nt, Artificial Sequence
  Antisense Oligo
caacuuaugagcaagaaga

SEQ ID NO: 39709 - RNA, 19 nt, Artificial Sequence
  Sense Oligo
cuucuugcucauaaguuga

SEQ ID NO: 39710 - RNA, 19 nt, Artificial Sequence
  Antisense Oligo
ucaacuuaugagcaagaag

SEQ ID NO: 39711 - RNA, 19 nt, Artificial Sequence
  Sense Oligo
uucuugcucauaaguugau

SEQ ID NO: 39712 - RNA, 19 nt, Artificial Sequence
  Antisense Oligo
aucaacuuaugagcaagaa

SEQ ID NO: 39713 - RNA, 19 nt, Artificial Sequence
  Sense Oligo
ucuugcucauaaguugaua

SEQ ID NO: 39714 - RNA, 19 nt, Artificial Sequence
  Antisense Oligo
uaucaacuuaugagcaaga

SEQ ID NO: 39715 - RNA, 19 nt, Artificial Sequence
  Sense Oligo
cuugcucauaaguugauag

SEQ ID NO: 39716 - RNA, 19 nt, Artificial Sequence
  Antisense Oligo
cuaucaacuuaugagcaag

SEQ ID NO: 39717 - RNA, 19 nt, Artificial Sequence
  Sense Oligo
uugcucauaaguugauagg

SEQ ID NO: 39718 - RNA, 19 nt, Artificial Sequence
  Antisense Oligo
ccuaucaacuuaugagcaa

SEQ ID NO: 39719 - RNA, 19 nt, Artificial Sequence
  Sense Oligo
gggugguuuauaauucuca

SEQ ID NO: 39720 - RNA, 19 nt, Artificial Sequence
  Antisense Oligo
ugagaauuauaaaccaccc

SEQ ID NO: 39721 - RNA, 19 nt, Artificial Sequence
  Sense Oligo
ggugguuuauaauucucaa

SEQ ID NO: 39722 - RNA, 19 nt, Artificial Sequence
  Antisense Oligo
uugagaauuauaaaccacc

SEQ ID NO: 39723 - RNA, 19 nt, Artificial Sequence
  Sense Oligo
gugguuuauaauucucaag

SEQ ID NO: 39724 - RNA, 19 nt, Artificial Sequence
  Antisense Oligo
cuugagaauuauaaaccac

SEQ ID NO: 39725 - RNA, 19 nt, Artificial Sequence
  Sense Oligo
aagugauaaaauaauggcc

SEQ ID NO: 39726 - RNA, 19 nt, Artificial Sequence
  Antisense Oligo
ggccauuauuuuaucacuu

SEQ ID NO: 39727 - RNA, 19 nt, Artificial Sequence
  Sense Oligo
agugauaaaauaauggcca

SEQ ID NO: 39728 - RNA, 19 nt, Artificial Sequence
  Antisense Oligo
uggccauuauuuuaucacu

SEQ ID NO: 39729 - RNA, 19 nt, Artificial Sequence
  Sense Oligo
gugauaaaauaauggccau

SEQ ID NO: 39730 - RNA, 19 nt, Artificial Sequence
  Antisense Oligo
auggccauuauuuuaucac

SEQ ID NO: 39731 - RNA, 19 nt, Artificial Sequence
  Sense Oligo
gauaaaauaauggccaucu

SEQ ID NO: 39732 - RNA, 19 nt, Artificial Sequence
  Antisense Oligo
agauggccauuauuuuauc

SEQ ID NO: 39733 - RNA, 19 nt, Artificial Sequence
  Sense Oligo
aaauaauggccaucucgaa

SEQ ID NO: 39734 - RNA, 19 nt, Artificial Sequence
  Antisense Oligo
uucgagauggccauuauuu

SEQ ID NO: 39735 - RNA, 19 nt, Artificial Sequence
  Sense Oligo
aaccauccuaguccuucuc

SEQ ID NO: 39736 - RNA, 19 nt, Artificial Sequence
  Antisense Oligo
gagaaggacuaggaugguu

SEQ ID NO: 39737 - RNA, 19 nt, Artificial Sequence
  Sense Oligo
accauccuaguccuucucc

SEQ ID NO: 39738 - RNA, 19 nt, Artificial Sequence
  Antisense Oligo
ggagaaggacuaggauggu

SEQ ID NO: 39739 - RNA, 19 nt, Artificial Sequence
  Sense Oligo
ccauccuaguccuucuccu

SEQ ID NO: 39740 - RNA, 19 nt, Artificial Sequence
  Antisense Oligo
aggagaaggacuaggaugg

SEQ ID NO: 39741 - RNA, 19 nt, Artificial Sequence
  Sense Oligo
cauccuaguccuucuccug

SEQ ID NO: 39742 - RNA, 19 nt, Artificial Sequence
  Antisense Oligo
caggagaaggacuaggaug

SEQ ID NO: 39743 - RNA, 19 nt, Artificial Sequence
  Sense Oligo
cuaguccuucuccuggugg

SEQ ID NO: 39744 - RNA, 19 nt, Artificial Sequence
  Antisense Oligo
ccaccaggagaaggacuag

SEQ ID NO: 39745 - RNA, 19 nt, Artificial Sequence
  Sense Oligo
uaguccuucuccugguggc

SEQ ID NO: 39746 - RNA, 19 nt, Artificial Sequence
  Antisense Oligo
gccaccaggagaaggacua

SEQ ID NO: 39747 - RNA, 19 nt, Artificial Sequence
  Sense Oligo
aguccuucuccugguggcg

SEQ ID NO: 39748 - RNA, 19 nt, Artificial Sequence
  Antisense Oligo
cgccaccaggagaaggacu

SEQ ID NO: 39749 - RNA, 19 nt, Artificial Sequence
  Sense Oligo
aauggcauuuguugcugua

SEQ ID NO: 39750 - RNA, 19 nt, Artificial Sequence
  Antisense Oligo
uacagcaacaaaugccauu

SEQ ID NO: 39751 - RNA, 19 nt, Artificial Sequence
  Sense Oligo
auggcauuuguugcuguau

SEQ ID NO: 39752 - RNA, 19 nt, Artificial Sequence
  Antisense Oligo
auacagcaacaaaugccau

SEQ ID NO: 39753 - RNA, 19 nt, Artificial Sequence
  Sense Oligo
ggcauuuguugcuguauug

SEQ ID NO: 39754 - RNA, 19 nt, Artificial Sequence
  Antisense Oligo
caauacagcaacaaaugcc

SEQ ID NO: 39755 - RNA, 19 nt, Artificial Sequence
  Sense Oligo
uuuguugcuguauuggguu

SEQ ID NO: 39756 - RNA, 19 nt, Artificial Sequence
  Antisense Oligo
aacccaauacagcaacaaa

SEQ ID NO: 39757 - RNA, 19 nt, Artificial Sequence
  Sense Oligo
uuguugcuguauuggguua

SEQ ID NO: 39758 - RNA, 19 nt, Artificial Sequence
  Antisense Oligo
uaacccaauacagcaacaa

SEQ ID NO: 39759 - RNA, 19 nt, Artificial Sequence
  Sense Oligo
uguugcuguauuggguuac

SEQ ID NO: 39760 - RNA, 19 nt, Artificial Sequence
  Antisense Oligo
guaacccaauacagcaaca

SEQ ID NO: 39761 - RNA, 19 nt, Artificial Sequence
  Sense Oligo
guugcuguauuggguuacu

SEQ ID NO: 39762 - RNA, 19 nt, Artificial Sequence
  Antisense Oligo
aguaacccaauacagcaac

SEQ ID NO: 39763 - RNA, 19 nt, Artificial Sequence
  Sense Oligo
uugcuguauuggguuacuu

SEQ ID NO: 39764 - RNA, 19 nt, Artificial Sequence
  Antisense Oligo
aaguaacccaauacagcaa

SEQ ID NO: 39765 - RNA, 19 nt, Artificial Sequence
  Sense Oligo
ugcuguauuggguuacuuu

SEQ ID NO: 39766 - RNA, 19 nt, Artificial Sequence
  Antisense Oligo
aaaguaacccaauacagca

SEQ ID NO: 39767 - RNA, 19 nt, Artificial Sequence
  Sense Oligo
gcuguauuggguuacuuua

SEQ ID NO: 39768 - RNA, 19 nt, Artificial Sequence
  Antisense Oligo
uaaaguaacccaauacagc

SEQ ID NO: 39769 - RNA, 19 nt, Artificial Sequence
  Sense Oligo
uggguuacuuuauuggugu

SEQ ID NO: 39770 - RNA, 19 nt, Artificial Sequence
  Antisense Oligo
acaccaauaaaguaaccca

SEQ ID NO: 39771 - RNA, 19 nt, Artificial Sequence
  Sense Oligo
ggguuacuuuauugguguu

SEQ ID NO: 39772 - RNA, 19 nt, Artificial Sequence
  Antisense Oligo
aacaccaauaaaguaaccc

SEQ ID NO: 39773 - RNA, 19 nt, Artificial Sequence
  Sense Oligo
gguuacuuuauugguguuc

SEQ ID NO: 39774 - RNA, 19 nt, Artificial Sequence
  Antisense Oligo
gaacaccaauaaaguaacc

SEQ ID NO: 39775 - RNA, 19 nt, Artificial Sequence
  Sense Oligo
guuacuuuauugguguucu

SEQ ID NO: 39776 - RNA, 19 nt, Artificial Sequence
  Antisense Oligo
agaacaccaauaaaguaac

SEQ ID NO: 39777 - RNA, 19 nt, Artificial Sequence
  Sense Oligo
auugguguucuuauuuucc

SEQ ID NO: 39778 - RNA, 19 nt, Artificial Sequence
  Antisense Oligo
ggaaaauaagaacaccaau

SEQ ID NO: 39779 - RNA, 19 nt, Artificial Sequence
  Sense Oligo
uugguguucuuauuuucca

SEQ ID NO: 39780 - RNA, 19 nt, Artificial Sequence
  Antisense Oligo
uggaaaauaagaacaccaa

SEQ ID NO: 39781 - RNA, 19 nt, Artificial Sequence
  Sense Oligo
gguguucuuauuuuccagg

SEQ ID NO: 39782 - RNA, 19 nt, Artificial Sequence
  Antisense Oligo
ccuggaaaauaagaacacc

SEQ ID NO: 39783 - RNA, 19 nt, Artificial Sequence
  Sense Oligo
ggaggaagcacuggauugg

SEQ ID NO: 39784 - RNA, 19 nt, Artificial Sequence
  Antisense Oligo
ccaauccagugcuuccucc

SEQ ID NO: 39785 - RNA, 19 nt, Artificial Sequence
  Sense Oligo
gaggaagcacuggauugga

SEQ ID NO: 39786 - RNA, 19 nt, Artificial Sequence
  Antisense Oligo
uccaauccagugcuuccuc

SEQ ID NO: 39787 - RNA, 19 nt, Artificial Sequence
  Sense Oligo
aaaagauguguugauaguc

SEQ ID NO: 39788 - RNA, 19 nt, Artificial Sequence
  Antisense Oligo
gacuaucaacacaucuuuu

SEQ ID NO: 39789 - RNA, 19 nt, Artificial Sequence
  Sense Oligo
aagauguguugauagucuc

SEQ ID NO: 39790 - RNA, 19 nt, Artificial Sequence
  Antisense Oligo
gagacuaucaacacaucuu

SEQ ID NO: 39791 - RNA, 19 nt, Artificial Sequence
  Sense Oligo
uguguugauagucuccuga

SEQ ID NO: 39792 - RNA, 19 nt, Artificial Sequence
  Antisense Oligo
ucaggagacuaucaacaca

SEQ ID NO: 39793 - RNA, 19 nt, Artificial Sequence
  Sense Oligo
guguugauagucuccugaa

SEQ ID NO: 39794 - RNA, 19 nt, Artificial Sequence
  Antisense Oligo
uucaggagacuaucaacac

SEQ ID NO: 39795 - RNA, 19 nt, Artificial Sequence
  Sense Oligo
uguugauagucuccugaag

SEQ ID NO: 39796 - RNA, 19 nt, Artificial Sequence
  Antisense Oligo
cuucaggagacuaucaaca

SEQ ID NO: 39797 - RNA, 19 nt, Artificial Sequence
  Sense Oligo
guugauagucuccugaaga

SEQ ID NO: 39798 - RNA, 19 nt, Artificial Sequence
  Antisense Oligo
ucuucaggagacuaucaac

SEQ ID NO: 39799 - RNA, 19 nt, Artificial Sequence
  Sense Oligo
uugauagucuccugaagau

SEQ ID NO: 39800 - RNA, 19 nt, Artificial Sequence
  Antisense Oligo
aucuucaggagacuaucaa

SEQ ID NO: 39801 - RNA, 19 nt, Artificial Sequence
  Sense Oligo
ugauagucuccugaagaug

SEQ ID NO: 39802 - RNA, 19 nt, Artificial Sequence
  Antisense Oligo
caucuucaggagacuauca

SEQ ID NO: 39803 - RNA, 19 nt, Artificial Sequence
  Sense Oligo
gauagucuccugaagaugu

SEQ ID NO: 39804 - RNA, 19 nt, Artificial Sequence
  Antisense Oligo
acaucuucaggagacuauc

SEQ ID NO: 39805 - RNA, 19 nt, Artificial Sequence
  Sense Oligo
auagucuccugaagaugug

SEQ ID NO: 39806 - RNA, 19 nt, Artificial Sequence
  Antisense Oligo
cacaucuucaggagacuau

SEQ ID NO: 39807 - RNA, 19 nt, Artificial Sequence
  Sense Oligo
uagucuccugaagaugugu

SEQ ID NO: 39808 - RNA, 19 nt, Artificial Sequence
  Antisense Oligo
acacaucuucaggagacua

SEQ ID NO: 39809 - RNA, 19 nt, Artificial Sequence
  Sense Oligo
gucuccugaagaugugugg

SEQ ID NO: 39810 - RNA, 19 nt, Artificial Sequence
  Antisense Oligo
ccacacaucuucaggagac

SEQ ID NO: 39811 - RNA, 19 nt, Artificial Sequence
  Sense Oligo
gagggcucucaaaggguua

SEQ ID NO: 39812 - RNA, 19 nt, Artificial Sequence
  Antisense Oligo
uaacccuuugagagcccuc

SEQ ID NO: 39813 - RNA, 19 nt, Artificial Sequence
  Sense Oligo
agggcucucaaaggguuag

SEQ ID NO: 39814 - RNA, 19 nt, Artificial Sequence
  Antisense Oligo
cuaacccuuugagagcccu

SEQ ID NO: 39815 - RNA, 19 nt, Artificial Sequence
  Sense Oligo
gggcucucaaaggguuaga

SEQ ID NO: 39816 - RNA, 19 nt, Artificial Sequence
  Antisense Oligo
ucuaacccuuugagagccc

SEQ ID NO: 39817 - RNA, 19 nt, Artificial Sequence
  Sense Oligo
ucucaaaggguuagaggag

SEQ ID NO: 39818 - RNA, 19 nt, Artificial Sequence
  Antisense Oligo
cuccucuaacccuuugaga

SEQ ID NO: 39819 - RNA, 19 nt, Artificial Sequence
  Sense Oligo
cacaguaagaauggaucac

SEQ ID NO: 39820 - RNA, 19 nt, Artificial Sequence
  Antisense Oligo
gugauccauucuuacugug

SEQ ID NO: 39821 - RNA, 19 nt, Artificial Sequence
  Sense Oligo
acaguaagaauggaucaca

SEQ ID NO: 39822 - RNA, 19 nt, Artificial Sequence
  Antisense Oligo
ugugauccauucuuacugu

SEQ ID NO: 39823 - RNA, 19 nt, Artificial Sequence
  Sense Oligo
caguaagaauggaucacag

SEQ ID NO: 39824 - RNA, 19 nt, Artificial Sequence
  Antisense Oligo
cugugauccauucuuacug

SEQ ID NO: 39825 - RNA, 19 nt, Artificial Sequence
  Sense Oligo
aguaagaauggaucacagu

SEQ ID NO: 39826 - RNA, 19 nt, Artificial Sequence
  Antisense Oligo
acugugauccauucuuacu

SEQ ID NO: 39827 - RNA, 19 nt, Artificial Sequence
  Sense Oligo
guaagaauggaucacagua

SEQ ID NO: 39828 - RNA, 19 nt, Artificial Sequence
  Antisense Oligo
uacugugauccauucuuac

SEQ ID NO: 39829 - RNA, 19 nt, Artificial Sequence
  Sense Oligo
uaagaauggaucacaguag

SEQ ID NO: 39830 - RNA, 19 nt, Artificial Sequence
  Antisense Oligo
cuacugugauccauucuua

SEQ ID NO: 39831 - RNA, 19 nt, Artificial Sequence
  Sense Oligo
agaauggaucacaguagca

SEQ ID NO: 39832 - RNA, 19 nt, Artificial Sequence
  Antisense Oligo
ugcuacugugauccauucu

SEQ ID NO: 39833 - RNA, 19 nt, Artificial Sequence
  Sense Oligo
gaauggaucacaguagcag

SEQ ID NO: 39834 - RNA, 19 nt, Artificial Sequence
  Antisense Oligo
cugcuacugugauccauuc

SEQ ID NO: 39835 - RNA, 19 nt, Artificial Sequence
  Sense Oligo
aauggaucacaguagcaga

SEQ ID NO: 39836 - RNA, 19 nt, Artificial Sequence
  Antisense Oligo
ucugcuacugugauccauu

SEQ ID NO: 39837 - RNA, 19 nt, Artificial Sequence
  Sense Oligo
auggaucacaguagcagau

SEQ ID NO: 39838 - RNA, 19 nt, Artificial Sequence
  Antisense Oligo
aucugcuacugugauccau

SEQ ID NO: 39839 - RNA, 19 nt, Artificial Sequence
  Sense Oligo
aucacaguagcagaucuuu

SEQ ID NO: 39840 - RNA, 19 nt, Artificial Sequence
  Antisense Oligo
aaagaucugcuacugugau

SEQ ID NO: 39841 - RNA, 19 nt, Artificial Sequence
  Sense Oligo
ucacaguagcagaucuuua

SEQ ID NO: 39842 - RNA, 19 nt, Artificial Sequence
  Antisense Oligo
uaaagaucugcuacuguga

SEQ ID NO: 39843 - RNA, 19 nt, Artificial Sequence
  Sense Oligo
gggaucgcuuucaccucuu

SEQ ID NO: 39844 - RNA, 19 nt, Artificial Sequence
  Antisense Oligo
aagaggugaaagcgauccc

SEQ ID NO: 39845 - RNA, 19 nt, Artificial Sequence
  Sense Oligo
ggaucgcuuucaccucuuu

SEQ ID NO: 39846 - RNA, 19 nt, Artificial Sequence
  Antisense Oligo
aaagaggugaaagcgaucc

SEQ ID NO: 39847 - RNA, 19 nt, Artificial Sequence
  Sense Oligo
gaucgcuuucaccucuuuu

SEQ ID NO: 39848 - RNA, 19 nt, Artificial Sequence
  Antisense Oligo
aaaagaggugaaagcgauc

SEQ ID NO: 39849 - RNA, 19 nt, Artificial Sequence
  Sense Oligo
aucgcuuucaccucuuuua

SEQ ID NO: 39850 - RNA, 19 nt, Artificial Sequence
  Antisense Oligo
uaaaagaggugaaagcgau

SEQ ID NO: 39851 - RNA, 19 nt, Artificial Sequence
  Sense Oligo
ucgcuuucaccucuuuuag

SEQ ID NO: 39852 - RNA, 19 nt, Artificial Sequence
  Antisense Oligo
cuaaaagaggugaaagcga

SEQ ID NO: 39853 - RNA, 19 nt, Artificial Sequence
  Sense Oligo
ucaccucuuuuagauucuu

SEQ ID NO: 39854 - RNA, 19 nt, Artificial Sequence
  Antisense Oligo
aagaaucuaaaagagguga

SEQ ID NO: 39855 - RNA, 19 nt, Artificial Sequence
  Sense Oligo
caccucuuuuagauucuuc

SEQ ID NO: 39856 - RNA, 19 nt, Artificial Sequence
  Antisense Oligo
gaagaaucuaaaagaggug

SEQ ID NO: 39857 - RNA, 19 nt, Artificial Sequence
  Sense Oligo
ccucuuuuagauucuucuu

SEQ ID NO: 39858 - RNA, 19 nt, Artificial Sequence
  Antisense Oligo
aagaagaaucuaaaagagg

SEQ ID NO: 39859 - RNA, 19 nt, Artificial Sequence
  Sense Oligo
guauuuauguccacauuuc

SEQ ID NO: 39860 - RNA, 19 nt, Artificial Sequence
  Antisense Oligo
gaaauguggacauaaauac

SEQ ID NO: 39861 - RNA, 19 nt, Artificial Sequence
  Sense Oligo
uauuuauguccacauuucc

SEQ ID NO: 39862 - RNA, 19 nt, Artificial Sequence
  Antisense Oligo
ggaaauguggacauaaaua

SEQ ID NO: 39863 - RNA, 19 nt, Artificial Sequence
  Sense Oligo
uuuauguccacauuuccaa

SEQ ID NO: 39864 - RNA, 19 nt, Artificial Sequence
  Antisense Oligo
uuggaaauguggacauaaa

SEQ ID NO: 39865 - RNA, 19 nt, Artificial Sequence
  Sense Oligo
uauguccacauuuccaaau

SEQ ID NO: 39866 - RNA, 19 nt, Artificial Sequence
  Antisense Oligo
auuuggaaauguggacaua

SEQ ID NO: 39867 - RNA, 19 nt, Artificial Sequence
  Sense Oligo
auguccacauuuccaaaua

SEQ ID NO: 39868 - RNA, 19 nt, Artificial Sequence
  Antisense Oligo
uauuuggaaauguggacau

SEQ ID NO: 39869 - RNA, 19 nt, Artificial Sequence
  Sense Oligo
uaagugucuccuggauuuu

SEQ ID NO: 39870 - RNA, 19 nt, Artificial Sequence
  Antisense Oligo
aaaauccaggagacacuua

SEQ ID NO: 39871 - RNA, 19 nt, Artificial Sequence
  Sense Oligo
uuuccggagucagcaugag

SEQ ID NO: 39872 - RNA, 19 nt, Artificial Sequence
  Antisense Oligo
cucaugcugacuccggaaa

SEQ ID NO: 39873 - RNA, 19 nt, Artificial Sequence
  Sense Oligo
cagaagaugagggcuuaga

SEQ ID NO: 39874 - RNA, 19 nt, Artificial Sequence
  Antisense Oligo
ucuaagcccucaucuucug

SEQ ID NO: 39875 - RNA, 19 nt, Artificial Sequence
  Sense Oligo
agaagaugagggcuuagag

SEQ ID NO: 39876 - RNA, 19 nt, Artificial Sequence
  Antisense Oligo
cucuaagcccucaucuucu

SEQ ID NO: 39877 - RNA, 19 nt, Artificial Sequence
  Sense Oligo
gaagaugagggcuuagagc

SEQ ID NO: 39878 - RNA, 19 nt, Artificial Sequence
  Antisense Oligo
gcucuaagcccucaucuuc

SEQ ID NO: 39879 - RNA, 19 nt, Artificial Sequence
  Sense Oligo
acauuucuggucugugccc

SEQ ID NO: 39880 - RNA, 19 nt, Artificial Sequence
  Antisense Oligo
gggcacagaccagaaaugu

SEQ ID NO: 39881 - RNA, 19 nt, Artificial Sequence
  Sense Oligo
cauuucuggucugugcccu

SEQ ID NO: 39882 - RNA, 19 nt, Artificial Sequence
  Antisense Oligo
agggcacagaccagaaaug

SEQ ID NO: 39883 - RNA, 19 nt, Artificial Sequence
  Sense Oligo
auuucuggucugugcccug

SEQ ID NO: 39884 - RNA, 19 nt, Artificial Sequence
  Antisense Oligo
cagggcacagaccagaaau

SEQ ID NO: 39885 - RNA, 19 nt, Artificial Sequence
  Sense Oligo
cacaucaccuuuccaccuc

SEQ ID NO: 39886 - RNA, 19 nt, Artificial Sequence
  Antisense Oligo
gagguggaaaggugaugug

SEQ ID NO: 39887 - RNA, 19 nt, Artificial Sequence
  Sense Oligo
acaucaccuuuccaccucc

SEQ ID NO: 39888 - RNA, 19 nt, Artificial Sequence
  Antisense Oligo
ggagguggaaaggugaugu

SEQ ID NO: 39889 - RNA, 19 nt, Artificial Sequence
  Sense Oligo
caccuuuccaccuccuguu

SEQ ID NO: 39890 - RNA, 19 nt, Artificial Sequence
  Antisense Oligo
aacaggagguggaaaggug

SEQ ID NO: 39891 - RNA, 19 nt, Artificial Sequence
  Sense Oligo
uuuccaccuccuguugcuu

SEQ ID NO: 39892 - RNA, 19 nt, Artificial Sequence
  Antisense Oligo
aagcaacaggagguggaaa

SEQ ID NO: 39893 - RNA, 19 nt, Artificial Sequence
  Sense Oligo
uuccaccuccuguugcuuc

SEQ ID NO: 39894 - RNA, 19 nt, Artificial Sequence
  Antisense Oligo
gaagcaacaggagguggaa

SEQ ID NO: 39895 - RNA, 19 nt, Artificial Sequence
  Sense Oligo
uccaccuccuguugcuucc

SEQ ID NO: 39896 - RNA, 19 nt, Artificial Sequence
  Antisense Oligo
ggaagcaacaggaggugga

SEQ ID NO: 39897 - RNA, 19 nt, Artificial Sequence
  Sense Oligo
ccaccuccuguugcuuccu

SEQ ID NO: 39898 - RNA, 19 nt, Artificial Sequence
  Antisense Oligo
aggaagcaacaggaggugg

SEQ ID NO: 39899 - RNA, 19 nt, Artificial Sequence
  Sense Oligo
gcuuccuguuuucucauaa

SEQ ID NO: 39900 - RNA, 19 nt, Artificial Sequence
  Antisense Oligo
uuaugagaaaacaggaagc

SEQ ID NO: 39901 - RNA, 19 nt, Artificial Sequence
  Sense Oligo
cuuccuguuuucucauaac

SEQ ID NO: 39902 - RNA, 19 nt, Artificial Sequence
  Antisense Oligo
guuaugagaaaacaggaag

SEQ ID NO: 39903 - RNA, 19 nt, Artificial Sequence
  Sense Oligo
uuccuguuuucucauaacg

SEQ ID NO: 39904 - RNA, 19 nt, Artificial Sequence
  Antisense Oligo
cguuaugagaaaacaggaa

SEQ ID NO: 39905 - RNA, 19 nt, Artificial Sequence
  Sense Oligo
uccuguuuucucauaacgg

SEQ ID NO: 39906 - RNA, 19 nt, Artificial Sequence
  Antisense Oligo
ccguuaugagaaaacagga

SEQ ID NO: 39907 - RNA, 19 nt, Artificial Sequence
  Sense Oligo
ccuguuuucucauaacgga

SEQ ID NO: 39908 - RNA, 19 nt, Artificial Sequence
  Antisense Oligo
uccguuaugagaaaacagg

SEQ ID NO: 39909 - RNA, 19 nt, Artificial Sequence
  Sense Oligo
cuguuuucucauaacggag

SEQ ID NO: 39910 - RNA, 19 nt, Artificial Sequence
  Antisense Oligo
cuccguuaugagaaaacag

SEQ ID NO: 39911 - RNA, 19 nt, Artificial Sequence
  Sense Oligo
uguuuucucauaacggagu

SEQ ID NO: 39912 - RNA, 19 nt, Artificial Sequence
  Antisense Oligo
acuccguuaugagaaaaca

SEQ ID NO: 39913 - RNA, 19 nt, Artificial Sequence
  Sense Oligo
guuuucucauaacggaguu

SEQ ID NO: 39914 - RNA, 19 nt, Artificial Sequence
  Antisense Oligo
aacuccguuaugagaaaac

SEQ ID NO: 39915 - RNA, 19 nt, Artificial Sequence
  Sense Oligo
uuuucucauaacggaguug

SEQ ID NO: 39916 - RNA, 19 nt, Artificial Sequence
  Antisense Oligo
caacuccguuaugagaaaa

SEQ ID NO: 39917 - RNA, 19 nt, Artificial Sequence
  Sense Oligo
uuucucauaacggaguugc

SEQ ID NO: 39918 - RNA, 19 nt, Artificial Sequence
  Antisense Oligo
gcaacuccguuaugagaaa

SEQ ID NO: 39919 - RNA, 19 nt, Artificial Sequence
  Sense Oligo
uucucauaacggaguugca

SEQ ID NO: 39920 - RNA, 19 nt, Artificial Sequence
  Antisense Oligo
ugcaacuccguuaugagaa

SEQ ID NO: 39921 - RNA, 19 nt, Artificial Sequence
  Sense Oligo
ucucauaacggaguugcau

SEQ ID NO: 39922 - RNA, 19 nt, Artificial Sequence
  Antisense Oligo
augcaacuccguuaugaga

SEQ ID NO: 39923 - RNA, 19 nt, Artificial Sequence
  Sense Oligo
cucauaacggaguugcauc

SEQ ID NO: 39924 - RNA, 19 nt, Artificial Sequence
  Antisense Oligo
gaugcaacuccguuaugag

SEQ ID NO: 39925 - RNA, 19 nt, Artificial Sequence
  Sense Oligo
ucauaacggaguugcauca

SEQ ID NO: 39926 - RNA, 19 nt, Artificial Sequence
  Antisense Oligo
ugaugcaacuccguuauga

SEQ ID NO: 39927 - RNA, 19 nt, Artificial Sequence
  Sense Oligo
cauaacggaguugcaucau

SEQ ID NO: 39928 - RNA, 19 nt, Artificial Sequence
  Antisense Oligo
augaugcaacuccguuaug

SEQ ID NO: 39929 - RNA, 19 nt, Artificial Sequence
  Sense Oligo
auaacggaguugcaucauu

SEQ ID NO: 39930 - RNA, 19 nt, Artificial Sequence
  Antisense Oligo
aaugaugcaacuccguuau

SEQ ID NO: 39931 - RNA, 19 nt, Artificial Sequence
  Sense Oligo
uaacggaguugcaucauug

SEQ ID NO: 39932 - RNA, 19 nt, Artificial Sequence
  Antisense Oligo
caaugaugcaacuccguua

SEQ ID NO: 39933 - RNA, 19 nt, Artificial Sequence
  Sense Oligo
aacggaguugcaucauugu

SEQ ID NO: 39934 - RNA, 19 nt, Artificial Sequence
  Antisense Oligo
acaaugaugcaacuccguu

SEQ ID NO: 39935 - RNA, 19 nt, Artificial Sequence
  Sense Oligo
acggaguugcaucauuguu

SEQ ID NO: 39936 - RNA, 19 nt, Artificial Sequence
  Antisense Oligo
aacaaugaugcaacuccgu

SEQ ID NO: 39937 - RNA, 19 nt, Artificial Sequence
  Sense Oligo
cggaguugcaucauuguuu

SEQ ID NO: 39938 - RNA, 19 nt, Artificial Sequence
  Antisense Oligo
aaacaaugaugcaacuccg

SEQ ID NO: 39939 - RNA, 19 nt, Artificial Sequence
  Sense Oligo
ggaguugcaucauuguuua

SEQ ID NO: 39940 - RNA, 19 nt, Artificial Sequence
  Antisense Oligo
uaaacaaugaugcaacucc

SEQ ID NO: 39941 - RNA, 19 nt, Artificial Sequence
  Sense Oligo
aguugcaucauuguuuagg

SEQ ID NO: 39942 - RNA, 19 nt, Artificial Sequence
  Antisense Oligo
ccuaaacaaugaugcaacu

SEQ ID NO: 39943 - RNA, 19 nt, Artificial Sequence
  Sense Oligo
guugcaucauuguuuaggg

SEQ ID NO: 39944 - RNA, 19 nt, Artificial Sequence
  Antisense Oligo
cccuaaacaaugaugcaac

SEQ ID NO: 39945 - RNA, 19 nt, Artificial Sequence
  Sense Oligo
uugcaucauuguuuagggu

SEQ ID NO: 39946 - RNA, 19 nt, Artificial Sequence
  Antisense Oligo
acccuaaacaaugaugcaa

SEQ ID NO: 39947 - RNA, 19 nt, Artificial Sequence
  Sense Oligo
ugcaucauuguuuaggguu

SEQ ID NO: 39948 - RNA, 19 nt, Artificial Sequence
  Antisense Oligo
aacccuaaacaaugaugca

SEQ ID NO: 39949 - RNA, 19 nt, Artificial Sequence
  Sense Oligo
gcaucauuguuuaggguua

SEQ ID NO: 39950 - RNA, 19 nt, Artificial Sequence
  Antisense Oligo
uaacccuaaacaaugaugc

SEQ ID NO: 39951 - RNA, 19 nt, Artificial Sequence
  Sense Oligo
caucauuguuuaggguuaa

SEQ ID NO: 39952 - RNA, 19 nt, Artificial Sequence
  Antisense Oligo
uuaacccuaaacaaugaug

SEQ ID NO: 39953 - RNA, 19 nt, Artificial Sequence
  Sense Oligo
gguuaaaucaucaggaccc

SEQ ID NO: 39954 - RNA, 19 nt, Artificial Sequence
  Antisense Oligo
ggguccugaugauuuaacc

SEQ ID NO: 39955 - RNA, 19 nt, Artificial Sequence
  Sense Oligo
aucaucaggacccacacgg

SEQ ID NO: 39956 - RNA, 19 nt, Artificial Sequence
  Antisense Oligo
ccguguggguccugaugau

SEQ ID NO: 39957 - RNA, 19 nt, Artificial Sequence
  Sense Oligo
ucaucaggacccacacgga

SEQ ID NO: 39958 - RNA, 19 nt, Artificial Sequence
  Antisense Oligo
uccguguggguccugauga

SEQ ID NO: 39959 - RNA, 19 nt, Artificial Sequence
  Sense Oligo
caucaggacccacacggau

SEQ ID NO: 39960 - RNA, 19 nt, Artificial Sequence
  Antisense Oligo
auccguguggguccugaug

SEQ ID NO: 39961 - RNA, 19 nt, Artificial Sequence
  Sense Oligo
aucaggacccacacggauc

SEQ ID NO: 39962 - RNA, 19 nt, Artificial Sequence
  Antisense Oligo
gauccguguggguccugau

SEQ ID NO: 39963 - RNA, 19 nt, Artificial Sequence
  Sense Oligo
ucaggacccacacggauca

SEQ ID NO: 39964 - RNA, 19 nt, Artificial Sequence
  Antisense Oligo
ugauccguguggguccuga

SEQ ID NO: 39965 - RNA, 19 nt, Artificial Sequence
  Sense Oligo
caggacccacacggaucac

SEQ ID NO: 39966 - RNA, 19 nt, Artificial Sequence
  Antisense Oligo
gugauccguguggguccug

SEQ ID NO: 39967 - RNA, 19 nt, Artificial Sequence
  Sense Oligo
aggacccacacggaucaca

SEQ ID NO: 39968 - RNA, 19 nt, Artificial Sequence
  Antisense Oligo
ugugauccguguggguccu

SEQ ID NO: 39969 - RNA, 19 nt, Artificial Sequence
  Sense Oligo
uuccacagaauuacauuuc

SEQ ID NO: 39970 - RNA, 19 nt, Artificial Sequence
  Antisense Oligo
gaaauguaauucuguggaa

SEQ ID NO: 39971 - RNA, 19 nt, Artificial Sequence
  Sense Oligo
gaauuacauuuccugucag

SEQ ID NO: 39972 - RNA, 19 nt, Artificial Sequence
  Antisense Oligo
cugacaggaaauguaauuc

SEQ ID NO: 39973 - RNA, 19 nt, Artificial Sequence
  Sense Oligo
aauuacauuuccugucaga

SEQ ID NO: 39974 - RNA, 19 nt, Artificial Sequence
  Antisense Oligo
ucugacaggaaauguaauu

SEQ ID NO: 39975 - RNA, 19 nt, Artificial Sequence
  Sense Oligo
auuacauuuccugucagau

SEQ ID NO: 39976 - RNA, 19 nt, Artificial Sequence
  Antisense Oligo
aucugacaggaaauguaau

SEQ ID NO: 39977 - RNA, 19 nt, Artificial Sequence
  Sense Oligo
uuacauuuccugucagaug

SEQ ID NO: 39978 - RNA, 19 nt, Artificial Sequence
  Antisense Oligo
caucugacaggaaauguaa

SEQ ID NO: 39979 - RNA, 19 nt, Artificial Sequence
  Sense Oligo
uacauuuccugucagaugc

SEQ ID NO: 39980 - RNA, 19 nt, Artificial Sequence
  Antisense Oligo
gcaucugacaggaaaugua

SEQ ID NO: 39981 - RNA, 19 nt, Artificial Sequence
  Sense Oligo
acauuuccugucagaugcu

SEQ ID NO: 39982 - RNA, 19 nt, Artificial Sequence
  Antisense Oligo
agcaucugacaggaaaugu

SEQ ID NO: 39983 - RNA, 19 nt, Artificial Sequence
  Sense Oligo
cauuuccugucagaugcug

SEQ ID NO: 39984 - RNA, 19 nt, Artificial Sequence
  Antisense Oligo
cagcaucugacaggaaaug

SEQ ID NO: 39985 - RNA, 19 nt, Artificial Sequence
  Sense Oligo
auuuccugucagaugcugu

SEQ ID NO: 39986 - RNA, 19 nt, Artificial Sequence
  Antisense Oligo
acagcaucugacaggaaau

SEQ ID NO: 39987 - RNA, 19 nt, Artificial Sequence
  Sense Oligo
uuuccugucagaugcuguu

SEQ ID NO: 39988 - RNA, 19 nt, Artificial Sequence
  Antisense Oligo
aacagcaucugacaggaaa

SEQ ID NO: 39989 - RNA, 19 nt, Artificial Sequence
  Sense Oligo
uuccugucagaugcuguuu

SEQ ID NO: 39990 - RNA, 19 nt, Artificial Sequence
  Antisense Oligo
aaacagcaucugacaggaa

SEQ ID NO: 39991 - RNA, 19 nt, Artificial Sequence
  Sense Oligo
ccugucagaugcuguuuuc

SEQ ID NO: 39992 - RNA, 19 nt, Artificial Sequence
  Antisense Oligo
gaaaacagcaucugacagg

SEQ ID NO: 39993 - RNA, 19 nt, Artificial Sequence
  Sense Oligo
ugucagaugcuguuuucac

SEQ ID NO: 39994 - RNA, 19 nt, Artificial Sequence
  Antisense Oligo
gugaaaacagcaucugaca

SEQ ID NO: 39995 - RNA, 19 nt, Artificial Sequence
  Sense Oligo
cguuaaugauacgcuguuu

SEQ ID NO: 39996 - RNA, 19 nt, Artificial Sequence
  Antisense Oligo
aaacagcguaucauuaacg

SEQ ID NO: 39997 - RNA, 19 nt, Artificial Sequence
  Sense Oligo
guuaaugauacgcuguuuu

SEQ ID NO: 39998 - RNA, 19 nt, Artificial Sequence
  Antisense Oligo
aaaacagcguaucauuaac

SEQ ID NO: 39999 - RNA, 19 nt, Artificial Sequence
  Sense Oligo
uuaaugauacgcuguuuuc

SEQ ID NO: 40000 - RNA, 19 nt, Artificial Sequence
  Antisense Oligo
gaaaacagcguaucauuaa

SEQ ID NO: 40001 - RNA, 19 nt, Artificial Sequence
  Sense Oligo
ugauacgcuguuuucauug

SEQ ID NO: 40002 - RNA, 19 nt, Artificial Sequence
  Antisense Oligo
caaugaaaacagcguauca

SEQ ID NO: 40003 - RNA, 19 nt, Artificial Sequence
  Sense Oligo
gauacgcuguuuucauugu

SEQ ID NO: 40004 - RNA, 19 nt, Artificial Sequence
  Antisense Oligo
acaaugaaaacagcguauc

SEQ ID NO: 40005 - RNA, 19 nt, Artificial Sequence
  Sense Oligo
auacgcuguuuucauugua

SEQ ID NO: 40006 - RNA, 19 nt, Artificial Sequence
  Antisense Oligo
uacaaugaaaacagcguau

SEQ ID NO: 40007 - RNA, 19 nt, Artificial Sequence
  Sense Oligo
gcaaucucugccgaguguc

SEQ ID NO: 40008 - RNA, 19 nt, Artificial Sequence
  Antisense Oligo
gacacucggcagagauugc

SEQ ID NO: 40009 - RNA, 19 nt, Artificial Sequence
  Sense Oligo
caaucucugccgagugucu

SEQ ID NO: 40010 - RNA, 19 nt, Artificial Sequence
  Antisense Oligo
agacacucggcagagauug

SEQ ID NO: 40011 - RNA, 19 nt, Artificial Sequence
  Sense Oligo
aaucucugccgagugucug

SEQ ID NO: 40012 - RNA, 19 nt, Artificial Sequence
  Antisense Oligo
cagacacucggcagagauu

SEQ ID NO: 40013 - RNA, 19 nt, Artificial Sequence
  Sense Oligo
aucucugccgagugucuga

SEQ ID NO: 40014 - RNA, 19 nt, Artificial Sequence
  Antisense Oligo
ucagacacucggcagagau

SEQ ID NO: 40015 - RNA, 19 nt, Artificial Sequence
  Sense Oligo
ucucugccgagugucugaa

SEQ ID NO: 40016 - RNA, 19 nt, Artificial Sequence
  Antisense Oligo
uucagacacucggcagaga

SEQ ID NO: 40017 - RNA, 19 nt, Artificial Sequence
  Sense Oligo
agugucugaauuuccuuga

SEQ ID NO: 40018 - RNA, 19 nt, Artificial Sequence
  Antisense Oligo
ucaaggaaauucagacacu

SEQ ID NO: 40019 - RNA, 19 nt, Artificial Sequence
  Sense Oligo
gugucugaauuuccuugaa

SEQ ID NO: 40020 - RNA, 19 nt, Artificial Sequence
  Antisense Oligo
uucaaggaaauucagacac

SEQ ID NO: 40021 - RNA, 19 nt, Artificial Sequence
  Sense Oligo
ugucugaauuuccuugaag

SEQ ID NO: 40022 - RNA, 19 nt, Artificial Sequence
  Antisense Oligo
cuucaaggaaauucagaca

SEQ ID NO: 40023 - RNA, 19 nt, Artificial Sequence
  Sense Oligo
gucugaauuuccuugaaga

SEQ ID NO: 40024 - RNA, 19 nt, Artificial Sequence
  Antisense Oligo
ucuucaaggaaauucagac

SEQ ID NO: 40025 - RNA, 19 nt, Artificial Sequence
  Sense Oligo
ucugaauuuccuugaagau

SEQ ID NO: 40026 - RNA, 19 nt, Artificial Sequence
  Antisense Oligo
aucuucaaggaaauucaga

SEQ ID NO: 40027 - RNA, 19 nt, Artificial Sequence
  Sense Oligo
auuuccuugaagaucauug

SEQ ID NO: 40028 - RNA, 19 nt, Artificial Sequence
  Antisense Oligo
caaugaucuucaaggaaau

SEQ ID NO: 40029 - RNA, 19 nt, Artificial Sequence
  Sense Oligo
uuuccuugaagaucauugg

SEQ ID NO: 40030 - RNA, 19 nt, Artificial Sequence
  Antisense Oligo
ccaaugaucuucaaggaaa

SEQ ID NO: 40031 - RNA, 19 nt, Artificial Sequence
  Sense Oligo
uccuugaagaucauugguu

SEQ ID NO: 40032 - RNA, 19 nt, Artificial Sequence
  Antisense Oligo
aaccaaugaucuucaagga

SEQ ID NO: 40033 - RNA, 19 nt, Artificial Sequence
  Sense Oligo
ccuugaagaucauugguuu

SEQ ID NO: 40034 - RNA, 19 nt, Artificial Sequence
  Antisense Oligo
aaaccaaugaucuucaagg

SEQ ID NO: 40035 - RNA, 19 nt, Artificial Sequence
  Sense Oligo
gaagaucauugguuugacc

SEQ ID NO: 40036 - RNA, 19 nt, Artificial Sequence
  Antisense Oligo
ggucaaaccaaugaucuuc

SEQ ID NO: 40037 - RNA, 19 nt, Artificial Sequence
  Sense Oligo
ucauugguuugaccuuuga

SEQ ID NO: 40038 - RNA, 19 nt, Artificial Sequence
  Antisense Oligo
ucaaaggucaaaccaauga

SEQ ID NO: 40039 - RNA, 19 nt, Artificial Sequence
  Sense Oligo
cauugguuugaccuuugaa

SEQ ID NO: 40040 - RNA, 19 nt, Artificial Sequence
  Antisense Oligo
uucaaaggucaaaccaaug

SEQ ID NO: 40041 - RNA, 19 nt, Artificial Sequence
  Sense Oligo
acccugggcugcagacgua

SEQ ID NO: 40042 - RNA, 19 nt, Artificial Sequence
  Antisense Oligo
uacgucugcagcccagggu

SEQ ID NO: 40043 - RNA, 19 nt, Artificial Sequence
  Sense Oligo
ugggcugcagacguagggu

SEQ ID NO: 40044 - RNA, 19 nt, Artificial Sequence
  Antisense Oligo
acccuacgucugcagccca

SEQ ID NO: 40045 - RNA, 19 nt, Artificial Sequence
  Sense Oligo
cugcagacguaggguggag

SEQ ID NO: 40046 - RNA, 19 nt, Artificial Sequence
  Antisense Oligo
cuccacccuacgucugcag

SEQ ID NO: 40047 - RNA, 19 nt, Artificial Sequence
  Sense Oligo
ucucccuccaccuccuagg

SEQ ID NO: 40048 - RNA, 19 nt, Artificial Sequence
  Antisense Oligo
ccuaggagguggagggaga

SEQ ID NO: 40049 - RNA, 19 nt, Artificial Sequence
  Sense Oligo
cucccuccaccuccuagga

SEQ ID NO: 40050 - RNA, 19 nt, Artificial Sequence
  Antisense Oligo
uccuaggagguggagggag

SEQ ID NO: 40051 - RNA, 19 nt, Artificial Sequence
  Sense Oligo
ccaccuccuaggagccuuu

SEQ ID NO: 40052 - RNA, 19 nt, Artificial Sequence
  Antisense Oligo
aaaggcuccuaggaggugg

SEQ ID NO: 40053 - RNA, 19 nt, Artificial Sequence
  Sense Oligo
caccuccuaggagccuuug

SEQ ID NO: 40054 - RNA, 19 nt, Artificial Sequence
  Antisense Oligo
caaaggcuccuaggaggug

SEQ ID NO: 40055 - RNA, 19 nt, Artificial Sequence
  Sense Oligo
accuccuaggagccuuugc

SEQ ID NO: 40056 - RNA, 19 nt, Artificial Sequence
  Antisense Oligo
gcaaaggcuccuaggaggu

SEQ ID NO: 40057 - RNA, 19 nt, Artificial Sequence
  Sense Oligo
ccuccuaggagccuuugcc

SEQ ID NO: 40058 - RNA, 19 nt, Artificial Sequence
  Antisense Oligo
ggcaaaggcuccuaggagg

SEQ ID NO: 40059 - RNA, 19 nt, Artificial Sequence
  Sense Oligo
cuccuaggagccuuugccu

SEQ ID NO: 40060 - RNA, 19 nt, Artificial Sequence
  Antisense Oligo
aggcaaaggcuccuaggag

SEQ ID NO: 40061 - RNA, 19 nt, Artificial Sequence
  Sense Oligo
uccuaggagccuuugccug

SEQ ID NO: 40062 - RNA, 19 nt, Artificial Sequence
  Antisense Oligo
caggcaaaggcuccuagga

SEQ ID NO: 40063 - RNA, 19 nt, Artificial Sequence
  Sense Oligo
ccuaggagccuuugccugg

SEQ ID NO: 40064 - RNA, 19 nt, Artificial Sequence
  Antisense Oligo
ccaggcaaaggcuccuagg

SEQ ID NO: 40065 - RNA, 19 nt, Artificial Sequence
  Sense Oligo
cuaggagccuuugccuggc

SEQ ID NO: 40066 - RNA, 19 nt, Artificial Sequence
  Antisense Oligo
gccaggcaaaggcuccuag

SEQ ID NO: 40067 - RNA, 19 nt, Artificial Sequence
  Sense Oligo
uaggagccuuugccuggca

SEQ ID NO: 40068 - RNA, 19 nt, Artificial Sequence
  Antisense Oligo
ugccaggcaaaggcuccua

SEQ ID NO: 40069 - RNA, 19 nt, Artificial Sequence
  Sense Oligo
aggagccuuugccuggcac

SEQ ID NO: 40070 - RNA, 19 nt, Artificial Sequence
  Antisense Oligo
gugccaggcaaaggcuccu

SEQ ID NO: 40071 - RNA, 19 nt, Artificial Sequence
  Sense Oligo
cuuugccuggcaccugggu

SEQ ID NO: 40072 - RNA, 19 nt, Artificial Sequence
  Antisense Oligo
acccaggugccaggcaaag

SEQ ID NO: 40073 - RNA, 19 nt, Artificial Sequence
  Sense Oligo
uuugccuggcaccuggguu

SEQ ID NO: 40074 - RNA, 19 nt, Artificial Sequence
  Antisense Oligo
aacccaggugccaggcaaa

SEQ ID NO: 40075 - RNA, 19 nt, Artificial Sequence
  Sense Oligo
uugccuggcaccuggguua

SEQ ID NO: 40076 - RNA, 19 nt, Artificial Sequence
  Antisense Oligo
uaacccaggugccaggcaa

SEQ ID NO: 40077 - RNA, 19 nt, Artificial Sequence
  Sense Oligo
ugccuggcaccuggguuag

SEQ ID NO: 40078 - RNA, 19 nt, Artificial Sequence
  Antisense Oligo
cuaacccaggugccaggca

SEQ ID NO: 40079 - RNA, 19 nt, Artificial Sequence
  Sense Oligo
gccuggcaccuggguuaga

SEQ ID NO: 40080 - RNA, 19 nt, Artificial Sequence
  Antisense Oligo
ucuaacccaggugccaggc

SEQ ID NO: 40081 - RNA, 19 nt, Artificial Sequence
  Sense Oligo
ccuggcaccuggguuagac

SEQ ID NO: 40082 - RNA, 19 nt, Artificial Sequence
  Antisense Oligo
gucuaacccaggugccagg

SEQ ID NO: 40083 - RNA, 19 nt, Artificial Sequence
  Sense Oligo
cuggcaccuggguuagacg

SEQ ID NO: 40084 - RNA, 19 nt, Artificial Sequence
  Antisense Oligo
cgucuaacccaggugccag

SEQ ID NO: 40085 - RNA, 19 nt, Artificial Sequence
  Sense Oligo
uggcaccuggguuagacgu

SEQ ID NO: 40086 - RNA, 19 nt, Artificial Sequence
  Antisense Oligo
acgucuaacccaggugcca

SEQ ID NO: 40087 - RNA, 19 nt, Artificial Sequence
  Sense Oligo
ggcaccuggguuagacgug

SEQ ID NO: 40088 - RNA, 19 nt, Artificial Sequence
  Antisense Oligo
cacgucuaacccaggugcc

SEQ ID NO: 40089 - RNA, 19 nt, Artificial Sequence
  Sense Oligo
gcaccuggguuagacgugg

SEQ ID NO: 40090 - RNA, 19 nt, Artificial Sequence
  Antisense Oligo
ccacgucuaacccaggugc

SEQ ID NO: 40091 - RNA, 19 nt, Artificial Sequence
  Sense Oligo
caccuggguuagacguggu

SEQ ID NO: 40092 - RNA, 19 nt, Artificial Sequence
  Antisense Oligo
accacgucuaacccaggug

SEQ ID NO: 40093 - RNA, 19 nt, Artificial Sequence
  Sense Oligo
accuggguuagacgugguu

SEQ ID NO: 40094 - RNA, 19 nt, Artificial Sequence
  Antisense Oligo
aaccacgucuaacccaggu

SEQ ID NO: 40095 - RNA, 19 nt, Artificial Sequence
  Sense Oligo
ccuggguuagacgugguuc

SEQ ID NO: 40096 - RNA, 19 nt, Artificial Sequence
  Antisense Oligo
gaaccacgucuaacccagg

SEQ ID NO: 40097 - RNA, 19 nt, Artificial Sequence
  Sense Oligo
cuggguuagacgugguucc

SEQ ID NO: 40098 - RNA, 19 nt, Artificial Sequence
  Antisense Oligo
ggaaccacgucuaacccag

SEQ ID NO: 40099 - RNA, 19 nt, Artificial Sequence
  Sense Oligo
cccgcuacucacuccugcu

SEQ ID NO: 40100 - RNA, 19 nt, Artificial Sequence
  Antisense Oligo
agcaggagugaguagcggg

SEQ ID NO: 40101 - RNA, 19 nt, Artificial Sequence
  Sense Oligo
ccgcuacucacuccugcuu

SEQ ID NO: 40102 - RNA, 19 nt, Artificial Sequence
  Antisense Oligo
aagcaggagugaguagcgg

SEQ ID NO: 40103 - RNA, 19 nt, Artificial Sequence
  Sense Oligo
cgcuacucacuccugcuuc

SEQ ID NO: 40104 - RNA, 19 nt, Artificial Sequence
  Antisense Oligo
gaagcaggagugaguagcg

SEQ ID NO: 40105 - RNA, 19 nt, Artificial Sequence
  Sense Oligo
gcuacucacuccugcuucc

SEQ ID NO: 40106 - RNA, 19 nt, Artificial Sequence
  Antisense Oligo
ggaagcaggagugaguagc

SEQ ID NO: 40107 - RNA, 19 nt, Artificial Sequence
  Sense Oligo
uacucacuccugcuuccuc

SEQ ID NO: 40108 - RNA, 19 nt, Artificial Sequence
  Antisense Oligo
gaggaagcaggagugagua

SEQ ID NO: 40109 - RNA, 19 nt, Artificial Sequence
  Sense Oligo
cacuccugcuuccucuguu

SEQ ID NO: 40110 - RNA, 19 nt, Artificial Sequence
  Antisense Oligo
aacagaggaagcaggagug

SEQ ID NO: 40111 - RNA, 19 nt, Artificial Sequence
  Sense Oligo
acuccugcuuccucuguug

SEQ ID NO: 40112 - RNA, 19 nt, Artificial Sequence
  Antisense Oligo
caacagaggaagcaggagu

SEQ ID NO: 40113 - RNA, 19 nt, Artificial Sequence
  Sense Oligo
cuccugcuuccucuguugg

SEQ ID NO: 40114 - RNA, 19 nt, Artificial Sequence
  Antisense Oligo
ccaacagaggaagcaggag

SEQ ID NO: 40115 - RNA, 19 nt, Artificial Sequence
  Sense Oligo
uccugcuuccucuguuggc

SEQ ID NO: 40116 - RNA, 19 nt, Artificial Sequence
  Antisense Oligo
gccaacagaggaagcagga

SEQ ID NO: 40117 - RNA, 19 nt, Artificial Sequence
  Sense Oligo
ccugcuuccucuguuggca

SEQ ID NO: 40118 - RNA, 19 nt, Artificial Sequence
  Antisense Oligo
ugccaacagaggaagcagg

SEQ ID NO: 40119 - RNA, 19 nt, Artificial Sequence
  Sense Oligo
guuggcagagcacacccuc

SEQ ID NO: 40120 - RNA, 19 nt, Artificial Sequence
  Antisense Oligo
gagggugugcucugccaac

SEQ ID NO: 40121 - RNA, 19 nt, Artificial Sequence
  Sense Oligo
uuggcagagcacacccuca

SEQ ID NO: 40122 - RNA, 19 nt, Artificial Sequence
  Antisense Oligo
ugagggugugcucugccaa

SEQ ID NO: 40123 - RNA, 19 nt, Artificial Sequence
  Sense Oligo
uggcagagcacacccucac

SEQ ID NO: 40124 - RNA, 19 nt, Artificial Sequence
  Antisense Oligo
gugagggugugcucugcca

SEQ ID NO: 40125 - RNA, 19 nt, Artificial Sequence
  Sense Oligo
ggcagagcacacccucacu

SEQ ID NO: 40126 - RNA, 19 nt, Artificial Sequence
  Antisense Oligo
agugagggugugcucugcc

SEQ ID NO: 40127 - RNA, 19 nt, Artificial Sequence
  Sense Oligo
gcagagcacacccucacug

SEQ ID NO: 40128 - RNA, 19 nt, Artificial Sequence
  Antisense Oligo
cagugagggugugcucugc

SEQ ID NO: 40129 - RNA, 19 nt, Artificial Sequence
  Sense Oligo
cacacccucacuggcuucc

SEQ ID NO: 40130 - RNA, 19 nt, Artificial Sequence
  Antisense Oligo
ggaagccagugagggugug

SEQ ID NO: 40131 - RNA, 19 nt, Artificial Sequence
  Sense Oligo
aacccucgaauccuugugu

SEQ ID NO: 40132 - RNA, 19 nt, Artificial Sequence
  Antisense Oligo
acacaaggauucgaggguu

SEQ ID NO: 40133 - RNA, 19 nt, Artificial Sequence
  Sense Oligo
acccucgaauccuugugug

SEQ ID NO: 40134 - RNA, 19 nt, Artificial Sequence
  Antisense Oligo
cacacaaggauucgagggu

SEQ ID NO: 40135 - RNA, 19 nt, Artificial Sequence
  Sense Oligo
ucgaauccuugugugucua

SEQ ID NO: 40136 - RNA, 19 nt, Artificial Sequence
  Antisense Oligo
uagacacacaaggauucga

SEQ ID NO: 40137 - RNA, 19 nt, Artificial Sequence
  Sense Oligo
cgaauccuugugugucuaa

SEQ ID NO: 40138 - RNA, 19 nt, Artificial Sequence
  Antisense Oligo
uuagacacacaaggauucg

SEQ ID NO: 40139 - RNA, 19 nt, Artificial Sequence
  Sense Oligo
gaauccuugugugucuaaa

SEQ ID NO: 40140 - RNA, 19 nt, Artificial Sequence
  Antisense Oligo
uuuagacacacaaggauuc

SEQ ID NO: 40141 - RNA, 19 nt, Artificial Sequence
  Sense Oligo
aauccuugugugucuaaag

SEQ ID NO: 40142 - RNA, 19 nt, Artificial Sequence
  Antisense Oligo
cuuuagacacacaaggauu

SEQ ID NO: 40143 - RNA, 19 nt, Artificial Sequence
  Sense Oligo
auccuugugugucuaaaga

SEQ ID NO: 40144 - RNA, 19 nt, Artificial Sequence
  Antisense Oligo
ucuuuagacacacaaggau

SEQ ID NO: 40145 - RNA, 19 nt, Artificial Sequence
  Sense Oligo
uccuugugugucuaaagau

SEQ ID NO: 40146 - RNA, 19 nt, Artificial Sequence
  Antisense Oligo
aucuuuagacacacaagga

SEQ ID NO: 40147 - RNA, 19 nt, Artificial Sequence
  Sense Oligo
ccuugugugucuaaagaug

SEQ ID NO: 40148 - RNA, 19 nt, Artificial Sequence
  Antisense Oligo
caucuuuagacacacaagg

SEQ ID NO: 40149 - RNA, 19 nt, Artificial Sequence
  Sense Oligo
cuugugugucuaaagaugu

SEQ ID NO: 40150 - RNA, 19 nt, Artificial Sequence
  Antisense Oligo
acaucuuuagacacacaag

SEQ ID NO: 40151 - RNA, 19 nt, Artificial Sequence
  Sense Oligo
uugugugucuaaagauguc

SEQ ID NO: 40152 - RNA, 19 nt, Artificial Sequence
  Antisense Oligo
gacaucuuuagacacacaa

SEQ ID NO: 40153 - RNA, 19 nt, Artificial Sequence
  Sense Oligo
ugugugucuaaagaugucu

SEQ ID NO: 40154 - RNA, 19 nt, Artificial Sequence
  Antisense Oligo
agacaucuuuagacacaca

SEQ ID NO: 40155 - RNA, 19 nt, Artificial Sequence
  Sense Oligo
gugugucuaaagaugucug

SEQ ID NO: 40156 - RNA, 19 nt, Artificial Sequence
  Antisense Oligo
cagacaucuuuagacacac

SEQ ID NO: 40157 - RNA, 19 nt, Artificial Sequence
  Sense Oligo
ugugucuaaagaugucugu

SEQ ID NO: 40158 - RNA, 19 nt, Artificial Sequence
  Antisense Oligo
acagacaucuuuagacaca

SEQ ID NO: 40159 - RNA, 19 nt, Artificial Sequence
  Sense Oligo
ugucuaaagaugucugucc

SEQ ID NO: 40160 - RNA, 19 nt, Artificial Sequence
  Antisense Oligo
ggacagacaucuuuagaca

SEQ ID NO: 40161 - RNA, 19 nt, Artificial Sequence
  Sense Oligo
gucuaaagaugucuguccu

SEQ ID NO: 40162 - RNA, 19 nt, Artificial Sequence
  Antisense Oligo
aggacagacaucuuuagac

SEQ ID NO: 40163 - RNA, 19 nt, Artificial Sequence
  Sense Oligo
cuaaagaugucuguccucu

SEQ ID NO: 40164 - RNA, 19 nt, Artificial Sequence
  Antisense Oligo
agaggacagacaucuuuag

SEQ ID NO: 40165 - RNA, 19 nt, Artificial Sequence
  Sense Oligo
agaugucuguccucuuacu

SEQ ID NO: 40166 - RNA, 19 nt, Artificial Sequence
  Antisense Oligo
aguaagaggacagacaucu

SEQ ID NO: 40167 - RNA, 19 nt, Artificial Sequence
  Sense Oligo
gaugucuguccucuuacua

SEQ ID NO: 40168 - RNA, 19 nt, Artificial Sequence
  Antisense Oligo
uaguaagaggacagacauc

SEQ ID NO: 40169 - RNA, 19 nt, Artificial Sequence
  Sense Oligo
ucuguccucuuacuagguc

SEQ ID NO: 40170 - RNA, 19 nt, Artificial Sequence
  Antisense Oligo
gaccuaguaagaggacaga

SEQ ID NO: 40171 - RNA, 19 nt, Artificial Sequence
  Sense Oligo
uccucuuacuaggucaguc

SEQ ID NO: 40172 - RNA, 19 nt, Artificial Sequence
  Antisense Oligo
gacugaccuaguaagagga

SEQ ID NO: 40173 - RNA, 19 nt, Artificial Sequence
  Sense Oligo
ccucuuacuaggucagucg

SEQ ID NO: 40174 - RNA, 19 nt, Artificial Sequence
  Antisense Oligo
cgacugaccuaguaagagg

SEQ ID NO: 40175 - RNA, 19 nt, Artificial Sequence
  Sense Oligo
cucuuacuaggucagucgc

SEQ ID NO: 40176 - RNA, 19 nt, Artificial Sequence
  Antisense Oligo
gcgacugaccuaguaagag

SEQ ID NO: 40177 - RNA, 19 nt, Artificial Sequence
  Sense Oligo
ucuuacuaggucagucgcu

SEQ ID NO: 40178 - RNA, 19 nt, Artificial Sequence
  Antisense Oligo
agcgacugaccuaguaaga

SEQ ID NO: 40179 - RNA, 19 nt, Artificial Sequence
  Sense Oligo
cuuacuaggucagucgcuc

SEQ ID NO: 40180 - RNA, 19 nt, Artificial Sequence
  Antisense Oligo
gagcgacugaccuaguaag

SEQ ID NO: 40181 - RNA, 19 nt, Artificial Sequence
  Sense Oligo
uuacuaggucagucgcucg

SEQ ID NO: 40182 - RNA, 19 nt, Artificial Sequence
  Antisense Oligo
cgagcgacugaccuaguaa

SEQ ID NO: 40183 - RNA, 19 nt, Artificial Sequence
  Sense Oligo
uacuaggucagucgcucgg

SEQ ID NO: 40184 - RNA, 19 nt, Artificial Sequence
  Antisense Oligo
ccgagcgacugaccuagua

SEQ ID NO: 40185 - RNA, 19 nt, Artificial Sequence
  Sense Oligo
acuaggucagucgcucggc

SEQ ID NO: 40186 - RNA, 19 nt, Artificial Sequence
  Antisense Oligo
gccgagcgacugaccuagu

SEQ ID NO: 40187 - RNA, 19 nt, Artificial Sequence
  Sense Oligo
cuaggucagucgcucggcu

SEQ ID NO: 40188 - RNA, 19 nt, Artificial Sequence
  Antisense Oligo
agccgagcgacugaccuag

SEQ ID NO: 40189 - RNA, 19 nt, Artificial Sequence
  Sense Oligo
uaggucagucgcucggcua

SEQ ID NO: 40190 - RNA, 19 nt, Artificial Sequence
  Antisense Oligo
uagccgagcgacugaccua

SEQ ID NO: 40191 - RNA, 19 nt, Artificial Sequence
  Sense Oligo
aggucagucgcucggcuag

SEQ ID NO: 40192 - RNA, 19 nt, Artificial Sequence
  Antisense Oligo
cuagccgagcgacugaccu

SEQ ID NO: 40193 - RNA, 19 nt, Artificial Sequence
  Sense Oligo
gucagucgcucggcuaggu

SEQ ID NO: 40194 - RNA, 19 nt, Artificial Sequence
  Antisense Oligo
accuagccgagcgacugac

SEQ ID NO: 40195 - RNA, 19 nt, Artificial Sequence
  Sense Oligo
ucagucgcucggcuagguc

SEQ ID NO: 40196 - RNA, 19 nt, Artificial Sequence
  Antisense Oligo
gaccuagccgagcgacuga

SEQ ID NO: 40197 - RNA, 19 nt, Artificial Sequence
  Sense Oligo
cagucgcucggcuaggucu

SEQ ID NO: 40198 - RNA, 19 nt, Artificial Sequence
  Antisense Oligo
agaccuagccgagcgacug

SEQ ID NO: 40199 - RNA, 19 nt, Artificial Sequence
  Sense Oligo
agucgcucggcuaggucua

SEQ ID NO: 40200 - RNA, 19 nt, Artificial Sequence
  Antisense Oligo
uagaccuagccgagcgacu

SEQ ID NO: 40201 - RNA, 19 nt, Artificial Sequence
  Sense Oligo
gucgcucggcuaggucuag

SEQ ID NO: 40202 - RNA, 19 nt, Artificial Sequence
  Antisense Oligo
cuagaccuagccgagcgac

SEQ ID NO: 40203 - RNA, 19 nt, Artificial Sequence
  Sense Oligo
ucgcucggcuaggucuaga

SEQ ID NO: 40204 - RNA, 19 nt, Artificial Sequence
  Antisense Oligo
ucuagaccuagccgagcga

SEQ ID NO: 40205 - RNA, 19 nt, Artificial Sequence
  Sense Oligo
cgcucggcuaggucuagaa

SEQ ID NO: 40206 - RNA, 19 nt, Artificial Sequence
  Antisense Oligo
uucuagaccuagccgagcg

SEQ ID NO: 40207 - RNA, 19 nt, Artificial Sequence
  Sense Oligo
gcucggcuaggucuagaau

SEQ ID NO: 40208 - RNA, 19 nt, Artificial Sequence
  Antisense Oligo
auucuagaccuagccgagc

SEQ ID NO: 40209 - RNA, 19 nt, Artificial Sequence
  Sense Oligo
cucggcuaggucuagaauu

SEQ ID NO: 40210 - RNA, 19 nt, Artificial Sequence
  Antisense Oligo
aauucuagaccuagccgag

SEQ ID NO: 40211 - RNA, 19 nt, Artificial Sequence
  Sense Oligo
ucggcuaggucuagaauua

SEQ ID NO: 40212 - RNA, 19 nt, Artificial Sequence
  Antisense Oligo
uaauucuagaccuagccga

SEQ ID NO: 40213 - RNA, 19 nt, Artificial Sequence
  Sense Oligo
cggcuaggucuagaauuac

SEQ ID NO: 40214 - RNA, 19 nt, Artificial Sequence
  Antisense Oligo
guaauucuagaccuagccg

SEQ ID NO: 40215 - RNA, 19 nt, Artificial Sequence
  Sense Oligo
ggcuaggucuagaauuaca

SEQ ID NO: 40216 - RNA, 19 nt, Artificial Sequence
  Antisense Oligo
uguaauucuagaccuagcc

SEQ ID NO: 40217 - RNA, 19 nt, Artificial Sequence
  Sense Oligo
gcuaggucuagaauuacag

SEQ ID NO: 40218 - RNA, 19 nt, Artificial Sequence
  Antisense Oligo
cuguaauucuagaccuagc

SEQ ID NO: 40219 - RNA, 19 nt, Artificial Sequence
  Sense Oligo
cuaggucuagaauuacaga

SEQ ID NO: 40220 - RNA, 19 nt, Artificial Sequence
  Antisense Oligo
ucuguaauucuagaccuag

SEQ ID NO: 40221 - RNA, 19 nt, Artificial Sequence
  Sense Oligo
ucuagaauuacagaccgga

SEQ ID NO: 40222 - RNA, 19 nt, Artificial Sequence
  Antisense Oligo
uccggucuguaauucuaga

SEQ ID NO: 40223 - RNA, 19 nt, Artificial Sequence
  Sense Oligo
cuagaauuacagaccggaa

SEQ ID NO: 40224 - RNA, 19 nt, Artificial Sequence
  Antisense Oligo
uuccggucuguaauucuag

SEQ ID NO: 40225 - RNA, 19 nt, Artificial Sequence
  Sense Oligo
uagaauuacagaccggaag

SEQ ID NO: 40226 - RNA, 19 nt, Artificial Sequence
  Antisense Oligo
cuuccggucuguaauucua

SEQ ID NO: 40227 - RNA, 19 nt, Artificial Sequence
  Sense Oligo
agaauuacagaccggaagu

SEQ ID NO: 40228 - RNA, 19 nt, Artificial Sequence
  Antisense Oligo
acuuccggucuguaauucu

SEQ ID NO: 40229 - RNA, 19 nt, Artificial Sequence
  Sense Oligo
gaauuacagaccggaaguc

SEQ ID NO: 40230 - RNA, 19 nt, Artificial Sequence
  Antisense Oligo
gacuuccggucuguaauuc

SEQ ID NO: 40231 - RNA, 19 nt, Artificial Sequence
  Sense Oligo
aauuacagaccggaaguca

SEQ ID NO: 40232 - RNA, 19 nt, Artificial Sequence
  Antisense Oligo
ugacuuccggucuguaauu

SEQ ID NO: 40233 - RNA, 19 nt, Artificial Sequence
  Sense Oligo
auuacagaccggaagucau

SEQ ID NO: 40234 - RNA, 19 nt, Artificial Sequence
  Antisense Oligo
augacuuccggucuguaau

SEQ ID NO: 40235 - RNA, 19 nt, Artificial Sequence
  Sense Oligo
uuacagaccggaagucauu

SEQ ID NO: 40236 - RNA, 19 nt, Artificial Sequence
  Antisense Oligo
aaugacuuccggucuguaa

SEQ ID NO: 40237 - RNA, 19 nt, Artificial Sequence
  Sense Oligo
uacagaccggaagucauuu

SEQ ID NO: 40238 - RNA, 19 nt, Artificial Sequence
  Antisense Oligo
aaaugacuuccggucugua

SEQ ID NO: 40239 - RNA, 19 nt, Artificial Sequence
  Sense Oligo
acagaccggaagucauuuu

SEQ ID NO: 40240 - RNA, 19 nt, Artificial Sequence
  Antisense Oligo
aaaaugacuuccggucugu

SEQ ID NO: 40241 - RNA, 19 nt, Artificial Sequence
  Sense Oligo
cagaccggaagucauuuuc

SEQ ID NO: 40242 - RNA, 19 nt, Artificial Sequence
  Antisense Oligo
gaaaaugacuuccggucug

SEQ ID NO: 40243 - RNA, 19 nt, Artificial Sequence
  Sense Oligo
ucauuuuccuucugaaguu

SEQ ID NO: 40244 - RNA, 19 nt, Artificial Sequence
  Antisense Oligo
aacuucagaaggaaaauga

SEQ ID NO: 40245 - RNA, 19 nt, Artificial Sequence
  Sense Oligo
cauuuuccuucugaaguuu

SEQ ID NO: 40246 - RNA, 19 nt, Artificial Sequence
  Antisense Oligo
aaacuucagaaggaaaaug

SEQ ID NO: 40247 - RNA, 19 nt, Artificial Sequence
  Sense Oligo
aucauugccuccacagugu

SEQ ID NO: 40248 - RNA, 19 nt, Artificial Sequence
  Antisense Oligo
acacuguggaggcaaugau

SEQ ID NO: 40249 - RNA, 19 nt, Artificial Sequence
  Sense Oligo
ucauugccuccacagugug

SEQ ID NO: 40250 - RNA, 19 nt, Artificial Sequence
  Antisense Oligo
cacacuguggaggcaauga

SEQ ID NO: 40251 - RNA, 19 nt, Artificial Sequence
  Sense Oligo
cacaguguggcuauguaug

SEQ ID NO: 40252 - RNA, 19 nt, Artificial Sequence
  Antisense Oligo
cauacauagccacacugug

SEQ ID NO: 40253 - RNA, 19 nt, Artificial Sequence
  Sense Oligo
acaguguggcuauguaugg

SEQ ID NO: 40254 - RNA, 19 nt, Artificial Sequence
  Antisense Oligo
ccauacauagccacacugu

SEQ ID NO: 40255 - RNA, 19 nt, Artificial Sequence
  Sense Oligo
caguguggcuauguaugga

SEQ ID NO: 40256 - RNA, 19 nt, Artificial Sequence
  Antisense Oligo
uccauacauagccacacug

SEQ ID NO: 40257 - RNA, 19 nt, Artificial Sequence
  Sense Oligo
gaaguccgaugcagugcca

SEQ ID NO: 40258 - RNA, 19 nt, Artificial Sequence
  Antisense Oligo
uggcacugcaucggacuuc

SEQ ID NO: 40259 - RNA, 19 nt, Artificial Sequence
  Sense Oligo
aaguccgaugcagugccag

SEQ ID NO: 40260 - RNA, 19 nt, Artificial Sequence
  Antisense Oligo
cuggcacugcaucggacuu

SEQ ID NO: 40261 - RNA, 19 nt, Artificial Sequence
  Sense Oligo
ccgaugcagugccaguuac

SEQ ID NO: 40262 - RNA, 19 nt, Artificial Sequence
  Antisense Oligo
guaacuggcacugcaucgg

SEQ ID NO: 40263 - RNA, 19 nt, Artificial Sequence
  Sense Oligo
cgaugcagugccaguuaca

SEQ ID NO: 40264 - RNA, 19 nt, Artificial Sequence
  Antisense Oligo
uguaacuggcacugcaucg

SEQ ID NO: 40265 - RNA, 19 nt, Artificial Sequence
  Sense Oligo
gaugcagugccaguuacac

SEQ ID NO: 40266 - RNA, 19 nt, Artificial Sequence
  Antisense Oligo
guguaacuggcacugcauc

SEQ ID NO: 40267 - RNA, 19 nt, Artificial Sequence
  Sense Oligo
cauccuucaugugugugac

SEQ ID NO: 40268 - RNA, 19 nt, Artificial Sequence
  Antisense Oligo
gucacacacaugaaggaug

SEQ ID NO: 40269 - RNA, 19 nt, Artificial Sequence
  Sense Oligo
auccuucaugugugugacc

SEQ ID NO: 40270 - RNA, 19 nt, Artificial Sequence
  Antisense Oligo
ggucacacacaugaaggau

SEQ ID NO: 40271 - RNA, 19 nt, Artificial Sequence
  Sense Oligo
uucaugugugugaccuguu

SEQ ID NO: 40272 - RNA, 19 nt, Artificial Sequence
  Antisense Oligo
aacaggucacacacaugaa

SEQ ID NO: 40273 - RNA, 19 nt, Artificial Sequence
  Sense Oligo
ucaugugugugaccuguuu

SEQ ID NO: 40274 - RNA, 19 nt, Artificial Sequence
  Antisense Oligo
aaacaggucacacacauga

SEQ ID NO: 40275 - RNA, 19 nt, Artificial Sequence
  Sense Oligo
caugugugugaccuguuuu

SEQ ID NO: 40276 - RNA, 19 nt, Artificial Sequence
  Antisense Oligo
aaaacaggucacacacaug

SEQ ID NO: 40277 - RNA, 19 nt, Artificial Sequence
  Sense Oligo
augugugugaccuguuuuc

SEQ ID NO: 40278 - RNA, 19 nt, Artificial Sequence
  Antisense Oligo
gaaaacaggucacacacau

SEQ ID NO: 40279 - RNA, 19 nt, Artificial Sequence
  Sense Oligo
gugaccuguuuucucuuuc

SEQ ID NO: 40280 - RNA, 19 nt, Artificial Sequence
  Antisense Oligo
gaaagagaaaacaggucac

SEQ ID NO: 40281 - RNA, 19 nt, Artificial Sequence
  Sense Oligo
gaccuguuuucucuuucuu

SEQ ID NO: 40282 - RNA, 19 nt, Artificial Sequence
  Antisense Oligo
aagaaagagaaaacagguc

SEQ ID NO: 40283 - RNA, 19 nt, Artificial Sequence
  Sense Oligo
accuguuuucucuuucuug

SEQ ID NO: 40284 - RNA, 19 nt, Artificial Sequence
  Antisense Oligo
caagaaagagaaaacaggu

SEQ ID NO: 40285 - RNA, 19 nt, Artificial Sequence
  Sense Oligo
uguuuucucuuucuugaag

SEQ ID NO: 40286 - RNA, 19 nt, Artificial Sequence
  Antisense Oligo
cuucaagaaagagaaaaca

SEQ ID NO: 40287 - RNA, 19 nt, Artificial Sequence
  Sense Oligo
guuuucucuuucuugaagc

SEQ ID NO: 40288 - RNA, 19 nt, Artificial Sequence
  Antisense Oligo
gcuucaagaaagagaaaac

SEQ ID NO: 40289 - RNA, 19 nt, Artificial Sequence
  Sense Oligo
uuuucucuuucuugaagcu

SEQ ID NO: 40290 - RNA, 19 nt, Artificial Sequence
  Antisense Oligo
agcuucaagaaagagaaaa

SEQ ID NO: 40291 - RNA, 19 nt, Artificial Sequence
  Sense Oligo
uuucuugaagcucuugagc

SEQ ID NO: 40292 - RNA, 19 nt, Artificial Sequence
  Antisense Oligo
gcucaagagcuucaagaaa

SEQ ID NO: 40293 - RNA, 19 nt, Artificial Sequence
  Sense Oligo
gcucuugagcucuuucugu

SEQ ID NO: 40294 - RNA, 19 nt, Artificial Sequence
  Antisense Oligo
acagaaagagcucaagagc

SEQ ID NO: 40295 - RNA, 19 nt, Artificial Sequence
  Sense Oligo
agcucuuucuguuacucau

SEQ ID NO: 40296 - RNA, 19 nt, Artificial Sequence
  Antisense Oligo
augaguaacagaaagagcu

SEQ ID NO: 40297 - RNA, 19 nt, Artificial Sequence
  Sense Oligo
cuuucuguuacucauauuc

SEQ ID NO: 40298 - RNA, 19 nt, Artificial Sequence
  Antisense Oligo
gaauaugaguaacagaaag

SEQ ID NO: 40299 - RNA, 19 nt, Artificial Sequence
  Sense Oligo
uucuguuacucauauucug

SEQ ID NO: 40300 - RNA, 19 nt, Artificial Sequence
  Antisense Oligo
cagaauaugaguaacagaa

SEQ ID NO: 40301 - RNA, 19 nt, Artificial Sequence
  Sense Oligo
ucuguuacucauauucuga

SEQ ID NO: 40302 - RNA, 19 nt, Artificial Sequence
  Antisense Oligo
ucagaauaugaguaacaga

SEQ ID NO: 40303 - RNA, 19 nt, Artificial Sequence
  Sense Oligo
cuguuacucauauucugaa

SEQ ID NO: 40304 - RNA, 19 nt, Artificial Sequence
  Antisense Oligo
uucagaauaugaguaacag

SEQ ID NO: 40305 - RNA, 19 nt, Artificial Sequence
  Sense Oligo
aaauaauaacgugucuugg

SEQ ID NO: 40306 - RNA, 19 nt, Artificial Sequence
  Antisense Oligo
ccaagacacguuauuauuu

SEQ ID NO: 40307 - RNA, 19 nt, Artificial Sequence
  Sense Oligo
aauaauaacgugucuuggc

SEQ ID NO: 40308 - RNA, 19 nt, Artificial Sequence
  Antisense Oligo
gccaagacacguuauuauu

SEQ ID NO: 40309 - RNA, 19 nt, Artificial Sequence
  Sense Oligo
auaauaacgugucuuggcc

SEQ ID NO: 40310 - RNA, 19 nt, Artificial Sequence
  Antisense Oligo
ggccaagacacguuauuau

SEQ ID NO: 40311 - RNA, 19 nt, Artificial Sequence
  Sense Oligo
uaauaacgugucuuggccu

SEQ ID NO: 40312 - RNA, 19 nt, Artificial Sequence
  Antisense Oligo
aggccaagacacguuauua

SEQ ID NO: 40313 - RNA, 19 nt, Artificial Sequence
  Sense Oligo
aauaacgugucuuggccug

SEQ ID NO: 40314 - RNA, 19 nt, Artificial Sequence
  Antisense Oligo
caggccaagacacguuauu

SEQ ID NO: 40315 - RNA, 19 nt, Artificial Sequence
  Sense Oligo
auaacgugucuuggccugg

SEQ ID NO: 40316 - RNA, 19 nt, Artificial Sequence
  Antisense Oligo
ccaggccaagacacguuau

SEQ ID NO: 40317 - RNA, 19 nt, Artificial Sequence
  Sense Oligo
uaacgugucuuggccugga

SEQ ID NO: 40318 - RNA, 19 nt, Artificial Sequence
  Antisense Oligo
uccaggccaagacacguua

SEQ ID NO: 40319 - RNA, 19 nt, Artificial Sequence
  Sense Oligo
gugucuuggccuggaucua

SEQ ID NO: 40320 - RNA, 19 nt, Artificial Sequence
  Antisense Oligo
uagauccaggccaagacac

SEQ ID NO: 40321 - RNA, 19 nt, Artificial Sequence
  Sense Oligo
ugucuuggccuggaucuau

SEQ ID NO: 40322 - RNA, 19 nt, Artificial Sequence
  Antisense Oligo
auagauccaggccaagaca

SEQ ID NO: 40323 - RNA, 19 nt, Artificial Sequence
  Sense Oligo
gucuuggccuggaucuaug

SEQ ID NO: 40324 - RNA, 19 nt, Artificial Sequence
  Antisense Oligo
cauagauccaggccaagac

SEQ ID NO: 40325 - RNA, 19 nt, Artificial Sequence
  Sense Oligo
ggaucuauguuccaucgag

SEQ ID NO: 40326 - RNA, 19 nt, Artificial Sequence
  Antisense Oligo
cucgauggaacauagaucc

SEQ ID NO: 40327 - RNA, 19 nt, Artificial Sequence
  Sense Oligo
gaucuauguuccaucgagg

SEQ ID NO: 40328 - RNA, 19 nt, Artificial Sequence
  Antisense Oligo
ccucgauggaacauagauc

SEQ ID NO: 40329 - RNA, 19 nt, Artificial Sequence
  Sense Oligo
aucuauguuccaucgaggc

SEQ ID NO: 40330 - RNA, 19 nt, Artificial Sequence
  Antisense Oligo
gccucgauggaacauagau

SEQ ID NO: 40331 - RNA, 19 nt, Artificial Sequence
  Sense Oligo
ucuauguuccaucgaggcu

SEQ ID NO: 40332 - RNA, 19 nt, Artificial Sequence
  Antisense Oligo
agccucgauggaacauaga

SEQ ID NO: 40333 - RNA, 19 nt, Artificial Sequence
  Sense Oligo
cuauguuccaucgaggcug

SEQ ID NO: 40334 - RNA, 19 nt, Artificial Sequence
  Antisense Oligo
cagccucgauggaacauag

SEQ ID NO: 40335 - RNA, 19 nt, Artificial Sequence
  Sense Oligo
uauguuccaucgaggcugg

SEQ ID NO: 40336 - RNA, 19 nt, Artificial Sequence
  Antisense Oligo
ccagccucgauggaacaua

SEQ ID NO: 40337 - RNA, 19 nt, Artificial Sequence
  Sense Oligo
auguuccaucgaggcuggg

SEQ ID NO: 40338 - RNA, 19 nt, Artificial Sequence
  Antisense Oligo
cccagccucgauggaacau

SEQ ID NO: 40339 - RNA, 19 nt, Artificial Sequence
  Sense Oligo
uguuccaucgaggcugggc

SEQ ID NO: 40340 - RNA, 19 nt, Artificial Sequence
  Antisense Oligo
gcccagccucgauggaaca

SEQ ID NO: 40341 - RNA, 19 nt, Artificial Sequence
  Sense Oligo
guuccaucgaggcugggca

SEQ ID NO: 40342 - RNA, 19 nt, Artificial Sequence
  Antisense Oligo
ugcccagccucgauggaac

SEQ ID NO: 40343 - RNA, 19 nt, Artificial Sequence
  Sense Oligo
uuccaucgaggcugggcau

SEQ ID NO: 40344 - RNA, 19 nt, Artificial Sequence
  Antisense Oligo
augcccagccucgauggaa

SEQ ID NO: 40345 - RNA, 19 nt, Artificial Sequence
  Sense Oligo
uccaucgaggcugggcaug

SEQ ID NO: 40346 - RNA, 19 nt, Artificial Sequence
  Antisense Oligo
caugcccagccucgaugga

SEQ ID NO: 40347 - RNA, 19 nt, Artificial Sequence
  Sense Oligo
ccaucgaggcugggcaugu

SEQ ID NO: 40348 - RNA, 19 nt, Artificial Sequence
  Antisense Oligo
acaugcccagccucgaugg

SEQ ID NO: 40349 - RNA, 19 nt, Artificial Sequence
  Sense Oligo
caucgaggcugggcauguu

SEQ ID NO: 40350 - RNA, 19 nt, Artificial Sequence
  Antisense Oligo
aacaugcccagccucgaug

SEQ ID NO: 40351 - RNA, 19 nt, Artificial Sequence
  Sense Oligo
aucgaggcugggcauguug

SEQ ID NO: 40352 - RNA, 19 nt, Artificial Sequence
  Antisense Oligo
caacaugcccagccucgau

SEQ ID NO: 40353 - RNA, 19 nt, Artificial Sequence
  Sense Oligo
ccaccuguaaucccagcac

SEQ ID NO: 40354 - RNA, 19 nt, Artificial Sequence
  Antisense Oligo
gugcugggauuacaggugg

SEQ ID NO: 40355 - RNA, 19 nt, Artificial Sequence
  Sense Oligo
uguaaucccagcacuucag

SEQ ID NO: 40356 - RNA, 19 nt, Artificial Sequence
  Antisense Oligo
cugaagugcugggauuaca

SEQ ID NO: 40357 - RNA, 19 nt, Artificial Sequence
  Sense Oligo
guaaucccagcacuucagg

SEQ ID NO: 40358 - RNA, 19 nt, Artificial Sequence
  Antisense Oligo
ccugaagugcugggauuac

SEQ ID NO: 40359 - RNA, 19 nt, Artificial Sequence
  Sense Oligo
cuucaggaggccaaggcag

SEQ ID NO: 40360 - RNA, 19 nt, Artificial Sequence
  Antisense Oligo
cugccuuggccuccugaag

SEQ ID NO: 40361 - RNA, 19 nt, Artificial Sequence
  Sense Oligo
uucaggaggccaaggcagg

SEQ ID NO: 40362 - RNA, 19 nt, Artificial Sequence
  Antisense Oligo
ccugccuuggccuccugaa

SEQ ID NO: 40363 - RNA, 19 nt, Artificial Sequence
  Sense Oligo
ucaggaggccaaggcagga

SEQ ID NO: 40364 - RNA, 19 nt, Artificial Sequence
  Antisense Oligo
uccugccuuggccuccuga

SEQ ID NO: 40365 - RNA, 19 nt, Artificial Sequence
  Sense Oligo
aggccaaggcaggaggacu

SEQ ID NO: 40366 - RNA, 19 nt, Artificial Sequence
  Antisense Oligo
aguccuccugccuuggccu

SEQ ID NO: 40367 - RNA, 19 nt, Artificial Sequence
  Sense Oligo
auuagcaagacacgguggu

SEQ ID NO: 40368 - RNA, 19 nt, Artificial Sequence
  Antisense Oligo
accaccgugucuugcuaau

SEQ ID NO: 40369 - RNA, 19 nt, Artificial Sequence
  Sense Oligo
uuagcaagacacgguggug

SEQ ID NO: 40370 - RNA, 19 nt, Artificial Sequence
  Antisense Oligo
caccaccgugucuugcuaa

SEQ ID NO: 40371 - RNA, 19 nt, Artificial Sequence
  Sense Oligo
agacacgguggugcaugcc

SEQ ID NO: 40372 - RNA, 19 nt, Artificial Sequence
  Antisense Oligo
ggcaugcaccaccgugucu

SEQ ID NO: 40373 - RNA, 19 nt, Artificial Sequence
  Sense Oligo
gacacgguggugcaugccu

SEQ ID NO: 40374 - RNA, 19 nt, Artificial Sequence
  Antisense Oligo
aggcaugcaccaccguguc

SEQ ID NO: 40375 - RNA, 19 nt, Artificial Sequence
  Sense Oligo
acacgguggugcaugccug

SEQ ID NO: 40376 - RNA, 19 nt, Artificial Sequence
  Antisense Oligo
caggcaugcaccaccgugu

SEQ ID NO: 40377 - RNA, 19 nt, Artificial Sequence
  Sense Oligo
cacgguggugcaugccugu

SEQ ID NO: 40378 - RNA, 19 nt, Artificial Sequence
  Antisense Oligo
acaggcaugcaccaccgug

SEQ ID NO: 40379 - RNA, 19 nt, Artificial Sequence
  Sense Oligo
acgguggugcaugccugua

SEQ ID NO: 40380 - RNA, 19 nt, Artificial Sequence
  Antisense Oligo
uacaggcaugcaccaccgu

SEQ ID NO: 40381 - RNA, 19 nt, Artificial Sequence
  Sense Oligo
cgguggugcaugccuguau

SEQ ID NO: 40382 - RNA, 19 nt, Artificial Sequence
  Antisense Oligo
auacaggcaugcaccaccg

SEQ ID NO: 40383 - RNA, 19 nt, Artificial Sequence
  Sense Oligo
gguggugcaugccuguauu

SEQ ID NO: 40384 - RNA, 19 nt, Artificial Sequence
  Antisense Oligo
aauacaggcaugcaccacc

SEQ ID NO: 40385 - RNA, 19 nt, Artificial Sequence
  Sense Oligo
guggugcaugccuguauuc

SEQ ID NO: 40386 - RNA, 19 nt, Artificial Sequence
  Antisense Oligo
gaauacaggcaugcaccac

SEQ ID NO: 40387 - RNA, 19 nt, Artificial Sequence
  Sense Oligo
uggugcaugccuguauucc

SEQ ID NO: 40388 - RNA, 19 nt, Artificial Sequence
  Antisense Oligo
ggaauacaggcaugcacca

SEQ ID NO: 40389 - RNA, 19 nt, Artificial Sequence
  Sense Oligo
ggugcaugccuguauuccc

SEQ ID NO: 40390 - RNA, 19 nt, Artificial Sequence
  Antisense Oligo
gggaauacaggcaugcacc

SEQ ID NO: 40391 - RNA, 19 nt, Artificial Sequence
  Sense Oligo
caacuacuugggaggcuga

SEQ ID NO: 40392 - RNA, 19 nt, Artificial Sequence
  Antisense Oligo
ucagccucccaaguaguug

SEQ ID NO: 40393 - RNA, 19 nt, Artificial Sequence
  Sense Oligo
aacuacuugggaggcugag

SEQ ID NO: 40394 - RNA, 19 nt, Artificial Sequence
  Antisense Oligo
cucagccucccaaguaguu

SEQ ID NO: 40395 - RNA, 19 nt, Artificial Sequence
  Sense Oligo
acuacuugggaggcugagg

SEQ ID NO: 40396 - RNA, 19 nt, Artificial Sequence
  Antisense Oligo
ccucagccucccaaguagu

SEQ ID NO: 40397 - RNA, 19 nt, Artificial Sequence
  Sense Oligo
cuacuugggaggcugaggc

SEQ ID NO: 40398 - RNA, 19 nt, Artificial Sequence
  Antisense Oligo
gccucagccucccaaguag

SEQ ID NO: 40399 - RNA, 19 nt, Artificial Sequence
  Sense Oligo
uacuugggaggcugaggca

SEQ ID NO: 40400 - RNA, 19 nt, Artificial Sequence
  Antisense Oligo
ugccucagccucccaagua

SEQ ID NO: 40401 - RNA, 19 nt, Artificial Sequence
  Sense Oligo
acuugggaggcugaggcag

SEQ ID NO: 40402 - RNA, 19 nt, Artificial Sequence
  Antisense Oligo
cugccucagccucccaagu

SEQ ID NO: 40403 - RNA, 19 nt, Artificial Sequence
  Sense Oligo
uugggaggcugaggcagga

SEQ ID NO: 40404 - RNA, 19 nt, Artificial Sequence
  Antisense Oligo
uccugccucagccucccaa

SEQ ID NO: 40405 - RNA, 19 nt, Artificial Sequence
  Sense Oligo
gaggcugaggcaggaggau

SEQ ID NO: 40406 - RNA, 19 nt, Artificial Sequence
  Antisense Oligo
auccuccugccucagccuc

SEQ ID NO: 40407 - RNA, 19 nt, Artificial Sequence
  Sense Oligo
aggcugaggcaggaggauc

SEQ ID NO: 40408 - RNA, 19 nt, Artificial Sequence
  Antisense Oligo
gauccuccugccucagccu

SEQ ID NO: 40409 - RNA, 19 nt, Artificial Sequence
  Sense Oligo
ggcugaggcaggaggauca

SEQ ID NO: 40410 - RNA, 19 nt, Artificial Sequence
  Antisense Oligo
ugauccuccugccucagcc

SEQ ID NO: 40411 - RNA, 19 nt, Artificial Sequence
  Sense Oligo
gcugaggcaggaggaucac

SEQ ID NO: 40412 - RNA, 19 nt, Artificial Sequence
  Antisense Oligo
gugauccuccugccucagc

SEQ ID NO: 40413 - RNA, 19 nt, Artificial Sequence
  Sense Oligo
cugaggcaggaggaucacu

SEQ ID NO: 40414 - RNA, 19 nt, Artificial Sequence
  Antisense Oligo
agugauccuccugccucag

SEQ ID NO: 40415 - RNA, 19 nt, Artificial Sequence
  Sense Oligo
ugaggcaggaggaucacuu

SEQ ID NO: 40416 - RNA, 19 nt, Artificial Sequence
  Antisense Oligo
aagugauccuccugccuca

SEQ ID NO: 40417 - RNA, 19 nt, Artificial Sequence
  Sense Oligo
gaggcaggaggaucacuug

SEQ ID NO: 40418 - RNA, 19 nt, Artificial Sequence
  Antisense Oligo
caagugauccuccugccuc

SEQ ID NO: 40419 - RNA, 19 nt, Artificial Sequence
  Sense Oligo
ggaucacuugagccuggga

SEQ ID NO: 40420 - RNA, 19 nt, Artificial Sequence
  Antisense Oligo
ucccaggcucaagugaucc

SEQ ID NO: 40421 - RNA, 19 nt, Artificial Sequence
  Sense Oligo
cagcuugggugacagagug

SEQ ID NO: 40422 - RNA, 19 nt, Artificial Sequence
  Antisense Oligo
cacucugucacccaagcug

SEQ ID NO: 40423 - RNA, 19 nt, Artificial Sequence
  Sense Oligo
uucaacucuagacaucaaa

SEQ ID NO: 40424 - RNA, 19 nt, Artificial Sequence
  Antisense Oligo
uuugaugucuagaguugaa

SEQ ID NO: 40425 - RNA, 19 nt, Artificial Sequence
  Sense Oligo
ucaacucuagacaucaaaa

SEQ ID NO: 40426 - RNA, 19 nt, Artificial Sequence
  Antisense Oligo
uuuugaugucuagaguuga

SEQ ID NO: 40427 - RNA, 19 nt, Artificial Sequence
  Sense Oligo
caacucuagacaucaaaau

SEQ ID NO: 40428 - RNA, 19 nt, Artificial Sequence
  Antisense Oligo
auuuugaugucuagaguug

SEQ ID NO: 40429 - RNA, 19 nt, Artificial Sequence
  Sense Oligo
cuagacaucaaaauccuug

SEQ ID NO: 40430 - RNA, 19 nt, Artificial Sequence
  Antisense Oligo
caaggauuuugaugucuag

SEQ ID NO: 40431 - RNA, 19 nt, Artificial Sequence
  Sense Oligo
caaaauccuugaguucugg

SEQ ID NO: 40432 - RNA, 19 nt, Artificial Sequence
  Antisense Oligo
ccagaacucaaggauuuug

SEQ ID NO: 40433 - RNA, 19 nt, Artificial Sequence
  Sense Oligo
aaaauccuugaguucuggg

SEQ ID NO: 40434 - RNA, 19 nt, Artificial Sequence
  Antisense Oligo
cccagaacucaaggauuuu

SEQ ID NO: 40435 - RNA, 19 nt, Artificial Sequence
  Sense Oligo
aaauccuugaguucuggga

SEQ ID NO: 40436 - RNA, 19 nt, Artificial Sequence
  Antisense Oligo
ucccagaacucaaggauuu

SEQ ID NO: 40437 - RNA, 19 nt, Artificial Sequence
  Sense Oligo
ccuguuaauuggauauggg

SEQ ID NO: 40438 - RNA, 19 nt, Artificial Sequence
  Antisense Oligo
cccauauccaauuaacagg

SEQ ID NO: 40439 - RNA, 19 nt, Artificial Sequence
  Sense Oligo
cuguuaauuggauauggga

SEQ ID NO: 40440 - RNA, 19 nt, Artificial Sequence
  Antisense Oligo
ucccauauccaauuaacag

SEQ ID NO: 40441 - RNA, 19 nt, Artificial Sequence
  Sense Oligo
uaauuggauaugggaccuc

SEQ ID NO: 40442 - RNA, 19 nt, Artificial Sequence
  Antisense Oligo
gaggucccauauccaauua

SEQ ID NO: 40443 - RNA, 19 nt, Artificial Sequence
  Sense Oligo
aauuggauaugggaccucc

SEQ ID NO: 40444 - RNA, 19 nt, Artificial Sequence
  Antisense Oligo
ggaggucccauauccaauu

SEQ ID NO: 40445 - RNA, 19 nt, Artificial Sequence
  Sense Oligo
augggaccuccuggaugau

SEQ ID NO: 40446 - RNA, 19 nt, Artificial Sequence
  Antisense Oligo
aucauccaggaggucccau

SEQ ID NO: 40447 - RNA, 19 nt, Artificial Sequence
  Sense Oligo
ugggaccuccuggaugauc

SEQ ID NO: 40448 - RNA, 19 nt, Artificial Sequence
  Antisense Oligo
gaucauccaggagguccca

SEQ ID NO: 40449 - RNA, 19 nt, Artificial Sequence
  Sense Oligo
gggaccuccuggaugauca

SEQ ID NO: 40450 - RNA, 19 nt, Artificial Sequence
  Antisense Oligo
ugaucauccaggagguccc

SEQ ID NO: 40451 - RNA, 19 nt, Artificial Sequence
  Sense Oligo
ggaccuccuggaugaucau

SEQ ID NO: 40452 - RNA, 19 nt, Artificial Sequence
  Antisense Oligo
augaucauccaggaggucc

SEQ ID NO: 40453 - RNA, 19 nt, Artificial Sequence
  Sense Oligo
gaccuccuggaugaucauc

SEQ ID NO: 40454 - RNA, 19 nt, Artificial Sequence
  Antisense Oligo
gaugaucauccaggagguc

SEQ ID NO: 40455 - RNA, 19 nt, Artificial Sequence
  Sense Oligo
accuccuggaugaucaucu

SEQ ID NO: 40456 - RNA, 19 nt, Artificial Sequence
  Antisense Oligo
agaugaucauccaggaggu

SEQ ID NO: 40457 - RNA, 19 nt, Artificial Sequence
  Sense Oligo
ccuccuggaugaucaucua

SEQ ID NO: 40458 - RNA, 19 nt, Artificial Sequence
  Antisense Oligo
uagaugaucauccaggagg

SEQ ID NO: 40459 - RNA, 19 nt, Artificial Sequence
  Sense Oligo
cuccuggaugaucaucuaa

SEQ ID NO: 40460 - RNA, 19 nt, Artificial Sequence
  Antisense Oligo
uuagaugaucauccaggag

SEQ ID NO: 40461 - RNA, 19 nt, Artificial Sequence
  Sense Oligo
uccuggaugaucaucuaac

SEQ ID NO: 40462 - RNA, 19 nt, Artificial Sequence
  Antisense Oligo
guuagaugaucauccagga

SEQ ID NO: 40463 - RNA, 19 nt, Artificial Sequence
  Sense Oligo
ccuggaugaucaucuaacu

SEQ ID NO: 40464 - RNA, 19 nt, Artificial Sequence
  Antisense Oligo
aguuagaugaucauccagg

SEQ ID NO: 40465 - RNA, 19 nt, Artificial Sequence
  Sense Oligo
gaugaucaucuaacuguca

SEQ ID NO: 40466 - RNA, 19 nt, Artificial Sequence
  Antisense Oligo
ugacaguuagaugaucauc

SEQ ID NO: 40467 - RNA, 19 nt, Artificial Sequence
  Sense Oligo
aucaucuaacugucaucau

SEQ ID NO: 40468 - RNA, 19 nt, Artificial Sequence
  Antisense Oligo
augaugacaguuagaugau

SEQ ID NO: 40469 - RNA, 19 nt, Artificial Sequence
  Sense Oligo
ucaucuaacugucaucauu

SEQ ID NO: 40470 - RNA, 19 nt, Artificial Sequence
  Antisense Oligo
aaugaugacaguuagauga

SEQ ID NO: 40471 - RNA, 19 nt, Artificial Sequence
  Sense Oligo
aacuuucugcuuagguuuu

SEQ ID NO: 40472 - RNA, 19 nt, Artificial Sequence
  Antisense Oligo
aaaaccuaagcagaaaguu

SEQ ID NO: 40473 - RNA, 19 nt, Artificial Sequence
  Sense Oligo
acuuucugcuuagguuuuc

SEQ ID NO: 40474 - RNA, 19 nt, Artificial Sequence
  Antisense Oligo
gaaaaccuaagcagaaagu

SEQ ID NO: 40475 - RNA, 19 nt, Artificial Sequence
  Sense Oligo
uuucugcuuagguuuucau

SEQ ID NO: 40476 - RNA, 19 nt, Artificial Sequence
  Antisense Oligo
augaaaaccuaagcagaaa

SEQ ID NO: 40477 - RNA, 19 nt, Artificial Sequence
  Sense Oligo
uucugcuuagguuuucaug

SEQ ID NO: 40478 - RNA, 19 nt, Artificial Sequence
  Antisense Oligo
caugaaaaccuaagcagaa

SEQ ID NO: 40479 - RNA, 19 nt, Artificial Sequence
  Sense Oligo
cugcuuagguuuucauguc

SEQ ID NO: 40480 - RNA, 19 nt, Artificial Sequence
  Antisense Oligo
gacaugaaaaccuaagcag

SEQ ID NO: 40481 - RNA, 19 nt, Artificial Sequence
  Sense Oligo
ugcuuagguuuucauguca

SEQ ID NO: 40482 - RNA, 19 nt, Artificial Sequence
  Antisense Oligo
ugacaugaaaaccuaagca

SEQ ID NO: 40483 - RNA, 19 nt, Artificial Sequence
  Sense Oligo
gcuuagguuuucaugucag

SEQ ID NO: 40484 - RNA, 19 nt, Artificial Sequence
  Antisense Oligo
cugacaugaaaaccuaagc

SEQ ID NO: 40485 - RNA, 19 nt, Artificial Sequence
  Sense Oligo
cuuagguuuucaugucagc

SEQ ID NO: 40486 - RNA, 19 nt, Artificial Sequence
  Antisense Oligo
gcugacaugaaaaccuaag

SEQ ID NO: 40487 - RNA, 19 nt, Artificial Sequence
  Sense Oligo
uuagguuuucaugucagcu

SEQ ID NO: 40488 - RNA, 19 nt, Artificial Sequence
  Antisense Oligo
agcugacaugaaaaccuaa

SEQ ID NO: 40489 - RNA, 19 nt, Artificial Sequence
  Sense Oligo
uagguuuucaugucagcuu

SEQ ID NO: 40490 - RNA, 19 nt, Artificial Sequence
  Antisense Oligo
aagcugacaugaaaaccua

SEQ ID NO: 40491 - RNA, 19 nt, Artificial Sequence
  Sense Oligo
uuuucucggaauguuccuu

SEQ ID NO: 40492 - RNA, 19 nt, Artificial Sequence
  Antisense Oligo
aaggaacauuccgagaaaa

SEQ ID NO: 40493 - RNA, 19 nt, Artificial Sequence
  Sense Oligo
uuucucggaauguuccuuu

SEQ ID NO: 40494 - RNA, 19 nt, Artificial Sequence
  Antisense Oligo
aaaggaacauuccgagaaa

SEQ ID NO: 40495 - RNA, 19 nt, Artificial Sequence
  Sense Oligo
uucucggaauguuccuuuu

SEQ ID NO: 40496 - RNA, 19 nt, Artificial Sequence
  Antisense Oligo
aaaaggaacauuccgagaa

SEQ ID NO: 40497 - RNA, 19 nt, Artificial Sequence
  Sense Oligo
uuuaaauucuguccuguuc

SEQ ID NO: 40498 - RNA, 19 nt, Artificial Sequence
  Antisense Oligo
gaacaggacagaauuuaaa

SEQ ID NO: 40499 - RNA, 19 nt, Artificial Sequence
  Sense Oligo
aaauucuguccuguucuug

SEQ ID NO: 40500 - RNA, 19 nt, Artificial Sequence
  Antisense Oligo
caagaacaggacagaauuu

SEQ ID NO: 40501 - RNA, 19 nt, Artificial Sequence
  Sense Oligo
auucuguccuguucuuguu

SEQ ID NO: 40502 - RNA, 19 nt, Artificial Sequence
  Antisense Oligo
aacaagaacaggacagaau

SEQ ID NO: 40503 - RNA, 19 nt, Artificial Sequence
  Sense Oligo
uucuguccuguucuuguuc

SEQ ID NO: 40504 - RNA, 19 nt, Artificial Sequence
  Antisense Oligo
gaacaagaacaggacagaa

SEQ ID NO: 40505 - RNA, 19 nt, Artificial Sequence
  Sense Oligo
uguccuguucuuguucacg

SEQ ID NO: 40506 - RNA, 19 nt, Artificial Sequence
  Antisense Oligo
cgugaacaagaacaggaca

SEQ ID NO: 40507 - RNA, 19 nt, Artificial Sequence
  Sense Oligo
guccuguucuuguucacgu

SEQ ID NO: 40508 - RNA, 19 nt, Artificial Sequence
  Antisense Oligo
acgugaacaagaacaggac

SEQ ID NO: 40509 - RNA, 19 nt, Artificial Sequence
  Sense Oligo
ccuguucuuguucacguug

SEQ ID NO: 40510 - RNA, 19 nt, Artificial Sequence
  Antisense Oligo
caacgugaacaagaacagg

SEQ ID NO: 40511 - RNA, 19 nt, Artificial Sequence
  Sense Oligo
cuguucuuguucacguugc

SEQ ID NO: 40512 - RNA, 19 nt, Artificial Sequence
  Antisense Oligo
gcaacgugaacaagaacag

SEQ ID NO: 40513 - RNA, 19 nt, Artificial Sequence
  Sense Oligo
uguucuuguucacguugca

SEQ ID NO: 40514 - RNA, 19 nt, Artificial Sequence
  Antisense Oligo
ugcaacgugaacaagaaca

SEQ ID NO: 40515 - RNA, 19 nt, Artificial Sequence
  Sense Oligo
guucuuguucacguugcag

SEQ ID NO: 40516 - RNA, 19 nt, Artificial Sequence
  Antisense Oligo
cugcaacgugaacaagaac

SEQ ID NO: 40517 - RNA, 19 nt, Artificial Sequence
  Sense Oligo
uucuuguucacguugcagc

SEQ ID NO: 40518 - RNA, 19 nt, Artificial Sequence
  Antisense Oligo
gcugcaacgugaacaagaa

SEQ ID NO: 40519 - RNA, 19 nt, Artificial Sequence
  Sense Oligo
ucuuguucacguugcagca

SEQ ID NO: 40520 - RNA, 19 nt, Artificial Sequence
  Antisense Oligo
ugcugcaacgugaacaaga

SEQ ID NO: 40521 - RNA, 19 nt, Artificial Sequence
  Sense Oligo
cuuguucacguugcagcau

SEQ ID NO: 40522 - RNA, 19 nt, Artificial Sequence
  Antisense Oligo
augcugcaacgugaacaag

SEQ ID NO: 40523 - RNA, 19 nt, Artificial Sequence
  Sense Oligo
uuguucacguugcagcauc

SEQ ID NO: 40524 - RNA, 19 nt, Artificial Sequence
  Antisense Oligo
gaugcugcaacgugaacaa

SEQ ID NO: 40525 - RNA, 19 nt, Artificial Sequence
  Sense Oligo
uguucacguugcagcaucu

SEQ ID NO: 40526 - RNA, 19 nt, Artificial Sequence
  Antisense Oligo
agaugcugcaacgugaaca

SEQ ID NO: 40527 - RNA, 19 nt, Artificial Sequence
  Sense Oligo
guucacguugcagcaucuu

SEQ ID NO: 40528 - RNA, 19 nt, Artificial Sequence
  Antisense Oligo
aagaugcugcaacgugaac

SEQ ID NO: 40529 - RNA, 19 nt, Artificial Sequence
  Sense Oligo
uucacguugcagcaucuuc

SEQ ID NO: 40530 - RNA, 19 nt, Artificial Sequence
  Antisense Oligo
gaagaugcugcaacgugaa

SEQ ID NO: 40531 - RNA, 19 nt, Artificial Sequence
  Sense Oligo
cguugcagcaucuucccuu

SEQ ID NO: 40532 - RNA, 19 nt, Artificial Sequence
  Antisense Oligo
aagggaagaugcugcaacg

SEQ ID NO: 40533 - RNA, 19 nt, Artificial Sequence
  Sense Oligo
ugcagcaucuucccuucug

SEQ ID NO: 40534 - RNA, 19 nt, Artificial Sequence
  Antisense Oligo
cagaagggaagaugcugca

SEQ ID NO: 40535 - RNA, 19 nt, Artificial Sequence
  Sense Oligo
gcagcaucuucccuucugg

SEQ ID NO: 40536 - RNA, 19 nt, Artificial Sequence
  Antisense Oligo
ccagaagggaagaugcugc

SEQ ID NO: 40537 - RNA, 19 nt, Artificial Sequence
  Sense Oligo
caucuucccuucuggguua

SEQ ID NO: 40538 - RNA, 19 nt, Artificial Sequence
  Antisense Oligo
uaacccagaagggaagaug

SEQ ID NO: 40539 - RNA, 19 nt, Artificial Sequence
  Sense Oligo
aucuucccuucuggguuau

SEQ ID NO: 40540 - RNA, 19 nt, Artificial Sequence
  Antisense Oligo
auaacccagaagggaagau

SEQ ID NO: 40541 - RNA, 19 nt, Artificial Sequence
  Sense Oligo
cuucccuucuggguuauuc

SEQ ID NO: 40542 - RNA, 19 nt, Artificial Sequence
  Antisense Oligo
gaauaacccagaagggaag

SEQ ID NO: 40543 - RNA, 19 nt, Artificial Sequence
  Sense Oligo
uucccuucuggguuauuca

SEQ ID NO: 40544 - RNA, 19 nt, Artificial Sequence
  Antisense Oligo
ugaauaacccagaagggaa

SEQ ID NO: 40545 - RNA, 19 nt, Artificial Sequence
  Sense Oligo
cuggguuauucaccguuuu

SEQ ID NO: 40546 - RNA, 19 nt, Artificial Sequence
  Antisense Oligo
aaaacggugaauaacccag

SEQ ID NO: 40547 - RNA, 19 nt, Artificial Sequence
  Sense Oligo
uggguuauucaccguuuug

SEQ ID NO: 40548 - RNA, 19 nt, Artificial Sequence
  Antisense Oligo
caaaacggugaauaaccca

SEQ ID NO: 40549 - RNA, 19 nt, Artificial Sequence
  Sense Oligo
ggguuauucaccguuuugu

SEQ ID NO: 40550 - RNA, 19 nt, Artificial Sequence
  Antisense Oligo
acaaaacggugaauaaccc

SEQ ID NO: 40551 - RNA, 19 nt, Artificial Sequence
  Sense Oligo
uauucaccguuuuguuuug

SEQ ID NO: 40552 - RNA, 19 nt, Artificial Sequence
  Antisense Oligo
caaaacaaaacggugaaua

SEQ ID NO: 40553 - RNA, 19 nt, Artificial Sequence
  Sense Oligo
auucaccguuuuguuuugg

SEQ ID NO: 40554 - RNA, 19 nt, Artificial Sequence
  Antisense Oligo
ccaaaacaaaacggugaau

SEQ ID NO: 40555 - RNA, 19 nt, Artificial Sequence
  Sense Oligo
uucaccguuuuguuuugga

SEQ ID NO: 40556 - RNA, 19 nt, Artificial Sequence
  Antisense Oligo
uccaaaacaaaacggugaa

SEQ ID NO: 40557 - RNA, 19 nt, Artificial Sequence
  Sense Oligo
ucaccguuuuguuuuggag

SEQ ID NO: 40558 - RNA, 19 nt, Artificial Sequence
  Antisense Oligo
cuccaaaacaaaacgguga

SEQ ID NO: 40559 - RNA, 19 nt, Artificial Sequence
  Sense Oligo
caccguuuuguuuuggagg

SEQ ID NO: 40560 - RNA, 19 nt, Artificial Sequence
  Antisense Oligo
ccuccaaaacaaaacggug

SEQ ID NO: 40561 - RNA, 19 nt, Artificial Sequence
  Sense Oligo
accguuuuguuuuggaggu

SEQ ID NO: 40562 - RNA, 19 nt, Artificial Sequence
  Antisense Oligo
accuccaaaacaaaacggu

SEQ ID NO: 40563 - RNA, 19 nt, Artificial Sequence
  Sense Oligo
ccguuuuguuuuggagguu

SEQ ID NO: 40564 - RNA, 19 nt, Artificial Sequence
  Antisense Oligo
aaccuccaaaacaaaacgg

SEQ ID NO: 40565 - RNA, 19 nt, Artificial Sequence
  Sense Oligo
cguuuuguuuuggagguuu

SEQ ID NO: 40566 - RNA, 19 nt, Artificial Sequence
  Antisense Oligo
aaaccuccaaaacaaaacg

SEQ ID NO: 40567 - RNA, 19 nt, Artificial Sequence
  Sense Oligo
uuguuuuggagguuuugcu

SEQ ID NO: 40568 - RNA, 19 nt, Artificial Sequence
  Antisense Oligo
agcaaaaccuccaaaacaa

SEQ ID NO: 40569 - RNA, 19 nt, Artificial Sequence
  Sense Oligo
guuuuggagguuuugcuuu

SEQ ID NO: 40570 - RNA, 19 nt, Artificial Sequence
  Antisense Oligo
aaagcaaaaccuccaaaac

SEQ ID NO: 40571 - RNA, 19 nt, Artificial Sequence
  Sense Oligo
uuuuggagguuuugcuuuu

SEQ ID NO: 40572 - RNA, 19 nt, Artificial Sequence
  Antisense Oligo
aaaagcaaaaccuccaaaa

SEQ ID NO: 40573 - RNA, 19 nt, Artificial Sequence
  Sense Oligo
uuggagguuuugcuuuucc

SEQ ID NO: 40574 - RNA, 19 nt, Artificial Sequence
  Antisense Oligo
ggaaaagcaaaaccuccaa

SEQ ID NO: 40575 - RNA, 19 nt, Artificial Sequence
  Sense Oligo
guuuugcuuuuccuggcau

SEQ ID NO: 40576 - RNA, 19 nt, Artificial Sequence
  Antisense Oligo
augccaggaaaagcaaaac

SEQ ID NO: 40577 - RNA, 19 nt, Artificial Sequence
  Sense Oligo
uuugcuuuuccuggcauca

SEQ ID NO: 40578 - RNA, 19 nt, Artificial Sequence
  Antisense Oligo
ugaugccaggaaaagcaaa

SEQ ID NO: 40579 - RNA, 19 nt, Artificial Sequence
  Sense Oligo
uugcuuuuccuggcaucau

SEQ ID NO: 40580 - RNA, 19 nt, Artificial Sequence
  Antisense Oligo
augaugccaggaaaagcaa

SEQ ID NO: 40581 - RNA, 19 nt, Artificial Sequence
  Sense Oligo
gcuuuuccuggcaucaugu

SEQ ID NO: 40582 - RNA, 19 nt, Artificial Sequence
  Antisense Oligo
acaugaugccaggaaaagc

SEQ ID NO: 40583 - RNA, 19 nt, Artificial Sequence
  Sense Oligo
cuuuuccuggcaucaugug

SEQ ID NO: 40584 - RNA, 19 nt, Artificial Sequence
  Antisense Oligo
cacaugaugccaggaaaag

SEQ ID NO: 40585 - RNA, 19 nt, Artificial Sequence
  Sense Oligo
uuuuccuggcaucaugugc

SEQ ID NO: 40586 - RNA, 19 nt, Artificial Sequence
  Antisense Oligo
gcacaugaugccaggaaaa

SEQ ID NO: 40587 - RNA, 19 nt, Artificial Sequence
  Sense Oligo
ggcaucaugugcugcuucc

SEQ ID NO: 40588 - RNA, 19 nt, Artificial Sequence
  Antisense Oligo
ggaagcagcacaugaugcc

SEQ ID NO: 40589 - RNA, 19 nt, Artificial Sequence
  Sense Oligo
gcaucaugugcugcuuccu

SEQ ID NO: 40590 - RNA, 19 nt, Artificial Sequence
  Antisense Oligo
aggaagcagcacaugaugc

SEQ ID NO: 40591 - RNA, 19 nt, Artificial Sequence
  Sense Oligo
caucaugugcugcuuccuc

SEQ ID NO: 40592 - RNA, 19 nt, Artificial Sequence
  Antisense Oligo
gaggaagcagcacaugaug

SEQ ID NO: 40593 - RNA, 19 nt, Artificial Sequence
  Sense Oligo
ugugcugcuuccuccaggu

SEQ ID NO: 40594 - RNA, 19 nt, Artificial Sequence
  Antisense Oligo
accuggaggaagcagcaca

SEQ ID NO: 40595 - RNA, 19 nt, Artificial Sequence
  Sense Oligo
cugcuuccuccagguuccu

SEQ ID NO: 40596 - RNA, 19 nt, Artificial Sequence
  Antisense Oligo
aggaaccuggaggaagcag

SEQ ID NO: 40597 - RNA, 19 nt, Artificial Sequence
  Sense Oligo
ugcuuccuccagguuccuu

SEQ ID NO: 40598 - RNA, 19 nt, Artificial Sequence
  Antisense Oligo
aaggaaccuggaggaagca

SEQ ID NO: 40599 - RNA, 19 nt, Artificial Sequence
  Sense Oligo
gcuuccuccagguuccuuu

SEQ ID NO: 40600 - RNA, 19 nt, Artificial Sequence
  Antisense Oligo
aaaggaaccuggaggaagc

SEQ ID NO: 40601 - RNA, 19 nt, Artificial Sequence
  Sense Oligo
cuccagguuccuuucacuu

SEQ ID NO: 40602 - RNA, 19 nt, Artificial Sequence
  Antisense Oligo
aagugaaaggaaccuggag

SEQ ID NO: 40603 - RNA, 19 nt, Artificial Sequence
  Sense Oligo
uccagguuccuuucacuug

SEQ ID NO: 40604 - RNA, 19 nt, Artificial Sequence
  Antisense Oligo
caagugaaaggaaccugga

SEQ ID NO: 40605 - RNA, 19 nt, Artificial Sequence
  Sense Oligo
ccagguuccuuucacuugu

SEQ ID NO: 40606 - RNA, 19 nt, Artificial Sequence
  Antisense Oligo
acaagugaaaggaaccugg

SEQ ID NO: 40607 - RNA, 19 nt, Artificial Sequence
  Sense Oligo
cagguuccuuucacuuguu

SEQ ID NO: 40608 - RNA, 19 nt, Artificial Sequence
  Antisense Oligo
aacaagugaaaggaaccug

SEQ ID NO: 40609 - RNA, 19 nt, Artificial Sequence
  Sense Oligo
cacuuguugauuuguuuug

SEQ ID NO: 40610 - RNA, 19 nt, Artificial Sequence
  Antisense Oligo
caaaacaaaucaacaagug

SEQ ID NO: 40611 - RNA, 19 nt, Artificial Sequence
  Sense Oligo
gauuuuccuccuaugucug

SEQ ID NO: 40612 - RNA, 19 nt, Artificial Sequence
  Antisense Oligo
cagacauaggaggaaaauc

SEQ ID NO: 40613 - RNA, 19 nt, Artificial Sequence
  Sense Oligo
uuuuccuccuaugucugga

SEQ ID NO: 40614 - RNA, 19 nt, Artificial Sequence
  Antisense Oligo
uccagacauaggaggaaaa

SEQ ID NO: 40615 - RNA, 19 nt, Artificial Sequence
  Sense Oligo
ugucuggacauucuuguuu

SEQ ID NO: 40616 - RNA, 19 nt, Artificial Sequence
  Antisense Oligo
aaacaagaauguccagaca

SEQ ID NO: 40617 - RNA, 19 nt, Artificial Sequence
  Sense Oligo
gucuggacauucuuguuug

SEQ ID NO: 40618 - RNA, 19 nt, Artificial Sequence
  Antisense Oligo
caaacaagaauguccagac

SEQ ID NO: 40619 - RNA, 19 nt, Artificial Sequence
  Sense Oligo
ucuggacauucuuguuugu

SEQ ID NO: 40620 - RNA, 19 nt, Artificial Sequence
  Antisense Oligo
acaaacaagaauguccaga

SEQ ID NO: 40621 - RNA, 19 nt, Artificial Sequence
  Sense Oligo
acauucuuguuugucugug

SEQ ID NO: 40622 - RNA, 19 nt, Artificial Sequence
  Antisense Oligo
cacagacaaacaagaaugu

SEQ ID NO: 40623 - RNA, 19 nt, Artificial Sequence
  Sense Oligo
uucuuguuugucuguguuu

SEQ ID NO: 40624 - RNA, 19 nt, Artificial Sequence
  Antisense Oligo
aaacacagacaaacaagaa

SEQ ID NO: 40625 - RNA, 19 nt, Artificial Sequence
  Sense Oligo
caaguggguuggcccucug

SEQ ID NO: 40626 - RNA, 19 nt, Artificial Sequence
  Antisense Oligo
cagagggccaacccacuug

SEQ ID NO: 40627 - RNA, 19 nt, Artificial Sequence
  Sense Oligo
ugcuguggcucgaccugga

SEQ ID NO: 40628 - RNA, 19 nt, Artificial Sequence
  Antisense Oligo
uccaggucgagccacagca

SEQ ID NO: 40629 - RNA, 19 nt, Artificial Sequence
  Sense Oligo
gcuguggcucgaccuggaa

SEQ ID NO: 40630 - RNA, 19 nt, Artificial Sequence
  Antisense Oligo
uuccaggucgagccacagc

SEQ ID NO: 40631 - RNA, 19 nt, Artificial Sequence
  Sense Oligo
cuguggcucgaccuggaag

SEQ ID NO: 40632 - RNA, 19 nt, Artificial Sequence
  Antisense Oligo
cuuccaggucgagccacag

SEQ ID NO: 40633 - RNA, 19 nt, Artificial Sequence
  Sense Oligo
uguggcucgaccuggaagu

SEQ ID NO: 40634 - RNA, 19 nt, Artificial Sequence
  Antisense Oligo
acuuccaggucgagccaca

SEQ ID NO: 40635 - RNA, 19 nt, Artificial Sequence
  Sense Oligo
guggcucgaccuggaaguu

SEQ ID NO: 40636 - RNA, 19 nt, Artificial Sequence
  Antisense Oligo
aacuuccaggucgagccac

SEQ ID NO: 40637 - RNA, 19 nt, Artificial Sequence
  Sense Oligo
uggcucgaccuggaaguug

SEQ ID NO: 40638 - RNA, 19 nt, Artificial Sequence
  Antisense Oligo
caacuuccaggucgagcca

SEQ ID NO: 40639 - RNA, 19 nt, Artificial Sequence
  Sense Oligo
ggcucgaccuggaaguugg

SEQ ID NO: 40640 - RNA, 19 nt, Artificial Sequence
  Antisense Oligo
ccaacuuccaggucgagcc

SEQ ID NO: 40641 - RNA, 19 nt, Artificial Sequence
  Sense Oligo
gcucgaccuggaaguuggc

SEQ ID NO: 40642 - RNA, 19 nt, Artificial Sequence
  Antisense Oligo
gccaacuuccaggucgagc

SEQ ID NO: 40643 - RNA, 19 nt, Artificial Sequence
  Sense Oligo
cucgaccuggaaguuggcc

SEQ ID NO: 40644 - RNA, 19 nt, Artificial Sequence
  Antisense Oligo
ggccaacuuccaggucgag

SEQ ID NO: 40645 - RNA, 19 nt, Artificial Sequence
  Sense Oligo
ucgaccuggaaguuggccu

SEQ ID NO: 40646 - RNA, 19 nt, Artificial Sequence
  Antisense Oligo
aggccaacuuccaggucga

SEQ ID NO: 40647 - RNA, 19 nt, Artificial Sequence
  Sense Oligo
cgaccuggaaguuggccug

SEQ ID NO: 40648 - RNA, 19 nt, Artificial Sequence
  Antisense Oligo
caggccaacuuccaggucg

SEQ ID NO: 40649 - RNA, 19 nt, Artificial Sequence
  Sense Oligo
gaccuggaaguuggccugu

SEQ ID NO: 40650 - RNA, 19 nt, Artificial Sequence
  Antisense Oligo
acaggccaacuuccagguc

SEQ ID NO: 40651 - RNA, 19 nt, Artificial Sequence
  Sense Oligo
accuggaaguuggccuguc

SEQ ID NO: 40652 - RNA, 19 nt, Artificial Sequence
  Antisense Oligo
gacaggccaacuuccaggu

SEQ ID NO: 40653 - RNA, 19 nt, Artificial Sequence
  Sense Oligo
ccuggaaguuggccugucu

SEQ ID NO: 40654 - RNA, 19 nt, Artificial Sequence
  Antisense Oligo
agacaggccaacuuccagg

SEQ ID NO: 40655 - RNA, 19 nt, Artificial Sequence
  Sense Oligo
cuggaaguuggccugucuc

SEQ ID NO: 40656 - RNA, 19 nt, Artificial Sequence
  Antisense Oligo
gagacaggccaacuuccag

SEQ ID NO: 40657 - RNA, 19 nt, Artificial Sequence
  Sense Oligo
aaguuggccugucuccuga

SEQ ID NO: 40658 - RNA, 19 nt, Artificial Sequence
  Antisense Oligo
ucaggagacaggccaacuu

SEQ ID NO: 40659 - RNA, 19 nt, Artificial Sequence
  Sense Oligo
aguuggccugucuccugaa

SEQ ID NO: 40660 - RNA, 19 nt, Artificial Sequence
  Antisense Oligo
uucaggagacaggccaacu

SEQ ID NO: 40661 - RNA, 19 nt, Artificial Sequence
  Sense Oligo
guuggccugucuccugaag

SEQ ID NO: 40662 - RNA, 19 nt, Artificial Sequence
  Antisense Oligo
cuucaggagacaggccaac

SEQ ID NO: 40663 - RNA, 19 nt, Artificial Sequence
  Sense Oligo
uuggccugucuccugaagu

SEQ ID NO: 40664 - RNA, 19 nt, Artificial Sequence
  Antisense Oligo
acuucaggagacaggccaa

SEQ ID NO: 40665 - RNA, 19 nt, Artificial Sequence
  Sense Oligo
ggccugucuccugaagucu

SEQ ID NO: 40666 - RNA, 19 nt, Artificial Sequence
  Antisense Oligo
agacuucaggagacaggcc

SEQ ID NO: 40667 - RNA, 19 nt, Artificial Sequence
  Sense Oligo
gucuccugaagucuucugu

SEQ ID NO: 40668 - RNA, 19 nt, Artificial Sequence
  Antisense Oligo
acagaagacuucaggagac

SEQ ID NO: 40669 - RNA, 19 nt, Artificial Sequence
  Sense Oligo
ucuccugaagucuucuguc

SEQ ID NO: 40670 - RNA, 19 nt, Artificial Sequence
  Antisense Oligo
gacagaagacuucaggaga

SEQ ID NO: 40671 - RNA, 19 nt, Artificial Sequence
  Sense Oligo
cuccugaagucuucugucu

SEQ ID NO: 40672 - RNA, 19 nt, Artificial Sequence
  Antisense Oligo
agacagaagacuucaggag

SEQ ID NO: 40673 - RNA, 19 nt, Artificial Sequence
  Sense Oligo
uccugaagucuucugucuc

SEQ ID NO: 40674 - RNA, 19 nt, Artificial Sequence
  Antisense Oligo
gagacagaagacuucagga

SEQ ID NO: 40675 - RNA, 19 nt, Artificial Sequence
  Sense Oligo
aagucuucugucuccugcc

SEQ ID NO: 40676 - RNA, 19 nt, Artificial Sequence
  Antisense Oligo
ggcaggagacagaagacuu

SEQ ID NO: 40677 - RNA, 19 nt, Artificial Sequence
  Sense Oligo
guuucugggagccaagagg

SEQ ID NO: 40678 - RNA, 19 nt, Artificial Sequence
  Antisense Oligo
ccucuuggcucccagaaac

SEQ ID NO: 40679 - RNA, 19 nt, Artificial Sequence
  Sense Oligo
uuucugggagccaagaggg

SEQ ID NO: 40680 - RNA, 19 nt, Artificial Sequence
  Antisense Oligo
cccucuuggcucccagaaa

SEQ ID NO: 40681 - RNA, 19 nt, Artificial Sequence
  Sense Oligo
uuggcaucccgugcguggu

SEQ ID NO: 40682 - RNA, 19 nt, Artificial Sequence
  Antisense Oligo
accacgcacgggaugccaa

SEQ ID NO: 40683 - RNA, 19 nt, Artificial Sequence
  Sense Oligo
gcccguguucucagugugg

SEQ ID NO: 40684 - RNA, 19 nt, Artificial Sequence
  Antisense Oligo
ccacacugagaacacgggc

SEQ ID NO: 40685 - RNA, 19 nt, Artificial Sequence
  Sense Oligo
guguucucagugugguucu

SEQ ID NO: 40686 - RNA, 19 nt, Artificial Sequence
  Antisense Oligo
agaaccacacugagaacac

SEQ ID NO: 40687 - RNA, 19 nt, Artificial Sequence
  Sense Oligo
uucuccgccaccucccucu

SEQ ID NO: 40688 - RNA, 19 nt, Artificial Sequence
  Antisense Oligo
agagggagguggcggagaa

SEQ ID NO: 40689 - RNA, 19 nt, Artificial Sequence
  Sense Oligo
cucccucugucuccugugu

SEQ ID NO: 40690 - RNA, 19 nt, Artificial Sequence
  Antisense Oligo
acacaggagacagagggag

SEQ ID NO: 40691 - RNA, 19 nt, Artificial Sequence
  Sense Oligo
ucccucugucuccuguguu

SEQ ID NO: 40692 - RNA, 19 nt, Artificial Sequence
  Antisense Oligo
aacacaggagacagaggga

SEQ ID NO: 40693 - RNA, 19 nt, Artificial Sequence
  Sense Oligo
agauuggauaauucauguc

SEQ ID NO: 40694 - RNA, 19 nt, Artificial Sequence
  Antisense Oligo
gacaugaauuauccaaucu

SEQ ID NO: 40695 - RNA, 19 nt, Artificial Sequence
  Sense Oligo
gauuggauaauucaugucu

SEQ ID NO: 40696 - RNA, 19 nt, Artificial Sequence
  Antisense Oligo
agacaugaauuauccaauc

SEQ ID NO: 40697 - RNA, 19 nt, Artificial Sequence
  Sense Oligo
uuggauaauucaugucuuc

SEQ ID NO: 40698 - RNA, 19 nt, Artificial Sequence
  Antisense Oligo
gaagacaugaauuauccaa

SEQ ID NO: 40699 - RNA, 19 nt, Artificial Sequence
  Sense Oligo
uggauaauucaugucuucu

SEQ ID NO: 40700 - RNA, 19 nt, Artificial Sequence
  Antisense Oligo
agaagacaugaauuaucca

SEQ ID NO: 40701 - RNA, 19 nt, Artificial Sequence
  Sense Oligo
gauaauucaugucuucugu

SEQ ID NO: 40702 - RNA, 19 nt, Artificial Sequence
  Antisense Oligo
acagaagacaugaauuauc

SEQ ID NO: 40703 - RNA, 19 nt, Artificial Sequence
  Sense Oligo
aauucaugucuucuguuag

SEQ ID NO: 40704 - RNA, 19 nt, Artificial Sequence
  Antisense Oligo
cuaacagaagacaugaauu

SEQ ID NO: 40705 - RNA, 19 nt, Artificial Sequence
  Sense Oligo
caugucuucuguuagcuuc

SEQ ID NO: 40706 - RNA, 19 nt, Artificial Sequence
  Antisense Oligo
gaagcuaacagaagacaug

SEQ ID NO: 40707 - RNA, 19 nt, Artificial Sequence
  Sense Oligo
augucuucuguuagcuucc

SEQ ID NO: 40708 - RNA, 19 nt, Artificial Sequence
  Antisense Oligo
ggaagcuaacagaagacau

SEQ ID NO: 40709 - RNA, 19 nt, Artificial Sequence
  Sense Oligo
aaggcccuuuguucugcca

SEQ ID NO: 40710 - RNA, 19 nt, Artificial Sequence
  Antisense Oligo
uggcagaacaaagggccuu

SEQ ID NO: 40711 - RNA, 19 nt, Artificial Sequence
  Sense Oligo
cccuuuguucugccaugua

SEQ ID NO: 40712 - RNA, 19 nt, Artificial Sequence
  Antisense Oligo
uacauggcagaacaaaggg

SEQ ID NO: 40713 - RNA, 19 nt, Artificial Sequence
  Sense Oligo
ccuuuguucugccauguau

SEQ ID NO: 40714 - RNA, 19 nt, Artificial Sequence
  Antisense Oligo
auacauggcagaacaaagg

SEQ ID NO: 40715 - RNA, 19 nt, Artificial Sequence
  Sense Oligo
cuuuguucugccauguauc

SEQ ID NO: 40716 - RNA, 19 nt, Artificial Sequence
  Antisense Oligo
gauacauggcagaacaaag

SEQ ID NO: 40717 - RNA, 19 nt, Artificial Sequence
  Sense Oligo
uguucugccauguaucugu

SEQ ID NO: 40718 - RNA, 19 nt, Artificial Sequence
  Antisense Oligo
acagauacauggcagaaca

SEQ ID NO: 40719 - RNA, 19 nt, Artificial Sequence
  Sense Oligo
guucugccauguaucugug

SEQ ID NO: 40720 - RNA, 19 nt, Artificial Sequence
  Antisense Oligo
cacagauacauggcagaac

SEQ ID NO: 40721 - RNA, 19 nt, Artificial Sequence
  Sense Oligo
uucugccauguaucugugg

SEQ ID NO: 40722 - RNA, 19 nt, Artificial Sequence
  Antisense Oligo
ccacagauacauggcagaa

SEQ ID NO: 40723 - RNA, 19 nt, Artificial Sequence
  Sense Oligo
ccauguaucuguggccucc

SEQ ID NO: 40724 - RNA, 19 nt, Artificial Sequence
  Antisense Oligo
ggaggccacagauacaugg

SEQ ID NO: 40725 - RNA, 19 nt, Artificial Sequence
  Sense Oligo
guaucuguggccuccaauc

SEQ ID NO: 40726 - RNA, 19 nt, Artificial Sequence
  Antisense Oligo
gauuggaggccacagauac

SEQ ID NO: 40727 - RNA, 19 nt, Artificial Sequence
  Sense Oligo
uaucuguggccuccaaucc

SEQ ID NO: 40728 - RNA, 19 nt, Artificial Sequence
  Antisense Oligo
ggauuggaggccacagaua

SEQ ID NO: 40729 - RNA, 19 nt, Artificial Sequence
  Sense Oligo
aucuguggccuccaaucca

SEQ ID NO: 40730 - RNA, 19 nt, Artificial Sequence
  Antisense Oligo
uggauuggaggccacagau

SEQ ID NO: 40731 - RNA, 19 nt, Artificial Sequence
  Sense Oligo
ccugcguuauccuuucuag

SEQ ID NO: 40732 - RNA, 19 nt, Artificial Sequence
  Antisense Oligo
cuagaaaggauaacgcagg

SEQ ID NO: 40733 - RNA, 19 nt, Artificial Sequence
  Sense Oligo
cugcguuauccuuucuaga

SEQ ID NO: 40734 - RNA, 19 nt, Artificial Sequence
  Antisense Oligo
ucuagaaaggauaacgcag

SEQ ID NO: 40735 - RNA, 19 nt, Artificial Sequence
  Sense Oligo
ugcguuauccuuucuagaa

SEQ ID NO: 40736 - RNA, 19 nt, Artificial Sequence
  Antisense Oligo
uucuagaaaggauaacgca

SEQ ID NO: 40737 - RNA, 19 nt, Artificial Sequence
  Sense Oligo
ggguccaccugcuguguca

SEQ ID NO: 40738 - RNA, 19 nt, Artificial Sequence
  Antisense Oligo
ugacacagcagguggaccc

SEQ ID NO: 40739 - RNA, 19 nt, Artificial Sequence
  Sense Oligo
gguccaccugcugugucag

SEQ ID NO: 40740 - RNA, 19 nt, Artificial Sequence
  Antisense Oligo
cugacacagcagguggacc

SEQ ID NO: 40741 - RNA, 19 nt, Artificial Sequence
  Sense Oligo
gcugugucagggcauuggg

SEQ ID NO: 40742 - RNA, 19 nt, Artificial Sequence
  Antisense Oligo
cccaaugcccugacacagc

SEQ ID NO: 40743 - RNA, 19 nt, Artificial Sequence
  Sense Oligo
gggugacaguuggugugcu

SEQ ID NO: 40744 - RNA, 19 nt, Artificial Sequence
  Antisense Oligo
agcacaccaacugucaccc

SEQ ID NO: 40745 - RNA, 19 nt, Artificial Sequence
  Sense Oligo
aguuggugugcuggaugga

SEQ ID NO: 40746 - RNA, 19 nt, Artificial Sequence
  Antisense Oligo
uccauccagcacaccaacu

SEQ ID NO: 40747 - RNA, 19 nt, Artificial Sequence
  Sense Oligo
guuggugugcuggauggac

SEQ ID NO: 40748 - RNA, 19 nt, Artificial Sequence
  Antisense Oligo
guccauccagcacaccaac

SEQ ID NO: 40749 - RNA, 19 nt, Artificial Sequence
  Sense Oligo
uuggugugcuggauggacc

SEQ ID NO: 40750 - RNA, 19 nt, Artificial Sequence
  Antisense Oligo
gguccauccagcacaccaa

SEQ ID NO: 40751 - RNA, 19 nt, Artificial Sequence
  Sense Oligo
ggugugcuggauggaccau

SEQ ID NO: 40752 - RNA, 19 nt, Artificial Sequence
  Antisense Oligo
augguccauccagcacacc

SEQ ID NO: 40753 - RNA, 19 nt, Artificial Sequence
  Sense Oligo
gugugcuggauggaccaug

SEQ ID NO: 40754 - RNA, 19 nt, Artificial Sequence
  Antisense Oligo
caugguccauccagcacac

SEQ ID NO: 40755 - RNA, 19 nt, Artificial Sequence
  Sense Oligo
ugcuggauggaccaugucu

SEQ ID NO: 40756 - RNA, 19 nt, Artificial Sequence
  Antisense Oligo
agacaugguccauccagca

SEQ ID NO: 40757 - RNA, 19 nt, Artificial Sequence
  Sense Oligo
gcuggagugcaguggcuca

SEQ ID NO: 40758 - RNA, 19 nt, Artificial Sequence
  Antisense Oligo
ugagccacugcacuccagc

SEQ ID NO: 40759 - RNA, 19 nt, Artificial Sequence
  Sense Oligo
cuggagugcaguggcucag

SEQ ID NO: 40760 - RNA, 19 nt, Artificial Sequence
  Antisense Oligo
cugagccacugcacuccag

SEQ ID NO: 40761 - RNA, 19 nt, Artificial Sequence
  Sense Oligo
uggagugcaguggcucagu

SEQ ID NO: 40762 - RNA, 19 nt, Artificial Sequence
  Antisense Oligo
acugagccacugcacucca

SEQ ID NO: 40763 - RNA, 19 nt, Artificial Sequence
  Sense Oligo
ggagugcaguggcucaguc

SEQ ID NO: 40764 - RNA, 19 nt, Artificial Sequence
  Antisense Oligo
gacugagccacugcacucc

SEQ ID NO: 40765 - RNA, 19 nt, Artificial Sequence
  Sense Oligo
agucucggcucacugcaac

SEQ ID NO: 40766 - RNA, 19 nt, Artificial Sequence
  Antisense Oligo
guugcagugagccgagacu

SEQ ID NO: 40767 - RNA, 19 nt, Artificial Sequence
  Sense Oligo
gucucggcucacugcaacc

SEQ ID NO: 40768 - RNA, 19 nt, Artificial Sequence
  Antisense Oligo
gguugcagugagccgagac

SEQ ID NO: 40769 - RNA, 19 nt, Artificial Sequence
  Sense Oligo
ucucggcucacugcaaccu

SEQ ID NO: 40770 - RNA, 19 nt, Artificial Sequence
  Antisense Oligo
agguugcagugagccgaga

SEQ ID NO: 40771 - RNA, 19 nt, Artificial Sequence
  Sense Oligo
ucacugcaaccucugcuuc

SEQ ID NO: 40772 - RNA, 19 nt, Artificial Sequence
  Antisense Oligo
gaagcagagguugcaguga

SEQ ID NO: 40773 - RNA, 19 nt, Artificial Sequence
  Sense Oligo
cacugcaaccucugcuucc

SEQ ID NO: 40774 - RNA, 19 nt, Artificial Sequence
  Antisense Oligo
ggaagcagagguugcagug

SEQ ID NO: 40775 - RNA, 19 nt, Artificial Sequence
  Sense Oligo
acugcaaccucugcuuccu

SEQ ID NO: 40776 - RNA, 19 nt, Artificial Sequence
  Antisense Oligo
aggaagcagagguugcagu

SEQ ID NO: 40777 - RNA, 19 nt, Artificial Sequence
  Sense Oligo
cugcuuccuggguucaagu

SEQ ID NO: 40778 - RNA, 19 nt, Artificial Sequence
  Antisense Oligo
acuugaacccaggaagcag

SEQ ID NO: 40779 - RNA, 19 nt, Artificial Sequence
  Sense Oligo
ugcuuccuggguucaagug

SEQ ID NO: 40780 - RNA, 19 nt, Artificial Sequence
  Antisense Oligo
cacuugaacccaggaagca

SEQ ID NO: 40781 - RNA, 19 nt, Artificial Sequence
  Sense Oligo
gcuuccuggguucaaguga

SEQ ID NO: 40782 - RNA, 19 nt, Artificial Sequence
  Antisense Oligo
ucacuugaacccaggaagc

SEQ ID NO: 40783 - RNA, 19 nt, Artificial Sequence
  Sense Oligo
cuuccuggguucaagugaa

SEQ ID NO: 40784 - RNA, 19 nt, Artificial Sequence
  Antisense Oligo
uucacuugaacccaggaag

SEQ ID NO: 40785 - RNA, 19 nt, Artificial Sequence
  Sense Oligo
uuccuggguucaagugaau

SEQ ID NO: 40786 - RNA, 19 nt, Artificial Sequence
  Antisense Oligo
auucacuugaacccaggaa

SEQ ID NO: 40787 - RNA, 19 nt, Artificial Sequence
  Sense Oligo
uccuggguucaagugaauc

SEQ ID NO: 40788 - RNA, 19 nt, Artificial Sequence
  Antisense Oligo
gauucacuugaacccagga

SEQ ID NO: 40789 - RNA, 19 nt, Artificial Sequence
  Sense Oligo
ccuggguucaagugaaucu

SEQ ID NO: 40790 - RNA, 19 nt, Artificial Sequence
  Antisense Oligo
agauucacuugaacccagg

SEQ ID NO: 40791 - RNA, 19 nt, Artificial Sequence
  Sense Oligo
cuggguucaagugaaucuu

SEQ ID NO: 40792 - RNA, 19 nt, Artificial Sequence
  Antisense Oligo
aagauucacuugaacccag

SEQ ID NO: 40793 - RNA, 19 nt, Artificial Sequence
  Sense Oligo
aagugaaucuugugucuca

SEQ ID NO: 40794 - RNA, 19 nt, Artificial Sequence
  Antisense Oligo
ugagacacaagauucacuu

SEQ ID NO: 40795 - RNA, 19 nt, Artificial Sequence
  Sense Oligo
agugaaucuugugucucag

SEQ ID NO: 40796 - RNA, 19 nt, Artificial Sequence
  Antisense Oligo
cugagacacaagauucacu

SEQ ID NO: 40797 - RNA, 19 nt, Artificial Sequence
  Sense Oligo
cuugugucucagccucccu

SEQ ID NO: 40798 - RNA, 19 nt, Artificial Sequence
  Antisense Oligo
agggaggcugagacacaag

SEQ ID NO: 40799 - RNA, 19 nt, Artificial Sequence
  Sense Oligo
uugugucucagccucccua

SEQ ID NO: 40800 - RNA, 19 nt, Artificial Sequence
  Antisense Oligo
uagggaggcugagacacaa

SEQ ID NO: 40801 - RNA, 19 nt, Artificial Sequence
  Sense Oligo
ugugucucagccucccuag

SEQ ID NO: 40802 - RNA, 19 nt, Artificial Sequence
  Antisense Oligo
cuagggaggcugagacaca

SEQ ID NO: 40803 - RNA, 19 nt, Artificial Sequence
  Sense Oligo
gugucucagccucccuagu

SEQ ID NO: 40804 - RNA, 19 nt, Artificial Sequence
  Antisense Oligo
acuagggaggcugagacac

SEQ ID NO: 40805 - RNA, 19 nt, Artificial Sequence
  Sense Oligo
ugucucagccucccuagua

SEQ ID NO: 40806 - RNA, 19 nt, Artificial Sequence
  Antisense Oligo
uacuagggaggcugagaca

SEQ ID NO: 40807 - RNA, 19 nt, Artificial Sequence
  Sense Oligo
gucucagccucccuaguag

SEQ ID NO: 40808 - RNA, 19 nt, Artificial Sequence
  Antisense Oligo
cuacuagggaggcugagac

SEQ ID NO: 40809 - RNA, 19 nt, Artificial Sequence
  Sense Oligo
caucauguuggccaggcug

SEQ ID NO: 40810 - RNA, 19 nt, Artificial Sequence
  Antisense Oligo
cagccuggccaacaugaug

SEQ ID NO: 40811 - RNA, 19 nt, Artificial Sequence
  Sense Oligo
aucauguuggccaggcugg

SEQ ID NO: 40812 - RNA, 19 nt, Artificial Sequence
  Antisense Oligo
ccagccuggccaacaugau

SEQ ID NO: 40813 - RNA, 19 nt, Artificial Sequence
  Sense Oligo
ucauguuggccaggcuggu

SEQ ID NO: 40814 - RNA, 19 nt, Artificial Sequence
  Antisense Oligo
accagccuggccaacauga

SEQ ID NO: 40815 - RNA, 19 nt, Artificial Sequence
  Sense Oligo
cauguuggccaggcugguc

SEQ ID NO: 40816 - RNA, 19 nt, Artificial Sequence
  Antisense Oligo
gaccagccuggccaacaug

SEQ ID NO: 40817 - RNA, 19 nt, Artificial Sequence
  Sense Oligo
auguuggccaggcuggucu

SEQ ID NO: 40818 - RNA, 19 nt, Artificial Sequence
  Antisense Oligo
agaccagccuggccaacau

SEQ ID NO: 40819 - RNA, 19 nt, Artificial Sequence
  Sense Oligo
uguuggccaggcuggucuu

SEQ ID NO: 40820 - RNA, 19 nt, Artificial Sequence
  Antisense Oligo
aagaccagccuggccaaca

SEQ ID NO: 40821 - RNA, 19 nt, Artificial Sequence
  Sense Oligo
guuggccaggcuggucuug

SEQ ID NO: 40822 - RNA, 19 nt, Artificial Sequence
  Antisense Oligo
caagaccagccuggccaac

SEQ ID NO: 40823 - RNA, 19 nt, Artificial Sequence
  Sense Oligo
uuggccaggcuggucuuga

SEQ ID NO: 40824 - RNA, 19 nt, Artificial Sequence
  Antisense Oligo
ucaagaccagccuggccaa

SEQ ID NO: 40825 - RNA, 19 nt, Artificial Sequence
  Sense Oligo
uggccaggcuggucuugaa

SEQ ID NO: 40826 - RNA, 19 nt, Artificial Sequence
  Antisense Oligo
uucaagaccagccuggcca

SEQ ID NO: 40827 - RNA, 19 nt, Artificial Sequence
  Sense Oligo
aacuccugaccucaaguga

SEQ ID NO: 40828 - RNA, 19 nt, Artificial Sequence
  Antisense Oligo
ucacuugaggucaggaguu

SEQ ID NO: 40829 - RNA, 19 nt, Artificial Sequence
  Sense Oligo
ccugaccucaagugaucca

SEQ ID NO: 40830 - RNA, 19 nt, Artificial Sequence
  Antisense Oligo
uggaucacuugaggucagg

SEQ ID NO: 40831 - RNA, 19 nt, Artificial Sequence
  Sense Oligo
cugaccucaagugauccau

SEQ ID NO: 40832 - RNA, 19 nt, Artificial Sequence
  Antisense Oligo
auggaucacuugaggucag

SEQ ID NO: 40833 - RNA, 19 nt, Artificial Sequence
  Sense Oligo
ugaccucaagugauccauc

SEQ ID NO: 40834 - RNA, 19 nt, Artificial Sequence
  Antisense Oligo
gauggaucacuugagguca

SEQ ID NO: 40835 - RNA, 19 nt, Artificial Sequence
  Sense Oligo
gaccucaagugauccaucc

SEQ ID NO: 40836 - RNA, 19 nt, Artificial Sequence
  Antisense Oligo
ggauggaucacuugagguc

SEQ ID NO: 40837 - RNA, 19 nt, Artificial Sequence
  Sense Oligo
accucaagugauccauccg

SEQ ID NO: 40838 - RNA, 19 nt, Artificial Sequence
  Antisense Oligo
cggauggaucacuugaggu

SEQ ID NO: 40839 - RNA, 19 nt, Artificial Sequence
  Sense Oligo
ccucaagugauccauccgc

SEQ ID NO: 40840 - RNA, 19 nt, Artificial Sequence
  Antisense Oligo
gcggauggaucacuugagg

SEQ ID NO: 40841 - RNA, 19 nt, Artificial Sequence
  Sense Oligo
ccucagccucccaaagugc

SEQ ID NO: 40842 - RNA, 19 nt, Artificial Sequence
  Antisense Oligo
gcacuuugggaggcugagg

SEQ ID NO: 40843 - RNA, 19 nt, Artificial Sequence
  Sense Oligo
ccagccuggaccgugucuu

SEQ ID NO: 40844 - RNA, 19 nt, Artificial Sequence
  Antisense Oligo
aagacacgguccaggcugg

SEQ ID NO: 40845 - RNA, 19 nt, Artificial Sequence
  Sense Oligo
caccaccucccagucugca

SEQ ID NO: 40846 - RNA, 19 nt, Artificial Sequence
  Antisense Oligo
ugcagacugggagguggug

SEQ ID NO: 40847 - RNA, 19 nt, Artificial Sequence
  Sense Oligo
cucagcucucaguguugcc

SEQ ID NO: 40848 - RNA, 19 nt, Artificial Sequence
  Antisense Oligo
ggcaacacugagagcugag

SEQ ID NO: 40849 - RNA, 19 nt, Artificial Sequence
  Sense Oligo
ucagcucucaguguugccc

SEQ ID NO: 40850 - RNA, 19 nt, Artificial Sequence
  Antisense Oligo
gggcaacacugagagcuga

SEQ ID NO: 40851 - RNA, 19 nt, Artificial Sequence
  Sense Oligo
agcucucaguguugcccac

SEQ ID NO: 40852 - RNA, 19 nt, Artificial Sequence
  Antisense Oligo
gugggcaacacugagagcu

SEQ ID NO: 40853 - RNA, 19 nt, Artificial Sequence
  Sense Oligo
guugcccacugggacccua

SEQ ID NO: 40854 - RNA, 19 nt, Artificial Sequence
  Antisense Oligo
uagggucccagugggcaac

SEQ ID NO: 40855 - RNA, 19 nt, Artificial Sequence
  Sense Oligo
uugcccacugggacccuag

SEQ ID NO: 40856 - RNA, 19 nt, Artificial Sequence
  Antisense Oligo
cuagggucccagugggcaa

SEQ ID NO: 40857 - RNA, 19 nt, Artificial Sequence
  Sense Oligo
ccacugggacccuaggacu

SEQ ID NO: 40858 - RNA, 19 nt, Artificial Sequence
  Antisense Oligo
aguccuagggucccagugg

SEQ ID NO: 40859 - RNA, 19 nt, Artificial Sequence
  Sense Oligo
cacugggacccuaggacuc

SEQ ID NO: 40860 - RNA, 19 nt, Artificial Sequence
  Antisense Oligo
gaguccuagggucccagug

SEQ ID NO: 40861 - RNA, 19 nt, Artificial Sequence
  Sense Oligo
acugggacccuaggacucc

SEQ ID NO: 40862 - RNA, 19 nt, Artificial Sequence
  Antisense Oligo
ggaguccuagggucccagu

SEQ ID NO: 40863 - RNA, 19 nt, Artificial Sequence
  Sense Oligo
acccuaggacuccauguua

SEQ ID NO: 40864 - RNA, 19 nt, Artificial Sequence
  Antisense Oligo
uaacauggaguccuagggu

SEQ ID NO: 40865 - RNA, 19 nt, Artificial Sequence
  Sense Oligo
uaggacuccauguuaccag

SEQ ID NO: 40866 - RNA, 19 nt, Artificial Sequence
  Antisense Oligo
cugguaacauggaguccua

SEQ ID NO: 40867 - RNA, 19 nt, Artificial Sequence
  Sense Oligo
aggacuccauguuaccagg

SEQ ID NO: 40868 - RNA, 19 nt, Artificial Sequence
  Antisense Oligo
ccugguaacauggaguccu

SEQ ID NO: 40869 - RNA, 19 nt, Artificial Sequence
  Sense Oligo
ggacuccauguuaccaggc

SEQ ID NO: 40870 - RNA, 19 nt, Artificial Sequence
  Antisense Oligo
gccugguaacauggagucc

SEQ ID NO: 40871 - RNA, 19 nt, Artificial Sequence
  Sense Oligo
gacuccauguuaccaggcc

SEQ ID NO: 40872 - RNA, 19 nt, Artificial Sequence
  Antisense Oligo
ggccugguaacauggaguc

SEQ ID NO: 40873 - RNA, 19 nt, Artificial Sequence
  Sense Oligo
acuccauguuaccaggccu

SEQ ID NO: 40874 - RNA, 19 nt, Artificial Sequence
  Antisense Oligo
aggccugguaacauggagu

SEQ ID NO: 40875 - RNA, 19 nt, Artificial Sequence
  Sense Oligo
cuccauguuaccaggccuc

SEQ ID NO: 40876 - RNA, 19 nt, Artificial Sequence
  Antisense Oligo
gaggccugguaacauggag

SEQ ID NO: 40877 - RNA, 19 nt, Artificial Sequence
  Sense Oligo
uccauguuaccaggccuca

SEQ ID NO: 40878 - RNA, 19 nt, Artificial Sequence
  Antisense Oligo
ugaggccugguaacaugga

SEQ ID NO: 40879 - RNA, 19 nt, Artificial Sequence
  Sense Oligo
ccauguuaccaggccucau

SEQ ID NO: 40880 - RNA, 19 nt, Artificial Sequence
  Antisense Oligo
augaggccugguaacaugg

SEQ ID NO: 40881 - RNA, 19 nt, Artificial Sequence
  Sense Oligo
auguuaccaggccucaugu

SEQ ID NO: 40882 - RNA, 19 nt, Artificial Sequence
  Antisense Oligo
acaugaggccugguaacau

SEQ ID NO: 40883 - RNA, 19 nt, Artificial Sequence
  Sense Oligo
uguuaccaggccucaugug

SEQ ID NO: 40884 - RNA, 19 nt, Artificial Sequence
  Antisense Oligo
cacaugaggccugguaaca

SEQ ID NO: 40885 - RNA, 19 nt, Artificial Sequence
  Sense Oligo
guuaccaggccucaugugu

SEQ ID NO: 40886 - RNA, 19 nt, Artificial Sequence
  Antisense Oligo
acacaugaggccugguaac

SEQ ID NO: 40887 - RNA, 19 nt, Artificial Sequence
  Sense Oligo
uuaccaggccucauguguc

SEQ ID NO: 40888 - RNA, 19 nt, Artificial Sequence
  Antisense Oligo
gacacaugaggccugguaa

SEQ ID NO: 40889 - RNA, 19 nt, Artificial Sequence
  Sense Oligo
aggccucaugugucauuua

SEQ ID NO: 40890 - RNA, 19 nt, Artificial Sequence
  Antisense Oligo
uaaaugacacaugaggccu

SEQ ID NO: 40891 - RNA, 19 nt, Artificial Sequence
  Sense Oligo
gccucaugugucauuuacc

SEQ ID NO: 40892 - RNA, 19 nt, Artificial Sequence
  Antisense Oligo
gguaaaugacacaugaggc

SEQ ID NO: 40893 - RNA, 19 nt, Artificial Sequence
  Sense Oligo
ccucaugugucauuuacca

SEQ ID NO: 40894 - RNA, 19 nt, Artificial Sequence
  Antisense Oligo
ugguaaaugacacaugagg

SEQ ID NO: 40895 - RNA, 19 nt, Artificial Sequence
  Sense Oligo
ucauuuaccacugguucag

SEQ ID NO: 40896 - RNA, 19 nt, Artificial Sequence
  Antisense Oligo
cugaaccagugguaaauga

SEQ ID NO: 40897 - RNA, 19 nt, Artificial Sequence
  Sense Oligo
cauuuaccacugguucagc

SEQ ID NO: 40898 - RNA, 19 nt, Artificial Sequence
  Antisense Oligo
gcugaaccagugguaaaug

SEQ ID NO: 40899 - RNA, 19 nt, Artificial Sequence
  Sense Oligo
auuuaccacugguucagcu

SEQ ID NO: 40900 - RNA, 19 nt, Artificial Sequence
  Antisense Oligo
agcugaaccagugguaaau

SEQ ID NO: 40901 - RNA, 19 nt, Artificial Sequence
  Sense Oligo
uuuaccacugguucagcuc

SEQ ID NO: 40902 - RNA, 19 nt, Artificial Sequence
  Antisense Oligo
gagcugaaccagugguaaa

SEQ ID NO: 40903 - RNA, 19 nt, Artificial Sequence
  Sense Oligo
uuaccacugguucagcucg

SEQ ID NO: 40904 - RNA, 19 nt, Artificial Sequence
  Antisense Oligo
cgagcugaaccagugguaa

SEQ ID NO: 40905 - RNA, 19 nt, Artificial Sequence
  Sense Oligo
uaccacugguucagcucgu

SEQ ID NO: 40906 - RNA, 19 nt, Artificial Sequence
  Antisense Oligo
acgagcugaaccaguggua

SEQ ID NO: 40907 - RNA, 19 nt, Artificial Sequence
  Sense Oligo
accacugguucagcucguu

SEQ ID NO: 40908 - RNA, 19 nt, Artificial Sequence
  Antisense Oligo
aacgagcugaaccaguggu

SEQ ID NO: 40909 - RNA, 19 nt, Artificial Sequence
  Sense Oligo
ccacugguucagcucguuu

SEQ ID NO: 40910 - RNA, 19 nt, Artificial Sequence
  Antisense Oligo
aaacgagcugaaccagugg

SEQ ID NO: 40911 - RNA, 19 nt, Artificial Sequence
  Sense Oligo
cacugguucagcucguuuu

SEQ ID NO: 40912 - RNA, 19 nt, Artificial Sequence
  Antisense Oligo
aaaacgagcugaaccagug

SEQ ID NO: 40913 - RNA, 19 nt, Artificial Sequence
  Sense Oligo
acugguucagcucguuuuc

SEQ ID NO: 40914 - RNA, 19 nt, Artificial Sequence
  Antisense Oligo
gaaaacgagcugaaccagu

SEQ ID NO: 40915 - RNA, 19 nt, Artificial Sequence
  Sense Oligo
cugguucagcucguuuuca

SEQ ID NO: 40916 - RNA, 19 nt, Artificial Sequence
  Antisense Oligo
ugaaaacgagcugaaccag

SEQ ID NO: 40917 - RNA, 19 nt, Artificial Sequence
  Sense Oligo
ugguucagcucguuuucaa

SEQ ID NO: 40918 - RNA, 19 nt, Artificial Sequence
  Antisense Oligo
uugaaaacgagcugaacca

SEQ ID NO: 40919 - RNA, 19 nt, Artificial Sequence
  Sense Oligo
gguucagcucguuuucaac

SEQ ID NO: 40920 - RNA, 19 nt, Artificial Sequence
  Antisense Oligo
guugaaaacgagcugaacc

SEQ ID NO: 40921 - RNA, 19 nt, Artificial Sequence
  Sense Oligo
guucagcucguuuucaacu

SEQ ID NO: 40922 - RNA, 19 nt, Artificial Sequence
  Antisense Oligo
aguugaaaacgagcugaac

SEQ ID NO: 40923 - RNA, 19 nt, Artificial Sequence
  Sense Oligo
agcucguuuucaacuucua

SEQ ID NO: 40924 - RNA, 19 nt, Artificial Sequence
  Antisense Oligo
uagaaguugaaaacgagcu

SEQ ID NO: 40925 - RNA, 19 nt, Artificial Sequence
  Sense Oligo
gcucguuuucaacuucuaa

SEQ ID NO: 40926 - RNA, 19 nt, Artificial Sequence
  Antisense Oligo
uuagaaguugaaaacgagc

SEQ ID NO: 40927 - RNA, 19 nt, Artificial Sequence
  Sense Oligo
cucguuuucaacuucuaaa

SEQ ID NO: 40928 - RNA, 19 nt, Artificial Sequence
  Antisense Oligo
uuuagaaguugaaaacgag

SEQ ID NO: 40929 - RNA, 19 nt, Artificial Sequence
  Sense Oligo
auuuuguuccuguuauccu

SEQ ID NO: 40930 - RNA, 19 nt, Artificial Sequence
  Antisense Oligo
aggauaacaggaacaaaau

SEQ ID NO: 40931 - RNA, 19 nt, Artificial Sequence
  Sense Oligo
uuuguuccuguuauccugu

SEQ ID NO: 40932 - RNA, 19 nt, Artificial Sequence
  Antisense Oligo
acaggauaacaggaacaaa

SEQ ID NO: 40933 - RNA, 19 nt, Artificial Sequence
  Sense Oligo
uuguuccuguuauccuguu

SEQ ID NO: 40934 - RNA, 19 nt, Artificial Sequence
  Antisense Oligo
aacaggauaacaggaacaa

SEQ ID NO: 40935 - RNA, 19 nt, Artificial Sequence
  Sense Oligo
uguuccuguuauccuguuc

SEQ ID NO: 40936 - RNA, 19 nt, Artificial Sequence
  Antisense Oligo
gaacaggauaacaggaaca

SEQ ID NO: 40937 - RNA, 19 nt, Artificial Sequence
  Sense Oligo
guuccuguuauccuguucg

SEQ ID NO: 40938 - RNA, 19 nt, Artificial Sequence
  Antisense Oligo
cgaacaggauaacaggaac

SEQ ID NO: 40939 - RNA, 19 nt, Artificial Sequence
  Sense Oligo
uuccuguuauccuguucgc

SEQ ID NO: 40940 - RNA, 19 nt, Artificial Sequence
  Antisense Oligo
gcgaacaggauaacaggaa

SEQ ID NO: 40941 - RNA, 19 nt, Artificial Sequence
  Sense Oligo
uccuguuauccuguucgcc

SEQ ID NO: 40942 - RNA, 19 nt, Artificial Sequence
  Antisense Oligo
ggcgaacaggauaacagga

SEQ ID NO: 40943 - RNA, 19 nt, Artificial Sequence
  Sense Oligo
ccuguuauccuguucgcca

SEQ ID NO: 40944 - RNA, 19 nt, Artificial Sequence
  Antisense Oligo
uggcgaacaggauaacagg

SEQ ID NO: 40945 - RNA, 19 nt, Artificial Sequence
  Sense Oligo
gccauuccuccuccugucc

SEQ ID NO: 40946 - RNA, 19 nt, Artificial Sequence
  Antisense Oligo
ggacaggaggaggaauggc

SEQ ID NO: 40947 - RNA, 19 nt, Artificial Sequence
  Sense Oligo
ccauuccuccuccuguccu

SEQ ID NO: 40948 - RNA, 19 nt, Artificial Sequence
  Antisense Oligo
aggacaggaggaggaaugg

SEQ ID NO: 40949 - RNA, 19 nt, Artificial Sequence
  Sense Oligo
uuccuccuccuguccuugu

SEQ ID NO: 40950 - RNA, 19 nt, Artificial Sequence
  Antisense Oligo
acaaggacaggaggaggaa

SEQ ID NO: 40951 - RNA, 19 nt, Artificial Sequence
  Sense Oligo
uccuccuccuguccuuguc

SEQ ID NO: 40952 - RNA, 19 nt, Artificial Sequence
  Antisense Oligo
gacaaggacaggaggagga

SEQ ID NO: 40953 - RNA, 19 nt, Artificial Sequence
  Sense Oligo
cuccuccuguccuugucag

SEQ ID NO: 40954 - RNA, 19 nt, Artificial Sequence
  Antisense Oligo
cugacaaggacaggaggag

SEQ ID NO: 40955 - RNA, 19 nt, Artificial Sequence
  Sense Oligo
uccuccuguccuugucagu

SEQ ID NO: 40956 - RNA, 19 nt, Artificial Sequence
  Antisense Oligo
acugacaaggacaggagga

SEQ ID NO: 40957 - RNA, 19 nt, Artificial Sequence
  Sense Oligo
ccuccuguccuugucaguu

SEQ ID NO: 40958 - RNA, 19 nt, Artificial Sequence
  Antisense Oligo
aacugacaaggacaggagg

SEQ ID NO: 40959 - RNA, 19 nt, Artificial Sequence
  Sense Oligo
cuccuguccuugucaguuu

SEQ ID NO: 40960 - RNA, 19 nt, Artificial Sequence
  Antisense Oligo
aaacugacaaggacaggag

SEQ ID NO: 40961 - RNA, 19 nt, Artificial Sequence
  Sense Oligo
uccuguccuugucaguuua

SEQ ID NO: 40962 - RNA, 19 nt, Artificial Sequence
  Antisense Oligo
uaaacugacaaggacagga

SEQ ID NO: 40963 - RNA, 19 nt, Artificial Sequence
  Sense Oligo
ccuguccuugucaguuuau

SEQ ID NO: 40964 - RNA, 19 nt, Artificial Sequence
  Antisense Oligo
auaaacugacaaggacagg

SEQ ID NO: 40965 - RNA, 19 nt, Artificial Sequence
  Sense Oligo
cuguccuugucaguuuaug

SEQ ID NO: 40966 - RNA, 19 nt, Artificial Sequence
  Antisense Oligo
cauaaacugacaaggacag

SEQ ID NO: 40967 - RNA, 19 nt, Artificial Sequence
  Sense Oligo
agucucacucugucaccca

SEQ ID NO: 40968 - RNA, 19 nt, Artificial Sequence
  Antisense Oligo
ugggugacagagugagacu

SEQ ID NO: 40969 - RNA, 19 nt, Artificial Sequence
  Sense Oligo
gucucacucugucacccag

SEQ ID NO: 40970 - RNA, 19 nt, Artificial Sequence
  Antisense Oligo
cugggugacagagugagac

SEQ ID NO: 40971 - RNA, 19 nt, Artificial Sequence
  Sense Oligo
ucucacucugucacccagg

SEQ ID NO: 40972 - RNA, 19 nt, Artificial Sequence
  Antisense Oligo
ccugggugacagagugaga

SEQ ID NO: 40973 - RNA, 19 nt, Artificial Sequence
  Sense Oligo
cucacucugucacccaggc

SEQ ID NO: 40974 - RNA, 19 nt, Artificial Sequence
  Antisense Oligo
gccugggugacagagugag

SEQ ID NO: 40975 - RNA, 19 nt, Artificial Sequence
  Sense Oligo
ucacucugucacccaggcu

SEQ ID NO: 40976 - RNA, 19 nt, Artificial Sequence
  Antisense Oligo
agccugggugacagaguga

SEQ ID NO: 40977 - RNA, 19 nt, Artificial Sequence
  Sense Oligo
cacucugucacccaggcug

SEQ ID NO: 40978 - RNA, 19 nt, Artificial Sequence
  Antisense Oligo
cagccugggugacagagug

SEQ ID NO: 40979 - RNA, 19 nt, Artificial Sequence
  Sense Oligo
acucugucacccaggcugg

SEQ ID NO: 40980 - RNA, 19 nt, Artificial Sequence
  Antisense Oligo
ccagccugggugacagagu

SEQ ID NO: 40981 - RNA, 19 nt, Artificial Sequence
  Sense Oligo
cucugucacccaggcugga

SEQ ID NO: 40982 - RNA, 19 nt, Artificial Sequence
  Antisense Oligo
uccagccugggugacagag

SEQ ID NO: 40983 - RNA, 19 nt, Artificial Sequence
  Sense Oligo
ucugucacccaggcuggag

SEQ ID NO: 40984 - RNA, 19 nt, Artificial Sequence
  Antisense Oligo
cuccagccugggugacaga

SEQ ID NO: 40985 - RNA, 19 nt, Artificial Sequence
  Sense Oligo
ucacccaggcuggagugca

SEQ ID NO: 40986 - RNA, 19 nt, Artificial Sequence
  Antisense Oligo
ugcacuccagccuggguga

SEQ ID NO: 40987 - RNA, 19 nt, Artificial Sequence
  Sense Oligo
agucucagcucacugcaac

SEQ ID NO: 40988 - RNA, 19 nt, Artificial Sequence
  Antisense Oligo
guugcagugagcugagacu

SEQ ID NO: 40989 - RNA, 19 nt, Artificial Sequence
  Sense Oligo
gucucagcucacugcaacc

SEQ ID NO: 40990 - RNA, 19 nt, Artificial Sequence
  Antisense Oligo
gguugcagugagcugagac

SEQ ID NO: 40991 - RNA, 19 nt, Artificial Sequence
  Sense Oligo
ucucagcucacugcaaccu

SEQ ID NO: 40992 - RNA, 19 nt, Artificial Sequence
  Antisense Oligo
agguugcagugagcugaga

SEQ ID NO: 40993 - RNA, 19 nt, Artificial Sequence
  Sense Oligo
cucacugcaaccuccaccu

SEQ ID NO: 40994 - RNA, 19 nt, Artificial Sequence
  Antisense Oligo
agguggagguugcagugag

SEQ ID NO: 40995 - RNA, 19 nt, Artificial Sequence
  Sense Oligo
ucacugcaaccuccaccuc

SEQ ID NO: 40996 - RNA, 19 nt, Artificial Sequence
  Antisense Oligo
gagguggagguugcaguga

SEQ ID NO: 40997 - RNA, 19 nt, Artificial Sequence
  Sense Oligo
cacugcaaccuccaccucc

SEQ ID NO: 40998 - RNA, 19 nt, Artificial Sequence
  Antisense Oligo
ggagguggagguugcagug

SEQ ID NO: 40999 - RNA, 19 nt, Artificial Sequence
  Sense Oligo
acugcaaccuccaccuccc

SEQ ID NO: 41000 - RNA, 19 nt, Artificial Sequence
  Antisense Oligo
gggagguggagguugcagu

SEQ ID NO: 41001 - RNA, 19 nt, Artificial Sequence
  Sense Oligo
cagguucaagugauucucc

SEQ ID NO: 41002 - RNA, 19 nt, Artificial Sequence
  Antisense Oligo
ggagaaucacuugaaccug

SEQ ID NO: 41003 - RNA, 19 nt, Artificial Sequence
  Sense Oligo
agguucaagugauucuccu

SEQ ID NO: 41004 - RNA, 19 nt, Artificial Sequence
  Antisense Oligo
aggagaaucacuugaaccu

SEQ ID NO: 41005 - RNA, 19 nt, Artificial Sequence
  Sense Oligo
gguucaagugauucuccug

SEQ ID NO: 41006 - RNA, 19 nt, Artificial Sequence
  Antisense Oligo
caggagaaucacuugaacc

SEQ ID NO: 41007 - RNA, 19 nt, Artificial Sequence
  Sense Oligo
guucaagugauucuccugc

SEQ ID NO: 41008 - RNA, 19 nt, Artificial Sequence
  Antisense Oligo
gcaggagaaucacuugaac

SEQ ID NO: 41009 - RNA, 19 nt, Artificial Sequence
  Sense Oligo
uucaagugauucuccugcc

SEQ ID NO: 41010 - RNA, 19 nt, Artificial Sequence
  Antisense Oligo
ggcaggagaaucacuugaa

SEQ ID NO: 41011 - RNA, 19 nt, Artificial Sequence
  Sense Oligo
ucaagugauucuccugccu

SEQ ID NO: 41012 - RNA, 19 nt, Artificial Sequence
  Antisense Oligo
aggcaggagaaucacuuga

SEQ ID NO: 41013 - RNA, 19 nt, Artificial Sequence
  Sense Oligo
agccuccugaguagcuggg

SEQ ID NO: 41014 - RNA, 19 nt, Artificial Sequence
  Antisense Oligo
cccagcuacucaggaggcu

SEQ ID NO: 41015 - RNA, 19 nt, Artificial Sequence
  Sense Oligo
gccuccugaguagcuggga

SEQ ID NO: 41016 - RNA, 19 nt, Artificial Sequence
  Antisense Oligo
ucccagcuacucaggaggc

SEQ ID NO: 41017 - RNA, 19 nt, Artificial Sequence
  Sense Oligo
ccuccugaguagcugggau

SEQ ID NO: 41018 - RNA, 19 nt, Artificial Sequence
  Antisense Oligo
aucccagcuacucaggagg

SEQ ID NO: 41019 - RNA, 19 nt, Artificial Sequence
  Sense Oligo
cuccugaguagcugggauu

SEQ ID NO: 41020 - RNA, 19 nt, Artificial Sequence
  Antisense Oligo
aaucccagcuacucaggag

SEQ ID NO: 41021 - RNA, 19 nt, Artificial Sequence
  Sense Oligo
uccugaguagcugggauua

SEQ ID NO: 41022 - RNA, 19 nt, Artificial Sequence
  Antisense Oligo
uaaucccagcuacucagga

SEQ ID NO: 41023 - RNA, 19 nt, Artificial Sequence
  Sense Oligo
ccugaguagcugggauuac

SEQ ID NO: 41024 - RNA, 19 nt, Artificial Sequence
  Antisense Oligo
guaaucccagcuacucagg

SEQ ID NO: 41025 - RNA, 19 nt, Artificial Sequence
  Sense Oligo
cugaguagcugggauuaca

SEQ ID NO: 41026 - RNA, 19 nt, Artificial Sequence
  Antisense Oligo
uguaaucccagcuacucag

SEQ ID NO: 41027 - RNA, 19 nt, Artificial Sequence
  Sense Oligo
ugaguagcugggauuacag

SEQ ID NO: 41028 - RNA, 19 nt, Artificial Sequence
  Antisense Oligo
cuguaaucccagcuacuca

SEQ ID NO: 41029 - RNA, 19 nt, Artificial Sequence
  Sense Oligo
uagcugggauuacaggugc

SEQ ID NO: 41030 - RNA, 19 nt, Artificial Sequence
  Antisense Oligo
gcaccuguaaucccagcua

SEQ ID NO: 41031 - RNA, 19 nt, Artificial Sequence
  Sense Oligo
agcugggauuacaggugcg

SEQ ID NO: 41032 - RNA, 19 nt, Artificial Sequence
  Antisense Oligo
cgcaccuguaaucccagcu

SEQ ID NO: 41033 - RNA, 19 nt, Artificial Sequence
  Sense Oligo
gcugggauuacaggugcgc

SEQ ID NO: 41034 - RNA, 19 nt, Artificial Sequence
  Antisense Oligo
gcgcaccuguaaucccagc

SEQ ID NO: 41035 - RNA, 19 nt, Artificial Sequence
  Sense Oligo
cugggauuacaggugcgcu

SEQ ID NO: 41036 - RNA, 19 nt, Artificial Sequence
  Antisense Oligo
agcgcaccuguaaucccag

SEQ ID NO: 41037 - RNA, 19 nt, Artificial Sequence
  Sense Oligo
caccacgccuggcuaauuu

SEQ ID NO: 41038 - RNA, 19 nt, Artificial Sequence
  Antisense Oligo
aaauuagccaggcguggug

SEQ ID NO: 41039 - RNA, 19 nt, Artificial Sequence
  Sense Oligo
accacgccuggcuaauuuu

SEQ ID NO: 41040 - RNA, 19 nt, Artificial Sequence
  Antisense Oligo
aaaauuagccaggcguggu

SEQ ID NO: 41041 - RNA, 19 nt, Artificial Sequence
  Sense Oligo
ugucauguuggccaggcug

SEQ ID NO: 41042 - RNA, 19 nt, Artificial Sequence
  Antisense Oligo
cagccuggccaacaugaca

SEQ ID NO: 41043 - RNA, 19 nt, Artificial Sequence
  Sense Oligo
gucauguuggccaggcugc

SEQ ID NO: 41044 - RNA, 19 nt, Artificial Sequence
  Antisense Oligo
gcagccuggccaacaugac

SEQ ID NO: 41045 - RNA, 19 nt, Artificial Sequence
  Sense Oligo
uguuggccaggcugcucau

SEQ ID NO: 41046 - RNA, 19 nt, Artificial Sequence
  Antisense Oligo
augagcagccuggccaaca

SEQ ID NO: 41047 - RNA, 19 nt, Artificial Sequence
  Sense Oligo
guuggccaggcugcucaug

SEQ ID NO: 41048 - RNA, 19 nt, Artificial Sequence
  Antisense Oligo
caugagcagccuggccaac

SEQ ID NO: 41049 - RNA, 19 nt, Artificial Sequence
  Sense Oligo
gugggauuacaggcaugag

SEQ ID NO: 41050 - RNA, 19 nt, Artificial Sequence
  Antisense Oligo
cucaugccuguaaucccac

SEQ ID NO: 41051 - RNA, 19 nt, Artificial Sequence
  Sense Oligo
auuacaggcaugagccacu

SEQ ID NO: 41052 - RNA, 19 nt, Artificial Sequence
  Antisense Oligo
aguggcucaugccuguaau

SEQ ID NO: 41053 - RNA, 19 nt, Artificial Sequence
  Sense Oligo
cgcccaacuaguuuaugac

SEQ ID NO: 41054 - RNA, 19 nt, Artificial Sequence
  Antisense Oligo
gucauaaacuaguugggcg

SEQ ID NO: 41055 - RNA, 19 nt, Artificial Sequence
  Sense Oligo
gcccaacuaguuuaugacu

SEQ ID NO: 41056 - RNA, 19 nt, Artificial Sequence
  Antisense Oligo
agucauaaacuaguugggc

SEQ ID NO: 41057 - RNA, 19 nt, Artificial Sequence
  Sense Oligo
cccaacuaguuuaugacuu

SEQ ID NO: 41058 - RNA, 19 nt, Artificial Sequence
  Antisense Oligo
aagucauaaacuaguuggg

SEQ ID NO: 41059 - RNA, 19 nt, Artificial Sequence
  Sense Oligo
ccaacuaguuuaugacuuu

SEQ ID NO: 41060 - RNA, 19 nt, Artificial Sequence
  Antisense Oligo
aaagucauaaacuaguugg

SEQ ID NO: 41061 - RNA, 19 nt, Artificial Sequence
  Sense Oligo
agaguaaauaggugcgugu

SEQ ID NO: 41062 - RNA, 19 nt, Artificial Sequence
  Antisense Oligo
acacgcaccuauuuacucu

SEQ ID NO: 41063 - RNA, 19 nt, Artificial Sequence
  Sense Oligo
gaguaaauaggugcguguu

SEQ ID NO: 41064 - RNA, 19 nt, Artificial Sequence
  Antisense Oligo
aacacgcaccuauuuacuc

SEQ ID NO: 41065 - RNA, 19 nt, Artificial Sequence
  Sense Oligo
aguaaauaggugcguguuu

SEQ ID NO: 41066 - RNA, 19 nt, Artificial Sequence
  Antisense Oligo
aaacacgcaccuauuuacu

SEQ ID NO: 41067 - RNA, 19 nt, Artificial Sequence
  Sense Oligo
guaaauaggugcguguuuu

SEQ ID NO: 41068 - RNA, 19 nt, Artificial Sequence
  Antisense Oligo
aaaacacgcaccuauuuac

SEQ ID NO: 41069 - RNA, 19 nt, Artificial Sequence
  Sense Oligo
uaaauaggugcguguuuuc

SEQ ID NO: 41070 - RNA, 19 nt, Artificial Sequence
  Antisense Oligo
gaaaacacgcaccuauuua

SEQ ID NO: 41071 - RNA, 19 nt, Artificial Sequence
  Sense Oligo
aaauaggugcguguuuucc

SEQ ID NO: 41072 - RNA, 19 nt, Artificial Sequence
  Antisense Oligo
ggaaaacacgcaccuauuu

SEQ ID NO: 41073 - RNA, 19 nt, Artificial Sequence
  Sense Oligo
aggugcguguuuucccacu

SEQ ID NO: 41074 - RNA, 19 nt, Artificial Sequence
  Antisense Oligo
agugggaaaacacgcaccu

SEQ ID NO: 41075 - RNA, 19 nt, Artificial Sequence
  Sense Oligo
guuuucccacugccaucuu

SEQ ID NO: 41076 - RNA, 19 nt, Artificial Sequence
  Antisense Oligo
aagauggcagugggaaaac

SEQ ID NO: 41077 - RNA, 19 nt, Artificial Sequence
  Sense Oligo
uuuucccacugccaucuuu

SEQ ID NO: 41078 - RNA, 19 nt, Artificial Sequence
  Antisense Oligo
aaagauggcagugggaaaa

SEQ ID NO: 41079 - RNA, 19 nt, Artificial Sequence
  Sense Oligo
uuucccacugccaucuuua

SEQ ID NO: 41080 - RNA, 19 nt, Artificial Sequence
  Antisense Oligo
uaaagauggcagugggaaa

SEQ ID NO: 41081 - RNA, 19 nt, Artificial Sequence
  Sense Oligo
uucccacugccaucuuuac

SEQ ID NO: 41082 - RNA, 19 nt, Artificial Sequence
  Antisense Oligo
guaaagauggcagugggaa

SEQ ID NO: 41083 - RNA, 19 nt, Artificial Sequence
  Sense Oligo
ucccacugccaucuuuacc

SEQ ID NO: 41084 - RNA, 19 nt, Artificial Sequence
  Antisense Oligo
gguaaagauggcaguggga

SEQ ID NO: 41085 - RNA, 19 nt, Artificial Sequence
  Sense Oligo
cccacugccaucuuuaccc

SEQ ID NO: 41086 - RNA, 19 nt, Artificial Sequence
  Antisense Oligo
ggguaaagauggcaguggg

SEQ ID NO: 41087 - RNA, 19 nt, Artificial Sequence
  Sense Oligo
ccacugccaucuuuaccca

SEQ ID NO: 41088 - RNA, 19 nt, Artificial Sequence
  Antisense Oligo
uggguaaagauggcagugg

SEQ ID NO: 41089 - RNA, 19 nt, Artificial Sequence
  Sense Oligo
cacugccaucuuuacccag

SEQ ID NO: 41090 - RNA, 19 nt, Artificial Sequence
  Antisense Oligo
cuggguaaagauggcagug

SEQ ID NO: 41091 - RNA, 19 nt, Artificial Sequence
  Sense Oligo
acugccaucuuuacccaga

SEQ ID NO: 41092 - RNA, 19 nt, Artificial Sequence
  Antisense Oligo
ucuggguaaagauggcagu

SEQ ID NO: 41093 - RNA, 19 nt, Artificial Sequence
  Sense Oligo
cugccaucuuuacccagaa

SEQ ID NO: 41094 - RNA, 19 nt, Artificial Sequence
  Antisense Oligo
uucuggguaaagauggcag

SEQ ID NO: 41095 - RNA, 19 nt, Artificial Sequence
  Sense Oligo
ccaucuuuacccagaaguu

SEQ ID NO: 41096 - RNA, 19 nt, Artificial Sequence
  Antisense Oligo
aacuucuggguaaagaugg

SEQ ID NO: 41097 - RNA, 19 nt, Artificial Sequence
  Sense Oligo
caucuuuacccagaaguuu

SEQ ID NO: 41098 - RNA, 19 nt, Artificial Sequence
  Antisense Oligo
aaacuucuggguaaagaug

SEQ ID NO: 41099 - RNA, 19 nt, Artificial Sequence
  Sense Oligo
aucuuuacccagaaguuua

SEQ ID NO: 41100 - RNA, 19 nt, Artificial Sequence
  Antisense Oligo
uaaacuucuggguaaagau

SEQ ID NO: 41101 - RNA, 19 nt, Artificial Sequence
  Sense Oligo
ucuuuacccagaaguuuau

SEQ ID NO: 41102 - RNA, 19 nt, Artificial Sequence
  Antisense Oligo
auaaacuucuggguaaaga

SEQ ID NO: 41103 - RNA, 19 nt, Artificial Sequence
  Sense Oligo
cuuuacccagaaguuuaug

SEQ ID NO: 41104 - RNA, 19 nt, Artificial Sequence
  Antisense Oligo
cauaaacuucuggguaaag

SEQ ID NO: 41105 - RNA, 19 nt, Artificial Sequence
  Sense Oligo
uuuacccagaaguuuauga

SEQ ID NO: 41106 - RNA, 19 nt, Artificial Sequence
  Antisense Oligo
ucauaaacuucuggguaaa

SEQ ID NO: 41107 - RNA, 19 nt, Artificial Sequence
  Sense Oligo
cccagaaguuuaugaugcu

SEQ ID NO: 41108 - RNA, 19 nt, Artificial Sequence
  Antisense Oligo
agcaucauaaacuucuggg

SEQ ID NO: 41109 - RNA, 19 nt, Artificial Sequence
  Sense Oligo
ccagaaguuuaugaugcuu

SEQ ID NO: 41110 - RNA, 19 nt, Artificial Sequence
  Antisense Oligo
aagcaucauaaacuucugg

SEQ ID NO: 41111 - RNA, 19 nt, Artificial Sequence
  Sense Oligo
agaaguuuaugaugcuuuc

SEQ ID NO: 41112 - RNA, 19 nt, Artificial Sequence
  Antisense Oligo
gaaagcaucauaaacuucu

SEQ ID NO: 41113 - RNA, 19 nt, Artificial Sequence
  Sense Oligo
gaaguuuaugaugcuuucu

SEQ ID NO: 41114 - RNA, 19 nt, Artificial Sequence
  Antisense Oligo
agaaagcaucauaaacuuc

SEQ ID NO: 41115 - RNA, 19 nt, Artificial Sequence
  Sense Oligo
aaauccuagcagcugugug

SEQ ID NO: 41116 - RNA, 19 nt, Artificial Sequence
  Antisense Oligo
cacacagcugcuaggauuu

SEQ ID NO: 41117 - RNA, 19 nt, Artificial Sequence
  Sense Oligo
aauccuagcagcugugugc

SEQ ID NO: 41118 - RNA, 19 nt, Artificial Sequence
  Antisense Oligo
gcacacagcugcuaggauu

SEQ ID NO: 41119 - RNA, 19 nt, Artificial Sequence
  Sense Oligo
cugugugcucuugaguucg

SEQ ID NO: 41120 - RNA, 19 nt, Artificial Sequence
  Antisense Oligo
cgaacucaagagcacacag

SEQ ID NO: 41121 - RNA, 19 nt, Artificial Sequence
  Sense Oligo
ugugugcucuugaguucgc

SEQ ID NO: 41122 - RNA, 19 nt, Artificial Sequence
  Antisense Oligo
gcgaacucaagagcacaca

SEQ ID NO: 41123 - RNA, 19 nt, Artificial Sequence
  Sense Oligo
gugugcucuugaguucgcu

SEQ ID NO: 41124 - RNA, 19 nt, Artificial Sequence
  Antisense Oligo
agcgaacucaagagcacac

SEQ ID NO: 41125 - RNA, 19 nt, Artificial Sequence
  Sense Oligo
ugugcucuugaguucgcuc

SEQ ID NO: 41126 - RNA, 19 nt, Artificial Sequence
  Antisense Oligo
gagcgaacucaagagcaca

SEQ ID NO: 41127 - RNA, 19 nt, Artificial Sequence
  Sense Oligo
aauggaaucaugauuagag

SEQ ID NO: 41128 - RNA, 19 nt, Artificial Sequence
  Antisense Oligo
cucuaaucaugauuccauu

SEQ ID NO: 41129 - RNA, 19 nt, Artificial Sequence
  Sense Oligo
auggaaucaugauuagagc

SEQ ID NO: 41130 - RNA, 19 nt, Artificial Sequence
  Antisense Oligo
gcucuaaucaugauuccau

SEQ ID NO: 41131 - RNA, 19 nt, Artificial Sequence
  Sense Oligo
uggaaucaugauuagagcu

SEQ ID NO: 41132 - RNA, 19 nt, Artificial Sequence
  Antisense Oligo
agcucuaaucaugauucca

SEQ ID NO: 41133 - RNA, 19 nt, Artificial Sequence
  Sense Oligo
caugauuagagcuuugacu

SEQ ID NO: 41134 - RNA, 19 nt, Artificial Sequence
  Antisense Oligo
agucaaagcucuaaucaug

SEQ ID NO: 41135 - RNA, 19 nt, Artificial Sequence
  Sense Oligo
ugauuagagcuuugacuuc

SEQ ID NO: 41136 - RNA, 19 nt, Artificial Sequence
  Antisense Oligo
gaagucaaagcucuaauca

SEQ ID NO: 41137 - RNA, 19 nt, Artificial Sequence
  Sense Oligo
gauuagagcuuugacuucu

SEQ ID NO: 41138 - RNA, 19 nt, Artificial Sequence
  Antisense Oligo
agaagucaaagcucuaauc

SEQ ID NO: 41139 - RNA, 19 nt, Artificial Sequence
  Sense Oligo
auuagagcuuugacuucug

SEQ ID NO: 41140 - RNA, 19 nt, Artificial Sequence
  Antisense Oligo
cagaagucaaagcucuaau

SEQ ID NO: 41141 - RNA, 19 nt, Artificial Sequence
  Sense Oligo
uuagagcuuugacuucuga

SEQ ID NO: 41142 - RNA, 19 nt, Artificial Sequence
  Antisense Oligo
ucagaagucaaagcucuaa

SEQ ID NO: 41143 - RNA, 19 nt, Artificial Sequence
  Sense Oligo
uagagcuuugacuucugac

SEQ ID NO: 41144 - RNA, 19 nt, Artificial Sequence
  Antisense Oligo
gucagaagucaaagcucua

SEQ ID NO: 41145 - RNA, 19 nt, Artificial Sequence
  Sense Oligo
agagcuuugacuucugaca

SEQ ID NO: 41146 - RNA, 19 nt, Artificial Sequence
  Antisense Oligo
ugucagaagucaaagcucu

SEQ ID NO: 41147 - RNA, 19 nt, Artificial Sequence
  Sense Oligo
gagcuuugacuucugacac

SEQ ID NO: 41148 - RNA, 19 nt, Artificial Sequence
  Antisense Oligo
gugucagaagucaaagcuc

SEQ ID NO: 41149 - RNA, 19 nt, Artificial Sequence
  Sense Oligo
ugacuucugacacuuucuu

SEQ ID NO: 41150 - RNA, 19 nt, Artificial Sequence
  Antisense Oligo
aagaaagugucagaaguca

SEQ ID NO: 41151 - RNA, 19 nt, Artificial Sequence
  Sense Oligo
uucugacacuuucuuuucg

SEQ ID NO: 41152 - RNA, 19 nt, Artificial Sequence
  Antisense Oligo
cgaaaagaaagugucagaa

SEQ ID NO: 41153 - RNA, 19 nt, Artificial Sequence
  Sense Oligo
uggacuuuggagugcuugc

SEQ ID NO: 41154 - RNA, 19 nt, Artificial Sequence
  Antisense Oligo
gcaagcacuccaaagucca

SEQ ID NO: 41155 - RNA, 19 nt, Artificial Sequence
  Sense Oligo
ggacuuuggagugcuugca

SEQ ID NO: 41156 - RNA, 19 nt, Artificial Sequence
  Antisense Oligo
ugcaagcacuccaaagucc

SEQ ID NO: 41157 - RNA, 19 nt, Artificial Sequence
  Sense Oligo
gacuuuggagugcuugcag

SEQ ID NO: 41158 - RNA, 19 nt, Artificial Sequence
  Antisense Oligo
cugcaagcacuccaaaguc

SEQ ID NO: 41159 - RNA, 19 nt, Artificial Sequence
  Sense Oligo
uuggagugcuugcaguaag

SEQ ID NO: 41160 - RNA, 19 nt, Artificial Sequence
  Antisense Oligo
cuuacugcaagcacuccaa

SEQ ID NO: 41161 - RNA, 19 nt, Artificial Sequence
  Sense Oligo
uggagugcuugcaguaaga

SEQ ID NO: 41162 - RNA, 19 nt, Artificial Sequence
  Antisense Oligo
ucuuacugcaagcacucca

SEQ ID NO: 41163 - RNA, 19 nt, Artificial Sequence
  Sense Oligo
gugcuugcaguaagacacu

SEQ ID NO: 41164 - RNA, 19 nt, Artificial Sequence
  Antisense Oligo
agugucuuacugcaagcac

SEQ ID NO: 41165 - RNA, 19 nt, Artificial Sequence
  Sense Oligo
ugcuugcaguaagacacuc

SEQ ID NO: 41166 - RNA, 19 nt, Artificial Sequence
  Antisense Oligo
gagugucuuacugcaagca

SEQ ID NO: 41167 - RNA, 19 nt, Artificial Sequence
  Sense Oligo
caagaccucagcaguaaaa

SEQ ID NO: 41168 - RNA, 19 nt, Artificial Sequence
  Antisense Oligo
uuuuacugcugaggucuug

SEQ ID NO: 41169 - RNA, 19 nt, Artificial Sequence
  Sense Oligo
aagaccucagcaguaaaag

SEQ ID NO: 41170 - RNA, 19 nt, Artificial Sequence
  Antisense Oligo
cuuuuacugcugaggucuu

SEQ ID NO: 41171 - RNA, 19 nt, Artificial Sequence
  Sense Oligo
accucagcaguaaaagauu

SEQ ID NO: 41172 - RNA, 19 nt, Artificial Sequence
  Antisense Oligo
aaucuuuuacugcugaggu

SEQ ID NO: 41173 - RNA, 19 nt, Artificial Sequence
  Sense Oligo
ccucagcaguaaaagauua

SEQ ID NO: 41174 - RNA, 19 nt, Artificial Sequence
  Antisense Oligo
uaaucuuuuacugcugagg

SEQ ID NO: 41175 - RNA, 19 nt, Artificial Sequence
  Sense Oligo
aacucgcagagggcaacgc

SEQ ID NO: 41176 - RNA, 19 nt, Artificial Sequence
  Antisense Oligo
gcguugcccucugcgaguu

SEQ ID NO: 41177 - RNA, 19 nt, Artificial Sequence
  Sense Oligo
acucgcagagggcaacgca

SEQ ID NO: 41178 - RNA, 19 nt, Artificial Sequence
  Antisense Oligo
ugcguugcccucugcgagu

SEQ ID NO: 41179 - RNA, 19 nt, Artificial Sequence
  Sense Oligo
cucgcagagggcaacgcau

SEQ ID NO: 41180 - RNA, 19 nt, Artificial Sequence
  Antisense Oligo
augcguugcccucugcgag

SEQ ID NO: 41181 - RNA, 19 nt, Artificial Sequence
  Sense Oligo
ucgcagagggcaacgcauu

SEQ ID NO: 41182 - RNA, 19 nt, Artificial Sequence
  Antisense Oligo
aaugcguugcccucugcga

SEQ ID NO: 41183 - RNA, 19 nt, Artificial Sequence
  Sense Oligo
agagggcaacgcauuacca

SEQ ID NO: 41184 - RNA, 19 nt, Artificial Sequence
  Antisense Oligo
ugguaaugcguugcccucu

SEQ ID NO: 41185 - RNA, 19 nt, Artificial Sequence
  Sense Oligo
gagggcaacgcauuaccac

SEQ ID NO: 41186 - RNA, 19 nt, Artificial Sequence
  Antisense Oligo
gugguaaugcguugcccuc

SEQ ID NO: 41187 - RNA, 19 nt, Artificial Sequence
  Sense Oligo
aacgcauuaccaccugagc

SEQ ID NO: 41188 - RNA, 19 nt, Artificial Sequence
  Antisense Oligo
gcucaggugguaaugcguu

SEQ ID NO: 41189 - RNA, 19 nt, Artificial Sequence
  Sense Oligo
ugagcucccagguccaaga

SEQ ID NO: 41190 - RNA, 19 nt, Artificial Sequence
  Antisense Oligo
ucuuggaccugggagcuca

SEQ ID NO: 41191 - RNA, 19 nt, Artificial Sequence
  Sense Oligo
gagcucccagguccaagaa

SEQ ID NO: 41192 - RNA, 19 nt, Artificial Sequence
  Antisense Oligo
uucuuggaccugggagcuc

SEQ ID NO: 41193 - RNA, 19 nt, Artificial Sequence
  Sense Oligo
aauggcugggaagauagac

SEQ ID NO: 41194 - RNA, 19 nt, Artificial Sequence
  Antisense Oligo
gucuaucuucccagccauu

SEQ ID NO: 41195 - RNA, 19 nt, Artificial Sequence
  Sense Oligo
uggcugggaagauagacuu

SEQ ID NO: 41196 - RNA, 19 nt, Artificial Sequence
  Antisense Oligo
aagucuaucuucccagcca

SEQ ID NO: 41197 - RNA, 19 nt, Artificial Sequence
  Sense Oligo
gggaagauagacuugcuca

SEQ ID NO: 41198 - RNA, 19 nt, Artificial Sequence
  Antisense Oligo
ugagcaagucuaucuuccc

SEQ ID NO: 41199 - RNA, 19 nt, Artificial Sequence
  Sense Oligo
ggaagauagacuugcucag

SEQ ID NO: 41200 - RNA, 19 nt, Artificial Sequence
  Antisense Oligo
cugagcaagucuaucuucc

SEQ ID NO: 41201 - RNA, 19 nt, Artificial Sequence
  Sense Oligo
gaagauagacuugcucaga

SEQ ID NO: 41202 - RNA, 19 nt, Artificial Sequence
  Antisense Oligo
ucugagcaagucuaucuuc

SEQ ID NO: 41203 - RNA, 19 nt, Artificial Sequence
  Sense Oligo
agccgcugagugagccuaa

SEQ ID NO: 41204 - RNA, 19 nt, Artificial Sequence
  Antisense Oligo
uuaggcucacucagcggcu

SEQ ID NO: 41205 - RNA, 19 nt, Artificial Sequence
  Sense Oligo
gccgcugagugagccuaag

SEQ ID NO: 41206 - RNA, 19 nt, Artificial Sequence
  Antisense Oligo
cuuaggcucacucagcggc

SEQ ID NO: 41207 - RNA, 19 nt, Artificial Sequence
  Sense Oligo
ccgcugagugagccuaagg

SEQ ID NO: 41208 - RNA, 19 nt, Artificial Sequence
  Antisense Oligo
ccuuaggcucacucagcgg

SEQ ID NO: 41209 - RNA, 19 nt, Artificial Sequence
  Sense Oligo
cgcugagugagccuaagga

SEQ ID NO: 41210 - RNA, 19 nt, Artificial Sequence
  Antisense Oligo
uccuuaggcucacucagcg

SEQ ID NO: 41211 - RNA, 19 nt, Artificial Sequence
  Sense Oligo
gcugagugagccuaaggag

SEQ ID NO: 41212 - RNA, 19 nt, Artificial Sequence
  Antisense Oligo
cuccuuaggcucacucagc

SEQ ID NO: 41213 - RNA, 19 nt, Artificial Sequence
  Sense Oligo
gagugagccuaaggaggac

SEQ ID NO: 41214 - RNA, 19 nt, Artificial Sequence
  Antisense Oligo
guccuccuuaggcucacuc

SEQ ID NO: 41215 - RNA, 19 nt, Artificial Sequence
  Sense Oligo
agugagccuaaggaggacc

SEQ ID NO: 41216 - RNA, 19 nt, Artificial Sequence
  Antisense Oligo
gguccuccuuaggcucacu

SEQ ID NO: 41217 - RNA, 19 nt, Artificial Sequence
  Sense Oligo
gugagccuaaggaggacca

SEQ ID NO: 41218 - RNA, 19 nt, Artificial Sequence
  Antisense Oligo
ugguccuccuuaggcucac

SEQ ID NO: 41219 - RNA, 19 nt, Artificial Sequence
  Sense Oligo
gccuaaggaggaccaggaa

SEQ ID NO: 41220 - RNA, 19 nt, Artificial Sequence
  Antisense Oligo
uuccugguccuccuuaggc

SEQ ID NO: 41221 - RNA, 19 nt, Artificial Sequence
  Sense Oligo
ccuaaggaggaccaggaag

SEQ ID NO: 41222 - RNA, 19 nt, Artificial Sequence
  Antisense Oligo
cuuccugguccuccuuagg

SEQ ID NO: 41223 - RNA, 19 nt, Artificial Sequence
  Sense Oligo
aggaccaggaagccgcaga

SEQ ID NO: 41224 - RNA, 19 nt, Artificial Sequence
  Antisense Oligo
ucugcggcuuccugguccu

SEQ ID NO: 41225 - RNA, 19 nt, Artificial Sequence
  Sense Oligo
gaccaggaagccgcagagu

SEQ ID NO: 41226 - RNA, 19 nt, Artificial Sequence
  Antisense Oligo
acucugcggcuuccugguc

SEQ ID NO: 41227 - RNA, 19 nt, Artificial Sequence
  Sense Oligo
accaggaagccgcagaguu

SEQ ID NO: 41228 - RNA, 19 nt, Artificial Sequence
  Antisense Oligo
aacucugcggcuuccuggu

SEQ ID NO: 41229 - RNA, 19 nt, Artificial Sequence
  Sense Oligo
ccaggaagccgcagaguug

SEQ ID NO: 41230 - RNA, 19 nt, Artificial Sequence
  Antisense Oligo
caacucugcggcuuccugg

SEQ ID NO: 41231 - RNA, 19 nt, Artificial Sequence
  Sense Oligo
caggaagccgcagaguugc

SEQ ID NO: 41232 - RNA, 19 nt, Artificial Sequence
  Antisense Oligo
gcaacucugcggcuuccug

SEQ ID NO: 41233 - RNA, 19 nt, Artificial Sequence
  Sense Oligo
aggaagccgcagaguugcu

SEQ ID NO: 41234 - RNA, 19 nt, Artificial Sequence
  Antisense Oligo
agcaacucugcggcuuccu

SEQ ID NO: 41235 - RNA, 19 nt, Artificial Sequence
  Sense Oligo
ggaagccgcagaguugcug

SEQ ID NO: 41236 - RNA, 19 nt, Artificial Sequence
  Antisense Oligo
cagcaacucugcggcuucc

SEQ ID NO: 41237 - RNA, 19 nt, Artificial Sequence
  Sense Oligo
gaagccgcagaguugcuga

SEQ ID NO: 41238 - RNA, 19 nt, Artificial Sequence
  Antisense Oligo
ucagcaacucugcggcuuc

SEQ ID NO: 41239 - RNA, 19 nt, Artificial Sequence
  Sense Oligo
aagccgcagaguugcugag

SEQ ID NO: 41240 - RNA, 19 nt, Artificial Sequence
  Antisense Oligo
cucagcaacucugcggcuu

SEQ ID NO: 41241 - RNA, 19 nt, Artificial Sequence
  Sense Oligo
cgcagaguugcugagugag

SEQ ID NO: 41242 - RNA, 19 nt, Artificial Sequence
  Antisense Oligo
cucacucagcaacucugcg

SEQ ID NO: 41243 - RNA, 19 nt, Artificial Sequence
  Sense Oligo
aagagguguaugacuauuu

SEQ ID NO: 41244 - RNA, 19 nt, Artificial Sequence
  Antisense Oligo
aaauagucauacaccucuu

SEQ ID NO: 41245 - RNA, 19 nt, Artificial Sequence
  Sense Oligo
agagguguaugacuauuug

SEQ ID NO: 41246 - RNA, 19 nt, Artificial Sequence
  Antisense Oligo
caaauagucauacaccucu

SEQ ID NO: 41247 - RNA, 19 nt, Artificial Sequence
  Sense Oligo
gagguguaugacuauuugu

SEQ ID NO: 41248 - RNA, 19 nt, Artificial Sequence
  Antisense Oligo
acaaauagucauacaccuc

SEQ ID NO: 41249 - RNA, 19 nt, Artificial Sequence
  Sense Oligo
agguguaugacuauuugua

SEQ ID NO: 41250 - RNA, 19 nt, Artificial Sequence
  Antisense Oligo
uacaaauagucauacaccu

SEQ ID NO: 41251 - RNA, 19 nt, Artificial Sequence
  Sense Oligo
guaugacuauuuguaucag

SEQ ID NO: 41252 - RNA, 19 nt, Artificial Sequence
  Antisense Oligo
cugauacaaauagucauac

SEQ ID NO: 41253 - RNA, 19 nt, Artificial Sequence
  Sense Oligo
uaugacuauuuguaucagc

SEQ ID NO: 41254 - RNA, 19 nt, Artificial Sequence
  Antisense Oligo
gcugauacaaauagucaua

SEQ ID NO: 41255 - RNA, 19 nt, Artificial Sequence
  Sense Oligo
augacuauuuguaucagcc

SEQ ID NO: 41256 - RNA, 19 nt, Artificial Sequence
  Antisense Oligo
ggcugauacaaauagucau

SEQ ID NO: 41257 - RNA, 19 nt, Artificial Sequence
  Sense Oligo
cuauuuguaucagccuucu

SEQ ID NO: 41258 - RNA, 19 nt, Artificial Sequence
  Antisense Oligo
agaaggcugauacaaauag

SEQ ID NO: 41259 - RNA, 19 nt, Artificial Sequence
  Sense Oligo
uauuuguaucagccuucuu

SEQ ID NO: 41260 - RNA, 19 nt, Artificial Sequence
  Antisense Oligo
aagaaggcugauacaaaua

SEQ ID NO: 41261 - RNA, 19 nt, Artificial Sequence
  Sense Oligo
auuuguaucagccuucuua

SEQ ID NO: 41262 - RNA, 19 nt, Artificial Sequence
  Antisense Oligo
uaagaaggcugauacaaau

SEQ ID NO: 41263 - RNA, 19 nt, Artificial Sequence
  Sense Oligo
uuuguaucagccuucuuac

SEQ ID NO: 41264 - RNA, 19 nt, Artificial Sequence
  Antisense Oligo
guaagaaggcugauacaaa

SEQ ID NO: 41265 - RNA, 19 nt, Artificial Sequence
  Sense Oligo
guaucagccuucuuacaga

SEQ ID NO: 41266 - RNA, 19 nt, Artificial Sequence
  Antisense Oligo
ucuguaagaaggcugauac

SEQ ID NO: 41267 - RNA, 19 nt, Artificial Sequence
  Sense Oligo
guucauuaaguugcaccag

SEQ ID NO: 41268 - RNA, 19 nt, Artificial Sequence
  Antisense Oligo
cuggugcaacuuaaugaac

SEQ ID NO: 41269 - RNA, 19 nt, Artificial Sequence
  Sense Oligo
uucauuaaguugcaccagg

SEQ ID NO: 41270 - RNA, 19 nt, Artificial Sequence
  Antisense Oligo
ccuggugcaacuuaaugaa

SEQ ID NO: 41271 - RNA, 19 nt, Artificial Sequence
  Sense Oligo
ucauuaaguugcaccagga

SEQ ID NO: 41272 - RNA, 19 nt, Artificial Sequence
  Antisense Oligo
uccuggugcaacuuaauga

SEQ ID NO: 41273 - RNA, 19 nt, Artificial Sequence
  Sense Oligo
cauuaaguugcaccaggau

SEQ ID NO: 41274 - RNA, 19 nt, Artificial Sequence
  Antisense Oligo
auccuggugcaacuuaaug

SEQ ID NO: 41275 - RNA, 19 nt, Artificial Sequence
  Sense Oligo
auuaaguugcaccaggauc

SEQ ID NO: 41276 - RNA, 19 nt, Artificial Sequence
  Antisense Oligo
gauccuggugcaacuuaau

SEQ ID NO: 41277 - RNA, 19 nt, Artificial Sequence
  Sense Oligo
uuaaguugcaccaggaucu

SEQ ID NO: 41278 - RNA, 19 nt, Artificial Sequence
  Antisense Oligo
agauccuggugcaacuuaa

SEQ ID NO: 41279 - RNA, 19 nt, Artificial Sequence
  Sense Oligo
uaaguugcaccaggaucua

SEQ ID NO: 41280 - RNA, 19 nt, Artificial Sequence
  Antisense Oligo
uagauccuggugcaacuua

SEQ ID NO: 41281 - RNA, 19 nt, Artificial Sequence
  Sense Oligo
aaguugcaccaggaucuaa

SEQ ID NO: 41282 - RNA, 19 nt, Artificial Sequence
  Antisense Oligo
uuagauccuggugcaacuu

SEQ ID NO: 41283 - RNA, 19 nt, Artificial Sequence
  Sense Oligo
aguugcaccaggaucuaaa

SEQ ID NO: 41284 - RNA, 19 nt, Artificial Sequence
  Antisense Oligo
uuuagauccuggugcaacu

SEQ ID NO: 41285 - RNA, 19 nt, Artificial Sequence
  Sense Oligo
guugcaccaggaucuaaag

SEQ ID NO: 41286 - RNA, 19 nt, Artificial Sequence
  Antisense Oligo
cuuuagauccuggugcaac

SEQ ID NO: 41287 - RNA, 19 nt, Artificial Sequence
  Sense Oligo
uugcaccaggaucuaaagu

SEQ ID NO: 41288 - RNA, 19 nt, Artificial Sequence
  Antisense Oligo
acuuuagauccuggugcaa

SEQ ID NO: 41289 - RNA, 19 nt, Artificial Sequence
  Sense Oligo
ugcaccaggaucuaaaguc

SEQ ID NO: 41290 - RNA, 19 nt, Artificial Sequence
  Antisense Oligo
gacuuuagauccuggugca

SEQ ID NO: 41291 - RNA, 19 nt, Artificial Sequence
  Sense Oligo
agaggucacccuugcagag

SEQ ID NO: 41292 - RNA, 19 nt, Artificial Sequence
  Antisense Oligo
cucugcaagggugaccucu

SEQ ID NO: 41293 - RNA, 19 nt, Artificial Sequence
  Sense Oligo
ugaugucaucuucaaggac

SEQ ID NO: 41294 - RNA, 19 nt, Artificial Sequence
  Antisense Oligo
guccuugaagaugacauca

SEQ ID NO: 41295 - RNA, 19 nt, Artificial Sequence
  Sense Oligo
gaugucaucuucaaggacu

SEQ ID NO: 41296 - RNA, 19 nt, Artificial Sequence
  Antisense Oligo
aguccuugaagaugacauc

SEQ ID NO: 41297 - RNA, 19 nt, Artificial Sequence
  Sense Oligo
ucaucuucaaggacuuugu

SEQ ID NO: 41298 - RNA, 19 nt, Artificial Sequence
  Antisense Oligo
acaaaguccuugaagauga

SEQ ID NO: 41299 - RNA, 19 nt, Artificial Sequence
  Sense Oligo
caucuucaaggacuuugug

SEQ ID NO: 41300 - RNA, 19 nt, Artificial Sequence
  Antisense Oligo
cacaaaguccuugaagaug

SEQ ID NO: 41301 - RNA, 19 nt, Artificial Sequence
  Sense Oligo
ggacuuugugaauaaauac

SEQ ID NO: 41302 - RNA, 19 nt, Artificial Sequence
  Antisense Oligo
guauuuauucacaaagucc

SEQ ID NO: 41303 - RNA, 19 nt, Artificial Sequence
  Sense Oligo
uugugaauaaauacacgga

SEQ ID NO: 41304 - RNA, 19 nt, Artificial Sequence
  Antisense Oligo
uccguguauuuauucacaa

SEQ ID NO: 41305 - RNA, 19 nt, Artificial Sequence
  Sense Oligo
ugugaauaaauacacggac

SEQ ID NO: 41306 - RNA, 19 nt, Artificial Sequence
  Antisense Oligo
guccguguauuuauucaca

SEQ ID NO: 41307 - RNA, 19 nt, Artificial Sequence
  Sense Oligo
gugaauaaauacacggacc

SEQ ID NO: 41308 - RNA, 19 nt, Artificial Sequence
  Antisense Oligo
gguccguguauuuauucac

SEQ ID NO: 41309 - RNA, 19 nt, Artificial Sequence
  Sense Oligo
ugaauaaauacacggaccu

SEQ ID NO: 41310 - RNA, 19 nt, Artificial Sequence
  Antisense Oligo
agguccguguauuuauuca

SEQ ID NO: 41311 - RNA, 19 nt, Artificial Sequence
  Sense Oligo
gaauaaauacacggaccug

SEQ ID NO: 41312 - RNA, 19 nt, Artificial Sequence
  Antisense Oligo
cagguccguguauuuauuc

SEQ ID NO: 41313 - RNA, 19 nt, Artificial Sequence
  Sense Oligo
aauaaauacacggaccugg

SEQ ID NO: 41314 - RNA, 19 nt, Artificial Sequence
  Antisense Oligo
ccagguccguguauuuauu

SEQ ID NO: 41315 - RNA, 19 nt, Artificial Sequence
  Sense Oligo
auaaauacacggaccugga

SEQ ID NO: 41316 - RNA, 19 nt, Artificial Sequence
  Antisense Oligo
uccagguccguguauuuau

SEQ ID NO: 41317 - RNA, 19 nt, Artificial Sequence
  Sense Oligo
auacacggaccuggauuca

SEQ ID NO: 41318 - RNA, 19 nt, Artificial Sequence
  Antisense Oligo
ugaauccagguccguguau

SEQ ID NO: 41319 - RNA, 19 nt, Artificial Sequence
  Sense Oligo
uacacggaccuggauucag

SEQ ID NO: 41320 - RNA, 19 nt, Artificial Sequence
  Antisense Oligo
cugaauccagguccgugua

SEQ ID NO: 41321 - RNA, 19 nt, Artificial Sequence
  Sense Oligo
acacggaccuggauucaga

SEQ ID NO: 41322 - RNA, 19 nt, Artificial Sequence
  Antisense Oligo
ucugaauccagguccgugu

SEQ ID NO: 41323 - RNA, 19 nt, Artificial Sequence
  Sense Oligo
cacggaccuggauucagaa

SEQ ID NO: 41324 - RNA, 19 nt, Artificial Sequence
  Antisense Oligo
uucugaauccagguccgug

SEQ ID NO: 41325 - RNA, 19 nt, Artificial Sequence
  Sense Oligo
aacuuaagaucaugugcac

SEQ ID NO: 41326 - RNA, 19 nt, Artificial Sequence
  Antisense Oligo
gugcacaugaucuuaaguu

SEQ ID NO: 41327 - RNA, 19 nt, Artificial Sequence
  Sense Oligo
acuuaagaucaugugcacc

SEQ ID NO: 41328 - RNA, 19 nt, Artificial Sequence
  Antisense Oligo
ggugcacaugaucuuaagu

SEQ ID NO: 41329 - RNA, 19 nt, Artificial Sequence
  Sense Oligo
cuuaagaucaugugcaccg

SEQ ID NO: 41330 - RNA, 19 nt, Artificial Sequence
  Antisense Oligo
cggugcacaugaucuuaag

SEQ ID NO: 41331 - RNA, 19 nt, Artificial Sequence
  Sense Oligo
agaucaugugcaccgugga

SEQ ID NO: 41332 - RNA, 19 nt, Artificial Sequence
  Antisense Oligo
uccacggugcacaugaucu

SEQ ID NO: 41333 - RNA, 19 nt, Artificial Sequence
  Sense Oligo
gaucaugugcaccguggac

SEQ ID NO: 41334 - RNA, 19 nt, Artificial Sequence
  Antisense Oligo
guccacggugcacaugauc

SEQ ID NO: 41335 - RNA, 19 nt, Artificial Sequence
  Sense Oligo
aucaugugcaccguggacc

SEQ ID NO: 41336 - RNA, 19 nt, Artificial Sequence
  Antisense Oligo
gguccacggugcacaugau

SEQ ID NO: 41337 - RNA, 19 nt, Artificial Sequence
  Sense Oligo
ucaugugcaccguggacca

SEQ ID NO: 41338 - RNA, 19 nt, Artificial Sequence
  Antisense Oligo
ugguccacggugcacauga

SEQ ID NO: 41339 - RNA, 19 nt, Artificial Sequence
  Sense Oligo
caugugcaccguggaccac

SEQ ID NO: 41340 - RNA, 19 nt, Artificial Sequence
  Antisense Oligo
gugguccacggugcacaug

SEQ ID NO: 41341 - RNA, 19 nt, Artificial Sequence
  Sense Oligo
agauuggaucaaggaccga

SEQ ID NO: 41342 - RNA, 19 nt, Artificial Sequence
  Antisense Oligo
ucgguccuugauccaaucu

SEQ ID NO: 41343 - RNA, 19 nt, Artificial Sequence
  Sense Oligo
gauuggaucaaggaccgag

SEQ ID NO: 41344 - RNA, 19 nt, Artificial Sequence
  Antisense Oligo
cucgguccuugauccaauc

SEQ ID NO: 41345 - RNA, 19 nt, Artificial Sequence
  Sense Oligo
auuggaucaaggaccgagu

SEQ ID NO: 41346 - RNA, 19 nt, Artificial Sequence
  Antisense Oligo
acucgguccuugauccaau

SEQ ID NO: 41347 - RNA, 19 nt, Artificial Sequence
  Sense Oligo
acagaucaaggaauaccau

SEQ ID NO: 41348 - RNA, 19 nt, Artificial Sequence
  Antisense Oligo
augguauuccuugaucugu

SEQ ID NO: 41349 - RNA, 19 nt, Artificial Sequence
  Sense Oligo
cagaucaaggaauaccauc

SEQ ID NO: 41350 - RNA, 19 nt, Artificial Sequence
  Antisense Oligo
gaugguauuccuugaucug

SEQ ID NO: 41351 - RNA, 19 nt, Artificial Sequence
  Sense Oligo
agaucaaggaauaccauca

SEQ ID NO: 41352 - RNA, 19 nt, Artificial Sequence
  Antisense Oligo
ugaugguauuccuugaucu

SEQ ID NO: 41353 - RNA, 19 nt, Artificial Sequence
  Sense Oligo
gaucaaggaauaccaucac

SEQ ID NO: 41354 - RNA, 19 nt, Artificial Sequence
  Antisense Oligo
gugaugguauuccuugauc

SEQ ID NO: 41355 - RNA, 19 nt, Artificial Sequence
  Sense Oligo
aucaaggaauaccaucacc

SEQ ID NO: 41356 - RNA, 19 nt, Artificial Sequence
  Antisense Oligo
ggugaugguauuccuugau

SEQ ID NO: 41357 - RNA, 19 nt, Artificial Sequence
  Sense Oligo
ucaaggaauaccaucaccu

SEQ ID NO: 41358 - RNA, 19 nt, Artificial Sequence
  Antisense Oligo
aggugaugguauuccuuga

SEQ ID NO: 41359 - RNA, 19 nt, Artificial Sequence
  Sense Oligo
auaccaucaccugcaccag

SEQ ID NO: 41360 - RNA, 19 nt, Artificial Sequence
  Antisense Oligo
cuggugcaggugaugguau

SEQ ID NO: 41361 - RNA, 19 nt, Artificial Sequence
  Sense Oligo
cacgcagccaaggucaucu

SEQ ID NO: 41362 - RNA, 19 nt, Artificial Sequence
  Antisense Oligo
agaugaccuuggcugcgug

SEQ ID NO: 41363 - RNA, 19 nt, Artificial Sequence
  Sense Oligo
gucaucuugcaggucaaag

SEQ ID NO: 41364 - RNA, 19 nt, Artificial Sequence
  Antisense Oligo
cuuugaccugcaagaugac

SEQ ID NO: 41365 - RNA, 19 nt, Artificial Sequence
  Sense Oligo
guccugccucagccucuuc

SEQ ID NO: 41366 - RNA, 19 nt, Artificial Sequence
  Antisense Oligo
gaagaggcugaggcaggac

SEQ ID NO: 41367 - RNA, 19 nt, Artificial Sequence
  Sense Oligo
ccucuucaggagccauggg

SEQ ID NO: 41368 - RNA, 19 nt, Artificial Sequence
  Antisense Oligo
cccauggcuccugaagagg

SEQ ID NO: 41369 - RNA, 19 nt, Artificial Sequence
  Sense Oligo
cucuucaggagccaugggc

SEQ ID NO: 41370 - RNA, 19 nt, Artificial Sequence
  Antisense Oligo
gcccauggcuccugaagag

SEQ ID NO: 41371 - RNA, 19 nt, Artificial Sequence
  Sense Oligo
ccaugggcuuuguggcuuu

SEQ ID NO: 41372 - RNA, 19 nt, Artificial Sequence
  Antisense Oligo
aaagccacaaagcccaugg

SEQ ID NO: 41373 - RNA, 19 nt, Artificial Sequence
  Sense Oligo
ggaugacuuagagcuuccg

SEQ ID NO: 41374 - RNA, 19 nt, Artificial Sequence
  Antisense Oligo
cggaagcucuaagucaucc

SEQ ID NO: 41375 - RNA, 19 nt, Artificial Sequence
  Sense Oligo
gaugacuuagagcuuccgu

SEQ ID NO: 41376 - RNA, 19 nt, Artificial Sequence
  Antisense Oligo
acggaagcucuaagucauc

SEQ ID NO: 41377 - RNA, 19 nt, Artificial Sequence
  Sense Oligo
augacuuagagcuuccguc

SEQ ID NO: 41378 - RNA, 19 nt, Artificial Sequence
  Antisense Oligo
gacggaagcucuaagucau

SEQ ID NO: 41379 - RNA, 19 nt, Artificial Sequence
  Sense Oligo
gacuuagagcuuccgucag

SEQ ID NO: 41380 - RNA, 19 nt, Artificial Sequence
  Antisense Oligo
cugacggaagcucuaaguc

SEQ ID NO: 41381 - RNA, 19 nt, Artificial Sequence
  Sense Oligo
acuuagagcuuccgucagg

SEQ ID NO: 41382 - RNA, 19 nt, Artificial Sequence
  Antisense Oligo
ccugacggaagcucuaagu

SEQ ID NO: 41383 - RNA, 19 nt, Artificial Sequence
  Sense Oligo
auaaauaguaccacugcuc

SEQ ID NO: 41384 - RNA, 19 nt, Artificial Sequence
  Antisense Oligo
gagcagugguacuauuuau

SEQ ID NO: 41385 - RNA, 19 nt, Artificial Sequence
  Sense Oligo
uaaauaguaccacugcucc

SEQ ID NO: 41386 - RNA, 19 nt, Artificial Sequence
  Antisense Oligo
ggagcagugguacuauuua

SEQ ID NO: 41387 - RNA, 19 nt, Artificial Sequence
  Sense Oligo
uaguaccacugcuccuuag

SEQ ID NO: 41388 - RNA, 19 nt, Artificial Sequence
  Antisense Oligo
cuaaggagcagugguacua

SEQ ID NO: 41389 - RNA, 19 nt, Artificial Sequence
  Sense Oligo
guaccacugcuccuuagcc

SEQ ID NO: 41390 - RNA, 19 nt, Artificial Sequence
  Antisense Oligo
ggcuaaggagcagugguac

SEQ ID NO: 41391 - RNA, 19 nt, Artificial Sequence
  Sense Oligo
uaccacugcuccuuagcca

SEQ ID NO: 41392 - RNA, 19 nt, Artificial Sequence
  Antisense Oligo
uggcuaaggagcaguggua

SEQ ID NO: 41393 - RNA, 19 nt, Artificial Sequence
  Sense Oligo
ugcuccuuagccagaggga

SEQ ID NO: 41394 - RNA, 19 nt, Artificial Sequence
  Antisense Oligo
ucccucuggcuaaggagca

SEQ ID NO: 41395 - RNA, 19 nt, Artificial Sequence
  Sense Oligo
ccuuagccagagggaguuu

SEQ ID NO: 41396 - RNA, 19 nt, Artificial Sequence
  Antisense Oligo
aaacucccucuggcuaagg

SEQ ID NO: 41397 - RNA, 19 nt, Artificial Sequence
  Sense Oligo
cuuagccagagggaguuuc

SEQ ID NO: 41398 - RNA, 19 nt, Artificial Sequence
  Antisense Oligo
gaaacucccucuggcuaag

SEQ ID NO: 41399 - RNA, 19 nt, Artificial Sequence
  Sense Oligo
uuagccagagggaguuucc

SEQ ID NO: 41400 - RNA, 19 nt, Artificial Sequence
  Antisense Oligo
ggaaacucccucuggcuaa

SEQ ID NO: 41401 - RNA, 19 nt, Artificial Sequence
  Sense Oligo
ccagagggaguuuccuugg

SEQ ID NO: 41402 - RNA, 19 nt, Artificial Sequence
  Antisense Oligo
ccaaggaaacucccucugg

SEQ ID NO: 41403 - RNA, 19 nt, Artificial Sequence
  Sense Oligo
cagagggaguuuccuuggg

SEQ ID NO: 41404 - RNA, 19 nt, Artificial Sequence
  Antisense Oligo
cccaaggaaacucccucug

SEQ ID NO: 41405 - RNA, 19 nt, Artificial Sequence
  Sense Oligo
agagggaguuuccuugggu

SEQ ID NO: 41406 - RNA, 19 nt, Artificial Sequence
  Antisense Oligo
acccaaggaaacucccucu

SEQ ID NO: 41407 - RNA, 19 nt, Artificial Sequence
  Sense Oligo
gagggaguuuccuuggguc

SEQ ID NO: 41408 - RNA, 19 nt, Artificial Sequence
  Antisense Oligo
gacccaaggaaacucccuc

SEQ ID NO: 41409 - RNA, 19 nt, Artificial Sequence
  Sense Oligo
agggaguuuccuugggucu

SEQ ID NO: 41410 - RNA, 19 nt, Artificial Sequence
  Antisense Oligo
agacccaaggaaacucccu

SEQ ID NO: 41411 - RNA, 19 nt, Artificial Sequence
  Sense Oligo
gggaguuuccuugggucug

SEQ ID NO: 41412 - RNA, 19 nt, Artificial Sequence
  Antisense Oligo
cagacccaaggaaacuccc

SEQ ID NO: 41413 - RNA, 19 nt, Artificial Sequence
  Sense Oligo
ggaguuuccuugggucugc

SEQ ID NO: 41414 - RNA, 19 nt, Artificial Sequence
  Antisense Oligo
gcagacccaaggaaacucc

SEQ ID NO: 41415 - RNA, 19 nt, Artificial Sequence
  Sense Oligo
gaguuuccuugggucugcg

SEQ ID NO: 41416 - RNA, 19 nt, Artificial Sequence
  Antisense Oligo
cgcagacccaaggaaacuc

SEQ ID NO: 41417 - RNA, 19 nt, Artificial Sequence
  Sense Oligo
aguuuccuugggucugcgu

SEQ ID NO: 41418 - RNA, 19 nt, Artificial Sequence
  Antisense Oligo
acgcagacccaaggaaacu

SEQ ID NO: 41419 - RNA, 19 nt, Artificial Sequence
  Sense Oligo
guuuccuugggucugcgug

SEQ ID NO: 41420 - RNA, 19 nt, Artificial Sequence
  Antisense Oligo
cacgcagacccaaggaaac

SEQ ID NO: 41421 - RNA, 19 nt, Artificial Sequence
  Sense Oligo
uuuccuugggucugcguga

SEQ ID NO: 41422 - RNA, 19 nt, Artificial Sequence
  Antisense Oligo
ucacgcagacccaaggaaa

SEQ ID NO: 41423 - RNA, 19 nt, Artificial Sequence
  Sense Oligo
uuccuugggucugcgugaa

SEQ ID NO: 41424 - RNA, 19 nt, Artificial Sequence
  Antisense Oligo
uucacgcagacccaaggaa

SEQ ID NO: 41425 - RNA, 19 nt, Artificial Sequence
  Sense Oligo
uccuugggucugcgugaag

SEQ ID NO: 41426 - RNA, 19 nt, Artificial Sequence
  Antisense Oligo
cuucacgcagacccaagga

SEQ ID NO: 41427 - RNA, 19 nt, Artificial Sequence
  Sense Oligo
ccuugggucugcgugaaga

SEQ ID NO: 41428 - RNA, 19 nt, Artificial Sequence
  Antisense Oligo
ucuucacgcagacccaagg

SEQ ID NO: 41429 - RNA, 19 nt, Artificial Sequence
  Sense Oligo
cuugggucugcgugaagau

SEQ ID NO: 41430 - RNA, 19 nt, Artificial Sequence
  Antisense Oligo
aucuucacgcagacccaag

SEQ ID NO: 41431 - RNA, 19 nt, Artificial Sequence
  Sense Oligo
uugggucugcgugaagauc

SEQ ID NO: 41432 - RNA, 19 nt, Artificial Sequence
  Antisense Oligo
gaucuucacgcagacccaa

SEQ ID NO: 41433 - RNA, 19 nt, Artificial Sequence
  Sense Oligo
ugggucugcgugaagauca

SEQ ID NO: 41434 - RNA, 19 nt, Artificial Sequence
  Antisense Oligo
ugaucuucacgcagaccca

SEQ ID NO: 41435 - RNA, 19 nt, Artificial Sequence
  Sense Oligo
gggucugcgugaagaucaa

SEQ ID NO: 41436 - RNA, 19 nt, Artificial Sequence
  Antisense Oligo
uugaucuucacgcagaccc

SEQ ID NO: 41437 - RNA, 19 nt, Artificial Sequence
  Sense Oligo
ggucugcgugaagaucaag

SEQ ID NO: 41438 - RNA, 19 nt, Artificial Sequence
  Antisense Oligo
cuugaucuucacgcagacc

SEQ ID NO: 41439 - RNA, 19 nt, Artificial Sequence
  Sense Oligo
gucugcgugaagaucaaga

SEQ ID NO: 41440 - RNA, 19 nt, Artificial Sequence
  Antisense Oligo
ucuugaucuucacgcagac

SEQ ID NO: 41441 - RNA, 19 nt, Artificial Sequence
  Sense Oligo
ucugcgugaagaucaagaa

SEQ ID NO: 41442 - RNA, 19 nt, Artificial Sequence
  Antisense Oligo
uucuugaucuucacgcaga

SEQ ID NO: 41443 - RNA, 19 nt, Artificial Sequence
  Sense Oligo
caauccucuuuucauaacg

SEQ ID NO: 41444 - RNA, 19 nt, Artificial Sequence
  Antisense Oligo
cguuaugaaaagaggauug

SEQ ID NO: 41445 - RNA, 19 nt, Artificial Sequence
  Sense Oligo
aauccucuuuucauaacgg

SEQ ID NO: 41446 - RNA, 19 nt, Artificial Sequence
  Antisense Oligo
ccguuaugaaaagaggauu

SEQ ID NO: 41447 - RNA, 19 nt, Artificial Sequence
  Sense Oligo
auccucuuuucauaacggg

SEQ ID NO: 41448 - RNA, 19 nt, Artificial Sequence
  Antisense Oligo
cccguuaugaaaagaggau

SEQ ID NO: 41449 - RNA, 19 nt, Artificial Sequence
  Sense Oligo
ccucuuuucauaacgggca

SEQ ID NO: 41450 - RNA, 19 nt, Artificial Sequence
  Antisense Oligo
ugcccguuaugaaaagagg

SEQ ID NO: 41451 - RNA, 19 nt, Artificial Sequence
  Sense Oligo
cucuuuucauaacgggcau

SEQ ID NO: 41452 - RNA, 19 nt, Artificial Sequence
  Antisense Oligo
augcccguuaugaaaagag

SEQ ID NO: 41453 - RNA, 19 nt, Artificial Sequence
  Sense Oligo
uuucauaacgggcauuugu

SEQ ID NO: 41454 - RNA, 19 nt, Artificial Sequence
  Antisense Oligo
acaaaugcccguuaugaaa

SEQ ID NO: 41455 - RNA, 19 nt, Artificial Sequence
  Sense Oligo
uucauaacgggcauuugua

SEQ ID NO: 41456 - RNA, 19 nt, Artificial Sequence
  Antisense Oligo
uacaaaugcccguuaugaa

SEQ ID NO: 41457 - RNA, 19 nt, Artificial Sequence
  Sense Oligo
ucauaacgggcauuuguaa

SEQ ID NO: 41458 - RNA, 19 nt, Artificial Sequence
  Antisense Oligo
uuacaaaugcccguuauga

SEQ ID NO: 41459 - RNA, 19 nt, Artificial Sequence
  Sense Oligo
cauaacgggcauuuguaaa

SEQ ID NO: 41460 - RNA, 19 nt, Artificial Sequence
  Antisense Oligo
uuuacaaaugcccguuaug

SEQ ID NO: 41461 - RNA, 19 nt, Artificial Sequence
  Sense Oligo
auaacgggcauuuguaaag

SEQ ID NO: 41462 - RNA, 19 nt, Artificial Sequence
  Antisense Oligo
cuuuacaaaugcccguuau

SEQ ID NO: 41463 - RNA, 19 nt, Artificial Sequence
  Sense Oligo
uaacgggcauuuguaaagg

SEQ ID NO: 41464 - RNA, 19 nt, Artificial Sequence
  Antisense Oligo
ccuuuacaaaugcccguua

SEQ ID NO: 41465 - RNA, 19 nt, Artificial Sequence
  Sense Oligo
aacgggcauuuguaaaggg

SEQ ID NO: 41466 - RNA, 19 nt, Artificial Sequence
  Antisense Oligo
cccuuuacaaaugcccguu

SEQ ID NO: 41467 - RNA, 19 nt, Artificial Sequence
  Sense Oligo
acgggcauuuguaaagggu

SEQ ID NO: 41468 - RNA, 19 nt, Artificial Sequence
  Antisense Oligo
acccuuuacaaaugcccgu

SEQ ID NO: 41469 - RNA, 19 nt, Artificial Sequence
  Sense Oligo
gcauuuguaaagggucaua

SEQ ID NO: 41470 - RNA, 19 nt, Artificial Sequence
  Antisense Oligo
uaugacccuuuacaaaugc

SEQ ID NO: 41471 - RNA, 19 nt, Artificial Sequence
  Sense Oligo
cauuuguaaagggucauag

SEQ ID NO: 41472 - RNA, 19 nt, Artificial Sequence
  Antisense Oligo
cuaugacccuuuacaaaug

SEQ ID NO: 41473 - RNA, 19 nt, Artificial Sequence
  Sense Oligo
auuuguaaagggucauagg

SEQ ID NO: 41474 - RNA, 19 nt, Artificial Sequence
  Antisense Oligo
ccuaugacccuuuacaaau

SEQ ID NO: 41475 - RNA, 19 nt, Artificial Sequence
  Sense Oligo
uuuguaaagggucauaggc

SEQ ID NO: 41476 - RNA, 19 nt, Artificial Sequence
  Antisense Oligo
gccuaugacccuuuacaaa

SEQ ID NO: 41477 - RNA, 19 nt, Artificial Sequence
  Sense Oligo
uuguaaagggucauaggcu

SEQ ID NO: 41478 - RNA, 19 nt, Artificial Sequence
  Antisense Oligo
agccuaugacccuuuacaa

SEQ ID NO: 41479 - RNA, 19 nt, Artificial Sequence
  Sense Oligo
uguaaagggucauaggcuc

SEQ ID NO: 41480 - RNA, 19 nt, Artificial Sequence
  Antisense Oligo
gagccuaugacccuuuaca

SEQ ID NO: 41481 - RNA, 19 nt, Artificial Sequence
  Sense Oligo
guaaagggucauaggcucu

SEQ ID NO: 41482 - RNA, 19 nt, Artificial Sequence
  Antisense Oligo
agagccuaugacccuuuac

SEQ ID NO: 41483 - RNA, 19 nt, Artificial Sequence
  Sense Oligo
uaaagggucauaggcucuc

SEQ ID NO: 41484 - RNA, 19 nt, Artificial Sequence
  Antisense Oligo
gagagccuaugacccuuua

SEQ ID NO: 41485 - RNA, 19 nt, Artificial Sequence
  Sense Oligo
aaagggucauaggcucucu

SEQ ID NO: 41486 - RNA, 19 nt, Artificial Sequence
  Antisense Oligo
agagagccuaugacccuuu

SEQ ID NO: 41487 - RNA, 19 nt, Artificial Sequence
  Sense Oligo
aagggucauaggcucucuc

SEQ ID NO: 41488 - RNA, 19 nt, Artificial Sequence
  Antisense Oligo
gagagagccuaugacccuu

SEQ ID NO: 41489 - RNA, 19 nt, Artificial Sequence
  Sense Oligo
agggucauaggcucucucu

SEQ ID NO: 41490 - RNA, 19 nt, Artificial Sequence
  Antisense Oligo
agagagagccuaugacccu

SEQ ID NO: 41491 - RNA, 19 nt, Artificial Sequence
  Sense Oligo
gggucauaggcucucucua

SEQ ID NO: 41492 - RNA, 19 nt, Artificial Sequence
  Antisense Oligo
uagagagagccuaugaccc

SEQ ID NO: 41493 - RNA, 19 nt, Artificial Sequence
  Sense Oligo
ggucauaggcucucucuag

SEQ ID NO: 41494 - RNA, 19 nt, Artificial Sequence
  Antisense Oligo
cuagagagagccuaugacc

SEQ ID NO: 41495 - RNA, 19 nt, Artificial Sequence
  Sense Oligo
gucauaggcucucucuagg

SEQ ID NO: 41496 - RNA, 19 nt, Artificial Sequence
  Antisense Oligo
ccuagagagagccuaugac

SEQ ID NO: 41497 - RNA, 19 nt, Artificial Sequence
  Sense Oligo
ucauaggcucucucuaggu

SEQ ID NO: 41498 - RNA, 19 nt, Artificial Sequence
  Antisense Oligo
accuagagagagccuauga

SEQ ID NO: 41499 - RNA, 19 nt, Artificial Sequence
  Sense Oligo
cauaggcucucucuagguu

SEQ ID NO: 41500 - RNA, 19 nt, Artificial Sequence
  Antisense Oligo
aaccuagagagagccuaug

SEQ ID NO: 41501 - RNA, 19 nt, Artificial Sequence
  Sense Oligo
auaggcucucucuagguua

SEQ ID NO: 41502 - RNA, 19 nt, Artificial Sequence
  Antisense Oligo
uaaccuagagagagccuau

SEQ ID NO: 41503 - RNA, 19 nt, Artificial Sequence
  Sense Oligo
uaggcucucucuagguuac

SEQ ID NO: 41504 - RNA, 19 nt, Artificial Sequence
  Antisense Oligo
guaaccuagagagagccua

SEQ ID NO: 41505 - RNA, 19 nt, Artificial Sequence
  Sense Oligo
aggcucucucuagguuaca

SEQ ID NO: 41506 - RNA, 19 nt, Artificial Sequence
  Antisense Oligo
uguaaccuagagagagccu

SEQ ID NO: 41507 - RNA, 19 nt, Artificial Sequence
  Sense Oligo
ggcucucucuagguuacag

SEQ ID NO: 41508 - RNA, 19 nt, Artificial Sequence
  Antisense Oligo
cuguaaccuagagagagcc

SEQ ID NO: 41509 - RNA, 19 nt, Artificial Sequence
  Sense Oligo
gcucucucuagguuacaga

SEQ ID NO: 41510 - RNA, 19 nt, Artificial Sequence
  Antisense Oligo
ucuguaaccuagagagagc

SEQ ID NO: 41511 - RNA, 19 nt, Artificial Sequence
  Sense Oligo
cucucucuagguuacagaa

SEQ ID NO: 41512 - RNA, 19 nt, Artificial Sequence
  Antisense Oligo
uucuguaaccuagagagag

SEQ ID NO: 41513 - RNA, 19 nt, Artificial Sequence
  Sense Oligo
ucucucuagguuacagaag

SEQ ID NO: 41514 - RNA, 19 nt, Artificial Sequence
  Antisense Oligo
cuucuguaaccuagagaga

SEQ ID NO: 41515 - RNA, 19 nt, Artificial Sequence
  Sense Oligo
ucuagguuacagaagccaa

SEQ ID NO: 41516 - RNA, 19 nt, Artificial Sequence
  Antisense Oligo
uuggcuucuguaaccuaga

SEQ ID NO: 41517 - RNA, 19 nt, Artificial Sequence
  Sense Oligo
cuagguuacagaagccaaa

SEQ ID NO: 41518 - RNA, 19 nt, Artificial Sequence
  Antisense Oligo
uuuggcuucuguaaccuag

SEQ ID NO: 41519 - RNA, 19 nt, Artificial Sequence
  Sense Oligo
acacuuugucggcugccca

SEQ ID NO: 41520 - RNA, 19 nt, Artificial Sequence
  Antisense Oligo
ugggcagccgacaaagugu

SEQ ID NO: 41521 - RNA, 19 nt, Artificial Sequence
  Sense Oligo
cacuuugucggcugcccaa

SEQ ID NO: 41522 - RNA, 19 nt, Artificial Sequence
  Antisense Oligo
uugggcagccgacaaagug

SEQ ID NO: 41523 - RNA, 19 nt, Artificial Sequence
  Sense Oligo
acuuugucggcugcccaac

SEQ ID NO: 41524 - RNA, 19 nt, Artificial Sequence
  Antisense Oligo
guugggcagccgacaaagu

SEQ ID NO: 41525 - RNA, 19 nt, Artificial Sequence
  Sense Oligo
cuuugucggcugcccaacu

SEQ ID NO: 41526 - RNA, 19 nt, Artificial Sequence
  Antisense Oligo
aguugggcagccgacaaag

SEQ ID NO: 41527 - RNA, 19 nt, Artificial Sequence
  Sense Oligo
uuugucggcugcccaacug

SEQ ID NO: 41528 - RNA, 19 nt, Artificial Sequence
  Antisense Oligo
caguugggcagccgacaaa

SEQ ID NO: 41529 - RNA, 19 nt, Artificial Sequence
  Sense Oligo
uugucggcugcccaacugc

SEQ ID NO: 41530 - RNA, 19 nt, Artificial Sequence
  Antisense Oligo
gcaguugggcagccgacaa

SEQ ID NO: 41531 - RNA, 19 nt, Artificial Sequence
  Sense Oligo
ugucggcugcccaacugca

SEQ ID NO: 41532 - RNA, 19 nt, Artificial Sequence
  Antisense Oligo
ugcaguugggcagccgaca

SEQ ID NO: 41533 - RNA, 19 nt, Artificial Sequence
  Sense Oligo
gucggcugcccaacugcau

SEQ ID NO: 41534 - RNA, 19 nt, Artificial Sequence
  Antisense Oligo
augcaguugggcagccgac

SEQ ID NO: 41535 - RNA, 19 nt, Artificial Sequence
  Sense Oligo
ucggcugcccaacugcauc

SEQ ID NO: 41536 - RNA, 19 nt, Artificial Sequence
  Antisense Oligo
gaugcaguugggcagccga

SEQ ID NO: 41537 - RNA, 19 nt, Artificial Sequence
  Sense Oligo
cggcugcccaacugcaucu

SEQ ID NO: 41538 - RNA, 19 nt, Artificial Sequence
  Antisense Oligo
agaugcaguugggcagccg

SEQ ID NO: 41539 - RNA, 19 nt, Artificial Sequence
  Sense Oligo
cugcaucucccaguuccac

SEQ ID NO: 41540 - RNA, 19 nt, Artificial Sequence
  Antisense Oligo
guggaacugggagaugcag

SEQ ID NO: 41541 - RNA, 19 nt, Artificial Sequence
  Sense Oligo
ugcaucucccaguuccacc

SEQ ID NO: 41542 - RNA, 19 nt, Artificial Sequence
  Antisense Oligo
gguggaacugggagaugca

SEQ ID NO: 41543 - RNA, 19 nt, Artificial Sequence
  Sense Oligo
cucccaguuccacccaaaa

SEQ ID NO: 41544 - RNA, 19 nt, Artificial Sequence
  Antisense Oligo
uuuuggguggaacugggag

SEQ ID NO: 41545 - RNA, 19 nt, Artificial Sequence
  Sense Oligo
ucccaguuccacccaaaag

SEQ ID NO: 41546 - RNA, 19 nt, Artificial Sequence
  Antisense Oligo
cuuuuggguggaacuggga

SEQ ID NO: 41547 - RNA, 19 nt, Artificial Sequence
  Sense Oligo
cccaguuccacccaaaagc

SEQ ID NO: 41548 - RNA, 19 nt, Artificial Sequence
  Antisense Oligo
gcuuuuggguggaacuggg

SEQ ID NO: 41549 - RNA, 19 nt, Artificial Sequence
  Sense Oligo
ccaguuccacccaaaagcg

SEQ ID NO: 41550 - RNA, 19 nt, Artificial Sequence
  Antisense Oligo
cgcuuuuggguggaacugg

SEQ ID NO: 41551 - RNA, 19 nt, Artificial Sequence
  Sense Oligo
caguuccacccaaaagcgg

SEQ ID NO: 41552 - RNA, 19 nt, Artificial Sequence
  Antisense Oligo
ccgcuuuuggguggaacug

SEQ ID NO: 41553 - RNA, 19 nt, Artificial Sequence
  Sense Oligo
aguuccacccaaaagcggu

SEQ ID NO: 41554 - RNA, 19 nt, Artificial Sequence
  Antisense Oligo
accgcuuuuggguggaacu

SEQ ID NO: 41555 - RNA, 19 nt, Artificial Sequence
  Sense Oligo
guuccacccaaaagcggua

SEQ ID NO: 41556 - RNA, 19 nt, Artificial Sequence
  Antisense Oligo
uaccgcuuuuggguggaac

SEQ ID NO: 41557 - RNA, 19 nt, Artificial Sequence
  Sense Oligo
uuccacccaaaagcgguaa

SEQ ID NO: 41558 - RNA, 19 nt, Artificial Sequence
  Antisense Oligo
uuaccgcuuuuggguggaa

SEQ ID NO: 41559 - RNA, 19 nt, Artificial Sequence
  Sense Oligo
uccacccaaaagcgguaaa

SEQ ID NO: 41560 - RNA, 19 nt, Artificial Sequence
  Antisense Oligo
uuuaccgcuuuugggugga

SEQ ID NO: 41561 - RNA, 19 nt, Artificial Sequence
  Sense Oligo
ccacccaaaagcgguaaau

SEQ ID NO: 41562 - RNA, 19 nt, Artificial Sequence
  Antisense Oligo
auuuaccgcuuuugggugg

SEQ ID NO: 41563 - RNA, 19 nt, Artificial Sequence
  Sense Oligo
cacccaaaagcgguaaauc

SEQ ID NO: 41564 - RNA, 19 nt, Artificial Sequence
  Antisense Oligo
gauuuaccgcuuuugggug

SEQ ID NO: 41565 - RNA, 19 nt, Artificial Sequence
  Sense Oligo
acccaaaagcgguaaauca

SEQ ID NO: 41566 - RNA, 19 nt, Artificial Sequence
  Antisense Oligo
ugauuuaccgcuuuugggu

SEQ ID NO: 41567 - RNA, 19 nt, Artificial Sequence
  Sense Oligo
aaaagcgguaaaucaguug

SEQ ID NO: 41568 - RNA, 19 nt, Artificial Sequence
  Antisense Oligo
caacugauuuaccgcuuuu

SEQ ID NO: 41569 - RNA, 19 nt, Artificial Sequence
  Sense Oligo
aaagcgguaaaucaguugu

SEQ ID NO: 41570 - RNA, 19 nt, Artificial Sequence
  Antisense Oligo
acaacugauuuaccgcuuu

SEQ ID NO: 41571 - RNA, 19 nt, Artificial Sequence
  Sense Oligo
aagcgguaaaucaguuguu

SEQ ID NO: 41572 - RNA, 19 nt, Artificial Sequence
  Antisense Oligo
aacaacugauuuaccgcuu

SEQ ID NO: 41573 - RNA, 19 nt, Artificial Sequence
  Sense Oligo
agcgguaaaucaguuguuu

SEQ ID NO: 41574 - RNA, 19 nt, Artificial Sequence
  Antisense Oligo
aaacaacugauuuaccgcu

SEQ ID NO: 41575 - RNA, 19 nt, Artificial Sequence
  Sense Oligo
guaaaucaguuguuucugu

SEQ ID NO: 41576 - RNA, 19 nt, Artificial Sequence
  Antisense Oligo
acagaaacaacugauuuac

SEQ ID NO: 41577 - RNA, 19 nt, Artificial Sequence
  Sense Oligo
aaucaguuguuucuguuag

SEQ ID NO: 41578 - RNA, 19 nt, Artificial Sequence
  Antisense Oligo
cuaacagaaacaacugauu

SEQ ID NO: 41579 - RNA, 19 nt, Artificial Sequence
  Sense Oligo
aucaguuguuucuguuaga

SEQ ID NO: 41580 - RNA, 19 nt, Artificial Sequence
  Antisense Oligo
ucuaacagaaacaacugau

SEQ ID NO: 41581 - RNA, 19 nt, Artificial Sequence
  Sense Oligo
ucaguuguuucuguuagag

SEQ ID NO: 41582 - RNA, 19 nt, Artificial Sequence
  Antisense Oligo
cucuaacagaaacaacuga

SEQ ID NO: 41583 - RNA, 19 nt, Artificial Sequence
  Sense Oligo
caguuguuucuguuagagu

SEQ ID NO: 41584 - RNA, 19 nt, Artificial Sequence
  Antisense Oligo
acucuaacagaaacaacug

SEQ ID NO: 41585 - RNA, 19 nt, Artificial Sequence
  Sense Oligo
aguuguuucuguuagaguu

SEQ ID NO: 41586 - RNA, 19 nt, Artificial Sequence
  Antisense Oligo
aacucuaacagaaacaacu

SEQ ID NO: 41587 - RNA, 19 nt, Artificial Sequence
  Sense Oligo
guuguuucuguuagaguua

SEQ ID NO: 41588 - RNA, 19 nt, Artificial Sequence
  Antisense Oligo
uaacucuaacagaaacaac

SEQ ID NO: 41589 - RNA, 19 nt, Artificial Sequence
  Sense Oligo
guuucuguuagaguuaaga

SEQ ID NO: 41590 - RNA, 19 nt, Artificial Sequence
  Antisense Oligo
ucuuaacucuaacagaaac

SEQ ID NO: 41591 - RNA, 19 nt, Artificial Sequence
  Sense Oligo
uuucuguuagaguuaagag

SEQ ID NO: 41592 - RNA, 19 nt, Artificial Sequence
  Antisense Oligo
cucuuaacucuaacagaaa

SEQ ID NO: 41593 - RNA, 19 nt, Artificial Sequence
  Sense Oligo
uucuguuagaguuaagagg

SEQ ID NO: 41594 - RNA, 19 nt, Artificial Sequence
  Antisense Oligo
ccucuuaacucuaacagaa

SEQ ID NO: 41595 - RNA, 19 nt, Artificial Sequence
  Sense Oligo
ucuguuagaguuaagaggu

SEQ ID NO: 41596 - RNA, 19 nt, Artificial Sequence
  Antisense Oligo
accucuuaacucuaacaga

SEQ ID NO: 41597 - RNA, 19 nt, Artificial Sequence
  Sense Oligo
uguuagaguuaagagguga

SEQ ID NO: 41598 - RNA, 19 nt, Artificial Sequence
  Antisense Oligo
ucaccucuuaacucuaaca

SEQ ID NO: 41599 - RNA, 19 nt, Artificial Sequence
  Sense Oligo
guuagaguuaagaggugac

SEQ ID NO: 41600 - RNA, 19 nt, Artificial Sequence
  Antisense Oligo
gucaccucuuaacucuaac

SEQ ID NO: 41601 - RNA, 19 nt, Artificial Sequence
  Sense Oligo
gaggugacucuuuugcuuu

SEQ ID NO: 41602 - RNA, 19 nt, Artificial Sequence
  Antisense Oligo
aaagcaaaagagucaccuc

SEQ ID NO: 41603 - RNA, 19 nt, Artificial Sequence
  Sense Oligo
aggugacucuuuugcuuuu

SEQ ID NO: 41604 - RNA, 19 nt, Artificial Sequence
  Antisense Oligo
aaaagcaaaagagucaccu

SEQ ID NO: 41605 - RNA, 19 nt, Artificial Sequence
  Sense Oligo
gcgcgaucuuggcucacug

SEQ ID NO: 41606 - RNA, 19 nt, Artificial Sequence
  Antisense Oligo
cagugagccaagaucgcgc

SEQ ID NO: 41607 - RNA, 19 nt, Artificial Sequence
  Sense Oligo
cgcgaucuuggcucacugc

SEQ ID NO: 41608 - RNA, 19 nt, Artificial Sequence
  Antisense Oligo
gcagugagccaagaucgcg

SEQ ID NO: 41609 - RNA, 19 nt, Artificial Sequence
  Sense Oligo
gcgaucuuggcucacugca

SEQ ID NO: 41610 - RNA, 19 nt, Artificial Sequence
  Antisense Oligo
ugcagugagccaagaucgc

SEQ ID NO: 41611 - RNA, 19 nt, Artificial Sequence
  Sense Oligo
cgaucuuggcucacugcaa

SEQ ID NO: 41612 - RNA, 19 nt, Artificial Sequence
  Antisense Oligo
uugcagugagccaagaucg

SEQ ID NO: 41613 - RNA, 19 nt, Artificial Sequence
  Sense Oligo
uuggcucacugcaagcuuc

SEQ ID NO: 41614 - RNA, 19 nt, Artificial Sequence
  Antisense Oligo
gaagcuugcagugagccaa

SEQ ID NO: 41615 - RNA, 19 nt, Artificial Sequence
  Sense Oligo
uggcucacugcaagcuucg

SEQ ID NO: 41616 - RNA, 19 nt, Artificial Sequence
  Antisense Oligo
cgaagcuugcagugagcca

SEQ ID NO: 41617 - RNA, 19 nt, Artificial Sequence
  Sense Oligo
ggcucacugcaagcuucgc

SEQ ID NO: 41618 - RNA, 19 nt, Artificial Sequence
  Antisense Oligo
gcgaagcuugcagugagcc

SEQ ID NO: 41619 - RNA, 19 nt, Artificial Sequence
  Sense Oligo
gcucacugcaagcuucgcc

SEQ ID NO: 41620 - RNA, 19 nt, Artificial Sequence
  Antisense Oligo
ggcgaagcuugcagugagc

SEQ ID NO: 41621 - RNA, 19 nt, Artificial Sequence
  Sense Oligo
cuucgccucccagguucac

SEQ ID NO: 41622 - RNA, 19 nt, Artificial Sequence
  Antisense Oligo
gugaaccugggaggcgaag

SEQ ID NO: 41623 - RNA, 19 nt, Artificial Sequence
  Sense Oligo
uucgccucccagguucacg

SEQ ID NO: 41624 - RNA, 19 nt, Artificial Sequence
  Antisense Oligo
cgugaaccugggaggcgaa

SEQ ID NO: 41625 - RNA, 19 nt, Artificial Sequence
  Sense Oligo
cugucucagccucccaagu

SEQ ID NO: 41626 - RNA, 19 nt, Artificial Sequence
  Antisense Oligo
acuugggaggcugagacag

SEQ ID NO: 41627 - RNA, 19 nt, Artificial Sequence
  Sense Oligo
ugucucagccucccaagua

SEQ ID NO: 41628 - RNA, 19 nt, Artificial Sequence
  Antisense Oligo
uacuugggaggcugagaca

SEQ ID NO: 41629 - RNA, 19 nt, Artificial Sequence
  Sense Oligo
gucucagccucccaaguag

SEQ ID NO: 41630 - RNA, 19 nt, Artificial Sequence
  Antisense Oligo
cuacuugggaggcugagac

SEQ ID NO: 41631 - RNA, 19 nt, Artificial Sequence
  Sense Oligo
ucucagccucccaaguagc

SEQ ID NO: 41632 - RNA, 19 nt, Artificial Sequence
  Antisense Oligo
gcuacuugggaggcugaga

SEQ ID NO: 41633 - RNA, 19 nt, Artificial Sequence
  Sense Oligo
cucagccucccaaguagcu

SEQ ID NO: 41634 - RNA, 19 nt, Artificial Sequence
  Antisense Oligo
agcuacuugggaggcugag

SEQ ID NO: 41635 - RNA, 19 nt, Artificial Sequence
  Sense Oligo
ccaaguagcugggaccaca

SEQ ID NO: 41636 - RNA, 19 nt, Artificial Sequence
  Antisense Oligo
uguggucccagcuacuugg

SEQ ID NO: 41637 - RNA, 19 nt, Artificial Sequence
  Sense Oligo
guagcugggaccacaggug

SEQ ID NO: 41638 - RNA, 19 nt, Artificial Sequence
  Antisense Oligo
caccuguggucccagcuac

SEQ ID NO: 41639 - RNA, 19 nt, Artificial Sequence
  Sense Oligo
uagcugggaccacaggugc

SEQ ID NO: 41640 - RNA, 19 nt, Artificial Sequence
  Antisense Oligo
gcaccuguggucccagcua

SEQ ID NO: 41641 - RNA, 19 nt, Artificial Sequence
  Sense Oligo
gacaggguuucaccguguu

SEQ ID NO: 41642 - RNA, 19 nt, Artificial Sequence
  Antisense Oligo
aacacggugaaacccuguc

SEQ ID NO: 41643 - RNA, 19 nt, Artificial Sequence
  Sense Oligo
acaggguuucaccguguua

SEQ ID NO: 41644 - RNA, 19 nt, Artificial Sequence
  Antisense Oligo
uaacacggugaaacccugu

SEQ ID NO: 41645 - RNA, 19 nt, Artificial Sequence
  Sense Oligo
caggguuucaccguguuag

SEQ ID NO: 41646 - RNA, 19 nt, Artificial Sequence
  Antisense Oligo
cuaacacggugaaacccug

SEQ ID NO: 41647 - RNA, 19 nt, Artificial Sequence
  Sense Oligo
aggguuucaccguguuagc

SEQ ID NO: 41648 - RNA, 19 nt, Artificial Sequence
  Antisense Oligo
gcuaacacggugaaacccu

SEQ ID NO: 41649 - RNA, 19 nt, Artificial Sequence
  Sense Oligo
ggguuucaccguguuagcc

SEQ ID NO: 41650 - RNA, 19 nt, Artificial Sequence
  Antisense Oligo
ggcuaacacggugaaaccc

SEQ ID NO: 41651 - RNA, 19 nt, Artificial Sequence
  Sense Oligo
gguuucaccguguuagcca

SEQ ID NO: 41652 - RNA, 19 nt, Artificial Sequence
  Antisense Oligo
uggcuaacacggugaaacc

SEQ ID NO: 41653 - RNA, 19 nt, Artificial Sequence
  Sense Oligo
caccguguuagccaggaug

SEQ ID NO: 41654 - RNA, 19 nt, Artificial Sequence
  Antisense Oligo
cauccuggcuaacacggug

SEQ ID NO: 41655 - RNA, 19 nt, Artificial Sequence
  Sense Oligo
accguguuagccaggaugg

SEQ ID NO: 41656 - RNA, 19 nt, Artificial Sequence
  Antisense Oligo
ccauccuggcuaacacggu

SEQ ID NO: 41657 - RNA, 19 nt, Artificial Sequence
  Sense Oligo
ccguguuagccaggauggu

SEQ ID NO: 41658 - RNA, 19 nt, Artificial Sequence
  Antisense Oligo
accauccuggcuaacacgg

SEQ ID NO: 41659 - RNA, 19 nt, Artificial Sequence
  Sense Oligo
cguguuagccaggaugguc

SEQ ID NO: 41660 - RNA, 19 nt, Artificial Sequence
  Antisense Oligo
gaccauccuggcuaacacg

SEQ ID NO: 41661 - RNA, 19 nt, Artificial Sequence
  Sense Oligo
guguuagccaggauggucu

SEQ ID NO: 41662 - RNA, 19 nt, Artificial Sequence
  Antisense Oligo
agaccauccuggcuaacac

SEQ ID NO: 41663 - RNA, 19 nt, Artificial Sequence
  Sense Oligo
uguuagccaggauggucuc

SEQ ID NO: 41664 - RNA, 19 nt, Artificial Sequence
  Antisense Oligo
gagaccauccuggcuaaca

SEQ ID NO: 41665 - RNA, 19 nt, Artificial Sequence
  Sense Oligo
guuagccaggauggucucg

SEQ ID NO: 41666 - RNA, 19 nt, Artificial Sequence
  Antisense Oligo
cgagaccauccuggcuaac

SEQ ID NO: 41667 - RNA, 19 nt, Artificial Sequence
  Sense Oligo
uuagccaggauggucucga

SEQ ID NO: 41668 - RNA, 19 nt, Artificial Sequence
  Antisense Oligo
ucgagaccauccuggcuaa

SEQ ID NO: 41669 - RNA, 19 nt, Artificial Sequence
  Sense Oligo
uagccaggauggucucgau

SEQ ID NO: 41670 - RNA, 19 nt, Artificial Sequence
  Antisense Oligo
aucgagaccauccuggcua

SEQ ID NO: 41671 - RNA, 19 nt, Artificial Sequence
  Sense Oligo
caggauggucucgaucucc

SEQ ID NO: 41672 - RNA, 19 nt, Artificial Sequence
  Antisense Oligo
ggagaucgagaccauccug

SEQ ID NO: 41673 - RNA, 19 nt, Artificial Sequence
  Sense Oligo
ggauggucucgaucuccug

SEQ ID NO: 41674 - RNA, 19 nt, Artificial Sequence
  Antisense Oligo
caggagaucgagaccaucc

SEQ ID NO: 41675 - RNA, 19 nt, Artificial Sequence
  Sense Oligo
gauggucucgaucuccuga

SEQ ID NO: 41676 - RNA, 19 nt, Artificial Sequence
  Antisense Oligo
ucaggagaucgagaccauc

SEQ ID NO: 41677 - RNA, 19 nt, Artificial Sequence
  Sense Oligo
auggucucgaucuccugac

SEQ ID NO: 41678 - RNA, 19 nt, Artificial Sequence
  Antisense Oligo
gucaggagaucgagaccau

SEQ ID NO: 41679 - RNA, 19 nt, Artificial Sequence
  Sense Oligo
cucgaucuccugaccucgu

SEQ ID NO: 41680 - RNA, 19 nt, Artificial Sequence
  Antisense Oligo
acgaggucaggagaucgag

SEQ ID NO: 41681 - RNA, 19 nt, Artificial Sequence
  Sense Oligo
ucgaucuccugaccucgug

SEQ ID NO: 41682 - RNA, 19 nt, Artificial Sequence
  Antisense Oligo
cacgaggucaggagaucga

SEQ ID NO: 41683 - RNA, 19 nt, Artificial Sequence
  Sense Oligo
cgaucuccugaccucguga

SEQ ID NO: 41684 - RNA, 19 nt, Artificial Sequence
  Antisense Oligo
ucacgaggucaggagaucg

SEQ ID NO: 41685 - RNA, 19 nt, Artificial Sequence
  Sense Oligo
gaucuccugaccucgugau

SEQ ID NO: 41686 - RNA, 19 nt, Artificial Sequence
  Antisense Oligo
aucacgaggucaggagauc

SEQ ID NO: 41687 - RNA, 19 nt, Artificial Sequence
  Sense Oligo
aucuccugaccucgugauc

SEQ ID NO: 41688 - RNA, 19 nt, Artificial Sequence
  Antisense Oligo
gaucacgaggucaggagau

SEQ ID NO: 41689 - RNA, 19 nt, Artificial Sequence
  Sense Oligo
ucuccugaccucgugaucc

SEQ ID NO: 41690 - RNA, 19 nt, Artificial Sequence
  Antisense Oligo
ggaucacgaggucaggaga

SEQ ID NO: 41691 - RNA, 19 nt, Artificial Sequence
  Sense Oligo
cuccugaccucgugaucca

SEQ ID NO: 41692 - RNA, 19 nt, Artificial Sequence
  Antisense Oligo
uggaucacgaggucaggag

SEQ ID NO: 41693 - RNA, 19 nt, Artificial Sequence
  Sense Oligo
uccugaccucgugauccac

SEQ ID NO: 41694 - RNA, 19 nt, Artificial Sequence
  Antisense Oligo
guggaucacgaggucagga

SEQ ID NO: 41695 - RNA, 19 nt, Artificial Sequence
  Sense Oligo
ccugaccucgugauccacc

SEQ ID NO: 41696 - RNA, 19 nt, Artificial Sequence
  Antisense Oligo
gguggaucacgaggucagg

SEQ ID NO: 41697 - RNA, 19 nt, Artificial Sequence
  Sense Oligo
ccaaagugcugggauuaca

SEQ ID NO: 41698 - RNA, 19 nt, Artificial Sequence
  Antisense Oligo
uguaaucccagcacuuugg

SEQ ID NO: 41699 - RNA, 19 nt, Artificial Sequence
  Sense Oligo
caaagugcugggauuacag

SEQ ID NO: 41700 - RNA, 19 nt, Artificial Sequence
  Antisense Oligo
cuguaaucccagcacuuug

SEQ ID NO: 41701 - RNA, 19 nt, Artificial Sequence
  Sense Oligo
gugcugggauuacaggcgu

SEQ ID NO: 41702 - RNA, 19 nt, Artificial Sequence
  Antisense Oligo
acgccuguaaucccagcac

SEQ ID NO: 41703 - RNA, 19 nt, Artificial Sequence
  Sense Oligo
ugcugggauuacaggcgug

SEQ ID NO: 41704 - RNA, 19 nt, Artificial Sequence
  Antisense Oligo
cacgccuguaaucccagca

SEQ ID NO: 41705 - RNA, 19 nt, Artificial Sequence
  Sense Oligo
gcugggauuacaggcguga

SEQ ID NO: 41706 - RNA, 19 nt, Artificial Sequence
  Antisense Oligo
ucacgccuguaaucccagc

SEQ ID NO: 41707 - RNA, 19 nt, Artificial Sequence
  Sense Oligo
cugggauuacaggcgugag

SEQ ID NO: 41708 - RNA, 19 nt, Artificial Sequence
  Antisense Oligo
cucacgccuguaaucccag

SEQ ID NO: 41709 - RNA, 19 nt, Artificial Sequence
  Sense Oligo
ugggauuacaggcgugagc

SEQ ID NO: 41710 - RNA, 19 nt, Artificial Sequence
  Antisense Oligo
gcucacgccuguaauccca

SEQ ID NO: 41711 - RNA, 19 nt, Artificial Sequence
  Sense Oligo
auuacaggcgugagccacc

SEQ ID NO: 41712 - RNA, 19 nt, Artificial Sequence
  Antisense Oligo
gguggcucacgccuguaau

SEQ ID NO: 41713 - RNA, 19 nt, Artificial Sequence
  Sense Oligo
uuacaggcgugagccaccg

SEQ ID NO: 41714 - RNA, 19 nt, Artificial Sequence
  Antisense Oligo
cgguggcucacgccuguaa

SEQ ID NO: 41715 - RNA, 19 nt, Artificial Sequence
  Sense Oligo
ccggcugagucuucugcuu

SEQ ID NO: 41716 - RNA, 19 nt, Artificial Sequence
  Antisense Oligo
aagcagaagacucagccgg

SEQ ID NO: 41717 - RNA, 19 nt, Artificial Sequence
  Sense Oligo
gcugagucuucugcuucuu

SEQ ID NO: 41718 - RNA, 19 nt, Artificial Sequence
  Antisense Oligo
aagaagcagaagacucagc

SEQ ID NO: 41719 - RNA, 19 nt, Artificial Sequence
  Sense Oligo
ugagucuucugcuucuuau

SEQ ID NO: 41720 - RNA, 19 nt, Artificial Sequence
  Antisense Oligo
auaagaagcagaagacuca

SEQ ID NO: 41721 - RNA, 19 nt, Artificial Sequence
  Sense Oligo
gagucuucugcuucuuaug

SEQ ID NO: 41722 - RNA, 19 nt, Artificial Sequence
  Antisense Oligo
cauaagaagcagaagacuc

SEQ ID NO: 41723 - RNA, 19 nt, Artificial Sequence
  Sense Oligo
agucuucugcuucuuaugu

SEQ ID NO: 41724 - RNA, 19 nt, Artificial Sequence
  Antisense Oligo
acauaagaagcagaagacu

SEQ ID NO: 41725 - RNA, 19 nt, Artificial Sequence
  Sense Oligo
gucuucugcuucuuauguu

SEQ ID NO: 41726 - RNA, 19 nt, Artificial Sequence
  Antisense Oligo
aacauaagaagcagaagac

SEQ ID NO: 41727 - RNA, 19 nt, Artificial Sequence
  Sense Oligo
cuucugcuucuuauguuuu

SEQ ID NO: 41728 - RNA, 19 nt, Artificial Sequence
  Antisense Oligo
aaaacauaagaagcagaag

SEQ ID NO: 41729 - RNA, 19 nt, Artificial Sequence
  Sense Oligo
augauuagaauuuagcugg

SEQ ID NO: 41730 - RNA, 19 nt, Artificial Sequence
  Antisense Oligo
ccagcuaaauucuaaucau

SEQ ID NO: 41731 - RNA, 19 nt, Artificial Sequence
  Sense Oligo
ugauuagaauuuagcuggg

SEQ ID NO: 41732 - RNA, 19 nt, Artificial Sequence
  Antisense Oligo
cccagcuaaauucuaauca

SEQ ID NO: 41733 - RNA, 19 nt, Artificial Sequence
  Sense Oligo
gauuagaauuuagcugggc

SEQ ID NO: 41734 - RNA, 19 nt, Artificial Sequence
  Antisense Oligo
gcccagcuaaauucuaauc

SEQ ID NO: 41735 - RNA, 19 nt, Artificial Sequence
  Sense Oligo
auuagaauuuagcugggca

SEQ ID NO: 41736 - RNA, 19 nt, Artificial Sequence
  Antisense Oligo
ugcccagcuaaauucuaau

SEQ ID NO: 41737 - RNA, 19 nt, Artificial Sequence
  Sense Oligo
uuagaauuuagcugggcac

SEQ ID NO: 41738 - RNA, 19 nt, Artificial Sequence
  Antisense Oligo
gugcccagcuaaauucuaa

SEQ ID NO: 41739 - RNA, 19 nt, Artificial Sequence
  Sense Oligo
uagaauuuagcugggcaca

SEQ ID NO: 41740 - RNA, 19 nt, Artificial Sequence
  Antisense Oligo
ugugcccagcuaaauucua

SEQ ID NO: 41741 - RNA, 19 nt, Artificial Sequence
  Sense Oligo
auuuagcugggcacagugg

SEQ ID NO: 41742 - RNA, 19 nt, Artificial Sequence
  Antisense Oligo
ccacugugcccagcuaaau

SEQ ID NO: 41743 - RNA, 19 nt, Artificial Sequence
  Sense Oligo
agcugggcacaguggcuca

SEQ ID NO: 41744 - RNA, 19 nt, Artificial Sequence
  Antisense Oligo
ugagccacugugcccagcu

SEQ ID NO: 41745 - RNA, 19 nt, Artificial Sequence
  Sense Oligo
gcugggcacaguggcucau

SEQ ID NO: 41746 - RNA, 19 nt, Artificial Sequence
  Antisense Oligo
augagccacugugcccagc

SEQ ID NO: 41747 - RNA, 19 nt, Artificial Sequence
  Sense Oligo
cugggcacaguggcucaug

SEQ ID NO: 41748 - RNA, 19 nt, Artificial Sequence
  Antisense Oligo
caugagccacugugcccag

SEQ ID NO: 41749 - RNA, 19 nt, Artificial Sequence
  Sense Oligo
ugggcacaguggcucaugc

SEQ ID NO: 41750 - RNA, 19 nt, Artificial Sequence
  Antisense Oligo
gcaugagccacugugccca

SEQ ID NO: 41751 - RNA, 19 nt, Artificial Sequence
  Sense Oligo
gcacaguggcucaugccug

SEQ ID NO: 41752 - RNA, 19 nt, Artificial Sequence
  Antisense Oligo
caggcaugagccacugugc

SEQ ID NO: 41753 - RNA, 19 nt, Artificial Sequence
  Sense Oligo
caguggcucaugccuguaa

SEQ ID NO: 41754 - RNA, 19 nt, Artificial Sequence
  Antisense Oligo
uuacaggcaugagccacug

SEQ ID NO: 41755 - RNA, 19 nt, Artificial Sequence
  Sense Oligo
aguggcucaugccuguaau

SEQ ID NO: 41756 - RNA, 19 nt, Artificial Sequence
  Antisense Oligo
auuacaggcaugagccacu

SEQ ID NO: 41757 - RNA, 19 nt, Artificial Sequence
  Sense Oligo
guggcucaugccuguaauc

SEQ ID NO: 41758 - RNA, 19 nt, Artificial Sequence
  Antisense Oligo
gauuacaggcaugagccac

SEQ ID NO: 41759 - RNA, 19 nt, Artificial Sequence
  Sense Oligo
uggcucaugccuguaaucc

SEQ ID NO: 41760 - RNA, 19 nt, Artificial Sequence
  Antisense Oligo
ggauuacaggcaugagcca

SEQ ID NO: 41761 - RNA, 19 nt, Artificial Sequence
  Sense Oligo
ggcucaugccuguaauccc

SEQ ID NO: 41762 - RNA, 19 nt, Artificial Sequence
  Antisense Oligo
gggauuacaggcaugagcc

SEQ ID NO: 41763 - RNA, 19 nt, Artificial Sequence
  Sense Oligo
augccuguaaucccagcac

SEQ ID NO: 41764 - RNA, 19 nt, Artificial Sequence
  Antisense Oligo
gugcugggauuacaggcau

SEQ ID NO: 41765 - RNA, 19 nt, Artificial Sequence
  Sense Oligo
agcacuuugggaggcugag

SEQ ID NO: 41766 - RNA, 19 nt, Artificial Sequence
  Antisense Oligo
cucagccucccaaagugcu

SEQ ID NO: 41767 - RNA, 19 nt, Artificial Sequence
  Sense Oligo
gcacuuugggaggcugagg

SEQ ID NO: 41768 - RNA, 19 nt, Artificial Sequence
  Antisense Oligo
ccucagccucccaaagugc

SEQ ID NO: 41769 - RNA, 19 nt, Artificial Sequence
  Sense Oligo
cacuuugggaggcugaggu

SEQ ID NO: 41770 - RNA, 19 nt, Artificial Sequence
  Antisense Oligo
accucagccucccaaagug

SEQ ID NO: 41771 - RNA, 19 nt, Artificial Sequence
  Sense Oligo
acuuugggaggcugaggug

SEQ ID NO: 41772 - RNA, 19 nt, Artificial Sequence
  Antisense Oligo
caccucagccucccaaagu

SEQ ID NO: 41773 - RNA, 19 nt, Artificial Sequence
  Sense Oligo
cuuugggaggcugaggugg

SEQ ID NO: 41774 - RNA, 19 nt, Artificial Sequence
  Antisense Oligo
ccaccucagccucccaaag

SEQ ID NO: 41775 - RNA, 19 nt, Artificial Sequence
  Sense Oligo
uuugggaggcugagguggg

SEQ ID NO: 41776 - RNA, 19 nt, Artificial Sequence
  Antisense Oligo
cccaccucagccucccaaa

SEQ ID NO: 41777 - RNA, 19 nt, Artificial Sequence
  Sense Oligo
ggcugaggugggcagauca

SEQ ID NO: 41778 - RNA, 19 nt, Artificial Sequence
  Antisense Oligo
ugaucugcccaccucagcc

SEQ ID NO: 41779 - RNA, 19 nt, Artificial Sequence
  Sense Oligo
gcugaggugggcagaucac

SEQ ID NO: 41780 - RNA, 19 nt, Artificial Sequence
  Antisense Oligo
gugaucugcccaccucagc

SEQ ID NO: 41781 - RNA, 19 nt, Artificial Sequence
  Sense Oligo
gugggcagaucaccugagg

SEQ ID NO: 41782 - RNA, 19 nt, Artificial Sequence
  Antisense Oligo
ccucaggugaucugcccac

SEQ ID NO: 41783 - RNA, 19 nt, Artificial Sequence
  Sense Oligo
ugggcagaucaccugaggu

SEQ ID NO: 41784 - RNA, 19 nt, Artificial Sequence
  Antisense Oligo
accucaggugaucugccca

SEQ ID NO: 41785 - RNA, 19 nt, Artificial Sequence
  Sense Oligo
ggugucaggugccuguaau

SEQ ID NO: 41786 - RNA, 19 nt, Artificial Sequence
  Antisense Oligo
auuacaggcaccugacacc

SEQ ID NO: 41787 - RNA, 19 nt, Artificial Sequence
  Sense Oligo
gugucaggugccuguaauc

SEQ ID NO: 41788 - RNA, 19 nt, Artificial Sequence
  Antisense Oligo
gauuacaggcaccugacac

SEQ ID NO: 41789 - RNA, 19 nt, Artificial Sequence
  Sense Oligo
ugucaggugccuguaaucu

SEQ ID NO: 41790 - RNA, 19 nt, Artificial Sequence
  Antisense Oligo
agauuacaggcaccugaca

SEQ ID NO: 41791 - RNA, 19 nt, Artificial Sequence
  Sense Oligo
gucaggugccuguaaucuc

SEQ ID NO: 41792 - RNA, 19 nt, Artificial Sequence
  Antisense Oligo
gagauuacaggcaccugac

SEQ ID NO: 41793 - RNA, 19 nt, Artificial Sequence
  Sense Oligo
ucaggugccuguaaucuca

SEQ ID NO: 41794 - RNA, 19 nt, Artificial Sequence
  Antisense Oligo
ugagauuacaggcaccuga

SEQ ID NO: 41795 - RNA, 19 nt, Artificial Sequence
  Sense Oligo
caggugccuguaaucucag

SEQ ID NO: 41796 - RNA, 19 nt, Artificial Sequence
  Antisense Oligo
cugagauuacaggcaccug

SEQ ID NO: 41797 - RNA, 19 nt, Artificial Sequence
  Sense Oligo
ugccuguaaucucagcuac

SEQ ID NO: 41798 - RNA, 19 nt, Artificial Sequence
  Antisense Oligo
guagcugagauuacaggca

SEQ ID NO: 41799 - RNA, 19 nt, Artificial Sequence
  Sense Oligo
gccuguaaucucagcuacu

SEQ ID NO: 41800 - RNA, 19 nt, Artificial Sequence
  Antisense Oligo
aguagcugagauuacaggc

SEQ ID NO: 41801 - RNA, 19 nt, Artificial Sequence
  Sense Oligo
ccuguaaucucagcuacua

SEQ ID NO: 41802 - RNA, 19 nt, Artificial Sequence
  Antisense Oligo
uaguagcugagauuacagg

SEQ ID NO: 41803 - RNA, 19 nt, Artificial Sequence
  Sense Oligo
agaggcugaggcaggagga

SEQ ID NO: 41804 - RNA, 19 nt, Artificial Sequence
  Antisense Oligo
uccuccugccucagccucu

SEQ ID NO: 41805 - RNA, 19 nt, Artificial Sequence
  Sense Oligo
gaggcugaggcaggaggau

SEQ ID NO: 41806 - RNA, 19 nt, Artificial Sequence
  Antisense Oligo
auccuccugccucagccuc

SEQ ID NO: 41807 - RNA, 19 nt, Artificial Sequence
  Sense Oligo
aggcugaggcaggaggauc

SEQ ID NO: 41808 - RNA, 19 nt, Artificial Sequence
  Antisense Oligo
gauccuccugccucagccu

SEQ ID NO: 41809 - RNA, 19 nt, Artificial Sequence
  Sense Oligo
cugaggcaggaggaucgcu

SEQ ID NO: 41810 - RNA, 19 nt, Artificial Sequence
  Antisense Oligo
agcgauccuccugccucag

SEQ ID NO: 41811 - RNA, 19 nt, Artificial Sequence
  Sense Oligo
ugaggcaggaggaucgcuu

SEQ ID NO: 41812 - RNA, 19 nt, Artificial Sequence
  Antisense Oligo
aagcgauccuccugccuca

SEQ ID NO: 41813 - RNA, 19 nt, Artificial Sequence
  Sense Oligo
gaggcaggaggaucgcuug

SEQ ID NO: 41814 - RNA, 19 nt, Artificial Sequence
  Antisense Oligo
caagcgauccuccugccuc

SEQ ID NO: 41815 - RNA, 19 nt, Artificial Sequence
  Sense Oligo
aggcaggaggaucgcuuga

SEQ ID NO: 41816 - RNA, 19 nt, Artificial Sequence
  Antisense Oligo
ucaagcgauccuccugccu

SEQ ID NO: 41817 - RNA, 19 nt, Artificial Sequence
  Sense Oligo
agccugggcgacagaguga

SEQ ID NO: 41818 - RNA, 19 nt, Artificial Sequence
  Antisense Oligo
ucacucugucgcccaggcu

SEQ ID NO: 41819 - RNA, 19 nt, Artificial Sequence
  Sense Oligo
ggaaucccauccauuuaca

SEQ ID NO: 41820 - RNA, 19 nt, Artificial Sequence
  Antisense Oligo
uguaaauggaugggauucc

SEQ ID NO: 41821 - RNA, 19 nt, Artificial Sequence
  Sense Oligo
gaaucccauccauuuacac

SEQ ID NO: 41822 - RNA, 19 nt, Artificial Sequence
  Antisense Oligo
guguaaauggaugggauuc

SEQ ID NO: 41823 - RNA, 19 nt, Artificial Sequence
  Sense Oligo
aacccuagugcacguccuc

SEQ ID NO: 41824 - RNA, 19 nt, Artificial Sequence
  Antisense Oligo
gaggacgugcacuaggguu

SEQ ID NO: 41825 - RNA, 19 nt, Artificial Sequence
  Sense Oligo
cuagugcacguccucgagg

SEQ ID NO: 41826 - RNA, 19 nt, Artificial Sequence
  Antisense Oligo
ccucgaggacgugcacuag

SEQ ID NO: 41827 - RNA, 19 nt, Artificial Sequence
  Sense Oligo
uagugcacguccucgagga

SEQ ID NO: 41828 - RNA, 19 nt, Artificial Sequence
  Antisense Oligo
uccucgaggacgugcacua

SEQ ID NO: 41829 - RNA, 19 nt, Artificial Sequence
  Sense Oligo
gcacguccucgaggaagca

SEQ ID NO: 41830 - RNA, 19 nt, Artificial Sequence
  Antisense Oligo
ugcuuccucgaggacgugc

SEQ ID NO: 41831 - RNA, 19 nt, Artificial Sequence
  Sense Oligo
cacguccucgaggaagcaa

SEQ ID NO: 41832 - RNA, 19 nt, Artificial Sequence
  Antisense Oligo
uugcuuccucgaggacgug

SEQ ID NO: 41833 - RNA, 19 nt, Artificial Sequence
  Sense Oligo
acguccucgaggaagcaac

SEQ ID NO: 41834 - RNA, 19 nt, Artificial Sequence
  Antisense Oligo
guugcuuccucgaggacgu

SEQ ID NO: 41835 - RNA, 19 nt, Artificial Sequence
  Sense Oligo
cguccucgaggaagcaacu

SEQ ID NO: 41836 - RNA, 19 nt, Artificial Sequence
  Antisense Oligo
aguugcuuccucgaggacg

SEQ ID NO: 41837 - RNA, 19 nt, Artificial Sequence
  Sense Oligo
guccucgaggaagcaacug

SEQ ID NO: 41838 - RNA, 19 nt, Artificial Sequence
  Antisense Oligo
caguugcuuccucgaggac

SEQ ID NO: 41839 - RNA, 19 nt, Artificial Sequence
  Sense Oligo
uccucgaggaagcaacugc

SEQ ID NO: 41840 - RNA, 19 nt, Artificial Sequence
  Antisense Oligo
gcaguugcuuccucgagga

SEQ ID NO: 41841 - RNA, 19 nt, Artificial Sequence
  Sense Oligo
ccucgaggaagcaacugcu

SEQ ID NO: 41842 - RNA, 19 nt, Artificial Sequence
  Antisense Oligo
agcaguugcuuccucgagg

SEQ ID NO: 41843 - RNA, 19 nt, Artificial Sequence
  Sense Oligo
cucgaggaagcaacugcuc

SEQ ID NO: 41844 - RNA, 19 nt, Artificial Sequence
  Antisense Oligo
gagcaguugcuuccucgag

SEQ ID NO: 41845 - RNA, 19 nt, Artificial Sequence
  Sense Oligo
ucgaggaagcaacugcucu

SEQ ID NO: 41846 - RNA, 19 nt, Artificial Sequence
  Antisense Oligo
agagcaguugcuuccucga

SEQ ID NO: 41847 - RNA, 19 nt, Artificial Sequence
  Sense Oligo
cgaggaagcaacugcucug

SEQ ID NO: 41848 - RNA, 19 nt, Artificial Sequence
  Antisense Oligo
cagagcaguugcuuccucg

SEQ ID NO: 41849 - RNA, 19 nt, Artificial Sequence
  Sense Oligo
ggaagcaacugcucugggc

SEQ ID NO: 41850 - RNA, 19 nt, Artificial Sequence
  Antisense Oligo
gcccagagcaguugcuucc

SEQ ID NO: 41851 - RNA, 19 nt, Artificial Sequence
  Sense Oligo
aagcaacugcucugggccu

SEQ ID NO: 41852 - RNA, 19 nt, Artificial Sequence
  Antisense Oligo
aggcccagagcaguugcuu

SEQ ID NO: 41853 - RNA, 19 nt, Artificial Sequence
  Sense Oligo
agcaacugcucugggccuu

SEQ ID NO: 41854 - RNA, 19 nt, Artificial Sequence
  Antisense Oligo
aaggcccagagcaguugcu

SEQ ID NO: 41855 - RNA, 19 nt, Artificial Sequence
  Sense Oligo
gcaacugcucugggccuuu

SEQ ID NO: 41856 - RNA, 19 nt, Artificial Sequence
  Antisense Oligo
aaaggcccagagcaguugc

SEQ ID NO: 41857 - RNA, 19 nt, Artificial Sequence
  Sense Oligo
caacugcucugggccuuua

SEQ ID NO: 41858 - RNA, 19 nt, Artificial Sequence
  Antisense Oligo
uaaaggcccagagcaguug

SEQ ID NO: 41859 - RNA, 19 nt, Artificial Sequence
  Sense Oligo
ugcucugggccuuuauuga

SEQ ID NO: 41860 - RNA, 19 nt, Artificial Sequence
  Antisense Oligo
ucaauaaaggcccagagca

SEQ ID NO: 41861 - RNA, 19 nt, Artificial Sequence
  Sense Oligo
gcucugggccuuuauugac

SEQ ID NO: 41862 - RNA, 19 nt, Artificial Sequence
  Antisense Oligo
gucaauaaaggcccagagc

SEQ ID NO: 41863 - RNA, 19 nt, Artificial Sequence
  Sense Oligo
cucugggccuuuauugaca

SEQ ID NO: 41864 - RNA, 19 nt, Artificial Sequence
  Antisense Oligo
ugucaauaaaggcccagag

SEQ ID NO: 41865 - RNA, 19 nt, Artificial Sequence
  Sense Oligo
acaguaguuacuuggcagg

SEQ ID NO: 41866 - RNA, 19 nt, Artificial Sequence
  Antisense Oligo
ccugccaaguaacuacugu

SEQ ID NO: 41867 - RNA, 19 nt, Artificial Sequence
  Sense Oligo
caguaguuacuuggcaggg

SEQ ID NO: 41868 - RNA, 19 nt, Artificial Sequence
  Antisense Oligo
cccugccaaguaacuacug

SEQ ID NO: 41869 - RNA, 19 nt, Artificial Sequence
  Sense Oligo
aguuacuuggcaggguuau

SEQ ID NO: 41870 - RNA, 19 nt, Artificial Sequence
  Antisense Oligo
auaacccugccaaguaacu

SEQ ID NO: 41871 - RNA, 19 nt, Artificial Sequence
  Sense Oligo
guuacuuggcaggguuaug

SEQ ID NO: 41872 - RNA, 19 nt, Artificial Sequence
  Antisense Oligo
cauaacccugccaaguaac

SEQ ID NO: 41873 - RNA, 19 nt, Artificial Sequence
  Sense Oligo
uuacuuggcaggguuaugu

SEQ ID NO: 41874 - RNA, 19 nt, Artificial Sequence
  Antisense Oligo
acauaacccugccaaguaa

SEQ ID NO: 41875 - RNA, 19 nt, Artificial Sequence
  Sense Oligo
uacuuggcaggguuaugug

SEQ ID NO: 41876 - RNA, 19 nt, Artificial Sequence
  Antisense Oligo
cacauaacccugccaagua

SEQ ID NO: 41877 - RNA, 19 nt, Artificial Sequence
  Sense Oligo
gguuaugugaggaauugau

SEQ ID NO: 41878 - RNA, 19 nt, Artificial Sequence
  Antisense Oligo
aucaauuccucacauaacc

SEQ ID NO: 41879 - RNA, 19 nt, Artificial Sequence
  Sense Oligo
aaugcuuagcagaauauca

SEQ ID NO: 41880 - RNA, 19 nt, Artificial Sequence
  Antisense Oligo
ugauauucugcuaagcauu

SEQ ID NO: 41881 - RNA, 19 nt, Artificial Sequence
  Sense Oligo
augcuuagcagaauaucag

SEQ ID NO: 41882 - RNA, 19 nt, Artificial Sequence
  Antisense Oligo
cugauauucugcuaagcau

SEQ ID NO: 41883 - RNA, 19 nt, Artificial Sequence
  Sense Oligo
ugcuuagcagaauaucagg

SEQ ID NO: 41884 - RNA, 19 nt, Artificial Sequence
  Antisense Oligo
ccugauauucugcuaagca

SEQ ID NO: 41885 - RNA, 19 nt, Artificial Sequence
  Sense Oligo
gcuuagcagaauaucaggu

SEQ ID NO: 41886 - RNA, 19 nt, Artificial Sequence
  Antisense Oligo
accugauauucugcuaagc

SEQ ID NO: 41887 - RNA, 19 nt, Artificial Sequence
  Sense Oligo
aauaucagguucccaggaa

SEQ ID NO: 41888 - RNA, 19 nt, Artificial Sequence
  Antisense Oligo
uuccugggaaccugauauu

SEQ ID NO: 41889 - RNA, 19 nt, Artificial Sequence
  Sense Oligo
auaucagguucccaggaau

SEQ ID NO: 41890 - RNA, 19 nt, Artificial Sequence
  Antisense Oligo
auuccugggaaccugauau

SEQ ID NO: 41891 - RNA, 19 nt, Artificial Sequence
  Sense Oligo
ucagguucccaggaaucac

SEQ ID NO: 41892 - RNA, 19 nt, Artificial Sequence
  Antisense Oligo
gugauuccugggaaccuga

SEQ ID NO: 41893 - RNA, 19 nt, Artificial Sequence
  Sense Oligo
uuugaucauccaauucagg

SEQ ID NO: 41894 - RNA, 19 nt, Artificial Sequence
  Antisense Oligo
ccugaauuggaugaucaaa

SEQ ID NO: 41895 - RNA, 19 nt, Artificial Sequence
  Sense Oligo
ggguaagagcuuggugugc

SEQ ID NO: 41896 - RNA, 19 nt, Artificial Sequence
  Antisense Oligo
gcacaccaagcucuuaccc

SEQ ID NO: 41897 - RNA, 19 nt, Artificial Sequence
  Sense Oligo
gguaagagcuuggugugcc

SEQ ID NO: 41898 - RNA, 19 nt, Artificial Sequence
  Antisense Oligo
ggcacaccaagcucuuacc

SEQ ID NO: 41899 - RNA, 19 nt, Artificial Sequence
  Sense Oligo
guaagagcuuggugugccu

SEQ ID NO: 41900 - RNA, 19 nt, Artificial Sequence
  Antisense Oligo
aggcacaccaagcucuuac

SEQ ID NO: 41901 - RNA, 19 nt, Artificial Sequence
  Sense Oligo
uaagagcuuggugugccug

SEQ ID NO: 41902 - RNA, 19 nt, Artificial Sequence
  Antisense Oligo
caggcacaccaagcucuua

SEQ ID NO: 41903 - RNA, 19 nt, Artificial Sequence
  Sense Oligo
aagagcuuggugugccugu

SEQ ID NO: 41904 - RNA, 19 nt, Artificial Sequence
  Antisense Oligo
acaggcacaccaagcucuu

SEQ ID NO: 41905 - RNA, 19 nt, Artificial Sequence
  Sense Oligo
agagcuuggugugccuguu

SEQ ID NO: 41906 - RNA, 19 nt, Artificial Sequence
  Antisense Oligo
aacaggcacaccaagcucu

SEQ ID NO: 41907 - RNA, 19 nt, Artificial Sequence
  Sense Oligo
gagcuuggugugccuguug

SEQ ID NO: 41908 - RNA, 19 nt, Artificial Sequence
  Antisense Oligo
caacaggcacaccaagcuc

SEQ ID NO: 41909 - RNA, 19 nt, Artificial Sequence
  Sense Oligo
agcuuggugugccuguugu

SEQ ID NO: 41910 - RNA, 19 nt, Artificial Sequence
  Antisense Oligo
acaacaggcacaccaagcu

SEQ ID NO: 41911 - RNA, 19 nt, Artificial Sequence
  Sense Oligo
gcuuggugugccuguuguc

SEQ ID NO: 41912 - RNA, 19 nt, Artificial Sequence
  Antisense Oligo
gacaacaggcacaccaagc

SEQ ID NO: 41913 - RNA, 19 nt, Artificial Sequence
  Sense Oligo
cuuggugugccuguuguca

SEQ ID NO: 41914 - RNA, 19 nt, Artificial Sequence
  Antisense Oligo
ugacaacaggcacaccaag

SEQ ID NO: 41915 - RNA, 19 nt, Artificial Sequence
  Sense Oligo
ugucacagcaguggcaaau

SEQ ID NO: 41916 - RNA, 19 nt, Artificial Sequence
  Antisense Oligo
auuugccacugcugugaca

SEQ ID NO: 41917 - RNA, 19 nt, Artificial Sequence
  Sense Oligo
ucacagcaguggcaaaucu

SEQ ID NO: 41918 - RNA, 19 nt, Artificial Sequence
  Antisense Oligo
agauuugccacugcuguga

SEQ ID NO: 41919 - RNA, 19 nt, Artificial Sequence
  Sense Oligo
cagcaguggcaaaucuagg

SEQ ID NO: 41920 - RNA, 19 nt, Artificial Sequence
  Antisense Oligo
ccuagauuugccacugcug

SEQ ID NO: 41921 - RNA, 19 nt, Artificial Sequence
  Sense Oligo
agcaguggcaaaucuaggc

SEQ ID NO: 41922 - RNA, 19 nt, Artificial Sequence
  Antisense Oligo
gccuagauuugccacugcu

SEQ ID NO: 41923 - RNA, 19 nt, Artificial Sequence
  Sense Oligo
gcaguggcaaaucuaggca

SEQ ID NO: 41924 - RNA, 19 nt, Artificial Sequence
  Antisense Oligo
ugccuagauuugccacugc

SEQ ID NO: 41925 - RNA, 19 nt, Artificial Sequence
  Sense Oligo
ggcaaaucuaggcauugag

SEQ ID NO: 41926 - RNA, 19 nt, Artificial Sequence
  Antisense Oligo
cucaaugccuagauuugcc

SEQ ID NO: 41927 - RNA, 19 nt, Artificial Sequence
  Sense Oligo
gcaaaucuaggcauugagg

SEQ ID NO: 41928 - RNA, 19 nt, Artificial Sequence
  Antisense Oligo
ccucaaugccuagauuugc

SEQ ID NO: 41929 - RNA, 19 nt, Artificial Sequence
  Sense Oligo
caaaucuaggcauugaggg

SEQ ID NO: 41930 - RNA, 19 nt, Artificial Sequence
  Antisense Oligo
cccucaaugccuagauuug

SEQ ID NO: 41931 - RNA, 19 nt, Artificial Sequence
  Sense Oligo
aaaucuaggcauugaggga

SEQ ID NO: 41932 - RNA, 19 nt, Artificial Sequence
  Antisense Oligo
ucccucaaugccuagauuu

SEQ ID NO: 41933 - RNA, 19 nt, Artificial Sequence
  Sense Oligo
cuaggcauugagggagggu

SEQ ID NO: 41934 - RNA, 19 nt, Artificial Sequence
  Antisense Oligo
acccucccucaaugccuag

SEQ ID NO: 41935 - RNA, 19 nt, Artificial Sequence
  Sense Oligo
ugcugggacggucagugcu

SEQ ID NO: 41936 - RNA, 19 nt, Artificial Sequence
  Antisense Oligo
agcacugaccgucccagca

SEQ ID NO: 41937 - RNA, 19 nt, Artificial Sequence
  Sense Oligo
gcugggacggucagugcuu

SEQ ID NO: 41938 - RNA, 19 nt, Artificial Sequence
  Antisense Oligo
aagcacugaccgucccagc

SEQ ID NO: 41939 - RNA, 19 nt, Artificial Sequence
  Sense Oligo
cugggacggucagugcuug

SEQ ID NO: 41940 - RNA, 19 nt, Artificial Sequence
  Antisense Oligo
caagcacugaccgucccag

SEQ ID NO: 41941 - RNA, 19 nt, Artificial Sequence
  Sense Oligo
ugggacggucagugcuugc

SEQ ID NO: 41942 - RNA, 19 nt, Artificial Sequence
  Antisense Oligo
gcaagcacugaccguccca

SEQ ID NO: 41943 - RNA, 19 nt, Artificial Sequence
  Sense Oligo
gggacggucagugcuugca

SEQ ID NO: 41944 - RNA, 19 nt, Artificial Sequence
  Antisense Oligo
ugcaagcacugaccguccc

SEQ ID NO: 41945 - RNA, 19 nt, Artificial Sequence
  Sense Oligo
ggacggucagugcuugcag

SEQ ID NO: 41946 - RNA, 19 nt, Artificial Sequence
  Antisense Oligo
cugcaagcacugaccgucc

SEQ ID NO: 41947 - RNA, 19 nt, Artificial Sequence
  Sense Oligo
gacggucagugcuugcagc

SEQ ID NO: 41948 - RNA, 19 nt, Artificial Sequence
  Antisense Oligo
gcugcaagcacugaccguc

SEQ ID NO: 41949 - RNA, 19 nt, Artificial Sequence
  Sense Oligo
gucagugcuugcagcucac

SEQ ID NO: 41950 - RNA, 19 nt, Artificial Sequence
  Antisense Oligo
gugagcugcaagcacugac

SEQ ID NO: 41951 - RNA, 19 nt, Artificial Sequence
  Sense Oligo
ucagugcuugcagcucaca

SEQ ID NO: 41952 - RNA, 19 nt, Artificial Sequence
  Antisense Oligo
ugugagcugcaagcacuga

SEQ ID NO: 41953 - RNA, 19 nt, Artificial Sequence
  Sense Oligo
cagugcuugcagcucacag

SEQ ID NO: 41954 - RNA, 19 nt, Artificial Sequence
  Antisense Oligo
cugugagcugcaagcacug

SEQ ID NO: 41955 - RNA, 19 nt, Artificial Sequence
  Sense Oligo
agugcuugcagcucacaga

SEQ ID NO: 41956 - RNA, 19 nt, Artificial Sequence
  Antisense Oligo
ucugugagcugcaagcacu

SEQ ID NO: 41957 - RNA, 19 nt, Artificial Sequence
  Sense Oligo
gugcuugcagcucacagau

SEQ ID NO: 41958 - RNA, 19 nt, Artificial Sequence
  Antisense Oligo
aucugugagcugcaagcac

SEQ ID NO: 41959 - RNA, 19 nt, Artificial Sequence
  Sense Oligo
ugcuugcagcucacagauu

SEQ ID NO: 41960 - RNA, 19 nt, Artificial Sequence
  Antisense Oligo
aaucugugagcugcaagca

SEQ ID NO: 41961 - RNA, 19 nt, Artificial Sequence
  Sense Oligo
gcuugcagcucacagauuc

SEQ ID NO: 41962 - RNA, 19 nt, Artificial Sequence
  Antisense Oligo
gaaucugugagcugcaagc

SEQ ID NO: 41963 - RNA, 19 nt, Artificial Sequence
  Sense Oligo
cuugcagcucacagauucu

SEQ ID NO: 41964 - RNA, 19 nt, Artificial Sequence
  Antisense Oligo
agaaucugugagcugcaag

SEQ ID NO: 41965 - RNA, 19 nt, Artificial Sequence
  Sense Oligo
uugcagcucacagauucug

SEQ ID NO: 41966 - RNA, 19 nt, Artificial Sequence
  Antisense Oligo
cagaaucugugagcugcaa

SEQ ID NO: 41967 - RNA, 19 nt, Artificial Sequence
  Sense Oligo
ugcagcucacagauucugg

SEQ ID NO: 41968 - RNA, 19 nt, Artificial Sequence
  Antisense Oligo
ccagaaucugugagcugca

SEQ ID NO: 41969 - RNA, 19 nt, Artificial Sequence
  Sense Oligo
gcagcucacagauucuggg

SEQ ID NO: 41970 - RNA, 19 nt, Artificial Sequence
  Antisense Oligo
cccagaaucugugagcugc

SEQ ID NO: 41971 - RNA, 19 nt, Artificial Sequence
  Sense Oligo
ggguucugguuaaugaguu

SEQ ID NO: 41972 - RNA, 19 nt, Artificial Sequence
  Antisense Oligo
aacucauuaaccagaaccc

SEQ ID NO: 41973 - RNA, 19 nt, Artificial Sequence
  Sense Oligo
gguucugguuaaugaguuc

SEQ ID NO: 41974 - RNA, 19 nt, Artificial Sequence
  Antisense Oligo
gaacucauuaaccagaacc

SEQ ID NO: 41975 - RNA, 19 nt, Artificial Sequence
  Sense Oligo
guucugguuaaugaguucc

SEQ ID NO: 41976 - RNA, 19 nt, Artificial Sequence
  Antisense Oligo
ggaacucauuaaccagaac

SEQ ID NO: 41977 - RNA, 19 nt, Artificial Sequence
  Sense Oligo
uucugguuaaugaguucca

SEQ ID NO: 41978 - RNA, 19 nt, Artificial Sequence
  Antisense Oligo
uggaacucauuaaccagaa

SEQ ID NO: 41979 - RNA, 19 nt, Artificial Sequence
  Sense Oligo
ugguuaaugaguuccaguc

SEQ ID NO: 41980 - RNA, 19 nt, Artificial Sequence
  Antisense Oligo
gacuggaacucauuaacca

SEQ ID NO: 41981 - RNA, 19 nt, Artificial Sequence
  Sense Oligo
gguuaaugaguuccagucc

SEQ ID NO: 41982 - RNA, 19 nt, Artificial Sequence
  Antisense Oligo
ggacuggaacucauuaacc

SEQ ID NO: 41983 - RNA, 19 nt, Artificial Sequence
  Sense Oligo
guuaaugaguuccagucca

SEQ ID NO: 41984 - RNA, 19 nt, Artificial Sequence
  Antisense Oligo
uggacuggaacucauuaac

SEQ ID NO: 41985 - RNA, 19 nt, Artificial Sequence
  Sense Oligo
gaguuccaguccacaguag

SEQ ID NO: 41986 - RNA, 19 nt, Artificial Sequence
  Antisense Oligo
cuacuguggacuggaacuc

SEQ ID NO: 41987 - RNA, 19 nt, Artificial Sequence
  Sense Oligo
aguuccaguccacaguaga

SEQ ID NO: 41988 - RNA, 19 nt, Artificial Sequence
  Antisense Oligo
ucuacuguggacuggaacu

SEQ ID NO: 41989 - RNA, 19 nt, Artificial Sequence
  Sense Oligo
guuccaguccacaguagag

SEQ ID NO: 41990 - RNA, 19 nt, Artificial Sequence
  Antisense Oligo
cucuacuguggacuggaac

SEQ ID NO: 41991 - RNA, 19 nt, Artificial Sequence
  Sense Oligo
uuccaguccacaguagagc

SEQ ID NO: 41992 - RNA, 19 nt, Artificial Sequence
  Antisense Oligo
gcucuacuguggacuggaa

SEQ ID NO: 41993 - RNA, 19 nt, Artificial Sequence
  Sense Oligo
uggaccagaucaaccagga

SEQ ID NO: 41994 - RNA, 19 nt, Artificial Sequence
  Antisense Oligo
uccugguugaucuggucca

SEQ ID NO: 41995 - RNA, 19 nt, Artificial Sequence
  Sense Oligo
ggaccagaucaaccaggag

SEQ ID NO: 41996 - RNA, 19 nt, Artificial Sequence
  Antisense Oligo
cuccugguugaucuggucc

SEQ ID NO: 41997 - RNA, 19 nt, Artificial Sequence
  Sense Oligo
gaccagaucaaccaggagc

SEQ ID NO: 41998 - RNA, 19 nt, Artificial Sequence
  Antisense Oligo
gcuccugguugaucugguc

SEQ ID NO: 41999 - RNA, 19 nt, Artificial Sequence
  Sense Oligo
accagaucaaccaggagcu

SEQ ID NO: 42000 - RNA, 19 nt, Artificial Sequence
  Antisense Oligo
agcuccugguugaucuggu

SEQ ID NO: 42001 - RNA, 19 nt, Artificial Sequence
  Sense Oligo
ccagaucaaccaggagcuc

SEQ ID NO: 42002 - RNA, 19 nt, Artificial Sequence
  Antisense Oligo
gagcuccugguugaucugg

SEQ ID NO: 42003 - RNA, 19 nt, Artificial Sequence
  Sense Oligo
cagaucaaccaggagcuca

SEQ ID NO: 42004 - RNA, 19 nt, Artificial Sequence
  Antisense Oligo
ugagcuccugguugaucug

SEQ ID NO: 42005 - RNA, 19 nt, Artificial Sequence
  Sense Oligo
gaucaaccaggagcucauc

SEQ ID NO: 42006 - RNA, 19 nt, Artificial Sequence
  Antisense Oligo
gaugagcuccugguugauc

SEQ ID NO: 42007 - RNA, 19 nt, Artificial Sequence
  Sense Oligo
aucaaccaggagcucaucc

SEQ ID NO: 42008 - RNA, 19 nt, Artificial Sequence
  Antisense Oligo
ggaugagcuccugguugau

SEQ ID NO: 42009 - RNA, 19 nt, Artificial Sequence
  Sense Oligo
ucaaccaggagcucaucca

SEQ ID NO: 42010 - RNA, 19 nt, Artificial Sequence
  Antisense Oligo
uggaugagcuccugguuga

SEQ ID NO: 42011 - RNA, 19 nt, Artificial Sequence
  Sense Oligo
aaccaggagcucauccagg

SEQ ID NO: 42012 - RNA, 19 nt, Artificial Sequence
  Antisense Oligo
ccuggaugagcuccugguu

SEQ ID NO: 42013 - RNA, 19 nt, Artificial Sequence
  Sense Oligo
accaggagcucauccaggc

SEQ ID NO: 42014 - RNA, 19 nt, Artificial Sequence
  Antisense Oligo
gccuggaugagcuccuggu

SEQ ID NO: 42015 - RNA, 19 nt, Artificial Sequence
  Sense Oligo
caggagcucauccaggcca

SEQ ID NO: 42016 - RNA, 19 nt, Artificial Sequence
  Antisense Oligo
uggccuggaugagcuccug

SEQ ID NO: 42017 - RNA, 19 nt, Artificial Sequence
  Sense Oligo
aggagcucauccaggccaa

SEQ ID NO: 42018 - RNA, 19 nt, Artificial Sequence
  Antisense Oligo
uuggccuggaugagcuccu

SEQ ID NO: 42019 - RNA, 19 nt, Artificial Sequence
  Sense Oligo
ggagcucauccaggccaaa

SEQ ID NO: 42020 - RNA, 19 nt, Artificial Sequence
  Antisense Oligo
uuuggccuggaugagcucc

SEQ ID NO: 42021 - RNA, 19 nt, Artificial Sequence
  Sense Oligo
gagcucauccaggccaaaa

SEQ ID NO: 42022 - RNA, 19 nt, Artificial Sequence
  Antisense Oligo
uuuuggccuggaugagcuc

SEQ ID NO: 42023 - RNA, 19 nt, Artificial Sequence
  Sense Oligo
aaaagcugcuccaggacau

SEQ ID NO: 42024 - RNA, 19 nt, Artificial Sequence
  Antisense Oligo
auguccuggagcagcuuuu

SEQ ID NO: 42025 - RNA, 19 nt, Artificial Sequence
  Sense Oligo
ugcuccaggacaucagcga

SEQ ID NO: 42026 - RNA, 19 nt, Artificial Sequence
  Antisense Oligo
ucgcugauguccuggagca

SEQ ID NO: 42027 - RNA, 19 nt, Artificial Sequence
  Sense Oligo
gcuccaggacaucagcgag

SEQ ID NO: 42028 - RNA, 19 nt, Artificial Sequence
  Antisense Oligo
cucgcugauguccuggagc

SEQ ID NO: 42029 - RNA, 19 nt, Artificial Sequence
  Sense Oligo
cuccaggacaucagcgagg

SEQ ID NO: 42030 - RNA, 19 nt, Artificial Sequence
  Antisense Oligo
ccucgcugauguccuggag

SEQ ID NO: 42031 - RNA, 19 nt, Artificial Sequence
  Sense Oligo
uucaucugcuggguccggg

SEQ ID NO: 42032 - RNA, 19 nt, Artificial Sequence
  Antisense Oligo
cccggacccagcagaugaa

SEQ ID NO: 42033 - RNA, 19 nt, Artificial Sequence
  Sense Oligo
ucaucugcuggguccggga

SEQ ID NO: 42034 - RNA, 19 nt, Artificial Sequence
  Antisense Oligo
ucccggacccagcagauga

SEQ ID NO: 42035 - RNA, 19 nt, Artificial Sequence
  Sense Oligo
cgggaggcucuuggaggua

SEQ ID NO: 42036 - RNA, 19 nt, Artificial Sequence
  Antisense Oligo
uaccuccaagagccucccg

SEQ ID NO: 42037 - RNA, 19 nt, Artificial Sequence
  Sense Oligo
gggaggcucuuggagguaa

SEQ ID NO: 42038 - RNA, 19 nt, Artificial Sequence
  Antisense Oligo
uuaccuccaagagccuccc

SEQ ID NO: 42039 - RNA, 19 nt, Artificial Sequence
  Sense Oligo
ggaggcucuuggagguaaa

SEQ ID NO: 42040 - RNA, 19 nt, Artificial Sequence
  Antisense Oligo
uuuaccuccaagagccucc

SEQ ID NO: 42041 - RNA, 19 nt, Artificial Sequence
  Sense Oligo
gaggcucuuggagguaaaa

SEQ ID NO: 42042 - RNA, 19 nt, Artificial Sequence
  Antisense Oligo
uuuuaccuccaagagccuc

SEQ ID NO: 42043 - RNA, 19 nt, Artificial Sequence
  Sense Oligo
gcucuuggagguaaaauca

SEQ ID NO: 42044 - RNA, 19 nt, Artificial Sequence
  Antisense Oligo
ugauuuuaccuccaagagc

SEQ ID NO: 42045 - RNA, 19 nt, Artificial Sequence
  Sense Oligo
gguaaaaucagccuuuggg

SEQ ID NO: 42046 - RNA, 19 nt, Artificial Sequence
  Antisense Oligo
cccaaaggcugauuuuacc

SEQ ID NO: 42047 - RNA, 19 nt, Artificial Sequence
  Sense Oligo
ggguugcguggaagugugg

SEQ ID NO: 42048 - RNA, 19 nt, Artificial Sequence
  Antisense Oligo
ccacacuuccacgcaaccc

SEQ ID NO: 42049 - RNA, 19 nt, Artificial Sequence
  Sense Oligo
gguugcguggaagugugga

SEQ ID NO: 42050 - RNA, 19 nt, Artificial Sequence
  Antisense Oligo
uccacacuuccacgcaacc

SEQ ID NO: 42051 - RNA, 19 nt, Artificial Sequence
  Sense Oligo
guugcguggaaguguggag

SEQ ID NO: 42052 - RNA, 19 nt, Artificial Sequence
  Antisense Oligo
cuccacacuuccacgcaac

SEQ ID NO: 42053 - RNA, 19 nt, Artificial Sequence
  Sense Oligo
aaagacguugccugcaugc

SEQ ID NO: 42054 - RNA, 19 nt, Artificial Sequence
  Antisense Oligo
gcaugcaggcaacgucuuu

SEQ ID NO: 42055 - RNA, 19 nt, Artificial Sequence
  Sense Oligo
aagacguugccugcaugcu

SEQ ID NO: 42056 - RNA, 19 nt, Artificial Sequence
  Antisense Oligo
agcaugcaggcaacgucuu

SEQ ID NO: 42057 - RNA, 19 nt, Artificial Sequence
  Sense Oligo
agacguugccugcaugcuu

SEQ ID NO: 42058 - RNA, 19 nt, Artificial Sequence
  Antisense Oligo
aagcaugcaggcaacgucu

SEQ ID NO: 42059 - RNA, 19 nt, Artificial Sequence
  Sense Oligo
gacguugccugcaugcuuu

SEQ ID NO: 42060 - RNA, 19 nt, Artificial Sequence
  Antisense Oligo
aaagcaugcaggcaacguc

SEQ ID NO: 42061 - RNA, 19 nt, Artificial Sequence
  Sense Oligo
ugccugcaugcuuuaggga

SEQ ID NO: 42062 - RNA, 19 nt, Artificial Sequence
  Antisense Oligo
ucccuaaagcaugcaggca

SEQ ID NO: 42063 - RNA, 19 nt, Artificial Sequence
  Sense Oligo
agaugggcacugaucauag

SEQ ID NO: 42064 - RNA, 19 nt, Artificial Sequence
  Antisense Oligo
cuaugaucagugcccaucu

SEQ ID NO: 42065 - RNA, 19 nt, Artificial Sequence
  Sense Oligo
gaugggcacugaucauaga

SEQ ID NO: 42066 - RNA, 19 nt, Artificial Sequence
  Antisense Oligo
ucuaugaucagugcccauc

SEQ ID NO: 42067 - RNA, 19 nt, Artificial Sequence
  Sense Oligo
augggcacugaucauagag

SEQ ID NO: 42068 - RNA, 19 nt, Artificial Sequence
  Antisense Oligo
cucuaugaucagugcccau

SEQ ID NO: 42069 - RNA, 19 nt, Artificial Sequence
  Sense Oligo
ugggcacugaucauagagu

SEQ ID NO: 42070 - RNA, 19 nt, Artificial Sequence
  Antisense Oligo
acucuaugaucagugccca

SEQ ID NO: 42071 - RNA, 19 nt, Artificial Sequence
  Sense Oligo
ggcacugaucauagaguuc

SEQ ID NO: 42072 - RNA, 19 nt, Artificial Sequence
  Antisense Oligo
gaacucuaugaucagugcc

SEQ ID NO: 42073 - RNA, 19 nt, Artificial Sequence
  Sense Oligo
cugaucauagaguucacac

SEQ ID NO: 42074 - RNA, 19 nt, Artificial Sequence
  Antisense Oligo
gugugaacucuaugaucag

SEQ ID NO: 42075 - RNA, 19 nt, Artificial Sequence
  Sense Oligo
uucccaugugcugcuguaa

SEQ ID NO: 42076 - RNA, 19 nt, Artificial Sequence
  Antisense Oligo
uuacagcagcacaugggaa

SEQ ID NO: 42077 - RNA, 19 nt, Artificial Sequence
  Sense Oligo
ucccaugugcugcuguaaa

SEQ ID NO: 42078 - RNA, 19 nt, Artificial Sequence
  Antisense Oligo
uuuacagcagcacauggga

SEQ ID NO: 42079 - RNA, 19 nt, Artificial Sequence
  Sense Oligo
ccaugugcugcuguaaaag

SEQ ID NO: 42080 - RNA, 19 nt, Artificial Sequence
  Antisense Oligo
cuuuuacagcagcacaugg

SEQ ID NO: 42081 - RNA, 19 nt, Artificial Sequence
  Sense Oligo
augugcugcuguaaaagcc

SEQ ID NO: 42082 - RNA, 19 nt, Artificial Sequence
  Antisense Oligo
ggcuuuuacagcagcacau

SEQ ID NO: 42083 - RNA, 19 nt, Artificial Sequence
  Sense Oligo
ugugcugcuguaaaagcca

SEQ ID NO: 42084 - RNA, 19 nt, Artificial Sequence
  Antisense Oligo
uggcuuuuacagcagcaca

SEQ ID NO: 42085 - RNA, 19 nt, Artificial Sequence
  Sense Oligo
ugcugcuguaaaagccacu

SEQ ID NO: 42086 - RNA, 19 nt, Artificial Sequence
  Antisense Oligo
aguggcuuuuacagcagca

SEQ ID NO: 42087 - RNA, 19 nt, Artificial Sequence
  Sense Oligo
gcugcuguaaaagccacuc

SEQ ID NO: 42088 - RNA, 19 nt, Artificial Sequence
  Antisense Oligo
gaguggcuuuuacagcagc

SEQ ID NO: 42089 - RNA, 19 nt, Artificial Sequence
  Sense Oligo
agccacucaccuugccaca

SEQ ID NO: 42090 - RNA, 19 nt, Artificial Sequence
  Antisense Oligo
uguggcaaggugaguggcu

SEQ ID NO: 42091 - RNA, 19 nt, Artificial Sequence
  Sense Oligo
gccacucaccuugccacac

SEQ ID NO: 42092 - RNA, 19 nt, Artificial Sequence
  Antisense Oligo
guguggcaaggugaguggc

SEQ ID NO: 42093 - RNA, 19 nt, Artificial Sequence
  Sense Oligo
ccgccacuucggaagcugu

SEQ ID NO: 42094 - RNA, 19 nt, Artificial Sequence
  Antisense Oligo
acagcuuccgaaguggcgg

SEQ ID NO: 42095 - RNA, 19 nt, Artificial Sequence
  Sense Oligo
cgccacuucggaagcugua

SEQ ID NO: 42096 - RNA, 19 nt, Artificial Sequence
  Antisense Oligo
uacagcuuccgaaguggcg

SEQ ID NO: 42097 - RNA, 19 nt, Artificial Sequence
  Sense Oligo
gccacuucggaagcuguaa

SEQ ID NO: 42098 - RNA, 19 nt, Artificial Sequence
  Antisense Oligo
uuacagcuuccgaaguggc

SEQ ID NO: 42099 - RNA, 19 nt, Artificial Sequence
  Sense Oligo
ccacuucggaagcuguaaa

SEQ ID NO: 42100 - RNA, 19 nt, Artificial Sequence
  Antisense Oligo
uuuacagcuuccgaagugg

SEQ ID NO: 42101 - RNA, 19 nt, Artificial Sequence
  Sense Oligo
cacuucggaagcuguaaau

SEQ ID NO: 42102 - RNA, 19 nt, Artificial Sequence
  Antisense Oligo
auuuacagcuuccgaagug

SEQ ID NO: 42103 - RNA, 19 nt, Artificial Sequence
  Sense Oligo
acuucggaagcuguaaaug

SEQ ID NO: 42104 - RNA, 19 nt, Artificial Sequence
  Antisense Oligo
cauuuacagcuuccgaagu

SEQ ID NO: 42105 - RNA, 19 nt, Artificial Sequence
  Sense Oligo
cuucggaagcuguaaaugg

SEQ ID NO: 42106 - RNA, 19 nt, Artificial Sequence
  Antisense Oligo
ccauuuacagcuuccgaag

SEQ ID NO: 42107 - RNA, 19 nt, Artificial Sequence
  Sense Oligo
uucggaagcuguaaauggc

SEQ ID NO: 42108 - RNA, 19 nt, Artificial Sequence
  Antisense Oligo
gccauuuacagcuuccgaa

SEQ ID NO: 42109 - RNA, 19 nt, Artificial Sequence
  Sense Oligo
ucggaagcuguaaauggcu

SEQ ID NO: 42110 - RNA, 19 nt, Artificial Sequence
  Antisense Oligo
agccauuuacagcuuccga

SEQ ID NO: 42111 - RNA, 19 nt, Artificial Sequence
  Sense Oligo
cggaagcuguaaauggcuc

SEQ ID NO: 42112 - RNA, 19 nt, Artificial Sequence
  Antisense Oligo
gagccauuuacagcuuccg

SEQ ID NO: 42113 - RNA, 19 nt, Artificial Sequence
  Sense Oligo
ggaagcuguaaauggcuca

SEQ ID NO: 42114 - RNA, 19 nt, Artificial Sequence
  Antisense Oligo
ugagccauuuacagcuucc

SEQ ID NO: 42115 - RNA, 19 nt, Artificial Sequence
  Sense Oligo
gaagcuguaaauggcucag

SEQ ID NO: 42116 - RNA, 19 nt, Artificial Sequence
  Antisense Oligo
cugagccauuuacagcuuc

SEQ ID NO: 42117 - RNA, 19 nt, Artificial Sequence
  Sense Oligo
aagcuguaaauggcucagg

SEQ ID NO: 42118 - RNA, 19 nt, Artificial Sequence
  Antisense Oligo
ccugagccauuuacagcuu

SEQ ID NO: 42119 - RNA, 19 nt, Artificial Sequence
  Sense Oligo
agcuguaaauggcucaggu

SEQ ID NO: 42120 - RNA, 19 nt, Artificial Sequence
  Antisense Oligo
accugagccauuuacagcu

SEQ ID NO: 42121 - RNA, 19 nt, Artificial Sequence
  Sense Oligo
guaaauggcucagguuccu

SEQ ID NO: 42122 - RNA, 19 nt, Artificial Sequence
  Antisense Oligo
aggaaccugagccauuuac

SEQ ID NO: 42123 - RNA, 19 nt, Artificial Sequence
  Sense Oligo
uaaauggcucagguuccuu

SEQ ID NO: 42124 - RNA, 19 nt, Artificial Sequence
  Antisense Oligo
aaggaaccugagccauuua

SEQ ID NO: 42125 - RNA, 19 nt, Artificial Sequence
  Sense Oligo
aauggcucagguuccuuuu

SEQ ID NO: 42126 - RNA, 19 nt, Artificial Sequence
  Antisense Oligo
aaaaggaaccugagccauu

SEQ ID NO: 42127 - RNA, 19 nt, Artificial Sequence
  Sense Oligo
ucagguuccuuuuccuuaa

SEQ ID NO: 42128 - RNA, 19 nt, Artificial Sequence
  Antisense Oligo
uuaaggaaaaggaaccuga

SEQ ID NO: 42129 - RNA, 19 nt, Artificial Sequence
  Sense Oligo
cagguuccuuuuccuuaaa

SEQ ID NO: 42130 - RNA, 19 nt, Artificial Sequence
  Antisense Oligo
uuuaaggaaaaggaaccug

SEQ ID NO: 42131 - RNA, 19 nt, Artificial Sequence
  Sense Oligo
agucucgcucugucgccca

SEQ ID NO: 42132 - RNA, 19 nt, Artificial Sequence
  Antisense Oligo
ugggcgacagagcgagacu

SEQ ID NO: 42133 - RNA, 19 nt, Artificial Sequence
  Sense Oligo
cuggagugcaguggcguga

SEQ ID NO: 42134 - RNA, 19 nt, Artificial Sequence
  Antisense Oligo
ucacgccacugcacuccag

SEQ ID NO: 42135 - RNA, 19 nt, Artificial Sequence
  Sense Oligo
uggagugcaguggcgugau

SEQ ID NO: 42136 - RNA, 19 nt, Artificial Sequence
  Antisense Oligo
aucacgccacugcacucca

SEQ ID NO: 42137 - RNA, 19 nt, Artificial Sequence
  Sense Oligo
ggagugcaguggcgugauc

SEQ ID NO: 42138 - RNA, 19 nt, Artificial Sequence
  Antisense Oligo
gaucacgccacugcacucc

SEQ ID NO: 42139 - RNA, 19 nt, Artificial Sequence
  Sense Oligo
gagugcaguggcgugaucu

SEQ ID NO: 42140 - RNA, 19 nt, Artificial Sequence
  Antisense Oligo
agaucacgccacugcacuc

SEQ ID NO: 42141 - RNA, 19 nt, Artificial Sequence
  Sense Oligo
agugcaguggcgugaucuu

SEQ ID NO: 42142 - RNA, 19 nt, Artificial Sequence
  Antisense Oligo
aagaucacgccacugcacu

SEQ ID NO: 42143 - RNA, 19 nt, Artificial Sequence
  Sense Oligo
gugcaguggcgugaucuug

SEQ ID NO: 42144 - RNA, 19 nt, Artificial Sequence
  Antisense Oligo
caagaucacgccacugcac

SEQ ID NO: 42145 - RNA, 19 nt, Artificial Sequence
  Sense Oligo
ugcaguggcgugaucuugg

SEQ ID NO: 42146 - RNA, 19 nt, Artificial Sequence
  Antisense Oligo
ccaagaucacgccacugca

SEQ ID NO: 42147 - RNA, 19 nt, Artificial Sequence
  Sense Oligo
gcaguggcgugaucuuggc

SEQ ID NO: 42148 - RNA, 19 nt, Artificial Sequence
  Antisense Oligo
gccaagaucacgccacugc

SEQ ID NO: 42149 - RNA, 19 nt, Artificial Sequence
  Sense Oligo
caguggcgugaucuuggcu

SEQ ID NO: 42150 - RNA, 19 nt, Artificial Sequence
  Antisense Oligo
agccaagaucacgccacug

SEQ ID NO: 42151 - RNA, 19 nt, Artificial Sequence
  Sense Oligo
aguggcgugaucuuggcuc

SEQ ID NO: 42152 - RNA, 19 nt, Artificial Sequence
  Antisense Oligo
gagccaagaucacgccacu

SEQ ID NO: 42153 - RNA, 19 nt, Artificial Sequence
  Sense Oligo
guggcgugaucuuggcuca

SEQ ID NO: 42154 - RNA, 19 nt, Artificial Sequence
  Antisense Oligo
ugagccaagaucacgccac

SEQ ID NO: 42155 - RNA, 19 nt, Artificial Sequence
  Sense Oligo
ugaucuuggcucacugcaa

SEQ ID NO: 42156 - RNA, 19 nt, Artificial Sequence
  Antisense Oligo
uugcagugagccaagauca

SEQ ID NO: 42157 - RNA, 19 nt, Artificial Sequence
  Sense Oligo
ccggguucacgccauucuc

SEQ ID NO: 42158 - RNA, 19 nt, Artificial Sequence
  Antisense Oligo
gagaauggcgugaacccgg

SEQ ID NO: 42159 - RNA, 19 nt, Artificial Sequence
  Sense Oligo
cggguucacgccauucucu

SEQ ID NO: 42160 - RNA, 19 nt, Artificial Sequence
  Antisense Oligo
agagaauggcgugaacccg

SEQ ID NO: 42161 - RNA, 19 nt, Artificial Sequence
  Sense Oligo
ggguucacgccauucucuu

SEQ ID NO: 42162 - RNA, 19 nt, Artificial Sequence
  Antisense Oligo
aagagaauggcgugaaccc

SEQ ID NO: 42163 - RNA, 19 nt, Artificial Sequence
  Sense Oligo
uagcugggacuacaggcga

SEQ ID NO: 42164 - RNA, 19 nt, Artificial Sequence
  Antisense Oligo
ucgccuguagucccagcua

SEQ ID NO: 42165 - RNA, 19 nt, Artificial Sequence
  Sense Oligo
agcugggacuacaggcgac

SEQ ID NO: 42166 - RNA, 19 nt, Artificial Sequence
  Antisense Oligo
gucgccuguagucccagcu

SEQ ID NO: 42167 - RNA, 19 nt, Artificial Sequence
  Sense Oligo
ggguuucacuguguuagcc

SEQ ID NO: 42168 - RNA, 19 nt, Artificial Sequence
  Antisense Oligo
ggcuaacacagugaaaccc

SEQ ID NO: 42169 - RNA, 19 nt, Artificial Sequence
  Sense Oligo
gguuucacuguguuagcca

SEQ ID NO: 42170 - RNA, 19 nt, Artificial Sequence
  Antisense Oligo
uggcuaacacagugaaacc

SEQ ID NO: 42171 - RNA, 19 nt, Artificial Sequence
  Sense Oligo
gauggucucgaucuccuga

SEQ ID NO: 42172 - RNA, 19 nt, Artificial Sequence
  Antisense Oligo
ucaggagaucgagaccauc

SEQ ID NO: 42173 - RNA, 19 nt, Artificial Sequence
  Sense Oligo
auggucucgaucuccugac

SEQ ID NO: 42174 - RNA, 19 nt, Artificial Sequence
  Antisense Oligo
gucaggagaucgagaccau

SEQ ID NO: 42175 - RNA, 19 nt, Artificial Sequence
  Sense Oligo
cucgaucuccugaccucgu

SEQ ID NO: 42176 - RNA, 19 nt, Artificial Sequence
  Antisense Oligo
acgaggucaggagaucgag

SEQ ID NO: 42177 - RNA, 19 nt, Artificial Sequence
  Sense Oligo
ucgaucuccugaccucgug

SEQ ID NO: 42178 - RNA, 19 nt, Artificial Sequence
  Antisense Oligo
cacgaggucaggagaucga

SEQ ID NO: 42179 - RNA, 19 nt, Artificial Sequence
  Sense Oligo
cgaucuccugaccucguga

SEQ ID NO: 42180 - RNA, 19 nt, Artificial Sequence
  Antisense Oligo
ucacgaggucaggagaucg

SEQ ID NO: 42181 - RNA, 19 nt, Artificial Sequence
  Sense Oligo
gaucuccugaccucgugau

SEQ ID NO: 42182 - RNA, 19 nt, Artificial Sequence
  Antisense Oligo
aucacgaggucaggagauc

SEQ ID NO: 42183 - RNA, 19 nt, Artificial Sequence
  Sense Oligo
aucuccugaccucgugauc

SEQ ID NO: 42184 - RNA, 19 nt, Artificial Sequence
  Antisense Oligo
gaucacgaggucaggagau

SEQ ID NO: 42185 - RNA, 19 nt, Artificial Sequence
  Sense Oligo
ucuccugaccucgugauca

SEQ ID NO: 42186 - RNA, 19 nt, Artificial Sequence
  Antisense Oligo
ugaucacgaggucaggaga

SEQ ID NO: 42187 - RNA, 19 nt, Artificial Sequence
  Sense Oligo
ccaaagugcugggauuaca

SEQ ID NO: 42188 - RNA, 19 nt, Artificial Sequence
  Antisense Oligo
uguaaucccagcacuuugg

SEQ ID NO: 42189 - RNA, 19 nt, Artificial Sequence
  Sense Oligo
caaagugcugggauuacag

SEQ ID NO: 42190 - RNA, 19 nt, Artificial Sequence
  Antisense Oligo
cuguaaucccagcacuuug

SEQ ID NO: 42191 - RNA, 19 nt, Artificial Sequence
  Sense Oligo
cugggauuacaggcaugag

SEQ ID NO: 42192 - RNA, 19 nt, Artificial Sequence
  Antisense Oligo
cucaugccuguaaucccag

SEQ ID NO: 42193 - RNA, 19 nt, Artificial Sequence
  Sense Oligo
aguuucgcucuuguugccc

SEQ ID NO: 42194 - RNA, 19 nt, Artificial Sequence
  Antisense Oligo
gggcaacaagagcgaaacu

SEQ ID NO: 42195 - RNA, 19 nt, Artificial Sequence
  Sense Oligo
guuucgcucuuguugccca

SEQ ID NO: 42196 - RNA, 19 nt, Artificial Sequence
  Antisense Oligo
ugggcaacaagagcgaaac

SEQ ID NO: 42197 - RNA, 19 nt, Artificial Sequence
  Sense Oligo
uuucgcucuuguugcccag

SEQ ID NO: 42198 - RNA, 19 nt, Artificial Sequence
  Antisense Oligo
cugggcaacaagagcgaaa

SEQ ID NO: 42199 - RNA, 19 nt, Artificial Sequence
  Sense Oligo
uucgcucuuguugcccagg

SEQ ID NO: 42200 - RNA, 19 nt, Artificial Sequence
  Antisense Oligo
ccugggcaacaagagcgaa

SEQ ID NO: 42201 - RNA, 19 nt, Artificial Sequence
  Sense Oligo
ucgcucuuguugcccaggc

SEQ ID NO: 42202 - RNA, 19 nt, Artificial Sequence
  Antisense Oligo
gccugggcaacaagagcga

SEQ ID NO: 42203 - RNA, 19 nt, Artificial Sequence
  Sense Oligo
cgcucuuguugcccaggcu

SEQ ID NO: 42204 - RNA, 19 nt, Artificial Sequence
  Antisense Oligo
agccugggcaacaagagcg

SEQ ID NO: 42205 - RNA, 19 nt, Artificial Sequence
  Sense Oligo
gcucuuguugcccaggcug

SEQ ID NO: 42206 - RNA, 19 nt, Artificial Sequence
  Antisense Oligo
cagccugggcaacaagagc

SEQ ID NO: 42207 - RNA, 19 nt, Artificial Sequence
  Sense Oligo
cucuuguugcccaggcugg

SEQ ID NO: 42208 - RNA, 19 nt, Artificial Sequence
  Antisense Oligo
ccagccugggcaacaagag

SEQ ID NO: 42209 - RNA, 19 nt, Artificial Sequence
  Sense Oligo
ucuuguugcccaggcugga

SEQ ID NO: 42210 - RNA, 19 nt, Artificial Sequence
  Antisense Oligo
uccagccugggcaacaaga

SEQ ID NO: 42211 - RNA, 19 nt, Artificial Sequence
  Sense Oligo
cuuguugcccaggcuggag

SEQ ID NO: 42212 - RNA, 19 nt, Artificial Sequence
  Antisense Oligo
cuccagccugggcaacaag

SEQ ID NO: 42213 - RNA, 19 nt, Artificial Sequence
  Sense Oligo
uugcccaggcuggagugca

SEQ ID NO: 42214 - RNA, 19 nt, Artificial Sequence
  Antisense Oligo
ugcacuccagccugggcaa

SEQ ID NO: 42215 - RNA, 19 nt, Artificial Sequence
  Sense Oligo
aggcuggagugcaguggug

SEQ ID NO: 42216 - RNA, 19 nt, Artificial Sequence
  Antisense Oligo
caccacugcacuccagccu

SEQ ID NO: 42217 - RNA, 19 nt, Artificial Sequence
  Sense Oligo
cagucuccugaguagcugg

SEQ ID NO: 42218 - RNA, 19 nt, Artificial Sequence
  Antisense Oligo
ccagcuacucaggagacug

SEQ ID NO: 42219 - RNA, 19 nt, Artificial Sequence
  Sense Oligo
agucuccugaguagcuggg

SEQ ID NO: 42220 - RNA, 19 nt, Artificial Sequence
  Antisense Oligo
cccagcuacucaggagacu

SEQ ID NO: 42221 - RNA, 19 nt, Artificial Sequence
  Sense Oligo
gucuccugaguagcuggga

SEQ ID NO: 42222 - RNA, 19 nt, Artificial Sequence
  Antisense Oligo
ucccagcuacucaggagac

SEQ ID NO: 42223 - RNA, 19 nt, Artificial Sequence
  Sense Oligo
ucuccugaguagcugggau

SEQ ID NO: 42224 - RNA, 19 nt, Artificial Sequence
  Antisense Oligo
aucccagcuacucaggaga

SEQ ID NO: 42225 - RNA, 19 nt, Artificial Sequence
  Sense Oligo
cuccugaguagcugggauu

SEQ ID NO: 42226 - RNA, 19 nt, Artificial Sequence
  Antisense Oligo
aaucccagcuacucaggag

SEQ ID NO: 42227 - RNA, 19 nt, Artificial Sequence
  Sense Oligo
uccugaguagcugggauua

SEQ ID NO: 42228 - RNA, 19 nt, Artificial Sequence
  Antisense Oligo
uaaucccagcuacucagga

SEQ ID NO: 42229 - RNA, 19 nt, Artificial Sequence
  Sense Oligo
ccugaguagcugggauuac

SEQ ID NO: 42230 - RNA, 19 nt, Artificial Sequence
  Antisense Oligo
guaaucccagcuacucagg

SEQ ID NO: 42231 - RNA, 19 nt, Artificial Sequence
  Sense Oligo
cugaguagcugggauuaca

SEQ ID NO: 42232 - RNA, 19 nt, Artificial Sequence
  Antisense Oligo
uguaaucccagcuacucag

SEQ ID NO: 42233 - RNA, 19 nt, Artificial Sequence
  Sense Oligo
ugaguagcugggauuacag

SEQ ID NO: 42234 - RNA, 19 nt, Artificial Sequence
  Antisense Oligo
cuguaaucccagcuacuca

SEQ ID NO: 42235 - RNA, 19 nt, Artificial Sequence
  Sense Oligo
gccaccacacccagcuacu

SEQ ID NO: 42236 - RNA, 19 nt, Artificial Sequence
  Antisense Oligo
aguagcugggugugguggc

SEQ ID NO: 42237 - RNA, 19 nt, Artificial Sequence
  Sense Oligo
ccaccacacccagcuacuu

SEQ ID NO: 42238 - RNA, 19 nt, Artificial Sequence
  Antisense Oligo
aaguagcuggguguggugg

SEQ ID NO: 42239 - RNA, 19 nt, Artificial Sequence
  Sense Oligo
caccacacccagcuacuuu

SEQ ID NO: 42240 - RNA, 19 nt, Artificial Sequence
  Antisense Oligo
aaaguagcuggguguggug

SEQ ID NO: 42241 - RNA, 19 nt, Artificial Sequence
  Sense Oligo
accacacccagcuacuuuu

SEQ ID NO: 42242 - RNA, 19 nt, Artificial Sequence
  Antisense Oligo
aaaaguagcuggguguggu

SEQ ID NO: 42243 - RNA, 19 nt, Artificial Sequence
  Sense Oligo
ggguuucaccguguuggcc

SEQ ID NO: 42244 - RNA, 19 nt, Artificial Sequence
  Antisense Oligo
ggccaacacggugaaaccc

SEQ ID NO: 42245 - RNA, 19 nt, Artificial Sequence
  Sense Oligo
gguuucaccguguuggcca

SEQ ID NO: 42246 - RNA, 19 nt, Artificial Sequence
  Antisense Oligo
uggccaacacggugaaacc

SEQ ID NO: 42247 - RNA, 19 nt, Artificial Sequence
  Sense Oligo
guguuggccaggcuggucu

SEQ ID NO: 42248 - RNA, 19 nt, Artificial Sequence
  Antisense Oligo
agaccagccuggccaacac

SEQ ID NO: 42249 - RNA, 19 nt, Artificial Sequence
  Sense Oligo
uguuggccaggcuggucuu

SEQ ID NO: 42250 - RNA, 19 nt, Artificial Sequence
  Antisense Oligo
aagaccagccuggccaaca

SEQ ID NO: 42251 - RNA, 19 nt, Artificial Sequence
  Sense Oligo
guuggccaggcuggucuug

SEQ ID NO: 42252 - RNA, 19 nt, Artificial Sequence
  Antisense Oligo
caagaccagccuggccaac

SEQ ID NO: 42253 - RNA, 19 nt, Artificial Sequence
  Sense Oligo
uuggccaggcuggucuuga

SEQ ID NO: 42254 - RNA, 19 nt, Artificial Sequence
  Antisense Oligo
ucaagaccagccuggccaa

SEQ ID NO: 42255 - RNA, 19 nt, Artificial Sequence
  Sense Oligo
uggccaggcuggucuugaa

SEQ ID NO: 42256 - RNA, 19 nt, Artificial Sequence
  Antisense Oligo
uucaagaccagccuggcca

SEQ ID NO: 42257 - RNA, 19 nt, Artificial Sequence
  Sense Oligo
cugaccucaggugauccac

SEQ ID NO: 42258 - RNA, 19 nt, Artificial Sequence
  Antisense Oligo
guggaucaccugaggucag

SEQ ID NO: 42259 - RNA, 19 nt, Artificial Sequence
  Sense Oligo
ucucagccucccaaagugc

SEQ ID NO: 42260 - RNA, 19 nt, Artificial Sequence
  Antisense Oligo
gcacuuugggaggcugaga

SEQ ID NO: 42261 - RNA, 19 nt, Artificial Sequence
  Sense Oligo
cucagccucccaaagugca

SEQ ID NO: 42262 - RNA, 19 nt, Artificial Sequence
  Antisense Oligo
ugcacuuugggaggcugag

SEQ ID NO: 42263 - RNA, 19 nt, Artificial Sequence
  Sense Oligo
aagugcaggcgugagcaag

SEQ ID NO: 42264 - RNA, 19 nt, Artificial Sequence
  Antisense Oligo
cuugcucacgccugcacuu

SEQ ID NO: 42265 - RNA, 19 nt, Artificial Sequence
  Sense Oligo
agugcaggcgugagcaagu

SEQ ID NO: 42266 - RNA, 19 nt, Artificial Sequence
  Antisense Oligo
acuugcucacgccugcacu

SEQ ID NO: 42267 - RNA, 19 nt, Artificial Sequence
  Sense Oligo
gugcaggcgugagcaagua

SEQ ID NO: 42268 - RNA, 19 nt, Artificial Sequence
  Antisense Oligo
uacuugcucacgccugcac

SEQ ID NO: 42269 - RNA, 19 nt, Artificial Sequence
  Sense Oligo
ugcaggcgugagcaaguac

SEQ ID NO: 42270 - RNA, 19 nt, Artificial Sequence
  Antisense Oligo
guacuugcucacgccugca

SEQ ID NO: 42271 - RNA, 19 nt, Artificial Sequence
  Sense Oligo
gcaggcgugagcaaguaca

SEQ ID NO: 42272 - RNA, 19 nt, Artificial Sequence
  Antisense Oligo
uguacuugcucacgccugc

SEQ ID NO: 42273 - RNA, 19 nt, Artificial Sequence
  Sense Oligo
caggcgugagcaaguacag

SEQ ID NO: 42274 - RNA, 19 nt, Artificial Sequence
  Antisense Oligo
cuguacuugcucacgccug

SEQ ID NO: 42275 - RNA, 19 nt, Artificial Sequence
  Sense Oligo
uuucucacuucuccauuga

SEQ ID NO: 42276 - RNA, 19 nt, Artificial Sequence
  Antisense Oligo
ucaauggagaagugagaaa

SEQ ID NO: 42277 - RNA, 19 nt, Artificial Sequence
  Sense Oligo
uucucacuucuccauugau

SEQ ID NO: 42278 - RNA, 19 nt, Artificial Sequence
  Antisense Oligo
aucaauggagaagugagaa

SEQ ID NO: 42279 - RNA, 19 nt, Artificial Sequence
  Sense Oligo
ucucacuucuccauugaug

SEQ ID NO: 42280 - RNA, 19 nt, Artificial Sequence
  Antisense Oligo
caucaauggagaagugaga

SEQ ID NO: 42281 - RNA, 19 nt, Artificial Sequence
  Sense Oligo
cucacuucuccauugaugc

SEQ ID NO: 42282 - RNA, 19 nt, Artificial Sequence
  Antisense Oligo
gcaucaauggagaagugag

SEQ ID NO: 42283 - RNA, 19 nt, Artificial Sequence
  Sense Oligo
ucacuucuccauugaugcu

SEQ ID NO: 42284 - RNA, 19 nt, Artificial Sequence
  Antisense Oligo
agcaucaauggagaaguga

SEQ ID NO: 42285 - RNA, 19 nt, Artificial Sequence
  Sense Oligo
cacuucuccauugaugcug

SEQ ID NO: 42286 - RNA, 19 nt, Artificial Sequence
  Antisense Oligo
cagcaucaauggagaagug

SEQ ID NO: 42287 - RNA, 19 nt, Artificial Sequence
  Sense Oligo
acuucuccauugaugcugu

SEQ ID NO: 42288 - RNA, 19 nt, Artificial Sequence
  Antisense Oligo
acagcaucaauggagaagu

SEQ ID NO: 42289 - RNA, 19 nt, Artificial Sequence
  Sense Oligo
cuuggcagccucuucaguu

SEQ ID NO: 42290 - RNA, 19 nt, Artificial Sequence
  Antisense Oligo
aacugaagaggcugccaag

SEQ ID NO: 42291 - RNA, 19 nt, Artificial Sequence
  Sense Oligo
ucaguucuguggcuuagau

SEQ ID NO: 42292 - RNA, 19 nt, Artificial Sequence
  Antisense Oligo
aucuaagccacagaacuga

SEQ ID NO: 42293 - RNA, 19 nt, Artificial Sequence
  Sense Oligo
caguucuguggcuuagaug

SEQ ID NO: 42294 - RNA, 19 nt, Artificial Sequence
  Antisense Oligo
caucuaagccacagaacug

SEQ ID NO: 42295 - RNA, 19 nt, Artificial Sequence
  Sense Oligo
aguucuguggcuuagaugu

SEQ ID NO: 42296 - RNA, 19 nt, Artificial Sequence
  Antisense Oligo
acaucuaagccacagaacu

SEQ ID NO: 42297 - RNA, 19 nt, Artificial Sequence
  Sense Oligo
acagguggcagugcaggug

SEQ ID NO: 42298 - RNA, 19 nt, Artificial Sequence
  Antisense Oligo
caccugcacugccaccugu

SEQ ID NO: 42299 - RNA, 19 nt, Artificial Sequence
  Sense Oligo
agguggcagugcaggugug

SEQ ID NO: 42300 - RNA, 19 nt, Artificial Sequence
  Antisense Oligo
cacaccugcacugccaccu

SEQ ID NO: 42301 - RNA, 19 nt, Artificial Sequence
  Sense Oligo
guggcagugcaggugugcu

SEQ ID NO: 42302 - RNA, 19 nt, Artificial Sequence
  Antisense Oligo
agcacaccugcacugccac

SEQ ID NO: 42303 - RNA, 19 nt, Artificial Sequence
  Sense Oligo
ccaccaccugcuggaucuc

SEQ ID NO: 42304 - RNA, 19 nt, Artificial Sequence
  Antisense Oligo
gagauccagcagguggugg

SEQ ID NO: 42305 - RNA, 19 nt, Artificial Sequence
  Sense Oligo
caccaccugcuggaucuca

SEQ ID NO: 42306 - RNA, 19 nt, Artificial Sequence
  Antisense Oligo
ugagauccagcagguggug

SEQ ID NO: 42307 - RNA, 19 nt, Artificial Sequence
  Sense Oligo
accaccugcuggaucucag

SEQ ID NO: 42308 - RNA, 19 nt, Artificial Sequence
  Antisense Oligo
cugagauccagcagguggu

SEQ ID NO: 42309 - RNA, 19 nt, Artificial Sequence
  Sense Oligo
cugcuggaucucaggcucu

SEQ ID NO: 42310 - RNA, 19 nt, Artificial Sequence
  Antisense Oligo
agagccugagauccagcag

SEQ ID NO: 42311 - RNA, 19 nt, Artificial Sequence
  Sense Oligo
ugcuggaucucaggcucug

SEQ ID NO: 42312 - RNA, 19 nt, Artificial Sequence
  Antisense Oligo
cagagccugagauccagca

SEQ ID NO: 42313 - RNA, 19 nt, Artificial Sequence
  Sense Oligo
gcuggaucucaggcucugg

SEQ ID NO: 42314 - RNA, 19 nt, Artificial Sequence
  Antisense Oligo
ccagagccugagauccagc

SEQ ID NO: 42315 - RNA, 19 nt, Artificial Sequence
  Sense Oligo
cuggaucucaggcucuggc

SEQ ID NO: 42316 - RNA, 19 nt, Artificial Sequence
  Antisense Oligo
gccagagccugagauccag

SEQ ID NO: 42317 - RNA, 19 nt, Artificial Sequence
  Sense Oligo
uggaucucaggcucuggcu

SEQ ID NO: 42318 - RNA, 19 nt, Artificial Sequence
  Antisense Oligo
agccagagccugagaucca

SEQ ID NO: 42319 - RNA, 19 nt, Artificial Sequence
  Sense Oligo
ggaucucaggcucuggcuc

SEQ ID NO: 42320 - RNA, 19 nt, Artificial Sequence
  Antisense Oligo
gagccagagccugagaucc

SEQ ID NO: 42321 - RNA, 19 nt, Artificial Sequence
  Sense Oligo
gaucucaggcucuggcucu

SEQ ID NO: 42322 - RNA, 19 nt, Artificial Sequence
  Antisense Oligo
agagccagagccugagauc

SEQ ID NO: 42323 - RNA, 19 nt, Artificial Sequence
  Sense Oligo
aucucaggcucuggcucuc

SEQ ID NO: 42324 - RNA, 19 nt, Artificial Sequence
  Antisense Oligo
gagagccagagccugagau

SEQ ID NO: 42325 - RNA, 19 nt, Artificial Sequence
  Sense Oligo
ucucaggcucuggcucucu

SEQ ID NO: 42326 - RNA, 19 nt, Artificial Sequence
  Antisense Oligo
agagagccagagccugaga

SEQ ID NO: 42327 - RNA, 19 nt, Artificial Sequence
  Sense Oligo
ggcucuggcucucuuggga

SEQ ID NO: 42328 - RNA, 19 nt, Artificial Sequence
  Antisense Oligo
ucccaagagagccagagcc

SEQ ID NO: 42329 - RNA, 19 nt, Artificial Sequence
  Sense Oligo
gcuuucagugguggacucu

SEQ ID NO: 42330 - RNA, 19 nt, Artificial Sequence
  Antisense Oligo
agaguccaccacugaaagc

SEQ ID NO: 42331 - RNA, 19 nt, Artificial Sequence
  Sense Oligo
cuuucagugguggacucuc

SEQ ID NO: 42332 - RNA, 19 nt, Artificial Sequence
  Antisense Oligo
gagaguccaccacugaaag

SEQ ID NO: 42333 - RNA, 19 nt, Artificial Sequence
  Sense Oligo
uuucagugguggacucucu

SEQ ID NO: 42334 - RNA, 19 nt, Artificial Sequence
  Antisense Oligo
agagaguccaccacugaaa

SEQ ID NO: 42335 - RNA, 19 nt, Artificial Sequence
  Sense Oligo
uucagugguggacucucug

SEQ ID NO: 42336 - RNA, 19 nt, Artificial Sequence
  Antisense Oligo
cagagaguccaccacugaa

SEQ ID NO: 42337 - RNA, 19 nt, Artificial Sequence
  Sense Oligo
ucagugguggacucucugg

SEQ ID NO: 42338 - RNA, 19 nt, Artificial Sequence
  Antisense Oligo
ccagagaguccaccacuga

SEQ ID NO: 42339 - RNA, 19 nt, Artificial Sequence
  Sense Oligo
cagugguggacucucuggu

SEQ ID NO: 42340 - RNA, 19 nt, Artificial Sequence
  Antisense Oligo
accagagaguccaccacug

SEQ ID NO: 42341 - RNA, 19 nt, Artificial Sequence
  Sense Oligo
agugguggacucucugguc

SEQ ID NO: 42342 - RNA, 19 nt, Artificial Sequence
  Antisense Oligo
gaccagagaguccaccacu

SEQ ID NO: 42343 - RNA, 19 nt, Artificial Sequence
  Sense Oligo
gacucucugguccacacug

SEQ ID NO: 42344 - RNA, 19 nt, Artificial Sequence
  Antisense Oligo
caguguggaccagagaguc

SEQ ID NO: 42345 - RNA, 19 nt, Artificial Sequence
  Sense Oligo
acucucugguccacacuga

SEQ ID NO: 42346 - RNA, 19 nt, Artificial Sequence
  Antisense Oligo
ucaguguggaccagagagu

SEQ ID NO: 42347 - RNA, 19 nt, Artificial Sequence
  Sense Oligo
cucucugguccacacugau

SEQ ID NO: 42348 - RNA, 19 nt, Artificial Sequence
  Antisense Oligo
aucaguguggaccagagag

SEQ ID NO: 42349 - RNA, 19 nt, Artificial Sequence
  Sense Oligo
ucucugguccacacugaug

SEQ ID NO: 42350 - RNA, 19 nt, Artificial Sequence
  Antisense Oligo
caucaguguggaccagaga

SEQ ID NO: 42351 - RNA, 19 nt, Artificial Sequence
  Sense Oligo
cucugguccacacugaugc

SEQ ID NO: 42352 - RNA, 19 nt, Artificial Sequence
  Antisense Oligo
gcaucaguguggaccagag

SEQ ID NO: 42353 - RNA, 19 nt, Artificial Sequence
  Sense Oligo
ucugguccacacugaugca

SEQ ID NO: 42354 - RNA, 19 nt, Artificial Sequence
  Antisense Oligo
ugcaucaguguggaccaga

SEQ ID NO: 42355 - RNA, 19 nt, Artificial Sequence
  Sense Oligo
cugguccacacugaugcac

SEQ ID NO: 42356 - RNA, 19 nt, Artificial Sequence
  Antisense Oligo
gugcaucaguguggaccag

SEQ ID NO: 42357 - RNA, 19 nt, Artificial Sequence
  Sense Oligo
ugguccacacugaugcaca

SEQ ID NO: 42358 - RNA, 19 nt, Artificial Sequence
  Antisense Oligo
ugugcaucaguguggacca

SEQ ID NO: 42359 - RNA, 19 nt, Artificial Sequence
  Sense Oligo
ccacacugaugcacauccu

SEQ ID NO: 42360 - RNA, 19 nt, Artificial Sequence
  Antisense Oligo
aggaugugcaucagugugg

SEQ ID NO: 42361 - RNA, 19 nt, Artificial Sequence
  Sense Oligo
cacacugaugcacauccuu

SEQ ID NO: 42362 - RNA, 19 nt, Artificial Sequence
  Antisense Oligo
aaggaugugcaucagugug

SEQ ID NO: 42363 - RNA, 19 nt, Artificial Sequence
  Sense Oligo
acacugaugcacauccuuc

SEQ ID NO: 42364 - RNA, 19 nt, Artificial Sequence
  Antisense Oligo
gaaggaugugcaucagugu

SEQ ID NO: 42365 - RNA, 19 nt, Artificial Sequence
  Sense Oligo
cacugaugcacauccuuca

SEQ ID NO: 42366 - RNA, 19 nt, Artificial Sequence
  Antisense Oligo
ugaaggaugugcaucagug

SEQ ID NO: 42367 - RNA, 19 nt, Artificial Sequence
  Sense Oligo
ugaugcacauccuucagug

SEQ ID NO: 42368 - RNA, 19 nt, Artificial Sequence
  Antisense Oligo
cacugaaggaugugcauca

SEQ ID NO: 42369 - RNA, 19 nt, Artificial Sequence
  Sense Oligo
acauccuucagugaguaau

SEQ ID NO: 42370 - RNA, 19 nt, Artificial Sequence
  Antisense Oligo
auuacucacugaaggaugu

SEQ ID NO: 42371 - RNA, 19 nt, Artificial Sequence
  Sense Oligo
cauccuucagugaguaauu

SEQ ID NO: 42372 - RNA, 19 nt, Artificial Sequence
  Antisense Oligo
aauuacucacugaaggaug

SEQ ID NO: 42373 - RNA, 19 nt, Artificial Sequence
  Sense Oligo
auccuucagugaguaauuu

SEQ ID NO: 42374 - RNA, 19 nt, Artificial Sequence
  Antisense Oligo
aaauuacucacugaaggau

SEQ ID NO: 42375 - RNA, 19 nt, Artificial Sequence
  Sense Oligo
cuucagugaguaauuuauc

SEQ ID NO: 42376 - RNA, 19 nt, Artificial Sequence
  Antisense Oligo
gauaaauuacucacugaag

SEQ ID NO: 42377 - RNA, 19 nt, Artificial Sequence
  Sense Oligo
gugaguaauuuaucugagg

SEQ ID NO: 42378 - RNA, 19 nt, Artificial Sequence
  Antisense Oligo
ccucagauaaauuacucac

SEQ ID NO: 42379 - RNA, 19 nt, Artificial Sequence
  Sense Oligo
ugaguaauuuaucugaggg

SEQ ID NO: 42380 - RNA, 19 nt, Artificial Sequence
  Antisense Oligo
cccucagauaaauuacuca

SEQ ID NO: 42381 - RNA, 19 nt, Artificial Sequence
  Sense Oligo
aucugaguguuucauaguu

SEQ ID NO: 42382 - RNA, 19 nt, Artificial Sequence
  Antisense Oligo
aacuaugaaacacucagau

SEQ ID NO: 42383 - RNA, 19 nt, Artificial Sequence
  Sense Oligo
cugaguguuucauaguuaa

SEQ ID NO: 42384 - RNA, 19 nt, Artificial Sequence
  Antisense Oligo
uuaacuaugaaacacucag

SEQ ID NO: 42385 - RNA, 19 nt, Artificial Sequence
  Sense Oligo
uauuuacagcugagccuug

SEQ ID NO: 42386 - RNA, 19 nt, Artificial Sequence
  Antisense Oligo
caaggcucagcuguaaaua

SEQ ID NO: 42387 - RNA, 19 nt, Artificial Sequence
  Sense Oligo
auuuacagcugagccuugg

SEQ ID NO: 42388 - RNA, 19 nt, Artificial Sequence
  Antisense Oligo
ccaaggcucagcuguaaau

SEQ ID NO: 42389 - RNA, 19 nt, Artificial Sequence
  Sense Oligo
uuuacagcugagccuuggu

SEQ ID NO: 42390 - RNA, 19 nt, Artificial Sequence
  Antisense Oligo
accaaggcucagcuguaaa

SEQ ID NO: 42391 - RNA, 19 nt, Artificial Sequence
  Sense Oligo
uuacagcugagccuugguu

SEQ ID NO: 42392 - RNA, 19 nt, Artificial Sequence
  Antisense Oligo
aaccaaggcucagcuguaa

SEQ ID NO: 42393 - RNA, 19 nt, Artificial Sequence
  Sense Oligo
uacagcugagccuugguuu

SEQ ID NO: 42394 - RNA, 19 nt, Artificial Sequence
  Antisense Oligo
aaaccaaggcucagcugua

SEQ ID NO: 42395 - RNA, 19 nt, Artificial Sequence
  Sense Oligo
agcugagccuugguuucuu

SEQ ID NO: 42396 - RNA, 19 nt, Artificial Sequence
  Antisense Oligo
aagaaaccaaggcucagcu

SEQ ID NO: 42397 - RNA, 19 nt, Artificial Sequence
  Sense Oligo
uaaaugguaauguugugug

SEQ ID NO: 42398 - RNA, 19 nt, Artificial Sequence
  Antisense Oligo
cacacaacauuaccauuua

SEQ ID NO: 42399 - RNA, 19 nt, Artificial Sequence
  Sense Oligo
aaaugguaauguugugugg

SEQ ID NO: 42400 - RNA, 19 nt, Artificial Sequence
  Antisense Oligo
ccacacaacauuaccauuu

SEQ ID NO: 42401 - RNA, 19 nt, Artificial Sequence
  Sense Oligo
aaugguaauguugugugga

SEQ ID NO: 42402 - RNA, 19 nt, Artificial Sequence
  Antisense Oligo
uccacacaacauuaccauu

SEQ ID NO: 42403 - RNA, 19 nt, Artificial Sequence
  Sense Oligo
augguaauguuguguggau

SEQ ID NO: 42404 - RNA, 19 nt, Artificial Sequence
  Antisense Oligo
auccacacaacauuaccau

SEQ ID NO: 42405 - RNA, 19 nt, Artificial Sequence
  Sense Oligo
gguaauguuguguggauug

SEQ ID NO: 42406 - RNA, 19 nt, Artificial Sequence
  Antisense Oligo
caauccacacaacauuacc

SEQ ID NO: 42407 - RNA, 19 nt, Artificial Sequence
  Sense Oligo
guaauguuguguggauuga

SEQ ID NO: 42408 - RNA, 19 nt, Artificial Sequence
  Antisense Oligo
ucaauccacacaacauuac

SEQ ID NO: 42409 - RNA, 19 nt, Artificial Sequence
  Sense Oligo
aauguuguguggauugaag

SEQ ID NO: 42410 - RNA, 19 nt, Artificial Sequence
  Antisense Oligo
cuucaauccacacaacauu

SEQ ID NO: 42411 - RNA, 19 nt, Artificial Sequence
  Sense Oligo
cacagaagugcaguacagu

SEQ ID NO: 42412 - RNA, 19 nt, Artificial Sequence
  Antisense Oligo
acuguacugcacuucugug

SEQ ID NO: 42413 - RNA, 19 nt, Artificial Sequence
  Sense Oligo
acagaagugcaguacagug

SEQ ID NO: 42414 - RNA, 19 nt, Artificial Sequence
  Antisense Oligo
cacuguacugcacuucugu

SEQ ID NO: 42415 - RNA, 19 nt, Artificial Sequence
  Sense Oligo
cagaagugcaguacagugc

SEQ ID NO: 42416 - RNA, 19 nt, Artificial Sequence
  Antisense Oligo
gcacuguacugcacuucug

SEQ ID NO: 42417 - RNA, 19 nt, Artificial Sequence
  Sense Oligo
agaagugcaguacagugcc

SEQ ID NO: 42418 - RNA, 19 nt, Artificial Sequence
  Antisense Oligo
ggcacuguacugcacuucu

SEQ ID NO: 42419 - RNA, 19 nt, Artificial Sequence
  Sense Oligo
gaagugcaguacagugccu

SEQ ID NO: 42420 - RNA, 19 nt, Artificial Sequence
  Antisense Oligo
aggcacuguacugcacuuc

SEQ ID NO: 42421 - RNA, 19 nt, Artificial Sequence
  Sense Oligo
aagugcaguacagugccug

SEQ ID NO: 42422 - RNA, 19 nt, Artificial Sequence
  Antisense Oligo
caggcacuguacugcacuu

SEQ ID NO: 42423 - RNA, 19 nt, Artificial Sequence
  Sense Oligo
agugcaguacagugccugg

SEQ ID NO: 42424 - RNA, 19 nt, Artificial Sequence
  Antisense Oligo
ccaggcacuguacugcacu

SEQ ID NO: 42425 - RNA, 19 nt, Artificial Sequence
  Sense Oligo
gugcaguacagugccuggg

SEQ ID NO: 42426 - RNA, 19 nt, Artificial Sequence
  Antisense Oligo
cccaggcacuguacugcac

SEQ ID NO: 42427 - RNA, 19 nt, Artificial Sequence
  Sense Oligo
ggcaagauaucguuuagug

SEQ ID NO: 42428 - RNA, 19 nt, Artificial Sequence
  Antisense Oligo
cacuaaacgauaucuugcc

SEQ ID NO: 42429 - RNA, 19 nt, Artificial Sequence
  Sense Oligo
gcaagauaucguuuagugc

SEQ ID NO: 42430 - RNA, 19 nt, Artificial Sequence
  Antisense Oligo
gcacuaaacgauaucuugc

SEQ ID NO: 42431 - RNA, 19 nt, Artificial Sequence
  Sense Oligo
caagauaucguuuagugcu

SEQ ID NO: 42432 - RNA, 19 nt, Artificial Sequence
  Antisense Oligo
agcacuaaacgauaucuug

SEQ ID NO: 42433 - RNA, 19 nt, Artificial Sequence
  Sense Oligo
aagauaucguuuagugcua

SEQ ID NO: 42434 - RNA, 19 nt, Artificial Sequence
  Antisense Oligo
uagcacuaaacgauaucuu

SEQ ID NO: 42435 - RNA, 19 nt, Artificial Sequence
  Sense Oligo
agauaucguuuagugcuau

SEQ ID NO: 42436 - RNA, 19 nt, Artificial Sequence
  Antisense Oligo
auagcacuaaacgauaucu

SEQ ID NO: 42437 - RNA, 19 nt, Artificial Sequence
  Sense Oligo
gauaucguuuagugcuauu

SEQ ID NO: 42438 - RNA, 19 nt, Artificial Sequence
  Antisense Oligo
aauagcacuaaacgauauc

SEQ ID NO: 42439 - RNA, 19 nt, Artificial Sequence
  Sense Oligo
aucguuuagugcuauuaac

SEQ ID NO: 42440 - RNA, 19 nt, Artificial Sequence
  Antisense Oligo
guuaauagcacuaaacgau

SEQ ID NO: 42441 - RNA, 19 nt, Artificial Sequence
  Sense Oligo
guggcucacaccuguaauc

SEQ ID NO: 42442 - RNA, 19 nt, Artificial Sequence
  Antisense Oligo
gauuacaggugugagccac

SEQ ID NO: 42443 - RNA, 19 nt, Artificial Sequence
  Sense Oligo
uggcucacaccuguaaucu

SEQ ID NO: 42444 - RNA, 19 nt, Artificial Sequence
  Antisense Oligo
agauuacaggugugagcca

SEQ ID NO: 42445 - RNA, 19 nt, Artificial Sequence
  Sense Oligo
ggcucacaccuguaaucuc

SEQ ID NO: 42446 - RNA, 19 nt, Artificial Sequence
  Antisense Oligo
gagauuacaggugugagcc

SEQ ID NO: 42447 - RNA, 19 nt, Artificial Sequence
  Sense Oligo
gcucacaccuguaaucuca

SEQ ID NO: 42448 - RNA, 19 nt, Artificial Sequence
  Antisense Oligo
ugagauuacaggugugagc

SEQ ID NO: 42449 - RNA, 19 nt, Artificial Sequence
  Sense Oligo
cucacaccuguaaucucag

SEQ ID NO: 42450 - RNA, 19 nt, Artificial Sequence
  Antisense Oligo
cugagauuacaggugugag

SEQ ID NO: 42451 - RNA, 19 nt, Artificial Sequence
  Sense Oligo
guaaucucagcacuuuggg

SEQ ID NO: 42452 - RNA, 19 nt, Artificial Sequence
  Antisense Oligo
cccaaagugcugagauuac

SEQ ID NO: 42453 - RNA, 19 nt, Artificial Sequence
  Sense Oligo
uaaucucagcacuuuggga

SEQ ID NO: 42454 - RNA, 19 nt, Artificial Sequence
  Antisense Oligo
ucccaaagugcugagauua

SEQ ID NO: 42455 - RNA, 19 nt, Artificial Sequence
  Sense Oligo
cucagcacuuugggaggcc

SEQ ID NO: 42456 - RNA, 19 nt, Artificial Sequence
  Antisense Oligo
ggccucccaaagugcugag

SEQ ID NO: 42457 - RNA, 19 nt, Artificial Sequence
  Sense Oligo
ucagcacuuugggaggcca

SEQ ID NO: 42458 - RNA, 19 nt, Artificial Sequence
  Antisense Oligo
uggccucccaaagugcuga

SEQ ID NO: 42459 - RNA, 19 nt, Artificial Sequence
  Sense Oligo
ccaagucguguggaucacc

SEQ ID NO: 42460 - RNA, 19 nt, Artificial Sequence
  Antisense Oligo
ggugauccacacgacuugg

SEQ ID NO: 42461 - RNA, 19 nt, Artificial Sequence
  Sense Oligo
caagucguguggaucaccu

SEQ ID NO: 42462 - RNA, 19 nt, Artificial Sequence
  Antisense Oligo
aggugauccacacgacuug

SEQ ID NO: 42463 - RNA, 19 nt, Artificial Sequence
  Sense Oligo
ucguguggaucaccugagg

SEQ ID NO: 42464 - RNA, 19 nt, Artificial Sequence
  Antisense Oligo
ccucaggugauccacacga

SEQ ID NO: 42465 - RNA, 19 nt, Artificial Sequence
  Sense Oligo
cguguggaucaccugaggu

SEQ ID NO: 42466 - RNA, 19 nt, Artificial Sequence
  Antisense Oligo
accucaggugauccacacg

SEQ ID NO: 42467 - RNA, 19 nt, Artificial Sequence
  Sense Oligo
guguggaucaccugagguc

SEQ ID NO: 42468 - RNA, 19 nt, Artificial Sequence
  Antisense Oligo
gaccucaggugauccacac

SEQ ID NO: 42469 - RNA, 19 nt, Artificial Sequence
  Sense Oligo
cugaggucaggaguuggag

SEQ ID NO: 42470 - RNA, 19 nt, Artificial Sequence
  Antisense Oligo
cuccaacuccugaccucag

SEQ ID NO: 42471 - RNA, 19 nt, Artificial Sequence
  Sense Oligo
aaaauuagccaggcguggu

SEQ ID NO: 42472 - RNA, 19 nt, Artificial Sequence
  Antisense Oligo
accacgccuggcuaauuuu

SEQ ID NO: 42473 - RNA, 19 nt, Artificial Sequence
  Sense Oligo
aaauuagccaggcguggug

SEQ ID NO: 42474 - RNA, 19 nt, Artificial Sequence
  Antisense Oligo
caccacgccuggcuaauuu

SEQ ID NO: 42475 - RNA, 19 nt, Artificial Sequence
  Sense Oligo
aauuagccaggcguggugg

SEQ ID NO: 42476 - RNA, 19 nt, Artificial Sequence
  Antisense Oligo
ccaccacgccuggcuaauu

SEQ ID NO: 42477 - RNA, 19 nt, Artificial Sequence
  Sense Oligo
auuagccaggcgugguggu

SEQ ID NO: 42478 - RNA, 19 nt, Artificial Sequence
  Antisense Oligo
accaccacgccuggcuaau

SEQ ID NO: 42479 - RNA, 19 nt, Artificial Sequence
  Sense Oligo
uuagccaggcgugguggug

SEQ ID NO: 42480 - RNA, 19 nt, Artificial Sequence
  Antisense Oligo
caccaccacgccuggcuaa

SEQ ID NO: 42481 - RNA, 19 nt, Artificial Sequence
  Sense Oligo
cgccaguaaucccagcuac

SEQ ID NO: 42482 - RNA, 19 nt, Artificial Sequence
  Antisense Oligo
guagcugggauuacuggcg

SEQ ID NO: 42483 - RNA, 19 nt, Artificial Sequence
  Sense Oligo
guaaucccagcuacacggg

SEQ ID NO: 42484 - RNA, 19 nt, Artificial Sequence
  Antisense Oligo
cccguguagcugggauuac

SEQ ID NO: 42485 - RNA, 19 nt, Artificial Sequence
  Sense Oligo
uacacgggaggcugaggca

SEQ ID NO: 42486 - RNA, 19 nt, Artificial Sequence
  Antisense Oligo
ugccucagccucccgugua

SEQ ID NO: 42487 - RNA, 19 nt, Artificial Sequence
  Sense Oligo
acacgggaggcugaggcaa

SEQ ID NO: 42488 - RNA, 19 nt, Artificial Sequence
  Antisense Oligo
uugccucagccucccgugu

SEQ ID NO: 42489 - RNA, 19 nt, Artificial Sequence
  Sense Oligo
acgggaggcugaggcaaga

SEQ ID NO: 42490 - RNA, 19 nt, Artificial Sequence
  Antisense Oligo
ucuugccucagccucccgu

SEQ ID NO: 42491 - RNA, 19 nt, Artificial Sequence
  Sense Oligo
cuggaagguggagguugca

SEQ ID NO: 42492 - RNA, 19 nt, Artificial Sequence
  Antisense Oligo
ugcaaccuccaccuuccag

SEQ ID NO: 42493 - RNA, 19 nt, Artificial Sequence
  Sense Oligo
uggaagguggagguugcag

SEQ ID NO: 42494 - RNA, 19 nt, Artificial Sequence
  Antisense Oligo
cugcaaccuccaccuucca

SEQ ID NO: 42495 - RNA, 19 nt, Artificial Sequence
  Sense Oligo
gagguugcagugagccgag

SEQ ID NO: 42496 - RNA, 19 nt, Artificial Sequence
  Antisense Oligo
cucggcucacugcaaccuc

SEQ ID NO: 42497 - RNA, 19 nt, Artificial Sequence
  Sense Oligo
caaaagauuagguguuccg

SEQ ID NO: 42498 - RNA, 19 nt, Artificial Sequence
  Antisense Oligo
cggaacaccuaaucuuuug

SEQ ID NO: 42499 - RNA, 19 nt, Artificial Sequence
  Sense Oligo
aaaagauuagguguuccgg

SEQ ID NO: 42500 - RNA, 19 nt, Artificial Sequence
  Antisense Oligo
ccggaacaccuaaucuuuu

SEQ ID NO: 42501 - RNA, 19 nt, Artificial Sequence
  Sense Oligo
aaagauuagguguuccgga

SEQ ID NO: 42502 - RNA, 19 nt, Artificial Sequence
  Antisense Oligo
uccggaacaccuaaucuuu

SEQ ID NO: 42503 - RNA, 19 nt, Artificial Sequence
  Sense Oligo
aagauuagguguuccggac

SEQ ID NO: 42504 - RNA, 19 nt, Artificial Sequence
  Antisense Oligo
guccggaacaccuaaucuu

SEQ ID NO: 42505 - RNA, 19 nt, Artificial Sequence
  Sense Oligo
agauuagguguuccggacu

SEQ ID NO: 42506 - RNA, 19 nt, Artificial Sequence
  Antisense Oligo
aguccggaacaccuaaucu

SEQ ID NO: 42507 - RNA, 19 nt, Artificial Sequence
  Sense Oligo
gauuagguguuccggacuc

SEQ ID NO: 42508 - RNA, 19 nt, Artificial Sequence
  Antisense Oligo
gaguccggaacaccuaauc

SEQ ID NO: 42509 - RNA, 19 nt, Artificial Sequence
  Sense Oligo
auuagguguuccggacucu

SEQ ID NO: 42510 - RNA, 19 nt, Artificial Sequence
  Antisense Oligo
agaguccggaacaccuaau

SEQ ID NO: 42511 - RNA, 19 nt, Artificial Sequence
  Sense Oligo
uuagguguuccggacucuu

SEQ ID NO: 42512 - RNA, 19 nt, Artificial Sequence
  Antisense Oligo
aagaguccggaacaccuaa

SEQ ID NO: 42513 - RNA, 19 nt, Artificial Sequence
  Sense Oligo
uagguguuccggacucuua

SEQ ID NO: 42514 - RNA, 19 nt, Artificial Sequence
  Antisense Oligo
uaagaguccggaacaccua

SEQ ID NO: 42515 - RNA, 19 nt, Artificial Sequence
  Sense Oligo
agguguuccggacucuuac

SEQ ID NO: 42516 - RNA, 19 nt, Artificial Sequence
  Antisense Oligo
guaagaguccggaacaccu

SEQ ID NO: 42517 - RNA, 19 nt, Artificial Sequence
  Sense Oligo
gguguuccggacucuuacu

SEQ ID NO: 42518 - RNA, 19 nt, Artificial Sequence
  Antisense Oligo
aguaagaguccggaacacc

SEQ ID NO: 42519 - RNA, 19 nt, Artificial Sequence
  Sense Oligo
auccauuucagcuucagua

SEQ ID NO: 42520 - RNA, 19 nt, Artificial Sequence
  Antisense Oligo
uacugaagcugaaauggau

SEQ ID NO: 42521 - RNA, 19 nt, Artificial Sequence
  Sense Oligo
uccauuucagcuucaguaa

SEQ ID NO: 42522 - RNA, 19 nt, Artificial Sequence
  Antisense Oligo
uuacugaagcugaaaugga

SEQ ID NO: 42523 - RNA, 19 nt, Artificial Sequence
  Sense Oligo
ccauuucagcuucaguaag

SEQ ID NO: 42524 - RNA, 19 nt, Artificial Sequence
  Antisense Oligo
cuuacugaagcugaaaugg

SEQ ID NO: 42525 - RNA, 19 nt, Artificial Sequence
  Sense Oligo
cauuucagcuucaguaagg

SEQ ID NO: 42526 - RNA, 19 nt, Artificial Sequence
  Antisense Oligo
ccuuacugaagcugaaaug

SEQ ID NO: 42527 - RNA, 19 nt, Artificial Sequence
  Sense Oligo
auuucagcuucaguaagga

SEQ ID NO: 42528 - RNA, 19 nt, Artificial Sequence
  Antisense Oligo
uccuuacugaagcugaaau

SEQ ID NO: 42529 - RNA, 19 nt, Artificial Sequence
  Sense Oligo
uaaggauuacugcccaaga

SEQ ID NO: 42530 - RNA, 19 nt, Artificial Sequence
  Antisense Oligo
ucuugggcaguaauccuua

SEQ ID NO: 42531 - RNA, 19 nt, Artificial Sequence
  Sense Oligo
gauuacugcccaagaccga

SEQ ID NO: 42532 - RNA, 19 nt, Artificial Sequence
  Antisense Oligo
ucggucuugggcaguaauc

SEQ ID NO: 42533 - RNA, 19 nt, Artificial Sequence
  Sense Oligo
auuacugcccaagaccgag

SEQ ID NO: 42534 - RNA, 19 nt, Artificial Sequence
  Antisense Oligo
cucggucuugggcaguaau

SEQ ID NO: 42535 - RNA, 19 nt, Artificial Sequence
  Sense Oligo
uuacugcccaagaccgagu

SEQ ID NO: 42536 - RNA, 19 nt, Artificial Sequence
  Antisense Oligo
acucggucuugggcaguaa

SEQ ID NO: 42537 - RNA, 19 nt, Artificial Sequence
  Sense Oligo
uacugcccaagaccgaguc

SEQ ID NO: 42538 - RNA, 19 nt, Artificial Sequence
  Antisense Oligo
gacucggucuugggcagua

SEQ ID NO: 42539 - RNA, 19 nt, Artificial Sequence
  Sense Oligo
gaccgagucuugugcuauc

SEQ ID NO: 42540 - RNA, 19 nt, Artificial Sequence
  Antisense Oligo
gauagcacaagacucgguc

SEQ ID NO: 42541 - RNA, 19 nt, Artificial Sequence
  Sense Oligo
accgagucuugugcuaucg

SEQ ID NO: 42542 - RNA, 19 nt, Artificial Sequence
  Antisense Oligo
cgauagcacaagacucggu

SEQ ID NO: 42543 - RNA, 19 nt, Artificial Sequence
  Sense Oligo
ccgagucuugugcuaucgu

SEQ ID NO: 42544 - RNA, 19 nt, Artificial Sequence
  Antisense Oligo
acgauagcacaagacucgg

SEQ ID NO: 42545 - RNA, 19 nt, Artificial Sequence
  Sense Oligo
cgagucuugugcuaucgug

SEQ ID NO: 42546 - RNA, 19 nt, Artificial Sequence
  Antisense Oligo
cacgauagcacaagacucg

SEQ ID NO: 42547 - RNA, 19 nt, Artificial Sequence
  Sense Oligo
gagucuugugcuaucgugg

SEQ ID NO: 42548 - RNA, 19 nt, Artificial Sequence
  Antisense Oligo
ccacgauagcacaagacuc

SEQ ID NO: 42549 - RNA, 19 nt, Artificial Sequence
  Sense Oligo
agucuugugcuaucgugga

SEQ ID NO: 42550 - RNA, 19 nt, Artificial Sequence
  Antisense Oligo
uccacgauagcacaagacu

SEQ ID NO: 42551 - RNA, 19 nt, Artificial Sequence
  Sense Oligo
gucuugugcuaucguggaa

SEQ ID NO: 42552 - RNA, 19 nt, Artificial Sequence
  Antisense Oligo
uuccacgauagcacaagac

SEQ ID NO: 42553 - RNA, 19 nt, Artificial Sequence
  Sense Oligo
ucuugugcuaucguggaau

SEQ ID NO: 42554 - RNA, 19 nt, Artificial Sequence
  Antisense Oligo
auuccacgauagcacaaga

SEQ ID NO: 42555 - RNA, 19 nt, Artificial Sequence
  Sense Oligo
cuugugcuaucguggaaua

SEQ ID NO: 42556 - RNA, 19 nt, Artificial Sequence
  Antisense Oligo
uauuccacgauagcacaag

SEQ ID NO: 42557 - RNA, 19 nt, Artificial Sequence
  Sense Oligo
uggaauagucccacgcuga

SEQ ID NO: 42558 - RNA, 19 nt, Artificial Sequence
  Antisense Oligo
ucagcgugggacuauucca

SEQ ID NO: 42559 - RNA, 19 nt, Artificial Sequence
  Sense Oligo
ggaauagucccacgcugaa

SEQ ID NO: 42560 - RNA, 19 nt, Artificial Sequence
  Antisense Oligo
uucagcgugggacuauucc

SEQ ID NO: 42561 - RNA, 19 nt, Artificial Sequence
  Sense Oligo
ccaggcaucaaugagcuga

SEQ ID NO: 42562 - RNA, 19 nt, Artificial Sequence
  Antisense Oligo
ucagcucauugaugccugg

SEQ ID NO: 42563 - RNA, 19 nt, Artificial Sequence
  Sense Oligo
caggcaucaaugagcugaa

SEQ ID NO: 42564 - RNA, 19 nt, Artificial Sequence
  Antisense Oligo
uucagcucauugaugccug

SEQ ID NO: 42565 - RNA, 19 nt, Artificial Sequence
  Sense Oligo
aggcaucaaugagcugaag

SEQ ID NO: 42566 - RNA, 19 nt, Artificial Sequence
  Antisense Oligo
cuucagcucauugaugccu

SEQ ID NO: 42567 - RNA, 19 nt, Artificial Sequence
  Sense Oligo
aucaaugagcugaaggugu

SEQ ID NO: 42568 - RNA, 19 nt, Artificial Sequence
  Antisense Oligo
acaccuucagcucauugau

SEQ ID NO: 42569 - RNA, 19 nt, Artificial Sequence
  Sense Oligo
ucaaugagcugaagguguu

SEQ ID NO: 42570 - RNA, 19 nt, Artificial Sequence
  Antisense Oligo
aacaccuucagcucauuga

SEQ ID NO: 42571 - RNA, 19 nt, Artificial Sequence
  Sense Oligo
caaugagcugaagguguuu

SEQ ID NO: 42572 - RNA, 19 nt, Artificial Sequence
  Antisense Oligo
aaacaccuucagcucauug

SEQ ID NO: 42573 - RNA, 19 nt, Artificial Sequence
  Sense Oligo
aaugagcugaagguguuug

SEQ ID NO: 42574 - RNA, 19 nt, Artificial Sequence
  Antisense Oligo
caaacaccuucagcucauu

SEQ ID NO: 42575 - RNA, 19 nt, Artificial Sequence
  Sense Oligo
augagcugaagguguuugu

SEQ ID NO: 42576 - RNA, 19 nt, Artificial Sequence
  Antisense Oligo
acaaacaccuucagcucau

SEQ ID NO: 42577 - RNA, 19 nt, Artificial Sequence
  Sense Oligo
ugagcugaagguguuugug

SEQ ID NO: 42578 - RNA, 19 nt, Artificial Sequence
  Antisense Oligo
cacaaacaccuucagcuca

SEQ ID NO: 42579 - RNA, 19 nt, Artificial Sequence
  Sense Oligo
agcugaagguguuugugga

SEQ ID NO: 42580 - RNA, 19 nt, Artificial Sequence
  Antisense Oligo
uccacaaacaccuucagcu

SEQ ID NO: 42581 - RNA, 19 nt, Artificial Sequence
  Sense Oligo
cugaagguguuuguggacc

SEQ ID NO: 42582 - RNA, 19 nt, Artificial Sequence
  Antisense Oligo
gguccacaaacaccuucag

SEQ ID NO: 42583 - RNA, 19 nt, Artificial Sequence
  Sense Oligo
gguguuuguggaccuggcc

SEQ ID NO: 42584 - RNA, 19 nt, Artificial Sequence
  Antisense Oligo
ggccagguccacaaacacc

SEQ ID NO: 42585 - RNA, 19 nt, Artificial Sequence
  Sense Oligo
guguuuguggaccuggccu

SEQ ID NO: 42586 - RNA, 19 nt, Artificial Sequence
  Antisense Oligo
aggccagguccacaaacac

SEQ ID NO: 42587 - RNA, 19 nt, Artificial Sequence
  Sense Oligo
uguuuguggaccuggccuc

SEQ ID NO: 42588 - RNA, 19 nt, Artificial Sequence
  Antisense Oligo
gaggccagguccacaaaca

SEQ ID NO: 42589 - RNA, 19 nt, Artificial Sequence
  Sense Oligo
guuuguggaccuggccucc

SEQ ID NO: 42590 - RNA, 19 nt, Artificial Sequence
  Antisense Oligo
ggaggccagguccacaaac

SEQ ID NO: 42591 - RNA, 19 nt, Artificial Sequence
  Sense Oligo
agaaugacauugaugugga

SEQ ID NO: 42592 - RNA, 19 nt, Artificial Sequence
  Antisense Oligo
uccacaucaaugucauucu

SEQ ID NO: 42593 - RNA, 19 nt, Artificial Sequence
  Sense Oligo
gaaugacauugauguggac

SEQ ID NO: 42594 - RNA, 19 nt, Artificial Sequence
  Antisense Oligo
guccacaucaaugucauuc

SEQ ID NO: 42595 - RNA, 19 nt, Artificial Sequence
  Sense Oligo
aaugacauugauguggacc

SEQ ID NO: 42596 - RNA, 19 nt, Artificial Sequence
  Antisense Oligo
gguccacaucaaugucauu

SEQ ID NO: 42597 - RNA, 19 nt, Artificial Sequence
  Sense Oligo
augacauugauguggaccg

SEQ ID NO: 42598 - RNA, 19 nt, Artificial Sequence
  Antisense Oligo
cgguccacaucaaugucau

SEQ ID NO: 42599 - RNA, 19 nt, Artificial Sequence
  Sense Oligo
ugacauugauguggaccgg

SEQ ID NO: 42600 - RNA, 19 nt, Artificial Sequence
  Antisense Oligo
ccgguccacaucaauguca

SEQ ID NO: 42601 - RNA, 19 nt, Artificial Sequence
  Sense Oligo
gacauugauguggaccggg

SEQ ID NO: 42602 - RNA, 19 nt, Artificial Sequence
  Antisense Oligo
cccgguccacaucaauguc

SEQ ID NO: 42603 - RNA, 19 nt, Artificial Sequence
  Sense Oligo
acauugauguggaccgggu

SEQ ID NO: 42604 - RNA, 19 nt, Artificial Sequence
  Antisense Oligo
acccgguccacaucaaugu

SEQ ID NO: 42605 - RNA, 19 nt, Artificial Sequence
  Sense Oligo
cauugauguggaccgggug

SEQ ID NO: 42606 - RNA, 19 nt, Artificial Sequence
  Antisense Oligo
cacccgguccacaucaaug

SEQ ID NO: 42607 - RNA, 19 nt, Artificial Sequence
  Sense Oligo
auugauguggaccgggugg

SEQ ID NO: 42608 - RNA, 19 nt, Artificial Sequence
  Antisense Oligo
ccacccgguccacaucaau

SEQ ID NO: 42609 - RNA, 19 nt, Artificial Sequence
  Sense Oligo
uugauguggaccggguggc

SEQ ID NO: 42610 - RNA, 19 nt, Artificial Sequence
  Antisense Oligo
gccacccgguccacaucaa

SEQ ID NO: 42611 - RNA, 19 nt, Artificial Sequence
  Sense Oligo
guggccugcuuccaugacg

SEQ ID NO: 42612 - RNA, 19 nt, Artificial Sequence
  Antisense Oligo
cgucauggaagcaggccac

SEQ ID NO: 42613 - RNA, 19 nt, Artificial Sequence
  Sense Oligo
uggccugcuuccaugacgc

SEQ ID NO: 42614 - RNA, 19 nt, Artificial Sequence
  Antisense Oligo
gcgucauggaagcaggcca

SEQ ID NO: 42615 - RNA, 19 nt, Artificial Sequence
  Sense Oligo
ggccugcuuccaugacgcu

SEQ ID NO: 42616 - RNA, 19 nt, Artificial Sequence
  Antisense Oligo
agcgucauggaagcaggcc

SEQ ID NO: 42617 - RNA, 19 nt, Artificial Sequence
  Sense Oligo
ggcuacgcaucccugcuau

SEQ ID NO: 42618 - RNA, 19 nt, Artificial Sequence
  Antisense Oligo
auagcagggaugcguagcc

SEQ ID NO: 42619 - RNA, 19 nt, Artificial Sequence
  Sense Oligo
gcuacgcaucccugcuauu

SEQ ID NO: 42620 - RNA, 19 nt, Artificial Sequence
  Antisense Oligo
aauagcagggaugcguagc

SEQ ID NO: 42621 - RNA, 19 nt, Artificial Sequence
  Sense Oligo
cuacgcaucccugcuauuu

SEQ ID NO: 42622 - RNA, 19 nt, Artificial Sequence
  Antisense Oligo
aaauagcagggaugcguag

SEQ ID NO: 42623 - RNA, 19 nt, Artificial Sequence
  Sense Oligo
uacgcaucccugcuauuua

SEQ ID NO: 42624 - RNA, 19 nt, Artificial Sequence
  Antisense Oligo
uaaauagcagggaugcgua

SEQ ID NO: 42625 - RNA, 19 nt, Artificial Sequence
  Sense Oligo
acgcaucccugcuauuuaa

SEQ ID NO: 42626 - RNA, 19 nt, Artificial Sequence
  Antisense Oligo
uuaaauagcagggaugcgu

SEQ ID NO: 42627 - RNA, 19 nt, Artificial Sequence
  Sense Oligo
cgcaucccugcuauuuaag

SEQ ID NO: 42628 - RNA, 19 nt, Artificial Sequence
  Antisense Oligo
cuuaaauagcagggaugcg

SEQ ID NO: 42629 - RNA, 19 nt, Artificial Sequence
  Sense Oligo
gcaucccugcuauuuaagc

SEQ ID NO: 42630 - RNA, 19 nt, Artificial Sequence
  Antisense Oligo
gcuuaaauagcagggaugc

SEQ ID NO: 42631 - RNA, 19 nt, Artificial Sequence
  Sense Oligo
cccugcuauuuaagcugga

SEQ ID NO: 42632 - RNA, 19 nt, Artificial Sequence
  Antisense Oligo
uccagcuuaaauagcaggg

SEQ ID NO: 42633 - RNA, 19 nt, Artificial Sequence
  Sense Oligo
cccagcguggacuucagug

SEQ ID NO: 42634 - RNA, 19 nt, Artificial Sequence
  Antisense Oligo
cacugaaguccacgcuggg

SEQ ID NO: 42635 - RNA, 19 nt, Artificial Sequence
  Sense Oligo
ccagcguggacuucagugc

SEQ ID NO: 42636 - RNA, 19 nt, Artificial Sequence
  Antisense Oligo
gcacugaaguccacgcugg

SEQ ID NO: 42637 - RNA, 19 nt, Artificial Sequence
  Sense Oligo
cagcguggacuucagugca

SEQ ID NO: 42638 - RNA, 19 nt, Artificial Sequence
  Antisense Oligo
ugcacugaaguccacgcug

SEQ ID NO: 42639 - RNA, 19 nt, Artificial Sequence
  Sense Oligo
guggacuucagugcauuca

SEQ ID NO: 42640 - RNA, 19 nt, Artificial Sequence
  Antisense Oligo
ugaaugcacugaaguccac

SEQ ID NO: 42641 - RNA, 19 nt, Artificial Sequence
  Sense Oligo
uggacuucagugcauucau

SEQ ID NO: 42642 - RNA, 19 nt, Artificial Sequence
  Antisense Oligo
augaaugcacugaagucca

SEQ ID NO: 42643 - RNA, 19 nt, Artificial Sequence
  Sense Oligo
ggacuucagugcauucaug

SEQ ID NO: 42644 - RNA, 19 nt, Artificial Sequence
  Antisense Oligo
caugaaugcacugaagucc

SEQ ID NO: 42645 - RNA, 19 nt, Artificial Sequence
  Sense Oligo
ucagugcauucaugaagca

SEQ ID NO: 42646 - RNA, 19 nt, Artificial Sequence
  Antisense Oligo
ugcuucaugaaugcacuga

SEQ ID NO: 42647 - RNA, 19 nt, Artificial Sequence
  Sense Oligo
cagugcauucaugaagcau

SEQ ID NO: 42648 - RNA, 19 nt, Artificial Sequence
  Antisense Oligo
augcuucaugaaugcacug

SEQ ID NO: 42649 - RNA, 19 nt, Artificial Sequence
  Sense Oligo
agugcauucaugaagcauc

SEQ ID NO: 42650 - RNA, 19 nt, Artificial Sequence
  Antisense Oligo
gaugcuucaugaaugcacu

SEQ ID NO: 42651 - RNA, 19 nt, Artificial Sequence
  Sense Oligo
gugcauucaugaagcaucu

SEQ ID NO: 42652 - RNA, 19 nt, Artificial Sequence
  Antisense Oligo
agaugcuucaugaaugcac

SEQ ID NO: 42653 - RNA, 19 nt, Artificial Sequence
  Sense Oligo
gcauucaugaagcaucuga

SEQ ID NO: 42654 - RNA, 19 nt, Artificial Sequence
  Antisense Oligo
ucagaugcuucaugaaugc

SEQ ID NO: 42655 - RNA, 19 nt, Artificial Sequence
  Sense Oligo
aaaagcuguggaaggcucu

SEQ ID NO: 42656 - RNA, 19 nt, Artificial Sequence
  Antisense Oligo
agagccuuccacagcuuuu

SEQ ID NO: 42657 - RNA, 19 nt, Artificial Sequence
  Sense Oligo
guggaaggcucuggauaag

SEQ ID NO: 42658 - RNA, 19 nt, Artificial Sequence
  Antisense Oligo
cuuauccagagccuuccac

SEQ ID NO: 42659 - RNA, 19 nt, Artificial Sequence
  Sense Oligo
uggaaggcucuggauaagg

SEQ ID NO: 42660 - RNA, 19 nt, Artificial Sequence
  Antisense Oligo
ccuuauccagagccuucca

SEQ ID NO: 42661 - RNA, 19 nt, Artificial Sequence
  Sense Oligo
ggaaggcucuggauaagga

SEQ ID NO: 42662 - RNA, 19 nt, Artificial Sequence
  Antisense Oligo
uccuuauccagagccuucc

SEQ ID NO: 42663 - RNA, 19 nt, Artificial Sequence
  Sense Oligo
gaaggcucuggauaaggac

SEQ ID NO: 42664 - RNA, 19 nt, Artificial Sequence
  Antisense Oligo
guccuuauccagagccuuc

SEQ ID NO: 42665 - RNA, 19 nt, Artificial Sequence
  Sense Oligo
aaggcucuggauaaggacc

SEQ ID NO: 42666 - RNA, 19 nt, Artificial Sequence
  Antisense Oligo
gguccuuauccagagccuu

SEQ ID NO: 42667 - RNA, 19 nt, Artificial Sequence
  Sense Oligo
aggcucuggauaaggacca

SEQ ID NO: 42668 - RNA, 19 nt, Artificial Sequence
  Antisense Oligo
ugguccuuauccagagccu

SEQ ID NO: 42669 - RNA, 19 nt, Artificial Sequence
  Sense Oligo
uggauaaggaccaguaccu

SEQ ID NO: 42670 - RNA, 19 nt, Artificial Sequence
  Antisense Oligo
agguacugguccuuaucca

SEQ ID NO: 42671 - RNA, 19 nt, Artificial Sequence
  Sense Oligo
ggauaaggaccaguaccug

SEQ ID NO: 42672 - RNA, 19 nt, Artificial Sequence
  Antisense Oligo
cagguacugguccuuaucc

SEQ ID NO: 42673 - RNA, 19 nt, Artificial Sequence
  Sense Oligo
gauaaggaccaguaccugc

SEQ ID NO: 42674 - RNA, 19 nt, Artificial Sequence
  Antisense Oligo
gcagguacugguccuuauc

SEQ ID NO: 42675 - RNA, 19 nt, Artificial Sequence
  Sense Oligo
auaaggaccaguaccugcc

SEQ ID NO: 42676 - RNA, 19 nt, Artificial Sequence
  Antisense Oligo
ggcagguacugguccuuau

SEQ ID NO: 42677 - RNA, 19 nt, Artificial Sequence
  Sense Oligo
uaaggaccaguaccugccc

SEQ ID NO: 42678 - RNA, 19 nt, Artificial Sequence
  Antisense Oligo
gggcagguacugguccuua

SEQ ID NO: 42679 - RNA, 19 nt, Artificial Sequence
  Sense Oligo
aaggaccaguaccugccca

SEQ ID NO: 42680 - RNA, 19 nt, Artificial Sequence
  Antisense Oligo
ugggcagguacugguccuu

SEQ ID NO: 42681 - RNA, 19 nt, Artificial Sequence
  Sense Oligo
aggaccaguaccugcccag

SEQ ID NO: 42682 - RNA, 19 nt, Artificial Sequence
  Antisense Oligo
cugggcagguacugguccu

SEQ ID NO: 42683 - RNA, 19 nt, Artificial Sequence
  Sense Oligo
gaccaguaccugcccagga

SEQ ID NO: 42684 - RNA, 19 nt, Artificial Sequence
  Antisense Oligo
uccugggcagguacugguc

SEQ ID NO: 42685 - RNA, 19 nt, Artificial Sequence
  Sense Oligo
aacuggugagucuuauucu

SEQ ID NO: 42686 - RNA, 19 nt, Artificial Sequence
  Antisense Oligo
agaauaagacucaccaguu

SEQ ID NO: 42687 - RNA, 19 nt, Artificial Sequence
  Sense Oligo
acuggugagucuuauucug

SEQ ID NO: 42688 - RNA, 19 nt, Artificial Sequence
  Antisense Oligo
cagaauaagacucaccagu

SEQ ID NO: 42689 - RNA, 19 nt, Artificial Sequence
  Sense Oligo
cuggugagucuuauucugu

SEQ ID NO: 42690 - RNA, 19 nt, Artificial Sequence
  Antisense Oligo
acagaauaagacucaccag

SEQ ID NO: 42691 - RNA, 19 nt, Artificial Sequence
  Sense Oligo
uggugagucuuauucuguc

SEQ ID NO: 42692 - RNA, 19 nt, Artificial Sequence
  Antisense Oligo
gacagaauaagacucacca

SEQ ID NO: 42693 - RNA, 19 nt, Artificial Sequence
  Sense Oligo
ggugagucuuauucugucu

SEQ ID NO: 42694 - RNA, 19 nt, Artificial Sequence
  Antisense Oligo
agacagaauaagacucacc

SEQ ID NO: 42695 - RNA, 19 nt, Artificial Sequence
  Sense Oligo
gugagucuuauucugucuc

SEQ ID NO: 42696 - RNA, 19 nt, Artificial Sequence
  Antisense Oligo
gagacagaauaagacucac

SEQ ID NO: 42697 - RNA, 19 nt, Artificial Sequence
  Sense Oligo
ugagucuuauucugucucu

SEQ ID NO: 42698 - RNA, 19 nt, Artificial Sequence
  Antisense Oligo
agagacagaauaagacuca

SEQ ID NO: 42699 - RNA, 19 nt, Artificial Sequence
  Sense Oligo
gagucuuauucugucucua

SEQ ID NO: 42700 - RNA, 19 nt, Artificial Sequence
  Antisense Oligo
uagagacagaauaagacuc

SEQ ID NO: 42701 - RNA, 19 nt, Artificial Sequence
  Sense Oligo
agucuuauucugucucuaa

SEQ ID NO: 42702 - RNA, 19 nt, Artificial Sequence
  Antisense Oligo
uuagagacagaauaagacu

SEQ ID NO: 42703 - RNA, 19 nt, Artificial Sequence
  Sense Oligo
gucuuauucugucucuaau

SEQ ID NO: 42704 - RNA, 19 nt, Artificial Sequence
  Antisense Oligo
auuagagacagaauaagac

SEQ ID NO: 42705 - RNA, 19 nt, Artificial Sequence
  Sense Oligo
cuuauucugucucuaaugc

SEQ ID NO: 42706 - RNA, 19 nt, Artificial Sequence
  Antisense Oligo
gcauuagagacagaauaag

SEQ ID NO: 42707 - RNA, 19 nt, Artificial Sequence
  Sense Oligo
ugucucuaaugcagauuuu

SEQ ID NO: 42708 - RNA, 19 nt, Artificial Sequence
  Antisense Oligo
aaaaucugcauuagagaca

SEQ ID NO: 42709 - RNA, 19 nt, Artificial Sequence
  Sense Oligo
gucucuaaugcagauuuug

SEQ ID NO: 42710 - RNA, 19 nt, Artificial Sequence
  Antisense Oligo
caaaaucugcauuagagac

SEQ ID NO: 42711 - RNA, 19 nt, Artificial Sequence
  Sense Oligo
ucucuaaugcagauuuugu

SEQ ID NO: 42712 - RNA, 19 nt, Artificial Sequence
  Antisense Oligo
acaaaaucugcauuagaga

SEQ ID NO: 42713 - RNA, 19 nt, Artificial Sequence
  Sense Oligo
agauuuuguugaauagagc

SEQ ID NO: 42714 - RNA, 19 nt, Artificial Sequence
  Antisense Oligo
gcucuauucaacaaaaucu

SEQ ID NO: 42715 - RNA, 19 nt, Artificial Sequence
  Sense Oligo
gauuuuguugaauagagca

SEQ ID NO: 42716 - RNA, 19 nt, Artificial Sequence
  Antisense Oligo
ugcucuauucaacaaaauc

SEQ ID NO: 42717 - RNA, 19 nt, Artificial Sequence
  Sense Oligo
uuuguugaauagagcauug

SEQ ID NO: 42718 - RNA, 19 nt, Artificial Sequence
  Antisense Oligo
caaugcucuauucaacaaa

SEQ ID NO: 42719 - RNA, 19 nt, Artificial Sequence
  Sense Oligo
uuguugaauagagcauugc

SEQ ID NO: 42720 - RNA, 19 nt, Artificial Sequence
  Antisense Oligo
gcaaugcucuauucaacaa

SEQ ID NO: 42721 - RNA, 19 nt, Artificial Sequence
  Sense Oligo
guugaauagagcauugcuu

SEQ ID NO: 42722 - RNA, 19 nt, Artificial Sequence
  Antisense Oligo
aagcaaugcucuauucaac

SEQ ID NO: 42723 - RNA, 19 nt, Artificial Sequence
  Sense Oligo
uugaauagagcauugcuua

SEQ ID NO: 42724 - RNA, 19 nt, Artificial Sequence
  Antisense Oligo
uaagcaaugcucuauucaa

SEQ ID NO: 42725 - RNA, 19 nt, Artificial Sequence
  Sense Oligo
ugaauagagcauugcuuag

SEQ ID NO: 42726 - RNA, 19 nt, Artificial Sequence
  Antisense Oligo
cuaagcaaugcucuauuca

SEQ ID NO: 42727 - RNA, 19 nt, Artificial Sequence
  Sense Oligo
gaauagagcauugcuuagc

SEQ ID NO: 42728 - RNA, 19 nt, Artificial Sequence
  Antisense Oligo
gcuaagcaaugcucuauuc

SEQ ID NO: 42729 - RNA, 19 nt, Artificial Sequence
  Sense Oligo
aauagagcauugcuuagca

SEQ ID NO: 42730 - RNA, 19 nt, Artificial Sequence
  Antisense Oligo
ugcuaagcaaugcucuauu

SEQ ID NO: 42731 - RNA, 19 nt, Artificial Sequence
  Sense Oligo
ugcuuagcaacguuagggc

SEQ ID NO: 42732 - RNA, 19 nt, Artificial Sequence
  Antisense Oligo
gcccuaacguugcuaagca

SEQ ID NO: 42733 - RNA, 19 nt, Artificial Sequence
  Sense Oligo
acguuagggcagugacugu

SEQ ID NO: 42734 - RNA, 19 nt, Artificial Sequence
  Antisense Oligo
acagucacugcccuaacgu

SEQ ID NO: 42735 - RNA, 19 nt, Artificial Sequence
  Sense Oligo
cugugugguagguuuguac

SEQ ID NO: 42736 - RNA, 19 nt, Artificial Sequence
  Antisense Oligo
guacaaaccuaccacacag

SEQ ID NO: 42737 - RNA, 19 nt, Artificial Sequence
  Sense Oligo
agcuuuucuucauaaaugg

SEQ ID NO: 42738 - RNA, 19 nt, Artificial Sequence
  Antisense Oligo
ccauuuaugaagaaaagcu

SEQ ID NO: 42739 - RNA, 19 nt, Artificial Sequence
  Sense Oligo
gcuuuucuucauaaaugga

SEQ ID NO: 42740 - RNA, 19 nt, Artificial Sequence
  Antisense Oligo
uccauuuaugaagaaaagc

SEQ ID NO: 42741 - RNA, 19 nt, Artificial Sequence
  Sense Oligo
ucaccaucuuguuaccuag

SEQ ID NO: 42742 - RNA, 19 nt, Artificial Sequence
  Antisense Oligo
cuagguaacaagaugguga

SEQ ID NO: 42743 - RNA, 19 nt, Artificial Sequence
  Sense Oligo
cacauaguaaucucuaagg

SEQ ID NO: 42744 - RNA, 19 nt, Artificial Sequence
  Antisense Oligo
ccuuagagauuacuaugug

SEQ ID NO: 42745 - RNA, 19 nt, Artificial Sequence
  Sense Oligo
acauaguaaucucuaaggu

SEQ ID NO: 42746 - RNA, 19 nt, Artificial Sequence
  Antisense Oligo
accuuagagauuacuaugu

SEQ ID NO: 42747 - RNA, 19 nt, Artificial Sequence
  Sense Oligo
cauaguaaucucuaaggug

SEQ ID NO: 42748 - RNA, 19 nt, Artificial Sequence
  Antisense Oligo
caccuuagagauuacuaug

SEQ ID NO: 42749 - RNA, 19 nt, Artificial Sequence
  Sense Oligo
auaguaaucucuaaggugc

SEQ ID NO: 42750 - RNA, 19 nt, Artificial Sequence
  Antisense Oligo
gcaccuuagagauuacuau

SEQ ID NO: 42751 - RNA, 19 nt, Artificial Sequence
  Sense Oligo
uaguaaucucuaaggugca

SEQ ID NO: 42752 - RNA, 19 nt, Artificial Sequence
  Antisense Oligo
ugcaccuuagagauuacua

SEQ ID NO: 42753 - RNA, 19 nt, Artificial Sequence
  Sense Oligo
aguaaucucuaaggugcaa

SEQ ID NO: 42754 - RNA, 19 nt, Artificial Sequence
  Antisense Oligo
uugcaccuuagagauuacu

SEQ ID NO: 42755 - RNA, 19 nt, Artificial Sequence
  Sense Oligo
guaaucucuaaggugcaaa

SEQ ID NO: 42756 - RNA, 19 nt, Artificial Sequence
  Antisense Oligo
uuugcaccuuagagauuac

SEQ ID NO: 42757 - RNA, 19 nt, Artificial Sequence
  Sense Oligo
uaaucucuaaggugcaaaa

SEQ ID NO: 42758 - RNA, 19 nt, Artificial Sequence
  Antisense Oligo
uuuugcaccuuagagauua

SEQ ID NO: 42759 - RNA, 19 nt, Artificial Sequence
  Sense Oligo
aacguugccaggaguuuuc

SEQ ID NO: 42760 - RNA, 19 nt, Artificial Sequence
  Antisense Oligo
gaaaacuccuggcaacguu

SEQ ID NO: 42761 - RNA, 19 nt, Artificial Sequence
  Sense Oligo
acguugccaggaguuuucu

SEQ ID NO: 42762 - RNA, 19 nt, Artificial Sequence
  Antisense Oligo
agaaaacuccuggcaacgu

SEQ ID NO: 42763 - RNA, 19 nt, Artificial Sequence
  Sense Oligo
ugccaggaguuuucucuga

SEQ ID NO: 42764 - RNA, 19 nt, Artificial Sequence
  Antisense Oligo
ucagagaaaacuccuggca

SEQ ID NO: 42765 - RNA, 19 nt, Artificial Sequence
  Sense Oligo
gccaggaguuuucucugaa

SEQ ID NO: 42766 - RNA, 19 nt, Artificial Sequence
  Antisense Oligo
uucagagaaaacuccuggc

SEQ ID NO: 42767 - RNA, 19 nt, Artificial Sequence
  Sense Oligo
ggaguuuucucugaauggu

SEQ ID NO: 42768 - RNA, 19 nt, Artificial Sequence
  Antisense Oligo
accauucagagaaaacucc

SEQ ID NO: 42769 - RNA, 19 nt, Artificial Sequence
  Sense Oligo
gaguuuucucugaaugguu

SEQ ID NO: 42770 - RNA, 19 nt, Artificial Sequence
  Antisense Oligo
aaccauucagagaaaacuc

SEQ ID NO: 42771 - RNA, 19 nt, Artificial Sequence
  Sense Oligo
aguuuucucugaaugguug

SEQ ID NO: 42772 - RNA, 19 nt, Artificial Sequence
  Antisense Oligo
caaccauucagagaaaacu

SEQ ID NO: 42773 - RNA, 19 nt, Artificial Sequence
  Sense Oligo
guuuucucugaaugguugu

SEQ ID NO: 42774 - RNA, 19 nt, Artificial Sequence
  Antisense Oligo
acaaccauucagagaaaac

SEQ ID NO: 42775 - RNA, 19 nt, Artificial Sequence
  Sense Oligo
uuuucucugaaugguugua

SEQ ID NO: 42776 - RNA, 19 nt, Artificial Sequence
  Antisense Oligo
uacaaccauucagagaaaa

SEQ ID NO: 42777 - RNA, 19 nt, Artificial Sequence
  Sense Oligo
uuucucugaaugguuguaa

SEQ ID NO: 42778 - RNA, 19 nt, Artificial Sequence
  Antisense Oligo
uuacaaccauucagagaaa

SEQ ID NO: 42779 - RNA, 19 nt, Artificial Sequence
  Sense Oligo
uucucugaaugguuguaau

SEQ ID NO: 42780 - RNA, 19 nt, Artificial Sequence
  Antisense Oligo
auuacaaccauucagagaa

SEQ ID NO: 42781 - RNA, 19 nt, Artificial Sequence
  Sense Oligo
ucucugaaugguuguaauu

SEQ ID NO: 42782 - RNA, 19 nt, Artificial Sequence
  Antisense Oligo
aauuacaaccauucagaga

SEQ ID NO: 42783 - RNA, 19 nt, Artificial Sequence
  Sense Oligo
cucugaaugguuguaauug

SEQ ID NO: 42784 - RNA, 19 nt, Artificial Sequence
  Antisense Oligo
caauuacaaccauucagag

SEQ ID NO: 42785 - RNA, 19 nt, Artificial Sequence
  Sense Oligo
ucugaaugguuguaauugu

SEQ ID NO: 42786 - RNA, 19 nt, Artificial Sequence
  Antisense Oligo
acaauuacaaccauucaga

SEQ ID NO: 42787 - RNA, 19 nt, Artificial Sequence
  Sense Oligo
cugaaugguuguaauuguc

SEQ ID NO: 42788 - RNA, 19 nt, Artificial Sequence
  Antisense Oligo
gacaauuacaaccauucag

SEQ ID NO: 42789 - RNA, 19 nt, Artificial Sequence
  Sense Oligo
ugaaugguuguaauuguca

SEQ ID NO: 42790 - RNA, 19 nt, Artificial Sequence
  Antisense Oligo
ugacaauuacaaccauuca

SEQ ID NO: 42791 - RNA, 19 nt, Artificial Sequence
  Sense Oligo
ggugugcgccuguaauccc

SEQ ID NO: 42792 - RNA, 19 nt, Artificial Sequence
  Antisense Oligo
gggauuacaggcgcacacc

SEQ ID NO: 42793 - RNA, 19 nt, Artificial Sequence
  Sense Oligo
gcgccuguaaucccagcua

SEQ ID NO: 42794 - RNA, 19 nt, Artificial Sequence
  Antisense Oligo
uagcugggauuacaggcgc

SEQ ID NO: 42795 - RNA, 19 nt, Artificial Sequence
  Sense Oligo
cgccuguaaucccagcuac

SEQ ID NO: 42796 - RNA, 19 nt, Artificial Sequence
  Antisense Oligo
guagcugggauuacaggcg

SEQ ID NO: 42797 - RNA, 19 nt, Artificial Sequence
  Sense Oligo
gccuguaaucccagcuacu

SEQ ID NO: 42798 - RNA, 19 nt, Artificial Sequence
  Antisense Oligo
aguagcugggauuacaggc

SEQ ID NO: 42799 - RNA, 19 nt, Artificial Sequence
  Sense Oligo
ccuguaaucccagcuacuc

SEQ ID NO: 42800 - RNA, 19 nt, Artificial Sequence
  Antisense Oligo
gaguagcugggauuacagg

SEQ ID NO: 42801 - RNA, 19 nt, Artificial Sequence
  Sense Oligo
cuguaaucccagcuacucu

SEQ ID NO: 42802 - RNA, 19 nt, Artificial Sequence
  Antisense Oligo
agaguagcugggauuacag

SEQ ID NO: 42803 - RNA, 19 nt, Artificial Sequence
  Sense Oligo
agaucacaccacuguacuc

SEQ ID NO: 42804 - RNA, 19 nt, Artificial Sequence
  Antisense Oligo
gaguacaguggugugaucu

SEQ ID NO: 42805 - RNA, 19 nt, Artificial Sequence
  Sense Oligo
gaucacaccacuguacucc

SEQ ID NO: 42806 - RNA, 19 nt, Artificial Sequence
  Antisense Oligo
ggaguacaguggugugauc

SEQ ID NO: 42807 - RNA, 19 nt, Artificial Sequence
  Sense Oligo
guagcagggucugaauuga

SEQ ID NO: 42808 - RNA, 19 nt, Artificial Sequence
  Antisense Oligo
ucaauucagacccugcuac

SEQ ID NO: 42809 - RNA, 19 nt, Artificial Sequence
  Sense Oligo
uagcagggucugaauugac

SEQ ID NO: 42810 - RNA, 19 nt, Artificial Sequence
  Antisense Oligo
gucaauucagacccugcua

SEQ ID NO: 42811 - RNA, 19 nt, Artificial Sequence
  Sense Oligo
agcagggucugaauugacg

SEQ ID NO: 42812 - RNA, 19 nt, Artificial Sequence
  Antisense Oligo
cgucaauucagacccugcu

SEQ ID NO: 42813 - RNA, 19 nt, Artificial Sequence
  Sense Oligo
gggucugaauugacguacg

SEQ ID NO: 42814 - RNA, 19 nt, Artificial Sequence
  Antisense Oligo
cguacgucaauucagaccc

SEQ ID NO: 42815 - RNA, 19 nt, Artificial Sequence
  Sense Oligo
ggucugaauugacguacgc

SEQ ID NO: 42816 - RNA, 19 nt, Artificial Sequence
  Antisense Oligo
gcguacgucaauucagacc

SEQ ID NO: 42817 - RNA, 19 nt, Artificial Sequence
  Sense Oligo
gucugaauugacguacgca

SEQ ID NO: 42818 - RNA, 19 nt, Artificial Sequence
  Antisense Oligo
ugcguacgucaauucagac

SEQ ID NO: 42819 - RNA, 19 nt, Artificial Sequence
  Sense Oligo
ucugaauugacguacgcag

SEQ ID NO: 42820 - RNA, 19 nt, Artificial Sequence
  Antisense Oligo
cugcguacgucaauucaga

SEQ ID NO: 42821 - RNA, 19 nt, Artificial Sequence
  Sense Oligo
cugaauugacguacgcagc

SEQ ID NO: 42822 - RNA, 19 nt, Artificial Sequence
  Antisense Oligo
gcugcguacgucaauucag

SEQ ID NO: 42823 - RNA, 19 nt, Artificial Sequence
  Sense Oligo
auugacguacgcagcuuaa

SEQ ID NO: 42824 - RNA, 19 nt, Artificial Sequence
  Antisense Oligo
uuaagcugcguacgucaau

SEQ ID NO: 42825 - RNA, 19 nt, Artificial Sequence
  Sense Oligo
uugacguacgcagcuuaac

SEQ ID NO: 42826 - RNA, 19 nt, Artificial Sequence
  Antisense Oligo
guuaagcugcguacgucaa

SEQ ID NO: 42827 - RNA, 19 nt, Artificial Sequence
  Sense Oligo
ugacguacgcagcuuaacu

SEQ ID NO: 42828 - RNA, 19 nt, Artificial Sequence
  Antisense Oligo
aguuaagcugcguacguca

SEQ ID NO: 42829 - RNA, 19 nt, Artificial Sequence
  Sense Oligo
gacguacgcagcuuaacua

SEQ ID NO: 42830 - RNA, 19 nt, Artificial Sequence
  Antisense Oligo
uaguuaagcugcguacguc

SEQ ID NO: 42831 - RNA, 19 nt, Artificial Sequence
  Sense Oligo
acguacgcagcuuaacuag

SEQ ID NO: 42832 - RNA, 19 nt, Artificial Sequence
  Antisense Oligo
cuaguuaagcugcguacgu

SEQ ID NO: 42833 - RNA, 19 nt, Artificial Sequence
  Sense Oligo
cguacgcagcuuaacuaga

SEQ ID NO: 42834 - RNA, 19 nt, Artificial Sequence
  Antisense Oligo
ucuaguuaagcugcguacg

SEQ ID NO: 42835 - RNA, 19 nt, Artificial Sequence
  Sense Oligo
guacgcagcuuaacuagau

SEQ ID NO: 42836 - RNA, 19 nt, Artificial Sequence
  Antisense Oligo
aucuaguuaagcugcguac

SEQ ID NO: 42837 - RNA, 19 nt, Artificial Sequence
  Sense Oligo
uacgcagcuuaacuagaua

SEQ ID NO: 42838 - RNA, 19 nt, Artificial Sequence
  Antisense Oligo
uaucuaguuaagcugcgua

SEQ ID NO: 42839 - RNA, 19 nt, Artificial Sequence
  Sense Oligo
acgcagcuuaacuagauac

SEQ ID NO: 42840 - RNA, 19 nt, Artificial Sequence
  Antisense Oligo
guaucuaguuaagcugcgu

SEQ ID NO: 42841 - RNA, 19 nt, Artificial Sequence
  Sense Oligo
cgcagcuuaacuagauacc

SEQ ID NO: 42842 - RNA, 19 nt, Artificial Sequence
  Antisense Oligo
gguaucuaguuaagcugcg

SEQ ID NO: 42843 - RNA, 19 nt, Artificial Sequence
  Sense Oligo
gcagcuuaacuagauaccu

SEQ ID NO: 42844 - RNA, 19 nt, Artificial Sequence
  Antisense Oligo
agguaucuaguuaagcugc

SEQ ID NO: 42845 - RNA, 19 nt, Artificial Sequence
  Sense Oligo
cagcuuaacuagauaccug

SEQ ID NO: 42846 - RNA, 19 nt, Artificial Sequence
  Antisense Oligo
cagguaucuaguuaagcug

SEQ ID NO: 42847 - RNA, 19 nt, Artificial Sequence
  Sense Oligo
agcuuaacuagauaccugg

SEQ ID NO: 42848 - RNA, 19 nt, Artificial Sequence
  Antisense Oligo
ccagguaucuaguuaagcu

SEQ ID NO: 42849 - RNA, 19 nt, Artificial Sequence
  Sense Oligo
gcuuaacuagauaccuggg

SEQ ID NO: 42850 - RNA, 19 nt, Artificial Sequence
  Antisense Oligo
cccagguaucuaguuaagc

SEQ ID NO: 42851 - RNA, 19 nt, Artificial Sequence
  Sense Oligo
cuuaacuagauaccugggc

SEQ ID NO: 42852 - RNA, 19 nt, Artificial Sequence
  Antisense Oligo
gcccagguaucuaguuaag

SEQ ID NO: 42853 - RNA, 19 nt, Artificial Sequence
  Sense Oligo
uuaacuagauaccugggcc

SEQ ID NO: 42854 - RNA, 19 nt, Artificial Sequence
  Antisense Oligo
ggcccagguaucuaguuaa

SEQ ID NO: 42855 - RNA, 19 nt, Artificial Sequence
  Sense Oligo
cauguggguggaggaagaa

SEQ ID NO: 42856 - RNA, 19 nt, Artificial Sequence
  Antisense Oligo
uucuuccuccacccacaug

SEQ ID NO: 42857 - RNA, 19 nt, Artificial Sequence
  Sense Oligo
uggaggaagaagugacaua

SEQ ID NO: 42858 - RNA, 19 nt, Artificial Sequence
  Antisense Oligo
uaugucacuucuuccucca

SEQ ID NO: 42859 - RNA, 19 nt, Artificial Sequence
  Sense Oligo
ggaggaagaagugacauau

SEQ ID NO: 42860 - RNA, 19 nt, Artificial Sequence
  Antisense Oligo
auaugucacuucuuccucc

SEQ ID NO: 42861 - RNA, 19 nt, Artificial Sequence
  Sense Oligo
aagaagugacauauggaag

SEQ ID NO: 42862 - RNA, 19 nt, Artificial Sequence
  Antisense Oligo
cuuccauaugucacuucuu

SEQ ID NO: 42863 - RNA, 19 nt, Artificial Sequence
  Sense Oligo
agaagugacauauggaagg

SEQ ID NO: 42864 - RNA, 19 nt, Artificial Sequence
  Antisense Oligo
ccuuccauaugucacuucu

SEQ ID NO: 42865 - RNA, 19 nt, Artificial Sequence
  Sense Oligo
gaagugacauauggaaggg

SEQ ID NO: 42866 - RNA, 19 nt, Artificial Sequence
  Antisense Oligo
cccuuccauaugucacuuc

SEQ ID NO: 42867 - RNA, 19 nt, Artificial Sequence
  Sense Oligo
aagugacauauggaagggc

SEQ ID NO: 42868 - RNA, 19 nt, Artificial Sequence
  Antisense Oligo
gcccuuccauaugucacuu

SEQ ID NO: 42869 - RNA, 19 nt, Artificial Sequence
  Sense Oligo
acauauggaagggcaggua

SEQ ID NO: 42870 - RNA, 19 nt, Artificial Sequence
  Antisense Oligo
uaccugcccuuccauaugu

SEQ ID NO: 42871 - RNA, 19 nt, Artificial Sequence
  Sense Oligo
cauauggaagggcagguaa

SEQ ID NO: 42872 - RNA, 19 nt, Artificial Sequence
  Antisense Oligo
uuaccugcccuuccauaug

SEQ ID NO: 42873 - RNA, 19 nt, Artificial Sequence
  Sense Oligo
auauggaagggcagguaaa

SEQ ID NO: 42874 - RNA, 19 nt, Artificial Sequence
  Antisense Oligo
uuuaccugcccuuccauau

SEQ ID NO: 42875 - RNA, 19 nt, Artificial Sequence
  Sense Oligo
uauggaagggcagguaaag

SEQ ID NO: 42876 - RNA, 19 nt, Artificial Sequence
  Antisense Oligo
cuuuaccugcccuuccaua

SEQ ID NO: 42877 - RNA, 19 nt, Artificial Sequence
  Sense Oligo
auggaagggcagguaaagc

SEQ ID NO: 42878 - RNA, 19 nt, Artificial Sequence
  Antisense Oligo
gcuuuaccugcccuuccau

SEQ ID NO: 42879 - RNA, 19 nt, Artificial Sequence
  Sense Oligo
aagggcagguaaagcuauc

SEQ ID NO: 42880 - RNA, 19 nt, Artificial Sequence
  Antisense Oligo
gauagcuuuaccugcccuu

SEQ ID NO: 42881 - RNA, 19 nt, Artificial Sequence
  Sense Oligo
agggcagguaaagcuaucu

SEQ ID NO: 42882 - RNA, 19 nt, Artificial Sequence
  Antisense Oligo
agauagcuuuaccugcccu

SEQ ID NO: 42883 - RNA, 19 nt, Artificial Sequence
  Sense Oligo
gggcagguaaagcuaucuu

SEQ ID NO: 42884 - RNA, 19 nt, Artificial Sequence
  Antisense Oligo
aagauagcuuuaccugccc

SEQ ID NO: 42885 - RNA, 19 nt, Artificial Sequence
  Sense Oligo
ggcagguaaagcuaucuuc

SEQ ID NO: 42886 - RNA, 19 nt, Artificial Sequence
  Antisense Oligo
gaagauagcuuuaccugcc

SEQ ID NO: 42887 - RNA, 19 nt, Artificial Sequence
  Sense Oligo
gguaaagcuaucuucauuu

SEQ ID NO: 42888 - RNA, 19 nt, Artificial Sequence
  Antisense Oligo
aaaugaagauagcuuuacc

SEQ ID NO: 42889 - RNA, 19 nt, Artificial Sequence
  Sense Oligo
cuucucuuauuguacuugg

SEQ ID NO: 42890 - RNA, 19 nt, Artificial Sequence
  Antisense Oligo
ccaaguacaauaagagaag

SEQ ID NO: 42891 - RNA, 19 nt, Artificial Sequence
  Sense Oligo
uucucuuauuguacuuggg

SEQ ID NO: 42892 - RNA, 19 nt, Artificial Sequence
  Antisense Oligo
cccaaguacaauaagagaa

SEQ ID NO: 42893 - RNA, 19 nt, Artificial Sequence
  Sense Oligo
gggaccacagaaggacacu

SEQ ID NO: 42894 - RNA, 19 nt, Artificial Sequence
  Antisense Oligo
aguguccuucugugguccc

SEQ ID NO: 42895 - RNA, 19 nt, Artificial Sequence
  Sense Oligo
ggaccacagaaggacacug

SEQ ID NO: 42896 - RNA, 19 nt, Artificial Sequence
  Antisense Oligo
caguguccuucuguggucc

SEQ ID NO: 42897 - RNA, 19 nt, Artificial Sequence
  Sense Oligo
accacagaaggacacugag

SEQ ID NO: 42898 - RNA, 19 nt, Artificial Sequence
  Antisense Oligo
cucaguguccuucuguggu

SEQ ID NO: 42899 - RNA, 19 nt, Artificial Sequence
  Sense Oligo
cacagaaggacacugagga

SEQ ID NO: 42900 - RNA, 19 nt, Artificial Sequence
  Antisense Oligo
uccucaguguccuucugug

SEQ ID NO: 42901 - RNA, 19 nt, Artificial Sequence
  Sense Oligo
acagaaggacacugaggac

SEQ ID NO: 42902 - RNA, 19 nt, Artificial Sequence
  Antisense Oligo
guccucaguguccuucugu

SEQ ID NO: 42903 - RNA, 19 nt, Artificial Sequence
  Sense Oligo
ggacacugaggacuuggga

SEQ ID NO: 42904 - RNA, 19 nt, Artificial Sequence
  Antisense Oligo
ucccaaguccucagugucc

SEQ ID NO: 42905 - RNA, 19 nt, Artificial Sequence
  Sense Oligo
gacacugaggacuugggac

SEQ ID NO: 42906 - RNA, 19 nt, Artificial Sequence
  Antisense Oligo
gucccaaguccucaguguc

SEQ ID NO: 42907 - RNA, 19 nt, Artificial Sequence
  Sense Oligo
acacugaggacuugggacu

SEQ ID NO: 42908 - RNA, 19 nt, Artificial Sequence
  Antisense Oligo
agucccaaguccucagugu

SEQ ID NO: 42909 - RNA, 19 nt, Artificial Sequence
  Sense Oligo
cacugaggacuugggacuc

SEQ ID NO: 42910 - RNA, 19 nt, Artificial Sequence
  Antisense Oligo
gagucccaaguccucagug

SEQ ID NO: 42911 - RNA, 19 nt, Artificial Sequence
  Sense Oligo
acugaggacuugggacucc

SEQ ID NO: 42912 - RNA, 19 nt, Artificial Sequence
  Antisense Oligo
ggagucccaaguccucagu

SEQ ID NO: 42913 - RNA, 19 nt, Artificial Sequence
  Sense Oligo
gggacuccacagccauugc

SEQ ID NO: 42914 - RNA, 19 nt, Artificial Sequence
  Antisense Oligo
gcaauggcuguggaguccc

SEQ ID NO: 42915 - RNA, 19 nt, Artificial Sequence
  Sense Oligo
gacuccacagccauugcuu

SEQ ID NO: 42916 - RNA, 19 nt, Artificial Sequence
  Antisense Oligo
aagcaauggcuguggaguc

SEQ ID NO: 42917 - RNA, 19 nt, Artificial Sequence
  Sense Oligo
acuccacagccauugcuuc

SEQ ID NO: 42918 - RNA, 19 nt, Artificial Sequence
  Antisense Oligo
gaagcaauggcuguggagu

SEQ ID NO: 42919 - RNA, 19 nt, Artificial Sequence
  Sense Oligo
cuccacagccauugcuucc

SEQ ID NO: 42920 - RNA, 19 nt, Artificial Sequence
  Antisense Oligo
ggaagcaauggcuguggag

SEQ ID NO: 42921 - RNA, 19 nt, Artificial Sequence
  Sense Oligo
uccacagccauugcuucca

SEQ ID NO: 42922 - RNA, 19 nt, Artificial Sequence
  Antisense Oligo
uggaagcaauggcugugga

SEQ ID NO: 42923 - RNA, 19 nt, Artificial Sequence
  Sense Oligo
ccacagccauugcuuccag

SEQ ID NO: 42924 - RNA, 19 nt, Artificial Sequence
  Antisense Oligo
cuggaagcaauggcugugg

SEQ ID NO: 42925 - RNA, 19 nt, Artificial Sequence
  Sense Oligo
cacagccauugcuuccagc

SEQ ID NO: 42926 - RNA, 19 nt, Artificial Sequence
  Antisense Oligo
gcuggaagcaauggcugug

SEQ ID NO: 42927 - RNA, 19 nt, Artificial Sequence
  Sense Oligo
acagccauugcuuccagcg

SEQ ID NO: 42928 - RNA, 19 nt, Artificial Sequence
  Antisense Oligo
cgcuggaagcaauggcugu

SEQ ID NO: 42929 - RNA, 19 nt, Artificial Sequence
  Sense Oligo
cagccauugcuuccagcgu

SEQ ID NO: 42930 - RNA, 19 nt, Artificial Sequence
  Antisense Oligo
acgcuggaagcaauggcug

SEQ ID NO: 42931 - RNA, 19 nt, Artificial Sequence
  Sense Oligo
agccauugcuuccagcguc

SEQ ID NO: 42932 - RNA, 19 nt, Artificial Sequence
  Antisense Oligo
gacgcuggaagcaauggcu

SEQ ID NO: 42933 - RNA, 19 nt, Artificial Sequence
  Sense Oligo
gccauugcuuccagcguca

SEQ ID NO: 42934 - RNA, 19 nt, Artificial Sequence
  Antisense Oligo
ugacgcuggaagcaauggc

SEQ ID NO: 42935 - RNA, 19 nt, Artificial Sequence
  Sense Oligo
ccauugcuuccagcgucac

SEQ ID NO: 42936 - RNA, 19 nt, Artificial Sequence
  Antisense Oligo
gugacgcuggaagcaaugg

SEQ ID NO: 42937 - RNA, 19 nt, Artificial Sequence
  Sense Oligo
cauugcuuccagcgucacc

SEQ ID NO: 42938 - RNA, 19 nt, Artificial Sequence
  Antisense Oligo
ggugacgcuggaagcaaug

SEQ ID NO: 42939 - RNA, 19 nt, Artificial Sequence
  Sense Oligo
auugcuuccagcgucaccc

SEQ ID NO: 42940 - RNA, 19 nt, Artificial Sequence
  Antisense Oligo
gggugacgcuggaagcaau

SEQ ID NO: 42941 - RNA, 19 nt, Artificial Sequence
  Sense Oligo
gaggguucucugcauuggg

SEQ ID NO: 42942 - RNA, 19 nt, Artificial Sequence
  Antisense Oligo
cccaaugcagagaacccuc

SEQ ID NO: 42943 - RNA, 19 nt, Artificial Sequence
  Sense Oligo
ggaccuggcagaaugaugg

SEQ ID NO: 42944 - RNA, 19 nt, Artificial Sequence
  Antisense Oligo
ccaucauucugccaggucc

SEQ ID NO: 42945 - RNA, 19 nt, Artificial Sequence
  Sense Oligo
gaccuggcagaaugauggc

SEQ ID NO: 42946 - RNA, 19 nt, Artificial Sequence
  Antisense Oligo
gccaucauucugccagguc

SEQ ID NO: 42947 - RNA, 19 nt, Artificial Sequence
  Sense Oligo
ccuggcagaaugauggcgu

SEQ ID NO: 42948 - RNA, 19 nt, Artificial Sequence
  Antisense Oligo
acgccaucauucugccagg

SEQ ID NO: 42949 - RNA, 19 nt, Artificial Sequence
  Sense Oligo
cuggcagaaugauggcguc

SEQ ID NO: 42950 - RNA, 19 nt, Artificial Sequence
  Antisense Oligo
gacgccaucauucugccag

SEQ ID NO: 42951 - RNA, 19 nt, Artificial Sequence
  Sense Oligo
uggcagaaugauggcgucu

SEQ ID NO: 42952 - RNA, 19 nt, Artificial Sequence
  Antisense Oligo
agacgccaucauucugcca

SEQ ID NO: 42953 - RNA, 19 nt, Artificial Sequence
  Sense Oligo
agaaugauggcgucuggua

SEQ ID NO: 42954 - RNA, 19 nt, Artificial Sequence
  Antisense Oligo
uaccagacgccaucauucu

SEQ ID NO: 42955 - RNA, 19 nt, Artificial Sequence
  Sense Oligo
gaaugauggcgucugguag

SEQ ID NO: 42956 - RNA, 19 nt, Artificial Sequence
  Antisense Oligo
cuaccagacgccaucauuc

SEQ ID NO: 42957 - RNA, 19 nt, Artificial Sequence
  Sense Oligo
aaugauggcgucugguaga

SEQ ID NO: 42958 - RNA, 19 nt, Artificial Sequence
  Antisense Oligo
ucuaccagacgccaucauu

SEQ ID NO: 42959 - RNA, 19 nt, Artificial Sequence
  Sense Oligo
augauggcgucugguagag

SEQ ID NO: 42960 - RNA, 19 nt, Artificial Sequence
  Antisense Oligo
cucuaccagacgccaucau

SEQ ID NO: 42961 - RNA, 19 nt, Artificial Sequence
  Sense Oligo
cuccacuccuccacagaug

SEQ ID NO: 42962 - RNA, 19 nt, Artificial Sequence
  Antisense Oligo
caucuguggaggaguggag

SEQ ID NO: 42963 - RNA, 19 nt, Artificial Sequence
  Sense Oligo
uccacuccuccacagaugu

SEQ ID NO: 42964 - RNA, 19 nt, Artificial Sequence
  Antisense Oligo
acaucuguggaggagugga

SEQ ID NO: 42965 - RNA, 19 nt, Artificial Sequence
  Sense Oligo
ccacuccuccacagaugua

SEQ ID NO: 42966 - RNA, 19 nt, Artificial Sequence
  Antisense Oligo
uacaucuguggaggagugg

SEQ ID NO: 42967 - RNA, 19 nt, Artificial Sequence
  Sense Oligo
acuccuccacagauguaag

SEQ ID NO: 42968 - RNA, 19 nt, Artificial Sequence
  Antisense Oligo
cuuacaucuguggaggagu

SEQ ID NO: 42969 - RNA, 19 nt, Artificial Sequence
  Sense Oligo
cuccuccacagauguaagu

SEQ ID NO: 42970 - RNA, 19 nt, Artificial Sequence
  Antisense Oligo
acuuacaucuguggaggag

SEQ ID NO: 42971 - RNA, 19 nt, Artificial Sequence
  Sense Oligo
gcagcacugagugacagau

SEQ ID NO: 42972 - RNA, 19 nt, Artificial Sequence
  Antisense Oligo
aucugucacucagugcugc

SEQ ID NO: 42973 - RNA, 19 nt, Artificial Sequence
  Sense Oligo
cagcacugagugacagauc

SEQ ID NO: 42974 - RNA, 19 nt, Artificial Sequence
  Antisense Oligo
gaucugucacucagugcug

SEQ ID NO: 42975 - RNA, 19 nt, Artificial Sequence
  Sense Oligo
gcacugagugacagaucau

SEQ ID NO: 42976 - RNA, 19 nt, Artificial Sequence
  Antisense Oligo
augaucugucacucagugc

SEQ ID NO: 42977 - RNA, 19 nt, Artificial Sequence
  Sense Oligo
cacugagugacagaucaug

SEQ ID NO: 42978 - RNA, 19 nt, Artificial Sequence
  Antisense Oligo
caugaucugucacucagug

SEQ ID NO: 42979 - RNA, 19 nt, Artificial Sequence
  Sense Oligo
acugagugacagaucaugu

SEQ ID NO: 42980 - RNA, 19 nt, Artificial Sequence
  Antisense Oligo
acaugaucugucacucagu

SEQ ID NO: 42981 - RNA, 19 nt, Artificial Sequence
  Sense Oligo
cugagugacagaucauguu

SEQ ID NO: 42982 - RNA, 19 nt, Artificial Sequence
  Antisense Oligo
aacaugaucugucacucag

SEQ ID NO: 42983 - RNA, 19 nt, Artificial Sequence
  Sense Oligo
ugagugacagaucauguug

SEQ ID NO: 42984 - RNA, 19 nt, Artificial Sequence
  Antisense Oligo
caacaugaucugucacuca

SEQ ID NO: 42985 - RNA, 19 nt, Artificial Sequence
  Sense Oligo
gagugacagaucauguugu

SEQ ID NO: 42986 - RNA, 19 nt, Artificial Sequence
  Antisense Oligo
acaacaugaucugucacuc

SEQ ID NO: 42987 - RNA, 19 nt, Artificial Sequence
  Sense Oligo
ucauguugucaggguggca

SEQ ID NO: 42988 - RNA, 19 nt, Artificial Sequence
  Antisense Oligo
ugccacccugacaacauga

SEQ ID NO: 42989 - RNA, 19 nt, Artificial Sequence
  Sense Oligo
cauguugucaggguggcac

SEQ ID NO: 42990 - RNA, 19 nt, Artificial Sequence
  Antisense Oligo
gugccacccugacaacaug

SEQ ID NO: 42991 - RNA, 19 nt, Artificial Sequence
  Sense Oligo
auguugucaggguggcacc

SEQ ID NO: 42992 - RNA, 19 nt, Artificial Sequence
  Antisense Oligo
ggugccacccugacaacau

SEQ ID NO: 42993 - RNA, 19 nt, Artificial Sequence
  Sense Oligo
uguugucaggguggcaccu

SEQ ID NO: 42994 - RNA, 19 nt, Artificial Sequence
  Antisense Oligo
aggugccacccugacaaca

SEQ ID NO: 42995 - RNA, 19 nt, Artificial Sequence
  Sense Oligo
agggcaagauccucgcucc

SEQ ID NO: 42996 - RNA, 19 nt, Artificial Sequence
  Antisense Oligo
ggagcgaggaucuugcccu

SEQ ID NO: 42997 - RNA, 19 nt, Artificial Sequence
  Sense Oligo
gggcaagauccucgcucca

SEQ ID NO: 42998 - RNA, 19 nt, Artificial Sequence
  Antisense Oligo
uggagcgaggaucuugccc

SEQ ID NO: 42999 - RNA, 19 nt, Artificial Sequence
  Sense Oligo
ggcaagauccucgcuccaa

SEQ ID NO: 43000 - RNA, 19 nt, Artificial Sequence
  Antisense Oligo
uuggagcgaggaucuugcc

SEQ ID NO: 43001 - RNA, 19 nt, Artificial Sequence
  Sense Oligo
gcaagauccucgcuccaac

SEQ ID NO: 43002 - RNA, 19 nt, Artificial Sequence
  Antisense Oligo
guuggagcgaggaucuugc

SEQ ID NO: 43003 - RNA, 19 nt, Artificial Sequence
  Sense Oligo
gauccucgcuccaaccgug

SEQ ID NO: 43004 - RNA, 19 nt, Artificial Sequence
  Antisense Oligo
cacgguuggagcgaggauc

SEQ ID NO: 43005 - RNA, 19 nt, Artificial Sequence
  Sense Oligo
auccucgcuccaaccgugg

SEQ ID NO: 43006 - RNA, 19 nt, Artificial Sequence
  Antisense Oligo
ccacgguuggagcgaggau

SEQ ID NO: 43007 - RNA, 19 nt, Artificial Sequence
  Sense Oligo
guguucucuccuuuugucc

SEQ ID NO: 43008 - RNA, 19 nt, Artificial Sequence
  Antisense Oligo
ggacaaaaggagagaacac

SEQ ID NO: 43009 - RNA, 19 nt, Artificial Sequence
  Sense Oligo
uguucucuccuuuuguccc

SEQ ID NO: 43010 - RNA, 19 nt, Artificial Sequence
  Antisense Oligo
gggacaaaaggagagaaca

SEQ ID NO: 43011 - RNA, 19 nt, Artificial Sequence
  Sense Oligo
aacuuggaauggcugaaga

SEQ ID NO: 43012 - RNA, 19 nt, Artificial Sequence
  Antisense Oligo
ucuucagccauuccaaguu

SEQ ID NO: 43013 - RNA, 19 nt, Artificial Sequence
  Sense Oligo
acuuggaauggcugaagac

SEQ ID NO: 43014 - RNA, 19 nt, Artificial Sequence
  Antisense Oligo
gucuucagccauuccaagu

SEQ ID NO: 43015 - RNA, 19 nt, Artificial Sequence
  Sense Oligo
cuuggaauggcugaagacu

SEQ ID NO: 43016 - RNA, 19 nt, Artificial Sequence
  Antisense Oligo
agucuucagccauuccaag

SEQ ID NO: 43017 - RNA, 19 nt, Artificial Sequence
  Sense Oligo
uggcugaagacugugaaug

SEQ ID NO: 43018 - RNA, 19 nt, Artificial Sequence
  Antisense Oligo
cauucacagucuucagcca

SEQ ID NO: 43019 - RNA, 19 nt, Artificial Sequence
  Sense Oligo
agagucaugggucugugga

SEQ ID NO: 43020 - RNA, 19 nt, Artificial Sequence
  Antisense Oligo
uccacagacccaugacucu

SEQ ID NO: 43021 - RNA, 19 nt, Artificial Sequence
  Sense Oligo
gagucaugggucuguggaa

SEQ ID NO: 43022 - RNA, 19 nt, Artificial Sequence
  Antisense Oligo
uuccacagacccaugacuc

SEQ ID NO: 43023 - RNA, 19 nt, Artificial Sequence
  Sense Oligo
acgcucaucccugacccug

SEQ ID NO: 43024 - RNA, 19 nt, Artificial Sequence
  Antisense Oligo
cagggucagggaugagcgu

SEQ ID NO: 43025 - RNA, 19 nt, Artificial Sequence
  Sense Oligo
ucaucccugacccuggcca

SEQ ID NO: 43026 - RNA, 19 nt, Artificial Sequence
  Antisense Oligo
uggccagggucagggauga

SEQ ID NO: 43027 - RNA, 19 nt, Artificial Sequence
  Sense Oligo
gccacggccaucaaccaaa

SEQ ID NO: 43028 - RNA, 19 nt, Artificial Sequence
  Antisense Oligo
uuugguugauggccguggc

SEQ ID NO: 43029 - RNA, 19 nt, Artificial Sequence
  Sense Oligo
gccaucaaccaaagaggca

SEQ ID NO: 43030 - RNA, 19 nt, Artificial Sequence
  Antisense Oligo
ugccucuuugguugauggc

SEQ ID NO: 43031 - RNA, 19 nt, Artificial Sequence
  Sense Oligo
ucaaccaaagaggcaucua

SEQ ID NO: 43032 - RNA, 19 nt, Artificial Sequence
  Antisense Oligo
uagaugccucuuugguuga

SEQ ID NO: 43033 - RNA, 19 nt, Artificial Sequence
  Sense Oligo
caaccaaagaggcaucuau

SEQ ID NO: 43034 - RNA, 19 nt, Artificial Sequence
  Antisense Oligo
auagaugccucuuugguug

SEQ ID NO: 43035 - RNA, 19 nt, Artificial Sequence
  Sense Oligo
aaccaaagaggcaucuaug

SEQ ID NO: 43036 - RNA, 19 nt, Artificial Sequence
  Antisense Oligo
cauagaugccucuuugguu

SEQ ID NO: 43037 - RNA, 19 nt, Artificial Sequence
  Sense Oligo
agaggcaucuaugugaucc

SEQ ID NO: 43038 - RNA, 19 nt, Artificial Sequence
  Antisense Oligo
ggaucacauagaugccucu

SEQ ID NO: 43039 - RNA, 19 nt, Artificial Sequence
  Sense Oligo
gaggcaucuaugugaucca

SEQ ID NO: 43040 - RNA, 19 nt, Artificial Sequence
  Antisense Oligo
uggaucacauagaugccuc

SEQ ID NO: 43041 - RNA, 19 nt, Artificial Sequence
  Sense Oligo
aggcaucuaugugauccag

SEQ ID NO: 43042 - RNA, 19 nt, Artificial Sequence
  Antisense Oligo
cuggaucacauagaugccu

SEQ ID NO: 43043 - RNA, 19 nt, Artificial Sequence
  Sense Oligo
ggcaucuaugugauccagg

SEQ ID NO: 43044 - RNA, 19 nt, Artificial Sequence
  Antisense Oligo
ccuggaucacauagaugcc

SEQ ID NO: 43045 - RNA, 19 nt, Artificial Sequence
  Sense Oligo
gcaucuaugugauccaggc

SEQ ID NO: 43046 - RNA, 19 nt, Artificial Sequence
  Antisense Oligo
gccuggaucacauagaugc

SEQ ID NO: 43047 - RNA, 19 nt, Artificial Sequence
  Sense Oligo
cccaaagguggccaaaagg

SEQ ID NO: 43048 - RNA, 19 nt, Artificial Sequence
  Antisense Oligo
ccuuuuggccaccuuuggg

SEQ ID NO: 43049 - RNA, 19 nt, Artificial Sequence
  Sense Oligo
caaagguggccaaaaggug

SEQ ID NO: 43050 - RNA, 19 nt, Artificial Sequence
  Antisense Oligo
caccuuuuggccaccuuug

SEQ ID NO: 43051 - RNA, 19 nt, Artificial Sequence
  Sense Oligo
aaagguggccaaaagguga

SEQ ID NO: 43052 - RNA, 19 nt, Artificial Sequence
  Antisense Oligo
ucaccuuuuggccaccuuu

SEQ ID NO: 43053 - RNA, 19 nt, Artificial Sequence
  Sense Oligo
aagguggccaaaaggugag

SEQ ID NO: 43054 - RNA, 19 nt, Artificial Sequence
  Antisense Oligo
cucaccuuuuggccaccuu

SEQ ID NO: 43055 - RNA, 19 nt, Artificial Sequence
  Sense Oligo
agguggccaaaaggugagc

SEQ ID NO: 43056 - RNA, 19 nt, Artificial Sequence
  Antisense Oligo
gcucaccuuuuggccaccu

SEQ ID NO: 43057 - RNA, 19 nt, Artificial Sequence
  Sense Oligo
gguggccaaaaggugagcg

SEQ ID NO: 43058 - RNA, 19 nt, Artificial Sequence
  Antisense Oligo
cgcucaccuuuuggccacc

SEQ ID NO: 43059 - RNA, 19 nt, Artificial Sequence
  Sense Oligo
guggccaaaaggugagcgg

SEQ ID NO: 43060 - RNA, 19 nt, Artificial Sequence
  Antisense Oligo
ccgcucaccuuuuggccac

SEQ ID NO: 43061 - RNA, 19 nt, Artificial Sequence
  Sense Oligo
uggccaaaaggugagcggu

SEQ ID NO: 43062 - RNA, 19 nt, Artificial Sequence
  Antisense Oligo
accgcucaccuuuuggcca

SEQ ID NO: 43063 - RNA, 19 nt, Artificial Sequence
  Sense Oligo
ggccaaaaggugagcgguc

SEQ ID NO: 43064 - RNA, 19 nt, Artificial Sequence
  Antisense Oligo
gaccgcucaccuuuuggcc

SEQ ID NO: 43065 - RNA, 19 nt, Artificial Sequence
  Sense Oligo
gccaaaaggugagcggucc

SEQ ID NO: 43066 - RNA, 19 nt, Artificial Sequence
  Antisense Oligo
ggaccgcucaccuuuuggc

SEQ ID NO: 43067 - RNA, 19 nt, Artificial Sequence
  Sense Oligo
ccaaaaggugagcgguccc

SEQ ID NO: 43068 - RNA, 19 nt, Artificial Sequence
  Antisense Oligo
gggaccgcucaccuuuugg

SEQ ID NO: 43069 - RNA, 19 nt, Artificial Sequence
  Sense Oligo
cugcugccaguccaggucu

SEQ ID NO: 43070 - RNA, 19 nt, Artificial Sequence
  Antisense Oligo
agaccuggacuggcagcag

SEQ ID NO: 43071 - RNA, 19 nt, Artificial Sequence
  Sense Oligo
ugcugccaguccaggucuu

SEQ ID NO: 43072 - RNA, 19 nt, Artificial Sequence
  Antisense Oligo
aagaccuggacuggcagca

SEQ ID NO: 43073 - RNA, 19 nt, Artificial Sequence
  Sense Oligo
gcugccaguccaggucuuc

SEQ ID NO: 43074 - RNA, 19 nt, Artificial Sequence
  Antisense Oligo
gaagaccuggacuggcagc

SEQ ID NO: 43075 - RNA, 19 nt, Artificial Sequence
  Sense Oligo
cugccaguccaggucuucu

SEQ ID NO: 43076 - RNA, 19 nt, Artificial Sequence
  Antisense Oligo
agaagaccuggacuggcag

SEQ ID NO: 43077 - RNA, 19 nt, Artificial Sequence
  Sense Oligo
ugccaguccaggucuucug

SEQ ID NO: 43078 - RNA, 19 nt, Artificial Sequence
  Antisense Oligo
cagaagaccuggacuggca

SEQ ID NO: 43079 - RNA, 19 nt, Artificial Sequence
  Sense Oligo
aagugacuucuaaccuaug

SEQ ID NO: 43080 - RNA, 19 nt, Artificial Sequence
  Antisense Oligo
cauagguuagaagucacuu

SEQ ID NO: 43081 - RNA, 19 nt, Artificial Sequence
  Sense Oligo
agugacuucuaaccuaugc

SEQ ID NO: 43082 - RNA, 19 nt, Artificial Sequence
  Antisense Oligo
gcauagguuagaagucacu

SEQ ID NO: 43083 - RNA, 19 nt, Artificial Sequence
  Sense Oligo
gugacuucuaaccuaugcu

SEQ ID NO: 43084 - RNA, 19 nt, Artificial Sequence
  Antisense Oligo
agcauagguuagaagucac

SEQ ID NO: 43085 - RNA, 19 nt, Artificial Sequence
  Sense Oligo
ugacuucuaaccuaugcuc

SEQ ID NO: 43086 - RNA, 19 nt, Artificial Sequence
  Antisense Oligo
gagcauagguuagaaguca

SEQ ID NO: 43087 - RNA, 19 nt, Artificial Sequence
  Sense Oligo
gacuucuaaccuaugcucu

SEQ ID NO: 43088 - RNA, 19 nt, Artificial Sequence
  Antisense Oligo
agagcauagguuagaaguc

SEQ ID NO: 43089 - RNA, 19 nt, Artificial Sequence
  Sense Oligo
acuucuaaccuaugcucuu

SEQ ID NO: 43090 - RNA, 19 nt, Artificial Sequence
  Antisense Oligo
aagagcauagguuagaagu

SEQ ID NO: 43091 - RNA, 19 nt, Artificial Sequence
  Sense Oligo
cuucuaaccuaugcucuuc

SEQ ID NO: 43092 - RNA, 19 nt, Artificial Sequence
  Antisense Oligo
gaagagcauagguuagaag

SEQ ID NO: 43093 - RNA, 19 nt, Artificial Sequence
  Sense Oligo
uaaccuaugcucuucacag

SEQ ID NO: 43094 - RNA, 19 nt, Artificial Sequence
  Antisense Oligo
cugugaagagcauagguua

SEQ ID NO: 43095 - RNA, 19 nt, Artificial Sequence
  Sense Oligo
aaccuaugcucuucacaga

SEQ ID NO: 43096 - RNA, 19 nt, Artificial Sequence
  Antisense Oligo
ucugugaagagcauagguu

SEQ ID NO: 43097 - RNA, 19 nt, Artificial Sequence
  Sense Oligo
accuaugcucuucacagau

SEQ ID NO: 43098 - RNA, 19 nt, Artificial Sequence
  Antisense Oligo
aucugugaagagcauaggu

SEQ ID NO: 43099 - RNA, 19 nt, Artificial Sequence
  Sense Oligo
ccuaugcucuucacagauu

SEQ ID NO: 43100 - RNA, 19 nt, Artificial Sequence
  Antisense Oligo
aaucugugaagagcauagg

SEQ ID NO: 43101 - RNA, 19 nt, Artificial Sequence
  Sense Oligo
uaugcucuucacagauuuc

SEQ ID NO: 43102 - RNA, 19 nt, Artificial Sequence
  Antisense Oligo
gaaaucugugaagagcaua

SEQ ID NO: 43103 - RNA, 19 nt, Artificial Sequence
  Sense Oligo
augcucuucacagauuucc

SEQ ID NO: 43104 - RNA, 19 nt, Artificial Sequence
  Antisense Oligo
ggaaaucugugaagagcau

SEQ ID NO: 43105 - RNA, 19 nt, Artificial Sequence
  Sense Oligo
guucugcacuugauccuuc

SEQ ID NO: 43106 - RNA, 19 nt, Artificial Sequence
  Antisense Oligo
gaaggaucaagugcagaac

SEQ ID NO: 43107 - RNA, 19 nt, Artificial Sequence
  Sense Oligo
uucugcacuugauccuucc

SEQ ID NO: 43108 - RNA, 19 nt, Artificial Sequence
  Antisense Oligo
ggaaggaucaagugcagaa

SEQ ID NO: 43109 - RNA, 19 nt, Artificial Sequence
  Sense Oligo
uggcagccacgaggaguca

SEQ ID NO: 43110 - RNA, 19 nt, Artificial Sequence
  Antisense Oligo
ugacuccucguggcugcca

SEQ ID NO: 43111 - RNA, 19 nt, Artificial Sequence
  Sense Oligo
agccacgaggagucacgag

SEQ ID NO: 43112 - RNA, 19 nt, Artificial Sequence
  Antisense Oligo
cucgugacuccucguggcu

SEQ ID NO: 43113 - RNA, 19 nt, Artificial Sequence
  Sense Oligo
agaguacucuuuagaggag

SEQ ID NO: 43114 - RNA, 19 nt, Artificial Sequence
  Antisense Oligo
cuccucuaaagaguacucu

SEQ ID NO: 43115 - RNA, 19 nt, Artificial Sequence
  Sense Oligo
gaguacucuuuagaggagg

SEQ ID NO: 43116 - RNA, 19 nt, Artificial Sequence
  Antisense Oligo
ccuccucuaaagaguacuc

SEQ ID NO: 43117 - RNA, 19 nt, Artificial Sequence
  Sense Oligo
aguacucuuuagaggaggu

SEQ ID NO: 43118 - RNA, 19 nt, Artificial Sequence
  Antisense Oligo
accuccucuaaagaguacu

SEQ ID NO: 43119 - RNA, 19 nt, Artificial Sequence
  Sense Oligo
guacucuuuagaggaggug

SEQ ID NO: 43120 - RNA, 19 nt, Artificial Sequence
  Antisense Oligo
caccuccucuaaagaguac

SEQ ID NO: 43121 - RNA, 19 nt, Artificial Sequence
  Sense Oligo
uacucuuuagaggagguga

SEQ ID NO: 43122 - RNA, 19 nt, Artificial Sequence
  Antisense Oligo
ucaccuccucuaaagagua

SEQ ID NO: 43123 - RNA, 19 nt, Artificial Sequence
  Sense Oligo
acucuuuagaggaggugaa

SEQ ID NO: 43124 - RNA, 19 nt, Artificial Sequence
  Antisense Oligo
uucaccuccucuaaagagu

SEQ ID NO: 43125 - RNA, 19 nt, Artificial Sequence
  Sense Oligo
uuagaggaggugaaggagc

SEQ ID NO: 43126 - RNA, 19 nt, Artificial Sequence
  Antisense Oligo
gcuccuucaccuccucuaa

SEQ ID NO: 43127 - RNA, 19 nt, Artificial Sequence
  Sense Oligo
uagaggaggugaaggagcu

SEQ ID NO: 43128 - RNA, 19 nt, Artificial Sequence
  Antisense Oligo
agcuccuucaccuccucua

SEQ ID NO: 43129 - RNA, 19 nt, Artificial Sequence
  Sense Oligo
gaggugaaggagcuuuuga

SEQ ID NO: 43130 - RNA, 19 nt, Artificial Sequence
  Antisense Oligo
ucaaaagcuccuucaccuc

SEQ ID NO: 43131 - RNA, 19 nt, Artificial Sequence
  Sense Oligo
aggugaaggagcuuuugaa

SEQ ID NO: 43132 - RNA, 19 nt, Artificial Sequence
  Antisense Oligo
uucaaaagcuccuucaccu

SEQ ID NO: 43133 - RNA, 19 nt, Artificial Sequence
  Sense Oligo
caaguugaugcugaugucu

SEQ ID NO: 43134 - RNA, 19 nt, Artificial Sequence
  Antisense Oligo
agacaucagcaucaacuug

SEQ ID NO: 43135 - RNA, 19 nt, Artificial Sequence
  Sense Oligo
aguugaugcugaugucugg

SEQ ID NO: 43136 - RNA, 19 nt, Artificial Sequence
  Antisense Oligo
ccagacaucagcaucaacu

SEQ ID NO: 43137 - RNA, 19 nt, Artificial Sequence
  Sense Oligo
guugaugcugaugucuggc

SEQ ID NO: 43138 - RNA, 19 nt, Artificial Sequence
  Antisense Oligo
gccagacaucagcaucaac

SEQ ID NO: 43139 - RNA, 19 nt, Artificial Sequence
  Sense Oligo
uugaugcugaugucuggca

SEQ ID NO: 43140 - RNA, 19 nt, Artificial Sequence
  Antisense Oligo
ugccagacaucagcaucaa

SEQ ID NO: 43141 - RNA, 19 nt, Artificial Sequence
  Sense Oligo
ugaugcugaugucuggcaa

SEQ ID NO: 43142 - RNA, 19 nt, Artificial Sequence
  Antisense Oligo
uugccagacaucagcauca

SEQ ID NO: 43143 - RNA, 19 nt, Artificial Sequence
  Sense Oligo
gaugcugaugucuggcaag

SEQ ID NO: 43144 - RNA, 19 nt, Artificial Sequence
  Antisense Oligo
cuugccagacaucagcauc

SEQ ID NO: 43145 - RNA, 19 nt, Artificial Sequence
  Sense Oligo
augcugaugucuggcaaga

SEQ ID NO: 43146 - RNA, 19 nt, Artificial Sequence
  Antisense Oligo
ucuugccagacaucagcau

SEQ ID NO: 43147 - RNA, 19 nt, Artificial Sequence
  Sense Oligo
ugcugaugucuggcaagaa

SEQ ID NO: 43148 - RNA, 19 nt, Artificial Sequence
  Antisense Oligo
uucuugccagacaucagca

SEQ ID NO: 43149 - RNA, 19 nt, Artificial Sequence
  Sense Oligo
gcugaugucuggcaagaag

SEQ ID NO: 43150 - RNA, 19 nt, Artificial Sequence
  Antisense Oligo
cuucuugccagacaucagc

SEQ ID NO: 43151 - RNA, 19 nt, Artificial Sequence
  Sense Oligo
gucuggcaagaaggaucgu

SEQ ID NO: 43152 - RNA, 19 nt, Artificial Sequence
  Antisense Oligo
acgauccuucuugccagac

SEQ ID NO: 43153 - RNA, 19 nt, Artificial Sequence
  Sense Oligo
ucuggcaagaaggaucgua

SEQ ID NO: 43154 - RNA, 19 nt, Artificial Sequence
  Antisense Oligo
uacgauccuucuugccaga

SEQ ID NO: 43155 - RNA, 19 nt, Artificial Sequence
  Sense Oligo
cuggcaagaaggaucguaa

SEQ ID NO: 43156 - RNA, 19 nt, Artificial Sequence
  Antisense Oligo
uuacgauccuucuugccag

SEQ ID NO: 43157 - RNA, 19 nt, Artificial Sequence
  Sense Oligo
uggcaagaaggaucguaac

SEQ ID NO: 43158 - RNA, 19 nt, Artificial Sequence
  Antisense Oligo
guuacgauccuucuugcca

SEQ ID NO: 43159 - RNA, 19 nt, Artificial Sequence
  Sense Oligo
agagguuuucagaggugag

SEQ ID NO: 43160 - RNA, 19 nt, Artificial Sequence
  Antisense Oligo
cucaccucugaaaaccucu

SEQ ID NO: 43161 - RNA, 19 nt, Artificial Sequence
  Sense Oligo
gagguuuucagaggugagg

SEQ ID NO: 43162 - RNA, 19 nt, Artificial Sequence
  Antisense Oligo
ccucaccucugaaaaccuc

SEQ ID NO: 43163 - RNA, 19 nt, Artificial Sequence
  Sense Oligo
agguuuucagaggugaggg

SEQ ID NO: 43164 - RNA, 19 nt, Artificial Sequence
  Antisense Oligo
cccucaccucugaaaaccu

SEQ ID NO: 43165 - RNA, 19 nt, Artificial Sequence
  Sense Oligo
gguuuucagaggugagggc

SEQ ID NO: 43166 - RNA, 19 nt, Artificial Sequence
  Antisense Oligo
gcccucaccucugaaaacc

SEQ ID NO: 43167 - RNA, 19 nt, Artificial Sequence
  Sense Oligo
gcaucuuugcaguggcgcu

SEQ ID NO: 43168 - RNA, 19 nt, Artificial Sequence
  Antisense Oligo
agcgccacugcaaagaugc

SEQ ID NO: 43169 - RNA, 19 nt, Artificial Sequence
  Sense Oligo
caucuuugcaguggcgcua

SEQ ID NO: 43170 - RNA, 19 nt, Artificial Sequence
  Antisense Oligo
uagcgccacugcaaagaug

SEQ ID NO: 43171 - RNA, 19 nt, Artificial Sequence
  Sense Oligo
aucuuugcaguggcgcuaa

SEQ ID NO: 43172 - RNA, 19 nt, Artificial Sequence
  Antisense Oligo
uuagcgccacugcaaagau

SEQ ID NO: 43173 - RNA, 19 nt, Artificial Sequence
  Sense Oligo
ucuuugcaguggcgcuaag

SEQ ID NO: 43174 - RNA, 19 nt, Artificial Sequence
  Antisense Oligo
cuuagcgccacugcaaaga

SEQ ID NO: 43175 - RNA, 19 nt, Artificial Sequence
  Sense Oligo
cuuugcaguggcgcuaagc

SEQ ID NO: 43176 - RNA, 19 nt, Artificial Sequence
  Antisense Oligo
gcuuagcgccacugcaaag

SEQ ID NO: 43177 - RNA, 19 nt, Artificial Sequence
  Sense Oligo
gcaguggcgcuaagcuggu

SEQ ID NO: 43178 - RNA, 19 nt, Artificial Sequence
  Antisense Oligo
accagcuuagcgccacugc

SEQ ID NO: 43179 - RNA, 19 nt, Artificial Sequence
  Sense Oligo
caguggcgcuaagcuggug

SEQ ID NO: 43180 - RNA, 19 nt, Artificial Sequence
  Antisense Oligo
caccagcuuagcgccacug

SEQ ID NO: 43181 - RNA, 19 nt, Artificial Sequence
  Sense Oligo
aguggcgcuaagcuggugg

SEQ ID NO: 43182 - RNA, 19 nt, Artificial Sequence
  Antisense Oligo
ccaccagcuuagcgccacu

SEQ ID NO: 43183 - RNA, 19 nt, Artificial Sequence
  Sense Oligo
guggcgcuaagcugguggu

SEQ ID NO: 43184 - RNA, 19 nt, Artificial Sequence
  Antisense Oligo
accaccagcuuagcgccac

SEQ ID NO: 43185 - RNA, 19 nt, Artificial Sequence
  Sense Oligo
uggcgcuaagcugguggug

SEQ ID NO: 43186 - RNA, 19 nt, Artificial Sequence
  Antisense Oligo
caccaccagcuuagcgcca

SEQ ID NO: 43187 - RNA, 19 nt, Artificial Sequence
  Sense Oligo
ggcgcuaagcugguggugu

SEQ ID NO: 43188 - RNA, 19 nt, Artificial Sequence
  Antisense Oligo
acaccaccagcuuagcgcc

SEQ ID NO: 43189 - RNA, 19 nt, Artificial Sequence
  Sense Oligo
gcgcuaagcuggugguguc

SEQ ID NO: 43190 - RNA, 19 nt, Artificial Sequence
  Antisense Oligo
gacaccaccagcuuagcgc

SEQ ID NO: 43191 - RNA, 19 nt, Artificial Sequence
  Sense Oligo
cgcuaagcuggugguguca

SEQ ID NO: 43192 - RNA, 19 nt, Artificial Sequence
  Antisense Oligo
ugacaccaccagcuuagcg

SEQ ID NO: 43193 - RNA, 19 nt, Artificial Sequence
  Sense Oligo
uccgugagggcuguguacu

SEQ ID NO: 43194 - RNA, 19 nt, Artificial Sequence
  Antisense Oligo
aguacacagcccucacgga

SEQ ID NO: 43195 - RNA, 19 nt, Artificial Sequence
  Sense Oligo
ccgugagggcuguguacuc

SEQ ID NO: 43196 - RNA, 19 nt, Artificial Sequence
  Antisense Oligo
gaguacacagcccucacgg

SEQ ID NO: 43197 - RNA, 19 nt, Artificial Sequence
  Sense Oligo
cgugagggcuguguacucc

SEQ ID NO: 43198 - RNA, 19 nt, Artificial Sequence
  Antisense Oligo
ggaguacacagcccucacg

SEQ ID NO: 43199 - RNA, 19 nt, Artificial Sequence
  Sense Oligo
gugagggcuguguacuccc

SEQ ID NO: 43200 - RNA, 19 nt, Artificial Sequence
  Antisense Oligo
gggaguacacagcccucac

SEQ ID NO: 43201 - RNA, 19 nt, Artificial Sequence
  Sense Oligo
gggcuguguacucccaaga

SEQ ID NO: 43202 - RNA, 19 nt, Artificial Sequence
  Antisense Oligo
ucuugggaguacacagccc

SEQ ID NO: 43203 - RNA, 19 nt, Artificial Sequence
  Sense Oligo
ggcuguguacucccaagaa

SEQ ID NO: 43204 - RNA, 19 nt, Artificial Sequence
  Antisense Oligo
uucuugggaguacacagcc

SEQ ID NO: 43205 - RNA, 19 nt, Artificial Sequence
  Sense Oligo
aaaggauuugacuugggau

SEQ ID NO: 43206 - RNA, 19 nt, Artificial Sequence
  Antisense Oligo
aucccaagucaaauccuuu

SEQ ID NO: 43207 - RNA, 19 nt, Artificial Sequence
  Sense Oligo
aaggauuugacuugggauu

SEQ ID NO: 43208 - RNA, 19 nt, Artificial Sequence
  Antisense Oligo
aaucccaagucaaauccuu

SEQ ID NO: 43209 - RNA, 19 nt, Artificial Sequence
  Sense Oligo
ggauuugacuugggauuug

SEQ ID NO: 43210 - RNA, 19 nt, Artificial Sequence
  Antisense Oligo
caaaucccaagucaaaucc

SEQ ID NO: 43211 - RNA, 19 nt, Artificial Sequence
  Sense Oligo
auuugacuugggauuugac

SEQ ID NO: 43212 - RNA, 19 nt, Artificial Sequence
  Antisense Oligo
gucaaaucccaagucaaau

SEQ ID NO: 43213 - RNA, 19 nt, Artificial Sequence
  Sense Oligo
uuugacuugggauuugacu

SEQ ID NO: 43214 - RNA, 19 nt, Artificial Sequence
  Antisense Oligo
agucaaaucccaagucaaa

SEQ ID NO: 43215 - RNA, 19 nt, Artificial Sequence
  Sense Oligo
uugacuugggauuugacug

SEQ ID NO: 43216 - RNA, 19 nt, Artificial Sequence
  Antisense Oligo
cagucaaaucccaagucaa

SEQ ID NO: 43217 - RNA, 19 nt, Artificial Sequence
  Sense Oligo
ugacuugggauuugacuga

SEQ ID NO: 43218 - RNA, 19 nt, Artificial Sequence
  Antisense Oligo
ucagucaaaucccaaguca

SEQ ID NO: 43219 - RNA, 19 nt, Artificial Sequence
  Sense Oligo
gacuugggauuugacugau

SEQ ID NO: 43220 - RNA, 19 nt, Artificial Sequence
  Antisense Oligo
aucagucaaaucccaaguc

SEQ ID NO: 43221 - RNA, 19 nt, Artificial Sequence
  Sense Oligo
ugggauuugacugauaaga

SEQ ID NO: 43222 - RNA, 19 nt, Artificial Sequence
  Antisense Oligo
ucuuaucagucaaauccca

SEQ ID NO: 43223 - RNA, 19 nt, Artificial Sequence
  Sense Oligo
gggauuugacugauaagaa

SEQ ID NO: 43224 - RNA, 19 nt, Artificial Sequence
  Antisense Oligo
uucuuaucagucaaauccc

SEQ ID NO: 43225 - RNA, 19 nt, Artificial Sequence
  Sense Oligo
ggauuugacugauaagaag

SEQ ID NO: 43226 - RNA, 19 nt, Artificial Sequence
  Antisense Oligo
cuucuuaucagucaaaucc

SEQ ID NO: 43227 - RNA, 19 nt, Artificial Sequence
  Sense Oligo
acugauaagaagggcucug

SEQ ID NO: 43228 - RNA, 19 nt, Artificial Sequence
  Antisense Oligo
cagagcccuucuuaucagu

SEQ ID NO: 43229 - RNA, 19 nt, Artificial Sequence
  Sense Oligo
agaagggcucugcucuuag

SEQ ID NO: 43230 - RNA, 19 nt, Artificial Sequence
  Antisense Oligo
cuaagagcagagcccuucu

SEQ ID NO: 43231 - RNA, 19 nt, Artificial Sequence
  Sense Oligo
gaagggcucugcucuuagg

SEQ ID NO: 43232 - RNA, 19 nt, Artificial Sequence
  Antisense Oligo
ccuaagagcagagcccuuc

SEQ ID NO: 43233 - RNA, 19 nt, Artificial Sequence
  Sense Oligo
agggcucugcucuuaggcc

SEQ ID NO: 43234 - RNA, 19 nt, Artificial Sequence
  Antisense Oligo
ggccuaagagcagagcccu

SEQ ID NO: 43235 - RNA, 19 nt, Artificial Sequence
  Sense Oligo
ggcucugcucuuaggccca

SEQ ID NO: 43236 - RNA, 19 nt, Artificial Sequence
  Antisense Oligo
ugggccuaagagcagagcc

SEQ ID NO: 43237 - RNA, 19 nt, Artificial Sequence
  Sense Oligo
gcucugcucuuaggcccau

SEQ ID NO: 43238 - RNA, 19 nt, Artificial Sequence
  Antisense Oligo
augggccuaagagcagagc

SEQ ID NO: 43239 - RNA, 19 nt, Artificial Sequence
  Sense Oligo
cucugcucuuaggcccaug

SEQ ID NO: 43240 - RNA, 19 nt, Artificial Sequence
  Antisense Oligo
caugggccuaagagcagag

SEQ ID NO: 43241 - RNA, 19 nt, Artificial Sequence
  Sense Oligo
ucugcucuuaggcccaugg

SEQ ID NO: 43242 - RNA, 19 nt, Artificial Sequence
  Antisense Oligo
ccaugggccuaagagcaga

SEQ ID NO: 43243 - RNA, 19 nt, Artificial Sequence
  Sense Oligo
cugcucuuaggcccaugga

SEQ ID NO: 43244 - RNA, 19 nt, Artificial Sequence
  Antisense Oligo
uccaugggccuaagagcag

SEQ ID NO: 43245 - RNA, 19 nt, Artificial Sequence
  Sense Oligo
aguagaguuggcacauuug

SEQ ID NO: 43246 - RNA, 19 nt, Artificial Sequence
  Antisense Oligo
caaaugugccaacucuacu

SEQ ID NO: 43247 - RNA, 19 nt, Artificial Sequence
  Sense Oligo
guagaguuggcacauuugu

SEQ ID NO: 43248 - RNA, 19 nt, Artificial Sequence
  Antisense Oligo
acaaaugugccaacucuac

SEQ ID NO: 43249 - RNA, 19 nt, Artificial Sequence
  Sense Oligo
uagaguuggcacauuugua

SEQ ID NO: 43250 - RNA, 19 nt, Artificial Sequence
  Antisense Oligo
uacaaaugugccaacucua

SEQ ID NO: 43251 - RNA, 19 nt, Artificial Sequence
  Sense Oligo
agaguuggcacauuuguag

SEQ ID NO: 43252 - RNA, 19 nt, Artificial Sequence
  Antisense Oligo
cuacaaaugugccaacucu

SEQ ID NO: 43253 - RNA, 19 nt, Artificial Sequence
  Sense Oligo
gaguuggcacauuuguagg

SEQ ID NO: 43254 - RNA, 19 nt, Artificial Sequence
  Antisense Oligo
ccuacaaaugugccaacuc

SEQ ID NO: 43255 - RNA, 19 nt, Artificial Sequence
  Sense Oligo
aguuggcacauuuguaggg

SEQ ID NO: 43256 - RNA, 19 nt, Artificial Sequence
  Antisense Oligo
cccuacaaaugugccaacu

SEQ ID NO: 43257 - RNA, 19 nt, Artificial Sequence
  Sense Oligo
guuggcacauuuguagggu

SEQ ID NO: 43258 - RNA, 19 nt, Artificial Sequence
  Antisense Oligo
acccuacaaaugugccaac

SEQ ID NO: 43259 - RNA, 19 nt, Artificial Sequence
  Sense Oligo
cauuuguagggugcaugga

SEQ ID NO: 43260 - RNA, 19 nt, Artificial Sequence
  Antisense Oligo
uccaugcacccuacaaaug

SEQ ID NO: 43261 - RNA, 19 nt, Artificial Sequence
  Sense Oligo
auuuguagggugcauggaa

SEQ ID NO: 43262 - RNA, 19 nt, Artificial Sequence
  Antisense Oligo
uuccaugcacccuacaaau

SEQ ID NO: 43263 - RNA, 19 nt, Artificial Sequence
  Sense Oligo
ggucuuaaggcaggcaggc

SEQ ID NO: 43264 - RNA, 19 nt, Artificial Sequence
  Antisense Oligo
gccugccugccuuaagacc

SEQ ID NO: 43265 - RNA, 19 nt, Artificial Sequence
  Sense Oligo
gucuuaaggcaggcaggcc

SEQ ID NO: 43266 - RNA, 19 nt, Artificial Sequence
  Antisense Oligo
ggccugccugccuuaagac

SEQ ID NO: 43267 - RNA, 19 nt, Artificial Sequence
  Sense Oligo
ucuuaaggcaggcaggccc

SEQ ID NO: 43268 - RNA, 19 nt, Artificial Sequence
  Antisense Oligo
gggccugccugccuuaaga

SEQ ID NO: 43269 - RNA, 19 nt, Artificial Sequence
  Sense Oligo
cccuggguuagcagucccu

SEQ ID NO: 43270 - RNA, 19 nt, Artificial Sequence
  Antisense Oligo
agggacugcuaacccaggg

SEQ ID NO: 43271 - RNA, 19 nt, Artificial Sequence
  Sense Oligo
ccuggguuagcagucccuc

SEQ ID NO: 43272 - RNA, 19 nt, Artificial Sequence
  Antisense Oligo
gagggacugcuaacccagg

SEQ ID NO: 43273 - RNA, 19 nt, Artificial Sequence
  Sense Oligo
cuggguuagcagucccucc

SEQ ID NO: 43274 - RNA, 19 nt, Artificial Sequence
  Antisense Oligo
ggagggacugcuaacccag

SEQ ID NO: 43275 - RNA, 19 nt, Artificial Sequence
  Sense Oligo
guuagcagucccuccuuac

SEQ ID NO: 43276 - RNA, 19 nt, Artificial Sequence
  Antisense Oligo
guaaggagggacugcuaac

SEQ ID NO: 43277 - RNA, 19 nt, Artificial Sequence
  Sense Oligo
uuagcagucccuccuuacg

SEQ ID NO: 43278 - RNA, 19 nt, Artificial Sequence
  Antisense Oligo
cguaaggagggacugcuaa

SEQ ID NO: 43279 - RNA, 19 nt, Artificial Sequence
  Sense Oligo
uagcagucccuccuuacga

SEQ ID NO: 43280 - RNA, 19 nt, Artificial Sequence
  Antisense Oligo
ucguaaggagggacugcua

SEQ ID NO: 43281 - RNA, 19 nt, Artificial Sequence
  Sense Oligo
ugaagcuggcagccugucc

SEQ ID NO: 43282 - RNA, 19 nt, Artificial Sequence
  Antisense Oligo
ggacaggcugccagcuuca

SEQ ID NO: 43283 - RNA, 19 nt, Artificial Sequence
  Sense Oligo
gaagcuggcagccugucca

SEQ ID NO: 43284 - RNA, 19 nt, Artificial Sequence
  Antisense Oligo
uggacaggcugccagcuuc

SEQ ID NO: 43285 - RNA, 19 nt, Artificial Sequence
  Sense Oligo
agaaggagguuggucaccc

SEQ ID NO: 43286 - RNA, 19 nt, Artificial Sequence
  Antisense Oligo
gggugaccaaccuccuucu

SEQ ID NO: 43287 - RNA, 19 nt, Artificial Sequence
  Sense Oligo
gaaggagguuggucaccca

SEQ ID NO: 43288 - RNA, 19 nt, Artificial Sequence
  Antisense Oligo
ugggugaccaaccuccuuc

SEQ ID NO: 43289 - RNA, 19 nt, Artificial Sequence
  Sense Oligo
aaggagguuggucacccag

SEQ ID NO: 43290 - RNA, 19 nt, Artificial Sequence
  Antisense Oligo
cugggugaccaaccuccuu

SEQ ID NO: 43291 - RNA, 19 nt, Artificial Sequence
  Sense Oligo
aggagguuggucacccagc

SEQ ID NO: 43292 - RNA, 19 nt, Artificial Sequence
  Antisense Oligo
gcugggugaccaaccuccu

SEQ ID NO: 43293 - RNA, 19 nt, Artificial Sequence
  Sense Oligo
ggagguuggucacccagca

SEQ ID NO: 43294 - RNA, 19 nt, Artificial Sequence
  Antisense Oligo
ugcugggugaccaaccucc

SEQ ID NO: 43295 - RNA, 19 nt, Artificial Sequence
  Sense Oligo
gagguuggucacccagcaa

SEQ ID NO: 43296 - RNA, 19 nt, Artificial Sequence
  Antisense Oligo
uugcugggugaccaaccuc

SEQ ID NO: 43297 - RNA, 19 nt, Artificial Sequence
  Sense Oligo
agguuggucacccagcaaa

SEQ ID NO: 43298 - RNA, 19 nt, Artificial Sequence
  Antisense Oligo
uuugcugggugaccaaccu

SEQ ID NO: 43299 - RNA, 19 nt, Artificial Sequence
  Sense Oligo
gguuggucacccagcaaau

SEQ ID NO: 43300 - RNA, 19 nt, Artificial Sequence
  Antisense Oligo
auuugcugggugaccaacc

SEQ ID NO: 43301 - RNA, 19 nt, Artificial Sequence
  Sense Oligo
guuggucacccagcaaaua

SEQ ID NO: 43302 - RNA, 19 nt, Artificial Sequence
  Antisense Oligo
uauuugcugggugaccaac

SEQ ID NO: 43303 - RNA, 19 nt, Artificial Sequence
  Sense Oligo
gucacccagcaaauagccc

SEQ ID NO: 43304 - RNA, 19 nt, Artificial Sequence
  Antisense Oligo
gggcuauuugcugggugac

SEQ ID NO: 43305 - RNA, 19 nt, Artificial Sequence
  Sense Oligo
ucacccagcaaauagcccu

SEQ ID NO: 43306 - RNA, 19 nt, Artificial Sequence
  Antisense Oligo
agggcuauuugcuggguga

SEQ ID NO: 43307 - RNA, 19 nt, Artificial Sequence
  Sense Oligo
cacccagcaaauagcccuu

SEQ ID NO: 43308 - RNA, 19 nt, Artificial Sequence
  Antisense Oligo
aagggcuauuugcugggug

SEQ ID NO: 43309 - RNA, 19 nt, Artificial Sequence
  Sense Oligo
acccagcaaauagcccuua

SEQ ID NO: 43310 - RNA, 19 nt, Artificial Sequence
  Antisense Oligo
uaagggcuauuugcugggu

SEQ ID NO: 43311 - RNA, 19 nt, Artificial Sequence
  Sense Oligo
cccagcaaauagcccuuag

SEQ ID NO: 43312 - RNA, 19 nt, Artificial Sequence
  Antisense Oligo
cuaagggcuauuugcuggg

SEQ ID NO: 43313 - RNA, 19 nt, Artificial Sequence
  Sense Oligo
ccagcaaauagcccuuaga

SEQ ID NO: 43314 - RNA, 19 nt, Artificial Sequence
  Antisense Oligo
ucuaagggcuauuugcugg

SEQ ID NO: 43315 - RNA, 19 nt, Artificial Sequence
  Sense Oligo
cagcaaauagcccuuagaa

SEQ ID NO: 43316 - RNA, 19 nt, Artificial Sequence
  Antisense Oligo
uucuaagggcuauuugcug

SEQ ID NO: 43317 - RNA, 19 nt, Artificial Sequence
  Sense Oligo
cacuugaauugccucucuc

SEQ ID NO: 43318 - RNA, 19 nt, Artificial Sequence
  Antisense Oligo
gagagaggcaauucaagug

SEQ ID NO: 43319 - RNA, 19 nt, Artificial Sequence
  Sense Oligo
cuugaauugccucucucac

SEQ ID NO: 43320 - RNA, 19 nt, Artificial Sequence
  Antisense Oligo
gugagagaggcaauucaag

SEQ ID NO: 43321 - RNA, 19 nt, Artificial Sequence
  Sense Oligo
uugaauugccucucucacu

SEQ ID NO: 43322 - RNA, 19 nt, Artificial Sequence
  Antisense Oligo
agugagagaggcaauucaa

SEQ ID NO: 43323 - RNA, 19 nt, Artificial Sequence
  Sense Oligo
ugaauugccucucucacuc

SEQ ID NO: 43324 - RNA, 19 nt, Artificial Sequence
  Antisense Oligo
gagugagagaggcaauuca

SEQ ID NO: 43325 - RNA, 19 nt, Artificial Sequence
  Sense Oligo
ccucucucacucuguaaau

SEQ ID NO: 43326 - RNA, 19 nt, Artificial Sequence
  Antisense Oligo
auuuacagagugagagagg

SEQ ID NO: 43327 - RNA, 19 nt, Artificial Sequence
  Sense Oligo
cucucucacucuguaaauc

SEQ ID NO: 43328 - RNA, 19 nt, Artificial Sequence
  Antisense Oligo
gauuuacagagugagagag

SEQ ID NO: 43329 - RNA, 19 nt, Artificial Sequence
  Sense Oligo
ucucucacucuguaaauca

SEQ ID NO: 43330 - RNA, 19 nt, Artificial Sequence
  Antisense Oligo
ugauuuacagagugagaga

SEQ ID NO: 43331 - RNA, 19 nt, Artificial Sequence
  Sense Oligo
acucuguaaaucagcaaga

SEQ ID NO: 43332 - RNA, 19 nt, Artificial Sequence
  Antisense Oligo
ucuugcugauuuacagagu

SEQ ID NO: 43333 - RNA, 19 nt, Artificial Sequence
  Sense Oligo
cuguaaaucagcaagaauc

SEQ ID NO: 43334 - RNA, 19 nt, Artificial Sequence
  Antisense Oligo
gauucuugcugauuuacag

SEQ ID NO: 43335 - RNA, 19 nt, Artificial Sequence
  Sense Oligo
uguaaaucagcaagaaucc

SEQ ID NO: 43336 - RNA, 19 nt, Artificial Sequence
  Antisense Oligo
ggauucuugcugauuuaca

SEQ ID NO: 43337 - RNA, 19 nt, Artificial Sequence
  Sense Oligo
guaaaucagcaagaaucca

SEQ ID NO: 43338 - RNA, 19 nt, Artificial Sequence
  Antisense Oligo
uggauucuugcugauuuac

SEQ ID NO: 43339 - RNA, 19 nt, Artificial Sequence
  Sense Oligo
aaucagcaagaauccaaau

SEQ ID NO: 43340 - RNA, 19 nt, Artificial Sequence
  Antisense Oligo
auuuggauucuugcugauu

SEQ ID NO: 43341 - RNA, 19 nt, Artificial Sequence
  Sense Oligo
ucagcaagaauccaaauaa

SEQ ID NO: 43342 - RNA, 19 nt, Artificial Sequence
  Antisense Oligo
uuauuuggauucuugcuga

SEQ ID NO: 43343 - RNA, 19 nt, Artificial Sequence
  Sense Oligo
cagcaagaauccaaauaac

SEQ ID NO: 43344 - RNA, 19 nt, Artificial Sequence
  Antisense Oligo
guuauuuggauucuugcug

SEQ ID NO: 43345 - RNA, 19 nt, Artificial Sequence
  Sense Oligo
gcaagaauccaaauaacua

SEQ ID NO: 43346 - RNA, 19 nt, Artificial Sequence
  Antisense Oligo
uaguuauuuggauucuugc

SEQ ID NO: 43347 - RNA, 19 nt, Artificial Sequence
  Sense Oligo
agaaugguguaccggucua

SEQ ID NO: 43348 - RNA, 19 nt, Artificial Sequence
  Antisense Oligo
uagaccgguacaccauucu

SEQ ID NO: 43349 - RNA, 19 nt, Artificial Sequence
  Sense Oligo
gaaugguguaccggucuaa

SEQ ID NO: 43350 - RNA, 19 nt, Artificial Sequence
  Antisense Oligo
uuagaccgguacaccauuc

SEQ ID NO: 43351 - RNA, 19 nt, Artificial Sequence
  Sense Oligo
aaugguguaccggucuaag

SEQ ID NO: 43352 - RNA, 19 nt, Artificial Sequence
  Antisense Oligo
cuuagaccgguacaccauu

SEQ ID NO: 43353 - RNA, 19 nt, Artificial Sequence
  Sense Oligo
augguguaccggucuaagu

SEQ ID NO: 43354 - RNA, 19 nt, Artificial Sequence
  Antisense Oligo
acuuagaccgguacaccau

SEQ ID NO: 43355 - RNA, 19 nt, Artificial Sequence
  Sense Oligo
ugguguaccggucuaagua

SEQ ID NO: 43356 - RNA, 19 nt, Artificial Sequence
  Antisense Oligo
uacuuagaccgguacacca

SEQ ID NO: 43357 - RNA, 19 nt, Artificial Sequence
  Sense Oligo
gguguaccggucuaaguaa

SEQ ID NO: 43358 - RNA, 19 nt, Artificial Sequence
  Antisense Oligo
uuacuuagaccgguacacc

SEQ ID NO: 43359 - RNA, 19 nt, Artificial Sequence
  Sense Oligo
guguaccggucuaaguaau

SEQ ID NO: 43360 - RNA, 19 nt, Artificial Sequence
  Antisense Oligo
auuacuuagaccgguacac

SEQ ID NO: 43361 - RNA, 19 nt, Artificial Sequence
  Sense Oligo
uguaccggucuaaguaaua

SEQ ID NO: 43362 - RNA, 19 nt, Artificial Sequence
  Antisense Oligo
uauuacuuagaccgguaca

SEQ ID NO: 43363 - RNA, 19 nt, Artificial Sequence
  Sense Oligo
guaccggucuaaguaauag

SEQ ID NO: 43364 - RNA, 19 nt, Artificial Sequence
  Antisense Oligo
cuauuacuuagaccgguac

SEQ ID NO: 43365 - RNA, 19 nt, Artificial Sequence
  Sense Oligo
uaccggucuaaguaauagu

SEQ ID NO: 43366 - RNA, 19 nt, Artificial Sequence
  Antisense Oligo
acuauuacuuagaccggua

SEQ ID NO: 43367 - RNA, 19 nt, Artificial Sequence
  Sense Oligo
accggucuaaguaauaguc

SEQ ID NO: 43368 - RNA, 19 nt, Artificial Sequence
  Antisense Oligo
gacuauuacuuagaccggu

SEQ ID NO: 43369 - RNA, 19 nt, Artificial Sequence
  Sense Oligo
ccggucuaaguaauagucu

SEQ ID NO: 43370 - RNA, 19 nt, Artificial Sequence
  Antisense Oligo
agacuauuacuuagaccgg

SEQ ID NO: 43371 - RNA, 19 nt, Artificial Sequence
  Sense Oligo
cggucuaaguaauagucuc

SEQ ID NO: 43372 - RNA, 19 nt, Artificial Sequence
  Antisense Oligo
gagacuauuacuuagaccg

SEQ ID NO: 43373 - RNA, 19 nt, Artificial Sequence
  Sense Oligo
ggucuaaguaauagucucu

SEQ ID NO: 43374 - RNA, 19 nt, Artificial Sequence
  Antisense Oligo
agagacuauuacuuagacc

SEQ ID NO: 43375 - RNA, 19 nt, Artificial Sequence
  Sense Oligo
gucuaaguaauagucucuc

SEQ ID NO: 43376 - RNA, 19 nt, Artificial Sequence
  Antisense Oligo
gagagacuauuacuuagac

SEQ ID NO: 43377 - RNA, 19 nt, Artificial Sequence
  Sense Oligo
ucuaaguaauagucucuca

SEQ ID NO: 43378 - RNA, 19 nt, Artificial Sequence
  Antisense Oligo
ugagagacuauuacuuaga

SEQ ID NO: 43379 - RNA, 19 nt, Artificial Sequence
  Sense Oligo
cuaaguaauagucucucaa

SEQ ID NO: 43380 - RNA, 19 nt, Artificial Sequence
  Antisense Oligo
uugagagacuauuacuuag

SEQ ID NO: 43381 - RNA, 19 nt, Artificial Sequence
  Sense Oligo
augguauccuuuaucucug

SEQ ID NO: 43382 - RNA, 19 nt, Artificial Sequence
  Antisense Oligo
cagagauaaaggauaccau

SEQ ID NO: 43383 - RNA, 19 nt, Artificial Sequence
  Sense Oligo
ccuuuaucucugcugggug

SEQ ID NO: 43384 - RNA, 19 nt, Artificial Sequence
  Antisense Oligo
cacccagcagagauaaagg

SEQ ID NO: 43385 - RNA, 19 nt, Artificial Sequence
  Sense Oligo
uuuaucucugcugggugca

SEQ ID NO: 43386 - RNA, 19 nt, Artificial Sequence
  Antisense Oligo
ugcacccagcagagauaaa

SEQ ID NO: 43387 - RNA, 19 nt, Artificial Sequence
  Sense Oligo
ugcugggugcaguggcuca

SEQ ID NO: 43388 - RNA, 19 nt, Artificial Sequence
  Antisense Oligo
ugagccacugcacccagca

SEQ ID NO: 43389 - RNA, 19 nt, Artificial Sequence
  Sense Oligo
cugggugcaguggcucaca

SEQ ID NO: 43390 - RNA, 19 nt, Artificial Sequence
  Antisense Oligo
ugugagccacugcacccag

SEQ ID NO: 43391 - RNA, 19 nt, Artificial Sequence
  Sense Oligo
ugggugcaguggcucacac

SEQ ID NO: 43392 - RNA, 19 nt, Artificial Sequence
  Antisense Oligo
gugugagccacugcaccca

SEQ ID NO: 43393 - RNA, 19 nt, Artificial Sequence
  Sense Oligo
caguggcucacaccuguaa

SEQ ID NO: 43394 - RNA, 19 nt, Artificial Sequence
  Antisense Oligo
uuacaggugugagccacug

SEQ ID NO: 43395 - RNA, 19 nt, Artificial Sequence
  Sense Oligo
aguggcucacaccuguaaa

SEQ ID NO: 43396 - RNA, 19 nt, Artificial Sequence
  Antisense Oligo
uuuacaggugugagccacu

SEQ ID NO: 43397 - RNA, 19 nt, Artificial Sequence
  Sense Oligo
guggcucacaccuguaaag

SEQ ID NO: 43398 - RNA, 19 nt, Artificial Sequence
  Antisense Oligo
cuuuacaggugugagccac

SEQ ID NO: 43399 - RNA, 19 nt, Artificial Sequence
  Sense Oligo
uggcucacaccuguaaagc

SEQ ID NO: 43400 - RNA, 19 nt, Artificial Sequence
  Antisense Oligo
gcuuuacaggugugagcca

SEQ ID NO: 43401 - RNA, 19 nt, Artificial Sequence
  Sense Oligo
gcucacaccuguaaagcca

SEQ ID NO: 43402 - RNA, 19 nt, Artificial Sequence
  Antisense Oligo
uggcuuuacaggugugagc

SEQ ID NO: 43403 - RNA, 19 nt, Artificial Sequence
  Sense Oligo
ccagcacuuugggagccca

SEQ ID NO: 43404 - RNA, 19 nt, Artificial Sequence
  Antisense Oligo
ugggcucccaaagugcugg

SEQ ID NO: 43405 - RNA, 19 nt, Artificial Sequence
  Sense Oligo
gcccaagguggaaggcuca

SEQ ID NO: 43406 - RNA, 19 nt, Artificial Sequence
  Antisense Oligo
ugagccuuccaccuugggc

SEQ ID NO: 43407 - RNA, 19 nt, Artificial Sequence
  Sense Oligo
cccaagguggaaggcucau

SEQ ID NO: 43408 - RNA, 19 nt, Artificial Sequence
  Antisense Oligo
augagccuuccaccuuggg

SEQ ID NO: 43409 - RNA, 19 nt, Artificial Sequence
  Sense Oligo
caagguggaaggcucauuu

SEQ ID NO: 43410 - RNA, 19 nt, Artificial Sequence
  Antisense Oligo
aaaugagccuuccaccuug

SEQ ID NO: 43411 - RNA, 19 nt, Artificial Sequence
  Sense Oligo
aagguggaaggcucauuuu

SEQ ID NO: 43412 - RNA, 19 nt, Artificial Sequence
  Antisense Oligo
aaaaugagccuuccaccuu

SEQ ID NO: 43413 - RNA, 19 nt, Artificial Sequence
  Sense Oligo
gguggaaggcucauuuuag

SEQ ID NO: 43414 - RNA, 19 nt, Artificial Sequence
  Antisense Oligo
cuaaaaugagccuuccacc

SEQ ID NO: 43415 - RNA, 19 nt, Artificial Sequence
  Sense Oligo
guggaaggcucauuuuagc

SEQ ID NO: 43416 - RNA, 19 nt, Artificial Sequence
  Antisense Oligo
gcuaaaaugagccuuccac

SEQ ID NO: 43417 - RNA, 19 nt, Artificial Sequence
  Sense Oligo
acaguccaggcaucauggu

SEQ ID NO: 43418 - RNA, 19 nt, Artificial Sequence
  Antisense Oligo
accaugaugccuggacugu

SEQ ID NO: 43419 - RNA, 19 nt, Artificial Sequence
  Sense Oligo
caguccaggcaucaugguu

SEQ ID NO: 43420 - RNA, 19 nt, Artificial Sequence
  Antisense Oligo
aaccaugaugccuggacug

SEQ ID NO: 43421 - RNA, 19 nt, Artificial Sequence
  Sense Oligo
aguccaggcaucaugguuc

SEQ ID NO: 43422 - RNA, 19 nt, Artificial Sequence
  Antisense Oligo
gaaccaugaugccuggacu

SEQ ID NO: 43423 - RNA, 19 nt, Artificial Sequence
  Sense Oligo
guccaggcaucaugguuca

SEQ ID NO: 43424 - RNA, 19 nt, Artificial Sequence
  Antisense Oligo
ugaaccaugaugccuggac

SEQ ID NO: 43425 - RNA, 19 nt, Artificial Sequence
  Sense Oligo
ggcaucaugguucacacuu

SEQ ID NO: 43426 - RNA, 19 nt, Artificial Sequence
  Antisense Oligo
aagugugaaccaugaugcc

SEQ ID NO: 43427 - RNA, 19 nt, Artificial Sequence
  Sense Oligo
ucaugguucacacuuuggg

SEQ ID NO: 43428 - RNA, 19 nt, Artificial Sequence
  Antisense Oligo
cccaaagugugaaccauga

SEQ ID NO: 43429 - RNA, 19 nt, Artificial Sequence
  Sense Oligo
caugguucacacuuuggga

SEQ ID NO: 43430 - RNA, 19 nt, Artificial Sequence
  Antisense Oligo
ucccaaagugugaaccaug

SEQ ID NO: 43431 - RNA, 19 nt, Artificial Sequence
  Sense Oligo
guucacacuuugggaggcc

SEQ ID NO: 43432 - RNA, 19 nt, Artificial Sequence
  Antisense Oligo
ggccucccaaagugugaac

SEQ ID NO: 43433 - RNA, 19 nt, Artificial Sequence
  Sense Oligo
uucacacuuugggaggccg

SEQ ID NO: 43434 - RNA, 19 nt, Artificial Sequence
  Antisense Oligo
cggccucccaaagugugaa

SEQ ID NO: 43435 - RNA, 19 nt, Artificial Sequence
  Sense Oligo
ucacacuuugggaggccga

SEQ ID NO: 43436 - RNA, 19 nt, Artificial Sequence
  Antisense Oligo
ucggccucccaaaguguga

SEQ ID NO: 43437 - RNA, 19 nt, Artificial Sequence
  Sense Oligo
cacacuuugggaggccgag

SEQ ID NO: 43438 - RNA, 19 nt, Artificial Sequence
  Antisense Oligo
cucggccucccaaagugug

SEQ ID NO: 43439 - RNA, 19 nt, Artificial Sequence
  Sense Oligo
acacuuugggaggccgagg

SEQ ID NO: 43440 - RNA, 19 nt, Artificial Sequence
  Antisense Oligo
ccucggccucccaaagugu

SEQ ID NO: 43441 - RNA, 19 nt, Artificial Sequence
  Sense Oligo
cuaucacuugaggucaggu

SEQ ID NO: 43442 - RNA, 19 nt, Artificial Sequence
  Antisense Oligo
accugaccucaagugauag

SEQ ID NO: 43443 - RNA, 19 nt, Artificial Sequence
  Sense Oligo
uaucacuugaggucaggug

SEQ ID NO: 43444 - RNA, 19 nt, Artificial Sequence
  Antisense Oligo
caccugaccucaagugaua

SEQ ID NO: 43445 - RNA, 19 nt, Artificial Sequence
  Sense Oligo
aucacuugaggucaggugu

SEQ ID NO: 43446 - RNA, 19 nt, Artificial Sequence
  Antisense Oligo
acaccugaccucaagugau

SEQ ID NO: 43447 - RNA, 19 nt, Artificial Sequence
  Sense Oligo
ucacuugaggucagguguu

SEQ ID NO: 43448 - RNA, 19 nt, Artificial Sequence
  Antisense Oligo
aacaccugaccucaaguga

SEQ ID NO: 43449 - RNA, 19 nt, Artificial Sequence
  Sense Oligo
cacuugaggucagguguuu

SEQ ID NO: 43450 - RNA, 19 nt, Artificial Sequence
  Antisense Oligo
aaacaccugaccucaagug

SEQ ID NO: 43451 - RNA, 19 nt, Artificial Sequence
  Sense Oligo
agaccagccuggcgauaug

SEQ ID NO: 43452 - RNA, 19 nt, Artificial Sequence
  Antisense Oligo
cauaucgccaggcuggucu

SEQ ID NO: 43453 - RNA, 19 nt, Artificial Sequence
  Sense Oligo
gaccagccuggcgauaugg

SEQ ID NO: 43454 - RNA, 19 nt, Artificial Sequence
  Antisense Oligo
ccauaucgccaggcugguc

SEQ ID NO: 43455 - RNA, 19 nt, Artificial Sequence
  Sense Oligo
cagccuggcgauaugguga

SEQ ID NO: 43456 - RNA, 19 nt, Artificial Sequence
  Antisense Oligo
ucaccauaucgccaggcug

SEQ ID NO: 43457 - RNA, 19 nt, Artificial Sequence
  Sense Oligo
cccaucucuacuaaaauua

SEQ ID NO: 43458 - RNA, 19 nt, Artificial Sequence
  Antisense Oligo
uaauuuuaguagagauggg

SEQ ID NO: 43459 - RNA, 19 nt, Artificial Sequence
  Sense Oligo
ccaucucuacuaaaauuac

SEQ ID NO: 43460 - RNA, 19 nt, Artificial Sequence
  Antisense Oligo
guaauuuuaguagagaugg

SEQ ID NO: 43461 - RNA, 19 nt, Artificial Sequence
  Sense Oligo
ggcacgugccuguaauccc

SEQ ID NO: 43462 - RNA, 19 nt, Artificial Sequence
  Antisense Oligo
gggauuacaggcacgugcc

SEQ ID NO: 43463 - RNA, 19 nt, Artificial Sequence
  Sense Oligo
gugccuguaaucccagcug

SEQ ID NO: 43464 - RNA, 19 nt, Artificial Sequence
  Antisense Oligo
cagcugggauuacaggcac

SEQ ID NO: 43465 - RNA, 19 nt, Artificial Sequence
  Sense Oligo
ugccuguaaucccagcugc

SEQ ID NO: 43466 - RNA, 19 nt, Artificial Sequence
  Antisense Oligo
gcagcugggauuacaggca

SEQ ID NO: 43467 - RNA, 19 nt, Artificial Sequence
  Sense Oligo
ugcacuccagccugggcaa

SEQ ID NO: 43468 - RNA, 19 nt, Artificial Sequence
  Antisense Oligo
uugcccaggcuggagugca

SEQ ID NO: 43469 - RNA, 19 nt, Artificial Sequence
  Sense Oligo
ugcaagacuccaucucaaa

SEQ ID NO: 43470 - RNA, 19 nt, Artificial Sequence
  Antisense Oligo
uuugagauggagucuugca

SEQ ID NO: 43471 - RNA, 19 nt, Artificial Sequence
  Sense Oligo
gcaagacuccaucucaaaa

SEQ ID NO: 43472 - RNA, 19 nt, Artificial Sequence
  Antisense Oligo
uuuugagauggagucuugc

SEQ ID NO: 43473 - RNA, 19 nt, Artificial Sequence
  Sense Oligo
caaugacucuuucccugau

SEQ ID NO: 43474 - RNA, 19 nt, Artificial Sequence
  Antisense Oligo
aucagggaaagagucauug

SEQ ID NO: 43475 - RNA, 19 nt, Artificial Sequence
  Sense Oligo
aaugacucuuucccugaug

SEQ ID NO: 43476 - RNA, 19 nt, Artificial Sequence
  Antisense Oligo
caucagggaaagagucauu

SEQ ID NO: 43477 - RNA, 19 nt, Artificial Sequence
  Sense Oligo
augacucuuucccugauga

SEQ ID NO: 43478 - RNA, 19 nt, Artificial Sequence
  Antisense Oligo
ucaucagggaaagagucau

SEQ ID NO: 43479 - RNA, 19 nt, Artificial Sequence
  Sense Oligo
ugacucuuucccugaugag

SEQ ID NO: 43480 - RNA, 19 nt, Artificial Sequence
  Antisense Oligo
cucaucagggaaagaguca

SEQ ID NO: 43481 - RNA, 19 nt, Artificial Sequence
  Sense Oligo
agagugccaucuucucagg

SEQ ID NO: 43482 - RNA, 19 nt, Artificial Sequence
  Antisense Oligo
ccugagaagauggcacucu

SEQ ID NO: 43483 - RNA, 19 nt, Artificial Sequence
  Sense Oligo
gagugccaucuucucaggu

SEQ ID NO: 43484 - RNA, 19 nt, Artificial Sequence
  Antisense Oligo
accugagaagauggcacuc

SEQ ID NO: 43485 - RNA, 19 nt, Artificial Sequence
  Sense Oligo
agugccaucuucucaggug

SEQ ID NO: 43486 - RNA, 19 nt, Artificial Sequence
  Antisense Oligo
caccugagaagauggcacu

SEQ ID NO: 43487 - RNA, 19 nt, Artificial Sequence
  Sense Oligo
ugccaucuucucagguggg

SEQ ID NO: 43488 - RNA, 19 nt, Artificial Sequence
  Antisense Oligo
cccaccugagaagauggca

SEQ ID NO: 43489 - RNA, 19 nt, Artificial Sequence
  Sense Oligo
gccaucuucucaggugggu

SEQ ID NO: 43490 - RNA, 19 nt, Artificial Sequence
  Antisense Oligo
acccaccugagaagauggc

SEQ ID NO: 43491 - RNA, 19 nt, Artificial Sequence
  Sense Oligo
ccaucuucucagguggguu

SEQ ID NO: 43492 - RNA, 19 nt, Artificial Sequence
  Antisense Oligo
aacccaccugagaagaugg

SEQ ID NO: 43493 - RNA, 19 nt, Artificial Sequence
  Sense Oligo
caucuucucagguggguug

SEQ ID NO: 43494 - RNA, 19 nt, Artificial Sequence
  Antisense Oligo
caacccaccugagaagaug

SEQ ID NO: 43495 - RNA, 19 nt, Artificial Sequence
  Sense Oligo
aucuucucagguggguugu

SEQ ID NO: 43496 - RNA, 19 nt, Artificial Sequence
  Antisense Oligo
acaacccaccugagaagau

SEQ ID NO: 43497 - RNA, 19 nt, Artificial Sequence
  Sense Oligo
ucuucucagguggguugug

SEQ ID NO: 43498 - RNA, 19 nt, Artificial Sequence
  Antisense Oligo
cacaacccaccugagaaga

SEQ ID NO: 43499 - RNA, 19 nt, Artificial Sequence
  Sense Oligo
cuucucagguggguugugu

SEQ ID NO: 43500 - RNA, 19 nt, Artificial Sequence
  Antisense Oligo
acacaacccaccugagaag

SEQ ID NO: 43501 - RNA, 19 nt, Artificial Sequence
  Sense Oligo
uucucagguggguugugua

SEQ ID NO: 43502 - RNA, 19 nt, Artificial Sequence
  Antisense Oligo
uacacaacccaccugagaa

SEQ ID NO: 43503 - RNA, 19 nt, Artificial Sequence
  Sense Oligo
ucucagguggguuguguag

SEQ ID NO: 43504 - RNA, 19 nt, Artificial Sequence
  Antisense Oligo
cuacacaacccaccugaga

SEQ ID NO: 43505 - RNA, 19 nt, Artificial Sequence
  Sense Oligo
cucagguggguuguguaga

SEQ ID NO: 43506 - RNA, 19 nt, Artificial Sequence
  Antisense Oligo
ucuacacaacccaccugag

SEQ ID NO: 43507 - RNA, 19 nt, Artificial Sequence
  Sense Oligo
ucagguggguuguguagau

SEQ ID NO: 43508 - RNA, 19 nt, Artificial Sequence
  Antisense Oligo
aucuacacaacccaccuga

SEQ ID NO: 43509 - RNA, 19 nt, Artificial Sequence
  Sense Oligo
cagguggguuguguagaug

SEQ ID NO: 43510 - RNA, 19 nt, Artificial Sequence
  Antisense Oligo
caucuacacaacccaccug

SEQ ID NO: 43511 - RNA, 19 nt, Artificial Sequence
  Sense Oligo
agguggguuguguagauga

SEQ ID NO: 43512 - RNA, 19 nt, Artificial Sequence
  Antisense Oligo
ucaucuacacaacccaccu

SEQ ID NO: 43513 - RNA, 19 nt, Artificial Sequence
  Sense Oligo
gguggguuguguagaugag

SEQ ID NO: 43514 - RNA, 19 nt, Artificial Sequence
  Antisense Oligo
cucaucuacacaacccacc

SEQ ID NO: 43515 - RNA, 19 nt, Artificial Sequence
  Sense Oligo
guggguuguguagaugagg

SEQ ID NO: 43516 - RNA, 19 nt, Artificial Sequence
  Antisense Oligo
ccucaucuacacaacccac

SEQ ID NO: 43517 - RNA, 19 nt, Artificial Sequence
  Sense Oligo
uggguuguguagaugagga

SEQ ID NO: 43518 - RNA, 19 nt, Artificial Sequence
  Antisense Oligo
uccucaucuacacaaccca

SEQ ID NO: 43519 - RNA, 19 nt, Artificial Sequence
  Sense Oligo
ggguuguguagaugaggag

SEQ ID NO: 43520 - RNA, 19 nt, Artificial Sequence
  Antisense Oligo
cuccucaucuacacaaccc

SEQ ID NO: 43521 - RNA, 19 nt, Artificial Sequence
  Sense Oligo
gguuguguagaugaggagg

SEQ ID NO: 43522 - RNA, 19 nt, Artificial Sequence
  Antisense Oligo
ccuccucaucuacacaacc

SEQ ID NO: 43523 - RNA, 19 nt, Artificial Sequence
  Sense Oligo
guuguguagaugaggaggg

SEQ ID NO: 43524 - RNA, 19 nt, Artificial Sequence
  Antisense Oligo
cccuccucaucuacacaac

SEQ ID NO: 43525 - RNA, 19 nt, Artificial Sequence
  Sense Oligo
uuguguagaugaggaggga

SEQ ID NO: 43526 - RNA, 19 nt, Artificial Sequence
  Antisense Oligo
ucccuccucaucuacacaa

SEQ ID NO: 43527 - RNA, 19 nt, Artificial Sequence
  Sense Oligo
guagaugaggagggaggcc

SEQ ID NO: 43528 - RNA, 19 nt, Artificial Sequence
  Antisense Oligo
ggccucccuccucaucuac

SEQ ID NO: 43529 - RNA, 19 nt, Artificial Sequence
  Sense Oligo
uagaugaggagggaggccu

SEQ ID NO: 43530 - RNA, 19 nt, Artificial Sequence
  Antisense Oligo
aggccucccuccucaucua

SEQ ID NO: 43531 - RNA, 19 nt, Artificial Sequence
  Sense Oligo
agaugaggagggaggccuu

SEQ ID NO: 43532 - RNA, 19 nt, Artificial Sequence
  Antisense Oligo
aaggccucccuccucaucu

SEQ ID NO: 43533 - RNA, 19 nt, Artificial Sequence
  Sense Oligo
gaugaggagggaggccuug

SEQ ID NO: 43534 - RNA, 19 nt, Artificial Sequence
  Antisense Oligo
caaggccucccuccucauc

SEQ ID NO: 43535 - RNA, 19 nt, Artificial Sequence
  Sense Oligo
cagaucaugcagugggccu

SEQ ID NO: 43536 - RNA, 19 nt, Artificial Sequence
  Antisense Oligo
aggcccacugcaugaucug

SEQ ID NO: 43537 - RNA, 19 nt, Artificial Sequence
  Sense Oligo
agaucaugcagugggccug

SEQ ID NO: 43538 - RNA, 19 nt, Artificial Sequence
  Antisense Oligo
caggcccacugcaugaucu

SEQ ID NO: 43539 - RNA, 19 nt, Artificial Sequence
  Sense Oligo
gaucaugcagugggccugu

SEQ ID NO: 43540 - RNA, 19 nt, Artificial Sequence
  Antisense Oligo
acaggcccacugcaugauc

SEQ ID NO: 43541 - RNA, 19 nt, Artificial Sequence
  Sense Oligo
aucaugcagugggccugug

SEQ ID NO: 43542 - RNA, 19 nt, Artificial Sequence
  Antisense Oligo
cacaggcccacugcaugau

SEQ ID NO: 43543 - RNA, 19 nt, Artificial Sequence
  Sense Oligo
ucaugcagugggccugugg

SEQ ID NO: 43544 - RNA, 19 nt, Artificial Sequence
  Antisense Oligo
ccacaggcccacugcauga

SEQ ID NO: 43545 - RNA, 19 nt, Artificial Sequence
  Sense Oligo
caugcagugggccugugga

SEQ ID NO: 43546 - RNA, 19 nt, Artificial Sequence
  Antisense Oligo
uccacaggcccacugcaug

SEQ ID NO: 43547 - RNA, 19 nt, Artificial Sequence
  Sense Oligo
augcagugggccuguggac

SEQ ID NO: 43548 - RNA, 19 nt, Artificial Sequence
  Antisense Oligo
guccacaggcccacugcau

SEQ ID NO: 43549 - RNA, 19 nt, Artificial Sequence
  Sense Oligo
ugcagugggccuguggaca

SEQ ID NO: 43550 - RNA, 19 nt, Artificial Sequence
  Antisense Oligo
uguccacaggcccacugca

SEQ ID NO: 43551 - RNA, 19 nt, Artificial Sequence
  Sense Oligo
gucuuuuggcgguaggccu

SEQ ID NO: 43552 - RNA, 19 nt, Artificial Sequence
  Antisense Oligo
aggccuaccgccaaaagac

SEQ ID NO: 43553 - RNA, 19 nt, Artificial Sequence
  Sense Oligo
ucuuuuggcgguaggccug

SEQ ID NO: 43554 - RNA, 19 nt, Artificial Sequence
  Antisense Oligo
caggccuaccgccaaaaga

SEQ ID NO: 43555 - RNA, 19 nt, Artificial Sequence
  Sense Oligo
cuuuuggcgguaggccugu

SEQ ID NO: 43556 - RNA, 19 nt, Artificial Sequence
  Antisense Oligo
acaggccuaccgccaaaag

SEQ ID NO: 43557 - RNA, 19 nt, Artificial Sequence
  Sense Oligo
uuuuggcgguaggccugug

SEQ ID NO: 43558 - RNA, 19 nt, Artificial Sequence
  Antisense Oligo
cacaggccuaccgccaaaa

SEQ ID NO: 43559 - RNA, 19 nt, Artificial Sequence
  Sense Oligo
uuuggcgguaggccugugu

SEQ ID NO: 43560 - RNA, 19 nt, Artificial Sequence
  Antisense Oligo
acacaggccuaccgccaaa

SEQ ID NO: 43561 - RNA, 19 nt, Artificial Sequence
  Sense Oligo
uuggcgguaggccugugug

SEQ ID NO: 43562 - RNA, 19 nt, Artificial Sequence
  Antisense Oligo
cacacaggccuaccgccaa

SEQ ID NO: 43563 - RNA, 19 nt, Artificial Sequence
  Sense Oligo
guaggccugugugcuguug

SEQ ID NO: 43564 - RNA, 19 nt, Artificial Sequence
  Antisense Oligo
caacagcacacaggccuac

SEQ ID NO: 43565 - RNA, 19 nt, Artificial Sequence
  Sense Oligo
uaggccugugugcuguugc

SEQ ID NO: 43566 - RNA, 19 nt, Artificial Sequence
  Antisense Oligo
gcaacagcacacaggccua

SEQ ID NO: 43567 - RNA, 19 nt, Artificial Sequence
  Sense Oligo
aggccugugugcuguugca

SEQ ID NO: 43568 - RNA, 19 nt, Artificial Sequence
  Antisense Oligo
ugcaacagcacacaggccu

SEQ ID NO: 43569 - RNA, 19 nt, Artificial Sequence
  Sense Oligo
ggccugugugcuguugcag

SEQ ID NO: 43570 - RNA, 19 nt, Artificial Sequence
  Antisense Oligo
cugcaacagcacacaggcc

SEQ ID NO: 43571 - RNA, 19 nt, Artificial Sequence
  Sense Oligo
ccugugugcuguugcagag

SEQ ID NO: 43572 - RNA, 19 nt, Artificial Sequence
  Antisense Oligo
cucugcaacagcacacagg

SEQ ID NO: 43573 - RNA, 19 nt, Artificial Sequence
  Sense Oligo
cugugugcuguugcagagu

SEQ ID NO: 43574 - RNA, 19 nt, Artificial Sequence
  Antisense Oligo
acucugcaacagcacacag

SEQ ID NO: 43575 - RNA, 19 nt, Artificial Sequence
  Sense Oligo
ugugugcuguugcagagua

SEQ ID NO: 43576 - RNA, 19 nt, Artificial Sequence
  Antisense Oligo
uacucugcaacagcacaca

SEQ ID NO: 43577 - RNA, 19 nt, Artificial Sequence
  Sense Oligo
gugugcuguugcagaguag

SEQ ID NO: 43578 - RNA, 19 nt, Artificial Sequence
  Antisense Oligo
cuacucugcaacagcacac

SEQ ID NO: 43579 - RNA, 19 nt, Artificial Sequence
  Sense Oligo
ugugcuguugcagaguagc

SEQ ID NO: 43580 - RNA, 19 nt, Artificial Sequence
  Antisense Oligo
gcuacucugcaacagcaca

SEQ ID NO: 43581 - RNA, 19 nt, Artificial Sequence
  Sense Oligo
gugcuguugcagaguagcg

SEQ ID NO: 43582 - RNA, 19 nt, Artificial Sequence
  Antisense Oligo
cgcuacucugcaacagcac

SEQ ID NO: 43583 - RNA, 19 nt, Artificial Sequence
  Sense Oligo
ugcuguugcagaguagcgu

SEQ ID NO: 43584 - RNA, 19 nt, Artificial Sequence
  Antisense Oligo
acgcuacucugcaacagca

SEQ ID NO: 43585 - RNA, 19 nt, Artificial Sequence
  Sense Oligo
gcuguugcagaguagcgug

SEQ ID NO: 43586 - RNA, 19 nt, Artificial Sequence
  Antisense Oligo
cacgcuacucugcaacagc

SEQ ID NO: 43587 - RNA, 19 nt, Artificial Sequence
  Sense Oligo
cuguugcagaguagcgugu

SEQ ID NO: 43588 - RNA, 19 nt, Artificial Sequence
  Antisense Oligo
acacgcuacucugcaacag

SEQ ID NO: 43589 - RNA, 19 nt, Artificial Sequence
  Sense Oligo
uguugcagaguagcguguu

SEQ ID NO: 43590 - RNA, 19 nt, Artificial Sequence
  Antisense Oligo
aacacgcuacucugcaaca

SEQ ID NO: 43591 - RNA, 19 nt, Artificial Sequence
  Sense Oligo
guugcagaguagcguguua

SEQ ID NO: 43592 - RNA, 19 nt, Artificial Sequence
  Antisense Oligo
uaacacgcuacucugcaac

SEQ ID NO: 43593 - RNA, 19 nt, Artificial Sequence
  Sense Oligo
cagaguagcguguuacccu

SEQ ID NO: 43594 - RNA, 19 nt, Artificial Sequence
  Antisense Oligo
aggguaacacgcuacucug

SEQ ID NO: 43595 - RNA, 19 nt, Artificial Sequence
  Sense Oligo
agaguagcguguuacccuc

SEQ ID NO: 43596 - RNA, 19 nt, Artificial Sequence
  Antisense Oligo
gaggguaacacgcuacucu

SEQ ID NO: 43597 - RNA, 19 nt, Artificial Sequence
  Sense Oligo
gaguagcguguuacccucu

SEQ ID NO: 43598 - RNA, 19 nt, Artificial Sequence
  Antisense Oligo
agaggguaacacgcuacuc

SEQ ID NO: 43599 - RNA, 19 nt, Artificial Sequence
  Sense Oligo
aguagcguguuacccucuc

SEQ ID NO: 43600 - RNA, 19 nt, Artificial Sequence
  Antisense Oligo
gagaggguaacacgcuacu

SEQ ID NO: 43601 - RNA, 19 nt, Artificial Sequence
  Sense Oligo
guagcguguuacccucucg

SEQ ID NO: 43602 - RNA, 19 nt, Artificial Sequence
  Antisense Oligo
cgagaggguaacacgcuac

SEQ ID NO: 43603 - RNA, 19 nt, Artificial Sequence
  Sense Oligo
uagcguguuacccucucgc

SEQ ID NO: 43604 - RNA, 19 nt, Artificial Sequence
  Antisense Oligo
gcgagaggguaacacgcua

SEQ ID NO: 43605 - RNA, 19 nt, Artificial Sequence
  Sense Oligo
agcguguuacccucucgca

SEQ ID NO: 43606 - RNA, 19 nt, Artificial Sequence
  Antisense Oligo
ugcgagaggguaacacgcu

SEQ ID NO: 43607 - RNA, 19 nt, Artificial Sequence
  Sense Oligo
gcguguuacccucucgcau

SEQ ID NO: 43608 - RNA, 19 nt, Artificial Sequence
  Antisense Oligo
augcgagaggguaacacgc

SEQ ID NO: 43609 - RNA, 19 nt, Artificial Sequence
  Sense Oligo
cguguuacccucucgcaug

SEQ ID NO: 43610 - RNA, 19 nt, Artificial Sequence
  Antisense Oligo
caugcgagaggguaacacg

SEQ ID NO: 43611 - RNA, 19 nt, Artificial Sequence
  Sense Oligo
guguuacccucucgcaugg

SEQ ID NO: 43612 - RNA, 19 nt, Artificial Sequence
  Antisense Oligo
ccaugcgagaggguaacac

SEQ ID NO: 43613 - RNA, 19 nt, Artificial Sequence
  Sense Oligo
uguuacccucucgcauggc

SEQ ID NO: 43614 - RNA, 19 nt, Artificial Sequence
  Antisense Oligo
gccaugcgagaggguaaca

SEQ ID NO: 43615 - RNA, 19 nt, Artificial Sequence
  Sense Oligo
guuacccucucgcauggcu

SEQ ID NO: 43616 - RNA, 19 nt, Artificial Sequence
  Antisense Oligo
agccaugcgagaggguaac

SEQ ID NO: 43617 - RNA, 19 nt, Artificial Sequence
  Sense Oligo
uuacccucucgcauggcuc

SEQ ID NO: 43618 - RNA, 19 nt, Artificial Sequence
  Antisense Oligo
gagccaugcgagaggguaa

SEQ ID NO: 43619 - RNA, 19 nt, Artificial Sequence
  Sense Oligo
uacccucucgcauggcucu

SEQ ID NO: 43620 - RNA, 19 nt, Artificial Sequence
  Antisense Oligo
agagccaugcgagagggua

SEQ ID NO: 43621 - RNA, 19 nt, Artificial Sequence
  Sense Oligo
acccucucgcauggcucug

SEQ ID NO: 43622 - RNA, 19 nt, Artificial Sequence
  Antisense Oligo
cagagccaugcgagagggu

SEQ ID NO: 43623 - RNA, 19 nt, Artificial Sequence
  Sense Oligo
cccucucgcauggcucugu

SEQ ID NO: 43624 - RNA, 19 nt, Artificial Sequence
  Antisense Oligo
acagagccaugcgagaggg

SEQ ID NO: 43625 - RNA, 19 nt, Artificial Sequence
  Sense Oligo
ccucucgcauggcucugug

SEQ ID NO: 43626 - RNA, 19 nt, Artificial Sequence
  Antisense Oligo
cacagagccaugcgagagg

SEQ ID NO: 43627 - RNA, 19 nt, Artificial Sequence
  Sense Oligo
augguucugccucuccagg

SEQ ID NO: 43628 - RNA, 19 nt, Artificial Sequence
  Antisense Oligo
ccuggagaggcagaaccau

SEQ ID NO: 43629 - RNA, 19 nt, Artificial Sequence
  Sense Oligo
ugguucugccucuccaggu

SEQ ID NO: 43630 - RNA, 19 nt, Artificial Sequence
  Antisense Oligo
accuggagaggcagaacca

SEQ ID NO: 43631 - RNA, 19 nt, Artificial Sequence
  Sense Oligo
gguucugccucuccagguc

SEQ ID NO: 43632 - RNA, 19 nt, Artificial Sequence
  Antisense Oligo
gaccuggagaggcagaacc

SEQ ID NO: 43633 - RNA, 19 nt, Artificial Sequence
  Sense Oligo
cugccucuccaggucuucu

SEQ ID NO: 43634 - RNA, 19 nt, Artificial Sequence
  Antisense Oligo
agaagaccuggagaggcag

SEQ ID NO: 43635 - RNA, 19 nt, Artificial Sequence
  Sense Oligo
ugccucuccaggucuucug

SEQ ID NO: 43636 - RNA, 19 nt, Artificial Sequence
  Antisense Oligo
cagaagaccuggagaggca

SEQ ID NO: 43637 - RNA, 19 nt, Artificial Sequence
  Sense Oligo
gccucuccaggucuucugc

SEQ ID NO: 43638 - RNA, 19 nt, Artificial Sequence
  Antisense Oligo
gcagaagaccuggagaggc

SEQ ID NO: 43639 - RNA, 19 nt, Artificial Sequence
  Sense Oligo
ccucuccaggucuucugca

SEQ ID NO: 43640 - RNA, 19 nt, Artificial Sequence
  Antisense Oligo
ugcagaagaccuggagagg

SEQ ID NO: 43641 - RNA, 19 nt, Artificial Sequence
  Sense Oligo
caggucuucugcagugugc

SEQ ID NO: 43642 - RNA, 19 nt, Artificial Sequence
  Antisense Oligo
gcacacugcagaagaccug

SEQ ID NO: 43643 - RNA, 19 nt, Artificial Sequence
  Sense Oligo
ggcucagccaggccuucau

SEQ ID NO: 43644 - RNA, 19 nt, Artificial Sequence
  Antisense Oligo
augaaggccuggcugagcc

SEQ ID NO: 43645 - RNA, 19 nt, Artificial Sequence
  Sense Oligo
gcucagccaggccuucauc

SEQ ID NO: 43646 - RNA, 19 nt, Artificial Sequence
  Antisense Oligo
gaugaaggccuggcugagc

SEQ ID NO: 43647 - RNA, 19 nt, Artificial Sequence
  Sense Oligo
cucagccaggccuucaucg

SEQ ID NO: 43648 - RNA, 19 nt, Artificial Sequence
  Antisense Oligo
cgaugaaggccuggcugag

SEQ ID NO: 43649 - RNA, 19 nt, Artificial Sequence
  Sense Oligo
ucagccaggccuucaucga

SEQ ID NO: 43650 - RNA, 19 nt, Artificial Sequence
  Antisense Oligo
ucgaugaaggccuggcuga

SEQ ID NO: 43651 - RNA, 19 nt, Artificial Sequence
  Sense Oligo
cagccaggccuucaucgac

SEQ ID NO: 43652 - RNA, 19 nt, Artificial Sequence
  Antisense Oligo
gucgaugaaggccuggcug

SEQ ID NO: 43653 - RNA, 19 nt, Artificial Sequence
  Sense Oligo
aggccuucaucgaccugca

SEQ ID NO: 43654 - RNA, 19 nt, Artificial Sequence
  Antisense Oligo
ugcaggucgaugaaggccu

SEQ ID NO: 43655 - RNA, 19 nt, Artificial Sequence
  Sense Oligo
accugcacucugcugggaa

SEQ ID NO: 43656 - RNA, 19 nt, Artificial Sequence
  Antisense Oligo
uucccagcagagugcaggu

SEQ ID NO: 43657 - RNA, 19 nt, Artificial Sequence
  Sense Oligo
ccugcacucugcugggaau

SEQ ID NO: 43658 - RNA, 19 nt, Artificial Sequence
  Antisense Oligo
auucccagcagagugcagg

SEQ ID NO: 43659 - RNA, 19 nt, Artificial Sequence
  Sense Oligo
cugcacucugcugggaaua

SEQ ID NO: 43660 - RNA, 19 nt, Artificial Sequence
  Antisense Oligo
uauucccagcagagugcag

SEQ ID NO: 43661 - RNA, 19 nt, Artificial Sequence
  Sense Oligo
ugcacucugcugggaauau

SEQ ID NO: 43662 - RNA, 19 nt, Artificial Sequence
  Antisense Oligo
auauucccagcagagugca

SEQ ID NO: 43663 - RNA, 19 nt, Artificial Sequence
  Sense Oligo
gcacucugcugggaauaug

SEQ ID NO: 43664 - RNA, 19 nt, Artificial Sequence
  Antisense Oligo
cauauucccagcagagugc

SEQ ID NO: 43665 - RNA, 19 nt, Artificial Sequence
  Sense Oligo
cacucugcugggaauaugc

SEQ ID NO: 43666 - RNA, 19 nt, Artificial Sequence
  Antisense Oligo
gcauauucccagcagagug

SEQ ID NO: 43667 - RNA, 19 nt, Artificial Sequence
  Sense Oligo
acucugcugggaauaugcu

SEQ ID NO: 43668 - RNA, 19 nt, Artificial Sequence
  Antisense Oligo
agcauauucccagcagagu

SEQ ID NO: 43669 - RNA, 19 nt, Artificial Sequence
  Sense Oligo
cucugcugggaauaugcug

SEQ ID NO: 43670 - RNA, 19 nt, Artificial Sequence
  Antisense Oligo
cagcauauucccagcagag

SEQ ID NO: 43671 - RNA, 19 nt, Artificial Sequence
  Sense Oligo
ucugcugggaauaugcugu

SEQ ID NO: 43672 - RNA, 19 nt, Artificial Sequence
  Antisense Oligo
acagcauauucccagcaga

SEQ ID NO: 43673 - RNA, 19 nt, Artificial Sequence
  Sense Oligo
cugcugggaauaugcuguu

SEQ ID NO: 43674 - RNA, 19 nt, Artificial Sequence
  Antisense Oligo
aacagcauauucccagcag

SEQ ID NO: 43675 - RNA, 19 nt, Artificial Sequence
  Sense Oligo
ugcugggaauaugcuguuc

SEQ ID NO: 43676 - RNA, 19 nt, Artificial Sequence
  Antisense Oligo
gaacagcauauucccagca

SEQ ID NO: 43677 - RNA, 19 nt, Artificial Sequence
  Sense Oligo
gcugggaauaugcuguuca

SEQ ID NO: 43678 - RNA, 19 nt, Artificial Sequence
  Antisense Oligo
ugaacagcauauucccagc

SEQ ID NO: 43679 - RNA, 19 nt, Artificial Sequence
  Sense Oligo
cugggaauaugcuguucag

SEQ ID NO: 43680 - RNA, 19 nt, Artificial Sequence
  Antisense Oligo
cugaacagcauauucccag

SEQ ID NO: 43681 - RNA, 19 nt, Artificial Sequence
  Sense Oligo
ugggaauaugcuguucagg

SEQ ID NO: 43682 - RNA, 19 nt, Artificial Sequence
  Antisense Oligo
ccugaacagcauauuccca

SEQ ID NO: 43683 - RNA, 19 nt, Artificial Sequence
  Sense Oligo
aauaugcuguucaggacgu

SEQ ID NO: 43684 - RNA, 19 nt, Artificial Sequence
  Antisense Oligo
acguccugaacagcauauu

SEQ ID NO: 43685 - RNA, 19 nt, Artificial Sequence
  Sense Oligo
auaugcuguucaggacgug

SEQ ID NO: 43686 - RNA, 19 nt, Artificial Sequence
  Antisense Oligo
cacguccugaacagcauau

SEQ ID NO: 43687 - RNA, 19 nt, Artificial Sequence
  Sense Oligo
uaugcuguucaggacgugg

SEQ ID NO: 43688 - RNA, 19 nt, Artificial Sequence
  Antisense Oligo
ccacguccugaacagcaua

SEQ ID NO: 43689 - RNA, 19 nt, Artificial Sequence
  Sense Oligo
ugcuguucaggacguggau

SEQ ID NO: 43690 - RNA, 19 nt, Artificial Sequence
  Antisense Oligo
auccacguccugaacagca

SEQ ID NO: 43691 - RNA, 19 nt, Artificial Sequence
  Sense Oligo
gcuguucaggacguggauc

SEQ ID NO: 43692 - RNA, 19 nt, Artificial Sequence
  Antisense Oligo
gauccacguccugaacagc

SEQ ID NO: 43693 - RNA, 19 nt, Artificial Sequence
  Sense Oligo
cuguucaggacguggaucg

SEQ ID NO: 43694 - RNA, 19 nt, Artificial Sequence
  Antisense Oligo
cgauccacguccugaacag

SEQ ID NO: 43695 - RNA, 19 nt, Artificial Sequence
  Sense Oligo
uguucaggacguggaucgc

SEQ ID NO: 43696 - RNA, 19 nt, Artificial Sequence
  Antisense Oligo
gcgauccacguccugaaca

SEQ ID NO: 43697 - RNA, 19 nt, Artificial Sequence
  Sense Oligo
guucaggacguggaucgcc

SEQ ID NO: 43698 - RNA, 19 nt, Artificial Sequence
  Antisense Oligo
ggcgauccacguccugaac

SEQ ID NO: 43699 - RNA, 19 nt, Artificial Sequence
  Sense Oligo
uucaggacguggaucgcca

SEQ ID NO: 43700 - RNA, 19 nt, Artificial Sequence
  Antisense Oligo
uggcgauccacguccugaa

SEQ ID NO: 43701 - RNA, 19 nt, Artificial Sequence
  Sense Oligo
acguggaucgccauggccu

SEQ ID NO: 43702 - RNA, 19 nt, Artificial Sequence
  Antisense Oligo
aggccauggcgauccacgu

SEQ ID NO: 43703 - RNA, 19 nt, Artificial Sequence
  Sense Oligo
cguggaucgccauggccua

SEQ ID NO: 43704 - RNA, 19 nt, Artificial Sequence
  Antisense Oligo
uaggccauggcgauccacg

SEQ ID NO: 43705 - RNA, 19 nt, Artificial Sequence
  Sense Oligo
guggaucgccauggccuac

SEQ ID NO: 43706 - RNA, 19 nt, Artificial Sequence
  Antisense Oligo
guaggccauggcgauccac

SEQ ID NO: 43707 - RNA, 19 nt, Artificial Sequence
  Sense Oligo
uggaucgccauggccuacu

SEQ ID NO: 43708 - RNA, 19 nt, Artificial Sequence
  Antisense Oligo
aguaggccauggcgaucca

SEQ ID NO: 43709 - RNA, 19 nt, Artificial Sequence
  Sense Oligo
ucgccauggccuacugcuc

SEQ ID NO: 43710 - RNA, 19 nt, Artificial Sequence
  Antisense Oligo
gagcaguaggccauggcga

SEQ ID NO: 43711 - RNA, 19 nt, Artificial Sequence
  Sense Oligo
gggugugucccuccaaaug

SEQ ID NO: 43712 - RNA, 19 nt, Artificial Sequence
  Antisense Oligo
cauuuggagggacacaccc

SEQ ID NO: 43713 - RNA, 19 nt, Artificial Sequence
  Sense Oligo
ggugugucccuccaaaugg

SEQ ID NO: 43714 - RNA, 19 nt, Artificial Sequence
  Antisense Oligo
ccauuuggagggacacacc

SEQ ID NO: 43715 - RNA, 19 nt, Artificial Sequence
  Sense Oligo
gugugucccuccaaaugga

SEQ ID NO: 43716 - RNA, 19 nt, Artificial Sequence
  Antisense Oligo
uccauuuggagggacacac

SEQ ID NO: 43717 - RNA, 19 nt, Artificial Sequence
  Sense Oligo
aaauggacuuuggcuugga

SEQ ID NO: 43718 - RNA, 19 nt, Artificial Sequence
  Antisense Oligo
uccaagccaaaguccauuu

SEQ ID NO: 43719 - RNA, 19 nt, Artificial Sequence
  Sense Oligo
aauggacuuuggcuuggac

SEQ ID NO: 43720 - RNA, 19 nt, Artificial Sequence
  Antisense Oligo
guccaagccaaaguccauu

SEQ ID NO: 43721 - RNA, 19 nt, Artificial Sequence
  Sense Oligo
auggacuuuggcuuggacc

SEQ ID NO: 43722 - RNA, 19 nt, Artificial Sequence
  Antisense Oligo
gguccaagccaaaguccau

SEQ ID NO: 43723 - RNA, 19 nt, Artificial Sequence
  Sense Oligo
uggacuuuggcuuggaccu

SEQ ID NO: 43724 - RNA, 19 nt, Artificial Sequence
  Antisense Oligo
agguccaagccaaagucca

SEQ ID NO: 43725 - RNA, 19 nt, Artificial Sequence
  Sense Oligo
ggacuuuggcuuggaccug

SEQ ID NO: 43726 - RNA, 19 nt, Artificial Sequence
  Antisense Oligo
cagguccaagccaaagucc

SEQ ID NO: 43727 - RNA, 19 nt, Artificial Sequence
  Sense Oligo
gacuuuggcuuggaccugg

SEQ ID NO: 43728 - RNA, 19 nt, Artificial Sequence
  Antisense Oligo
ccagguccaagccaaaguc

SEQ ID NO: 43729 - RNA, 19 nt, Artificial Sequence
  Sense Oligo
cuuuggcuuggaccuggug

SEQ ID NO: 43730 - RNA, 19 nt, Artificial Sequence
  Antisense Oligo
caccagguccaagccaaag

SEQ ID NO: 43731 - RNA, 19 nt, Artificial Sequence
  Sense Oligo
uuuggcuuggaccugguga

SEQ ID NO: 43732 - RNA, 19 nt, Artificial Sequence
  Antisense Oligo
ucaccagguccaagccaaa

SEQ ID NO: 43733 - RNA, 19 nt, Artificial Sequence
  Sense Oligo
uuggcuuggaccuggugac

SEQ ID NO: 43734 - RNA, 19 nt, Artificial Sequence
  Antisense Oligo
gucaccagguccaagccaa

SEQ ID NO: 43735 - RNA, 19 nt, Artificial Sequence
  Sense Oligo
uggcuuggaccuggugacg

SEQ ID NO: 43736 - RNA, 19 nt, Artificial Sequence
  Antisense Oligo
cgucaccagguccaagcca

SEQ ID NO: 43737 - RNA, 19 nt, Artificial Sequence
  Sense Oligo
gcuuggaccuggugacgga

SEQ ID NO: 43738 - RNA, 19 nt, Artificial Sequence
  Antisense Oligo
uccgucaccagguccaagc

SEQ ID NO: 43739 - RNA, 19 nt, Artificial Sequence
  Sense Oligo
cuuggaccuggugacggag

SEQ ID NO: 43740 - RNA, 19 nt, Artificial Sequence
  Antisense Oligo
cuccgucaccagguccaag

SEQ ID NO: 43741 - RNA, 19 nt, Artificial Sequence
  Sense Oligo
uuggaccuggugacggagc

SEQ ID NO: 43742 - RNA, 19 nt, Artificial Sequence
  Antisense Oligo
gcuccgucaccagguccaa

SEQ ID NO: 43743 - RNA, 19 nt, Artificial Sequence
  Sense Oligo
uggaccuggugacggagcu

SEQ ID NO: 43744 - RNA, 19 nt, Artificial Sequence
  Antisense Oligo
agcuccgucaccaggucca

SEQ ID NO: 43745 - RNA, 19 nt, Artificial Sequence
  Sense Oligo
ccuggugacggagcuuaaa

SEQ ID NO: 43746 - RNA, 19 nt, Artificial Sequence
  Antisense Oligo
uuuaagcuccgucaccagg

SEQ ID NO: 43747 - RNA, 19 nt, Artificial Sequence
  Sense Oligo
cuggugacggagcuuaaag

SEQ ID NO: 43748 - RNA, 19 nt, Artificial Sequence
  Antisense Oligo
cuuuaagcuccgucaccag

SEQ ID NO: 43749 - RNA, 19 nt, Artificial Sequence
  Sense Oligo
uggugacggagcuuaaaga

SEQ ID NO: 43750 - RNA, 19 nt, Artificial Sequence
  Antisense Oligo
ucuuuaagcuccgucacca

SEQ ID NO: 43751 - RNA, 19 nt, Artificial Sequence
  Sense Oligo
ggugacggagcuuaaagaa

SEQ ID NO: 43752 - RNA, 19 nt, Artificial Sequence
  Antisense Oligo
uucuuuaagcuccgucacc

SEQ ID NO: 43753 - RNA, 19 nt, Artificial Sequence
  Sense Oligo
gugacggagcuuaaagaag

SEQ ID NO: 43754 - RNA, 19 nt, Artificial Sequence
  Antisense Oligo
cuucuuuaagcuccgucac

SEQ ID NO: 43755 - RNA, 19 nt, Artificial Sequence
  Sense Oligo
cggagcuuaaagaaggugg

SEQ ID NO: 43756 - RNA, 19 nt, Artificial Sequence
  Antisense Oligo
ccaccuucuuuaagcuccg

SEQ ID NO: 43757 - RNA, 19 nt, Artificial Sequence
  Sense Oligo
ggagcuuaaagaaggugga

SEQ ID NO: 43758 - RNA, 19 nt, Artificial Sequence
  Antisense Oligo
uccaccuucuuuaagcucc

SEQ ID NO: 43759 - RNA, 19 nt, Artificial Sequence
  Sense Oligo
gagcuuaaagaagguggag

SEQ ID NO: 43760 - RNA, 19 nt, Artificial Sequence
  Antisense Oligo
cuccaccuucuuuaagcuc

SEQ ID NO: 43761 - RNA, 19 nt, Artificial Sequence
  Sense Oligo
gucacugagcugcuggcag

SEQ ID NO: 43762 - RNA, 19 nt, Artificial Sequence
  Antisense Oligo
cugccagcagcucagugac

SEQ ID NO: 43763 - RNA, 19 nt, Artificial Sequence
  Sense Oligo
ggcagauggagcacuuccu

SEQ ID NO: 43764 - RNA, 19 nt, Artificial Sequence
  Antisense Oligo
aggaagugcuccaucugcc

SEQ ID NO: 43765 - RNA, 19 nt, Artificial Sequence
  Sense Oligo
gcagauggagcacuuccuu

SEQ ID NO: 43766 - RNA, 19 nt, Artificial Sequence
  Antisense Oligo
aaggaagugcuccaucugc

SEQ ID NO: 43767 - RNA, 19 nt, Artificial Sequence
  Sense Oligo
cagauggagcacuuccuug

SEQ ID NO: 43768 - RNA, 19 nt, Artificial Sequence
  Antisense Oligo
caaggaagugcuccaucug

SEQ ID NO: 43769 - RNA, 19 nt, Artificial Sequence
  Sense Oligo
agauggagcacuuccuuga

SEQ ID NO: 43770 - RNA, 19 nt, Artificial Sequence
  Antisense Oligo
ucaaggaagugcuccaucu

SEQ ID NO: 43771 - RNA, 19 nt, Artificial Sequence
  Sense Oligo
gauggagcacuuccuugac

SEQ ID NO: 43772 - RNA, 19 nt, Artificial Sequence
  Antisense Oligo
gucaaggaagugcuccauc

SEQ ID NO: 43773 - RNA, 19 nt, Artificial Sequence
  Sense Oligo
auggagcacuuccuugaca

SEQ ID NO: 43774 - RNA, 19 nt, Artificial Sequence
  Antisense Oligo
ugucaaggaagugcuccau

SEQ ID NO: 43775 - RNA, 19 nt, Artificial Sequence
  Sense Oligo
uggagcacuuccuugacag

SEQ ID NO: 43776 - RNA, 19 nt, Artificial Sequence
  Antisense Oligo
cugucaaggaagugcucca

SEQ ID NO: 43777 - RNA, 19 nt, Artificial Sequence
  Sense Oligo
ggagcacuuccuugacagc

SEQ ID NO: 43778 - RNA, 19 nt, Artificial Sequence
  Antisense Oligo
gcugucaaggaagugcucc

SEQ ID NO: 43779 - RNA, 19 nt, Artificial Sequence
  Sense Oligo
gagcacuuccuugacagcu

SEQ ID NO: 43780 - RNA, 19 nt, Artificial Sequence
  Antisense Oligo
agcugucaaggaagugcuc

SEQ ID NO: 43781 - RNA, 19 nt, Artificial Sequence
  Sense Oligo
agcacuuccuugacagcug

SEQ ID NO: 43782 - RNA, 19 nt, Artificial Sequence
  Antisense Oligo
cagcugucaaggaagugcu

SEQ ID NO: 43783 - RNA, 19 nt, Artificial Sequence
  Sense Oligo
gcacuuccuugacagcugg

SEQ ID NO: 43784 - RNA, 19 nt, Artificial Sequence
  Antisense Oligo
ccagcugucaaggaagugc

SEQ ID NO: 43785 - RNA, 19 nt, Artificial Sequence
  Sense Oligo
cacuuccuugacagcugga

SEQ ID NO: 43786 - RNA, 19 nt, Artificial Sequence
  Antisense Oligo
uccagcugucaaggaagug

SEQ ID NO: 43787 - RNA, 19 nt, Artificial Sequence
  Sense Oligo
uuugugacccagaagcgaa

SEQ ID NO: 43788 - RNA, 19 nt, Artificial Sequence
  Antisense Oligo
uucgcuucugggucacaaa

SEQ ID NO: 43789 - RNA, 19 nt, Artificial Sequence
  Sense Oligo
uugugacccagaagcgaau

SEQ ID NO: 43790 - RNA, 19 nt, Artificial Sequence
  Antisense Oligo
auucgcuucugggucacaa

SEQ ID NO: 43791 - RNA, 19 nt, Artificial Sequence
  Sense Oligo
ugugacccagaagcgaaug

SEQ ID NO: 43792 - RNA, 19 nt, Artificial Sequence
  Antisense Oligo
cauucgcuucugggucaca

SEQ ID NO: 43793 - RNA, 19 nt, Artificial Sequence
  Sense Oligo
gugacccagaagcgaaugg

SEQ ID NO: 43794 - RNA, 19 nt, Artificial Sequence
  Antisense Oligo
ccauucgcuucugggucac

SEQ ID NO: 43795 - RNA, 19 nt, Artificial Sequence
  Sense Oligo
ugacccagaagcgaaugga

SEQ ID NO: 43796 - RNA, 19 nt, Artificial Sequence
  Antisense Oligo
uccauucgcuucuggguca

SEQ ID NO: 43797 - RNA, 19 nt, Artificial Sequence
  Sense Oligo
ccagaagcgaauggagcac

SEQ ID NO: 43798 - RNA, 19 nt, Artificial Sequence
  Antisense Oligo
gugcuccauucgcuucugg

SEQ ID NO: 43799 - RNA, 19 nt, Artificial Sequence
  Sense Oligo
gcgaauggagcacuuuuac

SEQ ID NO: 43800 - RNA, 19 nt, Artificial Sequence
  Antisense Oligo
guaaaagugcuccauucgc

SEQ ID NO: 43801 - RNA, 19 nt, Artificial Sequence
  Sense Oligo
cgaauggagcacuuuuacc

SEQ ID NO: 43802 - RNA, 19 nt, Artificial Sequence
  Antisense Oligo
gguaaaagugcuccauucg

SEQ ID NO: 43803 - RNA, 19 nt, Artificial Sequence
  Sense Oligo
gaauggagcacuuuuaccu

SEQ ID NO: 43804 - RNA, 19 nt, Artificial Sequence
  Antisense Oligo
agguaaaagugcuccauuc

SEQ ID NO: 43805 - RNA, 19 nt, Artificial Sequence
  Sense Oligo
aauggagcacuuuuaccug

SEQ ID NO: 43806 - RNA, 19 nt, Artificial Sequence
  Antisense Oligo
cagguaaaagugcuccauu

SEQ ID NO: 43807 - RNA, 19 nt, Artificial Sequence
  Sense Oligo
auggagcacuuuuaccuga

SEQ ID NO: 43808 - RNA, 19 nt, Artificial Sequence
  Antisense Oligo
ucagguaaaagugcuccau

SEQ ID NO: 43809 - RNA, 19 nt, Artificial Sequence
  Sense Oligo
uggagcacuuuuaccugaa

SEQ ID NO: 43810 - RNA, 19 nt, Artificial Sequence
  Antisense Oligo
uucagguaaaagugcucca

SEQ ID NO: 43811 - RNA, 19 nt, Artificial Sequence
  Sense Oligo
agagcagcugguuuaccug

SEQ ID NO: 43812 - RNA, 19 nt, Artificial Sequence
  Antisense Oligo
cagguaaaccagcugcucu

SEQ ID NO: 43813 - RNA, 19 nt, Artificial Sequence
  Sense Oligo
gagcagcugguuuaccuga

SEQ ID NO: 43814 - RNA, 19 nt, Artificial Sequence
  Antisense Oligo
ucagguaaaccagcugcuc

SEQ ID NO: 43815 - RNA, 19 nt, Artificial Sequence
  Sense Oligo
agcagcugguuuaccugag

SEQ ID NO: 43816 - RNA, 19 nt, Artificial Sequence
  Antisense Oligo
cucagguaaaccagcugcu

SEQ ID NO: 43817 - RNA, 19 nt, Artificial Sequence
  Sense Oligo
gcagcugguuuaccugagc

SEQ ID NO: 43818 - RNA, 19 nt, Artificial Sequence
  Antisense Oligo
gcucagguaaaccagcugc

SEQ ID NO: 43819 - RNA, 19 nt, Artificial Sequence
  Sense Oligo
cagcugguuuaccugagca

SEQ ID NO: 43820 - RNA, 19 nt, Artificial Sequence
  Antisense Oligo
ugcucagguaaaccagcug

SEQ ID NO: 43821 - RNA, 19 nt, Artificial Sequence
  Sense Oligo
agcugguuuaccugagcac

SEQ ID NO: 43822 - RNA, 19 nt, Artificial Sequence
  Antisense Oligo
gugcucagguaaaccagcu

SEQ ID NO: 43823 - RNA, 19 nt, Artificial Sequence
  Sense Oligo
guuuaccugagcacugagc

SEQ ID NO: 43824 - RNA, 19 nt, Artificial Sequence
  Antisense Oligo
gcucagugcucagguaaac

SEQ ID NO: 43825 - RNA, 19 nt, Artificial Sequence
  Sense Oligo
agcacugagcucaggaagc

SEQ ID NO: 43826 - RNA, 19 nt, Artificial Sequence
  Antisense Oligo
gcuuccugagcucagugcu

SEQ ID NO: 43827 - RNA, 19 nt, Artificial Sequence
  Sense Oligo
gcacugagcucaggaagca

SEQ ID NO: 43828 - RNA, 19 nt, Artificial Sequence
  Antisense Oligo
ugcuuccugagcucagugc

SEQ ID NO: 43829 - RNA, 19 nt, Artificial Sequence
  Sense Oligo
cacugagcucaggaagcag

SEQ ID NO: 43830 - RNA, 19 nt, Artificial Sequence
  Antisense Oligo
cugcuuccugagcucagug

SEQ ID NO: 43831 - RNA, 19 nt, Artificial Sequence
  Sense Oligo
acugagcucaggaagcagc

SEQ ID NO: 43832 - RNA, 19 nt, Artificial Sequence
  Antisense Oligo
gcugcuuccugagcucagu

SEQ ID NO: 43833 - RNA, 19 nt, Artificial Sequence
  Sense Oligo
cgcccuaacgaugcuaucc

SEQ ID NO: 43834 - RNA, 19 nt, Artificial Sequence
  Antisense Oligo
ggauagcaucguuagggcg

SEQ ID NO: 43835 - RNA, 19 nt, Artificial Sequence
  Sense Oligo
gcccuaacgaugcuauccu

SEQ ID NO: 43836 - RNA, 19 nt, Artificial Sequence
  Antisense Oligo
aggauagcaucguuagggc

SEQ ID NO: 43837 - RNA, 19 nt, Artificial Sequence
  Sense Oligo
cccuaacgaugcuauccuu

SEQ ID NO: 43838 - RNA, 19 nt, Artificial Sequence
  Antisense Oligo
aaggauagcaucguuaggg

SEQ ID NO: 43839 - RNA, 19 nt, Artificial Sequence
  Sense Oligo
ccuaacgaugcuauccuuc

SEQ ID NO: 43840 - RNA, 19 nt, Artificial Sequence
  Antisense Oligo
gaaggauagcaucguuagg

SEQ ID NO: 43841 - RNA, 19 nt, Artificial Sequence
  Sense Oligo
cuaacgaugcuauccuuca

SEQ ID NO: 43842 - RNA, 19 nt, Artificial Sequence
  Antisense Oligo
ugaaggauagcaucguuag

SEQ ID NO: 43843 - RNA, 19 nt, Artificial Sequence
  Sense Oligo
uaacgaugcuauccuucau

SEQ ID NO: 43844 - RNA, 19 nt, Artificial Sequence
  Antisense Oligo
augaaggauagcaucguua

SEQ ID NO: 43845 - RNA, 19 nt, Artificial Sequence
  Sense Oligo
augcuauccuucaucaaaa

SEQ ID NO: 43846 - RNA, 19 nt, Artificial Sequence
  Antisense Oligo
uuuugaugaaggauagcau

SEQ ID NO: 43847 - RNA, 19 nt, Artificial Sequence
  Sense Oligo
gcuauccuucaucaaaagc

SEQ ID NO: 43848 - RNA, 19 nt, Artificial Sequence
  Antisense Oligo
gcuuuugaugaaggauagc

SEQ ID NO: 43849 - RNA, 19 nt, Artificial Sequence
  Sense Oligo
cuauccuucaucaaaagca

SEQ ID NO: 43850 - RNA, 19 nt, Artificial Sequence
  Antisense Oligo
ugcuuuugaugaaggauag

SEQ ID NO: 43851 - RNA, 19 nt, Artificial Sequence
  Sense Oligo
uauccuucaucaaaagcaa

SEQ ID NO: 43852 - RNA, 19 nt, Artificial Sequence
  Antisense Oligo
uugcuuuugaugaaggaua

SEQ ID NO: 43853 - RNA, 19 nt, Artificial Sequence
  Sense Oligo
uccuucaucaaaagcaacu

SEQ ID NO: 43854 - RNA, 19 nt, Artificial Sequence
  Antisense Oligo
aguugcuuuugaugaagga

SEQ ID NO: 43855 - RNA, 19 nt, Artificial Sequence
  Sense Oligo
ccuucaucaaaagcaacug

SEQ ID NO: 43856 - RNA, 19 nt, Artificial Sequence
  Antisense Oligo
caguugcuuuugaugaagg

SEQ ID NO: 43857 - RNA, 19 nt, Artificial Sequence
  Sense Oligo
cuucaucaaaagcaacugc

SEQ ID NO: 43858 - RNA, 19 nt, Artificial Sequence
  Antisense Oligo
gcaguugcuuuugaugaag

SEQ ID NO: 43859 - RNA, 19 nt, Artificial Sequence
  Sense Oligo
uucaucaaaagcaacugca

SEQ ID NO: 43860 - RNA, 19 nt, Artificial Sequence
  Antisense Oligo
ugcaguugcuuuugaugaa

SEQ ID NO: 43861 - RNA, 19 nt, Artificial Sequence
  Sense Oligo
ucaaaagcaacugcacccu

SEQ ID NO: 43862 - RNA, 19 nt, Artificial Sequence
  Antisense Oligo
agggugcaguugcuuuuga

SEQ ID NO: 43863 - RNA, 19 nt, Artificial Sequence
  Sense Oligo
caaaagcaacugcacccug

SEQ ID NO: 43864 - RNA, 19 nt, Artificial Sequence
  Antisense Oligo
cagggugcaguugcuuuug

SEQ ID NO: 43865 - RNA, 19 nt, Artificial Sequence
  Sense Oligo
aaaagcaacugcacccuga

SEQ ID NO: 43866 - RNA, 19 nt, Artificial Sequence
  Antisense Oligo
ucagggugcaguugcuuuu

SEQ ID NO: 43867 - RNA, 19 nt, Artificial Sequence
  Sense Oligo
aaagcaacugcacccugag

SEQ ID NO: 43868 - RNA, 19 nt, Artificial Sequence
  Antisense Oligo
cucagggugcaguugcuuu

SEQ ID NO: 43869 - RNA, 19 nt, Artificial Sequence
  Sense Oligo
aagcaacugcacccugagg

SEQ ID NO: 43870 - RNA, 19 nt, Artificial Sequence
  Antisense Oligo
ccucagggugcaguugcuu

SEQ ID NO: 43871 - RNA, 19 nt, Artificial Sequence
  Sense Oligo
agcaacugcacccugaggg

SEQ ID NO: 43872 - RNA, 19 nt, Artificial Sequence
  Antisense Oligo
cccucagggugcaguugcu

SEQ ID NO: 43873 - RNA, 19 nt, Artificial Sequence
  Sense Oligo
gcaacugcacccugaggga

SEQ ID NO: 43874 - RNA, 19 nt, Artificial Sequence
  Antisense Oligo
ucccucagggugcaguugc

SEQ ID NO: 43875 - RNA, 19 nt, Artificial Sequence
  Sense Oligo
cugcacccugagggauguc

SEQ ID NO: 43876 - RNA, 19 nt, Artificial Sequence
  Antisense Oligo
gacaucccucagggugcag

SEQ ID NO: 43877 - RNA, 19 nt, Artificial Sequence
  Sense Oligo
ugcacccugagggaugucu

SEQ ID NO: 43878 - RNA, 19 nt, Artificial Sequence
  Antisense Oligo
agacaucccucagggugca

SEQ ID NO: 43879 - RNA, 19 nt, Artificial Sequence
  Sense Oligo
ccugagggaugucuuaagg

SEQ ID NO: 43880 - RNA, 19 nt, Artificial Sequence
  Antisense Oligo
ccuuaagacaucccucagg

SEQ ID NO: 43881 - RNA, 19 nt, Artificial Sequence
  Sense Oligo
cugagggaugucuuaaggg

SEQ ID NO: 43882 - RNA, 19 nt, Artificial Sequence
  Antisense Oligo
cccuuaagacaucccucag

SEQ ID NO: 43883 - RNA, 19 nt, Artificial Sequence
  Sense Oligo
ugagggaugucuuaagggc

SEQ ID NO: 43884 - RNA, 19 nt, Artificial Sequence
  Antisense Oligo
gcccuuaagacaucccuca

SEQ ID NO: 43885 - RNA, 19 nt, Artificial Sequence
  Sense Oligo
gagggaugucuuaagggcc

SEQ ID NO: 43886 - RNA, 19 nt, Artificial Sequence
  Antisense Oligo
ggcccuuaagacaucccuc

SEQ ID NO: 43887 - RNA, 19 nt, Artificial Sequence
  Sense Oligo
agggaugucuuaagggccu

SEQ ID NO: 43888 - RNA, 19 nt, Artificial Sequence
  Antisense Oligo
aggcccuuaagacaucccu

SEQ ID NO: 43889 - RNA, 19 nt, Artificial Sequence
  Sense Oligo
gggaugucuuaagggccuc

SEQ ID NO: 43890 - RNA, 19 nt, Artificial Sequence
  Antisense Oligo
gaggcccuuaagacauccc

SEQ ID NO: 43891 - RNA, 19 nt, Artificial Sequence
  Sense Oligo
ggaugucuuaagggccucu

SEQ ID NO: 43892 - RNA, 19 nt, Artificial Sequence
  Antisense Oligo
agaggcccuuaagacaucc

SEQ ID NO: 43893 - RNA, 19 nt, Artificial Sequence
  Sense Oligo
gaugucuuaagggccucug

SEQ ID NO: 43894 - RNA, 19 nt, Artificial Sequence
  Antisense Oligo
cagaggcccuuaagacauc

SEQ ID NO: 43895 - RNA, 19 nt, Artificial Sequence
  Sense Oligo
augucuuaagggccucugu

SEQ ID NO: 43896 - RNA, 19 nt, Artificial Sequence
  Antisense Oligo
acagaggcccuuaagacau

SEQ ID NO: 43897 - RNA, 19 nt, Artificial Sequence
  Sense Oligo
ugucuuaagggccucugug

SEQ ID NO: 43898 - RNA, 19 nt, Artificial Sequence
  Antisense Oligo
cacagaggcccuuaagaca

SEQ ID NO: 43899 - RNA, 19 nt, Artificial Sequence
  Sense Oligo
gucuuaagggccucugugg

SEQ ID NO: 43900 - RNA, 19 nt, Artificial Sequence
  Antisense Oligo
ccacagaggcccuuaagac

SEQ ID NO: 43901 - RNA, 19 nt, Artificial Sequence
  Sense Oligo
ucuuaagggccucuguggg

SEQ ID NO: 43902 - RNA, 19 nt, Artificial Sequence
  Antisense Oligo
cccacagaggcccuuaaga

SEQ ID NO: 43903 - RNA, 19 nt, Artificial Sequence
  Sense Oligo
gccagguaccgcaugagga

SEQ ID NO: 43904 - RNA, 19 nt, Artificial Sequence
  Antisense Oligo
uccucaugcgguaccuggc

SEQ ID NO: 43905 - RNA, 19 nt, Artificial Sequence
  Sense Oligo
ccagguaccgcaugaggag

SEQ ID NO: 43906 - RNA, 19 nt, Artificial Sequence
  Antisense Oligo
cuccucaugcgguaccugg

SEQ ID NO: 43907 - RNA, 19 nt, Artificial Sequence
  Sense Oligo
agagucauggaagagcucc

SEQ ID NO: 43908 - RNA, 19 nt, Artificial Sequence
  Antisense Oligo
ggagcucuuccaugacucu

SEQ ID NO: 43909 - RNA, 19 nt, Artificial Sequence
  Sense Oligo
gagucauggaagagcuccc

SEQ ID NO: 43910 - RNA, 19 nt, Artificial Sequence
  Antisense Oligo
gggagcucuuccaugacuc

SEQ ID NO: 43911 - RNA, 19 nt, Artificial Sequence
  Sense Oligo
gucauggaagagcucccgc

SEQ ID NO: 43912 - RNA, 19 nt, Artificial Sequence
  Antisense Oligo
gcgggagcucuuccaugac

SEQ ID NO: 43913 - RNA, 19 nt, Artificial Sequence
  Sense Oligo
ucauggaagagcucccgcu

SEQ ID NO: 43914 - RNA, 19 nt, Artificial Sequence
  Antisense Oligo
agcgggagcucuuccauga

SEQ ID NO: 43915 - RNA, 19 nt, Artificial Sequence
  Sense Oligo
cauggaagagcucccgcug

SEQ ID NO: 43916 - RNA, 19 nt, Artificial Sequence
  Antisense Oligo
cagcgggagcucuuccaug

SEQ ID NO: 43917 - RNA, 19 nt, Artificial Sequence
  Sense Oligo
aagagcucccgcugaugcu

SEQ ID NO: 43918 - RNA, 19 nt, Artificial Sequence
  Antisense Oligo
agcaucagcgggagcucuu

SEQ ID NO: 43919 - RNA, 19 nt, Artificial Sequence
  Sense Oligo
agcucccgcugaugcucuu

SEQ ID NO: 43920 - RNA, 19 nt, Artificial Sequence
  Antisense Oligo
aagagcaucagcgggagcu

SEQ ID NO: 43921 - RNA, 19 nt, Artificial Sequence
  Sense Oligo
gcucccgcugaugcucuua

SEQ ID NO: 43922 - RNA, 19 nt, Artificial Sequence
  Antisense Oligo
uaagagcaucagcgggagc

SEQ ID NO: 43923 - RNA, 19 nt, Artificial Sequence
  Sense Oligo
cucccgcugaugcucuuau

SEQ ID NO: 43924 - RNA, 19 nt, Artificial Sequence
  Antisense Oligo
auaagagcaucagcgggag

SEQ ID NO: 43925 - RNA, 19 nt, Artificial Sequence
  Sense Oligo
ucccgcugaugcucuuauc

SEQ ID NO: 43926 - RNA, 19 nt, Artificial Sequence
  Antisense Oligo
gauaagagcaucagcggga

SEQ ID NO: 43927 - RNA, 19 nt, Artificial Sequence
  Sense Oligo
cagaguucagccuggugga

SEQ ID NO: 43928 - RNA, 19 nt, Artificial Sequence
  Antisense Oligo
uccaccaggcugaacucug

SEQ ID NO: 43929 - RNA, 19 nt, Artificial Sequence
  Sense Oligo
agaguucagccugguggac

SEQ ID NO: 43930 - RNA, 19 nt, Artificial Sequence
  Antisense Oligo
guccaccaggcugaacucu

SEQ ID NO: 43931 - RNA, 19 nt, Artificial Sequence
  Sense Oligo
gaguucagccugguggaca

SEQ ID NO: 43932 - RNA, 19 nt, Artificial Sequence
  Antisense Oligo
uguccaccaggcugaacuc

SEQ ID NO: 43933 - RNA, 19 nt, Artificial Sequence
  Sense Oligo
caagcugaggaucaucaug

SEQ ID NO: 43934 - RNA, 19 nt, Artificial Sequence
  Antisense Oligo
caugaugauccucagcuug

SEQ ID NO: 43935 - RNA, 19 nt, Artificial Sequence
  Sense Oligo
aagcugaggaucaucaugg

SEQ ID NO: 43936 - RNA, 19 nt, Artificial Sequence
  Antisense Oligo
ccaugaugauccucagcuu

SEQ ID NO: 43937 - RNA, 19 nt, Artificial Sequence
  Sense Oligo
agcugaggaucaucaugga

SEQ ID NO: 43938 - RNA, 19 nt, Artificial Sequence
  Antisense Oligo
uccaugaugauccucagcu

SEQ ID NO: 43939 - RNA, 19 nt, Artificial Sequence
  Sense Oligo
gaggaucaucauggagcag

SEQ ID NO: 43940 - RNA, 19 nt, Artificial Sequence
  Antisense Oligo
cugcuccaugaugauccuc

SEQ ID NO: 43941 - RNA, 19 nt, Artificial Sequence
  Sense Oligo
aggaucaucauggagcagu

SEQ ID NO: 43942 - RNA, 19 nt, Artificial Sequence
  Antisense Oligo
acugcuccaugaugauccu

SEQ ID NO: 43943 - RNA, 19 nt, Artificial Sequence
  Sense Oligo
ggaucaucauggagcaguc

SEQ ID NO: 43944 - RNA, 19 nt, Artificial Sequence
  Antisense Oligo
gacugcuccaugaugaucc

SEQ ID NO: 43945 - RNA, 19 nt, Artificial Sequence
  Sense Oligo
gaucaucauggagcagucc

SEQ ID NO: 43946 - RNA, 19 nt, Artificial Sequence
  Antisense Oligo
ggacugcuccaugaugauc

SEQ ID NO: 43947 - RNA, 19 nt, Artificial Sequence
  Sense Oligo
ggagcaguccaugaggugc

SEQ ID NO: 43948 - RNA, 19 nt, Artificial Sequence
  Antisense Oligo
gcaccucauggacugcucc

SEQ ID NO: 43949 - RNA, 19 nt, Artificial Sequence
  Sense Oligo
gagcaguccaugaggugcc

SEQ ID NO: 43950 - RNA, 19 nt, Artificial Sequence
  Antisense Oligo
ggcaccucauggacugcuc

SEQ ID NO: 43951 - RNA, 19 nt, Artificial Sequence
  Sense Oligo
guccaugaggugccuuccu

SEQ ID NO: 43952 - RNA, 19 nt, Artificial Sequence
  Antisense Oligo
aggaaggcaccucauggac

SEQ ID NO: 43953 - RNA, 19 nt, Artificial Sequence
  Sense Oligo
augaggugccuuccugccu

SEQ ID NO: 43954 - RNA, 19 nt, Artificial Sequence
  Antisense Oligo
aggcaggaaggcaccucau

SEQ ID NO: 43955 - RNA, 19 nt, Artificial Sequence
  Sense Oligo
ggugccuuccugccuuccu

SEQ ID NO: 43956 - RNA, 19 nt, Artificial Sequence
  Antisense Oligo
aggaaggcaggaaggcacc

SEQ ID NO: 43957 - RNA, 19 nt, Artificial Sequence
  Sense Oligo
uuccugccuuccugcccga

SEQ ID NO: 43958 - RNA, 19 nt, Artificial Sequence
  Antisense Oligo
ucgggcaggaaggcaggaa

SEQ ID NO: 43959 - RNA, 19 nt, Artificial Sequence
  Sense Oligo
gacccuuggccacugucug

SEQ ID NO: 43960 - RNA, 19 nt, Artificial Sequence
  Antisense Oligo
cagacaguggccaaggguc

SEQ ID NO: 43961 - RNA, 19 nt, Artificial Sequence
  Sense Oligo
acccuuggccacugucugg

SEQ ID NO: 43962 - RNA, 19 nt, Artificial Sequence
  Antisense Oligo
ccagacaguggccaagggu

SEQ ID NO: 43963 - RNA, 19 nt, Artificial Sequence
  Sense Oligo
cugucuggcucaccuggca

SEQ ID NO: 43964 - RNA, 19 nt, Artificial Sequence
  Antisense Oligo
ugccaggugagccagacag

SEQ ID NO: 43965 - RNA, 19 nt, Artificial Sequence
  Sense Oligo
ugucuggcucaccuggcag

SEQ ID NO: 43966 - RNA, 19 nt, Artificial Sequence
  Antisense Oligo
cugccaggugagccagaca

SEQ ID NO: 43967 - RNA, 19 nt, Artificial Sequence
  Sense Oligo
ucaccuggcagggaugggu

SEQ ID NO: 43968 - RNA, 19 nt, Artificial Sequence
  Antisense Oligo
acccaucccugccagguga

SEQ ID NO: 43969 - RNA, 19 nt, Artificial Sequence
  Sense Oligo
ucccguggagcguugucuc

SEQ ID NO: 43970 - RNA, 19 nt, Artificial Sequence
  Antisense Oligo
gagacaacgcuccacggga

SEQ ID NO: 43971 - RNA, 19 nt, Artificial Sequence
  Sense Oligo
cagcccaaccucgucgucu

SEQ ID NO: 43972 - RNA, 19 nt, Artificial Sequence
  Antisense Oligo
agacgacgagguugggcug

SEQ ID NO: 43973 - RNA, 19 nt, Artificial Sequence
  Sense Oligo
agcccaaccucgucgucug

SEQ ID NO: 43974 - RNA, 19 nt, Artificial Sequence
  Antisense Oligo
cagacgacgagguugggcu

SEQ ID NO: 43975 - RNA, 19 nt, Artificial Sequence
  Sense Oligo
gcccaaccucgucgucugu

SEQ ID NO: 43976 - RNA, 19 nt, Artificial Sequence
  Antisense Oligo
acagacgacgagguugggc

SEQ ID NO: 43977 - RNA, 19 nt, Artificial Sequence
  Sense Oligo
cccaaccucgucgucugug

SEQ ID NO: 43978 - RNA, 19 nt, Artificial Sequence
  Antisense Oligo
cacagacgacgagguuggg

SEQ ID NO: 43979 - RNA, 19 nt, Artificial Sequence
  Sense Oligo
ccaaccucgucgucugugg

SEQ ID NO: 43980 - RNA, 19 nt, Artificial Sequence
  Antisense Oligo
ccacagacgacgagguugg

SEQ ID NO: 43981 - RNA, 19 nt, Artificial Sequence
  Sense Oligo
caaccucgucgucuguggc

SEQ ID NO: 43982 - RNA, 19 nt, Artificial Sequence
  Antisense Oligo
gccacagacgacgagguug

SEQ ID NO: 43983 - RNA, 19 nt, Artificial Sequence
  Sense Oligo
aaccucgucgucuguggcc

SEQ ID NO: 43984 - RNA, 19 nt, Artificial Sequence
  Antisense Oligo
ggccacagacgacgagguu

SEQ ID NO: 43985 - RNA, 19 nt, Artificial Sequence
  Sense Oligo
accucgucgucuguggcca

SEQ ID NO: 43986 - RNA, 19 nt, Artificial Sequence
  Antisense Oligo
uggccacagacgacgaggu

SEQ ID NO: 43987 - RNA, 19 nt, Artificial Sequence
  Sense Oligo
cucgucgucuguggccacu

SEQ ID NO: 43988 - RNA, 19 nt, Artificial Sequence
  Antisense Oligo
aguggccacagacgacgag

SEQ ID NO: 43989 - RNA, 19 nt, Artificial Sequence
  Sense Oligo
ucgucgucuguggccacuc

SEQ ID NO: 43990 - RNA, 19 nt, Artificial Sequence
  Antisense Oligo
gaguggccacagacgacga

SEQ ID NO: 43991 - RNA, 19 nt, Artificial Sequence
  Sense Oligo
ucuguggccacuccgaggu

SEQ ID NO: 43992 - RNA, 19 nt, Artificial Sequence
  Antisense Oligo
accucggaguggccacaga

SEQ ID NO: 43993 - RNA, 19 nt, Artificial Sequence
  Sense Oligo
uguggccacuccgaggugu

SEQ ID NO: 43994 - RNA, 19 nt, Artificial Sequence
  Antisense Oligo
acaccucggaguggccaca

SEQ ID NO: 43995 - RNA, 19 nt, Artificial Sequence
  Sense Oligo
guggccacuccgagguguu

SEQ ID NO: 43996 - RNA, 19 nt, Artificial Sequence
  Antisense Oligo
aacaccucggaguggccac

SEQ ID NO: 43997 - RNA, 19 nt, Artificial Sequence
  Sense Oligo
uggccacuccgagguguug

SEQ ID NO: 43998 - RNA, 19 nt, Artificial Sequence
  Antisense Oligo
caacaccucggaguggcca

SEQ ID NO: 43999 - RNA, 19 nt, Artificial Sequence
  Sense Oligo
ccacuccgagguguugcca

SEQ ID NO: 44000 - RNA, 19 nt, Artificial Sequence
  Antisense Oligo
uggcaacaccucggagugg

SEQ ID NO: 44001 - RNA, 19 nt, Artificial Sequence
  Sense Oligo
cacuccgagguguugccag

SEQ ID NO: 44002 - RNA, 19 nt, Artificial Sequence
  Antisense Oligo
cuggcaacaccucggagug

SEQ ID NO: 44003 - RNA, 19 nt, Artificial Sequence
  Sense Oligo
acuccgagguguugccagc

SEQ ID NO: 44004 - RNA, 19 nt, Artificial Sequence
  Antisense Oligo
gcuggcaacaccucggagu

SEQ ID NO: 44005 - RNA, 19 nt, Artificial Sequence
  Sense Oligo
ccuggcugucuacaugcaa

SEQ ID NO: 44006 - RNA, 19 nt, Artificial Sequence
  Antisense Oligo
uugcauguagacagccagg

SEQ ID NO: 44007 - RNA, 19 nt, Artificial Sequence
  Sense Oligo
cuggcugucuacaugcaaa

SEQ ID NO: 44008 - RNA, 19 nt, Artificial Sequence
  Antisense Oligo
uuugcauguagacagccag

SEQ ID NO: 44009 - RNA, 19 nt, Artificial Sequence
  Sense Oligo
ccugcccacuuacgaugag

SEQ ID NO: 44010 - RNA, 19 nt, Artificial Sequence
  Antisense Oligo
cucaucguaagugggcagg

SEQ ID NO: 44011 - RNA, 19 nt, Artificial Sequence
  Sense Oligo
cugcccacuuacgaugagg

SEQ ID NO: 44012 - RNA, 19 nt, Artificial Sequence
  Antisense Oligo
ccucaucguaagugggcag

SEQ ID NO: 44013 - RNA, 19 nt, Artificial Sequence
  Sense Oligo
ugcccacuuacgaugaggu

SEQ ID NO: 44014 - RNA, 19 nt, Artificial Sequence
  Antisense Oligo
accucaucguaagugggca

SEQ ID NO: 44015 - RNA, 19 nt, Artificial Sequence
  Sense Oligo
gcccacuuacgaugaggug

SEQ ID NO: 44016 - RNA, 19 nt, Artificial Sequence
  Antisense Oligo
caccucaucguaagugggc

SEQ ID NO: 44017 - RNA, 19 nt, Artificial Sequence
  Sense Oligo
cccacuuacgaugaggugc

SEQ ID NO: 44018 - RNA, 19 nt, Artificial Sequence
  Antisense Oligo
gcaccucaucguaaguggg

SEQ ID NO: 44019 - RNA, 19 nt, Artificial Sequence
  Sense Oligo
acgaugaggugcugcucug

SEQ ID NO: 44020 - RNA, 19 nt, Artificial Sequence
  Antisense Oligo
cagagcagcaccucaucgu

SEQ ID NO: 44021 - RNA, 19 nt, Artificial Sequence
  Sense Oligo
ggcaaccaccuuugaggag

SEQ ID NO: 44022 - RNA, 19 nt, Artificial Sequence
  Antisense Oligo
cuccucaaaggugguugcc

SEQ ID NO: 44023 - RNA, 19 nt, Artificial Sequence
  Sense Oligo
gcaaccaccuuugaggagg

SEQ ID NO: 44024 - RNA, 19 nt, Artificial Sequence
  Antisense Oligo
ccuccucaaaggugguugc

SEQ ID NO: 44025 - RNA, 19 nt, Artificial Sequence
  Sense Oligo
aggagguggcacuguugcu

SEQ ID NO: 44026 - RNA, 19 nt, Artificial Sequence
  Antisense Oligo
agcaacagugccaccuccu

SEQ ID NO: 44027 - RNA, 19 nt, Artificial Sequence
  Sense Oligo
ggagguggcacuguugcug

SEQ ID NO: 44028 - RNA, 19 nt, Artificial Sequence
  Antisense Oligo
cagcaacagugccaccucc

SEQ ID NO: 44029 - RNA, 19 nt, Artificial Sequence
  Sense Oligo
cuguucgcagaucagcuga

SEQ ID NO: 44030 - RNA, 19 nt, Artificial Sequence
  Antisense Oligo
ucagcugaucugcgaacag

SEQ ID NO: 44031 - RNA, 19 nt, Artificial Sequence
  Sense Oligo
uguucgcagaucagcugag

SEQ ID NO: 44032 - RNA, 19 nt, Artificial Sequence
  Antisense Oligo
cucagcugaucugcgaaca

SEQ ID NO: 44033 - RNA, 19 nt, Artificial Sequence
  Sense Oligo
guucgcagaucagcugagc

SEQ ID NO: 44034 - RNA, 19 nt, Artificial Sequence
  Antisense Oligo
gcucagcugaucugcgaac

SEQ ID NO: 44035 - RNA, 19 nt, Artificial Sequence
  Sense Oligo
uucgcagaucagcugagcu

SEQ ID NO: 44036 - RNA, 19 nt, Artificial Sequence
  Antisense Oligo
agcucagcugaucugcgaa

SEQ ID NO: 44037 - RNA, 19 nt, Artificial Sequence
  Sense Oligo
ucgcagaucagcugagcua

SEQ ID NO: 44038 - RNA, 19 nt, Artificial Sequence
  Antisense Oligo
uagcucagcugaucugcga

SEQ ID NO: 44039 - RNA, 19 nt, Artificial Sequence
  Sense Oligo
cgcagaucagcugagcuac

SEQ ID NO: 44040 - RNA, 19 nt, Artificial Sequence
  Antisense Oligo
guagcucagcugaucugcg

SEQ ID NO: 44041 - RNA, 19 nt, Artificial Sequence
  Sense Oligo
gcagaucagcugagcuacg

SEQ ID NO: 44042 - RNA, 19 nt, Artificial Sequence
  Antisense Oligo
cguagcucagcugaucugc

SEQ ID NO: 44043 - RNA, 19 nt, Artificial Sequence
  Sense Oligo
cagaucagcugagcuacga

SEQ ID NO: 44044 - RNA, 19 nt, Artificial Sequence
  Antisense Oligo
ucguagcucagcugaucug

SEQ ID NO: 44045 - RNA, 19 nt, Artificial Sequence
  Sense Oligo
gaucagcugagcuacgagg

SEQ ID NO: 44046 - RNA, 19 nt, Artificial Sequence
  Antisense Oligo
ccucguagcucagcugauc

SEQ ID NO: 44047 - RNA, 19 nt, Artificial Sequence
  Sense Oligo
aucagcugagcuacgaggu

SEQ ID NO: 44048 - RNA, 19 nt, Artificial Sequence
  Antisense Oligo
accucguagcucagcugau

SEQ ID NO: 44049 - RNA, 19 nt, Artificial Sequence
  Sense Oligo
ucagcugagcuacgaggug

SEQ ID NO: 44050 - RNA, 19 nt, Artificial Sequence
  Antisense Oligo
caccucguagcucagcuga

SEQ ID NO: 44051 - RNA, 19 nt, Artificial Sequence
  Sense Oligo
cagcugagcuacgaggugg

SEQ ID NO: 44052 - RNA, 19 nt, Artificial Sequence
  Antisense Oligo
ccaccucguagcucagcug

SEQ ID NO: 44053 - RNA, 19 nt, Artificial Sequence
  Sense Oligo
agcugagcuacgagguggc

SEQ ID NO: 44054 - RNA, 19 nt, Artificial Sequence
  Antisense Oligo
gccaccucguagcucagcu

SEQ ID NO: 44055 - RNA, 19 nt, Artificial Sequence
  Sense Oligo
gcugagcuacgagguggca

SEQ ID NO: 44056 - RNA, 19 nt, Artificial Sequence
  Antisense Oligo
ugccaccucguagcucagc

SEQ ID NO: 44057 - RNA, 19 nt, Artificial Sequence
  Sense Oligo
cugagcuacgagguggcac

SEQ ID NO: 44058 - RNA, 19 nt, Artificial Sequence
  Antisense Oligo
gugccaccucguagcucag

SEQ ID NO: 44059 - RNA, 19 nt, Artificial Sequence
  Sense Oligo
ugagcuacgagguggcacg

SEQ ID NO: 44060 - RNA, 19 nt, Artificial Sequence
  Antisense Oligo
cgugccaccucguagcuca

SEQ ID NO: 44061 - RNA, 19 nt, Artificial Sequence
  Sense Oligo
cuacgagguggcacgccaa

SEQ ID NO: 44062 - RNA, 19 nt, Artificial Sequence
  Antisense Oligo
uuggcgugccaccucguag

SEQ ID NO: 44063 - RNA, 19 nt, Artificial Sequence
  Sense Oligo
uacgagguggcacgccaag

SEQ ID NO: 44064 - RNA, 19 nt, Artificial Sequence
  Antisense Oligo
cuuggcgugccaccucgua

SEQ ID NO: 44065 - RNA, 19 nt, Artificial Sequence
  Sense Oligo
agcggaggagcuuuuccac

SEQ ID NO: 44066 - RNA, 19 nt, Artificial Sequence
  Antisense Oligo
guggaaaagcuccuccgcu

SEQ ID NO: 44067 - RNA, 19 nt, Artificial Sequence
  Sense Oligo
gcggaggagcuuuuccaca

SEQ ID NO: 44068 - RNA, 19 nt, Artificial Sequence
  Antisense Oligo
uguggaaaagcuccuccgc

SEQ ID NO: 44069 - RNA, 19 nt, Artificial Sequence
  Sense Oligo
agaagacuaccagcucguc

SEQ ID NO: 44070 - RNA, 19 nt, Artificial Sequence
  Antisense Oligo
gacgagcugguagucuucu

SEQ ID NO: 44071 - RNA, 19 nt, Artificial Sequence
  Sense Oligo
gaagacuaccagcucguca

SEQ ID NO: 44072 - RNA, 19 nt, Artificial Sequence
  Antisense Oligo
ugacgagcugguagucuuc

SEQ ID NO: 44073 - RNA, 19 nt, Artificial Sequence
  Sense Oligo
aagacuaccagcucgucau

SEQ ID NO: 44074 - RNA, 19 nt, Artificial Sequence
  Antisense Oligo
augacgagcugguagucuu

SEQ ID NO: 44075 - RNA, 19 nt, Artificial Sequence
  Sense Oligo
agacuaccagcucgucaug

SEQ ID NO: 44076 - RNA, 19 nt, Artificial Sequence
  Antisense Oligo
caugacgagcugguagucu

SEQ ID NO: 44077 - RNA, 19 nt, Artificial Sequence
  Sense Oligo
gacuaccagcucgucaugg

SEQ ID NO: 44078 - RNA, 19 nt, Artificial Sequence
  Antisense Oligo
ccaugacgagcugguaguc

SEQ ID NO: 44079 - RNA, 19 nt, Artificial Sequence
  Sense Oligo
ccagcucgucauggucugu

SEQ ID NO: 44080 - RNA, 19 nt, Artificial Sequence
  Antisense Oligo
acagaccaugacgagcugg

SEQ ID NO: 44081 - RNA, 19 nt, Artificial Sequence
  Sense Oligo
cagcucgucauggucugug

SEQ ID NO: 44082 - RNA, 19 nt, Artificial Sequence
  Antisense Oligo
cacagaccaugacgagcug

SEQ ID NO: 44083 - RNA, 19 nt, Artificial Sequence
  Sense Oligo
ucgucauggucugugaugg

SEQ ID NO: 44084 - RNA, 19 nt, Artificial Sequence
  Antisense Oligo
ccaucacagaccaugacga

SEQ ID NO: 44085 - RNA, 19 nt, Artificial Sequence
  Sense Oligo
gggacugggagcacugcua

SEQ ID NO: 44086 - RNA, 19 nt, Artificial Sequence
  Antisense Oligo
uagcagugcucccaguccc

SEQ ID NO: 44087 - RNA, 19 nt, Artificial Sequence
  Sense Oligo
ggacugggagcacugcuac

SEQ ID NO: 44088 - RNA, 19 nt, Artificial Sequence
  Antisense Oligo
guagcagugcucccagucc

SEQ ID NO: 44089 - RNA, 19 nt, Artificial Sequence
  Sense Oligo
gacugggagcacugcuacc

SEQ ID NO: 44090 - RNA, 19 nt, Artificial Sequence
  Antisense Oligo
gguagcagugcucccaguc

SEQ ID NO: 44091 - RNA, 19 nt, Artificial Sequence
  Sense Oligo
ccauccaagccuaccuggc

SEQ ID NO: 44092 - RNA, 19 nt, Artificial Sequence
  Antisense Oligo
gccagguaggcuuggaugg

SEQ ID NO: 44093 - RNA, 19 nt, Artificial Sequence
  Sense Oligo
cauccaagccuaccuggca

SEQ ID NO: 44094 - RNA, 19 nt, Artificial Sequence
  Antisense Oligo
ugccagguaggcuuggaug

SEQ ID NO: 44095 - RNA, 19 nt, Artificial Sequence
  Sense Oligo
auccaagccuaccuggcag

SEQ ID NO: 44096 - RNA, 19 nt, Artificial Sequence
  Antisense Oligo
cugccagguaggcuuggau

SEQ ID NO: 44097 - RNA, 19 nt, Artificial Sequence
  Sense Oligo
uccaagccuaccuggcagg

SEQ ID NO: 44098 - RNA, 19 nt, Artificial Sequence
  Antisense Oligo
ccugccagguaggcuugga

SEQ ID NO: 44099 - RNA, 19 nt, Artificial Sequence
  Sense Oligo
uggcaggucacuaccgggu

SEQ ID NO: 44100 - RNA, 19 nt, Artificial Sequence
  Antisense Oligo
acccgguagugaccugcca

SEQ ID NO: 44101 - RNA, 19 nt, Artificial Sequence
  Sense Oligo
acuaccgggucccgaagca

SEQ ID NO: 44102 - RNA, 19 nt, Artificial Sequence
  Antisense Oligo
ugcuucgggacccgguagu

SEQ ID NO: 44103 - RNA, 19 nt, Artificial Sequence
  Sense Oligo
uaccgggucccgaagcaga

SEQ ID NO: 44104 - RNA, 19 nt, Artificial Sequence
  Antisense Oligo
ucugcuucgggacccggua

SEQ ID NO: 44105 - RNA, 19 nt, Artificial Sequence
  Sense Oligo
gucccgaagcagacccugu

SEQ ID NO: 44106 - RNA, 19 nt, Artificial Sequence
  Antisense Oligo
acagggucugcuucgggac

SEQ ID NO: 44107 - RNA, 19 nt, Artificial Sequence
  Sense Oligo
ucccgaagcagacccuguc

SEQ ID NO: 44108 - RNA, 19 nt, Artificial Sequence
  Antisense Oligo
gacagggucugcuucggga

SEQ ID NO: 44109 - RNA, 19 nt, Artificial Sequence
  Sense Oligo
gcggcagccguguucaaug

SEQ ID NO: 44110 - RNA, 19 nt, Artificial Sequence
  Antisense Oligo
cauugaacacggcugccgc

SEQ ID NO: 44111 - RNA, 19 nt, Artificial Sequence
  Sense Oligo
cggcagccguguucaauga

SEQ ID NO: 44112 - RNA, 19 nt, Artificial Sequence
  Antisense Oligo
ucauugaacacggcugccg

SEQ ID NO: 44113 - RNA, 19 nt, Artificial Sequence
  Sense Oligo
ggcagccguguucaaugac

SEQ ID NO: 44114 - RNA, 19 nt, Artificial Sequence
  Antisense Oligo
gucauugaacacggcugcc

SEQ ID NO: 44115 - RNA, 19 nt, Artificial Sequence
  Sense Oligo
gcagccguguucaaugacc

SEQ ID NO: 44116 - RNA, 19 nt, Artificial Sequence
  Antisense Oligo
ggucauugaacacggcugc

SEQ ID NO: 44117 - RNA, 19 nt, Artificial Sequence
  Sense Oligo
cagccguguucaaugaccg

SEQ ID NO: 44118 - RNA, 19 nt, Artificial Sequence
  Antisense Oligo
cggucauugaacacggcug

SEQ ID NO: 44119 - RNA, 19 nt, Artificial Sequence
  Sense Oligo
agccguguucaaugaccgg

SEQ ID NO: 44120 - RNA, 19 nt, Artificial Sequence
  Antisense Oligo
ccggucauugaacacggcu

SEQ ID NO: 44121 - RNA, 19 nt, Artificial Sequence
  Sense Oligo
ccguguucaaugaccggcu

SEQ ID NO: 44122 - RNA, 19 nt, Artificial Sequence
  Antisense Oligo
agccggucauugaacacgg

SEQ ID NO: 44123 - RNA, 19 nt, Artificial Sequence
  Sense Oligo
cguguucaaugaccggcug

SEQ ID NO: 44124 - RNA, 19 nt, Artificial Sequence
  Antisense Oligo
cagccggucauugaacacg

SEQ ID NO: 44125 - RNA, 19 nt, Artificial Sequence
  Sense Oligo
guguucaaugaccggcugu

SEQ ID NO: 44126 - RNA, 19 nt, Artificial Sequence
  Antisense Oligo
acagccggucauugaacac

SEQ ID NO: 44127 - RNA, 19 nt, Artificial Sequence
  Sense Oligo
uguucaaugaccggcugug

SEQ ID NO: 44128 - RNA, 19 nt, Artificial Sequence
  Antisense Oligo
cacagccggucauugaaca

SEQ ID NO: 44129 - RNA, 19 nt, Artificial Sequence
  Sense Oligo
guucaaugaccggcugugu

SEQ ID NO: 44130 - RNA, 19 nt, Artificial Sequence
  Antisense Oligo
acacagccggucauugaac

SEQ ID NO: 44131 - RNA, 19 nt, Artificial Sequence
  Sense Oligo
uucaaugaccggcugugug

SEQ ID NO: 44132 - RNA, 19 nt, Artificial Sequence
  Antisense Oligo
cacacagccggucauugaa

SEQ ID NO: 44133 - RNA, 19 nt, Artificial Sequence
  Sense Oligo
augaccggcuguguguugg

SEQ ID NO: 44134 - RNA, 19 nt, Artificial Sequence
  Antisense Oligo
ccaacacacagccggucau

SEQ ID NO: 44135 - RNA, 19 nt, Artificial Sequence
  Sense Oligo
ugaccggcuguguguuggg

SEQ ID NO: 44136 - RNA, 19 nt, Artificial Sequence
  Antisense Oligo
cccaacacacagccgguca

SEQ ID NO: 44137 - RNA, 19 nt, Artificial Sequence
  Sense Oligo
gaccggcuguguguuggga

SEQ ID NO: 44138 - RNA, 19 nt, Artificial Sequence
  Antisense Oligo
ucccaacacacagccgguc

SEQ ID NO: 44139 - RNA, 19 nt, Artificial Sequence
  Sense Oligo
accggcuguguguugggau

SEQ ID NO: 44140 - RNA, 19 nt, Artificial Sequence
  Antisense Oligo
aucccaacacacagccggu

SEQ ID NO: 44141 - RNA, 19 nt, Artificial Sequence
  Sense Oligo
ccggcuguguguugggauc

SEQ ID NO: 44142 - RNA, 19 nt, Artificial Sequence
  Antisense Oligo
gaucccaacacacagccgg

SEQ ID NO: 44143 - RNA, 19 nt, Artificial Sequence
  Sense Oligo
cggcuguguguugggaucg

SEQ ID NO: 44144 - RNA, 19 nt, Artificial Sequence
  Antisense Oligo
cgaucccaacacacagccg

SEQ ID NO: 44145 - RNA, 19 nt, Artificial Sequence
  Sense Oligo
ggcuguguguugggaucgu

SEQ ID NO: 44146 - RNA, 19 nt, Artificial Sequence
  Antisense Oligo
acgaucccaacacacagcc

SEQ ID NO: 44147 - RNA, 19 nt, Artificial Sequence
  Sense Oligo
gcuguguguugggaucgug

SEQ ID NO: 44148 - RNA, 19 nt, Artificial Sequence
  Antisense Oligo
cacgaucccaacacacagc

SEQ ID NO: 44149 - RNA, 19 nt, Artificial Sequence
  Sense Oligo
cuguguguugggaucgugg

SEQ ID NO: 44150 - RNA, 19 nt, Artificial Sequence
  Antisense Oligo
ccacgaucccaacacacag

SEQ ID NO: 44151 - RNA, 19 nt, Artificial Sequence
  Sense Oligo
uguguguugggaucguggc

SEQ ID NO: 44152 - RNA, 19 nt, Artificial Sequence
  Antisense Oligo
gccacgaucccaacacaca

SEQ ID NO: 44153 - RNA, 19 nt, Artificial Sequence
  Sense Oligo
guguguugggaucguggcc

SEQ ID NO: 44154 - RNA, 19 nt, Artificial Sequence
  Antisense Oligo
ggccacgaucccaacacac

SEQ ID NO: 44155 - RNA, 19 nt, Artificial Sequence
  Sense Oligo
uguguugggaucguggccu

SEQ ID NO: 44156 - RNA, 19 nt, Artificial Sequence
  Antisense Oligo
aggccacgaucccaacaca

SEQ ID NO: 44157 - RNA, 19 nt, Artificial Sequence
  Sense Oligo
guguugggaucguggccuc

SEQ ID NO: 44158 - RNA, 19 nt, Artificial Sequence
  Antisense Oligo
gaggccacgaucccaacac

SEQ ID NO: 44159 - RNA, 19 nt, Artificial Sequence
  Sense Oligo
uguugggaucguggccucg

SEQ ID NO: 44160 - RNA, 19 nt, Artificial Sequence
  Antisense Oligo
cgaggccacgaucccaaca

SEQ ID NO: 44161 - RNA, 19 nt, Artificial Sequence
  Sense Oligo
uugggaucguggccucgga

SEQ ID NO: 44162 - RNA, 19 nt, Artificial Sequence
  Antisense Oligo
uccgaggccacgaucccaa

SEQ ID NO: 44163 - RNA, 19 nt, Artificial Sequence
  Sense Oligo
ucggagcgagcagguguug

SEQ ID NO: 44164 - RNA, 19 nt, Artificial Sequence
  Antisense Oligo
caacaccugcucgcuccga

SEQ ID NO: 44165 - RNA, 19 nt, Artificial Sequence
  Sense Oligo
ggagcgagcagguguuggu

SEQ ID NO: 44166 - RNA, 19 nt, Artificial Sequence
  Antisense Oligo
accaacaccugcucgcucc

SEQ ID NO: 44167 - RNA, 19 nt, Artificial Sequence
  Sense Oligo
gagcgagcagguguuggua

SEQ ID NO: 44168 - RNA, 19 nt, Artificial Sequence
  Antisense Oligo
uaccaacaccugcucgcuc

SEQ ID NO: 44169 - RNA, 19 nt, Artificial Sequence
  Sense Oligo
agcgagcagguguugguaa

SEQ ID NO: 44170 - RNA, 19 nt, Artificial Sequence
  Antisense Oligo
uuaccaacaccugcucgcu

SEQ ID NO: 44171 - RNA, 19 nt, Artificial Sequence
  Sense Oligo
gcgagcagguguugguaag

SEQ ID NO: 44172 - RNA, 19 nt, Artificial Sequence
  Antisense Oligo
cuuaccaacaccugcucgc

SEQ ID NO: 44173 - RNA, 19 nt, Artificial Sequence
  Sense Oligo
cgagcagguguugguaagg

SEQ ID NO: 44174 - RNA, 19 nt, Artificial Sequence
  Antisense Oligo
ccuuaccaacaccugcucg

SEQ ID NO: 44175 - RNA, 19 nt, Artificial Sequence
  Sense Oligo
gagcagguguugguaagga

SEQ ID NO: 44176 - RNA, 19 nt, Artificial Sequence
  Antisense Oligo
uccuuaccaacaccugcuc

SEQ ID NO: 44177 - RNA, 19 nt, Artificial Sequence
  Sense Oligo
agcagguguugguaaggag

SEQ ID NO: 44178 - RNA, 19 nt, Artificial Sequence
  Antisense Oligo
cuccuuaccaacaccugcu

SEQ ID NO: 44179 - RNA, 19 nt, Artificial Sequence
  Sense Oligo
cccuccagcagaugaagcc

SEQ ID NO: 44180 - RNA, 19 nt, Artificial Sequence
  Antisense Oligo
ggcuucaucugcuggaggg

SEQ ID NO: 44181 - RNA, 19 nt, Artificial Sequence
  Sense Oligo
ccuccagcagaugaagccu

SEQ ID NO: 44182 - RNA, 19 nt, Artificial Sequence
  Antisense Oligo
aggcuucaucugcuggagg

SEQ ID NO: 44183 - RNA, 19 nt, Artificial Sequence
  Sense Oligo
cagcagaugaagccugucu

SEQ ID NO: 44184 - RNA, 19 nt, Artificial Sequence
  Antisense Oligo
agacaggcuucaucugcug

SEQ ID NO: 44185 - RNA, 19 nt, Artificial Sequence
  Sense Oligo
aggcucagggaggguguga

SEQ ID NO: 44186 - RNA, 19 nt, Artificial Sequence
  Antisense Oligo
ucacacccucccugagccu

SEQ ID NO: 44187 - RNA, 19 nt, Artificial Sequence
  Sense Oligo
ggcucagggagggugugau

SEQ ID NO: 44188 - RNA, 19 nt, Artificial Sequence
  Antisense Oligo
aucacacccucccugagcc

SEQ ID NO: 44189 - RNA, 19 nt, Artificial Sequence
  Sense Oligo
agggagggugugauucauc

SEQ ID NO: 44190 - RNA, 19 nt, Artificial Sequence
  Antisense Oligo
gaugaaucacacccucccu

SEQ ID NO: 44191 - RNA, 19 nt, Artificial Sequence
  Sense Oligo
gggagggugugauucaucu

SEQ ID NO: 44192 - RNA, 19 nt, Artificial Sequence
  Antisense Oligo
agaugaaucacacccuccc

SEQ ID NO: 44193 - RNA, 19 nt, Artificial Sequence
  Sense Oligo
ggagggugugauucaucug

SEQ ID NO: 44194 - RNA, 19 nt, Artificial Sequence
  Antisense Oligo
cagaugaaucacacccucc

SEQ ID NO: 44195 - RNA, 19 nt, Artificial Sequence
  Sense Oligo
gagggugugauucaucugu

SEQ ID NO: 44196 - RNA, 19 nt, Artificial Sequence
  Antisense Oligo
acagaugaaucacacccuc

SEQ ID NO: 44197 - RNA, 19 nt, Artificial Sequence
  Sense Oligo
agggugugauucaucugug

SEQ ID NO: 44198 - RNA, 19 nt, Artificial Sequence
  Antisense Oligo
cacagaugaaucacacccu

SEQ ID NO: 44199 - RNA, 19 nt, Artificial Sequence
  Sense Oligo
gggugugauucaucugugg

SEQ ID NO: 44200 - RNA, 19 nt, Artificial Sequence
  Antisense Oligo
ccacagaugaaucacaccc

SEQ ID NO: 44201 - RNA, 19 nt, Artificial Sequence
  Sense Oligo
ggugugauucaucuguggg

SEQ ID NO: 44202 - RNA, 19 nt, Artificial Sequence
  Antisense Oligo
cccacagaugaaucacacc

SEQ ID NO: 44203 - RNA, 19 nt, Artificial Sequence
  Sense Oligo
gugugauucaucugugggu

SEQ ID NO: 44204 - RNA, 19 nt, Artificial Sequence
  Antisense Oligo
acccacagaugaaucacac

SEQ ID NO: 44205 - RNA, 19 nt, Artificial Sequence
  Sense Oligo
ugugauucaucugugggug

SEQ ID NO: 44206 - RNA, 19 nt, Artificial Sequence
  Antisense Oligo
cacccacagaugaaucaca

SEQ ID NO: 44207 - RNA, 19 nt, Artificial Sequence
  Sense Oligo
gugauucaucugugggugu

SEQ ID NO: 44208 - RNA, 19 nt, Artificial Sequence
  Antisense Oligo
acacccacagaugaaucac

SEQ ID NO: 44209 - RNA, 19 nt, Artificial Sequence
  Sense Oligo
ugauucaucuguggguguc

SEQ ID NO: 44210 - RNA, 19 nt, Artificial Sequence
  Antisense Oligo
gacacccacagaugaauca

SEQ ID NO: 44211 - RNA, 19 nt, Artificial Sequence
  Sense Oligo
gauucaucuguggguguca

SEQ ID NO: 44212 - RNA, 19 nt, Artificial Sequence
  Antisense Oligo
ugacacccacagaugaauc

SEQ ID NO: 44213 - RNA, 19 nt, Artificial Sequence
  Sense Oligo
auucaucugugggugucaa

SEQ ID NO: 44214 - RNA, 19 nt, Artificial Sequence
  Antisense Oligo
uugacacccacagaugaau

SEQ ID NO: 44215 - RNA, 19 nt, Artificial Sequence
  Sense Oligo
uucaucugugggugucaau

SEQ ID NO: 44216 - RNA, 19 nt, Artificial Sequence
  Antisense Oligo
auugacacccacagaugaa

SEQ ID NO: 44217 - RNA, 19 nt, Artificial Sequence
  Sense Oligo
ucaucugugggugucaauc

SEQ ID NO: 44218 - RNA, 19 nt, Artificial Sequence
  Antisense Oligo
gauugacacccacagauga

SEQ ID NO: 44219 - RNA, 19 nt, Artificial Sequence
  Sense Oligo
caucugugggugucaauca

SEQ ID NO: 44220 - RNA, 19 nt, Artificial Sequence
  Antisense Oligo
ugauugacacccacagaug

SEQ ID NO: 44221 - RNA, 19 nt, Artificial Sequence
  Sense Oligo
ggugucaaucagggucugu

SEQ ID NO: 44222 - RNA, 19 nt, Artificial Sequence
  Antisense Oligo
acagacccugauugacacc

SEQ ID NO: 44223 - RNA, 19 nt, Artificial Sequence
  Sense Oligo
gugucaaucagggucugug

SEQ ID NO: 44224 - RNA, 19 nt, Artificial Sequence
  Antisense Oligo
cacagacccugauugacac

SEQ ID NO: 44225 - RNA, 19 nt, Artificial Sequence
  Sense Oligo
ugucaaucagggucugugc

SEQ ID NO: 44226 - RNA, 19 nt, Artificial Sequence
  Antisense Oligo
gcacagacccugauugaca

SEQ ID NO: 44227 - RNA, 19 nt, Artificial Sequence
  Sense Oligo
gucaaucagggucugugcc

SEQ ID NO: 44228 - RNA, 19 nt, Artificial Sequence
  Antisense Oligo
ggcacagacccugauugac

SEQ ID NO: 44229 - RNA, 19 nt, Artificial Sequence
  Sense Oligo
ucaaucagggucugugcca

SEQ ID NO: 44230 - RNA, 19 nt, Artificial Sequence
  Antisense Oligo
uggcacagacccugauuga

SEQ ID NO: 44231 - RNA, 19 nt, Artificial Sequence
  Sense Oligo
cacccuggucaccuggucu

SEQ ID NO: 44232 - RNA, 19 nt, Artificial Sequence
  Antisense Oligo
agaccaggugaccagggug

SEQ ID NO: 44233 - RNA, 19 nt, Artificial Sequence
  Sense Oligo
acaucucugcaguguacuu

SEQ ID NO: 44234 - RNA, 19 nt, Artificial Sequence
  Antisense Oligo
aaguacacugcagagaugu

SEQ ID NO: 44235 - RNA, 19 nt, Artificial Sequence
  Sense Oligo
caucucugcaguguacuuu

SEQ ID NO: 44236 - RNA, 19 nt, Artificial Sequence
  Antisense Oligo
aaaguacacugcagagaug

SEQ ID NO: 44237 - RNA, 19 nt, Artificial Sequence
  Sense Oligo
cucugcaguguacuuugug

SEQ ID NO: 44238 - RNA, 19 nt, Artificial Sequence
  Antisense Oligo
cacaaaguacacugcagag

SEQ ID NO: 44239 - RNA, 19 nt, Artificial Sequence
  Sense Oligo
ucugcaguguacuuugugg

SEQ ID NO: 44240 - RNA, 19 nt, Artificial Sequence
  Antisense Oligo
ccacaaaguacacugcaga

SEQ ID NO: 44241 - RNA, 19 nt, Artificial Sequence
  Sense Oligo
caguguacuuugugguuuu

SEQ ID NO: 44242 - RNA, 19 nt, Artificial Sequence
  Antisense Oligo
aaaaccacaaaguacacug

SEQ ID NO: 44243 - RNA, 19 nt, Artificial Sequence
  Sense Oligo
gaucuuagcucacugcaac

SEQ ID NO: 44244 - RNA, 19 nt, Artificial Sequence
  Antisense Oligo
guugcagugagcuaagauc

SEQ ID NO: 44245 - RNA, 19 nt, Artificial Sequence
  Sense Oligo
aucuuagcucacugcaacc

SEQ ID NO: 44246 - RNA, 19 nt, Artificial Sequence
  Antisense Oligo
gguugcagugagcuaagau

SEQ ID NO: 44247 - RNA, 19 nt, Artificial Sequence
  Sense Oligo
ucuuagcucacugcaaccu

SEQ ID NO: 44248 - RNA, 19 nt, Artificial Sequence
  Antisense Oligo
agguugcagugagcuaaga

SEQ ID NO: 44249 - RNA, 19 nt, Artificial Sequence
  Sense Oligo
agcucacugcaaccuccgu

SEQ ID NO: 44250 - RNA, 19 nt, Artificial Sequence
  Antisense Oligo
acggagguugcagugagcu

SEQ ID NO: 44251 - RNA, 19 nt, Artificial Sequence
  Sense Oligo
cacugcaaccuccguuuuc

SEQ ID NO: 44252 - RNA, 19 nt, Artificial Sequence
  Antisense Oligo
gaaaacggagguugcagug

SEQ ID NO: 44253 - RNA, 19 nt, Artificial Sequence
  Sense Oligo
cguuuucuggguucaagca

SEQ ID NO: 44254 - RNA, 19 nt, Artificial Sequence
  Antisense Oligo
ugcuugaacccagaaaacg

SEQ ID NO: 44255 - RNA, 19 nt, Artificial Sequence
  Sense Oligo
agccuccugaguagcuggg

SEQ ID NO: 44256 - RNA, 19 nt, Artificial Sequence
  Antisense Oligo
cccagcuacucaggaggcu

SEQ ID NO: 44257 - RNA, 19 nt, Artificial Sequence
  Sense Oligo
gccuccugaguagcuggga

SEQ ID NO: 44258 - RNA, 19 nt, Artificial Sequence
  Antisense Oligo
ucccagcuacucaggaggc

SEQ ID NO: 44259 - RNA, 19 nt, Artificial Sequence
  Sense Oligo
ccuccugaguagcugggau

SEQ ID NO: 44260 - RNA, 19 nt, Artificial Sequence
  Antisense Oligo
aucccagcuacucaggagg

SEQ ID NO: 44261 - RNA, 19 nt, Artificial Sequence
  Sense Oligo
cuccugaguagcugggauu

SEQ ID NO: 44262 - RNA, 19 nt, Artificial Sequence
  Antisense Oligo
aaucccagcuacucaggag

SEQ ID NO: 44263 - RNA, 19 nt, Artificial Sequence
  Sense Oligo
uccugaguagcugggauua

SEQ ID NO: 44264 - RNA, 19 nt, Artificial Sequence
  Antisense Oligo
uaaucccagcuacucagga

SEQ ID NO: 44265 - RNA, 19 nt, Artificial Sequence
  Sense Oligo
ccugaguagcugggauuac

SEQ ID NO: 44266 - RNA, 19 nt, Artificial Sequence
  Antisense Oligo
guaaucccagcuacucagg

SEQ ID NO: 44267 - RNA, 19 nt, Artificial Sequence
  Sense Oligo
cugaguagcugggauuaca

SEQ ID NO: 44268 - RNA, 19 nt, Artificial Sequence
  Antisense Oligo
uguaaucccagcuacucag

SEQ ID NO: 44269 - RNA, 19 nt, Artificial Sequence
  Sense Oligo
ugaguagcugggauuacag

SEQ ID NO: 44270 - RNA, 19 nt, Artificial Sequence
  Antisense Oligo
cuguaaucccagcuacuca

SEQ ID NO: 44271 - RNA, 19 nt, Artificial Sequence
  Sense Oligo
uagcugggauuacagguac

SEQ ID NO: 44272 - RNA, 19 nt, Artificial Sequence
  Antisense Oligo
guaccuguaaucccagcua

SEQ ID NO: 44273 - RNA, 19 nt, Artificial Sequence
  Sense Oligo
agcugggauuacagguacc

SEQ ID NO: 44274 - RNA, 19 nt, Artificial Sequence
  Antisense Oligo
gguaccuguaaucccagcu

SEQ ID NO: 44275 - RNA, 19 nt, Artificial Sequence
  Sense Oligo
gcugggauuacagguaccc

SEQ ID NO: 44276 - RNA, 19 nt, Artificial Sequence
  Antisense Oligo
ggguaccuguaaucccagc

SEQ ID NO: 44277 - RNA, 19 nt, Artificial Sequence
  Sense Oligo
uggaguacaguggcgugau

SEQ ID NO: 44278 - RNA, 19 nt, Artificial Sequence
  Antisense Oligo
aucacgccacuguacucca

SEQ ID NO: 44279 - RNA, 19 nt, Artificial Sequence
  Sense Oligo
ggaguacaguggcgugauc

SEQ ID NO: 44280 - RNA, 19 nt, Artificial Sequence
  Antisense Oligo
gaucacgccacuguacucc

SEQ ID NO: 44281 - RNA, 19 nt, Artificial Sequence
  Sense Oligo
gaguacaguggcgugaucu

SEQ ID NO: 44282 - RNA, 19 nt, Artificial Sequence
  Antisense Oligo
agaucacgccacuguacuc

SEQ ID NO: 44283 - RNA, 19 nt, Artificial Sequence
  Sense Oligo
aguacaguggcgugaucuc

SEQ ID NO: 44284 - RNA, 19 nt, Artificial Sequence
  Antisense Oligo
gagaucacgccacuguacu

SEQ ID NO: 44285 - RNA, 19 nt, Artificial Sequence
  Sense Oligo
guacaguggcgugaucucg

SEQ ID NO: 44286 - RNA, 19 nt, Artificial Sequence
  Antisense Oligo
cgagaucacgccacuguac

SEQ ID NO: 44287 - RNA, 19 nt, Artificial Sequence
  Sense Oligo
uacaguggcgugaucucgg

SEQ ID NO: 44288 - RNA, 19 nt, Artificial Sequence
  Antisense Oligo
ccgagaucacgccacugua

SEQ ID NO: 44289 - RNA, 19 nt, Artificial Sequence
  Sense Oligo
acaguggcgugaucucggc

SEQ ID NO: 44290 - RNA, 19 nt, Artificial Sequence
  Antisense Oligo
gccgagaucacgccacugu

SEQ ID NO: 44291 - RNA, 19 nt, Artificial Sequence
  Sense Oligo
caguggcgugaucucggcu

SEQ ID NO: 44292 - RNA, 19 nt, Artificial Sequence
  Antisense Oligo
agccgagaucacgccacug

SEQ ID NO: 44293 - RNA, 19 nt, Artificial Sequence
  Sense Oligo
aguggcgugaucucggcuc

SEQ ID NO: 44294 - RNA, 19 nt, Artificial Sequence
  Antisense Oligo
gagccgagaucacgccacu

SEQ ID NO: 44295 - RNA, 19 nt, Artificial Sequence
  Sense Oligo
guggcgugaucucggcuca

SEQ ID NO: 44296 - RNA, 19 nt, Artificial Sequence
  Antisense Oligo
ugagccgagaucacgccac

SEQ ID NO: 44297 - RNA, 19 nt, Artificial Sequence
  Sense Oligo
ugaucucggcucacugcaa

SEQ ID NO: 44298 - RNA, 19 nt, Artificial Sequence
  Antisense Oligo
uugcagugagccgagauca

SEQ ID NO: 44299 - RNA, 19 nt, Artificial Sequence
  Sense Oligo
gaucucggcucacugcaac

SEQ ID NO: 44300 - RNA, 19 nt, Artificial Sequence
  Antisense Oligo
guugcagugagccgagauc

SEQ ID NO: 44301 - RNA, 19 nt, Artificial Sequence
  Sense Oligo
aucucggcucacugcaacc

SEQ ID NO: 44302 - RNA, 19 nt, Artificial Sequence
  Antisense Oligo
gguugcagugagccgagau

SEQ ID NO: 44303 - RNA, 19 nt, Artificial Sequence
  Sense Oligo
ucucggcucacugcaaccu

SEQ ID NO: 44304 - RNA, 19 nt, Artificial Sequence
  Antisense Oligo
agguugcagugagccgaga

SEQ ID NO: 44305 - RNA, 19 nt, Artificial Sequence
  Sense Oligo
cucggcucacugcaaccuu

SEQ ID NO: 44306 - RNA, 19 nt, Artificial Sequence
  Antisense Oligo
aagguugcagugagccgag

SEQ ID NO: 44307 - RNA, 19 nt, Artificial Sequence
  Sense Oligo
gcucacugcaaccuucgcc

SEQ ID NO: 44308 - RNA, 19 nt, Artificial Sequence
  Antisense Oligo
ggcgaagguugcagugagc

SEQ ID NO: 44309 - RNA, 19 nt, Artificial Sequence
  Sense Oligo
cugccucagccucccaagu

SEQ ID NO: 44310 - RNA, 19 nt, Artificial Sequence
  Antisense Oligo
acuugggaggcugaggcag

SEQ ID NO: 44311 - RNA, 19 nt, Artificial Sequence
  Sense Oligo
ugccucagccucccaagua

SEQ ID NO: 44312 - RNA, 19 nt, Artificial Sequence
  Antisense Oligo
uacuugggaggcugaggca

SEQ ID NO: 44313 - RNA, 19 nt, Artificial Sequence
  Sense Oligo
gccucagccucccaaguag

SEQ ID NO: 44314 - RNA, 19 nt, Artificial Sequence
  Antisense Oligo
cuacuugggaggcugaggc

SEQ ID NO: 44315 - RNA, 19 nt, Artificial Sequence
  Sense Oligo
ccucagccucccaaguagc

SEQ ID NO: 44316 - RNA, 19 nt, Artificial Sequence
  Antisense Oligo
gcuacuugggaggcugagg

SEQ ID NO: 44317 - RNA, 19 nt, Artificial Sequence
  Sense Oligo
cucagccucccaaguagcu

SEQ ID NO: 44318 - RNA, 19 nt, Artificial Sequence
  Antisense Oligo
agcuacuugggaggcugag

SEQ ID NO: 44319 - RNA, 19 nt, Artificial Sequence
  Sense Oligo
ucagccucccaaguagcua

SEQ ID NO: 44320 - RNA, 19 nt, Artificial Sequence
  Antisense Oligo
uagcuacuugggaggcuga

SEQ ID NO: 44321 - RNA, 19 nt, Artificial Sequence
  Sense Oligo
cagccucccaaguagcuag

SEQ ID NO: 44322 - RNA, 19 nt, Artificial Sequence
  Antisense Oligo
cuagcuacuugggaggcug

SEQ ID NO: 44323 - RNA, 19 nt, Artificial Sequence
  Sense Oligo
agccucccaaguagcuagg

SEQ ID NO: 44324 - RNA, 19 nt, Artificial Sequence
  Antisense Oligo
ccuagcuacuugggaggcu

SEQ ID NO: 44325 - RNA, 19 nt, Artificial Sequence
  Sense Oligo
gccucccaaguagcuagga

SEQ ID NO: 44326 - RNA, 19 nt, Artificial Sequence
  Antisense Oligo
uccuagcuacuugggaggc

SEQ ID NO: 44327 - RNA, 19 nt, Artificial Sequence
  Sense Oligo
ccucccaaguagcuaggac

SEQ ID NO: 44328 - RNA, 19 nt, Artificial Sequence
  Antisense Oligo
guccuagcuacuugggagg

SEQ ID NO: 44329 - RNA, 19 nt, Artificial Sequence
  Sense Oligo
cuaggacuacaggcaugca

SEQ ID NO: 44330 - RNA, 19 nt, Artificial Sequence
  Antisense Oligo
ugcaugccuguaguccuag

SEQ ID NO: 44331 - RNA, 19 nt, Artificial Sequence
  Sense Oligo
uaggacuacaggcaugcac

SEQ ID NO: 44332 - RNA, 19 nt, Artificial Sequence
  Antisense Oligo
gugcaugccuguaguccua

SEQ ID NO: 44333 - RNA, 19 nt, Artificial Sequence
  Sense Oligo
aggacuacaggcaugcacc

SEQ ID NO: 44334 - RNA, 19 nt, Artificial Sequence
  Antisense Oligo
ggugcaugccuguaguccu

SEQ ID NO: 44335 - RNA, 19 nt, Artificial Sequence
  Sense Oligo
ggacuacaggcaugcacca

SEQ ID NO: 44336 - RNA, 19 nt, Artificial Sequence
  Antisense Oligo
uggugcaugccuguagucc

SEQ ID NO: 44337 - RNA, 19 nt, Artificial Sequence
  Sense Oligo
gacuacaggcaugcaccag

SEQ ID NO: 44338 - RNA, 19 nt, Artificial Sequence
  Antisense Oligo
cuggugcaugccuguaguc

SEQ ID NO: 44339 - RNA, 19 nt, Artificial Sequence
  Sense Oligo
acuacaggcaugcaccagu

SEQ ID NO: 44340 - RNA, 19 nt, Artificial Sequence
  Antisense Oligo
acuggugcaugccuguagu

SEQ ID NO: 44341 - RNA, 19 nt, Artificial Sequence
  Sense Oligo
cuacaggcaugcaccagua

SEQ ID NO: 44342 - RNA, 19 nt, Artificial Sequence
  Antisense Oligo
uacuggugcaugccuguag

SEQ ID NO: 44343 - RNA, 19 nt, Artificial Sequence
  Sense Oligo
uacaggcaugcaccaguac

SEQ ID NO: 44344 - RNA, 19 nt, Artificial Sequence
  Antisense Oligo
guacuggugcaugccugua

SEQ ID NO: 44345 - RNA, 19 nt, Artificial Sequence
  Sense Oligo
acaggcaugcaccaguaca

SEQ ID NO: 44346 - RNA, 19 nt, Artificial Sequence
  Antisense Oligo
uguacuggugcaugccugu

SEQ ID NO: 44347 - RNA, 19 nt, Artificial Sequence
  Sense Oligo
caggcaugcaccaguacac

SEQ ID NO: 44348 - RNA, 19 nt, Artificial Sequence
  Antisense Oligo
guguacuggugcaugccug

SEQ ID NO: 44349 - RNA, 19 nt, Artificial Sequence
  Sense Oligo
aggcaugcaccaguacacc

SEQ ID NO: 44350 - RNA, 19 nt, Artificial Sequence
  Antisense Oligo
gguguacuggugcaugccu

SEQ ID NO: 44351 - RNA, 19 nt, Artificial Sequence
  Sense Oligo
accaguacacccagcuaau

SEQ ID NO: 44352 - RNA, 19 nt, Artificial Sequence
  Antisense Oligo
auuagcuggguguacuggu

SEQ ID NO: 44353 - RNA, 19 nt, Artificial Sequence
  Sense Oligo
ccaguacacccagcuaauu

SEQ ID NO: 44354 - RNA, 19 nt, Artificial Sequence
  Antisense Oligo
aauuagcuggguguacugg

SEQ ID NO: 44355 - RNA, 19 nt, Artificial Sequence
  Sense Oligo
caguacacccagcuaauuu

SEQ ID NO: 44356 - RNA, 19 nt, Artificial Sequence
  Antisense Oligo
aaauuagcuggguguacug

SEQ ID NO: 44357 - RNA, 19 nt, Artificial Sequence
  Sense Oligo
aguacacccagcuaauuuu

SEQ ID NO: 44358 - RNA, 19 nt, Artificial Sequence
  Antisense Oligo
aaaauuagcuggguguacu

SEQ ID NO: 44359 - RNA, 19 nt, Artificial Sequence
  Sense Oligo
auguggcuucaccguguua

SEQ ID NO: 44360 - RNA, 19 nt, Artificial Sequence
  Antisense Oligo
uaacacggugaagccacau

SEQ ID NO: 44361 - RNA, 19 nt, Artificial Sequence
  Sense Oligo
uguggcuucaccguguuag

SEQ ID NO: 44362 - RNA, 19 nt, Artificial Sequence
  Antisense Oligo
cuaacacggugaagccaca

SEQ ID NO: 44363 - RNA, 19 nt, Artificial Sequence
  Sense Oligo
guggcuucaccguguuagc

SEQ ID NO: 44364 - RNA, 19 nt, Artificial Sequence
  Antisense Oligo
gcuaacacggugaagccac

SEQ ID NO: 44365 - RNA, 19 nt, Artificial Sequence
  Sense Oligo
caccguguuagccaggaug

SEQ ID NO: 44366 - RNA, 19 nt, Artificial Sequence
  Antisense Oligo
cauccuggcuaacacggug

SEQ ID NO: 44367 - RNA, 19 nt, Artificial Sequence
  Sense Oligo
accguguuagccaggaugg

SEQ ID NO: 44368 - RNA, 19 nt, Artificial Sequence
  Antisense Oligo
ccauccuggcuaacacggu

SEQ ID NO: 44369 - RNA, 19 nt, Artificial Sequence
  Sense Oligo
ccguguuagccaggauggu

SEQ ID NO: 44370 - RNA, 19 nt, Artificial Sequence
  Antisense Oligo
accauccuggcuaacacgg

SEQ ID NO: 44371 - RNA, 19 nt, Artificial Sequence
  Sense Oligo
cguguuagccaggaugguc

SEQ ID NO: 44372 - RNA, 19 nt, Artificial Sequence
  Antisense Oligo
gaccauccuggcuaacacg

SEQ ID NO: 44373 - RNA, 19 nt, Artificial Sequence
  Sense Oligo
guguuagccaggauggucu

SEQ ID NO: 44374 - RNA, 19 nt, Artificial Sequence
  Antisense Oligo
agaccauccuggcuaacac

SEQ ID NO: 44375 - RNA, 19 nt, Artificial Sequence
  Sense Oligo
uguuagccaggauggucuc

SEQ ID NO: 44376 - RNA, 19 nt, Artificial Sequence
  Antisense Oligo
gagaccauccuggcuaaca

SEQ ID NO: 44377 - RNA, 19 nt, Artificial Sequence
  Sense Oligo
guuagccaggauggucucg

SEQ ID NO: 44378 - RNA, 19 nt, Artificial Sequence
  Antisense Oligo
cgagaccauccuggcuaac

SEQ ID NO: 44379 - RNA, 19 nt, Artificial Sequence
  Sense Oligo
uuagccaggauggucucga

SEQ ID NO: 44380 - RNA, 19 nt, Artificial Sequence
  Antisense Oligo
ucgagaccauccuggcuaa

SEQ ID NO: 44381 - RNA, 19 nt, Artificial Sequence
  Sense Oligo
uagccaggauggucucgau

SEQ ID NO: 44382 - RNA, 19 nt, Artificial Sequence
  Antisense Oligo
aucgagaccauccuggcua

SEQ ID NO: 44383 - RNA, 19 nt, Artificial Sequence
  Sense Oligo
caggauggucucgaucucc

SEQ ID NO: 44384 - RNA, 19 nt, Artificial Sequence
  Antisense Oligo
ggagaucgagaccauccug

SEQ ID NO: 44385 - RNA, 19 nt, Artificial Sequence
  Sense Oligo
ggauggucucgaucuccug

SEQ ID NO: 44386 - RNA, 19 nt, Artificial Sequence
  Antisense Oligo
caggagaucgagaccaucc

SEQ ID NO: 44387 - RNA, 19 nt, Artificial Sequence
  Sense Oligo
gauggucucgaucuccuga

SEQ ID NO: 44388 - RNA, 19 nt, Artificial Sequence
  Antisense Oligo
ucaggagaucgagaccauc

SEQ ID NO: 44389 - RNA, 19 nt, Artificial Sequence
  Sense Oligo
auggucucgaucuccugac

SEQ ID NO: 44390 - RNA, 19 nt, Artificial Sequence
  Antisense Oligo
gucaggagaucgagaccau

SEQ ID NO: 44391 - RNA, 19 nt, Artificial Sequence
  Sense Oligo
cucgaucuccugaccucau

SEQ ID NO: 44392 - RNA, 19 nt, Artificial Sequence
  Antisense Oligo
augaggucaggagaucgag

SEQ ID NO: 44393 - RNA, 19 nt, Artificial Sequence
  Sense Oligo
ucgaucuccugaccucaug

SEQ ID NO: 44394 - RNA, 19 nt, Artificial Sequence
  Antisense Oligo
caugaggucaggagaucga

SEQ ID NO: 44395 - RNA, 19 nt, Artificial Sequence
  Sense Oligo
ucuccugaccucaugaucu

SEQ ID NO: 44396 - RNA, 19 nt, Artificial Sequence
  Antisense Oligo
agaucaugaggucaggaga

SEQ ID NO: 44397 - RNA, 19 nt, Artificial Sequence
  Sense Oligo
cuccugaccucaugaucug

SEQ ID NO: 44398 - RNA, 19 nt, Artificial Sequence
  Antisense Oligo
cagaucaugaggucaggag

SEQ ID NO: 44399 - RNA, 19 nt, Artificial Sequence
  Sense Oligo
uccugaccucaugaucugc

SEQ ID NO: 44400 - RNA, 19 nt, Artificial Sequence
  Antisense Oligo
gcagaucaugaggucagga

SEQ ID NO: 44401 - RNA, 19 nt, Artificial Sequence
  Sense Oligo
ccugaccucaugaucugcc

SEQ ID NO: 44402 - RNA, 19 nt, Artificial Sequence
  Antisense Oligo
ggcagaucaugaggucagg

SEQ ID NO: 44403 - RNA, 19 nt, Artificial Sequence
  Sense Oligo
cugaccucaugaucugccc

SEQ ID NO: 44404 - RNA, 19 nt, Artificial Sequence
  Antisense Oligo
gggcagaucaugaggucag

SEQ ID NO: 44405 - RNA, 19 nt, Artificial Sequence
  Sense Oligo
ccucggccucccaaaguac

SEQ ID NO: 44406 - RNA, 19 nt, Artificial Sequence
  Antisense Oligo
guacuuugggaggccgagg

SEQ ID NO: 44407 - RNA, 19 nt, Artificial Sequence
  Sense Oligo
cucggccucccaaaguacu

SEQ ID NO: 44408 - RNA, 19 nt, Artificial Sequence
  Antisense Oligo
aguacuuugggaggccgag

SEQ ID NO: 44409 - RNA, 19 nt, Artificial Sequence
  Sense Oligo
ucggccucccaaaguacug

SEQ ID NO: 44410 - RNA, 19 nt, Artificial Sequence
  Antisense Oligo
caguacuuugggaggccga

SEQ ID NO: 44411 - RNA, 19 nt, Artificial Sequence
  Sense Oligo
cggccucccaaaguacugg

SEQ ID NO: 44412 - RNA, 19 nt, Artificial Sequence
  Antisense Oligo
ccaguacuuugggaggccg

SEQ ID NO: 44413 - RNA, 19 nt, Artificial Sequence
  Sense Oligo
aucacaggcaugagccacc

SEQ ID NO: 44414 - RNA, 19 nt, Artificial Sequence
  Antisense Oligo
gguggcucaugccugugau

SEQ ID NO: 44415 - RNA, 19 nt, Artificial Sequence
  Sense Oligo
ucacaggcaugagccaccg

SEQ ID NO: 44416 - RNA, 19 nt, Artificial Sequence
  Antisense Oligo
cgguggcucaugccuguga

SEQ ID NO: 44417 - RNA, 19 nt, Artificial Sequence
  Sense Oligo
agacaggguuucaccaugu

SEQ ID NO: 44418 - RNA, 19 nt, Artificial Sequence
  Antisense Oligo
acauggugaaacccugucu

SEQ ID NO: 44419 - RNA, 19 nt, Artificial Sequence
  Sense Oligo
gacaggguuucaccauguu

SEQ ID NO: 44420 - RNA, 19 nt, Artificial Sequence
  Antisense Oligo
aacauggugaaacccuguc

SEQ ID NO: 44421 - RNA, 19 nt, Artificial Sequence
  Sense Oligo
acaggguuucaccauguug

SEQ ID NO: 44422 - RNA, 19 nt, Artificial Sequence
  Antisense Oligo
caacauggugaaacccugu

SEQ ID NO: 44423 - RNA, 19 nt, Artificial Sequence
  Sense Oligo
caggguuucaccauguugg

SEQ ID NO: 44424 - RNA, 19 nt, Artificial Sequence
  Antisense Oligo
ccaacauggugaaacccug

SEQ ID NO: 44425 - RNA, 19 nt, Artificial Sequence
  Sense Oligo
aggguuucaccauguuggc

SEQ ID NO: 44426 - RNA, 19 nt, Artificial Sequence
  Antisense Oligo
gccaacauggugaaacccu

SEQ ID NO: 44427 - RNA, 19 nt, Artificial Sequence
  Sense Oligo
ggguuucaccauguuggcc

SEQ ID NO: 44428 - RNA, 19 nt, Artificial Sequence
  Antisense Oligo
ggccaacauggugaaaccc

SEQ ID NO: 44429 - RNA, 19 nt, Artificial Sequence
  Sense Oligo
gguuucaccauguuggcca

SEQ ID NO: 44430 - RNA, 19 nt, Artificial Sequence
  Antisense Oligo
uggccaacauggugaaacc

SEQ ID NO: 44431 - RNA, 19 nt, Artificial Sequence
  Sense Oligo
guuucaccauguuggccag

SEQ ID NO: 44432 - RNA, 19 nt, Artificial Sequence
  Antisense Oligo
cuggccaacauggugaaac

SEQ ID NO: 44433 - RNA, 19 nt, Artificial Sequence
  Sense Oligo
ccucagccucccaaagugc

SEQ ID NO: 44434 - RNA, 19 nt, Artificial Sequence
  Antisense Oligo
gcacuuugggaggcugagg

SEQ ID NO: 44435 - RNA, 19 nt, Artificial Sequence
  Sense Oligo
cucagccucccaaagugcu

SEQ ID NO: 44436 - RNA, 19 nt, Artificial Sequence
  Antisense Oligo
agcacuuugggaggcugag

SEQ ID NO: 44437 - RNA, 19 nt, Artificial Sequence
  Sense Oligo
ccaaagugcugggauuaca

SEQ ID NO: 44438 - RNA, 19 nt, Artificial Sequence
  Antisense Oligo
uguaaucccagcacuuugg

SEQ ID NO: 44439 - RNA, 19 nt, Artificial Sequence
  Sense Oligo
caaagugcugggauuacag

SEQ ID NO: 44440 - RNA, 19 nt, Artificial Sequence
  Antisense Oligo
cuguaaucccagcacuuug

SEQ ID NO: 44441 - RNA, 19 nt, Artificial Sequence
  Sense Oligo
gugcugggauuacaggugu

SEQ ID NO: 44442 - RNA, 19 nt, Artificial Sequence
  Antisense Oligo
acaccuguaaucccagcac

SEQ ID NO: 44443 - RNA, 19 nt, Artificial Sequence
  Sense Oligo
ugcugggauuacaggugug

SEQ ID NO: 44444 - RNA, 19 nt, Artificial Sequence
  Antisense Oligo
cacaccuguaaucccagca

SEQ ID NO: 44445 - RNA, 19 nt, Artificial Sequence
  Sense Oligo
gcugggauuacagguguga

SEQ ID NO: 44446 - RNA, 19 nt, Artificial Sequence
  Antisense Oligo
ucacaccuguaaucccagc

SEQ ID NO: 44447 - RNA, 19 nt, Artificial Sequence
  Sense Oligo
aaguuuacuucuucugccc

SEQ ID NO: 44448 - RNA, 19 nt, Artificial Sequence
  Antisense Oligo
gggcagaagaaguaaacuu

SEQ ID NO: 44449 - RNA, 19 nt, Artificial Sequence
  Sense Oligo
aguuuacuucuucugcccu

SEQ ID NO: 44450 - RNA, 19 nt, Artificial Sequence
  Antisense Oligo
agggcagaagaaguaaacu

SEQ ID NO: 44451 - RNA, 19 nt, Artificial Sequence
  Sense Oligo
guuuacuucuucugcccuu

SEQ ID NO: 44452 - RNA, 19 nt, Artificial Sequence
  Antisense Oligo
aagggcagaagaaguaaac

SEQ ID NO: 44453 - RNA, 19 nt, Artificial Sequence
  Sense Oligo
uacuucuucugcccuuaaa

SEQ ID NO: 44454 - RNA, 19 nt, Artificial Sequence
  Antisense Oligo
uuuaagggcagaagaagua

SEQ ID NO: 44455 - RNA, 19 nt, Artificial Sequence
  Sense Oligo
acuucuucugcccuuaaau

SEQ ID NO: 44456 - RNA, 19 nt, Artificial Sequence
  Antisense Oligo
auuuaagggcagaagaagu

SEQ ID NO: 44457 - RNA, 19 nt, Artificial Sequence
  Sense Oligo
cuucuucugcccuuaaaug

SEQ ID NO: 44458 - RNA, 19 nt, Artificial Sequence
  Antisense Oligo
cauuuaagggcagaagaag

SEQ ID NO: 44459 - RNA, 19 nt, Artificial Sequence
  Sense Oligo
uucuucugcccuuaaaugc

SEQ ID NO: 44460 - RNA, 19 nt, Artificial Sequence
  Antisense Oligo
gcauuuaagggcagaagaa

SEQ ID NO: 44461 - RNA, 19 nt, Artificial Sequence
  Sense Oligo
ucuucugcccuuaaaugcc

SEQ ID NO: 44462 - RNA, 19 nt, Artificial Sequence
  Antisense Oligo
ggcauuuaagggcagaaga

SEQ ID NO: 44463 - RNA, 19 nt, Artificial Sequence
  Sense Oligo
cuucugcccuuaaaugcca

SEQ ID NO: 44464 - RNA, 19 nt, Artificial Sequence
  Antisense Oligo
uggcauuuaagggcagaag

SEQ ID NO: 44465 - RNA, 19 nt, Artificial Sequence
  Sense Oligo
uucugcccuuaaaugccac

SEQ ID NO: 44466 - RNA, 19 nt, Artificial Sequence
  Antisense Oligo
guggcauuuaagggcagaa

SEQ ID NO: 44467 - RNA, 19 nt, Artificial Sequence
  Sense Oligo
cuuaaaugccacuggccuc

SEQ ID NO: 44468 - RNA, 19 nt, Artificial Sequence
  Antisense Oligo
gaggccaguggcauuuaag

SEQ ID NO: 44469 - RNA, 19 nt, Artificial Sequence
  Sense Oligo
uuaaaugccacuggccucu

SEQ ID NO: 44470 - RNA, 19 nt, Artificial Sequence
  Antisense Oligo
agaggccaguggcauuuaa

SEQ ID NO: 44471 - RNA, 19 nt, Artificial Sequence
  Sense Oligo
uaaaugccacuggccucuu

SEQ ID NO: 44472 - RNA, 19 nt, Artificial Sequence
  Antisense Oligo
aagaggccaguggcauuua

SEQ ID NO: 44473 - RNA, 19 nt, Artificial Sequence
  Sense Oligo
aaugccacuggccucuuug

SEQ ID NO: 44474 - RNA, 19 nt, Artificial Sequence
  Antisense Oligo
caaagaggccaguggcauu

SEQ ID NO: 44475 - RNA, 19 nt, Artificial Sequence
  Sense Oligo
augccacuggccucuuugg

SEQ ID NO: 44476 - RNA, 19 nt, Artificial Sequence
  Antisense Oligo
ccaaagaggccaguggcau

SEQ ID NO: 44477 - RNA, 19 nt, Artificial Sequence
  Sense Oligo
ugccacuggccucuuuggg

SEQ ID NO: 44478 - RNA, 19 nt, Artificial Sequence
  Antisense Oligo
cccaaagaggccaguggca

SEQ ID NO: 44479 - RNA, 19 nt, Artificial Sequence
  Sense Oligo
ggguugauguuggucgugu

SEQ ID NO: 44480 - RNA, 19 nt, Artificial Sequence
  Antisense Oligo
acacgaccaacaucaaccc

SEQ ID NO: 44481 - RNA, 19 nt, Artificial Sequence
  Sense Oligo
gguugauguuggucgugug

SEQ ID NO: 44482 - RNA, 19 nt, Artificial Sequence
  Antisense Oligo
cacacgaccaacaucaacc

SEQ ID NO: 44483 - RNA, 19 nt, Artificial Sequence
  Sense Oligo
guugauguuggucguguga

SEQ ID NO: 44484 - RNA, 19 nt, Artificial Sequence
  Antisense Oligo
ucacacgaccaacaucaac

SEQ ID NO: 44485 - RNA, 19 nt, Artificial Sequence
  Sense Oligo
auguuggucgugugagcaa

SEQ ID NO: 44486 - RNA, 19 nt, Artificial Sequence
  Antisense Oligo
uugcucacacgaccaacau

SEQ ID NO: 44487 - RNA, 19 nt, Artificial Sequence
  Sense Oligo
uguuggucgugugagcaag

SEQ ID NO: 44488 - RNA, 19 nt, Artificial Sequence
  Antisense Oligo
cuugcucacacgaccaaca

SEQ ID NO: 44489 - RNA, 19 nt, Artificial Sequence
  Sense Oligo
guuggucgugugagcaagg

SEQ ID NO: 44490 - RNA, 19 nt, Artificial Sequence
  Antisense Oligo
ccuugcucacacgaccaac

SEQ ID NO: 44491 - RNA, 19 nt, Artificial Sequence
  Sense Oligo
uuggucgugugagcaaggg

SEQ ID NO: 44492 - RNA, 19 nt, Artificial Sequence
  Antisense Oligo
cccuugcucacacgaccaa

SEQ ID NO: 44493 - RNA, 19 nt, Artificial Sequence
  Sense Oligo
aaagccaugccucuugacc

SEQ ID NO: 44494 - RNA, 19 nt, Artificial Sequence
  Antisense Oligo
ggucaagaggcauggcuuu

SEQ ID NO: 44495 - RNA, 19 nt, Artificial Sequence
  Sense Oligo
aagccaugccucuugaccc

SEQ ID NO: 44496 - RNA, 19 nt, Artificial Sequence
  Antisense Oligo
gggucaagaggcauggcuu

SEQ ID NO: 44497 - RNA, 19 nt, Artificial Sequence
  Sense Oligo
agccaugccucuugaccca

SEQ ID NO: 44498 - RNA, 19 nt, Artificial Sequence
  Antisense Oligo
ugggucaagaggcauggcu

SEQ ID NO: 44499 - RNA, 19 nt, Artificial Sequence
  Sense Oligo
gccaugccucuugacccac

SEQ ID NO: 44500 - RNA, 19 nt, Artificial Sequence
  Antisense Oligo
gugggucaagaggcauggc

SEQ ID NO: 44501 - RNA, 19 nt, Artificial Sequence
  Sense Oligo
gccucuugacccacccuuc

SEQ ID NO: 44502 - RNA, 19 nt, Artificial Sequence
  Antisense Oligo
gaagggugggucaagaggc

SEQ ID NO: 44503 - RNA, 19 nt, Artificial Sequence
  Sense Oligo
ccucuugacccacccuucg

SEQ ID NO: 44504 - RNA, 19 nt, Artificial Sequence
  Antisense Oligo
cgaagggugggucaagagg

SEQ ID NO: 44505 - RNA, 19 nt, Artificial Sequence
  Sense Oligo
cucuugacccacccuucgu

SEQ ID NO: 44506 - RNA, 19 nt, Artificial Sequence
  Antisense Oligo
acgaagggugggucaagag

SEQ ID NO: 44507 - RNA, 19 nt, Artificial Sequence
  Sense Oligo
ucuugacccacccuucguu

SEQ ID NO: 44508 - RNA, 19 nt, Artificial Sequence
  Antisense Oligo
aacgaagggugggucaaga

SEQ ID NO: 44509 - RNA, 19 nt, Artificial Sequence
  Sense Oligo
cuugacccacccuucguuu

SEQ ID NO: 44510 - RNA, 19 nt, Artificial Sequence
  Antisense Oligo
aaacgaagggugggucaag

SEQ ID NO: 44511 - RNA, 19 nt, Artificial Sequence
  Sense Oligo
uugacccacccuucguuug

SEQ ID NO: 44512 - RNA, 19 nt, Artificial Sequence
  Antisense Oligo
caaacgaagggugggucaa

SEQ ID NO: 44513 - RNA, 19 nt, Artificial Sequence
  Sense Oligo
ugacccacccuucguuugc

SEQ ID NO: 44514 - RNA, 19 nt, Artificial Sequence
  Antisense Oligo
gcaaacgaaggguggguca

SEQ ID NO: 44515 - RNA, 19 nt, Artificial Sequence
  Sense Oligo
gacccacccuucguuugcc

SEQ ID NO: 44516 - RNA, 19 nt, Artificial Sequence
  Antisense Oligo
ggcaaacgaaggguggguc

SEQ ID NO: 44517 - RNA, 19 nt, Artificial Sequence
  Sense Oligo
acccacccuucguuugcca

SEQ ID NO: 44518 - RNA, 19 nt, Artificial Sequence
  Antisense Oligo
uggcaaacgaagggugggu

SEQ ID NO: 44519 - RNA, 19 nt, Artificial Sequence
  Sense Oligo
acccuucguuugccaucuu

SEQ ID NO: 44520 - RNA, 19 nt, Artificial Sequence
  Antisense Oligo
aagauggcaaacgaagggu

SEQ ID NO: 44521 - RNA, 19 nt, Artificial Sequence
  Sense Oligo
cccuucguuugccaucuug

SEQ ID NO: 44522 - RNA, 19 nt, Artificial Sequence
  Antisense Oligo
caagauggcaaacgaaggg

SEQ ID NO: 44523 - RNA, 19 nt, Artificial Sequence
  Sense Oligo
ccuucguuugccaucuugu

SEQ ID NO: 44524 - RNA, 19 nt, Artificial Sequence
  Antisense Oligo
acaagauggcaaacgaagg

SEQ ID NO: 44525 - RNA, 19 nt, Artificial Sequence
  Sense Oligo
cuucguuugccaucuuguu

SEQ ID NO: 44526 - RNA, 19 nt, Artificial Sequence
  Antisense Oligo
aacaagauggcaaacgaag

SEQ ID NO: 44527 - RNA, 19 nt, Artificial Sequence
  Sense Oligo
uucguuugccaucuuguuu

SEQ ID NO: 44528 - RNA, 19 nt, Artificial Sequence
  Antisense Oligo
aaacaagauggcaaacgaa

SEQ ID NO: 44529 - RNA, 19 nt, Artificial Sequence
  Sense Oligo
ugccaucuuguuucccuua

SEQ ID NO: 44530 - RNA, 19 nt, Artificial Sequence
  Antisense Oligo
uaagggaaacaagauggca

SEQ ID NO: 44531 - RNA, 19 nt, Artificial Sequence
  Sense Oligo
ccaucuuguuucccuuaaa

SEQ ID NO: 44532 - RNA, 19 nt, Artificial Sequence
  Antisense Oligo
uuuaagggaaacaagaugg

SEQ ID NO: 44533 - RNA, 19 nt, Artificial Sequence
  Sense Oligo
caucuuguuucccuuaaaa

SEQ ID NO: 44534 - RNA, 19 nt, Artificial Sequence
  Antisense Oligo
uuuuaagggaaacaagaug

SEQ ID NO: 44535 - RNA, 19 nt, Artificial Sequence
  Sense Oligo
aaauaguagcuucuguucu

SEQ ID NO: 44536 - RNA, 19 nt, Artificial Sequence
  Antisense Oligo
agaacagaagcuacuauuu

SEQ ID NO: 44537 - RNA, 19 nt, Artificial Sequence
  Sense Oligo
aauaguagcuucuguucug

SEQ ID NO: 44538 - RNA, 19 nt, Artificial Sequence
  Antisense Oligo
cagaacagaagcuacuauu

SEQ ID NO: 44539 - RNA, 19 nt, Artificial Sequence
  Sense Oligo
uaguagcuucuguucuguu

SEQ ID NO: 44540 - RNA, 19 nt, Artificial Sequence
  Antisense Oligo
aacagaacagaagcuacua

SEQ ID NO: 44541 - RNA, 19 nt, Artificial Sequence
  Sense Oligo
aguagcuucuguucuguug

SEQ ID NO: 44542 - RNA, 19 nt, Artificial Sequence
  Antisense Oligo
caacagaacagaagcuacu

SEQ ID NO: 44543 - RNA, 19 nt, Artificial Sequence
  Sense Oligo
uucuguucuguugacuuua

SEQ ID NO: 44544 - RNA, 19 nt, Artificial Sequence
  Antisense Oligo
uaaagucaacagaacagaa

SEQ ID NO: 44545 - RNA, 19 nt, Artificial Sequence
  Sense Oligo
guucuguugacuuuauccu

SEQ ID NO: 44546 - RNA, 19 nt, Artificial Sequence
  Antisense Oligo
aggauaaagucaacagaac

SEQ ID NO: 44547 - RNA, 19 nt, Artificial Sequence
  Sense Oligo
uucuguugacuuuauccua

SEQ ID NO: 44548 - RNA, 19 nt, Artificial Sequence
  Antisense Oligo
uaggauaaagucaacagaa

SEQ ID NO: 44549 - RNA, 19 nt, Artificial Sequence
  Sense Oligo
ucuguugacuuuauccuau

SEQ ID NO: 44550 - RNA, 19 nt, Artificial Sequence
  Antisense Oligo
auaggauaaagucaacaga

SEQ ID NO: 44551 - RNA, 19 nt, Artificial Sequence
  Sense Oligo
uguugacuuuauccuauca

SEQ ID NO: 44552 - RNA, 19 nt, Artificial Sequence
  Antisense Oligo
ugauaggauaaagucaaca

SEQ ID NO: 44553 - RNA, 19 nt, Artificial Sequence
  Sense Oligo
caguaccucguccuguugg

SEQ ID NO: 44554 - RNA, 19 nt, Artificial Sequence
  Antisense Oligo
ccaacaggacgagguacug

SEQ ID NO: 44555 - RNA, 19 nt, Artificial Sequence
  Sense Oligo
aguaccucguccuguuggg

SEQ ID NO: 44556 - RNA, 19 nt, Artificial Sequence
  Antisense Oligo
cccaacaggacgagguacu

SEQ ID NO: 44557 - RNA, 19 nt, Artificial Sequence
  Sense Oligo
guaccucguccuguuggga

SEQ ID NO: 44558 - RNA, 19 nt, Artificial Sequence
  Antisense Oligo
ucccaacaggacgagguac

SEQ ID NO: 44559 - RNA, 19 nt, Artificial Sequence
  Sense Oligo
uaccucguccuguugggau

SEQ ID NO: 44560 - RNA, 19 nt, Artificial Sequence
  Antisense Oligo
aucccaacaggacgaggua

SEQ ID NO: 44561 - RNA, 19 nt, Artificial Sequence
  Sense Oligo
accucguccuguugggaua

SEQ ID NO: 44562 - RNA, 19 nt, Artificial Sequence
  Antisense Oligo
uaucccaacaggacgaggu

SEQ ID NO: 44563 - RNA, 19 nt, Artificial Sequence
  Sense Oligo
ccucguccuguugggauaa

SEQ ID NO: 44564 - RNA, 19 nt, Artificial Sequence
  Antisense Oligo
uuaucccaacaggacgagg

SEQ ID NO: 44565 - RNA, 19 nt, Artificial Sequence
  Sense Oligo
cucguccuguugggauaaa

SEQ ID NO: 44566 - RNA, 19 nt, Artificial Sequence
  Antisense Oligo
uuuaucccaacaggacgag

SEQ ID NO: 44567 - RNA, 19 nt, Artificial Sequence
  Sense Oligo
cugcugaagccucuccuuu

SEQ ID NO: 44568 - RNA, 19 nt, Artificial Sequence
  Antisense Oligo
aaaggagaggcuucagcag

SEQ ID NO: 44569 - RNA, 19 nt, Artificial Sequence
  Sense Oligo
ugcugaagccucuccuuuu

SEQ ID NO: 44570 - RNA, 19 nt, Artificial Sequence
  Antisense Oligo
aaaaggagaggcuucagca

SEQ ID NO: 44571 - RNA, 19 nt, Artificial Sequence
  Sense Oligo
gaagccucuccuuuugcug

SEQ ID NO: 44572 - RNA, 19 nt, Artificial Sequence
  Antisense Oligo
cagcaaaaggagaggcuuc

SEQ ID NO: 44573 - RNA, 19 nt, Artificial Sequence
  Sense Oligo
aagccucuccuuuugcugu

SEQ ID NO: 44574 - RNA, 19 nt, Artificial Sequence
  Antisense Oligo
acagcaaaaggagaggcuu

SEQ ID NO: 44575 - RNA, 19 nt, Artificial Sequence
  Sense Oligo
agccucuccuuuugcugug

SEQ ID NO: 44576 - RNA, 19 nt, Artificial Sequence
  Antisense Oligo
cacagcaaaaggagaggcu

SEQ ID NO: 44577 - RNA, 19 nt, Artificial Sequence
  Sense Oligo
cuccuuuugcugugacuuu

SEQ ID NO: 44578 - RNA, 19 nt, Artificial Sequence
  Antisense Oligo
aaagucacagcaaaaggag

SEQ ID NO: 44579 - RNA, 19 nt, Artificial Sequence
  Sense Oligo
uccuuuugcugugacuuuu

SEQ ID NO: 44580 - RNA, 19 nt, Artificial Sequence
  Antisense Oligo
aaaagucacagcaaaagga

SEQ ID NO: 44581 - RNA, 19 nt, Artificial Sequence
  Sense Oligo
ccuuuugcugugacuuuua

SEQ ID NO: 44582 - RNA, 19 nt, Artificial Sequence
  Antisense Oligo
uaaaagucacagcaaaagg

SEQ ID NO: 44583 - RNA, 19 nt, Artificial Sequence
  Sense Oligo
cuuuugcugugacuuuuau

SEQ ID NO: 44584 - RNA, 19 nt, Artificial Sequence
  Antisense Oligo
auaaaagucacagcaaaag

SEQ ID NO: 44585 - RNA, 19 nt, Artificial Sequence
  Sense Oligo
ugcugugacuuuuauuagc

SEQ ID NO: 44586 - RNA, 19 nt, Artificial Sequence
  Antisense Oligo
gcuaauaaaagucacagca

SEQ ID NO: 44587 - RNA, 19 nt, Artificial Sequence
  Sense Oligo
gcugugacuuuuauuagcu

SEQ ID NO: 44588 - RNA, 19 nt, Artificial Sequence
  Antisense Oligo
agcuaauaaaagucacagc

SEQ ID NO: 44589 - RNA, 19 nt, Artificial Sequence
  Sense Oligo
cugugacuuuuauuagcua

SEQ ID NO: 44590 - RNA, 19 nt, Artificial Sequence
  Antisense Oligo
uagcuaauaaaagucacag

SEQ ID NO: 44591 - RNA, 19 nt, Artificial Sequence
  Sense Oligo
cagcagaccacguauauga

SEQ ID NO: 44592 - RNA, 19 nt, Artificial Sequence
  Antisense Oligo
ucauauacguggucugcug

SEQ ID NO: 44593 - RNA, 19 nt, Artificial Sequence
  Sense Oligo
gcagaccacguauaugacc

SEQ ID NO: 44594 - RNA, 19 nt, Artificial Sequence
  Antisense Oligo
ggucauauacguggucugc

SEQ ID NO: 44595 - RNA, 19 nt, Artificial Sequence
  Sense Oligo
cagaccacguauaugacca

SEQ ID NO: 44596 - RNA, 19 nt, Artificial Sequence
  Antisense Oligo
uggucauauacguggucug

SEQ ID NO: 44597 - RNA, 19 nt, Artificial Sequence
  Sense Oligo
agaccacguauaugaccac

SEQ ID NO: 44598 - RNA, 19 nt, Artificial Sequence
  Antisense Oligo
guggucauauacguggucu

SEQ ID NO: 44599 - RNA, 19 nt, Artificial Sequence
  Sense Oligo
gaccacguauaugaccacg

SEQ ID NO: 44600 - RNA, 19 nt, Artificial Sequence
  Antisense Oligo
cguggucauauacgugguc

SEQ ID NO: 44601 - RNA, 19 nt, Artificial Sequence
  Sense Oligo
acguauaugaccacggucc

SEQ ID NO: 44602 - RNA, 19 nt, Artificial Sequence
  Antisense Oligo
ggaccguggucauauacgu

SEQ ID NO: 44603 - RNA, 19 nt, Artificial Sequence
  Sense Oligo
cguauaugaccacgguccc

SEQ ID NO: 44604 - RNA, 19 nt, Artificial Sequence
  Antisense Oligo
gggaccguggucauauacg

SEQ ID NO: 44605 - RNA, 19 nt, Artificial Sequence
  Sense Oligo
guauaugaccacgguccca

SEQ ID NO: 44606 - RNA, 19 nt, Artificial Sequence
  Antisense Oligo
ugggaccguggucauauac

SEQ ID NO: 44607 - RNA, 19 nt, Artificial Sequence
  Sense Oligo
uauaugaccacggucccau

SEQ ID NO: 44608 - RNA, 19 nt, Artificial Sequence
  Antisense Oligo
augggaccguggucauaua

SEQ ID NO: 44609 - RNA, 19 nt, Artificial Sequence
  Sense Oligo
augaccacggucccauaag

SEQ ID NO: 44610 - RNA, 19 nt, Artificial Sequence
  Antisense Oligo
cuuaugggaccguggucau

SEQ ID NO: 44611 - RNA, 19 nt, Artificial Sequence
  Sense Oligo
ugaccacggucccauaaga

SEQ ID NO: 44612 - RNA, 19 nt, Artificial Sequence
  Antisense Oligo
ucuuaugggaccgugguca

SEQ ID NO: 44613 - RNA, 19 nt, Artificial Sequence
  Sense Oligo
cacggucccauaagauuag

SEQ ID NO: 44614 - RNA, 19 nt, Artificial Sequence
  Antisense Oligo
cuaaucuuaugggaccgug

SEQ ID NO: 44615 - RNA, 19 nt, Artificial Sequence
  Sense Oligo
aaaauuagccaggcauggu

SEQ ID NO: 44616 - RNA, 19 nt, Artificial Sequence
  Antisense Oligo
accaugccuggcuaauuuu

SEQ ID NO: 44617 - RNA, 19 nt, Artificial Sequence
  Sense Oligo
aaauuagccaggcauggug

SEQ ID NO: 44618 - RNA, 19 nt, Artificial Sequence
  Antisense Oligo
caccaugccuggcuaauuu

SEQ ID NO: 44619 - RNA, 19 nt, Artificial Sequence
  Sense Oligo
aauuagccaggcauggugg

SEQ ID NO: 44620 - RNA, 19 nt, Artificial Sequence
  Antisense Oligo
ccaccaugccuggcuaauu

SEQ ID NO: 44621 - RNA, 19 nt, Artificial Sequence
  Sense Oligo
auuagccaggcaugguggu

SEQ ID NO: 44622 - RNA, 19 nt, Artificial Sequence
  Antisense Oligo
accaccaugccuggcuaau

SEQ ID NO: 44623 - RNA, 19 nt, Artificial Sequence
  Sense Oligo
uuagccaggcaugguggug

SEQ ID NO: 44624 - RNA, 19 nt, Artificial Sequence
  Antisense Oligo
caccaccaugccuggcuaa

SEQ ID NO: 44625 - RNA, 19 nt, Artificial Sequence
  Sense Oligo
augguggugcaugccugug

SEQ ID NO: 44626 - RNA, 19 nt, Artificial Sequence
  Antisense Oligo
cacaggcaugcaccaccau

SEQ ID NO: 44627 - RNA, 19 nt, Artificial Sequence
  Sense Oligo
uggugcaugccugugaucc

SEQ ID NO: 44628 - RNA, 19 nt, Artificial Sequence
  Antisense Oligo
ggaucacaggcaugcacca

SEQ ID NO: 44629 - RNA, 19 nt, Artificial Sequence
  Sense Oligo
gaucgcuccagcccaagag

SEQ ID NO: 44630 - RNA, 19 nt, Artificial Sequence
  Antisense Oligo
cucuugggcuggagcgauc

SEQ ID NO: 44631 - RNA, 19 nt, Artificial Sequence
  Sense Oligo
aucgcuccagcccaagagg

SEQ ID NO: 44632 - RNA, 19 nt, Artificial Sequence
  Antisense Oligo
ccucuugggcuggagcgau

SEQ ID NO: 44633 - RNA, 19 nt, Artificial Sequence
  Sense Oligo
ucgcuccagcccaagaggu

SEQ ID NO: 44634 - RNA, 19 nt, Artificial Sequence
  Antisense Oligo
accucuugggcuggagcga

SEQ ID NO: 44635 - RNA, 19 nt, Artificial Sequence
  Sense Oligo
gcuguggugagcugcaaau

SEQ ID NO: 44636 - RNA, 19 nt, Artificial Sequence
  Antisense Oligo
auuugcagcucaccacagc

SEQ ID NO: 44637 - RNA, 19 nt, Artificial Sequence
  Sense Oligo
cuguggugagcugcaaaua

SEQ ID NO: 44638 - RNA, 19 nt, Artificial Sequence
  Antisense Oligo
uauuugcagcucaccacag

SEQ ID NO: 44639 - RNA, 19 nt, Artificial Sequence
  Sense Oligo
uguggugagcugcaaauac

SEQ ID NO: 44640 - RNA, 19 nt, Artificial Sequence
  Antisense Oligo
guauuugcagcucaccaca

SEQ ID NO: 44641 - RNA, 19 nt, Artificial Sequence
  Sense Oligo
guggugagcugcaaauacg

SEQ ID NO: 44642 - RNA, 19 nt, Artificial Sequence
  Antisense Oligo
cguauuugcagcucaccac

SEQ ID NO: 44643 - RNA, 19 nt, Artificial Sequence
  Sense Oligo
uggugagcugcaaauacga

SEQ ID NO: 44644 - RNA, 19 nt, Artificial Sequence
  Antisense Oligo
ucguauuugcagcucacca

SEQ ID NO: 44645 - RNA, 19 nt, Artificial Sequence
  Sense Oligo
ggugagcugcaaauacgac

SEQ ID NO: 44646 - RNA, 19 nt, Artificial Sequence
  Antisense Oligo
gucguauuugcagcucacc

SEQ ID NO: 44647 - RNA, 19 nt, Artificial Sequence
  Sense Oligo
gugagcugcaaauacgaca

SEQ ID NO: 44648 - RNA, 19 nt, Artificial Sequence
  Antisense Oligo
ugucguauuugcagcucac

SEQ ID NO: 44649 - RNA, 19 nt, Artificial Sequence
  Sense Oligo
ugagcugcaaauacgacac

SEQ ID NO: 44650 - RNA, 19 nt, Artificial Sequence
  Antisense Oligo
gugucguauuugcagcuca

SEQ ID NO: 44651 - RNA, 19 nt, Artificial Sequence
  Sense Oligo
gagcugcaaauacgacacu

SEQ ID NO: 44652 - RNA, 19 nt, Artificial Sequence
  Antisense Oligo
agugucguauuugcagcuc

SEQ ID NO: 44653 - RNA, 19 nt, Artificial Sequence
  Sense Oligo
agcugcaaauacgacacug

SEQ ID NO: 44654 - RNA, 19 nt, Artificial Sequence
  Antisense Oligo
cagugucguauuugcagcu

SEQ ID NO: 44655 - RNA, 19 nt, Artificial Sequence
  Sense Oligo
gcugcaaauacgacacugc

SEQ ID NO: 44656 - RNA, 19 nt, Artificial Sequence
  Antisense Oligo
gcagugucguauuugcagc

SEQ ID NO: 44657 - RNA, 19 nt, Artificial Sequence
  Sense Oligo
cacugcacuccagccuagg

SEQ ID NO: 44658 - RNA, 19 nt, Artificial Sequence
  Antisense Oligo
ccuaggcuggagugcagug

SEQ ID NO: 44659 - RNA, 19 nt, Artificial Sequence
  Sense Oligo
acugcacuccagccuaggc

SEQ ID NO: 44660 - RNA, 19 nt, Artificial Sequence
  Antisense Oligo
gccuaggcuggagugcagu

SEQ ID NO: 44661 - RNA, 19 nt, Artificial Sequence
  Sense Oligo
cugcacuccagccuaggca

SEQ ID NO: 44662 - RNA, 19 nt, Artificial Sequence
  Antisense Oligo
ugccuaggcuggagugcag

SEQ ID NO: 44663 - RNA, 19 nt, Artificial Sequence
  Sense Oligo
ugcacuccagccuaggcaa

SEQ ID NO: 44664 - RNA, 19 nt, Artificial Sequence
  Antisense Oligo
uugccuaggcuggagugca

SEQ ID NO: 44665 - RNA, 19 nt, Artificial Sequence
  Sense Oligo
gcacuccagccuaggcaac

SEQ ID NO: 44666 - RNA, 19 nt, Artificial Sequence
  Antisense Oligo
guugccuaggcuggagugc

SEQ ID NO: 44667 - RNA, 19 nt, Artificial Sequence
  Sense Oligo
cacuccagccuaggcaacg

SEQ ID NO: 44668 - RNA, 19 nt, Artificial Sequence
  Antisense Oligo
cguugccuaggcuggagug

SEQ ID NO: 44669 - RNA, 19 nt, Artificial Sequence
  Sense Oligo
acuccagccuaggcaacgg

SEQ ID NO: 44670 - RNA, 19 nt, Artificial Sequence
  Antisense Oligo
ccguugccuaggcuggagu

SEQ ID NO: 44671 - RNA, 19 nt, Artificial Sequence
  Sense Oligo
agucucacucuguugccca

SEQ ID NO: 44672 - RNA, 19 nt, Artificial Sequence
  Antisense Oligo
ugggcaacagagugagacu

SEQ ID NO: 44673 - RNA, 19 nt, Artificial Sequence
  Sense Oligo
gucucacucuguugcccag

SEQ ID NO: 44674 - RNA, 19 nt, Artificial Sequence
  Antisense Oligo
cugggcaacagagugagac

SEQ ID NO: 44675 - RNA, 19 nt, Artificial Sequence
  Sense Oligo
ucucacucuguugcccagg

SEQ ID NO: 44676 - RNA, 19 nt, Artificial Sequence
  Antisense Oligo
ccugggcaacagagugaga

SEQ ID NO: 44677 - RNA, 19 nt, Artificial Sequence
  Sense Oligo
cucacucuguugcccaggc

SEQ ID NO: 44678 - RNA, 19 nt, Artificial Sequence
  Antisense Oligo
gccugggcaacagagugag

SEQ ID NO: 44679 - RNA, 19 nt, Artificial Sequence
  Sense Oligo
ucacucuguugcccaggcu

SEQ ID NO: 44680 - RNA, 19 nt, Artificial Sequence
  Antisense Oligo
agccugggcaacagaguga

SEQ ID NO: 44681 - RNA, 19 nt, Artificial Sequence
  Sense Oligo
cacucuguugcccaggcug

SEQ ID NO: 44682 - RNA, 19 nt, Artificial Sequence
  Antisense Oligo
cagccugggcaacagagug

SEQ ID NO: 44683 - RNA, 19 nt, Artificial Sequence
  Sense Oligo
acucuguugcccaggcugg

SEQ ID NO: 44684 - RNA, 19 nt, Artificial Sequence
  Antisense Oligo
ccagccugggcaacagagu

SEQ ID NO: 44685 - RNA, 19 nt, Artificial Sequence
  Sense Oligo
cucuguugcccaggcugga

SEQ ID NO: 44686 - RNA, 19 nt, Artificial Sequence
  Antisense Oligo
uccagccugggcaacagag

SEQ ID NO: 44687 - RNA, 19 nt, Artificial Sequence
  Sense Oligo
ucuguugcccaggcuggag

SEQ ID NO: 44688 - RNA, 19 nt, Artificial Sequence
  Antisense Oligo
cuccagccugggcaacaga

SEQ ID NO: 44689 - RNA, 19 nt, Artificial Sequence
  Sense Oligo
uugcccaggcuggagugca

SEQ ID NO: 44690 - RNA, 19 nt, Artificial Sequence
  Antisense Oligo
ugcacuccagccugggcaa

SEQ ID NO: 44691 - RNA, 19 nt, Artificial Sequence
  Sense Oligo
ugcccaggcuggagugcaa

SEQ ID NO: 44692 - RNA, 19 nt, Artificial Sequence
  Antisense Oligo
uugcacuccagccugggca

SEQ ID NO: 44693 - RNA, 19 nt, Artificial Sequence
  Sense Oligo
caggcuggagugcaauggc

SEQ ID NO: 44694 - RNA, 19 nt, Artificial Sequence
  Antisense Oligo
gccauugcacuccagccug

SEQ ID NO: 44695 - RNA, 19 nt, Artificial Sequence
  Sense Oligo
aggcuggagugcaauggca

SEQ ID NO: 44696 - RNA, 19 nt, Artificial Sequence
  Antisense Oligo
ugccauugcacuccagccu

SEQ ID NO: 44697 - RNA, 19 nt, Artificial Sequence
  Sense Oligo
ugcaauggcacgaucucgg

SEQ ID NO: 44698 - RNA, 19 nt, Artificial Sequence
  Antisense Oligo
ccgagaucgugccauugca

SEQ ID NO: 44699 - RNA, 19 nt, Artificial Sequence
  Sense Oligo
gcaauggcacgaucucggc

SEQ ID NO: 44700 - RNA, 19 nt, Artificial Sequence
  Antisense Oligo
gccgagaucgugccauugc

SEQ ID NO: 44701 - RNA, 19 nt, Artificial Sequence
  Sense Oligo
caauggcacgaucucggcu

SEQ ID NO: 44702 - RNA, 19 nt, Artificial Sequence
  Antisense Oligo
agccgagaucgugccauug

SEQ ID NO: 44703 - RNA, 19 nt, Artificial Sequence
  Sense Oligo
aauggcacgaucucggcuc

SEQ ID NO: 44704 - RNA, 19 nt, Artificial Sequence
  Antisense Oligo
gagccgagaucgugccauu

SEQ ID NO: 44705 - RNA, 19 nt, Artificial Sequence
  Sense Oligo
auggcacgaucucggcuca

SEQ ID NO: 44706 - RNA, 19 nt, Artificial Sequence
  Antisense Oligo
ugagccgagaucgugccau

SEQ ID NO: 44707 - RNA, 19 nt, Artificial Sequence
  Sense Oligo
uggcacgaucucggcucac

SEQ ID NO: 44708 - RNA, 19 nt, Artificial Sequence
  Antisense Oligo
gugagccgagaucgugcca

SEQ ID NO: 44709 - RNA, 19 nt, Artificial Sequence
  Sense Oligo
ggcacgaucucggcucacu

SEQ ID NO: 44710 - RNA, 19 nt, Artificial Sequence
  Antisense Oligo
agugagccgagaucgugcc

SEQ ID NO: 44711 - RNA, 19 nt, Artificial Sequence
  Sense Oligo
gcacgaucucggcucacug

SEQ ID NO: 44712 - RNA, 19 nt, Artificial Sequence
  Antisense Oligo
cagugagccgagaucgugc

SEQ ID NO: 44713 - RNA, 19 nt, Artificial Sequence
  Sense Oligo
cacgaucucggcucacugc

SEQ ID NO: 44714 - RNA, 19 nt, Artificial Sequence
  Antisense Oligo
gcagugagccgagaucgug

SEQ ID NO: 44715 - RNA, 19 nt, Artificial Sequence
  Sense Oligo
acgaucucggcucacugca

SEQ ID NO: 44716 - RNA, 19 nt, Artificial Sequence
  Antisense Oligo
ugcagugagccgagaucgu

SEQ ID NO: 44717 - RNA, 19 nt, Artificial Sequence
  Sense Oligo
agccucugccuccuggguu

SEQ ID NO: 44718 - RNA, 19 nt, Artificial Sequence
  Antisense Oligo
aacccaggaggcagaggcu

SEQ ID NO: 44719 - RNA, 19 nt, Artificial Sequence
  Sense Oligo
ccucugccuccuggguuca

SEQ ID NO: 44720 - RNA, 19 nt, Artificial Sequence
  Antisense Oligo
ugaacccaggaggcagagg

SEQ ID NO: 44721 - RNA, 19 nt, Artificial Sequence
  Sense Oligo
cucugccuccuggguucaa

SEQ ID NO: 44722 - RNA, 19 nt, Artificial Sequence
  Antisense Oligo
uugaacccaggaggcagag

SEQ ID NO: 44723 - RNA, 19 nt, Artificial Sequence
  Sense Oligo
ucugccuccuggguucaag

SEQ ID NO: 44724 - RNA, 19 nt, Artificial Sequence
  Antisense Oligo
cuugaacccaggaggcaga

SEQ ID NO: 44725 - RNA, 19 nt, Artificial Sequence
  Sense Oligo
cugccuccuggguucaagc

SEQ ID NO: 44726 - RNA, 19 nt, Artificial Sequence
  Antisense Oligo
gcuugaacccaggaggcag

SEQ ID NO: 44727 - RNA, 19 nt, Artificial Sequence
  Sense Oligo
ugccuccuggguucaagcg

SEQ ID NO: 44728 - RNA, 19 nt, Artificial Sequence
  Antisense Oligo
cgcuugaacccaggaggca

SEQ ID NO: 44729 - RNA, 19 nt, Artificial Sequence
  Sense Oligo
gccuccuggguucaagcga

SEQ ID NO: 44730 - RNA, 19 nt, Artificial Sequence
  Antisense Oligo
ucgcuugaacccaggaggc

SEQ ID NO: 44731 - RNA, 19 nt, Artificial Sequence
  Sense Oligo
ccuccuggguucaagcgau

SEQ ID NO: 44732 - RNA, 19 nt, Artificial Sequence
  Antisense Oligo
aucgcuugaacccaggagg

SEQ ID NO: 44733 - RNA, 19 nt, Artificial Sequence
  Sense Oligo
cuccuggguucaagcgauu

SEQ ID NO: 44734 - RNA, 19 nt, Artificial Sequence
  Antisense Oligo
aaucgcuugaacccaggag

SEQ ID NO: 44735 - RNA, 19 nt, Artificial Sequence
  Sense Oligo
uccuggguucaagcgauuc

SEQ ID NO: 44736 - RNA, 19 nt, Artificial Sequence
  Antisense Oligo
gaaucgcuugaacccagga

SEQ ID NO: 44737 - RNA, 19 nt, Artificial Sequence
  Sense Oligo
ccuggguucaagcgauucu

SEQ ID NO: 44738 - RNA, 19 nt, Artificial Sequence
  Antisense Oligo
agaaucgcuugaacccagg

SEQ ID NO: 44739 - RNA, 19 nt, Artificial Sequence
  Sense Oligo
cuggguucaagcgauucuc

SEQ ID NO: 44740 - RNA, 19 nt, Artificial Sequence
  Antisense Oligo
gagaaucgcuugaacccag

SEQ ID NO: 44741 - RNA, 19 nt, Artificial Sequence
  Sense Oligo
uggguucaagcgauucucc

SEQ ID NO: 44742 - RNA, 19 nt, Artificial Sequence
  Antisense Oligo
ggagaaucgcuugaaccca

SEQ ID NO: 44743 - RNA, 19 nt, Artificial Sequence
  Sense Oligo
ggguucaagcgauucuccu

SEQ ID NO: 44744 - RNA, 19 nt, Artificial Sequence
  Antisense Oligo
aggagaaucgcuugaaccc

SEQ ID NO: 44745 - RNA, 19 nt, Artificial Sequence
  Sense Oligo
gguucaagcgauucuccug

SEQ ID NO: 44746 - RNA, 19 nt, Artificial Sequence
  Antisense Oligo
caggagaaucgcuugaacc

SEQ ID NO: 44747 - RNA, 19 nt, Artificial Sequence
  Sense Oligo
guucaagcgauucuccugc

SEQ ID NO: 44748 - RNA, 19 nt, Artificial Sequence
  Antisense Oligo
gcaggagaaucgcuugaac

SEQ ID NO: 44749 - RNA, 19 nt, Artificial Sequence
  Sense Oligo
uucaagcgauucuccugcc

SEQ ID NO: 44750 - RNA, 19 nt, Artificial Sequence
  Antisense Oligo
ggcaggagaaucgcuugaa

SEQ ID NO: 44751 - RNA, 19 nt, Artificial Sequence
  Sense Oligo
ucaagcgauucuccugccu

SEQ ID NO: 44752 - RNA, 19 nt, Artificial Sequence
  Antisense Oligo
aggcaggagaaucgcuuga

SEQ ID NO: 44753 - RNA, 19 nt, Artificial Sequence
  Sense Oligo
gcugggacuacaggcacac

SEQ ID NO: 44754 - RNA, 19 nt, Artificial Sequence
  Antisense Oligo
gugugccuguagucccagc

SEQ ID NO: 44755 - RNA, 19 nt, Artificial Sequence
  Sense Oligo
cugggacuacaggcacacg

SEQ ID NO: 44756 - RNA, 19 nt, Artificial Sequence
  Antisense Oligo
cgugugccuguagucccag

SEQ ID NO: 44757 - RNA, 19 nt, Artificial Sequence
  Sense Oligo
ugggacuacaggcacacgc

SEQ ID NO: 44758 - RNA, 19 nt, Artificial Sequence
  Antisense Oligo
gcgugugccuguaguccca

SEQ ID NO: 44759 - RNA, 19 nt, Artificial Sequence
  Sense Oligo
ggacuacaggcacacgcca

SEQ ID NO: 44760 - RNA, 19 nt, Artificial Sequence
  Antisense Oligo
uggcgugugccuguagucc

SEQ ID NO: 44761 - RNA, 19 nt, Artificial Sequence
  Sense Oligo
cgccaccacaccugacuag

SEQ ID NO: 44762 - RNA, 19 nt, Artificial Sequence
  Antisense Oligo
cuagucaggugugguggcg

SEQ ID NO: 44763 - RNA, 19 nt, Artificial Sequence
  Sense Oligo
cauguuggccaggcugguc

SEQ ID NO: 44764 - RNA, 19 nt, Artificial Sequence
  Antisense Oligo
gaccagccuggccaacaug

SEQ ID NO: 44765 - RNA, 19 nt, Artificial Sequence
  Sense Oligo
auguuggccaggcuggucu

SEQ ID NO: 44766 - RNA, 19 nt, Artificial Sequence
  Antisense Oligo
agaccagccuggccaacau

SEQ ID NO: 44767 - RNA, 19 nt, Artificial Sequence
  Sense Oligo
uguuggccaggcuggucuc

SEQ ID NO: 44768 - RNA, 19 nt, Artificial Sequence
  Antisense Oligo
gagaccagccuggccaaca

SEQ ID NO: 44769 - RNA, 19 nt, Artificial Sequence
  Sense Oligo
guuggccaggcuggucuca

SEQ ID NO: 44770 - RNA, 19 nt, Artificial Sequence
  Antisense Oligo
ugagaccagccuggccaac

SEQ ID NO: 44771 - RNA, 19 nt, Artificial Sequence
  Sense Oligo
uuggccaggcuggucucaa

SEQ ID NO: 44772 - RNA, 19 nt, Artificial Sequence
  Antisense Oligo
uugagaccagccuggccaa

SEQ ID NO: 44773 - RNA, 19 nt, Artificial Sequence
  Sense Oligo
uggccaggcuggucucaaa

SEQ ID NO: 44774 - RNA, 19 nt, Artificial Sequence
  Antisense Oligo
uuugagaccagccuggcca

SEQ ID NO: 44775 - RNA, 19 nt, Artificial Sequence
  Sense Oligo
ugaccuugagugaucaccc

SEQ ID NO: 44776 - RNA, 19 nt, Artificial Sequence
  Antisense Oligo
gggugaucacucaagguca

SEQ ID NO: 44777 - RNA, 19 nt, Artificial Sequence
  Sense Oligo
gaccuugagugaucacccg

SEQ ID NO: 44778 - RNA, 19 nt, Artificial Sequence
  Antisense Oligo
cgggugaucacucaagguc

SEQ ID NO: 44779 - RNA, 19 nt, Artificial Sequence
  Sense Oligo
cucagccucccaaagugcu

SEQ ID NO: 44780 - RNA, 19 nt, Artificial Sequence
  Antisense Oligo
agcacuuugggaggcugag

SEQ ID NO: 44781 - RNA, 19 nt, Artificial Sequence
  Sense Oligo
ccaaagugcugggauuaca

SEQ ID NO: 44782 - RNA, 19 nt, Artificial Sequence
  Antisense Oligo
uguaaucccagcacuuugg

SEQ ID NO: 44783 - RNA, 19 nt, Artificial Sequence
  Sense Oligo
caaagugcugggauuacag

SEQ ID NO: 44784 - RNA, 19 nt, Artificial Sequence
  Antisense Oligo
cuguaaucccagcacuuug

SEQ ID NO: 44785 - RNA, 19 nt, Artificial Sequence
  Sense Oligo
gugcugggauuacaggccu

SEQ ID NO: 44786 - RNA, 19 nt, Artificial Sequence
  Antisense Oligo
aggccuguaaucccagcac

SEQ ID NO: 44787 - RNA, 19 nt, Artificial Sequence
  Sense Oligo
ugcugggauuacaggccug

SEQ ID NO: 44788 - RNA, 19 nt, Artificial Sequence
  Antisense Oligo
caggccuguaaucccagca

SEQ ID NO: 44789 - RNA, 19 nt, Artificial Sequence
  Sense Oligo
gcugggauuacaggccuga

SEQ ID NO: 44790 - RNA, 19 nt, Artificial Sequence
  Antisense Oligo
ucaggccuguaaucccagc

SEQ ID NO: 44791 - RNA, 19 nt, Artificial Sequence
  Sense Oligo
cugggauuacaggccugag

SEQ ID NO: 44792 - RNA, 19 nt, Artificial Sequence
  Antisense Oligo
cucaggccuguaaucccag

SEQ ID NO: 44793 - RNA, 19 nt, Artificial Sequence
  Sense Oligo
gccuggccugaauauguuu

SEQ ID NO: 44794 - RNA, 19 nt, Artificial Sequence
  Antisense Oligo
aaacauauucaggccaggc

SEQ ID NO: 44795 - RNA, 19 nt, Artificial Sequence
  Sense Oligo
ccuggccugaauauguuua

SEQ ID NO: 44796 - RNA, 19 nt, Artificial Sequence
  Antisense Oligo
uaaacauauucaggccagg

SEQ ID NO: 44797 - RNA, 19 nt, Artificial Sequence
  Sense Oligo
cuggccugaauauguuuag

SEQ ID NO: 44798 - RNA, 19 nt, Artificial Sequence
  Antisense Oligo
cuaaacauauucaggccag

SEQ ID NO: 44799 - RNA, 19 nt, Artificial Sequence
  Sense Oligo
ggccugaauauguuuagau

SEQ ID NO: 44800 - RNA, 19 nt, Artificial Sequence
  Antisense Oligo
aucuaaacauauucaggcc

SEQ ID NO: 44801 - RNA, 19 nt, Artificial Sequence
  Sense Oligo
gccugaauauguuuagaua

SEQ ID NO: 44802 - RNA, 19 nt, Artificial Sequence
  Antisense Oligo
uaucuaaacauauucaggc

SEQ ID NO: 44803 - RNA, 19 nt, Artificial Sequence
  Sense Oligo
gggcaaugggcuauuccac

SEQ ID NO: 44804 - RNA, 19 nt, Artificial Sequence
  Antisense Oligo
guggaauagcccauugccc

SEQ ID NO: 44805 - RNA, 19 nt, Artificial Sequence
  Sense Oligo
ggcaaugggcuauuccacc

SEQ ID NO: 44806 - RNA, 19 nt, Artificial Sequence
  Antisense Oligo
gguggaauagcccauugcc

SEQ ID NO: 44807 - RNA, 19 nt, Artificial Sequence
  Sense Oligo
gcaaugggcuauuccaccu

SEQ ID NO: 44808 - RNA, 19 nt, Artificial Sequence
  Antisense Oligo
agguggaauagcccauugc

SEQ ID NO: 44809 - RNA, 19 nt, Artificial Sequence
  Sense Oligo
caaugggcuauuccaccua

SEQ ID NO: 44810 - RNA, 19 nt, Artificial Sequence
  Antisense Oligo
uagguggaauagcccauug

SEQ ID NO: 44811 - RNA, 19 nt, Artificial Sequence
  Sense Oligo
aaugggcuauuccaccuag

SEQ ID NO: 44812 - RNA, 19 nt, Artificial Sequence
  Antisense Oligo
cuagguggaauagcccauu

SEQ ID NO: 44813 - RNA, 19 nt, Artificial Sequence
  Sense Oligo
cuauuccaccuagcucggg

SEQ ID NO: 44814 - RNA, 19 nt, Artificial Sequence
  Antisense Oligo
cccgagcuagguggaauag

SEQ ID NO: 44815 - RNA, 19 nt, Artificial Sequence
  Sense Oligo
uauuccaccuagcucgggu

SEQ ID NO: 44816 - RNA, 19 nt, Artificial Sequence
  Antisense Oligo
acccgagcuagguggaaua

SEQ ID NO: 44817 - RNA, 19 nt, Artificial Sequence
  Sense Oligo
ggguguguggucggcucua

SEQ ID NO: 44818 - RNA, 19 nt, Artificial Sequence
  Antisense Oligo
uagagccgaccacacaccc

SEQ ID NO: 44819 - RNA, 19 nt, Artificial Sequence
  Sense Oligo
uggguuucugcaggcacac

SEQ ID NO: 44820 - RNA, 19 nt, Artificial Sequence
  Antisense Oligo
gugugccugcagaaaccca

SEQ ID NO: 44821 - RNA, 19 nt, Artificial Sequence
  Sense Oligo
ggguuucugcaggcacacu

SEQ ID NO: 44822 - RNA, 19 nt, Artificial Sequence
  Antisense Oligo
agugugccugcagaaaccc

SEQ ID NO: 44823 - RNA, 19 nt, Artificial Sequence
  Sense Oligo
gguuucugcaggcacacuc

SEQ ID NO: 44824 - RNA, 19 nt, Artificial Sequence
  Antisense Oligo
gagugugccugcagaaacc

SEQ ID NO: 44825 - RNA, 19 nt, Artificial Sequence
  Sense Oligo
guuucugcaggcacacucu

SEQ ID NO: 44826 - RNA, 19 nt, Artificial Sequence
  Antisense Oligo
agagugugccugcagaaac

SEQ ID NO: 44827 - RNA, 19 nt, Artificial Sequence
  Sense Oligo
ugcaggcacacucugaugu

SEQ ID NO: 44828 - RNA, 19 nt, Artificial Sequence
  Antisense Oligo
acaucagagugugccugca

SEQ ID NO: 44829 - RNA, 19 nt, Artificial Sequence
  Sense Oligo
gcaggcacacucugauguu

SEQ ID NO: 44830 - RNA, 19 nt, Artificial Sequence
  Antisense Oligo
aacaucagagugugccugc

SEQ ID NO: 44831 - RNA, 19 nt, Artificial Sequence
  Sense Oligo
caggcacacucugauguuc

SEQ ID NO: 44832 - RNA, 19 nt, Artificial Sequence
  Antisense Oligo
gaacaucagagugugccug

SEQ ID NO: 44833 - RNA, 19 nt, Artificial Sequence
  Sense Oligo
aggcacacucugauguuca

SEQ ID NO: 44834 - RNA, 19 nt, Artificial Sequence
  Antisense Oligo
ugaacaucagagugugccu

SEQ ID NO: 44835 - RNA, 19 nt, Artificial Sequence
  Sense Oligo
cacacucugauguucacag

SEQ ID NO: 44836 - RNA, 19 nt, Artificial Sequence
  Antisense Oligo
cugugaacaucagagugug

SEQ ID NO: 44837 - RNA, 19 nt, Artificial Sequence
  Sense Oligo
acacucugauguucacagu

SEQ ID NO: 44838 - RNA, 19 nt, Artificial Sequence
  Antisense Oligo
acugugaacaucagagugu

SEQ ID NO: 44839 - RNA, 19 nt, Artificial Sequence
  Sense Oligo
ugauguucacagugacaga

SEQ ID NO: 44840 - RNA, 19 nt, Artificial Sequence
  Antisense Oligo
ucugucacugugaacauca

SEQ ID NO: 44841 - RNA, 19 nt, Artificial Sequence
  Sense Oligo
auguucacagugacagaau

SEQ ID NO: 44842 - RNA, 19 nt, Artificial Sequence
  Antisense Oligo
auucugucacugugaacau

SEQ ID NO: 44843 - RNA, 19 nt, Artificial Sequence
  Sense Oligo
uguucacagugacagaauc

SEQ ID NO: 44844 - RNA, 19 nt, Artificial Sequence
  Antisense Oligo
gauucugucacugugaaca

SEQ ID NO: 44845 - RNA, 19 nt, Artificial Sequence
  Sense Oligo
guucacagugacagaauca

SEQ ID NO: 44846 - RNA, 19 nt, Artificial Sequence
  Antisense Oligo
ugauucugucacugugaac

SEQ ID NO: 44847 - RNA, 19 nt, Artificial Sequence
  Sense Oligo
ucacagugacagaaucauu

SEQ ID NO: 44848 - RNA, 19 nt, Artificial Sequence
  Antisense Oligo
aaugauucugucacuguga

SEQ ID NO: 44849 - RNA, 19 nt, Artificial Sequence
  Sense Oligo
cacagugacagaaucauuu

SEQ ID NO: 44850 - RNA, 19 nt, Artificial Sequence
  Antisense Oligo
aaaugauucugucacugug

SEQ ID NO: 44851 - RNA, 19 nt, Artificial Sequence
  Sense Oligo
aacgugucccuagugcuaa

SEQ ID NO: 44852 - RNA, 19 nt, Artificial Sequence
  Antisense Oligo
uuagcacuagggacacguu

SEQ ID NO: 44853 - RNA, 19 nt, Artificial Sequence
  Sense Oligo
acgugucccuagugcuaag

SEQ ID NO: 44854 - RNA, 19 nt, Artificial Sequence
  Antisense Oligo
cuuagcacuagggacacgu

SEQ ID NO: 44855 - RNA, 19 nt, Artificial Sequence
  Sense Oligo
cgugucccuagugcuaagu

SEQ ID NO: 44856 - RNA, 19 nt, Artificial Sequence
  Antisense Oligo
acuuagcacuagggacacg

SEQ ID NO: 44857 - RNA, 19 nt, Artificial Sequence
  Sense Oligo
gugucccuagugcuaagug

SEQ ID NO: 44858 - RNA, 19 nt, Artificial Sequence
  Antisense Oligo
cacuuagcacuagggacac

SEQ ID NO: 44859 - RNA, 19 nt, Artificial Sequence
  Sense Oligo
ugucccuagugcuaagugg

SEQ ID NO: 44860 - RNA, 19 nt, Artificial Sequence
  Antisense Oligo
ccacuuagcacuagggaca

SEQ ID NO: 44861 - RNA, 19 nt, Artificial Sequence
  Sense Oligo
cgggacucugcuuugccug

SEQ ID NO: 44862 - RNA, 19 nt, Artificial Sequence
  Antisense Oligo
caggcaaagcagagucccg

SEQ ID NO: 44863 - RNA, 19 nt, Artificial Sequence
  Sense Oligo
gggacucugcuuugccugc

SEQ ID NO: 44864 - RNA, 19 nt, Artificial Sequence
  Antisense Oligo
gcaggcaaagcagaguccc

SEQ ID NO: 44865 - RNA, 19 nt, Artificial Sequence
  Sense Oligo
ggacucugcuuugccugcu

SEQ ID NO: 44866 - RNA, 19 nt, Artificial Sequence
  Antisense Oligo
agcaggcaaagcagagucc

SEQ ID NO: 44867 - RNA, 19 nt, Artificial Sequence
  Sense Oligo
ucugcuuugccugcugucc

SEQ ID NO: 44868 - RNA, 19 nt, Artificial Sequence
  Antisense Oligo
ggacagcaggcaaagcaga

SEQ ID NO: 44869 - RNA, 19 nt, Artificial Sequence
  Sense Oligo
cuuugccugcuguccugcg

SEQ ID NO: 44870 - RNA, 19 nt, Artificial Sequence
  Antisense Oligo
cgcaggacagcaggcaaag

SEQ ID NO: 44871 - RNA, 19 nt, Artificial Sequence
  Sense Oligo
uuugccugcuguccugcgg

SEQ ID NO: 44872 - RNA, 19 nt, Artificial Sequence
  Antisense Oligo
ccgcaggacagcaggcaaa

SEQ ID NO: 44873 - RNA, 19 nt, Artificial Sequence
  Sense Oligo
uugccugcuguccugcgga

SEQ ID NO: 44874 - RNA, 19 nt, Artificial Sequence
  Antisense Oligo
uccgcaggacagcaggcaa

SEQ ID NO: 44875 - RNA, 19 nt, Artificial Sequence
  Sense Oligo
ugaguagguaacggcuggg

SEQ ID NO: 44876 - RNA, 19 nt, Artificial Sequence
  Antisense Oligo
cccagccguuaccuacuca

SEQ ID NO: 44877 - RNA, 19 nt, Artificial Sequence
  Sense Oligo
gaguagguaacggcuggga

SEQ ID NO: 44878 - RNA, 19 nt, Artificial Sequence
  Antisense Oligo
ucccagccguuaccuacuc

SEQ ID NO: 44879 - RNA, 19 nt, Artificial Sequence
  Sense Oligo
aguagguaacggcugggaa

SEQ ID NO: 44880 - RNA, 19 nt, Artificial Sequence
  Antisense Oligo
uucccagccguuaccuacu

SEQ ID NO: 44881 - RNA, 19 nt, Artificial Sequence
  Sense Oligo
aaugugaagguucaagagc

SEQ ID NO: 44882 - RNA, 19 nt, Artificial Sequence
  Antisense Oligo
gcucuugaaccuucacauu

SEQ ID NO: 44883 - RNA, 19 nt, Artificial Sequence
  Sense Oligo
ucuugaaucugauguuaug

SEQ ID NO: 44884 - RNA, 19 nt, Artificial Sequence
  Antisense Oligo
cauaacaucagauucaaga

SEQ ID NO: 44885 - RNA, 19 nt, Artificial Sequence
  Sense Oligo
cuugaaucugauguuaugu

SEQ ID NO: 44886 - RNA, 19 nt, Artificial Sequence
  Antisense Oligo
acauaacaucagauucaag

SEQ ID NO: 44887 - RNA, 19 nt, Artificial Sequence
  Sense Oligo
ugaaucugauguuauguug

SEQ ID NO: 44888 - RNA, 19 nt, Artificial Sequence
  Antisense Oligo
caacauaacaucagauuca

SEQ ID NO: 44889 - RNA, 19 nt, Artificial Sequence
  Sense Oligo
gaaucugauguuauguugc

SEQ ID NO: 44890 - RNA, 19 nt, Artificial Sequence
  Antisense Oligo
gcaacauaacaucagauuc

SEQ ID NO: 44891 - RNA, 19 nt, Artificial Sequence
  Sense Oligo
aaucugauguuauguugca

SEQ ID NO: 44892 - RNA, 19 nt, Artificial Sequence
  Antisense Oligo
ugcaacauaacaucagauu

SEQ ID NO: 44893 - RNA, 19 nt, Artificial Sequence
  Sense Oligo
uguuauguugcaucaguuu

SEQ ID NO: 44894 - RNA, 19 nt, Artificial Sequence
  Antisense Oligo
aaacugaugcaacauaaca

SEQ ID NO: 44895 - RNA, 19 nt, Artificial Sequence
  Sense Oligo
guuauguugcaucaguuuu

SEQ ID NO: 44896 - RNA, 19 nt, Artificial Sequence
  Antisense Oligo
aaaacugaugcaacauaac

SEQ ID NO: 44897 - RNA, 19 nt, Artificial Sequence
  Sense Oligo
uuauguugcaucaguuuug

SEQ ID NO: 44898 - RNA, 19 nt, Artificial Sequence
  Antisense Oligo
caaaacugaugcaacauaa

SEQ ID NO: 44899 - RNA, 19 nt, Artificial Sequence
  Sense Oligo
uauguugcaucaguuuuga

SEQ ID NO: 44900 - RNA, 19 nt, Artificial Sequence
  Antisense Oligo
ucaaaacugaugcaacaua

SEQ ID NO: 44901 - RNA, 19 nt, Artificial Sequence
  Sense Oligo
auguugcaucaguuuugaa

SEQ ID NO: 44902 - RNA, 19 nt, Artificial Sequence
  Antisense Oligo
uucaaaacugaugcaacau

SEQ ID NO: 44903 - RNA, 19 nt, Artificial Sequence
  Sense Oligo
guugcaucaguuuugaauu

SEQ ID NO: 44904 - RNA, 19 nt, Artificial Sequence
  Antisense Oligo
aauucaaaacugaugcaac

SEQ ID NO: 44905 - RNA, 19 nt, Artificial Sequence
  Sense Oligo
aaguaacuucuaguggauc

SEQ ID NO: 44906 - RNA, 19 nt, Artificial Sequence
  Antisense Oligo
gauccacuagaaguuacuu

SEQ ID NO: 44907 - RNA, 19 nt, Artificial Sequence
  Sense Oligo
aguaacuucuaguggaucu

SEQ ID NO: 44908 - RNA, 19 nt, Artificial Sequence
  Antisense Oligo
agauccacuagaaguuacu

SEQ ID NO: 44909 - RNA, 19 nt, Artificial Sequence
  Sense Oligo
guaacuucuaguggaucuu

SEQ ID NO: 44910 - RNA, 19 nt, Artificial Sequence
  Antisense Oligo
aagauccacuagaaguuac

SEQ ID NO: 44911 - RNA, 19 nt, Artificial Sequence
  Sense Oligo
uagauucucuuacucuuug

SEQ ID NO: 44912 - RNA, 19 nt, Artificial Sequence
  Antisense Oligo
caaagaguaagagaaucua

SEQ ID NO: 44913 - RNA, 19 nt, Artificial Sequence
  Sense Oligo
agauucucuuacucuuugu

SEQ ID NO: 44914 - RNA, 19 nt, Artificial Sequence
  Antisense Oligo
acaaagaguaagagaaucu

SEQ ID NO: 44915 - RNA, 19 nt, Artificial Sequence
  Sense Oligo
gauucucuuacucuuuguc

SEQ ID NO: 44916 - RNA, 19 nt, Artificial Sequence
  Antisense Oligo
gacaaagaguaagagaauc

SEQ ID NO: 44917 - RNA, 19 nt, Artificial Sequence
  Sense Oligo
ucuuacucuuuguccuagc

SEQ ID NO: 44918 - RNA, 19 nt, Artificial Sequence
  Antisense Oligo
gcuaggacaaagaguaaga

SEQ ID NO: 44919 - RNA, 19 nt, Artificial Sequence
  Sense Oligo
cuuacucuuuguccuagcc

SEQ ID NO: 44920 - RNA, 19 nt, Artificial Sequence
  Antisense Oligo
ggcuaggacaaagaguaag

SEQ ID NO: 44921 - RNA, 19 nt, Artificial Sequence
  Sense Oligo
uuacucuuuguccuagccc

SEQ ID NO: 44922 - RNA, 19 nt, Artificial Sequence
  Antisense Oligo
gggcuaggacaaagaguaa

SEQ ID NO: 44923 - RNA, 19 nt, Artificial Sequence
  Sense Oligo
uacucuuuguccuagcccu

SEQ ID NO: 44924 - RNA, 19 nt, Artificial Sequence
  Antisense Oligo
agggcuaggacaaagagua

SEQ ID NO: 44925 - RNA, 19 nt, Artificial Sequence
  Sense Oligo
acucuuuguccuagcccug

SEQ ID NO: 44926 - RNA, 19 nt, Artificial Sequence
  Antisense Oligo
cagggcuaggacaaagagu

SEQ ID NO: 44927 - RNA, 19 nt, Artificial Sequence
  Sense Oligo
uccuagcccugggacuuaa

SEQ ID NO: 44928 - RNA, 19 nt, Artificial Sequence
  Antisense Oligo
uuaagucccagggcuagga

SEQ ID NO: 44929 - RNA, 19 nt, Artificial Sequence
  Sense Oligo
ccuagcccugggacuuaau

SEQ ID NO: 44930 - RNA, 19 nt, Artificial Sequence
  Antisense Oligo
auuaagucccagggcuagg

SEQ ID NO: 44931 - RNA, 19 nt, Artificial Sequence
  Sense Oligo
cuagcccugggacuuaauu

SEQ ID NO: 44932 - RNA, 19 nt, Artificial Sequence
  Antisense Oligo
aauuaagucccagggcuag

SEQ ID NO: 44933 - RNA, 19 nt, Artificial Sequence
  Sense Oligo
uagcccugggacuuaauuu

SEQ ID NO: 44934 - RNA, 19 nt, Artificial Sequence
  Antisense Oligo
aaauuaagucccagggcua

SEQ ID NO: 44935 - RNA, 19 nt, Artificial Sequence
  Sense Oligo
agcccugggacuuaauuuu

SEQ ID NO: 44936 - RNA, 19 nt, Artificial Sequence
  Antisense Oligo
aaaauuaagucccagggcu

SEQ ID NO: 44937 - RNA, 19 nt, Artificial Sequence
  Sense Oligo
uuuucucucucucucucuc

SEQ ID NO: 44938 - RNA, 19 nt, Artificial Sequence
  Antisense Oligo
gagagagagagagagaaaa

SEQ ID NO: 44939 - RNA, 19 nt, Artificial Sequence
  Sense Oligo
uuucucucucucucucucu

SEQ ID NO: 44940 - RNA, 19 nt, Artificial Sequence
  Antisense Oligo
agagagagagagagagaaa

SEQ ID NO: 44941 - RNA, 19 nt, Artificial Sequence
  Sense Oligo
uucucucucucucucucuc

SEQ ID NO: 44942 - RNA, 19 nt, Artificial Sequence
  Antisense Oligo
gagagagagagagagagaa

SEQ ID NO: 44943 - RNA, 19 nt, Artificial Sequence
  Sense Oligo
ucucucucucucucucucu

SEQ ID NO: 44944 - RNA, 19 nt, Artificial Sequence
  Antisense Oligo
agagagagagagagagaga

SEQ ID NO: 44945 - RNA, 19 nt, Artificial Sequence
  Sense Oligo
cucucucucucucucucua

SEQ ID NO: 44946 - RNA, 19 nt, Artificial Sequence
  Antisense Oligo
uagagagagagagagagag

SEQ ID NO: 44947 - RNA, 19 nt, Artificial Sequence
  Sense Oligo
ucucucucucucucucuau

SEQ ID NO: 44948 - RNA, 19 nt, Artificial Sequence
  Antisense Oligo
auagagagagagagagaga

SEQ ID NO: 44949 - RNA, 19 nt, Artificial Sequence
  Sense Oligo
cucucucucucucucuauu

SEQ ID NO: 44950 - RNA, 19 nt, Artificial Sequence
  Antisense Oligo
aauagagagagagagagag

SEQ ID NO: 44951 - RNA, 19 nt, Artificial Sequence
  Sense Oligo
ucucucucucucucuauuu

SEQ ID NO: 44952 - RNA, 19 nt, Artificial Sequence
  Antisense Oligo
aaauagagagagagagaga

SEQ ID NO: 44953 - RNA, 19 nt, Artificial Sequence
  Sense Oligo
cucucucucucucuauuuu

SEQ ID NO: 44954 - RNA, 19 nt, Artificial Sequence
  Antisense Oligo
aaaauagagagagagagag

SEQ ID NO: 44955 - RNA, 19 nt, Artificial Sequence
  Sense Oligo
guuucgcucugucacccua

SEQ ID NO: 44956 - RNA, 19 nt, Artificial Sequence
  Antisense Oligo
uagggugacagagcgaaac

SEQ ID NO: 44957 - RNA, 19 nt, Artificial Sequence
  Sense Oligo
uuucgcucugucacccuaa

SEQ ID NO: 44958 - RNA, 19 nt, Artificial Sequence
  Antisense Oligo
uuagggugacagagcgaaa

SEQ ID NO: 44959 - RNA, 19 nt, Artificial Sequence
  Sense Oligo
uucgcucugucacccuaac

SEQ ID NO: 44960 - RNA, 19 nt, Artificial Sequence
  Antisense Oligo
guuagggugacagagcgaa

SEQ ID NO: 44961 - RNA, 19 nt, Artificial Sequence
  Sense Oligo
augucuuaagggaugccca

SEQ ID NO: 44962 - RNA, 19 nt, Artificial Sequence
  Antisense Oligo
ugggcaucccuuaagacau

SEQ ID NO: 44963 - RNA, 19 nt, Artificial Sequence
  Sense Oligo
ugucuuaagggaugcccag

SEQ ID NO: 44964 - RNA, 19 nt, Artificial Sequence
  Antisense Oligo
cugggcaucccuuaagaca

SEQ ID NO: 44965 - RNA, 19 nt, Artificial Sequence
  Sense Oligo
gucuuaagggaugcccagg

SEQ ID NO: 44966 - RNA, 19 nt, Artificial Sequence
  Antisense Oligo
ccugggcaucccuuaagac

SEQ ID NO: 44967 - RNA, 19 nt, Artificial Sequence
  Sense Oligo
ucuuaagggaugcccaggc

SEQ ID NO: 44968 - RNA, 19 nt, Artificial Sequence
  Antisense Oligo
gccugggcaucccuuaaga

SEQ ID NO: 44969 - RNA, 19 nt, Artificial Sequence
  Sense Oligo
cuuaagggaugcccaggcu

SEQ ID NO: 44970 - RNA, 19 nt, Artificial Sequence
  Antisense Oligo
agccugggcaucccuuaag

SEQ ID NO: 44971 - RNA, 19 nt, Artificial Sequence
  Sense Oligo
uuaagggaugcccaggcug

SEQ ID NO: 44972 - RNA, 19 nt, Artificial Sequence
  Antisense Oligo
cagccugggcaucccuuaa

SEQ ID NO: 44973 - RNA, 19 nt, Artificial Sequence
  Sense Oligo
uaagggaugcccaggcugg

SEQ ID NO: 44974 - RNA, 19 nt, Artificial Sequence
  Antisense Oligo
ccagccugggcaucccuua

SEQ ID NO: 44975 - RNA, 19 nt, Artificial Sequence
  Sense Oligo
aagggaugcccaggcugga

SEQ ID NO: 44976 - RNA, 19 nt, Artificial Sequence
  Antisense Oligo
uccagccugggcaucccuu

SEQ ID NO: 44977 - RNA, 19 nt, Artificial Sequence
  Sense Oligo
guggugcaaucucagcuca

SEQ ID NO: 44978 - RNA, 19 nt, Artificial Sequence
  Antisense Oligo
ugagcugagauugcaccac

SEQ ID NO: 44979 - RNA, 19 nt, Artificial Sequence
  Sense Oligo
uggugcaaucucagcucac

SEQ ID NO: 44980 - RNA, 19 nt, Artificial Sequence
  Antisense Oligo
gugagcugagauugcacca

SEQ ID NO: 44981 - RNA, 19 nt, Artificial Sequence
  Sense Oligo
ggugcaaucucagcucacu

SEQ ID NO: 44982 - RNA, 19 nt, Artificial Sequence
  Antisense Oligo
agugagcugagauugcacc

SEQ ID NO: 44983 - RNA, 19 nt, Artificial Sequence
  Sense Oligo
gugcaaucucagcucacua

SEQ ID NO: 44984 - RNA, 19 nt, Artificial Sequence
  Antisense Oligo
uagugagcugagauugcac

SEQ ID NO: 44985 - RNA, 19 nt, Artificial Sequence
  Sense Oligo
ccggguucaagcgauucuc

SEQ ID NO: 44986 - RNA, 19 nt, Artificial Sequence
  Antisense Oligo
gagaaucgcuugaacccgg

SEQ ID NO: 44987 - RNA, 19 nt, Artificial Sequence
  Sense Oligo
cggguucaagcgauucucc

SEQ ID NO: 44988 - RNA, 19 nt, Artificial Sequence
  Antisense Oligo
ggagaaucgcuugaacccg

SEQ ID NO: 44989 - RNA, 19 nt, Artificial Sequence
  Sense Oligo
ggguucaagcgauucuccu

SEQ ID NO: 44990 - RNA, 19 nt, Artificial Sequence
  Antisense Oligo
aggagaaucgcuugaaccc

SEQ ID NO: 44991 - RNA, 19 nt, Artificial Sequence
  Sense Oligo
gguucaagcgauucuccug

SEQ ID NO: 44992 - RNA, 19 nt, Artificial Sequence
  Antisense Oligo
caggagaaucgcuugaacc

SEQ ID NO: 44993 - RNA, 19 nt, Artificial Sequence
  Sense Oligo
guucaagcgauucuccugc

SEQ ID NO: 44994 - RNA, 19 nt, Artificial Sequence
  Antisense Oligo
gcaggagaaucgcuugaac

SEQ ID NO: 44995 - RNA, 19 nt, Artificial Sequence
  Sense Oligo
uucaagcgauucuccugcc

SEQ ID NO: 44996 - RNA, 19 nt, Artificial Sequence
  Antisense Oligo
ggcaggagaaucgcuugaa

SEQ ID NO: 44997 - RNA, 19 nt, Artificial Sequence
  Sense Oligo
ucaagcgauucuccugccu

SEQ ID NO: 44998 - RNA, 19 nt, Artificial Sequence
  Antisense Oligo
aggcaggagaaucgcuuga

SEQ ID NO: 44999 - RNA, 19 nt, Artificial Sequence
  Sense Oligo
agccuccugaguagcuggg

SEQ ID NO: 45000 - RNA, 19 nt, Artificial Sequence
  Antisense Oligo
cccagcuacucaggaggcu

SEQ ID NO: 45001 - RNA, 19 nt, Artificial Sequence
  Sense Oligo
gccuccugaguagcuggga

SEQ ID NO: 45002 - RNA, 19 nt, Artificial Sequence
  Antisense Oligo
ucccagcuacucaggaggc

SEQ ID NO: 45003 - RNA, 19 nt, Artificial Sequence
  Sense Oligo
ccuccugaguagcugggau

SEQ ID NO: 45004 - RNA, 19 nt, Artificial Sequence
  Antisense Oligo
aucccagcuacucaggagg

SEQ ID NO: 45005 - RNA, 19 nt, Artificial Sequence
  Sense Oligo
cuccugaguagcugggauu

SEQ ID NO: 45006 - RNA, 19 nt, Artificial Sequence
  Antisense Oligo
aaucccagcuacucaggag

SEQ ID NO: 45007 - RNA, 19 nt, Artificial Sequence
  Sense Oligo
uccugaguagcugggauua

SEQ ID NO: 45008 - RNA, 19 nt, Artificial Sequence
  Antisense Oligo
uaaucccagcuacucagga

SEQ ID NO: 45009 - RNA, 19 nt, Artificial Sequence
  Sense Oligo
ccugaguagcugggauuac

SEQ ID NO: 45010 - RNA, 19 nt, Artificial Sequence
  Antisense Oligo
guaaucccagcuacucagg

SEQ ID NO: 45011 - RNA, 19 nt, Artificial Sequence
  Sense Oligo
cugaguagcugggauuaca

SEQ ID NO: 45012 - RNA, 19 nt, Artificial Sequence
  Antisense Oligo
uguaaucccagcuacucag

SEQ ID NO: 45013 - RNA, 19 nt, Artificial Sequence
  Sense Oligo
ugaguagcugggauuacag

SEQ ID NO: 45014 - RNA, 19 nt, Artificial Sequence
  Antisense Oligo
cuguaaucccagcuacuca

SEQ ID NO: 45015 - RNA, 19 nt, Artificial Sequence
  Sense Oligo
uagcugggauuacaggugc

SEQ ID NO: 45016 - RNA, 19 nt, Artificial Sequence
  Antisense Oligo
gcaccuguaaucccagcua

SEQ ID NO: 45017 - RNA, 19 nt, Artificial Sequence
  Sense Oligo
agcugggauuacaggugcc

SEQ ID NO: 45018 - RNA, 19 nt, Artificial Sequence
  Antisense Oligo
ggcaccuguaaucccagcu

SEQ ID NO: 45019 - RNA, 19 nt, Artificial Sequence
  Sense Oligo
gcugggauuacaggugccu

SEQ ID NO: 45020 - RNA, 19 nt, Artificial Sequence
  Antisense Oligo
aggcaccuguaaucccagc

SEQ ID NO: 45021 - RNA, 19 nt, Artificial Sequence
  Sense Oligo
cugggauuacaggugccug

SEQ ID NO: 45022 - RNA, 19 nt, Artificial Sequence
  Antisense Oligo
caggcaccuguaaucccag

SEQ ID NO: 45023 - RNA, 19 nt, Artificial Sequence
  Sense Oligo
ugggauuacaggugccugc

SEQ ID NO: 45024 - RNA, 19 nt, Artificial Sequence
  Antisense Oligo
gcaggcaccuguaauccca

SEQ ID NO: 45025 - RNA, 19 nt, Artificial Sequence
  Sense Oligo
gggauuacaggugccugcc

SEQ ID NO: 45026 - RNA, 19 nt, Artificial Sequence
  Antisense Oligo
ggcaggcaccuguaauccc

SEQ ID NO: 45027 - RNA, 19 nt, Artificial Sequence
  Sense Oligo
ggauuacaggugccugcca

SEQ ID NO: 45028 - RNA, 19 nt, Artificial Sequence
  Antisense Oligo
uggcaggcaccuguaaucc

SEQ ID NO: 45029 - RNA, 19 nt, Artificial Sequence
  Sense Oligo
gauuacaggugccugccac

SEQ ID NO: 45030 - RNA, 19 nt, Artificial Sequence
  Antisense Oligo
guggcaggcaccuguaauc

SEQ ID NO: 45031 - RNA, 19 nt, Artificial Sequence
  Sense Oligo
ccaccacgccuggcuaauu

SEQ ID NO: 45032 - RNA, 19 nt, Artificial Sequence
  Antisense Oligo
aauuagccaggcguggugg

SEQ ID NO: 45033 - RNA, 19 nt, Artificial Sequence
  Sense Oligo
caccacgccuggcuaauuu

SEQ ID NO: 45034 - RNA, 19 nt, Artificial Sequence
  Antisense Oligo
aaauuagccaggcguggug

SEQ ID NO: 45035 - RNA, 19 nt, Artificial Sequence
  Sense Oligo
accacgccuggcuaauuuu

SEQ ID NO: 45036 - RNA, 19 nt, Artificial Sequence
  Antisense Oligo
aaaauuagccaggcguggu

SEQ ID NO: 45037 - RNA, 19 nt, Artificial Sequence
  Sense Oligo
aacuccugaccucaaguga

SEQ ID NO: 45038 - RNA, 19 nt, Artificial Sequence
  Antisense Oligo
ucacuugaggucaggaguu

SEQ ID NO: 45039 - RNA, 19 nt, Artificial Sequence
  Sense Oligo
ccugaccucaagugauccc

SEQ ID NO: 45040 - RNA, 19 nt, Artificial Sequence
  Antisense Oligo
gggaucacuugaggucagg

SEQ ID NO: 45041 - RNA, 19 nt, Artificial Sequence
  Sense Oligo
cucggccucccaaagugcu

SEQ ID NO: 45042 - RNA, 19 nt, Artificial Sequence
  Antisense Oligo
agcacuuugggaggccgag

SEQ ID NO: 45043 - RNA, 19 nt, Artificial Sequence
  Sense Oligo
ucggccucccaaagugcua

SEQ ID NO: 45044 - RNA, 19 nt, Artificial Sequence
  Antisense Oligo
uagcacuuugggaggccga

SEQ ID NO: 45045 - RNA, 19 nt, Artificial Sequence
  Sense Oligo
cggccucccaaagugcuag

SEQ ID NO: 45046 - RNA, 19 nt, Artificial Sequence
  Antisense Oligo
cuagcacuuugggaggccg

SEQ ID NO: 45047 - RNA, 19 nt, Artificial Sequence
  Sense Oligo
ggccucccaaagugcuagg

SEQ ID NO: 45048 - RNA, 19 nt, Artificial Sequence
  Antisense Oligo
ccuagcacuuugggaggcc

SEQ ID NO: 45049 - RNA, 19 nt, Artificial Sequence
  Sense Oligo
gccucccaaagugcuagga

SEQ ID NO: 45050 - RNA, 19 nt, Artificial Sequence
  Antisense Oligo
uccuagcacuuugggaggc

SEQ ID NO: 45051 - RNA, 19 nt, Artificial Sequence
  Sense Oligo
ccucccaaagugcuaggau

SEQ ID NO: 45052 - RNA, 19 nt, Artificial Sequence
  Antisense Oligo
auccuagcacuuugggagg

SEQ ID NO: 45053 - RNA, 19 nt, Artificial Sequence
  Sense Oligo
cucccaaagugcuaggauu

SEQ ID NO: 45054 - RNA, 19 nt, Artificial Sequence
  Antisense Oligo
aauccuagcacuuugggag

SEQ ID NO: 45055 - RNA, 19 nt, Artificial Sequence
  Sense Oligo
ucccaaagugcuaggauua

SEQ ID NO: 45056 - RNA, 19 nt, Artificial Sequence
  Antisense Oligo
uaauccuagcacuuuggga

SEQ ID NO: 45057 - RNA, 19 nt, Artificial Sequence
  Sense Oligo
cccaaagugcuaggauuac

SEQ ID NO: 45058 - RNA, 19 nt, Artificial Sequence
  Antisense Oligo
guaauccuagcacuuuggg

SEQ ID NO: 45059 - RNA, 19 nt, Artificial Sequence
  Sense Oligo
ccaaagugcuaggauuaca

SEQ ID NO: 45060 - RNA, 19 nt, Artificial Sequence
  Antisense Oligo
uguaauccuagcacuuugg

SEQ ID NO: 45061 - RNA, 19 nt, Artificial Sequence
  Sense Oligo
caaagugcuaggauuacag

SEQ ID NO: 45062 - RNA, 19 nt, Artificial Sequence
  Antisense Oligo
cuguaauccuagcacuuug

SEQ ID NO: 45063 - RNA, 19 nt, Artificial Sequence
  Sense Oligo
gugcuaggauuacaggugu

SEQ ID NO: 45064 - RNA, 19 nt, Artificial Sequence
  Antisense Oligo
acaccuguaauccuagcac

SEQ ID NO: 45065 - RNA, 19 nt, Artificial Sequence
  Sense Oligo
ugcuaggauuacaggugug

SEQ ID NO: 45066 - RNA, 19 nt, Artificial Sequence
  Antisense Oligo
cacaccuguaauccuagca

SEQ ID NO: 45067 - RNA, 19 nt, Artificial Sequence
  Sense Oligo
gcuaggauuacagguguga

SEQ ID NO: 45068 - RNA, 19 nt, Artificial Sequence
  Antisense Oligo
ucacaccuguaauccuagc

SEQ ID NO: 45069 - RNA, 19 nt, Artificial Sequence
  Sense Oligo
accacucccagcccuaauu

SEQ ID NO: 45070 - RNA, 19 nt, Artificial Sequence
  Antisense Oligo
aauuagggcugggaguggu

SEQ ID NO: 45071 - RNA, 19 nt, Artificial Sequence
  Sense Oligo
ccacucccagcccuaauuu

SEQ ID NO: 45072 - RNA, 19 nt, Artificial Sequence
  Antisense Oligo
aaauuagggcugggagugg

SEQ ID NO: 45073 - RNA, 19 nt, Artificial Sequence
  Sense Oligo
cacucccagcccuaauuuc

SEQ ID NO: 45074 - RNA, 19 nt, Artificial Sequence
  Antisense Oligo
gaaauuagggcugggagug

SEQ ID NO: 45075 - RNA, 19 nt, Artificial Sequence
  Sense Oligo
acucccagcccuaauuucu

SEQ ID NO: 45076 - RNA, 19 nt, Artificial Sequence
  Antisense Oligo
agaaauuagggcugggagu

SEQ ID NO: 45077 - RNA, 19 nt, Artificial Sequence
  Sense Oligo
cucccagcccuaauuucug

SEQ ID NO: 45078 - RNA, 19 nt, Artificial Sequence
  Antisense Oligo
cagaaauuagggcugggag

SEQ ID NO: 45079 - RNA, 19 nt, Artificial Sequence
  Sense Oligo
ucccagcccuaauuucugu

SEQ ID NO: 45080 - RNA, 19 nt, Artificial Sequence
  Antisense Oligo
acagaaauuagggcuggga

SEQ ID NO: 45081 - RNA, 19 nt, Artificial Sequence
  Sense Oligo
cccagcccuaauuucugua

SEQ ID NO: 45082 - RNA, 19 nt, Artificial Sequence
  Antisense Oligo
uacagaaauuagggcuggg

SEQ ID NO: 45083 - RNA, 19 nt, Artificial Sequence
  Sense Oligo
ccagcccuaauuucuguau

SEQ ID NO: 45084 - RNA, 19 nt, Artificial Sequence
  Antisense Oligo
auacagaaauuagggcugg

SEQ ID NO: 45085 - RNA, 19 nt, Artificial Sequence
  Sense Oligo
cagcccuaauuucuguauu

SEQ ID NO: 45086 - RNA, 19 nt, Artificial Sequence
  Antisense Oligo
aauacagaaauuagggcug

SEQ ID NO: 45087 - RNA, 19 nt, Artificial Sequence
  Sense Oligo
aaagucucuguacgugaag

SEQ ID NO: 45088 - RNA, 19 nt, Artificial Sequence
  Antisense Oligo
cuucacguacagagacuuu

SEQ ID NO: 45089 - RNA, 19 nt, Artificial Sequence
  Sense Oligo
aagucucuguacgugaaga

SEQ ID NO: 45090 - RNA, 19 nt, Artificial Sequence
  Antisense Oligo
ucuucacguacagagacuu

SEQ ID NO: 45091 - RNA, 19 nt, Artificial Sequence
  Sense Oligo
ucuguacgugaagagguug

SEQ ID NO: 45092 - RNA, 19 nt, Artificial Sequence
  Antisense Oligo
caaccucuucacguacaga

SEQ ID NO: 45093 - RNA, 19 nt, Artificial Sequence
  Sense Oligo
cuguacgugaagagguugc

SEQ ID NO: 45094 - RNA, 19 nt, Artificial Sequence
  Antisense Oligo
gcaaccucuucacguacag

SEQ ID NO: 45095 - RNA, 19 nt, Artificial Sequence
  Sense Oligo
uguacgugaagagguugca

SEQ ID NO: 45096 - RNA, 19 nt, Artificial Sequence
  Antisense Oligo
ugcaaccucuucacguaca

SEQ ID NO: 45097 - RNA, 19 nt, Artificial Sequence
  Sense Oligo
gugaagagguugcacgaca

SEQ ID NO: 45098 - RNA, 19 nt, Artificial Sequence
  Antisense Oligo
ugucgugcaaccucuucac

SEQ ID NO: 45099 - RNA, 19 nt, Artificial Sequence
  Sense Oligo
ugaucgacccucaggugga

SEQ ID NO: 45100 - RNA, 19 nt, Artificial Sequence
  Antisense Oligo
uccaccugagggucgauca

SEQ ID NO: 45101 - RNA, 19 nt, Artificial Sequence
  Sense Oligo
gaucgacccucagguggau

SEQ ID NO: 45102 - RNA, 19 nt, Artificial Sequence
  Antisense Oligo
auccaccugagggucgauc

SEQ ID NO: 45103 - RNA, 19 nt, Artificial Sequence
  Sense Oligo
aucgacccucagguggaug

SEQ ID NO: 45104 - RNA, 19 nt, Artificial Sequence
  Antisense Oligo
cauccaccugagggucgau

SEQ ID NO: 45105 - RNA, 19 nt, Artificial Sequence
  Sense Oligo
ucgacccucagguggauga

SEQ ID NO: 45106 - RNA, 19 nt, Artificial Sequence
  Antisense Oligo
ucauccaccugagggucga

SEQ ID NO: 45107 - RNA, 19 nt, Artificial Sequence
  Sense Oligo
ccuuccuggaugcgcagua

SEQ ID NO: 45108 - RNA, 19 nt, Artificial Sequence
  Antisense Oligo
uacugcgcauccaggaagg

SEQ ID NO: 45109 - RNA, 19 nt, Artificial Sequence
  Sense Oligo
cuuccuggaugcgcaguau

SEQ ID NO: 45110 - RNA, 19 nt, Artificial Sequence
  Antisense Oligo
auacugcgcauccaggaag

SEQ ID NO: 45111 - RNA, 19 nt, Artificial Sequence
  Sense Oligo
uuccuggaugcgcaguauc

SEQ ID NO: 45112 - RNA, 19 nt, Artificial Sequence
  Antisense Oligo
gauacugcgcauccaggaa

SEQ ID NO: 45113 - RNA, 19 nt, Artificial Sequence
  Sense Oligo
uccuggaugcgcaguauca

SEQ ID NO: 45114 - RNA, 19 nt, Artificial Sequence
  Antisense Oligo
ugauacugcgcauccagga

SEQ ID NO: 45115 - RNA, 19 nt, Artificial Sequence
  Sense Oligo
ccuggaugcgcaguaucag

SEQ ID NO: 45116 - RNA, 19 nt, Artificial Sequence
  Antisense Oligo
cugauacugcgcauccagg

SEQ ID NO: 45117 - RNA, 19 nt, Artificial Sequence
  Sense Oligo
cuggaugcgcaguaucaga

SEQ ID NO: 45118 - RNA, 19 nt, Artificial Sequence
  Antisense Oligo
ucugauacugcgcauccag

SEQ ID NO: 45119 - RNA, 19 nt, Artificial Sequence
  Sense Oligo
uggaugcgcaguaucagaa

SEQ ID NO: 45120 - RNA, 19 nt, Artificial Sequence
  Antisense Oligo
uucugauacugcgcaucca

SEQ ID NO: 45121 - RNA, 19 nt, Artificial Sequence
  Sense Oligo
ggaugcgcaguaucagaag

SEQ ID NO: 45122 - RNA, 19 nt, Artificial Sequence
  Antisense Oligo
cuucugauacugcgcaucc

SEQ ID NO: 45123 - RNA, 19 nt, Artificial Sequence
  Sense Oligo
gcgcaguaucagaaggucc

SEQ ID NO: 45124 - RNA, 19 nt, Artificial Sequence
  Antisense Oligo
ggaccuucugauacugcgc

SEQ ID NO: 45125 - RNA, 19 nt, Artificial Sequence
  Sense Oligo
cgcaguaucagaagguccc

SEQ ID NO: 45126 - RNA, 19 nt, Artificial Sequence
  Antisense Oligo
gggaccuucugauacugcg

SEQ ID NO: 45127 - RNA, 19 nt, Artificial Sequence
  Sense Oligo
gcucuuucaccuggacgug

SEQ ID NO: 45128 - RNA, 19 nt, Artificial Sequence
  Antisense Oligo
cacguccaggugaaagagc

SEQ ID NO: 45129 - RNA, 19 nt, Artificial Sequence
  Sense Oligo
ggacgugaccuccucagua

SEQ ID NO: 45130 - RNA, 19 nt, Artificial Sequence
  Antisense Oligo
uacugaggaggucacgucc

SEQ ID NO: 45131 - RNA, 19 nt, Artificial Sequence
  Sense Oligo
gacgugaccuccucaguaa

SEQ ID NO: 45132 - RNA, 19 nt, Artificial Sequence
  Antisense Oligo
uuacugaggaggucacguc

SEQ ID NO: 45133 - RNA, 19 nt, Artificial Sequence
  Sense Oligo
acgugaccuccucaguaag

SEQ ID NO: 45134 - RNA, 19 nt, Artificial Sequence
  Antisense Oligo
cuuacugaggaggucacgu

SEQ ID NO: 45135 - RNA, 19 nt, Artificial Sequence
  Sense Oligo
cgugaccuccucaguaagu

SEQ ID NO: 45136 - RNA, 19 nt, Artificial Sequence
  Antisense Oligo
acuuacugaggaggucacg

SEQ ID NO: 45137 - RNA, 19 nt, Artificial Sequence
  Sense Oligo
gugaccuccucaguaagug

SEQ ID NO: 45138 - RNA, 19 nt, Artificial Sequence
  Antisense Oligo
cacuuacugaggaggucac

SEQ ID NO: 45139 - RNA, 19 nt, Artificial Sequence
  Sense Oligo
ugaccuccucaguaagugc

SEQ ID NO: 45140 - RNA, 19 nt, Artificial Sequence
  Antisense Oligo
gcacuuacugaggagguca

SEQ ID NO: 45141 - RNA, 19 nt, Artificial Sequence
  Sense Oligo
gaccuccucaguaagugcc

SEQ ID NO: 45142 - RNA, 19 nt, Artificial Sequence
  Antisense Oligo
ggcacuuacugaggagguc

SEQ ID NO: 45143 - RNA, 19 nt, Artificial Sequence
  Sense Oligo
accuccucaguaagugccc

SEQ ID NO: 45144 - RNA, 19 nt, Artificial Sequence
  Antisense Oligo
gggcacuuacugaggaggu

SEQ ID NO: 45145 - RNA, 19 nt, Artificial Sequence
  Sense Oligo
ccuccucaguaagugcccu

SEQ ID NO: 45146 - RNA, 19 nt, Artificial Sequence
  Antisense Oligo
agggcacuuacugaggagg

SEQ ID NO: 45147 - RNA, 19 nt, Artificial Sequence
  Sense Oligo
cuccucaguaagugcccuc

SEQ ID NO: 45148 - RNA, 19 nt, Artificial Sequence
  Antisense Oligo
gagggcacuuacugaggag

SEQ ID NO: 45149 - RNA, 19 nt, Artificial Sequence
  Sense Oligo
uccucaguaagugcccucc

SEQ ID NO: 45150 - RNA, 19 nt, Artificial Sequence
  Antisense Oligo
ggagggcacuuacugagga

SEQ ID NO: 45151 - RNA, 19 nt, Artificial Sequence
  Sense Oligo
caguaagugcccuccagcg

SEQ ID NO: 45152 - RNA, 19 nt, Artificial Sequence
  Antisense Oligo
cgcuggagggcacuuacug

SEQ ID NO: 45153 - RNA, 19 nt, Artificial Sequence
  Sense Oligo
aguaagugcccuccagcgu

SEQ ID NO: 45154 - RNA, 19 nt, Artificial Sequence
  Antisense Oligo
acgcuggagggcacuuacu

SEQ ID NO: 45155 - RNA, 19 nt, Artificial Sequence
  Sense Oligo
auggccacaucaguaaaga

SEQ ID NO: 45156 - RNA, 19 nt, Artificial Sequence
  Antisense Oligo
ucuuuacugauguggccau

SEQ ID NO: 45157 - RNA, 19 nt, Artificial Sequence
  Sense Oligo
ggccacaucaguaaagacg

SEQ ID NO: 45158 - RNA, 19 nt, Artificial Sequence
  Antisense Oligo
cgucuuuacugauguggcc

SEQ ID NO: 45159 - RNA, 19 nt, Artificial Sequence
  Sense Oligo
gccacaucaguaaagacgu

SEQ ID NO: 45160 - RNA, 19 nt, Artificial Sequence
  Antisense Oligo
acgucuuuacugauguggc

SEQ ID NO: 45161 - RNA, 19 nt, Artificial Sequence
  Sense Oligo
ccacaucaguaaagacgug

SEQ ID NO: 45162 - RNA, 19 nt, Artificial Sequence
  Antisense Oligo
cacgucuuuacugaugugg

SEQ ID NO: 45163 - RNA, 19 nt, Artificial Sequence
  Sense Oligo
cacaucaguaaagacgugg

SEQ ID NO: 45164 - RNA, 19 nt, Artificial Sequence
  Antisense Oligo
ccacgucuuuacugaugug

SEQ ID NO: 45165 - RNA, 19 nt, Artificial Sequence
  Sense Oligo
acaucaguaaagacguggu

SEQ ID NO: 45166 - RNA, 19 nt, Artificial Sequence
  Antisense Oligo
accacgucuuuacugaugu

SEQ ID NO: 45167 - RNA, 19 nt, Artificial Sequence
  Sense Oligo
caucaguaaagacgugguc

SEQ ID NO: 45168 - RNA, 19 nt, Artificial Sequence
  Antisense Oligo
gaccacgucuuuacugaug

SEQ ID NO: 45169 - RNA, 19 nt, Artificial Sequence
  Sense Oligo
aucaguaaagacguggucc

SEQ ID NO: 45170 - RNA, 19 nt, Artificial Sequence
  Antisense Oligo
ggaccacgucuuuacugau

SEQ ID NO: 45171 - RNA, 19 nt, Artificial Sequence
  Sense Oligo
ucaguaaagacgugguccc

SEQ ID NO: 45172 - RNA, 19 nt, Artificial Sequence
  Antisense Oligo
gggaccacgucuuuacuga

SEQ ID NO: 45173 - RNA, 19 nt, Artificial Sequence
  Sense Oligo
cccguguauagaauuccuu

SEQ ID NO: 45174 - RNA, 19 nt, Artificial Sequence
  Antisense Oligo
aaggaauucuauacacggg

SEQ ID NO: 45175 - RNA, 19 nt, Artificial Sequence
  Sense Oligo
ccguguauagaauuccuug

SEQ ID NO: 45176 - RNA, 19 nt, Artificial Sequence
  Antisense Oligo
caaggaauucuauacacgg

SEQ ID NO: 45177 - RNA, 19 nt, Artificial Sequence
  Sense Oligo
cguguauagaauuccuugu

SEQ ID NO: 45178 - RNA, 19 nt, Artificial Sequence
  Antisense Oligo
acaaggaauucuauacacg

SEQ ID NO: 45179 - RNA, 19 nt, Artificial Sequence
  Sense Oligo
guguauagaauuccuuguu

SEQ ID NO: 45180 - RNA, 19 nt, Artificial Sequence
  Antisense Oligo
aacaaggaauucuauacac

SEQ ID NO: 45181 - RNA, 19 nt, Artificial Sequence
  Sense Oligo
uagaauuccuuguuuccac

SEQ ID NO: 45182 - RNA, 19 nt, Artificial Sequence
  Antisense Oligo
guggaaacaaggaauucua

SEQ ID NO: 45183 - RNA, 19 nt, Artificial Sequence
  Sense Oligo
auuccuuguuuccacacgc

SEQ ID NO: 45184 - RNA, 19 nt, Artificial Sequence
  Antisense Oligo
gcguguggaaacaaggaau

SEQ ID NO: 45185 - RNA, 19 nt, Artificial Sequence
  Sense Oligo
uuccuuguuuccacacgca

SEQ ID NO: 45186 - RNA, 19 nt, Artificial Sequence
  Antisense Oligo
ugcguguggaaacaaggaa

SEQ ID NO: 45187 - RNA, 19 nt, Artificial Sequence
  Sense Oligo
uccuuguuuccacacgcac

SEQ ID NO: 45188 - RNA, 19 nt, Artificial Sequence
  Antisense Oligo
gugcguguggaaacaagga

SEQ ID NO: 45189 - RNA, 19 nt, Artificial Sequence
  Sense Oligo
uguuuccacacgcacaguc

SEQ ID NO: 45190 - RNA, 19 nt, Artificial Sequence
  Antisense Oligo
gacugugcguguggaaaca

SEQ ID NO: 45191 - RNA, 19 nt, Artificial Sequence
  Sense Oligo
guuuccacacgcacagucc

SEQ ID NO: 45192 - RNA, 19 nt, Artificial Sequence
  Antisense Oligo
ggacugugcguguggaaac

SEQ ID NO: 45193 - RNA, 19 nt, Artificial Sequence
  Sense Oligo
uuuccacacgcacaguccu

SEQ ID NO: 45194 - RNA, 19 nt, Artificial Sequence
  Antisense Oligo
aggacugugcguguggaaa

SEQ ID NO: 45195 - RNA, 19 nt, Artificial Sequence
  Sense Oligo
uuccacacgcacaguccug

SEQ ID NO: 45196 - RNA, 19 nt, Artificial Sequence
  Antisense Oligo
caggacugugcguguggaa

SEQ ID NO: 45197 - RNA, 19 nt, Artificial Sequence
  Sense Oligo
uccacacgcacaguccugu

SEQ ID NO: 45198 - RNA, 19 nt, Artificial Sequence
  Antisense Oligo
acaggacugugcgugugga

SEQ ID NO: 45199 - RNA, 19 nt, Artificial Sequence
  Sense Oligo
acaguccugugaagcuuaa

SEQ ID NO: 45200 - RNA, 19 nt, Artificial Sequence
  Antisense Oligo
uuaagcuucacaggacugu

SEQ ID NO: 45201 - RNA, 19 nt, Artificial Sequence
  Sense Oligo
caguccugugaagcuuaac

SEQ ID NO: 45202 - RNA, 19 nt, Artificial Sequence
  Antisense Oligo
guuaagcuucacaggacug

SEQ ID NO: 45203 - RNA, 19 nt, Artificial Sequence
  Sense Oligo
cagugggaaugugcucuga

SEQ ID NO: 45204 - RNA, 19 nt, Artificial Sequence
  Antisense Oligo
ucagagcacauucccacug

SEQ ID NO: 45205 - RNA, 19 nt, Artificial Sequence
  Sense Oligo
agugggaaugugcucugag

SEQ ID NO: 45206 - RNA, 19 nt, Artificial Sequence
  Antisense Oligo
cucagagcacauucccacu

SEQ ID NO: 45207 - RNA, 19 nt, Artificial Sequence
  Sense Oligo
aguguguugucaggcaguu

SEQ ID NO: 45208 - RNA, 19 nt, Artificial Sequence
  Antisense Oligo
aacugccugacaacacacu

SEQ ID NO: 45209 - RNA, 19 nt, Artificial Sequence
  Sense Oligo
guguguugucaggcaguuu

SEQ ID NO: 45210 - RNA, 19 nt, Artificial Sequence
  Antisense Oligo
aaacugccugacaacacac

SEQ ID NO: 45211 - RNA, 19 nt, Artificial Sequence
  Sense Oligo
uguguugucaggcaguuuc

SEQ ID NO: 45212 - RNA, 19 nt, Artificial Sequence
  Antisense Oligo
gaaacugccugacaacaca

SEQ ID NO: 45213 - RNA, 19 nt, Artificial Sequence
  Sense Oligo
guguugucaggcaguuucc

SEQ ID NO: 45214 - RNA, 19 nt, Artificial Sequence
  Antisense Oligo
ggaaacugccugacaacac

SEQ ID NO: 45215 - RNA, 19 nt, Artificial Sequence
  Sense Oligo
caggcaguuuccuccuugu

SEQ ID NO: 45216 - RNA, 19 nt, Artificial Sequence
  Antisense Oligo
acaaggaggaaacugccug

SEQ ID NO: 45217 - RNA, 19 nt, Artificial Sequence
  Sense Oligo
aggcaguuuccuccuugug

SEQ ID NO: 45218 - RNA, 19 nt, Artificial Sequence
  Antisense Oligo
cacaaggaggaaacugccu

SEQ ID NO: 45219 - RNA, 19 nt, Artificial Sequence
  Sense Oligo
ggcaguuuccuccuugugu

SEQ ID NO: 45220 - RNA, 19 nt, Artificial Sequence
  Antisense Oligo
acacaaggaggaaacugcc

SEQ ID NO: 45221 - RNA, 19 nt, Artificial Sequence
  Sense Oligo
caguuuccuccuuguguga

SEQ ID NO: 45222 - RNA, 19 nt, Artificial Sequence
  Antisense Oligo
ucacacaaggaggaaacug

SEQ ID NO: 45223 - RNA, 19 nt, Artificial Sequence
  Sense Oligo
aguuuccuccuugugugaa

SEQ ID NO: 45224 - RNA, 19 nt, Artificial Sequence
  Antisense Oligo
uucacacaaggaggaaacu

SEQ ID NO: 45225 - RNA, 19 nt, Artificial Sequence
  Sense Oligo
gcgcuuacacuaaccuaga

SEQ ID NO: 45226 - RNA, 19 nt, Artificial Sequence
  Antisense Oligo
ucuagguuaguguaagcgc

SEQ ID NO: 45227 - RNA, 19 nt, Artificial Sequence
  Sense Oligo
cgcuuacacuaaccuagac

SEQ ID NO: 45228 - RNA, 19 nt, Artificial Sequence
  Antisense Oligo
gucuagguuaguguaagcg

SEQ ID NO: 45229 - RNA, 19 nt, Artificial Sequence
  Sense Oligo
gcuuacacuaaccuagacg

SEQ ID NO: 45230 - RNA, 19 nt, Artificial Sequence
  Antisense Oligo
cgucuagguuaguguaagc

SEQ ID NO: 45231 - RNA, 19 nt, Artificial Sequence
  Sense Oligo
cuuacacuaaccuagacgu

SEQ ID NO: 45232 - RNA, 19 nt, Artificial Sequence
  Antisense Oligo
acgucuagguuaguguaag

SEQ ID NO: 45233 - RNA, 19 nt, Artificial Sequence
  Sense Oligo
uuacacuaaccuagacgua

SEQ ID NO: 45234 - RNA, 19 nt, Artificial Sequence
  Antisense Oligo
uacgucuagguuaguguaa

SEQ ID NO: 45235 - RNA, 19 nt, Artificial Sequence
  Sense Oligo
uacacuaaccuagacguag

SEQ ID NO: 45236 - RNA, 19 nt, Artificial Sequence
  Antisense Oligo
cuacgucuagguuagugua

SEQ ID NO: 45237 - RNA, 19 nt, Artificial Sequence
  Sense Oligo
acacuaaccuagacguaga

SEQ ID NO: 45238 - RNA, 19 nt, Artificial Sequence
  Antisense Oligo
ucuacgucuagguuagugu

SEQ ID NO: 45239 - RNA, 19 nt, Artificial Sequence
  Sense Oligo
cacaggcuuuaugguacac

SEQ ID NO: 45240 - RNA, 19 nt, Artificial Sequence
  Antisense Oligo
guguaccauaaagccugug

SEQ ID NO: 45241 - RNA, 19 nt, Artificial Sequence
  Sense Oligo
cacacugucgcuccuaggc

SEQ ID NO: 45242 - RNA, 19 nt, Artificial Sequence
  Antisense Oligo
gccuaggagcgacagugug

SEQ ID NO: 45243 - RNA, 19 nt, Artificial Sequence
  Sense Oligo
acacugucgcuccuaggcc

SEQ ID NO: 45244 - RNA, 19 nt, Artificial Sequence
  Antisense Oligo
ggccuaggagcgacagugu

SEQ ID NO: 45245 - RNA, 19 nt, Artificial Sequence
  Sense Oligo
aaccugugcugcauauggc

SEQ ID NO: 45246 - RNA, 19 nt, Artificial Sequence
  Antisense Oligo
gccauaugcagcacagguu

SEQ ID NO: 45247 - RNA, 19 nt, Artificial Sequence
  Sense Oligo
accugugcugcauauggcu

SEQ ID NO: 45248 - RNA, 19 nt, Artificial Sequence
  Antisense Oligo
agccauaugcagcacaggu

SEQ ID NO: 45249 - RNA, 19 nt, Artificial Sequence
  Sense Oligo
cugugcugcauauggcugu

SEQ ID NO: 45250 - RNA, 19 nt, Artificial Sequence
  Antisense Oligo
acagccauaugcagcacag

SEQ ID NO: 45251 - RNA, 19 nt, Artificial Sequence
  Sense Oligo
ugugcugcauauggcuguu

SEQ ID NO: 45252 - RNA, 19 nt, Artificial Sequence
  Antisense Oligo
aacagccauaugcagcaca

SEQ ID NO: 45253 - RNA, 19 nt, Artificial Sequence
  Sense Oligo
gugcugcauauggcuguuc

SEQ ID NO: 45254 - RNA, 19 nt, Artificial Sequence
  Antisense Oligo
gaacagccauaugcagcac

SEQ ID NO: 45255 - RNA, 19 nt, Artificial Sequence
  Sense Oligo
ugcugcauauggcuguucu

SEQ ID NO: 45256 - RNA, 19 nt, Artificial Sequence
  Antisense Oligo
agaacagccauaugcagca

SEQ ID NO: 45257 - RNA, 19 nt, Artificial Sequence
  Sense Oligo
gcugcauauggcuguucug

SEQ ID NO: 45258 - RNA, 19 nt, Artificial Sequence
  Antisense Oligo
cagaacagccauaugcagc

SEQ ID NO: 45259 - RNA, 19 nt, Artificial Sequence
  Sense Oligo
cugcauauggcuguucuga

SEQ ID NO: 45260 - RNA, 19 nt, Artificial Sequence
  Antisense Oligo
ucagaacagccauaugcag

SEQ ID NO: 45261 - RNA, 19 nt, Artificial Sequence
  Sense Oligo
ugcauauggcuguucugaa

SEQ ID NO: 45262 - RNA, 19 nt, Artificial Sequence
  Antisense Oligo
uucagaacagccauaugca

SEQ ID NO: 45263 - RNA, 19 nt, Artificial Sequence
  Sense Oligo
uauggcuguucugaauccu

SEQ ID NO: 45264 - RNA, 19 nt, Artificial Sequence
  Antisense Oligo
aggauucagaacagccaua

SEQ ID NO: 45265 - RNA, 19 nt, Artificial Sequence
  Sense Oligo
auggcuguucugaauccug

SEQ ID NO: 45266 - RNA, 19 nt, Artificial Sequence
  Antisense Oligo
caggauucagaacagccau

SEQ ID NO: 45267 - RNA, 19 nt, Artificial Sequence
  Sense Oligo
cuguucugaauccuggagc

SEQ ID NO: 45268 - RNA, 19 nt, Artificial Sequence
  Antisense Oligo
gcuccaggauucagaacag

SEQ ID NO: 45269 - RNA, 19 nt, Artificial Sequence
  Sense Oligo
uguucugaauccuggagcc

SEQ ID NO: 45270 - RNA, 19 nt, Artificial Sequence
  Antisense Oligo
ggcuccaggauucagaaca

SEQ ID NO: 45271 - RNA, 19 nt, Artificial Sequence
  Sense Oligo
guucugaauccuggagcca

SEQ ID NO: 45272 - RNA, 19 nt, Artificial Sequence
  Antisense Oligo
uggcuccaggauucagaac

SEQ ID NO: 45273 - RNA, 19 nt, Artificial Sequence
  Sense Oligo
uucugaauccuggagccaa

SEQ ID NO: 45274 - RNA, 19 nt, Artificial Sequence
  Antisense Oligo
uuggcuccaggauucagaa

SEQ ID NO: 45275 - RNA, 19 nt, Artificial Sequence
  Sense Oligo
ucugaauccuggagccaau

SEQ ID NO: 45276 - RNA, 19 nt, Artificial Sequence
  Antisense Oligo
auuggcuccaggauucaga

SEQ ID NO: 45277 - RNA, 19 nt, Artificial Sequence
  Sense Oligo
cugaauccuggagccaauu

SEQ ID NO: 45278 - RNA, 19 nt, Artificial Sequence
  Antisense Oligo
aauuggcuccaggauucag

SEQ ID NO: 45279 - RNA, 19 nt, Artificial Sequence
  Sense Oligo
ugaauccuggagccaauug

SEQ ID NO: 45280 - RNA, 19 nt, Artificial Sequence
  Antisense Oligo
caauuggcuccaggauuca

SEQ ID NO: 45281 - RNA, 19 nt, Artificial Sequence
  Sense Oligo
gaauccuggagccaauugu

SEQ ID NO: 45282 - RNA, 19 nt, Artificial Sequence
  Antisense Oligo
acaauuggcuccaggauuc

SEQ ID NO: 45283 - RNA, 19 nt, Artificial Sequence
  Sense Oligo
aauccuggagccaauugua

SEQ ID NO: 45284 - RNA, 19 nt, Artificial Sequence
  Antisense Oligo
uacaauuggcuccaggauu

SEQ ID NO: 45285 - RNA, 19 nt, Artificial Sequence
  Sense Oligo
auccuggagccaauuguaa

SEQ ID NO: 45286 - RNA, 19 nt, Artificial Sequence
  Antisense Oligo
uuacaauuggcuccaggau

SEQ ID NO: 45287 - RNA, 19 nt, Artificial Sequence
  Sense Oligo
uccuggagccaauuguaaa

SEQ ID NO: 45288 - RNA, 19 nt, Artificial Sequence
  Antisense Oligo
uuuacaauuggcuccagga

SEQ ID NO: 45289 - RNA, 19 nt, Artificial Sequence
  Sense Oligo
ccuggagccaauuguaaaa

SEQ ID NO: 45290 - RNA, 19 nt, Artificial Sequence
  Antisense Oligo
uuuuacaauuggcuccagg

SEQ ID NO: 45291 - RNA, 19 nt, Artificial Sequence
  Sense Oligo
aucaucaggaucaucguga

SEQ ID NO: 45292 - RNA, 19 nt, Artificial Sequence
  Antisense Oligo
ucacgaugauccugaugau

SEQ ID NO: 45293 - RNA, 19 nt, Artificial Sequence
  Sense Oligo
ucaucaggaucaucgugac

SEQ ID NO: 45294 - RNA, 19 nt, Artificial Sequence
  Antisense Oligo
gucacgaugauccugauga

SEQ ID NO: 45295 - RNA, 19 nt, Artificial Sequence
  Sense Oligo
caucaggaucaucgugaca

SEQ ID NO: 45296 - RNA, 19 nt, Artificial Sequence
  Antisense Oligo
ugucacgaugauccugaug

SEQ ID NO: 45297 - RNA, 19 nt, Artificial Sequence
  Sense Oligo
aagagcaaaauaaggaggg

SEQ ID NO: 45298 - RNA, 19 nt, Artificial Sequence
  Antisense Oligo
cccuccuuauuuugcucuu

SEQ ID NO: 45299 - RNA, 19 nt, Artificial Sequence
  Sense Oligo
ggguuacuuagaguuggga

SEQ ID NO: 45300 - RNA, 19 nt, Artificial Sequence
  Antisense Oligo
ucccaacucuaaguaaccc

SEQ ID NO: 45301 - RNA, 19 nt, Artificial Sequence
  Sense Oligo
aacucgccaucgugucgug

SEQ ID NO: 45302 - RNA, 19 nt, Artificial Sequence
  Antisense Oligo
cacgacacgauggcgaguu

SEQ ID NO: 45303 - RNA, 19 nt, Artificial Sequence
  Sense Oligo
acucgccaucgugucgugu

SEQ ID NO: 45304 - RNA, 19 nt, Artificial Sequence
  Antisense Oligo
acacgacacgauggcgagu

SEQ ID NO: 45305 - RNA, 19 nt, Artificial Sequence
  Sense Oligo
cucgccaucgugucgugug

SEQ ID NO: 45306 - RNA, 19 nt, Artificial Sequence
  Antisense Oligo
cacacgacacgauggcgag

SEQ ID NO: 45307 - RNA, 19 nt, Artificial Sequence
  Sense Oligo
ccaucgugucguguguuua

SEQ ID NO: 45308 - RNA, 19 nt, Artificial Sequence
  Antisense Oligo
uaaacacacgacacgaugg

SEQ ID NO: 45309 - RNA, 19 nt, Artificial Sequence
  Sense Oligo
ugcgauucuguucuuaggu

SEQ ID NO: 45310 - RNA, 19 nt, Artificial Sequence
  Antisense Oligo
accuaagaacagaaucgca

SEQ ID NO: 45311 - RNA, 19 nt, Artificial Sequence
  Sense Oligo
gcgauucuguucuuaggug

SEQ ID NO: 45312 - RNA, 19 nt, Artificial Sequence
  Antisense Oligo
caccuaagaacagaaucgc

SEQ ID NO: 45313 - RNA, 19 nt, Artificial Sequence
  Sense Oligo
cgauucuguucuuaggugc

SEQ ID NO: 45314 - RNA, 19 nt, Artificial Sequence
  Antisense Oligo
gcaccuaagaacagaaucg

SEQ ID NO: 45315 - RNA, 19 nt, Artificial Sequence
  Sense Oligo
gauucuguucuuaggugca

SEQ ID NO: 45316 - RNA, 19 nt, Artificial Sequence
  Antisense Oligo
ugcaccuaagaacagaauc

SEQ ID NO: 45317 - RNA, 19 nt, Artificial Sequence
  Sense Oligo
uuaggugcagacuggaauu

SEQ ID NO: 45318 - RNA, 19 nt, Artificial Sequence
  Antisense Oligo
aauuccagucugcaccuaa

SEQ ID NO: 45319 - RNA, 19 nt, Artificial Sequence
  Sense Oligo
gugcagacuggaauuuggg

SEQ ID NO: 45320 - RNA, 19 nt, Artificial Sequence
  Antisense Oligo
cccaaauuccagucugcac

SEQ ID NO: 45321 - RNA, 19 nt, Artificial Sequence
  Sense Oligo
cagacuggaauuugggugu

SEQ ID NO: 45322 - RNA, 19 nt, Artificial Sequence
  Antisense Oligo
acacccaaauuccagucug

SEQ ID NO: 45323 - RNA, 19 nt, Artificial Sequence
  Sense Oligo
agacuggaauuuggguguu

SEQ ID NO: 45324 - RNA, 19 nt, Artificial Sequence
  Antisense Oligo
aacacccaaauuccagucu

SEQ ID NO: 45325 - RNA, 19 nt, Artificial Sequence
  Sense Oligo
gacuggaauuuggguguuu

SEQ ID NO: 45326 - RNA, 19 nt, Artificial Sequence
  Antisense Oligo
aaacacccaaauuccaguc

SEQ ID NO: 45327 - RNA, 19 nt, Artificial Sequence
  Sense Oligo
auuuggguguuucuuuuca

SEQ ID NO: 45328 - RNA, 19 nt, Artificial Sequence
  Antisense Oligo
ugaaaagaaacacccaaau

SEQ ID NO: 45329 - RNA, 19 nt, Artificial Sequence
  Sense Oligo
uuuggguguuucuuuucaa

SEQ ID NO: 45330 - RNA, 19 nt, Artificial Sequence
  Antisense Oligo
uugaaaagaaacacccaaa

SEQ ID NO: 45331 - RNA, 19 nt, Artificial Sequence
  Sense Oligo
uuggguguuucuuuucaag

SEQ ID NO: 45332 - RNA, 19 nt, Artificial Sequence
  Antisense Oligo
cuugaaaagaaacacccaa

SEQ ID NO: 45333 - RNA, 19 nt, Artificial Sequence
  Sense Oligo
uggguguuucuuuucaagc

SEQ ID NO: 45334 - RNA, 19 nt, Artificial Sequence
  Antisense Oligo
gcuugaaaagaaacaccca

SEQ ID NO: 45335 - RNA, 19 nt, Artificial Sequence
  Sense Oligo
cuuuucaagcuccucauuu

SEQ ID NO: 45336 - RNA, 19 nt, Artificial Sequence
  Antisense Oligo
aaaugaggagcuugaaaag

SEQ ID NO: 45337 - RNA, 19 nt, Artificial Sequence
  Sense Oligo
uuuucaagcuccucauuuu

SEQ ID NO: 45338 - RNA, 19 nt, Artificial Sequence
  Antisense Oligo
aaaaugaggagcuugaaaa

SEQ ID NO: 45339 - RNA, 19 nt, Artificial Sequence
  Sense Oligo
cuuaauggauauaaauggg

SEQ ID NO: 45340 - RNA, 19 nt, Artificial Sequence
  Antisense Oligo
cccauuuauauccauuaag

SEQ ID NO: 45341 - RNA, 19 nt, Artificial Sequence
  Sense Oligo
aaaggaggacgucagugcc

SEQ ID NO: 45342 - RNA, 19 nt, Artificial Sequence
  Antisense Oligo
ggcacugacguccuccuuu

SEQ ID NO: 45343 - RNA, 19 nt, Artificial Sequence
  Sense Oligo
aaggaggacgucagugccg

SEQ ID NO: 45344 - RNA, 19 nt, Artificial Sequence
  Antisense Oligo
cggcacugacguccuccuu

SEQ ID NO: 45345 - RNA, 19 nt, Artificial Sequence
  Sense Oligo
aggaggacgucagugccgu

SEQ ID NO: 45346 - RNA, 19 nt, Artificial Sequence
  Antisense Oligo
acggcacugacguccuccu

SEQ ID NO: 45347 - RNA, 19 nt, Artificial Sequence
  Sense Oligo
acgucagugccgucgagga

SEQ ID NO: 45348 - RNA, 19 nt, Artificial Sequence
  Antisense Oligo
uccucgacggcacugacgu

SEQ ID NO: 45349 - RNA, 19 nt, Artificial Sequence
  Sense Oligo
ucagugccgucgaggagcu

SEQ ID NO: 45350 - RNA, 19 nt, Artificial Sequence
  Antisense Oligo
agcuccucgacggcacuga

SEQ ID NO: 45351 - RNA, 19 nt, Artificial Sequence
  Sense Oligo
agugccgucgaggagcucu

SEQ ID NO: 45352 - RNA, 19 nt, Artificial Sequence
  Antisense Oligo
agagcuccucgacggcacu

SEQ ID NO: 45353 - RNA, 19 nt, Artificial Sequence
  Sense Oligo
gugccgucgaggagcucuu

SEQ ID NO: 45354 - RNA, 19 nt, Artificial Sequence
  Antisense Oligo
aagagcuccucgacggcac

SEQ ID NO: 45355 - RNA, 19 nt, Artificial Sequence
  Sense Oligo
ugccgucgaggagcucuuc

SEQ ID NO: 45356 - RNA, 19 nt, Artificial Sequence
  Antisense Oligo
gaagagcuccucgacggca

SEQ ID NO: 45357 - RNA, 19 nt, Artificial Sequence
  Sense Oligo
gucgaggagcucuucagcg

SEQ ID NO: 45358 - RNA, 19 nt, Artificial Sequence
  Antisense Oligo
cgcugaagagcuccucgac

SEQ ID NO: 45359 - RNA, 19 nt, Artificial Sequence
  Sense Oligo
ucgaggagcucuucagcgc

SEQ ID NO: 45360 - RNA, 19 nt, Artificial Sequence
  Antisense Oligo
gcgcugaagagcuccucga

SEQ ID NO: 45361 - RNA, 19 nt, Artificial Sequence
  Sense Oligo
cgaggagcucuucagcgcu

SEQ ID NO: 45362 - RNA, 19 nt, Artificial Sequence
  Antisense Oligo
agcgcugaagagcuccucg

SEQ ID NO: 45363 - RNA, 19 nt, Artificial Sequence
  Sense Oligo
gaggagcucuucagcgcug

SEQ ID NO: 45364 - RNA, 19 nt, Artificial Sequence
  Antisense Oligo
cagcgcugaagagcuccuc

SEQ ID NO: 45365 - RNA, 19 nt, Artificial Sequence
  Sense Oligo
aggagcucuucagcgcugg

SEQ ID NO: 45366 - RNA, 19 nt, Artificial Sequence
  Antisense Oligo
ccagcgcugaagagcuccu

SEQ ID NO: 45367 - RNA, 19 nt, Artificial Sequence
  Sense Oligo
ggagcucuucagcgcuggu

SEQ ID NO: 45368 - RNA, 19 nt, Artificial Sequence
  Antisense Oligo
accagcgcugaagagcucc

SEQ ID NO: 45369 - RNA, 19 nt, Artificial Sequence
  Sense Oligo
gagcucuucagcgcugguc

SEQ ID NO: 45370 - RNA, 19 nt, Artificial Sequence
  Antisense Oligo
gaccagcgcugaagagcuc

SEQ ID NO: 45371 - RNA, 19 nt, Artificial Sequence
  Sense Oligo
agcucuucagcgcuggucu

SEQ ID NO: 45372 - RNA, 19 nt, Artificial Sequence
  Antisense Oligo
agaccagcgcugaagagcu

SEQ ID NO: 45373 - RNA, 19 nt, Artificial Sequence
  Sense Oligo
gcucuucagcgcuggucug

SEQ ID NO: 45374 - RNA, 19 nt, Artificial Sequence
  Antisense Oligo
cagaccagcgcugaagagc

SEQ ID NO: 45375 - RNA, 19 nt, Artificial Sequence
  Sense Oligo
cucuucagcgcuggucugu

SEQ ID NO: 45376 - RNA, 19 nt, Artificial Sequence
  Antisense Oligo
acagaccagcgcugaagag

SEQ ID NO: 45377 - RNA, 19 nt, Artificial Sequence
  Sense Oligo
ucuucagcgcuggucugua

SEQ ID NO: 45378 - RNA, 19 nt, Artificial Sequence
  Antisense Oligo
uacagaccagcgcugaaga

SEQ ID NO: 45379 - RNA, 19 nt, Artificial Sequence
  Sense Oligo
cuucagcgcuggucuguac

SEQ ID NO: 45380 - RNA, 19 nt, Artificial Sequence
  Antisense Oligo
guacagaccagcgcugaag

SEQ ID NO: 45381 - RNA, 19 nt, Artificial Sequence
  Sense Oligo
uucagcgcuggucuguacu

SEQ ID NO: 45382 - RNA, 19 nt, Artificial Sequence
  Antisense Oligo
aguacagaccagcgcugaa

SEQ ID NO: 45383 - RNA, 19 nt, Artificial Sequence
  Sense Oligo
ucagcgcuggucuguacug

SEQ ID NO: 45384 - RNA, 19 nt, Artificial Sequence
  Antisense Oligo
caguacagaccagcgcuga

SEQ ID NO: 45385 - RNA, 19 nt, Artificial Sequence
  Sense Oligo
ggcucuuggguucuuucug

SEQ ID NO: 45386 - RNA, 19 nt, Artificial Sequence
  Antisense Oligo
cagaaagaacccaagagcc

SEQ ID NO: 45387 - RNA, 19 nt, Artificial Sequence
  Sense Oligo
gcucuuggguucuuucugg

SEQ ID NO: 45388 - RNA, 19 nt, Artificial Sequence
  Antisense Oligo
ccagaaagaacccaagagc

SEQ ID NO: 45389 - RNA, 19 nt, Artificial Sequence
  Sense Oligo
ucuuggguucuuucugguc

SEQ ID NO: 45390 - RNA, 19 nt, Artificial Sequence
  Antisense Oligo
gaccagaaagaacccaaga

SEQ ID NO: 45391 - RNA, 19 nt, Artificial Sequence
  Sense Oligo
cuuggguucuuucuggucu

SEQ ID NO: 45392 - RNA, 19 nt, Artificial Sequence
  Antisense Oligo
agaccagaaagaacccaag

SEQ ID NO: 45393 - RNA, 19 nt, Artificial Sequence
  Sense Oligo
uuggguucuuucuggucuu

SEQ ID NO: 45394 - RNA, 19 nt, Artificial Sequence
  Antisense Oligo
aagaccagaaagaacccaa

SEQ ID NO: 45395 - RNA, 19 nt, Artificial Sequence
  Sense Oligo
cuuucuggucuuacugaag

SEQ ID NO: 45396 - RNA, 19 nt, Artificial Sequence
  Antisense Oligo
cuucaguaagaccagaaag

SEQ ID NO: 45397 - RNA, 19 nt, Artificial Sequence
  Sense Oligo
uuucuggucuuacugaagu

SEQ ID NO: 45398 - RNA, 19 nt, Artificial Sequence
  Antisense Oligo
acuucaguaagaccagaaa

SEQ ID NO: 45399 - RNA, 19 nt, Artificial Sequence
  Sense Oligo
uucuggucuuacugaagug

SEQ ID NO: 45400 - RNA, 19 nt, Artificial Sequence
  Antisense Oligo
cacuucaguaagaccagaa

SEQ ID NO: 45401 - RNA, 19 nt, Artificial Sequence
  Sense Oligo
ucuggucuuacugaagugg

SEQ ID NO: 45402 - RNA, 19 nt, Artificial Sequence
  Antisense Oligo
ccacuucaguaagaccaga

SEQ ID NO: 45403 - RNA, 19 nt, Artificial Sequence
  Sense Oligo
cuggucuuacugaagugga

SEQ ID NO: 45404 - RNA, 19 nt, Artificial Sequence
  Antisense Oligo
uccacuucaguaagaccag

SEQ ID NO: 45405 - RNA, 19 nt, Artificial Sequence
  Sense Oligo
uggucuuacugaaguggaa

SEQ ID NO: 45406 - RNA, 19 nt, Artificial Sequence
  Antisense Oligo
uuccacuucaguaagacca

SEQ ID NO: 45407 - RNA, 19 nt, Artificial Sequence
  Sense Oligo
ggucuuacugaaguggaau

SEQ ID NO: 45408 - RNA, 19 nt, Artificial Sequence
  Antisense Oligo
auuccacuucaguaagacc

SEQ ID NO: 45409 - RNA, 19 nt, Artificial Sequence
  Sense Oligo
gucuuacugaaguggaaug

SEQ ID NO: 45410 - RNA, 19 nt, Artificial Sequence
  Antisense Oligo
cauuccacuucaguaagac

SEQ ID NO: 45411 - RNA, 19 nt, Artificial Sequence
  Sense Oligo
ucuuacugaaguggaaugg

SEQ ID NO: 45412 - RNA, 19 nt, Artificial Sequence
  Antisense Oligo
ccauuccacuucaguaaga

SEQ ID NO: 45413 - RNA, 19 nt, Artificial Sequence
  Sense Oligo
cuuacugaaguggaauggc

SEQ ID NO: 45414 - RNA, 19 nt, Artificial Sequence
  Antisense Oligo
gccauuccacuucaguaag

SEQ ID NO: 45415 - RNA, 19 nt, Artificial Sequence
  Sense Oligo
uuacugaaguggaauggcg

SEQ ID NO: 45416 - RNA, 19 nt, Artificial Sequence
  Antisense Oligo
cgccauuccacuucaguaa

SEQ ID NO: 45417 - RNA, 19 nt, Artificial Sequence
  Sense Oligo
uacugaaguggaauggcgc

SEQ ID NO: 45418 - RNA, 19 nt, Artificial Sequence
  Antisense Oligo
gcgccauuccacuucagua

SEQ ID NO: 45419 - RNA, 19 nt, Artificial Sequence
  Sense Oligo
agacuccacaucuuugccu

SEQ ID NO: 45420 - RNA, 19 nt, Artificial Sequence
  Antisense Oligo
aggcaaagauguggagucu

SEQ ID NO: 45421 - RNA, 19 nt, Artificial Sequence
  Sense Oligo
uccacaucuuugccuuacu

SEQ ID NO: 45422 - RNA, 19 nt, Artificial Sequence
  Antisense Oligo
aguaaggcaaagaugugga

SEQ ID NO: 45423 - RNA, 19 nt, Artificial Sequence
  Sense Oligo
ccacaucuuugccuuacuu

SEQ ID NO: 45424 - RNA, 19 nt, Artificial Sequence
  Antisense Oligo
aaguaaggcaaagaugugg

SEQ ID NO: 45425 - RNA, 19 nt, Artificial Sequence
  Sense Oligo
cacaucuuugccuuacuua

SEQ ID NO: 45426 - RNA, 19 nt, Artificial Sequence
  Antisense Oligo
uaaguaaggcaaagaugug

SEQ ID NO: 45427 - RNA, 19 nt, Artificial Sequence
  Sense Oligo
acaucuuugccuuacuuag

SEQ ID NO: 45428 - RNA, 19 nt, Artificial Sequence
  Antisense Oligo
cuaaguaaggcaaagaugu

SEQ ID NO: 45429 - RNA, 19 nt, Artificial Sequence
  Sense Oligo
caucuuugccuuacuuagu

SEQ ID NO: 45430 - RNA, 19 nt, Artificial Sequence
  Antisense Oligo
acuaaguaaggcaaagaug

SEQ ID NO: 45431 - RNA, 19 nt, Artificial Sequence
  Sense Oligo
aucuuugccuuacuuagug

SEQ ID NO: 45432 - RNA, 19 nt, Artificial Sequence
  Antisense Oligo
cacuaaguaaggcaaagau

SEQ ID NO: 45433 - RNA, 19 nt, Artificial Sequence
  Sense Oligo
ucuuugccuuacuuagugc

SEQ ID NO: 45434 - RNA, 19 nt, Artificial Sequence
  Antisense Oligo
gcacuaaguaaggcaaaga

SEQ ID NO: 45435 - RNA, 19 nt, Artificial Sequence
  Sense Oligo
cuuugccuuacuuagugca

SEQ ID NO: 45436 - RNA, 19 nt, Artificial Sequence
  Antisense Oligo
ugcacuaaguaaggcaaag

SEQ ID NO: 45437 - RNA, 19 nt, Artificial Sequence
  Sense Oligo
acuuagugcagcagcugaa

SEQ ID NO: 45438 - RNA, 19 nt, Artificial Sequence
  Antisense Oligo
uucagcugcugcacuaagu

SEQ ID NO: 45439 - RNA, 19 nt, Artificial Sequence
  Sense Oligo
agcugaaugcaguguuagu

SEQ ID NO: 45440 - RNA, 19 nt, Artificial Sequence
  Antisense Oligo
acuaacacugcauucagcu

SEQ ID NO: 45441 - RNA, 19 nt, Artificial Sequence
  Sense Oligo
gcugaaugcaguguuagua

SEQ ID NO: 45442 - RNA, 19 nt, Artificial Sequence
  Antisense Oligo
uacuaacacugcauucagc

SEQ ID NO: 45443 - RNA, 19 nt, Artificial Sequence
  Sense Oligo
cugaaugcaguguuaguaa

SEQ ID NO: 45444 - RNA, 19 nt, Artificial Sequence
  Antisense Oligo
uuacuaacacugcauucag

SEQ ID NO: 45445 - RNA, 19 nt, Artificial Sequence
  Sense Oligo
ugaaugcaguguuaguaaa

SEQ ID NO: 45446 - RNA, 19 nt, Artificial Sequence
  Antisense Oligo
uuuacuaacacugcauuca

SEQ ID NO: 45447 - RNA, 19 nt, Artificial Sequence
  Sense Oligo
gaaugcaguguuaguaaag

SEQ ID NO: 45448 - RNA, 19 nt, Artificial Sequence
  Antisense Oligo
cuuuacuaacacugcauuc

SEQ ID NO: 45449 - RNA, 19 nt, Artificial Sequence
  Sense Oligo
aaugcaguguuaguaaaga

SEQ ID NO: 45450 - RNA, 19 nt, Artificial Sequence
  Antisense Oligo
ucuuuacuaacacugcauu

SEQ ID NO: 45451 - RNA, 19 nt, Artificial Sequence
  Sense Oligo
augcaguguuaguaaagaa

SEQ ID NO: 45452 - RNA, 19 nt, Artificial Sequence
  Antisense Oligo
uucuuuacuaacacugcau

SEQ ID NO: 45453 - RNA, 19 nt, Artificial Sequence
  Sense Oligo
uuuuaaucaugucugggau

SEQ ID NO: 45454 - RNA, 19 nt, Artificial Sequence
  Antisense Oligo
aucccagacaugauuaaaa

SEQ ID NO: 45455 - RNA, 19 nt, Artificial Sequence
  Sense Oligo
uuuaaucaugucugggaua

SEQ ID NO: 45456 - RNA, 19 nt, Artificial Sequence
  Antisense Oligo
uaucccagacaugauuaaa

SEQ ID NO: 45457 - RNA, 19 nt, Artificial Sequence
  Sense Oligo
uuaaucaugucugggauaa

SEQ ID NO: 45458 - RNA, 19 nt, Artificial Sequence
  Antisense Oligo
uuaucccagacaugauuaa

SEQ ID NO: 45459 - RNA, 19 nt, Artificial Sequence
  Sense Oligo
uaaucaugucugggauaaa

SEQ ID NO: 45460 - RNA, 19 nt, Artificial Sequence
  Antisense Oligo
uuuaucccagacaugauua

SEQ ID NO: 45461 - RNA, 19 nt, Artificial Sequence
  Sense Oligo
aaucaugucugggauaaaa

SEQ ID NO: 45462 - RNA, 19 nt, Artificial Sequence
  Antisense Oligo
uuuuaucccagacaugauu

SEQ ID NO: 45463 - RNA, 19 nt, Artificial Sequence
  Sense Oligo
aucaugucugggauaaaag

SEQ ID NO: 45464 - RNA, 19 nt, Artificial Sequence
  Antisense Oligo
cuuuuaucccagacaugau

SEQ ID NO: 45465 - RNA, 19 nt, Artificial Sequence
  Sense Oligo
ucaugucugggauaaaagu

SEQ ID NO: 45466 - RNA, 19 nt, Artificial Sequence
  Antisense Oligo
acuuuuaucccagacauga

SEQ ID NO: 45467 - RNA, 19 nt, Artificial Sequence
  Sense Oligo
caugucugggauaaaagua

SEQ ID NO: 45468 - RNA, 19 nt, Artificial Sequence
  Antisense Oligo
uacuuuuaucccagacaug

SEQ ID NO: 45469 - RNA, 19 nt, Artificial Sequence
  Sense Oligo
augucugggauaaaaguac

SEQ ID NO: 45470 - RNA, 19 nt, Artificial Sequence
  Antisense Oligo
guacuuuuaucccagacau

SEQ ID NO: 45471 - RNA, 19 nt, Artificial Sequence
  Sense Oligo
ugucugggauaaaaguacu

SEQ ID NO: 45472 - RNA, 19 nt, Artificial Sequence
  Antisense Oligo
aguacuuuuaucccagaca

SEQ ID NO: 45473 - RNA, 19 nt, Artificial Sequence
  Sense Oligo
gucugggauaaaaguacuc

SEQ ID NO: 45474 - RNA, 19 nt, Artificial Sequence
  Antisense Oligo
gaguacuuuuaucccagac

SEQ ID NO: 45475 - RNA, 19 nt, Artificial Sequence
  Sense Oligo
ucugggauaaaaguacucu

SEQ ID NO: 45476 - RNA, 19 nt, Artificial Sequence
  Antisense Oligo
agaguacuuuuaucccaga

SEQ ID NO: 45477 - RNA, 19 nt, Artificial Sequence
  Sense Oligo
cugggauaaaaguacucuu

SEQ ID NO: 45478 - RNA, 19 nt, Artificial Sequence
  Antisense Oligo
aagaguacuuuuaucccag

SEQ ID NO: 45479 - RNA, 19 nt, Artificial Sequence
  Sense Oligo
ugggauaaaaguacucuuc

SEQ ID NO: 45480 - RNA, 19 nt, Artificial Sequence
  Antisense Oligo
gaagaguacuuuuauccca

SEQ ID NO: 45481 - RNA, 19 nt, Artificial Sequence
  Sense Oligo
gggauaaaaguacucuucu

SEQ ID NO: 45482 - RNA, 19 nt, Artificial Sequence
  Antisense Oligo
agaagaguacuuuuauccc

SEQ ID NO: 45483 - RNA, 19 nt, Artificial Sequence
  Sense Oligo
ggauaaaaguacucuucug

SEQ ID NO: 45484 - RNA, 19 nt, Artificial Sequence
  Antisense Oligo
cagaagaguacuuuuaucc

SEQ ID NO: 45485 - RNA, 19 nt, Artificial Sequence
  Sense Oligo
guacucuucuguuaauuag

SEQ ID NO: 45486 - RNA, 19 nt, Artificial Sequence
  Antisense Oligo
cuaauuaacagaagaguac

SEQ ID NO: 45487 - RNA, 19 nt, Artificial Sequence
  Sense Oligo
uacucuucuguuaauuagc

SEQ ID NO: 45488 - RNA, 19 nt, Artificial Sequence
  Antisense Oligo
gcuaauuaacagaagagua

SEQ ID NO: 45489 - RNA, 19 nt, Artificial Sequence
  Sense Oligo
acucuucuguuaauuagca

SEQ ID NO: 45490 - RNA, 19 nt, Artificial Sequence
  Antisense Oligo
ugcuaauuaacagaagagu

SEQ ID NO: 45491 - RNA, 19 nt, Artificial Sequence
  Sense Oligo
cucuucuguuaauuagcag

SEQ ID NO: 45492 - RNA, 19 nt, Artificial Sequence
  Antisense Oligo
cugcuaauuaacagaagag

SEQ ID NO: 45493 - RNA, 19 nt, Artificial Sequence
  Sense Oligo
cuguuaauuagcagugucu

SEQ ID NO: 45494 - RNA, 19 nt, Artificial Sequence
  Antisense Oligo
agacacugcuaauuaacag

SEQ ID NO: 45495 - RNA, 19 nt, Artificial Sequence
  Sense Oligo
uguuaauuagcagugucuu

SEQ ID NO: 45496 - RNA, 19 nt, Artificial Sequence
  Antisense Oligo
aagacacugcuaauuaaca

SEQ ID NO: 45497 - RNA, 19 nt, Artificial Sequence
  Sense Oligo
guuaauuagcagugucuuc

SEQ ID NO: 45498 - RNA, 19 nt, Artificial Sequence
  Antisense Oligo
gaagacacugcuaauuaac

SEQ ID NO: 45499 - RNA, 19 nt, Artificial Sequence
  Sense Oligo
auuagcagugucuucaaua

SEQ ID NO: 45500 - RNA, 19 nt, Artificial Sequence
  Antisense Oligo
uauugaagacacugcuaau

SEQ ID NO: 45501 - RNA, 19 nt, Artificial Sequence
  Sense Oligo
uagcagugucuucaauauu

SEQ ID NO: 45502 - RNA, 19 nt, Artificial Sequence
  Antisense Oligo
aauauugaagacacugcua

SEQ ID NO: 45503 - RNA, 19 nt, Artificial Sequence
  Sense Oligo
agcagugucuucaauauuu

SEQ ID NO: 45504 - RNA, 19 nt, Artificial Sequence
  Antisense Oligo
aaauauugaagacacugcu

SEQ ID NO: 45505 - RNA, 19 nt, Artificial Sequence
  Sense Oligo
gcagugucuucaauauuuc

SEQ ID NO: 45506 - RNA, 19 nt, Artificial Sequence
  Antisense Oligo
gaaauauugaagacacugc

SEQ ID NO: 45507 - RNA, 19 nt, Artificial Sequence
  Sense Oligo
agugucuucaauauuucug

SEQ ID NO: 45508 - RNA, 19 nt, Artificial Sequence
  Antisense Oligo
cagaaauauugaagacacu

SEQ ID NO: 45509 - RNA, 19 nt, Artificial Sequence
  Sense Oligo
gugucuucaauauuucugu

SEQ ID NO: 45510 - RNA, 19 nt, Artificial Sequence
  Antisense Oligo
acagaaauauugaagacac

SEQ ID NO: 45511 - RNA, 19 nt, Artificial Sequence
  Sense Oligo
uauuucuguucaauucagg

SEQ ID NO: 45512 - RNA, 19 nt, Artificial Sequence
  Antisense Oligo
ccugaauugaacagaaaua

SEQ ID NO: 45513 - RNA, 19 nt, Artificial Sequence
  Sense Oligo
auuucuguucaauucaggc

SEQ ID NO: 45514 - RNA, 19 nt, Artificial Sequence
  Antisense Oligo
gccugaauugaacagaaau

SEQ ID NO: 45515 - RNA, 19 nt, Artificial Sequence
  Sense Oligo
uuucuguucaauucaggcu

SEQ ID NO: 45516 - RNA, 19 nt, Artificial Sequence
  Antisense Oligo
agccugaauugaacagaaa

SEQ ID NO: 45517 - RNA, 19 nt, Artificial Sequence
  Sense Oligo
ucuguucaauucaggcuuc

SEQ ID NO: 45518 - RNA, 19 nt, Artificial Sequence
  Antisense Oligo
gaagccugaauugaacaga

SEQ ID NO: 45519 - RNA, 19 nt, Artificial Sequence
  Sense Oligo
uucaauucaggcuucaugc

SEQ ID NO: 45520 - RNA, 19 nt, Artificial Sequence
  Antisense Oligo
gcaugaagccugaauugaa

SEQ ID NO: 45521 - RNA, 19 nt, Artificial Sequence
  Sense Oligo
ucaauucaggcuucaugcu

SEQ ID NO: 45522 - RNA, 19 nt, Artificial Sequence
  Antisense Oligo
agcaugaagccugaauuga

SEQ ID NO: 45523 - RNA, 19 nt, Artificial Sequence
  Sense Oligo
caauucaggcuucaugcug

SEQ ID NO: 45524 - RNA, 19 nt, Artificial Sequence
  Antisense Oligo
cagcaugaagccugaauug

SEQ ID NO: 45525 - RNA, 19 nt, Artificial Sequence
  Sense Oligo
aauucaggcuucaugcugu

SEQ ID NO: 45526 - RNA, 19 nt, Artificial Sequence
  Antisense Oligo
acagcaugaagccugaauu

SEQ ID NO: 45527 - RNA, 19 nt, Artificial Sequence
  Sense Oligo
auucaggcuucaugcugua

SEQ ID NO: 45528 - RNA, 19 nt, Artificial Sequence
  Antisense Oligo
uacagcaugaagccugaau

SEQ ID NO: 45529 - RNA, 19 nt, Artificial Sequence
  Sense Oligo
uucaggcuucaugcuguau

SEQ ID NO: 45530 - RNA, 19 nt, Artificial Sequence
  Antisense Oligo
auacagcaugaagccugaa

SEQ ID NO: 45531 - RNA, 19 nt, Artificial Sequence
  Sense Oligo
ucaggcuucaugcuguaug

SEQ ID NO: 45532 - RNA, 19 nt, Artificial Sequence
  Antisense Oligo
cauacagcaugaagccuga

SEQ ID NO: 45533 - RNA, 19 nt, Artificial Sequence
  Sense Oligo
caggcuucaugcuguaugc

SEQ ID NO: 45534 - RNA, 19 nt, Artificial Sequence
  Antisense Oligo
gcauacagcaugaagccug

SEQ ID NO: 45535 - RNA, 19 nt, Artificial Sequence
  Sense Oligo
aggcuucaugcuguaugcc

SEQ ID NO: 45536 - RNA, 19 nt, Artificial Sequence
  Antisense Oligo
ggcauacagcaugaagccu

SEQ ID NO: 45537 - RNA, 19 nt, Artificial Sequence
  Sense Oligo
ggcuucaugcuguaugccc

SEQ ID NO: 45538 - RNA, 19 nt, Artificial Sequence
  Antisense Oligo
gggcauacagcaugaagcc

SEQ ID NO: 45539 - RNA, 19 nt, Artificial Sequence
  Sense Oligo
gcuucaugcuguaugccca

SEQ ID NO: 45540 - RNA, 19 nt, Artificial Sequence
  Antisense Oligo
ugggcauacagcaugaagc

SEQ ID NO: 45541 - RNA, 19 nt, Artificial Sequence
  Sense Oligo
cuucaugcuguaugcccag

SEQ ID NO: 45542 - RNA, 19 nt, Artificial Sequence
  Antisense Oligo
cugggcauacagcaugaag

SEQ ID NO: 45543 - RNA, 19 nt, Artificial Sequence
  Sense Oligo
uucaugcuguaugcccagu

SEQ ID NO: 45544 - RNA, 19 nt, Artificial Sequence
  Antisense Oligo
acugggcauacagcaugaa

SEQ ID NO: 45545 - RNA, 19 nt, Artificial Sequence
  Sense Oligo
ucaugcuguaugcccaguc

SEQ ID NO: 45546 - RNA, 19 nt, Artificial Sequence
  Antisense Oligo
gacugggcauacagcauga

SEQ ID NO: 45547 - RNA, 19 nt, Artificial Sequence
  Sense Oligo
gcuguaugcccagucugaa

SEQ ID NO: 45548 - RNA, 19 nt, Artificial Sequence
  Antisense Oligo
uucagacugggcauacagc

SEQ ID NO: 45549 - RNA, 19 nt, Artificial Sequence
  Sense Oligo
uaugcccagucugaauccc

SEQ ID NO: 45550 - RNA, 19 nt, Artificial Sequence
  Antisense Oligo
gggauucagacugggcaua

SEQ ID NO: 45551 - RNA, 19 nt, Artificial Sequence
  Sense Oligo
cagucugaaucccagcugu

SEQ ID NO: 45552 - RNA, 19 nt, Artificial Sequence
  Antisense Oligo
acagcugggauucagacug

SEQ ID NO: 45553 - RNA, 19 nt, Artificial Sequence
  Sense Oligo
aaucccagcugugcucuga

SEQ ID NO: 45554 - RNA, 19 nt, Artificial Sequence
  Antisense Oligo
ucagagcacagcugggauu

SEQ ID NO: 45555 - RNA, 19 nt, Artificial Sequence
  Sense Oligo
gcugugcucugaaucuagg

SEQ ID NO: 45556 - RNA, 19 nt, Artificial Sequence
  Antisense Oligo
ccuagauucagagcacagc

SEQ ID NO: 45557 - RNA, 19 nt, Artificial Sequence
  Sense Oligo
cugugcucugaaucuagga

SEQ ID NO: 45558 - RNA, 19 nt, Artificial Sequence
  Antisense Oligo
uccuagauucagagcacag

SEQ ID NO: 45559 - RNA, 19 nt, Artificial Sequence
  Sense Oligo
agaccucaccuuuccuaau

SEQ ID NO: 45560 - RNA, 19 nt, Artificial Sequence
  Antisense Oligo
auuaggaaaggugaggucu

SEQ ID NO: 45561 - RNA, 19 nt, Artificial Sequence
  Sense Oligo
gaccucaccuuuccuaaug

SEQ ID NO: 45562 - RNA, 19 nt, Artificial Sequence
  Antisense Oligo
cauuaggaaaggugagguc

SEQ ID NO: 45563 - RNA, 19 nt, Artificial Sequence
  Sense Oligo
accucaccuuuccuaaugc

SEQ ID NO: 45564 - RNA, 19 nt, Artificial Sequence
  Antisense Oligo
gcauuaggaaaggugaggu

SEQ ID NO: 45565 - RNA, 19 nt, Artificial Sequence
  Sense Oligo
ccucaccuuuccuaaugcc

SEQ ID NO: 45566 - RNA, 19 nt, Artificial Sequence
  Antisense Oligo
ggcauuaggaaaggugagg

SEQ ID NO: 45567 - RNA, 19 nt, Artificial Sequence
  Sense Oligo
cucaccuuuccuaaugcca

SEQ ID NO: 45568 - RNA, 19 nt, Artificial Sequence
  Antisense Oligo
uggcauuaggaaaggugag

SEQ ID NO: 45569 - RNA, 19 nt, Artificial Sequence
  Sense Oligo
ucaccuuuccuaaugccag

SEQ ID NO: 45570 - RNA, 19 nt, Artificial Sequence
  Antisense Oligo
cuggcauuaggaaagguga

SEQ ID NO: 45571 - RNA, 19 nt, Artificial Sequence
  Sense Oligo
caccuuuccuaaugccagc

SEQ ID NO: 45572 - RNA, 19 nt, Artificial Sequence
  Antisense Oligo
gcuggcauuaggaaaggug

SEQ ID NO: 45573 - RNA, 19 nt, Artificial Sequence
  Sense Oligo
accuuuccuaaugccagcu

SEQ ID NO: 45574 - RNA, 19 nt, Artificial Sequence
  Antisense Oligo
agcuggcauuaggaaaggu

SEQ ID NO: 45575 - RNA, 19 nt, Artificial Sequence
  Sense Oligo
ccuuuccuaaugccagcua

SEQ ID NO: 45576 - RNA, 19 nt, Artificial Sequence
  Antisense Oligo
uagcuggcauuaggaaagg

SEQ ID NO: 45577 - RNA, 19 nt, Artificial Sequence
  Sense Oligo
cuuuccuaaugccagcuaa

SEQ ID NO: 45578 - RNA, 19 nt, Artificial Sequence
  Antisense Oligo
uuagcuggcauuaggaaag

SEQ ID NO: 45579 - RNA, 19 nt, Artificial Sequence
  Sense Oligo
uuuccuaaugccagcuaag

SEQ ID NO: 45580 - RNA, 19 nt, Artificial Sequence
  Antisense Oligo
cuuagcuggcauuaggaaa

SEQ ID NO: 45581 - RNA, 19 nt, Artificial Sequence
  Sense Oligo
uuccuaaugccagcuaaga

SEQ ID NO: 45582 - RNA, 19 nt, Artificial Sequence
  Antisense Oligo
ucuuagcuggcauuaggaa

SEQ ID NO: 45583 - RNA, 19 nt, Artificial Sequence
  Sense Oligo
uaaugccagcuaagaugag

SEQ ID NO: 45584 - RNA, 19 nt, Artificial Sequence
  Antisense Oligo
cucaucuuagcuggcauua

SEQ ID NO: 45585 - RNA, 19 nt, Artificial Sequence
  Sense Oligo
guucacucacauacauaau

SEQ ID NO: 45586 - RNA, 19 nt, Artificial Sequence
  Antisense Oligo
auuauguaugugagugaac

SEQ ID NO: 45587 - RNA, 19 nt, Artificial Sequence
  Sense Oligo
ucacucacauacauaauac

SEQ ID NO: 45588 - RNA, 19 nt, Artificial Sequence
  Antisense Oligo
guauuauguaugugaguga

SEQ ID NO: 45589 - RNA, 19 nt, Artificial Sequence
  Sense Oligo
cacucacauacauaauaca

SEQ ID NO: 45590 - RNA, 19 nt, Artificial Sequence
  Antisense Oligo
uguauuauguaugugagug

SEQ ID NO: 45591 - RNA, 19 nt, Artificial Sequence
  Sense Oligo
auacauguauagcuuagug

SEQ ID NO: 45592 - RNA, 19 nt, Artificial Sequence
  Antisense Oligo
cacuaagcuauacauguau

SEQ ID NO: 45593 - RNA, 19 nt, Artificial Sequence
  Sense Oligo
uacauguauagcuuagugg

SEQ ID NO: 45594 - RNA, 19 nt, Artificial Sequence
  Antisense Oligo
ccacuaagcuauacaugua

SEQ ID NO: 45595 - RNA, 19 nt, Artificial Sequence
  Sense Oligo
acauguauagcuuagugga

SEQ ID NO: 45596 - RNA, 19 nt, Artificial Sequence
  Antisense Oligo
uccacuaagcuauacaugu

SEQ ID NO: 45597 - RNA, 19 nt, Artificial Sequence
  Sense Oligo
cauguauagcuuaguggag

SEQ ID NO: 45598 - RNA, 19 nt, Artificial Sequence
  Antisense Oligo
cuccacuaagcuauacaug

SEQ ID NO: 45599 - RNA, 19 nt, Artificial Sequence
  Sense Oligo
cuuaguuucaggaaguugg

SEQ ID NO: 45600 - RNA, 19 nt, Artificial Sequence
  Antisense Oligo
ccaacuuccugaaacuaag

SEQ ID NO: 45601 - RNA, 19 nt, Artificial Sequence
  Sense Oligo
uuaguuucaggaaguuggg

SEQ ID NO: 45602 - RNA, 19 nt, Artificial Sequence
  Antisense Oligo
cccaacuuccugaaacuaa

SEQ ID NO: 45603 - RNA, 19 nt, Artificial Sequence
  Sense Oligo
uaguuucaggaaguugggu

SEQ ID NO: 45604 - RNA, 19 nt, Artificial Sequence
  Antisense Oligo
acccaacuuccugaaacua

SEQ ID NO: 45605 - RNA, 19 nt, Artificial Sequence
  Sense Oligo
guuucaggaaguuggguua

SEQ ID NO: 45606 - RNA, 19 nt, Artificial Sequence
  Antisense Oligo
uaacccaacuuccugaaac

SEQ ID NO: 45607 - RNA, 19 nt, Artificial Sequence
  Sense Oligo
uuucaggaaguuggguuag

SEQ ID NO: 45608 - RNA, 19 nt, Artificial Sequence
  Antisense Oligo
cuaacccaacuuccugaaa

SEQ ID NO: 45609 - RNA, 19 nt, Artificial Sequence
  Sense Oligo
cccacagcaaugccuuacu

SEQ ID NO: 45610 - RNA, 19 nt, Artificial Sequence
  Antisense Oligo
aguaaggcauugcuguggg

SEQ ID NO: 45611 - RNA, 19 nt, Artificial Sequence
  Sense Oligo
ccacagcaaugccuuacuu

SEQ ID NO: 45612 - RNA, 19 nt, Artificial Sequence
  Antisense Oligo
aaguaaggcauugcugugg

SEQ ID NO: 45613 - RNA, 19 nt, Artificial Sequence
  Sense Oligo
cacagcaaugccuuacuua

SEQ ID NO: 45614 - RNA, 19 nt, Artificial Sequence
  Antisense Oligo
uaaguaaggcauugcugug

SEQ ID NO: 45615 - RNA, 19 nt, Artificial Sequence
  Sense Oligo
acagcaaugccuuacuuaa

SEQ ID NO: 45616 - RNA, 19 nt, Artificial Sequence
  Antisense Oligo
uuaaguaaggcauugcugu

SEQ ID NO: 45617 - RNA, 19 nt, Artificial Sequence
  Sense Oligo
cagcaaugccuuacuuaau

SEQ ID NO: 45618 - RNA, 19 nt, Artificial Sequence
  Antisense Oligo
auuaaguaaggcauugcug

SEQ ID NO: 45619 - RNA, 19 nt, Artificial Sequence
  Sense Oligo
augccuuacuuaaugugca

SEQ ID NO: 45620 - RNA, 19 nt, Artificial Sequence
  Antisense Oligo
ugcacauuaaguaaggcau

SEQ ID NO: 45621 - RNA, 19 nt, Artificial Sequence
  Sense Oligo
gccuuacuuaaugugcaaa

SEQ ID NO: 45622 - RNA, 19 nt, Artificial Sequence
  Antisense Oligo
uuugcacauuaaguaaggc

SEQ ID NO: 45623 - RNA, 19 nt, Artificial Sequence
  Sense Oligo
ccuuacuuaaugugcaaaa

SEQ ID NO: 45624 - RNA, 19 nt, Artificial Sequence
  Antisense Oligo
uuuugcacauuaaguaagg

SEQ ID NO: 45625 - RNA, 19 nt, Artificial Sequence
  Sense Oligo
cuuacuuaaugugcaaaag

SEQ ID NO: 45626 - RNA, 19 nt, Artificial Sequence
  Antisense Oligo
cuuuugcacauuaaguaag

SEQ ID NO: 45627 - RNA, 19 nt, Artificial Sequence
  Sense Oligo
aaugugcaaaagauaugcu

SEQ ID NO: 45628 - RNA, 19 nt, Artificial Sequence
  Antisense Oligo
agcauaucuuuugcacauu

SEQ ID NO: 45629 - RNA, 19 nt, Artificial Sequence
  Sense Oligo
augugcaaaagauaugcug

SEQ ID NO: 45630 - RNA, 19 nt, Artificial Sequence
  Antisense Oligo
cagcauaucuuuugcacau

SEQ ID NO: 45631 - RNA, 19 nt, Artificial Sequence
  Sense Oligo
ugugcaaaagauaugcugu

SEQ ID NO: 45632 - RNA, 19 nt, Artificial Sequence
  Antisense Oligo
acagcauaucuuuugcaca

SEQ ID NO: 45633 - RNA, 19 nt, Artificial Sequence
  Sense Oligo
gugcaaaagauaugcugug

SEQ ID NO: 45634 - RNA, 19 nt, Artificial Sequence
  Antisense Oligo
cacagcauaucuuuugcac

SEQ ID NO: 45635 - RNA, 19 nt, Artificial Sequence
  Sense Oligo
ugcaaaagauaugcugugg

SEQ ID NO: 45636 - RNA, 19 nt, Artificial Sequence
  Antisense Oligo
ccacagcauaucuuuugca

SEQ ID NO: 45637 - RNA, 19 nt, Artificial Sequence
  Sense Oligo
gcaaaagauaugcugugga

SEQ ID NO: 45638 - RNA, 19 nt, Artificial Sequence
  Antisense Oligo
uccacagcauaucuuuugc

SEQ ID NO: 45639 - RNA, 19 nt, Artificial Sequence
  Sense Oligo
caaaagauaugcuguggaa

SEQ ID NO: 45640 - RNA, 19 nt, Artificial Sequence
  Antisense Oligo
uuccacagcauaucuuuug

SEQ ID NO: 45641 - RNA, 19 nt, Artificial Sequence
  Sense Oligo
uuuucauaaagguccaucc

SEQ ID NO: 45642 - RNA, 19 nt, Artificial Sequence
  Antisense Oligo
ggauggaccuuuaugaaaa

SEQ ID NO: 45643 - RNA, 19 nt, Artificial Sequence
  Sense Oligo
uuucauaaagguccaucca

SEQ ID NO: 45644 - RNA, 19 nt, Artificial Sequence
  Antisense Oligo
uggauggaccuuuaugaaa

SEQ ID NO: 45645 - RNA, 19 nt, Artificial Sequence
  Sense Oligo
uucauaaagguccauccaa

SEQ ID NO: 45646 - RNA, 19 nt, Artificial Sequence
  Antisense Oligo
uuggauggaccuuuaugaa

SEQ ID NO: 45647 - RNA, 19 nt, Artificial Sequence
  Sense Oligo
ucauaaagguccauccaau

SEQ ID NO: 45648 - RNA, 19 nt, Artificial Sequence
  Antisense Oligo
auuggauggaccuuuauga

SEQ ID NO: 45649 - RNA, 19 nt, Artificial Sequence
  Sense Oligo
cauaaagguccauccaaua

SEQ ID NO: 45650 - RNA, 19 nt, Artificial Sequence
  Antisense Oligo
uauuggauggaccuuuaug

SEQ ID NO: 45651 - RNA, 19 nt, Artificial Sequence
  Sense Oligo
auaaagguccauccaauau

SEQ ID NO: 45652 - RNA, 19 nt, Artificial Sequence
  Antisense Oligo
auauuggauggaccuuuau

SEQ ID NO: 45653 - RNA, 19 nt, Artificial Sequence
  Sense Oligo
uaaagguccauccaauaua

SEQ ID NO: 45654 - RNA, 19 nt, Artificial Sequence
  Antisense Oligo
uauauuggauggaccuuua

SEQ ID NO: 45655 - RNA, 19 nt, Artificial Sequence
  Sense Oligo
aaagguccauccaauauag

SEQ ID NO: 45656 - RNA, 19 nt, Artificial Sequence
  Antisense Oligo
cuauauuggauggaccuuu

SEQ ID NO: 45657 - RNA, 19 nt, Artificial Sequence
  Sense Oligo
aagguccauccaauauaga

SEQ ID NO: 45658 - RNA, 19 nt, Artificial Sequence
  Antisense Oligo
ucuauauuggauggaccuu

SEQ ID NO: 45659 - RNA, 19 nt, Artificial Sequence
  Sense Oligo
agguccauccaauauagau

SEQ ID NO: 45660 - RNA, 19 nt, Artificial Sequence
  Antisense Oligo
aucuauauuggauggaccu

SEQ ID NO: 45661 - RNA, 19 nt, Artificial Sequence
  Sense Oligo
gguccauccaauauagaua

SEQ ID NO: 45662 - RNA, 19 nt, Artificial Sequence
  Antisense Oligo
uaucuauauuggauggacc

SEQ ID NO: 45663 - RNA, 19 nt, Artificial Sequence
  Sense Oligo
uccauccaauauagauaac

SEQ ID NO: 45664 - RNA, 19 nt, Artificial Sequence
  Antisense Oligo
guuaucuauauuggaugga

SEQ ID NO: 45665 - RNA, 19 nt, Artificial Sequence
  Sense Oligo
ccauccaauauagauaacg

SEQ ID NO: 45666 - RNA, 19 nt, Artificial Sequence
  Antisense Oligo
cguuaucuauauuggaugg

SEQ ID NO: 45667 - RNA, 19 nt, Artificial Sequence
  Sense Oligo
cauccaauauagauaacgu

SEQ ID NO: 45668 - RNA, 19 nt, Artificial Sequence
  Antisense Oligo
acguuaucuauauuggaug

SEQ ID NO: 45669 - RNA, 19 nt, Artificial Sequence
  Sense Oligo
auccaauauagauaacgug

SEQ ID NO: 45670 - RNA, 19 nt, Artificial Sequence
  Antisense Oligo
cacguuaucuauauuggau

SEQ ID NO: 45671 - RNA, 19 nt, Artificial Sequence
  Sense Oligo
uccaauauagauaacgugg

SEQ ID NO: 45672 - RNA, 19 nt, Artificial Sequence
  Antisense Oligo
ccacguuaucuauauugga

SEQ ID NO: 45673 - RNA, 19 nt, Artificial Sequence
  Sense Oligo
ccaauauagauaacgugga

SEQ ID NO: 45674 - RNA, 19 nt, Artificial Sequence
  Antisense Oligo
uccacguuaucuauauugg

SEQ ID NO: 45675 - RNA, 19 nt, Artificial Sequence
  Sense Oligo
caauauagauaacguggag

SEQ ID NO: 45676 - RNA, 19 nt, Artificial Sequence
  Antisense Oligo
cuccacguuaucuauauug

SEQ ID NO: 45677 - RNA, 19 nt, Artificial Sequence
  Sense Oligo
aauauagauaacguggagg

SEQ ID NO: 45678 - RNA, 19 nt, Artificial Sequence
  Antisense Oligo
ccuccacguuaucuauauu

SEQ ID NO: 45679 - RNA, 19 nt, Artificial Sequence
  Sense Oligo
auauagauaacguggaggg

SEQ ID NO: 45680 - RNA, 19 nt, Artificial Sequence
  Antisense Oligo
cccuccacguuaucuauau

SEQ ID NO: 45681 - RNA, 19 nt, Artificial Sequence
  Sense Oligo
uauagauaacguggagggu

SEQ ID NO: 45682 - RNA, 19 nt, Artificial Sequence
  Antisense Oligo
acccuccacguuaucuaua

SEQ ID NO: 45683 - RNA, 19 nt, Artificial Sequence
  Sense Oligo
auagauaacguggaggguu

SEQ ID NO: 45684 - RNA, 19 nt, Artificial Sequence
  Antisense Oligo
aacccuccacguuaucuau

SEQ ID NO: 45685 - RNA, 19 nt, Artificial Sequence
  Sense Oligo
gucuucuuguaaccauuuc

SEQ ID NO: 45686 - RNA, 19 nt, Artificial Sequence
  Antisense Oligo
gaaaugguuacaagaagac

SEQ ID NO: 45687 - RNA, 19 nt, Artificial Sequence
  Sense Oligo
ucauuaaugucucuccuuu

SEQ ID NO: 45688 - RNA, 19 nt, Artificial Sequence
  Antisense Oligo
aaaggagagacauuaauga

SEQ ID NO: 45689 - RNA, 19 nt, Artificial Sequence
  Sense Oligo
uaaugucucuccuuuccag

SEQ ID NO: 45690 - RNA, 19 nt, Artificial Sequence
  Antisense Oligo
cuggaaaggagagacauua

SEQ ID NO: 45691 - RNA, 19 nt, Artificial Sequence
  Sense Oligo
aaugucucuccuuuccagc

SEQ ID NO: 45692 - RNA, 19 nt, Artificial Sequence
  Antisense Oligo
gcuggaaaggagagacauu

SEQ ID NO: 45693 - RNA, 19 nt, Artificial Sequence
  Sense Oligo
gucucuccuuuccagcgua

SEQ ID NO: 45694 - RNA, 19 nt, Artificial Sequence
  Antisense Oligo
uacgcuggaaaggagagac

SEQ ID NO: 45695 - RNA, 19 nt, Artificial Sequence
  Sense Oligo
ucucuccuuuccagcguac

SEQ ID NO: 45696 - RNA, 19 nt, Artificial Sequence
  Antisense Oligo
guacgcuggaaaggagaga

SEQ ID NO: 45697 - RNA, 19 nt, Artificial Sequence
  Sense Oligo
cucuccuuuccagcguaca

SEQ ID NO: 45698 - RNA, 19 nt, Artificial Sequence
  Antisense Oligo
uguacgcuggaaaggagag

SEQ ID NO: 45699 - RNA, 19 nt, Artificial Sequence
  Sense Oligo
ucuccuuuccagcguacac

SEQ ID NO: 45700 - RNA, 19 nt, Artificial Sequence
  Antisense Oligo
guguacgcuggaaaggaga

SEQ ID NO: 45701 - RNA, 19 nt, Artificial Sequence
  Sense Oligo
cuccuuuccagcguacacg

SEQ ID NO: 45702 - RNA, 19 nt, Artificial Sequence
  Antisense Oligo
cguguacgcuggaaaggag

SEQ ID NO: 45703 - RNA, 19 nt, Artificial Sequence
  Sense Oligo
uccuuuccagcguacacgu

SEQ ID NO: 45704 - RNA, 19 nt, Artificial Sequence
  Antisense Oligo
acguguacgcuggaaagga

SEQ ID NO: 45705 - RNA, 19 nt, Artificial Sequence
  Sense Oligo
ccuuuccagcguacacgug

SEQ ID NO: 45706 - RNA, 19 nt, Artificial Sequence
  Antisense Oligo
cacguguacgcuggaaagg

SEQ ID NO: 45707 - RNA, 19 nt, Artificial Sequence
  Sense Oligo
cuuuccagcguacacgugu

SEQ ID NO: 45708 - RNA, 19 nt, Artificial Sequence
  Antisense Oligo
acacguguacgcuggaaag

SEQ ID NO: 45709 - RNA, 19 nt, Artificial Sequence
  Sense Oligo
uuuccagcguacacgugua

SEQ ID NO: 45710 - RNA, 19 nt, Artificial Sequence
  Antisense Oligo
uacacguguacgcuggaaa

SEQ ID NO: 45711 - RNA, 19 nt, Artificial Sequence
  Sense Oligo
caaaagucaccugcaggcc

SEQ ID NO: 45712 - RNA, 19 nt, Artificial Sequence
  Antisense Oligo
ggccugcaggugacuuuug

SEQ ID NO: 45713 - RNA, 19 nt, Artificial Sequence
  Sense Oligo
aaaagucaccugcaggccu

SEQ ID NO: 45714 - RNA, 19 nt, Artificial Sequence
  Antisense Oligo
aggccugcaggugacuuuu

SEQ ID NO: 45715 - RNA, 19 nt, Artificial Sequence
  Sense Oligo
aaagucaccugcaggccuc

SEQ ID NO: 45716 - RNA, 19 nt, Artificial Sequence
  Antisense Oligo
gaggccugcaggugacuuu

SEQ ID NO: 45717 - RNA, 19 nt, Artificial Sequence
  Sense Oligo
aagucaccugcaggccucc

SEQ ID NO: 45718 - RNA, 19 nt, Artificial Sequence
  Antisense Oligo
ggaggccugcaggugacuu

SEQ ID NO: 45719 - RNA, 19 nt, Artificial Sequence
  Sense Oligo
cucccaaagaggugauaga

SEQ ID NO: 45720 - RNA, 19 nt, Artificial Sequence
  Antisense Oligo
ucuaucaccucuuugggag

SEQ ID NO: 45721 - RNA, 19 nt, Artificial Sequence
  Sense Oligo
ucccaaagaggugauagac

SEQ ID NO: 45722 - RNA, 19 nt, Artificial Sequence
  Antisense Oligo
gucuaucaccucuuuggga

SEQ ID NO: 45723 - RNA, 19 nt, Artificial Sequence
  Sense Oligo
cccaaagaggugauagaca

SEQ ID NO: 45724 - RNA, 19 nt, Artificial Sequence
  Antisense Oligo
ugucuaucaccucuuuggg

SEQ ID NO: 45725 - RNA, 19 nt, Artificial Sequence
  Sense Oligo
aagaggugauagacaugga

SEQ ID NO: 45726 - RNA, 19 nt, Artificial Sequence
  Antisense Oligo
uccaugucuaucaccucuu

SEQ ID NO: 45727 - RNA, 19 nt, Artificial Sequence
  Sense Oligo
ggugauagacauggagcug

SEQ ID NO: 45728 - RNA, 19 nt, Artificial Sequence
  Antisense Oligo
cagcuccaugucuaucacc

SEQ ID NO: 45729 - RNA, 19 nt, Artificial Sequence
  Sense Oligo
gugauagacauggagcuga

SEQ ID NO: 45730 - RNA, 19 nt, Artificial Sequence
  Antisense Oligo
ucagcuccaugucuaucac

SEQ ID NO: 45731 - RNA, 19 nt, Artificial Sequence
  Sense Oligo
ugauagacauggagcugag

SEQ ID NO: 45732 - RNA, 19 nt, Artificial Sequence
  Antisense Oligo
cucagcuccaugucuauca

SEQ ID NO: 45733 - RNA, 19 nt, Artificial Sequence
  Sense Oligo
acauggagcugagugcccu

SEQ ID NO: 45734 - RNA, 19 nt, Artificial Sequence
  Antisense Oligo
agggcacucagcuccaugu

SEQ ID NO: 45735 - RNA, 19 nt, Artificial Sequence
  Sense Oligo
cauggagcugagugcccug

SEQ ID NO: 45736 - RNA, 19 nt, Artificial Sequence
  Antisense Oligo
cagggcacucagcuccaug

SEQ ID NO: 45737 - RNA, 19 nt, Artificial Sequence
  Sense Oligo
auggagcugagugcccuga

SEQ ID NO: 45738 - RNA, 19 nt, Artificial Sequence
  Antisense Oligo
ucagggcacucagcuccau

SEQ ID NO: 45739 - RNA, 19 nt, Artificial Sequence
  Sense Oligo
uggagcugagugcccugag

SEQ ID NO: 45740 - RNA, 19 nt, Artificial Sequence
  Antisense Oligo
cucagggcacucagcucca

SEQ ID NO: 45741 - RNA, 19 nt, Artificial Sequence
  Sense Oligo
agcugagugcccugaggag

SEQ ID NO: 45742 - RNA, 19 nt, Artificial Sequence
  Antisense Oligo
cuccucagggcacucagcu

SEQ ID NO: 45743 - RNA, 19 nt, Artificial Sequence
  Sense Oligo
cugagugcccugaggagug

SEQ ID NO: 45744 - RNA, 19 nt, Artificial Sequence
  Antisense Oligo
cacuccucagggcacucag

SEQ ID NO: 45745 - RNA, 19 nt, Artificial Sequence
  Sense Oligo
ugagugcccugaggaguga

SEQ ID NO: 45746 - RNA, 19 nt, Artificial Sequence
  Antisense Oligo
ucacuccucagggcacuca

SEQ ID NO: 45747 - RNA, 19 nt, Artificial Sequence
  Sense Oligo
cacagagccugggauggau

SEQ ID NO: 45748 - RNA, 19 nt, Artificial Sequence
  Antisense Oligo
auccaucccaggcucugug

SEQ ID NO: 45749 - RNA, 19 nt, Artificial Sequence
  Sense Oligo
agagccugggauggaucug

SEQ ID NO: 45750 - RNA, 19 nt, Artificial Sequence
  Antisense Oligo
cagauccaucccaggcucu

SEQ ID NO: 45751 - RNA, 19 nt, Artificial Sequence
  Sense Oligo
gagccugggauggaucugu

SEQ ID NO: 45752 - RNA, 19 nt, Artificial Sequence
  Antisense Oligo
acagauccaucccaggcuc

SEQ ID NO: 45753 - RNA, 19 nt, Artificial Sequence
  Sense Oligo
agccugggauggaucugug

SEQ ID NO: 45754 - RNA, 19 nt, Artificial Sequence
  Antisense Oligo
cacagauccaucccaggcu

SEQ ID NO: 45755 - RNA, 19 nt, Artificial Sequence
  Sense Oligo
gccugggauggaucugugg

SEQ ID NO: 45756 - RNA, 19 nt, Artificial Sequence
  Antisense Oligo
ccacagauccaucccaggc

SEQ ID NO: 45757 - RNA, 19 nt, Artificial Sequence
  Sense Oligo
ccugggauggaucuguggg

SEQ ID NO: 45758 - RNA, 19 nt, Artificial Sequence
  Antisense Oligo
cccacagauccaucccagg

SEQ ID NO: 45759 - RNA, 19 nt, Artificial Sequence
  Sense Oligo
gauggaucugugggaguuc

SEQ ID NO: 45760 - RNA, 19 nt, Artificial Sequence
  Antisense Oligo
gaacucccacagauccauc

SEQ ID NO: 45761 - RNA, 19 nt, Artificial Sequence
  Sense Oligo
auggaucugugggaguucu

SEQ ID NO: 45762 - RNA, 19 nt, Artificial Sequence
  Antisense Oligo
agaacucccacagauccau

SEQ ID NO: 45763 - RNA, 19 nt, Artificial Sequence
  Sense Oligo
uggaucugugggaguucug

SEQ ID NO: 45764 - RNA, 19 nt, Artificial Sequence
  Antisense Oligo
cagaacucccacagaucca

SEQ ID NO: 45765 - RNA, 19 nt, Artificial Sequence
  Sense Oligo
ggaucugugggaguucugc

SEQ ID NO: 45766 - RNA, 19 nt, Artificial Sequence
  Antisense Oligo
gcagaacucccacagaucc

SEQ ID NO: 45767 - RNA, 19 nt, Artificial Sequence
  Sense Oligo
gaucugugggaguucugca

SEQ ID NO: 45768 - RNA, 19 nt, Artificial Sequence
  Antisense Oligo
ugcagaacucccacagauc

SEQ ID NO: 45769 - RNA, 19 nt, Artificial Sequence
  Sense Oligo
ugugggaguucugcagcga

SEQ ID NO: 45770 - RNA, 19 nt, Artificial Sequence
  Antisense Oligo
ucgcugcagaacucccaca

SEQ ID NO: 45771 - RNA, 19 nt, Artificial Sequence
  Sense Oligo
gugggaguucugcagcgaa

SEQ ID NO: 45772 - RNA, 19 nt, Artificial Sequence
  Antisense Oligo
uucgcugcagaacucccac

SEQ ID NO: 45773 - RNA, 19 nt, Artificial Sequence
  Sense Oligo
cuuuccaaagaccuuacca

SEQ ID NO: 45774 - RNA, 19 nt, Artificial Sequence
  Antisense Oligo
ugguaaggucuuuggaaag

SEQ ID NO: 45775 - RNA, 19 nt, Artificial Sequence
  Sense Oligo
uuuccaaagaccuuaccag

SEQ ID NO: 45776 - RNA, 19 nt, Artificial Sequence
  Antisense Oligo
cugguaaggucuuuggaaa

SEQ ID NO: 45777 - RNA, 19 nt, Artificial Sequence
  Sense Oligo
uuccaaagaccuuaccagu

SEQ ID NO: 45778 - RNA, 19 nt, Artificial Sequence
  Antisense Oligo
acugguaaggucuuuggaa

SEQ ID NO: 45779 - RNA, 19 nt, Artificial Sequence
  Sense Oligo
uccaaagaccuuaccagua

SEQ ID NO: 45780 - RNA, 19 nt, Artificial Sequence
  Antisense Oligo
uacugguaaggucuuugga

SEQ ID NO: 45781 - RNA, 19 nt, Artificial Sequence
  Sense Oligo
ccaaagaccuuaccaguau

SEQ ID NO: 45782 - RNA, 19 nt, Artificial Sequence
  Antisense Oligo
auacugguaaggucuuugg

SEQ ID NO: 45783 - RNA, 19 nt, Artificial Sequence
  Sense Oligo
agaccuuaccaguauuuaa

SEQ ID NO: 45784 - RNA, 19 nt, Artificial Sequence
  Antisense Oligo
uuaaauacugguaaggucu

SEQ ID NO: 45785 - RNA, 19 nt, Artificial Sequence
  Sense Oligo
uaccaguauuuaagacgau

SEQ ID NO: 45786 - RNA, 19 nt, Artificial Sequence
  Antisense Oligo
aucgucuuaaauacuggua

SEQ ID NO: 45787 - RNA, 19 nt, Artificial Sequence
  Sense Oligo
accaguauuuaagacgauu

SEQ ID NO: 45788 - RNA, 19 nt, Artificial Sequence
  Antisense Oligo
aaucgucuuaaauacuggu

SEQ ID NO: 45789 - RNA, 19 nt, Artificial Sequence
  Sense Oligo
ccaguauuuaagacgauuc

SEQ ID NO: 45790 - RNA, 19 nt, Artificial Sequence
  Antisense Oligo
gaaucgucuuaaauacugg

SEQ ID NO: 45791 - RNA, 19 nt, Artificial Sequence
  Sense Oligo
caguauuuaagacgauuca

SEQ ID NO: 45792 - RNA, 19 nt, Artificial Sequence
  Antisense Oligo
ugaaucgucuuaaauacug

SEQ ID NO: 45793 - RNA, 19 nt, Artificial Sequence
  Sense Oligo
ccaagaccuagacacguuu

SEQ ID NO: 45794 - RNA, 19 nt, Artificial Sequence
  Antisense Oligo
aaacgugucuaggucuugg

SEQ ID NO: 45795 - RNA, 19 nt, Artificial Sequence
  Sense Oligo
caagaccuagacacguuuc

SEQ ID NO: 45796 - RNA, 19 nt, Artificial Sequence
  Antisense Oligo
gaaacgugucuaggucuug

SEQ ID NO: 45797 - RNA, 19 nt, Artificial Sequence
  Sense Oligo
guaucaagaaggcucuguc

SEQ ID NO: 45798 - RNA, 19 nt, Artificial Sequence
  Antisense Oligo
gacagagccuucuugauac

SEQ ID NO: 45799 - RNA, 19 nt, Artificial Sequence
  Sense Oligo
caagaaggcucugucgaag

SEQ ID NO: 45800 - RNA, 19 nt, Artificial Sequence
  Antisense Oligo
cuucgacagagccuucuug

SEQ ID NO: 45801 - RNA, 19 nt, Artificial Sequence
  Sense Oligo
aagaaggcucugucgaagg

SEQ ID NO: 45802 - RNA, 19 nt, Artificial Sequence
  Antisense Oligo
ccuucgacagagccuucuu

SEQ ID NO: 45803 - RNA, 19 nt, Artificial Sequence
  Sense Oligo
agaaggcucugucgaaggc

SEQ ID NO: 45804 - RNA, 19 nt, Artificial Sequence
  Antisense Oligo
gccuucgacagagccuucu

SEQ ID NO: 45805 - RNA, 19 nt, Artificial Sequence
  Sense Oligo
gaaggcucugucgaaggca

SEQ ID NO: 45806 - RNA, 19 nt, Artificial Sequence
  Antisense Oligo
ugccuucgacagagccuuc

SEQ ID NO: 45807 - RNA, 19 nt, Artificial Sequence
  Sense Oligo
aaggcucugucgaaggcac

SEQ ID NO: 45808 - RNA, 19 nt, Artificial Sequence
  Antisense Oligo
gugccuucgacagagccuu

SEQ ID NO: 45809 - RNA, 19 nt, Artificial Sequence
  Sense Oligo
aggcucugucgaaggcacc

SEQ ID NO: 45810 - RNA, 19 nt, Artificial Sequence
  Antisense Oligo
ggugccuucgacagagccu

SEQ ID NO: 45811 - RNA, 19 nt, Artificial Sequence
  Sense Oligo
cagcauuuccuguuucacu

SEQ ID NO: 45812 - RNA, 19 nt, Artificial Sequence
  Antisense Oligo
agugaaacaggaaaugcug

SEQ ID NO: 45813 - RNA, 19 nt, Artificial Sequence
  Sense Oligo
gcauuuccuguuucacugc

SEQ ID NO: 45814 - RNA, 19 nt, Artificial Sequence
  Antisense Oligo
gcagugaaacaggaaaugc

SEQ ID NO: 45815 - RNA, 19 nt, Artificial Sequence
  Sense Oligo
cauuuccuguuucacugcg

SEQ ID NO: 45816 - RNA, 19 nt, Artificial Sequence
  Antisense Oligo
cgcagugaaacaggaaaug

SEQ ID NO: 45817 - RNA, 19 nt, Artificial Sequence
  Sense Oligo
auuuccuguuucacugcgg

SEQ ID NO: 45818 - RNA, 19 nt, Artificial Sequence
  Antisense Oligo
ccgcagugaaacaggaaau

SEQ ID NO: 45819 - RNA, 19 nt, Artificial Sequence
  Sense Oligo
uuuccuguuucacugcggg

SEQ ID NO: 45820 - RNA, 19 nt, Artificial Sequence
  Antisense Oligo
cccgcagugaaacaggaaa

SEQ ID NO: 45821 - RNA, 19 nt, Artificial Sequence
  Sense Oligo
auccuggucagagcuucgg

SEQ ID NO: 45822 - RNA, 19 nt, Artificial Sequence
  Antisense Oligo
ccgaagcucugaccaggau

SEQ ID NO: 45823 - RNA, 19 nt, Artificial Sequence
  Sense Oligo
uccuggucagagcuucgga

SEQ ID NO: 45824 - RNA, 19 nt, Artificial Sequence
  Antisense Oligo
uccgaagcucugaccagga

SEQ ID NO: 45825 - RNA, 19 nt, Artificial Sequence
  Sense Oligo
ccuggucagagcuucggaa

SEQ ID NO: 45826 - RNA, 19 nt, Artificial Sequence
  Antisense Oligo
uuccgaagcucugaccagg

SEQ ID NO: 45827 - RNA, 19 nt, Artificial Sequence
  Sense Oligo
ugcucgguuccugaauuau

SEQ ID NO: 45828 - RNA, 19 nt, Artificial Sequence
  Antisense Oligo
auaauucaggaaccgagca

SEQ ID NO: 45829 - RNA, 19 nt, Artificial Sequence
  Sense Oligo
gcucgguuccugaauuauc

SEQ ID NO: 45830 - RNA, 19 nt, Artificial Sequence
  Antisense Oligo
gauaauucaggaaccgagc

SEQ ID NO: 45831 - RNA, 19 nt, Artificial Sequence
  Sense Oligo
cucgguuccugaauuauca

SEQ ID NO: 45832 - RNA, 19 nt, Artificial Sequence
  Antisense Oligo
ugauaauucaggaaccgag

SEQ ID NO: 45833 - RNA, 19 nt, Artificial Sequence
  Sense Oligo
gauugugaggccucucucu

SEQ ID NO: 45834 - RNA, 19 nt, Artificial Sequence
  Antisense Oligo
agagagaggccucacaauc

SEQ ID NO: 45835 - RNA, 19 nt, Artificial Sequence
  Sense Oligo
auugugaggccucucucuu

SEQ ID NO: 45836 - RNA, 19 nt, Artificial Sequence
  Antisense Oligo
aagagagaggccucacaau

SEQ ID NO: 45837 - RNA, 19 nt, Artificial Sequence
  Sense Oligo
ucucucuucugcaauccga

SEQ ID NO: 45838 - RNA, 19 nt, Artificial Sequence
  Antisense Oligo
ucggauugcagaagagaga

SEQ ID NO: 45839 - RNA, 19 nt, Artificial Sequence
  Sense Oligo
cucucuucugcaauccgag

SEQ ID NO: 45840 - RNA, 19 nt, Artificial Sequence
  Antisense Oligo
cucggauugcagaagagag

SEQ ID NO: 45841 - RNA, 19 nt, Artificial Sequence
  Sense Oligo
ucucuucugcaauccgagu

SEQ ID NO: 45842 - RNA, 19 nt, Artificial Sequence
  Antisense Oligo
acucggauugcagaagaga

SEQ ID NO: 45843 - RNA, 19 nt, Artificial Sequence
  Sense Oligo
cucuucugcaauccgaguu

SEQ ID NO: 45844 - RNA, 19 nt, Artificial Sequence
  Antisense Oligo
aacucggauugcagaagag

SEQ ID NO: 45845 - RNA, 19 nt, Artificial Sequence
  Sense Oligo
ucuucugcaauccgaguuu

SEQ ID NO: 45846 - RNA, 19 nt, Artificial Sequence
  Antisense Oligo
aaacucggauugcagaaga

SEQ ID NO: 45847 - RNA, 19 nt, Artificial Sequence
  Sense Oligo
cuucugcaauccgaguuuu

SEQ ID NO: 45848 - RNA, 19 nt, Artificial Sequence
  Antisense Oligo
aaaacucggauugcagaag

SEQ ID NO: 45849 - RNA, 19 nt, Artificial Sequence
  Sense Oligo
uucugcaauccgaguuuua

SEQ ID NO: 45850 - RNA, 19 nt, Artificial Sequence
  Antisense Oligo
uaaaacucggauugcagaa

SEQ ID NO: 45851 - RNA, 19 nt, Artificial Sequence
  Sense Oligo
ucugcaauccgaguuuuau

SEQ ID NO: 45852 - RNA, 19 nt, Artificial Sequence
  Antisense Oligo
auaaaacucggauugcaga

SEQ ID NO: 45853 - RNA, 19 nt, Artificial Sequence
  Sense Oligo
cugcaauccgaguuuuauu

SEQ ID NO: 45854 - RNA, 19 nt, Artificial Sequence
  Antisense Oligo
aauaaaacucggauugcag

SEQ ID NO: 45855 - RNA, 19 nt, Artificial Sequence
  Sense Oligo
auccgaguuuuauuggcga

SEQ ID NO: 45856 - RNA, 19 nt, Artificial Sequence
  Antisense Oligo
ucgccaauaaaacucggau

SEQ ID NO: 45857 - RNA, 19 nt, Artificial Sequence
  Sense Oligo
uccgaguuuuauuggcgac

SEQ ID NO: 45858 - RNA, 19 nt, Artificial Sequence
  Antisense Oligo
gucgccaauaaaacucgga

SEQ ID NO: 45859 - RNA, 19 nt, Artificial Sequence
  Sense Oligo
ccgaguuuuauuggcgaca

SEQ ID NO: 45860 - RNA, 19 nt, Artificial Sequence
  Antisense Oligo
ugucgccaauaaaacucgg

SEQ ID NO: 45861 - RNA, 19 nt, Artificial Sequence
  Sense Oligo
cgaguuuuauuggcgacac

SEQ ID NO: 45862 - RNA, 19 nt, Artificial Sequence
  Antisense Oligo
gugucgccaauaaaacucg

SEQ ID NO: 45863 - RNA, 19 nt, Artificial Sequence
  Sense Oligo
gggcuucaagaaguucgug

SEQ ID NO: 45864 - RNA, 19 nt, Artificial Sequence
  Antisense Oligo
cacgaacuucuugaagccc

SEQ ID NO: 45865 - RNA, 19 nt, Artificial Sequence
  Sense Oligo
ggcuucaagaaguucgugg

SEQ ID NO: 45866 - RNA, 19 nt, Artificial Sequence
  Antisense Oligo
ccacgaacuucuugaagcc

SEQ ID NO: 45867 - RNA, 19 nt, Artificial Sequence
  Sense Oligo
gcuucaagaaguucguggu

SEQ ID NO: 45868 - RNA, 19 nt, Artificial Sequence
  Antisense Oligo
accacgaacuucuugaagc

SEQ ID NO: 45869 - RNA, 19 nt, Artificial Sequence
  Sense Oligo
uucaagaaguucgugguga

SEQ ID NO: 45870 - RNA, 19 nt, Artificial Sequence
  Antisense Oligo
ucaccacgaacuucuugaa

SEQ ID NO: 45871 - RNA, 19 nt, Artificial Sequence
  Sense Oligo
ucaagaaguucguggugac

SEQ ID NO: 45872 - RNA, 19 nt, Artificial Sequence
  Antisense Oligo
gucaccacgaacuucuuga

SEQ ID NO: 45873 - RNA, 19 nt, Artificial Sequence
  Sense Oligo
caagaaguucguggugacc

SEQ ID NO: 45874 - RNA, 19 nt, Artificial Sequence
  Antisense Oligo
ggucaccacgaacuucuug

SEQ ID NO: 45875 - RNA, 19 nt, Artificial Sequence
  Sense Oligo
guucguggugaccuucaug

SEQ ID NO: 45876 - RNA, 19 nt, Artificial Sequence
  Antisense Oligo
caugaaggucaccacgaac

SEQ ID NO: 45877 - RNA, 19 nt, Artificial Sequence
  Sense Oligo
ccuucaugaucuuuauggc

SEQ ID NO: 45878 - RNA, 19 nt, Artificial Sequence
  Antisense Oligo
gccauaaagaucaugaagg

SEQ ID NO: 45879 - RNA, 19 nt, Artificial Sequence
  Sense Oligo
cuucaugaucuuuauggca

SEQ ID NO: 45880 - RNA, 19 nt, Artificial Sequence
  Antisense Oligo
ugccauaaagaucaugaag

SEQ ID NO: 45881 - RNA, 19 nt, Artificial Sequence
  Sense Oligo
uucaugaucuuuauggcaa

SEQ ID NO: 45882 - RNA, 19 nt, Artificial Sequence
  Antisense Oligo
uugccauaaagaucaugaa

SEQ ID NO: 45883 - RNA, 19 nt, Artificial Sequence
  Sense Oligo
ucaugaucuuuauggcaag

SEQ ID NO: 45884 - RNA, 19 nt, Artificial Sequence
  Antisense Oligo
cuugccauaaagaucauga

SEQ ID NO: 45885 - RNA, 19 nt, Artificial Sequence
  Sense Oligo
agauuuugccacaccauca

SEQ ID NO: 45886 - RNA, 19 nt, Artificial Sequence
  Antisense Oligo
ugaugguguggcaaaaucu

SEQ ID NO: 45887 - RNA, 19 nt, Artificial Sequence
  Sense Oligo
gauuuugccacaccaucac

SEQ ID NO: 45888 - RNA, 19 nt, Artificial Sequence
  Antisense Oligo
gugaugguguggcaaaauc

SEQ ID NO: 45889 - RNA, 19 nt, Artificial Sequence
  Sense Oligo
auuuugccacaccaucacu

SEQ ID NO: 45890 - RNA, 19 nt, Artificial Sequence
  Antisense Oligo
agugaugguguggcaaaau

SEQ ID NO: 45891 - RNA, 19 nt, Artificial Sequence
  Sense Oligo
uuuugccacaccaucacuc

SEQ ID NO: 45892 - RNA, 19 nt, Artificial Sequence
  Antisense Oligo
gagugaugguguggcaaaa

SEQ ID NO: 45893 - RNA, 19 nt, Artificial Sequence
  Sense Oligo
ccacaccaucacuccacac

SEQ ID NO: 45894 - RNA, 19 nt, Artificial Sequence
  Antisense Oligo
guguggagugauggugugg

SEQ ID NO: 45895 - RNA, 19 nt, Artificial Sequence
  Sense Oligo
accaucacuccacaccucu

SEQ ID NO: 45896 - RNA, 19 nt, Artificial Sequence
  Antisense Oligo
agagguguggagugauggu

SEQ ID NO: 45897 - RNA, 19 nt, Artificial Sequence
  Sense Oligo
ccaucacuccacaccucug

SEQ ID NO: 45898 - RNA, 19 nt, Artificial Sequence
  Antisense Oligo
cagagguguggagugaugg

SEQ ID NO: 45899 - RNA, 19 nt, Artificial Sequence
  Sense Oligo
caucacuccacaccucuga

SEQ ID NO: 45900 - RNA, 19 nt, Artificial Sequence
  Antisense Oligo
ucagagguguggagugaug

SEQ ID NO: 45901 - RNA, 19 nt, Artificial Sequence
  Sense Oligo
aucacuccacaccucugac

SEQ ID NO: 45902 - RNA, 19 nt, Artificial Sequence
  Antisense Oligo
gucagagguguggagugau

SEQ ID NO: 45903 - RNA, 19 nt, Artificial Sequence
  Sense Oligo
gggaagcacauggucacca

SEQ ID NO: 45904 - RNA, 19 nt, Artificial Sequence
  Antisense Oligo
uggugaccaugugcuuccc

SEQ ID NO: 45905 - RNA, 19 nt, Artificial Sequence
  Sense Oligo
ggguuagggaagaagaucu

SEQ ID NO: 45906 - RNA, 19 nt, Artificial Sequence
  Antisense Oligo
agaucuucuucccuaaccc

SEQ ID NO: 45907 - RNA, 19 nt, Artificial Sequence
  Sense Oligo
gguuagggaagaagaucua

SEQ ID NO: 45908 - RNA, 19 nt, Artificial Sequence
  Antisense Oligo
uagaucuucuucccuaacc

SEQ ID NO: 45909 - RNA, 19 nt, Artificial Sequence
  Sense Oligo
guuagggaagaagaucuag

SEQ ID NO: 45910 - RNA, 19 nt, Artificial Sequence
  Antisense Oligo
cuagaucuucuucccuaac

SEQ ID NO: 45911 - RNA, 19 nt, Artificial Sequence
  Sense Oligo
uuagggaagaagaucuagc

SEQ ID NO: 45912 - RNA, 19 nt, Artificial Sequence
  Antisense Oligo
gcuagaucuucuucccuaa

SEQ ID NO: 45913 - RNA, 19 nt, Artificial Sequence
  Sense Oligo
uagggaagaagaucuagcg

SEQ ID NO: 45914 - RNA, 19 nt, Artificial Sequence
  Antisense Oligo
cgcuagaucuucuucccua

SEQ ID NO: 45915 - RNA, 19 nt, Artificial Sequence
  Sense Oligo
agggaagaagaucuagcgc

SEQ ID NO: 45916 - RNA, 19 nt, Artificial Sequence
  Antisense Oligo
gcgcuagaucuucuucccu

SEQ ID NO: 45917 - RNA, 19 nt, Artificial Sequence
  Sense Oligo
gggaagaagaucuagcgcc

SEQ ID NO: 45918 - RNA, 19 nt, Artificial Sequence
  Antisense Oligo
ggcgcuagaucuucuuccc

SEQ ID NO: 45919 - RNA, 19 nt, Artificial Sequence
  Sense Oligo
ggaagaggugggagucgga

SEQ ID NO: 45920 - RNA, 19 nt, Artificial Sequence
  Antisense Oligo
uccgacucccaccucuucc

SEQ ID NO: 45921 - RNA, 19 nt, Artificial Sequence
  Sense Oligo
gaagaggugggagucggag

SEQ ID NO: 45922 - RNA, 19 nt, Artificial Sequence
  Antisense Oligo
cuccgacucccaccucuuc

SEQ ID NO: 45923 - RNA, 19 nt, Artificial Sequence
  Sense Oligo
aagaggugggagucggagc

SEQ ID NO: 45924 - RNA, 19 nt, Artificial Sequence
  Antisense Oligo
gcuccgacucccaccucuu

SEQ ID NO: 45925 - RNA, 19 nt, Artificial Sequence
  Sense Oligo
gagucggagccucacccau

SEQ ID NO: 45926 - RNA, 19 nt, Artificial Sequence
  Antisense Oligo
augggugaggcuccgacuc

SEQ ID NO: 45927 - RNA, 19 nt, Artificial Sequence
  Sense Oligo
agucggagccucacccaua

SEQ ID NO: 45928 - RNA, 19 nt, Artificial Sequence
  Antisense Oligo
uaugggugaggcuccgacu

SEQ ID NO: 45929 - RNA, 19 nt, Artificial Sequence
  Sense Oligo
gucggagccucacccauac

SEQ ID NO: 45930 - RNA, 19 nt, Artificial Sequence
  Antisense Oligo
guaugggugaggcuccgac

SEQ ID NO: 45931 - RNA, 19 nt, Artificial Sequence
  Sense Oligo
ucggagccucacccauacg

SEQ ID NO: 45932 - RNA, 19 nt, Artificial Sequence
  Antisense Oligo
cguaugggugaggcuccga

SEQ ID NO: 45933 - RNA, 19 nt, Artificial Sequence
  Sense Oligo
cggagccucacccauacgu

SEQ ID NO: 45934 - RNA, 19 nt, Artificial Sequence
  Antisense Oligo
acguaugggugaggcuccg

SEQ ID NO: 45935 - RNA, 19 nt, Artificial Sequence
  Sense Oligo
ggagccucacccauacguu

SEQ ID NO: 45936 - RNA, 19 nt, Artificial Sequence
  Antisense Oligo
aacguaugggugaggcucc

SEQ ID NO: 45937 - RNA, 19 nt, Artificial Sequence
  Sense Oligo
gagccucacccauacguuu

SEQ ID NO: 45938 - RNA, 19 nt, Artificial Sequence
  Antisense Oligo
aaacguaugggugaggcuc

SEQ ID NO: 45939 - RNA, 19 nt, Artificial Sequence
  Sense Oligo
agccucacccauacguuuu

SEQ ID NO: 45940 - RNA, 19 nt, Artificial Sequence
  Antisense Oligo
aaaacguaugggugaggcu

SEQ ID NO: 45941 - RNA, 19 nt, Artificial Sequence
  Sense Oligo
gccucacccauacguuuuc

SEQ ID NO: 45942 - RNA, 19 nt, Artificial Sequence
  Antisense Oligo
gaaaacguaugggugaggc

SEQ ID NO: 45943 - RNA, 19 nt, Artificial Sequence
  Sense Oligo
ccucacccauacguuuucu

SEQ ID NO: 45944 - RNA, 19 nt, Artificial Sequence
  Antisense Oligo
agaaaacguaugggugagg

SEQ ID NO: 45945 - RNA, 19 nt, Artificial Sequence
  Sense Oligo
ucacccauacguuuucuuc

SEQ ID NO: 45946 - RNA, 19 nt, Artificial Sequence
  Antisense Oligo
gaagaaaacguauggguga

SEQ ID NO: 45947 - RNA, 19 nt, Artificial Sequence
  Sense Oligo
ccauacguuuucuucaaug

SEQ ID NO: 45948 - RNA, 19 nt, Artificial Sequence
  Antisense Oligo
cauugaagaaaacguaugg

SEQ ID NO: 45949 - RNA, 19 nt, Artificial Sequence
  Sense Oligo
cauacguuuucuucaauga

SEQ ID NO: 45950 - RNA, 19 nt, Artificial Sequence
  Antisense Oligo
ucauugaagaaaacguaug

SEQ ID NO: 45951 - RNA, 19 nt, Artificial Sequence
  Sense Oligo
auacguuuucuucaaugac

SEQ ID NO: 45952 - RNA, 19 nt, Artificial Sequence
  Antisense Oligo
gucauugaagaaaacguau

SEQ ID NO: 45953 - RNA, 19 nt, Artificial Sequence
  Sense Oligo
uacguuuucuucaaugacg

SEQ ID NO: 45954 - RNA, 19 nt, Artificial Sequence
  Antisense Oligo
cgucauugaagaaaacgua

SEQ ID NO: 45955 - RNA, 19 nt, Artificial Sequence
  Sense Oligo
acguuuucuucaaugacga

SEQ ID NO: 45956 - RNA, 19 nt, Artificial Sequence
  Antisense Oligo
ucgucauugaagaaaacgu

SEQ ID NO: 45957 - RNA, 19 nt, Artificial Sequence
  Sense Oligo
cguuuucuucaaugacgac

SEQ ID NO: 45958 - RNA, 19 nt, Artificial Sequence
  Antisense Oligo
gucgucauugaagaaaacg

SEQ ID NO: 45959 - RNA, 19 nt, Artificial Sequence
  Sense Oligo
guuuucuucaaugacgacc

SEQ ID NO: 45960 - RNA, 19 nt, Artificial Sequence
  Antisense Oligo
ggucgucauugaagaaaac

SEQ ID NO: 45961 - RNA, 19 nt, Artificial Sequence
  Sense Oligo
uuuucuucaaugacgacca

SEQ ID NO: 45962 - RNA, 19 nt, Artificial Sequence
  Antisense Oligo
uggucgucauugaagaaaa

SEQ ID NO: 45963 - RNA, 19 nt, Artificial Sequence
  Sense Oligo
uuucuucaaugacgaccac

SEQ ID NO: 45964 - RNA, 19 nt, Artificial Sequence
  Antisense Oligo
guggucgucauugaagaaa

SEQ ID NO: 45965 - RNA, 19 nt, Artificial Sequence
  Sense Oligo
uucuucaaugacgaccaca

SEQ ID NO: 45966 - RNA, 19 nt, Artificial Sequence
  Antisense Oligo
uguggucgucauugaagaa

SEQ ID NO: 45967 - RNA, 19 nt, Artificial Sequence
  Sense Oligo
ucuucaaugacgaccacac

SEQ ID NO: 45968 - RNA, 19 nt, Artificial Sequence
  Antisense Oligo
guguggucgucauugaaga

SEQ ID NO: 45969 - RNA, 19 nt, Artificial Sequence
  Sense Oligo
ugacauucaucggcuucca

SEQ ID NO: 45970 - RNA, 19 nt, Artificial Sequence
  Antisense Oligo
uggaagccgaugaauguca

SEQ ID NO: 45971 - RNA, 19 nt, Artificial Sequence
  Sense Oligo
gacauucaucggcuuccau

SEQ ID NO: 45972 - RNA, 19 nt, Artificial Sequence
  Antisense Oligo
auggaagccgaugaauguc

SEQ ID NO: 45973 - RNA, 19 nt, Artificial Sequence
  Sense Oligo
acauucaucggcuuccauc

SEQ ID NO: 45974 - RNA, 19 nt, Artificial Sequence
  Antisense Oligo
gauggaagccgaugaaugu

SEQ ID NO: 45975 - RNA, 19 nt, Artificial Sequence
  Sense Oligo
cauucaucggcuuccaucu

SEQ ID NO: 45976 - RNA, 19 nt, Artificial Sequence
  Antisense Oligo
agauggaagccgaugaaug

SEQ ID NO: 45977 - RNA, 19 nt, Artificial Sequence
  Sense Oligo
auucaucggcuuccaucug

SEQ ID NO: 45978 - RNA, 19 nt, Artificial Sequence
  Antisense Oligo
cagauggaagccgaugaau

SEQ ID NO: 45979 - RNA, 19 nt, Artificial Sequence
  Sense Oligo
uucaucggcuuccaucugc

SEQ ID NO: 45980 - RNA, 19 nt, Artificial Sequence
  Antisense Oligo
gcagauggaagccgaugaa

SEQ ID NO: 45981 - RNA, 19 nt, Artificial Sequence
  Sense Oligo
ucaucggcuuccaucugca

SEQ ID NO: 45982 - RNA, 19 nt, Artificial Sequence
  Antisense Oligo
ugcagauggaagccgauga

SEQ ID NO: 45983 - RNA, 19 nt, Artificial Sequence
  Sense Oligo
gcuuccaucugcagcccaa

SEQ ID NO: 45984 - RNA, 19 nt, Artificial Sequence
  Antisense Oligo
uugggcugcagauggaagc

SEQ ID NO: 45985 - RNA, 19 nt, Artificial Sequence
  Sense Oligo
cuuccaucugcagcccaac

SEQ ID NO: 45986 - RNA, 19 nt, Artificial Sequence
  Antisense Oligo
guugggcugcagauggaag

SEQ ID NO: 45987 - RNA, 19 nt, Artificial Sequence
  Sense Oligo
ucacuugacugggaagguc

SEQ ID NO: 45988 - RNA, 19 nt, Artificial Sequence
  Antisense Oligo
gaccuucccagucaaguga

SEQ ID NO: 45989 - RNA, 19 nt, Artificial Sequence
  Sense Oligo
gacugggaaggucaucaag

SEQ ID NO: 45990 - RNA, 19 nt, Artificial Sequence
  Antisense Oligo
cuugaugaccuucccaguc

SEQ ID NO: 45991 - RNA, 19 nt, Artificial Sequence
  Sense Oligo
acugggaaggucaucaaga

SEQ ID NO: 45992 - RNA, 19 nt, Artificial Sequence
  Antisense Oligo
ucuugaugaccuucccagu

SEQ ID NO: 45993 - RNA, 19 nt, Artificial Sequence
  Sense Oligo
cugggaaggucaucaagag

SEQ ID NO: 45994 - RNA, 19 nt, Artificial Sequence
  Antisense Oligo
cucuugaugaccuucccag

SEQ ID NO: 45995 - RNA, 19 nt, Artificial Sequence
  Sense Oligo
agacgucaugaccagggac

SEQ ID NO: 45996 - RNA, 19 nt, Artificial Sequence
  Antisense Oligo
gucccuggucaugacgucu

SEQ ID NO: 45997 - RNA, 19 nt, Artificial Sequence
  Sense Oligo
gacgucaugaccagggacc

SEQ ID NO: 45998 - RNA, 19 nt, Artificial Sequence
  Antisense Oligo
ggucccuggucaugacguc

SEQ ID NO: 45999 - RNA, 19 nt, Artificial Sequence
  Sense Oligo
acgucaugaccagggaccu

SEQ ID NO: 46000 - RNA, 19 nt, Artificial Sequence
  Antisense Oligo
aggucccuggucaugacgu

SEQ ID NO: 46001 - RNA, 19 nt, Artificial Sequence
  Sense Oligo
cgucaugaccagggaccug

SEQ ID NO: 46002 - RNA, 19 nt, Artificial Sequence
  Antisense Oligo
caggucccuggucaugacg

SEQ ID NO: 46003 - RNA, 19 nt, Artificial Sequence
  Sense Oligo
gucaugaccagggaccugu

SEQ ID NO: 46004 - RNA, 19 nt, Artificial Sequence
  Antisense Oligo
acaggucccuggucaugac

SEQ ID NO: 46005 - RNA, 19 nt, Artificial Sequence
  Sense Oligo
ucaugaccagggaccugua

SEQ ID NO: 46006 - RNA, 19 nt, Artificial Sequence
  Antisense Oligo
uacaggucccuggucauga

SEQ ID NO: 46007 - RNA, 19 nt, Artificial Sequence
  Sense Oligo
caugaccagggaccuguac

SEQ ID NO: 46008 - RNA, 19 nt, Artificial Sequence
  Antisense Oligo
guacaggucccuggucaug

SEQ ID NO: 46009 - RNA, 19 nt, Artificial Sequence
  Sense Oligo
augaccagggaccuguacc

SEQ ID NO: 46010 - RNA, 19 nt, Artificial Sequence
  Antisense Oligo
gguacaggucccuggucau

SEQ ID NO: 46011 - RNA, 19 nt, Artificial Sequence
  Sense Oligo
ugcuccagagggugcccuu

SEQ ID NO: 46012 - RNA, 19 nt, Artificial Sequence
  Antisense Oligo
aagggcacccucuggagca

SEQ ID NO: 46013 - RNA, 19 nt, Artificial Sequence
  Sense Oligo
uccagagggugcccuucaa

SEQ ID NO: 46014 - RNA, 19 nt, Artificial Sequence
  Antisense Oligo
uugaagggcacccucugga

SEQ ID NO: 46015 - RNA, 19 nt, Artificial Sequence
  Sense Oligo
ccagagggugcccuucaau

SEQ ID NO: 46016 - RNA, 19 nt, Artificial Sequence
  Antisense Oligo
auugaagggcacccucugg

SEQ ID NO: 46017 - RNA, 19 nt, Artificial Sequence
  Sense Oligo
cagagggugcccuucaaug

SEQ ID NO: 46018 - RNA, 19 nt, Artificial Sequence
  Antisense Oligo
cauugaagggcacccucug

SEQ ID NO: 46019 - RNA, 19 nt, Artificial Sequence
  Sense Oligo
agagggugcccuucaaugu

SEQ ID NO: 46020 - RNA, 19 nt, Artificial Sequence
  Antisense Oligo
acauugaagggcacccucu

SEQ ID NO: 46021 - RNA, 19 nt, Artificial Sequence
  Sense Oligo
gagggugcccuucaauguc

SEQ ID NO: 46022 - RNA, 19 nt, Artificial Sequence
  Antisense Oligo
gacauugaagggcacccuc

SEQ ID NO: 46023 - RNA, 19 nt, Artificial Sequence
  Sense Oligo
agggugcccuucaaugucg

SEQ ID NO: 46024 - RNA, 19 nt, Artificial Sequence
  Antisense Oligo
cgacauugaagggcacccu

SEQ ID NO: 46025 - RNA, 19 nt, Artificial Sequence
  Sense Oligo
gggugcccuucaaugucga

SEQ ID NO: 46026 - RNA, 19 nt, Artificial Sequence
  Antisense Oligo
ucgacauugaagggcaccc

SEQ ID NO: 46027 - RNA, 19 nt, Artificial Sequence
  Sense Oligo
ggugcccuucaaugucgac

SEQ ID NO: 46028 - RNA, 19 nt, Artificial Sequence
  Antisense Oligo
gucgacauugaagggcacc

SEQ ID NO: 46029 - RNA, 19 nt, Artificial Sequence
  Sense Oligo
gugcccuucaaugucgacu

SEQ ID NO: 46030 - RNA, 19 nt, Artificial Sequence
  Antisense Oligo
agucgacauugaagggcac

SEQ ID NO: 46031 - RNA, 19 nt, Artificial Sequence
  Sense Oligo
ugcccuucaaugucgacuu

SEQ ID NO: 46032 - RNA, 19 nt, Artificial Sequence
  Antisense Oligo
aagucgacauugaagggca

SEQ ID NO: 46033 - RNA, 19 nt, Artificial Sequence
  Sense Oligo
gcccuucaaugucgacuuu

SEQ ID NO: 46034 - RNA, 19 nt, Artificial Sequence
  Antisense Oligo
aaagucgacauugaagggc

SEQ ID NO: 46035 - RNA, 19 nt, Artificial Sequence
  Sense Oligo
cccuucaaugucgacuuug

SEQ ID NO: 46036 - RNA, 19 nt, Artificial Sequence
  Antisense Oligo
caaagucgacauugaaggg

SEQ ID NO: 46037 - RNA, 19 nt, Artificial Sequence
  Sense Oligo
caaugucgacuuugauaaa

SEQ ID NO: 46038 - RNA, 19 nt, Artificial Sequence
  Antisense Oligo
uuuaucaaagucgacauug

SEQ ID NO: 46039 - RNA, 19 nt, Artificial Sequence
  Sense Oligo
ggcucugccugaccuuagg

SEQ ID NO: 46040 - RNA, 19 nt, Artificial Sequence
  Antisense Oligo
ccuaaggucaggcagagcc

SEQ ID NO: 46041 - RNA, 19 nt, Artificial Sequence
  Sense Oligo
gcucugccugaccuuaggg

SEQ ID NO: 46042 - RNA, 19 nt, Artificial Sequence
  Antisense Oligo
cccuaaggucaggcagagc

SEQ ID NO: 46043 - RNA, 19 nt, Artificial Sequence
  Sense Oligo
cucugccugaccuuaggga

SEQ ID NO: 46044 - RNA, 19 nt, Artificial Sequence
  Antisense Oligo
ucccuaaggucaggcagag

SEQ ID NO: 46045 - RNA, 19 nt, Artificial Sequence
  Sense Oligo
gccugaccuuagggauccc

SEQ ID NO: 46046 - RNA, 19 nt, Artificial Sequence
  Antisense Oligo
gggaucccuaaggucaggc

SEQ ID NO: 46047 - RNA, 19 nt, Artificial Sequence
  Sense Oligo
uuaaaauccuugccaucga

SEQ ID NO: 46048 - RNA, 19 nt, Artificial Sequence
  Antisense Oligo
ucgauggcaaggauuuuaa

SEQ ID NO: 46049 - RNA, 19 nt, Artificial Sequence
  Sense Oligo
uaaaauccuugccaucgag

SEQ ID NO: 46050 - RNA, 19 nt, Artificial Sequence
  Antisense Oligo
cucgauggcaaggauuuua

SEQ ID NO: 46051 - RNA, 19 nt, Artificial Sequence
  Sense Oligo
agaugcgguuccggugugg

SEQ ID NO: 46052 - RNA, 19 nt, Artificial Sequence
  Antisense Oligo
ccacaccggaaccgcaucu

SEQ ID NO: 46053 - RNA, 19 nt, Artificial Sequence
  Sense Oligo
aaccaggcuuauuaaauuc

SEQ ID NO: 46054 - RNA, 19 nt, Artificial Sequence
  Antisense Oligo
gaauuuaauaagccugguu

SEQ ID NO: 46055 - RNA, 19 nt, Artificial Sequence
  Sense Oligo
accaggcuuauuaaauucc

SEQ ID NO: 46056 - RNA, 19 nt, Artificial Sequence
  Antisense Oligo
ggaauuuaauaagccuggu

SEQ ID NO: 46057 - RNA, 19 nt, Artificial Sequence
  Sense Oligo
ccaggcuuauuaaauuccu

SEQ ID NO: 46058 - RNA, 19 nt, Artificial Sequence
  Antisense Oligo
aggaauuuaauaagccugg

SEQ ID NO: 46059 - RNA, 19 nt, Artificial Sequence
  Sense Oligo
caggcuuauuaaauuccuu

SEQ ID NO: 46060 - RNA, 19 nt, Artificial Sequence
  Antisense Oligo
aaggaauuuaauaagccug

SEQ ID NO: 46061 - RNA, 19 nt, Artificial Sequence
  Sense Oligo
ggcuuauuaaauuccuuag

SEQ ID NO: 46062 - RNA, 19 nt, Artificial Sequence
  Antisense Oligo
cuaaggaauuuaauaagcc

SEQ ID NO: 46063 - RNA, 19 nt, Artificial Sequence
  Sense Oligo
gcuuauuaaauuccuuagc

SEQ ID NO: 46064 - RNA, 19 nt, Artificial Sequence
  Antisense Oligo
gcuaaggaauuuaauaagc

SEQ ID NO: 46065 - RNA, 19 nt, Artificial Sequence
  Sense Oligo
cuuauuaaauuccuuagcg

SEQ ID NO: 46066 - RNA, 19 nt, Artificial Sequence
  Antisense Oligo
cgcuaaggaauuuaauaag

SEQ ID NO: 46067 - RNA, 19 nt, Artificial Sequence
  Sense Oligo
uauuaaauuccuuagcgac

SEQ ID NO: 46068 - RNA, 19 nt, Artificial Sequence
  Antisense Oligo
gucgcuaaggaauuuaaua

SEQ ID NO: 46069 - RNA, 19 nt, Artificial Sequence
  Sense Oligo
auuaaauuccuuagcgacc

SEQ ID NO: 46070 - RNA, 19 nt, Artificial Sequence
  Antisense Oligo
ggucgcuaaggaauuuaau

SEQ ID NO: 46071 - RNA, 19 nt, Artificial Sequence
  Sense Oligo
uuaaauuccuuagcgaccu

SEQ ID NO: 46072 - RNA, 19 nt, Artificial Sequence
  Antisense Oligo
aggucgcuaaggaauuuaa

SEQ ID NO: 46073 - RNA, 19 nt, Artificial Sequence
  Sense Oligo
uaaauuccuuagcgaccug

SEQ ID NO: 46074 - RNA, 19 nt, Artificial Sequence
  Antisense Oligo
caggucgcuaaggaauuua

SEQ ID NO: 46075 - RNA, 19 nt, Artificial Sequence
  Sense Oligo
aaauuccuuagcgaccugc

SEQ ID NO: 46076 - RNA, 19 nt, Artificial Sequence
  Antisense Oligo
gcaggucgcuaaggaauuu

SEQ ID NO: 46077 - RNA, 19 nt, Artificial Sequence
  Sense Oligo
aauuccuuagcgaccugcg

SEQ ID NO: 46078 - RNA, 19 nt, Artificial Sequence
  Antisense Oligo
cgcaggucgcuaaggaauu

SEQ ID NO: 46079 - RNA, 19 nt, Artificial Sequence
  Sense Oligo
auuccuuagcgaccugcgg

SEQ ID NO: 46080 - RNA, 19 nt, Artificial Sequence
  Antisense Oligo
ccgcaggucgcuaaggaau

SEQ ID NO: 46081 - RNA, 19 nt, Artificial Sequence
  Sense Oligo
uuccuuagcgaccugcggc

SEQ ID NO: 46082 - RNA, 19 nt, Artificial Sequence
  Antisense Oligo
gccgcaggucgcuaaggaa

SEQ ID NO: 46083 - RNA, 19 nt, Artificial Sequence
  Sense Oligo
gugguaccaaugcugacac

SEQ ID NO: 46084 - RNA, 19 nt, Artificial Sequence
  Antisense Oligo
gugucagcauugguaccac

SEQ ID NO: 46085 - RNA, 19 nt, Artificial Sequence
  Sense Oligo
ugguaccaaugcugacacc

SEQ ID NO: 46086 - RNA, 19 nt, Artificial Sequence
  Antisense Oligo
ggugucagcauugguacca

SEQ ID NO: 46087 - RNA, 19 nt, Artificial Sequence
  Sense Oligo
gguaccaaugcugacacca

SEQ ID NO: 46088 - RNA, 19 nt, Artificial Sequence
  Antisense Oligo
uggugucagcauugguacc

SEQ ID NO: 46089 - RNA, 19 nt, Artificial Sequence
  Sense Oligo
guaccaaugcugacaccau

SEQ ID NO: 46090 - RNA, 19 nt, Artificial Sequence
  Antisense Oligo
auggugucagcauugguac

SEQ ID NO: 46091 - RNA, 19 nt, Artificial Sequence
  Sense Oligo
uaccaaugcugacaccaua

SEQ ID NO: 46092 - RNA, 19 nt, Artificial Sequence
  Antisense Oligo
uauggugucagcauuggua

SEQ ID NO: 46093 - RNA, 19 nt, Artificial Sequence
  Sense Oligo
accaaugcugacaccauaa

SEQ ID NO: 46094 - RNA, 19 nt, Artificial Sequence
  Antisense Oligo
uuauggugucagcauuggu

SEQ ID NO: 46095 - RNA, 19 nt, Artificial Sequence
  Sense Oligo
ccaaugcugacaccauaaa

SEQ ID NO: 46096 - RNA, 19 nt, Artificial Sequence
  Antisense Oligo
uuuauggugucagcauugg

SEQ ID NO: 46097 - RNA, 19 nt, Artificial Sequence
  Sense Oligo
caaugcugacaccauaaag

SEQ ID NO: 46098 - RNA, 19 nt, Artificial Sequence
  Antisense Oligo
cuuuauggugucagcauug

SEQ ID NO: 46099 - RNA, 19 nt, Artificial Sequence
  Sense Oligo
aaugcugacaccauaaagc

SEQ ID NO: 46100 - RNA, 19 nt, Artificial Sequence
  Antisense Oligo
gcuuuauggugucagcauu

SEQ ID NO: 46101 - RNA, 19 nt, Artificial Sequence
  Sense Oligo
ccauaaagcuggucaaggu

SEQ ID NO: 46102 - RNA, 19 nt, Artificial Sequence
  Antisense Oligo
accuugaccagcuuuaugg

SEQ ID NO: 46103 - RNA, 19 nt, Artificial Sequence
  Sense Oligo
cauaaagcuggucaaggug

SEQ ID NO: 46104 - RNA, 19 nt, Artificial Sequence
  Antisense Oligo
caccuugaccagcuuuaug

SEQ ID NO: 46105 - RNA, 19 nt, Artificial Sequence
  Sense Oligo
auaaagcuggucaaggugc

SEQ ID NO: 46106 - RNA, 19 nt, Artificial Sequence
  Antisense Oligo
gcaccuugaccagcuuuau

SEQ ID NO: 46107 - RNA, 19 nt, Artificial Sequence
  Sense Oligo
uaaagcuggucaaggugca

SEQ ID NO: 46108 - RNA, 19 nt, Artificial Sequence
  Antisense Oligo
ugcaccuugaccagcuuua

SEQ ID NO: 46109 - RNA, 19 nt, Artificial Sequence
  Sense Oligo
aaagcuggucaaggugcac

SEQ ID NO: 46110 - RNA, 19 nt, Artificial Sequence
  Antisense Oligo
gugcaccuugaccagcuuu

SEQ ID NO: 46111 - RNA, 19 nt, Artificial Sequence
  Sense Oligo
aagcuggucaaggugcacg

SEQ ID NO: 46112 - RNA, 19 nt, Artificial Sequence
  Antisense Oligo
cgugcaccuugaccagcuu

SEQ ID NO: 46113 - RNA, 19 nt, Artificial Sequence
  Sense Oligo
agcuggucaaggugcacgg

SEQ ID NO: 46114 - RNA, 19 nt, Artificial Sequence
  Antisense Oligo
ccgugcaccuugaccagcu

SEQ ID NO: 46115 - RNA, 19 nt, Artificial Sequence
  Sense Oligo
gcuggucaaggugcacgga

SEQ ID NO: 46116 - RNA, 19 nt, Artificial Sequence
  Antisense Oligo
uccgugcaccuugaccagc

SEQ ID NO: 46117 - RNA, 19 nt, Artificial Sequence
  Sense Oligo
cuggucaaggugcacggag

SEQ ID NO: 46118 - RNA, 19 nt, Artificial Sequence
  Antisense Oligo
cuccgugcaccuugaccag

SEQ ID NO: 46119 - RNA, 19 nt, Artificial Sequence
  Sense Oligo
uggucaaggugcacggagg

SEQ ID NO: 46120 - RNA, 19 nt, Artificial Sequence
  Antisense Oligo
ccuccgugcaccuugacca

SEQ ID NO: 46121 - RNA, 19 nt, Artificial Sequence
  Sense Oligo
ggucaaggugcacggagga

SEQ ID NO: 46122 - RNA, 19 nt, Artificial Sequence
  Antisense Oligo
uccuccgugcaccuugacc

SEQ ID NO: 46123 - RNA, 19 nt, Artificial Sequence
  Sense Oligo
caacugcagacaugaucua

SEQ ID NO: 46124 - RNA, 19 nt, Artificial Sequence
  Antisense Oligo
uagaucaugucugcaguug

SEQ ID NO: 46125 - RNA, 19 nt, Artificial Sequence
  Sense Oligo
augaucuacuccagaguca

SEQ ID NO: 46126 - RNA, 19 nt, Artificial Sequence
  Antisense Oligo
ugacucuggaguagaucau

SEQ ID NO: 46127 - RNA, 19 nt, Artificial Sequence
  Sense Oligo
uccagagucagggaggcug

SEQ ID NO: 46128 - RNA, 19 nt, Artificial Sequence
  Antisense Oligo
cagccucccugacucugga

SEQ ID NO: 46129 - RNA, 19 nt, Artificial Sequence
  Sense Oligo
acaucaguuggacaccauc

SEQ ID NO: 46130 - RNA, 19 nt, Artificial Sequence
  Antisense Oligo
gaugguguccaacugaugu

SEQ ID NO: 46131 - RNA, 19 nt, Artificial Sequence
  Sense Oligo
caucaguuggacaccaucu

SEQ ID NO: 46132 - RNA, 19 nt, Artificial Sequence
  Antisense Oligo
agaugguguccaacugaug

SEQ ID NO: 46133 - RNA, 19 nt, Artificial Sequence
  Sense Oligo
aucaguuggacaccaucuu

SEQ ID NO: 46134 - RNA, 19 nt, Artificial Sequence
  Antisense Oligo
aagaugguguccaacugau

SEQ ID NO: 46135 - RNA, 19 nt, Artificial Sequence
  Sense Oligo
ucaguuggacaccaucuug

SEQ ID NO: 46136 - RNA, 19 nt, Artificial Sequence
  Antisense Oligo
caagaugguguccaacuga

SEQ ID NO: 46137 - RNA, 19 nt, Artificial Sequence
  Sense Oligo
caguuggacaccaucuugu

SEQ ID NO: 46138 - RNA, 19 nt, Artificial Sequence
  Antisense Oligo
acaagaugguguccaacug

SEQ ID NO: 46139 - RNA, 19 nt, Artificial Sequence
  Sense Oligo
aguuggacaccaucuuguu

SEQ ID NO: 46140 - RNA, 19 nt, Artificial Sequence
  Antisense Oligo
aacaagaugguguccaacu

SEQ ID NO: 46141 - RNA, 19 nt, Artificial Sequence
  Sense Oligo
guuggacaccaucuuguuu

SEQ ID NO: 46142 - RNA, 19 nt, Artificial Sequence
  Antisense Oligo
aaacaagaugguguccaac

SEQ ID NO: 46143 - RNA, 19 nt, Artificial Sequence
  Sense Oligo
uuggacaccaucuuguuuu

SEQ ID NO: 46144 - RNA, 19 nt, Artificial Sequence
  Antisense Oligo
aaaacaagaugguguccaa

SEQ ID NO: 46145 - RNA, 19 nt, Artificial Sequence
  Sense Oligo
gcuauaagcuguaucaaag

SEQ ID NO: 46146 - RNA, 19 nt, Artificial Sequence
  Antisense Oligo
cuuugauacagcuuauagc

SEQ ID NO: 46147 - RNA, 19 nt, Artificial Sequence
  Sense Oligo
cuauaagcuguaucaaaga

SEQ ID NO: 46148 - RNA, 19 nt, Artificial Sequence
  Antisense Oligo
ucuuugauacagcuuauag

SEQ ID NO: 46149 - RNA, 19 nt, Artificial Sequence
  Sense Oligo
auaagcuguaucaaagaag

SEQ ID NO: 46150 - RNA, 19 nt, Artificial Sequence
  Antisense Oligo
cuucuuugauacagcuuau

SEQ ID NO: 46151 - RNA, 19 nt, Artificial Sequence
  Sense Oligo
uaagcuguaucaaagaagu

SEQ ID NO: 46152 - RNA, 19 nt, Artificial Sequence
  Antisense Oligo
acuucuuugauacagcuua

SEQ ID NO: 46153 - RNA, 19 nt, Artificial Sequence
  Sense Oligo
aagcuguaucaaagaaguc

SEQ ID NO: 46154 - RNA, 19 nt, Artificial Sequence
  Antisense Oligo
gacuucuuugauacagcuu

SEQ ID NO: 46155 - RNA, 19 nt, Artificial Sequence
  Sense Oligo
agcuguaucaaagaagucc

SEQ ID NO: 46156 - RNA, 19 nt, Artificial Sequence
  Antisense Oligo
ggacuucuuugauacagcu

SEQ ID NO: 46157 - RNA, 19 nt, Artificial Sequence
  Sense Oligo
gcuguaucaaagaaguccu

SEQ ID NO: 46158 - RNA, 19 nt, Artificial Sequence
  Antisense Oligo
aggacuucuuugauacagc

SEQ ID NO: 46159 - RNA, 19 nt, Artificial Sequence
  Sense Oligo
cuguaucaaagaaguccug

SEQ ID NO: 46160 - RNA, 19 nt, Artificial Sequence
  Antisense Oligo
caggacuucuuugauacag

SEQ ID NO: 46161 - RNA, 19 nt, Artificial Sequence
  Sense Oligo
uguaucaaagaaguccugu

SEQ ID NO: 46162 - RNA, 19 nt, Artificial Sequence
  Antisense Oligo
acaggacuucuuugauaca

SEQ ID NO: 46163 - RNA, 19 nt, Artificial Sequence
  Sense Oligo
guaucaaagaaguccugug

SEQ ID NO: 46164 - RNA, 19 nt, Artificial Sequence
  Antisense Oligo
cacaggacuucuuugauac

SEQ ID NO: 46165 - RNA, 19 nt, Artificial Sequence
  Sense Oligo
caaagaaguccugugugau

SEQ ID NO: 46166 - RNA, 19 nt, Artificial Sequence
  Antisense Oligo
aucacacaggacuucuuug

SEQ ID NO: 46167 - RNA, 19 nt, Artificial Sequence
  Sense Oligo
aaagaaguccugugugauc

SEQ ID NO: 46168 - RNA, 19 nt, Artificial Sequence
  Antisense Oligo
gaucacacaggacuucuuu

SEQ ID NO: 46169 - RNA, 19 nt, Artificial Sequence
  Sense Oligo
aagaaguccugugugauca

SEQ ID NO: 46170 - RNA, 19 nt, Artificial Sequence
  Antisense Oligo
ugaucacacaggacuucuu

SEQ ID NO: 46171 - RNA, 19 nt, Artificial Sequence
  Sense Oligo
agaaguccugugugaucau

SEQ ID NO: 46172 - RNA, 19 nt, Artificial Sequence
  Antisense Oligo
augaucacacaggacuucu

SEQ ID NO: 46173 - RNA, 19 nt, Artificial Sequence
  Sense Oligo
aaguccugugugaucauau

SEQ ID NO: 46174 - RNA, 19 nt, Artificial Sequence
  Antisense Oligo
auaugaucacacaggacuu

SEQ ID NO: 46175 - RNA, 19 nt, Artificial Sequence
  Sense Oligo
aguccugugugaucauaug

SEQ ID NO: 46176 - RNA, 19 nt, Artificial Sequence
  Antisense Oligo
cauaugaucacacaggacu

SEQ ID NO: 46177 - RNA, 19 nt, Artificial Sequence
  Sense Oligo
guccugugugaucauaugg

SEQ ID NO: 46178 - RNA, 19 nt, Artificial Sequence
  Antisense Oligo
ccauaugaucacacaggac

SEQ ID NO: 46179 - RNA, 19 nt, Artificial Sequence
  Sense Oligo
uccugugugaucauauggu

SEQ ID NO: 46180 - RNA, 19 nt, Artificial Sequence
  Antisense Oligo
accauaugaucacacagga

SEQ ID NO: 46181 - RNA, 19 nt, Artificial Sequence
  Sense Oligo
ccugugugaucauauggug

SEQ ID NO: 46182 - RNA, 19 nt, Artificial Sequence
  Antisense Oligo
caccauaugaucacacagg

SEQ ID NO: 46183 - RNA, 19 nt, Artificial Sequence
  Sense Oligo
cugugugaucauauggugg

SEQ ID NO: 46184 - RNA, 19 nt, Artificial Sequence
  Antisense Oligo
ccaccauaugaucacacag

SEQ ID NO: 46185 - RNA, 19 nt, Artificial Sequence
  Sense Oligo
ugugugaucauauggugga

SEQ ID NO: 46186 - RNA, 19 nt, Artificial Sequence
  Antisense Oligo
uccaccauaugaucacaca

SEQ ID NO: 46187 - RNA, 19 nt, Artificial Sequence
  Sense Oligo
gugugaucauaugguggau

SEQ ID NO: 46188 - RNA, 19 nt, Artificial Sequence
  Antisense Oligo
auccaccauaugaucacac

SEQ ID NO: 46189 - RNA, 19 nt, Artificial Sequence
  Sense Oligo
ugugaucauaugguggaug

SEQ ID NO: 46190 - RNA, 19 nt, Artificial Sequence
  Antisense Oligo
cauccaccauaugaucaca

SEQ ID NO: 46191 - RNA, 19 nt, Artificial Sequence
  Sense Oligo
gugaucauaugguggaugg

SEQ ID NO: 46192 - RNA, 19 nt, Artificial Sequence
  Antisense Oligo
ccauccaccauaugaucac

SEQ ID NO: 46193 - RNA, 19 nt, Artificial Sequence
  Sense Oligo
ugaucauaugguggauggc

SEQ ID NO: 46194 - RNA, 19 nt, Artificial Sequence
  Antisense Oligo
gccauccaccauaugauca

SEQ ID NO: 46195 - RNA, 19 nt, Artificial Sequence
  Sense Oligo
gaucauaugguggauggcc

SEQ ID NO: 46196 - RNA, 19 nt, Artificial Sequence
  Antisense Oligo
ggccauccaccauaugauc

SEQ ID NO: 46197 - RNA, 19 nt, Artificial Sequence
  Sense Oligo
aucauaugguggauggcca

SEQ ID NO: 46198 - RNA, 19 nt, Artificial Sequence
  Antisense Oligo
uggccauccaccauaugau

SEQ ID NO: 46199 - RNA, 19 nt, Artificial Sequence
  Sense Oligo
ucauaugguggauggccag

SEQ ID NO: 46200 - RNA, 19 nt, Artificial Sequence
  Antisense Oligo
cuggccauccaccauauga

SEQ ID NO: 46201 - RNA, 19 nt, Artificial Sequence
  Sense Oligo
cauaugguggauggccagc

SEQ ID NO: 46202 - RNA, 19 nt, Artificial Sequence
  Antisense Oligo
gcuggccauccaccauaug

SEQ ID NO: 46203 - RNA, 19 nt, Artificial Sequence
  Sense Oligo
cugaggacucuggccugca

SEQ ID NO: 46204 - RNA, 19 nt, Artificial Sequence
  Antisense Oligo
ugcaggccagaguccucag

SEQ ID NO: 46205 - RNA, 19 nt, Artificial Sequence
  Sense Oligo
ugaggacucuggccugcau

SEQ ID NO: 46206 - RNA, 19 nt, Artificial Sequence
  Antisense Oligo
augcaggccagaguccuca

SEQ ID NO: 46207 - RNA, 19 nt, Artificial Sequence
  Sense Oligo
gaggacucuggccugcaua

SEQ ID NO: 46208 - RNA, 19 nt, Artificial Sequence
  Antisense Oligo
uaugcaggccagaguccuc

SEQ ID NO: 46209 - RNA, 19 nt, Artificial Sequence
  Sense Oligo
aggacucuggccugcauau

SEQ ID NO: 46210 - RNA, 19 nt, Artificial Sequence
  Antisense Oligo
auaugcaggccagaguccu

SEQ ID NO: 46211 - RNA, 19 nt, Artificial Sequence
  Sense Oligo
ggacucuggccugcauauu

SEQ ID NO: 46212 - RNA, 19 nt, Artificial Sequence
  Antisense Oligo
aauaugcaggccagagucc

SEQ ID NO: 46213 - RNA, 19 nt, Artificial Sequence
  Sense Oligo
gacucuggccugcauauua

SEQ ID NO: 46214 - RNA, 19 nt, Artificial Sequence
  Antisense Oligo
uaauaugcaggccagaguc

SEQ ID NO: 46215 - RNA, 19 nt, Artificial Sequence
  Sense Oligo
uggccugcauauuauagcu

SEQ ID NO: 46216 - RNA, 19 nt, Artificial Sequence
  Antisense Oligo
agcuauaauaugcaggcca

SEQ ID NO: 46217 - RNA, 19 nt, Artificial Sequence
  Sense Oligo
ggccugcauauuauagcug

SEQ ID NO: 46218 - RNA, 19 nt, Artificial Sequence
  Antisense Oligo
cagcuauaauaugcaggcc

SEQ ID NO: 46219 - RNA, 19 nt, Artificial Sequence
  Sense Oligo
gccugcauauuauagcugc

SEQ ID NO: 46220 - RNA, 19 nt, Artificial Sequence
  Antisense Oligo
gcagcuauaauaugcaggc

SEQ ID NO: 46221 - RNA, 19 nt, Artificial Sequence
  Sense Oligo
ccugcauauuauagcugcc

SEQ ID NO: 46222 - RNA, 19 nt, Artificial Sequence
  Antisense Oligo
ggcagcuauaauaugcagg

SEQ ID NO: 46223 - RNA, 19 nt, Artificial Sequence
  Sense Oligo
cugcauauuauagcugccu

SEQ ID NO: 46224 - RNA, 19 nt, Artificial Sequence
  Antisense Oligo
aggcagcuauaauaugcag

SEQ ID NO: 46225 - RNA, 19 nt, Artificial Sequence
  Sense Oligo
ugcauauuauagcugccug

SEQ ID NO: 46226 - RNA, 19 nt, Artificial Sequence
  Antisense Oligo
caggcagcuauaauaugca

SEQ ID NO: 46227 - RNA, 19 nt, Artificial Sequence
  Sense Oligo
gcauauuauagcugccugc

SEQ ID NO: 46228 - RNA, 19 nt, Artificial Sequence
  Antisense Oligo
gcaggcagcuauaauaugc

SEQ ID NO: 46229 - RNA, 19 nt, Artificial Sequence
  Sense Oligo
cauauuauagcugccugca

SEQ ID NO: 46230 - RNA, 19 nt, Artificial Sequence
  Antisense Oligo
ugcaggcagcuauaauaug

SEQ ID NO: 46231 - RNA, 19 nt, Artificial Sequence
  Sense Oligo
auauuauagcugccugcaa

SEQ ID NO: 46232 - RNA, 19 nt, Artificial Sequence
  Antisense Oligo
uugcaggcagcuauaauau

SEQ ID NO: 46233 - RNA, 19 nt, Artificial Sequence
  Sense Oligo
uauagcugccugcaaucca

SEQ ID NO: 46234 - RNA, 19 nt, Artificial Sequence
  Antisense Oligo
uggauugcaggcagcuaua

SEQ ID NO: 46235 - RNA, 19 nt, Artificial Sequence
  Sense Oligo
auagcugccugcaauccau

SEQ ID NO: 46236 - RNA, 19 nt, Artificial Sequence
  Antisense Oligo
auggauugcaggcagcuau

SEQ ID NO: 46237 - RNA, 19 nt, Artificial Sequence
  Sense Oligo
uagcugccugcaauccaua

SEQ ID NO: 46238 - RNA, 19 nt, Artificial Sequence
  Antisense Oligo
uauggauugcaggcagcua

SEQ ID NO: 46239 - RNA, 19 nt, Artificial Sequence
  Sense Oligo
gcugccugcaauccauacc

SEQ ID NO: 46240 - RNA, 19 nt, Artificial Sequence
  Antisense Oligo
gguauggauugcaggcagc

SEQ ID NO: 46241 - RNA, 19 nt, Artificial Sequence
  Sense Oligo
cugccugcaauccauaccg

SEQ ID NO: 46242 - RNA, 19 nt, Artificial Sequence
  Antisense Oligo
cgguauggauugcaggcag

SEQ ID NO: 46243 - RNA, 19 nt, Artificial Sequence
  Sense Oligo
ugccugcaauccauaccgg

SEQ ID NO: 46244 - RNA, 19 nt, Artificial Sequence
  Antisense Oligo
ccgguauggauugcaggca

SEQ ID NO: 46245 - RNA, 19 nt, Artificial Sequence
  Sense Oligo
gccugcaauccauaccgga

SEQ ID NO: 46246 - RNA, 19 nt, Artificial Sequence
  Antisense Oligo
uccgguauggauugcaggc

SEQ ID NO: 46247 - RNA, 19 nt, Artificial Sequence
  Sense Oligo
ccugcaauccauaccggaa

SEQ ID NO: 46248 - RNA, 19 nt, Artificial Sequence
  Antisense Oligo
uuccgguauggauugcagg

SEQ ID NO: 46249 - RNA, 19 nt, Artificial Sequence
  Sense Oligo
cugcaauccauaccggaag

SEQ ID NO: 46250 - RNA, 19 nt, Artificial Sequence
  Antisense Oligo
cuuccgguauggauugcag

SEQ ID NO: 46251 - RNA, 19 nt, Artificial Sequence
  Sense Oligo
ugcaauccauaccggaagc

SEQ ID NO: 46252 - RNA, 19 nt, Artificial Sequence
  Antisense Oligo
gcuuccgguauggauugca

SEQ ID NO: 46253 - RNA, 19 nt, Artificial Sequence
  Sense Oligo
gcaauccauaccggaagca

SEQ ID NO: 46254 - RNA, 19 nt, Artificial Sequence
  Antisense Oligo
ugcuuccgguauggauugc

SEQ ID NO: 46255 - RNA, 19 nt, Artificial Sequence
  Sense Oligo
caauccauaccggaagcac

SEQ ID NO: 46256 - RNA, 19 nt, Artificial Sequence
  Antisense Oligo
gugcuuccgguauggauug

SEQ ID NO: 46257 - RNA, 19 nt, Artificial Sequence
  Sense Oligo
uaccggaagcacucugagg

SEQ ID NO: 46258 - RNA, 19 nt, Artificial Sequence
  Antisense Oligo
ccucagagugcuuccggua

SEQ ID NO: 46259 - RNA, 19 nt, Artificial Sequence
  Sense Oligo
accggaagcacucugagga

SEQ ID NO: 46260 - RNA, 19 nt, Artificial Sequence
  Antisense Oligo
uccucagagugcuuccggu

SEQ ID NO: 46261 - RNA, 19 nt, Artificial Sequence
  Sense Oligo
ccggaagcacucugaggag

SEQ ID NO: 46262 - RNA, 19 nt, Artificial Sequence
  Antisense Oligo
cuccucagagugcuuccgg

SEQ ID NO: 46263 - RNA, 19 nt, Artificial Sequence
  Sense Oligo
agaugaucugccguuugga

SEQ ID NO: 46264 - RNA, 19 nt, Artificial Sequence
  Antisense Oligo
uccaaacggcagaucaucu

SEQ ID NO: 46265 - RNA, 19 nt, Artificial Sequence
  Sense Oligo
gaugaucugccguuuggag

SEQ ID NO: 46266 - RNA, 19 nt, Artificial Sequence
  Antisense Oligo
cuccaaacggcagaucauc

SEQ ID NO: 46267 - RNA, 19 nt, Artificial Sequence
  Sense Oligo
ugccguuuggagucagcug

SEQ ID NO: 46268 - RNA, 19 nt, Artificial Sequence
  Antisense Oligo
cagcugacuccaaacggca

SEQ ID NO: 46269 - RNA, 19 nt, Artificial Sequence
  Sense Oligo
gccguuuggagucagcugg

SEQ ID NO: 46270 - RNA, 19 nt, Artificial Sequence
  Antisense Oligo
ccagcugacuccaaacggc

SEQ ID NO: 46271 - RNA, 19 nt, Artificial Sequence
  Sense Oligo
ccguuuggagucagcuggu

SEQ ID NO: 46272 - RNA, 19 nt, Artificial Sequence
  Antisense Oligo
accagcugacuccaaacgg

SEQ ID NO: 46273 - RNA, 19 nt, Artificial Sequence
  Sense Oligo
cguuuggagucagcugguu

SEQ ID NO: 46274 - RNA, 19 nt, Artificial Sequence
  Antisense Oligo
aaccagcugacuccaaacg

SEQ ID NO: 46275 - RNA, 19 nt, Artificial Sequence
  Sense Oligo
ggagucagcugguuugggc

SEQ ID NO: 46276 - RNA, 19 nt, Artificial Sequence
  Antisense Oligo
gcccaaaccagcugacucc

SEQ ID NO: 46277 - RNA, 19 nt, Artificial Sequence
  Sense Oligo
gagucagcugguuugggcu

SEQ ID NO: 46278 - RNA, 19 nt, Artificial Sequence
  Antisense Oligo
agcccaaaccagcugacuc

SEQ ID NO: 46279 - RNA, 19 nt, Artificial Sequence
  Sense Oligo
agucagcugguuugggcua

SEQ ID NO: 46280 - RNA, 19 nt, Artificial Sequence
  Antisense Oligo
uagcccaaaccagcugacu

SEQ ID NO: 46281 - RNA, 19 nt, Artificial Sequence
  Sense Oligo
gucagcugguuugggcuac

SEQ ID NO: 46282 - RNA, 19 nt, Artificial Sequence
  Antisense Oligo
guagcccaaaccagcugac

SEQ ID NO: 46283 - RNA, 19 nt, Artificial Sequence
  Sense Oligo
ucagcugguuugggcuaca

SEQ ID NO: 46284 - RNA, 19 nt, Artificial Sequence
  Antisense Oligo
uguagcccaaaccagcuga

SEQ ID NO: 46285 - RNA, 19 nt, Artificial Sequence
  Sense Oligo
cagcugguuugggcuacag

SEQ ID NO: 46286 - RNA, 19 nt, Artificial Sequence
  Antisense Oligo
cuguagcccaaaccagcug

SEQ ID NO: 46287 - RNA, 19 nt, Artificial Sequence
  Sense Oligo
guuugggcuacaggguuag

SEQ ID NO: 46288 - RNA, 19 nt, Artificial Sequence
  Antisense Oligo
cuaacccuguagcccaaac

SEQ ID NO: 46289 - RNA, 19 nt, Artificial Sequence
  Sense Oligo
uuugggcuacaggguuagu

SEQ ID NO: 46290 - RNA, 19 nt, Artificial Sequence
  Antisense Oligo
acuaacccuguagcccaaa

SEQ ID NO: 46291 - RNA, 19 nt, Artificial Sequence
  Sense Oligo
uugggcuacaggguuagua

SEQ ID NO: 46292 - RNA, 19 nt, Artificial Sequence
  Antisense Oligo
uacuaacccuguagcccaa

SEQ ID NO: 46293 - RNA, 19 nt, Artificial Sequence
  Sense Oligo
ugggcuacaggguuaguau

SEQ ID NO: 46294 - RNA, 19 nt, Artificial Sequence
  Antisense Oligo
auacuaacccuguagccca

SEQ ID NO: 46295 - RNA, 19 nt, Artificial Sequence
  Sense Oligo
gggcuacaggguuaguaug

SEQ ID NO: 46296 - RNA, 19 nt, Artificial Sequence
  Antisense Oligo
cauacuaacccuguagccc

SEQ ID NO: 46297 - RNA, 19 nt, Artificial Sequence
  Sense Oligo
ggcuacaggguuaguaugg

SEQ ID NO: 46298 - RNA, 19 nt, Artificial Sequence
  Antisense Oligo
ccauacuaacccuguagcc

SEQ ID NO: 46299 - RNA, 19 nt, Artificial Sequence
  Sense Oligo
gcuacaggguuaguaugga

SEQ ID NO: 46300 - RNA, 19 nt, Artificial Sequence
  Antisense Oligo
uccauacuaacccuguagc

SEQ ID NO: 46301 - RNA, 19 nt, Artificial Sequence
  Sense Oligo
caggguuaguauggaggag

SEQ ID NO: 46302 - RNA, 19 nt, Artificial Sequence
  Antisense Oligo
cuccuccauacuaacccug

SEQ ID NO: 46303 - RNA, 19 nt, Artificial Sequence
  Sense Oligo
ggcugggcuccauuccucu

SEQ ID NO: 46304 - RNA, 19 nt, Artificial Sequence
  Antisense Oligo
agaggaauggagcccagcc

SEQ ID NO: 46305 - RNA, 19 nt, Artificial Sequence
  Sense Oligo
gcugggcuccauuccucug

SEQ ID NO: 46306 - RNA, 19 nt, Artificial Sequence
  Antisense Oligo
cagaggaauggagcccagc

SEQ ID NO: 46307 - RNA, 19 nt, Artificial Sequence
  Sense Oligo
cugggcuccauuccucuga

SEQ ID NO: 46308 - RNA, 19 nt, Artificial Sequence
  Antisense Oligo
ucagaggaauggagcccag

SEQ ID NO: 46309 - RNA, 19 nt, Artificial Sequence
  Sense Oligo
ugggcuccauuccucugag

SEQ ID NO: 46310 - RNA, 19 nt, Artificial Sequence
  Antisense Oligo
cucagaggaauggagccca

SEQ ID NO: 46311 - RNA, 19 nt, Artificial Sequence
  Sense Oligo
gggcuccauuccucugagg

SEQ ID NO: 46312 - RNA, 19 nt, Artificial Sequence
  Antisense Oligo
ccucagaggaauggagccc

SEQ ID NO: 46313 - RNA, 19 nt, Artificial Sequence
  Sense Oligo
ggcuccauuccucugaggc

SEQ ID NO: 46314 - RNA, 19 nt, Artificial Sequence
  Antisense Oligo
gccucagaggaauggagcc

SEQ ID NO: 46315 - RNA, 19 nt, Artificial Sequence
  Sense Oligo
gcuccauuccucugaggca

SEQ ID NO: 46316 - RNA, 19 nt, Artificial Sequence
  Antisense Oligo
ugccucagaggaauggagc

SEQ ID NO: 46317 - RNA, 19 nt, Artificial Sequence
  Sense Oligo
cuccauuccucugaggcag

SEQ ID NO: 46318 - RNA, 19 nt, Artificial Sequence
  Antisense Oligo
cugccucagaggaauggag

SEQ ID NO: 46319 - RNA, 19 nt, Artificial Sequence
  Sense Oligo
uccauuccucugaggcagc

SEQ ID NO: 46320 - RNA, 19 nt, Artificial Sequence
  Antisense Oligo
gcugccucagaggaaugga

SEQ ID NO: 46321 - RNA, 19 nt, Artificial Sequence
  Sense Oligo
uuccucugaggcagcuggu

SEQ ID NO: 46322 - RNA, 19 nt, Artificial Sequence
  Antisense Oligo
accagcugccucagaggaa

SEQ ID NO: 46323 - RNA, 19 nt, Artificial Sequence
  Sense Oligo
uccucugaggcagcuggua

SEQ ID NO: 46324 - RNA, 19 nt, Artificial Sequence
  Antisense Oligo
uaccagcugccucagagga

SEQ ID NO: 46325 - RNA, 19 nt, Artificial Sequence
  Sense Oligo
ccucugaggcagcugguau

SEQ ID NO: 46326 - RNA, 19 nt, Artificial Sequence
  Antisense Oligo
auaccagcugccucagagg

SEQ ID NO: 46327 - RNA, 19 nt, Artificial Sequence
  Sense Oligo
cucugaggcagcugguaua

SEQ ID NO: 46328 - RNA, 19 nt, Artificial Sequence
  Antisense Oligo
uauaccagcugccucagag

SEQ ID NO: 46329 - RNA, 19 nt, Artificial Sequence
  Sense Oligo
ucugaggcagcugguauac

SEQ ID NO: 46330 - RNA, 19 nt, Artificial Sequence
  Antisense Oligo
guauaccagcugccucaga

SEQ ID NO: 46331 - RNA, 19 nt, Artificial Sequence
  Sense Oligo
cugaggcagcugguauacc

SEQ ID NO: 46332 - RNA, 19 nt, Artificial Sequence
  Antisense Oligo
gguauaccagcugccucag

SEQ ID NO: 46333 - RNA, 19 nt, Artificial Sequence
  Sense Oligo
ugaggcagcugguauaccg

SEQ ID NO: 46334 - RNA, 19 nt, Artificial Sequence
  Antisense Oligo
cgguauaccagcugccuca

SEQ ID NO: 46335 - RNA, 19 nt, Artificial Sequence
  Sense Oligo
gaggcagcugguauaccgg

SEQ ID NO: 46336 - RNA, 19 nt, Artificial Sequence
  Antisense Oligo
ccgguauaccagcugccuc

SEQ ID NO: 46337 - RNA, 19 nt, Artificial Sequence
  Sense Oligo
aggcagcugguauaccggg

SEQ ID NO: 46338 - RNA, 19 nt, Artificial Sequence
  Antisense Oligo
cccgguauaccagcugccu

SEQ ID NO: 46339 - RNA, 19 nt, Artificial Sequence
  Sense Oligo
ggcagcugguauaccgggu

SEQ ID NO: 46340 - RNA, 19 nt, Artificial Sequence
  Antisense Oligo
acccgguauaccagcugcc

SEQ ID NO: 46341 - RNA, 19 nt, Artificial Sequence
  Sense Oligo
gcagcugguauaccggguc

SEQ ID NO: 46342 - RNA, 19 nt, Artificial Sequence
  Antisense Oligo
gacccgguauaccagcugc

SEQ ID NO: 46343 - RNA, 19 nt, Artificial Sequence
  Sense Oligo
guauaccggguccaugcuc

SEQ ID NO: 46344 - RNA, 19 nt, Artificial Sequence
  Antisense Oligo
gagcauggacccgguauac

SEQ ID NO: 46345 - RNA, 19 nt, Artificial Sequence
  Sense Oligo
uauaccggguccaugcucu

SEQ ID NO: 46346 - RNA, 19 nt, Artificial Sequence
  Antisense Oligo
agagcauggacccgguaua

SEQ ID NO: 46347 - RNA, 19 nt, Artificial Sequence
  Sense Oligo
auaccggguccaugcucug

SEQ ID NO: 46348 - RNA, 19 nt, Artificial Sequence
  Antisense Oligo
cagagcauggacccgguau

SEQ ID NO: 46349 - RNA, 19 nt, Artificial Sequence
  Sense Oligo
cccgagccugauuccucug

SEQ ID NO: 46350 - RNA, 19 nt, Artificial Sequence
  Antisense Oligo
cagaggaaucaggcucggg

SEQ ID NO: 46351 - RNA, 19 nt, Artificial Sequence
  Sense Oligo
ccgagccugauuccucugg

SEQ ID NO: 46352 - RNA, 19 nt, Artificial Sequence
  Antisense Oligo
ccagaggaaucaggcucgg

SEQ ID NO: 46353 - RNA, 19 nt, Artificial Sequence
  Sense Oligo
cgagccugauuccucuggu

SEQ ID NO: 46354 - RNA, 19 nt, Artificial Sequence
  Antisense Oligo
accagaggaaucaggcucg

SEQ ID NO: 46355 - RNA, 19 nt, Artificial Sequence
  Sense Oligo
gagccugauuccucuggug

SEQ ID NO: 46356 - RNA, 19 nt, Artificial Sequence
  Antisense Oligo
caccagaggaaucaggcuc

SEQ ID NO: 46357 - RNA, 19 nt, Artificial Sequence
  Sense Oligo
agccugauuccucuggugu

SEQ ID NO: 46358 - RNA, 19 nt, Artificial Sequence
  Antisense Oligo
acaccagaggaaucaggcu

SEQ ID NO: 46359 - RNA, 19 nt, Artificial Sequence
  Sense Oligo
gccugauuccucuggugug

SEQ ID NO: 46360 - RNA, 19 nt, Artificial Sequence
  Antisense Oligo
cacaccagaggaaucaggc

SEQ ID NO: 46361 - RNA, 19 nt, Artificial Sequence
  Sense Oligo
ccugauuccucuggugugg

SEQ ID NO: 46362 - RNA, 19 nt, Artificial Sequence
  Antisense Oligo
ccacaccagaggaaucagg

SEQ ID NO: 46363 - RNA, 19 nt, Artificial Sequence
  Sense Oligo
uuccucuggugugggacuu

SEQ ID NO: 46364 - RNA, 19 nt, Artificial Sequence
  Antisense Oligo
aagucccacaccagaggaa

SEQ ID NO: 46365 - RNA, 19 nt, Artificial Sequence
  Sense Oligo
uccucuggugugggacuuu

SEQ ID NO: 46366 - RNA, 19 nt, Artificial Sequence
  Antisense Oligo
aaagucccacaccagagga

SEQ ID NO: 46367 - RNA, 19 nt, Artificial Sequence
  Sense Oligo
ccucuggugugggacuuug

SEQ ID NO: 46368 - RNA, 19 nt, Artificial Sequence
  Antisense Oligo
caaagucccacaccagagg

SEQ ID NO: 46369 - RNA, 19 nt, Artificial Sequence
  Sense Oligo
cucuggugugggacuuugg

SEQ ID NO: 46370 - RNA, 19 nt, Artificial Sequence
  Antisense Oligo
ccaaagucccacaccagag

SEQ ID NO: 46371 - RNA, 19 nt, Artificial Sequence
  Sense Oligo
ucuggugugggacuuugga

SEQ ID NO: 46372 - RNA, 19 nt, Artificial Sequence
  Antisense Oligo
uccaaagucccacaccaga

SEQ ID NO: 46373 - RNA, 19 nt, Artificial Sequence
  Sense Oligo
cuggugugggacuuuggac

SEQ ID NO: 46374 - RNA, 19 nt, Artificial Sequence
  Antisense Oligo
guccaaagucccacaccag

SEQ ID NO: 46375 - RNA, 19 nt, Artificial Sequence
  Sense Oligo
uggugugggacuuuggaca

SEQ ID NO: 46376 - RNA, 19 nt, Artificial Sequence
  Antisense Oligo
uguccaaagucccacacca

SEQ ID NO: 46377 - RNA, 19 nt, Artificial Sequence
  Sense Oligo
aacugagugacguugcuga

SEQ ID NO: 46378 - RNA, 19 nt, Artificial Sequence
  Antisense Oligo
ucagcaacgucacucaguu

SEQ ID NO: 46379 - RNA, 19 nt, Artificial Sequence
  Sense Oligo
acugagugacguugcugaa

SEQ ID NO: 46380 - RNA, 19 nt, Artificial Sequence
  Antisense Oligo
uucagcaacgucacucagu

SEQ ID NO: 46381 - RNA, 19 nt, Artificial Sequence
  Sense Oligo
aaaagcucuacauccagca

SEQ ID NO: 46382 - RNA, 19 nt, Artificial Sequence
  Antisense Oligo
ugcuggauguagagcuuuu

SEQ ID NO: 46383 - RNA, 19 nt, Artificial Sequence
  Sense Oligo
gcucuacauccagcagauu

SEQ ID NO: 46384 - RNA, 19 nt, Artificial Sequence
  Antisense Oligo
aaucugcuggauguagagc

SEQ ID NO: 46385 - RNA, 19 nt, Artificial Sequence
  Sense Oligo
cucuacauccagcagauug

SEQ ID NO: 46386 - RNA, 19 nt, Artificial Sequence
  Antisense Oligo
caaucugcuggauguagag

SEQ ID NO: 46387 - RNA, 19 nt, Artificial Sequence
  Sense Oligo
ucuacauccagcagauugu

SEQ ID NO: 46388 - RNA, 19 nt, Artificial Sequence
  Antisense Oligo
acaaucugcuggauguaga

SEQ ID NO: 46389 - RNA, 19 nt, Artificial Sequence
  Sense Oligo
cuacauccagcagauuguc

SEQ ID NO: 46390 - RNA, 19 nt, Artificial Sequence
  Antisense Oligo
gacaaucugcuggauguag

SEQ ID NO: 46391 - RNA, 19 nt, Artificial Sequence
  Sense Oligo
uacauccagcagauugucc

SEQ ID NO: 46392 - RNA, 19 nt, Artificial Sequence
  Antisense Oligo
ggacaaucugcuggaugua

SEQ ID NO: 46393 - RNA, 19 nt, Artificial Sequence
  Sense Oligo
acauccagcagauugucca

SEQ ID NO: 46394 - RNA, 19 nt, Artificial Sequence
  Antisense Oligo
uggacaaucugcuggaugu

SEQ ID NO: 46395 - RNA, 19 nt, Artificial Sequence
  Sense Oligo
ugaguccaucagccuagau

SEQ ID NO: 46396 - RNA, 19 nt, Artificial Sequence
  Antisense Oligo
aucuaggcugauggacuca

SEQ ID NO: 46397 - RNA, 19 nt, Artificial Sequence
  Sense Oligo
ggacucgcgugaucacaga

SEQ ID NO: 46398 - RNA, 19 nt, Artificial Sequence
  Antisense Oligo
ucugugaucacgcgagucc

SEQ ID NO: 46399 - RNA, 19 nt, Artificial Sequence
  Sense Oligo
gacucgcgugaucacagaa

SEQ ID NO: 46400 - RNA, 19 nt, Artificial Sequence
  Antisense Oligo
uucugugaucacgcgaguc

SEQ ID NO: 46401 - RNA, 19 nt, Artificial Sequence
  Sense Oligo
acucgcgugaucacagaag

SEQ ID NO: 46402 - RNA, 19 nt, Artificial Sequence
  Antisense Oligo
cuucugugaucacgcgagu

SEQ ID NO: 46403 - RNA, 19 nt, Artificial Sequence
  Sense Oligo
cucgcgugaucacagaagu

SEQ ID NO: 46404 - RNA, 19 nt, Artificial Sequence
  Antisense Oligo
acuucugugaucacgcgag

SEQ ID NO: 46405 - RNA, 19 nt, Artificial Sequence
  Sense Oligo
ucgcgugaucacagaaguc

SEQ ID NO: 46406 - RNA, 19 nt, Artificial Sequence
  Antisense Oligo
gacuucugugaucacgcga

SEQ ID NO: 46407 - RNA, 19 nt, Artificial Sequence
  Sense Oligo
cgcgugaucacagaagucc

SEQ ID NO: 46408 - RNA, 19 nt, Artificial Sequence
  Antisense Oligo
ggacuucugugaucacgcg

SEQ ID NO: 46409 - RNA, 19 nt, Artificial Sequence
  Sense Oligo
gcgugaucacagaaguccu

SEQ ID NO: 46410 - RNA, 19 nt, Artificial Sequence
  Antisense Oligo
aggacuucugugaucacgc

SEQ ID NO: 46411 - RNA, 19 nt, Artificial Sequence
  Sense Oligo
cgugaucacagaaguccuc

SEQ ID NO: 46412 - RNA, 19 nt, Artificial Sequence
  Antisense Oligo
gaggacuucugugaucacg

SEQ ID NO: 46413 - RNA, 19 nt, Artificial Sequence
  Sense Oligo
gugaucacagaaguccucu

SEQ ID NO: 46414 - RNA, 19 nt, Artificial Sequence
  Antisense Oligo
agaggacuucugugaucac

SEQ ID NO: 46415 - RNA, 19 nt, Artificial Sequence
  Sense Oligo
agaaguccucugcgccucu

SEQ ID NO: 46416 - RNA, 19 nt, Artificial Sequence
  Antisense Oligo
agaggcgcagaggacuucu

SEQ ID NO: 46417 - RNA, 19 nt, Artificial Sequence
  Sense Oligo
gaaguccucugcgccucuc

SEQ ID NO: 46418 - RNA, 19 nt, Artificial Sequence
  Antisense Oligo
gagaggcgcagaggacuuc

SEQ ID NO: 46419 - RNA, 19 nt, Artificial Sequence
  Sense Oligo
aaguccucugcgccucuca

SEQ ID NO: 46420 - RNA, 19 nt, Artificial Sequence
  Antisense Oligo
ugagaggcgcagaggacuu

SEQ ID NO: 46421 - RNA, 19 nt, Artificial Sequence
  Sense Oligo
aguccucugcgccucucag

SEQ ID NO: 46422 - RNA, 19 nt, Artificial Sequence
  Antisense Oligo
cugagaggcgcagaggacu

SEQ ID NO: 46423 - RNA, 19 nt, Artificial Sequence
  Sense Oligo
cugcgccucucaggguuuc

SEQ ID NO: 46424 - RNA, 19 nt, Artificial Sequence
  Antisense Oligo
gaaacccugagaggcgcag

SEQ ID NO: 46425 - RNA, 19 nt, Artificial Sequence
  Sense Oligo
ugcgccucucaggguuuca

SEQ ID NO: 46426 - RNA, 19 nt, Artificial Sequence
  Antisense Oligo
ugaaacccugagaggcgca

SEQ ID NO: 46427 - RNA, 19 nt, Artificial Sequence
  Sense Oligo
gcgccucucaggguuucau

SEQ ID NO: 46428 - RNA, 19 nt, Artificial Sequence
  Antisense Oligo
augaaacccugagaggcgc

SEQ ID NO: 46429 - RNA, 19 nt, Artificial Sequence
  Sense Oligo
cgccucucaggguuucaug

SEQ ID NO: 46430 - RNA, 19 nt, Artificial Sequence
  Antisense Oligo
caugaaacccugagaggcg

SEQ ID NO: 46431 - RNA, 19 nt, Artificial Sequence
  Sense Oligo
gaugagugcagcuuuguca

SEQ ID NO: 46432 - RNA, 19 nt, Artificial Sequence
  Antisense Oligo
ugacaaagcugcacucauc

SEQ ID NO: 46433 - RNA, 19 nt, Artificial Sequence
  Sense Oligo
augagugcagcuuugucag

SEQ ID NO: 46434 - RNA, 19 nt, Artificial Sequence
  Antisense Oligo
cugacaaagcugcacucau

SEQ ID NO: 46435 - RNA, 19 nt, Artificial Sequence
  Sense Oligo
ugagugcagcuuugucagc

SEQ ID NO: 46436 - RNA, 19 nt, Artificial Sequence
  Antisense Oligo
gcugacaaagcugcacuca

SEQ ID NO: 46437 - RNA, 19 nt, Artificial Sequence
  Sense Oligo
gagugcagcuuugucagcc

SEQ ID NO: 46438 - RNA, 19 nt, Artificial Sequence
  Antisense Oligo
ggcugacaaagcugcacuc

SEQ ID NO: 46439 - RNA, 19 nt, Artificial Sequence
  Sense Oligo
cagcuuugucagccucagg

SEQ ID NO: 46440 - RNA, 19 nt, Artificial Sequence
  Antisense Oligo
ccugaggcugacaaagcug

SEQ ID NO: 46441 - RNA, 19 nt, Artificial Sequence
  Sense Oligo
uuugucagccucagggacg

SEQ ID NO: 46442 - RNA, 19 nt, Artificial Sequence
  Antisense Oligo
cgucccugaggcugacaaa

SEQ ID NO: 46443 - RNA, 19 nt, Artificial Sequence
  Sense Oligo
uugucagccucagggacgu

SEQ ID NO: 46444 - RNA, 19 nt, Artificial Sequence
  Antisense Oligo
acgucccugaggcugacaa

SEQ ID NO: 46445 - RNA, 19 nt, Artificial Sequence
  Sense Oligo
ugucagccucagggacgug

SEQ ID NO: 46446 - RNA, 19 nt, Artificial Sequence
  Antisense Oligo
cacgucccugaggcugaca

SEQ ID NO: 46447 - RNA, 19 nt, Artificial Sequence
  Sense Oligo
ucagccucagggacgugga

SEQ ID NO: 46448 - RNA, 19 nt, Artificial Sequence
  Antisense Oligo
uccacgucccugaggcuga

SEQ ID NO: 46449 - RNA, 19 nt, Artificial Sequence
  Sense Oligo
gacguggagcgcuguguga

SEQ ID NO: 46450 - RNA, 19 nt, Artificial Sequence
  Antisense Oligo
ucacacagcgcuccacguc

SEQ ID NO: 46451 - RNA, 19 nt, Artificial Sequence
  Sense Oligo
acguggagcgcugugugaa

SEQ ID NO: 46452 - RNA, 19 nt, Artificial Sequence
  Antisense Oligo
uucacacagcgcuccacgu

SEQ ID NO: 46453 - RNA, 19 nt, Artificial Sequence
  Sense Oligo
aaaguuuucaggugguucc

SEQ ID NO: 46454 - RNA, 19 nt, Artificial Sequence
  Antisense Oligo
ggaaccaccugaaaacuuu

SEQ ID NO: 46455 - RNA, 19 nt, Artificial Sequence
  Sense Oligo
aaguuuucaggugguucca

SEQ ID NO: 46456 - RNA, 19 nt, Artificial Sequence
  Antisense Oligo
uggaaccaccugaaaacuu

SEQ ID NO: 46457 - RNA, 19 nt, Artificial Sequence
  Sense Oligo
aguuuucaggugguuccac

SEQ ID NO: 46458 - RNA, 19 nt, Artificial Sequence
  Antisense Oligo
guggaaccaccugaaaacu

SEQ ID NO: 46459 - RNA, 19 nt, Artificial Sequence
  Sense Oligo
guuuucaggugguuccacg

SEQ ID NO: 46460 - RNA, 19 nt, Artificial Sequence
  Antisense Oligo
cguggaaccaccugaaaac

SEQ ID NO: 46461 - RNA, 19 nt, Artificial Sequence
  Sense Oligo
uuucaggugguuccacgag

SEQ ID NO: 46462 - RNA, 19 nt, Artificial Sequence
  Antisense Oligo
cucguggaaccaccugaaa

SEQ ID NO: 46463 - RNA, 19 nt, Artificial Sequence
  Sense Oligo
uucaggugguuccacgagc

SEQ ID NO: 46464 - RNA, 19 nt, Artificial Sequence
  Antisense Oligo
gcucguggaaccaccugaa

SEQ ID NO: 46465 - RNA, 19 nt, Artificial Sequence
  Sense Oligo
ucaggugguuccacgagca

SEQ ID NO: 46466 - RNA, 19 nt, Artificial Sequence
  Antisense Oligo
ugcucguggaaccaccuga

SEQ ID NO: 46467 - RNA, 19 nt, Artificial Sequence
  Sense Oligo
caggugguuccacgagcac

SEQ ID NO: 46468 - RNA, 19 nt, Artificial Sequence
  Antisense Oligo
gugcucguggaaccaccug

SEQ ID NO: 46469 - RNA, 19 nt, Artificial Sequence
  Sense Oligo
ugguuccacgagcacagcg

SEQ ID NO: 46470 - RNA, 19 nt, Artificial Sequence
  Antisense Oligo
cgcugugcucguggaacca

SEQ ID NO: 46471 - RNA, 19 nt, Artificial Sequence
  Sense Oligo
uccacgagcacagcgcgau

SEQ ID NO: 46472 - RNA, 19 nt, Artificial Sequence
  Antisense Oligo
aucgcgcugugcucgugga

SEQ ID NO: 46473 - RNA, 19 nt, Artificial Sequence
  Sense Oligo
gcacagcgcgaugcucuua

SEQ ID NO: 46474 - RNA, 19 nt, Artificial Sequence
  Antisense Oligo
uaagagcaucgcgcugugc

SEQ ID NO: 46475 - RNA, 19 nt, Artificial Sequence
  Sense Oligo
cacagcgcgaugcucuuag

SEQ ID NO: 46476 - RNA, 19 nt, Artificial Sequence
  Antisense Oligo
cuaagagcaucgcgcugug

SEQ ID NO: 46477 - RNA, 19 nt, Artificial Sequence
  Sense Oligo
acagcgcgaugcucuuagc

SEQ ID NO: 46478 - RNA, 19 nt, Artificial Sequence
  Antisense Oligo
gcuaagagcaucgcgcugu

SEQ ID NO: 46479 - RNA, 19 nt, Artificial Sequence
  Sense Oligo
gaaugccuuucucuccaag

SEQ ID NO: 46480 - RNA, 19 nt, Artificial Sequence
  Antisense Oligo
cuuggagagaaaggcauuc

SEQ ID NO: 46481 - RNA, 19 nt, Artificial Sequence
  Sense Oligo
aaugccuuucucuccaagu

SEQ ID NO: 46482 - RNA, 19 nt, Artificial Sequence
  Antisense Oligo
acuuggagagaaaggcauu

SEQ ID NO: 46483 - RNA, 19 nt, Artificial Sequence
  Sense Oligo
augccuuucucuccaaguc

SEQ ID NO: 46484 - RNA, 19 nt, Artificial Sequence
  Antisense Oligo
gacuuggagagaaaggcau

SEQ ID NO: 46485 - RNA, 19 nt, Artificial Sequence
  Sense Oligo
ugccuuucucuccaagucc

SEQ ID NO: 46486 - RNA, 19 nt, Artificial Sequence
  Antisense Oligo
ggacuuggagagaaaggca

SEQ ID NO: 46487 - RNA, 19 nt, Artificial Sequence
  Sense Oligo
uucucuccaaguccagcgu

SEQ ID NO: 46488 - RNA, 19 nt, Artificial Sequence
  Antisense Oligo
acgcuggacuuggagagaa

SEQ ID NO: 46489 - RNA, 19 nt, Artificial Sequence
  Sense Oligo
ucucuccaaguccagcguc

SEQ ID NO: 46490 - RNA, 19 nt, Artificial Sequence
  Antisense Oligo
gacgcuggacuuggagaga

SEQ ID NO: 46491 - RNA, 19 nt, Artificial Sequence
  Sense Oligo
cucuccaaguccagcguca

SEQ ID NO: 46492 - RNA, 19 nt, Artificial Sequence
  Antisense Oligo
ugacgcuggacuuggagag

SEQ ID NO: 46493 - RNA, 19 nt, Artificial Sequence
  Sense Oligo
ucuccaaguccagcgucag

SEQ ID NO: 46494 - RNA, 19 nt, Artificial Sequence
  Antisense Oligo
cugacgcuggacuuggaga

SEQ ID NO: 46495 - RNA, 19 nt, Artificial Sequence
  Sense Oligo
cuccaaguccagcgucagc

SEQ ID NO: 46496 - RNA, 19 nt, Artificial Sequence
  Antisense Oligo
gcugacgcuggacuuggag

SEQ ID NO: 46497 - RNA, 19 nt, Artificial Sequence
  Sense Oligo
aaguccagcgucagcaaaa

SEQ ID NO: 46498 - RNA, 19 nt, Artificial Sequence
  Antisense Oligo
uuuugcugacgcuggacuu

SEQ ID NO: 46499 - RNA, 19 nt, Artificial Sequence
  Sense Oligo
agaucccguccucuggucg

SEQ ID NO: 46500 - RNA, 19 nt, Artificial Sequence
  Antisense Oligo
cgaccagaggacgggaucu

SEQ ID NO: 46501 - RNA, 19 nt, Artificial Sequence
  Sense Oligo
gaucccguccucuggucgu

SEQ ID NO: 46502 - RNA, 19 nt, Artificial Sequence
  Antisense Oligo
acgaccagaggacgggauc

SEQ ID NO: 46503 - RNA, 19 nt, Artificial Sequence
  Sense Oligo
aucccguccucuggucguu

SEQ ID NO: 46504 - RNA, 19 nt, Artificial Sequence
  Antisense Oligo
aacgaccagaggacgggau

SEQ ID NO: 46505 - RNA, 19 nt, Artificial Sequence
  Sense Oligo
ucccguccucuggucguug

SEQ ID NO: 46506 - RNA, 19 nt, Artificial Sequence
  Antisense Oligo
caacgaccagaggacggga

SEQ ID NO: 46507 - RNA, 19 nt, Artificial Sequence
  Sense Oligo
cccguccucuggucguuga

SEQ ID NO: 46508 - RNA, 19 nt, Artificial Sequence
  Antisense Oligo
ucaacgaccagaggacggg

SEQ ID NO: 46509 - RNA, 19 nt, Artificial Sequence
  Sense Oligo
ccguccucuggucguugau

SEQ ID NO: 46510 - RNA, 19 nt, Artificial Sequence
  Antisense Oligo
aucaacgaccagaggacgg

SEQ ID NO: 46511 - RNA, 19 nt, Artificial Sequence
  Sense Oligo
cguccucuggucguugaug

SEQ ID NO: 46512 - RNA, 19 nt, Artificial Sequence
  Antisense Oligo
caucaacgaccagaggacg

SEQ ID NO: 46513 - RNA, 19 nt, Artificial Sequence
  Sense Oligo
guccucuggucguugaugc

SEQ ID NO: 46514 - RNA, 19 nt, Artificial Sequence
  Antisense Oligo
gcaucaacgaccagaggac

SEQ ID NO: 46515 - RNA, 19 nt, Artificial Sequence
  Sense Oligo
uccucuggucguugaugcu

SEQ ID NO: 46516 - RNA, 19 nt, Artificial Sequence
  Antisense Oligo
agcaucaacgaccagagga

SEQ ID NO: 46517 - RNA, 19 nt, Artificial Sequence
  Sense Oligo
ccucuggucguugaugcug

SEQ ID NO: 46518 - RNA, 19 nt, Artificial Sequence
  Antisense Oligo
cagcaucaacgaccagagg

SEQ ID NO: 46519 - RNA, 19 nt, Artificial Sequence
  Sense Oligo
uggucguugaugcuggcca

SEQ ID NO: 46520 - RNA, 19 nt, Artificial Sequence
  Antisense Oligo
uggccagcaucaacgacca

SEQ ID NO: 46521 - RNA, 19 nt, Artificial Sequence
  Sense Oligo
ggucguugaugcuggccau

SEQ ID NO: 46522 - RNA, 19 nt, Artificial Sequence
  Antisense Oligo
auggccagcaucaacgacc

SEQ ID NO: 46523 - RNA, 19 nt, Artificial Sequence
  Sense Oligo
uguguuaccaugccucuuu

SEQ ID NO: 46524 - RNA, 19 nt, Artificial Sequence
  Antisense Oligo
aaagaggcaugguaacaca

SEQ ID NO: 46525 - RNA, 19 nt, Artificial Sequence
  Sense Oligo
guguuaccaugccucuuua

SEQ ID NO: 46526 - RNA, 19 nt, Artificial Sequence
  Antisense Oligo
uaaagaggcaugguaacac

SEQ ID NO: 46527 - RNA, 19 nt, Artificial Sequence
  Sense Oligo
uguuaccaugccucuuuag

SEQ ID NO: 46528 - RNA, 19 nt, Artificial Sequence
  Antisense Oligo
cuaaagaggcaugguaaca

SEQ ID NO: 46529 - RNA, 19 nt, Artificial Sequence
  Sense Oligo
uuaccaugccucuuuagaa

SEQ ID NO: 46530 - RNA, 19 nt, Artificial Sequence
  Antisense Oligo
uucuaaagaggcaugguaa

SEQ ID NO: 46531 - RNA, 19 nt, Artificial Sequence
  Sense Oligo
aagccaucgccagguucuu

SEQ ID NO: 46532 - RNA, 19 nt, Artificial Sequence
  Antisense Oligo
aagaaccuggcgauggcuu

SEQ ID NO: 46533 - RNA, 19 nt, Artificial Sequence
  Sense Oligo
aucgccagguucuuuccga

SEQ ID NO: 46534 - RNA, 19 nt, Artificial Sequence
  Antisense Oligo
ucggaaagaaccuggcgau

SEQ ID NO: 46535 - RNA, 19 nt, Artificial Sequence
  Sense Oligo
ucgccagguucuuuccgaa

SEQ ID NO: 46536 - RNA, 19 nt, Artificial Sequence
  Antisense Oligo
uucggaaagaaccuggcga

SEQ ID NO: 46537 - RNA, 19 nt, Artificial Sequence
  Sense Oligo
guaugacgacagcaggcug

SEQ ID NO: 46538 - RNA, 19 nt, Artificial Sequence
  Antisense Oligo
cagccugcugucgucauac

SEQ ID NO: 46539 - RNA, 19 nt, Artificial Sequence
  Sense Oligo
uaugacgacagcaggcugc

SEQ ID NO: 46540 - RNA, 19 nt, Artificial Sequence
  Antisense Oligo
gcagccugcugucgucaua

SEQ ID NO: 46541 - RNA, 19 nt, Artificial Sequence
  Sense Oligo
acacgggcacaggaucuuu

SEQ ID NO: 46542 - RNA, 19 nt, Artificial Sequence
  Antisense Oligo
aaagauccugugcccgugu

SEQ ID NO: 46543 - RNA, 19 nt, Artificial Sequence
  Sense Oligo
cacgggcacaggaucuuuu

SEQ ID NO: 46544 - RNA, 19 nt, Artificial Sequence
  Antisense Oligo
aaaagauccugugcccgug

SEQ ID NO: 46545 - RNA, 19 nt, Artificial Sequence
  Sense Oligo
uuuucuggacggcguaccu

SEQ ID NO: 46546 - RNA, 19 nt, Artificial Sequence
  Antisense Oligo
agguacgccguccagaaaa

SEQ ID NO: 46547 - RNA, 19 nt, Artificial Sequence
  Sense Oligo
cuggacggcguaccucuga

SEQ ID NO: 46548 - RNA, 19 nt, Artificial Sequence
  Antisense Oligo
ucagagguacgccguccag

SEQ ID NO: 46549 - RNA, 19 nt, Artificial Sequence
  Sense Oligo
uggacggcguaccucugag

SEQ ID NO: 46550 - RNA, 19 nt, Artificial Sequence
  Antisense Oligo
cucagagguacgccgucca

SEQ ID NO: 46551 - RNA, 19 nt, Artificial Sequence
  Sense Oligo
gacggcguaccucugagga

SEQ ID NO: 46552 - RNA, 19 nt, Artificial Sequence
  Antisense Oligo
uccucagagguacgccguc

SEQ ID NO: 46553 - RNA, 19 nt, Artificial Sequence
  Sense Oligo
aacgucuucaugauggucg

SEQ ID NO: 46554 - RNA, 19 nt, Artificial Sequence
  Antisense Oligo
cgaccaucaugaagacguu

SEQ ID NO: 46555 - RNA, 19 nt, Artificial Sequence
  Sense Oligo
acgucuucaugauggucgu

SEQ ID NO: 46556 - RNA, 19 nt, Artificial Sequence
  Antisense Oligo
acgaccaucaugaagacgu

SEQ ID NO: 46557 - RNA, 19 nt, Artificial Sequence
  Sense Oligo
cgucuucaugauggucguc

SEQ ID NO: 46558 - RNA, 19 nt, Artificial Sequence
  Antisense Oligo
gacgaccaucaugaagacg

SEQ ID NO: 46559 - RNA, 19 nt, Artificial Sequence
  Sense Oligo
gucuucaugauggucgucu

SEQ ID NO: 46560 - RNA, 19 nt, Artificial Sequence
  Antisense Oligo
agacgaccaucaugaagac

SEQ ID NO: 46561 - RNA, 19 nt, Artificial Sequence
  Sense Oligo
ucuucaugauggucgucug

SEQ ID NO: 46562 - RNA, 19 nt, Artificial Sequence
  Antisense Oligo
cagacgaccaucaugaaga

SEQ ID NO: 46563 - RNA, 19 nt, Artificial Sequence
  Sense Oligo
cuucaugauggucgucugc

SEQ ID NO: 46564 - RNA, 19 nt, Artificial Sequence
  Antisense Oligo
gcagacgaccaucaugaag

SEQ ID NO: 46565 - RNA, 19 nt, Artificial Sequence
  Sense Oligo
uucaugauggucgucugca

SEQ ID NO: 46566 - RNA, 19 nt, Artificial Sequence
  Antisense Oligo
ugcagacgaccaucaugaa

SEQ ID NO: 46567 - RNA, 19 nt, Artificial Sequence
  Sense Oligo
ucaugauggucgucugcau

SEQ ID NO: 46568 - RNA, 19 nt, Artificial Sequence
  Antisense Oligo
augcagacgaccaucauga

SEQ ID NO: 46569 - RNA, 19 nt, Artificial Sequence
  Sense Oligo
auggucgucugcaucgagc

SEQ ID NO: 46570 - RNA, 19 nt, Artificial Sequence
  Antisense Oligo
gcucgaugcagacgaccau

SEQ ID NO: 46571 - RNA, 19 nt, Artificial Sequence
  Sense Oligo
uggucgucugcaucgagcu

SEQ ID NO: 46572 - RNA, 19 nt, Artificial Sequence
  Antisense Oligo
agcucgaugcagacgacca

SEQ ID NO: 46573 - RNA, 19 nt, Artificial Sequence
  Sense Oligo
ggucgucugcaucgagcug

SEQ ID NO: 46574 - RNA, 19 nt, Artificial Sequence
  Antisense Oligo
cagcucgaugcagacgacc

SEQ ID NO: 46575 - RNA, 19 nt, Artificial Sequence
  Sense Oligo
gucgucugcaucgagcuga

SEQ ID NO: 46576 - RNA, 19 nt, Artificial Sequence
  Antisense Oligo
ucagcucgaugcagacgac

SEQ ID NO: 46577 - RNA, 19 nt, Artificial Sequence
  Sense Oligo
ucgucugcaucgagcugaa

SEQ ID NO: 46578 - RNA, 19 nt, Artificial Sequence
  Antisense Oligo
uucagcucgaugcagacga

SEQ ID NO: 46579 - RNA, 19 nt, Artificial Sequence
  Sense Oligo
cgucugcaucgagcugaag

SEQ ID NO: 46580 - RNA, 19 nt, Artificial Sequence
  Antisense Oligo
cuucagcucgaugcagacg

SEQ ID NO: 46581 - RNA, 19 nt, Artificial Sequence
  Sense Oligo
gucugcaucgagcugaaga

SEQ ID NO: 46582 - RNA, 19 nt, Artificial Sequence
  Antisense Oligo
ucuucagcucgaugcagac

SEQ ID NO: 46583 - RNA, 19 nt, Artificial Sequence
  Sense Oligo
ucugcaucgagcugaagau

SEQ ID NO: 46584 - RNA, 19 nt, Artificial Sequence
  Antisense Oligo
aucuucagcucgaugcaga

SEQ ID NO: 46585 - RNA, 19 nt, Artificial Sequence
  Sense Oligo
cugcaucgagcugaagauu

SEQ ID NO: 46586 - RNA, 19 nt, Artificial Sequence
  Antisense Oligo
aaucuucagcucgaugcag

SEQ ID NO: 46587 - RNA, 19 nt, Artificial Sequence
  Sense Oligo
ugcaucgagcugaagauuc

SEQ ID NO: 46588 - RNA, 19 nt, Artificial Sequence
  Antisense Oligo
gaaucuucagcucgaugca

SEQ ID NO: 46589 - RNA, 19 nt, Artificial Sequence
  Sense Oligo
gcaucgagcugaagauucc

SEQ ID NO: 46590 - RNA, 19 nt, Artificial Sequence
  Antisense Oligo
ggaaucuucagcucgaugc

SEQ ID NO: 46591 - RNA, 19 nt, Artificial Sequence
  Sense Oligo
ccggcagcuccaagucucu

SEQ ID NO: 46592 - RNA, 19 nt, Artificial Sequence
  Antisense Oligo
agagacuuggagcugccgg

SEQ ID NO: 46593 - RNA, 19 nt, Artificial Sequence
  Sense Oligo
cggcagcuccaagucucuc

SEQ ID NO: 46594 - RNA, 19 nt, Artificial Sequence
  Antisense Oligo
gagagacuuggagcugccg

SEQ ID NO: 46595 - RNA, 19 nt, Artificial Sequence
  Sense Oligo
ggcagcuccaagucucucg

SEQ ID NO: 46596 - RNA, 19 nt, Artificial Sequence
  Antisense Oligo
cgagagacuuggagcugcc

SEQ ID NO: 46597 - RNA, 19 nt, Artificial Sequence
  Sense Oligo
gcagcuccaagucucucgc

SEQ ID NO: 46598 - RNA, 19 nt, Artificial Sequence
  Antisense Oligo
gcgagagacuuggagcugc

SEQ ID NO: 46599 - RNA, 19 nt, Artificial Sequence
  Sense Oligo
cagcuccaagucucucgcc

SEQ ID NO: 46600 - RNA, 19 nt, Artificial Sequence
  Antisense Oligo
ggcgagagacuuggagcug

SEQ ID NO: 46601 - RNA, 19 nt, Artificial Sequence
  Sense Oligo
agcuccaagucucucgcca

SEQ ID NO: 46602 - RNA, 19 nt, Artificial Sequence
  Antisense Oligo
uggcgagagacuuggagcu

SEQ ID NO: 46603 - RNA, 19 nt, Artificial Sequence
  Sense Oligo
gcuccaagucucucgccaa

SEQ ID NO: 46604 - RNA, 19 nt, Artificial Sequence
  Antisense Oligo
uuggcgagagacuuggagc

SEQ ID NO: 46605 - RNA, 19 nt, Artificial Sequence
  Sense Oligo
cuccaagucucucgccaag

SEQ ID NO: 46606 - RNA, 19 nt, Artificial Sequence
  Antisense Oligo
cuuggcgagagacuuggag

SEQ ID NO: 46607 - RNA, 19 nt, Artificial Sequence
  Sense Oligo
uccaagucucucgccaaga

SEQ ID NO: 46608 - RNA, 19 nt, Artificial Sequence
  Antisense Oligo
ucuuggcgagagacuugga

SEQ ID NO: 46609 - RNA, 19 nt, Artificial Sequence
  Sense Oligo
ucucucgccaagaccaucg

SEQ ID NO: 46610 - RNA, 19 nt, Artificial Sequence
  Antisense Oligo
cgauggucuuggcgagaga

SEQ ID NO: 46611 - RNA, 19 nt, Artificial Sequence
  Sense Oligo
cucucgccaagaccaucgu

SEQ ID NO: 46612 - RNA, 19 nt, Artificial Sequence
  Antisense Oligo
acgauggucuuggcgagag

SEQ ID NO: 46613 - RNA, 19 nt, Artificial Sequence
  Sense Oligo
ucucgccaagaccaucgug

SEQ ID NO: 46614 - RNA, 19 nt, Artificial Sequence
  Antisense Oligo
cacgauggucuuggcgaga

SEQ ID NO: 46615 - RNA, 19 nt, Artificial Sequence
  Sense Oligo
cucgccaagaccaucgugg

SEQ ID NO: 46616 - RNA, 19 nt, Artificial Sequence
  Antisense Oligo
ccacgauggucuuggcgag

SEQ ID NO: 46617 - RNA, 19 nt, Artificial Sequence
  Sense Oligo
ccggcugccuacucagauc

SEQ ID NO: 46618 - RNA, 19 nt, Artificial Sequence
  Antisense Oligo
gaucugaguaggcagccgg

SEQ ID NO: 46619 - RNA, 19 nt, Artificial Sequence
  Sense Oligo
cggcugccuacucagaucu

SEQ ID NO: 46620 - RNA, 19 nt, Artificial Sequence
  Antisense Oligo
agaucugaguaggcagccg

SEQ ID NO: 46621 - RNA, 19 nt, Artificial Sequence
  Sense Oligo
ggcugccuacucagaucuc

SEQ ID NO: 46622 - RNA, 19 nt, Artificial Sequence
  Antisense Oligo
gagaucugaguaggcagcc

SEQ ID NO: 46623 - RNA, 19 nt, Artificial Sequence
  Sense Oligo
gcugccuacucagaucucu

SEQ ID NO: 46624 - RNA, 19 nt, Artificial Sequence
  Antisense Oligo
agagaucugaguaggcagc

SEQ ID NO: 46625 - RNA, 19 nt, Artificial Sequence
  Sense Oligo
ugccuacucagaucucuuc

SEQ ID NO: 46626 - RNA, 19 nt, Artificial Sequence
  Antisense Oligo
gaagagaucugaguaggca

SEQ ID NO: 46627 - RNA, 19 nt, Artificial Sequence
  Sense Oligo
uacucagaucucuuccgca

SEQ ID NO: 46628 - RNA, 19 nt, Artificial Sequence
  Antisense Oligo
ugcggaagagaucugagua

SEQ ID NO: 46629 - RNA, 19 nt, Artificial Sequence
  Sense Oligo
acucagaucucuuccgcag

SEQ ID NO: 46630 - RNA, 19 nt, Artificial Sequence
  Antisense Oligo
cugcggaagagaucugagu

SEQ ID NO: 46631 - RNA, 19 nt, Artificial Sequence
  Sense Oligo
cucagaucucuuccgcagc

SEQ ID NO: 46632 - RNA, 19 nt, Artificial Sequence
  Antisense Oligo
gcugcggaagagaucugag

SEQ ID NO: 46633 - RNA, 19 nt, Artificial Sequence
  Sense Oligo
agguccaccugguguccuu

SEQ ID NO: 46634 - RNA, 19 nt, Artificial Sequence
  Antisense Oligo
aaggacaccagguggaccu

SEQ ID NO: 46635 - RNA, 19 nt, Artificial Sequence
  Sense Oligo
gguccaccugguguccuuc

SEQ ID NO: 46636 - RNA, 19 nt, Artificial Sequence
  Antisense Oligo
gaaggacaccagguggacc

SEQ ID NO: 46637 - RNA, 19 nt, Artificial Sequence
  Sense Oligo
guccaccugguguccuucc

SEQ ID NO: 46638 - RNA, 19 nt, Artificial Sequence
  Antisense Oligo
ggaaggacaccagguggac

SEQ ID NO: 46639 - RNA, 19 nt, Artificial Sequence
  Sense Oligo
uccaccugguguccuucca

SEQ ID NO: 46640 - RNA, 19 nt, Artificial Sequence
  Antisense Oligo
uggaaggacaccaggugga

SEQ ID NO: 46641 - RNA, 19 nt, Artificial Sequence
  Sense Oligo
caucaucagcaccuuccgg

SEQ ID NO: 46642 - RNA, 19 nt, Artificial Sequence
  Antisense Oligo
ccggaaggugcugaugaug

SEQ ID NO: 46643 - RNA, 19 nt, Artificial Sequence
  Sense Oligo
aucaucagcaccuuccggc

SEQ ID NO: 46644 - RNA, 19 nt, Artificial Sequence
  Antisense Oligo
gccggaaggugcugaugau

SEQ ID NO: 46645 - RNA, 19 nt, Artificial Sequence
  Sense Oligo
caucagcaccuuccggcag

SEQ ID NO: 46646 - RNA, 19 nt, Artificial Sequence
  Antisense Oligo
cugccggaaggugcugaug

SEQ ID NO: 46647 - RNA, 19 nt, Artificial Sequence
  Sense Oligo
aucagcaccuuccggcagu

SEQ ID NO: 46648 - RNA, 19 nt, Artificial Sequence
  Antisense Oligo
acugccggaaggugcugau

SEQ ID NO: 46649 - RNA, 19 nt, Artificial Sequence
  Sense Oligo
gaaggaccugcagcaguac

SEQ ID NO: 46650 - RNA, 19 nt, Artificial Sequence
  Antisense Oligo
guacugcugcagguccuuc

SEQ ID NO: 46651 - RNA, 19 nt, Artificial Sequence
  Sense Oligo
aaggaccugcagcaguacg

SEQ ID NO: 46652 - RNA, 19 nt, Artificial Sequence
  Antisense Oligo
cguacugcugcagguccuu

SEQ ID NO: 46653 - RNA, 19 nt, Artificial Sequence
  Sense Oligo
aggaccugcagcaguacgu

SEQ ID NO: 46654 - RNA, 19 nt, Artificial Sequence
  Antisense Oligo
acguacugcugcagguccu

SEQ ID NO: 46655 - RNA, 19 nt, Artificial Sequence
  Sense Oligo
ggaccugcagcaguacguc

SEQ ID NO: 46656 - RNA, 19 nt, Artificial Sequence
  Antisense Oligo
gacguacugcugcaggucc

SEQ ID NO: 46657 - RNA, 19 nt, Artificial Sequence
  Sense Oligo
gaccugcagcaguacgucu

SEQ ID NO: 46658 - RNA, 19 nt, Artificial Sequence
  Antisense Oligo
agacguacugcugcagguc

SEQ ID NO: 46659 - RNA, 19 nt, Artificial Sequence
  Sense Oligo
accugcagcaguacgucuc

SEQ ID NO: 46660 - RNA, 19 nt, Artificial Sequence
  Antisense Oligo
gagacguacugcugcaggu

SEQ ID NO: 46661 - RNA, 19 nt, Artificial Sequence
  Sense Oligo
ccugcagcaguacgucucu

SEQ ID NO: 46662 - RNA, 19 nt, Artificial Sequence
  Antisense Oligo
agagacguacugcugcagg

SEQ ID NO: 46663 - RNA, 19 nt, Artificial Sequence
  Sense Oligo
cugcagcaguacgucucug

SEQ ID NO: 46664 - RNA, 19 nt, Artificial Sequence
  Antisense Oligo
cagagacguacugcugcag

SEQ ID NO: 46665 - RNA, 19 nt, Artificial Sequence
  Sense Oligo
ugcagcaguacgucucugu

SEQ ID NO: 46666 - RNA, 19 nt, Artificial Sequence
  Antisense Oligo
acagagacguacugcugca

SEQ ID NO: 46667 - RNA, 19 nt, Artificial Sequence
  Sense Oligo
gcagcaguacgucucugug

SEQ ID NO: 46668 - RNA, 19 nt, Artificial Sequence
  Antisense Oligo
cacagagacguacugcugc

SEQ ID NO: 46669 - RNA, 19 nt, Artificial Sequence
  Sense Oligo
cagcaguacgucucugugg

SEQ ID NO: 46670 - RNA, 19 nt, Artificial Sequence
  Antisense Oligo
ccacagagacguacugcug

SEQ ID NO: 46671 - RNA, 19 nt, Artificial Sequence
  Sense Oligo
aguacgucucugugguggu

SEQ ID NO: 46672 - RNA, 19 nt, Artificial Sequence
  Antisense Oligo
accaccacagagacguacu

SEQ ID NO: 46673 - RNA, 19 nt, Artificial Sequence
  Sense Oligo
guacgucucugugguggug

SEQ ID NO: 46674 - RNA, 19 nt, Artificial Sequence
  Antisense Oligo
caccaccacagagacguac

SEQ ID NO: 46675 - RNA, 19 nt, Artificial Sequence
  Sense Oligo
uacgucucugugguggugu

SEQ ID NO: 46676 - RNA, 19 nt, Artificial Sequence
  Antisense Oligo
acaccaccacagagacgua

SEQ ID NO: 46677 - RNA, 19 nt, Artificial Sequence
  Sense Oligo
acgucucuguggugguguu

SEQ ID NO: 46678 - RNA, 19 nt, Artificial Sequence
  Antisense Oligo
aacaccaccacagagacgu

SEQ ID NO: 46679 - RNA, 19 nt, Artificial Sequence
  Sense Oligo
cgucucuguggugguguua

SEQ ID NO: 46680 - RNA, 19 nt, Artificial Sequence
  Antisense Oligo
uaacaccaccacagagacg

SEQ ID NO: 46681 - RNA, 19 nt, Artificial Sequence
  Sense Oligo
gucucuguggugguguuag

SEQ ID NO: 46682 - RNA, 19 nt, Artificial Sequence
  Antisense Oligo
cuaacaccaccacagagac

SEQ ID NO: 46683 - RNA, 19 nt, Artificial Sequence
  Sense Oligo
ucucuguggugguguuaga

SEQ ID NO: 46684 - RNA, 19 nt, Artificial Sequence
  Antisense Oligo
ucuaacaccaccacagaga

SEQ ID NO: 46685 - RNA, 19 nt, Artificial Sequence
  Sense Oligo
cucuguggugguguuagau

SEQ ID NO: 46686 - RNA, 19 nt, Artificial Sequence
  Antisense Oligo
aucuaacaccaccacagag

SEQ ID NO: 46687 - RNA, 19 nt, Artificial Sequence
  Sense Oligo
uguggugguguuagaugag

SEQ ID NO: 46688 - RNA, 19 nt, Artificial Sequence
  Antisense Oligo
cucaucuaacaccaccaca

SEQ ID NO: 46689 - RNA, 19 nt, Artificial Sequence
  Sense Oligo
guggugguguuagaugagg

SEQ ID NO: 46690 - RNA, 19 nt, Artificial Sequence
  Antisense Oligo
ccucaucuaacaccaccac

SEQ ID NO: 46691 - RNA, 19 nt, Artificial Sequence
  Sense Oligo
uggugguguuagaugaggu

SEQ ID NO: 46692 - RNA, 19 nt, Artificial Sequence
  Antisense Oligo
accucaucuaacaccacca

SEQ ID NO: 46693 - RNA, 19 nt, Artificial Sequence
  Sense Oligo
ggugguguuagaugaggug

SEQ ID NO: 46694 - RNA, 19 nt, Artificial Sequence
  Antisense Oligo
caccucaucuaacaccacc

SEQ ID NO: 46695 - RNA, 19 nt, Artificial Sequence
  Sense Oligo
gugguguuagaugaggugg

SEQ ID NO: 46696 - RNA, 19 nt, Artificial Sequence
  Antisense Oligo
ccaccucaucuaacaccac

SEQ ID NO: 46697 - RNA, 19 nt, Artificial Sequence
  Sense Oligo
ugguguuagaugagguggg

SEQ ID NO: 46698 - RNA, 19 nt, Artificial Sequence
  Antisense Oligo
cccaccucaucuaacacca

SEQ ID NO: 46699 - RNA, 19 nt, Artificial Sequence
  Sense Oligo
cuggcggaagacucaccca

SEQ ID NO: 46700 - RNA, 19 nt, Artificial Sequence
  Antisense Oligo
ugggugagucuuccgccag

SEQ ID NO: 46701 - RNA, 19 nt, Artificial Sequence
  Sense Oligo
uggcggaagacucacccaa

SEQ ID NO: 46702 - RNA, 19 nt, Artificial Sequence
  Antisense Oligo
uugggugagucuuccgcca

SEQ ID NO: 46703 - RNA, 19 nt, Artificial Sequence
  Sense Oligo
ggcggaagacucacccaaa

SEQ ID NO: 46704 - RNA, 19 nt, Artificial Sequence
  Antisense Oligo
uuugggugagucuuccgcc

SEQ ID NO: 46705 - RNA, 19 nt, Artificial Sequence
  Sense Oligo
gcggaagacucacccaaaa

SEQ ID NO: 46706 - RNA, 19 nt, Artificial Sequence
  Antisense Oligo
uuuugggugagucuuccgc

SEQ ID NO: 46707 - RNA, 19 nt, Artificial Sequence
  Sense Oligo
cggaagacucacccaaaau

SEQ ID NO: 46708 - RNA, 19 nt, Artificial Sequence
  Antisense Oligo
auuuugggugagucuuccg

SEQ ID NO: 46709 - RNA, 19 nt, Artificial Sequence
  Sense Oligo
aagacucacccaaaaugcc

SEQ ID NO: 46710 - RNA, 19 nt, Artificial Sequence
  Antisense Oligo
ggcauuuugggugagucuu

SEQ ID NO: 46711 - RNA, 19 nt, Artificial Sequence
  Sense Oligo
agacucacccaaaaugccc

SEQ ID NO: 46712 - RNA, 19 nt, Artificial Sequence
  Antisense Oligo
gggcauuuugggugagucu

SEQ ID NO: 46713 - RNA, 19 nt, Artificial Sequence
  Sense Oligo
ccugaagacucugcacccg

SEQ ID NO: 46714 - RNA, 19 nt, Artificial Sequence
  Antisense Oligo
cgggugcagagucuucagg

SEQ ID NO: 46715 - RNA, 19 nt, Artificial Sequence
  Sense Oligo
cugaagacucugcacccgc

SEQ ID NO: 46716 - RNA, 19 nt, Artificial Sequence
  Antisense Oligo
gcgggugcagagucuucag

SEQ ID NO: 46717 - RNA, 19 nt, Artificial Sequence
  Sense Oligo
ugaagacucugcacccgcu

SEQ ID NO: 46718 - RNA, 19 nt, Artificial Sequence
  Antisense Oligo
agcgggugcagagucuuca

SEQ ID NO: 46719 - RNA, 19 nt, Artificial Sequence
  Sense Oligo
gaagacucugcacccgcug

SEQ ID NO: 46720 - RNA, 19 nt, Artificial Sequence
  Antisense Oligo
cagcgggugcagagucuuc

SEQ ID NO: 46721 - RNA, 19 nt, Artificial Sequence
  Sense Oligo
aagacucugcacccgcugc

SEQ ID NO: 46722 - RNA, 19 nt, Artificial Sequence
  Antisense Oligo
gcagcgggugcagagucuu

SEQ ID NO: 46723 - RNA, 19 nt, Artificial Sequence
  Sense Oligo
cgcugcuggaagacggaug

SEQ ID NO: 46724 - RNA, 19 nt, Artificial Sequence
  Antisense Oligo
cauccgucuuccagcagcg

SEQ ID NO: 46725 - RNA, 19 nt, Artificial Sequence
  Sense Oligo
gcuggaagacggaugcauu

SEQ ID NO: 46726 - RNA, 19 nt, Artificial Sequence
  Antisense Oligo
aaugcauccgucuuccagc

SEQ ID NO: 46727 - RNA, 19 nt, Artificial Sequence
  Sense Oligo
cuggaagacggaugcauug

SEQ ID NO: 46728 - RNA, 19 nt, Artificial Sequence
  Antisense Oligo
caaugcauccgucuuccag

SEQ ID NO: 46729 - RNA, 19 nt, Artificial Sequence
  Sense Oligo
uggaagacggaugcauuga

SEQ ID NO: 46730 - RNA, 19 nt, Artificial Sequence
  Antisense Oligo
ucaaugcauccgucuucca

SEQ ID NO: 46731 - RNA, 19 nt, Artificial Sequence
  Sense Oligo
ggaagacggaugcauugaa

SEQ ID NO: 46732 - RNA, 19 nt, Artificial Sequence
  Antisense Oligo
uucaaugcauccgucuucc

SEQ ID NO: 46733 - RNA, 19 nt, Artificial Sequence
  Sense Oligo
gaagacggaugcauugaag

SEQ ID NO: 46734 - RNA, 19 nt, Artificial Sequence
  Antisense Oligo
cuucaaugcauccgucuuc

SEQ ID NO: 46735 - RNA, 19 nt, Artificial Sequence
  Sense Oligo
aagacggaugcauugaaga

SEQ ID NO: 46736 - RNA, 19 nt, Artificial Sequence
  Antisense Oligo
ucuucaaugcauccgucuu

SEQ ID NO: 46737 - RNA, 19 nt, Artificial Sequence
  Sense Oligo
agacggaugcauugaagac

SEQ ID NO: 46738 - RNA, 19 nt, Artificial Sequence
  Antisense Oligo
gucuucaaugcauccgucu

SEQ ID NO: 46739 - RNA, 19 nt, Artificial Sequence
  Sense Oligo
gacggaugcauugaagacg

SEQ ID NO: 46740 - RNA, 19 nt, Artificial Sequence
  Antisense Oligo
cgucuucaaugcauccguc

SEQ ID NO: 46741 - RNA, 19 nt, Artificial Sequence
  Sense Oligo
acggaugcauugaagacga

SEQ ID NO: 46742 - RNA, 19 nt, Artificial Sequence
  Antisense Oligo
ucgucuucaaugcauccgu

SEQ ID NO: 46743 - RNA, 19 nt, Artificial Sequence
  Sense Oligo
cggaugcauugaagacgau

SEQ ID NO: 46744 - RNA, 19 nt, Artificial Sequence
  Antisense Oligo
aucgucuucaaugcauccg

SEQ ID NO: 46745 - RNA, 19 nt, Artificial Sequence
  Sense Oligo
ggaugcauugaagacgauc

SEQ ID NO: 46746 - RNA, 19 nt, Artificial Sequence
  Antisense Oligo
gaucgucuucaaugcaucc

SEQ ID NO: 46747 - RNA, 19 nt, Artificial Sequence
  Sense Oligo
gaugcauugaagacgaucc

SEQ ID NO: 46748 - RNA, 19 nt, Artificial Sequence
  Antisense Oligo
ggaucgucuucaaugcauc

SEQ ID NO: 46749 - RNA, 19 nt, Artificial Sequence
  Sense Oligo
augcauugaagacgauccc

SEQ ID NO: 46750 - RNA, 19 nt, Artificial Sequence
  Antisense Oligo
gggaucgucuucaaugcau

SEQ ID NO: 46751 - RNA, 19 nt, Artificial Sequence
  Sense Oligo
ugcauugaagacgaucccg

SEQ ID NO: 46752 - RNA, 19 nt, Artificial Sequence
  Antisense Oligo
cgggaucgucuucaaugca

SEQ ID NO: 46753 - RNA, 19 nt, Artificial Sequence
  Sense Oligo
gcauugaagacgaucccgc

SEQ ID NO: 46754 - RNA, 19 nt, Artificial Sequence
  Antisense Oligo
gcgggaucgucuucaaugc

SEQ ID NO: 46755 - RNA, 19 nt, Artificial Sequence
  Sense Oligo
aaaaggucggcuucguggg

SEQ ID NO: 46756 - RNA, 19 nt, Artificial Sequence
  Antisense Oligo
cccacgaagccgaccuuuu

SEQ ID NO: 46757 - RNA, 19 nt, Artificial Sequence
  Sense Oligo
aaaggucggcuucgugggc

SEQ ID NO: 46758 - RNA, 19 nt, Artificial Sequence
  Antisense Oligo
gcccacgaagccgaccuuu

SEQ ID NO: 46759 - RNA, 19 nt, Artificial Sequence
  Sense Oligo
aaggucggcuucgugggca

SEQ ID NO: 46760 - RNA, 19 nt, Artificial Sequence
  Antisense Oligo
ugcccacgaagccgaccuu

SEQ ID NO: 46761 - RNA, 19 nt, Artificial Sequence
  Sense Oligo
aggucggcuucgugggcau

SEQ ID NO: 46762 - RNA, 19 nt, Artificial Sequence
  Antisense Oligo
augcccacgaagccgaccu

SEQ ID NO: 46763 - RNA, 19 nt, Artificial Sequence
  Sense Oligo
gucggcuucgugggcaucu

SEQ ID NO: 46764 - RNA, 19 nt, Artificial Sequence
  Antisense Oligo
agaugcccacgaagccgac

SEQ ID NO: 46765 - RNA, 19 nt, Artificial Sequence
  Sense Oligo
gcuucgugggcaucuccaa

SEQ ID NO: 46766 - RNA, 19 nt, Artificial Sequence
  Antisense Oligo
uuggagaugcccacgaagc

SEQ ID NO: 46767 - RNA, 19 nt, Artificial Sequence
  Sense Oligo
cuucgugggcaucuccaac

SEQ ID NO: 46768 - RNA, 19 nt, Artificial Sequence
  Antisense Oligo
guuggagaugcccacgaag

SEQ ID NO: 46769 - RNA, 19 nt, Artificial Sequence
  Sense Oligo
uucgugggcaucuccaacu

SEQ ID NO: 46770 - RNA, 19 nt, Artificial Sequence
  Antisense Oligo
aguuggagaugcccacgaa

SEQ ID NO: 46771 - RNA, 19 nt, Artificial Sequence
  Sense Oligo
ucgugggcaucuccaacug

SEQ ID NO: 46772 - RNA, 19 nt, Artificial Sequence
  Antisense Oligo
caguuggagaugcccacga

SEQ ID NO: 46773 - RNA, 19 nt, Artificial Sequence
  Sense Oligo
cgugggcaucuccaacugg

SEQ ID NO: 46774 - RNA, 19 nt, Artificial Sequence
  Antisense Oligo
ccaguuggagaugcccacg

SEQ ID NO: 46775 - RNA, 19 nt, Artificial Sequence
  Sense Oligo
gugggcaucuccaacuggg

SEQ ID NO: 46776 - RNA, 19 nt, Artificial Sequence
  Antisense Oligo
cccaguuggagaugcccac

SEQ ID NO: 46777 - RNA, 19 nt, Artificial Sequence
  Sense Oligo
ugggcaucuccaacugggc

SEQ ID NO: 46778 - RNA, 19 nt, Artificial Sequence
  Antisense Oligo
gcccaguuggagaugccca

SEQ ID NO: 46779 - RNA, 19 nt, Artificial Sequence
  Sense Oligo
uugacccugccaagaugaa

SEQ ID NO: 46780 - RNA, 19 nt, Artificial Sequence
  Antisense Oligo
uucaucuuggcagggucaa

SEQ ID NO: 46781 - RNA, 19 nt, Artificial Sequence
  Sense Oligo
uuuugugucacguggcagc

SEQ ID NO: 46782 - RNA, 19 nt, Artificial Sequence
  Antisense Oligo
gcugccacgugacacaaaa

SEQ ID NO: 46783 - RNA, 19 nt, Artificial Sequence
  Sense Oligo
agagcgccaagggcaucug

SEQ ID NO: 46784 - RNA, 19 nt, Artificial Sequence
  Antisense Oligo
cagaugcccuuggcgcucu

SEQ ID NO: 46785 - RNA, 19 nt, Artificial Sequence
  Sense Oligo
agcgccaagggcaucugcu

SEQ ID NO: 46786 - RNA, 19 nt, Artificial Sequence
  Antisense Oligo
agcagaugcccuuggcgcu

SEQ ID NO: 46787 - RNA, 19 nt, Artificial Sequence
  Sense Oligo
uccucagacauccucgucc

SEQ ID NO: 46788 - RNA, 19 nt, Artificial Sequence
  Antisense Oligo
ggacgaggaugucugagga

SEQ ID NO: 46789 - RNA, 19 nt, Artificial Sequence
  Sense Oligo
ccucagacauccucgucca

SEQ ID NO: 46790 - RNA, 19 nt, Artificial Sequence
  Antisense Oligo
uggacgaggaugucugagg

SEQ ID NO: 46791 - RNA, 19 nt, Artificial Sequence
  Sense Oligo
uacuuugcguccuuugcca

SEQ ID NO: 46792 - RNA, 19 nt, Artificial Sequence
  Antisense Oligo
uggcaaaggacgcaaagua

SEQ ID NO: 46793 - RNA, 19 nt, Artificial Sequence
  Sense Oligo
aacgguguguaagcgccag

SEQ ID NO: 46794 - RNA, 19 nt, Artificial Sequence
  Antisense Oligo
cuggcgcuuacacaccguu

SEQ ID NO: 46795 - RNA, 19 nt, Artificial Sequence
  Sense Oligo
guguguaagcgccaggaca

SEQ ID NO: 46796 - RNA, 19 nt, Artificial Sequence
  Antisense Oligo
uguccuggcgcuuacacac

SEQ ID NO: 46797 - RNA, 19 nt, Artificial Sequence
  Sense Oligo
caaggaauucuucgggcuu

SEQ ID NO: 46798 - RNA, 19 nt, Artificial Sequence
  Antisense Oligo
aagcccgaagaauuccuug

SEQ ID NO: 46799 - RNA, 19 nt, Artificial Sequence
  Sense Oligo
aaggaauucuucgggcuuc

SEQ ID NO: 46800 - RNA, 19 nt, Artificial Sequence
  Antisense Oligo
gaagcccgaagaauuccuu

SEQ ID NO: 46801 - RNA, 19 nt, Artificial Sequence
  Sense Oligo
aggaauucuucgggcuucg

SEQ ID NO: 46802 - RNA, 19 nt, Artificial Sequence
  Antisense Oligo
cgaagcccgaagaauuccu

SEQ ID NO: 46803 - RNA, 19 nt, Artificial Sequence
  Sense Oligo
ggaauucuucgggcuucgu

SEQ ID NO: 46804 - RNA, 19 nt, Artificial Sequence
  Antisense Oligo
acgaagcccgaagaauucc

SEQ ID NO: 46805 - RNA, 19 nt, Artificial Sequence
  Sense Oligo
gaauucuucgggcuucgug

SEQ ID NO: 46806 - RNA, 19 nt, Artificial Sequence
  Antisense Oligo
cacgaagcccgaagaauuc

SEQ ID NO: 46807 - RNA, 19 nt, Artificial Sequence
  Sense Oligo
aauucuucgggcuucguga

SEQ ID NO: 46808 - RNA, 19 nt, Artificial Sequence
  Antisense Oligo
ucacgaagcccgaagaauu

SEQ ID NO: 46809 - RNA, 19 nt, Artificial Sequence
  Sense Oligo
auucuucgggcuucgugac

SEQ ID NO: 46810 - RNA, 19 nt, Artificial Sequence
  Antisense Oligo
gucacgaagcccgaagaau

SEQ ID NO: 46811 - RNA, 19 nt, Artificial Sequence
  Sense Oligo
uucuucgggcuucgugacu

SEQ ID NO: 46812 - RNA, 19 nt, Artificial Sequence
  Antisense Oligo
agucacgaagcccgaagaa

SEQ ID NO: 46813 - RNA, 19 nt, Artificial Sequence
  Sense Oligo
ucuucgggcuucgugacua

SEQ ID NO: 46814 - RNA, 19 nt, Artificial Sequence
  Antisense Oligo
uagucacgaagcccgaaga

SEQ ID NO: 46815 - RNA, 19 nt, Artificial Sequence
  Sense Oligo
cuucgggcuucgugacuac

SEQ ID NO: 46816 - RNA, 19 nt, Artificial Sequence
  Antisense Oligo
guagucacgaagcccgaag

SEQ ID NO: 46817 - RNA, 19 nt, Artificial Sequence
  Sense Oligo
uucgggcuucgugacuacu

SEQ ID NO: 46818 - RNA, 19 nt, Artificial Sequence
  Antisense Oligo
aguagucacgaagcccgaa

SEQ ID NO: 46819 - RNA, 19 nt, Artificial Sequence
  Sense Oligo
ucgggcuucgugacuacua

SEQ ID NO: 46820 - RNA, 19 nt, Artificial Sequence
  Antisense Oligo
uaguagucacgaagcccga

SEQ ID NO: 46821 - RNA, 19 nt, Artificial Sequence
  Sense Oligo
cgggcuucgugacuacuac

SEQ ID NO: 46822 - RNA, 19 nt, Artificial Sequence
  Antisense Oligo
guaguagucacgaagcccg

SEQ ID NO: 46823 - RNA, 19 nt, Artificial Sequence
  Sense Oligo
gggcuucgugacuacuaca

SEQ ID NO: 46824 - RNA, 19 nt, Artificial Sequence
  Antisense Oligo
uguaguagucacgaagccc

SEQ ID NO: 46825 - RNA, 19 nt, Artificial Sequence
  Sense Oligo
ggcuucgugacuacuacag

SEQ ID NO: 46826 - RNA, 19 nt, Artificial Sequence
  Antisense Oligo
cuguaguagucacgaagcc

SEQ ID NO: 46827 - RNA, 19 nt, Artificial Sequence
  Sense Oligo
gcuucgugacuacuacagc

SEQ ID NO: 46828 - RNA, 19 nt, Artificial Sequence
  Antisense Oligo
gcuguaguagucacgaagc

SEQ ID NO: 46829 - RNA, 19 nt, Artificial Sequence
  Sense Oligo
ugacuacuacagccucauc

SEQ ID NO: 46830 - RNA, 19 nt, Artificial Sequence
  Antisense Oligo
gaugaggcuguaguaguca

SEQ ID NO: 46831 - RNA, 19 nt, Artificial Sequence
  Sense Oligo
gacuacuacagccucauca

SEQ ID NO: 46832 - RNA, 19 nt, Artificial Sequence
  Antisense Oligo
ugaugaggcuguaguaguc

SEQ ID NO: 46833 - RNA, 19 nt, Artificial Sequence
  Sense Oligo
acuacuacagccucaucaa

SEQ ID NO: 46834 - RNA, 19 nt, Artificial Sequence
  Antisense Oligo
uugaugaggcuguaguagu

SEQ ID NO: 46835 - RNA, 19 nt, Artificial Sequence
  Sense Oligo
cuacuacagccucaucaaa

SEQ ID NO: 46836 - RNA, 19 nt, Artificial Sequence
  Antisense Oligo
uuugaugaggcuguaguag

SEQ ID NO: 46837 - RNA, 19 nt, Artificial Sequence
  Sense Oligo
uacuacagccucaucaaaa

SEQ ID NO: 46838 - RNA, 19 nt, Artificial Sequence
  Antisense Oligo
uuuugaugaggcuguagua

SEQ ID NO: 46839 - RNA, 19 nt, Artificial Sequence
  Sense Oligo
acuacagccucaucaaaau

SEQ ID NO: 46840 - RNA, 19 nt, Artificial Sequence
  Antisense Oligo
auuuugaugaggcuguagu

SEQ ID NO: 46841 - RNA, 19 nt, Artificial Sequence
  Sense Oligo
cuacagccucaucaaaaug

SEQ ID NO: 46842 - RNA, 19 nt, Artificial Sequence
  Antisense Oligo
cauuuugaugaggcuguag

SEQ ID NO: 46843 - RNA, 19 nt, Artificial Sequence
  Sense Oligo
uacagccucaucaaaaugg

SEQ ID NO: 46844 - RNA, 19 nt, Artificial Sequence
  Antisense Oligo
ccauuuugaugaggcugua

SEQ ID NO: 46845 - RNA, 19 nt, Artificial Sequence
  Sense Oligo
acagccucaucaaaauggu

SEQ ID NO: 46846 - RNA, 19 nt, Artificial Sequence
  Antisense Oligo
accauuuugaugaggcugu

SEQ ID NO: 46847 - RNA, 19 nt, Artificial Sequence
  Sense Oligo
cagccucaucaaaaugguc

SEQ ID NO: 46848 - RNA, 19 nt, Artificial Sequence
  Antisense Oligo
gaccauuuugaugaggcug

SEQ ID NO: 46849 - RNA, 19 nt, Artificial Sequence
  Sense Oligo
agccucaucaaaauggucu

SEQ ID NO: 46850 - RNA, 19 nt, Artificial Sequence
  Antisense Oligo
agaccauuuugaugaggcu

SEQ ID NO: 46851 - RNA, 19 nt, Artificial Sequence
  Sense Oligo
gccucaucaaaauggucuu

SEQ ID NO: 46852 - RNA, 19 nt, Artificial Sequence
  Antisense Oligo
aagaccauuuugaugaggc

SEQ ID NO: 46853 - RNA, 19 nt, Artificial Sequence
  Sense Oligo
gcagcaaaggcuucaaaua

SEQ ID NO: 46854 - RNA, 19 nt, Artificial Sequence
  Antisense Oligo
uauuugaagccuuugcugc

SEQ ID NO: 46855 - RNA, 19 nt, Artificial Sequence
  Sense Oligo
aagacauugcacaggcugu

SEQ ID NO: 46856 - RNA, 19 nt, Artificial Sequence
  Antisense Oligo
acagccugugcaaugucuu

SEQ ID NO: 46857 - RNA, 19 nt, Artificial Sequence
  Sense Oligo
acauugcacaggcuguccu

SEQ ID NO: 46858 - RNA, 19 nt, Artificial Sequence
  Antisense Oligo
aggacagccugugcaaugu

SEQ ID NO: 46859 - RNA, 19 nt, Artificial Sequence
  Sense Oligo
cauugcacaggcuguccuu

SEQ ID NO: 46860 - RNA, 19 nt, Artificial Sequence
  Antisense Oligo
aaggacagccugugcaaug

SEQ ID NO: 46861 - RNA, 19 nt, Artificial Sequence
  Sense Oligo
auugcacaggcuguccuua

SEQ ID NO: 46862 - RNA, 19 nt, Artificial Sequence
  Antisense Oligo
uaaggacagccugugcaau

SEQ ID NO: 46863 - RNA, 19 nt, Artificial Sequence
  Sense Oligo
uugcacaggcuguccuuag

SEQ ID NO: 46864 - RNA, 19 nt, Artificial Sequence
  Antisense Oligo
cuaaggacagccugugcaa

SEQ ID NO: 46865 - RNA, 19 nt, Artificial Sequence
  Sense Oligo
ugcacaggcuguccuuagg

SEQ ID NO: 46866 - RNA, 19 nt, Artificial Sequence
  Antisense Oligo
ccuaaggacagccugugca

SEQ ID NO: 46867 - RNA, 19 nt, Artificial Sequence
  Sense Oligo
cuucaguggcaaggaugac

SEQ ID NO: 46868 - RNA, 19 nt, Artificial Sequence
  Antisense Oligo
gucauccuugccacugaag

SEQ ID NO: 46869 - RNA, 19 nt, Artificial Sequence
  Sense Oligo
ucaguggcaaggaugacau

SEQ ID NO: 46870 - RNA, 19 nt, Artificial Sequence
  Antisense Oligo
augucauccuugccacuga

SEQ ID NO: 46871 - RNA, 19 nt, Artificial Sequence
  Sense Oligo
caagcuuuggacaucuuuc

SEQ ID NO: 46872 - RNA, 19 nt, Artificial Sequence
  Antisense Oligo
gaaagauguccaaagcuug

SEQ ID NO: 46873 - RNA, 19 nt, Artificial Sequence
  Sense Oligo
aagcuuuggacaucuuucu

SEQ ID NO: 46874 - RNA, 19 nt, Artificial Sequence
  Antisense Oligo
agaaagauguccaaagcuu

SEQ ID NO: 46875 - RNA, 19 nt, Artificial Sequence
  Sense Oligo
agcuuuggacaucuuucug

SEQ ID NO: 46876 - RNA, 19 nt, Artificial Sequence
  Antisense Oligo
cagaaagauguccaaagcu

SEQ ID NO: 46877 - RNA, 19 nt, Artificial Sequence
  Sense Oligo
gcuuuggacaucuuucugg

SEQ ID NO: 46878 - RNA, 19 nt, Artificial Sequence
  Antisense Oligo
ccagaaagauguccaaagc

SEQ ID NO: 46879 - RNA, 19 nt, Artificial Sequence
  Sense Oligo
cuuuggacaucuuucuggc

SEQ ID NO: 46880 - RNA, 19 nt, Artificial Sequence
  Antisense Oligo
gccagaaagauguccaaag

SEQ ID NO: 46881 - RNA, 19 nt, Artificial Sequence
  Sense Oligo
uuuggacaucuuucuggcc

SEQ ID NO: 46882 - RNA, 19 nt, Artificial Sequence
  Antisense Oligo
ggccagaaagauguccaaa

SEQ ID NO: 46883 - RNA, 19 nt, Artificial Sequence
  Sense Oligo
uggacaucuuucuggccaa

SEQ ID NO: 46884 - RNA, 19 nt, Artificial Sequence
  Antisense Oligo
uuggccagaaagaugucca

SEQ ID NO: 46885 - RNA, 19 nt, Artificial Sequence
  Sense Oligo
ggacaucuuucuggccaau

SEQ ID NO: 46886 - RNA, 19 nt, Artificial Sequence
  Antisense Oligo
auuggccagaaagaugucc

SEQ ID NO: 46887 - RNA, 19 nt, Artificial Sequence
  Sense Oligo
gacaucuuucuggccaauu

SEQ ID NO: 46888 - RNA, 19 nt, Artificial Sequence
  Antisense Oligo
aauuggccagaaagauguc

SEQ ID NO: 46889 - RNA, 19 nt, Artificial Sequence
  Sense Oligo
acaucuuucuggccaauuu

SEQ ID NO: 46890 - RNA, 19 nt, Artificial Sequence
  Antisense Oligo
aaauuggccagaaagaugu

SEQ ID NO: 46891 - RNA, 19 nt, Artificial Sequence
  Sense Oligo
caucuuucuggccaauuug

SEQ ID NO: 46892 - RNA, 19 nt, Artificial Sequence
  Antisense Oligo
caaauuggccagaaagaug

SEQ ID NO: 46893 - RNA, 19 nt, Artificial Sequence
  Sense Oligo
aucuuucuggccaauuugc

SEQ ID NO: 46894 - RNA, 19 nt, Artificial Sequence
  Antisense Oligo
gcaaauuggccagaaagau

SEQ ID NO: 46895 - RNA, 19 nt, Artificial Sequence
  Sense Oligo
ucuuucuggccaauuugcc

SEQ ID NO: 46896 - RNA, 19 nt, Artificial Sequence
  Antisense Oligo
ggcaaauuggccagaaaga

SEQ ID NO: 46897 - RNA, 19 nt, Artificial Sequence
  Sense Oligo
cuuucuggccaauuugccc

SEQ ID NO: 46898 - RNA, 19 nt, Artificial Sequence
  Antisense Oligo
gggcaaauuggccagaaag

SEQ ID NO: 46899 - RNA, 19 nt, Artificial Sequence
  Sense Oligo
uuucuggccaauuugcccg

SEQ ID NO: 46900 - RNA, 19 nt, Artificial Sequence
  Antisense Oligo
cgggcaaauuggccagaaa

SEQ ID NO: 46901 - RNA, 19 nt, Artificial Sequence
  Sense Oligo
uucuggccaauuugcccga

SEQ ID NO: 46902 - RNA, 19 nt, Artificial Sequence
  Antisense Oligo
ucgggcaaauuggccagaa

SEQ ID NO: 46903 - RNA, 19 nt, Artificial Sequence
  Sense Oligo
ucuggccaauuugcccgag

SEQ ID NO: 46904 - RNA, 19 nt, Artificial Sequence
  Antisense Oligo
cucgggcaaauuggccaga

SEQ ID NO: 46905 - RNA, 19 nt, Artificial Sequence
  Sense Oligo
gcucagaggaagucagccc

SEQ ID NO: 46906 - RNA, 19 nt, Artificial Sequence
  Antisense Oligo
gggcugacuuccucugagc

SEQ ID NO: 46907 - RNA, 19 nt, Artificial Sequence
  Sense Oligo
acaucuuugggccuucuca

SEQ ID NO: 46908 - RNA, 19 nt, Artificial Sequence
  Antisense Oligo
ugagaaggcccaaagaugu

SEQ ID NO: 46909 - RNA, 19 nt, Artificial Sequence
  Sense Oligo
caucuuugggccuucucag

SEQ ID NO: 46910 - RNA, 19 nt, Artificial Sequence
  Antisense Oligo
cugagaaggcccaaagaug

SEQ ID NO: 46911 - RNA, 19 nt, Artificial Sequence
  Sense Oligo
ucuuugggccuucucagaa

SEQ ID NO: 46912 - RNA, 19 nt, Artificial Sequence
  Antisense Oligo
uucugagaaggcccaaaga

SEQ ID NO: 46913 - RNA, 19 nt, Artificial Sequence
  Sense Oligo
caggaagaugcugaguccc

SEQ ID NO: 46914 - RNA, 19 nt, Artificial Sequence
  Antisense Oligo
gggacucagcaucuuccug

SEQ ID NO: 46915 - RNA, 19 nt, Artificial Sequence
  Sense Oligo
aggaagaugcugagucccg

SEQ ID NO: 46916 - RNA, 19 nt, Artificial Sequence
  Antisense Oligo
cgggacucagcaucuuccu

SEQ ID NO: 46917 - RNA, 19 nt, Artificial Sequence
  Sense Oligo
ggaagaugcugagucccgc

SEQ ID NO: 46918 - RNA, 19 nt, Artificial Sequence
  Antisense Oligo
gcgggacucagcaucuucc

SEQ ID NO: 46919 - RNA, 19 nt, Artificial Sequence
  Sense Oligo
gaagaugcugagucccgcu

SEQ ID NO: 46920 - RNA, 19 nt, Artificial Sequence
  Antisense Oligo
agcgggacucagcaucuuc

SEQ ID NO: 46921 - RNA, 19 nt, Artificial Sequence
  Sense Oligo
aagaugcugagucccgcua

SEQ ID NO: 46922 - RNA, 19 nt, Artificial Sequence
  Antisense Oligo
uagcgggacucagcaucuu

SEQ ID NO: 46923 - RNA, 19 nt, Artificial Sequence
  Sense Oligo
agaugcugagucccgcuac

SEQ ID NO: 46924 - RNA, 19 nt, Artificial Sequence
  Antisense Oligo
guagcgggacucagcaucu

SEQ ID NO: 46925 - RNA, 19 nt, Artificial Sequence
  Sense Oligo
gaugcugagucccgcuacu

SEQ ID NO: 46926 - RNA, 19 nt, Artificial Sequence
  Antisense Oligo
aguagcgggacucagcauc

SEQ ID NO: 46927 - RNA, 19 nt, Artificial Sequence
  Sense Oligo
augcugagucccgcuacuu

SEQ ID NO: 46928 - RNA, 19 nt, Artificial Sequence
  Antisense Oligo
aaguagcgggacucagcau

SEQ ID NO: 46929 - RNA, 19 nt, Artificial Sequence
  Sense Oligo
ugcugagucccgcuacuua

SEQ ID NO: 46930 - RNA, 19 nt, Artificial Sequence
  Antisense Oligo
uaaguagcgggacucagca

SEQ ID NO: 46931 - RNA, 19 nt, Artificial Sequence
  Sense Oligo
gcugagucccgcuacuuac

SEQ ID NO: 46932 - RNA, 19 nt, Artificial Sequence
  Antisense Oligo
guaaguagcgggacucagc

SEQ ID NO: 46933 - RNA, 19 nt, Artificial Sequence
  Sense Oligo
cugagucccgcuacuuacu

SEQ ID NO: 46934 - RNA, 19 nt, Artificial Sequence
  Antisense Oligo
aguaaguagcgggacucag

SEQ ID NO: 46935 - RNA, 19 nt, Artificial Sequence
  Sense Oligo
agucccgcuacuuacucgu

SEQ ID NO: 46936 - RNA, 19 nt, Artificial Sequence
  Antisense Oligo
acgaguaaguagcgggacu

SEQ ID NO: 46937 - RNA, 19 nt, Artificial Sequence
  Sense Oligo
gucccgcuacuuacucgug

SEQ ID NO: 46938 - RNA, 19 nt, Artificial Sequence
  Antisense Oligo
cacgaguaaguagcgggac

SEQ ID NO: 46939 - RNA, 19 nt, Artificial Sequence
  Sense Oligo
ucccgcuacuuacucgugc

SEQ ID NO: 46940 - RNA, 19 nt, Artificial Sequence
  Antisense Oligo
gcacgaguaaguagcggga

SEQ ID NO: 46941 - RNA, 19 nt, Artificial Sequence
  Sense Oligo
cccgcuacuuacucgugcu

SEQ ID NO: 46942 - RNA, 19 nt, Artificial Sequence
  Antisense Oligo
agcacgaguaaguagcggg

SEQ ID NO: 46943 - RNA, 19 nt, Artificial Sequence
  Sense Oligo
cuacguggcacugcagauc

SEQ ID NO: 46944 - RNA, 19 nt, Artificial Sequence
  Antisense Oligo
gaucugcagugccacguag

SEQ ID NO: 46945 - RNA, 19 nt, Artificial Sequence
  Sense Oligo
uacguggcacugcagaucc

SEQ ID NO: 46946 - RNA, 19 nt, Artificial Sequence
  Antisense Oligo
ggaucugcagugccacgua

SEQ ID NO: 46947 - RNA, 19 nt, Artificial Sequence
  Sense Oligo
cguggcacugcagauccug

SEQ ID NO: 46948 - RNA, 19 nt, Artificial Sequence
  Antisense Oligo
caggaucugcagugccacg

SEQ ID NO: 46949 - RNA, 19 nt, Artificial Sequence
  Sense Oligo
uccugcagcagacauucuu

SEQ ID NO: 46950 - RNA, 19 nt, Artificial Sequence
  Antisense Oligo
aagaaugucugcugcagga

SEQ ID NO: 46951 - RNA, 19 nt, Artificial Sequence
  Sense Oligo
ccugcagcagacauucuuc

SEQ ID NO: 46952 - RNA, 19 nt, Artificial Sequence
  Antisense Oligo
gaagaaugucugcugcagg

SEQ ID NO: 46953 - RNA, 19 nt, Artificial Sequence
  Sense Oligo
cugcagcagacauucuucg

SEQ ID NO: 46954 - RNA, 19 nt, Artificial Sequence
  Antisense Oligo
cgaagaaugucugcugcag

SEQ ID NO: 46955 - RNA, 19 nt, Artificial Sequence
  Sense Oligo
ugcagcagacauucuucga

SEQ ID NO: 46956 - RNA, 19 nt, Artificial Sequence
  Antisense Oligo
ucgaagaaugucugcugca

SEQ ID NO: 46957 - RNA, 19 nt, Artificial Sequence
  Sense Oligo
gcagcagacauucuucgag

SEQ ID NO: 46958 - RNA, 19 nt, Artificial Sequence
  Antisense Oligo
cucgaagaaugucugcugc

SEQ ID NO: 46959 - RNA, 19 nt, Artificial Sequence
  Sense Oligo
cagcagacauucuucgagg

SEQ ID NO: 46960 - RNA, 19 nt, Artificial Sequence
  Antisense Oligo
ccucgaagaaugucugcug

SEQ ID NO: 46961 - RNA, 19 nt, Artificial Sequence
  Sense Oligo
agcagacauucuucgaggg

SEQ ID NO: 46962 - RNA, 19 nt, Artificial Sequence
  Antisense Oligo
cccucgaagaaugucugcu

SEQ ID NO: 46963 - RNA, 19 nt, Artificial Sequence
  Sense Oligo
cccaaggaccaagaguaca

SEQ ID NO: 46964 - RNA, 19 nt, Artificial Sequence
  Antisense Oligo
uguacucuugguccuuggg

SEQ ID NO: 46965 - RNA, 19 nt, Artificial Sequence
  Sense Oligo
ccaaggaccaagaguacac

SEQ ID NO: 46966 - RNA, 19 nt, Artificial Sequence
  Antisense Oligo
guguacucuugguccuugg

SEQ ID NO: 46967 - RNA, 19 nt, Artificial Sequence
  Sense Oligo
caaggaccaagaguacacc

SEQ ID NO: 46968 - RNA, 19 nt, Artificial Sequence
  Antisense Oligo
gguguacucuugguccuug

SEQ ID NO: 46969 - RNA, 19 nt, Artificial Sequence
  Sense Oligo
aaggaccaagaguacaccc

SEQ ID NO: 46970 - RNA, 19 nt, Artificial Sequence
  Antisense Oligo
ggguguacucuugguccuu

SEQ ID NO: 46971 - RNA, 19 nt, Artificial Sequence
  Sense Oligo
aggaccaagaguacaccca

SEQ ID NO: 46972 - RNA, 19 nt, Artificial Sequence
  Antisense Oligo
uggguguacucuugguccu

SEQ ID NO: 46973 - RNA, 19 nt, Artificial Sequence
  Sense Oligo
ggaccaagaguacacccag

SEQ ID NO: 46974 - RNA, 19 nt, Artificial Sequence
  Antisense Oligo
cuggguguacucuuggucc

SEQ ID NO: 46975 - RNA, 19 nt, Artificial Sequence
  Sense Oligo
gaccaagaguacacccagc

SEQ ID NO: 46976 - RNA, 19 nt, Artificial Sequence
  Antisense Oligo
gcuggguguacucuugguc

SEQ ID NO: 46977 - RNA, 19 nt, Artificial Sequence
  Sense Oligo
accaagaguacacccagcu

SEQ ID NO: 46978 - RNA, 19 nt, Artificial Sequence
  Antisense Oligo
agcuggguguacucuuggu

SEQ ID NO: 46979 - RNA, 19 nt, Artificial Sequence
  Sense Oligo
ccaagaguacacccagcuc

SEQ ID NO: 46980 - RNA, 19 nt, Artificial Sequence
  Antisense Oligo
gagcuggguguacucuugg

SEQ ID NO: 46981 - RNA, 19 nt, Artificial Sequence
  Sense Oligo
acaucaaucgugugaagau

SEQ ID NO: 46982 - RNA, 19 nt, Artificial Sequence
  Antisense Oligo
aucuucacacgauugaugu

SEQ ID NO: 46983 - RNA, 19 nt, Artificial Sequence
  Sense Oligo
caucaaucgugugaagauc

SEQ ID NO: 46984 - RNA, 19 nt, Artificial Sequence
  Antisense Oligo
gaucuucacacgauugaug

SEQ ID NO: 46985 - RNA, 19 nt, Artificial Sequence
  Sense Oligo
aucaaucgugugaagaucu

SEQ ID NO: 46986 - RNA, 19 nt, Artificial Sequence
  Antisense Oligo
agaucuucacacgauugau

SEQ ID NO: 46987 - RNA, 19 nt, Artificial Sequence
  Sense Oligo
ucaaucgugugaagaucug

SEQ ID NO: 46988 - RNA, 19 nt, Artificial Sequence
  Antisense Oligo
cagaucuucacacgauuga

SEQ ID NO: 46989 - RNA, 19 nt, Artificial Sequence
  Sense Oligo
caaucgugugaagaucugc

SEQ ID NO: 46990 - RNA, 19 nt, Artificial Sequence
  Antisense Oligo
gcagaucuucacacgauug

SEQ ID NO: 46991 - RNA, 19 nt, Artificial Sequence
  Sense Oligo
aaucgugugaagaucugca

SEQ ID NO: 46992 - RNA, 19 nt, Artificial Sequence
  Antisense Oligo
ugcagaucuucacacgauu

SEQ ID NO: 46993 - RNA, 19 nt, Artificial Sequence
  Sense Oligo
aucgugugaagaucugcau

SEQ ID NO: 46994 - RNA, 19 nt, Artificial Sequence
  Antisense Oligo
augcagaucuucacacgau

SEQ ID NO: 46995 - RNA, 19 nt, Artificial Sequence
  Sense Oligo
ucgugugaagaucugcaug

SEQ ID NO: 46996 - RNA, 19 nt, Artificial Sequence
  Antisense Oligo
caugcagaucuucacacga

SEQ ID NO: 46997 - RNA, 19 nt, Artificial Sequence
  Sense Oligo
cgugugaagaucugcaugg

SEQ ID NO: 46998 - RNA, 19 nt, Artificial Sequence
  Antisense Oligo
ccaugcagaucuucacacg

SEQ ID NO: 46999 - RNA, 19 nt, Artificial Sequence
  Sense Oligo
gugugaagaucugcaugga

SEQ ID NO: 47000 - RNA, 19 nt, Artificial Sequence
  Antisense Oligo
uccaugcagaucuucacac

SEQ ID NO: 47001 - RNA, 19 nt, Artificial Sequence
  Sense Oligo
ugugaagaucugcauggaa

SEQ ID NO: 47002 - RNA, 19 nt, Artificial Sequence
  Antisense Oligo
uuccaugcagaucuucaca

SEQ ID NO: 47003 - RNA, 19 nt, Artificial Sequence
  Sense Oligo
aagaugguguugcuucuca

SEQ ID NO: 47004 - RNA, 19 nt, Artificial Sequence
  Antisense Oligo
ugagaagcaacaccaucuu

SEQ ID NO: 47005 - RNA, 19 nt, Artificial Sequence
  Sense Oligo
agaugguguugcuucucaa

SEQ ID NO: 47006 - RNA, 19 nt, Artificial Sequence
  Antisense Oligo
uugagaagcaacaccaucu

SEQ ID NO: 47007 - RNA, 19 nt, Artificial Sequence
  Sense Oligo
agagccucuacgacgcacu

SEQ ID NO: 47008 - RNA, 19 nt, Artificial Sequence
  Antisense Oligo
agugcgucguagaggcucu

SEQ ID NO: 47009 - RNA, 19 nt, Artificial Sequence
  Sense Oligo
gagccucuacgacgcacuc

SEQ ID NO: 47010 - RNA, 19 nt, Artificial Sequence
  Antisense Oligo
gagugcgucguagaggcuc

SEQ ID NO: 47011 - RNA, 19 nt, Artificial Sequence
  Sense Oligo
uacgacgcacucaaccagu

SEQ ID NO: 47012 - RNA, 19 nt, Artificial Sequence
  Antisense Oligo
acugguugagugcgucgua

SEQ ID NO: 47013 - RNA, 19 nt, Artificial Sequence
  Sense Oligo
acgacgcacucaaccagua

SEQ ID NO: 47014 - RNA, 19 nt, Artificial Sequence
  Antisense Oligo
uacugguugagugcgucgu

SEQ ID NO: 47015 - RNA, 19 nt, Artificial Sequence
  Sense Oligo
cgacgcacucaaccaguac

SEQ ID NO: 47016 - RNA, 19 nt, Artificial Sequence
  Antisense Oligo
guacugguugagugcgucg

SEQ ID NO: 47017 - RNA, 19 nt, Artificial Sequence
  Sense Oligo
gacgcacucaaccaguacu

SEQ ID NO: 47018 - RNA, 19 nt, Artificial Sequence
  Antisense Oligo
aguacugguugagugcguc

SEQ ID NO: 47019 - RNA, 19 nt, Artificial Sequence
  Sense Oligo
acgcacucaaccaguacua

SEQ ID NO: 47020 - RNA, 19 nt, Artificial Sequence
  Antisense Oligo
uaguacugguugagugcgu

SEQ ID NO: 47021 - RNA, 19 nt, Artificial Sequence
  Sense Oligo
cgcacucaaccaguacuac

SEQ ID NO: 47022 - RNA, 19 nt, Artificial Sequence
  Antisense Oligo
guaguacugguugagugcg

SEQ ID NO: 47023 - RNA, 19 nt, Artificial Sequence
  Sense Oligo
gcacucaaccaguacuacg

SEQ ID NO: 47024 - RNA, 19 nt, Artificial Sequence
  Antisense Oligo
cguaguacugguugagugc

SEQ ID NO: 47025 - RNA, 19 nt, Artificial Sequence
  Sense Oligo
ucaaccaguacuacgucca

SEQ ID NO: 47026 - RNA, 19 nt, Artificial Sequence
  Antisense Oligo
uggacguaguacugguuga

SEQ ID NO: 47027 - RNA, 19 nt, Artificial Sequence
  Sense Oligo
ccaguacuacguccaccuc

SEQ ID NO: 47028 - RNA, 19 nt, Artificial Sequence
  Antisense Oligo
gagguggacguaguacugg

SEQ ID NO: 47029 - RNA, 19 nt, Artificial Sequence
  Sense Oligo
caguacuacguccaccucg

SEQ ID NO: 47030 - RNA, 19 nt, Artificial Sequence
  Antisense Oligo
cgagguggacguaguacug

SEQ ID NO: 47031 - RNA, 19 nt, Artificial Sequence
  Sense Oligo
aguacuacguccaccucgg

SEQ ID NO: 47032 - RNA, 19 nt, Artificial Sequence
  Antisense Oligo
ccgagguggacguaguacu

SEQ ID NO: 47033 - RNA, 19 nt, Artificial Sequence
  Sense Oligo
guacuacguccaccucggc

SEQ ID NO: 47034 - RNA, 19 nt, Artificial Sequence
  Antisense Oligo
gccgagguggacguaguac

SEQ ID NO: 47035 - RNA, 19 nt, Artificial Sequence
  Sense Oligo
uacuacguccaccucggcg

SEQ ID NO: 47036 - RNA, 19 nt, Artificial Sequence
  Antisense Oligo
cgccgagguggacguagua

SEQ ID NO: 47037 - RNA, 19 nt, Artificial Sequence
  Sense Oligo
cggccagaaguacguggac

SEQ ID NO: 47038 - RNA, 19 nt, Artificial Sequence
  Antisense Oligo
guccacguacuucuggccg

SEQ ID NO: 47039 - RNA, 19 nt, Artificial Sequence
  Sense Oligo
ggccagaaguacguggacc

SEQ ID NO: 47040 - RNA, 19 nt, Artificial Sequence
  Antisense Oligo
gguccacguacuucuggcc

SEQ ID NO: 47041 - RNA, 19 nt, Artificial Sequence
  Sense Oligo
gccagaaguacguggaccu

SEQ ID NO: 47042 - RNA, 19 nt, Artificial Sequence
  Antisense Oligo
agguccacguacuucuggc

SEQ ID NO: 47043 - RNA, 19 nt, Artificial Sequence
  Sense Oligo
ccagaaguacguggaccuc

SEQ ID NO: 47044 - RNA, 19 nt, Artificial Sequence
  Antisense Oligo
gagguccacguacuucugg

SEQ ID NO: 47045 - RNA, 19 nt, Artificial Sequence
  Sense Oligo
cagaaguacguggaccucg

SEQ ID NO: 47046 - RNA, 19 nt, Artificial Sequence
  Antisense Oligo
cgagguccacguacuucug

SEQ ID NO: 47047 - RNA, 19 nt, Artificial Sequence
  Sense Oligo
agaaguacguggaccucgg

SEQ ID NO: 47048 - RNA, 19 nt, Artificial Sequence
  Antisense Oligo
ccgagguccacguacuucu

SEQ ID NO: 47049 - RNA, 19 nt, Artificial Sequence
  Sense Oligo
gaaguacguggaccucggu

SEQ ID NO: 47050 - RNA, 19 nt, Artificial Sequence
  Antisense Oligo
accgagguccacguacuuc

SEQ ID NO: 47051 - RNA, 19 nt, Artificial Sequence
  Sense Oligo
uacguggaccucggucugg

SEQ ID NO: 47052 - RNA, 19 nt, Artificial Sequence
  Antisense Oligo
ccagaccgagguccacgua

SEQ ID NO: 47053 - RNA, 19 nt, Artificial Sequence
  Sense Oligo
gggacccaccgcgucaaau

SEQ ID NO: 47054 - RNA, 19 nt, Artificial Sequence
  Antisense Oligo
auuugacgcgguggguccc

SEQ ID NO: 47055 - RNA, 19 nt, Artificial Sequence
  Sense Oligo
ggacccaccgcgucaaaug

SEQ ID NO: 47056 - RNA, 19 nt, Artificial Sequence
  Antisense Oligo
cauuugacgcggugggucc

SEQ ID NO: 47057 - RNA, 19 nt, Artificial Sequence
  Sense Oligo
gacccaccgcgucaaaugu

SEQ ID NO: 47058 - RNA, 19 nt, Artificial Sequence
  Antisense Oligo
acauuugacgcgguggguc

SEQ ID NO: 47059 - RNA, 19 nt, Artificial Sequence
  Sense Oligo
acccaccgcgucaaauguc

SEQ ID NO: 47060 - RNA, 19 nt, Artificial Sequence
  Antisense Oligo
gacauuugacgcggugggu

SEQ ID NO: 47061 - RNA, 19 nt, Artificial Sequence
  Sense Oligo
cccaccgcgucaaaugucg

SEQ ID NO: 47062 - RNA, 19 nt, Artificial Sequence
  Antisense Oligo
cgacauuugacgcgguggg

SEQ ID NO: 47063 - RNA, 19 nt, Artificial Sequence
  Sense Oligo
ccaccgcgucaaaugucgg

SEQ ID NO: 47064 - RNA, 19 nt, Artificial Sequence
  Antisense Oligo
ccgacauuugacgcggugg

SEQ ID NO: 47065 - RNA, 19 nt, Artificial Sequence
  Sense Oligo
caccgcgucaaaugucggg

SEQ ID NO: 47066 - RNA, 19 nt, Artificial Sequence
  Antisense Oligo
cccgacauuugacgcggug

SEQ ID NO: 47067 - RNA, 19 nt, Artificial Sequence
  Sense Oligo
accgcgucaaaugucgggu

SEQ ID NO: 47068 - RNA, 19 nt, Artificial Sequence
  Antisense Oligo
acccgacauuugacgcggu

SEQ ID NO: 47069 - RNA, 19 nt, Artificial Sequence
  Sense Oligo
ccgcgucaaaugucggguu

SEQ ID NO: 47070 - RNA, 19 nt, Artificial Sequence
  Antisense Oligo
aacccgacauuugacgcgg

SEQ ID NO: 47071 - RNA, 19 nt, Artificial Sequence
  Sense Oligo
cgcgucaaaugucggguuc

SEQ ID NO: 47072 - RNA, 19 nt, Artificial Sequence
  Antisense Oligo
gaacccgacauuugacgcg

SEQ ID NO: 47073 - RNA, 19 nt, Artificial Sequence
  Sense Oligo
gcgucaaaugucggguuca

SEQ ID NO: 47074 - RNA, 19 nt, Artificial Sequence
  Antisense Oligo
ugaacccgacauuugacgc

SEQ ID NO: 47075 - RNA, 19 nt, Artificial Sequence
  Sense Oligo
cgucaaaugucggguucac

SEQ ID NO: 47076 - RNA, 19 nt, Artificial Sequence
  Antisense Oligo
gugaacccgacauuugacg

SEQ ID NO: 47077 - RNA, 19 nt, Artificial Sequence
  Sense Oligo
gucaaaugucggguucacc

SEQ ID NO: 47078 - RNA, 19 nt, Artificial Sequence
  Antisense Oligo
ggugaacccgacauuugac

SEQ ID NO: 47079 - RNA, 19 nt, Artificial Sequence
  Sense Oligo
ucaaaugucggguucaccc

SEQ ID NO: 47080 - RNA, 19 nt, Artificial Sequence
  Antisense Oligo
gggugaacccgacauuuga

SEQ ID NO: 47081 - RNA, 19 nt, Artificial Sequence
  Sense Oligo
cccaacuuccgccugauug

SEQ ID NO: 47082 - RNA, 19 nt, Artificial Sequence
  Antisense Oligo
caaucaggcggaaguuggg

SEQ ID NO: 47083 - RNA, 19 nt, Artificial Sequence
  Sense Oligo
ccaacuuccgccugauugu

SEQ ID NO: 47084 - RNA, 19 nt, Artificial Sequence
  Antisense Oligo
acaaucaggcggaaguugg

SEQ ID NO: 47085 - RNA, 19 nt, Artificial Sequence
  Sense Oligo
caacuuccgccugauuguc

SEQ ID NO: 47086 - RNA, 19 nt, Artificial Sequence
  Antisense Oligo
gacaaucaggcggaaguug

SEQ ID NO: 47087 - RNA, 19 nt, Artificial Sequence
  Sense Oligo
aacuuccgccugauuguca

SEQ ID NO: 47088 - RNA, 19 nt, Artificial Sequence
  Antisense Oligo
ugacaaucaggcggaaguu

SEQ ID NO: 47089 - RNA, 19 nt, Artificial Sequence
  Sense Oligo
uccgccugauugucauuga

SEQ ID NO: 47090 - RNA, 19 nt, Artificial Sequence
  Antisense Oligo
ucaaugacaaucaggcgga

SEQ ID NO: 47091 - RNA, 19 nt, Artificial Sequence
  Sense Oligo
ccgccugauugucauugaa

SEQ ID NO: 47092 - RNA, 19 nt, Artificial Sequence
  Antisense Oligo
uucaaugacaaucaggcgg

SEQ ID NO: 47093 - RNA, 19 nt, Artificial Sequence
  Sense Oligo
cgccugauugucauugaag

SEQ ID NO: 47094 - RNA, 19 nt, Artificial Sequence
  Antisense Oligo
cuucaaugacaaucaggcg

SEQ ID NO: 47095 - RNA, 19 nt, Artificial Sequence
  Sense Oligo
gccugauugucauugaaga

SEQ ID NO: 47096 - RNA, 19 nt, Artificial Sequence
  Antisense Oligo
ucuucaaugacaaucaggc

SEQ ID NO: 47097 - RNA, 19 nt, Artificial Sequence
  Sense Oligo
cccucauuaaccggcugga

SEQ ID NO: 47098 - RNA, 19 nt, Artificial Sequence
  Antisense Oligo
uccagccgguuaaugaggg

SEQ ID NO: 47099 - RNA, 19 nt, Artificial Sequence
  Sense Oligo
ccucauuaaccggcuggag

SEQ ID NO: 47100 - RNA, 19 nt, Artificial Sequence
  Antisense Oligo
cuccagccgguuaaugagg

SEQ ID NO: 47101 - RNA, 19 nt, Artificial Sequence
  Sense Oligo
gcacuaucuggauaucaac

SEQ ID NO: 47102 - RNA, 19 nt, Artificial Sequence
  Antisense Oligo
guugauauccagauagugc

SEQ ID NO: 47103 - RNA, 19 nt, Artificial Sequence
  Sense Oligo
aaauggcagaagagcaucg

SEQ ID NO: 47104 - RNA, 19 nt, Artificial Sequence
  Antisense Oligo
cgaugcucuucugccauuu

SEQ ID NO: 47105 - RNA, 19 nt, Artificial Sequence
  Sense Oligo
aauggcagaagagcaucgu

SEQ ID NO: 47106 - RNA, 19 nt, Artificial Sequence
  Antisense Oligo
acgaugcucuucugccauu

SEQ ID NO: 47107 - RNA, 19 nt, Artificial Sequence
  Sense Oligo
auggcagaagagcaucgug

SEQ ID NO: 47108 - RNA, 19 nt, Artificial Sequence
  Antisense Oligo
cacgaugcucuucugccau

SEQ ID NO: 47109 - RNA, 19 nt, Artificial Sequence
  Sense Oligo
uggcagaagagcaucgugg

SEQ ID NO: 47110 - RNA, 19 nt, Artificial Sequence
  Antisense Oligo
ccacgaugcucuucugcca

SEQ ID NO: 47111 - RNA, 19 nt, Artificial Sequence
  Sense Oligo
ggcagaagagcaucgugga

SEQ ID NO: 47112 - RNA, 19 nt, Artificial Sequence
  Antisense Oligo
uccacgaugcucuucugcc

SEQ ID NO: 47113 - RNA, 19 nt, Artificial Sequence
  Sense Oligo
gcagaagagcaucguggag

SEQ ID NO: 47114 - RNA, 19 nt, Artificial Sequence
  Antisense Oligo
cuccacgaugcucuucugc

SEQ ID NO: 47115 - RNA, 19 nt, Artificial Sequence
  Sense Oligo
cagaagagcaucguggagg

SEQ ID NO: 47116 - RNA, 19 nt, Artificial Sequence
  Antisense Oligo
ccuccacgaugcucuucug

SEQ ID NO: 47117 - RNA, 19 nt, Artificial Sequence
  Sense Oligo
agaagagcaucguggagga

SEQ ID NO: 47118 - RNA, 19 nt, Artificial Sequence
  Antisense Oligo
uccuccacgaugcucuucu

SEQ ID NO: 47119 - RNA, 19 nt, Artificial Sequence
  Sense Oligo
gaagagcaucguggaggag

SEQ ID NO: 47120 - RNA, 19 nt, Artificial Sequence
  Antisense Oligo
cuccuccacgaugcucuuc

SEQ ID NO: 47121 - RNA, 19 nt, Artificial Sequence
  Sense Oligo
aagagcaucguggaggagc

SEQ ID NO: 47122 - RNA, 19 nt, Artificial Sequence
  Antisense Oligo
gcuccuccacgaugcucuu

SEQ ID NO: 47123 - RNA, 19 nt, Artificial Sequence
  Sense Oligo
agagcaucguggaggagcu

SEQ ID NO: 47124 - RNA, 19 nt, Artificial Sequence
  Antisense Oligo
agcuccuccacgaugcucu

SEQ ID NO: 47125 - RNA, 19 nt, Artificial Sequence
  Sense Oligo
agcaucguggaggagcucu

SEQ ID NO: 47126 - RNA, 19 nt, Artificial Sequence
  Antisense Oligo
agagcuccuccacgaugcu

SEQ ID NO: 47127 - RNA, 19 nt, Artificial Sequence
  Sense Oligo
gcaucguggaggagcucug

SEQ ID NO: 47128 - RNA, 19 nt, Artificial Sequence
  Antisense Oligo
cagagcuccuccacgaugc

SEQ ID NO: 47129 - RNA, 19 nt, Artificial Sequence
  Sense Oligo
caucguggaggagcucugu

SEQ ID NO: 47130 - RNA, 19 nt, Artificial Sequence
  Antisense Oligo
acagagcuccuccacgaug

SEQ ID NO: 47131 - RNA, 19 nt, Artificial Sequence
  Sense Oligo
aucguggaggagcucugug

SEQ ID NO: 47132 - RNA, 19 nt, Artificial Sequence
  Antisense Oligo
cacagagcuccuccacgau

SEQ ID NO: 47133 - RNA, 19 nt, Artificial Sequence
  Sense Oligo
ucguggaggagcucugugc

SEQ ID NO: 47134 - RNA, 19 nt, Artificial Sequence
  Antisense Oligo
gcacagagcuccuccacga

SEQ ID NO: 47135 - RNA, 19 nt, Artificial Sequence
  Sense Oligo
guggaggagcucugugcgu

SEQ ID NO: 47136 - RNA, 19 nt, Artificial Sequence
  Antisense Oligo
acgcacagagcuccuccac

SEQ ID NO: 47137 - RNA, 19 nt, Artificial Sequence
  Sense Oligo
uggaggagcucugugcgug

SEQ ID NO: 47138 - RNA, 19 nt, Artificial Sequence
  Antisense Oligo
cacgcacagagcuccucca

SEQ ID NO: 47139 - RNA, 19 nt, Artificial Sequence
  Sense Oligo
aggagcucugugcgugggu

SEQ ID NO: 47140 - RNA, 19 nt, Artificial Sequence
  Antisense Oligo
acccacgcacagagcuccu

SEQ ID NO: 47141 - RNA, 19 nt, Artificial Sequence
  Sense Oligo
agcucugugcgugggugga

SEQ ID NO: 47142 - RNA, 19 nt, Artificial Sequence
  Antisense Oligo
uccacccacgcacagagcu

SEQ ID NO: 47143 - RNA, 19 nt, Artificial Sequence
  Sense Oligo
agaaguucaucaaugucaa

SEQ ID NO: 47144 - RNA, 19 nt, Artificial Sequence
  Antisense Oligo
uugacauugaugaacuucu

SEQ ID NO: 47145 - RNA, 19 nt, Artificial Sequence
  Sense Oligo
gaaguucaucaaugucaaa

SEQ ID NO: 47146 - RNA, 19 nt, Artificial Sequence
  Antisense Oligo
uuugacauugaugaacuuc

SEQ ID NO: 47147 - RNA, 19 nt, Artificial Sequence
  Sense Oligo
aaguucaucaaugucaaag

SEQ ID NO: 47148 - RNA, 19 nt, Artificial Sequence
  Antisense Oligo
cuuugacauugaugaacuu

SEQ ID NO: 47149 - RNA, 19 nt, Artificial Sequence
  Sense Oligo
aguucaucaaugucaaagc

SEQ ID NO: 47150 - RNA, 19 nt, Artificial Sequence
  Antisense Oligo
gcuuugacauugaugaacu

SEQ ID NO: 47151 - RNA, 19 nt, Artificial Sequence
  Sense Oligo
guucaucaaugucaaagca

SEQ ID NO: 47152 - RNA, 19 nt, Artificial Sequence
  Antisense Oligo
ugcuuugacauugaugaac

SEQ ID NO: 47153 - RNA, 19 nt, Artificial Sequence
  Sense Oligo
uucaucaaugucaaagcac

SEQ ID NO: 47154 - RNA, 19 nt, Artificial Sequence
  Antisense Oligo
gugcuuugacauugaugaa

SEQ ID NO: 47155 - RNA, 19 nt, Artificial Sequence
  Sense Oligo
ugucaaagcacaucauuuc

SEQ ID NO: 47156 - RNA, 19 nt, Artificial Sequence
  Antisense Oligo
gaaaugaugugcuuugaca

SEQ ID NO: 47157 - RNA, 19 nt, Artificial Sequence
  Sense Oligo
gucaaagcacaucauuucc

SEQ ID NO: 47158 - RNA, 19 nt, Artificial Sequence
  Antisense Oligo
ggaaaugaugugcuuugac

SEQ ID NO: 47159 - RNA, 19 nt, Artificial Sequence
  Sense Oligo
ucaaagcacaucauuucca

SEQ ID NO: 47160 - RNA, 19 nt, Artificial Sequence
  Antisense Oligo
uggaaaugaugugcuuuga

SEQ ID NO: 47161 - RNA, 19 nt, Artificial Sequence
  Sense Oligo
aaagcacaucauuuccaga

SEQ ID NO: 47162 - RNA, 19 nt, Artificial Sequence
  Antisense Oligo
ucuggaaaugaugugcuuu

SEQ ID NO: 47163 - RNA, 19 nt, Artificial Sequence
  Sense Oligo
aagcacaucauuuccagaa

SEQ ID NO: 47164 - RNA, 19 nt, Artificial Sequence
  Antisense Oligo
uucuggaaaugaugugcuu

SEQ ID NO: 47165 - RNA, 19 nt, Artificial Sequence
  Sense Oligo
agcacaucauuuccagaag

SEQ ID NO: 47166 - RNA, 19 nt, Artificial Sequence
  Antisense Oligo
cuucuggaaaugaugugcu

SEQ ID NO: 47167 - RNA, 19 nt, Artificial Sequence
  Sense Oligo
gcacaucauuuccagaaga

SEQ ID NO: 47168 - RNA, 19 nt, Artificial Sequence
  Antisense Oligo
ucuucuggaaaugaugugc

SEQ ID NO: 47169 - RNA, 19 nt, Artificial Sequence
  Sense Oligo
cacaucauuuccagaagag

SEQ ID NO: 47170 - RNA, 19 nt, Artificial Sequence
  Antisense Oligo
cucuucuggaaaugaugug

SEQ ID NO: 47171 - RNA, 19 nt, Artificial Sequence
  Sense Oligo
acaucauuuccagaagagg

SEQ ID NO: 47172 - RNA, 19 nt, Artificial Sequence
  Antisense Oligo
ccucuucuggaaaugaugu

SEQ ID NO: 47173 - RNA, 19 nt, Artificial Sequence
  Sense Oligo
caucauuuccagaagaggc

SEQ ID NO: 47174 - RNA, 19 nt, Artificial Sequence
  Antisense Oligo
gccucuucuggaaaugaug

SEQ ID NO: 47175 - RNA, 19 nt, Artificial Sequence
  Sense Oligo
ucauuuccagaagaggcac

SEQ ID NO: 47176 - RNA, 19 nt, Artificial Sequence
  Antisense Oligo
gugccucuucuggaaauga

SEQ ID NO: 47177 - RNA, 19 nt, Artificial Sequence
  Sense Oligo
cauuuccagaagaggcaca

SEQ ID NO: 47178 - RNA, 19 nt, Artificial Sequence
  Antisense Oligo
ugugccucuucuggaaaug

SEQ ID NO: 47179 - RNA, 19 nt, Artificial Sequence
  Sense Oligo
cccucugacgucuucaucg

SEQ ID NO: 47180 - RNA, 19 nt, Artificial Sequence
  Antisense Oligo
cgaugaagacgucagaggg

SEQ ID NO: 47181 - RNA, 19 nt, Artificial Sequence
  Sense Oligo
ccucugacgucuucaucgg

SEQ ID NO: 47182 - RNA, 19 nt, Artificial Sequence
  Antisense Oligo
ccgaugaagacgucagagg

SEQ ID NO: 47183 - RNA, 19 nt, Artificial Sequence
  Sense Oligo
cucugacgucuucaucggc

SEQ ID NO: 47184 - RNA, 19 nt, Artificial Sequence
  Antisense Oligo
gccgaugaagacgucagag

SEQ ID NO: 47185 - RNA, 19 nt, Artificial Sequence
  Sense Oligo
ucugacgucuucaucggcu

SEQ ID NO: 47186 - RNA, 19 nt, Artificial Sequence
  Antisense Oligo
agccgaugaagacgucaga

SEQ ID NO: 47187 - RNA, 19 nt, Artificial Sequence
  Sense Oligo
cugacgucuucaucggcua

SEQ ID NO: 47188 - RNA, 19 nt, Artificial Sequence
  Antisense Oligo
uagccgaugaagacgucag

SEQ ID NO: 47189 - RNA, 19 nt, Artificial Sequence
  Sense Oligo
ugacgucuucaucggcuac

SEQ ID NO: 47190 - RNA, 19 nt, Artificial Sequence
  Antisense Oligo
guagccgaugaagacguca

SEQ ID NO: 47191 - RNA, 19 nt, Artificial Sequence
  Sense Oligo
gacgucuucaucggcuacc

SEQ ID NO: 47192 - RNA, 19 nt, Artificial Sequence
  Antisense Oligo
gguagccgaugaagacguc

SEQ ID NO: 47193 - RNA, 19 nt, Artificial Sequence
  Sense Oligo
acgucuucaucggcuacca

SEQ ID NO: 47194 - RNA, 19 nt, Artificial Sequence
  Antisense Oligo
ugguagccgaugaagacgu

SEQ ID NO: 47195 - RNA, 19 nt, Artificial Sequence
  Sense Oligo
cgucuucaucggcuaccac

SEQ ID NO: 47196 - RNA, 19 nt, Artificial Sequence
  Antisense Oligo
gugguagccgaugaagacg

SEQ ID NO: 47197 - RNA, 19 nt, Artificial Sequence
  Sense Oligo
uucaucggcuaccacucgg

SEQ ID NO: 47198 - RNA, 19 nt, Artificial Sequence
  Antisense Oligo
ccgagugguagccgaugaa

SEQ ID NO: 47199 - RNA, 19 nt, Artificial Sequence
  Sense Oligo
ucaucggcuaccacucgga

SEQ ID NO: 47200 - RNA, 19 nt, Artificial Sequence
  Antisense Oligo
uccgagugguagccgauga

SEQ ID NO: 47201 - RNA, 19 nt, Artificial Sequence
  Sense Oligo
caucggcuaccacucggac

SEQ ID NO: 47202 - RNA, 19 nt, Artificial Sequence
  Antisense Oligo
guccgagugguagccgaug

SEQ ID NO: 47203 - RNA, 19 nt, Artificial Sequence
  Sense Oligo
aucggcuaccacucggacg

SEQ ID NO: 47204 - RNA, 19 nt, Artificial Sequence
  Antisense Oligo
cguccgagugguagccgau

SEQ ID NO: 47205 - RNA, 19 nt, Artificial Sequence
  Sense Oligo
guggugcugcaggucauag

SEQ ID NO: 47206 - RNA, 19 nt, Artificial Sequence
  Antisense Oligo
cuaugaccugcagcaccac

SEQ ID NO: 47207 - RNA, 19 nt, Artificial Sequence
  Sense Oligo
uggugcugcaggucauaga

SEQ ID NO: 47208 - RNA, 19 nt, Artificial Sequence
  Antisense Oligo
ucuaugaccugcagcacca

SEQ ID NO: 47209 - RNA, 19 nt, Artificial Sequence
  Sense Oligo
ggugcugcaggucauagag

SEQ ID NO: 47210 - RNA, 19 nt, Artificial Sequence
  Antisense Oligo
cucuaugaccugcagcacc

SEQ ID NO: 47211 - RNA, 19 nt, Artificial Sequence
  Sense Oligo
agaaggugucugaggaggc

SEQ ID NO: 47212 - RNA, 19 nt, Artificial Sequence
  Antisense Oligo
gccuccucagacaccuucu

SEQ ID NO: 47213 - RNA, 19 nt, Artificial Sequence
  Sense Oligo
aaggugucugaggaggcca

SEQ ID NO: 47214 - RNA, 19 nt, Artificial Sequence
  Antisense Oligo
uggccuccucagacaccuu

SEQ ID NO: 47215 - RNA, 19 nt, Artificial Sequence
  Sense Oligo
aggugucugaggaggccaa

SEQ ID NO: 47216 - RNA, 19 nt, Artificial Sequence
  Antisense Oligo
uuggccuccucagacaccu

SEQ ID NO: 47217 - RNA, 19 nt, Artificial Sequence
  Sense Oligo
ggugucugaggaggccaaa

SEQ ID NO: 47218 - RNA, 19 nt, Artificial Sequence
  Antisense Oligo
uuuggccuccucagacacc

SEQ ID NO: 47219 - RNA, 19 nt, Artificial Sequence
  Sense Oligo
gugucugaggaggccaaau

SEQ ID NO: 47220 - RNA, 19 nt, Artificial Sequence
  Antisense Oligo
auuuggccuccucagacac

SEQ ID NO: 47221 - RNA, 19 nt, Artificial Sequence
  Sense Oligo
ugucugaggaggccaaauc

SEQ ID NO: 47222 - RNA, 19 nt, Artificial Sequence
  Antisense Oligo
gauuuggccuccucagaca

SEQ ID NO: 47223 - RNA, 19 nt, Artificial Sequence
  Sense Oligo
gucugaggaggccaaaucg

SEQ ID NO: 47224 - RNA, 19 nt, Artificial Sequence
  Antisense Oligo
cgauuuggccuccucagac

SEQ ID NO: 47225 - RNA, 19 nt, Artificial Sequence
  Sense Oligo
cugaggaggccaaaucgau

SEQ ID NO: 47226 - RNA, 19 nt, Artificial Sequence
  Antisense Oligo
aucgauuuggccuccucag

SEQ ID NO: 47227 - RNA, 19 nt, Artificial Sequence
  Sense Oligo
ggaggccaaaucgauccug

SEQ ID NO: 47228 - RNA, 19 nt, Artificial Sequence
  Antisense Oligo
caggaucgauuuggccucc

SEQ ID NO: 47229 - RNA, 19 nt, Artificial Sequence
  Sense Oligo
gaggccaaaucgauccugc

SEQ ID NO: 47230 - RNA, 19 nt, Artificial Sequence
  Antisense Oligo
gcaggaucgauuuggccuc

SEQ ID NO: 47231 - RNA, 19 nt, Artificial Sequence
  Sense Oligo
aggccaaaucgauccugcu

SEQ ID NO: 47232 - RNA, 19 nt, Artificial Sequence
  Antisense Oligo
agcaggaucgauuuggccu

SEQ ID NO: 47233 - RNA, 19 nt, Artificial Sequence
  Sense Oligo
caggaguacuuucacagac

SEQ ID NO: 47234 - RNA, 19 nt, Artificial Sequence
  Antisense Oligo
gucugugaaaguacuccug

SEQ ID NO: 47235 - RNA, 19 nt, Artificial Sequence
  Sense Oligo
aggaguacuuucacagaca

SEQ ID NO: 47236 - RNA, 19 nt, Artificial Sequence
  Antisense Oligo
ugucugugaaaguacuccu

SEQ ID NO: 47237 - RNA, 19 nt, Artificial Sequence
  Sense Oligo
ggaguacuuucacagacag

SEQ ID NO: 47238 - RNA, 19 nt, Artificial Sequence
  Antisense Oligo
cugucugugaaaguacucc

SEQ ID NO: 47239 - RNA, 19 nt, Artificial Sequence
  Sense Oligo
gaguacuuucacagacaga

SEQ ID NO: 47240 - RNA, 19 nt, Artificial Sequence
  Antisense Oligo
ucugucugugaaaguacuc

SEQ ID NO: 47241 - RNA, 19 nt, Artificial Sequence
  Sense Oligo
guacuuucacagacagagg

SEQ ID NO: 47242 - RNA, 19 nt, Artificial Sequence
  Antisense Oligo
ccucugucugugaaaguac

SEQ ID NO: 47243 - RNA, 19 nt, Artificial Sequence
  Sense Oligo
uacuuucacagacagaggc

SEQ ID NO: 47244 - RNA, 19 nt, Artificial Sequence
  Antisense Oligo
gccucugucugugaaagua

SEQ ID NO: 47245 - RNA, 19 nt, Artificial Sequence
  Sense Oligo
cuuucacagacagaggcac

SEQ ID NO: 47246 - RNA, 19 nt, Artificial Sequence
  Antisense Oligo
gugccucugucugugaaag

SEQ ID NO: 47247 - RNA, 19 nt, Artificial Sequence
  Sense Oligo
uuucacagacagaggcaca

SEQ ID NO: 47248 - RNA, 19 nt, Artificial Sequence
  Antisense Oligo
ugugccucugucugugaaa

SEQ ID NO: 47249 - RNA, 19 nt, Artificial Sequence
  Sense Oligo
caacuccuuugcagauuuc

SEQ ID NO: 47250 - RNA, 19 nt, Artificial Sequence
  Antisense Oligo
gaaaucugcaaaggaguug

SEQ ID NO: 47251 - RNA, 19 nt, Artificial Sequence
  Sense Oligo
aacuccuuugcagauuucc

SEQ ID NO: 47252 - RNA, 19 nt, Artificial Sequence
  Antisense Oligo
ggaaaucugcaaaggaguu

SEQ ID NO: 47253 - RNA, 19 nt, Artificial Sequence
  Sense Oligo
ccuuugcagauuuccuuca

SEQ ID NO: 47254 - RNA, 19 nt, Artificial Sequence
  Antisense Oligo
ugaaggaaaucugcaaagg

SEQ ID NO: 47255 - RNA, 19 nt, Artificial Sequence
  Sense Oligo
cuuugcagauuuccuucag

SEQ ID NO: 47256 - RNA, 19 nt, Artificial Sequence
  Antisense Oligo
cugaaggaaaucugcaaag

SEQ ID NO: 47257 - RNA, 19 nt, Artificial Sequence
  Sense Oligo
uuugcagauuuccuucagg

SEQ ID NO: 47258 - RNA, 19 nt, Artificial Sequence
  Antisense Oligo
ccugaaggaaaucugcaaa

SEQ ID NO: 47259 - RNA, 19 nt, Artificial Sequence
  Sense Oligo
uugcagauuuccuucaggc

SEQ ID NO: 47260 - RNA, 19 nt, Artificial Sequence
  Antisense Oligo
gccugaaggaaaucugcaa

SEQ ID NO: 47261 - RNA, 19 nt, Artificial Sequence
  Sense Oligo
agauuuccuucaggcacac

SEQ ID NO: 47262 - RNA, 19 nt, Artificial Sequence
  Antisense Oligo
gugugccugaaggaaaucu

SEQ ID NO: 47263 - RNA, 19 nt, Artificial Sequence
  Sense Oligo
uggagcgccacgccaucuu

SEQ ID NO: 47264 - RNA, 19 nt, Artificial Sequence
  Antisense Oligo
aagauggcguggcgcucca

SEQ ID NO: 47265 - RNA, 19 nt, Artificial Sequence
  Sense Oligo
cgccacgccaucuucacag

SEQ ID NO: 47266 - RNA, 19 nt, Artificial Sequence
  Antisense Oligo
cugugaagauggcguggcg

SEQ ID NO: 47267 - RNA, 19 nt, Artificial Sequence
  Sense Oligo
gccacgccaucuucacaga

SEQ ID NO: 47268 - RNA, 19 nt, Artificial Sequence
  Antisense Oligo
ucugugaagauggcguggc

SEQ ID NO: 47269 - RNA, 19 nt, Artificial Sequence
  Sense Oligo
ccacgccaucuucacagag

SEQ ID NO: 47270 - RNA, 19 nt, Artificial Sequence
  Antisense Oligo
cucugugaagauggcgugg

SEQ ID NO: 47271 - RNA, 19 nt, Artificial Sequence
  Sense Oligo
cacgccaucuucacagagg

SEQ ID NO: 47272 - RNA, 19 nt, Artificial Sequence
  Antisense Oligo
ccucugugaagauggcgug

SEQ ID NO: 47273 - RNA, 19 nt, Artificial Sequence
  Sense Oligo
acgccaucuucacagaggu

SEQ ID NO: 47274 - RNA, 19 nt, Artificial Sequence
  Antisense Oligo
accucugugaagauggcgu

SEQ ID NO: 47275 - RNA, 19 nt, Artificial Sequence
  Sense Oligo
cgccaucuucacagaggug

SEQ ID NO: 47276 - RNA, 19 nt, Artificial Sequence
  Antisense Oligo
caccucugugaagauggcg

SEQ ID NO: 47277 - RNA, 19 nt, Artificial Sequence
  Sense Oligo
agaggugauugucuuucug

SEQ ID NO: 47278 - RNA, 19 nt, Artificial Sequence
  Antisense Oligo
cagaaagacaaucaccucu

SEQ ID NO: 47279 - RNA, 19 nt, Artificial Sequence
  Sense Oligo
gaggugauugucuuucugc

SEQ ID NO: 47280 - RNA, 19 nt, Artificial Sequence
  Antisense Oligo
gcagaaagacaaucaccuc

SEQ ID NO: 47281 - RNA, 19 nt, Artificial Sequence
  Sense Oligo
ugucuuucugcacuuguac

SEQ ID NO: 47282 - RNA, 19 nt, Artificial Sequence
  Antisense Oligo
guacaagugcagaaagaca

SEQ ID NO: 47283 - RNA, 19 nt, Artificial Sequence
  Sense Oligo
gucuuucugcacuuguacc

SEQ ID NO: 47284 - RNA, 19 nt, Artificial Sequence
  Antisense Oligo
gguacaagugcagaaagac

SEQ ID NO: 47285 - RNA, 19 nt, Artificial Sequence
  Sense Oligo
ucuuucugcacuuguaccc

SEQ ID NO: 47286 - RNA, 19 nt, Artificial Sequence
  Antisense Oligo
ggguacaagugcagaaaga

SEQ ID NO: 47287 - RNA, 19 nt, Artificial Sequence
  Sense Oligo
cuuucugcacuuguacccu

SEQ ID NO: 47288 - RNA, 19 nt, Artificial Sequence
  Antisense Oligo
aggguacaagugcagaaag

SEQ ID NO: 47289 - RNA, 19 nt, Artificial Sequence
  Sense Oligo
ucugcacuuguacccuauc

SEQ ID NO: 47290 - RNA, 19 nt, Artificial Sequence
  Antisense Oligo
gauaggguacaagugcaga

SEQ ID NO: 47291 - RNA, 19 nt, Artificial Sequence
  Sense Oligo
cugcacuuguacccuaucc

SEQ ID NO: 47292 - RNA, 19 nt, Artificial Sequence
  Antisense Oligo
ggauaggguacaagugcag

SEQ ID NO: 47293 - RNA, 19 nt, Artificial Sequence
  Sense Oligo
ugcacuuguacccuauccc

SEQ ID NO: 47294 - RNA, 19 nt, Artificial Sequence
  Antisense Oligo
gggauaggguacaagugca

SEQ ID NO: 47295 - RNA, 19 nt, Artificial Sequence
  Sense Oligo
cccugucacccaagagucc

SEQ ID NO: 47296 - RNA, 19 nt, Artificial Sequence
  Antisense Oligo
ggacucuugggugacaggg

SEQ ID NO: 47297 - RNA, 19 nt, Artificial Sequence
  Sense Oligo
ccugucacccaagaguccu

SEQ ID NO: 47298 - RNA, 19 nt, Artificial Sequence
  Antisense Oligo
aggacucuugggugacagg

SEQ ID NO: 47299 - RNA, 19 nt, Artificial Sequence
  Sense Oligo
cugucacccaagaguccua

SEQ ID NO: 47300 - RNA, 19 nt, Artificial Sequence
  Antisense Oligo
uaggacucuugggugacag

SEQ ID NO: 47301 - RNA, 19 nt, Artificial Sequence
  Sense Oligo
ugucacccaagaguccuaa

SEQ ID NO: 47302 - RNA, 19 nt, Artificial Sequence
  Antisense Oligo
uuaggacucuugggugaca

SEQ ID NO: 47303 - RNA, 19 nt, Artificial Sequence
  Sense Oligo
ucacccaagaguccuaaau

SEQ ID NO: 47304 - RNA, 19 nt, Artificial Sequence
  Antisense Oligo
auuuaggacucuuggguga

SEQ ID NO: 47305 - RNA, 19 nt, Artificial Sequence
  Sense Oligo
ccucgugucaggauucaag

SEQ ID NO: 47306 - RNA, 19 nt, Artificial Sequence
  Antisense Oligo
cuugaauccugacacgagg

SEQ ID NO: 47307 - RNA, 19 nt, Artificial Sequence
  Sense Oligo
cucgugucaggauucaaga

SEQ ID NO: 47308 - RNA, 19 nt, Artificial Sequence
  Antisense Oligo
ucuugaauccugacacgag

SEQ ID NO: 47309 - RNA, 19 nt, Artificial Sequence
  Sense Oligo
ucgugucaggauucaagau

SEQ ID NO: 47310 - RNA, 19 nt, Artificial Sequence
  Antisense Oligo
aucuugaauccugacacga

SEQ ID NO: 47311 - RNA, 19 nt, Artificial Sequence
  Sense Oligo
cgugucaggauucaagauu

SEQ ID NO: 47312 - RNA, 19 nt, Artificial Sequence
  Antisense Oligo
aaucuugaauccugacacg

SEQ ID NO: 47313 - RNA, 19 nt, Artificial Sequence
  Sense Oligo
gugucaggauucaagauuc

SEQ ID NO: 47314 - RNA, 19 nt, Artificial Sequence
  Antisense Oligo
gaaucuugaauccugacac

SEQ ID NO: 47315 - RNA, 19 nt, Artificial Sequence
  Sense Oligo
ugucaggauucaagauucu

SEQ ID NO: 47316 - RNA, 19 nt, Artificial Sequence
  Antisense Oligo
agaaucuugaauccugaca

SEQ ID NO: 47317 - RNA, 19 nt, Artificial Sequence
  Sense Oligo
ucaggauucaagauucuuc

SEQ ID NO: 47318 - RNA, 19 nt, Artificial Sequence
  Antisense Oligo
gaagaaucuugaauccuga

SEQ ID NO: 47319 - RNA, 19 nt, Artificial Sequence
  Sense Oligo
ggcagcgguuagggauccu

SEQ ID NO: 47320 - RNA, 19 nt, Artificial Sequence
  Antisense Oligo
aggaucccuaaccgcugcc

SEQ ID NO: 47321 - RNA, 19 nt, Artificial Sequence
  Sense Oligo
gcagcgguuagggauccug

SEQ ID NO: 47322 - RNA, 19 nt, Artificial Sequence
  Antisense Oligo
caggaucccuaaccgcugc

SEQ ID NO: 47323 - RNA, 19 nt, Artificial Sequence
  Sense Oligo
cagcgguuagggauccugc

SEQ ID NO: 47324 - RNA, 19 nt, Artificial Sequence
  Antisense Oligo
gcaggaucccuaaccgcug

SEQ ID NO: 47325 - RNA, 19 nt, Artificial Sequence
  Sense Oligo
agcgguuagggauccugca

SEQ ID NO: 47326 - RNA, 19 nt, Artificial Sequence
  Antisense Oligo
ugcaggaucccuaaccgcu

SEQ ID NO: 47327 - RNA, 19 nt, Artificial Sequence
  Sense Oligo
guuagggauccugcaggga

SEQ ID NO: 47328 - RNA, 19 nt, Artificial Sequence
  Antisense Oligo
ucccugcaggaucccuaac

SEQ ID NO: 47329 - RNA, 19 nt, Artificial Sequence
  Sense Oligo
gggaguagguccaguuaac

SEQ ID NO: 47330 - RNA, 19 nt, Artificial Sequence
  Antisense Oligo
guuaacuggaccuacuccc

SEQ ID NO: 47331 - RNA, 19 nt, Artificial Sequence
  Sense Oligo
ggaguagguccaguuaacc

SEQ ID NO: 47332 - RNA, 19 nt, Artificial Sequence
  Antisense Oligo
gguuaacuggaccuacucc

SEQ ID NO: 47333 - RNA, 19 nt, Artificial Sequence
  Sense Oligo
gaguagguccaguuaacca

SEQ ID NO: 47334 - RNA, 19 nt, Artificial Sequence
  Antisense Oligo
ugguuaacuggaccuacuc

SEQ ID NO: 47335 - RNA, 19 nt, Artificial Sequence
  Sense Oligo
aguagguccaguuaaccag

SEQ ID NO: 47336 - RNA, 19 nt, Artificial Sequence
  Antisense Oligo
cugguuaacuggaccuacu

SEQ ID NO: 47337 - RNA, 19 nt, Artificial Sequence
  Sense Oligo
guagguccaguuaaccagg

SEQ ID NO: 47338 - RNA, 19 nt, Artificial Sequence
  Antisense Oligo
ccugguuaacuggaccuac

SEQ ID NO: 47339 - RNA, 19 nt, Artificial Sequence
  Sense Oligo
uagguccaguuaaccaggu

SEQ ID NO: 47340 - RNA, 19 nt, Artificial Sequence
  Antisense Oligo
accugguuaacuggaccua

SEQ ID NO: 47341 - RNA, 19 nt, Artificial Sequence
  Sense Oligo
agguccaguuaaccaggug

SEQ ID NO: 47342 - RNA, 19 nt, Artificial Sequence
  Antisense Oligo
caccugguuaacuggaccu

SEQ ID NO: 47343 - RNA, 19 nt, Artificial Sequence
  Sense Oligo
gguccaguuaaccaggugc

SEQ ID NO: 47344 - RNA, 19 nt, Artificial Sequence
  Antisense Oligo
gcaccugguuaacuggacc

SEQ ID NO: 47345 - RNA, 19 nt, Artificial Sequence
  Sense Oligo
uaaccaggugcugagugcc

SEQ ID NO: 47346 - RNA, 19 nt, Artificial Sequence
  Antisense Oligo
ggcacucagcaccugguua

SEQ ID NO: 47347 - RNA, 19 nt, Artificial Sequence
  Sense Oligo
aaccaggugcugagugccu

SEQ ID NO: 47348 - RNA, 19 nt, Artificial Sequence
  Antisense Oligo
aggcacucagcaccugguu

SEQ ID NO: 47349 - RNA, 19 nt, Artificial Sequence
  Sense Oligo
gugcugagugccuggcucu

SEQ ID NO: 47350 - RNA, 19 nt, Artificial Sequence
  Antisense Oligo
agagccaggcacucagcac

SEQ ID NO: 47351 - RNA, 19 nt, Artificial Sequence
  Sense Oligo
ugcugagugccuggcucug

SEQ ID NO: 47352 - RNA, 19 nt, Artificial Sequence
  Antisense Oligo
cagagccaggcacucagca

SEQ ID NO: 47353 - RNA, 19 nt, Artificial Sequence
  Sense Oligo
gcugagugccuggcucugu

SEQ ID NO: 47354 - RNA, 19 nt, Artificial Sequence
  Antisense Oligo
acagagccaggcacucagc

SEQ ID NO: 47355 - RNA, 19 nt, Artificial Sequence
  Sense Oligo
gagugccuggcucugugca

SEQ ID NO: 47356 - RNA, 19 nt, Artificial Sequence
  Antisense Oligo
ugcacagagccaggcacuc

SEQ ID NO: 47357 - RNA, 19 nt, Artificial Sequence
  Sense Oligo
caaauaaaguaccacgucc

SEQ ID NO: 47358 - RNA, 19 nt, Artificial Sequence
  Antisense Oligo
ggacgugguacuuuauuug

SEQ ID NO: 47359 - RNA, 19 nt, Artificial Sequence
  Sense Oligo
aaguaccacgucccaggac

SEQ ID NO: 47360 - RNA, 19 nt, Artificial Sequence
  Antisense Oligo
guccugggacgugguacuu

SEQ ID NO: 47361 - RNA, 19 nt, Artificial Sequence
  Sense Oligo
aguaccacgucccaggacu

SEQ ID NO: 47362 - RNA, 19 nt, Artificial Sequence
  Antisense Oligo
aguccugggacgugguacu

SEQ ID NO: 47363 - RNA, 19 nt, Artificial Sequence
  Sense Oligo
caagggcacuagggacgca

SEQ ID NO: 47364 - RNA, 19 nt, Artificial Sequence
  Antisense Oligo
ugcgucccuagugcccuug

SEQ ID NO: 47365 - RNA, 19 nt, Artificial Sequence
  Sense Oligo
aagggcacuagggacgcac

SEQ ID NO: 47366 - RNA, 19 nt, Artificial Sequence
  Antisense Oligo
gugcgucccuagugcccuu

SEQ ID NO: 47367 - RNA, 19 nt, Artificial Sequence
  Sense Oligo
gcacuagggacgcacagau

SEQ ID NO: 47368 - RNA, 19 nt, Artificial Sequence
  Antisense Oligo
aucugugcgucccuagugc

SEQ ID NO: 47369 - RNA, 19 nt, Artificial Sequence
  Sense Oligo
cacuagggacgcacagaug

SEQ ID NO: 47370 - RNA, 19 nt, Artificial Sequence
  Antisense Oligo
caucugugcgucccuagug

SEQ ID NO: 47371 - RNA, 19 nt, Artificial Sequence
  Sense Oligo
acuagggacgcacagauga

SEQ ID NO: 47372 - RNA, 19 nt, Artificial Sequence
  Antisense Oligo
ucaucugugcgucccuagu

SEQ ID NO: 47373 - RNA, 19 nt, Artificial Sequence
  Sense Oligo
gaugaaucuguagcccuug

SEQ ID NO: 47374 - RNA, 19 nt, Artificial Sequence
  Antisense Oligo
caagggcuacagauucauc

SEQ ID NO: 47375 - RNA, 19 nt, Artificial Sequence
  Sense Oligo
augaaucuguagcccuugu

SEQ ID NO: 47376 - RNA, 19 nt, Artificial Sequence
  Antisense Oligo
acaagggcuacagauucau

SEQ ID NO: 47377 - RNA, 19 nt, Artificial Sequence
  Sense Oligo
ugaaucuguagcccuuguc

SEQ ID NO: 47378 - RNA, 19 nt, Artificial Sequence
  Antisense Oligo
gacaagggcuacagauuca

SEQ ID NO: 47379 - RNA, 19 nt, Artificial Sequence
  Sense Oligo
gaaucuguagcccuugucc

SEQ ID NO: 47380 - RNA, 19 nt, Artificial Sequence
  Antisense Oligo
ggacaagggcuacagauuc

SEQ ID NO: 47381 - RNA, 19 nt, Artificial Sequence
  Sense Oligo
aaucuguagcccuuguccu

SEQ ID NO: 47382 - RNA, 19 nt, Artificial Sequence
  Antisense Oligo
aggacaagggcuacagauu

SEQ ID NO: 47383 - RNA, 19 nt, Artificial Sequence
  Sense Oligo
aucuguagcccuuguccuu

SEQ ID NO: 47384 - RNA, 19 nt, Artificial Sequence
  Antisense Oligo
aaggacaagggcuacagau

SEQ ID NO: 47385 - RNA, 19 nt, Artificial Sequence
  Sense Oligo
gcccuuguccuuuguuagc

SEQ ID NO: 47386 - RNA, 19 nt, Artificial Sequence
  Antisense Oligo
gcuaacaaaggacaagggc

SEQ ID NO: 47387 - RNA, 19 nt, Artificial Sequence
  Sense Oligo
cccuuguccuuuguuagca

SEQ ID NO: 47388 - RNA, 19 nt, Artificial Sequence
  Antisense Oligo
ugcuaacaaaggacaaggg

SEQ ID NO: 47389 - RNA, 19 nt, Artificial Sequence
  Sense Oligo
ccuuguccuuuguuagcau

SEQ ID NO: 47390 - RNA, 19 nt, Artificial Sequence
  Antisense Oligo
augcuaacaaaggacaagg

SEQ ID NO: 47391 - RNA, 19 nt, Artificial Sequence
  Sense Oligo
cuuguccuuuguuagcauu

SEQ ID NO: 47392 - RNA, 19 nt, Artificial Sequence
  Antisense Oligo
aaugcuaacaaaggacaag

SEQ ID NO: 47393 - RNA, 19 nt, Artificial Sequence
  Sense Oligo
uccuuuguuagcauuaggg

SEQ ID NO: 47394 - RNA, 19 nt, Artificial Sequence
  Antisense Oligo
cccuaaugcuaacaaagga

SEQ ID NO: 47395 - RNA, 19 nt, Artificial Sequence
  Sense Oligo
ccuuuguuagcauuaggga

SEQ ID NO: 47396 - RNA, 19 nt, Artificial Sequence
  Antisense Oligo
ucccuaaugcuaacaaagg

SEQ ID NO: 47397 - RNA, 19 nt, Artificial Sequence
  Sense Oligo
uguuagcauuagggagcau

SEQ ID NO: 47398 - RNA, 19 nt, Artificial Sequence
  Antisense Oligo
augcucccuaaugcuaaca

SEQ ID NO: 47399 - RNA, 19 nt, Artificial Sequence
  Sense Oligo
guuagcauuagggagcaug

SEQ ID NO: 47400 - RNA, 19 nt, Artificial Sequence
  Antisense Oligo
caugcucccuaaugcuaac

SEQ ID NO: 47401 - RNA, 19 nt, Artificial Sequence
  Sense Oligo
uuagcauuagggagcaugg

SEQ ID NO: 47402 - RNA, 19 nt, Artificial Sequence
  Antisense Oligo
ccaugcucccuaaugcuaa

SEQ ID NO: 47403 - RNA, 19 nt, Artificial Sequence
  Sense Oligo
uagcauuagggagcaugga

SEQ ID NO: 47404 - RNA, 19 nt, Artificial Sequence
  Antisense Oligo
uccaugcucccuaaugcua

SEQ ID NO: 47405 - RNA, 19 nt, Artificial Sequence
  Sense Oligo
acagaugccaucaauauca

SEQ ID NO: 47406 - RNA, 19 nt, Artificial Sequence
  Antisense Oligo
ugauauugauggcaucugu

SEQ ID NO: 47407 - RNA, 19 nt, Artificial Sequence
  Sense Oligo
cagaugccaucaauaucau

SEQ ID NO: 47408 - RNA, 19 nt, Artificial Sequence
  Antisense Oligo
augauauugauggcaucug

SEQ ID NO: 47409 - RNA, 19 nt, Artificial Sequence
  Sense Oligo
agaugccaucaauaucaua

SEQ ID NO: 47410 - RNA, 19 nt, Artificial Sequence
  Antisense Oligo
uaugauauugauggcaucu

SEQ ID NO: 47411 - RNA, 19 nt, Artificial Sequence
  Sense Oligo
gaugccaucaauaucauau

SEQ ID NO: 47412 - RNA, 19 nt, Artificial Sequence
  Antisense Oligo
auaugauauugauggcauc

SEQ ID NO: 47413 - RNA, 19 nt, Artificial Sequence
  Sense Oligo
augccaucaauaucauaug

SEQ ID NO: 47414 - RNA, 19 nt, Artificial Sequence
  Antisense Oligo
cauaugauauugauggcau

SEQ ID NO: 47415 - RNA, 19 nt, Artificial Sequence
  Sense Oligo
ugccaucaauaucauauga

SEQ ID NO: 47416 - RNA, 19 nt, Artificial Sequence
  Antisense Oligo
ucauaugauauugauggca

SEQ ID NO: 47417 - RNA, 19 nt, Artificial Sequence
  Sense Oligo
ucauaugauaaaugcugug

SEQ ID NO: 47418 - RNA, 19 nt, Artificial Sequence
  Antisense Oligo
cacagcauuuaucauauga

SEQ ID NO: 47419 - RNA, 19 nt, Artificial Sequence
  Sense Oligo
cauaugauaaaugcugugc

SEQ ID NO: 47420 - RNA, 19 nt, Artificial Sequence
  Antisense Oligo
gcacagcauuuaucauaug

SEQ ID NO: 47421 - RNA, 19 nt, Artificial Sequence
  Sense Oligo
auaugauaaaugcugugcu

SEQ ID NO: 47422 - RNA, 19 nt, Artificial Sequence
  Antisense Oligo
agcacagcauuuaucauau

SEQ ID NO: 47423 - RNA, 19 nt, Artificial Sequence
  Sense Oligo
uaugauaaaugcugugcuu

SEQ ID NO: 47424 - RNA, 19 nt, Artificial Sequence
  Antisense Oligo
aagcacagcauuuaucaua

SEQ ID NO: 47425 - RNA, 19 nt, Artificial Sequence
  Sense Oligo
ugauaaaugcugugcuuag

SEQ ID NO: 47426 - RNA, 19 nt, Artificial Sequence
  Antisense Oligo
cuaagcacagcauuuauca

SEQ ID NO: 47427 - RNA, 19 nt, Artificial Sequence
  Sense Oligo
gauaaaugcugugcuuaga

SEQ ID NO: 47428 - RNA, 19 nt, Artificial Sequence
  Antisense Oligo
ucuaagcacagcauuuauc

SEQ ID NO: 47429 - RNA, 19 nt, Artificial Sequence
  Sense Oligo
auaaaugcugugcuuagag

SEQ ID NO: 47430 - RNA, 19 nt, Artificial Sequence
  Antisense Oligo
cucuaagcacagcauuuau

SEQ ID NO: 47431 - RNA, 19 nt, Artificial Sequence
  Sense Oligo
uaaaugcugugcuuagagg

SEQ ID NO: 47432 - RNA, 19 nt, Artificial Sequence
  Antisense Oligo
ccucuaagcacagcauuua

SEQ ID NO: 47433 - RNA, 19 nt, Artificial Sequence
  Sense Oligo
aaaugcugugcuuagaggc

SEQ ID NO: 47434 - RNA, 19 nt, Artificial Sequence
  Antisense Oligo
gccucuaagcacagcauuu

SEQ ID NO: 47435 - RNA, 19 nt, Artificial Sequence
  Sense Oligo
cugugcuuagaggcagcgg

SEQ ID NO: 47436 - RNA, 19 nt, Artificial Sequence
  Antisense Oligo
ccgcugccucuaagcacag

SEQ ID NO: 47437 - RNA, 19 nt, Artificial Sequence
  Sense Oligo
gagcggugcagaccaggau

SEQ ID NO: 47438 - RNA, 19 nt, Artificial Sequence
  Antisense Oligo
auccuggucugcaccgcuc

SEQ ID NO: 47439 - RNA, 19 nt, Artificial Sequence
  Sense Oligo
agcggugcagaccaggaug

SEQ ID NO: 47440 - RNA, 19 nt, Artificial Sequence
  Antisense Oligo
cauccuggucugcaccgcu

SEQ ID NO: 47441 - RNA, 19 nt, Artificial Sequence
  Sense Oligo
gugcagaccaggaugcgag

SEQ ID NO: 47442 - RNA, 19 nt, Artificial Sequence
  Antisense Oligo
cucgcauccuggucugcac

SEQ ID NO: 47443 - RNA, 19 nt, Artificial Sequence
  Sense Oligo
ugcagaccaggaugcgagc

SEQ ID NO: 47444 - RNA, 19 nt, Artificial Sequence
  Antisense Oligo
gcucgcauccuggucugca

SEQ ID NO: 47445 - RNA, 19 nt, Artificial Sequence
  Sense Oligo
gcagaccaggaugcgagcu

SEQ ID NO: 47446 - RNA, 19 nt, Artificial Sequence
  Antisense Oligo
agcucgcauccuggucugc

SEQ ID NO: 47447 - RNA, 19 nt, Artificial Sequence
  Sense Oligo
cagaccaggaugcgagcuc

SEQ ID NO: 47448 - RNA, 19 nt, Artificial Sequence
  Antisense Oligo
gagcucgcauccuggucug

SEQ ID NO: 47449 - RNA, 19 nt, Artificial Sequence
  Sense Oligo
agaccaggaugcgagcuca

SEQ ID NO: 47450 - RNA, 19 nt, Artificial Sequence
  Antisense Oligo
ugagcucgcauccuggucu

SEQ ID NO: 47451 - RNA, 19 nt, Artificial Sequence
  Sense Oligo
gaccaggaugcgagcucag

SEQ ID NO: 47452 - RNA, 19 nt, Artificial Sequence
  Antisense Oligo
cugagcucgcauccugguc

SEQ ID NO: 47453 - RNA, 19 nt, Artificial Sequence
  Sense Oligo
accaggaugcgagcucaga

SEQ ID NO: 47454 - RNA, 19 nt, Artificial Sequence
  Antisense Oligo
ucugagcucgcauccuggu

SEQ ID NO: 47455 - RNA, 19 nt, Artificial Sequence
  Sense Oligo
ccaggaugcgagcucagau

SEQ ID NO: 47456 - RNA, 19 nt, Artificial Sequence
  Antisense Oligo
aucugagcucgcauccugg

SEQ ID NO: 47457 - RNA, 19 nt, Artificial Sequence
  Sense Oligo
caggaugcgagcucagaug

SEQ ID NO: 47458 - RNA, 19 nt, Artificial Sequence
  Antisense Oligo
caucugagcucgcauccug

SEQ ID NO: 47459 - RNA, 19 nt, Artificial Sequence
  Sense Oligo
aggaugcgagcucagauga

SEQ ID NO: 47460 - RNA, 19 nt, Artificial Sequence
  Antisense Oligo
ucaucugagcucgcauccu

SEQ ID NO: 47461 - RNA, 19 nt, Artificial Sequence
  Sense Oligo
ggaugcgagcucagaugag

SEQ ID NO: 47462 - RNA, 19 nt, Artificial Sequence
  Antisense Oligo
cucaucugagcucgcaucc

SEQ ID NO: 47463 - RNA, 19 nt, Artificial Sequence
  Sense Oligo
gggaagggauuguaggcug

SEQ ID NO: 47464 - RNA, 19 nt, Artificial Sequence
  Antisense Oligo
cagccuacaaucccuuccc

SEQ ID NO: 47465 - RNA, 19 nt, Artificial Sequence
  Sense Oligo
ggaagggauuguaggcuga

SEQ ID NO: 47466 - RNA, 19 nt, Artificial Sequence
  Antisense Oligo
ucagccuacaaucccuucc

SEQ ID NO: 47467 - RNA, 19 nt, Artificial Sequence
  Sense Oligo
gaagggauuguaggcugag

SEQ ID NO: 47468 - RNA, 19 nt, Artificial Sequence
  Antisense Oligo
cucagccuacaaucccuuc

SEQ ID NO: 47469 - RNA, 19 nt, Artificial Sequence
  Sense Oligo
gggauuguaggcugagggc

SEQ ID NO: 47470 - RNA, 19 nt, Artificial Sequence
  Antisense Oligo
gcccucagccuacaauccc

SEQ ID NO: 47471 - RNA, 19 nt, Artificial Sequence
  Sense Oligo
ggauuguaggcugagggcc

SEQ ID NO: 47472 - RNA, 19 nt, Artificial Sequence
  Antisense Oligo
ggcccucagccuacaaucc

SEQ ID NO: 47473 - RNA, 19 nt, Artificial Sequence
  Sense Oligo
agccgcugacagcucuuag

SEQ ID NO: 47474 - RNA, 19 nt, Artificial Sequence
  Antisense Oligo
cuaagagcugucagcggcu

SEQ ID NO: 47475 - RNA, 19 nt, Artificial Sequence
  Sense Oligo
gccgcugacagcucuuagg

SEQ ID NO: 47476 - RNA, 19 nt, Artificial Sequence
  Antisense Oligo
ccuaagagcugucagcggc

SEQ ID NO: 47477 - RNA, 19 nt, Artificial Sequence
  Sense Oligo
ccgcugacagcucuuaggg

SEQ ID NO: 47478 - RNA, 19 nt, Artificial Sequence
  Antisense Oligo
cccuaagagcugucagcgg

SEQ ID NO: 47479 - RNA, 19 nt, Artificial Sequence
  Sense Oligo
cgcugacagcucuuagggu

SEQ ID NO: 47480 - RNA, 19 nt, Artificial Sequence
  Antisense Oligo
acccuaagagcugucagcg

SEQ ID NO: 47481 - RNA, 19 nt, Artificial Sequence
  Sense Oligo
gcugacagcucuuaggguu

SEQ ID NO: 47482 - RNA, 19 nt, Artificial Sequence
  Antisense Oligo
aacccuaagagcugucagc

SEQ ID NO: 47483 - RNA, 19 nt, Artificial Sequence
  Sense Oligo
cugacagcucuuaggguuc

SEQ ID NO: 47484 - RNA, 19 nt, Artificial Sequence
  Antisense Oligo
gaacccuaagagcugucag

SEQ ID NO: 47485 - RNA, 19 nt, Artificial Sequence
  Sense Oligo
ugacagcucuuaggguuca

SEQ ID NO: 47486 - RNA, 19 nt, Artificial Sequence
  Antisense Oligo
ugaacccuaagagcuguca

SEQ ID NO: 47487 - RNA, 19 nt, Artificial Sequence
  Sense Oligo
gacagcucuuaggguucaa

SEQ ID NO: 47488 - RNA, 19 nt, Artificial Sequence
  Antisense Oligo
uugaacccuaagagcuguc

SEQ ID NO: 47489 - RNA, 19 nt, Artificial Sequence
  Sense Oligo
acagcucuuaggguucaag

SEQ ID NO: 47490 - RNA, 19 nt, Artificial Sequence
  Antisense Oligo
cuugaacccuaagagcugu

SEQ ID NO: 47491 - RNA, 19 nt, Artificial Sequence
  Sense Oligo
cagcucuuaggguucaagg

SEQ ID NO: 47492 - RNA, 19 nt, Artificial Sequence
  Antisense Oligo
ccuugaacccuaagagcug

SEQ ID NO: 47493 - RNA, 19 nt, Artificial Sequence
  Sense Oligo
agcucuuaggguucaaggc

SEQ ID NO: 47494 - RNA, 19 nt, Artificial Sequence
  Antisense Oligo
gccuugaacccuaagagcu

SEQ ID NO: 47495 - RNA, 19 nt, Artificial Sequence
  Sense Oligo
gcucuuaggguucaaggcu

SEQ ID NO: 47496 - RNA, 19 nt, Artificial Sequence
  Antisense Oligo
agccuugaacccuaagagc

SEQ ID NO: 47497 - RNA, 19 nt, Artificial Sequence
  Sense Oligo
cucuuaggguucaaggcug

SEQ ID NO: 47498 - RNA, 19 nt, Artificial Sequence
  Antisense Oligo
cagccuugaacccuaagag

SEQ ID NO: 47499 - RNA, 19 nt, Artificial Sequence
  Sense Oligo
ucuuaggguucaaggcugu

SEQ ID NO: 47500 - RNA, 19 nt, Artificial Sequence
  Antisense Oligo
acagccuugaacccuaaga

SEQ ID NO: 47501 - RNA, 19 nt, Artificial Sequence
  Sense Oligo
cuuaggguucaaggcugua

SEQ ID NO: 47502 - RNA, 19 nt, Artificial Sequence
  Antisense Oligo
uacagccuugaacccuaag

SEQ ID NO: 47503 - RNA, 19 nt, Artificial Sequence
  Sense Oligo
gguucaaggcuguagugcu

SEQ ID NO: 47504 - RNA, 19 nt, Artificial Sequence
  Antisense Oligo
agcacuacagccuugaacc

SEQ ID NO: 47505 - RNA, 19 nt, Artificial Sequence
  Sense Oligo
aacuacuggaggcccucag

SEQ ID NO: 47506 - RNA, 19 nt, Artificial Sequence
  Antisense Oligo
cugagggccuccaguaguu

SEQ ID NO: 47507 - RNA, 19 nt, Artificial Sequence
  Sense Oligo
ggaggcccucagugacucu

SEQ ID NO: 47508 - RNA, 19 nt, Artificial Sequence
  Antisense Oligo
agagucacugagggccucc

SEQ ID NO: 47509 - RNA, 19 nt, Artificial Sequence
  Sense Oligo
gugacucugcagagccaca

SEQ ID NO: 47510 - RNA, 19 nt, Artificial Sequence
  Antisense Oligo
uguggcucugcagagucac

SEQ ID NO: 47511 - RNA, 19 nt, Artificial Sequence
  Sense Oligo
agagccacaucucagcccu

SEQ ID NO: 47512 - RNA, 19 nt, Artificial Sequence
  Antisense Oligo
agggcugagauguggcucu

SEQ ID NO: 47513 - RNA, 19 nt, Artificial Sequence
  Sense Oligo
gagccacaucucagcccua

SEQ ID NO: 47514 - RNA, 19 nt, Artificial Sequence
  Antisense Oligo
uagggcugagauguggcuc

SEQ ID NO: 47515 - RNA, 19 nt, Artificial Sequence
  Sense Oligo
agccacaucucagcccuau

SEQ ID NO: 47516 - RNA, 19 nt, Artificial Sequence
  Antisense Oligo
auagggcugagauguggcu

SEQ ID NO: 47517 - RNA, 19 nt, Artificial Sequence
  Sense Oligo
gccacaucucagcccuaug

SEQ ID NO: 47518 - RNA, 19 nt, Artificial Sequence
  Antisense Oligo
cauagggcugagauguggc

SEQ ID NO: 47519 - RNA, 19 nt, Artificial Sequence
  Sense Oligo
ccacaucucagcccuaugg

SEQ ID NO: 47520 - RNA, 19 nt, Artificial Sequence
  Antisense Oligo
ccauagggcugagaugugg

SEQ ID NO: 47521 - RNA, 19 nt, Artificial Sequence
  Sense Oligo
cacaucucagcccuaugga

SEQ ID NO: 47522 - RNA, 19 nt, Artificial Sequence
  Antisense Oligo
uccauagggcugagaugug

SEQ ID NO: 47523 - RNA, 19 nt, Artificial Sequence
  Sense Oligo
ucucagcccuauggagcgg

SEQ ID NO: 47524 - RNA, 19 nt, Artificial Sequence
  Antisense Oligo
ccgcuccauagggcugaga

SEQ ID NO: 47525 - RNA, 19 nt, Artificial Sequence
  Sense Oligo
gcacuggaggcacgcuugu

SEQ ID NO: 47526 - RNA, 19 nt, Artificial Sequence
  Antisense Oligo
acaagcgugccuccagugc

SEQ ID NO: 47527 - RNA, 19 nt, Artificial Sequence
  Sense Oligo
cacuggaggcacgcuuguc

SEQ ID NO: 47528 - RNA, 19 nt, Artificial Sequence
  Antisense Oligo
gacaagcgugccuccagug

SEQ ID NO: 47529 - RNA, 19 nt, Artificial Sequence
  Sense Oligo
acuggaggcacgcuugucu

SEQ ID NO: 47530 - RNA, 19 nt, Artificial Sequence
  Antisense Oligo
agacaagcgugccuccagu

SEQ ID NO: 47531 - RNA, 19 nt, Artificial Sequence
  Sense Oligo
cuggaggcacgcuugucuc

SEQ ID NO: 47532 - RNA, 19 nt, Artificial Sequence
  Antisense Oligo
gagacaagcgugccuccag

SEQ ID NO: 47533 - RNA, 19 nt, Artificial Sequence
  Sense Oligo
aggcacgcuugucucccug

SEQ ID NO: 47534 - RNA, 19 nt, Artificial Sequence
  Antisense Oligo
cagggagacaagcgugccu

SEQ ID NO: 47535 - RNA, 19 nt, Artificial Sequence
  Sense Oligo
acgcuugucucccuggcug

SEQ ID NO: 47536 - RNA, 19 nt, Artificial Sequence
  Antisense Oligo
cagccagggagacaagcgu

SEQ ID NO: 47537 - RNA, 19 nt, Artificial Sequence
  Sense Oligo
cuugucucccuggcugggu

SEQ ID NO: 47538 - RNA, 19 nt, Artificial Sequence
  Antisense Oligo
acccagccagggagacaag

SEQ ID NO: 47539 - RNA, 19 nt, Artificial Sequence
  Sense Oligo
uugucucccuggcugggug

SEQ ID NO: 47540 - RNA, 19 nt, Artificial Sequence
  Antisense Oligo
cacccagccagggagacaa

SEQ ID NO: 47541 - RNA, 19 nt, Artificial Sequence
  Sense Oligo
ugucucccuggcuggguga

SEQ ID NO: 47542 - RNA, 19 nt, Artificial Sequence
  Antisense Oligo
ucacccagccagggagaca

SEQ ID NO: 47543 - RNA, 19 nt, Artificial Sequence
  Sense Oligo
gucucccuggcugggugaa

SEQ ID NO: 47544 - RNA, 19 nt, Artificial Sequence
  Antisense Oligo
uucacccagccagggagac

SEQ ID NO: 47545 - RNA, 19 nt, Artificial Sequence
  Sense Oligo
ucucccuggcugggugaag

SEQ ID NO: 47546 - RNA, 19 nt, Artificial Sequence
  Antisense Oligo
cuucacccagccagggaga

SEQ ID NO: 47547 - RNA, 19 nt, Artificial Sequence
  Sense Oligo
ggcugggugaagggagucu

SEQ ID NO: 47548 - RNA, 19 nt, Artificial Sequence
  Antisense Oligo
agacucccuucacccagcc

SEQ ID NO: 47549 - RNA, 19 nt, Artificial Sequence
  Sense Oligo
gcugggugaagggagucug

SEQ ID NO: 47550 - RNA, 19 nt, Artificial Sequence
  Antisense Oligo
cagacucccuucacccagc

SEQ ID NO: 47551 - RNA, 19 nt, Artificial Sequence
  Sense Oligo
cugggugaagggagucuga

SEQ ID NO: 47552 - RNA, 19 nt, Artificial Sequence
  Antisense Oligo
ucagacucccuucacccag

SEQ ID NO: 47553 - RNA, 19 nt, Artificial Sequence
  Sense Oligo
ugggugaagggagucugau

SEQ ID NO: 47554 - RNA, 19 nt, Artificial Sequence
  Antisense Oligo
aucagacucccuucaccca

SEQ ID NO: 47555 - RNA, 19 nt, Artificial Sequence
  Sense Oligo
gggugaagggagucugaug

SEQ ID NO: 47556 - RNA, 19 nt, Artificial Sequence
  Antisense Oligo
caucagacucccuucaccc

SEQ ID NO: 47557 - RNA, 19 nt, Artificial Sequence
  Sense Oligo
ggugaagggagucugauga

SEQ ID NO: 47558 - RNA, 19 nt, Artificial Sequence
  Antisense Oligo
ucaucagacucccuucacc

SEQ ID NO: 47559 - RNA, 19 nt, Artificial Sequence
  Sense Oligo
gugaagggagucugaugaa

SEQ ID NO: 47560 - RNA, 19 nt, Artificial Sequence
  Antisense Oligo
uucaucagacucccuucac

SEQ ID NO: 47561 - RNA, 19 nt, Artificial Sequence
  Sense Oligo
agauacucaggaggcaauu

SEQ ID NO: 47562 - RNA, 19 nt, Artificial Sequence
  Antisense Oligo
aauugccuccugaguaucu

SEQ ID NO: 47563 - RNA, 19 nt, Artificial Sequence
  Sense Oligo
gauacucaggaggcaauuu

SEQ ID NO: 47564 - RNA, 19 nt, Artificial Sequence
  Antisense Oligo
aaauugccuccugaguauc

SEQ ID NO: 47565 - RNA, 19 nt, Artificial Sequence
  Sense Oligo
uacucaggaggcaauuugg

SEQ ID NO: 47566 - RNA, 19 nt, Artificial Sequence
  Antisense Oligo
ccaaauugccuccugagua

SEQ ID NO: 47567 - RNA, 19 nt, Artificial Sequence
  Sense Oligo
acucaggaggcaauuuggc

SEQ ID NO: 47568 - RNA, 19 nt, Artificial Sequence
  Antisense Oligo
gccaaauugccuccugagu

SEQ ID NO: 47569 - RNA, 19 nt, Artificial Sequence
  Sense Oligo
ucaggaggcaauuuggcag

SEQ ID NO: 47570 - RNA, 19 nt, Artificial Sequence
  Antisense Oligo
cugccaaauugccuccuga

SEQ ID NO: 47571 - RNA, 19 nt, Artificial Sequence
  Sense Oligo
aggaggcaauuuggcaggg

SEQ ID NO: 47572 - RNA, 19 nt, Artificial Sequence
  Antisense Oligo
cccugccaaauugccuccu

SEQ ID NO: 47573 - RNA, 19 nt, Artificial Sequence
  Sense Oligo
ggaggcaauuuggcagggc

SEQ ID NO: 47574 - RNA, 19 nt, Artificial Sequence
  Antisense Oligo
gcccugccaaauugccucc

SEQ ID NO: 47575 - RNA, 19 nt, Artificial Sequence
  Sense Oligo
uuccuccuuagaugagugg

SEQ ID NO: 47576 - RNA, 19 nt, Artificial Sequence
  Antisense Oligo
ccacucaucuaaggaggaa

SEQ ID NO: 47577 - RNA, 19 nt, Artificial Sequence
  Sense Oligo
uccuccuuagaugagugga

SEQ ID NO: 47578 - RNA, 19 nt, Artificial Sequence
  Antisense Oligo
uccacucaucuaaggagga

SEQ ID NO: 47579 - RNA, 19 nt, Artificial Sequence
  Sense Oligo
ccuccuuagaugaguggac

SEQ ID NO: 47580 - RNA, 19 nt, Artificial Sequence
  Antisense Oligo
guccacucaucuaaggagg

SEQ ID NO: 47581 - RNA, 19 nt, Artificial Sequence
  Sense Oligo
cuccuuagaugaguggaca

SEQ ID NO: 47582 - RNA, 19 nt, Artificial Sequence
  Antisense Oligo
uguccacucaucuaaggag

SEQ ID NO: 47583 - RNA, 19 nt, Artificial Sequence
  Sense Oligo
uccuuagaugaguggacau

SEQ ID NO: 47584 - RNA, 19 nt, Artificial Sequence
  Antisense Oligo
auguccacucaucuaagga

SEQ ID NO: 47585 - RNA, 19 nt, Artificial Sequence
  Sense Oligo
ccuuagaugaguggacauu

SEQ ID NO: 47586 - RNA, 19 nt, Artificial Sequence
  Antisense Oligo
aauguccacucaucuaagg

SEQ ID NO: 47587 - RNA, 19 nt, Artificial Sequence
  Sense Oligo
cuuagaugaguggacauug

SEQ ID NO: 47588 - RNA, 19 nt, Artificial Sequence
  Antisense Oligo
caauguccacucaucuaag

SEQ ID NO: 47589 - RNA, 19 nt, Artificial Sequence
  Sense Oligo
uuagaugaguggacauugc

SEQ ID NO: 47590 - RNA, 19 nt, Artificial Sequence
  Antisense Oligo
gcaauguccacucaucuaa

SEQ ID NO: 47591 - RNA, 19 nt, Artificial Sequence
  Sense Oligo
uagaugaguggacauugcu

SEQ ID NO: 47592 - RNA, 19 nt, Artificial Sequence
  Antisense Oligo
agcaauguccacucaucua

SEQ ID NO: 47593 - RNA, 19 nt, Artificial Sequence
  Sense Oligo
agaugaguggacauugcuu

SEQ ID NO: 47594 - RNA, 19 nt, Artificial Sequence
  Antisense Oligo
aagcaauguccacucaucu

SEQ ID NO: 47595 - RNA, 19 nt, Artificial Sequence
  Sense Oligo
gaugaguggacauugcuuc

SEQ ID NO: 47596 - RNA, 19 nt, Artificial Sequence
  Antisense Oligo
gaagcaauguccacucauc

SEQ ID NO: 47597 - RNA, 19 nt, Artificial Sequence
  Sense Oligo
aguggacauugcuucauca

SEQ ID NO: 47598 - RNA, 19 nt, Artificial Sequence
  Antisense Oligo
ugaugaagcaauguccacu

SEQ ID NO: 47599 - RNA, 19 nt, Artificial Sequence
  Sense Oligo
guggacauugcuucaucau

SEQ ID NO: 47600 - RNA, 19 nt, Artificial Sequence
  Antisense Oligo
augaugaagcaauguccac

SEQ ID NO: 47601 - RNA, 19 nt, Artificial Sequence
  Sense Oligo
uggacauugcuucaucaug

SEQ ID NO: 47602 - RNA, 19 nt, Artificial Sequence
  Antisense Oligo
caugaugaagcaaugucca

SEQ ID NO: 47603 - RNA, 19 nt, Artificial Sequence
  Sense Oligo
cauugcuucaucaugacag

SEQ ID NO: 47604 - RNA, 19 nt, Artificial Sequence
  Antisense Oligo
cugucaugaugaagcaaug

SEQ ID NO: 47605 - RNA, 19 nt, Artificial Sequence
  Sense Oligo
auugcuucaucaugacaga

SEQ ID NO: 47606 - RNA, 19 nt, Artificial Sequence
  Antisense Oligo
ucugucaugaugaagcaau

SEQ ID NO: 47607 - RNA, 19 nt, Artificial Sequence
  Sense Oligo
uugcuucaucaugacagau

SEQ ID NO: 47608 - RNA, 19 nt, Artificial Sequence
  Antisense Oligo
aucugucaugaugaagcaa

SEQ ID NO: 47609 - RNA, 19 nt, Artificial Sequence
  Sense Oligo
ugcuucaucaugacagaua

SEQ ID NO: 47610 - RNA, 19 nt, Artificial Sequence
  Antisense Oligo
uaucugucaugaugaagca

SEQ ID NO: 47611 - RNA, 19 nt, Artificial Sequence
  Sense Oligo
gcuucaucaugacagauac

SEQ ID NO: 47612 - RNA, 19 nt, Artificial Sequence
  Antisense Oligo
guaucugucaugaugaagc

SEQ ID NO: 47613 - RNA, 19 nt, Artificial Sequence
  Sense Oligo
cuucaucaugacagauacc

SEQ ID NO: 47614 - RNA, 19 nt, Artificial Sequence
  Antisense Oligo
gguaucugucaugaugaag

SEQ ID NO: 47615 - RNA, 19 nt, Artificial Sequence
  Sense Oligo
uucaucaugacagauaccg

SEQ ID NO: 47616 - RNA, 19 nt, Artificial Sequence
  Antisense Oligo
cgguaucugucaugaugaa

SEQ ID NO: 47617 - RNA, 19 nt, Artificial Sequence
  Sense Oligo
ucaucaugacagauaccgc

SEQ ID NO: 47618 - RNA, 19 nt, Artificial Sequence
  Antisense Oligo
gcgguaucugucaugauga

SEQ ID NO: 47619 - RNA, 19 nt, Artificial Sequence
  Sense Oligo
caucaugacagauaccgca

SEQ ID NO: 47620 - RNA, 19 nt, Artificial Sequence
  Antisense Oligo
ugcgguaucugucaugaug

SEQ ID NO: 47621 - RNA, 19 nt, Artificial Sequence
  Sense Oligo
aucaugacagauaccgcag

SEQ ID NO: 47622 - RNA, 19 nt, Artificial Sequence
  Antisense Oligo
cugcgguaucugucaugau

SEQ ID NO: 47623 - RNA, 19 nt, Artificial Sequence
  Sense Oligo
ucaugacagauaccgcagg

SEQ ID NO: 47624 - RNA, 19 nt, Artificial Sequence
  Antisense Oligo
ccugcgguaucugucauga

SEQ ID NO: 47625 - RNA, 19 nt, Artificial Sequence
  Sense Oligo
caugacagauaccgcagga

SEQ ID NO: 47626 - RNA, 19 nt, Artificial Sequence
  Antisense Oligo
uccugcgguaucugucaug

SEQ ID NO: 47627 - RNA, 19 nt, Artificial Sequence
  Sense Oligo
augacagauaccgcaggaa

SEQ ID NO: 47628 - RNA, 19 nt, Artificial Sequence
  Antisense Oligo
uuccugcgguaucugucau

SEQ ID NO: 47629 - RNA, 19 nt, Artificial Sequence
  Sense Oligo
cagcagguugugggaggcu

SEQ ID NO: 47630 - RNA, 19 nt, Artificial Sequence
  Antisense Oligo
agccucccacaaccugcug

SEQ ID NO: 47631 - RNA, 19 nt, Artificial Sequence
  Sense Oligo
agcagguugugggaggcua

SEQ ID NO: 47632 - RNA, 19 nt, Artificial Sequence
  Antisense Oligo
uagccucccacaaccugcu

SEQ ID NO: 47633 - RNA, 19 nt, Artificial Sequence
  Sense Oligo
gcagguugugggaggcuag

SEQ ID NO: 47634 - RNA, 19 nt, Artificial Sequence
  Antisense Oligo
cuagccucccacaaccugc

SEQ ID NO: 47635 - RNA, 19 nt, Artificial Sequence
  Sense Oligo
cagguugugggaggcuagu

SEQ ID NO: 47636 - RNA, 19 nt, Artificial Sequence
  Antisense Oligo
acuagccucccacaaccug

SEQ ID NO: 47637 - RNA, 19 nt, Artificial Sequence
  Sense Oligo
agguugugggaggcuagug

SEQ ID NO: 47638 - RNA, 19 nt, Artificial Sequence
  Antisense Oligo
cacuagccucccacaaccu

SEQ ID NO: 47639 - RNA, 19 nt, Artificial Sequence
  Sense Oligo
gguugugggaggcuaguga

SEQ ID NO: 47640 - RNA, 19 nt, Artificial Sequence
  Antisense Oligo
ucacuagccucccacaacc

SEQ ID NO: 47641 - RNA, 19 nt, Artificial Sequence
  Sense Oligo
gugggaggcuagugaugau

SEQ ID NO: 47642 - RNA, 19 nt, Artificial Sequence
  Antisense Oligo
aucaucacuagccucccac

SEQ ID NO: 47643 - RNA, 19 nt, Artificial Sequence
  Sense Oligo
ugggaggcuagugaugaug

SEQ ID NO: 47644 - RNA, 19 nt, Artificial Sequence
  Antisense Oligo
caucaucacuagccuccca

SEQ ID NO: 47645 - RNA, 19 nt, Artificial Sequence
  Sense Oligo
gggaggcuagugaugaugu

SEQ ID NO: 47646 - RNA, 19 nt, Artificial Sequence
  Antisense Oligo
acaucaucacuagccuccc

SEQ ID NO: 47647 - RNA, 19 nt, Artificial Sequence
  Sense Oligo
ggaggcuagugaugauguc

SEQ ID NO: 47648 - RNA, 19 nt, Artificial Sequence
  Antisense Oligo
gacaucaucacuagccucc

SEQ ID NO: 47649 - RNA, 19 nt, Artificial Sequence
  Sense Oligo
gaggcuagugaugaugucc

SEQ ID NO: 47650 - RNA, 19 nt, Artificial Sequence
  Antisense Oligo
ggacaucaucacuagccuc

SEQ ID NO: 47651 - RNA, 19 nt, Artificial Sequence
  Sense Oligo
aggcuagugaugauguccg

SEQ ID NO: 47652 - RNA, 19 nt, Artificial Sequence
  Antisense Oligo
cggacaucaucacuagccu

SEQ ID NO: 47653 - RNA, 19 nt, Artificial Sequence
  Sense Oligo
ggcuagugaugauguccgc

SEQ ID NO: 47654 - RNA, 19 nt, Artificial Sequence
  Antisense Oligo
gcggacaucaucacuagcc

SEQ ID NO: 47655 - RNA, 19 nt, Artificial Sequence
  Sense Oligo
ucgugcagcuggacguagg

SEQ ID NO: 47656 - RNA, 19 nt, Artificial Sequence
  Antisense Oligo
ccuacguccagcugcacga

SEQ ID NO: 47657 - RNA, 19 nt, Artificial Sequence
  Sense Oligo
cagcuggacguaggaaucu

SEQ ID NO: 47658 - RNA, 19 nt, Artificial Sequence
  Antisense Oligo
agauuccuacguccagcug

SEQ ID NO: 47659 - RNA, 19 nt, Artificial Sequence
  Sense Oligo
agcuggacguaggaaucug

SEQ ID NO: 47660 - RNA, 19 nt, Artificial Sequence
  Antisense Oligo
cagauuccuacguccagcu

SEQ ID NO: 47661 - RNA, 19 nt, Artificial Sequence
  Sense Oligo
gcuggacguaggaaucuga

SEQ ID NO: 47662 - RNA, 19 nt, Artificial Sequence
  Antisense Oligo
ucagauuccuacguccagc

SEQ ID NO: 47663 - RNA, 19 nt, Artificial Sequence
  Sense Oligo
cuggacguaggaaucugag

SEQ ID NO: 47664 - RNA, 19 nt, Artificial Sequence
  Antisense Oligo
cucagauuccuacguccag

SEQ ID NO: 47665 - RNA, 19 nt, Artificial Sequence
  Sense Oligo
uggacguaggaaucugagc

SEQ ID NO: 47666 - RNA, 19 nt, Artificial Sequence
  Antisense Oligo
gcucagauuccuacgucca

SEQ ID NO: 47667 - RNA, 19 nt, Artificial Sequence
  Sense Oligo
ggacguaggaaucugagcu

SEQ ID NO: 47668 - RNA, 19 nt, Artificial Sequence
  Antisense Oligo
agcucagauuccuacgucc

SEQ ID NO: 47669 - RNA, 19 nt, Artificial Sequence
  Sense Oligo
gacguaggaaucugagcuc

SEQ ID NO: 47670 - RNA, 19 nt, Artificial Sequence
  Antisense Oligo
gagcucagauuccuacguc

SEQ ID NO: 47671 - RNA, 19 nt, Artificial Sequence
  Sense Oligo
acguaggaaucugagcuca

SEQ ID NO: 47672 - RNA, 19 nt, Artificial Sequence
  Antisense Oligo
ugagcucagauuccuacgu

SEQ ID NO: 47673 - RNA, 19 nt, Artificial Sequence
  Sense Oligo
cguaggaaucugagcucag

SEQ ID NO: 47674 - RNA, 19 nt, Artificial Sequence
  Antisense Oligo
cugagcucagauuccuacg

SEQ ID NO: 47675 - RNA, 19 nt, Artificial Sequence
  Sense Oligo
uaggaaucugagcucagug

SEQ ID NO: 47676 - RNA, 19 nt, Artificial Sequence
  Antisense Oligo
cacugagcucagauuccua

SEQ ID NO: 47677 - RNA, 19 nt, Artificial Sequence
  Sense Oligo
aggaaucugagcucagugg

SEQ ID NO: 47678 - RNA, 19 nt, Artificial Sequence
  Antisense Oligo
ccacugagcucagauuccu

SEQ ID NO: 47679 - RNA, 19 nt, Artificial Sequence
  Sense Oligo
ggaaucugagcucaguggu

SEQ ID NO: 47680 - RNA, 19 nt, Artificial Sequence
  Antisense Oligo
accacugagcucagauucc

SEQ ID NO: 47681 - RNA, 19 nt, Artificial Sequence
  Sense Oligo
gaaucugagcucaguggug

SEQ ID NO: 47682 - RNA, 19 nt, Artificial Sequence
  Antisense Oligo
caccacugagcucagauuc

SEQ ID NO: 47683 - RNA, 19 nt, Artificial Sequence
  Sense Oligo
guggugaggcagggauucc

SEQ ID NO: 47684 - RNA, 19 nt, Artificial Sequence
  Antisense Oligo
ggaaucccugccucaccac

SEQ ID NO: 47685 - RNA, 19 nt, Artificial Sequence
  Sense Oligo
ggauuccugggcuagagca

SEQ ID NO: 47686 - RNA, 19 nt, Artificial Sequence
  Antisense Oligo
ugcucuagcccaggaaucc

SEQ ID NO: 47687 - RNA, 19 nt, Artificial Sequence
  Sense Oligo
gauuccugggcuagagcag

SEQ ID NO: 47688 - RNA, 19 nt, Artificial Sequence
  Antisense Oligo
cugcucuagcccaggaauc

SEQ ID NO: 47689 - RNA, 19 nt, Artificial Sequence
  Sense Oligo
auuccugggcuagagcagc

SEQ ID NO: 47690 - RNA, 19 nt, Artificial Sequence
  Antisense Oligo
gcugcucuagcccaggaau

SEQ ID NO: 47691 - RNA, 19 nt, Artificial Sequence
  Sense Oligo
uuccugggcuagagcagca

SEQ ID NO: 47692 - RNA, 19 nt, Artificial Sequence
  Antisense Oligo
ugcugcucuagcccaggaa

SEQ ID NO: 47693 - RNA, 19 nt, Artificial Sequence
  Sense Oligo
cuagagcagcaggccucga

SEQ ID NO: 47694 - RNA, 19 nt, Artificial Sequence
  Antisense Oligo
ucgaggccugcugcucuag

SEQ ID NO: 47695 - RNA, 19 nt, Artificial Sequence
  Sense Oligo
uagagcagcaggccucgag

SEQ ID NO: 47696 - RNA, 19 nt, Artificial Sequence
  Antisense Oligo
cucgaggccugcugcucua

SEQ ID NO: 47697 - RNA, 19 nt, Artificial Sequence
  Sense Oligo
ucgacuugcacugugaugg

SEQ ID NO: 47698 - RNA, 19 nt, Artificial Sequence
  Antisense Oligo
ccaucacagugcaagucga

SEQ ID NO: 47699 - RNA, 19 nt, Artificial Sequence
  Sense Oligo
cgacuugcacugugauggg

SEQ ID NO: 47700 - RNA, 19 nt, Artificial Sequence
  Antisense Oligo
cccaucacagugcaagucg

SEQ ID NO: 47701 - RNA, 19 nt, Artificial Sequence
  Sense Oligo
gggagugaccuuugggaca

SEQ ID NO: 47702 - RNA, 19 nt, Artificial Sequence
  Antisense Oligo
ugucccaaaggucacuccc

SEQ ID NO: 47703 - RNA, 19 nt, Artificial Sequence
  Sense Oligo
ggagugaccuuugggacag

SEQ ID NO: 47704 - RNA, 19 nt, Artificial Sequence
  Antisense Oligo
cugucccaaaggucacucc

SEQ ID NO: 47705 - RNA, 19 nt, Artificial Sequence
  Sense Oligo
gagugaccuuugggacagg

SEQ ID NO: 47706 - RNA, 19 nt, Artificial Sequence
  Antisense Oligo
ccugucccaaaggucacuc

SEQ ID NO: 47707 - RNA, 19 nt, Artificial Sequence
  Sense Oligo
gugaccuuugggacaggag

SEQ ID NO: 47708 - RNA, 19 nt, Artificial Sequence
  Antisense Oligo
cuccugucccaaaggucac

SEQ ID NO: 47709 - RNA, 19 nt, Artificial Sequence
  Sense Oligo
aaagcaugagucguacuau

SEQ ID NO: 47710 - RNA, 19 nt, Artificial Sequence
  Antisense Oligo
auaguacgacucaugcuuu

SEQ ID NO: 47711 - RNA, 19 nt, Artificial Sequence
  Sense Oligo
aagcaugagucguacuaua

SEQ ID NO: 47712 - RNA, 19 nt, Artificial Sequence
  Antisense Oligo
uauaguacgacucaugcuu

SEQ ID NO: 47713 - RNA, 19 nt, Artificial Sequence
  Sense Oligo
agcaugagucguacuauaa

SEQ ID NO: 47714 - RNA, 19 nt, Artificial Sequence
  Antisense Oligo
uuauaguacgacucaugcu

SEQ ID NO: 47715 - RNA, 19 nt, Artificial Sequence
  Sense Oligo
gcaugagucguacuauaac

SEQ ID NO: 47716 - RNA, 19 nt, Artificial Sequence
  Antisense Oligo
guuauaguacgacucaugc

SEQ ID NO: 47717 - RNA, 19 nt, Artificial Sequence
  Sense Oligo
aauggcauuugugcugagc

SEQ ID NO: 47718 - RNA, 19 nt, Artificial Sequence
  Antisense Oligo
gcucagcacaaaugccauu

SEQ ID NO: 47719 - RNA, 19 nt, Artificial Sequence
  Sense Oligo
gcauuugugcugagcccua

SEQ ID NO: 47720 - RNA, 19 nt, Artificial Sequence
  Antisense Oligo
uagggcucagcacaaaugc

SEQ ID NO: 47721 - RNA, 19 nt, Artificial Sequence
  Sense Oligo
auuugugcugagcccuaag

SEQ ID NO: 47722 - RNA, 19 nt, Artificial Sequence
  Antisense Oligo
cuuagggcucagcacaaau

SEQ ID NO: 47723 - RNA, 19 nt, Artificial Sequence
  Sense Oligo
uuugugcugagcccuaagg

SEQ ID NO: 47724 - RNA, 19 nt, Artificial Sequence
  Antisense Oligo
ccuuagggcucagcacaaa

SEQ ID NO: 47725 - RNA, 19 nt, Artificial Sequence
  Sense Oligo
uugugcugagcccuaaggg

SEQ ID NO: 47726 - RNA, 19 nt, Artificial Sequence
  Antisense Oligo
cccuuagggcucagcacaa

SEQ ID NO: 47727 - RNA, 19 nt, Artificial Sequence
  Sense Oligo
cugagcccuaagggaucau

SEQ ID NO: 47728 - RNA, 19 nt, Artificial Sequence
  Antisense Oligo
augaucccuuagggcucag

SEQ ID NO: 47729 - RNA, 19 nt, Artificial Sequence
  Sense Oligo
ugagcccuaagggaucaug

SEQ ID NO: 47730 - RNA, 19 nt, Artificial Sequence
  Antisense Oligo
caugaucccuuagggcuca

SEQ ID NO: 47731 - RNA, 19 nt, Artificial Sequence
  Sense Oligo
gggucgucucuccaaugcc

SEQ ID NO: 47732 - RNA, 19 nt, Artificial Sequence
  Antisense Oligo
ggcauuggagagacgaccc

SEQ ID NO: 47733 - RNA, 19 nt, Artificial Sequence
  Sense Oligo
ggucgucucuccaaugccu

SEQ ID NO: 47734 - RNA, 19 nt, Artificial Sequence
  Antisense Oligo
aggcauuggagagacgacc

SEQ ID NO: 47735 - RNA, 19 nt, Artificial Sequence
  Sense Oligo
caaugccuuuggcccugua

SEQ ID NO: 47736 - RNA, 19 nt, Artificial Sequence
  Antisense Oligo
uacagggccaaaggcauug

SEQ ID NO: 47737 - RNA, 19 nt, Artificial Sequence
  Sense Oligo
cccagcgcugccguguuuu

SEQ ID NO: 47738 - RNA, 19 nt, Artificial Sequence
  Antisense Oligo
aaaacacggcagcgcuggg

SEQ ID NO: 47739 - RNA, 19 nt, Artificial Sequence
  Sense Oligo
ccagcgcugccguguuuug

SEQ ID NO: 47740 - RNA, 19 nt, Artificial Sequence
  Antisense Oligo
caaaacacggcagcgcugg

SEQ ID NO: 47741 - RNA, 19 nt, Artificial Sequence
  Sense Oligo
cagcgcugccguguuuugg

SEQ ID NO: 47742 - RNA, 19 nt, Artificial Sequence
  Antisense Oligo
ccaaaacacggcagcgcug

SEQ ID NO: 47743 - RNA, 19 nt, Artificial Sequence
  Sense Oligo
agcgcugccguguuuuggg

SEQ ID NO: 47744 - RNA, 19 nt, Artificial Sequence
  Antisense Oligo
cccaaaacacggcagcgcu

SEQ ID NO: 47745 - RNA, 19 nt, Artificial Sequence
  Sense Oligo
gcgcugccguguuuuggga

SEQ ID NO: 47746 - RNA, 19 nt, Artificial Sequence
  Antisense Oligo
ucccaaaacacggcagcgc

SEQ ID NO: 47747 - RNA, 19 nt, Artificial Sequence
  Sense Oligo
cgcugccguguuuugggaa

SEQ ID NO: 47748 - RNA, 19 nt, Artificial Sequence
  Antisense Oligo
uucccaaaacacggcagcg

SEQ ID NO: 47749 - RNA, 19 nt, Artificial Sequence
  Sense Oligo
aacuccuuuggguuuggau

SEQ ID NO: 47750 - RNA, 19 nt, Artificial Sequence
  Antisense Oligo
auccaaacccaaaggaguu

SEQ ID NO: 47751 - RNA, 19 nt, Artificial Sequence
  Sense Oligo
acuccuuuggguuuggauu

SEQ ID NO: 47752 - RNA, 19 nt, Artificial Sequence
  Antisense Oligo
aauccaaacccaaaggagu

SEQ ID NO: 47753 - RNA, 19 nt, Artificial Sequence
  Sense Oligo
cuccuuuggguuuggauuc

SEQ ID NO: 47754 - RNA, 19 nt, Artificial Sequence
  Antisense Oligo
gaauccaaacccaaaggag

SEQ ID NO: 47755 - RNA, 19 nt, Artificial Sequence
  Sense Oligo
ccuggcagcagacuugcaa

SEQ ID NO: 47756 - RNA, 19 nt, Artificial Sequence
  Antisense Oligo
uugcaagucugcugccagg

SEQ ID NO: 47757 - RNA, 19 nt, Artificial Sequence
  Sense Oligo
cuggcagcagacuugcaac

SEQ ID NO: 47758 - RNA, 19 nt, Artificial Sequence
  Antisense Oligo
guugcaagucugcugccag

SEQ ID NO: 47759 - RNA, 19 nt, Artificial Sequence
  Sense Oligo
uggcagcagacuugcaacc

SEQ ID NO: 47760 - RNA, 19 nt, Artificial Sequence
  Antisense Oligo
gguugcaagucugcugcca

SEQ ID NO: 47761 - RNA, 19 nt, Artificial Sequence
  Sense Oligo
ggcagcagacuugcaaccu

SEQ ID NO: 47762 - RNA, 19 nt, Artificial Sequence
  Antisense Oligo
agguugcaagucugcugcc

SEQ ID NO: 47763 - RNA, 19 nt, Artificial Sequence
  Sense Oligo
gcagcagacuugcaaccuu

SEQ ID NO: 47764 - RNA, 19 nt, Artificial Sequence
  Antisense Oligo
aagguugcaagucugcugc

SEQ ID NO: 47765 - RNA, 19 nt, Artificial Sequence
  Sense Oligo
cagcagacuugcaaccuuu

SEQ ID NO: 47766 - RNA, 19 nt, Artificial Sequence
  Antisense Oligo
aaagguugcaagucugcug

SEQ ID NO: 47767 - RNA, 19 nt, Artificial Sequence
  Sense Oligo
acuugcaaccuuuccuuga

SEQ ID NO: 47768 - RNA, 19 nt, Artificial Sequence
  Antisense Oligo
ucaaggaaagguugcaagu

SEQ ID NO: 47769 - RNA, 19 nt, Artificial Sequence
  Sense Oligo
cuugcaaccuuuccuugaa

SEQ ID NO: 47770 - RNA, 19 nt, Artificial Sequence
  Antisense Oligo
uucaaggaaagguugcaag

SEQ ID NO: 47771 - RNA, 19 nt, Artificial Sequence
  Sense Oligo
uugcaaccuuuccuugaag

SEQ ID NO: 47772 - RNA, 19 nt, Artificial Sequence
  Antisense Oligo
cuucaaggaaagguugcaa

SEQ ID NO: 47773 - RNA, 19 nt, Artificial Sequence
  Sense Oligo
ugcaaccuuuccuugaagu

SEQ ID NO: 47774 - RNA, 19 nt, Artificial Sequence
  Antisense Oligo
acuucaaggaaagguugca

SEQ ID NO: 47775 - RNA, 19 nt, Artificial Sequence
  Sense Oligo
gcaaccuuuccuugaaguc

SEQ ID NO: 47776 - RNA, 19 nt, Artificial Sequence
  Antisense Oligo
gacuucaaggaaagguugc

SEQ ID NO: 47777 - RNA, 19 nt, Artificial Sequence
  Sense Oligo
caaccuuuccuugaagucu

SEQ ID NO: 47778 - RNA, 19 nt, Artificial Sequence
  Antisense Oligo
agacuucaaggaaagguug

SEQ ID NO: 47779 - RNA, 19 nt, Artificial Sequence
  Sense Oligo
aaccuuuccuugaagucug

SEQ ID NO: 47780 - RNA, 19 nt, Artificial Sequence
  Antisense Oligo
cagacuucaaggaaagguu

SEQ ID NO: 47781 - RNA, 19 nt, Artificial Sequence
  Sense Oligo
accuuuccuugaagucugg

SEQ ID NO: 47782 - RNA, 19 nt, Artificial Sequence
  Antisense Oligo
ccagacuucaaggaaaggu

SEQ ID NO: 47783 - RNA, 19 nt, Artificial Sequence
  Sense Oligo
ccuuuccuugaagucuggc

SEQ ID NO: 47784 - RNA, 19 nt, Artificial Sequence
  Antisense Oligo
gccagacuucaaggaaagg

SEQ ID NO: 47785 - RNA, 19 nt, Artificial Sequence
  Sense Oligo
cuuuccuugaagucuggca

SEQ ID NO: 47786 - RNA, 19 nt, Artificial Sequence
  Antisense Oligo
ugccagacuucaaggaaag

SEQ ID NO: 47787 - RNA, 19 nt, Artificial Sequence
  Sense Oligo
uuuccuugaagucuggcaa

SEQ ID NO: 47788 - RNA, 19 nt, Artificial Sequence
  Antisense Oligo
uugccagacuucaaggaaa

SEQ ID NO: 47789 - RNA, 19 nt, Artificial Sequence
  Sense Oligo
uugaagucuggcaaguaau

SEQ ID NO: 47790 - RNA, 19 nt, Artificial Sequence
  Antisense Oligo
auuacuugccagacuucaa

SEQ ID NO: 47791 - RNA, 19 nt, Artificial Sequence
  Sense Oligo
ugaagucuggcaaguaauu

SEQ ID NO: 47792 - RNA, 19 nt, Artificial Sequence
  Antisense Oligo
aauuacuugccagacuuca

SEQ ID NO: 47793 - RNA, 19 nt, Artificial Sequence
  Sense Oligo
gaagucuggcaaguaauuu

SEQ ID NO: 47794 - RNA, 19 nt, Artificial Sequence
  Antisense Oligo
aaauuacuugccagacuuc

SEQ ID NO: 47795 - RNA, 19 nt, Artificial Sequence
  Sense Oligo
aagucuggcaaguaauuug

SEQ ID NO: 47796 - RNA, 19 nt, Artificial Sequence
  Antisense Oligo
caaauuacuugccagacuu

SEQ ID NO: 47797 - RNA, 19 nt, Artificial Sequence
  Sense Oligo
caccacuuucuccaggcug

SEQ ID NO: 47798 - RNA, 19 nt, Artificial Sequence
  Antisense Oligo
cagccuggagaaaguggug

SEQ ID NO: 47799 - RNA, 19 nt, Artificial Sequence
  Sense Oligo
accacuuucuccaggcugc

SEQ ID NO: 47800 - RNA, 19 nt, Artificial Sequence
  Antisense Oligo
gcagccuggagaaaguggu

SEQ ID NO: 47801 - RNA, 19 nt, Artificial Sequence
  Sense Oligo
cuuucuccaggcugcuaac

SEQ ID NO: 47802 - RNA, 19 nt, Artificial Sequence
  Antisense Oligo
guuagcagccuggagaaag

SEQ ID NO: 47803 - RNA, 19 nt, Artificial Sequence
  Sense Oligo
uuagaaucagaggucacag

SEQ ID NO: 47804 - RNA, 19 nt, Artificial Sequence
  Antisense Oligo
cugugaccucugauucuaa

SEQ ID NO: 47805 - RNA, 19 nt, Artificial Sequence
  Sense Oligo
uagaaucagaggucacagg

SEQ ID NO: 47806 - RNA, 19 nt, Artificial Sequence
  Antisense Oligo
ccugugaccucugauucua

SEQ ID NO: 47807 - RNA, 19 nt, Artificial Sequence
  Sense Oligo
agaaucagaggucacaggc

SEQ ID NO: 47808 - RNA, 19 nt, Artificial Sequence
  Antisense Oligo
gccugugaccucugauucu

SEQ ID NO: 47809 - RNA, 19 nt, Artificial Sequence
  Sense Oligo
ucacaggcagggcuccgaa

SEQ ID NO: 47810 - RNA, 19 nt, Artificial Sequence
  Antisense Oligo
uucggagcccugccuguga

SEQ ID NO: 47811 - RNA, 19 nt, Artificial Sequence
  Sense Oligo
ccuguggcugcagcaguuu

SEQ ID NO: 47812 - RNA, 19 nt, Artificial Sequence
  Antisense Oligo
aaacugcugcagccacagg

SEQ ID NO: 47813 - RNA, 19 nt, Artificial Sequence
  Sense Oligo
cuguggcugcagcaguuug

SEQ ID NO: 47814 - RNA, 19 nt, Artificial Sequence
  Antisense Oligo
caaacugcugcagccacag

SEQ ID NO: 47815 - RNA, 19 nt, Artificial Sequence
  Sense Oligo
uguggcugcagcaguuuga

SEQ ID NO: 47816 - RNA, 19 nt, Artificial Sequence
  Antisense Oligo
ucaaacugcugcagccaca

SEQ ID NO: 47817 - RNA, 19 nt, Artificial Sequence
  Sense Oligo
guggcugcagcaguuugac

SEQ ID NO: 47818 - RNA, 19 nt, Artificial Sequence
  Antisense Oligo
gucaaacugcugcagccac

SEQ ID NO: 47819 - RNA, 19 nt, Artificial Sequence
  Sense Oligo
uggcugcagcaguuugaca

SEQ ID NO: 47820 - RNA, 19 nt, Artificial Sequence
  Antisense Oligo
ugucaaacugcugcagcca

SEQ ID NO: 47821 - RNA, 19 nt, Artificial Sequence
  Sense Oligo
ggcugcagcaguuugacac

SEQ ID NO: 47822 - RNA, 19 nt, Artificial Sequence
  Antisense Oligo
gugucaaacugcugcagcc

SEQ ID NO: 47823 - RNA, 19 nt, Artificial Sequence
  Sense Oligo
gcugcagcaguuugacacc

SEQ ID NO: 47824 - RNA, 19 nt, Artificial Sequence
  Antisense Oligo
ggugucaaacugcugcagc

SEQ ID NO: 47825 - RNA, 19 nt, Artificial Sequence
  Sense Oligo
cugcagcaguuugacaccg

SEQ ID NO: 47826 - RNA, 19 nt, Artificial Sequence
  Antisense Oligo
cggugucaaacugcugcag

SEQ ID NO: 47827 - RNA, 19 nt, Artificial Sequence
  Sense Oligo
ugcagcaguuugacaccga

SEQ ID NO: 47828 - RNA, 19 nt, Artificial Sequence
  Antisense Oligo
ucggugucaaacugcugca

SEQ ID NO: 47829 - RNA, 19 nt, Artificial Sequence
  Sense Oligo
gcagcaguuugacaccgag

SEQ ID NO: 47830 - RNA, 19 nt, Artificial Sequence
  Antisense Oligo
cucggugucaaacugcugc

SEQ ID NO: 47831 - RNA, 19 nt, Artificial Sequence
  Sense Oligo
cagcaguuugacaccgagu

SEQ ID NO: 47832 - RNA, 19 nt, Artificial Sequence
  Antisense Oligo
acucggugucaaacugcug

SEQ ID NO: 47833 - RNA, 19 nt, Artificial Sequence
  Sense Oligo
agcaguuugacaccgagua

SEQ ID NO: 47834 - RNA, 19 nt, Artificial Sequence
  Antisense Oligo
uacucggugucaaacugcu

SEQ ID NO: 47835 - RNA, 19 nt, Artificial Sequence
  Sense Oligo
gcaguuugacaccgaguac

SEQ ID NO: 47836 - RNA, 19 nt, Artificial Sequence
  Antisense Oligo
guacucggugucaaacugc

SEQ ID NO: 47837 - RNA, 19 nt, Artificial Sequence
  Sense Oligo
caguuugacaccgaguacu

SEQ ID NO: 47838 - RNA, 19 nt, Artificial Sequence
  Antisense Oligo
aguacucggugucaaacug

SEQ ID NO: 47839 - RNA, 19 nt, Artificial Sequence
  Sense Oligo
aguuugacaccgaguacuc

SEQ ID NO: 47840 - RNA, 19 nt, Artificial Sequence
  Antisense Oligo
gaguacucggugucaaacu

SEQ ID NO: 47841 - RNA, 19 nt, Artificial Sequence
  Sense Oligo
guuugacaccgaguacuca

SEQ ID NO: 47842 - RNA, 19 nt, Artificial Sequence
  Antisense Oligo
ugaguacucggugucaaac

SEQ ID NO: 47843 - RNA, 19 nt, Artificial Sequence
  Sense Oligo
uuugacaccgaguacucau

SEQ ID NO: 47844 - RNA, 19 nt, Artificial Sequence
  Antisense Oligo
augaguacucggugucaaa

SEQ ID NO: 47845 - RNA, 19 nt, Artificial Sequence
  Sense Oligo
uugacaccgaguacucauu

SEQ ID NO: 47846 - RNA, 19 nt, Artificial Sequence
  Antisense Oligo
aaugaguacucggugucaa

SEQ ID NO: 47847 - RNA, 19 nt, Artificial Sequence
  Sense Oligo
ugacaccgaguacucauuc

SEQ ID NO: 47848 - RNA, 19 nt, Artificial Sequence
  Antisense Oligo
gaaugaguacucgguguca

SEQ ID NO: 47849 - RNA, 19 nt, Artificial Sequence
  Sense Oligo
gaguacucauuccucaaag

SEQ ID NO: 47850 - RNA, 19 nt, Artificial Sequence
  Antisense Oligo
cuuugaggaaugaguacuc

SEQ ID NO: 47851 - RNA, 19 nt, Artificial Sequence
  Sense Oligo
aguacucauuccucaaaga

SEQ ID NO: 47852 - RNA, 19 nt, Artificial Sequence
  Antisense Oligo
ucuuugaggaaugaguacu

SEQ ID NO: 47853 - RNA, 19 nt, Artificial Sequence
  Sense Oligo
guacucauuccucaaagaa

SEQ ID NO: 47854 - RNA, 19 nt, Artificial Sequence
  Antisense Oligo
uucuuugaggaaugaguac

SEQ ID NO: 47855 - RNA, 19 nt, Artificial Sequence
  Sense Oligo
acucauuccucaaagaagu

SEQ ID NO: 47856 - RNA, 19 nt, Artificial Sequence
  Antisense Oligo
acuucuuugaggaaugagu

SEQ ID NO: 47857 - RNA, 19 nt, Artificial Sequence
  Sense Oligo
ucauuccucaaagaagucc

SEQ ID NO: 47858 - RNA, 19 nt, Artificial Sequence
  Antisense Oligo
ggacuucuuugaggaauga

SEQ ID NO: 47859 - RNA, 19 nt, Artificial Sequence
  Sense Oligo
cauuccucaaagaaguccg

SEQ ID NO: 47860 - RNA, 19 nt, Artificial Sequence
  Antisense Oligo
cggacuucuuugaggaaug

SEQ ID NO: 47861 - RNA, 19 nt, Artificial Sequence
  Sense Oligo
auuccucaaagaaguccgg

SEQ ID NO: 47862 - RNA, 19 nt, Artificial Sequence
  Antisense Oligo
ccggacuucuuugaggaau

SEQ ID NO: 47863 - RNA, 19 nt, Artificial Sequence
  Sense Oligo
uuccucaaagaaguccggu

SEQ ID NO: 47864 - RNA, 19 nt, Artificial Sequence
  Antisense Oligo
accggacuucuuugaggaa

SEQ ID NO: 47865 - RNA, 19 nt, Artificial Sequence
  Sense Oligo
uccucaaagaaguccggug

SEQ ID NO: 47866 - RNA, 19 nt, Artificial Sequence
  Antisense Oligo
caccggacuucuuugagga

SEQ ID NO: 47867 - RNA, 19 nt, Artificial Sequence
  Sense Oligo
ccucaaagaaguccgguga

SEQ ID NO: 47868 - RNA, 19 nt, Artificial Sequence
  Antisense Oligo
ucaccggacuucuuugagg

SEQ ID NO: 47869 - RNA, 19 nt, Artificial Sequence
  Sense Oligo
ucaaagaaguccggugagg

SEQ ID NO: 47870 - RNA, 19 nt, Artificial Sequence
  Antisense Oligo
ccucaccggacuucuuuga

SEQ ID NO: 47871 - RNA, 19 nt, Artificial Sequence
  Sense Oligo
caaagaaguccggugaggu

SEQ ID NO: 47872 - RNA, 19 nt, Artificial Sequence
  Antisense Oligo
accucaccggacuucuuug

SEQ ID NO: 47873 - RNA, 19 nt, Artificial Sequence
  Sense Oligo
aaagaaguccggugagguu

SEQ ID NO: 47874 - RNA, 19 nt, Artificial Sequence
  Antisense Oligo
aaccucaccggacuucuuu

SEQ ID NO: 47875 - RNA, 19 nt, Artificial Sequence
  Sense Oligo
aagaaguccggugagguuc

SEQ ID NO: 47876 - RNA, 19 nt, Artificial Sequence
  Antisense Oligo
gaaccucaccggacuucuu

SEQ ID NO: 47877 - RNA, 19 nt, Artificial Sequence
  Sense Oligo
agaaguccggugagguucc

SEQ ID NO: 47878 - RNA, 19 nt, Artificial Sequence
  Antisense Oligo
ggaaccucaccggacuucu

SEQ ID NO: 47879 - RNA, 19 nt, Artificial Sequence
  Sense Oligo
gagguucccugccuucccu

SEQ ID NO: 47880 - RNA, 19 nt, Artificial Sequence
  Antisense Oligo
agggaaggcagggaaccuc

SEQ ID NO: 47881 - RNA, 19 nt, Artificial Sequence
  Sense Oligo
guggcuucugcguggcgau

SEQ ID NO: 47882 - RNA, 19 nt, Artificial Sequence
  Antisense Oligo
aucgccacgcagaagccac

SEQ ID NO: 47883 - RNA, 19 nt, Artificial Sequence
  Sense Oligo
uggcuucugcguggcgaug

SEQ ID NO: 47884 - RNA, 19 nt, Artificial Sequence
  Antisense Oligo
caucgccacgcagaagcca

SEQ ID NO: 47885 - RNA, 19 nt, Artificial Sequence
  Sense Oligo
uucugcguggcgaugguac

SEQ ID NO: 47886 - RNA, 19 nt, Artificial Sequence
  Antisense Oligo
guaccaucgccacgcagaa

SEQ ID NO: 47887 - RNA, 19 nt, Artificial Sequence
  Sense Oligo
ucugcguggcgaugguacc

SEQ ID NO: 47888 - RNA, 19 nt, Artificial Sequence
  Antisense Oligo
gguaccaucgccacgcaga

SEQ ID NO: 47889 - RNA, 19 nt, Artificial Sequence
  Sense Oligo
gccgguuaaugagcgccac

SEQ ID NO: 47890 - RNA, 19 nt, Artificial Sequence
  Antisense Oligo
guggcgcucauuaaccggc

SEQ ID NO: 47891 - RNA, 19 nt, Artificial Sequence
  Sense Oligo
ccgguuaaugagcgccaca

SEQ ID NO: 47892 - RNA, 19 nt, Artificial Sequence
  Antisense Oligo
uguggcgcucauuaaccgg

SEQ ID NO: 47893 - RNA, 19 nt, Artificial Sequence
  Sense Oligo
uuaaugagcgccacaguca

SEQ ID NO: 47894 - RNA, 19 nt, Artificial Sequence
  Antisense Oligo
ugacuguggcgcucauuaa

SEQ ID NO: 47895 - RNA, 19 nt, Artificial Sequence
  Sense Oligo
ugagcgccacagucacgug

SEQ ID NO: 47896 - RNA, 19 nt, Artificial Sequence
  Antisense Oligo
cacgugacuguggcgcuca

SEQ ID NO: 47897 - RNA, 19 nt, Artificial Sequence
  Sense Oligo
gagcgccacagucacguga

SEQ ID NO: 47898 - RNA, 19 nt, Artificial Sequence
  Antisense Oligo
ucacgugacuguggcgcuc

SEQ ID NO: 47899 - RNA, 19 nt, Artificial Sequence
  Sense Oligo
agcgccacagucacgugac

SEQ ID NO: 47900 - RNA, 19 nt, Artificial Sequence
  Antisense Oligo
gucacgugacuguggcgcu

SEQ ID NO: 47901 - RNA, 19 nt, Artificial Sequence
  Sense Oligo
guuaaaucucucccagcau

SEQ ID NO: 47902 - RNA, 19 nt, Artificial Sequence
  Antisense Oligo
augcugggagagauuuaac

SEQ ID NO: 47903 - RNA, 19 nt, Artificial Sequence
  Sense Oligo
uuaaaucucucccagcauc

SEQ ID NO: 47904 - RNA, 19 nt, Artificial Sequence
  Antisense Oligo
gaugcugggagagauuuaa

SEQ ID NO: 47905 - RNA, 19 nt, Artificial Sequence
  Sense Oligo
uaaaucucucccagcaucc

SEQ ID NO: 47906 - RNA, 19 nt, Artificial Sequence
  Antisense Oligo
ggaugcugggagagauuua

SEQ ID NO: 47907 - RNA, 19 nt, Artificial Sequence
  Sense Oligo
aaaucucucccagcauccc

SEQ ID NO: 47908 - RNA, 19 nt, Artificial Sequence
  Antisense Oligo
gggaugcugggagagauuu

SEQ ID NO: 47909 - RNA, 19 nt, Artificial Sequence
  Sense Oligo
cucucccagcaucccucuc

SEQ ID NO: 47910 - RNA, 19 nt, Artificial Sequence
  Antisense Oligo
gagagggaugcugggagag

SEQ ID NO: 47911 - RNA, 19 nt, Artificial Sequence
  Sense Oligo
ucucccagcaucccucuca

SEQ ID NO: 47912 - RNA, 19 nt, Artificial Sequence
  Antisense Oligo
ugagagggaugcugggaga

SEQ ID NO: 47913 - RNA, 19 nt, Artificial Sequence
  Sense Oligo
cucccagcaucccucucau

SEQ ID NO: 47914 - RNA, 19 nt, Artificial Sequence
  Antisense Oligo
augagagggaugcugggag

SEQ ID NO: 47915 - RNA, 19 nt, Artificial Sequence
  Sense Oligo
ucccagcaucccucucauc

SEQ ID NO: 47916 - RNA, 19 nt, Artificial Sequence
  Antisense Oligo
gaugagagggaugcuggga

SEQ ID NO: 47917 - RNA, 19 nt, Artificial Sequence
  Sense Oligo
cccagcaucccucucaucu

SEQ ID NO: 47918 - RNA, 19 nt, Artificial Sequence
  Antisense Oligo
agaugagagggaugcuggg

SEQ ID NO: 47919 - RNA, 19 nt, Artificial Sequence
  Sense Oligo
ucccucucaucuccaucau

SEQ ID NO: 47920 - RNA, 19 nt, Artificial Sequence
  Antisense Oligo
augauggagaugagaggga

SEQ ID NO: 47921 - RNA, 19 nt, Artificial Sequence
  Sense Oligo
ccucucaucuccaucaucu

SEQ ID NO: 47922 - RNA, 19 nt, Artificial Sequence
  Antisense Oligo
agaugauggagaugagagg

SEQ ID NO: 47923 - RNA, 19 nt, Artificial Sequence
  Sense Oligo
cucucaucuccaucaucuu

SEQ ID NO: 47924 - RNA, 19 nt, Artificial Sequence
  Antisense Oligo
aagaugauggagaugagag

SEQ ID NO: 47925 - RNA, 19 nt, Artificial Sequence
  Sense Oligo
cucaucuccaucaucuucu

SEQ ID NO: 47926 - RNA, 19 nt, Artificial Sequence
  Antisense Oligo
agaagaugauggagaugag

SEQ ID NO: 47927 - RNA, 19 nt, Artificial Sequence
  Sense Oligo
ucaucuccaucaucuucug

SEQ ID NO: 47928 - RNA, 19 nt, Artificial Sequence
  Antisense Oligo
cagaagaugauggagauga

SEQ ID NO: 47929 - RNA, 19 nt, Artificial Sequence
  Sense Oligo
caucuccaucaucuucugc

SEQ ID NO: 47930 - RNA, 19 nt, Artificial Sequence
  Antisense Oligo
gcagaagaugauggagaug

SEQ ID NO: 47931 - RNA, 19 nt, Artificial Sequence
  Sense Oligo
aucuccaucaucuucugca

SEQ ID NO: 47932 - RNA, 19 nt, Artificial Sequence
  Antisense Oligo
ugcagaagaugauggagau

SEQ ID NO: 47933 - RNA, 19 nt, Artificial Sequence
  Sense Oligo
ucuccaucaucuucugcaa

SEQ ID NO: 47934 - RNA, 19 nt, Artificial Sequence
  Antisense Oligo
uugcagaagaugauggaga

SEQ ID NO: 47935 - RNA, 19 nt, Artificial Sequence
  Sense Oligo
cuccaucaucuucugcaac

SEQ ID NO: 47936 - RNA, 19 nt, Artificial Sequence
  Antisense Oligo
guugcagaagaugauggag

SEQ ID NO: 47937 - RNA, 19 nt, Artificial Sequence
  Sense Oligo
agagcaccauccucggacc

SEQ ID NO: 47938 - RNA, 19 nt, Artificial Sequence
  Antisense Oligo
gguccgaggauggugcucu

SEQ ID NO: 47939 - RNA, 19 nt, Artificial Sequence
  Sense Oligo
gagcaccauccucggaccu

SEQ ID NO: 47940 - RNA, 19 nt, Artificial Sequence
  Antisense Oligo
agguccgaggauggugcuc

SEQ ID NO: 47941 - RNA, 19 nt, Artificial Sequence
  Sense Oligo
agcaccauccucggaccuc

SEQ ID NO: 47942 - RNA, 19 nt, Artificial Sequence
  Antisense Oligo
gagguccgaggauggugcu

SEQ ID NO: 47943 - RNA, 19 nt, Artificial Sequence
  Sense Oligo
caccauccucggaccucgu

SEQ ID NO: 47944 - RNA, 19 nt, Artificial Sequence
  Antisense Oligo
acgagguccgaggauggug

SEQ ID NO: 47945 - RNA, 19 nt, Artificial Sequence
  Sense Oligo
accauccucggaccucguu

SEQ ID NO: 47946 - RNA, 19 nt, Artificial Sequence
  Antisense Oligo
aacgagguccgaggauggu

SEQ ID NO: 47947 - RNA, 19 nt, Artificial Sequence
  Sense Oligo
ccauccucggaccucguua

SEQ ID NO: 47948 - RNA, 19 nt, Artificial Sequence
  Antisense Oligo
uaacgagguccgaggaugg

SEQ ID NO: 47949 - RNA, 19 nt, Artificial Sequence
  Sense Oligo
cauccucggaccucguuag

SEQ ID NO: 47950 - RNA, 19 nt, Artificial Sequence
  Antisense Oligo
cuaacgagguccgaggaug

SEQ ID NO: 47951 - RNA, 19 nt, Artificial Sequence
  Sense Oligo
auccucggaccucguuagg

SEQ ID NO: 47952 - RNA, 19 nt, Artificial Sequence
  Antisense Oligo
ccuaacgagguccgaggau

SEQ ID NO: 47953 - RNA, 19 nt, Artificial Sequence
  Sense Oligo
ccucggaccucguuaggag

SEQ ID NO: 47954 - RNA, 19 nt, Artificial Sequence
  Antisense Oligo
cuccuaacgagguccgagg

SEQ ID NO: 47955 - RNA, 19 nt, Artificial Sequence
  Sense Oligo
ggaggcauuccuuggguuu

SEQ ID NO: 47956 - RNA, 19 nt, Artificial Sequence
  Antisense Oligo
aaacccaaggaaugccucc

SEQ ID NO: 47957 - RNA, 19 nt, Artificial Sequence
  Sense Oligo
ccuggacuaucuguucuua

SEQ ID NO: 47958 - RNA, 19 nt, Artificial Sequence
  Antisense Oligo
uaagaacagauaguccagg

SEQ ID NO: 47959 - RNA, 19 nt, Artificial Sequence
  Sense Oligo
cuggacuaucuguucuuac

SEQ ID NO: 47960 - RNA, 19 nt, Artificial Sequence
  Antisense Oligo
guaagaacagauaguccag

SEQ ID NO: 47961 - RNA, 19 nt, Artificial Sequence
  Sense Oligo
uggacuaucuguucuuacu

SEQ ID NO: 47962 - RNA, 19 nt, Artificial Sequence
  Antisense Oligo
aguaagaacagauagucca

SEQ ID NO: 47963 - RNA, 19 nt, Artificial Sequence
  Sense Oligo
cuaucuguucuuacugaag

SEQ ID NO: 47964 - RNA, 19 nt, Artificial Sequence
  Antisense Oligo
cuucaguaagaacagauag

SEQ ID NO: 47965 - RNA, 19 nt, Artificial Sequence
  Sense Oligo
gaguagcuguuucuuugua

SEQ ID NO: 47966 - RNA, 19 nt, Artificial Sequence
  Antisense Oligo
uacaaagaaacagcuacuc

SEQ ID NO: 47967 - RNA, 19 nt, Artificial Sequence
  Sense Oligo
aguagcuguuucuuuguag

SEQ ID NO: 47968 - RNA, 19 nt, Artificial Sequence
  Antisense Oligo
cuacaaagaaacagcuacu

SEQ ID NO: 47969 - RNA, 19 nt, Artificial Sequence
  Sense Oligo
cuguuucuuuguagccuuu

SEQ ID NO: 47970 - RNA, 19 nt, Artificial Sequence
  Antisense Oligo
aaaggcuacaaagaaacag

SEQ ID NO: 47971 - RNA, 19 nt, Artificial Sequence
  Sense Oligo
uguuucuuuguagccuuua

SEQ ID NO: 47972 - RNA, 19 nt, Artificial Sequence
  Antisense Oligo
uaaaggcuacaaagaaaca

SEQ ID NO: 47973 - RNA, 19 nt, Artificial Sequence
  Sense Oligo
gccuuuauguuucccauca

SEQ ID NO: 47974 - RNA, 19 nt, Artificial Sequence
  Antisense Oligo
ugaugggaaacauaaaggc

SEQ ID NO: 47975 - RNA, 19 nt, Artificial Sequence
  Sense Oligo
ccuuuauguuucccaucac

SEQ ID NO: 47976 - RNA, 19 nt, Artificial Sequence
  Antisense Oligo
gugaugggaaacauaaagg

SEQ ID NO: 47977 - RNA, 19 nt, Artificial Sequence
  Sense Oligo
aacucacuugaauaacuuc

SEQ ID NO: 47978 - RNA, 19 nt, Artificial Sequence
  Antisense Oligo
gaaguuauucaagugaguu

SEQ ID NO: 47979 - RNA, 19 nt, Artificial Sequence
  Sense Oligo
acucacuugaauaacuucc

SEQ ID NO: 47980 - RNA, 19 nt, Artificial Sequence
  Antisense Oligo
ggaaguuauucaagugagu

SEQ ID NO: 47981 - RNA, 19 nt, Artificial Sequence
  Sense Oligo
cucacuugaauaacuuccc

SEQ ID NO: 47982 - RNA, 19 nt, Artificial Sequence
  Antisense Oligo
gggaaguuauucaagugag

SEQ ID NO: 47983 - RNA, 19 nt, Artificial Sequence
  Sense Oligo
ucacuugaauaacuucccu

SEQ ID NO: 47984 - RNA, 19 nt, Artificial Sequence
  Antisense Oligo
agggaaguuauucaaguga

SEQ ID NO: 47985 - RNA, 19 nt, Artificial Sequence
  Sense Oligo
cacuugaauaacuucccuu

SEQ ID NO: 47986 - RNA, 19 nt, Artificial Sequence
  Antisense Oligo
aagggaaguuauucaagug

SEQ ID NO: 47987 - RNA, 19 nt, Artificial Sequence
  Sense Oligo
acuugaauaacuucccuuu

SEQ ID NO: 47988 - RNA, 19 nt, Artificial Sequence
  Antisense Oligo
aaagggaaguuauucaagu

SEQ ID NO: 47989 - RNA, 19 nt, Artificial Sequence
  Sense Oligo
cuugaauaacuucccuuuu

SEQ ID NO: 47990 - RNA, 19 nt, Artificial Sequence
  Antisense Oligo
aaaagggaaguuauucaag

SEQ ID NO: 47991 - RNA, 19 nt, Artificial Sequence
  Sense Oligo
ugaauaacuucccuuuucu

SEQ ID NO: 47992 - RNA, 19 nt, Artificial Sequence
  Antisense Oligo
agaaaagggaaguuauuca

SEQ ID NO: 47993 - RNA, 19 nt, Artificial Sequence
  Sense Oligo
uuaacgaauacagccaaau

SEQ ID NO: 47994 - RNA, 19 nt, Artificial Sequence
  Antisense Oligo
auuuggcuguauucguuaa

SEQ ID NO: 47995 - RNA, 19 nt, Artificial Sequence
  Sense Oligo
uaacgaauacagccaaaug

SEQ ID NO: 47996 - RNA, 19 nt, Artificial Sequence
  Antisense Oligo
cauuuggcuguauucguua

SEQ ID NO: 47997 - RNA, 19 nt, Artificial Sequence
  Sense Oligo
aacgaauacagccaaaugu

SEQ ID NO: 47998 - RNA, 19 nt, Artificial Sequence
  Antisense Oligo
acauuuggcuguauucguu

SEQ ID NO: 47999 - RNA, 19 nt, Artificial Sequence
  Sense Oligo
cagacagauuuugaagaug

SEQ ID NO: 48000 - RNA, 19 nt, Artificial Sequence
  Antisense Oligo
caucuucaaaaucugucug

SEQ ID NO: 48001 - RNA, 19 nt, Artificial Sequence
  Sense Oligo
agacagauuuugaagaugg

SEQ ID NO: 48002 - RNA, 19 nt, Artificial Sequence
  Antisense Oligo
ccaucuucaaaaucugucu

SEQ ID NO: 48003 - RNA, 19 nt, Artificial Sequence
  Sense Oligo
auuuugaagauggaauccg

SEQ ID NO: 48004 - RNA, 19 nt, Artificial Sequence
  Antisense Oligo
cggauuccaucuucaaaau

SEQ ID NO: 48005 - RNA, 19 nt, Artificial Sequence
  Sense Oligo
uuuugaagauggaauccgu

SEQ ID NO: 48006 - RNA, 19 nt, Artificial Sequence
  Antisense Oligo
acggauuccaucuucaaaa

SEQ ID NO: 48007 - RNA, 19 nt, Artificial Sequence
  Sense Oligo
uuugaagauggaauccgua

SEQ ID NO: 48008 - RNA, 19 nt, Artificial Sequence
  Antisense Oligo
uacggauuccaucuucaaa

SEQ ID NO: 48009 - RNA, 19 nt, Artificial Sequence
  Sense Oligo
uugaagauggaauccguag

SEQ ID NO: 48010 - RNA, 19 nt, Artificial Sequence
  Antisense Oligo
cuacggauuccaucuucaa

SEQ ID NO: 48011 - RNA, 19 nt, Artificial Sequence
  Sense Oligo
ugaagauggaauccguagc

SEQ ID NO: 48012 - RNA, 19 nt, Artificial Sequence
  Antisense Oligo
gcuacggauuccaucuuca

SEQ ID NO: 48013 - RNA, 19 nt, Artificial Sequence
  Sense Oligo
gaagauggaauccguagcg

SEQ ID NO: 48014 - RNA, 19 nt, Artificial Sequence
  Antisense Oligo
cgcuacggauuccaucuuc

SEQ ID NO: 48015 - RNA, 19 nt, Artificial Sequence
  Sense Oligo
aagauggaauccguagcgc

SEQ ID NO: 48016 - RNA, 19 nt, Artificial Sequence
  Antisense Oligo
gcgcuacggauuccaucuu

SEQ ID NO: 48017 - RNA, 19 nt, Artificial Sequence
  Sense Oligo
agauggaauccguagcgcc

SEQ ID NO: 48018 - RNA, 19 nt, Artificial Sequence
  Antisense Oligo
ggcgcuacggauuccaucu

SEQ ID NO: 48019 - RNA, 19 nt, Artificial Sequence
  Sense Oligo
gcucauugccucagcuaag

SEQ ID NO: 48020 - RNA, 19 nt, Artificial Sequence
  Antisense Oligo
cuuagcugaggcaaugagc

SEQ ID NO: 48021 - RNA, 19 nt, Artificial Sequence
  Sense Oligo
cucauugccucagcuaagu

SEQ ID NO: 48022 - RNA, 19 nt, Artificial Sequence
  Antisense Oligo
acuuagcugaggcaaugag

SEQ ID NO: 48023 - RNA, 19 nt, Artificial Sequence
  Sense Oligo
ucauugccucagcuaagua

SEQ ID NO: 48024 - RNA, 19 nt, Artificial Sequence
  Antisense Oligo
uacuuagcugaggcaauga

SEQ ID NO: 48025 - RNA, 19 nt, Artificial Sequence
  Sense Oligo
cauugccucagcuaaguau

SEQ ID NO: 48026 - RNA, 19 nt, Artificial Sequence
  Antisense Oligo
auacuuagcugaggcaaug

SEQ ID NO: 48027 - RNA, 19 nt, Artificial Sequence
  Sense Oligo
auugccucagcuaaguaug

SEQ ID NO: 48028 - RNA, 19 nt, Artificial Sequence
  Antisense Oligo
cauacuuagcugaggcaau

SEQ ID NO: 48029 - RNA, 19 nt, Artificial Sequence
  Sense Oligo
uugccucagcuaaguaugu

SEQ ID NO: 48030 - RNA, 19 nt, Artificial Sequence
  Antisense Oligo
acauacuuagcugaggcaa

SEQ ID NO: 48031 - RNA, 19 nt, Artificial Sequence
  Sense Oligo
ugccucagcuaaguauguu

SEQ ID NO: 48032 - RNA, 19 nt, Artificial Sequence
  Antisense Oligo
aacauacuuagcugaggca

SEQ ID NO: 48033 - RNA, 19 nt, Artificial Sequence
  Sense Oligo
gccucagcuaaguauguuu

SEQ ID NO: 48034 - RNA, 19 nt, Artificial Sequence
  Antisense Oligo
aaacauacuuagcugaggc

SEQ ID NO: 48035 - RNA, 19 nt, Artificial Sequence
  Sense Oligo
ccucagcuaaguauguuuu

SEQ ID NO: 48036 - RNA, 19 nt, Artificial Sequence
  Antisense Oligo
aaaacauacuuagcugagg

SEQ ID NO: 48037 - RNA, 19 nt, Artificial Sequence
  Sense Oligo
uuuccuugaagacaguaua

SEQ ID NO: 48038 - RNA, 19 nt, Artificial Sequence
  Antisense Oligo
uauacugucuucaaggaaa

SEQ ID NO: 48039 - RNA, 19 nt, Artificial Sequence
  Sense Oligo
uuccuugaagacaguauag

SEQ ID NO: 48040 - RNA, 19 nt, Artificial Sequence
  Antisense Oligo
cuauacugucuucaaggaa

SEQ ID NO: 48041 - RNA, 19 nt, Artificial Sequence
  Sense Oligo
uccuugaagacaguauagu

SEQ ID NO: 48042 - RNA, 19 nt, Artificial Sequence
  Antisense Oligo
acuauacugucuucaagga

SEQ ID NO: 48043 - RNA, 19 nt, Artificial Sequence
  Sense Oligo
ccuugaagacaguauagua

SEQ ID NO: 48044 - RNA, 19 nt, Artificial Sequence
  Antisense Oligo
uacuauacugucuucaagg

SEQ ID NO: 48045 - RNA, 19 nt, Artificial Sequence
  Sense Oligo
cuugaagacaguauaguau

SEQ ID NO: 48046 - RNA, 19 nt, Artificial Sequence
  Antisense Oligo
auacuauacugucuucaag

SEQ ID NO: 48047 - RNA, 19 nt, Artificial Sequence
  Sense Oligo
uugaagacaguauaguauc

SEQ ID NO: 48048 - RNA, 19 nt, Artificial Sequence
  Antisense Oligo
gauacuauacugucuucaa

SEQ ID NO: 48049 - RNA, 19 nt, Artificial Sequence
  Sense Oligo
ugaagacaguauaguauca

SEQ ID NO: 48050 - RNA, 19 nt, Artificial Sequence
  Antisense Oligo
ugauacuauacugucuuca

SEQ ID NO: 48051 - RNA, 19 nt, Artificial Sequence
  Sense Oligo
gaagacaguauaguaucau

SEQ ID NO: 48052 - RNA, 19 nt, Artificial Sequence
  Antisense Oligo
augauacuauacugucuuc

SEQ ID NO: 48053 - RNA, 19 nt, Artificial Sequence
  Sense Oligo
aaaauaguggaaugggccu

SEQ ID NO: 48054 - RNA, 19 nt, Artificial Sequence
  Antisense Oligo
aggcccauuccacuauuuu

SEQ ID NO: 48055 - RNA, 19 nt, Artificial Sequence
  Sense Oligo
aaauaguggaaugggccug

SEQ ID NO: 48056 - RNA, 19 nt, Artificial Sequence
  Antisense Oligo
caggcccauuccacuauuu

SEQ ID NO: 48057 - RNA, 19 nt, Artificial Sequence
  Sense Oligo
aauaguggaaugggccugg

SEQ ID NO: 48058 - RNA, 19 nt, Artificial Sequence
  Antisense Oligo
ccaggcccauuccacuauu

SEQ ID NO: 48059 - RNA, 19 nt, Artificial Sequence
  Sense Oligo
auaguggaaugggccuggg

SEQ ID NO: 48060 - RNA, 19 nt, Artificial Sequence
  Antisense Oligo
cccaggcccauuccacuau

SEQ ID NO: 48061 - RNA, 19 nt, Artificial Sequence
  Sense Oligo
uaguggaaugggccugggc

SEQ ID NO: 48062 - RNA, 19 nt, Artificial Sequence
  Antisense Oligo
gcccaggcccauuccacua

SEQ ID NO: 48063 - RNA, 19 nt, Artificial Sequence
  Sense Oligo
aguggaaugggccugggca

SEQ ID NO: 48064 - RNA, 19 nt, Artificial Sequence
  Antisense Oligo
ugcccaggcccauuccacu

SEQ ID NO: 48065 - RNA, 19 nt, Artificial Sequence
  Sense Oligo
guggaaugggccugggcaa

SEQ ID NO: 48066 - RNA, 19 nt, Artificial Sequence
  Antisense Oligo
uugcccaggcccauuccac

SEQ ID NO: 48067 - RNA, 19 nt, Artificial Sequence
  Sense Oligo
uggaaugggccugggcaac

SEQ ID NO: 48068 - RNA, 19 nt, Artificial Sequence
  Antisense Oligo
guugcccaggcccauucca

SEQ ID NO: 48069 - RNA, 19 nt, Artificial Sequence
  Sense Oligo
aaaauaauuagccuuccac

SEQ ID NO: 48070 - RNA, 19 nt, Artificial Sequence
  Antisense Oligo
guggaaggcuaauuauuuu

SEQ ID NO: 48071 - RNA, 19 nt, Artificial Sequence
  Sense Oligo
aaauaauuagccuuccaca

SEQ ID NO: 48072 - RNA, 19 nt, Artificial Sequence
  Antisense Oligo
uguggaaggcuaauuauuu

SEQ ID NO: 48073 - RNA, 19 nt, Artificial Sequence
  Sense Oligo
aauuagccuuccacagugc

SEQ ID NO: 48074 - RNA, 19 nt, Artificial Sequence
  Antisense Oligo
gcacuguggaaggcuaauu

SEQ ID NO: 48075 - RNA, 19 nt, Artificial Sequence
  Sense Oligo
uuagccuuccacagugcac

SEQ ID NO: 48076 - RNA, 19 nt, Artificial Sequence
  Antisense Oligo
gugcacuguggaaggcuaa

SEQ ID NO: 48077 - RNA, 19 nt, Artificial Sequence
  Sense Oligo
acagugcaccucuaguccc

SEQ ID NO: 48078 - RNA, 19 nt, Artificial Sequence
  Antisense Oligo
gggacuagaggugcacugu

SEQ ID NO: 48079 - RNA, 19 nt, Artificial Sequence
  Sense Oligo
aaggcugaggugggaggau

SEQ ID NO: 48080 - RNA, 19 nt, Artificial Sequence
  Antisense Oligo
auccucccaccucagccuu

SEQ ID NO: 48081 - RNA, 19 nt, Artificial Sequence
  Sense Oligo
aggcugaggugggaggauc

SEQ ID NO: 48082 - RNA, 19 nt, Artificial Sequence
  Antisense Oligo
gauccucccaccucagccu

SEQ ID NO: 48083 - RNA, 19 nt, Artificial Sequence
  Sense Oligo
ugagccugggaggucaagg

SEQ ID NO: 48084 - RNA, 19 nt, Artificial Sequence
  Antisense Oligo
ccuugaccucccaggcuca

SEQ ID NO: 48085 - RNA, 19 nt, Artificial Sequence
  Sense Oligo
agagcaagagccuguccuc

SEQ ID NO: 48086 - RNA, 19 nt, Artificial Sequence
  Antisense Oligo
gaggacaggcucuugcucu

SEQ ID NO: 48087 - RNA, 19 nt, Artificial Sequence
  Sense Oligo
agagguguaaauaauggaa

SEQ ID NO: 48088 - RNA, 19 nt, Artificial Sequence
  Antisense Oligo
uuccauuauuuacaccucu

SEQ ID NO: 48089 - RNA, 19 nt, Artificial Sequence
  Sense Oligo
ugccuuugaagccuguguu

SEQ ID NO: 48090 - RNA, 19 nt, Artificial Sequence
  Antisense Oligo
aacacaggcuucaaaggca

SEQ ID NO: 48091 - RNA, 19 nt, Artificial Sequence
  Sense Oligo
gccuuugaagccuguguuu

SEQ ID NO: 48092 - RNA, 19 nt, Artificial Sequence
  Antisense Oligo
aaacacaggcuucaaaggc

SEQ ID NO: 48093 - RNA, 19 nt, Artificial Sequence
  Sense Oligo
ccuuugaagccuguguuug

SEQ ID NO: 48094 - RNA, 19 nt, Artificial Sequence
  Antisense Oligo
caaacacaggcuucaaagg

SEQ ID NO: 48095 - RNA, 19 nt, Artificial Sequence
  Sense Oligo
cuuugaagccuguguuugu

SEQ ID NO: 48096 - RNA, 19 nt, Artificial Sequence
  Antisense Oligo
acaaacacaggcuucaaag

SEQ ID NO: 48097 - RNA, 19 nt, Artificial Sequence
  Sense Oligo
uugaagccuguguuuguag

SEQ ID NO: 48098 - RNA, 19 nt, Artificial Sequence
  Antisense Oligo
cuacaaacacaggcuucaa

SEQ ID NO: 48099 - RNA, 19 nt, Artificial Sequence
  Sense Oligo
ugaagccuguguuuguaga

SEQ ID NO: 48100 - RNA, 19 nt, Artificial Sequence
  Antisense Oligo
ucuacaaacacaggcuuca

SEQ ID NO: 48101 - RNA, 19 nt, Artificial Sequence
  Sense Oligo
gaagccuguguuuguagac

SEQ ID NO: 48102 - RNA, 19 nt, Artificial Sequence
  Antisense Oligo
gucuacaaacacaggcuuc

SEQ ID NO: 48103 - RNA, 19 nt, Artificial Sequence
  Sense Oligo
aagccuguguuuguagaca

SEQ ID NO: 48104 - RNA, 19 nt, Artificial Sequence
  Antisense Oligo
ugucuacaaacacaggcuu

SEQ ID NO: 48105 - RNA, 19 nt, Artificial Sequence
  Sense Oligo
cuguguuuguagacauguu

SEQ ID NO: 48106 - RNA, 19 nt, Artificial Sequence
  Antisense Oligo
aacaugucuacaaacacag

SEQ ID NO: 48107 - RNA, 19 nt, Artificial Sequence
  Sense Oligo
guguuuguagacauguuuu

SEQ ID NO: 48108 - RNA, 19 nt, Artificial Sequence
  Antisense Oligo
aaaacaugucuacaaacac

SEQ ID NO: 48109 - RNA, 19 nt, Artificial Sequence
  Sense Oligo
uguuuguagacauguuuug

SEQ ID NO: 48110 - RNA, 19 nt, Artificial Sequence
  Antisense Oligo
caaaacaugucuacaaaca

SEQ ID NO: 48111 - RNA, 19 nt, Artificial Sequence
  Sense Oligo
guuuguagacauguuuugg

SEQ ID NO: 48112 - RNA, 19 nt, Artificial Sequence
  Antisense Oligo
ccaaaacaugucuacaaac

SEQ ID NO: 48113 - RNA, 19 nt, Artificial Sequence
  Sense Oligo
uuuguagacauguuuuggu

SEQ ID NO: 48114 - RNA, 19 nt, Artificial Sequence
  Antisense Oligo
accaaaacaugucuacaaa

SEQ ID NO: 48115 - RNA, 19 nt, Artificial Sequence
  Sense Oligo
uuguagacauguuuugguc

SEQ ID NO: 48116 - RNA, 19 nt, Artificial Sequence
  Antisense Oligo
gaccaaaacaugucuacaa

SEQ ID NO: 48117 - RNA, 19 nt, Artificial Sequence
  Sense Oligo
uguagacauguuuugguca

SEQ ID NO: 48118 - RNA, 19 nt, Artificial Sequence
  Antisense Oligo
ugaccaaaacaugucuaca

SEQ ID NO: 48119 - RNA, 19 nt, Artificial Sequence
  Sense Oligo
guagacauguuuuggucau

SEQ ID NO: 48120 - RNA, 19 nt, Artificial Sequence
  Antisense Oligo
augaccaaaacaugucuac

SEQ ID NO: 48121 - RNA, 19 nt, Artificial Sequence
  Sense Oligo
gacauguuuuggucauuau

SEQ ID NO: 48122 - RNA, 19 nt, Artificial Sequence
  Antisense Oligo
auaaugaccaaaacauguc

SEQ ID NO: 48123 - RNA, 19 nt, Artificial Sequence
  Sense Oligo
auuuauuucaaguucgagg

SEQ ID NO: 48124 - RNA, 19 nt, Artificial Sequence
  Antisense Oligo
ccucgaacuugaaauaaau

SEQ ID NO: 48125 - RNA, 19 nt, Artificial Sequence
  Sense Oligo
uuuauuucaaguucgaggg

SEQ ID NO: 48126 - RNA, 19 nt, Artificial Sequence
  Antisense Oligo
cccucgaacuugaaauaaa

SEQ ID NO: 48127 - RNA, 19 nt, Artificial Sequence
  Sense Oligo
uuauuucaaguucgaggga

SEQ ID NO: 48128 - RNA, 19 nt, Artificial Sequence
  Antisense Oligo
ucccucgaacuugaaauaa

SEQ ID NO: 48129 - RNA, 19 nt, Artificial Sequence
  Sense Oligo
uauuucaaguucgagggaa

SEQ ID NO: 48130 - RNA, 19 nt, Artificial Sequence
  Antisense Oligo
uucccucgaacuugaaaua

SEQ ID NO: 48131 - RNA, 19 nt, Artificial Sequence
  Sense Oligo
acaguagguaaaugcuuuu

SEQ ID NO: 48132 - RNA, 19 nt, Artificial Sequence
  Antisense Oligo
aaaagcauuuaccuacugu

SEQ ID NO: 48133 - RNA, 19 nt, Artificial Sequence
  Sense Oligo
uuuuauaguguuuguaggg

SEQ ID NO: 48134 - RNA, 19 nt, Artificial Sequence
  Antisense Oligo
cccuacaaacacuauaaaa

SEQ ID NO: 48135 - RNA, 19 nt, Artificial Sequence
  Sense Oligo
gggaagucugaugcucuua

SEQ ID NO: 48136 - RNA, 19 nt, Artificial Sequence
  Antisense Oligo
uaagagcaucagacuuccc

SEQ ID NO: 48137 - RNA, 19 nt, Artificial Sequence
  Sense Oligo
ggaagucugaugcucuuag

SEQ ID NO: 48138 - RNA, 19 nt, Artificial Sequence
  Antisense Oligo
cuaagagcaucagacuucc

SEQ ID NO: 48139 - RNA, 19 nt, Artificial Sequence
  Sense Oligo
gaagucugaugcucuuaga

SEQ ID NO: 48140 - RNA, 19 nt, Artificial Sequence
  Antisense Oligo
ucuaagagcaucagacuuc

SEQ ID NO: 48141 - RNA, 19 nt, Artificial Sequence
  Sense Oligo
aacuuugugccuuuauuac

SEQ ID NO: 48142 - RNA, 19 nt, Artificial Sequence
  Antisense Oligo
guaauaaaggcacaaaguu

SEQ ID NO: 48143 - RNA, 19 nt, Artificial Sequence
  Sense Oligo
acuuugugccuuuauuacu

SEQ ID NO: 48144 - RNA, 19 nt, Artificial Sequence
  Antisense Oligo
aguaauaaaggcacaaagu

SEQ ID NO: 48145 - RNA, 19 nt, Artificial Sequence
  Sense Oligo
cuuugugccuuuauuacuu

SEQ ID NO: 48146 - RNA, 19 nt, Artificial Sequence
  Antisense Oligo
aaguaauaaaggcacaaag

SEQ ID NO: 48147 - RNA, 19 nt, Artificial Sequence
  Sense Oligo
aaguaaaagugauuucugg

SEQ ID NO: 48148 - RNA, 19 nt, Artificial Sequence
  Antisense Oligo
ccagaaaucacuuuuacuu

SEQ ID NO: 48149 - RNA, 19 nt, Artificial Sequence
  Sense Oligo
aaagugauuucuggaccuu

SEQ ID NO: 48150 - RNA, 19 nt, Artificial Sequence
  Antisense Oligo
aagguccagaaaucacuuu

SEQ ID NO: 48151 - RNA, 19 nt, Artificial Sequence
  Sense Oligo
aagugauuucuggaccuuu

SEQ ID NO: 48152 - RNA, 19 nt, Artificial Sequence
  Antisense Oligo
aaagguccagaaaucacuu

SEQ ID NO: 48153 - RNA, 19 nt, Artificial Sequence
  Sense Oligo
agugauuucuggaccuuuu

SEQ ID NO: 48154 - RNA, 19 nt, Artificial Sequence
  Antisense Oligo
aaaagguccagaaaucacu

SEQ ID NO: 48155 - RNA, 19 nt, Artificial Sequence
  Sense Oligo
uggaugccauauuucaguu

SEQ ID NO: 48156 - RNA, 19 nt, Artificial Sequence
  Antisense Oligo
aacugaaauauggcaucca

SEQ ID NO: 48157 - RNA, 19 nt, Artificial Sequence
  Sense Oligo
ggaugccauauuucaguuc

SEQ ID NO: 48158 - RNA, 19 nt, Artificial Sequence
  Antisense Oligo
gaacugaaauauggcaucc

SEQ ID NO: 48159 - RNA, 19 nt, Artificial Sequence
  Sense Oligo
gaugccauauuucaguucg

SEQ ID NO: 48160 - RNA, 19 nt, Artificial Sequence
  Antisense Oligo
cgaacugaaauauggcauc

SEQ ID NO: 48161 - RNA, 19 nt, Artificial Sequence
  Sense Oligo
ugccauauuucaguucgug

SEQ ID NO: 48162 - RNA, 19 nt, Artificial Sequence
  Antisense Oligo
cacgaacugaaauauggca

SEQ ID NO: 48163 - RNA, 19 nt, Artificial Sequence
  Sense Oligo
gccauauuucaguucgugg

SEQ ID NO: 48164 - RNA, 19 nt, Artificial Sequence
  Antisense Oligo
ccacgaacugaaauauggc

SEQ ID NO: 48165 - RNA, 19 nt, Artificial Sequence
  Sense Oligo
ccauauuucaguucguggc

SEQ ID NO: 48166 - RNA, 19 nt, Artificial Sequence
  Antisense Oligo
gccacgaacugaaauaugg

SEQ ID NO: 48167 - RNA, 19 nt, Artificial Sequence
  Sense Oligo
cauauuucaguucguggcu

SEQ ID NO: 48168 - RNA, 19 nt, Artificial Sequence
  Antisense Oligo
agccacgaacugaaauaug

SEQ ID NO: 48169 - RNA, 19 nt, Artificial Sequence
  Sense Oligo
auauuucaguucguggcuu

SEQ ID NO: 48170 - RNA, 19 nt, Artificial Sequence
  Antisense Oligo
aagccacgaacugaaauau

SEQ ID NO: 48171 - RNA, 19 nt, Artificial Sequence
  Sense Oligo
uauuucaguucguggcuua

SEQ ID NO: 48172 - RNA, 19 nt, Artificial Sequence
  Antisense Oligo
uaagccacgaacugaaaua

SEQ ID NO: 48173 - RNA, 19 nt, Artificial Sequence
  Sense Oligo
auuucaguucguggcuuaa

SEQ ID NO: 48174 - RNA, 19 nt, Artificial Sequence
  Antisense Oligo
uuaagccacgaacugaaau

SEQ ID NO: 48175 - RNA, 19 nt, Artificial Sequence
  Sense Oligo
ucaguucguggcuuaaauc

SEQ ID NO: 48176 - RNA, 19 nt, Artificial Sequence
  Antisense Oligo
gauuuaagccacgaacuga

SEQ ID NO: 48177 - RNA, 19 nt, Artificial Sequence
  Sense Oligo
caguucguggcuuaaaucu

SEQ ID NO: 48178 - RNA, 19 nt, Artificial Sequence
  Antisense Oligo
agauuuaagccacgaacug

SEQ ID NO: 48179 - RNA, 19 nt, Artificial Sequence
  Sense Oligo
aguucguggcuuaaaucuc

SEQ ID NO: 48180 - RNA, 19 nt, Artificial Sequence
  Antisense Oligo
gagauuuaagccacgaacu

SEQ ID NO: 48181 - RNA, 19 nt, Artificial Sequence
  Sense Oligo
guucguggcuuaaaucuca

SEQ ID NO: 48182 - RNA, 19 nt, Artificial Sequence
  Antisense Oligo
ugagauuuaagccacgaac

SEQ ID NO: 48183 - RNA, 19 nt, Artificial Sequence
  Sense Oligo
ucguggcuuaaaucucaac

SEQ ID NO: 48184 - RNA, 19 nt, Artificial Sequence
  Antisense Oligo
guugagauuuaagccacga

SEQ ID NO: 48185 - RNA, 19 nt, Artificial Sequence
  Sense Oligo
ggcuuuggccauuggucau

SEQ ID NO: 48186 - RNA, 19 nt, Artificial Sequence
  Antisense Oligo
augaccaauggccaaagcc

SEQ ID NO: 48187 - RNA, 19 nt, Artificial Sequence
  Sense Oligo
gcuuuggccauuggucauc

SEQ ID NO: 48188 - RNA, 19 nt, Artificial Sequence
  Antisense Oligo
gaugaccaauggccaaagc

SEQ ID NO: 48189 - RNA, 19 nt, Artificial Sequence
  Sense Oligo
cuuuggccauuggucaucu

SEQ ID NO: 48190 - RNA, 19 nt, Artificial Sequence
  Antisense Oligo
agaugaccaauggccaaag

SEQ ID NO: 48191 - RNA, 19 nt, Artificial Sequence
  Sense Oligo
uuuggccauuggucaucug

SEQ ID NO: 48192 - RNA, 19 nt, Artificial Sequence
  Antisense Oligo
cagaugaccaauggccaaa

SEQ ID NO: 48193 - RNA, 19 nt, Artificial Sequence
  Sense Oligo
uuggccauuggucaucuga

SEQ ID NO: 48194 - RNA, 19 nt, Artificial Sequence
  Antisense Oligo
ucagaugaccaauggccaa

SEQ ID NO: 48195 - RNA, 19 nt, Artificial Sequence
  Sense Oligo
uggccauuggucaucugaa

SEQ ID NO: 48196 - RNA, 19 nt, Artificial Sequence
  Antisense Oligo
uucagaugaccaauggcca

SEQ ID NO: 48197 - RNA, 19 nt, Artificial Sequence
  Sense Oligo
ggccauuggucaucugaag

SEQ ID NO: 48198 - RNA, 19 nt, Artificial Sequence
  Antisense Oligo
cuucagaugaccaauggcc

SEQ ID NO: 48199 - RNA, 19 nt, Artificial Sequence
  Sense Oligo
uggucaucugaagggaaug

SEQ ID NO: 48200 - RNA, 19 nt, Artificial Sequence
  Antisense Oligo
cauucccuucagaugacca

SEQ ID NO: 48201 - RNA, 19 nt, Artificial Sequence
  Sense Oligo
ggucaucugaagggaaugg

SEQ ID NO: 48202 - RNA, 19 nt, Artificial Sequence
  Antisense Oligo
ccauucccuucagaugacc

SEQ ID NO: 48203 - RNA, 19 nt, Artificial Sequence
  Sense Oligo
gucaucugaagggaauggc

SEQ ID NO: 48204 - RNA, 19 nt, Artificial Sequence
  Antisense Oligo
gccauucccuucagaugac

SEQ ID NO: 48205 - RNA, 19 nt, Artificial Sequence
  Sense Oligo
ucaucugaagggaauggca

SEQ ID NO: 48206 - RNA, 19 nt, Artificial Sequence
  Antisense Oligo
ugccauucccuucagauga

SEQ ID NO: 48207 - RNA, 19 nt, Artificial Sequence
  Sense Oligo
caucugaagggaauggcau

SEQ ID NO: 48208 - RNA, 19 nt, Artificial Sequence
  Antisense Oligo
augccauucccuucagaug

SEQ ID NO: 48209 - RNA, 19 nt, Artificial Sequence
  Sense Oligo
aaagguccacuggguacag

SEQ ID NO: 48210 - RNA, 19 nt, Artificial Sequence
  Antisense Oligo
cuguacccaguggaccuuu

SEQ ID NO: 48211 - RNA, 19 nt, Artificial Sequence
  Sense Oligo
aagcagaggcaggaggauc

SEQ ID NO: 48212 - RNA, 19 nt, Artificial Sequence
  Antisense Oligo
gauccuccugccucugcuu

SEQ ID NO: 48213 - RNA, 19 nt, Artificial Sequence
  Sense Oligo
gaggcaggaggaucguuug

SEQ ID NO: 48214 - RNA, 19 nt, Artificial Sequence
  Antisense Oligo
caaacgauccuccugccuc

SEQ ID NO: 48215 - RNA, 19 nt, Artificial Sequence
  Sense Oligo
aucguuugaggccaggagu

SEQ ID NO: 48216 - RNA, 19 nt, Artificial Sequence
  Antisense Oligo
acuccuggccucaaacgau

SEQ ID NO: 48217 - RNA, 19 nt, Artificial Sequence
  Sense Oligo
ucguuugaggccaggaguu

SEQ ID NO: 48218 - RNA, 19 nt, Artificial Sequence
  Antisense Oligo
aacuccuggccucaaacga

SEQ ID NO: 48219 - RNA, 19 nt, Artificial Sequence
  Sense Oligo
cguuugaggccaggaguuu

SEQ ID NO: 48220 - RNA, 19 nt, Artificial Sequence
  Antisense Oligo
aaacuccuggccucaaacg

SEQ ID NO: 48221 - RNA, 19 nt, Artificial Sequence
  Sense Oligo
guuugaggccaggaguuug

SEQ ID NO: 48222 - RNA, 19 nt, Artificial Sequence
  Antisense Oligo
caaacuccuggccucaaac

SEQ ID NO: 48223 - RNA, 19 nt, Artificial Sequence
  Sense Oligo
uuugaggccaggaguuuga

SEQ ID NO: 48224 - RNA, 19 nt, Artificial Sequence
  Antisense Oligo
ucaaacuccuggccucaaa

SEQ ID NO: 48225 - RNA, 19 nt, Artificial Sequence
  Sense Oligo
aguucagcuguccucaccc

SEQ ID NO: 48226 - RNA, 19 nt, Artificial Sequence
  Antisense Oligo
gggugaggacagcugaacu

SEQ ID NO: 48227 - RNA, 19 nt, Artificial Sequence
  Sense Oligo
guucagcuguccucacccu

SEQ ID NO: 48228 - RNA, 19 nt, Artificial Sequence
  Antisense Oligo
agggugaggacagcugaac

SEQ ID NO: 48229 - RNA, 19 nt, Artificial Sequence
  Sense Oligo
uucagcuguccucacccuu

SEQ ID NO: 48230 - RNA, 19 nt, Artificial Sequence
  Antisense Oligo
aagggugaggacagcugaa

SEQ ID NO: 48231 - RNA, 19 nt, Artificial Sequence
  Sense Oligo
ucagcuguccucacccuua

SEQ ID NO: 48232 - RNA, 19 nt, Artificial Sequence
  Antisense Oligo
uaagggugaggacagcuga

SEQ ID NO: 48233 - RNA, 19 nt, Artificial Sequence
  Sense Oligo
cagcuguccucacccuuag

SEQ ID NO: 48234 - RNA, 19 nt, Artificial Sequence
  Antisense Oligo
cuaagggugaggacagcug

SEQ ID NO: 48235 - RNA, 19 nt, Artificial Sequence
  Sense Oligo
agcuguccucacccuuagc

SEQ ID NO: 48236 - RNA, 19 nt, Artificial Sequence
  Antisense Oligo
gcuaagggugaggacagcu

SEQ ID NO: 48237 - RNA, 19 nt, Artificial Sequence
  Sense Oligo
gcuguccucacccuuagcu

SEQ ID NO: 48238 - RNA, 19 nt, Artificial Sequence
  Antisense Oligo
agcuaagggugaggacagc

SEQ ID NO: 48239 - RNA, 19 nt, Artificial Sequence
  Sense Oligo
cuguccucacccuuagcug

SEQ ID NO: 48240 - RNA, 19 nt, Artificial Sequence
  Antisense Oligo
cagcuaagggugaggacag

SEQ ID NO: 48241 - RNA, 19 nt, Artificial Sequence
  Sense Oligo
guccucacccuuagcugca

SEQ ID NO: 48242 - RNA, 19 nt, Artificial Sequence
  Antisense Oligo
ugcagcuaagggugaggac

SEQ ID NO: 48243 - RNA, 19 nt, Artificial Sequence
  Sense Oligo
ucacccuuagcugcaccgg

SEQ ID NO: 48244 - RNA, 19 nt, Artificial Sequence
  Antisense Oligo
ccggugcagcuaaggguga

SEQ ID NO: 48245 - RNA, 19 nt, Artificial Sequence
  Sense Oligo
gcaggcccauugaggagca

SEQ ID NO: 48246 - RNA, 19 nt, Artificial Sequence
  Antisense Oligo
ugcuccucaaugggccugc

SEQ ID NO: 48247 - RNA, 19 nt, Artificial Sequence
  Sense Oligo
caggcccauugaggagcac

SEQ ID NO: 48248 - RNA, 19 nt, Artificial Sequence
  Antisense Oligo
gugcuccucaaugggccug

SEQ ID NO: 48249 - RNA, 19 nt, Artificial Sequence
  Sense Oligo
caagauaggguuucugguc

SEQ ID NO: 48250 - RNA, 19 nt, Artificial Sequence
  Antisense Oligo
gaccagaaacccuaucuug

SEQ ID NO: 48251 - RNA, 19 nt, Artificial Sequence
  Sense Oligo
aagauaggguuucugguca

SEQ ID NO: 48252 - RNA, 19 nt, Artificial Sequence
  Antisense Oligo
ugaccagaaacccuaucuu

SEQ ID NO: 48253 - RNA, 19 nt, Artificial Sequence
  Sense Oligo
agauaggguuucuggucaa

SEQ ID NO: 48254 - RNA, 19 nt, Artificial Sequence
  Antisense Oligo
uugaccagaaacccuaucu

SEQ ID NO: 48255 - RNA, 19 nt, Artificial Sequence
  Sense Oligo
gauaggguuucuggucaac

SEQ ID NO: 48256 - RNA, 19 nt, Artificial Sequence
  Antisense Oligo
guugaccagaaacccuauc

SEQ ID NO: 48257 - RNA, 19 nt, Artificial Sequence
  Sense Oligo
auaggguuucuggucaacg

SEQ ID NO: 48258 - RNA, 19 nt, Artificial Sequence
  Antisense Oligo
cguugaccagaaacccuau

SEQ ID NO: 48259 - RNA, 19 nt, Artificial Sequence
  Sense Oligo
uaggguuucuggucaacga

SEQ ID NO: 48260 - RNA, 19 nt, Artificial Sequence
  Antisense Oligo
ucguugaccagaaacccua

SEQ ID NO: 48261 - RNA, 19 nt, Artificial Sequence
  Sense Oligo
aggguuucuggucaacgaa

SEQ ID NO: 48262 - RNA, 19 nt, Artificial Sequence
  Antisense Oligo
uucguugaccagaaacccu

SEQ ID NO: 48263 - RNA, 19 nt, Artificial Sequence
  Sense Oligo
ggguuucuggucaacgaag

SEQ ID NO: 48264 - RNA, 19 nt, Artificial Sequence
  Antisense Oligo
cuucguugaccagaaaccc

SEQ ID NO: 48265 - RNA, 19 nt, Artificial Sequence
  Sense Oligo
gguuucuggucaacgaagg

SEQ ID NO: 48266 - RNA, 19 nt, Artificial Sequence
  Antisense Oligo
ccuucguugaccagaaacc

SEQ ID NO: 48267 - RNA, 19 nt, Artificial Sequence
  Sense Oligo
guuucuggucaacgaagga

SEQ ID NO: 48268 - RNA, 19 nt, Artificial Sequence
  Antisense Oligo
uccuucguugaccagaaac

SEQ ID NO: 48269 - RNA, 19 nt, Artificial Sequence
  Sense Oligo
uuucuggucaacgaaggaa

SEQ ID NO: 48270 - RNA, 19 nt, Artificial Sequence
  Antisense Oligo
uuccuucguugaccagaaa

SEQ ID NO: 48271 - RNA, 19 nt, Artificial Sequence
  Sense Oligo
uucuggucaacgaaggaau

SEQ ID NO: 48272 - RNA, 19 nt, Artificial Sequence
  Antisense Oligo
auuccuucguugaccagaa

SEQ ID NO: 48273 - RNA, 19 nt, Artificial Sequence
  Sense Oligo
ucuggucaacgaaggaaug

SEQ ID NO: 48274 - RNA, 19 nt, Artificial Sequence
  Antisense Oligo
cauuccuucguugaccaga

SEQ ID NO: 48275 - RNA, 19 nt, Artificial Sequence
  Sense Oligo
cuggucaacgaaggaaugc

SEQ ID NO: 48276 - RNA, 19 nt, Artificial Sequence
  Antisense Oligo
gcauuccuucguugaccag

SEQ ID NO: 48277 - RNA, 19 nt, Artificial Sequence
  Sense Oligo
uggucaacgaaggaaugcc

SEQ ID NO: 48278 - RNA, 19 nt, Artificial Sequence
  Antisense Oligo
ggcauuccuucguugacca

SEQ ID NO: 48279 - RNA, 19 nt, Artificial Sequence
  Sense Oligo
ggucaacgaaggaaugcca

SEQ ID NO: 48280 - RNA, 19 nt, Artificial Sequence
  Antisense Oligo
uggcauuccuucguugacc

SEQ ID NO: 48281 - RNA, 19 nt, Artificial Sequence
  Sense Oligo
gucaacgaaggaaugccac

SEQ ID NO: 48282 - RNA, 19 nt, Artificial Sequence
  Antisense Oligo
guggcauuccuucguugac

SEQ ID NO: 48283 - RNA, 19 nt, Artificial Sequence
  Sense Oligo
ucaacgaaggaaugccacu

SEQ ID NO: 48284 - RNA, 19 nt, Artificial Sequence
  Antisense Oligo
aguggcauuccuucguuga

SEQ ID NO: 48285 - RNA, 19 nt, Artificial Sequence
  Sense Oligo
caacgaaggaaugccacuu

SEQ ID NO: 48286 - RNA, 19 nt, Artificial Sequence
  Antisense Oligo
aaguggcauuccuucguug

SEQ ID NO: 48287 - RNA, 19 nt, Artificial Sequence
  Sense Oligo
aggaaugccacuucaaagc

SEQ ID NO: 48288 - RNA, 19 nt, Artificial Sequence
  Antisense Oligo
gcuuugaaguggcauuccu

SEQ ID NO: 48289 - RNA, 19 nt, Artificial Sequence
  Sense Oligo
ggaaugccacuucaaagca

SEQ ID NO: 48290 - RNA, 19 nt, Artificial Sequence
  Antisense Oligo
ugcuuugaaguggcauucc

SEQ ID NO: 48291 - RNA, 19 nt, Artificial Sequence
  Sense Oligo
gaaugccacuucaaagcag

SEQ ID NO: 48292 - RNA, 19 nt, Artificial Sequence
  Antisense Oligo
cugcuuugaaguggcauuc

SEQ ID NO: 48293 - RNA, 19 nt, Artificial Sequence
  Sense Oligo
aaugccacuucaaagcaga

SEQ ID NO: 48294 - RNA, 19 nt, Artificial Sequence
  Antisense Oligo
ucugcuuugaaguggcauu

SEQ ID NO: 48295 - RNA, 19 nt, Artificial Sequence
  Sense Oligo
augccacuucaaagcagag

SEQ ID NO: 48296 - RNA, 19 nt, Artificial Sequence
  Antisense Oligo
cucugcuuugaaguggcau

SEQ ID NO: 48297 - RNA, 19 nt, Artificial Sequence
  Sense Oligo
ugccacuucaaagcagagg

SEQ ID NO: 48298 - RNA, 19 nt, Artificial Sequence
  Antisense Oligo
ccucugcuuugaaguggca

SEQ ID NO: 48299 - RNA, 19 nt, Artificial Sequence
  Sense Oligo
gccacuucaaagcagagga

SEQ ID NO: 48300 - RNA, 19 nt, Artificial Sequence
  Antisense Oligo
uccucugcuuugaaguggc

SEQ ID NO: 48301 - RNA, 19 nt, Artificial Sequence
  Sense Oligo
ccacuucaaagcagaggac

SEQ ID NO: 48302 - RNA, 19 nt, Artificial Sequence
  Antisense Oligo
guccucugcuuugaagugg

SEQ ID NO: 48303 - RNA, 19 nt, Artificial Sequence
  Sense Oligo
ucacgaucgcagggcucug

SEQ ID NO: 48304 - RNA, 19 nt, Artificial Sequence
  Antisense Oligo
cagagcccugcgaucguga

SEQ ID NO: 48305 - RNA, 19 nt, Artificial Sequence
  Sense Oligo
cacgaucgcagggcucuga

SEQ ID NO: 48306 - RNA, 19 nt, Artificial Sequence
  Antisense Oligo
ucagagcccugcgaucgug

SEQ ID NO: 48307 - RNA, 19 nt, Artificial Sequence
  Sense Oligo
acgaucgcagggcucugaa

SEQ ID NO: 48308 - RNA, 19 nt, Artificial Sequence
  Antisense Oligo
uucagagcccugcgaucgu

SEQ ID NO: 48309 - RNA, 19 nt, Artificial Sequence
  Sense Oligo
cgaucgcagggcucugaag

SEQ ID NO: 48310 - RNA, 19 nt, Artificial Sequence
  Antisense Oligo
cuucagagcccugcgaucg

SEQ ID NO: 48311 - RNA, 19 nt, Artificial Sequence
  Sense Oligo
gaucgcagggcucugaagu

SEQ ID NO: 48312 - RNA, 19 nt, Artificial Sequence
  Antisense Oligo
acuucagagcccugcgauc

SEQ ID NO: 48313 - RNA, 19 nt, Artificial Sequence
  Sense Oligo
aucgcagggcucugaaguu

SEQ ID NO: 48314 - RNA, 19 nt, Artificial Sequence
  Antisense Oligo
aacuucagagcccugcgau

SEQ ID NO: 48315 - RNA, 19 nt, Artificial Sequence
  Sense Oligo
ucgcagggcucugaaguuu

SEQ ID NO: 48316 - RNA, 19 nt, Artificial Sequence
  Antisense Oligo
aaacuucagagcccugcga

SEQ ID NO: 48317 - RNA, 19 nt, Artificial Sequence
  Sense Oligo
cgcagggcucugaaguuua

SEQ ID NO: 48318 - RNA, 19 nt, Artificial Sequence
  Antisense Oligo
uaaacuucagagcccugcg

SEQ ID NO: 48319 - RNA, 19 nt, Artificial Sequence
  Sense Oligo
gcagggcucugaaguuuau

SEQ ID NO: 48320 - RNA, 19 nt, Artificial Sequence
  Antisense Oligo
auaaacuucagagcccugc

SEQ ID NO: 48321 - RNA, 19 nt, Artificial Sequence
  Sense Oligo
cagggcucugaaguuuaug

SEQ ID NO: 48322 - RNA, 19 nt, Artificial Sequence
  Antisense Oligo
cauaaacuucagagcccug

SEQ ID NO: 48323 - RNA, 19 nt, Artificial Sequence
  Sense Oligo
agggcucugaaguuuaugu

SEQ ID NO: 48324 - RNA, 19 nt, Artificial Sequence
  Antisense Oligo
acauaaacuucagagcccu

SEQ ID NO: 48325 - RNA, 19 nt, Artificial Sequence
  Sense Oligo
gggcucugaaguuuaugua

SEQ ID NO: 48326 - RNA, 19 nt, Artificial Sequence
  Antisense Oligo
uacauaaacuucagagccc

SEQ ID NO: 48327 - RNA, 19 nt, Artificial Sequence
  Sense Oligo
ggcucugaaguuuauguaa

SEQ ID NO: 48328 - RNA, 19 nt, Artificial Sequence
  Antisense Oligo
uuacauaaacuucagagcc

SEQ ID NO: 48329 - RNA, 19 nt, Artificial Sequence
  Sense Oligo
gcucugaaguuuauguaaa

SEQ ID NO: 48330 - RNA, 19 nt, Artificial Sequence
  Antisense Oligo
uuuacauaaacuucagagc

SEQ ID NO: 48331 - RNA, 19 nt, Artificial Sequence
  Sense Oligo
acacccuucugcagcugca

SEQ ID NO: 48332 - RNA, 19 nt, Artificial Sequence
  Antisense Oligo
ugcagcugcagaagggugu

SEQ ID NO: 48333 - RNA, 19 nt, Artificial Sequence
  Sense Oligo
acagcuuugcuuuguuuau

SEQ ID NO: 48334 - RNA, 19 nt, Artificial Sequence
  Antisense Oligo
auaaacaaagcaaagcugu

SEQ ID NO: 48335 - RNA, 19 nt, Artificial Sequence
  Sense Oligo
cuuugcuuuguuuauuugc

SEQ ID NO: 48336 - RNA, 19 nt, Artificial Sequence
  Antisense Oligo
gcaaauaaacaaagcaaag

SEQ ID NO: 48337 - RNA, 19 nt, Artificial Sequence
  Sense Oligo
aaaaugaggaccguaucuu

SEQ ID NO: 48338 - RNA, 19 nt, Artificial Sequence
  Antisense Oligo
aagauacgguccucauuuu

SEQ ID NO: 48339 - RNA, 19 nt, Artificial Sequence
  Sense Oligo
aaaugaggaccguaucuuc

SEQ ID NO: 48340 - RNA, 19 nt, Artificial Sequence
  Antisense Oligo
gaagauacgguccucauuu

SEQ ID NO: 48341 - RNA, 19 nt, Artificial Sequence
  Sense Oligo
aaugaggaccguaucuucg

SEQ ID NO: 48342 - RNA, 19 nt, Artificial Sequence
  Antisense Oligo
cgaagauacgguccucauu

SEQ ID NO: 48343 - RNA, 19 nt, Artificial Sequence
  Sense Oligo
augaggaccguaucuucgu

SEQ ID NO: 48344 - RNA, 19 nt, Artificial Sequence
  Antisense Oligo
acgaagauacgguccucau

SEQ ID NO: 48345 - RNA, 19 nt, Artificial Sequence
  Sense Oligo
ugaggaccguaucuucguc

SEQ ID NO: 48346 - RNA, 19 nt, Artificial Sequence
  Antisense Oligo
gacgaagauacgguccuca

SEQ ID NO: 48347 - RNA, 19 nt, Artificial Sequence
  Sense Oligo
gaggaccguaucuucgucu

SEQ ID NO: 48348 - RNA, 19 nt, Artificial Sequence
  Antisense Oligo
agacgaagauacgguccuc

SEQ ID NO: 48349 - RNA, 19 nt, Artificial Sequence
  Sense Oligo
aggaccguaucuucgucua

SEQ ID NO: 48350 - RNA, 19 nt, Artificial Sequence
  Antisense Oligo
uagacgaagauacgguccu

SEQ ID NO: 48351 - RNA, 19 nt, Artificial Sequence
  Sense Oligo
ggaccguaucuucgucuau

SEQ ID NO: 48352 - RNA, 19 nt, Artificial Sequence
  Antisense Oligo
auagacgaagauacggucc

SEQ ID NO: 48353 - RNA, 19 nt, Artificial Sequence
  Sense Oligo
gaccguaucuucgucuauu

SEQ ID NO: 48354 - RNA, 19 nt, Artificial Sequence
  Antisense Oligo
aauagacgaagauacgguc

SEQ ID NO: 48355 - RNA, 19 nt, Artificial Sequence
  Sense Oligo
accguaucuucgucuauuu

SEQ ID NO: 48356 - RNA, 19 nt, Artificial Sequence
  Antisense Oligo
aaauagacgaagauacggu

SEQ ID NO: 48357 - RNA, 19 nt, Artificial Sequence
  Sense Oligo
ccguaucuucgucuauuuc

SEQ ID NO: 48358 - RNA, 19 nt, Artificial Sequence
  Antisense Oligo
gaaauagacgaagauacgg

SEQ ID NO: 48359 - RNA, 19 nt, Artificial Sequence
  Sense Oligo
ucuucgucuauuucaucac

SEQ ID NO: 48360 - RNA, 19 nt, Artificial Sequence
  Antisense Oligo
gugaugaaauagacgaaga

SEQ ID NO: 48361 - RNA, 19 nt, Artificial Sequence
  Sense Oligo
cuucgucuauuucaucaca

SEQ ID NO: 48362 - RNA, 19 nt, Artificial Sequence
  Antisense Oligo
ugugaugaaauagacgaag

SEQ ID NO: 48363 - RNA, 19 nt, Artificial Sequence
  Sense Oligo
ugggcuuccacggagguga

SEQ ID NO: 48364 - RNA, 19 nt, Artificial Sequence
  Antisense Oligo
ucaccuccguggaagccca

SEQ ID NO: 48365 - RNA, 19 nt, Artificial Sequence
  Sense Oligo
acaucagucaggguauuua

SEQ ID NO: 48366 - RNA, 19 nt, Artificial Sequence
  Antisense Oligo
uaaauacccugacugaugu

SEQ ID NO: 48367 - RNA, 19 nt, Artificial Sequence
  Sense Oligo
caucagucaggguauuuau

SEQ ID NO: 48368 - RNA, 19 nt, Artificial Sequence
  Antisense Oligo
auaaauacccugacugaug

SEQ ID NO: 48369 - RNA, 19 nt, Artificial Sequence
  Sense Oligo
aucagucaggguauuuauu

SEQ ID NO: 48370 - RNA, 19 nt, Artificial Sequence
  Antisense Oligo
aauaaauacccugacugau

SEQ ID NO: 48371 - RNA, 19 nt, Artificial Sequence
  Sense Oligo
ucagucaggguauuuauuu

SEQ ID NO: 48372 - RNA, 19 nt, Artificial Sequence
  Antisense Oligo
aaauaaauacccugacuga

SEQ ID NO: 48373 - RNA, 19 nt, Artificial Sequence
  Sense Oligo
cagucaggguauuuauuua

SEQ ID NO: 48374 - RNA, 19 nt, Artificial Sequence
  Antisense Oligo
uaaauaaauacccugacug

SEQ ID NO: 48375 - RNA, 19 nt, Artificial Sequence
  Sense Oligo
gucaggguauuuauuuaug

SEQ ID NO: 48376 - RNA, 19 nt, Artificial Sequence
  Antisense Oligo
cauaaauaaauacccugac

SEQ ID NO: 48377 - RNA, 19 nt, Artificial Sequence
  Sense Oligo
agauggagucuugcucugu

SEQ ID NO: 48378 - RNA, 19 nt, Artificial Sequence
  Antisense Oligo
acagagcaagacuccaucu

SEQ ID NO: 48379 - RNA, 19 nt, Artificial Sequence
  Sense Oligo
gauggagucuugcucuguc

SEQ ID NO: 48380 - RNA, 19 nt, Artificial Sequence
  Antisense Oligo
gacagagcaagacuccauc

SEQ ID NO: 48381 - RNA, 19 nt, Artificial Sequence
  Sense Oligo
auggagucuugcucuguca

SEQ ID NO: 48382 - RNA, 19 nt, Artificial Sequence
  Antisense Oligo
ugacagagcaagacuccau

SEQ ID NO: 48383 - RNA, 19 nt, Artificial Sequence
  Sense Oligo
agucuugcucugucaccag

SEQ ID NO: 48384 - RNA, 19 nt, Artificial Sequence
  Antisense Oligo
cuggugacagagcaagacu

SEQ ID NO: 48385 - RNA, 19 nt, Artificial Sequence
  Sense Oligo
gucuugcucugucaccagg

SEQ ID NO: 48386 - RNA, 19 nt, Artificial Sequence
  Antisense Oligo
ccuggugacagagcaagac

SEQ ID NO: 48387 - RNA, 19 nt, Artificial Sequence
  Sense Oligo
ucuugcucugucaccaggc

SEQ ID NO: 48388 - RNA, 19 nt, Artificial Sequence
  Antisense Oligo
gccuggugacagagcaaga

SEQ ID NO: 48389 - RNA, 19 nt, Artificial Sequence
  Sense Oligo
cuugcucugucaccaggcu

SEQ ID NO: 48390 - RNA, 19 nt, Artificial Sequence
  Antisense Oligo
agccuggugacagagcaag

SEQ ID NO: 48391 - RNA, 19 nt, Artificial Sequence
  Sense Oligo
gucaccaggcuggagugca

SEQ ID NO: 48392 - RNA, 19 nt, Artificial Sequence
  Antisense Oligo
ugcacuccagccuggugac

SEQ ID NO: 48393 - RNA, 19 nt, Artificial Sequence
  Sense Oligo
cucaaucuccuggguucaa

SEQ ID NO: 48394 - RNA, 19 nt, Artificial Sequence
  Antisense Oligo
uugaacccaggagauugag

SEQ ID NO: 48395 - RNA, 19 nt, Artificial Sequence
  Sense Oligo
ucaaucuccuggguucaag

SEQ ID NO: 48396 - RNA, 19 nt, Artificial Sequence
  Antisense Oligo
cuugaacccaggagauuga

SEQ ID NO: 48397 - RNA, 19 nt, Artificial Sequence
  Sense Oligo
caaucuccuggguucaagc

SEQ ID NO: 48398 - RNA, 19 nt, Artificial Sequence
  Antisense Oligo
gcuugaacccaggagauug

SEQ ID NO: 48399 - RNA, 19 nt, Artificial Sequence
  Sense Oligo
aaucuccuggguucaagcg

SEQ ID NO: 48400 - RNA, 19 nt, Artificial Sequence
  Antisense Oligo
cgcuugaacccaggagauu

SEQ ID NO: 48401 - RNA, 19 nt, Artificial Sequence
  Sense Oligo
aucuccuggguucaagcga

SEQ ID NO: 48402 - RNA, 19 nt, Artificial Sequence
  Antisense Oligo
ucgcuugaacccaggagau

SEQ ID NO: 48403 - RNA, 19 nt, Artificial Sequence
  Sense Oligo
ucuccuggguucaagcgau

SEQ ID NO: 48404 - RNA, 19 nt, Artificial Sequence
  Antisense Oligo
aucgcuugaacccaggaga

SEQ ID NO: 48405 - RNA, 19 nt, Artificial Sequence
  Sense Oligo
cuccuggguucaagcgauu

SEQ ID NO: 48406 - RNA, 19 nt, Artificial Sequence
  Antisense Oligo
aaucgcuugaacccaggag

SEQ ID NO: 48407 - RNA, 19 nt, Artificial Sequence
  Sense Oligo
uccuggguucaagcgauuc

SEQ ID NO: 48408 - RNA, 19 nt, Artificial Sequence
  Antisense Oligo
gaaucgcuugaacccagga

SEQ ID NO: 48409 - RNA, 19 nt, Artificial Sequence
  Sense Oligo
ccuggguucaagcgauucu

SEQ ID NO: 48410 - RNA, 19 nt, Artificial Sequence
  Antisense Oligo
agaaucgcuugaacccagg

SEQ ID NO: 48411 - RNA, 19 nt, Artificial Sequence
  Sense Oligo
cuggguucaagcgauucuc

SEQ ID NO: 48412 - RNA, 19 nt, Artificial Sequence
  Antisense Oligo
gagaaucgcuugaacccag

SEQ ID NO: 48413 - RNA, 19 nt, Artificial Sequence
  Sense Oligo
uggguucaagcgauucucc

SEQ ID NO: 48414 - RNA, 19 nt, Artificial Sequence
  Antisense Oligo
ggagaaucgcuugaaccca

SEQ ID NO: 48415 - RNA, 19 nt, Artificial Sequence
  Sense Oligo
ggguucaagcgauucuccu

SEQ ID NO: 48416 - RNA, 19 nt, Artificial Sequence
  Antisense Oligo
aggagaaucgcuugaaccc

SEQ ID NO: 48417 - RNA, 19 nt, Artificial Sequence
  Sense Oligo
gguucaagcgauucuccug

SEQ ID NO: 48418 - RNA, 19 nt, Artificial Sequence
  Antisense Oligo
caggagaaucgcuugaacc

SEQ ID NO: 48419 - RNA, 19 nt, Artificial Sequence
  Sense Oligo
guucaagcgauucuccugc

SEQ ID NO: 48420 - RNA, 19 nt, Artificial Sequence
  Antisense Oligo
gcaggagaaucgcuugaac

SEQ ID NO: 48421 - RNA, 19 nt, Artificial Sequence
  Sense Oligo
uucaagcgauucuccugcc

SEQ ID NO: 48422 - RNA, 19 nt, Artificial Sequence
  Antisense Oligo
ggcaggagaaucgcuugaa

SEQ ID NO: 48423 - RNA, 19 nt, Artificial Sequence
  Sense Oligo
ucaagcgauucuccugccu

SEQ ID NO: 48424 - RNA, 19 nt, Artificial Sequence
  Antisense Oligo
aggcaggagaaucgcuuga

SEQ ID NO: 48425 - RNA, 19 nt, Artificial Sequence
  Sense Oligo
cugccucagccucccaagu

SEQ ID NO: 48426 - RNA, 19 nt, Artificial Sequence
  Antisense Oligo
acuugggaggcugaggcag

SEQ ID NO: 48427 - RNA, 19 nt, Artificial Sequence
  Sense Oligo
ugccucagccucccaagua

SEQ ID NO: 48428 - RNA, 19 nt, Artificial Sequence
  Antisense Oligo
uacuugggaggcugaggca

SEQ ID NO: 48429 - RNA, 19 nt, Artificial Sequence
  Sense Oligo
gccucagccucccaaguag

SEQ ID NO: 48430 - RNA, 19 nt, Artificial Sequence
  Antisense Oligo
cuacuugggaggcugaggc

SEQ ID NO: 48431 - RNA, 19 nt, Artificial Sequence
  Sense Oligo
ccucagccucccaaguagc

SEQ ID NO: 48432 - RNA, 19 nt, Artificial Sequence
  Antisense Oligo
gcuacuugggaggcugagg

SEQ ID NO: 48433 - RNA, 19 nt, Artificial Sequence
  Sense Oligo
cucagccucccaaguagcu

SEQ ID NO: 48434 - RNA, 19 nt, Artificial Sequence
  Antisense Oligo
agcuacuugggaggcugag

SEQ ID NO: 48435 - RNA, 19 nt, Artificial Sequence
  Sense Oligo
agccucccaaguagcuggc

SEQ ID NO: 48436 - RNA, 19 nt, Artificial Sequence
  Antisense Oligo
gccagcuacuugggaggcu

SEQ ID NO: 48437 - RNA, 19 nt, Artificial Sequence
  Sense Oligo
gccucccaaguagcuggca

SEQ ID NO: 48438 - RNA, 19 nt, Artificial Sequence
  Antisense Oligo
ugccagcuacuugggaggc

SEQ ID NO: 48439 - RNA, 19 nt, Artificial Sequence
  Sense Oligo
ccucccaaguagcuggcau

SEQ ID NO: 48440 - RNA, 19 nt, Artificial Sequence
  Antisense Oligo
augccagcuacuugggagg

SEQ ID NO: 48441 - RNA, 19 nt, Artificial Sequence
  Sense Oligo
cgccaccaugcccagcuaa

SEQ ID NO: 48442 - RNA, 19 nt, Artificial Sequence
  Antisense Oligo
uuagcugggcaugguggcg

SEQ ID NO: 48443 - RNA, 19 nt, Artificial Sequence
  Sense Oligo
gccaccaugcccagcuaau

SEQ ID NO: 48444 - RNA, 19 nt, Artificial Sequence
  Antisense Oligo
auuagcugggcaugguggc

SEQ ID NO: 48445 - RNA, 19 nt, Artificial Sequence
  Sense Oligo
ccaccaugcccagcuaauu

SEQ ID NO: 48446 - RNA, 19 nt, Artificial Sequence
  Antisense Oligo
aauuagcugggcauggugg

SEQ ID NO: 48447 - RNA, 19 nt, Artificial Sequence
  Sense Oligo
caccaugcccagcuaauuu

SEQ ID NO: 48448 - RNA, 19 nt, Artificial Sequence
  Antisense Oligo
aaauuagcugggcauggug

SEQ ID NO: 48449 - RNA, 19 nt, Artificial Sequence
  Sense Oligo
accaugcccagcuaauuuu

SEQ ID NO: 48450 - RNA, 19 nt, Artificial Sequence
  Antisense Oligo
aaaauuagcugggcauggu

SEQ ID NO: 48451 - RNA, 19 nt, Artificial Sequence
  Sense Oligo
caccacguuggccuagaug

SEQ ID NO: 48452 - RNA, 19 nt, Artificial Sequence
  Antisense Oligo
caucuaggccaacguggug

SEQ ID NO: 48453 - RNA, 19 nt, Artificial Sequence
  Sense Oligo
accacguuggccuagaugg

SEQ ID NO: 48454 - RNA, 19 nt, Artificial Sequence
  Antisense Oligo
ccaucuaggccaacguggu

SEQ ID NO: 48455 - RNA, 19 nt, Artificial Sequence
  Sense Oligo
uggccuagauggucucaau

SEQ ID NO: 48456 - RNA, 19 nt, Artificial Sequence
  Antisense Oligo
auugagaccaucuaggcca

SEQ ID NO: 48457 - RNA, 19 nt, Artificial Sequence
  Sense Oligo
ggccuagauggucucaauc

SEQ ID NO: 48458 - RNA, 19 nt, Artificial Sequence
  Antisense Oligo
gauugagaccaucuaggcc

SEQ ID NO: 48459 - RNA, 19 nt, Artificial Sequence
  Sense Oligo
gccuagauggucucaaucc

SEQ ID NO: 48460 - RNA, 19 nt, Artificial Sequence
  Antisense Oligo
ggauugagaccaucuaggc

SEQ ID NO: 48461 - RNA, 19 nt, Artificial Sequence
  Sense Oligo
ccuagauggucucaauccg

SEQ ID NO: 48462 - RNA, 19 nt, Artificial Sequence
  Antisense Oligo
cggauugagaccaucuagg

SEQ ID NO: 48463 - RNA, 19 nt, Artificial Sequence
  Sense Oligo
cuagauggucucaauccgu

SEQ ID NO: 48464 - RNA, 19 nt, Artificial Sequence
  Antisense Oligo
acggauugagaccaucuag

SEQ ID NO: 48465 - RNA, 19 nt, Artificial Sequence
  Sense Oligo
uccguugaccucaugaucc

SEQ ID NO: 48466 - RNA, 19 nt, Artificial Sequence
  Antisense Oligo
ggaucaugaggucaacgga

SEQ ID NO: 48467 - RNA, 19 nt, Artificial Sequence
  Sense Oligo
ugaccucaugauccgcucg

SEQ ID NO: 48468 - RNA, 19 nt, Artificial Sequence
  Antisense Oligo
cgagcggaucaugagguca

SEQ ID NO: 48469 - RNA, 19 nt, Artificial Sequence
  Sense Oligo
cccagccucccaaagugcu

SEQ ID NO: 48470 - RNA, 19 nt, Artificial Sequence
  Antisense Oligo
agcacuuugggaggcuggg

SEQ ID NO: 48471 - RNA, 19 nt, Artificial Sequence
  Sense Oligo
ccaaagugcugggauuaca

SEQ ID NO: 48472 - RNA, 19 nt, Artificial Sequence
  Antisense Oligo
uguaaucccagcacuuugg

SEQ ID NO: 48473 - RNA, 19 nt, Artificial Sequence
  Sense Oligo
caaagugcugggauuacag

SEQ ID NO: 48474 - RNA, 19 nt, Artificial Sequence
  Antisense Oligo
cuguaaucccagcacuuug

SEQ ID NO: 48475 - RNA, 19 nt, Artificial Sequence
  Sense Oligo
gugcugggauuacaggugu

SEQ ID NO: 48476 - RNA, 19 nt, Artificial Sequence
  Antisense Oligo
acaccuguaaucccagcac

SEQ ID NO: 48477 - RNA, 19 nt, Artificial Sequence
  Sense Oligo
ugcugggauuacaggugug

SEQ ID NO: 48478 - RNA, 19 nt, Artificial Sequence
  Antisense Oligo
cacaccuguaaucccagca

SEQ ID NO: 48479 - RNA, 19 nt, Artificial Sequence
  Sense Oligo
gcugggauuacagguguga

SEQ ID NO: 48480 - RNA, 19 nt, Artificial Sequence
  Antisense Oligo
ucacaccuguaaucccagc

SEQ ID NO: 48481 - RNA, 19 nt, Artificial Sequence
  Sense Oligo
cacccagcccagucagugu

SEQ ID NO: 48482 - RNA, 19 nt, Artificial Sequence
  Antisense Oligo
acacugacugggcugggug

SEQ ID NO: 48483 - RNA, 19 nt, Artificial Sequence
  Sense Oligo
acccagcccagucagugua

SEQ ID NO: 48484 - RNA, 19 nt, Artificial Sequence
  Antisense Oligo
uacacugacugggcugggu

SEQ ID NO: 48485 - RNA, 19 nt, Artificial Sequence
  Sense Oligo
cccagcccagucaguguau

SEQ ID NO: 48486 - RNA, 19 nt, Artificial Sequence
  Antisense Oligo
auacacugacugggcuggg

SEQ ID NO: 48487 - RNA, 19 nt, Artificial Sequence
  Sense Oligo
ccagcccagucaguguauu

SEQ ID NO: 48488 - RNA, 19 nt, Artificial Sequence
  Antisense Oligo
aauacacugacugggcugg

SEQ ID NO: 48489 - RNA, 19 nt, Artificial Sequence
  Sense Oligo
cagcccagucaguguauuu

SEQ ID NO: 48490 - RNA, 19 nt, Artificial Sequence
  Antisense Oligo
aaauacacugacugggcug

SEQ ID NO: 48491 - RNA, 19 nt, Artificial Sequence
  Sense Oligo
agcccagucaguguauuua

SEQ ID NO: 48492 - RNA, 19 nt, Artificial Sequence
  Antisense Oligo
uaaauacacugacugggcu

SEQ ID NO: 48493 - RNA, 19 nt, Artificial Sequence
  Sense Oligo
gcccagucaguguauuuau

SEQ ID NO: 48494 - RNA, 19 nt, Artificial Sequence
  Antisense Oligo
auaaauacacugacugggc

SEQ ID NO: 48495 - RNA, 19 nt, Artificial Sequence
  Sense Oligo
cccagucaguguauuuauu

SEQ ID NO: 48496 - RNA, 19 nt, Artificial Sequence
  Antisense Oligo
aauaaauacacugacuggg

SEQ ID NO: 48497 - RNA, 19 nt, Artificial Sequence
  Sense Oligo
ccagucaguguauuuauuu

SEQ ID NO: 48498 - RNA, 19 nt, Artificial Sequence
  Antisense Oligo
aaauaaauacacugacugg

SEQ ID NO: 48499 - RNA, 19 nt, Artificial Sequence
  Sense Oligo
aacuguuucucauuugguu

SEQ ID NO: 48500 - RNA, 19 nt, Artificial Sequence
  Antisense Oligo
aaccaaaugagaaacaguu

SEQ ID NO: 48501 - RNA, 19 nt, Artificial Sequence
  Sense Oligo
acuguuucucauuugguuc

SEQ ID NO: 48502 - RNA, 19 nt, Artificial Sequence
  Antisense Oligo
gaaccaaaugagaaacagu

SEQ ID NO: 48503 - RNA, 19 nt, Artificial Sequence
  Sense Oligo
cuguuucucauuugguucu

SEQ ID NO: 48504 - RNA, 19 nt, Artificial Sequence
  Antisense Oligo
agaaccaaaugagaaacag

SEQ ID NO: 48505 - RNA, 19 nt, Artificial Sequence
  Sense Oligo
guuucucauuugguucugu

SEQ ID NO: 48506 - RNA, 19 nt, Artificial Sequence
  Antisense Oligo
acagaaccaaaugagaaac

SEQ ID NO: 48507 - RNA, 19 nt, Artificial Sequence
  Sense Oligo
uuucucauuugguucugug

SEQ ID NO: 48508 - RNA, 19 nt, Artificial Sequence
  Antisense Oligo
cacagaaccaaaugagaaa

SEQ ID NO: 48509 - RNA, 19 nt, Artificial Sequence
  Sense Oligo
uucucauuugguucugugu

SEQ ID NO: 48510 - RNA, 19 nt, Artificial Sequence
  Antisense Oligo
acacagaaccaaaugagaa

SEQ ID NO: 48511 - RNA, 19 nt, Artificial Sequence
  Sense Oligo
ucucauuugguucuguguu

SEQ ID NO: 48512 - RNA, 19 nt, Artificial Sequence
  Antisense Oligo
aacacagaaccaaaugaga

SEQ ID NO: 48513 - RNA, 19 nt, Artificial Sequence
  Sense Oligo
cucauuugguucuguguug

SEQ ID NO: 48514 - RNA, 19 nt, Artificial Sequence
  Antisense Oligo
caacacagaaccaaaugag

SEQ ID NO: 48515 - RNA, 19 nt, Artificial Sequence
  Sense Oligo
ucauuugguucuguguugu

SEQ ID NO: 48516 - RNA, 19 nt, Artificial Sequence
  Antisense Oligo
acaacacagaaccaaauga

SEQ ID NO: 48517 - RNA, 19 nt, Artificial Sequence
  Sense Oligo
cauuugguucuguguugua

SEQ ID NO: 48518 - RNA, 19 nt, Artificial Sequence
  Antisense Oligo
uacaacacagaaccaaaug

SEQ ID NO: 48519 - RNA, 19 nt, Artificial Sequence
  Sense Oligo
uuauuguuaaccucaagag

SEQ ID NO: 48520 - RNA, 19 nt, Artificial Sequence
  Antisense Oligo
cucuugagguuaacaauaa

SEQ ID NO: 48521 - RNA, 19 nt, Artificial Sequence
  Sense Oligo
uauuguuaaccucaagagg

SEQ ID NO: 48522 - RNA, 19 nt, Artificial Sequence
  Antisense Oligo
ccucuugagguuaacaaua

SEQ ID NO: 48523 - RNA, 19 nt, Artificial Sequence
  Sense Oligo
auuguuaaccucaagagga

SEQ ID NO: 48524 - RNA, 19 nt, Artificial Sequence
  Antisense Oligo
uccucuugagguuaacaau

SEQ ID NO: 48525 - RNA, 19 nt, Artificial Sequence
  Sense Oligo
uuguuaaccucaagaggau

SEQ ID NO: 48526 - RNA, 19 nt, Artificial Sequence
  Antisense Oligo
auccucuugagguuaacaa

SEQ ID NO: 48527 - RNA, 19 nt, Artificial Sequence
  Sense Oligo
uguuaaccucaagaggauu

SEQ ID NO: 48528 - RNA, 19 nt, Artificial Sequence
  Antisense Oligo
aauccucuugagguuaaca

SEQ ID NO: 48529 - RNA, 19 nt, Artificial Sequence
  Sense Oligo
guuaaccucaagaggauuc

SEQ ID NO: 48530 - RNA, 19 nt, Artificial Sequence
  Antisense Oligo
gaauccucuugagguuaac

SEQ ID NO: 48531 - RNA, 19 nt, Artificial Sequence
  Sense Oligo
uuaaccucaagaggauucu

SEQ ID NO: 48532 - RNA, 19 nt, Artificial Sequence
  Antisense Oligo
agaauccucuugagguuaa

SEQ ID NO: 48533 - RNA, 19 nt, Artificial Sequence
  Sense Oligo
agaggauucuuuccagaug

SEQ ID NO: 48534 - RNA, 19 nt, Artificial Sequence
  Antisense Oligo
caucuggaaagaauccucu

SEQ ID NO: 48535 - RNA, 19 nt, Artificial Sequence
  Sense Oligo
aggauucuuuccagaugca

SEQ ID NO: 48536 - RNA, 19 nt, Artificial Sequence
  Antisense Oligo
ugcaucuggaaagaauccu

SEQ ID NO: 48537 - RNA, 19 nt, Artificial Sequence
  Sense Oligo
cuuuccagaugcaauuaga

SEQ ID NO: 48538 - RNA, 19 nt, Artificial Sequence
  Antisense Oligo
ucuaauugcaucuggaaag

SEQ ID NO: 48539 - RNA, 19 nt, Artificial Sequence
  Sense Oligo
uuuccagaugcaauuagau

SEQ ID NO: 48540 - RNA, 19 nt, Artificial Sequence
  Antisense Oligo
aucuaauugcaucuggaaa

SEQ ID NO: 48541 - RNA, 19 nt, Artificial Sequence
  Sense Oligo
uuccagaugcaauuagauu

SEQ ID NO: 48542 - RNA, 19 nt, Artificial Sequence
  Antisense Oligo
aaucuaauugcaucuggaa

SEQ ID NO: 48543 - RNA, 19 nt, Artificial Sequence
  Sense Oligo
uccagaugcaauuagauuu

SEQ ID NO: 48544 - RNA, 19 nt, Artificial Sequence
  Antisense Oligo
aaaucuaauugcaucugga

SEQ ID NO: 48545 - RNA, 19 nt, Artificial Sequence
  Sense Oligo
ccagaugcaauuagauuuc

SEQ ID NO: 48546 - RNA, 19 nt, Artificial Sequence
  Antisense Oligo
gaaaucuaauugcaucugg

SEQ ID NO: 48547 - RNA, 19 nt, Artificial Sequence
  Sense Oligo
cagaugcaauuagauuucu

SEQ ID NO: 48548 - RNA, 19 nt, Artificial Sequence
  Antisense Oligo
agaaaucuaauugcaucug

SEQ ID NO: 48549 - RNA, 19 nt, Artificial Sequence
  Sense Oligo
ugcaauuagauuucuuacc

SEQ ID NO: 48550 - RNA, 19 nt, Artificial Sequence
  Antisense Oligo
gguaagaaaucuaauugca

SEQ ID NO: 48551 - RNA, 19 nt, Artificial Sequence
  Sense Oligo
gcaauuagauuucuuacca

SEQ ID NO: 48552 - RNA, 19 nt, Artificial Sequence
  Antisense Oligo
ugguaagaaaucuaauugc

SEQ ID NO: 48553 - RNA, 19 nt, Artificial Sequence
  Sense Oligo
caauuagauuucuuaccac

SEQ ID NO: 48554 - RNA, 19 nt, Artificial Sequence
  Antisense Oligo
gugguaagaaaucuaauug

SEQ ID NO: 48555 - RNA, 19 nt, Artificial Sequence
  Sense Oligo
agauuucuuaccacugauu

SEQ ID NO: 48556 - RNA, 19 nt, Artificial Sequence
  Antisense Oligo
aaucagugguaagaaaucu

SEQ ID NO: 48557 - RNA, 19 nt, Artificial Sequence
  Sense Oligo
auuucuuaccacugauuac

SEQ ID NO: 48558 - RNA, 19 nt, Artificial Sequence
  Antisense Oligo
guaaucagugguaagaaau

SEQ ID NO: 48559 - RNA, 19 nt, Artificial Sequence
  Sense Oligo
uuucuuaccacugauuacc

SEQ ID NO: 48560 - RNA, 19 nt, Artificial Sequence
  Antisense Oligo
gguaaucagugguaagaaa

SEQ ID NO: 48561 - RNA, 19 nt, Artificial Sequence
  Sense Oligo
cuuaccacugauuaccaug

SEQ ID NO: 48562 - RNA, 19 nt, Artificial Sequence
  Antisense Oligo
caugguaaucagugguaag

SEQ ID NO: 48563 - RNA, 19 nt, Artificial Sequence
  Sense Oligo
uuaccacugauuaccauga

SEQ ID NO: 48564 - RNA, 19 nt, Artificial Sequence
  Antisense Oligo
ucaugguaaucagugguaa

SEQ ID NO: 48565 - RNA, 19 nt, Artificial Sequence
  Sense Oligo
uaccacugauuaccaugaa

SEQ ID NO: 48566 - RNA, 19 nt, Artificial Sequence
  Antisense Oligo
uucaugguaaucaguggua

SEQ ID NO: 48567 - RNA, 19 nt, Artificial Sequence
  Sense Oligo
ucuccuggacugacucuag

SEQ ID NO: 48568 - RNA, 19 nt, Artificial Sequence
  Antisense Oligo
cuagagucaguccaggaga

SEQ ID NO: 48569 - RNA, 19 nt, Artificial Sequence
  Sense Oligo
cuccuggacugacucuagg

SEQ ID NO: 48570 - RNA, 19 nt, Artificial Sequence
  Antisense Oligo
ccuagagucaguccaggag

SEQ ID NO: 48571 - RNA, 19 nt, Artificial Sequence
  Sense Oligo
uccuggacugacucuaggc

SEQ ID NO: 48572 - RNA, 19 nt, Artificial Sequence
  Antisense Oligo
gccuagagucaguccagga

SEQ ID NO: 48573 - RNA, 19 nt, Artificial Sequence
  Sense Oligo
ccuggacugacucuaggca

SEQ ID NO: 48574 - RNA, 19 nt, Artificial Sequence
  Antisense Oligo
ugccuagagucaguccagg

SEQ ID NO: 48575 - RNA, 19 nt, Artificial Sequence
  Sense Oligo
cuggacugacucuaggcaa

SEQ ID NO: 48576 - RNA, 19 nt, Artificial Sequence
  Antisense Oligo
uugccuagagucaguccag

SEQ ID NO: 48577 - RNA, 19 nt, Artificial Sequence
  Sense Oligo
uggacugacucuaggcaag

SEQ ID NO: 48578 - RNA, 19 nt, Artificial Sequence
  Antisense Oligo
cuugccuagagucagucca

SEQ ID NO: 48579 - RNA, 19 nt, Artificial Sequence
  Sense Oligo
ggacugacucuaggcaagc

SEQ ID NO: 48580 - RNA, 19 nt, Artificial Sequence
  Antisense Oligo
gcuugccuagagucagucc

SEQ ID NO: 48581 - RNA, 19 nt, Artificial Sequence
  Sense Oligo
gacugacucuaggcaagcu

SEQ ID NO: 48582 - RNA, 19 nt, Artificial Sequence
  Antisense Oligo
agcuugccuagagucaguc

SEQ ID NO: 48583 - RNA, 19 nt, Artificial Sequence
  Sense Oligo
cuaggcaagcuccucaccu

SEQ ID NO: 48584 - RNA, 19 nt, Artificial Sequence
  Antisense Oligo
aggugaggagcuugccuag

SEQ ID NO: 48585 - RNA, 19 nt, Artificial Sequence
  Sense Oligo
uaggcaagcuccucaccuc

SEQ ID NO: 48586 - RNA, 19 nt, Artificial Sequence
  Antisense Oligo
gaggugaggagcuugccua

SEQ ID NO: 48587 - RNA, 19 nt, Artificial Sequence
  Sense Oligo
aggcaagcuccucaccucu

SEQ ID NO: 48588 - RNA, 19 nt, Artificial Sequence
  Antisense Oligo
agaggugaggagcuugccu

SEQ ID NO: 48589 - RNA, 19 nt, Artificial Sequence
  Sense Oligo
ggcaagcuccucaccucuu

SEQ ID NO: 48590 - RNA, 19 nt, Artificial Sequence
  Antisense Oligo
aagaggugaggagcuugcc

SEQ ID NO: 48591 - RNA, 19 nt, Artificial Sequence
  Sense Oligo
gcaagcuccucaccucuua

SEQ ID NO: 48592 - RNA, 19 nt, Artificial Sequence
  Antisense Oligo
uaagaggugaggagcuugc

SEQ ID NO: 48593 - RNA, 19 nt, Artificial Sequence
  Sense Oligo
caagcuccucaccucuuag

SEQ ID NO: 48594 - RNA, 19 nt, Artificial Sequence
  Antisense Oligo
cuaagaggugaggagcuug

SEQ ID NO: 48595 - RNA, 19 nt, Artificial Sequence
  Sense Oligo
aagcuccucaccucuuagc

SEQ ID NO: 48596 - RNA, 19 nt, Artificial Sequence
  Antisense Oligo
gcuaagaggugaggagcuu

SEQ ID NO: 48597 - RNA, 19 nt, Artificial Sequence
  Sense Oligo
agcuccucaccucuuagca

SEQ ID NO: 48598 - RNA, 19 nt, Artificial Sequence
  Antisense Oligo
ugcuaagaggugaggagcu

SEQ ID NO: 48599 - RNA, 19 nt, Artificial Sequence
  Sense Oligo
gcuccucaccucuuagcau

SEQ ID NO: 48600 - RNA, 19 nt, Artificial Sequence
  Antisense Oligo
augcuaagaggugaggagc

SEQ ID NO: 48601 - RNA, 19 nt, Artificial Sequence
  Sense Oligo
cuccucaccucuuagcaug

SEQ ID NO: 48602 - RNA, 19 nt, Artificial Sequence
  Antisense Oligo
caugcuaagaggugaggag

SEQ ID NO: 48603 - RNA, 19 nt, Artificial Sequence
  Sense Oligo
uccucaccucuuagcaugu

SEQ ID NO: 48604 - RNA, 19 nt, Artificial Sequence
  Antisense Oligo
acaugcuaagaggugagga

SEQ ID NO: 48605 - RNA, 19 nt, Artificial Sequence
  Sense Oligo
ccucaccucuuagcaugua

SEQ ID NO: 48606 - RNA, 19 nt, Artificial Sequence
  Antisense Oligo
uacaugcuaagaggugagg

SEQ ID NO: 48607 - RNA, 19 nt, Artificial Sequence
  Sense Oligo
cucaccucuuagcauguag

SEQ ID NO: 48608 - RNA, 19 nt, Artificial Sequence
  Antisense Oligo
cuacaugcuaagaggugag

SEQ ID NO: 48609 - RNA, 19 nt, Artificial Sequence
  Sense Oligo
ucaccucuuagcauguagg

SEQ ID NO: 48610 - RNA, 19 nt, Artificial Sequence
  Antisense Oligo
ccuacaugcuaagagguga

SEQ ID NO: 48611 - RNA, 19 nt, Artificial Sequence
  Sense Oligo
cuuagcauguaggucacac

SEQ ID NO: 48612 - RNA, 19 nt, Artificial Sequence
  Antisense Oligo
gugugaccuacaugcuaag

SEQ ID NO: 48613 - RNA, 19 nt, Artificial Sequence
  Sense Oligo
uuagcauguaggucacacg

SEQ ID NO: 48614 - RNA, 19 nt, Artificial Sequence
  Antisense Oligo
cgugugaccuacaugcuaa

SEQ ID NO: 48615 - RNA, 19 nt, Artificial Sequence
  Sense Oligo
uagcauguaggucacacgg

SEQ ID NO: 48616 - RNA, 19 nt, Artificial Sequence
  Antisense Oligo
ccgugugaccuacaugcua

SEQ ID NO: 48617 - RNA, 19 nt, Artificial Sequence
  Sense Oligo
agcauguaggucacacggc

SEQ ID NO: 48618 - RNA, 19 nt, Artificial Sequence
  Antisense Oligo
gccgugugaccuacaugcu

SEQ ID NO: 48619 - RNA, 19 nt, Artificial Sequence
  Sense Oligo
gcauguaggucacacggcg

SEQ ID NO: 48620 - RNA, 19 nt, Artificial Sequence
  Antisense Oligo
cgccgugugaccuacaugc

SEQ ID NO: 48621 - RNA, 19 nt, Artificial Sequence
  Sense Oligo
cauguaggucacacggcgu

SEQ ID NO: 48622 - RNA, 19 nt, Artificial Sequence
  Antisense Oligo
acgccgugugaccuacaug

SEQ ID NO: 48623 - RNA, 19 nt, Artificial Sequence
  Sense Oligo
auguaggucacacggcgug

SEQ ID NO: 48624 - RNA, 19 nt, Artificial Sequence
  Antisense Oligo
cacgccgugugaccuacau

SEQ ID NO: 48625 - RNA, 19 nt, Artificial Sequence
  Sense Oligo
uguaggucacacggcgugg

SEQ ID NO: 48626 - RNA, 19 nt, Artificial Sequence
  Antisense Oligo
ccacgccgugugaccuaca

SEQ ID NO: 48627 - RNA, 19 nt, Artificial Sequence
  Sense Oligo
guaggucacacggcgugga

SEQ ID NO: 48628 - RNA, 19 nt, Artificial Sequence
  Antisense Oligo
uccacgccgugugaccuac

SEQ ID NO: 48629 - RNA, 19 nt, Artificial Sequence
  Sense Oligo
uaggucacacggcguggag

SEQ ID NO: 48630 - RNA, 19 nt, Artificial Sequence
  Antisense Oligo
cuccacgccgugugaccua

SEQ ID NO: 48631 - RNA, 19 nt, Artificial Sequence
  Sense Oligo
acucccgacucccgacaga

SEQ ID NO: 48632 - RNA, 19 nt, Artificial Sequence
  Antisense Oligo
ucugucgggagucgggagu

SEQ ID NO: 48633 - RNA, 19 nt, Artificial Sequence
  Sense Oligo
ucccgacucccgacagaca

SEQ ID NO: 48634 - RNA, 19 nt, Artificial Sequence
  Antisense Oligo
ugucugucgggagucggga

SEQ ID NO: 48635 - RNA, 19 nt, Artificial Sequence
  Sense Oligo
ccgacucccgacagacacu

SEQ ID NO: 48636 - RNA, 19 nt, Artificial Sequence
  Antisense Oligo
agugucugucgggagucgg

SEQ ID NO: 48637 - RNA, 19 nt, Artificial Sequence
  Sense Oligo
cgacucccgacagacacug

SEQ ID NO: 48638 - RNA, 19 nt, Artificial Sequence
  Antisense Oligo
cagugucugucgggagucg

SEQ ID NO: 48639 - RNA, 19 nt, Artificial Sequence
  Sense Oligo
aacgcaccgauacgccugu

SEQ ID NO: 48640 - RNA, 19 nt, Artificial Sequence
  Antisense Oligo
acaggcguaucggugcguu

SEQ ID NO: 48641 - RNA, 19 nt, Artificial Sequence
  Sense Oligo
acgcaccgauacgccuguu

SEQ ID NO: 48642 - RNA, 19 nt, Artificial Sequence
  Antisense Oligo
aacaggcguaucggugcgu

SEQ ID NO: 48643 - RNA, 19 nt, Artificial Sequence
  Sense Oligo
cgcaccgauacgccuguuu

SEQ ID NO: 48644 - RNA, 19 nt, Artificial Sequence
  Antisense Oligo
aaacaggcguaucggugcg

SEQ ID NO: 48645 - RNA, 19 nt, Artificial Sequence
  Sense Oligo
gcaccgauacgccuguuug

SEQ ID NO: 48646 - RNA, 19 nt, Artificial Sequence
  Antisense Oligo
caaacaggcguaucggugc

SEQ ID NO: 48647 - RNA, 19 nt, Artificial Sequence
  Sense Oligo
caccgauacgccuguuugg

SEQ ID NO: 48648 - RNA, 19 nt, Artificial Sequence
  Antisense Oligo
ccaaacaggcguaucggug

SEQ ID NO: 48649 - RNA, 19 nt, Artificial Sequence
  Sense Oligo
accgauacgccuguuuggc

SEQ ID NO: 48650 - RNA, 19 nt, Artificial Sequence
  Antisense Oligo
gccaaacaggcguaucggu

SEQ ID NO: 48651 - RNA, 19 nt, Artificial Sequence
  Sense Oligo
ggacuaucuucagaucucu

SEQ ID NO: 48652 - RNA, 19 nt, Artificial Sequence
  Antisense Oligo
agagaucugaagauagucc

SEQ ID NO: 48653 - RNA, 19 nt, Artificial Sequence
  Sense Oligo
gacuaucuucagaucucuu

SEQ ID NO: 48654 - RNA, 19 nt, Artificial Sequence
  Antisense Oligo
aagagaucugaagauaguc

SEQ ID NO: 48655 - RNA, 19 nt, Artificial Sequence
  Sense Oligo
acuaucuucagaucucuuu

SEQ ID NO: 48656 - RNA, 19 nt, Artificial Sequence
  Antisense Oligo
aaagagaucugaagauagu

SEQ ID NO: 48657 - RNA, 19 nt, Artificial Sequence
  Sense Oligo
cuaucuucagaucucuuuu

SEQ ID NO: 48658 - RNA, 19 nt, Artificial Sequence
  Antisense Oligo
aaaagagaucugaagauag

SEQ ID NO: 48659 - RNA, 19 nt, Artificial Sequence
  Sense Oligo
uuuuccaaggaauggucac

SEQ ID NO: 48660 - RNA, 19 nt, Artificial Sequence
  Antisense Oligo
gugaccauuccuuggaaaa

SEQ ID NO: 48661 - RNA, 19 nt, Artificial Sequence
  Sense Oligo
uuuccaaggaauggucacc

SEQ ID NO: 48662 - RNA, 19 nt, Artificial Sequence
  Antisense Oligo
ggugaccauuccuuggaaa

SEQ ID NO: 48663 - RNA, 19 nt, Artificial Sequence
  Sense Oligo
uccaaggaauggucaccag

SEQ ID NO: 48664 - RNA, 19 nt, Artificial Sequence
  Antisense Oligo
cuggugaccauuccuugga

SEQ ID NO: 48665 - RNA, 19 nt, Artificial Sequence
  Sense Oligo
aggaauggucaccagcuau

SEQ ID NO: 48666 - RNA, 19 nt, Artificial Sequence
  Antisense Oligo
auagcuggugaccauuccu

SEQ ID NO: 48667 - RNA, 19 nt, Artificial Sequence
  Sense Oligo
ggaauggucaccagcuauu

SEQ ID NO: 48668 - RNA, 19 nt, Artificial Sequence
  Antisense Oligo
aauagcuggugaccauucc

SEQ ID NO: 48669 - RNA, 19 nt, Artificial Sequence
  Sense Oligo
gaauggucaccagcuauuu

SEQ ID NO: 48670 - RNA, 19 nt, Artificial Sequence
  Antisense Oligo
aaauagcuggugaccauuc

SEQ ID NO: 48671 - RNA, 19 nt, Artificial Sequence
  Sense Oligo
aauggucaccagcuauuua

SEQ ID NO: 48672 - RNA, 19 nt, Artificial Sequence
  Antisense Oligo
uaaauagcuggugaccauu

SEQ ID NO: 48673 - RNA, 19 nt, Artificial Sequence
  Sense Oligo
uggucaccagcuauuuaug

SEQ ID NO: 48674 - RNA, 19 nt, Artificial Sequence
  Antisense Oligo
cauaaauagcuggugacca

SEQ ID NO: 48675 - RNA, 19 nt, Artificial Sequence
  Sense Oligo
ggucaccagcuauuuauga

SEQ ID NO: 48676 - RNA, 19 nt, Artificial Sequence
  Antisense Oligo
ucauaaauagcuggugacc

SEQ ID NO: 48677 - RNA, 19 nt, Artificial Sequence
  Sense Oligo
aaaaguugguauuccagaa

SEQ ID NO: 48678 - RNA, 19 nt, Artificial Sequence
  Antisense Oligo
uucuggaauaccaacuuuu

SEQ ID NO: 48679 - RNA, 19 nt, Artificial Sequence
  Sense Oligo
uacuugaauaauuucgugg

SEQ ID NO: 48680 - RNA, 19 nt, Artificial Sequence
  Antisense Oligo
ccacgaaauuauucaagua

SEQ ID NO: 48681 - RNA, 19 nt, Artificial Sequence
  Sense Oligo
cuugaauaauuucguggag

SEQ ID NO: 48682 - RNA, 19 nt, Artificial Sequence
  Antisense Oligo
cuccacgaaauuauucaag

SEQ ID NO: 48683 - RNA, 19 nt, Artificial Sequence
  Sense Oligo
gcagaccuugccagugucc

SEQ ID NO: 48684 - RNA, 19 nt, Artificial Sequence
  Antisense Oligo
ggacacuggcaaggucugc

SEQ ID NO: 48685 - RNA, 19 nt, Artificial Sequence
  Sense Oligo
uccuucccacgcuggccau

SEQ ID NO: 48686 - RNA, 19 nt, Artificial Sequence
  Antisense Oligo
auggccagcgugggaagga

SEQ ID NO: 48687 - RNA, 19 nt, Artificial Sequence
  Sense Oligo
ccuucccacgcuggccauu

SEQ ID NO: 48688 - RNA, 19 nt, Artificial Sequence
  Antisense Oligo
aauggccagcgugggaagg

SEQ ID NO: 48689 - RNA, 19 nt, Artificial Sequence
  Sense Oligo
cuucccacgcuggccauug

SEQ ID NO: 48690 - RNA, 19 nt, Artificial Sequence
  Antisense Oligo
caauggccagcgugggaag

SEQ ID NO: 48691 - RNA, 19 nt, Artificial Sequence
  Sense Oligo
uucccacgcuggccauugc

SEQ ID NO: 48692 - RNA, 19 nt, Artificial Sequence
  Antisense Oligo
gcaauggccagcgugggaa

SEQ ID NO: 48693 - RNA, 19 nt, Artificial Sequence
  Sense Oligo
ucccacgcuggccauugca

SEQ ID NO: 48694 - RNA, 19 nt, Artificial Sequence
  Antisense Oligo
ugcaauggccagcguggga

SEQ ID NO: 48695 - RNA, 19 nt, Artificial Sequence
  Sense Oligo
cacgcuggccauugcaggu

SEQ ID NO: 48696 - RNA, 19 nt, Artificial Sequence
  Antisense Oligo
accugcaauggccagcgug

SEQ ID NO: 48697 - RNA, 19 nt, Artificial Sequence
  Sense Oligo
acgcuggccauugcagguc

SEQ ID NO: 48698 - RNA, 19 nt, Artificial Sequence
  Antisense Oligo
gaccugcaauggccagcgu

SEQ ID NO: 48699 - RNA, 19 nt, Artificial Sequence
  Sense Oligo
cgcuggccauugcaggucu

SEQ ID NO: 48700 - RNA, 19 nt, Artificial Sequence
  Antisense Oligo
agaccugcaauggccagcg

SEQ ID NO: 48701 - RNA, 19 nt, Artificial Sequence
  Sense Oligo
gcuggccauugcaggucuu

SEQ ID NO: 48702 - RNA, 19 nt, Artificial Sequence
  Antisense Oligo
aagaccugcaauggccagc

SEQ ID NO: 48703 - RNA, 19 nt, Artificial Sequence
  Sense Oligo
gccauugcaggucuuaccg

SEQ ID NO: 48704 - RNA, 19 nt, Artificial Sequence
  Antisense Oligo
cgguaagaccugcaauggc

SEQ ID NO: 48705 - RNA, 19 nt, Artificial Sequence
  Sense Oligo
ccauugcaggucuuaccgu

SEQ ID NO: 48706 - RNA, 19 nt, Artificial Sequence
  Antisense Oligo
acgguaagaccugcaaugg

SEQ ID NO: 48707 - RNA, 19 nt, Artificial Sequence
  Sense Oligo
cauugcaggucuuaccguu

SEQ ID NO: 48708 - RNA, 19 nt, Artificial Sequence
  Antisense Oligo
aacgguaagaccugcaaug

SEQ ID NO: 48709 - RNA, 19 nt, Artificial Sequence
  Sense Oligo
auugcaggucuuaccguug

SEQ ID NO: 48710 - RNA, 19 nt, Artificial Sequence
  Antisense Oligo
caacgguaagaccugcaau

SEQ ID NO: 48711 - RNA, 19 nt, Artificial Sequence
  Sense Oligo
uugcaggucuuaccguugc

SEQ ID NO: 48712 - RNA, 19 nt, Artificial Sequence
  Antisense Oligo
gcaacgguaagaccugcaa

SEQ ID NO: 48713 - RNA, 19 nt, Artificial Sequence
  Sense Oligo
ugcaggucuuaccguugcu

SEQ ID NO: 48714 - RNA, 19 nt, Artificial Sequence
  Antisense Oligo
agcaacgguaagaccugca

SEQ ID NO: 48715 - RNA, 19 nt, Artificial Sequence
  Sense Oligo
gcaggucuuaccguugcug

SEQ ID NO: 48716 - RNA, 19 nt, Artificial Sequence
  Antisense Oligo
cagcaacgguaagaccugc

SEQ ID NO: 48717 - RNA, 19 nt, Artificial Sequence
  Sense Oligo
ucuuaccguugcugcuuau

SEQ ID NO: 48718 - RNA, 19 nt, Artificial Sequence
  Antisense Oligo
auaagcagcaacgguaaga

SEQ ID NO: 48719 - RNA, 19 nt, Artificial Sequence
  Sense Oligo
cuuaccguugcugcuuaug

SEQ ID NO: 48720 - RNA, 19 nt, Artificial Sequence
  Antisense Oligo
cauaagcagcaacgguaag

SEQ ID NO: 48721 - RNA, 19 nt, Artificial Sequence
  Sense Oligo
uuaccguugcugcuuaugg

SEQ ID NO: 48722 - RNA, 19 nt, Artificial Sequence
  Antisense Oligo
ccauaagcagcaacgguaa

SEQ ID NO: 48723 - RNA, 19 nt, Artificial Sequence
  Sense Oligo
uaccguugcugcuuauggu

SEQ ID NO: 48724 - RNA, 19 nt, Artificial Sequence
  Antisense Oligo
accauaagcagcaacggua

SEQ ID NO: 48725 - RNA, 19 nt, Artificial Sequence
  Sense Oligo
accguugcugcuuauggug

SEQ ID NO: 48726 - RNA, 19 nt, Artificial Sequence
  Antisense Oligo
caccauaagcagcaacggu

SEQ ID NO: 48727 - RNA, 19 nt, Artificial Sequence
  Sense Oligo
ccguugcugcuuaugguga

SEQ ID NO: 48728 - RNA, 19 nt, Artificial Sequence
  Antisense Oligo
ucaccauaagcagcaacgg

SEQ ID NO: 48729 - RNA, 19 nt, Artificial Sequence
  Sense Oligo
cguugcugcuuauggugaa

SEQ ID NO: 48730 - RNA, 19 nt, Artificial Sequence
  Antisense Oligo
uucaccauaagcagcaacg

SEQ ID NO: 48731 - RNA, 19 nt, Artificial Sequence
  Sense Oligo
guugcugcuuauggugaag

SEQ ID NO: 48732 - RNA, 19 nt, Artificial Sequence
  Antisense Oligo
cuucaccauaagcagcaac

SEQ ID NO: 48733 - RNA, 19 nt, Artificial Sequence
  Sense Oligo
uauggugaagcugucgaug

SEQ ID NO: 48734 - RNA, 19 nt, Artificial Sequence
  Antisense Oligo
caucgacagcuucaccaua

SEQ ID NO: 48735 - RNA, 19 nt, Artificial Sequence
  Sense Oligo
aaucgggucguguauagua

SEQ ID NO: 48736 - RNA, 19 nt, Artificial Sequence
  Antisense Oligo
uacuauacacgacccgauu

SEQ ID NO: 48737 - RNA, 19 nt, Artificial Sequence
  Sense Oligo
aucgggucguguauaguau

SEQ ID NO: 48738 - RNA, 19 nt, Artificial Sequence
  Antisense Oligo
auacuauacacgacccgau

SEQ ID NO: 48739 - RNA, 19 nt, Artificial Sequence
  Sense Oligo
ucgggucguguauaguauc

SEQ ID NO: 48740 - RNA, 19 nt, Artificial Sequence
  Antisense Oligo
gauacuauacacgacccga

SEQ ID NO: 48741 - RNA, 19 nt, Artificial Sequence
  Sense Oligo
cgggucguguauaguaucg

SEQ ID NO: 48742 - RNA, 19 nt, Artificial Sequence
  Antisense Oligo
cgauacuauacacgacccg

SEQ ID NO: 48743 - RNA, 19 nt, Artificial Sequence
  Sense Oligo
gggucguguauaguaucgg

SEQ ID NO: 48744 - RNA, 19 nt, Artificial Sequence
  Antisense Oligo
ccgauacuauacacgaccc

SEQ ID NO: 48745 - RNA, 19 nt, Artificial Sequence
  Sense Oligo
ggucguguauaguaucggg

SEQ ID NO: 48746 - RNA, 19 nt, Artificial Sequence
  Antisense Oligo
cccgauacuauacacgacc

SEQ ID NO: 48747 - RNA, 19 nt, Artificial Sequence
  Sense Oligo
gucguguauaguaucgggu

SEQ ID NO: 48748 - RNA, 19 nt, Artificial Sequence
  Antisense Oligo
acccgauacuauacacgac

SEQ ID NO: 48749 - RNA, 19 nt, Artificial Sequence
  Sense Oligo
ucguguauaguaucggguu

SEQ ID NO: 48750 - RNA, 19 nt, Artificial Sequence
  Antisense Oligo
aacccgauacuauacacga

SEQ ID NO: 48751 - RNA, 19 nt, Artificial Sequence
  Sense Oligo
cguguauaguaucggguug

SEQ ID NO: 48752 - RNA, 19 nt, Artificial Sequence
  Antisense Oligo
caacccgauacuauacacg

SEQ ID NO: 48753 - RNA, 19 nt, Artificial Sequence
  Sense Oligo
guguauaguaucggguugg

SEQ ID NO: 48754 - RNA, 19 nt, Artificial Sequence
  Antisense Oligo
ccaacccgauacuauacac

SEQ ID NO: 48755 - RNA, 19 nt, Artificial Sequence
  Sense Oligo
uguauaguaucggguuggg

SEQ ID NO: 48756 - RNA, 19 nt, Artificial Sequence
  Antisense Oligo
cccaacccgauacuauaca

SEQ ID NO: 48757 - RNA, 19 nt, Artificial Sequence
  Sense Oligo
guauaguaucggguugggu

SEQ ID NO: 48758 - RNA, 19 nt, Artificial Sequence
  Antisense Oligo
acccaacccgauacuauac

SEQ ID NO: 48759 - RNA, 19 nt, Artificial Sequence
  Sense Oligo
uauaguaucggguugggug

SEQ ID NO: 48760 - RNA, 19 nt, Artificial Sequence
  Antisense Oligo
cacccaacccgauacuaua

SEQ ID NO: 48761 - RNA, 19 nt, Artificial Sequence
  Sense Oligo
auaguaucggguugggugg

SEQ ID NO: 48762 - RNA, 19 nt, Artificial Sequence
  Antisense Oligo
ccacccaacccgauacuau

SEQ ID NO: 48763 - RNA, 19 nt, Artificial Sequence
  Sense Oligo
uaguaucggguuggguggu

SEQ ID NO: 48764 - RNA, 19 nt, Artificial Sequence
  Antisense Oligo
accacccaacccgauacua

SEQ ID NO: 48765 - RNA, 19 nt, Artificial Sequence
  Sense Oligo
aguaucggguugggugguu

SEQ ID NO: 48766 - RNA, 19 nt, Artificial Sequence
  Antisense Oligo
aaccacccaacccgauacu

SEQ ID NO: 48767 - RNA, 19 nt, Artificial Sequence
  Sense Oligo
guaucggguugggugguuu

SEQ ID NO: 48768 - RNA, 19 nt, Artificial Sequence
  Antisense Oligo
aaaccacccaacccgauac

SEQ ID NO: 48769 - RNA, 19 nt, Artificial Sequence
  Sense Oligo
uaucggguugggugguuuc

SEQ ID NO: 48770 - RNA, 19 nt, Artificial Sequence
  Antisense Oligo
gaaaccacccaacccgaua

SEQ ID NO: 48771 - RNA, 19 nt, Artificial Sequence
  Sense Oligo
aucggguugggugguuucu

SEQ ID NO: 48772 - RNA, 19 nt, Artificial Sequence
  Antisense Oligo
agaaaccacccaacccgau

SEQ ID NO: 48773 - RNA, 19 nt, Artificial Sequence
  Sense Oligo
ucggguugggugguuucug

SEQ ID NO: 48774 - RNA, 19 nt, Artificial Sequence
  Antisense Oligo
cagaaaccacccaacccga

SEQ ID NO: 48775 - RNA, 19 nt, Artificial Sequence
  Sense Oligo
cggguugggugguuucugc

SEQ ID NO: 48776 - RNA, 19 nt, Artificial Sequence
  Antisense Oligo
gcagaaaccacccaacccg

SEQ ID NO: 48777 - RNA, 19 nt, Artificial Sequence
  Sense Oligo
ggguugggugguuucugcg

SEQ ID NO: 48778 - RNA, 19 nt, Artificial Sequence
  Antisense Oligo
cgcagaaaccacccaaccc

SEQ ID NO: 48779 - RNA, 19 nt, Artificial Sequence
  Sense Oligo
gguugggugguuucugcgc

SEQ ID NO: 48780 - RNA, 19 nt, Artificial Sequence
  Antisense Oligo
gcgcagaaaccacccaacc

SEQ ID NO: 48781 - RNA, 19 nt, Artificial Sequence
  Sense Oligo
ugguuucugcgcaggccca

SEQ ID NO: 48782 - RNA, 19 nt, Artificial Sequence
  Antisense Oligo
ugggccugcgcagaaacca

SEQ ID NO: 48783 - RNA, 19 nt, Artificial Sequence
  Sense Oligo
gguuucugcgcaggcccau

SEQ ID NO: 48784 - RNA, 19 nt, Artificial Sequence
  Antisense Oligo
augggccugcgcagaaacc

SEQ ID NO: 48785 - RNA, 19 nt, Artificial Sequence
  Sense Oligo
guuucugcgcaggcccauu

SEQ ID NO: 48786 - RNA, 19 nt, Artificial Sequence
  Antisense Oligo
aaugggccugcgcagaaac

SEQ ID NO: 48787 - RNA, 19 nt, Artificial Sequence
  Sense Oligo
uuucugcgcaggcccauuc

SEQ ID NO: 48788 - RNA, 19 nt, Artificial Sequence
  Antisense Oligo
gaaugggccugcgcagaaa

SEQ ID NO: 48789 - RNA, 19 nt, Artificial Sequence
  Sense Oligo
aggcccauuccaggguuuc

SEQ ID NO: 48790 - RNA, 19 nt, Artificial Sequence
  Antisense Oligo
gaaacccuggaaugggccu

SEQ ID NO: 48791 - RNA, 19 nt, Artificial Sequence
  Sense Oligo
ggcccauuccaggguuucg

SEQ ID NO: 48792 - RNA, 19 nt, Artificial Sequence
  Antisense Oligo
cgaaacccuggaaugggcc

SEQ ID NO: 48793 - RNA, 19 nt, Artificial Sequence
  Sense Oligo
gcccauuccaggguuucgg

SEQ ID NO: 48794 - RNA, 19 nt, Artificial Sequence
  Antisense Oligo
ccgaaacccuggaaugggc

SEQ ID NO: 48795 - RNA, 19 nt, Artificial Sequence
  Sense Oligo
cccauuccaggguuucggc

SEQ ID NO: 48796 - RNA, 19 nt, Artificial Sequence
  Antisense Oligo
gccgaaacccuggaauggg

SEQ ID NO: 48797 - RNA, 19 nt, Artificial Sequence
  Sense Oligo
ccauuccaggguuucggcu

SEQ ID NO: 48798 - RNA, 19 nt, Artificial Sequence
  Antisense Oligo
agccgaaacccuggaaugg

SEQ ID NO: 48799 - RNA, 19 nt, Artificial Sequence
  Sense Oligo
cauuccaggguuucggcuu

SEQ ID NO: 48800 - RNA, 19 nt, Artificial Sequence
  Antisense Oligo
aagccgaaacccuggaaug

SEQ ID NO: 48801 - RNA, 19 nt, Artificial Sequence
  Sense Oligo
auuccaggguuucggcuuc

SEQ ID NO: 48802 - RNA, 19 nt, Artificial Sequence
  Antisense Oligo
gaagccgaaacccuggaau

SEQ ID NO: 48803 - RNA, 19 nt, Artificial Sequence
  Sense Oligo
uuucggcuucagggugcca

SEQ ID NO: 48804 - RNA, 19 nt, Artificial Sequence
  Antisense Oligo
uggcacccugaagccgaaa

SEQ ID NO: 48805 - RNA, 19 nt, Artificial Sequence
  Sense Oligo
uucggcuucagggugccag

SEQ ID NO: 48806 - RNA, 19 nt, Artificial Sequence
  Antisense Oligo
cuggcacccugaagccgaa

SEQ ID NO: 48807 - RNA, 19 nt, Artificial Sequence
  Sense Oligo
gcuucagggugccagucau

SEQ ID NO: 48808 - RNA, 19 nt, Artificial Sequence
  Antisense Oligo
augacuggcacccugaagc

SEQ ID NO: 48809 - RNA, 19 nt, Artificial Sequence
  Sense Oligo
uucagggugccagucauuc

SEQ ID NO: 48810 - RNA, 19 nt, Artificial Sequence
  Antisense Oligo
gaaugacuggcacccugaa

SEQ ID NO: 48811 - RNA, 19 nt, Artificial Sequence
  Sense Oligo
gggugccagucauucauug

SEQ ID NO: 48812 - RNA, 19 nt, Artificial Sequence
  Antisense Oligo
caaugaaugacuggcaccc

SEQ ID NO: 48813 - RNA, 19 nt, Artificial Sequence
  Sense Oligo
ggugccagucauucauugc

SEQ ID NO: 48814 - RNA, 19 nt, Artificial Sequence
  Antisense Oligo
gcaaugaaugacuggcacc

SEQ ID NO: 48815 - RNA, 19 nt, Artificial Sequence
  Sense Oligo
gugccagucauucauugcg

SEQ ID NO: 48816 - RNA, 19 nt, Artificial Sequence
  Antisense Oligo
cgcaaugaaugacuggcac

SEQ ID NO: 48817 - RNA, 19 nt, Artificial Sequence
  Sense Oligo
ugccagucauucauugcgc

SEQ ID NO: 48818 - RNA, 19 nt, Artificial Sequence
  Antisense Oligo
gcgcaaugaaugacuggca

SEQ ID NO: 48819 - RNA, 19 nt, Artificial Sequence
  Sense Oligo
agucauucauugcgcagca

SEQ ID NO: 48820 - RNA, 19 nt, Artificial Sequence
  Antisense Oligo
ugcugcgcaaugaaugacu

SEQ ID NO: 48821 - RNA, 19 nt, Artificial Sequence
  Sense Oligo
ugcgcagcaagauaaugac

SEQ ID NO: 48822 - RNA, 19 nt, Artificial Sequence
  Antisense Oligo
gucauuaucuugcugcgca

SEQ ID NO: 48823 - RNA, 19 nt, Artificial Sequence
  Sense Oligo
gcgcagcaagauaaugaca

SEQ ID NO: 48824 - RNA, 19 nt, Artificial Sequence
  Antisense Oligo
ugucauuaucuugcugcgc

SEQ ID NO: 48825 - RNA, 19 nt, Artificial Sequence
  Sense Oligo
agccagggugugcaauguc

SEQ ID NO: 48826 - RNA, 19 nt, Artificial Sequence
  Antisense Oligo
gacauugcacacccuggcu

SEQ ID NO: 48827 - RNA, 19 nt, Artificial Sequence
  Sense Oligo
gccagggugugcaaugucc

SEQ ID NO: 48828 - RNA, 19 nt, Artificial Sequence
  Antisense Oligo
ggacauugcacacccuggc

SEQ ID NO: 48829 - RNA, 19 nt, Artificial Sequence
  Sense Oligo
ccagggugugcaauguccc

SEQ ID NO: 48830 - RNA, 19 nt, Artificial Sequence
  Antisense Oligo
gggacauugcacacccugg

SEQ ID NO: 48831 - RNA, 19 nt, Artificial Sequence
  Sense Oligo
caaagacaguugugggugg

SEQ ID NO: 48832 - RNA, 19 nt, Artificial Sequence
  Antisense Oligo
ccacccacaacugucuuug

SEQ ID NO: 48833 - RNA, 19 nt, Artificial Sequence
  Sense Oligo
aaagacaguuguggguggc

SEQ ID NO: 48834 - RNA, 19 nt, Artificial Sequence
  Antisense Oligo
gccacccacaacugucuuu

SEQ ID NO: 48835 - RNA, 19 nt, Artificial Sequence
  Sense Oligo
aagacaguuguggguggcu

SEQ ID NO: 48836 - RNA, 19 nt, Artificial Sequence
  Antisense Oligo
agccacccacaacugucuu

SEQ ID NO: 48837 - RNA, 19 nt, Artificial Sequence
  Sense Oligo
agacaguuguggguggcuu

SEQ ID NO: 48838 - RNA, 19 nt, Artificial Sequence
  Antisense Oligo
aagccacccacaacugucu

SEQ ID NO: 48839 - RNA, 19 nt, Artificial Sequence
  Sense Oligo
gacaguuguggguggcuuc

SEQ ID NO: 48840 - RNA, 19 nt, Artificial Sequence
  Antisense Oligo
gaagccacccacaacuguc

SEQ ID NO: 48841 - RNA, 19 nt, Artificial Sequence
  Sense Oligo
guuguggguggcuucacuc

SEQ ID NO: 48842 - RNA, 19 nt, Artificial Sequence
  Antisense Oligo
gagugaagccacccacaac

SEQ ID NO: 48843 - RNA, 19 nt, Artificial Sequence
  Sense Oligo
uuguggguggcuucacucu

SEQ ID NO: 48844 - RNA, 19 nt, Artificial Sequence
  Antisense Oligo
agagugaagccacccacaa

SEQ ID NO: 48845 - RNA, 19 nt, Artificial Sequence
  Sense Oligo
uguggguggcuucacucuu

SEQ ID NO: 48846 - RNA, 19 nt, Artificial Sequence
  Antisense Oligo
aagagugaagccacccaca

SEQ ID NO: 48847 - RNA, 19 nt, Artificial Sequence
  Sense Oligo
guggguggcuucacucuuc

SEQ ID NO: 48848 - RNA, 19 nt, Artificial Sequence
  Antisense Oligo
gaagagugaagccacccac

SEQ ID NO: 48849 - RNA, 19 nt, Artificial Sequence
  Sense Oligo
guggcuucacucuucacag

SEQ ID NO: 48850 - RNA, 19 nt, Artificial Sequence
  Antisense Oligo
cugugaagagugaagccac

SEQ ID NO: 48851 - RNA, 19 nt, Artificial Sequence
  Sense Oligo
uggcuucacucuucacagg

SEQ ID NO: 48852 - RNA, 19 nt, Artificial Sequence
  Antisense Oligo
ccugugaagagugaagcca

SEQ ID NO: 48853 - RNA, 19 nt, Artificial Sequence
  Sense Oligo
agggcuguggcagucuguc

SEQ ID NO: 48854 - RNA, 19 nt, Artificial Sequence
  Antisense Oligo
gacagacugccacagcccu

SEQ ID NO: 48855 - RNA, 19 nt, Artificial Sequence
  Sense Oligo
ggcuguggcagucugucca

SEQ ID NO: 48856 - RNA, 19 nt, Artificial Sequence
  Antisense Oligo
uggacagacugccacagcc

SEQ ID NO: 48857 - RNA, 19 nt, Artificial Sequence
  Sense Oligo
ggcagucuguccacaucga

SEQ ID NO: 48858 - RNA, 19 nt, Artificial Sequence
  Antisense Oligo
ucgauguggacagacugcc

SEQ ID NO: 48859 - RNA, 19 nt, Artificial Sequence
  Sense Oligo
gcagucuguccacaucgau

SEQ ID NO: 48860 - RNA, 19 nt, Artificial Sequence
  Antisense Oligo
aucgauguggacagacugc

SEQ ID NO: 48861 - RNA, 19 nt, Artificial Sequence
  Sense Oligo
cagucuguccacaucgaug

SEQ ID NO: 48862 - RNA, 19 nt, Artificial Sequence
  Antisense Oligo
caucgauguggacagacug

SEQ ID NO: 48863 - RNA, 19 nt, Artificial Sequence
  Sense Oligo
agucuguccacaucgauga

SEQ ID NO: 48864 - RNA, 19 nt, Artificial Sequence
  Antisense Oligo
ucaucgauguggacagacu

SEQ ID NO: 48865 - RNA, 19 nt, Artificial Sequence
  Sense Oligo
gucuguccacaucgaugac

SEQ ID NO: 48866 - RNA, 19 nt, Artificial Sequence
  Antisense Oligo
gucaucgauguggacagac

SEQ ID NO: 48867 - RNA, 19 nt, Artificial Sequence
  Sense Oligo
ucuguccacaucgaugacc

SEQ ID NO: 48868 - RNA, 19 nt, Artificial Sequence
  Antisense Oligo
ggucaucgauguggacaga

SEQ ID NO: 48869 - RNA, 19 nt, Artificial Sequence
  Sense Oligo
uccacaucgaugaccuccg

SEQ ID NO: 48870 - RNA, 19 nt, Artificial Sequence
  Antisense Oligo
cggaggucaucgaugugga

SEQ ID NO: 48871 - RNA, 19 nt, Artificial Sequence
  Sense Oligo
ccacaucgaugaccuccgg

SEQ ID NO: 48872 - RNA, 19 nt, Artificial Sequence
  Antisense Oligo
ccggaggucaucgaugugg

SEQ ID NO: 48873 - RNA, 19 nt, Artificial Sequence
  Sense Oligo
cacaucgaugaccuccgga

SEQ ID NO: 48874 - RNA, 19 nt, Artificial Sequence
  Antisense Oligo
uccggaggucaucgaugug

SEQ ID NO: 48875 - RNA, 19 nt, Artificial Sequence
  Sense Oligo
acaucgaugaccuccggag

SEQ ID NO: 48876 - RNA, 19 nt, Artificial Sequence
  Antisense Oligo
cuccggaggucaucgaugu

SEQ ID NO: 48877 - RNA, 19 nt, Artificial Sequence
  Sense Oligo
agauccacccucaugguuu

SEQ ID NO: 48878 - RNA, 19 nt, Artificial Sequence
  Antisense Oligo
aaaccaugaggguggaucu

SEQ ID NO: 48879 - RNA, 19 nt, Artificial Sequence
  Sense Oligo
gauccacccucaugguuuc

SEQ ID NO: 48880 - RNA, 19 nt, Artificial Sequence
  Antisense Oligo
gaaaccaugaggguggauc

SEQ ID NO: 48881 - RNA, 19 nt, Artificial Sequence
  Sense Oligo
auccacccucaugguuucu

SEQ ID NO: 48882 - RNA, 19 nt, Artificial Sequence
  Antisense Oligo
agaaaccaugaggguggau

SEQ ID NO: 48883 - RNA, 19 nt, Artificial Sequence
  Sense Oligo
uccacccucaugguuucug

SEQ ID NO: 48884 - RNA, 19 nt, Artificial Sequence
  Antisense Oligo
cagaaaccaugagggugga

SEQ ID NO: 48885 - RNA, 19 nt, Artificial Sequence
  Sense Oligo
ccacccucaugguuucuga

SEQ ID NO: 48886 - RNA, 19 nt, Artificial Sequence
  Antisense Oligo
ucagaaaccaugagggugg

SEQ ID NO: 48887 - RNA, 19 nt, Artificial Sequence
  Sense Oligo
acccucaugguuucugaug

SEQ ID NO: 48888 - RNA, 19 nt, Artificial Sequence
  Antisense Oligo
caucagaaaccaugagggu

SEQ ID NO: 48889 - RNA, 19 nt, Artificial Sequence
  Sense Oligo
cccucaugguuucugaugu

SEQ ID NO: 48890 - RNA, 19 nt, Artificial Sequence
  Antisense Oligo
acaucagaaaccaugaggg

SEQ ID NO: 48891 - RNA, 19 nt, Artificial Sequence
  Sense Oligo
uuucugaugugaccaggcu

SEQ ID NO: 48892 - RNA, 19 nt, Artificial Sequence
  Antisense Oligo
agccuggucacaucagaaa

SEQ ID NO: 48893 - RNA, 19 nt, Artificial Sequence
  Sense Oligo
uucugaugugaccaggcug

SEQ ID NO: 48894 - RNA, 19 nt, Artificial Sequence
  Antisense Oligo
cagccuggucacaucagaa

SEQ ID NO: 48895 - RNA, 19 nt, Artificial Sequence
  Sense Oligo
ugugaccaggcugcagcau

SEQ ID NO: 48896 - RNA, 19 nt, Artificial Sequence
  Antisense Oligo
augcugcagccuggucaca

SEQ ID NO: 48897 - RNA, 19 nt, Artificial Sequence
  Sense Oligo
gugaccaggcugcagcaug

SEQ ID NO: 48898 - RNA, 19 nt, Artificial Sequence
  Antisense Oligo
caugcugcagccuggucac

SEQ ID NO: 48899 - RNA, 19 nt, Artificial Sequence
  Sense Oligo
ugaccaggcugcagcaugu

SEQ ID NO: 48900 - RNA, 19 nt, Artificial Sequence
  Antisense Oligo
acaugcugcagccugguca

SEQ ID NO: 48901 - RNA, 19 nt, Artificial Sequence
  Sense Oligo
gaccaggcugcagcauguc

SEQ ID NO: 48902 - RNA, 19 nt, Artificial Sequence
  Antisense Oligo
gacaugcugcagccugguc

SEQ ID NO: 48903 - RNA, 19 nt, Artificial Sequence
  Sense Oligo
accaggcugcagcauguca

SEQ ID NO: 48904 - RNA, 19 nt, Artificial Sequence
  Antisense Oligo
ugacaugcugcagccuggu

SEQ ID NO: 48905 - RNA, 19 nt, Artificial Sequence
  Sense Oligo
ggcugcagcaugucaccau

SEQ ID NO: 48906 - RNA, 19 nt, Artificial Sequence
  Antisense Oligo
auggugacaugcugcagcc

SEQ ID NO: 48907 - RNA, 19 nt, Artificial Sequence
  Sense Oligo
gcugcagcaugucaccauc

SEQ ID NO: 48908 - RNA, 19 nt, Artificial Sequence
  Antisense Oligo
gauggugacaugcugcagc

SEQ ID NO: 48909 - RNA, 19 nt, Artificial Sequence
  Sense Oligo
cugcagcaugucaccauca

SEQ ID NO: 48910 - RNA, 19 nt, Artificial Sequence
  Antisense Oligo
ugauggugacaugcugcag

SEQ ID NO: 48911 - RNA, 19 nt, Artificial Sequence
  Sense Oligo
ugucaccaucagccagcug

SEQ ID NO: 48912 - RNA, 19 nt, Artificial Sequence
  Antisense Oligo
cagcuggcugauggugaca

SEQ ID NO: 48913 - RNA, 19 nt, Artificial Sequence
  Sense Oligo
gucaccaucagccagcugu

SEQ ID NO: 48914 - RNA, 19 nt, Artificial Sequence
  Antisense Oligo
acagcuggcugauggugac

SEQ ID NO: 48915 - RNA, 19 nt, Artificial Sequence
  Sense Oligo
ucaccaucagccagcuguu

SEQ ID NO: 48916 - RNA, 19 nt, Artificial Sequence
  Antisense Oligo
aacagcuggcugaugguga

SEQ ID NO: 48917 - RNA, 19 nt, Artificial Sequence
  Sense Oligo
caccaucagccagcuguuc

SEQ ID NO: 48918 - RNA, 19 nt, Artificial Sequence
  Antisense Oligo
gaacagcuggcugauggug

SEQ ID NO: 48919 - RNA, 19 nt, Artificial Sequence
  Sense Oligo
accaucagccagcuguucg

SEQ ID NO: 48920 - RNA, 19 nt, Artificial Sequence
  Antisense Oligo
cgaacagcuggcugauggu

SEQ ID NO: 48921 - RNA, 19 nt, Artificial Sequence
  Sense Oligo
ccaucagccagcuguucgc

SEQ ID NO: 48922 - RNA, 19 nt, Artificial Sequence
  Antisense Oligo
gcgaacagcuggcugaugg

SEQ ID NO: 48923 - RNA, 19 nt, Artificial Sequence
  Sense Oligo
caucagccagcuguucgcg

SEQ ID NO: 48924 - RNA, 19 nt, Artificial Sequence
  Antisense Oligo
cgcgaacagcuggcugaug

SEQ ID NO: 48925 - RNA, 19 nt, Artificial Sequence
  Sense Oligo
agacuugccugagcgugag

SEQ ID NO: 48926 - RNA, 19 nt, Artificial Sequence
  Antisense Oligo
cucacgcucaggcaagucu

SEQ ID NO: 48927 - RNA, 19 nt, Artificial Sequence
  Sense Oligo
ugcacauggcacuaggagc

SEQ ID NO: 48928 - RNA, 19 nt, Artificial Sequence
  Antisense Oligo
gcuccuagugccaugugca

SEQ ID NO: 48929 - RNA, 19 nt, Artificial Sequence
  Sense Oligo
gcacauggcacuaggagca

SEQ ID NO: 48930 - RNA, 19 nt, Artificial Sequence
  Antisense Oligo
ugcuccuagugccaugugc

SEQ ID NO: 48931 - RNA, 19 nt, Artificial Sequence
  Sense Oligo
cacauggcacuaggagcag

SEQ ID NO: 48932 - RNA, 19 nt, Artificial Sequence
  Antisense Oligo
cugcuccuagugccaugug

SEQ ID NO: 48933 - RNA, 19 nt, Artificial Sequence
  Sense Oligo
agggccaccguguuucguc

SEQ ID NO: 48934 - RNA, 19 nt, Artificial Sequence
  Antisense Oligo
gacgaaacacgguggcccu

SEQ ID NO: 48935 - RNA, 19 nt, Artificial Sequence
  Sense Oligo
caccguguuucgucccucg

SEQ ID NO: 48936 - RNA, 19 nt, Artificial Sequence
  Antisense Oligo
cgagggacgaaacacggug

SEQ ID NO: 48937 - RNA, 19 nt, Artificial Sequence
  Sense Oligo
accguguuucgucccucgg

SEQ ID NO: 48938 - RNA, 19 nt, Artificial Sequence
  Antisense Oligo
ccgagggacgaaacacggu

SEQ ID NO: 48939 - RNA, 19 nt, Artificial Sequence
  Sense Oligo
cguguuucgucccucggca

SEQ ID NO: 48940 - RNA, 19 nt, Artificial Sequence
  Antisense Oligo
ugccgagggacgaaacacg

SEQ ID NO: 48941 - RNA, 19 nt, Artificial Sequence
  Sense Oligo
guguuucgucccucggcag

SEQ ID NO: 48942 - RNA, 19 nt, Artificial Sequence
  Antisense Oligo
cugccgagggacgaaacac

SEQ ID NO: 48943 - RNA, 19 nt, Artificial Sequence
  Sense Oligo
uguuucgucccucggcagg

SEQ ID NO: 48944 - RNA, 19 nt, Artificial Sequence
  Antisense Oligo
ccugccgagggacgaaaca

SEQ ID NO: 48945 - RNA, 19 nt, Artificial Sequence
  Sense Oligo
guuucgucccucggcagga

SEQ ID NO: 48946 - RNA, 19 nt, Artificial Sequence
  Antisense Oligo
uccugccgagggacgaaac

SEQ ID NO: 48947 - RNA, 19 nt, Artificial Sequence
  Sense Oligo
uuucgucccucggcaggag

SEQ ID NO: 48948 - RNA, 19 nt, Artificial Sequence
  Antisense Oligo
cuccugccgagggacgaaa

SEQ ID NO: 48949 - RNA, 19 nt, Artificial Sequence
  Sense Oligo
aacugacugguggcucauc

SEQ ID NO: 48950 - RNA, 19 nt, Artificial Sequence
  Antisense Oligo
gaugagccaccagucaguu

SEQ ID NO: 48951 - RNA, 19 nt, Artificial Sequence
  Sense Oligo
acugacugguggcucauca

SEQ ID NO: 48952 - RNA, 19 nt, Artificial Sequence
  Antisense Oligo
ugaugagccaccagucagu

SEQ ID NO: 48953 - RNA, 19 nt, Artificial Sequence
  Sense Oligo
cugacugguggcucaucau

SEQ ID NO: 48954 - RNA, 19 nt, Artificial Sequence
  Antisense Oligo
augaugagccaccagucag

SEQ ID NO: 48955 - RNA, 19 nt, Artificial Sequence
  Sense Oligo
ugacugguggcucaucaua

SEQ ID NO: 48956 - RNA, 19 nt, Artificial Sequence
  Antisense Oligo
uaugaugagccaccaguca

SEQ ID NO: 48957 - RNA, 19 nt, Artificial Sequence
  Sense Oligo
gacugguggcucaucauag

SEQ ID NO: 48958 - RNA, 19 nt, Artificial Sequence
  Antisense Oligo
cuaugaugagccaccaguc

SEQ ID NO: 48959 - RNA, 19 nt, Artificial Sequence
  Sense Oligo
acugguggcucaucauaga

SEQ ID NO: 48960 - RNA, 19 nt, Artificial Sequence
  Antisense Oligo
ucuaugaugagccaccagu

SEQ ID NO: 48961 - RNA, 19 nt, Artificial Sequence
  Sense Oligo
cugguggcucaucauagag

SEQ ID NO: 48962 - RNA, 19 nt, Artificial Sequence
  Antisense Oligo
cucuaugaugagccaccag

SEQ ID NO: 48963 - RNA, 19 nt, Artificial Sequence
  Sense Oligo
cgagcaggugcgcuuacca

SEQ ID NO: 48964 - RNA, 19 nt, Artificial Sequence
  Antisense Oligo
ugguaagcgcaccugcucg

SEQ ID NO: 48965 - RNA, 19 nt, Artificial Sequence
  Sense Oligo
gagcaggugcgcuuaccac

SEQ ID NO: 48966 - RNA, 19 nt, Artificial Sequence
  Antisense Oligo
gugguaagcgcaccugcuc

SEQ ID NO: 48967 - RNA, 19 nt, Artificial Sequence
  Sense Oligo
agcaggugcgcuuaccaca

SEQ ID NO: 48968 - RNA, 19 nt, Artificial Sequence
  Antisense Oligo
ugugguaagcgcaccugcu

SEQ ID NO: 48969 - RNA, 19 nt, Artificial Sequence
  Sense Oligo
ggugcgcuuaccacaggcu

SEQ ID NO: 48970 - RNA, 19 nt, Artificial Sequence
  Antisense Oligo
agccugugguaagcgcacc

SEQ ID NO: 48971 - RNA, 19 nt, Artificial Sequence
  Sense Oligo
gugcgcuuaccacaggcug

SEQ ID NO: 48972 - RNA, 19 nt, Artificial Sequence
  Antisense Oligo
cagccugugguaagcgcac

SEQ ID NO: 48973 - RNA, 19 nt, Artificial Sequence
  Sense Oligo
ugcgcuuaccacaggcuga

SEQ ID NO: 48974 - RNA, 19 nt, Artificial Sequence
  Antisense Oligo
ucagccugugguaagcgca

SEQ ID NO: 48975 - RNA, 19 nt, Artificial Sequence
  Sense Oligo
gcgcuuaccacaggcugag

SEQ ID NO: 48976 - RNA, 19 nt, Artificial Sequence
  Antisense Oligo
cucagccugugguaagcgc

SEQ ID NO: 48977 - RNA, 19 nt, Artificial Sequence
  Sense Oligo
cgcuuaccacaggcugagg

SEQ ID NO: 48978 - RNA, 19 nt, Artificial Sequence
  Antisense Oligo
ccucagccugugguaagcg

SEQ ID NO: 48979 - RNA, 19 nt, Artificial Sequence
  Sense Oligo
gcuuaccacaggcugaggu

SEQ ID NO: 48980 - RNA, 19 nt, Artificial Sequence
  Antisense Oligo
accucagccugugguaagc

SEQ ID NO: 48981 - RNA, 19 nt, Artificial Sequence
  Sense Oligo
accacaggcugagguagag

SEQ ID NO: 48982 - RNA, 19 nt, Artificial Sequence
  Antisense Oligo
cucuaccucagccuguggu

SEQ ID NO: 48983 - RNA, 19 nt, Artificial Sequence
  Sense Oligo
ccacaggcugagguagagc

SEQ ID NO: 48984 - RNA, 19 nt, Artificial Sequence
  Antisense Oligo
gcucuaccucagccugugg

SEQ ID NO: 48985 - RNA, 19 nt, Artificial Sequence
  Sense Oligo
cacaggcugagguagagcu

SEQ ID NO: 48986 - RNA, 19 nt, Artificial Sequence
  Antisense Oligo
agcucuaccucagccugug

SEQ ID NO: 48987 - RNA, 19 nt, Artificial Sequence
  Sense Oligo
acaggcugagguagagcuc

SEQ ID NO: 48988 - RNA, 19 nt, Artificial Sequence
  Antisense Oligo
gagcucuaccucagccugu

SEQ ID NO: 48989 - RNA, 19 nt, Artificial Sequence
  Sense Oligo
caggcugagguagagcucu

SEQ ID NO: 48990 - RNA, 19 nt, Artificial Sequence
  Antisense Oligo
agagcucuaccucagccug

SEQ ID NO: 48991 - RNA, 19 nt, Artificial Sequence
  Sense Oligo
aggcugagguagagcucug

SEQ ID NO: 48992 - RNA, 19 nt, Artificial Sequence
  Antisense Oligo
cagagcucuaccucagccu

SEQ ID NO: 48993 - RNA, 19 nt, Artificial Sequence
  Sense Oligo
ggcugagguagagcucugu

SEQ ID NO: 48994 - RNA, 19 nt, Artificial Sequence
  Antisense Oligo
acagagcucuaccucagcc

SEQ ID NO: 48995 - RNA, 19 nt, Artificial Sequence
  Sense Oligo
gcugagguagagcucugug

SEQ ID NO: 48996 - RNA, 19 nt, Artificial Sequence
  Antisense Oligo
cacagagcucuaccucagc

SEQ ID NO: 48997 - RNA, 19 nt, Artificial Sequence
  Sense Oligo
ugagcaggccagccaugga

SEQ ID NO: 48998 - RNA, 19 nt, Artificial Sequence
  Antisense Oligo
uccauggcuggccugcuca

SEQ ID NO: 48999 - RNA, 19 nt, Artificial Sequence
  Sense Oligo
gagcaggccagccauggaa

SEQ ID NO: 49000 - RNA, 19 nt, Artificial Sequence
  Antisense Oligo
uuccauggcuggccugcuc

SEQ ID NO: 49001 - RNA, 19 nt, Artificial Sequence
  Sense Oligo
agcaggccagccauggaag

SEQ ID NO: 49002 - RNA, 19 nt, Artificial Sequence
  Antisense Oligo
cuuccauggcuggccugcu

SEQ ID NO: 49003 - RNA, 19 nt, Artificial Sequence
  Sense Oligo
aggccagccauggaaguga

SEQ ID NO: 49004 - RNA, 19 nt, Artificial Sequence
  Antisense Oligo
ucacuuccauggcuggccu

SEQ ID NO: 49005 - RNA, 19 nt, Artificial Sequence
  Sense Oligo
ccagccauggaagugagca

SEQ ID NO: 49006 - RNA, 19 nt, Artificial Sequence
  Antisense Oligo
ugcucacuuccauggcugg

SEQ ID NO: 49007 - RNA, 19 nt, Artificial Sequence
  Sense Oligo
cagccauggaagugagcac

SEQ ID NO: 49008 - RNA, 19 nt, Artificial Sequence
  Antisense Oligo
gugcucacuuccauggcug

SEQ ID NO: 49009 - RNA, 19 nt, Artificial Sequence
  Sense Oligo
uggaagugagcaccuagaa

SEQ ID NO: 49010 - RNA, 19 nt, Artificial Sequence
  Antisense Oligo
uucuaggugcucacuucca

SEQ ID NO: 49011 - RNA, 19 nt, Artificial Sequence
  Sense Oligo
agagcccaggcuggaagga

SEQ ID NO: 49012 - RNA, 19 nt, Artificial Sequence
  Antisense Oligo
uccuuccagccugggcucu

SEQ ID NO: 49013 - RNA, 19 nt, Artificial Sequence
  Sense Oligo
gagcccaggcuggaaggaa

SEQ ID NO: 49014 - RNA, 19 nt, Artificial Sequence
  Antisense Oligo
uuccuuccagccugggcuc

SEQ ID NO: 49015 - RNA, 19 nt, Artificial Sequence
  Sense Oligo
gggcugaucuucaugaccg

SEQ ID NO: 49016 - RNA, 19 nt, Artificial Sequence
  Antisense Oligo
cggucaugaagaucagccc

SEQ ID NO: 49017 - RNA, 19 nt, Artificial Sequence
  Sense Oligo
ggcugaucuucaugaccgu

SEQ ID NO: 49018 - RNA, 19 nt, Artificial Sequence
  Antisense Oligo
acggucaugaagaucagcc

SEQ ID NO: 49019 - RNA, 19 nt, Artificial Sequence
  Sense Oligo
gcugaucuucaugaccgug

SEQ ID NO: 49020 - RNA, 19 nt, Artificial Sequence
  Antisense Oligo
cacggucaugaagaucagc

SEQ ID NO: 49021 - RNA, 19 nt, Artificial Sequence
  Sense Oligo
cugaucuucaugaccguga

SEQ ID NO: 49022 - RNA, 19 nt, Artificial Sequence
  Antisense Oligo
ucacggucaugaagaucag

SEQ ID NO: 49023 - RNA, 19 nt, Artificial Sequence
  Sense Oligo
ugaucuucaugaccgugau

SEQ ID NO: 49024 - RNA, 19 nt, Artificial Sequence
  Antisense Oligo
aucacggucaugaagauca

SEQ ID NO: 49025 - RNA, 19 nt, Artificial Sequence
  Sense Oligo
aucuucaugaccgugaucu

SEQ ID NO: 49026 - RNA, 19 nt, Artificial Sequence
  Antisense Oligo
agaucacggucaugaagau

SEQ ID NO: 49027 - RNA, 19 nt, Artificial Sequence
  Sense Oligo
ucuucaugaccgugaucuc

SEQ ID NO: 49028 - RNA, 19 nt, Artificial Sequence
  Antisense Oligo
gagaucacggucaugaaga

SEQ ID NO: 49029 - RNA, 19 nt, Artificial Sequence
  Sense Oligo
cuucaugaccgugaucucu

SEQ ID NO: 49030 - RNA, 19 nt, Artificial Sequence
  Antisense Oligo
agagaucacggucaugaag

SEQ ID NO: 49031 - RNA, 19 nt, Artificial Sequence
  Sense Oligo
uucaugaccgugaucucuc

SEQ ID NO: 49032 - RNA, 19 nt, Artificial Sequence
  Antisense Oligo
gagagaucacggucaugaa

SEQ ID NO: 49033 - RNA, 19 nt, Artificial Sequence
  Sense Oligo
ucaugaccgugaucucuca

SEQ ID NO: 49034 - RNA, 19 nt, Artificial Sequence
  Antisense Oligo
ugagagaucacggucauga

SEQ ID NO: 49035 - RNA, 19 nt, Artificial Sequence
  Sense Oligo
ugaccgugaucucucaucu

SEQ ID NO: 49036 - RNA, 19 nt, Artificial Sequence
  Antisense Oligo
agaugagagaucacgguca

SEQ ID NO: 49037 - RNA, 19 nt, Artificial Sequence
  Sense Oligo
gaccgugaucucucaucug

SEQ ID NO: 49038 - RNA, 19 nt, Artificial Sequence
  Antisense Oligo
cagaugagagaucacgguc

SEQ ID NO: 49039 - RNA, 19 nt, Artificial Sequence
  Sense Oligo
acagacucccagauggcac

SEQ ID NO: 49040 - RNA, 19 nt, Artificial Sequence
  Antisense Oligo
gugccaucugggagucugu

SEQ ID NO: 49041 - RNA, 19 nt, Artificial Sequence
  Sense Oligo
agacucccagauggcaccg

SEQ ID NO: 49042 - RNA, 19 nt, Artificial Sequence
  Antisense Oligo
cggugccaucugggagucu

SEQ ID NO: 49043 - RNA, 19 nt, Artificial Sequence
  Sense Oligo
caccuucugagugguaacg

SEQ ID NO: 49044 - RNA, 19 nt, Artificial Sequence
  Antisense Oligo
cguuaccacucagaaggug

SEQ ID NO: 49045 - RNA, 19 nt, Artificial Sequence
  Sense Oligo
accuucugagugguaacgc

SEQ ID NO: 49046 - RNA, 19 nt, Artificial Sequence
  Antisense Oligo
gcguuaccacucagaaggu

SEQ ID NO: 49047 - RNA, 19 nt, Artificial Sequence
  Sense Oligo
ccuucugagugguaacgca

SEQ ID NO: 49048 - RNA, 19 nt, Artificial Sequence
  Antisense Oligo
ugcguuaccacucagaagg

SEQ ID NO: 49049 - RNA, 19 nt, Artificial Sequence
  Sense Oligo
cuucugagugguaacgcaa

SEQ ID NO: 49050 - RNA, 19 nt, Artificial Sequence
  Antisense Oligo
uugcguuaccacucagaag

SEQ ID NO: 49051 - RNA, 19 nt, Artificial Sequence
  Sense Oligo
uucugagugguaacgcaau

SEQ ID NO: 49052 - RNA, 19 nt, Artificial Sequence
  Antisense Oligo
auugcguuaccacucagaa

SEQ ID NO: 49053 - RNA, 19 nt, Artificial Sequence
  Sense Oligo
ucugagugguaacgcaauc

SEQ ID NO: 49054 - RNA, 19 nt, Artificial Sequence
  Antisense Oligo
gauugcguuaccacucaga

SEQ ID NO: 49055 - RNA, 19 nt, Artificial Sequence
  Sense Oligo
cugagugguaacgcaauca

SEQ ID NO: 49056 - RNA, 19 nt, Artificial Sequence
  Antisense Oligo
ugauugcguuaccacucag

SEQ ID NO: 49057 - RNA, 19 nt, Artificial Sequence
  Sense Oligo
ugagugguaacgcaaucac

SEQ ID NO: 49058 - RNA, 19 nt, Artificial Sequence
  Antisense Oligo
gugauugcguuaccacuca

SEQ ID NO: 49059 - RNA, 19 nt, Artificial Sequence
  Sense Oligo
gagugguaacgcaaucacg

SEQ ID NO: 49060 - RNA, 19 nt, Artificial Sequence
  Antisense Oligo
cgugauugcguuaccacuc

SEQ ID NO: 49061 - RNA, 19 nt, Artificial Sequence
  Sense Oligo
agugguaacgcaaucacgu

SEQ ID NO: 49062 - RNA, 19 nt, Artificial Sequence
  Antisense Oligo
acgugauugcguuaccacu

SEQ ID NO: 49063 - RNA, 19 nt, Artificial Sequence
  Sense Oligo
caaucacguuugcuucgac

SEQ ID NO: 49064 - RNA, 19 nt, Artificial Sequence
  Antisense Oligo
gucgaagcaaacgugauug

SEQ ID NO: 49065 - RNA, 19 nt, Artificial Sequence
  Sense Oligo
aaucacguuugcuucgacu

SEQ ID NO: 49066 - RNA, 19 nt, Artificial Sequence
  Antisense Oligo
agucgaagcaaacgugauu

SEQ ID NO: 49067 - RNA, 19 nt, Artificial Sequence
  Sense Oligo
aucacguuugcuucgacug

SEQ ID NO: 49068 - RNA, 19 nt, Artificial Sequence
  Antisense Oligo
cagucgaagcaaacgugau

SEQ ID NO: 49069 - RNA, 19 nt, Artificial Sequence
  Sense Oligo
ucacguuugcuucgacugc

SEQ ID NO: 49070 - RNA, 19 nt, Artificial Sequence
  Antisense Oligo
gcagucgaagcaaacguga

SEQ ID NO: 49071 - RNA, 19 nt, Artificial Sequence
  Sense Oligo
cacguuugcuucgacugca

SEQ ID NO: 49072 - RNA, 19 nt, Artificial Sequence
  Antisense Oligo
ugcagucgaagcaaacgug

SEQ ID NO: 49073 - RNA, 19 nt, Artificial Sequence
  Sense Oligo
ugcuucgacugcagugggc

SEQ ID NO: 49074 - RNA, 19 nt, Artificial Sequence
  Antisense Oligo
gcccacugcagucgaagca

SEQ ID NO: 49075 - RNA, 19 nt, Artificial Sequence
  Sense Oligo
gcuucgacugcagugggcu

SEQ ID NO: 49076 - RNA, 19 nt, Artificial Sequence
  Antisense Oligo
agcccacugcagucgaagc

SEQ ID NO: 49077 - RNA, 19 nt, Artificial Sequence
  Sense Oligo
cuucgacugcagugggcuu

SEQ ID NO: 49078 - RNA, 19 nt, Artificial Sequence
  Antisense Oligo
aagcccacugcagucgaag

SEQ ID NO: 49079 - RNA, 19 nt, Artificial Sequence
  Sense Oligo
uucgacugcagugggcuug

SEQ ID NO: 49080 - RNA, 19 nt, Artificial Sequence
  Antisense Oligo
caagcccacugcagucgaa

SEQ ID NO: 49081 - RNA, 19 nt, Artificial Sequence
  Sense Oligo
ucgacugcagugggcuugg

SEQ ID NO: 49082 - RNA, 19 nt, Artificial Sequence
  Antisense Oligo
ccaagcccacugcagucga

SEQ ID NO: 49083 - RNA, 19 nt, Artificial Sequence
  Sense Oligo
cgacugcagugggcuugga

SEQ ID NO: 49084 - RNA, 19 nt, Artificial Sequence
  Antisense Oligo
uccaagcccacugcagucg

SEQ ID NO: 49085 - RNA, 19 nt, Artificial Sequence
  Sense Oligo
gacugcagugggcuuggaa

SEQ ID NO: 49086 - RNA, 19 nt, Artificial Sequence
  Antisense Oligo
uuccaagcccacugcaguc

SEQ ID NO: 49087 - RNA, 19 nt, Artificial Sequence
  Sense Oligo
gaagacggccaugaggagg

SEQ ID NO: 49088 - RNA, 19 nt, Artificial Sequence
  Antisense Oligo
ccuccucauggccgucuuc

SEQ ID NO: 49089 - RNA, 19 nt, Artificial Sequence
  Sense Oligo
aagacggccaugaggaggc

SEQ ID NO: 49090 - RNA, 19 nt, Artificial Sequence
  Antisense Oligo
gccuccucauggccgucuu

SEQ ID NO: 49091 - RNA, 19 nt, Artificial Sequence
  Sense Oligo
acggccaugaggaggcgau

SEQ ID NO: 49092 - RNA, 19 nt, Artificial Sequence
  Antisense Oligo
aucgccuccucauggccgu

SEQ ID NO: 49093 - RNA, 19 nt, Artificial Sequence
  Sense Oligo
acucggaggcagugaugua

SEQ ID NO: 49094 - RNA, 19 nt, Artificial Sequence
  Antisense Oligo
uacaucacugccuccgagu

SEQ ID NO: 49095 - RNA, 19 nt, Artificial Sequence
  Sense Oligo
cucggaggcagugauguaa

SEQ ID NO: 49096 - RNA, 19 nt, Artificial Sequence
  Antisense Oligo
uuacaucacugccuccgag

SEQ ID NO: 49097 - RNA, 19 nt, Artificial Sequence
  Sense Oligo
ucggaggcagugauguaag

SEQ ID NO: 49098 - RNA, 19 nt, Artificial Sequence
  Antisense Oligo
cuuacaucacugccuccga

SEQ ID NO: 49099 - RNA, 19 nt, Artificial Sequence
  Sense Oligo
cggaggcagugauguaagu

SEQ ID NO: 49100 - RNA, 19 nt, Artificial Sequence
  Antisense Oligo
acuuacaucacugccuccg

SEQ ID NO: 49101 - RNA, 19 nt, Artificial Sequence
  Sense Oligo
ggaggcagugauguaaguu

SEQ ID NO: 49102 - RNA, 19 nt, Artificial Sequence
  Antisense Oligo
aacuuacaucacugccucc

SEQ ID NO: 49103 - RNA, 19 nt, Artificial Sequence
  Sense Oligo
gaggcagugauguaaguuc

SEQ ID NO: 49104 - RNA, 19 nt, Artificial Sequence
  Antisense Oligo
gaacuuacaucacugccuc

SEQ ID NO: 49105 - RNA, 19 nt, Artificial Sequence
  Sense Oligo
aggcagugauguaaguucu

SEQ ID NO: 49106 - RNA, 19 nt, Artificial Sequence
  Antisense Oligo
agaacuuacaucacugccu

SEQ ID NO: 49107 - RNA, 19 nt, Artificial Sequence
  Sense Oligo
ggcagugauguaaguucug

SEQ ID NO: 49108 - RNA, 19 nt, Artificial Sequence
  Antisense Oligo
cagaacuuacaucacugcc

SEQ ID NO: 49109 - RNA, 19 nt, Artificial Sequence
  Sense Oligo
gcagugauguaaguucugg

SEQ ID NO: 49110 - RNA, 19 nt, Artificial Sequence
  Antisense Oligo
ccagaacuuacaucacugc

SEQ ID NO: 49111 - RNA, 19 nt, Artificial Sequence
  Sense Oligo
cagugauguaaguucuggu

SEQ ID NO: 49112 - RNA, 19 nt, Artificial Sequence
  Antisense Oligo
accagaacuuacaucacug

SEQ ID NO: 49113 - RNA, 19 nt, Artificial Sequence
  Sense Oligo
agugauguaaguucugguu

SEQ ID NO: 49114 - RNA, 19 nt, Artificial Sequence
  Antisense Oligo
aaccagaacuuacaucacu

SEQ ID NO: 49115 - RNA, 19 nt, Artificial Sequence
  Sense Oligo
gugauguaaguucugguuc

SEQ ID NO: 49116 - RNA, 19 nt, Artificial Sequence
  Antisense Oligo
gaaccagaacuuacaucac

SEQ ID NO: 49117 - RNA, 19 nt, Artificial Sequence
  Sense Oligo
ugauguaaguucugguucu

SEQ ID NO: 49118 - RNA, 19 nt, Artificial Sequence
  Antisense Oligo
agaaccagaacuuacauca

SEQ ID NO: 49119 - RNA, 19 nt, Artificial Sequence
  Sense Oligo
gauguaaguucugguucuu

SEQ ID NO: 49120 - RNA, 19 nt, Artificial Sequence
  Antisense Oligo
aagaaccagaacuuacauc

SEQ ID NO: 49121 - RNA, 19 nt, Artificial Sequence
  Sense Oligo
auguaaguucugguucuug

SEQ ID NO: 49122 - RNA, 19 nt, Artificial Sequence
  Antisense Oligo
caagaaccagaacuuacau

SEQ ID NO: 49123 - RNA, 19 nt, Artificial Sequence
  Sense Oligo
uguaaguucugguucuugg

SEQ ID NO: 49124 - RNA, 19 nt, Artificial Sequence
  Antisense Oligo
ccaagaaccagaacuuaca

SEQ ID NO: 49125 - RNA, 19 nt, Artificial Sequence
  Sense Oligo
guaaguucugguucuuggg

SEQ ID NO: 49126 - RNA, 19 nt, Artificial Sequence
  Antisense Oligo
cccaagaaccagaacuuac

SEQ ID NO: 49127 - RNA, 19 nt, Artificial Sequence
  Sense Oligo
uaaguucugguucuuggga

SEQ ID NO: 49128 - RNA, 19 nt, Artificial Sequence
  Antisense Oligo
ucccaagaaccagaacuua

SEQ ID NO: 49129 - RNA, 19 nt, Artificial Sequence
  Sense Oligo
aaguucugguucuugggac

SEQ ID NO: 49130 - RNA, 19 nt, Artificial Sequence
  Antisense Oligo
gucccaagaaccagaacuu

SEQ ID NO: 49131 - RNA, 19 nt, Artificial Sequence
  Sense Oligo
aguucugguucuugggacc

SEQ ID NO: 49132 - RNA, 19 nt, Artificial Sequence
  Antisense Oligo
ggucccaagaaccagaacu

SEQ ID NO: 49133 - RNA, 19 nt, Artificial Sequence
  Sense Oligo
guucugguucuugggaccu

SEQ ID NO: 49134 - RNA, 19 nt, Artificial Sequence
  Antisense Oligo
aggucccaagaaccagaac

SEQ ID NO: 49135 - RNA, 19 nt, Artificial Sequence
  Sense Oligo
uucugguucuugggaccuc

SEQ ID NO: 49136 - RNA, 19 nt, Artificial Sequence
  Antisense Oligo
gaggucccaagaaccagaa

SEQ ID NO: 49137 - RNA, 19 nt, Artificial Sequence
  Sense Oligo
ucugguucuugggaccucc

SEQ ID NO: 49138 - RNA, 19 nt, Artificial Sequence
  Antisense Oligo
ggaggucccaagaaccaga

SEQ ID NO: 49139 - RNA, 19 nt, Artificial Sequence
  Sense Oligo
cugguucuugggaccuccc

SEQ ID NO: 49140 - RNA, 19 nt, Artificial Sequence
  Antisense Oligo
gggaggucccaagaaccag

SEQ ID NO: 49141 - RNA, 19 nt, Artificial Sequence
  Sense Oligo
cccuugugcugcuggugau

SEQ ID NO: 49142 - RNA, 19 nt, Artificial Sequence
  Antisense Oligo
aucaccagcagcacaaggg

SEQ ID NO: 49143 - RNA, 19 nt, Artificial Sequence
  Sense Oligo
ccuugugcugcuggugaug

SEQ ID NO: 49144 - RNA, 19 nt, Artificial Sequence
  Antisense Oligo
caucaccagcagcacaagg

SEQ ID NO: 49145 - RNA, 19 nt, Artificial Sequence
  Sense Oligo
cuugugcugcuggugaugc

SEQ ID NO: 49146 - RNA, 19 nt, Artificial Sequence
  Antisense Oligo
gcaucaccagcagcacaag

SEQ ID NO: 49147 - RNA, 19 nt, Artificial Sequence
  Sense Oligo
uugugcugcuggugaugcu

SEQ ID NO: 49148 - RNA, 19 nt, Artificial Sequence
  Antisense Oligo
agcaucaccagcagcacaa

SEQ ID NO: 49149 - RNA, 19 nt, Artificial Sequence
  Sense Oligo
ugugcugcuggugaugcuu

SEQ ID NO: 49150 - RNA, 19 nt, Artificial Sequence
  Antisense Oligo
aagcaucaccagcagcaca

SEQ ID NO: 49151 - RNA, 19 nt, Artificial Sequence
  Sense Oligo
ugcugcuggugaugcuucu

SEQ ID NO: 49152 - RNA, 19 nt, Artificial Sequence
  Antisense Oligo
agaagcaucaccagcagca

SEQ ID NO: 49153 - RNA, 19 nt, Artificial Sequence
  Sense Oligo
gcugcuggugaugcuucug

SEQ ID NO: 49154 - RNA, 19 nt, Artificial Sequence
  Antisense Oligo
cagaagcaucaccagcagc

SEQ ID NO: 49155 - RNA, 19 nt, Artificial Sequence
  Sense Oligo
cugcuggugaugcuucuga

SEQ ID NO: 49156 - RNA, 19 nt, Artificial Sequence
  Antisense Oligo
ucagaagcaucaccagcag

SEQ ID NO: 49157 - RNA, 19 nt, Artificial Sequence
  Sense Oligo
ugcuggugaugcuucugag

SEQ ID NO: 49158 - RNA, 19 nt, Artificial Sequence
  Antisense Oligo
cucagaagcaucaccagca

SEQ ID NO: 49159 - RNA, 19 nt, Artificial Sequence
  Sense Oligo
gcuggugaugcuucugagc

SEQ ID NO: 49160 - RNA, 19 nt, Artificial Sequence
  Antisense Oligo
gcucagaagcaucaccagc

SEQ ID NO: 49161 - RNA, 19 nt, Artificial Sequence
  Sense Oligo
cuggugaugcuucugagcu

SEQ ID NO: 49162 - RNA, 19 nt, Artificial Sequence
  Antisense Oligo
agcucagaagcaucaccag

SEQ ID NO: 49163 - RNA, 19 nt, Artificial Sequence
  Sense Oligo
uggugaugcuucugagcug

SEQ ID NO: 49164 - RNA, 19 nt, Artificial Sequence
  Antisense Oligo
cagcucagaagcaucacca

SEQ ID NO: 49165 - RNA, 19 nt, Artificial Sequence
  Sense Oligo
ggugaugcuucugagcugc

SEQ ID NO: 49166 - RNA, 19 nt, Artificial Sequence
  Antisense Oligo
gcagcucagaagcaucacc

SEQ ID NO: 49167 - RNA, 19 nt, Artificial Sequence
  Sense Oligo
gugaugcuucugagcugca

SEQ ID NO: 49168 - RNA, 19 nt, Artificial Sequence
  Antisense Oligo
ugcagcucagaagcaucac

SEQ ID NO: 49169 - RNA, 19 nt, Artificial Sequence
  Sense Oligo
cuucugagcugcaucuuua

SEQ ID NO: 49170 - RNA, 19 nt, Artificial Sequence
  Antisense Oligo
uaaagaugcagcucagaag

SEQ ID NO: 49171 - RNA, 19 nt, Artificial Sequence
  Sense Oligo
uucugagcugcaucuuuaa

SEQ ID NO: 49172 - RNA, 19 nt, Artificial Sequence
  Antisense Oligo
uuaaagaugcagcucagaa

SEQ ID NO: 49173 - RNA, 19 nt, Artificial Sequence
  Sense Oligo
ucugagcugcaucuuuaaa

SEQ ID NO: 49174 - RNA, 19 nt, Artificial Sequence
  Antisense Oligo
uuuaaagaugcagcucaga

SEQ ID NO: 49175 - RNA, 19 nt, Artificial Sequence
  Sense Oligo
uugggagcuagaggagucg

SEQ ID NO: 49176 - RNA, 19 nt, Artificial Sequence
  Antisense Oligo
cgacuccucuagcucccaa

SEQ ID NO: 49177 - RNA, 19 nt, Artificial Sequence
  Sense Oligo
agugacggucuuguugcug

SEQ ID NO: 49178 - RNA, 19 nt, Artificial Sequence
  Antisense Oligo
cagcaacaagaccgucacu

SEQ ID NO: 49179 - RNA, 19 nt, Artificial Sequence
  Sense Oligo
acggucuuguugcugguua

SEQ ID NO: 49180 - RNA, 19 nt, Artificial Sequence
  Antisense Oligo
uaaccagcaacaagaccgu

SEQ ID NO: 49181 - RNA, 19 nt, Artificial Sequence
  Sense Oligo
cggucuuguugcugguuac

SEQ ID NO: 49182 - RNA, 19 nt, Artificial Sequence
  Antisense Oligo
guaaccagcaacaagaccg

SEQ ID NO: 49183 - RNA, 19 nt, Artificial Sequence
  Sense Oligo
ggucuuguugcugguuacu

SEQ ID NO: 49184 - RNA, 19 nt, Artificial Sequence
  Antisense Oligo
aguaaccagcaacaagacc

SEQ ID NO: 49185 - RNA, 19 nt, Artificial Sequence
  Sense Oligo
ucaagggcaucugcaccgg

SEQ ID NO: 49186 - RNA, 19 nt, Artificial Sequence
  Antisense Oligo
ccggugcagaugcccuuga

SEQ ID NO: 49187 - RNA, 19 nt, Artificial Sequence
  Sense Oligo
aagggcaucugcaccggca

SEQ ID NO: 49188 - RNA, 19 nt, Artificial Sequence
  Antisense Oligo
ugccggugcagaugcccuu

SEQ ID NO: 49189 - RNA, 19 nt, Artificial Sequence
  Sense Oligo
ggaggucggcgucucuucu

SEQ ID NO: 49190 - RNA, 19 nt, Artificial Sequence
  Antisense Oligo
agaagagacgccgaccucc

SEQ ID NO: 49191 - RNA, 19 nt, Artificial Sequence
  Sense Oligo
gaggucggcgucucuucuu

SEQ ID NO: 49192 - RNA, 19 nt, Artificial Sequence
  Antisense Oligo
aagaagagacgccgaccuc

SEQ ID NO: 49193 - RNA, 19 nt, Artificial Sequence
  Sense Oligo
ucggcgucucuucuuuguc

SEQ ID NO: 49194 - RNA, 19 nt, Artificial Sequence
  Antisense Oligo
gacaaagaagagacgccga

SEQ ID NO: 49195 - RNA, 19 nt, Artificial Sequence
  Sense Oligo
cgcccugugcuguuugcug

SEQ ID NO: 49196 - RNA, 19 nt, Artificial Sequence
  Antisense Oligo
cagcaaacagcacagggcg

SEQ ID NO: 49197 - RNA, 19 nt, Artificial Sequence
  Sense Oligo
ugugcuguuugcugcauug

SEQ ID NO: 49198 - RNA, 19 nt, Artificial Sequence
  Antisense Oligo
caaugcagcaaacagcaca

SEQ ID NO: 49199 - RNA, 19 nt, Artificial Sequence
  Sense Oligo
gugcuguuugcugcauuga

SEQ ID NO: 49200 - RNA, 19 nt, Artificial Sequence
  Antisense Oligo
ucaaugcagcaaacagcac

SEQ ID NO: 49201 - RNA, 19 nt, Artificial Sequence
  Sense Oligo
ggcgguuuggcuuuugccc

SEQ ID NO: 49202 - RNA, 19 nt, Artificial Sequence
  Antisense Oligo
gggcaaaagccaaaccgcc

SEQ ID NO: 49203 - RNA, 19 nt, Artificial Sequence
  Sense Oligo
gcgguuuggcuuuugccca

SEQ ID NO: 49204 - RNA, 19 nt, Artificial Sequence
  Antisense Oligo
ugggcaaaagccaaaccgc

SEQ ID NO: 49205 - RNA, 19 nt, Artificial Sequence
  Sense Oligo
cgguuuggcuuuugcccac

SEQ ID NO: 49206 - RNA, 19 nt, Artificial Sequence
  Antisense Oligo
gugggcaaaagccaaaccg

SEQ ID NO: 49207 - RNA, 19 nt, Artificial Sequence
  Sense Oligo
gguuuggcuuuugcccacu

SEQ ID NO: 49208 - RNA, 19 nt, Artificial Sequence
  Antisense Oligo
agugggcaaaagccaaacc

SEQ ID NO: 49209 - RNA, 19 nt, Artificial Sequence
  Sense Oligo
gcuuuugcccacuguguca

SEQ ID NO: 49210 - RNA, 19 nt, Artificial Sequence
  Antisense Oligo
ugacacagugggcaaaagc

SEQ ID NO: 49211 - RNA, 19 nt, Artificial Sequence
  Sense Oligo
ugacccaaccgucuccacc

SEQ ID NO: 49212 - RNA, 19 nt, Artificial Sequence
  Antisense Oligo
gguggagacgguuggguca

SEQ ID NO: 49213 - RNA, 19 nt, Artificial Sequence
  Sense Oligo
gacccaaccgucuccacca

SEQ ID NO: 49214 - RNA, 19 nt, Artificial Sequence
  Antisense Oligo
ugguggagacgguuggguc

SEQ ID NO: 49215 - RNA, 19 nt, Artificial Sequence
  Sense Oligo
acccaaccgucuccaccaa

SEQ ID NO: 49216 - RNA, 19 nt, Artificial Sequence
  Antisense Oligo
uugguggagacgguugggu

SEQ ID NO: 49217 - RNA, 19 nt, Artificial Sequence
  Sense Oligo
gaagcugugugcagagcgc

SEQ ID NO: 49218 - RNA, 19 nt, Artificial Sequence
  Antisense Oligo
gcgcucugcacacagcuuc

SEQ ID NO: 49219 - RNA, 19 nt, Artificial Sequence
  Sense Oligo
aagcugugugcagagcgcc

SEQ ID NO: 49220 - RNA, 19 nt, Artificial Sequence
  Antisense Oligo
ggcgcucugcacacagcuu

SEQ ID NO: 49221 - RNA, 19 nt, Artificial Sequence
  Sense Oligo
agcugcacgcgcaauaugc

SEQ ID NO: 49222 - RNA, 19 nt, Artificial Sequence
  Antisense Oligo
gcauauugcgcgugcagcu

SEQ ID NO: 49223 - RNA, 19 nt, Artificial Sequence
  Sense Oligo
caauaugcggaggguggug

SEQ ID NO: 49224 - RNA, 19 nt, Artificial Sequence
  Antisense Oligo
caccacccuccgcauauug

SEQ ID NO: 49225 - RNA, 19 nt, Artificial Sequence
  Sense Oligo
cuccugggccucuugaaug

SEQ ID NO: 49226 - RNA, 19 nt, Artificial Sequence
  Antisense Oligo
cauucaagaggcccaggag

SEQ ID NO: 49227 - RNA, 19 nt, Artificial Sequence
  Sense Oligo
acgugggcucuuccugagg

SEQ ID NO: 49228 - RNA, 19 nt, Artificial Sequence
  Antisense Oligo
ccucaggaagagcccacgu

SEQ ID NO: 49229 - RNA, 19 nt, Artificial Sequence
  Sense Oligo
ugggcucuuccugaggagu

SEQ ID NO: 49230 - RNA, 19 nt, Artificial Sequence
  Antisense Oligo
acuccucaggaagagccca

SEQ ID NO: 49231 - RNA, 19 nt, Artificial Sequence
  Sense Oligo
gggcucuuccugaggagug

SEQ ID NO: 49232 - RNA, 19 nt, Artificial Sequence
  Antisense Oligo
cacuccucaggaagagccc

SEQ ID NO: 49233 - RNA, 19 nt, Artificial Sequence
  Sense Oligo
ggcucuuccugaggagugg

SEQ ID NO: 49234 - RNA, 19 nt, Artificial Sequence
  Antisense Oligo
ccacuccucaggaagagcc

SEQ ID NO: 49235 - RNA, 19 nt, Artificial Sequence
  Sense Oligo
gcucuuccugaggaguggg

SEQ ID NO: 49236 - RNA, 19 nt, Artificial Sequence
  Antisense Oligo
cccacuccucaggaagagc

SEQ ID NO: 49237 - RNA, 19 nt, Artificial Sequence
  Sense Oligo
ucuuccugaggagugggca

SEQ ID NO: 49238 - RNA, 19 nt, Artificial Sequence
  Antisense Oligo
ugcccacuccucaggaaga

SEQ ID NO: 49239 - RNA, 19 nt, Artificial Sequence
  Sense Oligo
cugaggagugggcaucauu

SEQ ID NO: 49240 - RNA, 19 nt, Artificial Sequence
  Antisense Oligo
aaugaugcccacuccucag

SEQ ID NO: 49241 - RNA, 19 nt, Artificial Sequence
  Sense Oligo
ugaggagugggcaucauuu

SEQ ID NO: 49242 - RNA, 19 nt, Artificial Sequence
  Antisense Oligo
aaaugaugcccacuccuca

SEQ ID NO: 49243 - RNA, 19 nt, Artificial Sequence
  Sense Oligo
gaggagugggcaucauuuc

SEQ ID NO: 49244 - RNA, 19 nt, Artificial Sequence
  Antisense Oligo
gaaaugaugcccacuccuc

SEQ ID NO: 49245 - RNA, 19 nt, Artificial Sequence
  Sense Oligo
gugggcaucauuucacugu

SEQ ID NO: 49246 - RNA, 19 nt, Artificial Sequence
  Antisense Oligo
acagugaaaugaugcccac

SEQ ID NO: 49247 - RNA, 19 nt, Artificial Sequence
  Sense Oligo
ucauuucacuguguguugg

SEQ ID NO: 49248 - RNA, 19 nt, Artificial Sequence
  Antisense Oligo
ccaacacacagugaaauga

SEQ ID NO: 49249 - RNA, 19 nt, Artificial Sequence
  Sense Oligo
cauuucacuguguguuggg

SEQ ID NO: 49250 - RNA, 19 nt, Artificial Sequence
  Antisense Oligo
cccaacacacagugaaaug

SEQ ID NO: 49251 - RNA, 19 nt, Artificial Sequence
  Sense Oligo
gacacccucucagguuucc

SEQ ID NO: 49252 - RNA, 19 nt, Artificial Sequence
  Antisense Oligo
ggaaaccugagaggguguc

SEQ ID NO: 49253 - RNA, 19 nt, Artificial Sequence
  Sense Oligo
acacccucucagguuucca

SEQ ID NO: 49254 - RNA, 19 nt, Artificial Sequence
  Antisense Oligo
uggaaaccugagagggugu

SEQ ID NO: 49255 - RNA, 19 nt, Artificial Sequence
  Sense Oligo
cacccucucagguuuccau

SEQ ID NO: 49256 - RNA, 19 nt, Artificial Sequence
  Antisense Oligo
auggaaaccugagagggug

SEQ ID NO: 49257 - RNA, 19 nt, Artificial Sequence
  Sense Oligo
cucucagguuuccauggcu

SEQ ID NO: 49258 - RNA, 19 nt, Artificial Sequence
  Antisense Oligo
agccauggaaaccugagag

SEQ ID NO: 49259 - RNA, 19 nt, Artificial Sequence
  Sense Oligo
ucucagguuuccauggcuc

SEQ ID NO: 49260 - RNA, 19 nt, Artificial Sequence
  Antisense Oligo
gagccauggaaaccugaga

SEQ ID NO: 49261 - RNA, 19 nt, Artificial Sequence
  Sense Oligo
auggcucagcagaagcagu

SEQ ID NO: 49262 - RNA, 19 nt, Artificial Sequence
  Antisense Oligo
acugcuucugcugagccau

SEQ ID NO: 49263 - RNA, 19 nt, Artificial Sequence
  Sense Oligo
cacagugggaaucuaagag

SEQ ID NO: 49264 - RNA, 19 nt, Artificial Sequence
  Antisense Oligo
cucuuagauucccacugug

SEQ ID NO: 49265 - RNA, 19 nt, Artificial Sequence
  Sense Oligo
acagugggaaucuaagagc

SEQ ID NO: 49266 - RNA, 19 nt, Artificial Sequence
  Antisense Oligo
gcucuuagauucccacugu

SEQ ID NO: 49267 - RNA, 19 nt, Artificial Sequence
  Sense Oligo
cagugggaaucuaagagca

SEQ ID NO: 49268 - RNA, 19 nt, Artificial Sequence
  Antisense Oligo
ugcucuuagauucccacug

SEQ ID NO: 49269 - RNA, 19 nt, Artificial Sequence
  Sense Oligo
gugggaaucuaagagcauc

SEQ ID NO: 49270 - RNA, 19 nt, Artificial Sequence
  Antisense Oligo
gaugcucuuagauucccac

SEQ ID NO: 49271 - RNA, 19 nt, Artificial Sequence
  Sense Oligo
ugggaaucuaagagcaucu

SEQ ID NO: 49272 - RNA, 19 nt, Artificial Sequence
  Antisense Oligo
agaugcucuuagauuccca

SEQ ID NO: 49273 - RNA, 19 nt, Artificial Sequence
  Sense Oligo
cucucagauuuugcucuag

SEQ ID NO: 49274 - RNA, 19 nt, Artificial Sequence
  Antisense Oligo
cuagagcaaaaucugagag

SEQ ID NO: 49275 - RNA, 19 nt, Artificial Sequence
  Sense Oligo
ucucagauuuugcucuaga

SEQ ID NO: 49276 - RNA, 19 nt, Artificial Sequence
  Antisense Oligo
ucuagagcaaaaucugaga

SEQ ID NO: 49277 - RNA, 19 nt, Artificial Sequence
  Sense Oligo
cucagauuuugcucuagaa

SEQ ID NO: 49278 - RNA, 19 nt, Artificial Sequence
  Antisense Oligo
uucuagagcaaaaucugag

SEQ ID NO: 49279 - RNA, 19 nt, Artificial Sequence
  Sense Oligo
ucagauuuugcucuagaau

SEQ ID NO: 49280 - RNA, 19 nt, Artificial Sequence
  Antisense Oligo
auucuagagcaaaaucuga

SEQ ID NO: 49281 - RNA, 19 nt, Artificial Sequence
  Sense Oligo
cagauuuugcucuagaauu

SEQ ID NO: 49282 - RNA, 19 nt, Artificial Sequence
  Antisense Oligo
aauucuagagcaaaaucug

SEQ ID NO: 49283 - RNA, 19 nt, Artificial Sequence
  Sense Oligo
agauuuugcucuagaauug

SEQ ID NO: 49284 - RNA, 19 nt, Artificial Sequence
  Antisense Oligo
caauucuagagcaaaaucu

SEQ ID NO: 49285 - RNA, 19 nt, Artificial Sequence
  Sense Oligo
gauuuugcucuagaauugg

SEQ ID NO: 49286 - RNA, 19 nt, Artificial Sequence
  Antisense Oligo
ccaauucuagagcaaaauc

SEQ ID NO: 49287 - RNA, 19 nt, Artificial Sequence
  Sense Oligo
uuuugcucuagaauuggcc

SEQ ID NO: 49288 - RNA, 19 nt, Artificial Sequence
  Antisense Oligo
ggccaauucuagagcaaaa

SEQ ID NO: 49289 - RNA, 19 nt, Artificial Sequence
  Sense Oligo
uuugcucuagaauuggccu

SEQ ID NO: 49290 - RNA, 19 nt, Artificial Sequence
  Antisense Oligo
aggccaauucuagagcaaa

SEQ ID NO: 49291 - RNA, 19 nt, Artificial Sequence
  Sense Oligo
uugcucuagaauuggccug

SEQ ID NO: 49292 - RNA, 19 nt, Artificial Sequence
  Antisense Oligo
caggccaauucuagagcaa

SEQ ID NO: 49293 - RNA, 19 nt, Artificial Sequence
  Sense Oligo
cucuagaauuggccuggcc

SEQ ID NO: 49294 - RNA, 19 nt, Artificial Sequence
  Antisense Oligo
ggccaggccaauucuagag

SEQ ID NO: 49295 - RNA, 19 nt, Artificial Sequence
  Sense Oligo
cuggccaacggacuucccu

SEQ ID NO: 49296 - RNA, 19 nt, Artificial Sequence
  Antisense Oligo
agggaaguccguuggccag

SEQ ID NO: 49297 - RNA, 19 nt, Artificial Sequence
  Sense Oligo
uggccaacggacuucccuu

SEQ ID NO: 49298 - RNA, 19 nt, Artificial Sequence
  Antisense Oligo
aagggaaguccguuggcca

SEQ ID NO: 49299 - RNA, 19 nt, Artificial Sequence
  Sense Oligo
ggccaacggacuucccuuc

SEQ ID NO: 49300 - RNA, 19 nt, Artificial Sequence
  Antisense Oligo
gaagggaaguccguuggcc

SEQ ID NO: 49301 - RNA, 19 nt, Artificial Sequence
  Sense Oligo
gccaacggacuucccuucc

SEQ ID NO: 49302 - RNA, 19 nt, Artificial Sequence
  Antisense Oligo
ggaagggaaguccguuggc

SEQ ID NO: 49303 - RNA, 19 nt, Artificial Sequence
  Sense Oligo
ccaacggacuucccuuccu

SEQ ID NO: 49304 - RNA, 19 nt, Artificial Sequence
  Antisense Oligo
aggaagggaaguccguugg

SEQ ID NO: 49305 - RNA, 19 nt, Artificial Sequence
  Sense Oligo
gggacagaagcacuccgga

SEQ ID NO: 49306 - RNA, 19 nt, Artificial Sequence
  Antisense Oligo
uccggagugcuucuguccc

SEQ ID NO: 49307 - RNA, 19 nt, Artificial Sequence
  Sense Oligo
ggacagaagcacuccggag

SEQ ID NO: 49308 - RNA, 19 nt, Artificial Sequence
  Antisense Oligo
cuccggagugcuucugucc

SEQ ID NO: 49309 - RNA, 19 nt, Artificial Sequence
  Sense Oligo
gacagaagcacuccggagc

SEQ ID NO: 49310 - RNA, 19 nt, Artificial Sequence
  Antisense Oligo
gcuccggagugcuucuguc

SEQ ID NO: 49311 - RNA, 19 nt, Artificial Sequence
  Sense Oligo
acagaagcacuccggagcc

SEQ ID NO: 49312 - RNA, 19 nt, Artificial Sequence
  Antisense Oligo
ggcuccggagugcuucugu

SEQ ID NO: 49313 - RNA, 19 nt, Artificial Sequence
  Sense Oligo
cagaagcacuccggagcca

SEQ ID NO: 49314 - RNA, 19 nt, Artificial Sequence
  Antisense Oligo
uggcuccggagugcuucug

SEQ ID NO: 49315 - RNA, 19 nt, Artificial Sequence
  Sense Oligo
agaagcacuccggagccaa

SEQ ID NO: 49316 - RNA, 19 nt, Artificial Sequence
  Antisense Oligo
uuggcuccggagugcuucu

SEQ ID NO: 49317 - RNA, 19 nt, Artificial Sequence
  Sense Oligo
gaagcacuccggagccaac

SEQ ID NO: 49318 - RNA, 19 nt, Artificial Sequence
  Antisense Oligo
guuggcuccggagugcuuc

SEQ ID NO: 49319 - RNA, 19 nt, Artificial Sequence
  Sense Oligo
acagcucagccacggccau

SEQ ID NO: 49320 - RNA, 19 nt, Artificial Sequence
  Antisense Oligo
auggccguggcugagcugu

SEQ ID NO: 49321 - RNA, 19 nt, Artificial Sequence
  Sense Oligo
cgucuguuucugccuuugu

SEQ ID NO: 49322 - RNA, 19 nt, Artificial Sequence
  Antisense Oligo
acaaaggcagaaacagacg

SEQ ID NO: 49323 - RNA, 19 nt, Artificial Sequence
  Sense Oligo
cagccucuuucuugcgggu

SEQ ID NO: 49324 - RNA, 19 nt, Artificial Sequence
  Antisense Oligo
acccgcaagaaagaggcug

SEQ ID NO: 49325 - RNA, 19 nt, Artificial Sequence
  Sense Oligo
agccucuuucuugcgggua

SEQ ID NO: 49326 - RNA, 19 nt, Artificial Sequence
  Antisense Oligo
uacccgcaagaaagaggcu

SEQ ID NO: 49327 - RNA, 19 nt, Artificial Sequence
  Sense Oligo
gccucuuucuugcggguau

SEQ ID NO: 49328 - RNA, 19 nt, Artificial Sequence
  Antisense Oligo
auacccgcaagaaagaggc

SEQ ID NO: 49329 - RNA, 19 nt, Artificial Sequence
  Sense Oligo
ccucuuucuugcggguauc

SEQ ID NO: 49330 - RNA, 19 nt, Artificial Sequence
  Antisense Oligo
gauacccgcaagaaagagg

SEQ ID NO: 49331 - RNA, 19 nt, Artificial Sequence
  Sense Oligo
cucuuucuugcggguaucc

SEQ ID NO: 49332 - RNA, 19 nt, Artificial Sequence
  Antisense Oligo
ggauacccgcaagaaagag

SEQ ID NO: 49333 - RNA, 19 nt, Artificial Sequence
  Sense Oligo
uugcggguauccaagaugc

SEQ ID NO: 49334 - RNA, 19 nt, Artificial Sequence
  Antisense Oligo
gcaucuuggauacccgcaa

SEQ ID NO: 49335 - RNA, 19 nt, Artificial Sequence
  Sense Oligo
ugcggguauccaagaugcg

SEQ ID NO: 49336 - RNA, 19 nt, Artificial Sequence
  Antisense Oligo
cgcaucuuggauacccgca

SEQ ID NO: 49337 - RNA, 19 nt, Artificial Sequence
  Sense Oligo
gcggguauccaagaugcgc

SEQ ID NO: 49338 - RNA, 19 nt, Artificial Sequence
  Antisense Oligo
gcgcaucuuggauacccgc

SEQ ID NO: 49339 - RNA, 19 nt, Artificial Sequence
  Sense Oligo
cggguauccaagaugcgcc

SEQ ID NO: 49340 - RNA, 19 nt, Artificial Sequence
  Antisense Oligo
ggcgcaucuuggauacccg

SEQ ID NO: 49341 - RNA, 19 nt, Artificial Sequence
  Sense Oligo
ggguauccaagaugcgccu

SEQ ID NO: 49342 - RNA, 19 nt, Artificial Sequence
  Antisense Oligo
aggcgcaucuuggauaccc

SEQ ID NO: 49343 - RNA, 19 nt, Artificial Sequence
  Sense Oligo
gguauccaagaugcgccuc

SEQ ID NO: 49344 - RNA, 19 nt, Artificial Sequence
  Antisense Oligo
gaggcgcaucuuggauacc

SEQ ID NO: 49345 - RNA, 19 nt, Artificial Sequence
  Sense Oligo
guauccaagaugcgccuca

SEQ ID NO: 49346 - RNA, 19 nt, Artificial Sequence
  Antisense Oligo
ugaggcgcaucuuggauac

SEQ ID NO: 49347 - RNA, 19 nt, Artificial Sequence
  Sense Oligo
uauccaagaugcgccucag

SEQ ID NO: 49348 - RNA, 19 nt, Artificial Sequence
  Antisense Oligo
cugaggcgcaucuuggaua

SEQ ID NO: 49349 - RNA, 19 nt, Artificial Sequence
  Sense Oligo
auccaagaugcgccucagu

SEQ ID NO: 49350 - RNA, 19 nt, Artificial Sequence
  Antisense Oligo
acugaggcgcaucuuggau

SEQ ID NO: 49351 - RNA, 19 nt, Artificial Sequence
  Sense Oligo
uccaagaugcgccucagug

SEQ ID NO: 49352 - RNA, 19 nt, Artificial Sequence
  Antisense Oligo
cacugaggcgcaucuugga

SEQ ID NO: 49353 - RNA, 19 nt, Artificial Sequence
  Sense Oligo
ccaagaugcgccucagugu

SEQ ID NO: 49354 - RNA, 19 nt, Artificial Sequence
  Antisense Oligo
acacugaggcgcaucuugg

SEQ ID NO: 49355 - RNA, 19 nt, Artificial Sequence
  Sense Oligo
caagaugcgccucaguguc

SEQ ID NO: 49356 - RNA, 19 nt, Artificial Sequence
  Antisense Oligo
gacacugaggcgcaucuug

SEQ ID NO: 49357 - RNA, 19 nt, Artificial Sequence
  Sense Oligo
aagaugcgccucagugucu

SEQ ID NO: 49358 - RNA, 19 nt, Artificial Sequence
  Antisense Oligo
agacacugaggcgcaucuu

SEQ ID NO: 49359 - RNA, 19 nt, Artificial Sequence
  Sense Oligo
agaugcgccucagugucuu

SEQ ID NO: 49360 - RNA, 19 nt, Artificial Sequence
  Antisense Oligo
aagacacugaggcgcaucu

SEQ ID NO: 49361 - RNA, 19 nt, Artificial Sequence
  Sense Oligo
gagccaguuucacccucug

SEQ ID NO: 49362 - RNA, 19 nt, Artificial Sequence
  Antisense Oligo
cagagggugaaacuggcuc

SEQ ID NO: 49363 - RNA, 19 nt, Artificial Sequence
  Sense Oligo
uuucacccucuggaguggu

SEQ ID NO: 49364 - RNA, 19 nt, Artificial Sequence
  Antisense Oligo
accacuccagagggugaaa

SEQ ID NO: 49365 - RNA, 19 nt, Artificial Sequence
  Sense Oligo
uucacccucuggagugguu

SEQ ID NO: 49366 - RNA, 19 nt, Artificial Sequence
  Antisense Oligo
aaccacuccagagggugaa

SEQ ID NO: 49367 - RNA, 19 nt, Artificial Sequence
  Sense Oligo
ucacccucuggagugguug

SEQ ID NO: 49368 - RNA, 19 nt, Artificial Sequence
  Antisense Oligo
caaccacuccagaggguga

SEQ ID NO: 49369 - RNA, 19 nt, Artificial Sequence
  Sense Oligo
cacccucuggagugguugg

SEQ ID NO: 49370 - RNA, 19 nt, Artificial Sequence
  Antisense Oligo
ccaaccacuccagagggug

SEQ ID NO: 49371 - RNA, 19 nt, Artificial Sequence
  Sense Oligo
acccucuggagugguuggc

SEQ ID NO: 49372 - RNA, 19 nt, Artificial Sequence
  Antisense Oligo
gccaaccacuccagagggu

SEQ ID NO: 49373 - RNA, 19 nt, Artificial Sequence
  Sense Oligo
cccucuggagugguuggca

SEQ ID NO: 49374 - RNA, 19 nt, Artificial Sequence
  Antisense Oligo
ugccaaccacuccagaggg

SEQ ID NO: 49375 - RNA, 19 nt, Artificial Sequence
  Sense Oligo
ccucuggagugguuggcaa

SEQ ID NO: 49376 - RNA, 19 nt, Artificial Sequence
  Antisense Oligo
uugccaaccacuccagagg

SEQ ID NO: 49377 - RNA, 19 nt, Artificial Sequence
  Sense Oligo
cucuggagugguuggcaag

SEQ ID NO: 49378 - RNA, 19 nt, Artificial Sequence
  Antisense Oligo
cuugccaaccacuccagag

SEQ ID NO: 49379 - RNA, 19 nt, Artificial Sequence
  Sense Oligo
ucuggagugguuggcaagg

SEQ ID NO: 49380 - RNA, 19 nt, Artificial Sequence
  Antisense Oligo
ccuugccaaccacuccaga

SEQ ID NO: 49381 - RNA, 19 nt, Artificial Sequence
  Sense Oligo
cuggagugguuggcaaggg

SEQ ID NO: 49382 - RNA, 19 nt, Artificial Sequence
  Antisense Oligo
cccuugccaaccacuccag

SEQ ID NO: 49383 - RNA, 19 nt, Artificial Sequence
  Sense Oligo
agugguuggcaagggaagc

SEQ ID NO: 49384 - RNA, 19 nt, Artificial Sequence
  Antisense Oligo
gcuucccuugccaaccacu

SEQ ID NO: 49385 - RNA, 19 nt, Artificial Sequence
  Sense Oligo
gugguuggcaagggaagcc

SEQ ID NO: 49386 - RNA, 19 nt, Artificial Sequence
  Antisense Oligo
ggcuucccuugccaaccac

SEQ ID NO: 49387 - RNA, 19 nt, Artificial Sequence
  Sense Oligo
ugguuggcaagggaagccu

SEQ ID NO: 49388 - RNA, 19 nt, Artificial Sequence
  Antisense Oligo
aggcuucccuugccaacca

SEQ ID NO: 49389 - RNA, 19 nt, Artificial Sequence
  Sense Oligo
uggcaagggaagccugcaa

SEQ ID NO: 49390 - RNA, 19 nt, Artificial Sequence
  Antisense Oligo
uugcaggcuucccuugcca

SEQ ID NO: 49391 - RNA, 19 nt, Artificial Sequence
  Sense Oligo
ggcaagggaagccugcaac

SEQ ID NO: 49392 - RNA, 19 nt, Artificial Sequence
  Antisense Oligo
guugcaggcuucccuugcc

SEQ ID NO: 49393 - RNA, 19 nt, Artificial Sequence
  Sense Oligo
gcaagggaagccugcaacc

SEQ ID NO: 49394 - RNA, 19 nt, Artificial Sequence
  Antisense Oligo
gguugcaggcuucccuugc

SEQ ID NO: 49395 - RNA, 19 nt, Artificial Sequence
  Sense Oligo
caagggaagccugcaacca

SEQ ID NO: 49396 - RNA, 19 nt, Artificial Sequence
  Antisense Oligo
ugguugcaggcuucccuug

SEQ ID NO: 49397 - RNA, 19 nt, Artificial Sequence
  Sense Oligo
aagggaagccugcaaccag

SEQ ID NO: 49398 - RNA, 19 nt, Artificial Sequence
  Antisense Oligo
cugguugcaggcuucccuu

SEQ ID NO: 49399 - RNA, 19 nt, Artificial Sequence
  Sense Oligo
cugcaaccaggacgcucuc

SEQ ID NO: 49400 - RNA, 19 nt, Artificial Sequence
  Antisense Oligo
gagagcguccugguugcag

SEQ ID NO: 49401 - RNA, 19 nt, Artificial Sequence
  Sense Oligo
aaccaggacgcucuccagg

SEQ ID NO: 49402 - RNA, 19 nt, Artificial Sequence
  Antisense Oligo
ccuggagagcguccugguu

SEQ ID NO: 49403 - RNA, 19 nt, Artificial Sequence
  Sense Oligo
accaggacgcucuccagga

SEQ ID NO: 49404 - RNA, 19 nt, Artificial Sequence
  Antisense Oligo
uccuggagagcguccuggu

SEQ ID NO: 49405 - RNA, 19 nt, Artificial Sequence
  Sense Oligo
cgggcacauucagguacug

SEQ ID NO: 49406 - RNA, 19 nt, Artificial Sequence
  Antisense Oligo
caguaccugaaugugcccg

SEQ ID NO: 49407 - RNA, 19 nt, Artificial Sequence
  Sense Oligo
cauucagguacugugacua

SEQ ID NO: 49408 - RNA, 19 nt, Artificial Sequence
  Antisense Oligo
uagucacaguaccugaaug

SEQ ID NO: 49409 - RNA, 19 nt, Artificial Sequence
  Sense Oligo
uucagguacugugacuaaa

SEQ ID NO: 49410 - RNA, 19 nt, Artificial Sequence
  Antisense Oligo
uuuagucacaguaccugaa

SEQ ID NO: 49411 - RNA, 19 nt, Artificial Sequence
  Sense Oligo
ucagguacugugacuaaag

SEQ ID NO: 49412 - RNA, 19 nt, Artificial Sequence
  Antisense Oligo
cuuuagucacaguaccuga

SEQ ID NO: 49413 - RNA, 19 nt, Artificial Sequence
  Sense Oligo
cagguacugugacuaaagg

SEQ ID NO: 49414 - RNA, 19 nt, Artificial Sequence
  Antisense Oligo
ccuuuagucacaguaccug

SEQ ID NO: 49415 - RNA, 19 nt, Artificial Sequence
  Sense Oligo
agguacugugacuaaagga

SEQ ID NO: 49416 - RNA, 19 nt, Artificial Sequence
  Antisense Oligo
uccuuuagucacaguaccu

SEQ ID NO: 49417 - RNA, 19 nt, Artificial Sequence
  Sense Oligo
gguacugugacuaaaggaa

SEQ ID NO: 49418 - RNA, 19 nt, Artificial Sequence
  Antisense Oligo
uuccuuuagucacaguacc

SEQ ID NO: 49419 - RNA, 19 nt, Artificial Sequence
  Sense Oligo
guacugugacuaaaggaag

SEQ ID NO: 49420 - RNA, 19 nt, Artificial Sequence
  Antisense Oligo
cuuccuuuagucacaguac

SEQ ID NO: 49421 - RNA, 19 nt, Artificial Sequence
  Sense Oligo
uacugugacuaaaggaagc

SEQ ID NO: 49422 - RNA, 19 nt, Artificial Sequence
  Antisense Oligo
gcuuccuuuagucacagua

SEQ ID NO: 49423 - RNA, 19 nt, Artificial Sequence
  Sense Oligo
acugugacuaaaggaagca

SEQ ID NO: 49424 - RNA, 19 nt, Artificial Sequence
  Antisense Oligo
ugcuuccuuuagucacagu

SEQ ID NO: 49425 - RNA, 19 nt, Artificial Sequence
  Sense Oligo
cugugacuaaaggaagcaa

SEQ ID NO: 49426 - RNA, 19 nt, Artificial Sequence
  Antisense Oligo
uugcuuccuuuagucacag

SEQ ID NO: 49427 - RNA, 19 nt, Artificial Sequence
  Sense Oligo
ugugacuaaaggaagcaag

SEQ ID NO: 49428 - RNA, 19 nt, Artificial Sequence
  Antisense Oligo
cuugcuuccuuuagucaca

SEQ ID NO: 49429 - RNA, 19 nt, Artificial Sequence
  Sense Oligo
gugacuaaaggaagcaagg

SEQ ID NO: 49430 - RNA, 19 nt, Artificial Sequence
  Antisense Oligo
ccuugcuuccuuuagucac

SEQ ID NO: 49431 - RNA, 19 nt, Artificial Sequence
  Sense Oligo
ugacuaaaggaagcaagga

SEQ ID NO: 49432 - RNA, 19 nt, Artificial Sequence
  Antisense Oligo
uccuugcuuccuuuaguca

SEQ ID NO: 49433 - RNA, 19 nt, Artificial Sequence
  Sense Oligo
acuaaaggaagcaaggagu

SEQ ID NO: 49434 - RNA, 19 nt, Artificial Sequence
  Antisense Oligo
acuccuugcuuccuuuagu

SEQ ID NO: 49435 - RNA, 19 nt, Artificial Sequence
  Sense Oligo
uaaaggaagcaaggagugg

SEQ ID NO: 49436 - RNA, 19 nt, Artificial Sequence
  Antisense Oligo
ccacuccuugcuuccuuua

SEQ ID NO: 49437 - RNA, 19 nt, Artificial Sequence
  Sense Oligo
aguggcuccaaucuggugg

SEQ ID NO: 49438 - RNA, 19 nt, Artificial Sequence
  Antisense Oligo
ccaccagauuggagccacu

SEQ ID NO: 49439 - RNA, 19 nt, Artificial Sequence
  Sense Oligo
guggcuccaaucugguggc

SEQ ID NO: 49440 - RNA, 19 nt, Artificial Sequence
  Antisense Oligo
gccaccagauuggagccac

SEQ ID NO: 49441 - RNA, 19 nt, Artificial Sequence
  Sense Oligo
uggcuccaaucugguggca

SEQ ID NO: 49442 - RNA, 19 nt, Artificial Sequence
  Antisense Oligo
ugccaccagauuggagcca

SEQ ID NO: 49443 - RNA, 19 nt, Artificial Sequence
  Sense Oligo
ggcuccaaucugguggcag

SEQ ID NO: 49444 - RNA, 19 nt, Artificial Sequence
  Antisense Oligo
cugccaccagauuggagcc

SEQ ID NO: 49445 - RNA, 19 nt, Artificial Sequence
  Sense Oligo
gcuccaaucugguggcagc

SEQ ID NO: 49446 - RNA, 19 nt, Artificial Sequence
  Antisense Oligo
gcugccaccagauuggagc

SEQ ID NO: 49447 - RNA, 19 nt, Artificial Sequence
  Sense Oligo
cuccaaucugguggcagca

SEQ ID NO: 49448 - RNA, 19 nt, Artificial Sequence
  Antisense Oligo
ugcugccaccagauuggag

SEQ ID NO: 49449 - RNA, 19 nt, Artificial Sequence
  Sense Oligo
uccaaucugguggcagcau

SEQ ID NO: 49450 - RNA, 19 nt, Artificial Sequence
  Antisense Oligo
augcugccaccagauugga

SEQ ID NO: 49451 - RNA, 19 nt, Artificial Sequence
  Sense Oligo
ccaaucugguggcagcaug

SEQ ID NO: 49452 - RNA, 19 nt, Artificial Sequence
  Antisense Oligo
caugcugccaccagauugg

SEQ ID NO: 49453 - RNA, 19 nt, Artificial Sequence
  Sense Oligo
caaucugguggcagcaugg

SEQ ID NO: 49454 - RNA, 19 nt, Artificial Sequence
  Antisense Oligo
ccaugcugccaccagauug

SEQ ID NO: 49455 - RNA, 19 nt, Artificial Sequence
  Sense Oligo
aaucugguggcagcauggg

SEQ ID NO: 49456 - RNA, 19 nt, Artificial Sequence
  Antisense Oligo
cccaugcugccaccagauu

SEQ ID NO: 49457 - RNA, 19 nt, Artificial Sequence
  Sense Oligo
cugccugcagggauccucu

SEQ ID NO: 49458 - RNA, 19 nt, Artificial Sequence
  Antisense Oligo
agaggaucccugcaggcag

SEQ ID NO: 49459 - RNA, 19 nt, Artificial Sequence
  Sense Oligo
ugccugcagggauccucuc

SEQ ID NO: 49460 - RNA, 19 nt, Artificial Sequence
  Antisense Oligo
gagaggaucccugcaggca

SEQ ID NO: 49461 - RNA, 19 nt, Artificial Sequence
  Sense Oligo
ccugcagggauccucucuc

SEQ ID NO: 49462 - RNA, 19 nt, Artificial Sequence
  Antisense Oligo
gagagaggaucccugcagg

SEQ ID NO: 49463 - RNA, 19 nt, Artificial Sequence
  Sense Oligo
ugagcuguuucuuuccaaa

SEQ ID NO: 49464 - RNA, 19 nt, Artificial Sequence
  Antisense Oligo
uuuggaaagaaacagcuca

SEQ ID NO: 49465 - RNA, 19 nt, Artificial Sequence
  Sense Oligo
accucucagccauucaaag

SEQ ID NO: 49466 - RNA, 19 nt, Artificial Sequence
  Antisense Oligo
cuuugaauggcugagaggu

SEQ ID NO: 49467 - RNA, 19 nt, Artificial Sequence
  Sense Oligo
ccucucagccauucaaagc

SEQ ID NO: 49468 - RNA, 19 nt, Artificial Sequence
  Antisense Oligo
gcuuugaauggcugagagg

SEQ ID NO: 49469 - RNA, 19 nt, Artificial Sequence
  Sense Oligo
agccauucaaagcuguaaa

SEQ ID NO: 49470 - RNA, 19 nt, Artificial Sequence
  Antisense Oligo
uuuacagcuuugaauggcu

SEQ ID NO: 49471 - RNA, 19 nt, Artificial Sequence
  Sense Oligo
ccauucaaagcuguaaagu

SEQ ID NO: 49472 - RNA, 19 nt, Artificial Sequence
  Antisense Oligo
acuuuacagcuuugaaugg

SEQ ID NO: 49473 - RNA, 19 nt, Artificial Sequence
  Sense Oligo
cauucaaagcuguaaaguu

SEQ ID NO: 49474 - RNA, 19 nt, Artificial Sequence
  Antisense Oligo
aacuuuacagcuuugaaug

SEQ ID NO: 49475 - RNA, 19 nt, Artificial Sequence
  Sense Oligo
acaguaggucuggacagug

SEQ ID NO: 49476 - RNA, 19 nt, Artificial Sequence
  Antisense Oligo
cacuguccagaccuacugu

SEQ ID NO: 49477 - RNA, 19 nt, Artificial Sequence
  Sense Oligo
caguaggucuggacagugg

SEQ ID NO: 49478 - RNA, 19 nt, Artificial Sequence
  Antisense Oligo
ccacuguccagaccuacug

SEQ ID NO: 49479 - RNA, 19 nt, Artificial Sequence
  Sense Oligo
aggucuggacaguggccaa

SEQ ID NO: 49480 - RNA, 19 nt, Artificial Sequence
  Antisense Oligo
uuggccacuguccagaccu

SEQ ID NO: 49481 - RNA, 19 nt, Artificial Sequence
  Sense Oligo
ggucuggacaguggccaaa

SEQ ID NO: 49482 - RNA, 19 nt, Artificial Sequence
  Antisense Oligo
uuuggccacuguccagacc

SEQ ID NO: 49483 - RNA, 19 nt, Artificial Sequence
  Sense Oligo
gucuggacaguggccaaau

SEQ ID NO: 49484 - RNA, 19 nt, Artificial Sequence
  Antisense Oligo
auuuggccacuguccagac

SEQ ID NO: 49485 - RNA, 19 nt, Artificial Sequence
  Sense Oligo
ucuggacaguggccaaaug

SEQ ID NO: 49486 - RNA, 19 nt, Artificial Sequence
  Antisense Oligo
cauuuggccacuguccaga

SEQ ID NO: 49487 - RNA, 19 nt, Artificial Sequence
  Sense Oligo
cuggacaguggccaaaugg

SEQ ID NO: 49488 - RNA, 19 nt, Artificial Sequence
  Antisense Oligo
ccauuuggccacuguccag

SEQ ID NO: 49489 - RNA, 19 nt, Artificial Sequence
  Sense Oligo
uggacaguggccaaauggc

SEQ ID NO: 49490 - RNA, 19 nt, Artificial Sequence
  Antisense Oligo
gccauuuggccacugucca

SEQ ID NO: 49491 - RNA, 19 nt, Artificial Sequence
  Sense Oligo
ggacaguggccaaauggca

SEQ ID NO: 49492 - RNA, 19 nt, Artificial Sequence
  Antisense Oligo
ugccauuuggccacugucc

SEQ ID NO: 49493 - RNA, 19 nt, Artificial Sequence
  Sense Oligo
gacaguggccaaauggcag

SEQ ID NO: 49494 - RNA, 19 nt, Artificial Sequence
  Antisense Oligo
cugccauuuggccacuguc

SEQ ID NO: 49495 - RNA, 19 nt, Artificial Sequence
  Sense Oligo
acaguggccaaauggcagg

SEQ ID NO: 49496 - RNA, 19 nt, Artificial Sequence
  Antisense Oligo
ccugccauuuggccacugu

SEQ ID NO: 49497 - RNA, 19 nt, Artificial Sequence
  Sense Oligo
guggccaaauggcaggugc

SEQ ID NO: 49498 - RNA, 19 nt, Artificial Sequence
  Antisense Oligo
gcaccugccauuuggccac

SEQ ID NO: 49499 - RNA, 19 nt, Artificial Sequence
  Sense Oligo
auggcaggugcuggacucu

SEQ ID NO: 49500 - RNA, 19 nt, Artificial Sequence
  Antisense Oligo
agaguccagcaccugccau

SEQ ID NO: 49501 - RNA, 19 nt, Artificial Sequence
  Sense Oligo
uggcaggugcuggacucuu

SEQ ID NO: 49502 - RNA, 19 nt, Artificial Sequence
  Antisense Oligo
aagaguccagcaccugcca

SEQ ID NO: 49503 - RNA, 19 nt, Artificial Sequence
  Sense Oligo
cuaauuucguguuuacagu

SEQ ID NO: 49504 - RNA, 19 nt, Artificial Sequence
  Antisense Oligo
acuguaaacacgaaauuag

SEQ ID NO: 49505 - RNA, 19 nt, Artificial Sequence
  Sense Oligo
acaucuguucuuagaguag

SEQ ID NO: 49506 - RNA, 19 nt, Artificial Sequence
  Antisense Oligo
cuacucuaagaacagaugu

SEQ ID NO: 49507 - RNA, 19 nt, Artificial Sequence
  Sense Oligo
caucuguucuuagaguaga

SEQ ID NO: 49508 - RNA, 19 nt, Artificial Sequence
  Antisense Oligo
ucuacucuaagaacagaug

SEQ ID NO: 49509 - RNA, 19 nt, Artificial Sequence
  Sense Oligo
aaagggcugcuguuuucag

SEQ ID NO: 49510 - RNA, 19 nt, Artificial Sequence
  Antisense Oligo
cugaaaacagcagcccuuu

SEQ ID NO: 49511 - RNA, 19 nt, Artificial Sequence
  Sense Oligo
aagggcugcuguuuucagu

SEQ ID NO: 49512 - RNA, 19 nt, Artificial Sequence
  Antisense Oligo
acugaaaacagcagcccuu

SEQ ID NO: 49513 - RNA, 19 nt, Artificial Sequence
  Sense Oligo
ggcugcuguuuucagucau

SEQ ID NO: 49514 - RNA, 19 nt, Artificial Sequence
  Antisense Oligo
augacugaaaacagcagcc

SEQ ID NO: 49515 - RNA, 19 nt, Artificial Sequence
  Sense Oligo
ggauuuucccaguccugcu

SEQ ID NO: 49516 - RNA, 19 nt, Artificial Sequence
  Antisense Oligo
agcaggacugggaaaaucc

SEQ ID NO: 49517 - RNA, 19 nt, Artificial Sequence
  Sense Oligo
uuucccaguccugcuguuu

SEQ ID NO: 49518 - RNA, 19 nt, Artificial Sequence
  Antisense Oligo
aaacagcaggacugggaaa

SEQ ID NO: 49519 - RNA, 19 nt, Artificial Sequence
  Sense Oligo
uucccaguccugcuguuug

SEQ ID NO: 49520 - RNA, 19 nt, Artificial Sequence
  Antisense Oligo
caaacagcaggacugggaa

SEQ ID NO: 49521 - RNA, 19 nt, Artificial Sequence
  Sense Oligo
ucccaguccugcuguuuga

SEQ ID NO: 49522 - RNA, 19 nt, Artificial Sequence
  Antisense Oligo
ucaaacagcaggacuggga

SEQ ID NO: 49523 - RNA, 19 nt, Artificial Sequence
  Sense Oligo
cccaguccugcuguuugaa

SEQ ID NO: 49524 - RNA, 19 nt, Artificial Sequence
  Antisense Oligo
uucaaacagcaggacuggg

SEQ ID NO: 49525 - RNA, 19 nt, Artificial Sequence
  Sense Oligo
ccaguccugcuguuugaag

SEQ ID NO: 49526 - RNA, 19 nt, Artificial Sequence
  Antisense Oligo
cuucaaacagcaggacugg

SEQ ID NO: 49527 - RNA, 19 nt, Artificial Sequence
  Sense Oligo
caguccugcuguuugaaga

SEQ ID NO: 49528 - RNA, 19 nt, Artificial Sequence
  Antisense Oligo
ucuucaaacagcaggacug

SEQ ID NO: 49529 - RNA, 19 nt, Artificial Sequence
  Sense Oligo
aguccugcuguuugaagaa

SEQ ID NO: 49530 - RNA, 19 nt, Artificial Sequence
  Antisense Oligo
uucuucaaacagcaggacu

SEQ ID NO: 49531 - RNA, 19 nt, Artificial Sequence
  Sense Oligo
guccugcuguuugaagaau

SEQ ID NO: 49532 - RNA, 19 nt, Artificial Sequence
  Antisense Oligo
auucuucaaacagcaggac

SEQ ID NO: 49533 - RNA, 19 nt, Artificial Sequence
  Sense Oligo
uccugcuguuugaagaaug

SEQ ID NO: 49534 - RNA, 19 nt, Artificial Sequence
  Antisense Oligo
cauucuucaaacagcagga

SEQ ID NO: 49535 - RNA, 19 nt, Artificial Sequence
  Sense Oligo
cugcuguuugaagaauggu

SEQ ID NO: 49536 - RNA, 19 nt, Artificial Sequence
  Antisense Oligo
accauucuucaaacagcag

SEQ ID NO: 49537 - RNA, 19 nt, Artificial Sequence
  Sense Oligo
ugcuguuugaagaauggua

SEQ ID NO: 49538 - RNA, 19 nt, Artificial Sequence
  Antisense Oligo
uaccauucuucaaacagca

SEQ ID NO: 49539 - RNA, 19 nt, Artificial Sequence
  Sense Oligo
gcuguuugaagaaugguaa

SEQ ID NO: 49540 - RNA, 19 nt, Artificial Sequence
  Antisense Oligo
uuaccauucuucaaacagc

SEQ ID NO: 49541 - RNA, 19 nt, Artificial Sequence
  Sense Oligo
cuguuugaagaaugguaac

SEQ ID NO: 49542 - RNA, 19 nt, Artificial Sequence
  Antisense Oligo
guuaccauucuucaaacag

SEQ ID NO: 49543 - RNA, 19 nt, Artificial Sequence
  Sense Oligo
aaccaggacccagcaguau

SEQ ID NO: 49544 - RNA, 19 nt, Artificial Sequence
  Antisense Oligo
auacugcuggguccugguu

SEQ ID NO: 49545 - RNA, 19 nt, Artificial Sequence
  Sense Oligo
accaggacccagcaguaua

SEQ ID NO: 49546 - RNA, 19 nt, Artificial Sequence
  Antisense Oligo
uauacugcuggguccuggu

SEQ ID NO: 49547 - RNA, 19 nt, Artificial Sequence
  Sense Oligo
ccaggacccagcaguauau

SEQ ID NO: 49548 - RNA, 19 nt, Artificial Sequence
  Antisense Oligo
auauacugcuggguccugg

SEQ ID NO: 49549 - RNA, 19 nt, Artificial Sequence
  Sense Oligo
caggacccagcaguauauu

SEQ ID NO: 49550 - RNA, 19 nt, Artificial Sequence
  Antisense Oligo
aauauacugcuggguccug

SEQ ID NO: 49551 - RNA, 19 nt, Artificial Sequence
  Sense Oligo
aggacccagcaguauauuc

SEQ ID NO: 49552 - RNA, 19 nt, Artificial Sequence
  Antisense Oligo
gaauauacugcuggguccu

SEQ ID NO: 49553 - RNA, 19 nt, Artificial Sequence
  Sense Oligo
ggacccagcaguauauuca

SEQ ID NO: 49554 - RNA, 19 nt, Artificial Sequence
  Antisense Oligo
ugaauauacugcugggucc

SEQ ID NO: 49555 - RNA, 19 nt, Artificial Sequence
  Sense Oligo
uauauucacugccaugguu

SEQ ID NO: 49556 - RNA, 19 nt, Artificial Sequence
  Antisense Oligo
aaccauggcagugaauaua

SEQ ID NO: 49557 - RNA, 19 nt, Artificial Sequence
  Sense Oligo
auauucacugccaugguua

SEQ ID NO: 49558 - RNA, 19 nt, Artificial Sequence
  Antisense Oligo
uaaccauggcagugaauau

SEQ ID NO: 49559 - RNA, 19 nt, Artificial Sequence
  Sense Oligo
uauucacugccaugguuau

SEQ ID NO: 49560 - RNA, 19 nt, Artificial Sequence
  Antisense Oligo
auaaccauggcagugaaua

SEQ ID NO: 49561 - RNA, 19 nt, Artificial Sequence
  Sense Oligo
auucacugccaugguuauu

SEQ ID NO: 49562 - RNA, 19 nt, Artificial Sequence
  Antisense Oligo
aauaaccauggcagugaau

SEQ ID NO: 49563 - RNA, 19 nt, Artificial Sequence
  Sense Oligo
uucacugccaugguuauuu

SEQ ID NO: 49564 - RNA, 19 nt, Artificial Sequence
  Antisense Oligo
aaauaaccauggcagugaa

SEQ ID NO: 49565 - RNA, 19 nt, Artificial Sequence
  Sense Oligo
ucacugccaugguuauuuu

SEQ ID NO: 49566 - RNA, 19 nt, Artificial Sequence
  Antisense Oligo
aaaauaaccauggcaguga

SEQ ID NO: 49567 - RNA, 19 nt, Artificial Sequence
  Sense Oligo
agacuaaccuugauuaucu

SEQ ID NO: 49568 - RNA, 19 nt, Artificial Sequence
  Antisense Oligo
agauaaucaagguuagucu

SEQ ID NO: 49569 - RNA, 19 nt, Artificial Sequence
  Sense Oligo
gacuaaccuugauuaucuu

SEQ ID NO: 49570 - RNA, 19 nt, Artificial Sequence
  Antisense Oligo
aagauaaucaagguuaguc

SEQ ID NO: 49571 - RNA, 19 nt, Artificial Sequence
  Sense Oligo
acuaaccuugauuaucuug

SEQ ID NO: 49572 - RNA, 19 nt, Artificial Sequence
  Antisense Oligo
caagauaaucaagguuagu

SEQ ID NO: 49573 - RNA, 19 nt, Artificial Sequence
  Sense Oligo
cuaaccuugauuaucuugg

SEQ ID NO: 49574 - RNA, 19 nt, Artificial Sequence
  Antisense Oligo
ccaagauaaucaagguuag

SEQ ID NO: 49575 - RNA, 19 nt, Artificial Sequence
  Sense Oligo
uaaccuugauuaucuugga

SEQ ID NO: 49576 - RNA, 19 nt, Artificial Sequence
  Antisense Oligo
uccaagauaaucaagguua

SEQ ID NO: 49577 - RNA, 19 nt, Artificial Sequence
  Sense Oligo
ccuugauuaucuuggaugu

SEQ ID NO: 49578 - RNA, 19 nt, Artificial Sequence
  Antisense Oligo
acauccaagauaaucaagg

SEQ ID NO: 49579 - RNA, 19 nt, Artificial Sequence
  Sense Oligo
cuugauuaucuuggaugug

SEQ ID NO: 49580 - RNA, 19 nt, Artificial Sequence
  Antisense Oligo
cacauccaagauaaucaag

SEQ ID NO: 49581 - RNA, 19 nt, Artificial Sequence
  Sense Oligo
uugauuaucuuggaugugg

SEQ ID NO: 49582 - RNA, 19 nt, Artificial Sequence
  Antisense Oligo
ccacauccaagauaaucaa

SEQ ID NO: 49583 - RNA, 19 nt, Artificial Sequence
  Sense Oligo
ugauuaucuuggauguggc

SEQ ID NO: 49584 - RNA, 19 nt, Artificial Sequence
  Antisense Oligo
gccacauccaagauaauca

SEQ ID NO: 49585 - RNA, 19 nt, Artificial Sequence
  Sense Oligo
gauuaucuuggauguggcc

SEQ ID NO: 49586 - RNA, 19 nt, Artificial Sequence
  Antisense Oligo
ggccacauccaagauaauc

SEQ ID NO: 49587 - RNA, 19 nt, Artificial Sequence
  Sense Oligo
auuaucuuggauguggccg

SEQ ID NO: 49588 - RNA, 19 nt, Artificial Sequence
  Antisense Oligo
cggccacauccaagauaau

SEQ ID NO: 49589 - RNA, 19 nt, Artificial Sequence
  Sense Oligo
uuaucuuggauguggccgu

SEQ ID NO: 49590 - RNA, 19 nt, Artificial Sequence
  Antisense Oligo
acggccacauccaagauaa

SEQ ID NO: 49591 - RNA, 19 nt, Artificial Sequence
  Sense Oligo
uaucuuggauguggccgug

SEQ ID NO: 49592 - RNA, 19 nt, Artificial Sequence
  Antisense Oligo
cacggccacauccaagaua

SEQ ID NO: 49593 - RNA, 19 nt, Artificial Sequence
  Sense Oligo
aucuuggauguggccgugu

SEQ ID NO: 49594 - RNA, 19 nt, Artificial Sequence
  Antisense Oligo
acacggccacauccaagau

SEQ ID NO: 49595 - RNA, 19 nt, Artificial Sequence
  Sense Oligo
ucuuggauguggccgugua

SEQ ID NO: 49596 - RNA, 19 nt, Artificial Sequence
  Antisense Oligo
uacacggccacauccaaga

SEQ ID NO: 49597 - RNA, 19 nt, Artificial Sequence
  Sense Oligo
cuuggauguggccguguau

SEQ ID NO: 49598 - RNA, 19 nt, Artificial Sequence
  Antisense Oligo
auacacggccacauccaag

SEQ ID NO: 49599 - RNA, 19 nt, Artificial Sequence
  Sense Oligo
uuggauguggccguguauu

SEQ ID NO: 49600 - RNA, 19 nt, Artificial Sequence
  Antisense Oligo
aauacacggccacauccaa

SEQ ID NO: 49601 - RNA, 19 nt, Artificial Sequence
  Sense Oligo
uggauguggccguguauug

SEQ ID NO: 49602 - RNA, 19 nt, Artificial Sequence
  Antisense Oligo
caauacacggccacaucca

SEQ ID NO: 49603 - RNA, 19 nt, Artificial Sequence
  Sense Oligo
ggauguggccguguauuga

SEQ ID NO: 49604 - RNA, 19 nt, Artificial Sequence
  Antisense Oligo
ucaauacacggccacaucc

SEQ ID NO: 49605 - RNA, 19 nt, Artificial Sequence
  Sense Oligo
gauguggccguguauugag

SEQ ID NO: 49606 - RNA, 19 nt, Artificial Sequence
  Antisense Oligo
cucaauacacggccacauc

SEQ ID NO: 49607 - RNA, 19 nt, Artificial Sequence
  Sense Oligo
auguggccguguauugagg

SEQ ID NO: 49608 - RNA, 19 nt, Artificial Sequence
  Antisense Oligo
ccucaauacacggccacau

SEQ ID NO: 49609 - RNA, 19 nt, Artificial Sequence
  Sense Oligo
uguggccguguauugagga

SEQ ID NO: 49610 - RNA, 19 nt, Artificial Sequence
  Antisense Oligo
uccucaauacacggccaca

SEQ ID NO: 49611 - RNA, 19 nt, Artificial Sequence
  Sense Oligo
gccguguauugaggaagga

SEQ ID NO: 49612 - RNA, 19 nt, Artificial Sequence
  Antisense Oligo
uccuuccucaauacacggc

SEQ ID NO: 49613 - RNA, 19 nt, Artificial Sequence
  Sense Oligo
ccguguauugaggaaggag

SEQ ID NO: 49614 - RNA, 19 nt, Artificial Sequence
  Antisense Oligo
cuccuuccucaauacacgg

SEQ ID NO: 49615 - RNA, 19 nt, Artificial Sequence
  Sense Oligo
cguguauugaggaaggagg

SEQ ID NO: 49616 - RNA, 19 nt, Artificial Sequence
  Antisense Oligo
ccuccuuccucaauacacg

SEQ ID NO: 49617 - RNA, 19 nt, Artificial Sequence
  Sense Oligo
guguauugaggaaggaggg

SEQ ID NO: 49618 - RNA, 19 nt, Artificial Sequence
  Antisense Oligo
cccuccuuccucaauacac

SEQ ID NO: 49619 - RNA, 19 nt, Artificial Sequence
  Sense Oligo
ucucuuuaagacagacucu

SEQ ID NO: 49620 - RNA, 19 nt, Artificial Sequence
  Antisense Oligo
agagucugucuuaaagaga

SEQ ID NO: 49621 - RNA, 19 nt, Artificial Sequence
  Sense Oligo
cucuuuaagacagacucuc

SEQ ID NO: 49622 - RNA, 19 nt, Artificial Sequence
  Antisense Oligo
gagagucugucuuaaagag

SEQ ID NO: 49623 - RNA, 19 nt, Artificial Sequence
  Sense Oligo
ucuuuaagacagacucuca

SEQ ID NO: 49624 - RNA, 19 nt, Artificial Sequence
  Antisense Oligo
ugagagucugucuuaaaga

SEQ ID NO: 49625 - RNA, 19 nt, Artificial Sequence
  Sense Oligo
cuuuaagacagacucucag

SEQ ID NO: 49626 - RNA, 19 nt, Artificial Sequence
  Antisense Oligo
cugagagucugucuuaaag

SEQ ID NO: 49627 - RNA, 19 nt, Artificial Sequence
  Sense Oligo
uuaagacagacucucagac

SEQ ID NO: 49628 - RNA, 19 nt, Artificial Sequence
  Antisense Oligo
gucugagagucugucuuaa

SEQ ID NO: 49629 - RNA, 19 nt, Artificial Sequence
  Sense Oligo
agacagacucucagaccuc

SEQ ID NO: 49630 - RNA, 19 nt, Artificial Sequence
  Antisense Oligo
gaggucugagagucugucu

SEQ ID NO: 49631 - RNA, 19 nt, Artificial Sequence
  Sense Oligo
gacagacucucagaccucc

SEQ ID NO: 49632 - RNA, 19 nt, Artificial Sequence
  Antisense Oligo
ggaggucugagagucuguc

SEQ ID NO: 49633 - RNA, 19 nt, Artificial Sequence
  Sense Oligo
gacucucagaccuccugcc

SEQ ID NO: 49634 - RNA, 19 nt, Artificial Sequence
  Antisense Oligo
ggcaggaggucugagaguc

SEQ ID NO: 49635 - RNA, 19 nt, Artificial Sequence
  Sense Oligo
cucucagaccuccugccug

SEQ ID NO: 49636 - RNA, 19 nt, Artificial Sequence
  Antisense Oligo
caggcaggaggucugagag

SEQ ID NO: 49637 - RNA, 19 nt, Artificial Sequence
  Sense Oligo
cagugacuugguuauuugg

SEQ ID NO: 49638 - RNA, 19 nt, Artificial Sequence
  Antisense Oligo
ccaaauaaccaagucacug

SEQ ID NO: 49639 - RNA, 19 nt, Artificial Sequence
  Sense Oligo
agugacuugguuauuuggg

SEQ ID NO: 49640 - RNA, 19 nt, Artificial Sequence
  Antisense Oligo
cccaaauaaccaagucacu

SEQ ID NO: 49641 - RNA, 19 nt, Artificial Sequence
  Sense Oligo
gugacuugguuauuugggc

SEQ ID NO: 49642 - RNA, 19 nt, Artificial Sequence
  Antisense Oligo
gcccaaauaaccaagucac

SEQ ID NO: 49643 - RNA, 19 nt, Artificial Sequence
  Sense Oligo
ugacuugguuauuugggcc

SEQ ID NO: 49644 - RNA, 19 nt, Artificial Sequence
  Antisense Oligo
ggcccaaauaaccaaguca

SEQ ID NO: 49645 - RNA, 19 nt, Artificial Sequence
  Sense Oligo
uucccaucucuaaaagaca

SEQ ID NO: 49646 - RNA, 19 nt, Artificial Sequence
  Antisense Oligo
ugucuuuuagagaugggaa

SEQ ID NO: 49647 - RNA, 19 nt, Artificial Sequence
  Sense Oligo
ucccaucucuaaaagacag

SEQ ID NO: 49648 - RNA, 19 nt, Artificial Sequence
  Antisense Oligo
cugucuuuuagagauggga

SEQ ID NO: 49649 - RNA, 19 nt, Artificial Sequence
  Sense Oligo
cccaucucuaaaagacagc

SEQ ID NO: 49650 - RNA, 19 nt, Artificial Sequence
  Antisense Oligo
gcugucuuuuagagauggg

SEQ ID NO: 49651 - RNA, 19 nt, Artificial Sequence
  Sense Oligo
cccuuccagguccaagcuu

SEQ ID NO: 49652 - RNA, 19 nt, Artificial Sequence
  Antisense Oligo
aagcuuggaccuggaaggg

SEQ ID NO: 49653 - RNA, 19 nt, Artificial Sequence
  Sense Oligo
ccuuccagguccaagcuuc

SEQ ID NO: 49654 - RNA, 19 nt, Artificial Sequence
  Antisense Oligo
gaagcuuggaccuggaagg

SEQ ID NO: 49655 - RNA, 19 nt, Artificial Sequence
  Sense Oligo
cuuccagguccaagcuucu

SEQ ID NO: 49656 - RNA, 19 nt, Artificial Sequence
  Antisense Oligo
agaagcuuggaccuggaag

SEQ ID NO: 49657 - RNA, 19 nt, Artificial Sequence
  Sense Oligo
uuccagguccaagcuucug

SEQ ID NO: 49658 - RNA, 19 nt, Artificial Sequence
  Antisense Oligo
cagaagcuuggaccuggaa

SEQ ID NO: 49659 - RNA, 19 nt, Artificial Sequence
  Sense Oligo
uccagguccaagcuucugu

SEQ ID NO: 49660 - RNA, 19 nt, Artificial Sequence
  Antisense Oligo
acagaagcuuggaccugga

SEQ ID NO: 49661 - RNA, 19 nt, Artificial Sequence
  Sense Oligo
ccagguccaagcuucugug

SEQ ID NO: 49662 - RNA, 19 nt, Artificial Sequence
  Antisense Oligo
cacagaagcuuggaccugg

SEQ ID NO: 49663 - RNA, 19 nt, Artificial Sequence
  Sense Oligo
cagguccaagcuucugugc

SEQ ID NO: 49664 - RNA, 19 nt, Artificial Sequence
  Antisense Oligo
gcacagaagcuuggaccug

SEQ ID NO: 49665 - RNA, 19 nt, Artificial Sequence
  Sense Oligo
agguccaagcuucugugcc

SEQ ID NO: 49666 - RNA, 19 nt, Artificial Sequence
  Antisense Oligo
ggcacagaagcuuggaccu

SEQ ID NO: 49667 - RNA, 19 nt, Artificial Sequence
  Sense Oligo
gguccaagcuucugugcca

SEQ ID NO: 49668 - RNA, 19 nt, Artificial Sequence
  Antisense Oligo
uggcacagaagcuuggacc

SEQ ID NO: 49669 - RNA, 19 nt, Artificial Sequence
  Sense Oligo
guccaagcuucugugccag

SEQ ID NO: 49670 - RNA, 19 nt, Artificial Sequence
  Antisense Oligo
cuggcacagaagcuuggac

SEQ ID NO: 49671 - RNA, 19 nt, Artificial Sequence
  Sense Oligo
uucugugccagugauaggu

SEQ ID NO: 49672 - RNA, 19 nt, Artificial Sequence
  Antisense Oligo
accuaucacuggcacagaa

SEQ ID NO: 49673 - RNA, 19 nt, Artificial Sequence
  Sense Oligo
ucugugccagugauagguu

SEQ ID NO: 49674 - RNA, 19 nt, Artificial Sequence
  Antisense Oligo
aaccuaucacuggcacaga

SEQ ID NO: 49675 - RNA, 19 nt, Artificial Sequence
  Sense Oligo
cugugccagugauagguuc

SEQ ID NO: 49676 - RNA, 19 nt, Artificial Sequence
  Antisense Oligo
gaaccuaucacuggcacag

SEQ ID NO: 49677 - RNA, 19 nt, Artificial Sequence
  Sense Oligo
ugugccagugauagguucg

SEQ ID NO: 49678 - RNA, 19 nt, Artificial Sequence
  Antisense Oligo
cgaaccuaucacuggcaca

SEQ ID NO: 49679 - RNA, 19 nt, Artificial Sequence
  Sense Oligo
gugccagugauagguucgc

SEQ ID NO: 49680 - RNA, 19 nt, Artificial Sequence
  Antisense Oligo
gcgaaccuaucacuggcac

SEQ ID NO: 49681 - RNA, 19 nt, Artificial Sequence
  Sense Oligo
ugccagugauagguucgcu

SEQ ID NO: 49682 - RNA, 19 nt, Artificial Sequence
  Antisense Oligo
agcgaaccuaucacuggca

SEQ ID NO: 49683 - RNA, 19 nt, Artificial Sequence
  Sense Oligo
gccagugauagguucgcuu

SEQ ID NO: 49684 - RNA, 19 nt, Artificial Sequence
  Antisense Oligo
aagcgaaccuaucacuggc

SEQ ID NO: 49685 - RNA, 19 nt, Artificial Sequence
  Sense Oligo
ccagugauagguucgcuuu

SEQ ID NO: 49686 - RNA, 19 nt, Artificial Sequence
  Antisense Oligo
aaagcgaaccuaucacugg

SEQ ID NO: 49687 - RNA, 19 nt, Artificial Sequence
  Sense Oligo
ugauagguucgcuuugggc

SEQ ID NO: 49688 - RNA, 19 nt, Artificial Sequence
  Antisense Oligo
gcccaaagcgaaccuauca

SEQ ID NO: 49689 - RNA, 19 nt, Artificial Sequence
  Sense Oligo
uacagccaggugugaucug

SEQ ID NO: 49690 - RNA, 19 nt, Artificial Sequence
  Antisense Oligo
cagaucacaccuggcugua

SEQ ID NO: 49691 - RNA, 19 nt, Artificial Sequence
  Sense Oligo
acagccaggugugaucugc

SEQ ID NO: 49692 - RNA, 19 nt, Artificial Sequence
  Antisense Oligo
gcagaucacaccuggcugu

SEQ ID NO: 49693 - RNA, 19 nt, Artificial Sequence
  Sense Oligo
cagccaggugugaucugca

SEQ ID NO: 49694 - RNA, 19 nt, Artificial Sequence
  Antisense Oligo
ugcagaucacaccuggcug

SEQ ID NO: 49695 - RNA, 19 nt, Artificial Sequence
  Sense Oligo
caggugugaucugcaggag

SEQ ID NO: 49696 - RNA, 19 nt, Artificial Sequence
  Antisense Oligo
cuccugcagaucacaccug

SEQ ID NO: 49697 - RNA, 19 nt, Artificial Sequence
  Sense Oligo
aggugugaucugcaggagg

SEQ ID NO: 49698 - RNA, 19 nt, Artificial Sequence
  Antisense Oligo
ccuccugcagaucacaccu

SEQ ID NO: 49699 - RNA, 19 nt, Artificial Sequence
  Sense Oligo
gugugaucugcaggaggga

SEQ ID NO: 49700 - RNA, 19 nt, Artificial Sequence
  Antisense Oligo
ucccuccugcagaucacac

SEQ ID NO: 49701 - RNA, 19 nt, Artificial Sequence
  Sense Oligo
aacgugaggaagaagcggg

SEQ ID NO: 49702 - RNA, 19 nt, Artificial Sequence
  Antisense Oligo
cccgcuucuuccucacguu

SEQ ID NO: 49703 - RNA, 19 nt, Artificial Sequence
  Sense Oligo
gggcuuacagaggaagaag

SEQ ID NO: 49704 - RNA, 19 nt, Artificial Sequence
  Antisense Oligo
cuucuuccucuguaagccc

SEQ ID NO: 49705 - RNA, 19 nt, Artificial Sequence
  Sense Oligo
gggcucacggaggaagaag

SEQ ID NO: 49706 - RNA, 19 nt, Artificial Sequence
  Antisense Oligo
cuucuuccuccgugagccc

SEQ ID NO: 49707 - RNA, 19 nt, Artificial Sequence
  Sense Oligo
acagacaccuuccucguga

SEQ ID NO: 49708 - RNA, 19 nt, Artificial Sequence
  Antisense Oligo
ucacgaggaaggugucugu

SEQ ID NO: 49709 - RNA, 19 nt, Artificial Sequence
  Sense Oligo
cagacaccuuccucgugac

SEQ ID NO: 49710 - RNA, 19 nt, Artificial Sequence
  Antisense Oligo
gucacgaggaaggugucug

SEQ ID NO: 49711 - RNA, 19 nt, Artificial Sequence
  Sense Oligo
agacaccuuccucgugacc

SEQ ID NO: 49712 - RNA, 19 nt, Artificial Sequence
  Antisense Oligo
ggucacgaggaaggugucu

SEQ ID NO: 49713 - RNA, 19 nt, Artificial Sequence
  Sense Oligo
gacaccuuccucgugacca

SEQ ID NO: 49714 - RNA, 19 nt, Artificial Sequence
  Antisense Oligo
uggucacgaggaagguguc

SEQ ID NO: 49715 - RNA, 19 nt, Artificial Sequence
  Sense Oligo
uuuucucuaguuauccuuc

SEQ ID NO: 49716 - RNA, 19 nt, Artificial Sequence
  Antisense Oligo
gaaggauaacuagagaaaa

SEQ ID NO: 49717 - RNA, 19 nt, Artificial Sequence
  Sense Oligo
uuucucuaguuauccuucg

SEQ ID NO: 49718 - RNA, 19 nt, Artificial Sequence
  Antisense Oligo
cgaaggauaacuagagaaa

SEQ ID NO: 49719 - RNA, 19 nt, Artificial Sequence
  Sense Oligo
uucucuaguuauccuucgu

SEQ ID NO: 49720 - RNA, 19 nt, Artificial Sequence
  Antisense Oligo
acgaaggauaacuagagaa

SEQ ID NO: 49721 - RNA, 19 nt, Artificial Sequence
  Sense Oligo
ucucuaguuauccuucguu

SEQ ID NO: 49722 - RNA, 19 nt, Artificial Sequence
  Antisense Oligo
aacgaaggauaacuagaga

SEQ ID NO: 49723 - RNA, 19 nt, Artificial Sequence
  Sense Oligo
cucuaguuauccuucguuu

SEQ ID NO: 49724 - RNA, 19 nt, Artificial Sequence
  Antisense Oligo
aaacgaaggauaacuagag

SEQ ID NO: 49725 - RNA, 19 nt, Artificial Sequence
  Sense Oligo
ucuaguuauccuucguuuc

SEQ ID NO: 49726 - RNA, 19 nt, Artificial Sequence
  Antisense Oligo
gaaacgaaggauaacuaga

SEQ ID NO: 49727 - RNA, 19 nt, Artificial Sequence
  Sense Oligo
cuaguuauccuucguuucu

SEQ ID NO: 49728 - RNA, 19 nt, Artificial Sequence
  Antisense Oligo
agaaacgaaggauaacuag

SEQ ID NO: 49729 - RNA, 19 nt, Artificial Sequence
  Sense Oligo
cuugucacgccuucugaag

SEQ ID NO: 49730 - RNA, 19 nt, Artificial Sequence
  Antisense Oligo
cuucagaaggcgugacaag

SEQ ID NO: 49731 - RNA, 19 nt, Artificial Sequence
  Sense Oligo
cuucugaagggauuuuagg

SEQ ID NO: 49732 - RNA, 19 nt, Artificial Sequence
  Antisense Oligo
ccuaaaaucccuucagaag

SEQ ID NO: 49733 - RNA, 19 nt, Artificial Sequence
  Sense Oligo
ucugaagggauuuuaggag

SEQ ID NO: 49734 - RNA, 19 nt, Artificial Sequence
  Antisense Oligo
cuccuaaaaucccuucaga

SEQ ID NO: 49735 - RNA, 19 nt, Artificial Sequence
  Sense Oligo
aauauuuucauuucccucc

SEQ ID NO: 49736 - RNA, 19 nt, Artificial Sequence
  Antisense Oligo
ggagggaaaugaaaauauu

SEQ ID NO: 49737 - RNA, 19 nt, Artificial Sequence
  Sense Oligo
auauuuucauuucccuccg

SEQ ID NO: 49738 - RNA, 19 nt, Artificial Sequence
  Antisense Oligo
cggagggaaaugaaaauau

SEQ ID NO: 49739 - RNA, 19 nt, Artificial Sequence
  Sense Oligo
uauuuucauuucccuccgu

SEQ ID NO: 49740 - RNA, 19 nt, Artificial Sequence
  Antisense Oligo
acggagggaaaugaaaaua

SEQ ID NO: 49741 - RNA, 19 nt, Artificial Sequence
  Sense Oligo
uucauuucccuccguuccu

SEQ ID NO: 49742 - RNA, 19 nt, Artificial Sequence
  Antisense Oligo
aggaacggagggaaaugaa

SEQ ID NO: 49743 - RNA, 19 nt, Artificial Sequence
  Sense Oligo
ucauuucccuccguuccuc

SEQ ID NO: 49744 - RNA, 19 nt, Artificial Sequence
  Antisense Oligo
gaggaacggagggaaauga

SEQ ID NO: 49745 - RNA, 19 nt, Artificial Sequence
  Sense Oligo
ucccuccguuccuccuugu

SEQ ID NO: 49746 - RNA, 19 nt, Artificial Sequence
  Antisense Oligo
acaaggaggaacggaggga

SEQ ID NO: 49747 - RNA, 19 nt, Artificial Sequence
  Sense Oligo
cccuccguuccuccuugug

SEQ ID NO: 49748 - RNA, 19 nt, Artificial Sequence
  Antisense Oligo
cacaaggaggaacggaggg

SEQ ID NO: 49749 - RNA, 19 nt, Artificial Sequence
  Sense Oligo
ccuccguuccuccuugugg

SEQ ID NO: 49750 - RNA, 19 nt, Artificial Sequence
  Antisense Oligo
ccacaaggaggaacggagg

SEQ ID NO: 49751 - RNA, 19 nt, Artificial Sequence
  Sense Oligo
cuccguuccuccuugugga

SEQ ID NO: 49752 - RNA, 19 nt, Artificial Sequence
  Antisense Oligo
uccacaaggaggaacggag

SEQ ID NO: 49753 - RNA, 19 nt, Artificial Sequence
  Sense Oligo
ccguuccuccuuguggacu

SEQ ID NO: 49754 - RNA, 19 nt, Artificial Sequence
  Antisense Oligo
aguccacaaggaggaacgg

SEQ ID NO: 49755 - RNA, 19 nt, Artificial Sequence
  Sense Oligo
cguuccuccuuguggacuc

SEQ ID NO: 49756 - RNA, 19 nt, Artificial Sequence
  Antisense Oligo
gaguccacaaggaggaacg

SEQ ID NO: 49757 - RNA, 19 nt, Artificial Sequence
  Sense Oligo
guuccuccuuguggacucu

SEQ ID NO: 49758 - RNA, 19 nt, Artificial Sequence
  Antisense Oligo
agaguccacaaggaggaac

SEQ ID NO: 49759 - RNA, 19 nt, Artificial Sequence
  Sense Oligo
uuccuccuuguggacucuc

SEQ ID NO: 49760 - RNA, 19 nt, Artificial Sequence
  Antisense Oligo
gagaguccacaaggaggaa

SEQ ID NO: 49761 - RNA, 19 nt, Artificial Sequence
  Sense Oligo
uccuccuuguggacucucu

SEQ ID NO: 49762 - RNA, 19 nt, Artificial Sequence
  Antisense Oligo
agagaguccacaaggagga

SEQ ID NO: 49763 - RNA, 19 nt, Artificial Sequence
  Sense Oligo
cuuguggacucucuugaug

SEQ ID NO: 49764 - RNA, 19 nt, Artificial Sequence
  Antisense Oligo
caucaagagaguccacaag

SEQ ID NO: 49765 - RNA, 19 nt, Artificial Sequence
  Sense Oligo
uuguggacucucuugaugc

SEQ ID NO: 49766 - RNA, 19 nt, Artificial Sequence
  Antisense Oligo
gcaucaagagaguccacaa

SEQ ID NO: 49767 - RNA, 19 nt, Artificial Sequence
  Sense Oligo
uguggacucucuugaugcu

SEQ ID NO: 49768 - RNA, 19 nt, Artificial Sequence
  Antisense Oligo
agcaucaagagaguccaca

SEQ ID NO: 49769 - RNA, 19 nt, Artificial Sequence
  Sense Oligo
guggacucucuugaugcuu

SEQ ID NO: 49770 - RNA, 19 nt, Artificial Sequence
  Antisense Oligo
aagcaucaagagaguccac

SEQ ID NO: 49771 - RNA, 19 nt, Artificial Sequence
  Sense Oligo
uggacucucuugaugcuuu

SEQ ID NO: 49772 - RNA, 19 nt, Artificial Sequence
  Antisense Oligo
aaagcaucaagagagucca

SEQ ID NO: 49773 - RNA, 19 nt, Artificial Sequence
  Sense Oligo
ggacucucuugaugcuuuu

SEQ ID NO: 49774 - RNA, 19 nt, Artificial Sequence
  Antisense Oligo
aaaagcaucaagagagucc

SEQ ID NO: 49775 - RNA, 19 nt, Artificial Sequence
  Sense Oligo
agucucacucugucgccca

SEQ ID NO: 49776 - RNA, 19 nt, Artificial Sequence
  Antisense Oligo
ugggcgacagagugagacu

SEQ ID NO: 49777 - RNA, 19 nt, Artificial Sequence
  Sense Oligo
gucucacucugucgcccag

SEQ ID NO: 49778 - RNA, 19 nt, Artificial Sequence
  Antisense Oligo
cugggcgacagagugagac

SEQ ID NO: 49779 - RNA, 19 nt, Artificial Sequence
  Sense Oligo
ucucacucugucgcccagg

SEQ ID NO: 49780 - RNA, 19 nt, Artificial Sequence
  Antisense Oligo
ccugggcgacagagugaga

SEQ ID NO: 49781 - RNA, 19 nt, Artificial Sequence
  Sense Oligo
ucacucugucgcccaggcu

SEQ ID NO: 49782 - RNA, 19 nt, Artificial Sequence
  Antisense Oligo
agccugggcgacagaguga

SEQ ID NO: 49783 - RNA, 19 nt, Artificial Sequence
  Sense Oligo
gcuggagugcagugaugcg

SEQ ID NO: 49784 - RNA, 19 nt, Artificial Sequence
  Antisense Oligo
cgcaucacugcacuccagc

SEQ ID NO: 49785 - RNA, 19 nt, Artificial Sequence
  Sense Oligo
cuggagugcagugaugcga

SEQ ID NO: 49786 - RNA, 19 nt, Artificial Sequence
  Antisense Oligo
ucgcaucacugcacuccag

SEQ ID NO: 49787 - RNA, 19 nt, Artificial Sequence
  Sense Oligo
gugaugcgaucucagcuca

SEQ ID NO: 49788 - RNA, 19 nt, Artificial Sequence
  Antisense Oligo
ugagcugagaucgcaucac

SEQ ID NO: 49789 - RNA, 19 nt, Artificial Sequence
  Sense Oligo
ugaugcgaucucagcucac

SEQ ID NO: 49790 - RNA, 19 nt, Artificial Sequence
  Antisense Oligo
gugagcugagaucgcauca

SEQ ID NO: 49791 - RNA, 19 nt, Artificial Sequence
  Sense Oligo
gaugcgaucucagcucacu

SEQ ID NO: 49792 - RNA, 19 nt, Artificial Sequence
  Antisense Oligo
agugagcugagaucgcauc

SEQ ID NO: 49793 - RNA, 19 nt, Artificial Sequence
  Sense Oligo
augcgaucucagcucacug

SEQ ID NO: 49794 - RNA, 19 nt, Artificial Sequence
  Antisense Oligo
cagugagcugagaucgcau

SEQ ID NO: 49795 - RNA, 19 nt, Artificial Sequence
  Sense Oligo
aacuuccaccuccuggguu

SEQ ID NO: 49796 - RNA, 19 nt, Artificial Sequence
  Antisense Oligo
aacccaggagguggaaguu

SEQ ID NO: 49797 - RNA, 19 nt, Artificial Sequence
  Sense Oligo
acuuccaccuccuggguuc

SEQ ID NO: 49798 - RNA, 19 nt, Artificial Sequence
  Antisense Oligo
gaacccaggagguggaagu

SEQ ID NO: 49799 - RNA, 19 nt, Artificial Sequence
  Sense Oligo
cuuccaccuccuggguuca

SEQ ID NO: 49800 - RNA, 19 nt, Artificial Sequence
  Antisense Oligo
ugaacccaggagguggaag

SEQ ID NO: 49801 - RNA, 19 nt, Artificial Sequence
  Sense Oligo
uuccaccuccuggguucaa

SEQ ID NO: 49802 - RNA, 19 nt, Artificial Sequence
  Antisense Oligo
uugaacccaggagguggaa

SEQ ID NO: 49803 - RNA, 19 nt, Artificial Sequence
  Sense Oligo
uccaccuccuggguucaag

SEQ ID NO: 49804 - RNA, 19 nt, Artificial Sequence
  Antisense Oligo
cuugaacccaggaggugga

SEQ ID NO: 49805 - RNA, 19 nt, Artificial Sequence
  Sense Oligo
ccaccuccuggguucaagc

SEQ ID NO: 49806 - RNA, 19 nt, Artificial Sequence
  Antisense Oligo
gcuugaacccaggaggugg

SEQ ID NO: 49807 - RNA, 19 nt, Artificial Sequence
  Sense Oligo
caccuccuggguucaagcg

SEQ ID NO: 49808 - RNA, 19 nt, Artificial Sequence
  Antisense Oligo
cgcuugaacccaggaggug

SEQ ID NO: 49809 - RNA, 19 nt, Artificial Sequence
  Sense Oligo
accuccuggguucaagcga

SEQ ID NO: 49810 - RNA, 19 nt, Artificial Sequence
  Antisense Oligo
ucgcuugaacccaggaggu

SEQ ID NO: 49811 - RNA, 19 nt, Artificial Sequence
  Sense Oligo
ccuccuggguucaagcgau

SEQ ID NO: 49812 - RNA, 19 nt, Artificial Sequence
  Antisense Oligo
aucgcuugaacccaggagg

SEQ ID NO: 49813 - RNA, 19 nt, Artificial Sequence
  Sense Oligo
cuccuggguucaagcgauu

SEQ ID NO: 49814 - RNA, 19 nt, Artificial Sequence
  Antisense Oligo
aaucgcuugaacccaggag

SEQ ID NO: 49815 - RNA, 19 nt, Artificial Sequence
  Sense Oligo
uccuggguucaagcgauuc

SEQ ID NO: 49816 - RNA, 19 nt, Artificial Sequence
  Antisense Oligo
gaaucgcuugaacccagga

SEQ ID NO: 49817 - RNA, 19 nt, Artificial Sequence
  Sense Oligo
ccuggguucaagcgauucu

SEQ ID NO: 49818 - RNA, 19 nt, Artificial Sequence
  Antisense Oligo
agaaucgcuugaacccagg

SEQ ID NO: 49819 - RNA, 19 nt, Artificial Sequence
  Sense Oligo
cuggguucaagcgauucuc

SEQ ID NO: 49820 - RNA, 19 nt, Artificial Sequence
  Antisense Oligo
gagaaucgcuugaacccag

SEQ ID NO: 49821 - RNA, 19 nt, Artificial Sequence
  Sense Oligo
uggguucaagcgauucucc

SEQ ID NO: 49822 - RNA, 19 nt, Artificial Sequence
  Antisense Oligo
ggagaaucgcuugaaccca

SEQ ID NO: 49823 - RNA, 19 nt, Artificial Sequence
  Sense Oligo
ggguucaagcgauucuccu

SEQ ID NO: 49824 - RNA, 19 nt, Artificial Sequence
  Antisense Oligo
aggagaaucgcuugaaccc

SEQ ID NO: 49825 - RNA, 19 nt, Artificial Sequence
  Sense Oligo
gguucaagcgauucuccug

SEQ ID NO: 49826 - RNA, 19 nt, Artificial Sequence
  Antisense Oligo
caggagaaucgcuugaacc

SEQ ID NO: 49827 - RNA, 19 nt, Artificial Sequence
  Sense Oligo
guucaagcgauucuccugc

SEQ ID NO: 49828 - RNA, 19 nt, Artificial Sequence
  Antisense Oligo
gcaggagaaucgcuugaac

SEQ ID NO: 49829 - RNA, 19 nt, Artificial Sequence
  Sense Oligo
uucaagcgauucuccugcc

SEQ ID NO: 49830 - RNA, 19 nt, Artificial Sequence
  Antisense Oligo
ggcaggagaaucgcuugaa

SEQ ID NO: 49831 - RNA, 19 nt, Artificial Sequence
  Sense Oligo
ucaagcgauucuccugccu

SEQ ID NO: 49832 - RNA, 19 nt, Artificial Sequence
  Antisense Oligo
aggcaggagaaucgcuuga

SEQ ID NO: 49833 - RNA, 19 nt, Artificial Sequence
  Sense Oligo
gcgauucuccugccucaga

SEQ ID NO: 49834 - RNA, 19 nt, Artificial Sequence
  Antisense Oligo
ucugaggcaggagaaucgc

SEQ ID NO: 49835 - RNA, 19 nt, Artificial Sequence
  Sense Oligo
cgauucuccugccucagac

SEQ ID NO: 49836 - RNA, 19 nt, Artificial Sequence
  Antisense Oligo
gucugaggcaggagaaucg

SEQ ID NO: 49837 - RNA, 19 nt, Artificial Sequence
  Sense Oligo
gauucuccugccucagacu

SEQ ID NO: 49838 - RNA, 19 nt, Artificial Sequence
  Antisense Oligo
agucugaggcaggagaauc

SEQ ID NO: 49839 - RNA, 19 nt, Artificial Sequence
  Sense Oligo
auucuccugccucagacuc

SEQ ID NO: 49840 - RNA, 19 nt, Artificial Sequence
  Antisense Oligo
gagucugaggcaggagaau

SEQ ID NO: 49841 - RNA, 19 nt, Artificial Sequence
  Sense Oligo
uucuccugccucagacucc

SEQ ID NO: 49842 - RNA, 19 nt, Artificial Sequence
  Antisense Oligo
ggagucugaggcaggagaa

SEQ ID NO: 49843 - RNA, 19 nt, Artificial Sequence
  Sense Oligo
uguuggccaggcuggucuc

SEQ ID NO: 49844 - RNA, 19 nt, Artificial Sequence
  Antisense Oligo
gagaccagccuggccaaca

SEQ ID NO: 49845 - RNA, 19 nt, Artificial Sequence
  Sense Oligo
guuggccaggcuggucuca

SEQ ID NO: 49846 - RNA, 19 nt, Artificial Sequence
  Antisense Oligo
ugagaccagccuggccaac

SEQ ID NO: 49847 - RNA, 19 nt, Artificial Sequence
  Sense Oligo
uuggccaggcuggucucaa

SEQ ID NO: 49848 - RNA, 19 nt, Artificial Sequence
  Antisense Oligo
uugagaccagccuggccaa

SEQ ID NO: 49849 - RNA, 19 nt, Artificial Sequence
  Sense Oligo
uggccaggcuggucucaaa

SEQ ID NO: 49850 - RNA, 19 nt, Artificial Sequence
  Antisense Oligo
uuugagaccagccuggcca

SEQ ID NO: 49851 - RNA, 19 nt, Artificial Sequence
  Sense Oligo
cugaccucaggugauccac

SEQ ID NO: 49852 - RNA, 19 nt, Artificial Sequence
  Antisense Oligo
guggaucaccugaggucag

SEQ ID NO: 49853 - RNA, 19 nt, Artificial Sequence
  Sense Oligo
ugaccucaggugauccacu

SEQ ID NO: 49854 - RNA, 19 nt, Artificial Sequence
  Antisense Oligo
aguggaucaccugagguca

SEQ ID NO: 49855 - RNA, 19 nt, Artificial Sequence
  Sense Oligo
gaccucaggugauccacuc

SEQ ID NO: 49856 - RNA, 19 nt, Artificial Sequence
  Antisense Oligo
gaguggaucaccugagguc

SEQ ID NO: 49857 - RNA, 19 nt, Artificial Sequence
  Sense Oligo
accucaggugauccacucg

SEQ ID NO: 49858 - RNA, 19 nt, Artificial Sequence
  Antisense Oligo
cgaguggaucaccugaggu

SEQ ID NO: 49859 - RNA, 19 nt, Artificial Sequence
  Sense Oligo
ccucaggugauccacucgc

SEQ ID NO: 49860 - RNA, 19 nt, Artificial Sequence
  Antisense Oligo
gcgaguggaucaccugagg

SEQ ID NO: 49861 - RNA, 19 nt, Artificial Sequence
  Sense Oligo
cucaggugauccacucgcc

SEQ ID NO: 49862 - RNA, 19 nt, Artificial Sequence
  Antisense Oligo
ggcgaguggaucaccugag

SEQ ID NO: 49863 - RNA, 19 nt, Artificial Sequence
  Sense Oligo
accagcccugagucacuga

SEQ ID NO: 49864 - RNA, 19 nt, Artificial Sequence
  Antisense Oligo
ucagugacucagggcuggu

SEQ ID NO: 49865 - RNA, 19 nt, Artificial Sequence
  Sense Oligo
ccagcccugagucacugaa

SEQ ID NO: 49866 - RNA, 19 nt, Artificial Sequence
  Antisense Oligo
uucagugacucagggcugg

SEQ ID NO: 49867 - RNA, 19 nt, Artificial Sequence
  Sense Oligo
aaccuccucagucugcucu

SEQ ID NO: 49868 - RNA, 19 nt, Artificial Sequence
  Antisense Oligo
agagcagacugaggagguu

SEQ ID NO: 49869 - RNA, 19 nt, Artificial Sequence
  Sense Oligo
accuccucagucugcucuu

SEQ ID NO: 49870 - RNA, 19 nt, Artificial Sequence
  Antisense Oligo
aagagcagacugaggaggu

SEQ ID NO: 49871 - RNA, 19 nt, Artificial Sequence
  Sense Oligo
ccuccucagucugcucuuc

SEQ ID NO: 49872 - RNA, 19 nt, Artificial Sequence
  Antisense Oligo
gaagagcagacugaggagg

SEQ ID NO: 49873 - RNA, 19 nt, Artificial Sequence
  Sense Oligo
ccuggcuccgucguguucu

SEQ ID NO: 49874 - RNA, 19 nt, Artificial Sequence
  Antisense Oligo
agaacacgacggagccagg

SEQ ID NO: 49875 - RNA, 19 nt, Artificial Sequence
  Sense Oligo
cuggcuccgucguguucug

SEQ ID NO: 49876 - RNA, 19 nt, Artificial Sequence
  Antisense Oligo
cagaacacgacggagccag

SEQ ID NO: 49877 - RNA, 19 nt, Artificial Sequence
  Sense Oligo
gccagcagcacccugacua

SEQ ID NO: 49878 - RNA, 19 nt, Artificial Sequence
  Antisense Oligo
uagucagggugcugcuggc

SEQ ID NO: 49879 - RNA, 19 nt, Artificial Sequence
  Sense Oligo
ccagcagcacccugacuac

SEQ ID NO: 49880 - RNA, 19 nt, Artificial Sequence
  Antisense Oligo
guagucagggugcugcugg

SEQ ID NO: 49881 - RNA, 19 nt, Artificial Sequence
  Sense Oligo
cagcagcacccugacuacc

SEQ ID NO: 49882 - RNA, 19 nt, Artificial Sequence
  Antisense Oligo
gguagucagggugcugcug

SEQ ID NO: 49883 - RNA, 19 nt, Artificial Sequence
  Sense Oligo
gcacccugacuaccucgau

SEQ ID NO: 49884 - RNA, 19 nt, Artificial Sequence
  Antisense Oligo
aucgagguagucagggugc

SEQ ID NO: 49885 - RNA, 19 nt, Artificial Sequence
  Sense Oligo
cacccugacuaccucgauu

SEQ ID NO: 49886 - RNA, 19 nt, Artificial Sequence
  Antisense Oligo
aaucgagguagucagggug

SEQ ID NO: 49887 - RNA, 19 nt, Artificial Sequence
  Sense Oligo
acccugacuaccucgauuc

SEQ ID NO: 49888 - RNA, 19 nt, Artificial Sequence
  Antisense Oligo
gaaucgagguagucagggu

SEQ ID NO: 49889 - RNA, 19 nt, Artificial Sequence
  Sense Oligo
cccugacuaccucgauuca

SEQ ID NO: 49890 - RNA, 19 nt, Artificial Sequence
  Antisense Oligo
ugaaucgagguagucaggg

SEQ ID NO: 49891 - RNA, 19 nt, Artificial Sequence
  Sense Oligo
gacuaccucgauucaccac

SEQ ID NO: 49892 - RNA, 19 nt, Artificial Sequence
  Antisense Oligo
guggugaaucgagguaguc

SEQ ID NO: 49893 - RNA, 19 nt, Artificial Sequence
  Sense Oligo
auucaccaccacuguguuc

SEQ ID NO: 49894 - RNA, 19 nt, Artificial Sequence
  Antisense Oligo
gaacacagugguggugaau

SEQ ID NO: 49895 - RNA, 19 nt, Artificial Sequence
  Sense Oligo
uucaccaccacuguguucu

SEQ ID NO: 49896 - RNA, 19 nt, Artificial Sequence
  Antisense Oligo
agaacacagugguggugaa

SEQ ID NO: 49897 - RNA, 19 nt, Artificial Sequence
  Sense Oligo
ucaccaccacuguguucug

SEQ ID NO: 49898 - RNA, 19 nt, Artificial Sequence
  Antisense Oligo
cagaacacaguggugguga

SEQ ID NO: 49899 - RNA, 19 nt, Artificial Sequence
  Sense Oligo
caccaccacuguguucugg

SEQ ID NO: 49900 - RNA, 19 nt, Artificial Sequence
  Antisense Oligo
ccagaacacagugguggug

SEQ ID NO: 49901 - RNA, 19 nt, Artificial Sequence
  Sense Oligo
accaccacuguguucuggg

SEQ ID NO: 49902 - RNA, 19 nt, Artificial Sequence
  Antisense Oligo
cccagaacacagugguggu

SEQ ID NO: 49903 - RNA, 19 nt, Artificial Sequence
  Sense Oligo
gacuggaguccuuugcccu

SEQ ID NO: 49904 - RNA, 19 nt, Artificial Sequence
  Antisense Oligo
agggcaaaggacuccaguc

SEQ ID NO: 49905 - RNA, 19 nt, Artificial Sequence
  Sense Oligo
uggaguccuuugcccucuc

SEQ ID NO: 49906 - RNA, 19 nt, Artificial Sequence
  Antisense Oligo
gagagggcaaaggacucca

SEQ ID NO: 49907 - RNA, 19 nt, Artificial Sequence
  Sense Oligo
ggaguccuuugcccucucg

SEQ ID NO: 49908 - RNA, 19 nt, Artificial Sequence
  Antisense Oligo
cgagagggcaaaggacucc

SEQ ID NO: 49909 - RNA, 19 nt, Artificial Sequence
  Sense Oligo
gaguccuuugcccucucgg

SEQ ID NO: 49910 - RNA, 19 nt, Artificial Sequence
  Antisense Oligo
ccgagagggcaaaggacuc

SEQ ID NO: 49911 - RNA, 19 nt, Artificial Sequence
  Sense Oligo
aguccuuugcccucucggg

SEQ ID NO: 49912 - RNA, 19 nt, Artificial Sequence
  Antisense Oligo
cccgagagggcaaaggacu

SEQ ID NO: 49913 - RNA, 19 nt, Artificial Sequence
  Sense Oligo
guccuuugcccucucggga

SEQ ID NO: 49914 - RNA, 19 nt, Artificial Sequence
  Antisense Oligo
ucccgagagggcaaaggac

SEQ ID NO: 49915 - RNA, 19 nt, Artificial Sequence
  Sense Oligo
uccuuugcccucucgggau

SEQ ID NO: 49916 - RNA, 19 nt, Artificial Sequence
  Antisense Oligo
aucccgagagggcaaagga

SEQ ID NO: 49917 - RNA, 19 nt, Artificial Sequence
  Sense Oligo
ccuuugcccucucgggauu

SEQ ID NO: 49918 - RNA, 19 nt, Artificial Sequence
  Antisense Oligo
aaucccgagagggcaaagg

SEQ ID NO: 49919 - RNA, 19 nt, Artificial Sequence
  Sense Oligo
cuuugcccucucgggauua

SEQ ID NO: 49920 - RNA, 19 nt, Artificial Sequence
  Antisense Oligo
uaaucccgagagggcaaag

SEQ ID NO: 49921 - RNA, 19 nt, Artificial Sequence
  Sense Oligo
uuugcccucucgggauuaa

SEQ ID NO: 49922 - RNA, 19 nt, Artificial Sequence
  Antisense Oligo
uuaaucccgagagggcaaa

SEQ ID NO: 49923 - RNA, 19 nt, Artificial Sequence
  Sense Oligo
uugcccucucgggauuaaa

SEQ ID NO: 49924 - RNA, 19 nt, Artificial Sequence
  Antisense Oligo
uuuaaucccgagagggcaa

SEQ ID NO: 49925 - RNA, 19 nt, Artificial Sequence
  Sense Oligo
aacucugccugccugucca

SEQ ID NO: 49926 - RNA, 19 nt, Artificial Sequence
  Antisense Oligo
uggacaggcaggcagaguu

SEQ ID NO: 49927 - RNA, 19 nt, Artificial Sequence
  Sense Oligo
cugccugccuguccagaua

SEQ ID NO: 49928 - RNA, 19 nt, Artificial Sequence
  Antisense Oligo
uaucuggacaggcaggcag

SEQ ID NO: 49929 - RNA, 19 nt, Artificial Sequence
  Sense Oligo
ugccugccuguccagauac

SEQ ID NO: 49930 - RNA, 19 nt, Artificial Sequence
  Antisense Oligo
guaucuggacaggcaggca

SEQ ID NO: 49931 - RNA, 19 nt, Artificial Sequence
  Sense Oligo
gccugccuguccagauaca

SEQ ID NO: 49932 - RNA, 19 nt, Artificial Sequence
  Antisense Oligo
uguaucuggacaggcaggc

SEQ ID NO: 49933 - RNA, 19 nt, Artificial Sequence
  Sense Oligo
aggcucagcggcuccagau

SEQ ID NO: 49934 - RNA, 19 nt, Artificial Sequence
  Antisense Oligo
aucuggagccgcugagccu

SEQ ID NO: 49935 - RNA, 19 nt, Artificial Sequence
  Sense Oligo
ggcucagcggcuccagaua

SEQ ID NO: 49936 - RNA, 19 nt, Artificial Sequence
  Antisense Oligo
uaucuggagccgcugagcc

SEQ ID NO: 49937 - RNA, 19 nt, Artificial Sequence
  Sense Oligo
gcucagcggcuccagauag

SEQ ID NO: 49938 - RNA, 19 nt, Artificial Sequence
  Antisense Oligo
cuaucuggagccgcugagc

SEQ ID NO: 49939 - RNA, 19 nt, Artificial Sequence
  Sense Oligo
cucagcggcuccagauagg

SEQ ID NO: 49940 - RNA, 19 nt, Artificial Sequence
  Antisense Oligo
ccuaucuggagccgcugag

SEQ ID NO: 49941 - RNA, 19 nt, Artificial Sequence
  Sense Oligo
ucagcggcuccagauaggg

SEQ ID NO: 49942 - RNA, 19 nt, Artificial Sequence
  Antisense Oligo
cccuaucuggagccgcuga

SEQ ID NO: 49943 - RNA, 19 nt, Artificial Sequence
  Sense Oligo
ucucccagcgcuuguccca

SEQ ID NO: 49944 - RNA, 19 nt, Artificial Sequence
  Antisense Oligo
ugggacaagcgcugggaga

SEQ ID NO: 49945 - RNA, 19 nt, Artificial Sequence
  Sense Oligo
gcgccuggguuuuccuucu

SEQ ID NO: 49946 - RNA, 19 nt, Artificial Sequence
  Antisense Oligo
agaaggaaaacccaggcgc

SEQ ID NO: 49947 - RNA, 19 nt, Artificial Sequence
  Sense Oligo
uuuccuucugccuuuugug

SEQ ID NO: 49948 - RNA, 19 nt, Artificial Sequence
  Antisense Oligo
cacaaaaggcagaaggaaa

SEQ ID NO: 49949 - RNA, 19 nt, Artificial Sequence
  Sense Oligo
ccuucugccuuuuguguuc

SEQ ID NO: 49950 - RNA, 19 nt, Artificial Sequence
  Antisense Oligo
gaacacaaaaggcagaagg

SEQ ID NO: 49951 - RNA, 19 nt, Artificial Sequence
  Sense Oligo
cuucugccuuuuguguucg

SEQ ID NO: 49952 - RNA, 19 nt, Artificial Sequence
  Antisense Oligo
cgaacacaaaaggcagaag

SEQ ID NO: 49953 - RNA, 19 nt, Artificial Sequence
  Sense Oligo
uucugccuuuuguguucgc

SEQ ID NO: 49954 - RNA, 19 nt, Artificial Sequence
  Antisense Oligo
gcgaacacaaaaggcagaa

SEQ ID NO: 49955 - RNA, 19 nt, Artificial Sequence
  Sense Oligo
ucugccuuuuguguucgcg

SEQ ID NO: 49956 - RNA, 19 nt, Artificial Sequence
  Antisense Oligo
cgcgaacacaaaaggcaga

SEQ ID NO: 49957 - RNA, 19 nt, Artificial Sequence
  Sense Oligo
cugccuuuuguguucgcga

SEQ ID NO: 49958 - RNA, 19 nt, Artificial Sequence
  Antisense Oligo
ucgcgaacacaaaaggcag

SEQ ID NO: 49959 - RNA, 19 nt, Artificial Sequence
  Sense Oligo
ugccuuuuguguucgcgac

SEQ ID NO: 49960 - RNA, 19 nt, Artificial Sequence
  Antisense Oligo
gucgcgaacacaaaaggca

SEQ ID NO: 49961 - RNA, 19 nt, Artificial Sequence
  Sense Oligo
gccuuuuguguucgcgaca

SEQ ID NO: 49962 - RNA, 19 nt, Artificial Sequence
  Antisense Oligo
ugucgcgaacacaaaaggc

SEQ ID NO: 49963 - RNA, 19 nt, Artificial Sequence
  Sense Oligo
ucgcgacacuuuuccuagu

SEQ ID NO: 49964 - RNA, 19 nt, Artificial Sequence
  Antisense Oligo
acuaggaaaagugucgcga

SEQ ID NO: 49965 - RNA, 19 nt, Artificial Sequence
  Sense Oligo
gacacuuuuccuaguuugc

SEQ ID NO: 49966 - RNA, 19 nt, Artificial Sequence
  Antisense Oligo
gcaaacuaggaaaaguguc

SEQ ID NO: 49967 - RNA, 19 nt, Artificial Sequence
  Sense Oligo
acacuuuuccuaguuugcu

SEQ ID NO: 49968 - RNA, 19 nt, Artificial Sequence
  Antisense Oligo
agcaaacuaggaaaagugu

SEQ ID NO: 49969 - RNA, 19 nt, Artificial Sequence
  Sense Oligo
cacuuuuccuaguuugcug

SEQ ID NO: 49970 - RNA, 19 nt, Artificial Sequence
  Antisense Oligo
cagcaaacuaggaaaagug

SEQ ID NO: 49971 - RNA, 19 nt, Artificial Sequence
  Sense Oligo
acuuuuccuaguuugcugu

SEQ ID NO: 49972 - RNA, 19 nt, Artificial Sequence
  Antisense Oligo
acagcaaacuaggaaaagu

SEQ ID NO: 49973 - RNA, 19 nt, Artificial Sequence
  Sense Oligo
aguuugcuguuuucucccu

SEQ ID NO: 49974 - RNA, 19 nt, Artificial Sequence
  Antisense Oligo
agggagaaaacagcaaacu

SEQ ID NO: 49975 - RNA, 19 nt, Artificial Sequence
  Sense Oligo
guuugcuguuuucucccuc

SEQ ID NO: 49976 - RNA, 19 nt, Artificial Sequence
  Antisense Oligo
gagggagaaaacagcaaac

SEQ ID NO: 49977 - RNA, 19 nt, Artificial Sequence
  Sense Oligo
uuugcuguuuucucccucu

SEQ ID NO: 49978 - RNA, 19 nt, Artificial Sequence
  Antisense Oligo
agagggagaaaacagcaaa

SEQ ID NO: 49979 - RNA, 19 nt, Artificial Sequence
  Sense Oligo
uguuuucucccucugugca

SEQ ID NO: 49980 - RNA, 19 nt, Artificial Sequence
  Antisense Oligo
ugcacagagggagaaaaca

SEQ ID NO: 49981 - RNA, 19 nt, Artificial Sequence
  Sense Oligo
guuuucucccucugugcac

SEQ ID NO: 49982 - RNA, 19 nt, Artificial Sequence
  Antisense Oligo
gugcacagagggagaaaac

SEQ ID NO: 49983 - RNA, 19 nt, Artificial Sequence
  Sense Oligo
cugugcacugggaugcuuu

SEQ ID NO: 49984 - RNA, 19 nt, Artificial Sequence
  Antisense Oligo
aaagcaucccagugcacag

SEQ ID NO: 49985 - RNA, 19 nt, Artificial Sequence
  Sense Oligo
cacugggaugcuuuauuuu

SEQ ID NO: 49986 - RNA, 19 nt, Artificial Sequence
  Antisense Oligo
aaaauaaagcaucccagug

SEQ ID NO: 49987 - RNA, 19 nt, Artificial Sequence
  Sense Oligo
cugggaugcuuuauuuucc

SEQ ID NO: 49988 - RNA, 19 nt, Artificial Sequence
  Antisense Oligo
ggaaaauaaagcaucccag

SEQ ID NO: 49989 - RNA, 19 nt, Artificial Sequence
  Sense Oligo
acauuaauuaccuuguggg

SEQ ID NO: 49990 - RNA, 19 nt, Artificial Sequence
  Antisense Oligo
cccacaagguaauuaaugu

SEQ ID NO: 49991 - RNA, 19 nt, Artificial Sequence
  Sense Oligo
caugcuggagugcaauggc

SEQ ID NO: 49992 - RNA, 19 nt, Artificial Sequence
  Antisense Oligo
gccauugcacuccagcaug

SEQ ID NO: 49993 - RNA, 19 nt, Artificial Sequence
  Sense Oligo
cgauuuuggcucacugcaa

SEQ ID NO: 49994 - RNA, 19 nt, Artificial Sequence
  Antisense Oligo
uugcagugagccaaaaucg

SEQ ID NO: 49995 - RNA, 19 nt, Artificial Sequence
  Sense Oligo
gauuuuggcucacugcaac

SEQ ID NO: 49996 - RNA, 19 nt, Artificial Sequence
  Antisense Oligo
guugcagugagccaaaauc

SEQ ID NO: 49997 - RNA, 19 nt, Artificial Sequence
  Sense Oligo
auuuuggcucacugcaacu

SEQ ID NO: 49998 - RNA, 19 nt, Artificial Sequence
  Antisense Oligo
aguugcagugagccaaaau

SEQ ID NO: 49999 - RNA, 19 nt, Artificial Sequence
  Sense Oligo
uggcucacugcaacuucug

SEQ ID NO: 50000 - RNA, 19 nt, Artificial Sequence
  Antisense Oligo
cagaaguugcagugagcca

SEQ ID NO: 50001 - RNA, 19 nt, Artificial Sequence
  Sense Oligo
ggcucacugcaacuucugc

SEQ ID NO: 50002 - RNA, 19 nt, Artificial Sequence
  Antisense Oligo
gcagaaguugcagugagcc

SEQ ID NO: 50003 - RNA, 19 nt, Artificial Sequence
  Sense Oligo
ccggguucaagcgauucuc

SEQ ID NO: 50004 - RNA, 19 nt, Artificial Sequence
  Antisense Oligo
gagaaucgcuugaacccgg

SEQ ID NO: 50005 - RNA, 19 nt, Artificial Sequence
  Sense Oligo
cggguucaagcgauucucc

SEQ ID NO: 50006 - RNA, 19 nt, Artificial Sequence
  Antisense Oligo
ggagaaucgcuugaacccg

SEQ ID NO: 50007 - RNA, 19 nt, Artificial Sequence
  Sense Oligo
ggguucaagcgauucuccu

SEQ ID NO: 50008 - RNA, 19 nt, Artificial Sequence
  Antisense Oligo
aggagaaucgcuugaaccc

SEQ ID NO: 50009 - RNA, 19 nt, Artificial Sequence
  Sense Oligo
gguucaagcgauucuccug

SEQ ID NO: 50010 - RNA, 19 nt, Artificial Sequence
  Antisense Oligo
caggagaaucgcuugaacc

SEQ ID NO: 50011 - RNA, 19 nt, Artificial Sequence
  Sense Oligo
guucaagcgauucuccugc

SEQ ID NO: 50012 - RNA, 19 nt, Artificial Sequence
  Antisense Oligo
gcaggagaaucgcuugaac

SEQ ID NO: 50013 - RNA, 19 nt, Artificial Sequence
  Sense Oligo
uucaagcgauucuccugcu

SEQ ID NO: 50014 - RNA, 19 nt, Artificial Sequence
  Antisense Oligo
agcaggagaaucgcuugaa

SEQ ID NO: 50015 - RNA, 19 nt, Artificial Sequence
  Sense Oligo
ucaagcgauucuccugcuc

SEQ ID NO: 50016 - RNA, 19 nt, Artificial Sequence
  Antisense Oligo
gagcaggagaaucgcuuga

SEQ ID NO: 50017 - RNA, 19 nt, Artificial Sequence
  Sense Oligo
caagcgauucuccugcuca

SEQ ID NO: 50018 - RNA, 19 nt, Artificial Sequence
  Antisense Oligo
ugagcaggagaaucgcuug

SEQ ID NO: 50019 - RNA, 19 nt, Artificial Sequence
  Sense Oligo
aagcgauucuccugcucag

SEQ ID NO: 50020 - RNA, 19 nt, Artificial Sequence
  Antisense Oligo
cugagcaggagaaucgcuu

SEQ ID NO: 50021 - RNA, 19 nt, Artificial Sequence
  Sense Oligo
agccuccugaguagcuggg

SEQ ID NO: 50022 - RNA, 19 nt, Artificial Sequence
  Antisense Oligo
cccagcuacucaggaggcu

SEQ ID NO: 50023 - RNA, 19 nt, Artificial Sequence
  Sense Oligo
gccuccugaguagcuggga

SEQ ID NO: 50024 - RNA, 19 nt, Artificial Sequence
  Antisense Oligo
ucccagcuacucaggaggc

SEQ ID NO: 50025 - RNA, 19 nt, Artificial Sequence
  Sense Oligo
ccuccugaguagcugggau

SEQ ID NO: 50026 - RNA, 19 nt, Artificial Sequence
  Antisense Oligo
aucccagcuacucaggagg

SEQ ID NO: 50027 - RNA, 19 nt, Artificial Sequence
  Sense Oligo
cuccugaguagcugggauu

SEQ ID NO: 50028 - RNA, 19 nt, Artificial Sequence
  Antisense Oligo
aaucccagcuacucaggag

SEQ ID NO: 50029 - RNA, 19 nt, Artificial Sequence
  Sense Oligo
uccugaguagcugggauua

SEQ ID NO: 50030 - RNA, 19 nt, Artificial Sequence
  Antisense Oligo
uaaucccagcuacucagga

SEQ ID NO: 50031 - RNA, 19 nt, Artificial Sequence
  Sense Oligo
ccugaguagcugggauuac

SEQ ID NO: 50032 - RNA, 19 nt, Artificial Sequence
  Antisense Oligo
guaaucccagcuacucagg

SEQ ID NO: 50033 - RNA, 19 nt, Artificial Sequence
  Sense Oligo
cugaguagcugggauuaca

SEQ ID NO: 50034 - RNA, 19 nt, Artificial Sequence
  Antisense Oligo
uguaaucccagcuacucag

SEQ ID NO: 50035 - RNA, 19 nt, Artificial Sequence
  Sense Oligo
ugaguagcugggauuacag

SEQ ID NO: 50036 - RNA, 19 nt, Artificial Sequence
  Antisense Oligo
cuguaaucccagcuacuca

SEQ ID NO: 50037 - RNA, 19 nt, Artificial Sequence
  Sense Oligo
uagcugggauuacaggugc

SEQ ID NO: 50038 - RNA, 19 nt, Artificial Sequence
  Antisense Oligo
gcaccuguaaucccagcua

SEQ ID NO: 50039 - RNA, 19 nt, Artificial Sequence
  Sense Oligo
agcugggauuacaggugcc

SEQ ID NO: 50040 - RNA, 19 nt, Artificial Sequence
  Antisense Oligo
ggcaccuguaaucccagcu

SEQ ID NO: 50041 - RNA, 19 nt, Artificial Sequence
  Sense Oligo
gcugggauuacaggugccu

SEQ ID NO: 50042 - RNA, 19 nt, Artificial Sequence
  Antisense Oligo
aggcaccuguaaucccagc

SEQ ID NO: 50043 - RNA, 19 nt, Artificial Sequence
  Sense Oligo
cugggauuacaggugccug

SEQ ID NO: 50044 - RNA, 19 nt, Artificial Sequence
  Antisense Oligo
caggcaccuguaaucccag

SEQ ID NO: 50045 - RNA, 19 nt, Artificial Sequence
  Sense Oligo
ugggauuacaggugccugc

SEQ ID NO: 50046 - RNA, 19 nt, Artificial Sequence
  Antisense Oligo
gcaggcaccuguaauccca

SEQ ID NO: 50047 - RNA, 19 nt, Artificial Sequence
  Sense Oligo
gggauuacaggugccugcc

SEQ ID NO: 50048 - RNA, 19 nt, Artificial Sequence
  Antisense Oligo
ggcaggcaccuguaauccc

SEQ ID NO: 50049 - RNA, 19 nt, Artificial Sequence
  Sense Oligo
ggauuacaggugccugcca

SEQ ID NO: 50050 - RNA, 19 nt, Artificial Sequence
  Antisense Oligo
uggcaggcaccuguaaucc

SEQ ID NO: 50051 - RNA, 19 nt, Artificial Sequence
  Sense Oligo
gauuacaggugccugccac

SEQ ID NO: 50052 - RNA, 19 nt, Artificial Sequence
  Antisense Oligo
guggcaggcaccuguaauc

SEQ ID NO: 50053 - RNA, 19 nt, Artificial Sequence
  Sense Oligo
ugccugccaccacgacugu

SEQ ID NO: 50054 - RNA, 19 nt, Artificial Sequence
  Antisense Oligo
acagucgugguggcaggca

SEQ ID NO: 50055 - RNA, 19 nt, Artificial Sequence
  Sense Oligo
gccugccaccacgacugua

SEQ ID NO: 50056 - RNA, 19 nt, Artificial Sequence
  Antisense Oligo
uacagucgugguggcaggc

SEQ ID NO: 50057 - RNA, 19 nt, Artificial Sequence
  Sense Oligo
ccugccaccacgacuguaa

SEQ ID NO: 50058 - RNA, 19 nt, Artificial Sequence
  Antisense Oligo
uuacagucgugguggcagg

SEQ ID NO: 50059 - RNA, 19 nt, Artificial Sequence
  Sense Oligo
cugccaccacgacuguaau

SEQ ID NO: 50060 - RNA, 19 nt, Artificial Sequence
  Antisense Oligo
auuacagucgugguggcag

SEQ ID NO: 50061 - RNA, 19 nt, Artificial Sequence
  Sense Oligo
ugccaccacgacuguaauu

SEQ ID NO: 50062 - RNA, 19 nt, Artificial Sequence
  Antisense Oligo
aauuacagucgugguggca

SEQ ID NO: 50063 - RNA, 19 nt, Artificial Sequence
  Sense Oligo
gccaccacgacuguaauuu

SEQ ID NO: 50064 - RNA, 19 nt, Artificial Sequence
  Antisense Oligo
aaauuacagucgugguggc

SEQ ID NO: 50065 - RNA, 19 nt, Artificial Sequence
  Sense Oligo
ccaccacgacuguaauuuu

SEQ ID NO: 50066 - RNA, 19 nt, Artificial Sequence
  Antisense Oligo
aaaauuacagucguggugg

SEQ ID NO: 50067 - RNA, 19 nt, Artificial Sequence
  Sense Oligo
cgggauuucaccauguugg

SEQ ID NO: 50068 - RNA, 19 nt, Artificial Sequence
  Antisense Oligo
ccaacauggugaaaucccg

SEQ ID NO: 50069 - RNA, 19 nt, Artificial Sequence
  Sense Oligo
gggauuucaccauguuggc

SEQ ID NO: 50070 - RNA, 19 nt, Artificial Sequence
  Antisense Oligo
gccaacauggugaaauccc

SEQ ID NO: 50071 - RNA, 19 nt, Artificial Sequence
  Sense Oligo
ggauuucaccauguuggcc

SEQ ID NO: 50072 - RNA, 19 nt, Artificial Sequence
  Antisense Oligo
ggccaacauggugaaaucc

SEQ ID NO: 50073 - RNA, 19 nt, Artificial Sequence
  Sense Oligo
gauuucaccauguuggcca

SEQ ID NO: 50074 - RNA, 19 nt, Artificial Sequence
  Antisense Oligo
uggccaacauggugaaauc

SEQ ID NO: 50075 - RNA, 19 nt, Artificial Sequence
  Sense Oligo
auuucaccauguuggccag

SEQ ID NO: 50076 - RNA, 19 nt, Artificial Sequence
  Antisense Oligo
cuggccaacauggugaaau

SEQ ID NO: 50077 - RNA, 19 nt, Artificial Sequence
  Sense Oligo
caccauguuggccaggcug

SEQ ID NO: 50078 - RNA, 19 nt, Artificial Sequence
  Antisense Oligo
cagccuggccaacauggug

SEQ ID NO: 50079 - RNA, 19 nt, Artificial Sequence
  Sense Oligo
accauguuggccaggcugg

SEQ ID NO: 50080 - RNA, 19 nt, Artificial Sequence
  Antisense Oligo
ccagccuggccaacauggu

SEQ ID NO: 50081 - RNA, 19 nt, Artificial Sequence
  Sense Oligo
ccauguuggccaggcuggu

SEQ ID NO: 50082 - RNA, 19 nt, Artificial Sequence
  Antisense Oligo
accagccuggccaacaugg

SEQ ID NO: 50083 - RNA, 19 nt, Artificial Sequence
  Sense Oligo
cauguuggccaggcugguc

SEQ ID NO: 50084 - RNA, 19 nt, Artificial Sequence
  Antisense Oligo
gaccagccuggccaacaug

SEQ ID NO: 50085 - RNA, 19 nt, Artificial Sequence
  Sense Oligo
auguuggccaggcuggucu

SEQ ID NO: 50086 - RNA, 19 nt, Artificial Sequence
  Antisense Oligo
agaccagccuggccaacau

SEQ ID NO: 50087 - RNA, 19 nt, Artificial Sequence
  Sense Oligo
uguuggccaggcuggucuc

SEQ ID NO: 50088 - RNA, 19 nt, Artificial Sequence
  Antisense Oligo
gagaccagccuggccaaca

SEQ ID NO: 50089 - RNA, 19 nt, Artificial Sequence
  Sense Oligo
gcccagccaccuuuuaauu

SEQ ID NO: 50090 - RNA, 19 nt, Artificial Sequence
  Antisense Oligo
aauuaaaagguggcugggc

SEQ ID NO: 50091 - RNA, 19 nt, Artificial Sequence
  Sense Oligo
cccagccaccuuuuaauuc

SEQ ID NO: 50092 - RNA, 19 nt, Artificial Sequence
  Antisense Oligo
gaauuaaaagguggcuggg

SEQ ID NO: 50093 - RNA, 19 nt, Artificial Sequence
  Sense Oligo
ccagccaccuuuuaauucu

SEQ ID NO: 50094 - RNA, 19 nt, Artificial Sequence
  Antisense Oligo
agaauuaaaagguggcugg

SEQ ID NO: 50095 - RNA, 19 nt, Artificial Sequence
  Sense Oligo
cagccaccuuuuaauucuu

SEQ ID NO: 50096 - RNA, 19 nt, Artificial Sequence
  Antisense Oligo
aagaauuaaaagguggcug

SEQ ID NO: 50097 - RNA, 19 nt, Artificial Sequence
  Sense Oligo
gccaccuuuuaauucuuau

SEQ ID NO: 50098 - RNA, 19 nt, Artificial Sequence
  Antisense Oligo
auaagaauuaaaagguggc

SEQ ID NO: 50099 - RNA, 19 nt, Artificial Sequence
  Sense Oligo
caccuuuuaauucuuaucc

SEQ ID NO: 50100 - RNA, 19 nt, Artificial Sequence
  Antisense Oligo
ggauaagaauuaaaaggug

SEQ ID NO: 50101 - RNA, 19 nt, Artificial Sequence
  Sense Oligo
aaaugucuuguaguuaacc

SEQ ID NO: 50102 - RNA, 19 nt, Artificial Sequence
  Antisense Oligo
gguuaacuacaagacauuu

SEQ ID NO: 50103 - RNA, 19 nt, Artificial Sequence
  Sense Oligo
aaugucuuguaguuaacca

SEQ ID NO: 50104 - RNA, 19 nt, Artificial Sequence
  Antisense Oligo
ugguuaacuacaagacauu

SEQ ID NO: 50105 - RNA, 19 nt, Artificial Sequence
  Sense Oligo
augucuuguaguuaaccaa

SEQ ID NO: 50106 - RNA, 19 nt, Artificial Sequence
  Antisense Oligo
uugguuaacuacaagacau

SEQ ID NO: 50107 - RNA, 19 nt, Artificial Sequence
  Sense Oligo
ugucuuguaguuaaccaau

SEQ ID NO: 50108 - RNA, 19 nt, Artificial Sequence
  Antisense Oligo
auugguuaacuacaagaca

SEQ ID NO: 50109 - RNA, 19 nt, Artificial Sequence
  Sense Oligo
gucuuguaguuaaccaauu

SEQ ID NO: 50110 - RNA, 19 nt, Artificial Sequence
  Antisense Oligo
aauugguuaacuacaagac

SEQ ID NO: 50111 - RNA, 19 nt, Artificial Sequence
  Sense Oligo
aaccaauuaucuuucuguc

SEQ ID NO: 50112 - RNA, 19 nt, Artificial Sequence
  Antisense Oligo
gacagaaagauaauugguu

SEQ ID NO: 50113 - RNA, 19 nt, Artificial Sequence
  Sense Oligo
accaauuaucuuucugucu

SEQ ID NO: 50114 - RNA, 19 nt, Artificial Sequence
  Antisense Oligo
agacagaaagauaauuggu

SEQ ID NO: 50115 - RNA, 19 nt, Artificial Sequence
  Sense Oligo
ccaauuaucuuucugucug

SEQ ID NO: 50116 - RNA, 19 nt, Artificial Sequence
  Antisense Oligo
cagacagaaagauaauugg

SEQ ID NO: 50117 - RNA, 19 nt, Artificial Sequence
  Sense Oligo
aauuaucuuucugucugcc

SEQ ID NO: 50118 - RNA, 19 nt, Artificial Sequence
  Antisense Oligo
ggcagacagaaagauaauu

SEQ ID NO: 50119 - RNA, 19 nt, Artificial Sequence
  Sense Oligo
auuaucuuucugucugccu

SEQ ID NO: 50120 - RNA, 19 nt, Artificial Sequence
  Antisense Oligo
aggcagacagaaagauaau

SEQ ID NO: 50121 - RNA, 19 nt, Artificial Sequence
  Sense Oligo
uuaucuuucugucugccua

SEQ ID NO: 50122 - RNA, 19 nt, Artificial Sequence
  Antisense Oligo
uaggcagacagaaagauaa

SEQ ID NO: 50123 - RNA, 19 nt, Artificial Sequence
  Sense Oligo
uucugucugccuaucugug

SEQ ID NO: 50124 - RNA, 19 nt, Artificial Sequence
  Antisense Oligo
cacagauaggcagacagaa

SEQ ID NO: 50125 - RNA, 19 nt, Artificial Sequence
  Sense Oligo
cugucugccuaucugugca

SEQ ID NO: 50126 - RNA, 19 nt, Artificial Sequence
  Antisense Oligo
ugcacagauaggcagacag

SEQ ID NO: 50127 - RNA, 19 nt, Artificial Sequence
  Sense Oligo
ugccuaucugugcauucau

SEQ ID NO: 50128 - RNA, 19 nt, Artificial Sequence
  Antisense Oligo
augaaugcacagauaggca

SEQ ID NO: 50129 - RNA, 19 nt, Artificial Sequence
  Sense Oligo
gccuaucugugcauucauc

SEQ ID NO: 50130 - RNA, 19 nt, Artificial Sequence
  Antisense Oligo
gaugaaugcacagauaggc

SEQ ID NO: 50131 - RNA, 19 nt, Artificial Sequence
  Sense Oligo
ccuaucugugcauucaucc

SEQ ID NO: 50132 - RNA, 19 nt, Artificial Sequence
  Antisense Oligo
ggaugaaugcacagauagg

SEQ ID NO: 50133 - RNA, 19 nt, Artificial Sequence
  Sense Oligo
cuaucugugcauucaucca

SEQ ID NO: 50134 - RNA, 19 nt, Artificial Sequence
  Antisense Oligo
uggaugaaugcacagauag

SEQ ID NO: 50135 - RNA, 19 nt, Artificial Sequence
  Sense Oligo
cugugcauucauccauccc

SEQ ID NO: 50136 - RNA, 19 nt, Artificial Sequence
  Antisense Oligo
gggauggaugaaugcacag

SEQ ID NO: 50137 - RNA, 19 nt, Artificial Sequence
  Sense Oligo
gcauucauccaucccuccg

SEQ ID NO: 50138 - RNA, 19 nt, Artificial Sequence
  Antisense Oligo
cggagggauggaugaaugc

SEQ ID NO: 50139 - RNA, 19 nt, Artificial Sequence
  Sense Oligo
ccauccaccugucuaucag

SEQ ID NO: 50140 - RNA, 19 nt, Artificial Sequence
  Antisense Oligo
cugauagacagguggaugg

SEQ ID NO: 50141 - RNA, 19 nt, Artificial Sequence
  Sense Oligo
cauccaccugucuaucaga

SEQ ID NO: 50142 - RNA, 19 nt, Artificial Sequence
  Antisense Oligo
ucugauagacagguggaug

SEQ ID NO: 50143 - RNA, 19 nt, Artificial Sequence
  Sense Oligo
ucuaucagacacucagauc

SEQ ID NO: 50144 - RNA, 19 nt, Artificial Sequence
  Antisense Oligo
gaucugagugucugauaga

SEQ ID NO: 50145 - RNA, 19 nt, Artificial Sequence
  Sense Oligo
cuaucagacacucagaucu

SEQ ID NO: 50146 - RNA, 19 nt, Artificial Sequence
  Antisense Oligo
agaucugagugucugauag

SEQ ID NO: 50147 - RNA, 19 nt, Artificial Sequence
  Sense Oligo
uaucagacacucagaucua

SEQ ID NO: 50148 - RNA, 19 nt, Artificial Sequence
  Antisense Oligo
uagaucugagugucugaua

SEQ ID NO: 50149 - RNA, 19 nt, Artificial Sequence
  Sense Oligo
aucagacacucagaucuag

SEQ ID NO: 50150 - RNA, 19 nt, Artificial Sequence
  Antisense Oligo
cuagaucugagugucugau

SEQ ID NO: 50151 - RNA, 19 nt, Artificial Sequence
  Sense Oligo
caaauacuuaguuccagau

SEQ ID NO: 50152 - RNA, 19 nt, Artificial Sequence
  Antisense Oligo
aucuggaacuaaguauuug

SEQ ID NO: 50153 - RNA, 19 nt, Artificial Sequence
  Sense Oligo
acaugugccuucuuguuua

SEQ ID NO: 50154 - RNA, 19 nt, Artificial Sequence
  Antisense Oligo
uaaacaagaaggcacaugu

SEQ ID NO: 50155 - RNA, 19 nt, Artificial Sequence
  Sense Oligo
caugugccuucuuguuuag

SEQ ID NO: 50156 - RNA, 19 nt, Artificial Sequence
  Antisense Oligo
cuaaacaagaaggcacaug

SEQ ID NO: 50157 - RNA, 19 nt, Artificial Sequence
  Sense Oligo
augugccuucuuguuuagu

SEQ ID NO: 50158 - RNA, 19 nt, Artificial Sequence
  Antisense Oligo
acuaaacaagaaggcacau

SEQ ID NO: 50159 - RNA, 19 nt, Artificial Sequence
  Sense Oligo
ugugccuucuuguuuaguu

SEQ ID NO: 50160 - RNA, 19 nt, Artificial Sequence
  Antisense Oligo
aacuaaacaagaaggcaca

SEQ ID NO: 50161 - RNA, 19 nt, Artificial Sequence
  Sense Oligo
gugccuucuuguuuaguuu

SEQ ID NO: 50162 - RNA, 19 nt, Artificial Sequence
  Antisense Oligo
aaacuaaacaagaaggcac

SEQ ID NO: 50163 - RNA, 19 nt, Artificial Sequence
  Sense Oligo
ugccuucuuguuuaguuug

SEQ ID NO: 50164 - RNA, 19 nt, Artificial Sequence
  Antisense Oligo
caaacuaaacaagaaggca

SEQ ID NO: 50165 - RNA, 19 nt, Artificial Sequence
  Sense Oligo
gccuucuuguuuaguuuga

SEQ ID NO: 50166 - RNA, 19 nt, Artificial Sequence
  Antisense Oligo
ucaaacuaaacaagaaggc

SEQ ID NO: 50167 - RNA, 19 nt, Artificial Sequence
  Sense Oligo
ccuucuuguuuaguuugau

SEQ ID NO: 50168 - RNA, 19 nt, Artificial Sequence
  Antisense Oligo
aucaaacuaaacaagaagg

SEQ ID NO: 50169 - RNA, 19 nt, Artificial Sequence
  Sense Oligo
cuucuuguuuaguuugauc

SEQ ID NO: 50170 - RNA, 19 nt, Artificial Sequence
  Antisense Oligo
gaucaaacuaaacaagaag

SEQ ID NO: 50171 - RNA, 19 nt, Artificial Sequence
  Sense Oligo
ucuuguuuaguuugaucug

SEQ ID NO: 50172 - RNA, 19 nt, Artificial Sequence
  Antisense Oligo
cagaucaaacuaaacaaga

SEQ ID NO: 50173 - RNA, 19 nt, Artificial Sequence
  Sense Oligo
guuuaguuugaucugggac

SEQ ID NO: 50174 - RNA, 19 nt, Artificial Sequence
  Antisense Oligo
gucccagaucaaacuaaac

SEQ ID NO: 50175 - RNA, 19 nt, Artificial Sequence
  Sense Oligo
uuuaguuugaucugggaca

SEQ ID NO: 50176 - RNA, 19 nt, Artificial Sequence
  Antisense Oligo
ugucccagaucaaacuaaa

SEQ ID NO: 50177 - RNA, 19 nt, Artificial Sequence
  Sense Oligo
aauucauuuuggucucuuc

SEQ ID NO: 50178 - RNA, 19 nt, Artificial Sequence
  Antisense Oligo
gaagagaccaaaaugaauu

SEQ ID NO: 50179 - RNA, 19 nt, Artificial Sequence
  Sense Oligo
uggucucuucaucuguauu

SEQ ID NO: 50180 - RNA, 19 nt, Artificial Sequence
  Antisense Oligo
aauacagaugaagagacca

SEQ ID NO: 50181 - RNA, 19 nt, Artificial Sequence
  Sense Oligo
ggucucuucaucuguauua

SEQ ID NO: 50182 - RNA, 19 nt, Artificial Sequence
  Antisense Oligo
uaauacagaugaagagacc

SEQ ID NO: 50183 - RNA, 19 nt, Artificial Sequence
  Sense Oligo
cuucaucuguauuauaguc

SEQ ID NO: 50184 - RNA, 19 nt, Artificial Sequence
  Antisense Oligo
gacuauaauacagaugaag

SEQ ID NO: 50185 - RNA, 19 nt, Artificial Sequence
  Sense Oligo
uuuuccaaaugaaucguca

SEQ ID NO: 50186 - RNA, 19 nt, Artificial Sequence
  Antisense Oligo
ugacgauucauuuggaaaa

SEQ ID NO: 50187 - RNA, 19 nt, Artificial Sequence
  Sense Oligo
aaccucgaugacuuguucu

SEQ ID NO: 50188 - RNA, 19 nt, Artificial Sequence
  Antisense Oligo
agaacaagucaucgagguu

SEQ ID NO: 50189 - RNA, 19 nt, Artificial Sequence
  Sense Oligo
accucgaugacuuguucug

SEQ ID NO: 50190 - RNA, 19 nt, Artificial Sequence
  Antisense Oligo
cagaacaagucaucgaggu

SEQ ID NO: 50191 - RNA, 19 nt, Artificial Sequence
  Sense Oligo
ccucgaugacuuguucuga

SEQ ID NO: 50192 - RNA, 19 nt, Artificial Sequence
  Antisense Oligo
ucagaacaagucaucgagg

SEQ ID NO: 50193 - RNA, 19 nt, Artificial Sequence
  Sense Oligo
cucgaugacuuguucugaa

SEQ ID NO: 50194 - RNA, 19 nt, Artificial Sequence
  Antisense Oligo
uucagaacaagucaucgag

SEQ ID NO: 50195 - RNA, 19 nt, Artificial Sequence
  Sense Oligo
guggcucacaccuguaauc

SEQ ID NO: 50196 - RNA, 19 nt, Artificial Sequence
  Antisense Oligo
gauuacaggugugagccac

SEQ ID NO: 50197 - RNA, 19 nt, Artificial Sequence
  Sense Oligo
uggcucacaccuguaaucc

SEQ ID NO: 50198 - RNA, 19 nt, Artificial Sequence
  Antisense Oligo
ggauuacaggugugagcca

SEQ ID NO: 50199 - RNA, 19 nt, Artificial Sequence
  Sense Oligo
ggcucacaccuguaauccc

SEQ ID NO: 50200 - RNA, 19 nt, Artificial Sequence
  Antisense Oligo
gggauuacaggugugagcc

SEQ ID NO: 50201 - RNA, 19 nt, Artificial Sequence
  Sense Oligo
cacaccuguaaucccaaua

SEQ ID NO: 50202 - RNA, 19 nt, Artificial Sequence
  Antisense Oligo
uauugggauuacaggugug

SEQ ID NO: 50203 - RNA, 19 nt, Artificial Sequence
  Sense Oligo
acaccuguaaucccaauac

SEQ ID NO: 50204 - RNA, 19 nt, Artificial Sequence
  Antisense Oligo
guauugggauuacaggugu

SEQ ID NO: 50205 - RNA, 19 nt, Artificial Sequence
  Sense Oligo
caccuguaaucccaauacu

SEQ ID NO: 50206 - RNA, 19 nt, Artificial Sequence
  Antisense Oligo
aguauugggauuacaggug

SEQ ID NO: 50207 - RNA, 19 nt, Artificial Sequence
  Sense Oligo
accuguaaucccaauacuu

SEQ ID NO: 50208 - RNA, 19 nt, Artificial Sequence
  Antisense Oligo
aaguauugggauuacaggu

SEQ ID NO: 50209 - RNA, 19 nt, Artificial Sequence
  Sense Oligo
cuugugcccaggaguuuga

SEQ ID NO: 50210 - RNA, 19 nt, Artificial Sequence
  Antisense Oligo
ucaaacuccugggcacaag

SEQ ID NO: 50211 - RNA, 19 nt, Artificial Sequence
  Sense Oligo
guggcacuggguguguugu

SEQ ID NO: 50212 - RNA, 19 nt, Artificial Sequence
  Antisense Oligo
acaacacacccagugccac

SEQ ID NO: 50213 - RNA, 19 nt, Artificial Sequence
  Sense Oligo
uggcacuggguguguuguu

SEQ ID NO: 50214 - RNA, 19 nt, Artificial Sequence
  Antisense Oligo
aacaacacacccagugcca

SEQ ID NO: 50215 - RNA, 19 nt, Artificial Sequence
  Sense Oligo
ggcacuggguguguuguuc

SEQ ID NO: 50216 - RNA, 19 nt, Artificial Sequence
  Antisense Oligo
gaacaacacacccagugcc

SEQ ID NO: 50217 - RNA, 19 nt, Artificial Sequence
  Sense Oligo
ggguguguuguuccugucu

SEQ ID NO: 50218 - RNA, 19 nt, Artificial Sequence
  Antisense Oligo
agacaggaacaacacaccc

SEQ ID NO: 50219 - RNA, 19 nt, Artificial Sequence
  Sense Oligo
guuguuccugucuacuugc

SEQ ID NO: 50220 - RNA, 19 nt, Artificial Sequence
  Antisense Oligo
gcaaguagacaggaacaac

SEQ ID NO: 50221 - RNA, 19 nt, Artificial Sequence
  Sense Oligo
uuguuccugucuacuugca

SEQ ID NO: 50222 - RNA, 19 nt, Artificial Sequence
  Antisense Oligo
ugcaaguagacaggaacaa

SEQ ID NO: 50223 - RNA, 19 nt, Artificial Sequence
  Sense Oligo
uccugucuacuugcacggc

SEQ ID NO: 50224 - RNA, 19 nt, Artificial Sequence
  Antisense Oligo
gccgugcaaguagacagga

SEQ ID NO: 50225 - RNA, 19 nt, Artificial Sequence
  Sense Oligo
ccugucuacuugcacggcu

SEQ ID NO: 50226 - RNA, 19 nt, Artificial Sequence
  Antisense Oligo
agccgugcaaguagacagg

SEQ ID NO: 50227 - RNA, 19 nt, Artificial Sequence
  Sense Oligo
cugucuacuugcacggcug

SEQ ID NO: 50228 - RNA, 19 nt, Artificial Sequence
  Antisense Oligo
cagccgugcaaguagacag

SEQ ID NO: 50229 - RNA, 19 nt, Artificial Sequence
  Sense Oligo
ugucuacuugcacggcuga

SEQ ID NO: 50230 - RNA, 19 nt, Artificial Sequence
  Antisense Oligo
ucagccgugcaaguagaca

SEQ ID NO: 50231 - RNA, 19 nt, Artificial Sequence
  Sense Oligo
gucuacuugcacggcugag

SEQ ID NO: 50232 - RNA, 19 nt, Artificial Sequence
  Antisense Oligo
cucagccgugcaaguagac

SEQ ID NO: 50233 - RNA, 19 nt, Artificial Sequence
  Sense Oligo
acuugcacggcugaggugg

SEQ ID NO: 50234 - RNA, 19 nt, Artificial Sequence
  Antisense Oligo
ccaccucagccgugcaagu

SEQ ID NO: 50235 - RNA, 19 nt, Artificial Sequence
  Sense Oligo
acggcugaggugggaggau

SEQ ID NO: 50236 - RNA, 19 nt, Artificial Sequence
  Antisense Oligo
auccucccaccucagccgu

SEQ ID NO: 50237 - RNA, 19 nt, Artificial Sequence
  Sense Oligo
ugagcccagguauuccagg

SEQ ID NO: 50238 - RNA, 19 nt, Artificial Sequence
  Antisense Oligo
ccuggaauaccugggcuca

SEQ ID NO: 50239 - RNA, 19 nt, Artificial Sequence
  Sense Oligo
gagcccagguauuccaggu

SEQ ID NO: 50240 - RNA, 19 nt, Artificial Sequence
  Antisense Oligo
accuggaauaccugggcuc

SEQ ID NO: 50241 - RNA, 19 nt, Artificial Sequence
  Sense Oligo
ccagguauuccagguuaug

SEQ ID NO: 50242 - RNA, 19 nt, Artificial Sequence
  Antisense Oligo
cauaaccuggaauaccugg

SEQ ID NO: 50243 - RNA, 19 nt, Artificial Sequence
  Sense Oligo
cagguauuccagguuauga

SEQ ID NO: 50244 - RNA, 19 nt, Artificial Sequence
  Antisense Oligo
ucauaaccuggaauaccug

SEQ ID NO: 50245 - RNA, 19 nt, Artificial Sequence
  Sense Oligo
agguauuccagguuaugac

SEQ ID NO: 50246 - RNA, 19 nt, Artificial Sequence
  Antisense Oligo
gucauaaccuggaauaccu

SEQ ID NO: 50247 - RNA, 19 nt, Artificial Sequence
  Sense Oligo
ugucacuacaccgcaguug

SEQ ID NO: 50248 - RNA, 19 nt, Artificial Sequence
  Antisense Oligo
caacugcgguguagugaca

SEQ ID NO: 50249 - RNA, 19 nt, Artificial Sequence
  Sense Oligo
gucacuacaccgcaguugg

SEQ ID NO: 50250 - RNA, 19 nt, Artificial Sequence
  Antisense Oligo
ccaacugcgguguagugac

SEQ ID NO: 50251 - RNA, 19 nt, Artificial Sequence
  Sense Oligo
ucacuacaccgcaguuggc

SEQ ID NO: 50252 - RNA, 19 nt, Artificial Sequence
  Antisense Oligo
gccaacugcgguguaguga

SEQ ID NO: 50253 - RNA, 19 nt, Artificial Sequence
  Sense Oligo
cacuacaccgcaguuggcg

SEQ ID NO: 50254 - RNA, 19 nt, Artificial Sequence
  Antisense Oligo
cgccaacugcgguguagug

SEQ ID NO: 50255 - RNA, 19 nt, Artificial Sequence
  Sense Oligo
acuacaccgcaguuggcgu

SEQ ID NO: 50256 - RNA, 19 nt, Artificial Sequence
  Antisense Oligo
acgccaacugcgguguagu

SEQ ID NO: 50257 - RNA, 19 nt, Artificial Sequence
  Sense Oligo
cuacaccgcaguuggcgug

SEQ ID NO: 50258 - RNA, 19 nt, Artificial Sequence
  Antisense Oligo
cacgccaacugcgguguag

SEQ ID NO: 50259 - RNA, 19 nt, Artificial Sequence
  Sense Oligo
uacaccgcaguuggcguga

SEQ ID NO: 50260 - RNA, 19 nt, Artificial Sequence
  Antisense Oligo
ucacgccaacugcggugua

SEQ ID NO: 50261 - RNA, 19 nt, Artificial Sequence
  Sense Oligo
acaccgcaguuggcgugac

SEQ ID NO: 50262 - RNA, 19 nt, Artificial Sequence
  Antisense Oligo
gucacgccaacugcggugu

SEQ ID NO: 50263 - RNA, 19 nt, Artificial Sequence
  Sense Oligo
caccgcaguuggcgugaca

SEQ ID NO: 50264 - RNA, 19 nt, Artificial Sequence
  Antisense Oligo
ugucacgccaacugcggug

SEQ ID NO: 50265 - RNA, 19 nt, Artificial Sequence
  Sense Oligo
accgcaguuggcgugacag

SEQ ID NO: 50266 - RNA, 19 nt, Artificial Sequence
  Antisense Oligo
cugucacgccaacugcggu

SEQ ID NO: 50267 - RNA, 19 nt, Artificial Sequence
  Sense Oligo
ccgcaguuggcgugacaga

SEQ ID NO: 50268 - RNA, 19 nt, Artificial Sequence
  Antisense Oligo
ucugucacgccaacugcgg

SEQ ID NO: 50269 - RNA, 19 nt, Artificial Sequence
  Sense Oligo
cgcaguuggcgugacagag

SEQ ID NO: 50270 - RNA, 19 nt, Artificial Sequence
  Antisense Oligo
cucugucacgccaacugcg

SEQ ID NO: 50271 - RNA, 19 nt, Artificial Sequence
  Sense Oligo
gcaguuggcgugacagagu

SEQ ID NO: 50272 - RNA, 19 nt, Artificial Sequence
  Antisense Oligo
acucugucacgccaacugc

SEQ ID NO: 50273 - RNA, 19 nt, Artificial Sequence
  Sense Oligo
caguuggcgugacagagug

SEQ ID NO: 50274 - RNA, 19 nt, Artificial Sequence
  Antisense Oligo
cacucugucacgccaacug

SEQ ID NO: 50275 - RNA, 19 nt, Artificial Sequence
  Sense Oligo
aguuggcgugacagaguga

SEQ ID NO: 50276 - RNA, 19 nt, Artificial Sequence
  Antisense Oligo
ucacucugucacgccaacu

SEQ ID NO: 50277 - RNA, 19 nt, Artificial Sequence
  Sense Oligo
guuggcgugacagagugag

SEQ ID NO: 50278 - RNA, 19 nt, Artificial Sequence
  Antisense Oligo
cucacucugucacgccaac

SEQ ID NO: 50279 - RNA, 19 nt, Artificial Sequence
  Sense Oligo
cacuacuucacccuuccag

SEQ ID NO: 50280 - RNA, 19 nt, Artificial Sequence
  Antisense Oligo
cuggaagggugaaguagug

SEQ ID NO: 50281 - RNA, 19 nt, Artificial Sequence
  Sense Oligo
acuacuucacccuuccagu

SEQ ID NO: 50282 - RNA, 19 nt, Artificial Sequence
  Antisense Oligo
acuggaagggugaaguagu

SEQ ID NO: 50283 - RNA, 19 nt, Artificial Sequence
  Sense Oligo
acuucacccuuccaguaac

SEQ ID NO: 50284 - RNA, 19 nt, Artificial Sequence
  Antisense Oligo
guuacuggaagggugaagu

SEQ ID NO: 50285 - RNA, 19 nt, Artificial Sequence
  Sense Oligo
acccuuccaguaaccuaau

SEQ ID NO: 50286 - RNA, 19 nt, Artificial Sequence
  Antisense Oligo
auuagguuacuggaagggu

SEQ ID NO: 50287 - RNA, 19 nt, Artificial Sequence
  Sense Oligo
cccuuccaguaaccuaaug

SEQ ID NO: 50288 - RNA, 19 nt, Artificial Sequence
  Antisense Oligo
cauuagguuacuggaaggg

SEQ ID NO: 50289 - RNA, 19 nt, Artificial Sequence
  Sense Oligo
ccuuccaguaaccuaauga

SEQ ID NO: 50290 - RNA, 19 nt, Artificial Sequence
  Antisense Oligo
ucauuagguuacuggaagg

SEQ ID NO: 50291 - RNA, 19 nt, Artificial Sequence
  Sense Oligo
cuuccaguaaccuaaugac

SEQ ID NO: 50292 - RNA, 19 nt, Artificial Sequence
  Antisense Oligo
gucauuagguuacuggaag

SEQ ID NO: 50293 - RNA, 19 nt, Artificial Sequence
  Sense Oligo
uuccaguaaccuaaugaca

SEQ ID NO: 50294 - RNA, 19 nt, Artificial Sequence
  Antisense Oligo
ugucauuagguuacuggaa

SEQ ID NO: 50295 - RNA, 19 nt, Artificial Sequence
  Sense Oligo
uccaguaaccuaaugacag

SEQ ID NO: 50296 - RNA, 19 nt, Artificial Sequence
  Antisense Oligo
cugucauuagguuacugga

SEQ ID NO: 50297 - RNA, 19 nt, Artificial Sequence
  Sense Oligo
ccaguaaccuaaugacagu

SEQ ID NO: 50298 - RNA, 19 nt, Artificial Sequence
  Antisense Oligo
acugucauuagguuacugg

SEQ ID NO: 50299 - RNA, 19 nt, Artificial Sequence
  Sense Oligo
caguaaccuaaugacaguu

SEQ ID NO: 50300 - RNA, 19 nt, Artificial Sequence
  Antisense Oligo
aacugucauuagguuacug

SEQ ID NO: 50301 - RNA, 19 nt, Artificial Sequence
  Sense Oligo
guaaccuaaugacaguuua

SEQ ID NO: 50302 - RNA, 19 nt, Artificial Sequence
  Antisense Oligo
uaaacugucauuagguuac

SEQ ID NO: 50303 - RNA, 19 nt, Artificial Sequence
  Sense Oligo
gacaguuuauuagauguag

SEQ ID NO: 50304 - RNA, 19 nt, Artificial Sequence
  Antisense Oligo
cuacaucuaauaaacuguc

SEQ ID NO: 50305 - RNA, 19 nt, Artificial Sequence
  Sense Oligo
agauguagaauuaaguucc

SEQ ID NO: 50306 - RNA, 19 nt, Artificial Sequence
  Antisense Oligo
ggaacuuaauucuacaucu

SEQ ID NO: 50307 - RNA, 19 nt, Artificial Sequence
  Sense Oligo
aauuaaguuccauuccagu

SEQ ID NO: 50308 - RNA, 19 nt, Artificial Sequence
  Antisense Oligo
acuggaauggaacuuaauu

SEQ ID NO: 50309 - RNA, 19 nt, Artificial Sequence
  Sense Oligo
auuaaguuccauuccaguu

SEQ ID NO: 50310 - RNA, 19 nt, Artificial Sequence
  Antisense Oligo
aacuggaauggaacuuaau

SEQ ID NO: 50311 - RNA, 19 nt, Artificial Sequence
  Sense Oligo
uuaaguuccauuccaguuc

SEQ ID NO: 50312 - RNA, 19 nt, Artificial Sequence
  Antisense Oligo
gaacuggaauggaacuuaa

SEQ ID NO: 50313 - RNA, 19 nt, Artificial Sequence
  Sense Oligo
uaaguuccauuccaguucc

SEQ ID NO: 50314 - RNA, 19 nt, Artificial Sequence
  Antisense Oligo
ggaacuggaauggaacuua

SEQ ID NO: 50315 - RNA, 19 nt, Artificial Sequence
  Sense Oligo
aaguuccauuccaguuccg

SEQ ID NO: 50316 - RNA, 19 nt, Artificial Sequence
  Antisense Oligo
cggaacuggaauggaacuu

SEQ ID NO: 50317 - RNA, 19 nt, Artificial Sequence
  Sense Oligo
aguuccauuccaguuccgu

SEQ ID NO: 50318 - RNA, 19 nt, Artificial Sequence
  Antisense Oligo
acggaacuggaauggaacu

SEQ ID NO: 50319 - RNA, 19 nt, Artificial Sequence
  Sense Oligo
guuccauuccaguuccguc

SEQ ID NO: 50320 - RNA, 19 nt, Artificial Sequence
  Antisense Oligo
gacggaacuggaauggaac

SEQ ID NO: 50321 - RNA, 19 nt, Artificial Sequence
  Sense Oligo
cauuccaguuccgucucua

SEQ ID NO: 50322 - RNA, 19 nt, Artificial Sequence
  Antisense Oligo
uagagacggaacuggaaug

SEQ ID NO: 50323 - RNA, 19 nt, Artificial Sequence
  Sense Oligo
auuccaguuccgucucuaa

SEQ ID NO: 50324 - RNA, 19 nt, Artificial Sequence
  Antisense Oligo
uuagagacggaacuggaau

SEQ ID NO: 50325 - RNA, 19 nt, Artificial Sequence
  Sense Oligo
uuccaguuccgucucuaau

SEQ ID NO: 50326 - RNA, 19 nt, Artificial Sequence
  Antisense Oligo
auuagagacggaacuggaa

SEQ ID NO: 50327 - RNA, 19 nt, Artificial Sequence
  Sense Oligo
uccaguuccgucucuaauc

SEQ ID NO: 50328 - RNA, 19 nt, Artificial Sequence
  Antisense Oligo
gauuagagacggaacugga

SEQ ID NO: 50329 - RNA, 19 nt, Artificial Sequence
  Sense Oligo
ccaguuccgucucuaaucu

SEQ ID NO: 50330 - RNA, 19 nt, Artificial Sequence
  Antisense Oligo
agauuagagacggaacugg

SEQ ID NO: 50331 - RNA, 19 nt, Artificial Sequence
  Sense Oligo
caguuccgucucuaaucuu

SEQ ID NO: 50332 - RNA, 19 nt, Artificial Sequence
  Antisense Oligo
aagauuagagacggaacug

SEQ ID NO: 50333 - RNA, 19 nt, Artificial Sequence
  Sense Oligo
aguuccgucucuaaucuua

SEQ ID NO: 50334 - RNA, 19 nt, Artificial Sequence
  Antisense Oligo
uaagauuagagacggaacu

SEQ ID NO: 50335 - RNA, 19 nt, Artificial Sequence
  Sense Oligo
guuccgucucuaaucuuag

SEQ ID NO: 50336 - RNA, 19 nt, Artificial Sequence
  Antisense Oligo
cuaagauuagagacggaac

SEQ ID NO: 50337 - RNA, 19 nt, Artificial Sequence
  Sense Oligo
cuaaucuuagacaucuuug

SEQ ID NO: 50338 - RNA, 19 nt, Artificial Sequence
  Antisense Oligo
caaagaugucuaagauuag

SEQ ID NO: 50339 - RNA, 19 nt, Artificial Sequence
  Sense Oligo
aaucuuagacaucuuugug

SEQ ID NO: 50340 - RNA, 19 nt, Artificial Sequence
  Antisense Oligo
cacaaagaugucuaagauu

SEQ ID NO: 50341 - RNA, 19 nt, Artificial Sequence
  Sense Oligo
gacaucuuugugagucugu

SEQ ID NO: 50342 - RNA, 19 nt, Artificial Sequence
  Antisense Oligo
acagacucacaaagauguc

SEQ ID NO: 50343 - RNA, 19 nt, Artificial Sequence
  Sense Oligo
acaucuuugugagucuguu

SEQ ID NO: 50344 - RNA, 19 nt, Artificial Sequence
  Antisense Oligo
aacagacucacaaagaugu

SEQ ID NO: 50345 - RNA, 19 nt, Artificial Sequence
  Sense Oligo
aucuuugugagucuguuuu

SEQ ID NO: 50346 - RNA, 19 nt, Artificial Sequence
  Antisense Oligo
aaaacagacucacaaagau

SEQ ID NO: 50347 - RNA, 19 nt, Artificial Sequence
  Sense Oligo
ucuuugugagucuguuuuc

SEQ ID NO: 50348 - RNA, 19 nt, Artificial Sequence
  Antisense Oligo
gaaaacagacucacaaaga

SEQ ID NO: 50349 - RNA, 19 nt, Artificial Sequence
  Sense Oligo
cuuugugagucuguuuucu

SEQ ID NO: 50350 - RNA, 19 nt, Artificial Sequence
  Antisense Oligo
agaaaacagacucacaaag

SEQ ID NO: 50351 - RNA, 19 nt, Artificial Sequence
  Sense Oligo
uuugugagucuguuuucua

SEQ ID NO: 50352 - RNA, 19 nt, Artificial Sequence
  Antisense Oligo
uagaaaacagacucacaaa

SEQ ID NO: 50353 - RNA, 19 nt, Artificial Sequence
  Sense Oligo
uugugagucuguuuucuag

SEQ ID NO: 50354 - RNA, 19 nt, Artificial Sequence
  Antisense Oligo
cuagaaaacagacucacaa

SEQ ID NO: 50355 - RNA, 19 nt, Artificial Sequence
  Sense Oligo
gugagucuguuuucuagga

SEQ ID NO: 50356 - RNA, 19 nt, Artificial Sequence
  Antisense Oligo
uccuagaaaacagacucac

SEQ ID NO: 50357 - RNA, 19 nt, Artificial Sequence
  Sense Oligo
ugagucuguuuucuaggac

SEQ ID NO: 50358 - RNA, 19 nt, Artificial Sequence
  Antisense Oligo
guccuagaaaacagacuca

SEQ ID NO: 50359 - RNA, 19 nt, Artificial Sequence
  Sense Oligo
gucuguuuucuaggacuua

SEQ ID NO: 50360 - RNA, 19 nt, Artificial Sequence
  Antisense Oligo
uaaguccuagaaaacagac

SEQ ID NO: 50361 - RNA, 19 nt, Artificial Sequence
  Sense Oligo
aaaugucaaguuauugcug

SEQ ID NO: 50362 - RNA, 19 nt, Artificial Sequence
  Antisense Oligo
cagcaauaacuugacauuu

SEQ ID NO: 50363 - RNA, 19 nt, Artificial Sequence
  Sense Oligo
aaugucaaguuauugcugu

SEQ ID NO: 50364 - RNA, 19 nt, Artificial Sequence
  Antisense Oligo
acagcaauaacuugacauu

SEQ ID NO: 50365 - RNA, 19 nt, Artificial Sequence
  Sense Oligo
gugugguaaauaguagacu

SEQ ID NO: 50366 - RNA, 19 nt, Artificial Sequence
  Antisense Oligo
agucuacuauuuaccacac

SEQ ID NO: 50367 - RNA, 19 nt, Artificial Sequence
  Sense Oligo
ugugguaaauaguagacua

SEQ ID NO: 50368 - RNA, 19 nt, Artificial Sequence
  Antisense Oligo
uagucuacuauuuaccaca

SEQ ID NO: 50369 - RNA, 19 nt, Artificial Sequence
  Sense Oligo
gugguaaauaguagacuag

SEQ ID NO: 50370 - RNA, 19 nt, Artificial Sequence
  Antisense Oligo
cuagucuacuauuuaccac

SEQ ID NO: 50371 - RNA, 19 nt, Artificial Sequence
  Sense Oligo
ugguaaauaguagacuagu

SEQ ID NO: 50372 - RNA, 19 nt, Artificial Sequence
  Antisense Oligo
acuagucuacuauuuacca

SEQ ID NO: 50373 - RNA, 19 nt, Artificial Sequence
  Sense Oligo
uaguagacuaguuguuuug

SEQ ID NO: 50374 - RNA, 19 nt, Artificial Sequence
  Antisense Oligo
caaaacaacuagucuacua

SEQ ID NO: 50375 - RNA, 19 nt, Artificial Sequence
  Sense Oligo
aguagacuaguuguuuugu

SEQ ID NO: 50376 - RNA, 19 nt, Artificial Sequence
  Antisense Oligo
acaaaacaacuagucuacu

SEQ ID NO: 50377 - RNA, 19 nt, Artificial Sequence
  Sense Oligo
cuaguuguuuuguuaaugc

SEQ ID NO: 50378 - RNA, 19 nt, Artificial Sequence
  Antisense Oligo
gcauuaacaaaacaacuag

SEQ ID NO: 50379 - RNA, 19 nt, Artificial Sequence
  Sense Oligo
aguuguuuuguuaaugcuc

SEQ ID NO: 50380 - RNA, 19 nt, Artificial Sequence
  Antisense Oligo
gagcauuaacaaaacaacu

SEQ ID NO: 50381 - RNA, 19 nt, Artificial Sequence
  Sense Oligo
uuuguuaaugcucaagaag

SEQ ID NO: 50382 - RNA, 19 nt, Artificial Sequence
  Antisense Oligo
cuucuugagcauuaacaaa

SEQ ID NO: 50383 - RNA, 19 nt, Artificial Sequence
  Sense Oligo
caaaaugucaaaagguggc

SEQ ID NO: 50384 - RNA, 19 nt, Artificial Sequence
  Antisense Oligo
gccaccuuuugacauuuug

SEQ ID NO: 50385 - RNA, 19 nt, Artificial Sequence
  Sense Oligo
aaaaugucaaaagguggca

SEQ ID NO: 50386 - RNA, 19 nt, Artificial Sequence
  Antisense Oligo
ugccaccuuuugacauuuu

SEQ ID NO: 50387 - RNA, 19 nt, Artificial Sequence
  Sense Oligo
aaaugucaaaagguggcag

SEQ ID NO: 50388 - RNA, 19 nt, Artificial Sequence
  Antisense Oligo
cugccaccuuuugacauuu

SEQ ID NO: 50389 - RNA, 19 nt, Artificial Sequence
  Sense Oligo
caaaagguggcagaccgcc

SEQ ID NO: 50390 - RNA, 19 nt, Artificial Sequence
  Antisense Oligo
ggcggucugccaccuuuug

SEQ ID NO: 50391 - RNA, 19 nt, Artificial Sequence
  Sense Oligo
agaccgccacucugguucc

SEQ ID NO: 50392 - RNA, 19 nt, Artificial Sequence
  Antisense Oligo
ggaaccagaguggcggucu

SEQ ID NO: 50393 - RNA, 19 nt, Artificial Sequence
  Sense Oligo
gaccgccacucugguuccu

SEQ ID NO: 50394 - RNA, 19 nt, Artificial Sequence
  Antisense Oligo
aggaaccagaguggcgguc

SEQ ID NO: 50395 - RNA, 19 nt, Artificial Sequence
  Sense Oligo
accgccacucugguuccuc

SEQ ID NO: 50396 - RNA, 19 nt, Artificial Sequence
  Antisense Oligo
gaggaaccagaguggcggu

SEQ ID NO: 50397 - RNA, 19 nt, Artificial Sequence
  Sense Oligo
ccgccacucugguuccucu

SEQ ID NO: 50398 - RNA, 19 nt, Artificial Sequence
  Antisense Oligo
agaggaaccagaguggcgg

SEQ ID NO: 50399 - RNA, 19 nt, Artificial Sequence
  Sense Oligo
cgccacucugguuccucug

SEQ ID NO: 50400 - RNA, 19 nt, Artificial Sequence
  Antisense Oligo
cagaggaaccagaguggcg

SEQ ID NO: 50401 - RNA, 19 nt, Artificial Sequence
  Sense Oligo
ccacucugguuccucugac

SEQ ID NO: 50402 - RNA, 19 nt, Artificial Sequence
  Antisense Oligo
gucagaggaaccagagugg

SEQ ID NO: 50403 - RNA, 19 nt, Artificial Sequence
  Sense Oligo
cugguuccucugacccgug

SEQ ID NO: 50404 - RNA, 19 nt, Artificial Sequence
  Antisense Oligo
cacgggucagaggaaccag

SEQ ID NO: 50405 - RNA, 19 nt, Artificial Sequence
  Sense Oligo
ugguuccucugacccgugg

SEQ ID NO: 50406 - RNA, 19 nt, Artificial Sequence
  Antisense Oligo
ccacgggucagaggaacca

SEQ ID NO: 50407 - RNA, 19 nt, Artificial Sequence
  Sense Oligo
gguuccucugacccguggu

SEQ ID NO: 50408 - RNA, 19 nt, Artificial Sequence
  Antisense Oligo
accacgggucagaggaacc

SEQ ID NO: 50409 - RNA, 19 nt, Artificial Sequence
  Sense Oligo
uuccucugacccguggugg

SEQ ID NO: 50410 - RNA, 19 nt, Artificial Sequence
  Antisense Oligo
ccaccacgggucagaggaa

SEQ ID NO: 50411 - RNA, 19 nt, Artificial Sequence
  Sense Oligo
cgugguggcccaucucucu

SEQ ID NO: 50412 - RNA, 19 nt, Artificial Sequence
  Antisense Oligo
agagagaugggccaccacg

SEQ ID NO: 50413 - RNA, 19 nt, Artificial Sequence
  Sense Oligo
gugguggcccaucucucuu

SEQ ID NO: 50414 - RNA, 19 nt, Artificial Sequence
  Antisense Oligo
aagagagaugggccaccac

SEQ ID NO: 50415 - RNA, 19 nt, Artificial Sequence
  Sense Oligo
ugguggcccaucucucuuc

SEQ ID NO: 50416 - RNA, 19 nt, Artificial Sequence
  Antisense Oligo
gaagagagaugggccacca

SEQ ID NO: 50417 - RNA, 19 nt, Artificial Sequence
  Sense Oligo
gguggcccaucucucuucu

SEQ ID NO: 50418 - RNA, 19 nt, Artificial Sequence
  Antisense Oligo
agaagagagaugggccacc

SEQ ID NO: 50419 - RNA, 19 nt, Artificial Sequence
  Sense Oligo
guggcccaucucucuucug

SEQ ID NO: 50420 - RNA, 19 nt, Artificial Sequence
  Antisense Oligo
cagaagagagaugggccac

SEQ ID NO: 50421 - RNA, 19 nt, Artificial Sequence
  Sense Oligo
uggcccaucucucuucugu

SEQ ID NO: 50422 - RNA, 19 nt, Artificial Sequence
  Antisense Oligo
acagaagagagaugggcca

SEQ ID NO: 50423 - RNA, 19 nt, Artificial Sequence
  Sense Oligo
ggcccaucucucuucugug

SEQ ID NO: 50424 - RNA, 19 nt, Artificial Sequence
  Antisense Oligo
cacagaagagagaugggcc

SEQ ID NO: 50425 - RNA, 19 nt, Artificial Sequence
  Sense Oligo
gcccaucucucuucugugc

SEQ ID NO: 50426 - RNA, 19 nt, Artificial Sequence
  Antisense Oligo
gcacagaagagagaugggc

SEQ ID NO: 50427 - RNA, 19 nt, Artificial Sequence
  Sense Oligo
ugcugcaggcacacccucu

SEQ ID NO: 50428 - RNA, 19 nt, Artificial Sequence
  Antisense Oligo
agagggugugccugcagca

SEQ ID NO: 50429 - RNA, 19 nt, Artificial Sequence
  Sense Oligo
ugcaggcacacccucugga

SEQ ID NO: 50430 - RNA, 19 nt, Artificial Sequence
  Antisense Oligo
uccagagggugugccugca

SEQ ID NO: 50431 - RNA, 19 nt, Artificial Sequence
  Sense Oligo
gcaggcacacccucuggaa

SEQ ID NO: 50432 - RNA, 19 nt, Artificial Sequence
  Antisense Oligo
uuccagagggugugccugc

SEQ ID NO: 50433 - RNA, 19 nt, Artificial Sequence
  Sense Oligo
caggcacacccucuggaag

SEQ ID NO: 50434 - RNA, 19 nt, Artificial Sequence
  Antisense Oligo
cuuccagagggugugccug

SEQ ID NO: 50435 - RNA, 19 nt, Artificial Sequence
  Sense Oligo
aggcacacccucuggaagc

SEQ ID NO: 50436 - RNA, 19 nt, Artificial Sequence
  Antisense Oligo
gcuuccagagggugugccu

SEQ ID NO: 50437 - RNA, 19 nt, Artificial Sequence
  Sense Oligo
cggguccaaggugcuguca

SEQ ID NO: 50438 - RNA, 19 nt, Artificial Sequence
  Antisense Oligo
ugacagcaccuuggacccg

SEQ ID NO: 50439 - RNA, 19 nt, Artificial Sequence
  Sense Oligo
uggcgagcaugauaucauu

SEQ ID NO: 50440 - RNA, 19 nt, Artificial Sequence
  Antisense Oligo
aaugauaucaugcucgcca

SEQ ID NO: 50441 - RNA, 19 nt, Artificial Sequence
  Sense Oligo
ggcgagcaugauaucauuc

SEQ ID NO: 50442 - RNA, 19 nt, Artificial Sequence
  Antisense Oligo
gaaugauaucaugcucgcc

SEQ ID NO: 50443 - RNA, 19 nt, Artificial Sequence
  Sense Oligo
gcgagcaugauaucauuca

SEQ ID NO: 50444 - RNA, 19 nt, Artificial Sequence
  Antisense Oligo
ugaaugauaucaugcucgc

SEQ ID NO: 50445 - RNA, 19 nt, Artificial Sequence
  Sense Oligo
ugauaucauucaucgacag

SEQ ID NO: 50446 - RNA, 19 nt, Artificial Sequence
  Antisense Oligo
cugucgaugaaugauauca

SEQ ID NO: 50447 - RNA, 19 nt, Artificial Sequence
  Sense Oligo
gauaucauucaucgacaga

SEQ ID NO: 50448 - RNA, 19 nt, Artificial Sequence
  Antisense Oligo
ucugucgaugaaugauauc

SEQ ID NO: 50449 - RNA, 19 nt, Artificial Sequence
  Sense Oligo
auaucauucaucgacagag

SEQ ID NO: 50450 - RNA, 19 nt, Artificial Sequence
  Antisense Oligo
cucugucgaugaaugauau

SEQ ID NO: 50451 - RNA, 19 nt, Artificial Sequence
  Sense Oligo
agacggcaaccuagaguua

SEQ ID NO: 50452 - RNA, 19 nt, Artificial Sequence
  Antisense Oligo
uaacucuagguugccgucu

SEQ ID NO: 50453 - RNA, 19 nt, Artificial Sequence
  Sense Oligo
gacggcaaccuagaguuac

SEQ ID NO: 50454 - RNA, 19 nt, Artificial Sequence
  Antisense Oligo
guaacucuagguugccguc

SEQ ID NO: 50455 - RNA, 19 nt, Artificial Sequence
  Sense Oligo
acggcaaccuagaguuacu

SEQ ID NO: 50456 - RNA, 19 nt, Artificial Sequence
  Antisense Oligo
aguaacucuagguugccgu

SEQ ID NO: 50457 - RNA, 19 nt, Artificial Sequence
  Sense Oligo
uagaguuacugaccaggcc

SEQ ID NO: 50458 - RNA, 19 nt, Artificial Sequence
  Antisense Oligo
ggccuggucaguaacucua

SEQ ID NO: 50459 - RNA, 19 nt, Artificial Sequence
  Sense Oligo
agaguuacugaccaggcca

SEQ ID NO: 50460 - RNA, 19 nt, Artificial Sequence
  Antisense Oligo
uggccuggucaguaacucu

SEQ ID NO: 50461 - RNA, 19 nt, Artificial Sequence
  Sense Oligo
gaguuacugaccaggccag

SEQ ID NO: 50462 - RNA, 19 nt, Artificial Sequence
  Antisense Oligo
cuggccuggucaguaacuc

SEQ ID NO: 50463 - RNA, 19 nt, Artificial Sequence
  Sense Oligo
aguuacugaccaggccaga

SEQ ID NO: 50464 - RNA, 19 nt, Artificial Sequence
  Antisense Oligo
ucuggccuggucaguaacu

SEQ ID NO: 50465 - RNA, 19 nt, Artificial Sequence
  Sense Oligo
uuacugaccaggccagaua

SEQ ID NO: 50466 - RNA, 19 nt, Artificial Sequence
  Antisense Oligo
uaucuggccuggucaguaa

SEQ ID NO: 50467 - RNA, 19 nt, Artificial Sequence
  Sense Oligo
uacugaccaggccagauac

SEQ ID NO: 50468 - RNA, 19 nt, Artificial Sequence
  Antisense Oligo
guaucuggccuggucagua

SEQ ID NO: 50469 - RNA, 19 nt, Artificial Sequence
  Sense Oligo
acugaccaggccagauacu

SEQ ID NO: 50470 - RNA, 19 nt, Artificial Sequence
  Antisense Oligo
aguaucuggccuggucagu

SEQ ID NO: 50471 - RNA, 19 nt, Artificial Sequence
  Sense Oligo
accaggccagauacuccgc

SEQ ID NO: 50472 - RNA, 19 nt, Artificial Sequence
  Antisense Oligo
gcggaguaucuggccuggu

SEQ ID NO: 50473 - RNA, 19 nt, Artificial Sequence
  Sense Oligo
uggauguuuauuuucagug

SEQ ID NO: 50474 - RNA, 19 nt, Artificial Sequence
  Antisense Oligo
cacugaaaauaaacaucca

SEQ ID NO: 50475 - RNA, 19 nt, Artificial Sequence
  Sense Oligo
auuuucagugacacgaugc

SEQ ID NO: 50476 - RNA, 19 nt, Artificial Sequence
  Antisense Oligo
gcaucgugucacugaaaau

SEQ ID NO: 50477 - RNA, 19 nt, Artificial Sequence
  Sense Oligo
uuuucagugacacgaugcu

SEQ ID NO: 50478 - RNA, 19 nt, Artificial Sequence
  Antisense Oligo
agcaucgugucacugaaaa

SEQ ID NO: 50479 - RNA, 19 nt, Artificial Sequence
  Sense Oligo
uuucagugacacgaugcuu

SEQ ID NO: 50480 - RNA, 19 nt, Artificial Sequence
  Antisense Oligo
aagcaucgugucacugaaa

SEQ ID NO: 50481 - RNA, 19 nt, Artificial Sequence
  Sense Oligo
uucagugacacgaugcuuc

SEQ ID NO: 50482 - RNA, 19 nt, Artificial Sequence
  Antisense Oligo
gaagcaucgugucacugaa

SEQ ID NO: 50483 - RNA, 19 nt, Artificial Sequence
  Sense Oligo
ucagugacacgaugcuucu

SEQ ID NO: 50484 - RNA, 19 nt, Artificial Sequence
  Antisense Oligo
agaagcaucgugucacuga

SEQ ID NO: 50485 - RNA, 19 nt, Artificial Sequence
  Sense Oligo
cagugacacgaugcuucug

SEQ ID NO: 50486 - RNA, 19 nt, Artificial Sequence
  Antisense Oligo
cagaagcaucgugucacug

SEQ ID NO: 50487 - RNA, 19 nt, Artificial Sequence
  Sense Oligo
agugacacgaugcuucuga

SEQ ID NO: 50488 - RNA, 19 nt, Artificial Sequence
  Antisense Oligo
ucagaagcaucgugucacu

SEQ ID NO: 50489 - RNA, 19 nt, Artificial Sequence
  Sense Oligo
gugacacgaugcuucugaa

SEQ ID NO: 50490 - RNA, 19 nt, Artificial Sequence
  Antisense Oligo
uucagaagcaucgugucac

SEQ ID NO: 50491 - RNA, 19 nt, Artificial Sequence
  Sense Oligo
acauuccucuugugaugaa

SEQ ID NO: 50492 - RNA, 19 nt, Artificial Sequence
  Antisense Oligo
uucaucacaagaggaaugu

SEQ ID NO: 50493 - RNA, 19 nt, Artificial Sequence
  Sense Oligo
aaaggugaguggaaggcuu

SEQ ID NO: 50494 - RNA, 19 nt, Artificial Sequence
  Antisense Oligo
aagccuuccacucaccuuu

SEQ ID NO: 50495 - RNA, 19 nt, Artificial Sequence
  Sense Oligo
aaggugaguggaaggcuuu

SEQ ID NO: 50496 - RNA, 19 nt, Artificial Sequence
  Antisense Oligo
aaagccuuccacucaccuu

SEQ ID NO: 50497 - RNA, 19 nt, Artificial Sequence
  Sense Oligo
aggugaguggaaggcuuuc

SEQ ID NO: 50498 - RNA, 19 nt, Artificial Sequence
  Antisense Oligo
gaaagccuuccacucaccu

SEQ ID NO: 50499 - RNA, 19 nt, Artificial Sequence
  Sense Oligo
ggugaguggaaggcuuucu

SEQ ID NO: 50500 - RNA, 19 nt, Artificial Sequence
  Antisense Oligo
agaaagccuuccacucacc

SEQ ID NO: 50501 - RNA, 19 nt, Artificial Sequence
  Sense Oligo
gugaguggaaggcuuucuu

SEQ ID NO: 50502 - RNA, 19 nt, Artificial Sequence
  Antisense Oligo
aagaaagccuuccacucac

SEQ ID NO: 50503 - RNA, 19 nt, Artificial Sequence
  Sense Oligo
cacagcaggacccuaauau

SEQ ID NO: 50504 - RNA, 19 nt, Artificial Sequence
  Antisense Oligo
auauuaggguccugcugug

SEQ ID NO: 50505 - RNA, 19 nt, Artificial Sequence
  Sense Oligo
acagcaggacccuaauaug

SEQ ID NO: 50506 - RNA, 19 nt, Artificial Sequence
  Antisense Oligo
cauauuaggguccugcugu

SEQ ID NO: 50507 - RNA, 19 nt, Artificial Sequence
  Sense Oligo
cagcaggacccuaauaugc

SEQ ID NO: 50508 - RNA, 19 nt, Artificial Sequence
  Antisense Oligo
gcauauuaggguccugcug

SEQ ID NO: 50509 - RNA, 19 nt, Artificial Sequence
  Sense Oligo
gcaggacccuaauaugcuc

SEQ ID NO: 50510 - RNA, 19 nt, Artificial Sequence
  Antisense Oligo
gagcauauuaggguccugc

SEQ ID NO: 50511 - RNA, 19 nt, Artificial Sequence
  Sense Oligo
caggacccuaauaugcucu

SEQ ID NO: 50512 - RNA, 19 nt, Artificial Sequence
  Antisense Oligo
agagcauauuaggguccug

SEQ ID NO: 50513 - RNA, 19 nt, Artificial Sequence
  Sense Oligo
aggacccuaauaugcucuc

SEQ ID NO: 50514 - RNA, 19 nt, Artificial Sequence
  Antisense Oligo
gagagcauauuaggguccu

SEQ ID NO: 50515 - RNA, 19 nt, Artificial Sequence
  Sense Oligo
cuaauaugcucucccaagu

SEQ ID NO: 50516 - RNA, 19 nt, Artificial Sequence
  Antisense Oligo
acuugggagagcauauuag

SEQ ID NO: 50517 - RNA, 19 nt, Artificial Sequence
  Sense Oligo
uaauaugcucucccaagug

SEQ ID NO: 50518 - RNA, 19 nt, Artificial Sequence
  Antisense Oligo
cacuugggagagcauauua

SEQ ID NO: 50519 - RNA, 19 nt, Artificial Sequence
  Sense Oligo
aauaugcucucccaagugc

SEQ ID NO: 50520 - RNA, 19 nt, Artificial Sequence
  Antisense Oligo
gcacuugggagagcauauu

SEQ ID NO: 50521 - RNA, 19 nt, Artificial Sequence
  Sense Oligo
auaugcucucccaagugcu

SEQ ID NO: 50522 - RNA, 19 nt, Artificial Sequence
  Antisense Oligo
agcacuugggagagcauau

SEQ ID NO: 50523 - RNA, 19 nt, Artificial Sequence
  Sense Oligo
gcccucaacuucagagcaa

SEQ ID NO: 50524 - RNA, 19 nt, Artificial Sequence
  Antisense Oligo
uugcucugaaguugagggc

SEQ ID NO: 50525 - RNA, 19 nt, Artificial Sequence
  Sense Oligo
cccucaacuucagagcaac

SEQ ID NO: 50526 - RNA, 19 nt, Artificial Sequence
  Antisense Oligo
guugcucugaaguugaggg

SEQ ID NO: 50527 - RNA, 19 nt, Artificial Sequence
  Sense Oligo
ccucaacuucagagcaacg

SEQ ID NO: 50528 - RNA, 19 nt, Artificial Sequence
  Antisense Oligo
cguugcucugaaguugagg

SEQ ID NO: 50529 - RNA, 19 nt, Artificial Sequence
  Sense Oligo
cucaacuucagagcaacgu

SEQ ID NO: 50530 - RNA, 19 nt, Artificial Sequence
  Antisense Oligo
acguugcucugaaguugag

SEQ ID NO: 50531 - RNA, 19 nt, Artificial Sequence
  Sense Oligo
ucaacuucagagcaacguu

SEQ ID NO: 50532 - RNA, 19 nt, Artificial Sequence
  Antisense Oligo
aacguugcucugaaguuga

SEQ ID NO: 50533 - RNA, 19 nt, Artificial Sequence
  Sense Oligo
aacuucagagcaacguuga

SEQ ID NO: 50534 - RNA, 19 nt, Artificial Sequence
  Antisense Oligo
ucaacguugcucugaaguu

SEQ ID NO: 50535 - RNA, 19 nt, Artificial Sequence
  Sense Oligo
acuucagagcaacguugac

SEQ ID NO: 50536 - RNA, 19 nt, Artificial Sequence
  Antisense Oligo
gucaacguugcucugaagu

SEQ ID NO: 50537 - RNA, 19 nt, Artificial Sequence
  Sense Oligo
caugguggcucacgccugu

SEQ ID NO: 50538 - RNA, 19 nt, Artificial Sequence
  Antisense Oligo
acaggcgugagccaccaug

SEQ ID NO: 50539 - RNA, 19 nt, Artificial Sequence
  Sense Oligo
augguggcucacgccugua

SEQ ID NO: 50540 - RNA, 19 nt, Artificial Sequence
  Antisense Oligo
uacaggcgugagccaccau

SEQ ID NO: 50541 - RNA, 19 nt, Artificial Sequence
  Sense Oligo
ugguggcucacgccuguaa

SEQ ID NO: 50542 - RNA, 19 nt, Artificial Sequence
  Antisense Oligo
uuacaggcgugagccacca

SEQ ID NO: 50543 - RNA, 19 nt, Artificial Sequence
  Sense Oligo
gguggcucacgccuguaau

SEQ ID NO: 50544 - RNA, 19 nt, Artificial Sequence
  Antisense Oligo
auuacaggcgugagccacc

SEQ ID NO: 50545 - RNA, 19 nt, Artificial Sequence
  Sense Oligo
guggcucacgccuguaauc

SEQ ID NO: 50546 - RNA, 19 nt, Artificial Sequence
  Antisense Oligo
gauuacaggcgugagccac

SEQ ID NO: 50547 - RNA, 19 nt, Artificial Sequence
  Sense Oligo
uggcucacgccuguaaucc

SEQ ID NO: 50548 - RNA, 19 nt, Artificial Sequence
  Antisense Oligo
ggauuacaggcgugagcca

SEQ ID NO: 50549 - RNA, 19 nt, Artificial Sequence
  Sense Oligo
ggcucacgccuguaauccc

SEQ ID NO: 50550 - RNA, 19 nt, Artificial Sequence
  Antisense Oligo
gggauuacaggcgugagcc

SEQ ID NO: 50551 - RNA, 19 nt, Artificial Sequence
  Sense Oligo
acgccuguaaucccagcac

SEQ ID NO: 50552 - RNA, 19 nt, Artificial Sequence
  Antisense Oligo
gugcugggauuacaggcgu

SEQ ID NO: 50553 - RNA, 19 nt, Artificial Sequence
  Sense Oligo
cagcacuuugggaggccga

SEQ ID NO: 50554 - RNA, 19 nt, Artificial Sequence
  Antisense Oligo
ucggccucccaaagugcug

SEQ ID NO: 50555 - RNA, 19 nt, Artificial Sequence
  Sense Oligo
agcacuuugggaggccgag

SEQ ID NO: 50556 - RNA, 19 nt, Artificial Sequence
  Antisense Oligo
cucggccucccaaagugcu

SEQ ID NO: 50557 - RNA, 19 nt, Artificial Sequence
  Sense Oligo
acuuugggaggccgaggca

SEQ ID NO: 50558 - RNA, 19 nt, Artificial Sequence
  Antisense Oligo
ugccucggccucccaaagu

SEQ ID NO: 50559 - RNA, 19 nt, Artificial Sequence
  Sense Oligo
gccgaggcagguggaucau

SEQ ID NO: 50560 - RNA, 19 nt, Artificial Sequence
  Antisense Oligo
augauccaccugccucggc

SEQ ID NO: 50561 - RNA, 19 nt, Artificial Sequence
  Sense Oligo
ccgaggcagguggaucaug

SEQ ID NO: 50562 - RNA, 19 nt, Artificial Sequence
  Antisense Oligo
caugauccaccugccucgg

SEQ ID NO: 50563 - RNA, 19 nt, Artificial Sequence
  Sense Oligo
ggcagguggaucaugaggu

SEQ ID NO: 50564 - RNA, 19 nt, Artificial Sequence
  Antisense Oligo
accucaugauccaccugcc

SEQ ID NO: 50565 - RNA, 19 nt, Artificial Sequence
  Sense Oligo
gcagguggaucaugagguc

SEQ ID NO: 50566 - RNA, 19 nt, Artificial Sequence
  Antisense Oligo
gaccucaugauccaccugc

SEQ ID NO: 50567 - RNA, 19 nt, Artificial Sequence
  Sense Oligo
aaaauuagcugggcguggu

SEQ ID NO: 50568 - RNA, 19 nt, Artificial Sequence
  Antisense Oligo
accacgcccagcuaauuuu

SEQ ID NO: 50569 - RNA, 19 nt, Artificial Sequence
  Sense Oligo
aaauuagcugggcguggug

SEQ ID NO: 50570 - RNA, 19 nt, Artificial Sequence
  Antisense Oligo
caccacgcccagcuaauuu

SEQ ID NO: 50571 - RNA, 19 nt, Artificial Sequence
  Sense Oligo
aauuagcugggcguggugg

SEQ ID NO: 50572 - RNA, 19 nt, Artificial Sequence
  Antisense Oligo
ccaccacgcccagcuaauu

SEQ ID NO: 50573 - RNA, 19 nt, Artificial Sequence
  Sense Oligo
auuagcugggcgugguggc

SEQ ID NO: 50574 - RNA, 19 nt, Artificial Sequence
  Antisense Oligo
gccaccacgcccagcuaau

SEQ ID NO: 50575 - RNA, 19 nt, Artificial Sequence
  Sense Oligo
agcuauuugggaggcugag

SEQ ID NO: 50576 - RNA, 19 nt, Artificial Sequence
  Antisense Oligo
cucagccucccaaauagcu

SEQ ID NO: 50577 - RNA, 19 nt, Artificial Sequence
  Sense Oligo
gcuauuugggaggcugagg

SEQ ID NO: 50578 - RNA, 19 nt, Artificial Sequence
  Antisense Oligo
ccucagccucccaaauagc

SEQ ID NO: 50579 - RNA, 19 nt, Artificial Sequence
  Sense Oligo
cuauuugggaggcugaggc

SEQ ID NO: 50580 - RNA, 19 nt, Artificial Sequence
  Antisense Oligo
gccucagccucccaaauag

SEQ ID NO: 50581 - RNA, 19 nt, Artificial Sequence
  Sense Oligo
uauuugggaggcugaggca

SEQ ID NO: 50582 - RNA, 19 nt, Artificial Sequence
  Antisense Oligo
ugccucagccucccaaaua

SEQ ID NO: 50583 - RNA, 19 nt, Artificial Sequence
  Sense Oligo
auuugggaggcugaggcag

SEQ ID NO: 50584 - RNA, 19 nt, Artificial Sequence
  Antisense Oligo
cugccucagccucccaaau

SEQ ID NO: 50585 - RNA, 19 nt, Artificial Sequence
  Sense Oligo
uuugggaggcugaggcagg

SEQ ID NO: 50586 - RNA, 19 nt, Artificial Sequence
  Antisense Oligo
ccugccucagccucccaaa

SEQ ID NO: 50587 - RNA, 19 nt, Artificial Sequence
  Sense Oligo
uugggaggcugaggcagga

SEQ ID NO: 50588 - RNA, 19 nt, Artificial Sequence
  Antisense Oligo
uccugccucagccucccaa

SEQ ID NO: 50589 - RNA, 19 nt, Artificial Sequence
  Sense Oligo
gagguugcagugagccgag

SEQ ID NO: 50590 - RNA, 19 nt, Artificial Sequence
  Antisense Oligo
cucggcucacugcaaccuc

SEQ ID NO: 50591 - RNA, 19 nt, Artificial Sequence
  Sense Oligo
acugcacuccagccuggug

SEQ ID NO: 50592 - RNA, 19 nt, Artificial Sequence
  Antisense Oligo
caccaggcuggagugcagu

SEQ ID NO: 50593 - RNA, 19 nt, Artificial Sequence
  Sense Oligo
cugcacuccagccugguga

SEQ ID NO: 50594 - RNA, 19 nt, Artificial Sequence
  Antisense Oligo
ucaccaggcuggagugcag

SEQ ID NO: 50595 - RNA, 19 nt, Artificial Sequence
  Sense Oligo
ugcacuccagccuggugac

SEQ ID NO: 50596 - RNA, 19 nt, Artificial Sequence
  Antisense Oligo
gucaccaggcuggagugca

SEQ ID NO: 50597 - RNA, 19 nt, Artificial Sequence
  Sense Oligo
gcacuccagccuggugaca

SEQ ID NO: 50598 - RNA, 19 nt, Artificial Sequence
  Antisense Oligo
ugucaccaggcuggagugc

SEQ ID NO: 50599 - RNA, 19 nt, Artificial Sequence
  Sense Oligo
agccuggugacagagcaag

SEQ ID NO: 50600 - RNA, 19 nt, Artificial Sequence
  Antisense Oligo
cuugcucugucaccaggcu

SEQ ID NO: 50601 - RNA, 19 nt, Artificial Sequence
  Sense Oligo
gccuggugacagagcaaga

SEQ ID NO: 50602 - RNA, 19 nt, Artificial Sequence
  Antisense Oligo
ucuugcucugucaccaggc

SEQ ID NO: 50603 - RNA, 19 nt, Artificial Sequence
  Sense Oligo
agaauaggaaguuuacgaa

SEQ ID NO: 50604 - RNA, 19 nt, Artificial Sequence
  Antisense Oligo
uucguaaacuuccuauucu

SEQ ID NO: 50605 - RNA, 19 nt, Artificial Sequence
  Sense Oligo
gaauaggaaguuuacgaag

SEQ ID NO: 50606 - RNA, 19 nt, Artificial Sequence
  Antisense Oligo
cuucguaaacuuccuauuc

SEQ ID NO: 50607 - RNA, 19 nt, Artificial Sequence
  Sense Oligo
aauaggaaguuuacgaagc

SEQ ID NO: 50608 - RNA, 19 nt, Artificial Sequence
  Antisense Oligo
gcuucguaaacuuccuauu

SEQ ID NO: 50609 - RNA, 19 nt, Artificial Sequence
  Sense Oligo
auaggaaguuuacgaagcu

SEQ ID NO: 50610 - RNA, 19 nt, Artificial Sequence
  Antisense Oligo
agcuucguaaacuuccuau

SEQ ID NO: 50611 - RNA, 19 nt, Artificial Sequence
  Sense Oligo
uuucuguuuuaucuccacc

SEQ ID NO: 50612 - RNA, 19 nt, Artificial Sequence
  Antisense Oligo
gguggagauaaaacagaaa

SEQ ID NO: 50613 - RNA, 19 nt, Artificial Sequence
  Sense Oligo
uguuuuaucuccacccucc

SEQ ID NO: 50614 - RNA, 19 nt, Artificial Sequence
  Antisense Oligo
ggaggguggagauaaaaca

SEQ ID NO: 50615 - RNA, 19 nt, Artificial Sequence
  Sense Oligo
uccucauuucccugcuuuc

SEQ ID NO: 50616 - RNA, 19 nt, Artificial Sequence
  Antisense Oligo
gaaagcagggaaaugagga

SEQ ID NO: 50617 - RNA, 19 nt, Artificial Sequence
  Sense Oligo
gcuuucagagcacugguuc

SEQ ID NO: 50618 - RNA, 19 nt, Artificial Sequence
  Antisense Oligo
gaaccagugcucugaaagc

SEQ ID NO: 50619 - RNA, 19 nt, Artificial Sequence
  Sense Oligo
cuuucagagcacugguucu

SEQ ID NO: 50620 - RNA, 19 nt, Artificial Sequence
  Antisense Oligo
agaaccagugcucugaaag

SEQ ID NO: 50621 - RNA, 19 nt, Artificial Sequence
  Sense Oligo
uuucagagcacugguucua

SEQ ID NO: 50622 - RNA, 19 nt, Artificial Sequence
  Antisense Oligo
uagaaccagugcucugaaa

SEQ ID NO: 50623 - RNA, 19 nt, Artificial Sequence
  Sense Oligo
uucagagcacugguucuag

SEQ ID NO: 50624 - RNA, 19 nt, Artificial Sequence
  Antisense Oligo
cuagaaccagugcucugaa

SEQ ID NO: 50625 - RNA, 19 nt, Artificial Sequence
  Sense Oligo
ucagagcacugguucuagc

SEQ ID NO: 50626 - RNA, 19 nt, Artificial Sequence
  Antisense Oligo
gcuagaaccagugcucuga

SEQ ID NO: 50627 - RNA, 19 nt, Artificial Sequence
  Sense Oligo
cagagcacugguucuagcc

SEQ ID NO: 50628 - RNA, 19 nt, Artificial Sequence
  Antisense Oligo
ggcuagaaccagugcucug

SEQ ID NO: 50629 - RNA, 19 nt, Artificial Sequence
  Sense Oligo
agagcacugguucuagcca

SEQ ID NO: 50630 - RNA, 19 nt, Artificial Sequence
  Antisense Oligo
uggcuagaaccagugcucu

SEQ ID NO: 50631 - RNA, 19 nt, Artificial Sequence
  Sense Oligo
gguucuagccagacccagc

SEQ ID NO: 50632 - RNA, 19 nt, Artificial Sequence
  Antisense Oligo
gcugggucuggcuagaacc

SEQ ID NO: 50633 - RNA, 19 nt, Artificial Sequence
  Sense Oligo
gucccucauucccuggugg

SEQ ID NO: 50634 - RNA, 19 nt, Artificial Sequence
  Antisense Oligo
ccaccagggaaugagggac

SEQ ID NO: 50635 - RNA, 19 nt, Artificial Sequence
  Sense Oligo
ucccucauucccuggugga

SEQ ID NO: 50636 - RNA, 19 nt, Artificial Sequence
  Antisense Oligo
uccaccagggaaugaggga

SEQ ID NO: 50637 - RNA, 19 nt, Artificial Sequence
  Sense Oligo
cccucauucccugguggag

SEQ ID NO: 50638 - RNA, 19 nt, Artificial Sequence
  Antisense Oligo
cuccaccagggaaugaggg

SEQ ID NO: 50639 - RNA, 19 nt, Artificial Sequence
  Sense Oligo
ccucauucccugguggagc

SEQ ID NO: 50640 - RNA, 19 nt, Artificial Sequence
  Antisense Oligo
gcuccaccagggaaugagg

SEQ ID NO: 50641 - RNA, 19 nt, Artificial Sequence
  Sense Oligo
gcaggccugaugaugugcg

SEQ ID NO: 50642 - RNA, 19 nt, Artificial Sequence
  Antisense Oligo
cgcacaucaucaggccugc

SEQ ID NO: 50643 - RNA, 19 nt, Artificial Sequence
  Sense Oligo
caggccugaugaugugcgg

SEQ ID NO: 50644 - RNA, 19 nt, Artificial Sequence
  Antisense Oligo
ccgcacaucaucaggccug

SEQ ID NO: 50645 - RNA, 19 nt, Artificial Sequence
  Sense Oligo
aggccugaugaugugcggc

SEQ ID NO: 50646 - RNA, 19 nt, Artificial Sequence
  Antisense Oligo
gccgcacaucaucaggccu

SEQ ID NO: 50647 - RNA, 19 nt, Artificial Sequence
  Sense Oligo
ggccugaugaugugcggcu

SEQ ID NO: 50648 - RNA, 19 nt, Artificial Sequence
  Antisense Oligo
agccgcacaucaucaggcc

SEQ ID NO: 50649 - RNA, 19 nt, Artificial Sequence
  Sense Oligo
gccugaugaugugcggcuc

SEQ ID NO: 50650 - RNA, 19 nt, Artificial Sequence
  Antisense Oligo
gagccgcacaucaucaggc

SEQ ID NO: 50651 - RNA, 19 nt, Artificial Sequence
  Sense Oligo
ccugaugaugugcggcuca

SEQ ID NO: 50652 - RNA, 19 nt, Artificial Sequence
  Antisense Oligo
ugagccgcacaucaucagg

SEQ ID NO: 50653 - RNA, 19 nt, Artificial Sequence
  Sense Oligo
ugaugaugugcggcucagg

SEQ ID NO: 50654 - RNA, 19 nt, Artificial Sequence
  Antisense Oligo
ccugagccgcacaucauca

SEQ ID NO: 50655 - RNA, 19 nt, Artificial Sequence
  Sense Oligo
gaugaugugcggcucaggc

SEQ ID NO: 50656 - RNA, 19 nt, Artificial Sequence
  Antisense Oligo
gccugagccgcacaucauc

SEQ ID NO: 50657 - RNA, 19 nt, Artificial Sequence
  Sense Oligo
augaugugcggcucaggcu

SEQ ID NO: 50658 - RNA, 19 nt, Artificial Sequence
  Antisense Oligo
agccugagccgcacaucau

SEQ ID NO: 50659 - RNA, 19 nt, Artificial Sequence
  Sense Oligo
ugaugugcggcucaggcuc

SEQ ID NO: 50660 - RNA, 19 nt, Artificial Sequence
  Antisense Oligo
gagccugagccgcacauca

SEQ ID NO: 50661 - RNA, 19 nt, Artificial Sequence
  Sense Oligo
gaugugcggcucaggcuca

SEQ ID NO: 50662 - RNA, 19 nt, Artificial Sequence
  Antisense Oligo
ugagccugagccgcacauc

SEQ ID NO: 50663 - RNA, 19 nt, Artificial Sequence
  Sense Oligo
augugcggcucaggcucag

SEQ ID NO: 50664 - RNA, 19 nt, Artificial Sequence
  Antisense Oligo
cugagccugagccgcacau

SEQ ID NO: 50665 - RNA, 19 nt, Artificial Sequence
  Sense Oligo
ucaggcucagcucccaaua

SEQ ID NO: 50666 - RNA, 19 nt, Artificial Sequence
  Antisense Oligo
uauugggagcugagccuga

SEQ ID NO: 50667 - RNA, 19 nt, Artificial Sequence
  Sense Oligo
caggcucagcucccaauag

SEQ ID NO: 50668 - RNA, 19 nt, Artificial Sequence
  Antisense Oligo
cuauugggagcugagccug

SEQ ID NO: 50669 - RNA, 19 nt, Artificial Sequence
  Sense Oligo
aggcucagcucccaauagc

SEQ ID NO: 50670 - RNA, 19 nt, Artificial Sequence
  Antisense Oligo
gcuauugggagcugagccu

SEQ ID NO: 50671 - RNA, 19 nt, Artificial Sequence
  Sense Oligo
cccaauagcuuccacuuca

SEQ ID NO: 50672 - RNA, 19 nt, Artificial Sequence
  Antisense Oligo
ugaaguggaagcuauuggg

SEQ ID NO: 50673 - RNA, 19 nt, Artificial Sequence
  Sense Oligo
ccaauagcuuccacuucag

SEQ ID NO: 50674 - RNA, 19 nt, Artificial Sequence
  Antisense Oligo
cugaaguggaagcuauugg

SEQ ID NO: 50675 - RNA, 19 nt, Artificial Sequence
  Sense Oligo
caauagcuuccacuucagc

SEQ ID NO: 50676 - RNA, 19 nt, Artificial Sequence
  Antisense Oligo
gcugaaguggaagcuauug

SEQ ID NO: 50677 - RNA, 19 nt, Artificial Sequence
  Sense Oligo
ggcuucaauucuggaugua

SEQ ID NO: 50678 - RNA, 19 nt, Artificial Sequence
  Antisense Oligo
uacauccagaauugaagcc

SEQ ID NO: 50679 - RNA, 19 nt, Artificial Sequence
  Sense Oligo
gcuucaauucuggauguag

SEQ ID NO: 50680 - RNA, 19 nt, Artificial Sequence
  Antisense Oligo
cuacauccagaauugaagc

SEQ ID NO: 50681 - RNA, 19 nt, Artificial Sequence
  Sense Oligo
cuucaauucuggauguaga

SEQ ID NO: 50682 - RNA, 19 nt, Artificial Sequence
  Antisense Oligo
ucuacauccagaauugaag

SEQ ID NO: 50683 - RNA, 19 nt, Artificial Sequence
  Sense Oligo
caauucuggauguagauuu

SEQ ID NO: 50684 - RNA, 19 nt, Artificial Sequence
  Antisense Oligo
aaaucuacauccagaauug

SEQ ID NO: 50685 - RNA, 19 nt, Artificial Sequence
  Sense Oligo
aauaaaugugcccaggcuc

SEQ ID NO: 50686 - RNA, 19 nt, Artificial Sequence
  Antisense Oligo
gagccugggcacauuuauu

SEQ ID NO: 50687 - RNA, 19 nt, Artificial Sequence
  Sense Oligo
auaaaugugcccaggcucg

SEQ ID NO: 50688 - RNA, 19 nt, Artificial Sequence
  Antisense Oligo
cgagccugggcacauuuau

SEQ ID NO: 50689 - RNA, 19 nt, Artificial Sequence
  Sense Oligo
uaaaugugcccaggcucgg

SEQ ID NO: 50690 - RNA, 19 nt, Artificial Sequence
  Antisense Oligo
ccgagccugggcacauuua

SEQ ID NO: 50691 - RNA, 19 nt, Artificial Sequence
  Sense Oligo
aaaugugcccaggcucggu

SEQ ID NO: 50692 - RNA, 19 nt, Artificial Sequence
  Antisense Oligo
accgagccugggcacauuu

SEQ ID NO: 50693 - RNA, 19 nt, Artificial Sequence
  Sense Oligo
aaugugcccaggcucggug

SEQ ID NO: 50694 - RNA, 19 nt, Artificial Sequence
  Antisense Oligo
caccgagccugggcacauu

SEQ ID NO: 50695 - RNA, 19 nt, Artificial Sequence
  Sense Oligo
gcucgguggcucaugccua

SEQ ID NO: 50696 - RNA, 19 nt, Artificial Sequence
  Antisense Oligo
uaggcaugagccaccgagc

SEQ ID NO: 50697 - RNA, 19 nt, Artificial Sequence
  Sense Oligo
cucgguggcucaugccuau

SEQ ID NO: 50698 - RNA, 19 nt, Artificial Sequence
  Antisense Oligo
auaggcaugagccaccgag

SEQ ID NO: 50699 - RNA, 19 nt, Artificial Sequence
  Sense Oligo
ucgguggcucaugccuaua

SEQ ID NO: 50700 - RNA, 19 nt, Artificial Sequence
  Antisense Oligo
uauaggcaugagccaccga

SEQ ID NO: 50701 - RNA, 19 nt, Artificial Sequence
  Sense Oligo
cgguggcucaugccuauaa

SEQ ID NO: 50702 - RNA, 19 nt, Artificial Sequence
  Antisense Oligo
uuauaggcaugagccaccg

SEQ ID NO: 50703 - RNA, 19 nt, Artificial Sequence
  Sense Oligo
gguggcucaugccuauaac

SEQ ID NO: 50704 - RNA, 19 nt, Artificial Sequence
  Antisense Oligo
guuauaggcaugagccacc

SEQ ID NO: 50705 - RNA, 19 nt, Artificial Sequence
  Sense Oligo
guggcucaugccuauaacc

SEQ ID NO: 50706 - RNA, 19 nt, Artificial Sequence
  Antisense Oligo
gguuauaggcaugagccac

SEQ ID NO: 50707 - RNA, 19 nt, Artificial Sequence
  Sense Oligo
uggcucaugccuauaaccc

SEQ ID NO: 50708 - RNA, 19 nt, Artificial Sequence
  Antisense Oligo
ggguuauaggcaugagcca

SEQ ID NO: 50709 - RNA, 19 nt, Artificial Sequence
  Sense Oligo
gcaauuuaguaggcugagg

SEQ ID NO: 50710 - RNA, 19 nt, Artificial Sequence
  Antisense Oligo
ccucagccuacuaaauugc

SEQ ID NO: 50711 - RNA, 19 nt, Artificial Sequence
  Sense Oligo
uuaguaggcugaggcagga

SEQ ID NO: 50712 - RNA, 19 nt, Artificial Sequence
  Antisense Oligo
uccugccucagccuacuaa

SEQ ID NO: 50713 - RNA, 19 nt, Artificial Sequence
  Sense Oligo
uaguaggcugaggcaggaa

SEQ ID NO: 50714 - RNA, 19 nt, Artificial Sequence
  Antisense Oligo
uuccugccucagccuacua

SEQ ID NO: 50715 - RNA, 19 nt, Artificial Sequence
  Sense Oligo
aaaauuaggcauaacgugg

SEQ ID NO: 50716 - RNA, 19 nt, Artificial Sequence
  Antisense Oligo
ccacguuaugccuaauuuu

SEQ ID NO: 50717 - RNA, 19 nt, Artificial Sequence
  Sense Oligo
aaauuaggcauaacguggu

SEQ ID NO: 50718 - RNA, 19 nt, Artificial Sequence
  Antisense Oligo
accacguuaugccuaauuu

SEQ ID NO: 50719 - RNA, 19 nt, Artificial Sequence
  Sense Oligo
aauuaggcauaacguggug

SEQ ID NO: 50720 - RNA, 19 nt, Artificial Sequence
  Antisense Oligo
caccacguuaugccuaauu

SEQ ID NO: 50721 - RNA, 19 nt, Artificial Sequence
  Sense Oligo
gugcgcaccuguaguccca

SEQ ID NO: 50722 - RNA, 19 nt, Artificial Sequence
  Antisense Oligo
ugggacuacaggugcgcac

SEQ ID NO: 50723 - RNA, 19 nt, Artificial Sequence
  Sense Oligo
gcaccuguagucccagcua

SEQ ID NO: 50724 - RNA, 19 nt, Artificial Sequence
  Antisense Oligo
uagcugggacuacaggugc

SEQ ID NO: 50725 - RNA, 19 nt, Artificial Sequence
  Sense Oligo
uagucccagcuacucuaga

SEQ ID NO: 50726 - RNA, 19 nt, Artificial Sequence
  Antisense Oligo
ucuagaguagcugggacua

SEQ ID NO: 50727 - RNA, 19 nt, Artificial Sequence
  Sense Oligo
agucccagcuacucuagaa

SEQ ID NO: 50728 - RNA, 19 nt, Artificial Sequence
  Antisense Oligo
uucuagaguagcugggacu

SEQ ID NO: 50729 - RNA, 19 nt, Artificial Sequence
  Sense Oligo
gcgggaggauugcuugagc

SEQ ID NO: 50730 - RNA, 19 nt, Artificial Sequence
  Antisense Oligo
gcucaagcaauccucccgc

SEQ ID NO: 50731 - RNA, 19 nt, Artificial Sequence
  Sense Oligo
gaggauugcuugagcccag

SEQ ID NO: 50732 - RNA, 19 nt, Artificial Sequence
  Antisense Oligo
cugggcucaagcaauccuc

SEQ ID NO: 50733 - RNA, 19 nt, Artificial Sequence
  Sense Oligo
aggauugcuugagcccagg

SEQ ID NO: 50734 - RNA, 19 nt, Artificial Sequence
  Antisense Oligo
ccugggcucaagcaauccu

SEQ ID NO: 50735 - RNA, 19 nt, Artificial Sequence
  Sense Oligo
ggauugcuugagcccagga

SEQ ID NO: 50736 - RNA, 19 nt, Artificial Sequence
  Antisense Oligo
uccugggcucaagcaaucc

SEQ ID NO: 50737 - RNA, 19 nt, Artificial Sequence
  Sense Oligo
gauugcuugagcccaggag

SEQ ID NO: 50738 - RNA, 19 nt, Artificial Sequence
  Antisense Oligo
cuccugggcucaagcaauc

SEQ ID NO: 50739 - RNA, 19 nt, Artificial Sequence
  Sense Oligo
auugcuugagcccaggagu

SEQ ID NO: 50740 - RNA, 19 nt, Artificial Sequence
  Antisense Oligo
acuccugggcucaagcaau

SEQ ID NO: 50741 - RNA, 19 nt, Artificial Sequence
  Sense Oligo
uugcuugagcccaggaguu

SEQ ID NO: 50742 - RNA, 19 nt, Artificial Sequence
  Antisense Oligo
aacuccugggcucaagcaa

SEQ ID NO: 50743 - RNA, 19 nt, Artificial Sequence
  Sense Oligo
ugcuugagcccaggaguuu

SEQ ID NO: 50744 - RNA, 19 nt, Artificial Sequence
  Antisense Oligo
aaacuccugggcucaagca

SEQ ID NO: 50745 - RNA, 19 nt, Artificial Sequence
  Sense Oligo
gcuugagcccaggaguuug

SEQ ID NO: 50746 - RNA, 19 nt, Artificial Sequence
  Antisense Oligo
caaacuccugggcucaagc

SEQ ID NO: 50747 - RNA, 19 nt, Artificial Sequence
  Sense Oligo
cuugagcccaggaguuuga

SEQ ID NO: 50748 - RNA, 19 nt, Artificial Sequence
  Antisense Oligo
ucaaacuccugggcucaag

SEQ ID NO: 50749 - RNA, 19 nt, Artificial Sequence
  Sense Oligo
agcccaggaguuugaggug

SEQ ID NO: 50750 - RNA, 19 nt, Artificial Sequence
  Antisense Oligo
caccucaaacuccugggcu

SEQ ID NO: 50751 - RNA, 19 nt, Artificial Sequence
  Sense Oligo
gcccaggaguuugagguga

SEQ ID NO: 50752 - RNA, 19 nt, Artificial Sequence
  Antisense Oligo
ucaccucaaacuccugggc

SEQ ID NO: 50753 - RNA, 19 nt, Artificial Sequence
  Sense Oligo
cccaggaguuugaggugag

SEQ ID NO: 50754 - RNA, 19 nt, Artificial Sequence
  Antisense Oligo
cucaccucaaacuccuggg

SEQ ID NO: 50755 - RNA, 19 nt, Artificial Sequence
  Sense Oligo
aggaucacaccacucacug

SEQ ID NO: 50756 - RNA, 19 nt, Artificial Sequence
  Antisense Oligo
cagugaguggugugauccu

SEQ ID NO: 50757 - RNA, 19 nt, Artificial Sequence
  Sense Oligo
accacucacugcacucuag

SEQ ID NO: 50758 - RNA, 19 nt, Artificial Sequence
  Antisense Oligo
cuagagugcagugaguggu

SEQ ID NO: 50759 - RNA, 19 nt, Artificial Sequence
  Sense Oligo
ccacucacugcacucuagc

SEQ ID NO: 50760 - RNA, 19 nt, Artificial Sequence
  Antisense Oligo
gcuagagugcagugagugg

SEQ ID NO: 50761 - RNA, 19 nt, Artificial Sequence
  Sense Oligo
cacucacugcacucuagcc

SEQ ID NO: 50762 - RNA, 19 nt, Artificial Sequence
  Antisense Oligo
ggcuagagugcagugagug

SEQ ID NO: 50763 - RNA, 19 nt, Artificial Sequence
  Sense Oligo
acucacugcacucuagccu

SEQ ID NO: 50764 - RNA, 19 nt, Artificial Sequence
  Antisense Oligo
aggcuagagugcagugagu

SEQ ID NO: 50765 - RNA, 19 nt, Artificial Sequence
  Sense Oligo
acugcacucuagccugggu

SEQ ID NO: 50766 - RNA, 19 nt, Artificial Sequence
  Antisense Oligo
acccaggcuagagugcagu

SEQ ID NO: 50767 - RNA, 19 nt, Artificial Sequence
  Sense Oligo
cugcacucuagccugggug

SEQ ID NO: 50768 - RNA, 19 nt, Artificial Sequence
  Antisense Oligo
cacccaggcuagagugcag

SEQ ID NO: 50769 - RNA, 19 nt, Artificial Sequence
  Sense Oligo
ugcacucuagccugggugg

SEQ ID NO: 50770 - RNA, 19 nt, Artificial Sequence
  Antisense Oligo
ccacccaggcuagagugca

SEQ ID NO: 50771 - RNA, 19 nt, Artificial Sequence
  Sense Oligo
gcacucuagccuggguggu

SEQ ID NO: 50772 - RNA, 19 nt, Artificial Sequence
  Antisense Oligo
accacccaggcuagagugc

SEQ ID NO: 50773 - RNA, 19 nt, Artificial Sequence
  Sense Oligo
cacucuagccuggguggug

SEQ ID NO: 50774 - RNA, 19 nt, Artificial Sequence
  Antisense Oligo
caccacccaggcuagagug

SEQ ID NO: 50775 - RNA, 19 nt, Artificial Sequence
  Sense Oligo
acucuagccugggugguga

SEQ ID NO: 50776 - RNA, 19 nt, Artificial Sequence
  Antisense Oligo
ucaccacccaggcuagagu

SEQ ID NO: 50777 - RNA, 19 nt, Artificial Sequence
  Sense Oligo
cucuagccuggguggugac

SEQ ID NO: 50778 - RNA, 19 nt, Artificial Sequence
  Antisense Oligo
gucaccacccaggcuagag

SEQ ID NO: 50779 - RNA, 19 nt, Artificial Sequence
  Sense Oligo
cuggguggugacagaguga

SEQ ID NO: 50780 - RNA, 19 nt, Artificial Sequence
  Antisense Oligo
ucacucugucaccacccag

SEQ ID NO: 50781 - RNA, 19 nt, Artificial Sequence
  Sense Oligo
uggguggugacagagugag

SEQ ID NO: 50782 - RNA, 19 nt, Artificial Sequence
  Antisense Oligo
cucacucugucaccaccca

SEQ ID NO: 50783 - RNA, 19 nt, Artificial Sequence
  Sense Oligo
aauggaauuugaauugcca

SEQ ID NO: 50784 - RNA, 19 nt, Artificial Sequence
  Antisense Oligo
uggcaauucaaauuccauu

SEQ ID NO: 50785 - RNA, 19 nt, Artificial Sequence
  Sense Oligo
auggaauuugaauugccag

SEQ ID NO: 50786 - RNA, 19 nt, Artificial Sequence
  Antisense Oligo
cuggcaauucaaauuccau

SEQ ID NO: 50787 - RNA, 19 nt, Artificial Sequence
  Sense Oligo
aauuugaauugccagugga

SEQ ID NO: 50788 - RNA, 19 nt, Artificial Sequence
  Antisense Oligo
uccacuggcaauucaaauu

SEQ ID NO: 50789 - RNA, 19 nt, Artificial Sequence
  Sense Oligo
auuugaauugccaguggaa

SEQ ID NO: 50790 - RNA, 19 nt, Artificial Sequence
  Antisense Oligo
uuccacuggcaauucaaau

SEQ ID NO: 50791 - RNA, 19 nt, Artificial Sequence
  Sense Oligo
caaggcgcugcugauguuc

SEQ ID NO: 50792 - RNA, 19 nt, Artificial Sequence
  Antisense Oligo
gaacaucagcagcgccuug

SEQ ID NO: 50793 - RNA, 19 nt, Artificial Sequence
  Sense Oligo
aaggcgcugcugauguuca

SEQ ID NO: 50794 - RNA, 19 nt, Artificial Sequence
  Antisense Oligo
ugaacaucagcagcgccuu

SEQ ID NO: 50795 - RNA, 19 nt, Artificial Sequence
  Sense Oligo
aggcgcugcugauguucau

SEQ ID NO: 50796 - RNA, 19 nt, Artificial Sequence
  Antisense Oligo
augaacaucagcagcgccu

SEQ ID NO: 50797 - RNA, 19 nt, Artificial Sequence
  Sense Oligo
ggcgcugcugauguucaug

SEQ ID NO: 50798 - RNA, 19 nt, Artificial Sequence
  Antisense Oligo
caugaacaucagcagcgcc

SEQ ID NO: 50799 - RNA, 19 nt, Artificial Sequence
  Sense Oligo
cugauguucaugaagcaaa

SEQ ID NO: 50800 - RNA, 19 nt, Artificial Sequence
  Antisense Oligo
uuugcuucaugaacaucag

SEQ ID NO: 50801 - RNA, 19 nt, Artificial Sequence
  Sense Oligo
ugauguucaugaagcaaag

SEQ ID NO: 50802 - RNA, 19 nt, Artificial Sequence
  Antisense Oligo
cuuugcuucaugaacauca

SEQ ID NO: 50803 - RNA, 19 nt, Artificial Sequence
  Sense Oligo
gauguucaugaagcaaaga

SEQ ID NO: 50804 - RNA, 19 nt, Artificial Sequence
  Antisense Oligo
ucuuugcuucaugaacauc

SEQ ID NO: 50805 - RNA, 19 nt, Artificial Sequence
  Sense Oligo
auguucaugaagcaaagac

SEQ ID NO: 50806 - RNA, 19 nt, Artificial Sequence
  Antisense Oligo
gucuuugcuucaugaacau

SEQ ID NO: 50807 - RNA, 19 nt, Artificial Sequence
  Sense Oligo
guucaugaagcaaagacuc

SEQ ID NO: 50808 - RNA, 19 nt, Artificial Sequence
  Antisense Oligo
gagucuuugcuucaugaac

SEQ ID NO: 50809 - RNA, 19 nt, Artificial Sequence
  Sense Oligo
uucaugaagcaaagacucu

SEQ ID NO: 50810 - RNA, 19 nt, Artificial Sequence
  Antisense Oligo
agagucuuugcuucaugaa

SEQ ID NO: 50811 - RNA, 19 nt, Artificial Sequence
  Sense Oligo
ucaugaagcaaagacucua

SEQ ID NO: 50812 - RNA, 19 nt, Artificial Sequence
  Antisense Oligo
uagagucuuugcuucauga

SEQ ID NO: 50813 - RNA, 19 nt, Artificial Sequence
  Sense Oligo
caugaagcaaagacucuaa

SEQ ID NO: 50814 - RNA, 19 nt, Artificial Sequence
  Antisense Oligo
uuagagucuuugcuucaug

SEQ ID NO: 50815 - RNA, 19 nt, Artificial Sequence
  Sense Oligo
augaagcaaagacucuaac

SEQ ID NO: 50816 - RNA, 19 nt, Artificial Sequence
  Antisense Oligo
guuagagucuuugcuucau

SEQ ID NO: 50817 - RNA, 19 nt, Artificial Sequence
  Sense Oligo
caaguugugcucuguguua

SEQ ID NO: 50818 - RNA, 19 nt, Artificial Sequence
  Antisense Oligo
uaacacagagcacaacuug

SEQ ID NO: 50819 - RNA, 19 nt, Artificial Sequence
  Sense Oligo
aaagauugcauaagacagu

SEQ ID NO: 50820 - RNA, 19 nt, Artificial Sequence
  Antisense Oligo
acugucuuaugcaaucuuu

SEQ ID NO: 50821 - RNA, 19 nt, Artificial Sequence
  Sense Oligo
aagauugcauaagacaguu

SEQ ID NO: 50822 - RNA, 19 nt, Artificial Sequence
  Antisense Oligo
aacugucuuaugcaaucuu

SEQ ID NO: 50823 - RNA, 19 nt, Artificial Sequence
  Sense Oligo
agauugcauaagacaguuc

SEQ ID NO: 50824 - RNA, 19 nt, Artificial Sequence
  Antisense Oligo
gaacugucuuaugcaaucu

SEQ ID NO: 50825 - RNA, 19 nt, Artificial Sequence
  Sense Oligo
gauugcauaagacaguucc

SEQ ID NO: 50826 - RNA, 19 nt, Artificial Sequence
  Antisense Oligo
ggaacugucuuaugcaauc

SEQ ID NO: 50827 - RNA, 19 nt, Artificial Sequence
  Sense Oligo
gaagagcuggcaucagugg

SEQ ID NO: 50828 - RNA, 19 nt, Artificial Sequence
  Antisense Oligo
ccacugaugccagcucuuc

SEQ ID NO: 50829 - RNA, 19 nt, Artificial Sequence
  Sense Oligo
ggcaucaguggcagaucuu

SEQ ID NO: 50830 - RNA, 19 nt, Artificial Sequence
  Antisense Oligo
aagaucugccacugaugcc

SEQ ID NO: 50831 - RNA, 19 nt, Artificial Sequence
  Sense Oligo
gcaucaguggcagaucuua

SEQ ID NO: 50832 - RNA, 19 nt, Artificial Sequence
  Antisense Oligo
uaagaucugccacugaugc

SEQ ID NO: 50833 - RNA, 19 nt, Artificial Sequence
  Sense Oligo
caucaguggcagaucuuau

SEQ ID NO: 50834 - RNA, 19 nt, Artificial Sequence
  Antisense Oligo
auaagaucugccacugaug

SEQ ID NO: 50835 - RNA, 19 nt, Artificial Sequence
  Sense Oligo
aucaguggcagaucuuauc

SEQ ID NO: 50836 - RNA, 19 nt, Artificial Sequence
  Antisense Oligo
gauaagaucugccacugau

SEQ ID NO: 50837 - RNA, 19 nt, Artificial Sequence
  Sense Oligo
gaucuuaucuuguguuuug

SEQ ID NO: 50838 - RNA, 19 nt, Artificial Sequence
  Antisense Oligo
caaaacacaagauaagauc

SEQ ID NO: 50839 - RNA, 19 nt, Artificial Sequence
  Sense Oligo
guguuuugagugacgucuc

SEQ ID NO: 50840 - RNA, 19 nt, Artificial Sequence
  Antisense Oligo
gagacgucacucaaaacac

SEQ ID NO: 50841 - RNA, 19 nt, Artificial Sequence
  Sense Oligo
caucccucaccuuauugca

SEQ ID NO: 50842 - RNA, 19 nt, Artificial Sequence
  Antisense Oligo
ugcaauaaggugagggaug

SEQ ID NO: 50843 - RNA, 19 nt, Artificial Sequence
  Sense Oligo
aucccucaccuuauugcag

SEQ ID NO: 50844 - RNA, 19 nt, Artificial Sequence
  Antisense Oligo
cugcaauaaggugagggau

SEQ ID NO: 50845 - RNA, 19 nt, Artificial Sequence
  Sense Oligo
ucccucaccuuauugcaga

SEQ ID NO: 50846 - RNA, 19 nt, Artificial Sequence
  Antisense Oligo
ucugcaauaaggugaggga

SEQ ID NO: 50847 - RNA, 19 nt, Artificial Sequence
  Sense Oligo
uauugcagacauaaaggug

SEQ ID NO: 50848 - RNA, 19 nt, Artificial Sequence
  Antisense Oligo
caccuuuaugucugcaaua

SEQ ID NO: 50849 - RNA, 19 nt, Artificial Sequence
  Sense Oligo
auugcagacauaaagguga

SEQ ID NO: 50850 - RNA, 19 nt, Artificial Sequence
  Antisense Oligo
ucaccuuuaugucugcaau

SEQ ID NO: 50851 - RNA, 19 nt, Artificial Sequence
  Sense Oligo
aucaaggacuaucuggagg

SEQ ID NO: 50852 - RNA, 19 nt, Artificial Sequence
  Antisense Oligo
ccuccagauaguccuugau

SEQ ID NO: 50853 - RNA, 19 nt, Artificial Sequence
  Sense Oligo
ucaaggacuaucuggagga

SEQ ID NO: 50854 - RNA, 19 nt, Artificial Sequence
  Antisense Oligo
uccuccagauaguccuuga

SEQ ID NO: 50855 - RNA, 19 nt, Artificial Sequence
  Sense Oligo
caaggacuaucuggaggag

SEQ ID NO: 50856 - RNA, 19 nt, Artificial Sequence
  Antisense Oligo
cuccuccagauaguccuug

SEQ ID NO: 50857 - RNA, 19 nt, Artificial Sequence
  Sense Oligo
aaggacuaucuggaggagc

SEQ ID NO: 50858 - RNA, 19 nt, Artificial Sequence
  Antisense Oligo
gcuccuccagauaguccuu

SEQ ID NO: 50859 - RNA, 19 nt, Artificial Sequence
  Sense Oligo
aggacuaucuggaggagcu

SEQ ID NO: 50860 - RNA, 19 nt, Artificial Sequence
  Antisense Oligo
agcuccuccagauaguccu

SEQ ID NO: 50861 - RNA, 19 nt, Artificial Sequence
  Sense Oligo
ggacuaucuggaggagcug

SEQ ID NO: 50862 - RNA, 19 nt, Artificial Sequence
  Antisense Oligo
cagcuccuccagauagucc

SEQ ID NO: 50863 - RNA, 19 nt, Artificial Sequence
  Sense Oligo
gacuaucuggaggagcugu

SEQ ID NO: 50864 - RNA, 19 nt, Artificial Sequence
  Antisense Oligo
acagcuccuccagauaguc

SEQ ID NO: 50865 - RNA, 19 nt, Artificial Sequence
  Sense Oligo
acuaucuggaggagcugug

SEQ ID NO: 50866 - RNA, 19 nt, Artificial Sequence
  Antisense Oligo
cacagcuccuccagauagu

SEQ ID NO: 50867 - RNA, 19 nt, Artificial Sequence
  Sense Oligo
cuaucuggaggagcugugg

SEQ ID NO: 50868 - RNA, 19 nt, Artificial Sequence
  Antisense Oligo
ccacagcuccuccagauag

SEQ ID NO: 50869 - RNA, 19 nt, Artificial Sequence
  Sense Oligo
uaucuggaggagcuguggg

SEQ ID NO: 50870 - RNA, 19 nt, Artificial Sequence
  Antisense Oligo
cccacagcuccuccagaua

SEQ ID NO: 50871 - RNA, 19 nt, Artificial Sequence
  Sense Oligo
agcuguggguccaggcuca

SEQ ID NO: 50872 - RNA, 19 nt, Artificial Sequence
  Antisense Oligo
ugagccuggacccacagcu

SEQ ID NO: 50873 - RNA, 19 nt, Artificial Sequence
  Sense Oligo
cuguggguccaggcucagu

SEQ ID NO: 50874 - RNA, 19 nt, Artificial Sequence
  Antisense Oligo
acugagccuggacccacag

SEQ ID NO: 50875 - RNA, 19 nt, Artificial Sequence
  Sense Oligo
uguggguccaggcucagua

SEQ ID NO: 50876 - RNA, 19 nt, Artificial Sequence
  Antisense Oligo
uacugagccuggacccaca

SEQ ID NO: 50877 - RNA, 19 nt, Artificial Sequence
  Sense Oligo
guggguccaggcucaguac

SEQ ID NO: 50878 - RNA, 19 nt, Artificial Sequence
  Antisense Oligo
guacugagccuggacccac

SEQ ID NO: 50879 - RNA, 19 nt, Artificial Sequence
  Sense Oligo
uggguccaggcucaguaca

SEQ ID NO: 50880 - RNA, 19 nt, Artificial Sequence
  Antisense Oligo
uguacugagccuggaccca

SEQ ID NO: 50881 - RNA, 19 nt, Artificial Sequence
  Sense Oligo
ggguccaggcucaguacau

SEQ ID NO: 50882 - RNA, 19 nt, Artificial Sequence
  Antisense Oligo
auguacugagccuggaccc

SEQ ID NO: 50883 - RNA, 19 nt, Artificial Sequence
  Sense Oligo
gguccaggcucaguacauc

SEQ ID NO: 50884 - RNA, 19 nt, Artificial Sequence
  Antisense Oligo
gauguacugagccuggacc

SEQ ID NO: 50885 - RNA, 19 nt, Artificial Sequence
  Sense Oligo
guccaggcucaguacauca

SEQ ID NO: 50886 - RNA, 19 nt, Artificial Sequence
  Antisense Oligo
ugauguacugagccuggac

SEQ ID NO: 50887 - RNA, 19 nt, Artificial Sequence
  Sense Oligo
uccaggcucaguacaucac

SEQ ID NO: 50888 - RNA, 19 nt, Artificial Sequence
  Antisense Oligo
gugauguacugagccugga

SEQ ID NO: 50889 - RNA, 19 nt, Artificial Sequence
  Sense Oligo
ccaggcucaguacaucaca

SEQ ID NO: 50890 - RNA, 19 nt, Artificial Sequence
  Antisense Oligo
ugugauguacugagccugg

SEQ ID NO: 50891 - RNA, 19 nt, Artificial Sequence
  Sense Oligo
caggcucaguacaucacag

SEQ ID NO: 50892 - RNA, 19 nt, Artificial Sequence
  Antisense Oligo
cugugauguacugagccug

SEQ ID NO: 50893 - RNA, 19 nt, Artificial Sequence
  Sense Oligo
ccucaagacaggucagauu

SEQ ID NO: 50894 - RNA, 19 nt, Artificial Sequence
  Antisense Oligo
aaucugaccugucuugagg

SEQ ID NO: 50895 - RNA, 19 nt, Artificial Sequence
  Sense Oligo
cucaagacaggucagauuc

SEQ ID NO: 50896 - RNA, 19 nt, Artificial Sequence
  Antisense Oligo
gaaucugaccugucuugag

SEQ ID NO: 50897 - RNA, 19 nt, Artificial Sequence
  Sense Oligo
ucaagacaggucagauuca

SEQ ID NO: 50898 - RNA, 19 nt, Artificial Sequence
  Antisense Oligo
ugaaucugaccugucuuga

SEQ ID NO: 50899 - RNA, 19 nt, Artificial Sequence
  Sense Oligo
caagacaggucagauucag

SEQ ID NO: 50900 - RNA, 19 nt, Artificial Sequence
  Antisense Oligo
cugaaucugaccugucuug

SEQ ID NO: 50901 - RNA, 19 nt, Artificial Sequence
  Sense Oligo
aagacaggucagauucagc

SEQ ID NO: 50902 - RNA, 19 nt, Artificial Sequence
  Antisense Oligo
gcugaaucugaccugucuu

SEQ ID NO: 50903 - RNA, 19 nt, Artificial Sequence
  Sense Oligo
ggucagauucagcacaggu

SEQ ID NO: 50904 - RNA, 19 nt, Artificial Sequence
  Antisense Oligo
accugugcugaaucugacc

SEQ ID NO: 50905 - RNA, 19 nt, Artificial Sequence
  Sense Oligo
gucagauucagcacaggug

SEQ ID NO: 50906 - RNA, 19 nt, Artificial Sequence
  Antisense Oligo
caccugugcugaaucugac

SEQ ID NO: 50907 - RNA, 19 nt, Artificial Sequence
  Sense Oligo
ucagauucagcacagguga

SEQ ID NO: 50908 - RNA, 19 nt, Artificial Sequence
  Antisense Oligo
ucaccugugcugaaucuga

SEQ ID NO: 50909 - RNA, 19 nt, Artificial Sequence
  Sense Oligo
ucagcacaggugaaucaca

SEQ ID NO: 50910 - RNA, 19 nt, Artificial Sequence
  Antisense Oligo
ugugauucaccugugcuga

SEQ ID NO: 50911 - RNA, 19 nt, Artificial Sequence
  Sense Oligo
uggguggcuagaauugcaa

SEQ ID NO: 50912 - RNA, 19 nt, Artificial Sequence
  Antisense Oligo
uugcaauucuagccaccca

SEQ ID NO: 50913 - RNA, 19 nt, Artificial Sequence
  Sense Oligo
ggguggcuagaauugcaag

SEQ ID NO: 50914 - RNA, 19 nt, Artificial Sequence
  Antisense Oligo
cuugcaauucuagccaccc

SEQ ID NO: 50915 - RNA, 19 nt, Artificial Sequence
  Sense Oligo
gguggcuagaauugcaagg

SEQ ID NO: 50916 - RNA, 19 nt, Artificial Sequence
  Antisense Oligo
ccuugcaauucuagccacc

SEQ ID NO: 50917 - RNA, 19 nt, Artificial Sequence
  Sense Oligo
guggcuagaauugcaaggu

SEQ ID NO: 50918 - RNA, 19 nt, Artificial Sequence
  Antisense Oligo
accuugcaauucuagccac

SEQ ID NO: 50919 - RNA, 19 nt, Artificial Sequence
  Sense Oligo
uggcuagaauugcaaggug

SEQ ID NO: 50920 - RNA, 19 nt, Artificial Sequence
  Antisense Oligo
caccuugcaauucuagcca

SEQ ID NO: 50921 - RNA, 19 nt, Artificial Sequence
  Sense Oligo
ggcuagaauugcaagguga

SEQ ID NO: 50922 - RNA, 19 nt, Artificial Sequence
  Antisense Oligo
ucaccuugcaauucuagcc

SEQ ID NO: 50923 - RNA, 19 nt, Artificial Sequence
  Sense Oligo
gcuagaauugcaaggugaa

SEQ ID NO: 50924 - RNA, 19 nt, Artificial Sequence
  Antisense Oligo
uucaccuugcaauucuagc

SEQ ID NO: 50925 - RNA, 19 nt, Artificial Sequence
  Sense Oligo
auugcaaggugaauuuugg

SEQ ID NO: 50926 - RNA, 19 nt, Artificial Sequence
  Antisense Oligo
ccaaaauucaccuugcaau

SEQ ID NO: 50927 - RNA, 19 nt, Artificial Sequence
  Sense Oligo
uugcaaggugaauuuugga

SEQ ID NO: 50928 - RNA, 19 nt, Artificial Sequence
  Antisense Oligo
uccaaaauucaccuugcaa

SEQ ID NO: 50929 - RNA, 19 nt, Artificial Sequence
  Sense Oligo
guuuucacacuuuguuugu

SEQ ID NO: 50930 - RNA, 19 nt, Artificial Sequence
  Antisense Oligo
acaaacaaagugugaaaac

SEQ ID NO: 50931 - RNA, 19 nt, Artificial Sequence
  Sense Oligo
acuuuguuugugcaguaag

SEQ ID NO: 50932 - RNA, 19 nt, Artificial Sequence
  Antisense Oligo
cuuacugcacaaacaaagu

SEQ ID NO: 50933 - RNA, 19 nt, Artificial Sequence
  Sense Oligo
uuuguuugugcaguaagcg

SEQ ID NO: 50934 - RNA, 19 nt, Artificial Sequence
  Antisense Oligo
cgcuuacugcacaaacaaa

SEQ ID NO: 50935 - RNA, 19 nt, Artificial Sequence
  Sense Oligo
uuguuugugcaguaagcgu

SEQ ID NO: 50936 - RNA, 19 nt, Artificial Sequence
  Antisense Oligo
acgcuuacugcacaaacaa

SEQ ID NO: 50937 - RNA, 19 nt, Artificial Sequence
  Sense Oligo
uguuugugcaguaagcguc

SEQ ID NO: 50938 - RNA, 19 nt, Artificial Sequence
  Antisense Oligo
gacgcuuacugcacaaaca

SEQ ID NO: 50939 - RNA, 19 nt, Artificial Sequence
  Sense Oligo
guuugugcaguaagcgucc

SEQ ID NO: 50940 - RNA, 19 nt, Artificial Sequence
  Antisense Oligo
ggacgcuuacugcacaaac

SEQ ID NO: 50941 - RNA, 19 nt, Artificial Sequence
  Sense Oligo
uuugugcaguaagcgucca

SEQ ID NO: 50942 - RNA, 19 nt, Artificial Sequence
  Antisense Oligo
uggacgcuuacugcacaaa

SEQ ID NO: 50943 - RNA, 19 nt, Artificial Sequence
  Sense Oligo
uugugcaguaagcguccaa

SEQ ID NO: 50944 - RNA, 19 nt, Artificial Sequence
  Antisense Oligo
uuggacgcuuacugcacaa

SEQ ID NO: 50945 - RNA, 19 nt, Artificial Sequence
  Sense Oligo
ugugcaguaagcguccaau

SEQ ID NO: 50946 - RNA, 19 nt, Artificial Sequence
  Antisense Oligo
auuggacgcuuacugcaca

SEQ ID NO: 50947 - RNA, 19 nt, Artificial Sequence
  Sense Oligo
gugcaguaagcguccaauu

SEQ ID NO: 50948 - RNA, 19 nt, Artificial Sequence
  Antisense Oligo
aauuggacgcuuacugcac

SEQ ID NO: 50949 - RNA, 19 nt, Artificial Sequence
  Sense Oligo
ugcaguaagcguccaauuu

SEQ ID NO: 50950 - RNA, 19 nt, Artificial Sequence
  Antisense Oligo
aaauuggacgcuuacugca

SEQ ID NO: 50951 - RNA, 19 nt, Artificial Sequence
  Sense Oligo
gcaguaagcguccaauuua

SEQ ID NO: 50952 - RNA, 19 nt, Artificial Sequence
  Antisense Oligo
uaaauuggacgcuuacugc

SEQ ID NO: 50953 - RNA, 19 nt, Artificial Sequence
  Sense Oligo
cgucauuuuaaaguuucug

SEQ ID NO: 50954 - RNA, 19 nt, Artificial Sequence
  Antisense Oligo
cagaaacuuuaaaaugacg

SEQ ID NO: 50955 - RNA, 19 nt, Artificial Sequence
  Sense Oligo
gucauuuuaaaguuucugc

SEQ ID NO: 50956 - RNA, 19 nt, Artificial Sequence
  Antisense Oligo
gcagaaacuuuaaaaugac

SEQ ID NO: 50957 - RNA, 19 nt, Artificial Sequence
  Sense Oligo
aguuucugcugaaggagug

SEQ ID NO: 50958 - RNA, 19 nt, Artificial Sequence
  Antisense Oligo
cacuccuucagcagaaacu

SEQ ID NO: 50959 - RNA, 19 nt, Artificial Sequence
  Sense Oligo
aaccuuucgauccuauggc

SEQ ID NO: 50960 - RNA, 19 nt, Artificial Sequence
  Antisense Oligo
gccauaggaucgaaagguu

SEQ ID NO: 50961 - RNA, 19 nt, Artificial Sequence
  Sense Oligo
accuuucgauccuauggca

SEQ ID NO: 50962 - RNA, 19 nt, Artificial Sequence
  Antisense Oligo
ugccauaggaucgaaaggu

SEQ ID NO: 50963 - RNA, 19 nt, Artificial Sequence
  Sense Oligo
ccuuucgauccuauggcag

SEQ ID NO: 50964 - RNA, 19 nt, Artificial Sequence
  Antisense Oligo
cugccauaggaucgaaagg

SEQ ID NO: 50965 - RNA, 19 nt, Artificial Sequence
  Sense Oligo
cuuucgauccuauggcagc

SEQ ID NO: 50966 - RNA, 19 nt, Artificial Sequence
  Antisense Oligo
gcugccauaggaucgaaag

SEQ ID NO: 50967 - RNA, 19 nt, Artificial Sequence
  Sense Oligo
uuucgauccuauggcagca

SEQ ID NO: 50968 - RNA, 19 nt, Artificial Sequence
  Antisense Oligo
ugcugccauaggaucgaaa

SEQ ID NO: 50969 - RNA, 19 nt, Artificial Sequence
  Sense Oligo
ccuauggcagcaggagccu

SEQ ID NO: 50970 - RNA, 19 nt, Artificial Sequence
  Antisense Oligo
aggcuccugcugccauagg

SEQ ID NO: 50971 - RNA, 19 nt, Artificial Sequence
  Sense Oligo
uuuuagugccgugauggcc

SEQ ID NO: 50972 - RNA, 19 nt, Artificial Sequence
  Antisense Oligo
ggccaucacggcacuaaaa

SEQ ID NO: 50973 - RNA, 19 nt, Artificial Sequence
  Sense Oligo
uuuagugccgugauggcca

SEQ ID NO: 50974 - RNA, 19 nt, Artificial Sequence
  Antisense Oligo
uggccaucacggcacuaaa

SEQ ID NO: 50975 - RNA, 19 nt, Artificial Sequence
  Sense Oligo
uuagugccgugauggccag

SEQ ID NO: 50976 - RNA, 19 nt, Artificial Sequence
  Antisense Oligo
cuggccaucacggcacuaa

SEQ ID NO: 50977 - RNA, 19 nt, Artificial Sequence
  Sense Oligo
cgugauggccagggauaug

SEQ ID NO: 50978 - RNA, 19 nt, Artificial Sequence
  Antisense Oligo
cauaucccuggccaucacg

SEQ ID NO: 50979 - RNA, 19 nt, Artificial Sequence
  Sense Oligo
gugauggccagggauaugg

SEQ ID NO: 50980 - RNA, 19 nt, Artificial Sequence
  Antisense Oligo
ccauaucccuggccaucac

SEQ ID NO: 50981 - RNA, 19 nt, Artificial Sequence
  Sense Oligo
guguguucuggcaagagga

SEQ ID NO: 50982 - RNA, 19 nt, Artificial Sequence
  Antisense Oligo
uccucuugccagaacacac

SEQ ID NO: 50983 - RNA, 19 nt, Artificial Sequence
  Sense Oligo
guguucuggcaagaggagg

SEQ ID NO: 50984 - RNA, 19 nt, Artificial Sequence
  Antisense Oligo
ccuccucuugccagaacac

SEQ ID NO: 50985 - RNA, 19 nt, Artificial Sequence
  Sense Oligo
uguucuggcaagaggagga

SEQ ID NO: 50986 - RNA, 19 nt, Artificial Sequence
  Antisense Oligo
uccuccucuugccagaaca

SEQ ID NO: 50987 - RNA, 19 nt, Artificial Sequence
  Sense Oligo
guucuggcaagaggaggac

SEQ ID NO: 50988 - RNA, 19 nt, Artificial Sequence
  Antisense Oligo
guccuccucuugccagaac

SEQ ID NO: 50989 - RNA, 19 nt, Artificial Sequence
  Sense Oligo
uucuggcaagaggaggacu

SEQ ID NO: 50990 - RNA, 19 nt, Artificial Sequence
  Antisense Oligo
aguccuccucuugccagaa

SEQ ID NO: 50991 - RNA, 19 nt, Artificial Sequence
  Sense Oligo
aagaggaggacugucgccu

SEQ ID NO: 50992 - RNA, 19 nt, Artificial Sequence
  Antisense Oligo
aggcgacaguccuccucuu

SEQ ID NO: 50993 - RNA, 19 nt, Artificial Sequence
  Sense Oligo
aggacugucgccucuauca

SEQ ID NO: 50994 - RNA, 19 nt, Artificial Sequence
  Antisense Oligo
ugauagaggcgacaguccu

SEQ ID NO: 50995 - RNA, 19 nt, Artificial Sequence
  Sense Oligo
ggacugucgccucuaucag

SEQ ID NO: 50996 - RNA, 19 nt, Artificial Sequence
  Antisense Oligo
cugauagaggcgacagucc

SEQ ID NO: 50997 - RNA, 19 nt, Artificial Sequence
  Sense Oligo
gacugucgccucuaucagc

SEQ ID NO: 50998 - RNA, 19 nt, Artificial Sequence
  Antisense Oligo
gcugauagaggcgacaguc

SEQ ID NO: 50999 - RNA, 19 nt, Artificial Sequence
  Sense Oligo
acugucgccucuaucagcu

SEQ ID NO: 51000 - RNA, 19 nt, Artificial Sequence
  Antisense Oligo
agcugauagaggcgacagu

SEQ ID NO: 51001 - RNA, 19 nt, Artificial Sequence
  Sense Oligo
cugucgccucuaucagcug

SEQ ID NO: 51002 - RNA, 19 nt, Artificial Sequence
  Antisense Oligo
cagcugauagaggcgacag

SEQ ID NO: 51003 - RNA, 19 nt, Artificial Sequence
  Sense Oligo
ugucgccucuaucagcugg

SEQ ID NO: 51004 - RNA, 19 nt, Artificial Sequence
  Antisense Oligo
ccagcugauagaggcgaca

SEQ ID NO: 51005 - RNA, 19 nt, Artificial Sequence
  Sense Oligo
gucgccucuaucagcuggu

SEQ ID NO: 51006 - RNA, 19 nt, Artificial Sequence
  Antisense Oligo
accagcugauagaggcgac

SEQ ID NO: 51007 - RNA, 19 nt, Artificial Sequence
  Sense Oligo
ucgccucuaucagcugguc

SEQ ID NO: 51008 - RNA, 19 nt, Artificial Sequence
  Antisense Oligo
gaccagcugauagaggcga

SEQ ID NO: 51009 - RNA, 19 nt, Artificial Sequence
  Sense Oligo
cgccucuaucagcugguca

SEQ ID NO: 51010 - RNA, 19 nt, Artificial Sequence
  Antisense Oligo
ugaccagcugauagaggcg

SEQ ID NO: 51011 - RNA, 19 nt, Artificial Sequence
  Sense Oligo
gccucuaucagcuggucau

SEQ ID NO: 51012 - RNA, 19 nt, Artificial Sequence
  Antisense Oligo
augaccagcugauagaggc

SEQ ID NO: 51013 - RNA, 19 nt, Artificial Sequence
  Sense Oligo
ccucuaucagcuggucauu

SEQ ID NO: 51014 - RNA, 19 nt, Artificial Sequence
  Antisense Oligo
aaugaccagcugauagagg

SEQ ID NO: 51015 - RNA, 19 nt, Artificial Sequence
  Sense Oligo
cucuaucagcuggucauuc

SEQ ID NO: 51016 - RNA, 19 nt, Artificial Sequence
  Antisense Oligo
gaaugaccagcugauagag

SEQ ID NO: 51017 - RNA, 19 nt, Artificial Sequence
  Sense Oligo
aucagcuggucauucccau

SEQ ID NO: 51018 - RNA, 19 nt, Artificial Sequence
  Antisense Oligo
augggaaugaccagcugau

SEQ ID NO: 51019 - RNA, 19 nt, Artificial Sequence
  Sense Oligo
ucagcuggucauucccauu

SEQ ID NO: 51020 - RNA, 19 nt, Artificial Sequence
  Antisense Oligo
aaugggaaugaccagcuga

SEQ ID NO: 51021 - RNA, 19 nt, Artificial Sequence
  Sense Oligo
cagcuggucauucccauuc

SEQ ID NO: 51022 - RNA, 19 nt, Artificial Sequence
  Antisense Oligo
gaaugggaaugaccagcug

SEQ ID NO: 51023 - RNA, 19 nt, Artificial Sequence
  Sense Oligo
agcuggucauucccauucu

SEQ ID NO: 51024 - RNA, 19 nt, Artificial Sequence
  Antisense Oligo
agaaugggaaugaccagcu

SEQ ID NO: 51025 - RNA, 19 nt, Artificial Sequence
  Sense Oligo
gcuggucauucccauucug

SEQ ID NO: 51026 - RNA, 19 nt, Artificial Sequence
  Antisense Oligo
cagaaugggaaugaccagc

SEQ ID NO: 51027 - RNA, 19 nt, Artificial Sequence
  Sense Oligo
cuggucauucccauucugg

SEQ ID NO: 51028 - RNA, 19 nt, Artificial Sequence
  Antisense Oligo
ccagaaugggaaugaccag

SEQ ID NO: 51029 - RNA, 19 nt, Artificial Sequence
  Sense Oligo
ccauucugggccuucucag

SEQ ID NO: 51030 - RNA, 19 nt, Artificial Sequence
  Antisense Oligo
cugagaaggcccagaaugg

SEQ ID NO: 51031 - RNA, 19 nt, Artificial Sequence
  Sense Oligo
aggcguucucagaaggcac

SEQ ID NO: 51032 - RNA, 19 nt, Artificial Sequence
  Antisense Oligo
gugccuucugagaacgccu

SEQ ID NO: 51033 - RNA, 19 nt, Artificial Sequence
  Sense Oligo
ggcguucucagaaggcacg

SEQ ID NO: 51034 - RNA, 19 nt, Artificial Sequence
  Antisense Oligo
cgugccuucugagaacgcc

SEQ ID NO: 51035 - RNA, 19 nt, Artificial Sequence
  Sense Oligo
gcguucucagaaggcacga

SEQ ID NO: 51036 - RNA, 19 nt, Artificial Sequence
  Antisense Oligo
ucgugccuucugagaacgc

SEQ ID NO: 51037 - RNA, 19 nt, Artificial Sequence
  Sense Oligo
cguucucagaaggcacgag

SEQ ID NO: 51038 - RNA, 19 nt, Artificial Sequence
  Antisense Oligo
cucgugccuucugagaacg

SEQ ID NO: 51039 - RNA, 19 nt, Artificial Sequence
  Sense Oligo
guucucagaaggcacgagc

SEQ ID NO: 51040 - RNA, 19 nt, Artificial Sequence
  Antisense Oligo
gcucgugccuucugagaac

SEQ ID NO: 51041 - RNA, 19 nt, Artificial Sequence
  Sense Oligo
uucucagaaggcacgagcg

SEQ ID NO: 51042 - RNA, 19 nt, Artificial Sequence
  Antisense Oligo
cgcucgugccuucugagaa

SEQ ID NO: 51043 - RNA, 19 nt, Artificial Sequence
  Sense Oligo
aggcaccucccagcugugu

SEQ ID NO: 51044 - RNA, 19 nt, Artificial Sequence
  Antisense Oligo
acacagcugggaggugccu

SEQ ID NO: 51045 - RNA, 19 nt, Artificial Sequence
  Sense Oligo
gcaccucccagcugugucu

SEQ ID NO: 51046 - RNA, 19 nt, Artificial Sequence
  Antisense Oligo
agacacagcugggaggugc

SEQ ID NO: 51047 - RNA, 19 nt, Artificial Sequence
  Sense Oligo
caccucccagcugugucuc

SEQ ID NO: 51048 - RNA, 19 nt, Artificial Sequence
  Antisense Oligo
gagacacagcugggaggug

SEQ ID NO: 51049 - RNA, 19 nt, Artificial Sequence
  Sense Oligo
agccaucuuucauacaugc

SEQ ID NO: 51050 - RNA, 19 nt, Artificial Sequence
  Antisense Oligo
gcauguaugaaagauggcu

SEQ ID NO: 51051 - RNA, 19 nt, Artificial Sequence
  Sense Oligo
gccaucuuucauacaugca

SEQ ID NO: 51052 - RNA, 19 nt, Artificial Sequence
  Antisense Oligo
ugcauguaugaaagauggc

SEQ ID NO: 51053 - RNA, 19 nt, Artificial Sequence
  Sense Oligo
ccaucuuucauacaugcaa

SEQ ID NO: 51054 - RNA, 19 nt, Artificial Sequence
  Antisense Oligo
uugcauguaugaaagaugg

SEQ ID NO: 51055 - RNA, 19 nt, Artificial Sequence
  Sense Oligo
uuucauacaugcaauaguc

SEQ ID NO: 51056 - RNA, 19 nt, Artificial Sequence
  Antisense Oligo
gacuauugcauguaugaaa

SEQ ID NO: 51057 - RNA, 19 nt, Artificial Sequence
  Sense Oligo
uucauacaugcaauagucu

SEQ ID NO: 51058 - RNA, 19 nt, Artificial Sequence
  Antisense Oligo
agacuauugcauguaugaa

SEQ ID NO: 51059 - RNA, 19 nt, Artificial Sequence
  Sense Oligo
ucauacaugcaauagucuu

SEQ ID NO: 51060 - RNA, 19 nt, Artificial Sequence
  Antisense Oligo
aagacuauugcauguauga

SEQ ID NO: 51061 - RNA, 19 nt, Artificial Sequence
  Sense Oligo
acaugcaauagucuuuucc

SEQ ID NO: 51062 - RNA, 19 nt, Artificial Sequence
  Antisense Oligo
ggaaaagacuauugcaugu

SEQ ID NO: 51063 - RNA, 19 nt, Artificial Sequence
  Sense Oligo
caugcaauagucuuuucca

SEQ ID NO: 51064 - RNA, 19 nt, Artificial Sequence
  Antisense Oligo
uggaaaagacuauugcaug

SEQ ID NO: 51065 - RNA, 19 nt, Artificial Sequence
  Sense Oligo
augcaauagucuuuuccac

SEQ ID NO: 51066 - RNA, 19 nt, Artificial Sequence
  Antisense Oligo
guggaaaagacuauugcau

SEQ ID NO: 51067 - RNA, 19 nt, Artificial Sequence
  Sense Oligo
ugcaauagucuuuuccacg

SEQ ID NO: 51068 - RNA, 19 nt, Artificial Sequence
  Antisense Oligo
cguggaaaagacuauugca

SEQ ID NO: 51069 - RNA, 19 nt, Artificial Sequence
  Sense Oligo
gcaauagucuuuuccacgu

SEQ ID NO: 51070 - RNA, 19 nt, Artificial Sequence
  Antisense Oligo
acguggaaaagacuauugc

SEQ ID NO: 51071 - RNA, 19 nt, Artificial Sequence
  Sense Oligo
caauagucuuuuccacguu

SEQ ID NO: 51072 - RNA, 19 nt, Artificial Sequence
  Antisense Oligo
aacguggaaaagacuauug

SEQ ID NO: 51073 - RNA, 19 nt, Artificial Sequence
  Sense Oligo
aauagucuuuuccacguuu

SEQ ID NO: 51074 - RNA, 19 nt, Artificial Sequence
  Antisense Oligo
aaacguggaaaagacuauu

SEQ ID NO: 51075 - RNA, 19 nt, Artificial Sequence
  Sense Oligo
auagucuuuuccacguuua

SEQ ID NO: 51076 - RNA, 19 nt, Artificial Sequence
  Antisense Oligo
uaaacguggaaaagacuau

SEQ ID NO: 51077 - RNA, 19 nt, Artificial Sequence
  Sense Oligo
ucuuuuccacguuuacuua

SEQ ID NO: 51078 - RNA, 19 nt, Artificial Sequence
  Antisense Oligo
uaaguaaacguggaaaaga

SEQ ID NO: 51079 - RNA, 19 nt, Artificial Sequence
  Sense Oligo
cuuuuccacguuuacuuau

SEQ ID NO: 51080 - RNA, 19 nt, Artificial Sequence
  Antisense Oligo
auaaguaaacguggaaaag

SEQ ID NO: 51081 - RNA, 19 nt, Artificial Sequence
  Sense Oligo
guaccauuuggaagacuca

SEQ ID NO: 51082 - RNA, 19 nt, Artificial Sequence
  Antisense Oligo
ugagucuuccaaaugguac

SEQ ID NO: 51083 - RNA, 19 nt, Artificial Sequence
  Sense Oligo
uggaagacucaggguggcc

SEQ ID NO: 51084 - RNA, 19 nt, Artificial Sequence
  Antisense Oligo
ggccacccugagucuucca

SEQ ID NO: 51085 - RNA, 19 nt, Artificial Sequence
  Sense Oligo
ggaagacucaggguggccu

SEQ ID NO: 51086 - RNA, 19 nt, Artificial Sequence
  Antisense Oligo
aggccacccugagucuucc

SEQ ID NO: 51087 - RNA, 19 nt, Artificial Sequence
  Sense Oligo
gaagacucaggguggccuu

SEQ ID NO: 51088 - RNA, 19 nt, Artificial Sequence
  Antisense Oligo
aaggccacccugagucuuc

SEQ ID NO: 51089 - RNA, 19 nt, Artificial Sequence
  Sense Oligo
aagacucaggguggccuuc

SEQ ID NO: 51090 - RNA, 19 nt, Artificial Sequence
  Antisense Oligo
gaaggccacccugagucuu

SEQ ID NO: 51091 - RNA, 19 nt, Artificial Sequence
  Sense Oligo
agacucaggguggccuucu

SEQ ID NO: 51092 - RNA, 19 nt, Artificial Sequence
  Antisense Oligo
agaaggccacccugagucu

SEQ ID NO: 51093 - RNA, 19 nt, Artificial Sequence
  Sense Oligo
gacucaggguggccuucuu

SEQ ID NO: 51094 - RNA, 19 nt, Artificial Sequence
  Antisense Oligo
aagaaggccacccugaguc

SEQ ID NO: 51095 - RNA, 19 nt, Artificial Sequence
  Sense Oligo
caggguggccuucuuuucu

SEQ ID NO: 51096 - RNA, 19 nt, Artificial Sequence
  Antisense Oligo
agaaaagaaggccacccug

SEQ ID NO: 51097 - RNA, 19 nt, Artificial Sequence
  Sense Oligo
aggguggccuucuuuucua

SEQ ID NO: 51098 - RNA, 19 nt, Artificial Sequence
  Antisense Oligo
uagaaaagaaggccacccu

SEQ ID NO: 51099 - RNA, 19 nt, Artificial Sequence
  Sense Oligo
ggguggccuucuuuucuag

SEQ ID NO: 51100 - RNA, 19 nt, Artificial Sequence
  Antisense Oligo
cuagaaaagaaggccaccc

SEQ ID NO: 51101 - RNA, 19 nt, Artificial Sequence
  Sense Oligo
gguggccuucuuuucuagg

SEQ ID NO: 51102 - RNA, 19 nt, Artificial Sequence
  Antisense Oligo
ccuagaaaagaaggccacc

SEQ ID NO: 51103 - RNA, 19 nt, Artificial Sequence
  Sense Oligo
guggccuucuuuucuaggu

SEQ ID NO: 51104 - RNA, 19 nt, Artificial Sequence
  Antisense Oligo
accuagaaaagaaggccac

SEQ ID NO: 51105 - RNA, 19 nt, Artificial Sequence
  Sense Oligo
ggccuucuuuucuagguua

SEQ ID NO: 51106 - RNA, 19 nt, Artificial Sequence
  Antisense Oligo
uaaccuagaaaagaaggcc

SEQ ID NO: 51107 - RNA, 19 nt, Artificial Sequence
  Sense Oligo
gccuucuuuucuagguuac

SEQ ID NO: 51108 - RNA, 19 nt, Artificial Sequence
  Antisense Oligo
guaaccuagaaaagaaggc

SEQ ID NO: 51109 - RNA, 19 nt, Artificial Sequence
  Sense Oligo
ccuucuuuucuagguuacc

SEQ ID NO: 51110 - RNA, 19 nt, Artificial Sequence
  Antisense Oligo
gguaaccuagaaaagaagg

SEQ ID NO: 51111 - RNA, 19 nt, Artificial Sequence
  Sense Oligo
cuucuuuucuagguuacca

SEQ ID NO: 51112 - RNA, 19 nt, Artificial Sequence
  Antisense Oligo
ugguaaccuagaaaagaag

SEQ ID NO: 51113 - RNA, 19 nt, Artificial Sequence
  Sense Oligo
uucuuuucuagguuaccau

SEQ ID NO: 51114 - RNA, 19 nt, Artificial Sequence
  Antisense Oligo
augguaaccuagaaaagaa

SEQ ID NO: 51115 - RNA, 19 nt, Artificial Sequence
  Sense Oligo
cuuuucuagguuaccauuc

SEQ ID NO: 51116 - RNA, 19 nt, Artificial Sequence
  Antisense Oligo
gaaugguaaccuagaaaag

SEQ ID NO: 51117 - RNA, 19 nt, Artificial Sequence
  Sense Oligo
uuuucuagguuaccauucu

SEQ ID NO: 51118 - RNA, 19 nt, Artificial Sequence
  Antisense Oligo
agaaugguaaccuagaaaa

SEQ ID NO: 51119 - RNA, 19 nt, Artificial Sequence
  Sense Oligo
uuucuagguuaccauucug

SEQ ID NO: 51120 - RNA, 19 nt, Artificial Sequence
  Antisense Oligo
cagaaugguaaccuagaaa

SEQ ID NO: 51121 - RNA, 19 nt, Artificial Sequence
  Sense Oligo
uucuagguuaccauucugc

SEQ ID NO: 51122 - RNA, 19 nt, Artificial Sequence
  Antisense Oligo
gcagaaugguaaccuagaa

SEQ ID NO: 51123 - RNA, 19 nt, Artificial Sequence
  Sense Oligo
ucuagguuaccauucugcc

SEQ ID NO: 51124 - RNA, 19 nt, Artificial Sequence
  Antisense Oligo
ggcagaaugguaaccuaga

SEQ ID NO: 51125 - RNA, 19 nt, Artificial Sequence
  Sense Oligo
cuagguuaccauucugcca

SEQ ID NO: 51126 - RNA, 19 nt, Artificial Sequence
  Antisense Oligo
uggcagaaugguaaccuag

SEQ ID NO: 51127 - RNA, 19 nt, Artificial Sequence
  Sense Oligo
uagguuaccauucugccac

SEQ ID NO: 51128 - RNA, 19 nt, Artificial Sequence
  Antisense Oligo
guggcagaaugguaaccua

SEQ ID NO: 51129 - RNA, 19 nt, Artificial Sequence
  Sense Oligo
agguuaccauucugccacu

SEQ ID NO: 51130 - RNA, 19 nt, Artificial Sequence
  Antisense Oligo
aguggcagaaugguaaccu

SEQ ID NO: 51131 - RNA, 19 nt, Artificial Sequence
  Sense Oligo
gguuaccauucugccacuu

SEQ ID NO: 51132 - RNA, 19 nt, Artificial Sequence
  Antisense Oligo
aaguggcagaaugguaacc

SEQ ID NO: 51133 - RNA, 19 nt, Artificial Sequence
  Sense Oligo
uuucucaaagcagucucuc

SEQ ID NO: 51134 - RNA, 19 nt, Artificial Sequence
  Antisense Oligo
gagagacugcuuugagaaa

SEQ ID NO: 51135 - RNA, 19 nt, Artificial Sequence
  Sense Oligo
uucucaaagcagucucucu

SEQ ID NO: 51136 - RNA, 19 nt, Artificial Sequence
  Antisense Oligo
agagagacugcuuugagaa

SEQ ID NO: 51137 - RNA, 19 nt, Artificial Sequence
  Sense Oligo
cucucuccucaugagcaua

SEQ ID NO: 51138 - RNA, 19 nt, Artificial Sequence
  Antisense Oligo
uaugcucaugaggagagag

SEQ ID NO: 51139 - RNA, 19 nt, Artificial Sequence
  Sense Oligo
ucucuccucaugagcauau

SEQ ID NO: 51140 - RNA, 19 nt, Artificial Sequence
  Antisense Oligo
auaugcucaugaggagaga

SEQ ID NO: 51141 - RNA, 19 nt, Artificial Sequence
  Sense Oligo
cucuccucaugagcauauu

SEQ ID NO: 51142 - RNA, 19 nt, Artificial Sequence
  Antisense Oligo
aauaugcucaugaggagag

SEQ ID NO: 51143 - RNA, 19 nt, Artificial Sequence
  Sense Oligo
ucuccucaugagcauauuc

SEQ ID NO: 51144 - RNA, 19 nt, Artificial Sequence
  Antisense Oligo
gaauaugcucaugaggaga

SEQ ID NO: 51145 - RNA, 19 nt, Artificial Sequence
  Sense Oligo
cuccucaugagcauauucc

SEQ ID NO: 51146 - RNA, 19 nt, Artificial Sequence
  Antisense Oligo
ggaauaugcucaugaggag

SEQ ID NO: 51147 - RNA, 19 nt, Artificial Sequence
  Sense Oligo
uccucaugagcauauuccu

SEQ ID NO: 51148 - RNA, 19 nt, Artificial Sequence
  Antisense Oligo
aggaauaugcucaugagga

SEQ ID NO: 51149 - RNA, 19 nt, Artificial Sequence
  Sense Oligo
agcauauuccuuucucagg

SEQ ID NO: 51150 - RNA, 19 nt, Artificial Sequence
  Antisense Oligo
ccugagaaaggaauaugcu

SEQ ID NO: 51151 - RNA, 19 nt, Artificial Sequence
  Sense Oligo
cccaacugacccugcuuuu

SEQ ID NO: 51152 - RNA, 19 nt, Artificial Sequence
  Antisense Oligo
aaaagcagggucaguuggg

SEQ ID NO: 51153 - RNA, 19 nt, Artificial Sequence
  Sense Oligo
ccaacugacccugcuuuuc

SEQ ID NO: 51154 - RNA, 19 nt, Artificial Sequence
  Antisense Oligo
gaaaagcagggucaguugg

SEQ ID NO: 51155 - RNA, 19 nt, Artificial Sequence
  Sense Oligo
caacugacccugcuuuucu

SEQ ID NO: 51156 - RNA, 19 nt, Artificial Sequence
  Antisense Oligo
agaaaagcagggucaguug

SEQ ID NO: 51157 - RNA, 19 nt, Artificial Sequence
  Sense Oligo
aacugacccugcuuuucua

SEQ ID NO: 51158 - RNA, 19 nt, Artificial Sequence
  Antisense Oligo
uagaaaagcagggucaguu

SEQ ID NO: 51159 - RNA, 19 nt, Artificial Sequence
  Sense Oligo
cugacccugcuuuucuaug

SEQ ID NO: 51160 - RNA, 19 nt, Artificial Sequence
  Antisense Oligo
cauagaaaagcagggucag

SEQ ID NO: 51161 - RNA, 19 nt, Artificial Sequence
  Sense Oligo
cccugcuuuucuaugacag

SEQ ID NO: 51162 - RNA, 19 nt, Artificial Sequence
  Antisense Oligo
cugucauagaaaagcaggg

SEQ ID NO: 51163 - RNA, 19 nt, Artificial Sequence
  Sense Oligo
ccugcuuuucuaugacagc

SEQ ID NO: 51164 - RNA, 19 nt, Artificial Sequence
  Antisense Oligo
gcugucauagaaaagcagg

SEQ ID NO: 51165 - RNA, 19 nt, Artificial Sequence
  Sense Oligo
gcuuuucuaugacagcaug

SEQ ID NO: 51166 - RNA, 19 nt, Artificial Sequence
  Antisense Oligo
caugcugucauagaaaagc

SEQ ID NO: 51167 - RNA, 19 nt, Artificial Sequence
  Sense Oligo
cuuuucuaugacagcaugc

SEQ ID NO: 51168 - RNA, 19 nt, Artificial Sequence
  Antisense Oligo
gcaugcugucauagaaaag

SEQ ID NO: 51169 - RNA, 19 nt, Artificial Sequence
  Sense Oligo
uuuucuaugacagcaugcg

SEQ ID NO: 51170 - RNA, 19 nt, Artificial Sequence
  Antisense Oligo
cgcaugcugucauagaaaa

SEQ ID NO: 51171 - RNA, 19 nt, Artificial Sequence
  Sense Oligo
uuucuaugacagcaugcga

SEQ ID NO: 51172 - RNA, 19 nt, Artificial Sequence
  Antisense Oligo
ucgcaugcugucauagaaa

SEQ ID NO: 51173 - RNA, 19 nt, Artificial Sequence
  Sense Oligo
uucuaugacagcaugcgaa

SEQ ID NO: 51174 - RNA, 19 nt, Artificial Sequence
  Antisense Oligo
uucgcaugcugucauagaa

SEQ ID NO: 51175 - RNA, 19 nt, Artificial Sequence
  Sense Oligo
ucuaugacagcaugcgaau

SEQ ID NO: 51176 - RNA, 19 nt, Artificial Sequence
  Antisense Oligo
auucgcaugcugucauaga

SEQ ID NO: 51177 - RNA, 19 nt, Artificial Sequence
  Sense Oligo
cuaugacagcaugcgaauu

SEQ ID NO: 51178 - RNA, 19 nt, Artificial Sequence
  Antisense Oligo
aauucgcaugcugucauag

SEQ ID NO: 51179 - RNA, 19 nt, Artificial Sequence
  Sense Oligo
uaugacagcaugcgaauua

SEQ ID NO: 51180 - RNA, 19 nt, Artificial Sequence
  Antisense Oligo
uaauucgcaugcugucaua

SEQ ID NO: 51181 - RNA, 19 nt, Artificial Sequence
  Sense Oligo
augacagcaugcgaauuag

SEQ ID NO: 51182 - RNA, 19 nt, Artificial Sequence
  Antisense Oligo
cuaauucgcaugcugucau

SEQ ID NO: 51183 - RNA, 19 nt, Artificial Sequence
  Sense Oligo
ugacagcaugcgaauuagg

SEQ ID NO: 51184 - RNA, 19 nt, Artificial Sequence
  Antisense Oligo
ccuaauucgcaugcuguca

SEQ ID NO: 51185 - RNA, 19 nt, Artificial Sequence
  Sense Oligo
gacagcaugcgaauuaggg

SEQ ID NO: 51186 - RNA, 19 nt, Artificial Sequence
  Antisense Oligo
cccuaauucgcaugcuguc

SEQ ID NO: 51187 - RNA, 19 nt, Artificial Sequence
  Sense Oligo
gcccacuagaagccagauc

SEQ ID NO: 51188 - RNA, 19 nt, Artificial Sequence
  Antisense Oligo
gaucuggcuucuagugggc

SEQ ID NO: 51189 - RNA, 19 nt, Artificial Sequence
  Sense Oligo
cccacuagaagccagaucu

SEQ ID NO: 51190 - RNA, 19 nt, Artificial Sequence
  Antisense Oligo
agaucuggcuucuaguggg

SEQ ID NO: 51191 - RNA, 19 nt, Artificial Sequence
  Sense Oligo
ccacuagaagccagaucuu

SEQ ID NO: 51192 - RNA, 19 nt, Artificial Sequence
  Antisense Oligo
aagaucuggcuucuagugg

SEQ ID NO: 51193 - RNA, 19 nt, Artificial Sequence
  Sense Oligo
cacuagaagccagaucuuu

SEQ ID NO: 51194 - RNA, 19 nt, Artificial Sequence
  Antisense Oligo
aaagaucuggcuucuagug

SEQ ID NO: 51195 - RNA, 19 nt, Artificial Sequence
  Sense Oligo
acuagaagccagaucuuuc

SEQ ID NO: 51196 - RNA, 19 nt, Artificial Sequence
  Antisense Oligo
gaaagaucuggcuucuagu

SEQ ID NO: 51197 - RNA, 19 nt, Artificial Sequence
  Sense Oligo
uguuccuaauuuacuugga

SEQ ID NO: 51198 - RNA, 19 nt, Artificial Sequence
  Antisense Oligo
uccaaguaaauuaggaaca

SEQ ID NO: 51199 - RNA, 19 nt, Artificial Sequence
  Sense Oligo
uuccuaauuuacuuggacc

SEQ ID NO: 51200 - RNA, 19 nt, Artificial Sequence
  Antisense Oligo
gguccaaguaaauuaggaa

SEQ ID NO: 51201 - RNA, 19 nt, Artificial Sequence
  Sense Oligo
uccuaauuuacuuggaccc

SEQ ID NO: 51202 - RNA, 19 nt, Artificial Sequence
  Antisense Oligo
ggguccaaguaaauuagga

SEQ ID NO: 51203 - RNA, 19 nt, Artificial Sequence
  Sense Oligo
ccuaauuuacuuggacccg

SEQ ID NO: 51204 - RNA, 19 nt, Artificial Sequence
  Antisense Oligo
cggguccaaguaaauuagg

SEQ ID NO: 51205 - RNA, 19 nt, Artificial Sequence
  Sense Oligo
cuaauuuacuuggacccgg

SEQ ID NO: 51206 - RNA, 19 nt, Artificial Sequence
  Antisense Oligo
ccggguccaaguaaauuag

SEQ ID NO: 51207 - RNA, 19 nt, Artificial Sequence
  Sense Oligo
ggguuccugaagcaugcug

SEQ ID NO: 51208 - RNA, 19 nt, Artificial Sequence
  Antisense Oligo
cagcaugcuucaggaaccc

SEQ ID NO: 51209 - RNA, 19 nt, Artificial Sequence
  Sense Oligo
gguuccugaagcaugcugu

SEQ ID NO: 51210 - RNA, 19 nt, Artificial Sequence
  Antisense Oligo
acagcaugcuucaggaacc

SEQ ID NO: 51211 - RNA, 19 nt, Artificial Sequence
  Sense Oligo
guuccugaagcaugcugug

SEQ ID NO: 51212 - RNA, 19 nt, Artificial Sequence
  Antisense Oligo
cacagcaugcuucaggaac

SEQ ID NO: 51213 - RNA, 19 nt, Artificial Sequence
  Sense Oligo
aagcaugcugugaccugua

SEQ ID NO: 51214 - RNA, 19 nt, Artificial Sequence
  Antisense Oligo
uacaggucacagcaugcuu

SEQ ID NO: 51215 - RNA, 19 nt, Artificial Sequence
  Sense Oligo
caacucagucuuaucuaga

SEQ ID NO: 51216 - RNA, 19 nt, Artificial Sequence
  Antisense Oligo
ucuagauaagacugaguug

SEQ ID NO: 51217 - RNA, 19 nt, Artificial Sequence
  Sense Oligo
aacucagucuuaucuagau

SEQ ID NO: 51218 - RNA, 19 nt, Artificial Sequence
  Antisense Oligo
aucuagauaagacugaguu

SEQ ID NO: 51219 - RNA, 19 nt, Artificial Sequence
  Sense Oligo
acucagucuuaucuagaug

SEQ ID NO: 51220 - RNA, 19 nt, Artificial Sequence
  Antisense Oligo
caucuagauaagacugagu

SEQ ID NO: 51221 - RNA, 19 nt, Artificial Sequence
  Sense Oligo
cucagucuuaucuagaugu

SEQ ID NO: 51222 - RNA, 19 nt, Artificial Sequence
  Antisense Oligo
acaucuagauaagacugag

SEQ ID NO: 51223 - RNA, 19 nt, Artificial Sequence
  Sense Oligo
ucagucuuaucuagauguu

SEQ ID NO: 51224 - RNA, 19 nt, Artificial Sequence
  Antisense Oligo
aacaucuagauaagacuga

SEQ ID NO: 51225 - RNA, 19 nt, Artificial Sequence
  Sense Oligo
cagucuuaucuagauguuu

SEQ ID NO: 51226 - RNA, 19 nt, Artificial Sequence
  Antisense Oligo
aaacaucuagauaagacug

SEQ ID NO: 51227 - RNA, 19 nt, Artificial Sequence
  Sense Oligo
aucuagauguuucucuuug

SEQ ID NO: 51228 - RNA, 19 nt, Artificial Sequence
  Antisense Oligo
caaagagaaacaucuagau

SEQ ID NO: 51229 - RNA, 19 nt, Artificial Sequence
  Sense Oligo
ucuagauguuucucuuugg

SEQ ID NO: 51230 - RNA, 19 nt, Artificial Sequence
  Antisense Oligo
ccaaagagaaacaucuaga

SEQ ID NO: 51231 - RNA, 19 nt, Artificial Sequence
  Sense Oligo
cuagauguuucucuuuggg

SEQ ID NO: 51232 - RNA, 19 nt, Artificial Sequence
  Antisense Oligo
cccaaagagaaacaucuag

SEQ ID NO: 51233 - RNA, 19 nt, Artificial Sequence
  Sense Oligo
cuagcuuggcuguuucuga

SEQ ID NO: 51234 - RNA, 19 nt, Artificial Sequence
  Antisense Oligo
ucagaaacagccaagcuag

SEQ ID NO: 51235 - RNA, 19 nt, Artificial Sequence
  Sense Oligo
uagcuuggcuguuucugac

SEQ ID NO: 51236 - RNA, 19 nt, Artificial Sequence
  Antisense Oligo
gucagaaacagccaagcua

SEQ ID NO: 51237 - RNA, 19 nt, Artificial Sequence
  Sense Oligo
ggcuguuucugaccuaaau

SEQ ID NO: 51238 - RNA, 19 nt, Artificial Sequence
  Antisense Oligo
auuuaggucagaaacagcc

SEQ ID NO: 51239 - RNA, 19 nt, Artificial Sequence
  Sense Oligo
gcuguuucugaccuaaauu

SEQ ID NO: 51240 - RNA, 19 nt, Artificial Sequence
  Antisense Oligo
aauuuaggucagaaacagc

SEQ ID NO: 51241 - RNA, 19 nt, Artificial Sequence
  Sense Oligo
cuguuucugaccuaaauuu

SEQ ID NO: 51242 - RNA, 19 nt, Artificial Sequence
  Antisense Oligo
aaauuuaggucagaaacag

SEQ ID NO: 51243 - RNA, 19 nt, Artificial Sequence
  Sense Oligo
uguuucugaccuaaauuug

SEQ ID NO: 51244 - RNA, 19 nt, Artificial Sequence
  Antisense Oligo
caaauuuaggucagaaaca

SEQ ID NO: 51245 - RNA, 19 nt, Artificial Sequence
  Sense Oligo
guuucugaccuaaauuuga

SEQ ID NO: 51246 - RNA, 19 nt, Artificial Sequence
  Antisense Oligo
ucaaauuuaggucagaaac

SEQ ID NO: 51247 - RNA, 19 nt, Artificial Sequence
  Sense Oligo
uuucugaccuaaauuugac

SEQ ID NO: 51248 - RNA, 19 nt, Artificial Sequence
  Antisense Oligo
gucaaauuuaggucagaaa

SEQ ID NO: 51249 - RNA, 19 nt, Artificial Sequence
  Sense Oligo
ucugaccuaaauuugacac

SEQ ID NO: 51250 - RNA, 19 nt, Artificial Sequence
  Antisense Oligo
gugucaaauuuaggucaga

SEQ ID NO: 51251 - RNA, 19 nt, Artificial Sequence
  Sense Oligo
cugaccuaaauuugacacu

SEQ ID NO: 51252 - RNA, 19 nt, Artificial Sequence
  Antisense Oligo
agugucaaauuuaggucag

SEQ ID NO: 51253 - RNA, 19 nt, Artificial Sequence
  Sense Oligo
gaccuaaauuugacacugu

SEQ ID NO: 51254 - RNA, 19 nt, Artificial Sequence
  Antisense Oligo
acagugucaaauuuagguc

SEQ ID NO: 51255 - RNA, 19 nt, Artificial Sequence
  Sense Oligo
aauuugacacuguuuccgc

SEQ ID NO: 51256 - RNA, 19 nt, Artificial Sequence
  Antisense Oligo
gcggaaacagugucaaauu

SEQ ID NO: 51257 - RNA, 19 nt, Artificial Sequence
  Sense Oligo
ugacacuguuuccgccuuc

SEQ ID NO: 51258 - RNA, 19 nt, Artificial Sequence
  Antisense Oligo
gaaggcggaaacaguguca

SEQ ID NO: 51259 - RNA, 19 nt, Artificial Sequence
  Sense Oligo
gacacuguuuccgccuucc

SEQ ID NO: 51260 - RNA, 19 nt, Artificial Sequence
  Antisense Oligo
ggaaggcggaaacaguguc

SEQ ID NO: 51261 - RNA, 19 nt, Artificial Sequence
  Sense Oligo
acacuguuuccgccuuccu

SEQ ID NO: 51262 - RNA, 19 nt, Artificial Sequence
  Antisense Oligo
aggaaggcggaaacagugu

SEQ ID NO: 51263 - RNA, 19 nt, Artificial Sequence
  Sense Oligo
cacuguuuccgccuuccuu

SEQ ID NO: 51264 - RNA, 19 nt, Artificial Sequence
  Antisense Oligo
aaggaaggcggaaacagug

SEQ ID NO: 51265 - RNA, 19 nt, Artificial Sequence
  Sense Oligo
acuguuuccgccuuccuuu

SEQ ID NO: 51266 - RNA, 19 nt, Artificial Sequence
  Antisense Oligo
aaaggaaggcggaaacagu

SEQ ID NO: 51267 - RNA, 19 nt, Artificial Sequence
  Sense Oligo
cuguuuccgccuuccuuua

SEQ ID NO: 51268 - RNA, 19 nt, Artificial Sequence
  Antisense Oligo
uaaaggaaggcggaaacag

SEQ ID NO: 51269 - RNA, 19 nt, Artificial Sequence
  Sense Oligo
uuccgccuuccuuuauuuu

SEQ ID NO: 51270 - RNA, 19 nt, Artificial Sequence
  Antisense Oligo
aaaauaaaggaaggcggaa

SEQ ID NO: 51271 - RNA, 19 nt, Artificial Sequence
  Sense Oligo
uccgccuuccuuuauuuua

SEQ ID NO: 51272 - RNA, 19 nt, Artificial Sequence
  Antisense Oligo
uaaaauaaaggaaggcgga

SEQ ID NO: 51273 - RNA, 19 nt, Artificial Sequence
  Sense Oligo
ccgccuuccuuuauuuuau

SEQ ID NO: 51274 - RNA, 19 nt, Artificial Sequence
  Antisense Oligo
auaaaauaaaggaaggcgg

SEQ ID NO: 51275 - RNA, 19 nt, Artificial Sequence
  Sense Oligo
cgccuuccuuuauuuuauu

SEQ ID NO: 51276 - RNA, 19 nt, Artificial Sequence
  Antisense Oligo
aauaaaauaaaggaaggcg

SEQ ID NO: 51277 - RNA, 19 nt, Artificial Sequence
  Sense Oligo
ccggcagaucaccugaggu

SEQ ID NO: 51278 - RNA, 19 nt, Artificial Sequence
  Antisense Oligo
accucaggugaucugccgg

SEQ ID NO: 51279 - RNA, 19 nt, Artificial Sequence
  Sense Oligo
cggcagaucaccugagguc

SEQ ID NO: 51280 - RNA, 19 nt, Artificial Sequence
  Antisense Oligo
gaccucaggugaucugccg

SEQ ID NO: 51281 - RNA, 19 nt, Artificial Sequence
  Sense Oligo
cugaggucaggaguucgag

SEQ ID NO: 51282 - RNA, 19 nt, Artificial Sequence
  Antisense Oligo
cucgaacuccugaccucag

SEQ ID NO: 51283 - RNA, 19 nt, Artificial Sequence
  Sense Oligo
auuagcugggugugguggu

SEQ ID NO: 51284 - RNA, 19 nt, Artificial Sequence
  Antisense Oligo
accaccacacccagcuaau

SEQ ID NO: 51285 - RNA, 19 nt, Artificial Sequence
  Sense Oligo
uuagcugggugugguggug

SEQ ID NO: 51286 - RNA, 19 nt, Artificial Sequence
  Antisense Oligo
caccaccacacccagcuaa

SEQ ID NO: 51287 - RNA, 19 nt, Artificial Sequence
  Sense Oligo
gcggagguugcagugagca

SEQ ID NO: 51288 - RNA, 19 nt, Artificial Sequence
  Antisense Oligo
ugcucacugcaaccuccgc

SEQ ID NO: 51289 - RNA, 19 nt, Artificial Sequence
  Sense Oligo
cggagguugcagugagcag

SEQ ID NO: 51290 - RNA, 19 nt, Artificial Sequence
  Antisense Oligo
cugcucacugcaaccuccg

SEQ ID NO: 51291 - RNA, 19 nt, Artificial Sequence
  Sense Oligo
ggagguugcagugagcaga

SEQ ID NO: 51292 - RNA, 19 nt, Artificial Sequence
  Antisense Oligo
ucugcucacugcaaccucc

SEQ ID NO: 51293 - RNA, 19 nt, Artificial Sequence
  Sense Oligo
gagguugcagugagcagag

SEQ ID NO: 51294 - RNA, 19 nt, Artificial Sequence
  Antisense Oligo
cucugcucacugcaaccuc

SEQ ID NO: 51295 - RNA, 19 nt, Artificial Sequence
  Sense Oligo
gaucacgcuacccaccgca

SEQ ID NO: 51296 - RNA, 19 nt, Artificial Sequence
  Antisense Oligo
ugcgguggguagcgugauc

SEQ ID NO: 51297 - RNA, 19 nt, Artificial Sequence
  Sense Oligo
aucacgcuacccaccgcac

SEQ ID NO: 51298 - RNA, 19 nt, Artificial Sequence
  Antisense Oligo
gugcgguggguagcgugau

SEQ ID NO: 51299 - RNA, 19 nt, Artificial Sequence
  Sense Oligo
ucacgcuacccaccgcacu

SEQ ID NO: 51300 - RNA, 19 nt, Artificial Sequence
  Antisense Oligo
agugcgguggguagcguga

SEQ ID NO: 51301 - RNA, 19 nt, Artificial Sequence
  Sense Oligo
auauccuaaaugucuagac

SEQ ID NO: 51302 - RNA, 19 nt, Artificial Sequence
  Antisense Oligo
gucuagacauuuaggauau

SEQ ID NO: 51303 - RNA, 19 nt, Artificial Sequence
  Sense Oligo
uauccuaaaugucuagaca

SEQ ID NO: 51304 - RNA, 19 nt, Artificial Sequence
  Antisense Oligo
ugucuagacauuuaggaua

SEQ ID NO: 51305 - RNA, 19 nt, Artificial Sequence
  Sense Oligo
auccuaaaugucuagacag

SEQ ID NO: 51306 - RNA, 19 nt, Artificial Sequence
  Antisense Oligo
cugucuagacauuuaggau

SEQ ID NO: 51307 - RNA, 19 nt, Artificial Sequence
  Sense Oligo
uccuaaaugucuagacagu

SEQ ID NO: 51308 - RNA, 19 nt, Artificial Sequence
  Antisense Oligo
acugucuagacauuuagga

SEQ ID NO: 51309 - RNA, 19 nt, Artificial Sequence
  Sense Oligo
ccuaaaugucuagacagug

SEQ ID NO: 51310 - RNA, 19 nt, Artificial Sequence
  Antisense Oligo
cacugucuagacauuuagg

SEQ ID NO: 51311 - RNA, 19 nt, Artificial Sequence
  Sense Oligo
caaaaucaggcaguuggua

SEQ ID NO: 51312 - RNA, 19 nt, Artificial Sequence
  Antisense Oligo
uaccaacugccugauuuug

SEQ ID NO: 51313 - RNA, 19 nt, Artificial Sequence
  Sense Oligo
aaaaucaggcaguugguac

SEQ ID NO: 51314 - RNA, 19 nt, Artificial Sequence
  Antisense Oligo
guaccaacugccugauuuu

SEQ ID NO: 51315 - RNA, 19 nt, Artificial Sequence
  Sense Oligo
aaaucaggcaguugguacc

SEQ ID NO: 51316 - RNA, 19 nt, Artificial Sequence
  Antisense Oligo
gguaccaacugccugauuu

SEQ ID NO: 51317 - RNA, 19 nt, Artificial Sequence
  Sense Oligo
aaucaggcaguugguaccc

SEQ ID NO: 51318 - RNA, 19 nt, Artificial Sequence
  Antisense Oligo
ggguaccaacugccugauu

SEQ ID NO: 51319 - RNA, 19 nt, Artificial Sequence
  Sense Oligo
cccuuugucuacgagcucc

SEQ ID NO: 51320 - RNA, 19 nt, Artificial Sequence
  Antisense Oligo
ggagcucguagacaaaggg

SEQ ID NO: 51321 - RNA, 19 nt, Artificial Sequence
  Sense Oligo
ccuuugucuacgagcuccc

SEQ ID NO: 51322 - RNA, 19 nt, Artificial Sequence
  Antisense Oligo
gggagcucguagacaaagg

SEQ ID NO: 51323 - RNA, 19 nt, Artificial Sequence
  Sense Oligo
ugucuacgagcucccauuc

SEQ ID NO: 51324 - RNA, 19 nt, Artificial Sequence
  Antisense Oligo
gaaugggagcucguagaca

SEQ ID NO: 51325 - RNA, 19 nt, Artificial Sequence
  Sense Oligo
gucuacgagcucccauuca

SEQ ID NO: 51326 - RNA, 19 nt, Artificial Sequence
  Antisense Oligo
ugaaugggagcucguagac

SEQ ID NO: 51327 - RNA, 19 nt, Artificial Sequence
  Sense Oligo
ucuacgagcucccauucaa

SEQ ID NO: 51328 - RNA, 19 nt, Artificial Sequence
  Antisense Oligo
uugaaugggagcucguaga

SEQ ID NO: 51329 - RNA, 19 nt, Artificial Sequence
  Sense Oligo
cuacgagcucccauucaac

SEQ ID NO: 51330 - RNA, 19 nt, Artificial Sequence
  Antisense Oligo
guugaaugggagcucguag

SEQ ID NO: 51331 - RNA, 19 nt, Artificial Sequence
  Sense Oligo
gggagcgccaugacuuaga

SEQ ID NO: 51332 - RNA, 19 nt, Artificial Sequence
  Antisense Oligo
ucuaagucauggcgcuccc

SEQ ID NO: 51333 - RNA, 19 nt, Artificial Sequence
  Sense Oligo
ggagcgccaugacuuagac

SEQ ID NO: 51334 - RNA, 19 nt, Artificial Sequence
  Antisense Oligo
gucuaagucauggcgcucc

SEQ ID NO: 51335 - RNA, 19 nt, Artificial Sequence
  Sense Oligo
gagcgccaugacuuagacg

SEQ ID NO: 51336 - RNA, 19 nt, Artificial Sequence
  Antisense Oligo
cgucuaagucauggcgcuc

SEQ ID NO: 51337 - RNA, 19 nt, Artificial Sequence
  Sense Oligo
agcgccaugacuuagacgc

SEQ ID NO: 51338 - RNA, 19 nt, Artificial Sequence
  Antisense Oligo
gcgucuaagucauggcgcu

SEQ ID NO: 51339 - RNA, 19 nt, Artificial Sequence
  Sense Oligo
gcgccaugacuuagacgca

SEQ ID NO: 51340 - RNA, 19 nt, Artificial Sequence
  Antisense Oligo
ugcgucuaagucauggcgc

SEQ ID NO: 51341 - RNA, 19 nt, Artificial Sequence
  Sense Oligo
cgccaugacuuagacgcac

SEQ ID NO: 51342 - RNA, 19 nt, Artificial Sequence
  Antisense Oligo
gugcgucuaagucauggcg

SEQ ID NO: 51343 - RNA, 19 nt, Artificial Sequence
  Sense Oligo
gccaugacuuagacgcacu

SEQ ID NO: 51344 - RNA, 19 nt, Artificial Sequence
  Antisense Oligo
agugcgucuaagucauggc

SEQ ID NO: 51345 - RNA, 19 nt, Artificial Sequence
  Sense Oligo
ccaugacuuagacgcacuc

SEQ ID NO: 51346 - RNA, 19 nt, Artificial Sequence
  Antisense Oligo
gagugcgucuaagucaugg

SEQ ID NO: 51347 - RNA, 19 nt, Artificial Sequence
  Sense Oligo
acuuagacgcacuccaggc

SEQ ID NO: 51348 - RNA, 19 nt, Artificial Sequence
  Antisense Oligo
gccuggagugcgucuaagu

SEQ ID NO: 51349 - RNA, 19 nt, Artificial Sequence
  Sense Oligo
cuuagacgcacuccaggcc

SEQ ID NO: 51350 - RNA, 19 nt, Artificial Sequence
  Antisense Oligo
ggccuggagugcgucuaag

SEQ ID NO: 51351 - RNA, 19 nt, Artificial Sequence
  Sense Oligo
uuagacgcacuccaggccg

SEQ ID NO: 51352 - RNA, 19 nt, Artificial Sequence
  Antisense Oligo
cggccuggagugcgucuaa

SEQ ID NO: 51353 - RNA, 19 nt, Artificial Sequence
  Sense Oligo
cuccuugguuuccucucug

SEQ ID NO: 51354 - RNA, 19 nt, Artificial Sequence
  Antisense Oligo
cagagaggaaaccaaggag

SEQ ID NO: 51355 - RNA, 19 nt, Artificial Sequence
  Sense Oligo
ucucugcaggacugcccaa

SEQ ID NO: 51356 - RNA, 19 nt, Artificial Sequence
  Antisense Oligo
uugggcaguccugcagaga

SEQ ID NO: 51357 - RNA, 19 nt, Artificial Sequence
  Sense Oligo
cucugcaggacugcccaag

SEQ ID NO: 51358 - RNA, 19 nt, Artificial Sequence
  Antisense Oligo
cuugggcaguccugcagag

SEQ ID NO: 51359 - RNA, 19 nt, Artificial Sequence
  Sense Oligo
ucugcaggacugcccaaga

SEQ ID NO: 51360 - RNA, 19 nt, Artificial Sequence
  Antisense Oligo
ucuugggcaguccugcaga

SEQ ID NO: 51361 - RNA, 19 nt, Artificial Sequence
  Sense Oligo
cugcaggacugcccaagaa

SEQ ID NO: 51362 - RNA, 19 nt, Artificial Sequence
  Antisense Oligo
uucuugggcaguccugcag

SEQ ID NO: 51363 - RNA, 19 nt, Artificial Sequence
  Sense Oligo
ugcaggacugcccaagaag

SEQ ID NO: 51364 - RNA, 19 nt, Artificial Sequence
  Antisense Oligo
cuucuugggcaguccugca

SEQ ID NO: 51365 - RNA, 19 nt, Artificial Sequence
  Sense Oligo
gcaggacugcccaagaagu

SEQ ID NO: 51366 - RNA, 19 nt, Artificial Sequence
  Antisense Oligo
acuucuugggcaguccugc

SEQ ID NO: 51367 - RNA, 19 nt, Artificial Sequence
  Sense Oligo
caggacugcccaagaaguu

SEQ ID NO: 51368 - RNA, 19 nt, Artificial Sequence
  Antisense Oligo
aacuucuugggcaguccug

SEQ ID NO: 51369 - RNA, 19 nt, Artificial Sequence
  Sense Oligo
aggacugcccaagaaguuc

SEQ ID NO: 51370 - RNA, 19 nt, Artificial Sequence
  Antisense Oligo
gaacuucuugggcaguccu

SEQ ID NO: 51371 - RNA, 19 nt, Artificial Sequence
  Sense Oligo
ggacugcccaagaaguucg

SEQ ID NO: 51372 - RNA, 19 nt, Artificial Sequence
  Antisense Oligo
cgaacuucuugggcagucc

SEQ ID NO: 51373 - RNA, 19 nt, Artificial Sequence
  Sense Oligo
gacugcccaagaaguucgu

SEQ ID NO: 51374 - RNA, 19 nt, Artificial Sequence
  Antisense Oligo
acgaacuucuugggcaguc

SEQ ID NO: 51375 - RNA, 19 nt, Artificial Sequence
  Sense Oligo
acugcccaagaaguucgug

SEQ ID NO: 51376 - RNA, 19 nt, Artificial Sequence
  Antisense Oligo
cacgaacuucuugggcagu

SEQ ID NO: 51377 - RNA, 19 nt, Artificial Sequence
  Sense Oligo
cugcccaagaaguucgugg

SEQ ID NO: 51378 - RNA, 19 nt, Artificial Sequence
  Antisense Oligo
ccacgaacuucuugggcag

SEQ ID NO: 51379 - RNA, 19 nt, Artificial Sequence
  Sense Oligo
ugcccaagaaguucgugga

SEQ ID NO: 51380 - RNA, 19 nt, Artificial Sequence
  Antisense Oligo
uccacgaacuucuugggca

SEQ ID NO: 51381 - RNA, 19 nt, Artificial Sequence
  Sense Oligo
gcccaagaaguucguggac

SEQ ID NO: 51382 - RNA, 19 nt, Artificial Sequence
  Antisense Oligo
guccacgaacuucuugggc

SEQ ID NO: 51383 - RNA, 19 nt, Artificial Sequence
  Sense Oligo
cccaagaaguucguggaca

SEQ ID NO: 51384 - RNA, 19 nt, Artificial Sequence
  Antisense Oligo
uguccacgaacuucuuggg

SEQ ID NO: 51385 - RNA, 19 nt, Artificial Sequence
  Sense Oligo
ccaagaaguucguggacau

SEQ ID NO: 51386 - RNA, 19 nt, Artificial Sequence
  Antisense Oligo
auguccacgaacuucuugg

SEQ ID NO: 51387 - RNA, 19 nt, Artificial Sequence
  Sense Oligo
gaaguucguggacaucuuu

SEQ ID NO: 51388 - RNA, 19 nt, Artificial Sequence
  Antisense Oligo
aaagauguccacgaacuuc

SEQ ID NO: 51389 - RNA, 19 nt, Artificial Sequence
  Sense Oligo
aaguucguggacaucuuuc

SEQ ID NO: 51390 - RNA, 19 nt, Artificial Sequence
  Antisense Oligo
gaaagauguccacgaacuu

SEQ ID NO: 51391 - RNA, 19 nt, Artificial Sequence
  Sense Oligo
caucuuucagcagacuccu

SEQ ID NO: 51392 - RNA, 19 nt, Artificial Sequence
  Antisense Oligo
aggagucugcugaaagaug

SEQ ID NO: 51393 - RNA, 19 nt, Artificial Sequence
  Sense Oligo
aucuuucagcagacuccuc

SEQ ID NO: 51394 - RNA, 19 nt, Artificial Sequence
  Antisense Oligo
gaggagucugcugaaagau

SEQ ID NO: 51395 - RNA, 19 nt, Artificial Sequence
  Sense Oligo
ucuuucagcagacuccucu

SEQ ID NO: 51396 - RNA, 19 nt, Artificial Sequence
  Antisense Oligo
agaggagucugcugaaaga

SEQ ID NO: 51397 - RNA, 19 nt, Artificial Sequence
  Sense Oligo
uccucugggcagguuucuu

SEQ ID NO: 51398 - RNA, 19 nt, Artificial Sequence
  Antisense Oligo
aagaaaccugcccagagga

SEQ ID NO: 51399 - RNA, 19 nt, Artificial Sequence
  Sense Oligo
ccucugggcagguuucuug

SEQ ID NO: 51400 - RNA, 19 nt, Artificial Sequence
  Antisense Oligo
caagaaaccugcccagagg

SEQ ID NO: 51401 - RNA, 19 nt, Artificial Sequence
  Sense Oligo
cucugggcagguuucuugc

SEQ ID NO: 51402 - RNA, 19 nt, Artificial Sequence
  Antisense Oligo
gcaagaaaccugcccagag

SEQ ID NO: 51403 - RNA, 19 nt, Artificial Sequence
  Sense Oligo
gcagguuucuugcccagcu

SEQ ID NO: 51404 - RNA, 19 nt, Artificial Sequence
  Antisense Oligo
agcugggcaagaaaccugc

SEQ ID NO: 51405 - RNA, 19 nt, Artificial Sequence
  Sense Oligo
agguuucuugcccagcucc

SEQ ID NO: 51406 - RNA, 19 nt, Artificial Sequence
  Antisense Oligo
ggagcugggcaagaaaccu

SEQ ID NO: 51407 - RNA, 19 nt, Artificial Sequence
  Sense Oligo
gguuucuugcccagcucca

SEQ ID NO: 51408 - RNA, 19 nt, Artificial Sequence
  Antisense Oligo
uggagcugggcaagaaacc

SEQ ID NO: 51409 - RNA, 19 nt, Artificial Sequence
  Sense Oligo
acuucuucaguguuacuug

SEQ ID NO: 51410 - RNA, 19 nt, Artificial Sequence
  Antisense Oligo
caaguaacacugaagaagu

SEQ ID NO: 51411 - RNA, 19 nt, Artificial Sequence
  Sense Oligo
guguuacuugaaggauuuc

SEQ ID NO: 51412 - RNA, 19 nt, Artificial Sequence
  Antisense Oligo
gaaauccuucaaguaacac

SEQ ID NO: 51413 - RNA, 19 nt, Artificial Sequence
  Sense Oligo
ggauuucauucucuugacc

SEQ ID NO: 51414 - RNA, 19 nt, Artificial Sequence
  Antisense Oligo
ggucaagagaaugaaaucc

SEQ ID NO: 51415 - RNA, 19 nt, Artificial Sequence
  Sense Oligo
uuucauucucuugaccaug

SEQ ID NO: 51416 - RNA, 19 nt, Artificial Sequence
  Antisense Oligo
cauggucaagagaaugaaa

SEQ ID NO: 51417 - RNA, 19 nt, Artificial Sequence
  Sense Oligo
uucauucucuugaccaugc

SEQ ID NO: 51418 - RNA, 19 nt, Artificial Sequence
  Antisense Oligo
gcauggucaagagaaugaa

SEQ ID NO: 51419 - RNA, 19 nt, Artificial Sequence
  Sense Oligo
ucauucucuugaccaugcg

SEQ ID NO: 51420 - RNA, 19 nt, Artificial Sequence
  Antisense Oligo
cgcauggucaagagaauga

SEQ ID NO: 51421 - RNA, 19 nt, Artificial Sequence
  Sense Oligo
cauucucuugaccaugcgu

SEQ ID NO: 51422 - RNA, 19 nt, Artificial Sequence
  Antisense Oligo
acgcauggucaagagaaug

SEQ ID NO: 51423 - RNA, 19 nt, Artificial Sequence
  Sense Oligo
auucucuugaccaugcgug

SEQ ID NO: 51424 - RNA, 19 nt, Artificial Sequence
  Antisense Oligo
cacgcauggucaagagaau

SEQ ID NO: 51425 - RNA, 19 nt, Artificial Sequence
  Sense Oligo
uucucuugaccaugcgugu

SEQ ID NO: 51426 - RNA, 19 nt, Artificial Sequence
  Antisense Oligo
acacgcauggucaagagaa

SEQ ID NO: 51427 - RNA, 19 nt, Artificial Sequence
  Sense Oligo
ucucuugaccaugcgugug

SEQ ID NO: 51428 - RNA, 19 nt, Artificial Sequence
  Antisense Oligo
cacacgcauggucaagaga

SEQ ID NO: 51429 - RNA, 19 nt, Artificial Sequence
  Sense Oligo
gaccaugcgugugucaacg

SEQ ID NO: 51430 - RNA, 19 nt, Artificial Sequence
  Antisense Oligo
cguugacacacgcaugguc

SEQ ID NO: 51431 - RNA, 19 nt, Artificial Sequence
  Sense Oligo
accaugcgugugucaacgg

SEQ ID NO: 51432 - RNA, 19 nt, Artificial Sequence
  Antisense Oligo
ccguugacacacgcauggu

SEQ ID NO: 51433 - RNA, 19 nt, Artificial Sequence
  Sense Oligo
ccaugcgugugucaacgga

SEQ ID NO: 51434 - RNA, 19 nt, Artificial Sequence
  Antisense Oligo
uccguugacacacgcaugg

SEQ ID NO: 51435 - RNA, 19 nt, Artificial Sequence
  Sense Oligo
caugcgugugucaacggag

SEQ ID NO: 51436 - RNA, 19 nt, Artificial Sequence
  Antisense Oligo
cuccguugacacacgcaug

SEQ ID NO: 51437 - RNA, 19 nt, Artificial Sequence
  Sense Oligo
augcgugugucaacggagg

SEQ ID NO: 51438 - RNA, 19 nt, Artificial Sequence
  Antisense Oligo
ccuccguugacacacgcau

SEQ ID NO: 51439 - RNA, 19 nt, Artificial Sequence
  Sense Oligo
ugcgugugucaacggagga

SEQ ID NO: 51440 - RNA, 19 nt, Artificial Sequence
  Antisense Oligo
uccuccguugacacacgca

SEQ ID NO: 51441 - RNA, 19 nt, Artificial Sequence
  Sense Oligo
gcgugugucaacggaggag

SEQ ID NO: 51442 - RNA, 19 nt, Artificial Sequence
  Antisense Oligo
cuccuccguugacacacgc

SEQ ID NO: 51443 - RNA, 19 nt, Artificial Sequence
  Sense Oligo
cgugugucaacggaggagg

SEQ ID NO: 51444 - RNA, 19 nt, Artificial Sequence
  Antisense Oligo
ccuccuccguugacacacg

SEQ ID NO: 51445 - RNA, 19 nt, Artificial Sequence
  Sense Oligo
gugugucaacggaggagga

SEQ ID NO: 51446 - RNA, 19 nt, Artificial Sequence
  Antisense Oligo
uccuccuccguugacacac

SEQ ID NO: 51447 - RNA, 19 nt, Artificial Sequence
  Sense Oligo
gucaacggaggaggaauua

SEQ ID NO: 51448 - RNA, 19 nt, Artificial Sequence
  Antisense Oligo
uaauuccuccuccguugac

SEQ ID NO: 51449 - RNA, 19 nt, Artificial Sequence
  Sense Oligo
ucaacggaggaggaauuaa

SEQ ID NO: 51450 - RNA, 19 nt, Artificial Sequence
  Antisense Oligo
uuaauuccuccuccguuga

SEQ ID NO: 51451 - RNA, 19 nt, Artificial Sequence
  Sense Oligo
caacggaggaggaauuaaa

SEQ ID NO: 51452 - RNA, 19 nt, Artificial Sequence
  Antisense Oligo
uuuaauuccuccuccguug

SEQ ID NO: 51453 - RNA, 19 nt, Artificial Sequence
  Sense Oligo
aacggaggaggaauuaaag

SEQ ID NO: 51454 - RNA, 19 nt, Artificial Sequence
  Antisense Oligo
cuuuaauuccuccuccguu

SEQ ID NO: 51455 - RNA, 19 nt, Artificial Sequence
  Sense Oligo
acggaggaggaauuaaagg

SEQ ID NO: 51456 - RNA, 19 nt, Artificial Sequence
  Antisense Oligo
ccuuuaauuccuccuccgu

SEQ ID NO: 51457 - RNA, 19 nt, Artificial Sequence
  Sense Oligo
cggaggaggaauuaaaggu

SEQ ID NO: 51458 - RNA, 19 nt, Artificial Sequence
  Antisense Oligo
accuuuaauuccuccuccg

SEQ ID NO: 51459 - RNA, 19 nt, Artificial Sequence
  Sense Oligo
ggaggaggaauuaaaggua

SEQ ID NO: 51460 - RNA, 19 nt, Artificial Sequence
  Antisense Oligo
uaccuuuaauuccuccucc

SEQ ID NO: 51461 - RNA, 19 nt, Artificial Sequence
  Sense Oligo
gaggaggaauuaaagguag

SEQ ID NO: 51462 - RNA, 19 nt, Artificial Sequence
  Antisense Oligo
cuaccuuuaauuccuccuc

SEQ ID NO: 51463 - RNA, 19 nt, Artificial Sequence
  Sense Oligo
aggaggaauuaaagguaga

SEQ ID NO: 51464 - RNA, 19 nt, Artificial Sequence
  Antisense Oligo
ucuaccuuuaauuccuccu

SEQ ID NO: 51465 - RNA, 19 nt, Artificial Sequence
  Sense Oligo
ggaggaauuaaagguagau

SEQ ID NO: 51466 - RNA, 19 nt, Artificial Sequence
  Antisense Oligo
aucuaccuuuaauuccucc

SEQ ID NO: 51467 - RNA, 19 nt, Artificial Sequence
  Sense Oligo
gaggaauuaaagguagaug

SEQ ID NO: 51468 - RNA, 19 nt, Artificial Sequence
  Antisense Oligo
caucuaccuuuaauuccuc

SEQ ID NO: 51469 - RNA, 19 nt, Artificial Sequence
  Sense Oligo
aggaauuaaagguagaugu

SEQ ID NO: 51470 - RNA, 19 nt, Artificial Sequence
  Antisense Oligo
acaucuaccuuuaauuccu

SEQ ID NO: 51471 - RNA, 19 nt, Artificial Sequence
  Sense Oligo
ggaauuaaagguagauguu

SEQ ID NO: 51472 - RNA, 19 nt, Artificial Sequence
  Antisense Oligo
aacaucuaccuuuaauucc

SEQ ID NO: 51473 - RNA, 19 nt, Artificial Sequence
  Sense Oligo
aagguagauguuuagauac

SEQ ID NO: 51474 - RNA, 19 nt, Artificial Sequence
  Antisense Oligo
guaucuaaacaucuaccuu

SEQ ID NO: 51475 - RNA, 19 nt, Artificial Sequence
  Sense Oligo
agguagauguuuagauacu

SEQ ID NO: 51476 - RNA, 19 nt, Artificial Sequence
  Antisense Oligo
aguaucuaaacaucuaccu

SEQ ID NO: 51477 - RNA, 19 nt, Artificial Sequence
  Sense Oligo
gguagauguuuagauacug

SEQ ID NO: 51478 - RNA, 19 nt, Artificial Sequence
  Antisense Oligo
caguaucuaaacaucuacc

SEQ ID NO: 51479 - RNA, 19 nt, Artificial Sequence
  Sense Oligo
guagauguuuagauacugg

SEQ ID NO: 51480 - RNA, 19 nt, Artificial Sequence
  Antisense Oligo
ccaguaucuaaacaucuac

SEQ ID NO: 51481 - RNA, 19 nt, Artificial Sequence
  Sense Oligo
uagauguuuagauacuggc

SEQ ID NO: 51482 - RNA, 19 nt, Artificial Sequence
  Antisense Oligo
gccaguaucuaaacaucua

SEQ ID NO: 51483 - RNA, 19 nt, Artificial Sequence
  Sense Oligo
agauguuuagauacuggcu

SEQ ID NO: 51484 - RNA, 19 nt, Artificial Sequence
  Antisense Oligo
agccaguaucuaaacaucu

SEQ ID NO: 51485 - RNA, 19 nt, Artificial Sequence
  Sense Oligo
gauguuuagauacuggcua

SEQ ID NO: 51486 - RNA, 19 nt, Artificial Sequence
  Antisense Oligo
uagccaguaucuaaacauc

SEQ ID NO: 51487 - RNA, 19 nt, Artificial Sequence
  Sense Oligo
auacuggcuaagggucagg

SEQ ID NO: 51488 - RNA, 19 nt, Artificial Sequence
  Antisense Oligo
ccugacccuuagccaguau

SEQ ID NO: 51489 - RNA, 19 nt, Artificial Sequence
  Sense Oligo
uacuggcuaagggucaggu

SEQ ID NO: 51490 - RNA, 19 nt, Artificial Sequence
  Antisense Oligo
accugacccuuagccagua

SEQ ID NO: 51491 - RNA, 19 nt, Artificial Sequence
  Sense Oligo
acuggcuaagggucaggug

SEQ ID NO: 51492 - RNA, 19 nt, Artificial Sequence
  Antisense Oligo
caccugacccuuagccagu

SEQ ID NO: 51493 - RNA, 19 nt, Artificial Sequence
  Sense Oligo
cuggcuaagggucaggugu

SEQ ID NO: 51494 - RNA, 19 nt, Artificial Sequence
  Antisense Oligo
acaccugacccuuagccag

SEQ ID NO: 51495 - RNA, 19 nt, Artificial Sequence
  Sense Oligo
uggcuaagggucaggugua

SEQ ID NO: 51496 - RNA, 19 nt, Artificial Sequence
  Antisense Oligo
uacaccugacccuuagcca

SEQ ID NO: 51497 - RNA, 19 nt, Artificial Sequence
  Sense Oligo
acuggaugcagacacggag

SEQ ID NO: 51498 - RNA, 19 nt, Artificial Sequence
  Antisense Oligo
cuccgugucugcauccagu

SEQ ID NO: 51499 - RNA, 19 nt, Artificial Sequence
  Sense Oligo
gacguuuccucagcugccu

SEQ ID NO: 51500 - RNA, 19 nt, Artificial Sequence
  Antisense Oligo
aggcagcugaggaaacguc

SEQ ID NO: 51501 - RNA, 19 nt, Artificial Sequence
  Sense Oligo
acguuuccucagcugccug

SEQ ID NO: 51502 - RNA, 19 nt, Artificial Sequence
  Antisense Oligo
caggcagcugaggaaacgu

SEQ ID NO: 51503 - RNA, 19 nt, Artificial Sequence
  Sense Oligo
cguuuccucagcugccugg

SEQ ID NO: 51504 - RNA, 19 nt, Artificial Sequence
  Antisense Oligo
ccaggcagcugaggaaacg

SEQ ID NO: 51505 - RNA, 19 nt, Artificial Sequence
  Sense Oligo
guuuccucagcugccugga

SEQ ID NO: 51506 - RNA, 19 nt, Artificial Sequence
  Antisense Oligo
uccaggcagcugaggaaac

SEQ ID NO: 51507 - RNA, 19 nt, Artificial Sequence
  Sense Oligo
ggagcuggugcugugaagu

SEQ ID NO: 51508 - RNA, 19 nt, Artificial Sequence
  Antisense Oligo
acuucacagcaccagcucc

SEQ ID NO: 51509 - RNA, 19 nt, Artificial Sequence
  Sense Oligo
gagcuggugcugugaaguc

SEQ ID NO: 51510 - RNA, 19 nt, Artificial Sequence
  Antisense Oligo
gacuucacagcaccagcuc

SEQ ID NO: 51511 - RNA, 19 nt, Artificial Sequence
  Sense Oligo
agcuggugcugugaagucu

SEQ ID NO: 51512 - RNA, 19 nt, Artificial Sequence
  Antisense Oligo
agacuucacagcaccagcu

SEQ ID NO: 51513 - RNA, 19 nt, Artificial Sequence
  Sense Oligo
gcuggugcugugaagucug

SEQ ID NO: 51514 - RNA, 19 nt, Artificial Sequence
  Antisense Oligo
cagacuucacagcaccagc

SEQ ID NO: 51515 - RNA, 19 nt, Artificial Sequence
  Sense Oligo
cuggugcugugaagucugg

SEQ ID NO: 51516 - RNA, 19 nt, Artificial Sequence
  Antisense Oligo
ccagacuucacagcaccag

SEQ ID NO: 51517 - RNA, 19 nt, Artificial Sequence
  Sense Oligo
uggugcugugaagucuggg

SEQ ID NO: 51518 - RNA, 19 nt, Artificial Sequence
  Antisense Oligo
cccagacuucacagcacca

SEQ ID NO: 51519 - RNA, 19 nt, Artificial Sequence
  Sense Oligo
ggugcugugaagucuggga

SEQ ID NO: 51520 - RNA, 19 nt, Artificial Sequence
  Antisense Oligo
ucccagacuucacagcacc

SEQ ID NO: 51521 - RNA, 19 nt, Artificial Sequence
  Sense Oligo
gugcugugaagucugggaa

SEQ ID NO: 51522 - RNA, 19 nt, Artificial Sequence
  Antisense Oligo
uucccagacuucacagcac

SEQ ID NO: 51523 - RNA, 19 nt, Artificial Sequence
  Sense Oligo
aagggugccggugggugaa

SEQ ID NO: 51524 - RNA, 19 nt, Artificial Sequence
  Antisense Oligo
uucacccaccggcacccuu

SEQ ID NO: 51525 - RNA, 19 nt, Artificial Sequence
  Sense Oligo
cucucaauauucagugcua

SEQ ID NO: 51526 - RNA, 19 nt, Artificial Sequence
  Antisense Oligo
uagcacugaauauugagag

SEQ ID NO: 51527 - RNA, 19 nt, Artificial Sequence
  Sense Oligo
ucucaauauucagugcuac

SEQ ID NO: 51528 - RNA, 19 nt, Artificial Sequence
  Antisense Oligo
guagcacugaauauugaga

SEQ ID NO: 51529 - RNA, 19 nt, Artificial Sequence
  Sense Oligo
cucaauauucagugcuaca

SEQ ID NO: 51530 - RNA, 19 nt, Artificial Sequence
  Antisense Oligo
uguagcacugaauauugag

SEQ ID NO: 51531 - RNA, 19 nt, Artificial Sequence
  Sense Oligo
ucaauauucagugcuacac

SEQ ID NO: 51532 - RNA, 19 nt, Artificial Sequence
  Antisense Oligo
guguagcacugaauauuga

SEQ ID NO: 51533 - RNA, 19 nt, Artificial Sequence
  Sense Oligo
caauauucagugcuacacc

SEQ ID NO: 51534 - RNA, 19 nt, Artificial Sequence
  Antisense Oligo
gguguagcacugaauauug

SEQ ID NO: 51535 - RNA, 19 nt, Artificial Sequence
  Sense Oligo
aauauucagugcuacaccc

SEQ ID NO: 51536 - RNA, 19 nt, Artificial Sequence
  Antisense Oligo
ggguguagcacugaauauu

SEQ ID NO: 51537 - RNA, 19 nt, Artificial Sequence
  Sense Oligo
auauucagugcuacacccu

SEQ ID NO: 51538 - RNA, 19 nt, Artificial Sequence
  Antisense Oligo
aggguguagcacugaauau

SEQ ID NO: 51539 - RNA, 19 nt, Artificial Sequence
  Sense Oligo
uauucagugcuacacccuc

SEQ ID NO: 51540 - RNA, 19 nt, Artificial Sequence
  Antisense Oligo
gaggguguagcacugaaua

SEQ ID NO: 51541 - RNA, 19 nt, Artificial Sequence
  Sense Oligo
auucagugcuacacccuca

SEQ ID NO: 51542 - RNA, 19 nt, Artificial Sequence
  Antisense Oligo
ugaggguguagcacugaau

SEQ ID NO: 51543 - RNA, 19 nt, Artificial Sequence
  Sense Oligo
uucagugcuacacccucag

SEQ ID NO: 51544 - RNA, 19 nt, Artificial Sequence
  Antisense Oligo
cugaggguguagcacugaa

SEQ ID NO: 51545 - RNA, 19 nt, Artificial Sequence
  Sense Oligo
ucagugcuacacccucagu

SEQ ID NO: 51546 - RNA, 19 nt, Artificial Sequence
  Antisense Oligo
acugaggguguagcacuga

SEQ ID NO: 51547 - RNA, 19 nt, Artificial Sequence
  Sense Oligo
cagugcuacacccucaguc

SEQ ID NO: 51548 - RNA, 19 nt, Artificial Sequence
  Antisense Oligo
gacugaggguguagcacug

SEQ ID NO: 51549 - RNA, 19 nt, Artificial Sequence
  Sense Oligo
agugcuacacccucagucc

SEQ ID NO: 51550 - RNA, 19 nt, Artificial Sequence
  Antisense Oligo
ggacugaggguguagcacu

SEQ ID NO: 51551 - RNA, 19 nt, Artificial Sequence
  Sense Oligo
gugcuacacccucagucca

SEQ ID NO: 51552 - RNA, 19 nt, Artificial Sequence
  Antisense Oligo
uggacugaggguguagcac

SEQ ID NO: 51553 - RNA, 19 nt, Artificial Sequence
  Sense Oligo
uacacccucaguccaccgc

SEQ ID NO: 51554 - RNA, 19 nt, Artificial Sequence
  Antisense Oligo
gcgguggacugagggugua

SEQ ID NO: 51555 - RNA, 19 nt, Artificial Sequence
  Sense Oligo
agaccuccaauuuccuuga

SEQ ID NO: 51556 - RNA, 19 nt, Artificial Sequence
  Antisense Oligo
ucaaggaaauuggaggucu

SEQ ID NO: 51557 - RNA, 19 nt, Artificial Sequence
  Sense Oligo
ccuccaauuuccuugacau

SEQ ID NO: 51558 - RNA, 19 nt, Artificial Sequence
  Antisense Oligo
augucaaggaaauuggagg

SEQ ID NO: 51559 - RNA, 19 nt, Artificial Sequence
  Sense Oligo
uccaauuuccuugacauag

SEQ ID NO: 51560 - RNA, 19 nt, Artificial Sequence
  Antisense Oligo
cuaugucaaggaaauugga

SEQ ID NO: 51561 - RNA, 19 nt, Artificial Sequence
  Sense Oligo
auuuccuugacauagcuuc

SEQ ID NO: 51562 - RNA, 19 nt, Artificial Sequence
  Antisense Oligo
gaagcuaugucaaggaaau

SEQ ID NO: 51563 - RNA, 19 nt, Artificial Sequence
  Sense Oligo
uuuccuugacauagcuucu

SEQ ID NO: 51564 - RNA, 19 nt, Artificial Sequence
  Antisense Oligo
agaagcuaugucaaggaaa

SEQ ID NO: 51565 - RNA, 19 nt, Artificial Sequence
  Sense Oligo
uuccuugacauagcuucuu

SEQ ID NO: 51566 - RNA, 19 nt, Artificial Sequence
  Antisense Oligo
aagaagcuaugucaaggaa

SEQ ID NO: 51567 - RNA, 19 nt, Artificial Sequence
  Sense Oligo
uuaaauacguaacuaaccc

SEQ ID NO: 51568 - RNA, 19 nt, Artificial Sequence
  Antisense Oligo
ggguuaguuacguauuuaa

SEQ ID NO: 51569 - RNA, 19 nt, Artificial Sequence
  Sense Oligo
cccuacaggguaagaauaa

SEQ ID NO: 51570 - RNA, 19 nt, Artificial Sequence
  Antisense Oligo
uuauucuuacccuguaggg

SEQ ID NO: 51571 - RNA, 19 nt, Artificial Sequence
  Sense Oligo
ccuacaggguaagaauaaa

SEQ ID NO: 51572 - RNA, 19 nt, Artificial Sequence
  Antisense Oligo
uuuauucuuacccuguagg

SEQ ID NO: 51573 - RNA, 19 nt, Artificial Sequence
  Sense Oligo
cauccuuacagcuaauaug

SEQ ID NO: 51574 - RNA, 19 nt, Artificial Sequence
  Antisense Oligo
cauauuagcuguaaggaug

SEQ ID NO: 51575 - RNA, 19 nt, Artificial Sequence
  Sense Oligo
auccuuacagcuaauauga

SEQ ID NO: 51576 - RNA, 19 nt, Artificial Sequence
  Antisense Oligo
ucauauuagcuguaaggau

SEQ ID NO: 51577 - RNA, 19 nt, Artificial Sequence
  Sense Oligo
uccuuacagcuaauaugac

SEQ ID NO: 51578 - RNA, 19 nt, Artificial Sequence
  Antisense Oligo
gucauauuagcuguaagga

SEQ ID NO: 51579 - RNA, 19 nt, Artificial Sequence
  Sense Oligo
ccuuacagcuaauaugacu

SEQ ID NO: 51580 - RNA, 19 nt, Artificial Sequence
  Antisense Oligo
agucauauuagcuguaagg

SEQ ID NO: 51581 - RNA, 19 nt, Artificial Sequence
  Sense Oligo
cuuacagcuaauaugacua

SEQ ID NO: 51582 - RNA, 19 nt, Artificial Sequence
  Antisense Oligo
uagucauauuagcuguaag

SEQ ID NO: 51583 - RNA, 19 nt, Artificial Sequence
  Sense Oligo
uuacagcuaauaugacuag

SEQ ID NO: 51584 - RNA, 19 nt, Artificial Sequence
  Antisense Oligo
cuagucauauuagcuguaa

SEQ ID NO: 51585 - RNA, 19 nt, Artificial Sequence
  Sense Oligo
uacagcuaauaugacuaga

SEQ ID NO: 51586 - RNA, 19 nt, Artificial Sequence
  Antisense Oligo
ucuagucauauuagcugua

SEQ ID NO: 51587 - RNA, 19 nt, Artificial Sequence
  Sense Oligo
acagcuaauaugacuagag

SEQ ID NO: 51588 - RNA, 19 nt, Artificial Sequence
  Antisense Oligo
cucuagucauauuagcugu

SEQ ID NO: 51589 - RNA, 19 nt, Artificial Sequence
  Sense Oligo
cagcuaauaugacuagagg

SEQ ID NO: 51590 - RNA, 19 nt, Artificial Sequence
  Antisense Oligo
ccucuagucauauuagcug

SEQ ID NO: 51591 - RNA, 19 nt, Artificial Sequence
  Sense Oligo
agcuaauaugacuagaggu

SEQ ID NO: 51592 - RNA, 19 nt, Artificial Sequence
  Antisense Oligo
accucuagucauauuagcu

SEQ ID NO: 51593 - RNA, 19 nt, Artificial Sequence
  Sense Oligo
gcuaauaugacuagagguu

SEQ ID NO: 51594 - RNA, 19 nt, Artificial Sequence
  Antisense Oligo
aaccucuagucauauuagc

SEQ ID NO: 51595 - RNA, 19 nt, Artificial Sequence
  Sense Oligo
cuaauaugacuagagguua

SEQ ID NO: 51596 - RNA, 19 nt, Artificial Sequence
  Antisense Oligo
uaaccucuagucauauuag

SEQ ID NO: 51597 - RNA, 19 nt, Artificial Sequence
  Sense Oligo
gacuagagguuaauauucu

SEQ ID NO: 51598 - RNA, 19 nt, Artificial Sequence
  Antisense Oligo
agaauauuaaccucuaguc

SEQ ID NO: 51599 - RNA, 19 nt, Artificial Sequence
  Sense Oligo
agagguuaauauucuuagg

SEQ ID NO: 51600 - RNA, 19 nt, Artificial Sequence
  Antisense Oligo
ccuaagaauauuaaccucu

SEQ ID NO: 51601 - RNA, 19 nt, Artificial Sequence
  Sense Oligo
gagguuaauauucuuagga

SEQ ID NO: 51602 - RNA, 19 nt, Artificial Sequence
  Antisense Oligo
uccuaagaauauuaaccuc

SEQ ID NO: 51603 - RNA, 19 nt, Artificial Sequence
  Sense Oligo
ucucauuaagcauaucaac

SEQ ID NO: 51604 - RNA, 19 nt, Artificial Sequence
  Antisense Oligo
guugauaugcuuaaugaga

SEQ ID NO: 51605 - RNA, 19 nt, Artificial Sequence
  Sense Oligo
aauugcuuagccuuacuau

SEQ ID NO: 51606 - RNA, 19 nt, Artificial Sequence
  Antisense Oligo
auaguaaggcuaagcaauu

SEQ ID NO: 51607 - RNA, 19 nt, Artificial Sequence
  Sense Oligo
auugcuuagccuuacuauu

SEQ ID NO: 51608 - RNA, 19 nt, Artificial Sequence
  Antisense Oligo
aauaguaaggcuaagcaau

SEQ ID NO: 51609 - RNA, 19 nt, Artificial Sequence
  Sense Oligo
uugcuuagccuuacuauua

SEQ ID NO: 51610 - RNA, 19 nt, Artificial Sequence
  Antisense Oligo
uaauaguaaggcuaagcaa

SEQ ID NO: 51611 - RNA, 19 nt, Artificial Sequence
  Sense Oligo
ugcuuagccuuacuauuaa

SEQ ID NO: 51612 - RNA, 19 nt, Artificial Sequence
  Antisense Oligo
uuaauaguaaggcuaagca

SEQ ID NO: 51613 - RNA, 19 nt, Artificial Sequence
  Sense Oligo
gcuuagccuuacuauuaau

SEQ ID NO: 51614 - RNA, 19 nt, Artificial Sequence
  Antisense Oligo
auuaauaguaaggcuaagc

SEQ ID NO: 51615 - RNA, 19 nt, Artificial Sequence
  Sense Oligo
uagccuuacuauuaauagc

SEQ ID NO: 51616 - RNA, 19 nt, Artificial Sequence
  Antisense Oligo
gcuauuaauaguaaggcua

SEQ ID NO: 51617 - RNA, 19 nt, Artificial Sequence
  Sense Oligo
agccuuacuauuaauagca

SEQ ID NO: 51618 - RNA, 19 nt, Artificial Sequence
  Antisense Oligo
ugcuauuaauaguaaggcu

SEQ ID NO: 51619 - RNA, 19 nt, Artificial Sequence
  Sense Oligo
gccuuacuauuaauagcaa

SEQ ID NO: 51620 - RNA, 19 nt, Artificial Sequence
  Antisense Oligo
uugcuauuaauaguaaggc

SEQ ID NO: 51621 - RNA, 19 nt, Artificial Sequence
  Sense Oligo
guuuacguauucauuuugc

SEQ ID NO: 51622 - RNA, 19 nt, Artificial Sequence
  Antisense Oligo
gcaaaaugaauacguaaac

SEQ ID NO: 51623 - RNA, 19 nt, Artificial Sequence
  Sense Oligo
acguauucauuuugcaaag

SEQ ID NO: 51624 - RNA, 19 nt, Artificial Sequence
  Antisense Oligo
cuuugcaaaaugaauacgu

SEQ ID NO: 51625 - RNA, 19 nt, Artificial Sequence
  Sense Oligo
cguauucauuuugcaaagc

SEQ ID NO: 51626 - RNA, 19 nt, Artificial Sequence
  Antisense Oligo
gcuuugcaaaaugaauacg

SEQ ID NO: 51627 - RNA, 19 nt, Artificial Sequence
  Sense Oligo
aaauagccaggccacgcgg

SEQ ID NO: 51628 - RNA, 19 nt, Artificial Sequence
  Antisense Oligo
ccgcguggccuggcuauuu

SEQ ID NO: 51629 - RNA, 19 nt, Artificial Sequence
  Sense Oligo
cggcugacaguguagcgug

SEQ ID NO: 51630 - RNA, 19 nt, Artificial Sequence
  Antisense Oligo
cacgcuacacugucagccg

SEQ ID NO: 51631 - RNA, 19 nt, Artificial Sequence
  Sense Oligo
ggcugacaguguagcgugc

SEQ ID NO: 51632 - RNA, 19 nt, Artificial Sequence
  Antisense Oligo
gcacgcuacacugucagcc

SEQ ID NO: 51633 - RNA, 19 nt, Artificial Sequence
  Sense Oligo
gcugacaguguagcgugca

SEQ ID NO: 51634 - RNA, 19 nt, Artificial Sequence
  Antisense Oligo
ugcacgcuacacugucagc

SEQ ID NO: 51635 - RNA, 19 nt, Artificial Sequence
  Sense Oligo
cugacaguguagcgugcac

SEQ ID NO: 51636 - RNA, 19 nt, Artificial Sequence
  Antisense Oligo
gugcacgcuacacugucag

SEQ ID NO: 51637 - RNA, 19 nt, Artificial Sequence
  Sense Oligo
ugacaguguagcgugcaca

SEQ ID NO: 51638 - RNA, 19 nt, Artificial Sequence
  Antisense Oligo
ugugcacgcuacacuguca

SEQ ID NO: 51639 - RNA, 19 nt, Artificial Sequence
  Sense Oligo
gacaguguagcgugcacag

SEQ ID NO: 51640 - RNA, 19 nt, Artificial Sequence
  Antisense Oligo
cugugcacgcuacacuguc

SEQ ID NO: 51641 - RNA, 19 nt, Artificial Sequence
  Sense Oligo
acaguguagcgugcacagu

SEQ ID NO: 51642 - RNA, 19 nt, Artificial Sequence
  Antisense Oligo
acugugcacgcuacacugu

SEQ ID NO: 51643 - RNA, 19 nt, Artificial Sequence
  Sense Oligo
caguguagcgugcacagug

SEQ ID NO: 51644 - RNA, 19 nt, Artificial Sequence
  Antisense Oligo
cacugugcacgcuacacug

SEQ ID NO: 51645 - RNA, 19 nt, Artificial Sequence
  Sense Oligo
aguguagcgugcacagugg

SEQ ID NO: 51646 - RNA, 19 nt, Artificial Sequence
  Antisense Oligo
ccacugugcacgcuacacu

SEQ ID NO: 51647 - RNA, 19 nt, Artificial Sequence
  Sense Oligo
guguagcgugcacaguggg

SEQ ID NO: 51648 - RNA, 19 nt, Artificial Sequence
  Antisense Oligo
cccacugugcacgcuacac

SEQ ID NO: 51649 - RNA, 19 nt, Artificial Sequence
  Sense Oligo
uguagcgugcacagugggc

SEQ ID NO: 51650 - RNA, 19 nt, Artificial Sequence
  Antisense Oligo
gcccacugugcacgcuaca

SEQ ID NO: 51651 - RNA, 19 nt, Artificial Sequence
  Sense Oligo
acaguugagcaccuuaucc

SEQ ID NO: 51652 - RNA, 19 nt, Artificial Sequence
  Antisense Oligo
ggauaaggugcucaacugu

SEQ ID NO: 51653 - RNA, 19 nt, Artificial Sequence
  Sense Oligo
aacugcugacucuguccug

SEQ ID NO: 51654 - RNA, 19 nt, Artificial Sequence
  Antisense Oligo
caggacagagucagcaguu

SEQ ID NO: 51655 - RNA, 19 nt, Artificial Sequence
  Sense Oligo
acugcugacucuguccuga

SEQ ID NO: 51656 - RNA, 19 nt, Artificial Sequence
  Antisense Oligo
ucaggacagagucagcagu

SEQ ID NO: 51657 - RNA, 19 nt, Artificial Sequence
  Sense Oligo
caaauauuugguucacagg

SEQ ID NO: 51658 - RNA, 19 nt, Artificial Sequence
  Antisense Oligo
ccugugaaccaaauauuug

SEQ ID NO: 51659 - RNA, 19 nt, Artificial Sequence
  Sense Oligo
uuugguucacagggauguc

SEQ ID NO: 51660 - RNA, 19 nt, Artificial Sequence
  Antisense Oligo
gacaucccugugaaccaaa

SEQ ID NO: 51661 - RNA, 19 nt, Artificial Sequence
  Sense Oligo
uugguucacagggaugucc

SEQ ID NO: 51662 - RNA, 19 nt, Artificial Sequence
  Antisense Oligo
ggacaucccugugaaccaa

SEQ ID NO: 51663 - RNA, 19 nt, Artificial Sequence
  Sense Oligo
ugguucacagggauguccu

SEQ ID NO: 51664 - RNA, 19 nt, Artificial Sequence
  Antisense Oligo
aggacaucccugugaacca

SEQ ID NO: 51665 - RNA, 19 nt, Artificial Sequence
  Sense Oligo
gguucacagggauguccuu

SEQ ID NO: 51666 - RNA, 19 nt, Artificial Sequence
  Antisense Oligo
aaggacaucccugugaacc

SEQ ID NO: 51667 - RNA, 19 nt, Artificial Sequence
  Sense Oligo
guucacagggauguccuuu

SEQ ID NO: 51668 - RNA, 19 nt, Artificial Sequence
  Antisense Oligo
aaaggacaucccugugaac

SEQ ID NO: 51669 - RNA, 19 nt, Artificial Sequence
  Sense Oligo
uucacagggauguccuuuu

SEQ ID NO: 51670 - RNA, 19 nt, Artificial Sequence
  Antisense Oligo
aaaaggacaucccugugaa

SEQ ID NO: 51671 - RNA, 19 nt, Artificial Sequence
  Sense Oligo
ucacagggauguccuuuuc

SEQ ID NO: 51672 - RNA, 19 nt, Artificial Sequence
  Antisense Oligo
gaaaaggacaucccuguga

SEQ ID NO: 51673 - RNA, 19 nt, Artificial Sequence
  Sense Oligo
cacagggauguccuuuuca

SEQ ID NO: 51674 - RNA, 19 nt, Artificial Sequence
  Antisense Oligo
ugaaaaggacaucccugug

SEQ ID NO: 51675 - RNA, 19 nt, Artificial Sequence
  Sense Oligo
acagggauguccuuuucag

SEQ ID NO: 51676 - RNA, 19 nt, Artificial Sequence
  Antisense Oligo
cugaaaaggacaucccugu

SEQ ID NO: 51677 - RNA, 19 nt, Artificial Sequence
  Sense Oligo
cagggauguccuuuucagc

SEQ ID NO: 51678 - RNA, 19 nt, Artificial Sequence
  Antisense Oligo
gcugaaaaggacaucccug

SEQ ID NO: 51679 - RNA, 19 nt, Artificial Sequence
  Sense Oligo
agggauguccuuuucagcu

SEQ ID NO: 51680 - RNA, 19 nt, Artificial Sequence
  Antisense Oligo
agcugaaaaggacaucccu

SEQ ID NO: 51681 - RNA, 19 nt, Artificial Sequence
  Sense Oligo
gggauguccuuuucagcuu

SEQ ID NO: 51682 - RNA, 19 nt, Artificial Sequence
  Antisense Oligo
aagcugaaaaggacauccc

SEQ ID NO: 51683 - RNA, 19 nt, Artificial Sequence
  Sense Oligo
guccuuuucagcuuugcuu

SEQ ID NO: 51684 - RNA, 19 nt, Artificial Sequence
  Antisense Oligo
aagcaaagcugaaaaggac

SEQ ID NO: 51685 - RNA, 19 nt, Artificial Sequence
  Sense Oligo
uccuuuucagcuuugcuuc

SEQ ID NO: 51686 - RNA, 19 nt, Artificial Sequence
  Antisense Oligo
gaagcaaagcugaaaagga

SEQ ID NO: 51687 - RNA, 19 nt, Artificial Sequence
  Sense Oligo
ccuuuucagcuuugcuucg

SEQ ID NO: 51688 - RNA, 19 nt, Artificial Sequence
  Antisense Oligo
cgaagcaaagcugaaaagg

SEQ ID NO: 51689 - RNA, 19 nt, Artificial Sequence
  Sense Oligo
cuuuucagcuuugcuucga

SEQ ID NO: 51690 - RNA, 19 nt, Artificial Sequence
  Antisense Oligo
ucgaagcaaagcugaaaag

SEQ ID NO: 51691 - RNA, 19 nt, Artificial Sequence
  Sense Oligo
uuuucagcuuugcuucgaa

SEQ ID NO: 51692 - RNA, 19 nt, Artificial Sequence
  Antisense Oligo
uucgaagcaaagcugaaaa

SEQ ID NO: 51693 - RNA, 19 nt, Artificial Sequence
  Sense Oligo
aaauaguuuaauuguccgg

SEQ ID NO: 51694 - RNA, 19 nt, Artificial Sequence
  Antisense Oligo
ccggacaauuaaacuauuu

SEQ ID NO: 51695 - RNA, 19 nt, Artificial Sequence
  Sense Oligo
aauaguuuaauuguccgga

SEQ ID NO: 51696 - RNA, 19 nt, Artificial Sequence
  Antisense Oligo
uccggacaauuaaacuauu

SEQ ID NO: 51697 - RNA, 19 nt, Artificial Sequence
  Sense Oligo
auaguuuaauuguccggaa

SEQ ID NO: 51698 - RNA, 19 nt, Artificial Sequence
  Antisense Oligo
uuccggacaauuaaacuau

SEQ ID NO: 51699 - RNA, 19 nt, Artificial Sequence
  Sense Oligo
aaauacaggaugggcaaau

SEQ ID NO: 51700 - RNA, 19 nt, Artificial Sequence
  Antisense Oligo
auuugcccauccuguauuu

SEQ ID NO: 51701 - RNA, 19 nt, Artificial Sequence
  Sense Oligo
aauacaggaugggcaaauu

SEQ ID NO: 51702 - RNA, 19 nt, Artificial Sequence
  Antisense Oligo
aauuugcccauccuguauu

SEQ ID NO: 51703 - RNA, 19 nt, Artificial Sequence
  Sense Oligo
auacaggaugggcaaauua

SEQ ID NO: 51704 - RNA, 19 nt, Artificial Sequence
  Antisense Oligo
uaauuugcccauccuguau

SEQ ID NO: 51705 - RNA, 19 nt, Artificial Sequence
  Sense Oligo
uacaggaugggcaaauuaa

SEQ ID NO: 51706 - RNA, 19 nt, Artificial Sequence
  Antisense Oligo
uuaauuugcccauccugua

SEQ ID NO: 51707 - RNA, 19 nt, Artificial Sequence
  Sense Oligo
aggaugggcaaauuaaagu

SEQ ID NO: 51708 - RNA, 19 nt, Artificial Sequence
  Antisense Oligo
acuuuaauuugcccauccu

SEQ ID NO: 51709 - RNA, 19 nt, Artificial Sequence
  Sense Oligo
gaugggcaaauuaaaguau

SEQ ID NO: 51710 - RNA, 19 nt, Artificial Sequence
  Antisense Oligo
auacuuuaauuugcccauc

SEQ ID NO: 51711 - RNA, 19 nt, Artificial Sequence
  Sense Oligo
augggcaaauuaaaguaug

SEQ ID NO: 51712 - RNA, 19 nt, Artificial Sequence
  Antisense Oligo
cauacuuuaauuugcccau

SEQ ID NO: 51713 - RNA, 19 nt, Artificial Sequence
  Sense Oligo
ugggcaaauuaaaguaugg

SEQ ID NO: 51714 - RNA, 19 nt, Artificial Sequence
  Antisense Oligo
ccauacuuuaauuugccca

SEQ ID NO: 51715 - RNA, 19 nt, Artificial Sequence
  Sense Oligo
gggcaaauuaaaguauggc

SEQ ID NO: 51716 - RNA, 19 nt, Artificial Sequence
  Antisense Oligo
gccauacuuuaauuugccc

SEQ ID NO: 51717 - RNA, 19 nt, Artificial Sequence
  Sense Oligo
ggcaaauuaaaguauggcc

SEQ ID NO: 51718 - RNA, 19 nt, Artificial Sequence
  Antisense Oligo
ggccauacuuuaauuugcc

SEQ ID NO: 51719 - RNA, 19 nt, Artificial Sequence
  Sense Oligo
gcaaauuaaaguauggccg

SEQ ID NO: 51720 - RNA, 19 nt, Artificial Sequence
  Antisense Oligo
cggccauacuuuaauuugc

SEQ ID NO: 51721 - RNA, 19 nt, Artificial Sequence
  Sense Oligo
caaauuaaaguauggccgu

SEQ ID NO: 51722 - RNA, 19 nt, Artificial Sequence
  Antisense Oligo
acggccauacuuuaauuug

SEQ ID NO: 51723 - RNA, 19 nt, Artificial Sequence
  Sense Oligo
aaauuaaaguauggccgua

SEQ ID NO: 51724 - RNA, 19 nt, Artificial Sequence
  Antisense Oligo
uacggccauacuuuaauuu

SEQ ID NO: 51725 - RNA, 19 nt, Artificial Sequence
  Sense Oligo
aauuaaaguauggccguau

SEQ ID NO: 51726 - RNA, 19 nt, Artificial Sequence
  Antisense Oligo
auacggccauacuuuaauu

SEQ ID NO: 51727 - RNA, 19 nt, Artificial Sequence
  Sense Oligo
auuaaaguauggccguaug

SEQ ID NO: 51728 - RNA, 19 nt, Artificial Sequence
  Antisense Oligo
cauacggccauacuuuaau

SEQ ID NO: 51729 - RNA, 19 nt, Artificial Sequence
  Sense Oligo
uuaaaguauggccguauga

SEQ ID NO: 51730 - RNA, 19 nt, Artificial Sequence
  Antisense Oligo
ucauacggccauacuuuaa

SEQ ID NO: 51731 - RNA, 19 nt, Artificial Sequence
  Sense Oligo
aguauggccguaugauggg

SEQ ID NO: 51732 - RNA, 19 nt, Artificial Sequence
  Antisense Oligo
cccaucauacggccauacu

SEQ ID NO: 51733 - RNA, 19 nt, Artificial Sequence
  Sense Oligo
guauggccguaugaugggu

SEQ ID NO: 51734 - RNA, 19 nt, Artificial Sequence
  Antisense Oligo
acccaucauacggccauac

SEQ ID NO: 51735 - RNA, 19 nt, Artificial Sequence
  Sense Oligo
auggccguaugauggguua

SEQ ID NO: 51736 - RNA, 19 nt, Artificial Sequence
  Antisense Oligo
uaacccaucauacggccau

SEQ ID NO: 51737 - RNA, 19 nt, Artificial Sequence
  Sense Oligo
uggccguaugauggguuau

SEQ ID NO: 51738 - RNA, 19 nt, Artificial Sequence
  Antisense Oligo
auaacccaucauacggcca

SEQ ID NO: 51739 - RNA, 19 nt, Artificial Sequence
  Sense Oligo
ggccguaugauggguuauu

SEQ ID NO: 51740 - RNA, 19 nt, Artificial Sequence
  Antisense Oligo
aauaacccaucauacggcc

SEQ ID NO: 51741 - RNA, 19 nt, Artificial Sequence
  Sense Oligo
gccguaugauggguuauug

SEQ ID NO: 51742 - RNA, 19 nt, Artificial Sequence
  Antisense Oligo
caauaacccaucauacggc

SEQ ID NO: 51743 - RNA, 19 nt, Artificial Sequence
  Sense Oligo
ccguaugauggguuauuga

SEQ ID NO: 51744 - RNA, 19 nt, Artificial Sequence
  Antisense Oligo
ucaauaacccaucauacgg

SEQ ID NO: 51745 - RNA, 19 nt, Artificial Sequence
  Sense Oligo
guaugauggguuauugagc

SEQ ID NO: 51746 - RNA, 19 nt, Artificial Sequence
  Antisense Oligo
gcucaauaacccaucauac

SEQ ID NO: 51747 - RNA, 19 nt, Artificial Sequence
  Sense Oligo
uaugauggguuauugagca

SEQ ID NO: 51748 - RNA, 19 nt, Artificial Sequence
  Antisense Oligo
ugcucaauaacccaucaua

SEQ ID NO: 51749 - RNA, 19 nt, Artificial Sequence
  Sense Oligo
augauggguuauugagcag

SEQ ID NO: 51750 - RNA, 19 nt, Artificial Sequence
  Antisense Oligo
cugcucaauaacccaucau

SEQ ID NO: 51751 - RNA, 19 nt, Artificial Sequence
  Sense Oligo
ugauggguuauugagcagc

SEQ ID NO: 51752 - RNA, 19 nt, Artificial Sequence
  Antisense Oligo
gcugcucaauaacccauca

SEQ ID NO: 51753 - RNA, 19 nt, Artificial Sequence
  Sense Oligo
guuauugagcagccauuaa

SEQ ID NO: 51754 - RNA, 19 nt, Artificial Sequence
  Antisense Oligo
uuaauggcugcucaauaac

SEQ ID NO: 51755 - RNA, 19 nt, Artificial Sequence
  Sense Oligo
uuauugagcagccauuaaa

SEQ ID NO: 51756 - RNA, 19 nt, Artificial Sequence
  Antisense Oligo
uuuaauggcugcucaauaa

SEQ ID NO: 51757 - RNA, 19 nt, Artificial Sequence
  Sense Oligo
uuucaaguauacucaguca

SEQ ID NO: 51758 - RNA, 19 nt, Artificial Sequence
  Antisense Oligo
ugacugaguauacuugaaa

SEQ ID NO: 51759 - RNA, 19 nt, Artificial Sequence
  Sense Oligo
uucaaguauacucagucau

SEQ ID NO: 51760 - RNA, 19 nt, Artificial Sequence
  Antisense Oligo
augacugaguauacuugaa

SEQ ID NO: 51761 - RNA, 19 nt, Artificial Sequence
  Sense Oligo
ucaaguauacucagucaua

SEQ ID NO: 51762 - RNA, 19 nt, Artificial Sequence
  Antisense Oligo
uaugacugaguauacuuga

SEQ ID NO: 51763 - RNA, 19 nt, Artificial Sequence
  Sense Oligo
caaguauacucagucauag

SEQ ID NO: 51764 - RNA, 19 nt, Artificial Sequence
  Antisense Oligo
cuaugacugaguauacuug

SEQ ID NO: 51765 - RNA, 19 nt, Artificial Sequence
  Sense Oligo
aaguauacucagucauagg

SEQ ID NO: 51766 - RNA, 19 nt, Artificial Sequence
  Antisense Oligo
ccuaugacugaguauacuu

SEQ ID NO: 51767 - RNA, 19 nt, Artificial Sequence
  Sense Oligo
aguauacucagucauaggg

SEQ ID NO: 51768 - RNA, 19 nt, Artificial Sequence
  Antisense Oligo
cccuaugacugaguauacu

SEQ ID NO: 51769 - RNA, 19 nt, Artificial Sequence
  Sense Oligo
uauacucagucauagggaa

SEQ ID NO: 51770 - RNA, 19 nt, Artificial Sequence
  Antisense Oligo
uucccuaugacugaguaua

SEQ ID NO: 51771 - RNA, 19 nt, Artificial Sequence
  Sense Oligo
augaugucauguucagugg

SEQ ID NO: 51772 - RNA, 19 nt, Artificial Sequence
  Antisense Oligo
ccacugaacaugacaucau

SEQ ID NO: 51773 - RNA, 19 nt, Artificial Sequence
  Sense Oligo
ugucauguucaguggcaaa

SEQ ID NO: 51774 - RNA, 19 nt, Artificial Sequence
  Antisense Oligo
uuugccacugaacaugaca

SEQ ID NO: 51775 - RNA, 19 nt, Artificial Sequence
  Sense Oligo
aagcccagacgacacggug

SEQ ID NO: 51776 - RNA, 19 nt, Artificial Sequence
  Antisense Oligo
caccgugucgucugggcuu

SEQ ID NO: 51777 - RNA, 19 nt, Artificial Sequence
  Sense Oligo
agcccagacgacacgguga

SEQ ID NO: 51778 - RNA, 19 nt, Artificial Sequence
  Antisense Oligo
ucaccgugucgucugggcu

SEQ ID NO: 51779 - RNA, 19 nt, Artificial Sequence
  Sense Oligo
gacgacacggugaccuuaa

SEQ ID NO: 51780 - RNA, 19 nt, Artificial Sequence
  Antisense Oligo
uuaaggucaccgugucguc

SEQ ID NO: 51781 - RNA, 19 nt, Artificial Sequence
  Sense Oligo
acgacacggugaccuuaac

SEQ ID NO: 51782 - RNA, 19 nt, Artificial Sequence
  Antisense Oligo
guuaaggucaccgugucgu

SEQ ID NO: 51783 - RNA, 19 nt, Artificial Sequence
  Sense Oligo
cgacacggugaccuuaacg

SEQ ID NO: 51784 - RNA, 19 nt, Artificial Sequence
  Antisense Oligo
cguuaaggucaccgugucg

SEQ ID NO: 51785 - RNA, 19 nt, Artificial Sequence
  Sense Oligo
gacacggugaccuuaacgu

SEQ ID NO: 51786 - RNA, 19 nt, Artificial Sequence
  Antisense Oligo
acguuaaggucaccguguc

SEQ ID NO: 51787 - RNA, 19 nt, Artificial Sequence
  Sense Oligo
acggugaccuuaacguggg

SEQ ID NO: 51788 - RNA, 19 nt, Artificial Sequence
  Antisense Oligo
cccacguuaaggucaccgu

SEQ ID NO: 51789 - RNA, 19 nt, Artificial Sequence
  Sense Oligo
gaccuuaacgugggaggag

SEQ ID NO: 51790 - RNA, 19 nt, Artificial Sequence
  Antisense Oligo
cuccucccacguuaagguc

SEQ ID NO: 51791 - RNA, 19 nt, Artificial Sequence
  Sense Oligo
ugguuucuaauuuccucuu

SEQ ID NO: 51792 - RNA, 19 nt, Artificial Sequence
  Antisense Oligo
aagaggaaauuagaaacca

SEQ ID NO: 51793 - RNA, 19 nt, Artificial Sequence
  Sense Oligo
gguuucuaauuuccucuuu

SEQ ID NO: 51794 - RNA, 19 nt, Artificial Sequence
  Antisense Oligo
aaagaggaaauuagaaacc

SEQ ID NO: 51795 - RNA, 19 nt, Artificial Sequence
  Sense Oligo
cuaauuuccucuuuuaugg

SEQ ID NO: 51796 - RNA, 19 nt, Artificial Sequence
  Antisense Oligo
ccauaaaagaggaaauuag

SEQ ID NO: 51797 - RNA, 19 nt, Artificial Sequence
  Sense Oligo
uuccucuuuuaugguuuuc

SEQ ID NO: 51798 - RNA, 19 nt, Artificial Sequence
  Antisense Oligo
gaaaaccauaaaagaggaa

SEQ ID NO: 51799 - RNA, 19 nt, Artificial Sequence
  Sense Oligo
uccucuuuuaugguuuucc

SEQ ID NO: 51800 - RNA, 19 nt, Artificial Sequence
  Antisense Oligo
ggaaaaccauaaaagagga

SEQ ID NO: 51801 - RNA, 19 nt, Artificial Sequence
  Sense Oligo
ccucuuuuaugguuuucca

SEQ ID NO: 51802 - RNA, 19 nt, Artificial Sequence
  Antisense Oligo
uggaaaaccauaaaagagg

SEQ ID NO: 51803 - RNA, 19 nt, Artificial Sequence
  Sense Oligo
cucuuuuaugguuuuccaa

SEQ ID NO: 51804 - RNA, 19 nt, Artificial Sequence
  Antisense Oligo
uuggaaaaccauaaaagag

SEQ ID NO: 51805 - RNA, 19 nt, Artificial Sequence
  Sense Oligo
uaugguuuuccaauaguuc

SEQ ID NO: 51806 - RNA, 19 nt, Artificial Sequence
  Antisense Oligo
gaacuauuggaaaaccaua

SEQ ID NO: 51807 - RNA, 19 nt, Artificial Sequence
  Sense Oligo
uuuugaaucccaguuucug

SEQ ID NO: 51808 - RNA, 19 nt, Artificial Sequence
  Antisense Oligo
cagaaacugggauucaaaa

SEQ ID NO: 51809 - RNA, 19 nt, Artificial Sequence
  Sense Oligo
uuugaaucccaguuucugc

SEQ ID NO: 51810 - RNA, 19 nt, Artificial Sequence
  Antisense Oligo
gcagaaacugggauucaaa

SEQ ID NO: 51811 - RNA, 19 nt, Artificial Sequence
  Sense Oligo
aucccaguuucugcagaug

SEQ ID NO: 51812 - RNA, 19 nt, Artificial Sequence
  Antisense Oligo
caucugcagaaacugggau

SEQ ID NO: 51813 - RNA, 19 nt, Artificial Sequence
  Sense Oligo
ucccaguuucugcagaugg

SEQ ID NO: 51814 - RNA, 19 nt, Artificial Sequence
  Antisense Oligo
ccaucugcagaaacuggga

SEQ ID NO: 51815 - RNA, 19 nt, Artificial Sequence
  Sense Oligo
cccaguuucugcagauggc

SEQ ID NO: 51816 - RNA, 19 nt, Artificial Sequence
  Antisense Oligo
gccaucugcagaaacuggg

SEQ ID NO: 51817 - RNA, 19 nt, Artificial Sequence
  Sense Oligo
ccaguuucugcagauggcu

SEQ ID NO: 51818 - RNA, 19 nt, Artificial Sequence
  Antisense Oligo
agccaucugcagaaacugg

SEQ ID NO: 51819 - RNA, 19 nt, Artificial Sequence
  Sense Oligo
caguuucugcagauggcuc

SEQ ID NO: 51820 - RNA, 19 nt, Artificial Sequence
  Antisense Oligo
gagccaucugcagaaacug

SEQ ID NO: 51821 - RNA, 19 nt, Artificial Sequence
  Sense Oligo
aguuucugcagauggcucu

SEQ ID NO: 51822 - RNA, 19 nt, Artificial Sequence
  Antisense Oligo
agagccaucugcagaaacu

SEQ ID NO: 51823 - RNA, 19 nt, Artificial Sequence
  Sense Oligo
auggcucugugguccugca

SEQ ID NO: 51824 - RNA, 19 nt, Artificial Sequence
  Antisense Oligo
ugcaggaccacagagccau

SEQ ID NO: 51825 - RNA, 19 nt, Artificial Sequence
  Sense Oligo
ucugugguccugcacuagg

SEQ ID NO: 51826 - RNA, 19 nt, Artificial Sequence
  Antisense Oligo
ccuagugcaggaccacaga

SEQ ID NO: 51827 - RNA, 19 nt, Artificial Sequence
  Sense Oligo
gaagagguuuccuuaccgu

SEQ ID NO: 51828 - RNA, 19 nt, Artificial Sequence
  Antisense Oligo
acgguaaggaaaccucuuc

SEQ ID NO: 51829 - RNA, 19 nt, Artificial Sequence
  Sense Oligo
aagagguuuccuuaccgug

SEQ ID NO: 51830 - RNA, 19 nt, Artificial Sequence
  Antisense Oligo
cacgguaaggaaaccucuu

SEQ ID NO: 51831 - RNA, 19 nt, Artificial Sequence
  Sense Oligo
agagguuuccuuaccgugg

SEQ ID NO: 51832 - RNA, 19 nt, Artificial Sequence
  Antisense Oligo
ccacgguaaggaaaccucu

SEQ ID NO: 51833 - RNA, 19 nt, Artificial Sequence
  Sense Oligo
gagguuuccuuaccguggg

SEQ ID NO: 51834 - RNA, 19 nt, Artificial Sequence
  Antisense Oligo
cccacgguaaggaaaccuc

SEQ ID NO: 51835 - RNA, 19 nt, Artificial Sequence
  Sense Oligo
agguuuccuuaccgugggu

SEQ ID NO: 51836 - RNA, 19 nt, Artificial Sequence
  Antisense Oligo
acccacgguaaggaaaccu

SEQ ID NO: 51837 - RNA, 19 nt, Artificial Sequence
  Sense Oligo
gguuuccuuaccgugggug

SEQ ID NO: 51838 - RNA, 19 nt, Artificial Sequence
  Antisense Oligo
cacccacgguaaggaaacc

SEQ ID NO: 51839 - RNA, 19 nt, Artificial Sequence
  Sense Oligo
guuuccuuaccgugggugc

SEQ ID NO: 51840 - RNA, 19 nt, Artificial Sequence
  Antisense Oligo
gcacccacgguaaggaaac

SEQ ID NO: 51841 - RNA, 19 nt, Artificial Sequence
  Sense Oligo
uuuccuuaccgugggugca

SEQ ID NO: 51842 - RNA, 19 nt, Artificial Sequence
  Antisense Oligo
ugcacccacgguaaggaaa

SEQ ID NO: 51843 - RNA, 19 nt, Artificial Sequence
  Sense Oligo
uuccuuaccgugggugcac

SEQ ID NO: 51844 - RNA, 19 nt, Artificial Sequence
  Antisense Oligo
gugcacccacgguaaggaa

SEQ ID NO: 51845 - RNA, 19 nt, Artificial Sequence
  Sense Oligo
uccuuaccgugggugcacc

SEQ ID NO: 51846 - RNA, 19 nt, Artificial Sequence
  Antisense Oligo
ggugcacccacgguaagga

SEQ ID NO: 51847 - RNA, 19 nt, Artificial Sequence
  Sense Oligo
ccuuaccgugggugcaccu

SEQ ID NO: 51848 - RNA, 19 nt, Artificial Sequence
  Antisense Oligo
aggugcacccacgguaagg

SEQ ID NO: 51849 - RNA, 19 nt, Artificial Sequence
  Sense Oligo
gugggugcaccuugccuac

SEQ ID NO: 51850 - RNA, 19 nt, Artificial Sequence
  Antisense Oligo
guaggcaaggugcacccac

SEQ ID NO: 51851 - RNA, 19 nt, Artificial Sequence
  Sense Oligo
ugggugcaccuugccuacc

SEQ ID NO: 51852 - RNA, 19 nt, Artificial Sequence
  Antisense Oligo
gguaggcaaggugcaccca

SEQ ID NO: 51853 - RNA, 19 nt, Artificial Sequence
  Sense Oligo
gggugcaccuugccuacca

SEQ ID NO: 51854 - RNA, 19 nt, Artificial Sequence
  Antisense Oligo
ugguaggcaaggugcaccc

SEQ ID NO: 51855 - RNA, 19 nt, Artificial Sequence
  Sense Oligo
ggugcaccuugccuaccag

SEQ ID NO: 51856 - RNA, 19 nt, Artificial Sequence
  Antisense Oligo
cugguaggcaaggugcacc

SEQ ID NO: 51857 - RNA, 19 nt, Artificial Sequence
  Sense Oligo
caccuugccuaccagcguu

SEQ ID NO: 51858 - RNA, 19 nt, Artificial Sequence
  Antisense Oligo
aacgcugguaggcaaggug

SEQ ID NO: 51859 - RNA, 19 nt, Artificial Sequence
  Sense Oligo
accuugccuaccagcguuu

SEQ ID NO: 51860 - RNA, 19 nt, Artificial Sequence
  Antisense Oligo
aaacgcugguaggcaaggu

SEQ ID NO: 51861 - RNA, 19 nt, Artificial Sequence
  Sense Oligo
ccuugccuaccagcguuuc

SEQ ID NO: 51862 - RNA, 19 nt, Artificial Sequence
  Antisense Oligo
gaaacgcugguaggcaagg

SEQ ID NO: 51863 - RNA, 19 nt, Artificial Sequence
  Sense Oligo
cuugccuaccagcguuuca

SEQ ID NO: 51864 - RNA, 19 nt, Artificial Sequence
  Antisense Oligo
ugaaacgcugguaggcaag

SEQ ID NO: 51865 - RNA, 19 nt, Artificial Sequence
  Sense Oligo
uugccuaccagcguuucag

SEQ ID NO: 51866 - RNA, 19 nt, Artificial Sequence
  Antisense Oligo
cugaaacgcugguaggcaa

SEQ ID NO: 51867 - RNA, 19 nt, Artificial Sequence
  Sense Oligo
ugccuaccagcguuucaga

SEQ ID NO: 51868 - RNA, 19 nt, Artificial Sequence
  Antisense Oligo
ucugaaacgcugguaggca

SEQ ID NO: 51869 - RNA, 19 nt, Artificial Sequence
  Sense Oligo
gccuaccagcguuucagaa

SEQ ID NO: 51870 - RNA, 19 nt, Artificial Sequence
  Antisense Oligo
uucugaaacgcugguaggc

SEQ ID NO: 51871 - RNA, 19 nt, Artificial Sequence
  Sense Oligo
ccuaccagcguuucagaag

SEQ ID NO: 51872 - RNA, 19 nt, Artificial Sequence
  Antisense Oligo
cuucugaaacgcugguagg

SEQ ID NO: 51873 - RNA, 19 nt, Artificial Sequence
  Sense Oligo
ccagcguuucagaagccgu

SEQ ID NO: 51874 - RNA, 19 nt, Artificial Sequence
  Antisense Oligo
acggcuucugaaacgcugg

SEQ ID NO: 51875 - RNA, 19 nt, Artificial Sequence
  Sense Oligo
cagcguuucagaagccguc

SEQ ID NO: 51876 - RNA, 19 nt, Artificial Sequence
  Antisense Oligo
gacggcuucugaaacgcug

SEQ ID NO: 51877 - RNA, 19 nt, Artificial Sequence
  Sense Oligo
aacuuuuccagaauccuga

SEQ ID NO: 51878 - RNA, 19 nt, Artificial Sequence
  Antisense Oligo
ucaggauucuggaaaaguu

SEQ ID NO: 51879 - RNA, 19 nt, Artificial Sequence
  Sense Oligo
acuuuuccagaauccugac

SEQ ID NO: 51880 - RNA, 19 nt, Artificial Sequence
  Antisense Oligo
gucaggauucuggaaaagu

SEQ ID NO: 51881 - RNA, 19 nt, Artificial Sequence
  Sense Oligo
uuccagaauccugaccauc

SEQ ID NO: 51882 - RNA, 19 nt, Artificial Sequence
  Antisense Oligo
gauggucaggauucuggaa

SEQ ID NO: 51883 - RNA, 19 nt, Artificial Sequence
  Sense Oligo
uccagaauccugaccaucu

SEQ ID NO: 51884 - RNA, 19 nt, Artificial Sequence
  Antisense Oligo
agauggucaggauucugga

SEQ ID NO: 51885 - RNA, 19 nt, Artificial Sequence
  Sense Oligo
ccagaauccugaccaucua

SEQ ID NO: 51886 - RNA, 19 nt, Artificial Sequence
  Antisense Oligo
uagauggucaggauucugg

SEQ ID NO: 51887 - RNA, 19 nt, Artificial Sequence
  Sense Oligo
auccugaccaucuacccuc

SEQ ID NO: 51888 - RNA, 19 nt, Artificial Sequence
  Antisense Oligo
gaggguagauggucaggau

SEQ ID NO: 51889 - RNA, 19 nt, Artificial Sequence
  Sense Oligo
uccugaccaucuacccuca

SEQ ID NO: 51890 - RNA, 19 nt, Artificial Sequence
  Antisense Oligo
ugaggguagauggucagga

SEQ ID NO: 51891 - RNA, 19 nt, Artificial Sequence
  Sense Oligo
ccacagccugauggaagcc

SEQ ID NO: 51892 - RNA, 19 nt, Artificial Sequence
  Antisense Oligo
ggcuuccaucaggcugugg

SEQ ID NO: 51893 - RNA, 19 nt, Artificial Sequence
  Sense Oligo
agccugauggaagcccguu

SEQ ID NO: 51894 - RNA, 19 nt, Artificial Sequence
  Antisense Oligo
aacgggcuuccaucaggcu

SEQ ID NO: 51895 - RNA, 19 nt, Artificial Sequence
  Sense Oligo
gccugauggaagcccguug

SEQ ID NO: 51896 - RNA, 19 nt, Artificial Sequence
  Antisense Oligo
caacgggcuuccaucaggc

SEQ ID NO: 51897 - RNA, 19 nt, Artificial Sequence
  Sense Oligo
ccugauggaagcccguugg

SEQ ID NO: 51898 - RNA, 19 nt, Artificial Sequence
  Antisense Oligo
ccaacgggcuuccaucagg

SEQ ID NO: 51899 - RNA, 19 nt, Artificial Sequence
  Sense Oligo
cugauggaagcccguugga

SEQ ID NO: 51900 - RNA, 19 nt, Artificial Sequence
  Antisense Oligo
uccaacgggcuuccaucag

SEQ ID NO: 51901 - RNA, 19 nt, Artificial Sequence
  Sense Oligo
ugauggaagcccguuggaa

SEQ ID NO: 51902 - RNA, 19 nt, Artificial Sequence
  Antisense Oligo
uuccaacgggcuuccauca

SEQ ID NO: 51903 - RNA, 19 nt, Artificial Sequence
  Sense Oligo
caugagcuggcuggaugug

SEQ ID NO: 51904 - RNA, 19 nt, Artificial Sequence
  Antisense Oligo
cacauccagccagcucaug

SEQ ID NO: 51905 - RNA, 19 nt, Artificial Sequence
  Sense Oligo
ccugcccugagcaagccuu

SEQ ID NO: 51906 - RNA, 19 nt, Artificial Sequence
  Antisense Oligo
aaggcuugcucagggcagg

SEQ ID NO: 51907 - RNA, 19 nt, Artificial Sequence
  Sense Oligo
cugcccugagcaagccuug

SEQ ID NO: 51908 - RNA, 19 nt, Artificial Sequence
  Antisense Oligo
caaggcuugcucagggcag

SEQ ID NO: 51909 - RNA, 19 nt, Artificial Sequence
  Sense Oligo
ugcccugagcaagccuugu

SEQ ID NO: 51910 - RNA, 19 nt, Artificial Sequence
  Antisense Oligo
acaaggcuugcucagggca

SEQ ID NO: 51911 - RNA, 19 nt, Artificial Sequence
  Sense Oligo
gcccugagcaagccuugug

SEQ ID NO: 51912 - RNA, 19 nt, Artificial Sequence
  Antisense Oligo
cacaaggcuugcucagggc

SEQ ID NO: 51913 - RNA, 19 nt, Artificial Sequence
  Sense Oligo
cccugagcaagccuugugg

SEQ ID NO: 51914 - RNA, 19 nt, Artificial Sequence
  Antisense Oligo
ccacaaggcuugcucaggg

SEQ ID NO: 51915 - RNA, 19 nt, Artificial Sequence
  Sense Oligo
agccuuguggugcuuccaa

SEQ ID NO: 51916 - RNA, 19 nt, Artificial Sequence
  Antisense Oligo
uuggaagcaccacaaggcu

SEQ ID NO: 51917 - RNA, 19 nt, Artificial Sequence
  Sense Oligo
gccuuguggugcuuccaac

SEQ ID NO: 51918 - RNA, 19 nt, Artificial Sequence
  Antisense Oligo
guuggaagcaccacaaggc

SEQ ID NO: 51919 - RNA, 19 nt, Artificial Sequence
  Sense Oligo
ccuuguggugcuuccaacu

SEQ ID NO: 51920 - RNA, 19 nt, Artificial Sequence
  Antisense Oligo
aguuggaagcaccacaagg

SEQ ID NO: 51921 - RNA, 19 nt, Artificial Sequence
  Sense Oligo
ggugcuuccaacuccacuc

SEQ ID NO: 51922 - RNA, 19 nt, Artificial Sequence
  Antisense Oligo
gaguggaguuggaagcacc

SEQ ID NO: 51923 - RNA, 19 nt, Artificial Sequence
  Sense Oligo
gugcuuccaacuccacucu

SEQ ID NO: 51924 - RNA, 19 nt, Artificial Sequence
  Antisense Oligo
agaguggaguuggaagcac

SEQ ID NO: 51925 - RNA, 19 nt, Artificial Sequence
  Sense Oligo
uuccaacuccacucuggga

SEQ ID NO: 51926 - RNA, 19 nt, Artificial Sequence
  Antisense Oligo
ucccagaguggaguuggaa

SEQ ID NO: 51927 - RNA, 19 nt, Artificial Sequence
  Sense Oligo
uccaacuccacucugggaa

SEQ ID NO: 51928 - RNA, 19 nt, Artificial Sequence
  Antisense Oligo
uucccagaguggaguugga

SEQ ID NO: 51929 - RNA, 19 nt, Artificial Sequence
  Sense Oligo
gggcuguguuccaaguggg

SEQ ID NO: 51930 - RNA, 19 nt, Artificial Sequence
  Antisense Oligo
cccacuuggaacacagccc

SEQ ID NO: 51931 - RNA, 19 nt, Artificial Sequence
  Sense Oligo
uaccuuagcugaauucaga

SEQ ID NO: 51932 - RNA, 19 nt, Artificial Sequence
  Antisense Oligo
ucugaauucagcuaaggua

SEQ ID NO: 51933 - RNA, 19 nt, Artificial Sequence
  Sense Oligo
cacaucucgcugacgcuuc

SEQ ID NO: 51934 - RNA, 19 nt, Artificial Sequence
  Antisense Oligo
gaagcgucagcgagaugug

SEQ ID NO: 51935 - RNA, 19 nt, Artificial Sequence
  Sense Oligo
acaucucgcugacgcuucu

SEQ ID NO: 51936 - RNA, 19 nt, Artificial Sequence
  Antisense Oligo
agaagcgucagcgagaugu

SEQ ID NO: 51937 - RNA, 19 nt, Artificial Sequence
  Sense Oligo
caucucgcugacgcuucuc

SEQ ID NO: 51938 - RNA, 19 nt, Artificial Sequence
  Antisense Oligo
gagaagcgucagcgagaug

SEQ ID NO: 51939 - RNA, 19 nt, Artificial Sequence
  Sense Oligo
aucucgcugacgcuucuca

SEQ ID NO: 51940 - RNA, 19 nt, Artificial Sequence
  Antisense Oligo
ugagaagcgucagcgagau

SEQ ID NO: 51941 - RNA, 19 nt, Artificial Sequence
  Sense Oligo
ucucgcugacgcuucucac

SEQ ID NO: 51942 - RNA, 19 nt, Artificial Sequence
  Antisense Oligo
gugagaagcgucagcgaga

SEQ ID NO: 51943 - RNA, 19 nt, Artificial Sequence
  Sense Oligo
cucgcugacgcuucucaca

SEQ ID NO: 51944 - RNA, 19 nt, Artificial Sequence
  Antisense Oligo
ugugagaagcgucagcgag

SEQ ID NO: 51945 - RNA, 19 nt, Artificial Sequence
  Sense Oligo
ucgcugacgcuucucacau

SEQ ID NO: 51946 - RNA, 19 nt, Artificial Sequence
  Antisense Oligo
augugagaagcgucagcga

SEQ ID NO: 51947 - RNA, 19 nt, Artificial Sequence
  Sense Oligo
cgcugacgcuucucacauc

SEQ ID NO: 51948 - RNA, 19 nt, Artificial Sequence
  Antisense Oligo
gaugugagaagcgucagcg

SEQ ID NO: 51949 - RNA, 19 nt, Artificial Sequence
  Sense Oligo
gcugacgcuucucacaucc

SEQ ID NO: 51950 - RNA, 19 nt, Artificial Sequence
  Antisense Oligo
ggaugugagaagcgucagc

SEQ ID NO: 51951 - RNA, 19 nt, Artificial Sequence
  Sense Oligo
cugacgcuucucacauccu

SEQ ID NO: 51952 - RNA, 19 nt, Artificial Sequence
  Antisense Oligo
aggaugugagaagcgucag

SEQ ID NO: 51953 - RNA, 19 nt, Artificial Sequence
  Sense Oligo
ugacgcuucucacauccua

SEQ ID NO: 51954 - RNA, 19 nt, Artificial Sequence
  Antisense Oligo
uaggaugugagaagcguca

SEQ ID NO: 51955 - RNA, 19 nt, Artificial Sequence
  Sense Oligo
gacgcuucucacauccuag

SEQ ID NO: 51956 - RNA, 19 nt, Artificial Sequence
  Antisense Oligo
cuaggaugugagaagcguc

SEQ ID NO: 51957 - RNA, 19 nt, Artificial Sequence
  Sense Oligo
acgcuucucacauccuaga

SEQ ID NO: 51958 - RNA, 19 nt, Artificial Sequence
  Antisense Oligo
ucuaggaugugagaagcgu

SEQ ID NO: 51959 - RNA, 19 nt, Artificial Sequence
  Sense Oligo
cgcuucucacauccuagac

SEQ ID NO: 51960 - RNA, 19 nt, Artificial Sequence
  Antisense Oligo
gucuaggaugugagaagcg

SEQ ID NO: 51961 - RNA, 19 nt, Artificial Sequence
  Sense Oligo
aaaguuuaggucgcaagcc

SEQ ID NO: 51962 - RNA, 19 nt, Artificial Sequence
  Antisense Oligo
ggcuugcgaccuaaacuuu

SEQ ID NO: 51963 - RNA, 19 nt, Artificial Sequence
  Sense Oligo
aaguuuaggucgcaagccu

SEQ ID NO: 51964 - RNA, 19 nt, Artificial Sequence
  Antisense Oligo
aggcuugcgaccuaaacuu

SEQ ID NO: 51965 - RNA, 19 nt, Artificial Sequence
  Sense Oligo
uuaggucgcaagccuggga

SEQ ID NO: 51966 - RNA, 19 nt, Artificial Sequence
  Antisense Oligo
ucccaggcuugcgaccuaa

SEQ ID NO: 51967 - RNA, 19 nt, Artificial Sequence
  Sense Oligo
uaggucgcaagccugggac

SEQ ID NO: 51968 - RNA, 19 nt, Artificial Sequence
  Antisense Oligo
gucccaggcuugcgaccua

SEQ ID NO: 51969 - RNA, 19 nt, Artificial Sequence
  Sense Oligo
aggucgcaagccugggaca

SEQ ID NO: 51970 - RNA, 19 nt, Artificial Sequence
  Antisense Oligo
ugucccaggcuugcgaccu

SEQ ID NO: 51971 - RNA, 19 nt, Artificial Sequence
  Sense Oligo
aaguauacaugcagcuaac

SEQ ID NO: 51972 - RNA, 19 nt, Artificial Sequence
  Antisense Oligo
guuagcugcauguauacuu

SEQ ID NO: 51973 - RNA, 19 nt, Artificial Sequence
  Sense Oligo
cagacccuggacgcauuug

SEQ ID NO: 51974 - RNA, 19 nt, Artificial Sequence
  Antisense Oligo
caaaugcguccagggucug

SEQ ID NO: 51975 - RNA, 19 nt, Artificial Sequence
  Sense Oligo
agacccuggacgcauuugc

SEQ ID NO: 51976 - RNA, 19 nt, Artificial Sequence
  Antisense Oligo
gcaaaugcguccagggucu

SEQ ID NO: 51977 - RNA, 19 nt, Artificial Sequence
  Sense Oligo
gacccuggacgcauuugcc

SEQ ID NO: 51978 - RNA, 19 nt, Artificial Sequence
  Antisense Oligo
ggcaaaugcguccaggguc

SEQ ID NO: 51979 - RNA, 19 nt, Artificial Sequence
  Sense Oligo
acccuggacgcauuugccg

SEQ ID NO: 51980 - RNA, 19 nt, Artificial Sequence
  Antisense Oligo
cggcaaaugcguccagggu

SEQ ID NO: 51981 - RNA, 19 nt, Artificial Sequence
  Sense Oligo
ccuggacgcauuugccgca

SEQ ID NO: 51982 - RNA, 19 nt, Artificial Sequence
  Antisense Oligo
ugcggcaaaugcguccagg

SEQ ID NO: 51983 - RNA, 19 nt, Artificial Sequence
  Sense Oligo
cuggacgcauuugccgcaa

SEQ ID NO: 51984 - RNA, 19 nt, Artificial Sequence
  Antisense Oligo
uugcggcaaaugcguccag

SEQ ID NO: 51985 - RNA, 19 nt, Artificial Sequence
  Sense Oligo
uggacgcauuugccgcaau

SEQ ID NO: 51986 - RNA, 19 nt, Artificial Sequence
  Antisense Oligo
auugcggcaaaugcgucca

SEQ ID NO: 51987 - RNA, 19 nt, Artificial Sequence
  Sense Oligo
auuugccgcaauggccugc

SEQ ID NO: 51988 - RNA, 19 nt, Artificial Sequence
  Antisense Oligo
gcaggccauugcggcaaau

SEQ ID NO: 51989 - RNA, 19 nt, Artificial Sequence
  Sense Oligo
uuugccgcaauggccugca

SEQ ID NO: 51990 - RNA, 19 nt, Artificial Sequence
  Antisense Oligo
ugcaggccauugcggcaaa

SEQ ID NO: 51991 - RNA, 19 nt, Artificial Sequence
  Sense Oligo
acacccugaagcccagucc

SEQ ID NO: 51992 - RNA, 19 nt, Artificial Sequence
  Antisense Oligo
ggacugggcuucagggugu

SEQ ID NO: 51993 - RNA, 19 nt, Artificial Sequence
  Sense Oligo
cccaggcguggcuacaguu

SEQ ID NO: 51994 - RNA, 19 nt, Artificial Sequence
  Antisense Oligo
aacuguagccacgccuggg

SEQ ID NO: 51995 - RNA, 19 nt, Artificial Sequence
  Sense Oligo
ccaggcguggcuacaguug

SEQ ID NO: 51996 - RNA, 19 nt, Artificial Sequence
  Antisense Oligo
caacuguagccacgccugg

SEQ ID NO: 51997 - RNA, 19 nt, Artificial Sequence
  Sense Oligo
caggcguggcuacaguugg

SEQ ID NO: 51998 - RNA, 19 nt, Artificial Sequence
  Antisense Oligo
ccaacuguagccacgccug

SEQ ID NO: 51999 - RNA, 19 nt, Artificial Sequence
  Sense Oligo
aggcguggcuacaguuggu

SEQ ID NO: 52000 - RNA, 19 nt, Artificial Sequence
  Antisense Oligo
accaacuguagccacgccu

SEQ ID NO: 52001 - RNA, 19 nt, Artificial Sequence
  Sense Oligo
ggcguggcuacaguuggug

SEQ ID NO: 52002 - RNA, 19 nt, Artificial Sequence
  Antisense Oligo
caccaacuguagccacgcc

SEQ ID NO: 52003 - RNA, 19 nt, Artificial Sequence
  Sense Oligo
cguggcuacaguuggugaa

SEQ ID NO: 52004 - RNA, 19 nt, Artificial Sequence
  Antisense Oligo
uucaccaacuguagccacg

SEQ ID NO: 52005 - RNA, 19 nt, Artificial Sequence
  Sense Oligo
guggcuacaguuggugaag

SEQ ID NO: 52006 - RNA, 19 nt, Artificial Sequence
  Antisense Oligo
cuucaccaacuguagccac

SEQ ID NO: 52007 - RNA, 19 nt, Artificial Sequence
  Sense Oligo
uggcuacaguuggugaaga

SEQ ID NO: 52008 - RNA, 19 nt, Artificial Sequence
  Antisense Oligo
ucuucaccaacuguagcca

SEQ ID NO: 52009 - RNA, 19 nt, Artificial Sequence
  Sense Oligo
gcuacaguuggugaagaau

SEQ ID NO: 52010 - RNA, 19 nt, Artificial Sequence
  Antisense Oligo
auucuucaccaacuguagc

SEQ ID NO: 52011 - RNA, 19 nt, Artificial Sequence
  Sense Oligo
cuacaguuggugaagaauc

SEQ ID NO: 52012 - RNA, 19 nt, Artificial Sequence
  Antisense Oligo
gauucuucaccaacuguag

SEQ ID NO: 52013 - RNA, 19 nt, Artificial Sequence
  Sense Oligo
uacaguuggugaagaaucu

SEQ ID NO: 52014 - RNA, 19 nt, Artificial Sequence
  Antisense Oligo
agauucuucaccaacugua

SEQ ID NO: 52015 - RNA, 19 nt, Artificial Sequence
  Sense Oligo
acaguuggugaagaaucuu

SEQ ID NO: 52016 - RNA, 19 nt, Artificial Sequence
  Antisense Oligo
aagauucuucaccaacugu

SEQ ID NO: 52017 - RNA, 19 nt, Artificial Sequence
  Sense Oligo
caguuggugaagaaucuuu

SEQ ID NO: 52018 - RNA, 19 nt, Artificial Sequence
  Antisense Oligo
aaagauucuucaccaacug

SEQ ID NO: 52019 - RNA, 19 nt, Artificial Sequence
  Sense Oligo
aguuggugaagaaucuuuc

SEQ ID NO: 52020 - RNA, 19 nt, Artificial Sequence
  Antisense Oligo
gaaagauucuucaccaacu

SEQ ID NO: 52021 - RNA, 19 nt, Artificial Sequence
  Sense Oligo
guuggugaagaaucuuucc

SEQ ID NO: 52022 - RNA, 19 nt, Artificial Sequence
  Antisense Oligo
ggaaagauucuucaccaac

SEQ ID NO: 52023 - RNA, 19 nt, Artificial Sequence
  Sense Oligo
uuggugaagaaucuuucca

SEQ ID NO: 52024 - RNA, 19 nt, Artificial Sequence
  Antisense Oligo
uggaaagauucuucaccaa

SEQ ID NO: 52025 - RNA, 19 nt, Artificial Sequence
  Sense Oligo
uggugaagaaucuuuccau

SEQ ID NO: 52026 - RNA, 19 nt, Artificial Sequence
  Antisense Oligo
auggaaagauucuucacca

SEQ ID NO: 52027 - RNA, 19 nt, Artificial Sequence
  Sense Oligo
gaagaaucuuuccaugccg

SEQ ID NO: 52028 - RNA, 19 nt, Artificial Sequence
  Antisense Oligo
cggcauggaaagauucuuc

SEQ ID NO: 52029 - RNA, 19 nt, Artificial Sequence
  Sense Oligo
aagaaucuuuccaugccgc

SEQ ID NO: 52030 - RNA, 19 nt, Artificial Sequence
  Antisense Oligo
gcggcauggaaagauucuu

SEQ ID NO: 52031 - RNA, 19 nt, Artificial Sequence
  Sense Oligo
agaaucuuuccaugccgcu

SEQ ID NO: 52032 - RNA, 19 nt, Artificial Sequence
  Antisense Oligo
agcggcauggaaagauucu

SEQ ID NO: 52033 - RNA, 19 nt, Artificial Sequence
  Sense Oligo
gaaucuuuccaugccgcug

SEQ ID NO: 52034 - RNA, 19 nt, Artificial Sequence
  Antisense Oligo
cagcggcauggaaagauuc

SEQ ID NO: 52035 - RNA, 19 nt, Artificial Sequence
  Sense Oligo
aaucuuuccaugccgcugg

SEQ ID NO: 52036 - RNA, 19 nt, Artificial Sequence
  Antisense Oligo
ccagcggcauggaaagauu

SEQ ID NO: 52037 - RNA, 19 nt, Artificial Sequence
  Sense Oligo
ccaugccgcuggagcucau

SEQ ID NO: 52038 - RNA, 19 nt, Artificial Sequence
  Antisense Oligo
augagcuccagcggcaugg

SEQ ID NO: 52039 - RNA, 19 nt, Artificial Sequence
  Sense Oligo
caugccgcuggagcucauc

SEQ ID NO: 52040 - RNA, 19 nt, Artificial Sequence
  Antisense Oligo
gaugagcuccagcggcaug

SEQ ID NO: 52041 - RNA, 19 nt, Artificial Sequence
  Sense Oligo
augccgcuggagcucaucu

SEQ ID NO: 52042 - RNA, 19 nt, Artificial Sequence
  Antisense Oligo
agaugagcuccagcggcau

SEQ ID NO: 52043 - RNA, 19 nt, Artificial Sequence
  Sense Oligo
ugccgcuggagcucaucug

SEQ ID NO: 52044 - RNA, 19 nt, Artificial Sequence
  Antisense Oligo
cagaugagcuccagcggca

SEQ ID NO: 52045 - RNA, 19 nt, Artificial Sequence
  Sense Oligo
ccgcuggagcucaucugcu

SEQ ID NO: 52046 - RNA, 19 nt, Artificial Sequence
  Antisense Oligo
agcagaugagcuccagcgg

SEQ ID NO: 52047 - RNA, 19 nt, Artificial Sequence
  Sense Oligo
cuccgaugagcacaugcaa

SEQ ID NO: 52048 - RNA, 19 nt, Artificial Sequence
  Antisense Oligo
uugcaugugcucaucggag

SEQ ID NO: 52049 - RNA, 19 nt, Artificial Sequence
  Sense Oligo
uccgaugagcacaugcaag

SEQ ID NO: 52050 - RNA, 19 nt, Artificial Sequence
  Antisense Oligo
cuugcaugugcucaucgga

SEQ ID NO: 52051 - RNA, 19 nt, Artificial Sequence
  Sense Oligo
ccgaugagcacaugcaagg

SEQ ID NO: 52052 - RNA, 19 nt, Artificial Sequence
  Antisense Oligo
ccuugcaugugcucaucgg

SEQ ID NO: 52053 - RNA, 19 nt, Artificial Sequence
  Sense Oligo
cgaugagcacaugcaaggc

SEQ ID NO: 52054 - RNA, 19 nt, Artificial Sequence
  Antisense Oligo
gccuugcaugugcucaucg

SEQ ID NO: 52055 - RNA, 19 nt, Artificial Sequence
  Sense Oligo
gaugagcacaugcaaggca

SEQ ID NO: 52056 - RNA, 19 nt, Artificial Sequence
  Antisense Oligo
ugccuugcaugugcucauc

SEQ ID NO: 52057 - RNA, 19 nt, Artificial Sequence
  Sense Oligo
augagcacaugcaaggcag

SEQ ID NO: 52058 - RNA, 19 nt, Artificial Sequence
  Antisense Oligo
cugccuugcaugugcucau

SEQ ID NO: 52059 - RNA, 19 nt, Artificial Sequence
  Sense Oligo
ugagcacaugcaaggcagc

SEQ ID NO: 52060 - RNA, 19 nt, Artificial Sequence
  Antisense Oligo
gcugccuugcaugugcuca

SEQ ID NO: 52061 - RNA, 19 nt, Artificial Sequence
  Sense Oligo
gagcacaugcaaggcagcg

SEQ ID NO: 52062 - RNA, 19 nt, Artificial Sequence
  Antisense Oligo
cgcugccuugcaugugcuc

SEQ ID NO: 52063 - RNA, 19 nt, Artificial Sequence
  Sense Oligo
agcacaugcaaggcagcgg

SEQ ID NO: 52064 - RNA, 19 nt, Artificial Sequence
  Antisense Oligo
ccgcugccuugcaugugcu

SEQ ID NO: 52065 - RNA, 19 nt, Artificial Sequence
  Sense Oligo
cacaugcaaggcagcggga

SEQ ID NO: 52066 - RNA, 19 nt, Artificial Sequence
  Antisense Oligo
ucccgcugccuugcaugug

SEQ ID NO: 52067 - RNA, 19 nt, Artificial Sequence
  Sense Oligo
acaugcaaggcagcgggag

SEQ ID NO: 52068 - RNA, 19 nt, Artificial Sequence
  Antisense Oligo
cucccgcugccuugcaugu

SEQ ID NO: 52069 - RNA, 19 nt, Artificial Sequence
  Sense Oligo
gagcccucacccacugcuu

SEQ ID NO: 52070 - RNA, 19 nt, Artificial Sequence
  Antisense Oligo
aagcagugggugagggcuc

SEQ ID NO: 52071 - RNA, 19 nt, Artificial Sequence
  Sense Oligo
agcccucacccacugcuuc

SEQ ID NO: 52072 - RNA, 19 nt, Artificial Sequence
  Antisense Oligo
gaagcagugggugagggcu

SEQ ID NO: 52073 - RNA, 19 nt, Artificial Sequence
  Sense Oligo
cucacccacugcuucaucu

SEQ ID NO: 52074 - RNA, 19 nt, Artificial Sequence
  Antisense Oligo
agaugaagcagugggugag

SEQ ID NO: 52075 - RNA, 19 nt, Artificial Sequence
  Sense Oligo
ucacccacugcuucaucug

SEQ ID NO: 52076 - RNA, 19 nt, Artificial Sequence
  Antisense Oligo
cagaugaagcaguggguga

SEQ ID NO: 52077 - RNA, 19 nt, Artificial Sequence
  Sense Oligo
ccacugcuucaucuggcgc

SEQ ID NO: 52078 - RNA, 19 nt, Artificial Sequence
  Antisense Oligo
gcgccagaugaagcagugg

SEQ ID NO: 52079 - RNA, 19 nt, Artificial Sequence
  Sense Oligo
accaggagccugccaagug

SEQ ID NO: 52080 - RNA, 19 nt, Artificial Sequence
  Antisense Oligo
cacuuggcaggcuccuggu

SEQ ID NO: 52081 - RNA, 19 nt, Artificial Sequence
  Sense Oligo
aggagccugccaagugcca

SEQ ID NO: 52082 - RNA, 19 nt, Artificial Sequence
  Antisense Oligo
uggcacuuggcaggcuccu

SEQ ID NO: 52083 - RNA, 19 nt, Artificial Sequence
  Sense Oligo
gccaagugccaggcauguc

SEQ ID NO: 52084 - RNA, 19 nt, Artificial Sequence
  Antisense Oligo
gacaugccuggcacuuggc

SEQ ID NO: 52085 - RNA, 19 nt, Artificial Sequence
  Sense Oligo
aagugccaggcauguccau

SEQ ID NO: 52086 - RNA, 19 nt, Artificial Sequence
  Antisense Oligo
auggacaugccuggcacuu

SEQ ID NO: 52087 - RNA, 19 nt, Artificial Sequence
  Sense Oligo
cuccguccucacccguuca

SEQ ID NO: 52088 - RNA, 19 nt, Artificial Sequence
  Antisense Oligo
ugaacgggugaggacggag

SEQ ID NO: 52089 - RNA, 19 nt, Artificial Sequence
  Sense Oligo
uccguccucacccguucac

SEQ ID NO: 52090 - RNA, 19 nt, Artificial Sequence
  Antisense Oligo
gugaacgggugaggacgga

SEQ ID NO: 52091 - RNA, 19 nt, Artificial Sequence
  Sense Oligo
ccguccucacccguucacu

SEQ ID NO: 52092 - RNA, 19 nt, Artificial Sequence
  Antisense Oligo
agugaacgggugaggacgg

SEQ ID NO: 52093 - RNA, 19 nt, Artificial Sequence
  Sense Oligo
cguccucacccguucacuc

SEQ ID NO: 52094 - RNA, 19 nt, Artificial Sequence
  Antisense Oligo
gagugaacgggugaggacg

SEQ ID NO: 52095 - RNA, 19 nt, Artificial Sequence
  Sense Oligo
cucacccguucacuccgca

SEQ ID NO: 52096 - RNA, 19 nt, Artificial Sequence
  Antisense Oligo
ugcggagugaacgggugag

SEQ ID NO: 52097 - RNA, 19 nt, Artificial Sequence
  Sense Oligo
ucacccguucacuccgcau

SEQ ID NO: 52098 - RNA, 19 nt, Artificial Sequence
  Antisense Oligo
augcggagugaacggguga

SEQ ID NO: 52099 - RNA, 19 nt, Artificial Sequence
  Sense Oligo
cacccguucacuccgcauu

SEQ ID NO: 52100 - RNA, 19 nt, Artificial Sequence
  Antisense Oligo
aaugcggagugaacgggug

SEQ ID NO: 52101 - RNA, 19 nt, Artificial Sequence
  Sense Oligo
acccguucacuccgcauuu

SEQ ID NO: 52102 - RNA, 19 nt, Artificial Sequence
  Antisense Oligo
aaaugcggagugaacgggu

SEQ ID NO: 52103 - RNA, 19 nt, Artificial Sequence
  Sense Oligo
cccguucacuccgcauuug

SEQ ID NO: 52104 - RNA, 19 nt, Artificial Sequence
  Antisense Oligo
caaaugcggagugaacggg

SEQ ID NO: 52105 - RNA, 19 nt, Artificial Sequence
  Sense Oligo
ccguucacuccgcauuugc

SEQ ID NO: 52106 - RNA, 19 nt, Artificial Sequence
  Antisense Oligo
gcaaaugcggagugaacgg

SEQ ID NO: 52107 - RNA, 19 nt, Artificial Sequence
  Sense Oligo
aacccuuagugagugccag

SEQ ID NO: 52108 - RNA, 19 nt, Artificial Sequence
  Antisense Oligo
cuggcacucacuaaggguu

SEQ ID NO: 52109 - RNA, 19 nt, Artificial Sequence
  Sense Oligo
cugugcauucagggagcgc

SEQ ID NO: 52110 - RNA, 19 nt, Artificial Sequence
  Antisense Oligo
gcgcucccugaaugcacag

SEQ ID NO: 52111 - RNA, 19 nt, Artificial Sequence
  Sense Oligo
ugugcauucagggagcgca

SEQ ID NO: 52112 - RNA, 19 nt, Artificial Sequence
  Antisense Oligo
ugcgcucccugaaugcaca

SEQ ID NO: 52113 - RNA, 19 nt, Artificial Sequence
  Sense Oligo
ugcauucagggagcgcacu

SEQ ID NO: 52114 - RNA, 19 nt, Artificial Sequence
  Antisense Oligo
agugcgcucccugaaugca

SEQ ID NO: 52115 - RNA, 19 nt, Artificial Sequence
  Sense Oligo
cagggagcgcacuguguac

SEQ ID NO: 52116 - RNA, 19 nt, Artificial Sequence
  Antisense Oligo
guacacagugcgcucccug

SEQ ID NO: 52117 - RNA, 19 nt, Artificial Sequence
  Sense Oligo
agggagcgcacuguguacu

SEQ ID NO: 52118 - RNA, 19 nt, Artificial Sequence
  Antisense Oligo
aguacacagugcgcucccu

SEQ ID NO: 52119 - RNA, 19 nt, Artificial Sequence
  Sense Oligo
gggagcgcacuguguacug

SEQ ID NO: 52120 - RNA, 19 nt, Artificial Sequence
  Antisense Oligo
caguacacagugcgcuccc

SEQ ID NO: 52121 - RNA, 19 nt, Artificial Sequence
  Sense Oligo
ggagcgcacuguguacugg

SEQ ID NO: 52122 - RNA, 19 nt, Artificial Sequence
  Antisense Oligo
ccaguacacagugcgcucc

SEQ ID NO: 52123 - RNA, 19 nt, Artificial Sequence
  Sense Oligo
gagcgcacuguguacuggg

SEQ ID NO: 52124 - RNA, 19 nt, Artificial Sequence
  Antisense Oligo
cccaguacacagugcgcuc

SEQ ID NO: 52125 - RNA, 19 nt, Artificial Sequence
  Sense Oligo
agacgggcuauugugaugc

SEQ ID NO: 52126 - RNA, 19 nt, Artificial Sequence
  Antisense Oligo
gcaucacaauagcccgucu

SEQ ID NO: 52127 - RNA, 19 nt, Artificial Sequence
  Sense Oligo
gacgggcuauugugaugcc

SEQ ID NO: 52128 - RNA, 19 nt, Artificial Sequence
  Antisense Oligo
ggcaucacaauagcccguc

SEQ ID NO: 52129 - RNA, 19 nt, Artificial Sequence
  Sense Oligo
aggugcacagagcaggaca

SEQ ID NO: 52130 - RNA, 19 nt, Artificial Sequence
  Antisense Oligo
uguccugcucugugcaccu

SEQ ID NO: 52131 - RNA, 19 nt, Artificial Sequence
  Sense Oligo
ggugcacagagcaggacag

SEQ ID NO: 52132 - RNA, 19 nt, Artificial Sequence
  Antisense Oligo
cuguccugcucugugcacc

SEQ ID NO: 52133 - RNA, 19 nt, Artificial Sequence
  Sense Oligo
gugcacagagcaggacagg

SEQ ID NO: 52134 - RNA, 19 nt, Artificial Sequence
  Antisense Oligo
ccuguccugcucugugcac

SEQ ID NO: 52135 - RNA, 19 nt, Artificial Sequence
  Sense Oligo
ugcacagagcaggacaggc

SEQ ID NO: 52136 - RNA, 19 nt, Artificial Sequence
  Antisense Oligo
gccuguccugcucugugca

SEQ ID NO: 52137 - RNA, 19 nt, Artificial Sequence
  Sense Oligo
acagagcaggacaggcccu

SEQ ID NO: 52138 - RNA, 19 nt, Artificial Sequence
  Antisense Oligo
agggccuguccugcucugu

SEQ ID NO: 52139 - RNA, 19 nt, Artificial Sequence
  Sense Oligo
agagcaggacaggcccuca

SEQ ID NO: 52140 - RNA, 19 nt, Artificial Sequence
  Antisense Oligo
ugagggccuguccugcucu

SEQ ID NO: 52141 - RNA, 19 nt, Artificial Sequence
  Sense Oligo
cagggccagaguccacuuc

SEQ ID NO: 52142 - RNA, 19 nt, Artificial Sequence
  Antisense Oligo
gaaguggacucuggcccug

SEQ ID NO: 52143 - RNA, 19 nt, Artificial Sequence
  Sense Oligo
agggccagaguccacuucc

SEQ ID NO: 52144 - RNA, 19 nt, Artificial Sequence
  Antisense Oligo
ggaaguggacucuggcccu

SEQ ID NO: 52145 - RNA, 19 nt, Artificial Sequence
  Sense Oligo
ggccagaguccacuucccu

SEQ ID NO: 52146 - RNA, 19 nt, Artificial Sequence
  Antisense Oligo
agggaaguggacucuggcc

SEQ ID NO: 52147 - RNA, 19 nt, Artificial Sequence
  Sense Oligo
gccagaguccacuucccua

SEQ ID NO: 52148 - RNA, 19 nt, Artificial Sequence
  Antisense Oligo
uagggaaguggacucuggc

SEQ ID NO: 52149 - RNA, 19 nt, Artificial Sequence
  Sense Oligo
ccagaguccacuucccuaa

SEQ ID NO: 52150 - RNA, 19 nt, Artificial Sequence
  Antisense Oligo
uuagggaaguggacucugg

SEQ ID NO: 52151 - RNA, 19 nt, Artificial Sequence
  Sense Oligo
cagaguccacuucccuaaa

SEQ ID NO: 52152 - RNA, 19 nt, Artificial Sequence
  Antisense Oligo
uuuagggaaguggacucug

SEQ ID NO: 52153 - RNA, 19 nt, Artificial Sequence
  Sense Oligo
agaguccacuucccuaaag

SEQ ID NO: 52154 - RNA, 19 nt, Artificial Sequence
  Antisense Oligo
cuuuagggaaguggacucu

SEQ ID NO: 52155 - RNA, 19 nt, Artificial Sequence
  Sense Oligo
gaguccacuucccuaaagg

SEQ ID NO: 52156 - RNA, 19 nt, Artificial Sequence
  Antisense Oligo
ccuuuagggaaguggacuc

SEQ ID NO: 52157 - RNA, 19 nt, Artificial Sequence
  Sense Oligo
aguccacuucccuaaaggu

SEQ ID NO: 52158 - RNA, 19 nt, Artificial Sequence
  Antisense Oligo
accuuuagggaaguggacu

SEQ ID NO: 52159 - RNA, 19 nt, Artificial Sequence
  Sense Oligo
guccacuucccuaaaggug

SEQ ID NO: 52160 - RNA, 19 nt, Artificial Sequence
  Antisense Oligo
caccuuuagggaaguggac

SEQ ID NO: 52161 - RNA, 19 nt, Artificial Sequence
  Sense Oligo
acuucccuaaaggugaggu

SEQ ID NO: 52162 - RNA, 19 nt, Artificial Sequence
  Antisense Oligo
accucaccuuuagggaagu

SEQ ID NO: 52163 - RNA, 19 nt, Artificial Sequence
  Sense Oligo
cuucccuaaaggugaggug

SEQ ID NO: 52164 - RNA, 19 nt, Artificial Sequence
  Antisense Oligo
caccucaccuuuagggaag

SEQ ID NO: 52165 - RNA, 19 nt, Artificial Sequence
  Sense Oligo
uucccuaaaggugaggugg

SEQ ID NO: 52166 - RNA, 19 nt, Artificial Sequence
  Antisense Oligo
ccaccucaccuuuagggaa

SEQ ID NO: 52167 - RNA, 19 nt, Artificial Sequence
  Sense Oligo
ucccuaaaggugagguggg

SEQ ID NO: 52168 - RNA, 19 nt, Artificial Sequence
  Antisense Oligo
cccaccucaccuuuaggga

SEQ ID NO: 52169 - RNA, 19 nt, Artificial Sequence
  Sense Oligo
uaaaggugaggugggacuu

SEQ ID NO: 52170 - RNA, 19 nt, Artificial Sequence
  Antisense Oligo
aagucccaccucaccuuua

SEQ ID NO: 52171 - RNA, 19 nt, Artificial Sequence
  Sense Oligo
gugaggugggacuugacag

SEQ ID NO: 52172 - RNA, 19 nt, Artificial Sequence
  Antisense Oligo
cugucaagucccaccucac

SEQ ID NO: 52173 - RNA, 19 nt, Artificial Sequence
  Sense Oligo
ugaggugggacuugacagg

SEQ ID NO: 52174 - RNA, 19 nt, Artificial Sequence
  Antisense Oligo
ccugucaagucccaccuca

SEQ ID NO: 52175 - RNA, 19 nt, Artificial Sequence
  Sense Oligo
gaggugggacuugacaggc

SEQ ID NO: 52176 - RNA, 19 nt, Artificial Sequence
  Antisense Oligo
gccugucaagucccaccuc

SEQ ID NO: 52177 - RNA, 19 nt, Artificial Sequence
  Sense Oligo
aggugggacuugacaggcg

SEQ ID NO: 52178 - RNA, 19 nt, Artificial Sequence
  Antisense Oligo
cgccugucaagucccaccu

SEQ ID NO: 52179 - RNA, 19 nt, Artificial Sequence
  Sense Oligo
gugggacuugacaggcgca

SEQ ID NO: 52180 - RNA, 19 nt, Artificial Sequence
  Antisense Oligo
ugcgccugucaagucccac

SEQ ID NO: 52181 - RNA, 19 nt, Artificial Sequence
  Sense Oligo
ugggacuugacaggcgcag

SEQ ID NO: 52182 - RNA, 19 nt, Artificial Sequence
  Antisense Oligo
cugcgccugucaaguccca

SEQ ID NO: 52183 - RNA, 19 nt, Artificial Sequence
  Sense Oligo
ggacuugacaggcgcagga

SEQ ID NO: 52184 - RNA, 19 nt, Artificial Sequence
  Antisense Oligo
uccugcgccugucaagucc

SEQ ID NO: 52185 - RNA, 19 nt, Artificial Sequence
  Sense Oligo
gacuugacaggcgcaggau

SEQ ID NO: 52186 - RNA, 19 nt, Artificial Sequence
  Antisense Oligo
auccugcgccugucaaguc

SEQ ID NO: 52187 - RNA, 19 nt, Artificial Sequence
  Sense Oligo
acuugacaggcgcaggauc

SEQ ID NO: 52188 - RNA, 19 nt, Artificial Sequence
  Antisense Oligo
gauccugcgccugucaagu

SEQ ID NO: 52189 - RNA, 19 nt, Artificial Sequence
  Sense Oligo
cuugacaggcgcaggauca

SEQ ID NO: 52190 - RNA, 19 nt, Artificial Sequence
  Antisense Oligo
ugauccugcgccugucaag

SEQ ID NO: 52191 - RNA, 19 nt, Artificial Sequence
  Sense Oligo
uugacaggcgcaggaucau

SEQ ID NO: 52192 - RNA, 19 nt, Artificial Sequence
  Antisense Oligo
augauccugcgccugucaa

SEQ ID NO: 52193 - RNA, 19 nt, Artificial Sequence
  Sense Oligo
ugacaggcgcaggaucaug

SEQ ID NO: 52194 - RNA, 19 nt, Artificial Sequence
  Antisense Oligo
caugauccugcgccuguca

SEQ ID NO: 52195 - RNA, 19 nt, Artificial Sequence
  Sense Oligo
aggaucaugcagugagcgg

SEQ ID NO: 52196 - RNA, 19 nt, Artificial Sequence
  Antisense Oligo
ccgcucacugcaugauccu

SEQ ID NO: 52197 - RNA, 19 nt, Artificial Sequence
  Sense Oligo
ggaucaugcagugagcggg

SEQ ID NO: 52198 - RNA, 19 nt, Artificial Sequence
  Antisense Oligo
cccgcucacugcaugaucc

SEQ ID NO: 52199 - RNA, 19 nt, Artificial Sequence
  Sense Oligo
gaucaugcagugagcgggu

SEQ ID NO: 52200 - RNA, 19 nt, Artificial Sequence
  Antisense Oligo
acccgcucacugcaugauc

SEQ ID NO: 52201 - RNA, 19 nt, Artificial Sequence
  Sense Oligo
aucaugcagugagcggguu

SEQ ID NO: 52202 - RNA, 19 nt, Artificial Sequence
  Antisense Oligo
aacccgcucacugcaugau

SEQ ID NO: 52203 - RNA, 19 nt, Artificial Sequence
  Sense Oligo
ucaugcagugagcggguug

SEQ ID NO: 52204 - RNA, 19 nt, Artificial Sequence
  Antisense Oligo
caacccgcucacugcauga

SEQ ID NO: 52205 - RNA, 19 nt, Artificial Sequence
  Sense Oligo
caugcagugagcggguugu

SEQ ID NO: 52206 - RNA, 19 nt, Artificial Sequence
  Antisense Oligo
acaacccgcucacugcaug

SEQ ID NO: 52207 - RNA, 19 nt, Artificial Sequence
  Sense Oligo
ugcagugagcggguugugg

SEQ ID NO: 52208 - RNA, 19 nt, Artificial Sequence
  Antisense Oligo
ccacaacccgcucacugca

SEQ ID NO: 52209 - RNA, 19 nt, Artificial Sequence
  Sense Oligo
gugagcggguugugguggu

SEQ ID NO: 52210 - RNA, 19 nt, Artificial Sequence
  Antisense Oligo
accaccacaacccgcucac

SEQ ID NO: 52211 - RNA, 19 nt, Artificial Sequence
  Sense Oligo
ugagcggguugugguggua

SEQ ID NO: 52212 - RNA, 19 nt, Artificial Sequence
  Antisense Oligo
uaccaccacaacccgcuca

SEQ ID NO: 52213 - RNA, 19 nt, Artificial Sequence
  Sense Oligo
gagcggguuguggugguac

SEQ ID NO: 52214 - RNA, 19 nt, Artificial Sequence
  Antisense Oligo
guaccaccacaacccgcuc

SEQ ID NO: 52215 - RNA, 19 nt, Artificial Sequence
  Sense Oligo
agcggguuguggugguacc

SEQ ID NO: 52216 - RNA, 19 nt, Artificial Sequence
  Antisense Oligo
gguaccaccacaacccgcu

SEQ ID NO: 52217 - RNA, 19 nt, Artificial Sequence
  Sense Oligo
ugcagaggcaucacagugg

SEQ ID NO: 52218 - RNA, 19 nt, Artificial Sequence
  Antisense Oligo
ccacugugaugccucugca

SEQ ID NO: 52219 - RNA, 19 nt, Artificial Sequence
  Sense Oligo
gcagaggcaucacaguggg

SEQ ID NO: 52220 - RNA, 19 nt, Artificial Sequence
  Antisense Oligo
cccacugugaugccucugc

SEQ ID NO: 52221 - RNA, 19 nt, Artificial Sequence
  Sense Oligo
aggcaucacagugggacac

SEQ ID NO: 52222 - RNA, 19 nt, Artificial Sequence
  Antisense Oligo
gugucccacugugaugccu

SEQ ID NO: 52223 - RNA, 19 nt, Artificial Sequence
  Sense Oligo
ggcaucacagugggacacc

SEQ ID NO: 52224 - RNA, 19 nt, Artificial Sequence
  Antisense Oligo
ggugucccacugugaugcc

SEQ ID NO: 52225 - RNA, 19 nt, Artificial Sequence
  Sense Oligo
gcaucacagugggacaccg

SEQ ID NO: 52226 - RNA, 19 nt, Artificial Sequence
  Antisense Oligo
cggugucccacugugaugc

SEQ ID NO: 52227 - RNA, 19 nt, Artificial Sequence
  Sense Oligo
caucacagugggacaccga

SEQ ID NO: 52228 - RNA, 19 nt, Artificial Sequence
  Antisense Oligo
ucggugucccacugugaug

SEQ ID NO: 52229 - RNA, 19 nt, Artificial Sequence
  Sense Oligo
aucacagugggacaccgag

SEQ ID NO: 52230 - RNA, 19 nt, Artificial Sequence
  Antisense Oligo
cucggugucccacugugau

SEQ ID NO: 52231 - RNA, 19 nt, Artificial Sequence
  Sense Oligo
ucacagugggacaccgagu

SEQ ID NO: 52232 - RNA, 19 nt, Artificial Sequence
  Antisense Oligo
acucggugucccacuguga

SEQ ID NO: 52233 - RNA, 19 nt, Artificial Sequence
  Sense Oligo
cacagugggacaccgaguc

SEQ ID NO: 52234 - RNA, 19 nt, Artificial Sequence
  Antisense Oligo
gacucggugucccacugug

SEQ ID NO: 52235 - RNA, 19 nt, Artificial Sequence
  Sense Oligo
gacaccgagucccagcuaa

SEQ ID NO: 52236 - RNA, 19 nt, Artificial Sequence
  Antisense Oligo
uuagcugggacucgguguc

SEQ ID NO: 52237 - RNA, 19 nt, Artificial Sequence
  Sense Oligo
acaccgagucccagcuaag

SEQ ID NO: 52238 - RNA, 19 nt, Artificial Sequence
  Antisense Oligo
cuuagcugggacucggugu

SEQ ID NO: 52239 - RNA, 19 nt, Artificial Sequence
  Sense Oligo
caccgagucccagcuaagc

SEQ ID NO: 52240 - RNA, 19 nt, Artificial Sequence
  Antisense Oligo
gcuuagcugggacucggug

SEQ ID NO: 52241 - RNA, 19 nt, Artificial Sequence
  Sense Oligo
agcuaagcugagcgucuga

SEQ ID NO: 52242 - RNA, 19 nt, Artificial Sequence
  Antisense Oligo
ucagacgcucagcuuagcu

SEQ ID NO: 52243 - RNA, 19 nt, Artificial Sequence
  Sense Oligo
gcuaagcugagcgucugag

SEQ ID NO: 52244 - RNA, 19 nt, Artificial Sequence
  Antisense Oligo
cucagacgcucagcuuagc

SEQ ID NO: 52245 - RNA, 19 nt, Artificial Sequence
  Sense Oligo
augucacauagggcuugcu

SEQ ID NO: 52246 - RNA, 19 nt, Artificial Sequence
  Antisense Oligo
agcaagcccuaugugacau

SEQ ID NO: 52247 - RNA, 19 nt, Artificial Sequence
  Sense Oligo
ugucacauagggcuugcuu

SEQ ID NO: 52248 - RNA, 19 nt, Artificial Sequence
  Antisense Oligo
aagcaagcccuaugugaca

SEQ ID NO: 52249 - RNA, 19 nt, Artificial Sequence
  Sense Oligo
cgggucccgcaucucuucu

SEQ ID NO: 52250 - RNA, 19 nt, Artificial Sequence
  Antisense Oligo
agaagagaugcgggacccg

SEQ ID NO: 52251 - RNA, 19 nt, Artificial Sequence
  Sense Oligo
gggucccgcaucucuucuc

SEQ ID NO: 52252 - RNA, 19 nt, Artificial Sequence
  Antisense Oligo
gagaagagaugcgggaccc

SEQ ID NO: 52253 - RNA, 19 nt, Artificial Sequence
  Sense Oligo
ggucccgcaucucuucucc

SEQ ID NO: 52254 - RNA, 19 nt, Artificial Sequence
  Antisense Oligo
ggagaagagaugcgggacc

SEQ ID NO: 52255 - RNA, 19 nt, Artificial Sequence
  Sense Oligo
gucccgcaucucuucuccc

SEQ ID NO: 52256 - RNA, 19 nt, Artificial Sequence
  Antisense Oligo
gggagaagagaugcgggac

SEQ ID NO: 52257 - RNA, 19 nt, Artificial Sequence
  Sense Oligo
ucccgcaucucuucucccg

SEQ ID NO: 52258 - RNA, 19 nt, Artificial Sequence
  Antisense Oligo
cgggagaagagaugcggga

SEQ ID NO: 52259 - RNA, 19 nt, Artificial Sequence
  Sense Oligo
cccgcaucucuucucccgu

SEQ ID NO: 52260 - RNA, 19 nt, Artificial Sequence
  Antisense Oligo
acgggagaagagaugcggg

SEQ ID NO: 52261 - RNA, 19 nt, Artificial Sequence
  Sense Oligo
ccgcaucucuucucccguc

SEQ ID NO: 52262 - RNA, 19 nt, Artificial Sequence
  Antisense Oligo
gacgggagaagagaugcgg

SEQ ID NO: 52263 - RNA, 19 nt, Artificial Sequence
  Sense Oligo
cucuucucccgucucccuc

SEQ ID NO: 52264 - RNA, 19 nt, Artificial Sequence
  Antisense Oligo
gagggagacgggagaagag

SEQ ID NO: 52265 - RNA, 19 nt, Artificial Sequence
  Sense Oligo
uuucacccuuggguuccuu

SEQ ID NO: 52266 - RNA, 19 nt, Artificial Sequence
  Antisense Oligo
aaggaacccaagggugaaa

SEQ ID NO: 52267 - RNA, 19 nt, Artificial Sequence
  Sense Oligo
uucacccuuggguuccuug

SEQ ID NO: 52268 - RNA, 19 nt, Artificial Sequence
  Antisense Oligo
caaggaacccaagggugaa

SEQ ID NO: 52269 - RNA, 19 nt, Artificial Sequence
  Sense Oligo
ucacccuuggguuccuugg

SEQ ID NO: 52270 - RNA, 19 nt, Artificial Sequence
  Antisense Oligo
ccaaggaacccaaggguga

SEQ ID NO: 52271 - RNA, 19 nt, Artificial Sequence
  Sense Oligo
cacccuuggguuccuuggu

SEQ ID NO: 52272 - RNA, 19 nt, Artificial Sequence
  Antisense Oligo
accaaggaacccaagggug

SEQ ID NO: 52273 - RNA, 19 nt, Artificial Sequence
  Sense Oligo
acccuuggguuccuuggug

SEQ ID NO: 52274 - RNA, 19 nt, Artificial Sequence
  Antisense Oligo
caccaaggaacccaagggu

SEQ ID NO: 52275 - RNA, 19 nt, Artificial Sequence
  Sense Oligo
cccuuggguuccuuggugg

SEQ ID NO: 52276 - RNA, 19 nt, Artificial Sequence
  Antisense Oligo
ccaccaaggaacccaaggg

SEQ ID NO: 52277 - RNA, 19 nt, Artificial Sequence
  Sense Oligo
guuccuuggugggagccga

SEQ ID NO: 52278 - RNA, 19 nt, Artificial Sequence
  Antisense Oligo
ucggcucccaccaaggaac

SEQ ID NO: 52279 - RNA, 19 nt, Artificial Sequence
  Sense Oligo
uuccuuggugggagccgag

SEQ ID NO: 52280 - RNA, 19 nt, Artificial Sequence
  Antisense Oligo
cucggcucccaccaaggaa

SEQ ID NO: 52281 - RNA, 19 nt, Artificial Sequence
  Sense Oligo
uccuuggugggagccgagu

SEQ ID NO: 52282 - RNA, 19 nt, Artificial Sequence
  Antisense Oligo
acucggcucccaccaagga

SEQ ID NO: 52283 - RNA, 19 nt, Artificial Sequence
  Sense Oligo
cuuggugggagccgaguga

SEQ ID NO: 52284 - RNA, 19 nt, Artificial Sequence
  Antisense Oligo
ucacucggcucccaccaag

SEQ ID NO: 52285 - RNA, 19 nt, Artificial Sequence
  Sense Oligo
uuggugggagccgagugag

SEQ ID NO: 52286 - RNA, 19 nt, Artificial Sequence
  Antisense Oligo
cucacucggcucccaccaa

SEQ ID NO: 52287 - RNA, 19 nt, Artificial Sequence
  Sense Oligo
ugggagccgagugagugag

SEQ ID NO: 52288 - RNA, 19 nt, Artificial Sequence
  Antisense Oligo
cucacucacucggcuccca

SEQ ID NO: 52289 - RNA, 19 nt, Artificial Sequence
  Sense Oligo
agccgagugagugagugag

SEQ ID NO: 52290 - RNA, 19 nt, Artificial Sequence
  Antisense Oligo
cucacucacucacucggcu

SEQ ID NO: 52291 - RNA, 19 nt, Artificial Sequence
  Sense Oligo
ucuuuugacagagcccagu

SEQ ID NO: 52292 - RNA, 19 nt, Artificial Sequence
  Antisense Oligo
acugggcucugucaaaaga

SEQ ID NO: 52293 - RNA, 19 nt, Artificial Sequence
  Sense Oligo
cuuuugacagagcccagug

SEQ ID NO: 52294 - RNA, 19 nt, Artificial Sequence
  Antisense Oligo
cacugggcucugucaaaag

SEQ ID NO: 52295 - RNA, 19 nt, Artificial Sequence
  Sense Oligo
uuuugacagagcccagugg

SEQ ID NO: 52296 - RNA, 19 nt, Artificial Sequence
  Antisense Oligo
ccacugggcucugucaaaa

SEQ ID NO: 52297 - RNA, 19 nt, Artificial Sequence
  Sense Oligo
uuugacagagcccagugga

SEQ ID NO: 52298 - RNA, 19 nt, Artificial Sequence
  Antisense Oligo
uccacugggcucugucaaa

SEQ ID NO: 52299 - RNA, 19 nt, Artificial Sequence
  Sense Oligo
uugacagagcccaguggag

SEQ ID NO: 52300 - RNA, 19 nt, Artificial Sequence
  Antisense Oligo
cuccacugggcucugucaa

SEQ ID NO: 52301 - RNA, 19 nt, Artificial Sequence
  Sense Oligo
agagcccaguggagucgga

SEQ ID NO: 52302 - RNA, 19 nt, Artificial Sequence
  Antisense Oligo
uccgacuccacugggcucu

SEQ ID NO: 52303 - RNA, 19 nt, Artificial Sequence
  Sense Oligo
gagcccaguggagucggau

SEQ ID NO: 52304 - RNA, 19 nt, Artificial Sequence
  Antisense Oligo
auccgacuccacugggcuc

SEQ ID NO: 52305 - RNA, 19 nt, Artificial Sequence
  Sense Oligo
agcccaguggagucggauu

SEQ ID NO: 52306 - RNA, 19 nt, Artificial Sequence
  Antisense Oligo
aauccgacuccacugggcu

SEQ ID NO: 52307 - RNA, 19 nt, Artificial Sequence
  Sense Oligo
gcccaguggagucggauuu

SEQ ID NO: 52308 - RNA, 19 nt, Artificial Sequence
  Antisense Oligo
aaauccgacuccacugggc

SEQ ID NO: 52309 - RNA, 19 nt, Artificial Sequence
  Sense Oligo
cccaguggagucggauuuu

SEQ ID NO: 52310 - RNA, 19 nt, Artificial Sequence
  Antisense Oligo
aaaauccgacuccacuggg

SEQ ID NO: 52311 - RNA, 19 nt, Artificial Sequence
  Sense Oligo
ccaguggagucggauuuuc

SEQ ID NO: 52312 - RNA, 19 nt, Artificial Sequence
  Antisense Oligo
gaaaauccgacuccacugg

SEQ ID NO: 52313 - RNA, 19 nt, Artificial Sequence
  Sense Oligo
caguggagucggauuuucu

SEQ ID NO: 52314 - RNA, 19 nt, Artificial Sequence
  Antisense Oligo
agaaaauccgacuccacug

SEQ ID NO: 52315 - RNA, 19 nt, Artificial Sequence
  Sense Oligo
gagucggauuuucuccacc

SEQ ID NO: 52316 - RNA, 19 nt, Artificial Sequence
  Antisense Oligo
gguggagaaaauccgacuc

SEQ ID NO: 52317 - RNA, 19 nt, Artificial Sequence
  Sense Oligo
agucggauuuucuccaccg

SEQ ID NO: 52318 - RNA, 19 nt, Artificial Sequence
  Antisense Oligo
cgguggagaaaauccgacu

SEQ ID NO: 52319 - RNA, 19 nt, Artificial Sequence
  Sense Oligo
gucggauuuucuccaccgc

SEQ ID NO: 52320 - RNA, 19 nt, Artificial Sequence
  Antisense Oligo
gcgguggagaaaauccgac

SEQ ID NO: 52321 - RNA, 19 nt, Artificial Sequence
  Sense Oligo
ucggauuuucuccaccgca

SEQ ID NO: 52322 - RNA, 19 nt, Artificial Sequence
  Antisense Oligo
ugcgguggagaaaauccga

SEQ ID NO: 52323 - RNA, 19 nt, Artificial Sequence
  Sense Oligo
cggauuuucuccaccgcac

SEQ ID NO: 52324 - RNA, 19 nt, Artificial Sequence
  Antisense Oligo
gugcgguggagaaaauccg

SEQ ID NO: 52325 - RNA, 19 nt, Artificial Sequence
  Sense Oligo
ggauuuucuccaccgcacu

SEQ ID NO: 52326 - RNA, 19 nt, Artificial Sequence
  Antisense Oligo
agugcgguggagaaaaucc

SEQ ID NO: 52327 - RNA, 19 nt, Artificial Sequence
  Sense Oligo
gauuuucuccaccgcacuc

SEQ ID NO: 52328 - RNA, 19 nt, Artificial Sequence
  Antisense Oligo
gagugcgguggagaaaauc

SEQ ID NO: 52329 - RNA, 19 nt, Artificial Sequence
  Sense Oligo
auuuucuccaccgcacucu

SEQ ID NO: 52330 - RNA, 19 nt, Artificial Sequence
  Antisense Oligo
agagugcgguggagaaaau

SEQ ID NO: 52331 - RNA, 19 nt, Artificial Sequence
  Sense Oligo
uuuucuccaccgcacucuu

SEQ ID NO: 52332 - RNA, 19 nt, Artificial Sequence
  Antisense Oligo
aagagugcgguggagaaaa

SEQ ID NO: 52333 - RNA, 19 nt, Artificial Sequence
  Sense Oligo
uuucuccaccgcacucuuc

SEQ ID NO: 52334 - RNA, 19 nt, Artificial Sequence
  Antisense Oligo
gaagagugcgguggagaaa

SEQ ID NO: 52335 - RNA, 19 nt, Artificial Sequence
  Sense Oligo
uucuccaccgcacucuucg

SEQ ID NO: 52336 - RNA, 19 nt, Artificial Sequence
  Antisense Oligo
cgaagagugcgguggagaa

SEQ ID NO: 52337 - RNA, 19 nt, Artificial Sequence
  Sense Oligo
ucuccaccgcacucuucgu

SEQ ID NO: 52338 - RNA, 19 nt, Artificial Sequence
  Antisense Oligo
acgaagagugcgguggaga

SEQ ID NO: 52339 - RNA, 19 nt, Artificial Sequence
  Sense Oligo
cuccaccgcacucuucgug

SEQ ID NO: 52340 - RNA, 19 nt, Artificial Sequence
  Antisense Oligo
cacgaagagugcgguggag

SEQ ID NO: 52341 - RNA, 19 nt, Artificial Sequence
  Sense Oligo
caccgcacucuucguggag

SEQ ID NO: 52342 - RNA, 19 nt, Artificial Sequence
  Antisense Oligo
cuccacgaagagugcggug

SEQ ID NO: 52343 - RNA, 19 nt, Artificial Sequence
  Sense Oligo
accgcacucuucguggagc

SEQ ID NO: 52344 - RNA, 19 nt, Artificial Sequence
  Antisense Oligo
gcuccacgaagagugcggu

SEQ ID NO: 52345 - RNA, 19 nt, Artificial Sequence
  Sense Oligo
ccgcacucuucguggagca

SEQ ID NO: 52346 - RNA, 19 nt, Artificial Sequence
  Antisense Oligo
ugcuccacgaagagugcgg

SEQ ID NO: 52347 - RNA, 19 nt, Artificial Sequence
  Sense Oligo
cgcacucuucguggagcac

SEQ ID NO: 52348 - RNA, 19 nt, Artificial Sequence
  Antisense Oligo
gugcuccacgaagagugcg

SEQ ID NO: 52349 - RNA, 19 nt, Artificial Sequence
  Sense Oligo
aaggugaguacuugggcug

SEQ ID NO: 52350 - RNA, 19 nt, Artificial Sequence
  Antisense Oligo
cagcccaaguacucaccuu

SEQ ID NO: 52351 - RNA, 19 nt, Artificial Sequence
  Sense Oligo
aggugaguacuugggcugg

SEQ ID NO: 52352 - RNA, 19 nt, Artificial Sequence
  Antisense Oligo
ccagcccaaguacucaccu

SEQ ID NO: 52353 - RNA, 19 nt, Artificial Sequence
  Sense Oligo
gugaguacuugggcuggcc

SEQ ID NO: 52354 - RNA, 19 nt, Artificial Sequence
  Antisense Oligo
ggccagcccaaguacucac

SEQ ID NO: 52355 - RNA, 19 nt, Artificial Sequence
  Sense Oligo
ugaguacuugggcuggccu

SEQ ID NO: 52356 - RNA, 19 nt, Artificial Sequence
  Antisense Oligo
aggccagcccaaguacuca

SEQ ID NO: 52357 - RNA, 19 nt, Artificial Sequence
  Sense Oligo
gaguacuugggcuggccuc

SEQ ID NO: 52358 - RNA, 19 nt, Artificial Sequence
  Antisense Oligo
gaggccagcccaaguacuc

SEQ ID NO: 52359 - RNA, 19 nt, Artificial Sequence
  Sense Oligo
aguacuugggcuggccuca

SEQ ID NO: 52360 - RNA, 19 nt, Artificial Sequence
  Antisense Oligo
ugaggccagcccaaguacu

SEQ ID NO: 52361 - RNA, 19 nt, Artificial Sequence
  Sense Oligo
guacuugggcuggccucag

SEQ ID NO: 52362 - RNA, 19 nt, Artificial Sequence
  Antisense Oligo
cugaggccagcccaaguac

SEQ ID NO: 52363 - RNA, 19 nt, Artificial Sequence
  Sense Oligo
cuggccucagcacaugcac

SEQ ID NO: 52364 - RNA, 19 nt, Artificial Sequence
  Antisense Oligo
gugcaugugcugaggccag

SEQ ID NO: 52365 - RNA, 19 nt, Artificial Sequence
  Sense Oligo
uggccucagcacaugcacg

SEQ ID NO: 52366 - RNA, 19 nt, Artificial Sequence
  Antisense Oligo
cgugcaugugcugaggcca

SEQ ID NO: 52367 - RNA, 19 nt, Artificial Sequence
  Sense Oligo
gccucagcacaugcacgga

SEQ ID NO: 52368 - RNA, 19 nt, Artificial Sequence
  Antisense Oligo
uccgugcaugugcugaggc

SEQ ID NO: 52369 - RNA, 19 nt, Artificial Sequence
  Sense Oligo
ccucagcacaugcacggau

SEQ ID NO: 52370 - RNA, 19 nt, Artificial Sequence
  Antisense Oligo
auccgugcaugugcugagg

SEQ ID NO: 52371 - RNA, 19 nt, Artificial Sequence
  Sense Oligo
cucagcacaugcacggauc

SEQ ID NO: 52372 - RNA, 19 nt, Artificial Sequence
  Antisense Oligo
gauccgugcaugugcugag

SEQ ID NO: 52373 - RNA, 19 nt, Artificial Sequence
  Sense Oligo
ucagcacaugcacggaucc

SEQ ID NO: 52374 - RNA, 19 nt, Artificial Sequence
  Antisense Oligo
ggauccgugcaugugcuga

SEQ ID NO: 52375 - RNA, 19 nt, Artificial Sequence
  Sense Oligo
cagcacaugcacggaucca

SEQ ID NO: 52376 - RNA, 19 nt, Artificial Sequence
  Antisense Oligo
uggauccgugcaugugcug

SEQ ID NO: 52377 - RNA, 19 nt, Artificial Sequence
  Sense Oligo
agcacaugcacggauccac

SEQ ID NO: 52378 - RNA, 19 nt, Artificial Sequence
  Antisense Oligo
guggauccgugcaugugcu

SEQ ID NO: 52379 - RNA, 19 nt, Artificial Sequence
  Sense Oligo
gcacaugcacggauccacc

SEQ ID NO: 52380 - RNA, 19 nt, Artificial Sequence
  Antisense Oligo
gguggauccgugcaugugc

SEQ ID NO: 52381 - RNA, 19 nt, Artificial Sequence
  Sense Oligo
augcacggauccacccuuu

SEQ ID NO: 52382 - RNA, 19 nt, Artificial Sequence
  Antisense Oligo
aaaggguggauccgugcau

SEQ ID NO: 52383 - RNA, 19 nt, Artificial Sequence
  Sense Oligo
ugcacggauccacccuuuu

SEQ ID NO: 52384 - RNA, 19 nt, Artificial Sequence
  Antisense Oligo
aaaaggguggauccgugca

SEQ ID NO: 52385 - RNA, 19 nt, Artificial Sequence
  Sense Oligo
gcacggauccacccuuuuc

SEQ ID NO: 52386 - RNA, 19 nt, Artificial Sequence
  Antisense Oligo
gaaaaggguggauccgugc

SEQ ID NO: 52387 - RNA, 19 nt, Artificial Sequence
  Sense Oligo
cacggauccacccuuuucc

SEQ ID NO: 52388 - RNA, 19 nt, Artificial Sequence
  Antisense Oligo
ggaaaaggguggauccgug

SEQ ID NO: 52389 - RNA, 19 nt, Artificial Sequence
  Sense Oligo
ggauccacccuuuuccgaa

SEQ ID NO: 52390 - RNA, 19 nt, Artificial Sequence
  Antisense Oligo
uucggaaaaggguggaucc

SEQ ID NO: 52391 - RNA, 19 nt, Artificial Sequence
  Sense Oligo
acugacagugaucugcggc

SEQ ID NO: 52392 - RNA, 19 nt, Artificial Sequence
  Antisense Oligo
gccgcagaucacugucagu

SEQ ID NO: 52393 - RNA, 19 nt, Artificial Sequence
  Sense Oligo
cugacagugaucugcggcu

SEQ ID NO: 52394 - RNA, 19 nt, Artificial Sequence
  Antisense Oligo
agccgcagaucacugucag

SEQ ID NO: 52395 - RNA, 19 nt, Artificial Sequence
  Sense Oligo
ugacagugaucugcggcug

SEQ ID NO: 52396 - RNA, 19 nt, Artificial Sequence
  Antisense Oligo
cagccgcagaucacuguca

SEQ ID NO: 52397 - RNA, 19 nt, Artificial Sequence
  Sense Oligo
gacagugaucugcggcugg

SEQ ID NO: 52398 - RNA, 19 nt, Artificial Sequence
  Antisense Oligo
ccagccgcagaucacuguc

SEQ ID NO: 52399 - RNA, 19 nt, Artificial Sequence
  Sense Oligo
acagugaucugcggcuggg

SEQ ID NO: 52400 - RNA, 19 nt, Artificial Sequence
  Antisense Oligo
cccagccgcagaucacugu

SEQ ID NO: 52401 - RNA, 19 nt, Artificial Sequence
  Sense Oligo
cagugaucugcggcuggga

SEQ ID NO: 52402 - RNA, 19 nt, Artificial Sequence
  Antisense Oligo
ucccagccgcagaucacug

SEQ ID NO: 52403 - RNA, 19 nt, Artificial Sequence
  Sense Oligo
agacgcucuuuuggcucug

SEQ ID NO: 52404 - RNA, 19 nt, Artificial Sequence
  Antisense Oligo
cagagccaaaagagcgucu

SEQ ID NO: 52405 - RNA, 19 nt, Artificial Sequence
  Sense Oligo
gacgcucuuuuggcucuga

SEQ ID NO: 52406 - RNA, 19 nt, Artificial Sequence
  Antisense Oligo
ucagagccaaaagagcguc

SEQ ID NO: 52407 - RNA, 19 nt, Artificial Sequence
  Sense Oligo
acgcucuuuuggcucugac

SEQ ID NO: 52408 - RNA, 19 nt, Artificial Sequence
  Antisense Oligo
gucagagccaaaagagcgu

SEQ ID NO: 52409 - RNA, 19 nt, Artificial Sequence
  Sense Oligo
ucuuuuggcucugaccguu

SEQ ID NO: 52410 - RNA, 19 nt, Artificial Sequence
  Antisense Oligo
aacggucagagccaaaaga

SEQ ID NO: 52411 - RNA, 19 nt, Artificial Sequence
  Sense Oligo
cuuuuggcucugaccguuu

SEQ ID NO: 52412 - RNA, 19 nt, Artificial Sequence
  Antisense Oligo
aaacggucagagccaaaag

SEQ ID NO: 52413 - RNA, 19 nt, Artificial Sequence
  Sense Oligo
uuuuggcucugaccguuuu

SEQ ID NO: 52414 - RNA, 19 nt, Artificial Sequence
  Antisense Oligo
aaaacggucagagccaaaa

SEQ ID NO: 52415 - RNA, 19 nt, Artificial Sequence
  Sense Oligo
uuuggcucugaccguuuug

SEQ ID NO: 52416 - RNA, 19 nt, Artificial Sequence
  Antisense Oligo
caaaacggucagagccaaa

SEQ ID NO: 52417 - RNA, 19 nt, Artificial Sequence
  Sense Oligo
uuggcucugaccguuuugu

SEQ ID NO: 52418 - RNA, 19 nt, Artificial Sequence
  Antisense Oligo
acaaaacggucagagccaa

SEQ ID NO: 52419 - RNA, 19 nt, Artificial Sequence
  Sense Oligo
uggcucugaccguuuuguc

SEQ ID NO: 52420 - RNA, 19 nt, Artificial Sequence
  Antisense Oligo
gacaaaacggucagagcca

SEQ ID NO: 52421 - RNA, 19 nt, Artificial Sequence
  Sense Oligo
ggcucugaccguuuugucu

SEQ ID NO: 52422 - RNA, 19 nt, Artificial Sequence
  Antisense Oligo
agacaaaacggucagagcc

SEQ ID NO: 52423 - RNA, 19 nt, Artificial Sequence
  Sense Oligo
gcucugaccguuuugucua

SEQ ID NO: 52424 - RNA, 19 nt, Artificial Sequence
  Antisense Oligo
uagacaaaacggucagagc

SEQ ID NO: 52425 - RNA, 19 nt, Artificial Sequence
  Sense Oligo
cucugaccguuuugucuag

SEQ ID NO: 52426 - RNA, 19 nt, Artificial Sequence
  Antisense Oligo
cuagacaaaacggucagag

SEQ ID NO: 52427 - RNA, 19 nt, Artificial Sequence
  Sense Oligo
ucugaccguuuugucuaga

SEQ ID NO: 52428 - RNA, 19 nt, Artificial Sequence
  Antisense Oligo
ucuagacaaaacggucaga

SEQ ID NO: 52429 - RNA, 19 nt, Artificial Sequence
  Sense Oligo
cugaccguuuugucuagac

SEQ ID NO: 52430 - RNA, 19 nt, Artificial Sequence
  Antisense Oligo
gucuagacaaaacggucag

SEQ ID NO: 52431 - RNA, 19 nt, Artificial Sequence
  Sense Oligo
ugaccguuuugucuagaca

SEQ ID NO: 52432 - RNA, 19 nt, Artificial Sequence
  Antisense Oligo
ugucuagacaaaacgguca

SEQ ID NO: 52433 - RNA, 19 nt, Artificial Sequence
  Sense Oligo
guuuugucuagacaugcaa

SEQ ID NO: 52434 - RNA, 19 nt, Artificial Sequence
  Antisense Oligo
uugcaugucuagacaaaac

SEQ ID NO: 52435 - RNA, 19 nt, Artificial Sequence
  Sense Oligo
uugucuagacaugcaaagg

SEQ ID NO: 52436 - RNA, 19 nt, Artificial Sequence
  Antisense Oligo
ccuuugcaugucuagacaa

SEQ ID NO: 52437 - RNA, 19 nt, Artificial Sequence
  Sense Oligo
ugucuagacaugcaaagga

SEQ ID NO: 52438 - RNA, 19 nt, Artificial Sequence
  Antisense Oligo
uccuuugcaugucuagaca

SEQ ID NO: 52439 - RNA, 19 nt, Artificial Sequence
  Sense Oligo
gucuagacaugcaaaggaa

SEQ ID NO: 52440 - RNA, 19 nt, Artificial Sequence
  Antisense Oligo
uuccuuugcaugucuagac

SEQ ID NO: 52441 - RNA, 19 nt, Artificial Sequence
  Sense Oligo
ucuagacaugcaaaggaag

SEQ ID NO: 52442 - RNA, 19 nt, Artificial Sequence
  Antisense Oligo
cuuccuuugcaugucuaga

SEQ ID NO: 52443 - RNA, 19 nt, Artificial Sequence
  Sense Oligo
cuagacaugcaaaggaagg

SEQ ID NO: 52444 - RNA, 19 nt, Artificial Sequence
  Antisense Oligo
ccuuccuuugcaugucuag

SEQ ID NO: 52445 - RNA, 19 nt, Artificial Sequence
  Sense Oligo
uagacaugcaaaggaaggu

SEQ ID NO: 52446 - RNA, 19 nt, Artificial Sequence
  Antisense Oligo
accuuccuuugcaugucua

SEQ ID NO: 52447 - RNA, 19 nt, Artificial Sequence
  Sense Oligo
agacaugcaaaggaaggug

SEQ ID NO: 52448 - RNA, 19 nt, Artificial Sequence
  Antisense Oligo
caccuuccuuugcaugucu

SEQ ID NO: 52449 - RNA, 19 nt, Artificial Sequence
  Sense Oligo
gacaugcaaaggaagguga

SEQ ID NO: 52450 - RNA, 19 nt, Artificial Sequence
  Antisense Oligo
ucaccuuccuuugcauguc

SEQ ID NO: 52451 - RNA, 19 nt, Artificial Sequence
  Sense Oligo
acaugcaaaggaaggugau

SEQ ID NO: 52452 - RNA, 19 nt, Artificial Sequence
  Antisense Oligo
aucaccuuccuuugcaugu

SEQ ID NO: 52453 - RNA, 19 nt, Artificial Sequence
  Sense Oligo
caugcaaaggaaggugauu

SEQ ID NO: 52454 - RNA, 19 nt, Artificial Sequence
  Antisense Oligo
aaucaccuuccuuugcaug

SEQ ID NO: 52455 - RNA, 19 nt, Artificial Sequence
  Sense Oligo
gauuucaucacuaggccau

SEQ ID NO: 52456 - RNA, 19 nt, Artificial Sequence
  Antisense Oligo
auggccuagugaugaaauc

SEQ ID NO: 52457 - RNA, 19 nt, Artificial Sequence
  Sense Oligo
auuucaucacuaggccauu

SEQ ID NO: 52458 - RNA, 19 nt, Artificial Sequence
  Antisense Oligo
aauggccuagugaugaaau

SEQ ID NO: 52459 - RNA, 19 nt, Artificial Sequence
  Sense Oligo
uuucaucacuaggccauua

SEQ ID NO: 52460 - RNA, 19 nt, Artificial Sequence
  Antisense Oligo
uaauggccuagugaugaaa

SEQ ID NO: 52461 - RNA, 19 nt, Artificial Sequence
  Sense Oligo
uucaucacuaggccauuac

SEQ ID NO: 52462 - RNA, 19 nt, Artificial Sequence
  Antisense Oligo
guaauggccuagugaugaa

SEQ ID NO: 52463 - RNA, 19 nt, Artificial Sequence
  Sense Oligo
ucaucacuaggccauuaca

SEQ ID NO: 52464 - RNA, 19 nt, Artificial Sequence
  Antisense Oligo
uguaauggccuagugauga

SEQ ID NO: 52465 - RNA, 19 nt, Artificial Sequence
  Sense Oligo
cacuaggccauuacauuuu

SEQ ID NO: 52466 - RNA, 19 nt, Artificial Sequence
  Antisense Oligo
aaaauguaauggccuagug

SEQ ID NO: 52467 - RNA, 19 nt, Artificial Sequence
  Sense Oligo
acuaggccauuacauuuuc

SEQ ID NO: 52468 - RNA, 19 nt, Artificial Sequence
  Antisense Oligo
gaaaauguaauggccuagu

SEQ ID NO: 52469 - RNA, 19 nt, Artificial Sequence
  Sense Oligo
cuaggccauuacauuuucc

SEQ ID NO: 52470 - RNA, 19 nt, Artificial Sequence
  Antisense Oligo
ggaaaauguaauggccuag

SEQ ID NO: 52471 - RNA, 19 nt, Artificial Sequence
  Sense Oligo
uuuacccucugcugauugc

SEQ ID NO: 52472 - RNA, 19 nt, Artificial Sequence
  Antisense Oligo
gcaaucagcagaggguaaa

SEQ ID NO: 52473 - RNA, 19 nt, Artificial Sequence
  Sense Oligo
uuacccucugcugauugcu

SEQ ID NO: 52474 - RNA, 19 nt, Artificial Sequence
  Antisense Oligo
agcaaucagcagaggguaa

SEQ ID NO: 52475 - RNA, 19 nt, Artificial Sequence
  Sense Oligo
acccucugcugauugcuaa

SEQ ID NO: 52476 - RNA, 19 nt, Artificial Sequence
  Antisense Oligo
uuagcaaucagcagagggu

SEQ ID NO: 52477 - RNA, 19 nt, Artificial Sequence
  Sense Oligo
cccucugcugauugcuaag

SEQ ID NO: 52478 - RNA, 19 nt, Artificial Sequence
  Antisense Oligo
cuuagcaaucagcagaggg

SEQ ID NO: 52479 - RNA, 19 nt, Artificial Sequence
  Sense Oligo
ccucugcugauugcuaagu

SEQ ID NO: 52480 - RNA, 19 nt, Artificial Sequence
  Antisense Oligo
acuuagcaaucagcagagg

SEQ ID NO: 52481 - RNA, 19 nt, Artificial Sequence
  Sense Oligo
cucugcugauugcuaaguc

SEQ ID NO: 52482 - RNA, 19 nt, Artificial Sequence
  Antisense Oligo
gacuuagcaaucagcagag

SEQ ID NO: 52483 - RNA, 19 nt, Artificial Sequence
  Sense Oligo
ucugcugauugcuaaguca

SEQ ID NO: 52484 - RNA, 19 nt, Artificial Sequence
  Antisense Oligo
ugacuuagcaaucagcaga

SEQ ID NO: 52485 - RNA, 19 nt, Artificial Sequence
  Sense Oligo
aagucagagcauaucauuu

SEQ ID NO: 52486 - RNA, 19 nt, Artificial Sequence
  Antisense Oligo
aaaugauaugcucugacuu

SEQ ID NO: 52487 - RNA, 19 nt, Artificial Sequence
  Sense Oligo
agucagagcauaucauuua

SEQ ID NO: 52488 - RNA, 19 nt, Artificial Sequence
  Antisense Oligo
uaaaugauaugcucugacu

SEQ ID NO: 52489 - RNA, 19 nt, Artificial Sequence
  Sense Oligo
agagcauaucauuuagaag

SEQ ID NO: 52490 - RNA, 19 nt, Artificial Sequence
  Antisense Oligo
cuucuaaaugauaugcucu

SEQ ID NO: 52491 - RNA, 19 nt, Artificial Sequence
  Sense Oligo
gagcauaucauuuagaagu

SEQ ID NO: 52492 - RNA, 19 nt, Artificial Sequence
  Antisense Oligo
acuucuaaaugauaugcuc

SEQ ID NO: 52493 - RNA, 19 nt, Artificial Sequence
  Sense Oligo
agcauaucauuuagaagug

SEQ ID NO: 52494 - RNA, 19 nt, Artificial Sequence
  Antisense Oligo
cacuucuaaaugauaugcu

SEQ ID NO: 52495 - RNA, 19 nt, Artificial Sequence
  Sense Oligo
gcauaucauuuagaaguga

SEQ ID NO: 52496 - RNA, 19 nt, Artificial Sequence
  Antisense Oligo
ucacuucuaaaugauaugc

SEQ ID NO: 52497 - RNA, 19 nt, Artificial Sequence
  Sense Oligo
cauuuagaagugauuccag

SEQ ID NO: 52498 - RNA, 19 nt, Artificial Sequence
  Antisense Oligo
cuggaaucacuucuaaaug

SEQ ID NO: 52499 - RNA, 19 nt, Artificial Sequence
  Sense Oligo
auuuagaagugauuccagg

SEQ ID NO: 52500 - RNA, 19 nt, Artificial Sequence
  Antisense Oligo
ccuggaaucacuucuaaau

SEQ ID NO: 52501 - RNA, 19 nt, Artificial Sequence
  Sense Oligo
uuuagaagugauuccagga

SEQ ID NO: 52502 - RNA, 19 nt, Artificial Sequence
  Antisense Oligo
uccuggaaucacuucuaaa

SEQ ID NO: 52503 - RNA, 19 nt, Artificial Sequence
  Sense Oligo
acagaccacuagccuggcc

SEQ ID NO: 52504 - RNA, 19 nt, Artificial Sequence
  Antisense Oligo
ggccaggcuaguggucugu

SEQ ID NO: 52505 - RNA, 19 nt, Artificial Sequence
  Sense Oligo
cagaccacuagccuggcca

SEQ ID NO: 52506 - RNA, 19 nt, Artificial Sequence
  Antisense Oligo
uggccaggcuaguggucug

SEQ ID NO: 52507 - RNA, 19 nt, Artificial Sequence
  Sense Oligo
agaccacuagccuggccau

SEQ ID NO: 52508 - RNA, 19 nt, Artificial Sequence
  Antisense Oligo
auggccaggcuaguggucu

SEQ ID NO: 52509 - RNA, 19 nt, Artificial Sequence
  Sense Oligo
gaccacuagccuggccauc

SEQ ID NO: 52510 - RNA, 19 nt, Artificial Sequence
  Antisense Oligo
gauggccaggcuagugguc

SEQ ID NO: 52511 - RNA, 19 nt, Artificial Sequence
  Sense Oligo
ccacuagccuggccaucug

SEQ ID NO: 52512 - RNA, 19 nt, Artificial Sequence
  Antisense Oligo
cagauggccaggcuagugg

SEQ ID NO: 52513 - RNA, 19 nt, Artificial Sequence
  Sense Oligo
cacuagccuggccaucugu

SEQ ID NO: 52514 - RNA, 19 nt, Artificial Sequence
  Antisense Oligo
acagauggccaggcuagug

SEQ ID NO: 52515 - RNA, 19 nt, Artificial Sequence
  Sense Oligo
acuagccuggccaucugug

SEQ ID NO: 52516 - RNA, 19 nt, Artificial Sequence
  Antisense Oligo
cacagauggccaggcuagu

SEQ ID NO: 52517 - RNA, 19 nt, Artificial Sequence
  Sense Oligo
cuagccuggccaucugugg

SEQ ID NO: 52518 - RNA, 19 nt, Artificial Sequence
  Antisense Oligo
ccacagauggccaggcuag

SEQ ID NO: 52519 - RNA, 19 nt, Artificial Sequence
  Sense Oligo
uagccuggccaucugugga

SEQ ID NO: 52520 - RNA, 19 nt, Artificial Sequence
  Antisense Oligo
uccacagauggccaggcua

SEQ ID NO: 52521 - RNA, 19 nt, Artificial Sequence
  Sense Oligo
agccuggccaucuguggaa

SEQ ID NO: 52522 - RNA, 19 nt, Artificial Sequence
  Antisense Oligo
uuccacagauggccaggcu

SEQ ID NO: 52523 - RNA, 19 nt, Artificial Sequence
  Sense Oligo
gccuggccaucuguggaag

SEQ ID NO: 52524 - RNA, 19 nt, Artificial Sequence
  Antisense Oligo
cuuccacagauggccaggc

SEQ ID NO: 52525 - RNA, 19 nt, Artificial Sequence
  Sense Oligo
cuggccaucuguggaagcu

SEQ ID NO: 52526 - RNA, 19 nt, Artificial Sequence
  Antisense Oligo
agcuuccacagauggccag

SEQ ID NO: 52527 - RNA, 19 nt, Artificial Sequence
  Sense Oligo
uggccaucuguggaagcug

SEQ ID NO: 52528 - RNA, 19 nt, Artificial Sequence
  Antisense Oligo
cagcuuccacagauggcca

SEQ ID NO: 52529 - RNA, 19 nt, Artificial Sequence
  Sense Oligo
ggccaucuguggaagcugu

SEQ ID NO: 52530 - RNA, 19 nt, Artificial Sequence
  Antisense Oligo
acagcuuccacagauggcc

SEQ ID NO: 52531 - RNA, 19 nt, Artificial Sequence
  Sense Oligo
gccaucuguggaagcuguu

SEQ ID NO: 52532 - RNA, 19 nt, Artificial Sequence
  Antisense Oligo
aacagcuuccacagauggc

SEQ ID NO: 52533 - RNA, 19 nt, Artificial Sequence
  Sense Oligo
ccaucuguggaagcuguua

SEQ ID NO: 52534 - RNA, 19 nt, Artificial Sequence
  Antisense Oligo
uaacagcuuccacagaugg

SEQ ID NO: 52535 - RNA, 19 nt, Artificial Sequence
  Sense Oligo
cuguggaagcuguuaccau

SEQ ID NO: 52536 - RNA, 19 nt, Artificial Sequence
  Antisense Oligo
augguaacagcuuccacag

SEQ ID NO: 52537 - RNA, 19 nt, Artificial Sequence
  Sense Oligo
guggaagcuguuaccauuu

SEQ ID NO: 52538 - RNA, 19 nt, Artificial Sequence
  Antisense Oligo
aaaugguaacagcuuccac

SEQ ID NO: 52539 - RNA, 19 nt, Artificial Sequence
  Sense Oligo
gaagcuguuaccauuuuca

SEQ ID NO: 52540 - RNA, 19 nt, Artificial Sequence
  Antisense Oligo
ugaaaaugguaacagcuuc

SEQ ID NO: 52541 - RNA, 19 nt, Artificial Sequence
  Sense Oligo
agcuguuaccauuuucaua

SEQ ID NO: 52542 - RNA, 19 nt, Artificial Sequence
  Antisense Oligo
uaugaaaaugguaacagcu

SEQ ID NO: 52543 - RNA, 19 nt, Artificial Sequence
  Sense Oligo
uguuaccauuuucauaguc

SEQ ID NO: 52544 - RNA, 19 nt, Artificial Sequence
  Antisense Oligo
gacuaugaaaaugguaaca

SEQ ID NO: 52545 - RNA, 19 nt, Artificial Sequence
  Sense Oligo
acaggaagccaccaugccu

SEQ ID NO: 52546 - RNA, 19 nt, Artificial Sequence
  Antisense Oligo
aggcaugguggcuuccugu

SEQ ID NO: 52547 - RNA, 19 nt, Artificial Sequence
  Sense Oligo
aggaagccaccaugccugu

SEQ ID NO: 52548 - RNA, 19 nt, Artificial Sequence
  Antisense Oligo
acaggcaugguggcuuccu

SEQ ID NO: 52549 - RNA, 19 nt, Artificial Sequence
  Sense Oligo
ggaagccaccaugccuguc

SEQ ID NO: 52550 - RNA, 19 nt, Artificial Sequence
  Antisense Oligo
gacaggcaugguggcuucc

SEQ ID NO: 52551 - RNA, 19 nt, Artificial Sequence
  Sense Oligo
gaagccaccaugccuguca

SEQ ID NO: 52552 - RNA, 19 nt, Artificial Sequence
  Antisense Oligo
ugacaggcaugguggcuuc

SEQ ID NO: 52553 - RNA, 19 nt, Artificial Sequence
  Sense Oligo
cuucauaaagcuacuaaug

SEQ ID NO: 52554 - RNA, 19 nt, Artificial Sequence
  Antisense Oligo
cauuaguagcuuuaugaag

SEQ ID NO: 52555 - RNA, 19 nt, Artificial Sequence
  Sense Oligo
auaaagcuacuaauguggg

SEQ ID NO: 52556 - RNA, 19 nt, Artificial Sequence
  Antisense Oligo
cccacauuaguagcuuuau

SEQ ID NO: 52557 - RNA, 19 nt, Artificial Sequence
  Sense Oligo
gugacccuacagugaugcc

SEQ ID NO: 52558 - RNA, 19 nt, Artificial Sequence
  Antisense Oligo
ggcaucacuguagggucac

SEQ ID NO: 52559 - RNA, 19 nt, Artificial Sequence
  Sense Oligo
ugacccuacagugaugccc

SEQ ID NO: 52560 - RNA, 19 nt, Artificial Sequence
  Antisense Oligo
gggcaucacuguaggguca

SEQ ID NO: 52561 - RNA, 19 nt, Artificial Sequence
  Sense Oligo
acgcagugguguccagcaa

SEQ ID NO: 52562 - RNA, 19 nt, Artificial Sequence
  Antisense Oligo
uugcuggacaccacugcgu

SEQ ID NO: 52563 - RNA, 19 nt, Artificial Sequence
  Sense Oligo
cgcagugguguccagcaac

SEQ ID NO: 52564 - RNA, 19 nt, Artificial Sequence
  Antisense Oligo
guugcuggacaccacugcg

SEQ ID NO: 52565 - RNA, 19 nt, Artificial Sequence
  Sense Oligo
gucuggaagaggcagcgcu

SEQ ID NO: 52566 - RNA, 19 nt, Artificial Sequence
  Antisense Oligo
agcgcugccucuuccagac

SEQ ID NO: 52567 - RNA, 19 nt, Artificial Sequence
  Sense Oligo
ucuggaagaggcagcgcug

SEQ ID NO: 52568 - RNA, 19 nt, Artificial Sequence
  Antisense Oligo
cagcgcugccucuuccaga

SEQ ID NO: 52569 - RNA, 19 nt, Artificial Sequence
  Sense Oligo
accuuuggagcacaggaag

SEQ ID NO: 52570 - RNA, 19 nt, Artificial Sequence
  Antisense Oligo
cuuccugugcuccaaaggu

SEQ ID NO: 52571 - RNA, 19 nt, Artificial Sequence
  Sense Oligo
uuuggagcacaggaagguu

SEQ ID NO: 52572 - RNA, 19 nt, Artificial Sequence
  Antisense Oligo
aaccuuccugugcuccaaa

SEQ ID NO: 52573 - RNA, 19 nt, Artificial Sequence
  Sense Oligo
uuggagcacaggaagguuu

SEQ ID NO: 52574 - RNA, 19 nt, Artificial Sequence
  Antisense Oligo
aaaccuuccugugcuccaa

SEQ ID NO: 52575 - RNA, 19 nt, Artificial Sequence
  Sense Oligo
gcacaggaagguuuacuaa

SEQ ID NO: 52576 - RNA, 19 nt, Artificial Sequence
  Antisense Oligo
uuaguaaaccuuccugugc

SEQ ID NO: 52577 - RNA, 19 nt, Artificial Sequence
  Sense Oligo
cacaggaagguuuacuaaa

SEQ ID NO: 52578 - RNA, 19 nt, Artificial Sequence
  Antisense Oligo
uuuaguaaaccuuccugug

SEQ ID NO: 52579 - RNA, 19 nt, Artificial Sequence
  Sense Oligo
acaggaagguuuacuaaaa

SEQ ID NO: 52580 - RNA, 19 nt, Artificial Sequence
  Antisense Oligo
uuuuaguaaaccuuccugu

SEQ ID NO: 52581 - RNA, 19 nt, Artificial Sequence
  Sense Oligo
caggaagguuuacuaaaag

SEQ ID NO: 52582 - RNA, 19 nt, Artificial Sequence
  Antisense Oligo
cuuuuaguaaaccuuccug

SEQ ID NO: 52583 - RNA, 19 nt, Artificial Sequence
  Sense Oligo
aggaagguuuacuaaaagg

SEQ ID NO: 52584 - RNA, 19 nt, Artificial Sequence
  Antisense Oligo
ccuuuuaguaaaccuuccu

SEQ ID NO: 52585 - RNA, 19 nt, Artificial Sequence
  Sense Oligo
ggaagguuuacuaaaagga

SEQ ID NO: 52586 - RNA, 19 nt, Artificial Sequence
  Antisense Oligo
uccuuuuaguaaaccuucc

SEQ ID NO: 52587 - RNA, 19 nt, Artificial Sequence
  Sense Oligo
gaagguuuacuaaaaggag

SEQ ID NO: 52588 - RNA, 19 nt, Artificial Sequence
  Antisense Oligo
cuccuuuuaguaaaccuuc

SEQ ID NO: 52589 - RNA, 19 nt, Artificial Sequence
  Sense Oligo
gcauggaugcuggaugugu

SEQ ID NO: 52590 - RNA, 19 nt, Artificial Sequence
  Antisense Oligo
acacauccagcauccaugc

SEQ ID NO: 52591 - RNA, 19 nt, Artificial Sequence
  Sense Oligo
cauggaugcuggauguguu

SEQ ID NO: 52592 - RNA, 19 nt, Artificial Sequence
  Antisense Oligo
aacacauccagcauccaug

SEQ ID NO: 52593 - RNA, 19 nt, Artificial Sequence
  Sense Oligo
auggaugcuggauguguug

SEQ ID NO: 52594 - RNA, 19 nt, Artificial Sequence
  Antisense Oligo
caacacauccagcauccau

SEQ ID NO: 52595 - RNA, 19 nt, Artificial Sequence
  Sense Oligo
ugcuggauguguugacucu

SEQ ID NO: 52596 - RNA, 19 nt, Artificial Sequence
  Antisense Oligo
agagucaacacauccagca

SEQ ID NO: 52597 - RNA, 19 nt, Artificial Sequence
  Sense Oligo
acaucagcggcuuagacac

SEQ ID NO: 52598 - RNA, 19 nt, Artificial Sequence
  Antisense Oligo
gugucuaagccgcugaugu

SEQ ID NO: 52599 - RNA, 19 nt, Artificial Sequence
  Sense Oligo
agcugauuucccacccagg

SEQ ID NO: 52600 - RNA, 19 nt, Artificial Sequence
  Antisense Oligo
ccugggugggaaaucagcu

SEQ ID NO: 52601 - RNA, 19 nt, Artificial Sequence
  Sense Oligo
gcugauuucccacccagga

SEQ ID NO: 52602 - RNA, 19 nt, Artificial Sequence
  Antisense Oligo
uccugggugggaaaucagc

SEQ ID NO: 52603 - RNA, 19 nt, Artificial Sequence
  Sense Oligo
cugauuucccacccaggau

SEQ ID NO: 52604 - RNA, 19 nt, Artificial Sequence
  Antisense Oligo
auccugggugggaaaucag

SEQ ID NO: 52605 - RNA, 19 nt, Artificial Sequence
  Sense Oligo
ugauuucccacccaggaug

SEQ ID NO: 52606 - RNA, 19 nt, Artificial Sequence
  Antisense Oligo
cauccugggugggaaauca

SEQ ID NO: 52607 - RNA, 19 nt, Artificial Sequence
  Sense Oligo
gauuucccacccaggaugg

SEQ ID NO: 52608 - RNA, 19 nt, Artificial Sequence
  Antisense Oligo
ccauccugggugggaaauc

SEQ ID NO: 52609 - RNA, 19 nt, Artificial Sequence
  Sense Oligo
ugcccacgcuccgucuugu

SEQ ID NO: 52610 - RNA, 19 nt, Artificial Sequence
  Antisense Oligo
acaagacggagcgugggca

SEQ ID NO: 52611 - RNA, 19 nt, Artificial Sequence
  Sense Oligo
cacgcuccgucuugucccu

SEQ ID NO: 52612 - RNA, 19 nt, Artificial Sequence
  Antisense Oligo
agggacaagacggagcgug

SEQ ID NO: 52613 - RNA, 19 nt, Artificial Sequence
  Sense Oligo
acgcuccgucuugucccuu

SEQ ID NO: 52614 - RNA, 19 nt, Artificial Sequence
  Antisense Oligo
aagggacaagacggagcgu

SEQ ID NO: 52615 - RNA, 19 nt, Artificial Sequence
  Sense Oligo
cgcuccgucuugucccuuc

SEQ ID NO: 52616 - RNA, 19 nt, Artificial Sequence
  Antisense Oligo
gaagggacaagacggagcg

SEQ ID NO: 52617 - RNA, 19 nt, Artificial Sequence
  Sense Oligo
gcuccgucuugucccuuca

SEQ ID NO: 52618 - RNA, 19 nt, Artificial Sequence
  Antisense Oligo
ugaagggacaagacggagc

SEQ ID NO: 52619 - RNA, 19 nt, Artificial Sequence
  Sense Oligo
cuccgucuugucccuucau

SEQ ID NO: 52620 - RNA, 19 nt, Artificial Sequence
  Antisense Oligo
augaagggacaagacggag

SEQ ID NO: 52621 - RNA, 19 nt, Artificial Sequence
  Sense Oligo
gucccuaauguucagcuuc

SEQ ID NO: 52622 - RNA, 19 nt, Artificial Sequence
  Antisense Oligo
gaagcugaacauuagggac

SEQ ID NO: 52623 - RNA, 19 nt, Artificial Sequence
  Sense Oligo
ucccuaauguucagcuucc

SEQ ID NO: 52624 - RNA, 19 nt, Artificial Sequence
  Antisense Oligo
ggaagcugaacauuaggga

SEQ ID NO: 52625 - RNA, 19 nt, Artificial Sequence
  Sense Oligo
cccuaauguucagcuucca

SEQ ID NO: 52626 - RNA, 19 nt, Artificial Sequence
  Antisense Oligo
uggaagcugaacauuaggg

SEQ ID NO: 52627 - RNA, 19 nt, Artificial Sequence
  Sense Oligo
ccuaauguucagcuuccac

SEQ ID NO: 52628 - RNA, 19 nt, Artificial Sequence
  Antisense Oligo
guggaagcugaacauuagg

SEQ ID NO: 52629 - RNA, 19 nt, Artificial Sequence
  Sense Oligo
cuaauguucagcuuccacc

SEQ ID NO: 52630 - RNA, 19 nt, Artificial Sequence
  Antisense Oligo
gguggaagcugaacauuag

SEQ ID NO: 52631 - RNA, 19 nt, Artificial Sequence
  Sense Oligo
gagguagaggacaggccgu

SEQ ID NO: 52632 - RNA, 19 nt, Artificial Sequence
  Antisense Oligo
acggccuguccucuaccuc

SEQ ID NO: 52633 - RNA, 19 nt, Artificial Sequence
  Sense Oligo
agguagaggacaggccguu

SEQ ID NO: 52634 - RNA, 19 nt, Artificial Sequence
  Antisense Oligo
aacggccuguccucuaccu

SEQ ID NO: 52635 - RNA, 19 nt, Artificial Sequence
  Sense Oligo
gguagaggacaggccguuu

SEQ ID NO: 52636 - RNA, 19 nt, Artificial Sequence
  Antisense Oligo
aaacggccuguccucuacc

SEQ ID NO: 52637 - RNA, 19 nt, Artificial Sequence
  Sense Oligo
guagaggacaggccguuuu

SEQ ID NO: 52638 - RNA, 19 nt, Artificial Sequence
  Antisense Oligo
aaaacggccuguccucuac

SEQ ID NO: 52639 - RNA, 19 nt, Artificial Sequence
  Sense Oligo
uagaggacaggccguuuuc

SEQ ID NO: 52640 - RNA, 19 nt, Artificial Sequence
  Antisense Oligo
gaaaacggccuguccucua

SEQ ID NO: 52641 - RNA, 19 nt, Artificial Sequence
  Sense Oligo
agaggacaggccguuuucc

SEQ ID NO: 52642 - RNA, 19 nt, Artificial Sequence
  Antisense Oligo
ggaaaacggccuguccucu

SEQ ID NO: 52643 - RNA, 19 nt, Artificial Sequence
  Sense Oligo
gacaggccguuuuccuuaa

SEQ ID NO: 52644 - RNA, 19 nt, Artificial Sequence
  Antisense Oligo
uuaaggaaaacggccuguc

SEQ ID NO: 52645 - RNA, 19 nt, Artificial Sequence
  Sense Oligo
acaggccguuuuccuuaag

SEQ ID NO: 52646 - RNA, 19 nt, Artificial Sequence
  Antisense Oligo
cuuaaggaaaacggccugu

SEQ ID NO: 52647 - RNA, 19 nt, Artificial Sequence
  Sense Oligo
caggccguuuuccuuaaga

SEQ ID NO: 52648 - RNA, 19 nt, Artificial Sequence
  Antisense Oligo
ucuuaaggaaaacggccug

SEQ ID NO: 52649 - RNA, 19 nt, Artificial Sequence
  Sense Oligo
aggccguuuuccuuaagag

SEQ ID NO: 52650 - RNA, 19 nt, Artificial Sequence
  Antisense Oligo
cucuuaaggaaaacggccu

SEQ ID NO: 52651 - RNA, 19 nt, Artificial Sequence
  Sense Oligo
ggccguuuuccuuaagagc

SEQ ID NO: 52652 - RNA, 19 nt, Artificial Sequence
  Antisense Oligo
gcucuuaaggaaaacggcc

SEQ ID NO: 52653 - RNA, 19 nt, Artificial Sequence
  Sense Oligo
uuuuccuuaagagcccaau

SEQ ID NO: 52654 - RNA, 19 nt, Artificial Sequence
  Antisense Oligo
auugggcucuuaaggaaaa

SEQ ID NO: 52655 - RNA, 19 nt, Artificial Sequence
  Sense Oligo
uuuccuuaagagcccaauc

SEQ ID NO: 52656 - RNA, 19 nt, Artificial Sequence
  Antisense Oligo
gauugggcucuuaaggaaa

SEQ ID NO: 52657 - RNA, 19 nt, Artificial Sequence
  Sense Oligo
uuccuuaagagcccaaucc

SEQ ID NO: 52658 - RNA, 19 nt, Artificial Sequence
  Antisense Oligo
ggauugggcucuuaaggaa

SEQ ID NO: 52659 - RNA, 19 nt, Artificial Sequence
  Sense Oligo
uccuuaagagcccaauccc

SEQ ID NO: 52660 - RNA, 19 nt, Artificial Sequence
  Antisense Oligo
gggauugggcucuuaagga

SEQ ID NO: 52661 - RNA, 19 nt, Artificial Sequence
  Sense Oligo
ccuuaagagcccaaucccg

SEQ ID NO: 52662 - RNA, 19 nt, Artificial Sequence
  Antisense Oligo
cgggauugggcucuuaagg

SEQ ID NO: 52663 - RNA, 19 nt, Artificial Sequence
  Sense Oligo
cuuaagagcccaaucccgg

SEQ ID NO: 52664 - RNA, 19 nt, Artificial Sequence
  Antisense Oligo
ccgggauugggcucuuaag

SEQ ID NO: 52665 - RNA, 19 nt, Artificial Sequence
  Sense Oligo
uuaagagcccaaucccgga

SEQ ID NO: 52666 - RNA, 19 nt, Artificial Sequence
  Antisense Oligo
uccgggauugggcucuuaa

SEQ ID NO: 52667 - RNA, 19 nt, Artificial Sequence
  Sense Oligo
uaagagcccaaucccggac

SEQ ID NO: 52668 - RNA, 19 nt, Artificial Sequence
  Antisense Oligo
guccgggauugggcucuua

SEQ ID NO: 52669 - RNA, 19 nt, Artificial Sequence
  Sense Oligo
aagagcccaaucccggaca

SEQ ID NO: 52670 - RNA, 19 nt, Artificial Sequence
  Antisense Oligo
uguccgggauugggcucuu

SEQ ID NO: 52671 - RNA, 19 nt, Artificial Sequence
  Sense Oligo
agagcccaaucccggacac

SEQ ID NO: 52672 - RNA, 19 nt, Artificial Sequence
  Antisense Oligo
guguccgggauugggcucu

SEQ ID NO: 52673 - RNA, 19 nt, Artificial Sequence
  Sense Oligo
acacgccacaccagcucgu

SEQ ID NO: 52674 - RNA, 19 nt, Artificial Sequence
  Antisense Oligo
acgagcugguguggcgugu

SEQ ID NO: 52675 - RNA, 19 nt, Artificial Sequence
  Sense Oligo
caccagcucgugucucgug

SEQ ID NO: 52676 - RNA, 19 nt, Artificial Sequence
  Antisense Oligo
cacgagacacgagcuggug

SEQ ID NO: 52677 - RNA, 19 nt, Artificial Sequence
  Sense Oligo
accagcucgugucucgugg

SEQ ID NO: 52678 - RNA, 19 nt, Artificial Sequence
  Antisense Oligo
ccacgagacacgagcuggu

SEQ ID NO: 52679 - RNA, 19 nt, Artificial Sequence
  Sense Oligo
ccagcucgugucucguggu

SEQ ID NO: 52680 - RNA, 19 nt, Artificial Sequence
  Antisense Oligo
accacgagacacgagcugg

SEQ ID NO: 52681 - RNA, 19 nt, Artificial Sequence
  Sense Oligo
cagcucgugucucgugguc

SEQ ID NO: 52682 - RNA, 19 nt, Artificial Sequence
  Antisense Oligo
gaccacgagacacgagcug

SEQ ID NO: 52683 - RNA, 19 nt, Artificial Sequence
  Sense Oligo
agcucgugucucguggucc

SEQ ID NO: 52684 - RNA, 19 nt, Artificial Sequence
  Antisense Oligo
ggaccacgagacacgagcu

SEQ ID NO: 52685 - RNA, 19 nt, Artificial Sequence
  Sense Oligo
gcucgugucucgugguccu

SEQ ID NO: 52686 - RNA, 19 nt, Artificial Sequence
  Antisense Oligo
aggaccacgagacacgagc

SEQ ID NO: 52687 - RNA, 19 nt, Artificial Sequence
  Sense Oligo
cucgugucucgugguccua

SEQ ID NO: 52688 - RNA, 19 nt, Artificial Sequence
  Antisense Oligo
uaggaccacgagacacgag

SEQ ID NO: 52689 - RNA, 19 nt, Artificial Sequence
  Sense Oligo
ucgugucucgugguccuaa

SEQ ID NO: 52690 - RNA, 19 nt, Artificial Sequence
  Antisense Oligo
uuaggaccacgagacacga

SEQ ID NO: 52691 - RNA, 19 nt, Artificial Sequence
  Sense Oligo
cgugucucgugguccuaaa

SEQ ID NO: 52692 - RNA, 19 nt, Artificial Sequence
  Antisense Oligo
uuuaggaccacgagacacg

SEQ ID NO: 52693 - RNA, 19 nt, Artificial Sequence
  Sense Oligo
acucggccuuaucugguug

SEQ ID NO: 52694 - RNA, 19 nt, Artificial Sequence
  Antisense Oligo
caaccagauaaggccgagu

SEQ ID NO: 52695 - RNA, 19 nt, Artificial Sequence
  Sense Oligo
cucggccuuaucugguugc

SEQ ID NO: 52696 - RNA, 19 nt, Artificial Sequence
  Antisense Oligo
gcaaccagauaaggccgag

SEQ ID NO: 52697 - RNA, 19 nt, Artificial Sequence
  Sense Oligo
ucggccuuaucugguugca

SEQ ID NO: 52698 - RNA, 19 nt, Artificial Sequence
  Antisense Oligo
ugcaaccagauaaggccga

SEQ ID NO: 52699 - RNA, 19 nt, Artificial Sequence
  Sense Oligo
cggccuuaucugguugcaa

SEQ ID NO: 52700 - RNA, 19 nt, Artificial Sequence
  Antisense Oligo
uugcaaccagauaaggccg

SEQ ID NO: 52701 - RNA, 19 nt, Artificial Sequence
  Sense Oligo
ggccuuaucugguugcaag

SEQ ID NO: 52702 - RNA, 19 nt, Artificial Sequence
  Antisense Oligo
cuugcaaccagauaaggcc

SEQ ID NO: 52703 - RNA, 19 nt, Artificial Sequence
  Sense Oligo
gccuuaucugguugcaaga

SEQ ID NO: 52704 - RNA, 19 nt, Artificial Sequence
  Antisense Oligo
ucuugcaaccagauaaggc

SEQ ID NO: 52705 - RNA, 19 nt, Artificial Sequence
  Sense Oligo
ccuuaucugguugcaagaa

SEQ ID NO: 52706 - RNA, 19 nt, Artificial Sequence
  Antisense Oligo
uucuugcaaccagauaagg

SEQ ID NO: 52707 - RNA, 19 nt, Artificial Sequence
  Sense Oligo
uuuucguggcauggucaug

SEQ ID NO: 52708 - RNA, 19 nt, Artificial Sequence
  Antisense Oligo
caugaccaugccacgaaaa

SEQ ID NO: 52709 - RNA, 19 nt, Artificial Sequence
  Sense Oligo
uuucguggcauggucaugu

SEQ ID NO: 52710 - RNA, 19 nt, Artificial Sequence
  Antisense Oligo
acaugaccaugccacgaaa

SEQ ID NO: 52711 - RNA, 19 nt, Artificial Sequence
  Sense Oligo
uucguggcauggucauguu

SEQ ID NO: 52712 - RNA, 19 nt, Artificial Sequence
  Antisense Oligo
aacaugaccaugccacgaa

SEQ ID NO: 52713 - RNA, 19 nt, Artificial Sequence
  Sense Oligo
ucguggcauggucauguuc

SEQ ID NO: 52714 - RNA, 19 nt, Artificial Sequence
  Antisense Oligo
gaacaugaccaugccacga

SEQ ID NO: 52715 - RNA, 19 nt, Artificial Sequence
  Sense Oligo
cguggcauggucauguucc

SEQ ID NO: 52716 - RNA, 19 nt, Artificial Sequence
  Antisense Oligo
ggaacaugaccaugccacg

SEQ ID NO: 52717 - RNA, 19 nt, Artificial Sequence
  Sense Oligo
uggcauggucauguuccag

SEQ ID NO: 52718 - RNA, 19 nt, Artificial Sequence
  Antisense Oligo
cuggaacaugaccaugcca

SEQ ID NO: 52719 - RNA, 19 nt, Artificial Sequence
  Sense Oligo
ggcauggucauguuccagg

SEQ ID NO: 52720 - RNA, 19 nt, Artificial Sequence
  Antisense Oligo
ccuggaacaugaccaugcc

SEQ ID NO: 52721 - RNA, 19 nt, Artificial Sequence
  Sense Oligo
gcauggucauguuccaggu

SEQ ID NO: 52722 - RNA, 19 nt, Artificial Sequence
  Antisense Oligo
accuggaacaugaccaugc

SEQ ID NO: 52723 - RNA, 19 nt, Artificial Sequence
  Sense Oligo
cauggucauguuccaggug

SEQ ID NO: 52724 - RNA, 19 nt, Artificial Sequence
  Antisense Oligo
caccuggaacaugaccaug

SEQ ID NO: 52725 - RNA, 19 nt, Artificial Sequence
  Sense Oligo
auggucauguuccaggugg

SEQ ID NO: 52726 - RNA, 19 nt, Artificial Sequence
  Antisense Oligo
ccaccuggaacaugaccau

SEQ ID NO: 52727 - RNA, 19 nt, Artificial Sequence
  Sense Oligo
uggucauguuccaggugga

SEQ ID NO: 52728 - RNA, 19 nt, Artificial Sequence
  Antisense Oligo
uccaccuggaacaugacca

SEQ ID NO: 52729 - RNA, 19 nt, Artificial Sequence
  Sense Oligo
agcaugcagccucuccaag

SEQ ID NO: 52730 - RNA, 19 nt, Artificial Sequence
  Antisense Oligo
cuuggagaggcugcaugcu

SEQ ID NO: 52731 - RNA, 19 nt, Artificial Sequence
  Sense Oligo
gcaugcagccucuccaagu

SEQ ID NO: 52732 - RNA, 19 nt, Artificial Sequence
  Antisense Oligo
acuuggagaggcugcaugc

SEQ ID NO: 52733 - RNA, 19 nt, Artificial Sequence
  Sense Oligo
caugcagccucuccaaguc

SEQ ID NO: 52734 - RNA, 19 nt, Artificial Sequence
  Antisense Oligo
gacuuggagaggcugcaug

SEQ ID NO: 52735 - RNA, 19 nt, Artificial Sequence
  Sense Oligo
augcagccucuccaagucu

SEQ ID NO: 52736 - RNA, 19 nt, Artificial Sequence
  Antisense Oligo
agacuuggagaggcugcau

SEQ ID NO: 52737 - RNA, 19 nt, Artificial Sequence
  Sense Oligo
ugcagccucuccaagucuc

SEQ ID NO: 52738 - RNA, 19 nt, Artificial Sequence
  Antisense Oligo
gagacuuggagaggcugca

SEQ ID NO: 52739 - RNA, 19 nt, Artificial Sequence
  Sense Oligo
gccucuccaagucucauca

SEQ ID NO: 52740 - RNA, 19 nt, Artificial Sequence
  Antisense Oligo
ugaugagacuuggagaggc

SEQ ID NO: 52741 - RNA, 19 nt, Artificial Sequence
  Sense Oligo
agguccagcgugggucaua

SEQ ID NO: 52742 - RNA, 19 nt, Artificial Sequence
  Antisense Oligo
uaugacccacgcuggaccu

SEQ ID NO: 52743 - RNA, 19 nt, Artificial Sequence
  Sense Oligo
gguccagcgugggucauaa

SEQ ID NO: 52744 - RNA, 19 nt, Artificial Sequence
  Antisense Oligo
uuaugacccacgcuggacc

SEQ ID NO: 52745 - RNA, 19 nt, Artificial Sequence
  Sense Oligo
guccagcgugggucauaag

SEQ ID NO: 52746 - RNA, 19 nt, Artificial Sequence
  Antisense Oligo
cuuaugacccacgcuggac

SEQ ID NO: 52747 - RNA, 19 nt, Artificial Sequence
  Sense Oligo
uccagcgugggucauaagg

SEQ ID NO: 52748 - RNA, 19 nt, Artificial Sequence
  Antisense Oligo
ccuuaugacccacgcugga

SEQ ID NO: 52749 - RNA, 19 nt, Artificial Sequence
  Sense Oligo
ccagcgugggucauaaggg

SEQ ID NO: 52750 - RNA, 19 nt, Artificial Sequence
  Antisense Oligo
cccuuaugacccacgcugg

SEQ ID NO: 52751 - RNA, 19 nt, Artificial Sequence
  Sense Oligo
cagcgugggucauaagggc

SEQ ID NO: 52752 - RNA, 19 nt, Artificial Sequence
  Antisense Oligo
gcccuuaugacccacgcug

SEQ ID NO: 52753 - RNA, 19 nt, Artificial Sequence
  Sense Oligo
agcgugggucauaagggcc

SEQ ID NO: 52754 - RNA, 19 nt, Artificial Sequence
  Antisense Oligo
ggcccuuaugacccacgcu

SEQ ID NO: 52755 - RNA, 19 nt, Artificial Sequence
  Sense Oligo
aacccaaagguaaaggagc

SEQ ID NO: 52756 - RNA, 19 nt, Artificial Sequence
  Antisense Oligo
gcuccuuuaccuuuggguu

SEQ ID NO: 52757 - RNA, 19 nt, Artificial Sequence
  Sense Oligo
acccaaagguaaaggagcu

SEQ ID NO: 52758 - RNA, 19 nt, Artificial Sequence
  Antisense Oligo
agcuccuuuaccuuugggu

SEQ ID NO: 52759 - RNA, 19 nt, Artificial Sequence
  Sense Oligo
cccaaagguaaaggagcug

SEQ ID NO: 52760 - RNA, 19 nt, Artificial Sequence
  Antisense Oligo
cagcuccuuuaccuuuggg

SEQ ID NO: 52761 - RNA, 19 nt, Artificial Sequence
  Sense Oligo
ccaaagguaaaggagcugg

SEQ ID NO: 52762 - RNA, 19 nt, Artificial Sequence
  Antisense Oligo
ccagcuccuuuaccuuugg

SEQ ID NO: 52763 - RNA, 19 nt, Artificial Sequence
  Sense Oligo
caaagguaaaggagcuggc

SEQ ID NO: 52764 - RNA, 19 nt, Artificial Sequence
  Antisense Oligo
gccagcuccuuuaccuuug

SEQ ID NO: 52765 - RNA, 19 nt, Artificial Sequence
  Sense Oligo
aaagguaaaggagcuggcc

SEQ ID NO: 52766 - RNA, 19 nt, Artificial Sequence
  Antisense Oligo
ggccagcuccuuuaccuuu

SEQ ID NO: 52767 - RNA, 19 nt, Artificial Sequence
  Sense Oligo
cugccugcucacaugccca

SEQ ID NO: 52768 - RNA, 19 nt, Artificial Sequence
  Antisense Oligo
ugggcaugugagcaggcag

SEQ ID NO: 52769 - RNA, 19 nt, Artificial Sequence
  Sense Oligo
ugccugcucacaugcccac

SEQ ID NO: 52770 - RNA, 19 nt, Artificial Sequence
  Antisense Oligo
gugggcaugugagcaggca

SEQ ID NO: 52771 - RNA, 19 nt, Artificial Sequence
  Sense Oligo
gcucacaugcccacaggau

SEQ ID NO: 52772 - RNA, 19 nt, Artificial Sequence
  Antisense Oligo
auccugugggcaugugagc

SEQ ID NO: 52773 - RNA, 19 nt, Artificial Sequence
  Sense Oligo
cucacaugcccacaggauu

SEQ ID NO: 52774 - RNA, 19 nt, Artificial Sequence
  Antisense Oligo
aauccugugggcaugugag

SEQ ID NO: 52775 - RNA, 19 nt, Artificial Sequence
  Sense Oligo
ucacaugcccacaggauuu

SEQ ID NO: 52776 - RNA, 19 nt, Artificial Sequence
  Antisense Oligo
aaauccugugggcauguga

SEQ ID NO: 52777 - RNA, 19 nt, Artificial Sequence
  Sense Oligo
cacaugcccacaggauuug

SEQ ID NO: 52778 - RNA, 19 nt, Artificial Sequence
  Antisense Oligo
caaauccugugggcaugug

SEQ ID NO: 52779 - RNA, 19 nt, Artificial Sequence
  Sense Oligo
acaugcccacaggauuugg

SEQ ID NO: 52780 - RNA, 19 nt, Artificial Sequence
  Antisense Oligo
ccaaauccugugggcaugu

SEQ ID NO: 52781 - RNA, 19 nt, Artificial Sequence
  Sense Oligo
ccacaggauuugggagguu

SEQ ID NO: 52782 - RNA, 19 nt, Artificial Sequence
  Antisense Oligo
aaccucccaaauccugugg

SEQ ID NO: 52783 - RNA, 19 nt, Artificial Sequence
  Sense Oligo
cacaggauuugggagguua

SEQ ID NO: 52784 - RNA, 19 nt, Artificial Sequence
  Antisense Oligo
uaaccucccaaauccugug

SEQ ID NO: 52785 - RNA, 19 nt, Artificial Sequence
  Sense Oligo
acaggauuugggagguuag

SEQ ID NO: 52786 - RNA, 19 nt, Artificial Sequence
  Antisense Oligo
cuaaccucccaaauccugu

SEQ ID NO: 52787 - RNA, 19 nt, Artificial Sequence
  Sense Oligo
aggauuugggagguuagga

SEQ ID NO: 52788 - RNA, 19 nt, Artificial Sequence
  Antisense Oligo
uccuaaccucccaaauccu

SEQ ID NO: 52789 - RNA, 19 nt, Artificial Sequence
  Sense Oligo
uuuggcgauaaaauggccu

SEQ ID NO: 52790 - RNA, 19 nt, Artificial Sequence
  Antisense Oligo
aggccauuuuaucgccaaa

SEQ ID NO: 52791 - RNA, 19 nt, Artificial Sequence
  Sense Oligo
uuggcgauaaaauggccuc

SEQ ID NO: 52792 - RNA, 19 nt, Artificial Sequence
  Antisense Oligo
gaggccauuuuaucgccaa

SEQ ID NO: 52793 - RNA, 19 nt, Artificial Sequence
  Sense Oligo
uggcgauaaaauggccuca

SEQ ID NO: 52794 - RNA, 19 nt, Artificial Sequence
  Antisense Oligo
ugaggccauuuuaucgcca

SEQ ID NO: 52795 - RNA, 19 nt, Artificial Sequence
  Sense Oligo
ggcgauaaaauggccucag

SEQ ID NO: 52796 - RNA, 19 nt, Artificial Sequence
  Antisense Oligo
cugaggccauuuuaucgcc

SEQ ID NO: 52797 - RNA, 19 nt, Artificial Sequence
  Sense Oligo
gcgauaaaauggccucaga

SEQ ID NO: 52798 - RNA, 19 nt, Artificial Sequence
  Antisense Oligo
ucugaggccauuuuaucgc

SEQ ID NO: 52799 - RNA, 19 nt, Artificial Sequence
  Sense Oligo
cgauaaaauggccucagaa

SEQ ID NO: 52800 - RNA, 19 nt, Artificial Sequence
  Antisense Oligo
uucugaggccauuuuaucg

SEQ ID NO: 52801 - RNA, 19 nt, Artificial Sequence
  Sense Oligo
aacuuacuggguuucuggu

SEQ ID NO: 52802 - RNA, 19 nt, Artificial Sequence
  Antisense Oligo
accagaaacccaguaaguu

SEQ ID NO: 52803 - RNA, 19 nt, Artificial Sequence
  Sense Oligo
acuuacuggguuucugguu

SEQ ID NO: 52804 - RNA, 19 nt, Artificial Sequence
  Antisense Oligo
aaccagaaacccaguaagu

SEQ ID NO: 52805 - RNA, 19 nt, Artificial Sequence
  Sense Oligo
uuacuggguuucugguuua

SEQ ID NO: 52806 - RNA, 19 nt, Artificial Sequence
  Antisense Oligo
uaaaccagaaacccaguaa

SEQ ID NO: 52807 - RNA, 19 nt, Artificial Sequence
  Sense Oligo
uacuggguuucugguuuau

SEQ ID NO: 52808 - RNA, 19 nt, Artificial Sequence
  Antisense Oligo
auaaaccagaaacccagua

SEQ ID NO: 52809 - RNA, 19 nt, Artificial Sequence
  Sense Oligo
acuggguuucugguuuauu

SEQ ID NO: 52810 - RNA, 19 nt, Artificial Sequence
  Antisense Oligo
aauaaaccagaaacccagu

SEQ ID NO: 52811 - RNA, 19 nt, Artificial Sequence
  Sense Oligo
cuggguuucugguuuauuu

SEQ ID NO: 52812 - RNA, 19 nt, Artificial Sequence
  Antisense Oligo
aaauaaaccagaaacccag

SEQ ID NO: 52813 - RNA, 19 nt, Artificial Sequence
  Sense Oligo
ggguuucugguuuauuucc

SEQ ID NO: 52814 - RNA, 19 nt, Artificial Sequence
  Antisense Oligo
ggaaauaaaccagaaaccc

SEQ ID NO: 52815 - RNA, 19 nt, Artificial Sequence
  Sense Oligo
gguuuauuuccuuccaguc

SEQ ID NO: 52816 - RNA, 19 nt, Artificial Sequence
  Antisense Oligo
gacuggaaggaaauaaacc

SEQ ID NO: 52817 - RNA, 19 nt, Artificial Sequence
  Sense Oligo
auuuccuuccagucagauc

SEQ ID NO: 52818 - RNA, 19 nt, Artificial Sequence
  Antisense Oligo
gaucugacuggaaggaaau

SEQ ID NO: 52819 - RNA, 19 nt, Artificial Sequence
  Sense Oligo
uuuccuuccagucagaucu

SEQ ID NO: 52820 - RNA, 19 nt, Artificial Sequence
  Antisense Oligo
agaucugacuggaaggaaa

SEQ ID NO: 52821 - RNA, 19 nt, Artificial Sequence
  Sense Oligo
uuccuuccagucagaucuc

SEQ ID NO: 52822 - RNA, 19 nt, Artificial Sequence
  Antisense Oligo
gagaucugacuggaaggaa

SEQ ID NO: 52823 - RNA, 19 nt, Artificial Sequence
  Sense Oligo
uccuuccagucagaucucu

SEQ ID NO: 52824 - RNA, 19 nt, Artificial Sequence
  Antisense Oligo
agagaucugacuggaagga

SEQ ID NO: 52825 - RNA, 19 nt, Artificial Sequence
  Sense Oligo
ccuuccagucagaucucug

SEQ ID NO: 52826 - RNA, 19 nt, Artificial Sequence
  Antisense Oligo
cagagaucugacuggaagg

SEQ ID NO: 52827 - RNA, 19 nt, Artificial Sequence
  Sense Oligo
cuuccagucagaucucugu

SEQ ID NO: 52828 - RNA, 19 nt, Artificial Sequence
  Antisense Oligo
acagagaucugacuggaag

SEQ ID NO: 52829 - RNA, 19 nt, Artificial Sequence
  Sense Oligo
uuccagucagaucucugug

SEQ ID NO: 52830 - RNA, 19 nt, Artificial Sequence
  Antisense Oligo
cacagagaucugacuggaa

SEQ ID NO: 52831 - RNA, 19 nt, Artificial Sequence
  Sense Oligo
uccagucagaucucugugc

SEQ ID NO: 52832 - RNA, 19 nt, Artificial Sequence
  Antisense Oligo
gcacagagaucugacugga

SEQ ID NO: 52833 - RNA, 19 nt, Artificial Sequence
  Sense Oligo
ccagucagaucucugugca

SEQ ID NO: 52834 - RNA, 19 nt, Artificial Sequence
  Antisense Oligo
ugcacagagaucugacugg

SEQ ID NO: 52835 - RNA, 19 nt, Artificial Sequence
  Sense Oligo
ucagaucucugugcaggua

SEQ ID NO: 52836 - RNA, 19 nt, Artificial Sequence
  Antisense Oligo
uaccugcacagagaucuga

SEQ ID NO: 52837 - RNA, 19 nt, Artificial Sequence
  Sense Oligo
cagaucucugugcagguaa

SEQ ID NO: 52838 - RNA, 19 nt, Artificial Sequence
  Antisense Oligo
uuaccugcacagagaucug

SEQ ID NO: 52839 - RNA, 19 nt, Artificial Sequence
  Sense Oligo
agaucucugugcagguaac

SEQ ID NO: 52840 - RNA, 19 nt, Artificial Sequence
  Antisense Oligo
guuaccugcacagagaucu

SEQ ID NO: 52841 - RNA, 19 nt, Artificial Sequence
  Sense Oligo
guaaccacagccaaagacc

SEQ ID NO: 52842 - RNA, 19 nt, Artificial Sequence
  Antisense Oligo
ggucuuuggcugugguuac

SEQ ID NO: 52843 - RNA, 19 nt, Artificial Sequence
  Sense Oligo
uaaccacagccaaagaccu

SEQ ID NO: 52844 - RNA, 19 nt, Artificial Sequence
  Antisense Oligo
aggucuuuggcugugguua

SEQ ID NO: 52845 - RNA, 19 nt, Artificial Sequence
  Sense Oligo
uccugcuggaagccugacu

SEQ ID NO: 52846 - RNA, 19 nt, Artificial Sequence
  Antisense Oligo
agucaggcuuccagcagga

SEQ ID NO: 52847 - RNA, 19 nt, Artificial Sequence
  Sense Oligo
ccugcuggaagccugacuu

SEQ ID NO: 52848 - RNA, 19 nt, Artificial Sequence
  Antisense Oligo
aagucaggcuuccagcagg

SEQ ID NO: 52849 - RNA, 19 nt, Artificial Sequence
  Sense Oligo
cuggaagccugacuuguac

SEQ ID NO: 52850 - RNA, 19 nt, Artificial Sequence
  Antisense Oligo
guacaagucaggcuuccag

SEQ ID NO: 52851 - RNA, 19 nt, Artificial Sequence
  Sense Oligo
uggaagccugacuuguacc

SEQ ID NO: 52852 - RNA, 19 nt, Artificial Sequence
  Antisense Oligo
gguacaagucaggcuucca

SEQ ID NO: 52853 - RNA, 19 nt, Artificial Sequence
  Sense Oligo
ggaagccugacuuguaccc

SEQ ID NO: 52854 - RNA, 19 nt, Artificial Sequence
  Antisense Oligo
ggguacaagucaggcuucc

SEQ ID NO: 52855 - RNA, 19 nt, Artificial Sequence
  Sense Oligo
agagcagcccuugggacca

SEQ ID NO: 52856 - RNA, 19 nt, Artificial Sequence
  Antisense Oligo
uggucccaagggcugcucu

SEQ ID NO: 52857 - RNA, 19 nt, Artificial Sequence
  Sense Oligo
gagcagcccuugggaccau

SEQ ID NO: 52858 - RNA, 19 nt, Artificial Sequence
  Antisense Oligo
auggucccaagggcugcuc

SEQ ID NO: 52859 - RNA, 19 nt, Artificial Sequence
  Sense Oligo
agcagcccuugggaccauu

SEQ ID NO: 52860 - RNA, 19 nt, Artificial Sequence
  Antisense Oligo
aauggucccaagggcugcu

SEQ ID NO: 52861 - RNA, 19 nt, Artificial Sequence
  Sense Oligo
gcagcccuugggaccauuu

SEQ ID NO: 52862 - RNA, 19 nt, Artificial Sequence
  Antisense Oligo
aaauggucccaagggcugc

SEQ ID NO: 52863 - RNA, 19 nt, Artificial Sequence
  Sense Oligo
cagcccuugggaccauuug

SEQ ID NO: 52864 - RNA, 19 nt, Artificial Sequence
  Antisense Oligo
caaauggucccaagggcug

SEQ ID NO: 52865 - RNA, 19 nt, Artificial Sequence
  Sense Oligo
agcccuugggaccauuuga

SEQ ID NO: 52866 - RNA, 19 nt, Artificial Sequence
  Antisense Oligo
ucaaauggucccaagggcu

SEQ ID NO: 52867 - RNA, 19 nt, Artificial Sequence
  Sense Oligo
gcccuugggaccauuugaa

SEQ ID NO: 52868 - RNA, 19 nt, Artificial Sequence
  Antisense Oligo
uucaaauggucccaagggc

SEQ ID NO: 52869 - RNA, 19 nt, Artificial Sequence
  Sense Oligo
cgggcaggaaguugucgac

SEQ ID NO: 52870 - RNA, 19 nt, Artificial Sequence
  Antisense Oligo
gucgacaacuuccugcccg

SEQ ID NO: 52871 - RNA, 19 nt, Artificial Sequence
  Sense Oligo
gggcaggaaguugucgacg

SEQ ID NO: 52872 - RNA, 19 nt, Artificial Sequence
  Antisense Oligo
cgucgacaacuuccugccc

SEQ ID NO: 52873 - RNA, 19 nt, Artificial Sequence
  Sense Oligo
ggcaggaaguugucgacgg

SEQ ID NO: 52874 - RNA, 19 nt, Artificial Sequence
  Antisense Oligo
ccgucgacaacuuccugcc

SEQ ID NO: 52875 - RNA, 19 nt, Artificial Sequence
  Sense Oligo
gcaggaaguugucgacgga

SEQ ID NO: 52876 - RNA, 19 nt, Artificial Sequence
  Antisense Oligo
uccgucgacaacuuccugc

SEQ ID NO: 52877 - RNA, 19 nt, Artificial Sequence
  Sense Oligo
caggaaguugucgacggaa

SEQ ID NO: 52878 - RNA, 19 nt, Artificial Sequence
  Antisense Oligo
uuccgucgacaacuuccug

SEQ ID NO: 52879 - RNA, 19 nt, Artificial Sequence
  Sense Oligo
acugcugcaggauggcacg

SEQ ID NO: 52880 - RNA, 19 nt, Artificial Sequence
  Antisense Oligo
cgugccauccugcagcagu

SEQ ID NO: 52881 - RNA, 19 nt, Artificial Sequence
  Sense Oligo
cgggcauggcuggcuuuua

SEQ ID NO: 52882 - RNA, 19 nt, Artificial Sequence
  Antisense Oligo
uaaaagccagccaugcccg

SEQ ID NO: 52883 - RNA, 19 nt, Artificial Sequence
  Sense Oligo
gggcauggcuggcuuuuag

SEQ ID NO: 52884 - RNA, 19 nt, Artificial Sequence
  Antisense Oligo
cuaaaagccagccaugccc

SEQ ID NO: 52885 - RNA, 19 nt, Artificial Sequence
  Sense Oligo
cuggcuuuuaguuguuuug

SEQ ID NO: 52886 - RNA, 19 nt, Artificial Sequence
  Antisense Oligo
caaaacaacuaaaagccag

SEQ ID NO: 52887 - RNA, 19 nt, Artificial Sequence
  Sense Oligo
uggcuuuuaguuguuuugg

SEQ ID NO: 52888 - RNA, 19 nt, Artificial Sequence
  Antisense Oligo
ccaaaacaacuaaaagcca

SEQ ID NO: 52889 - RNA, 19 nt, Artificial Sequence
  Sense Oligo
ggcuuuuaguuguuuugga

SEQ ID NO: 52890 - RNA, 19 nt, Artificial Sequence
  Antisense Oligo
uccaaaacaacuaaaagcc

SEQ ID NO: 52891 - RNA, 19 nt, Artificial Sequence
  Sense Oligo
gcuuuuaguuguuuuggau

SEQ ID NO: 52892 - RNA, 19 nt, Artificial Sequence
  Antisense Oligo
auccaaaacaacuaaaagc

SEQ ID NO: 52893 - RNA, 19 nt, Artificial Sequence
  Sense Oligo
aguuguuuuggauauguac

SEQ ID NO: 52894 - RNA, 19 nt, Artificial Sequence
  Antisense Oligo
guacauauccaaaacaacu

SEQ ID NO: 52895 - RNA, 19 nt, Artificial Sequence
  Sense Oligo
guuguuuuggauauguacc

SEQ ID NO: 52896 - RNA, 19 nt, Artificial Sequence
  Antisense Oligo
gguacauauccaaaacaac

SEQ ID NO: 52897 - RNA, 19 nt, Artificial Sequence
  Sense Oligo
uuguuuuggauauguaccu

SEQ ID NO: 52898 - RNA, 19 nt, Artificial Sequence
  Antisense Oligo
agguacauauccaaaacaa

SEQ ID NO: 52899 - RNA, 19 nt, Artificial Sequence
  Sense Oligo
uguuuuggauauguaccuu

SEQ ID NO: 52900 - RNA, 19 nt, Artificial Sequence
  Antisense Oligo
aagguacauauccaaaaca

SEQ ID NO: 52901 - RNA, 19 nt, Artificial Sequence
  Sense Oligo
guuuuggauauguaccuug

SEQ ID NO: 52902 - RNA, 19 nt, Artificial Sequence
  Antisense Oligo
caagguacauauccaaaac

SEQ ID NO: 52903 - RNA, 19 nt, Artificial Sequence
  Sense Oligo
uuuuggauauguaccuuga

SEQ ID NO: 52904 - RNA, 19 nt, Artificial Sequence
  Antisense Oligo
ucaagguacauauccaaaa

SEQ ID NO: 52905 - RNA, 19 nt, Artificial Sequence
  Sense Oligo
uuuggauauguaccuugaa

SEQ ID NO: 52906 - RNA, 19 nt, Artificial Sequence
  Antisense Oligo
uucaagguacauauccaaa

SEQ ID NO: 52907 - RNA, 19 nt, Artificial Sequence
  Sense Oligo
uuggauauguaccuugaag

SEQ ID NO: 52908 - RNA, 19 nt, Artificial Sequence
  Antisense Oligo
cuucaagguacauauccaa

SEQ ID NO: 52909 - RNA, 19 nt, Artificial Sequence
  Sense Oligo
gggaauuccuggaucauuu

SEQ ID NO: 52910 - RNA, 19 nt, Artificial Sequence
  Antisense Oligo
aaaugauccaggaauuccc

SEQ ID NO: 52911 - RNA, 19 nt, Artificial Sequence
  Sense Oligo
gaauuccuggaucauuuga

SEQ ID NO: 52912 - RNA, 19 nt, Artificial Sequence
  Antisense Oligo
ucaaaugauccaggaauuc

SEQ ID NO: 52913 - RNA, 19 nt, Artificial Sequence
  Sense Oligo
uuccuggaucauuugauaa

SEQ ID NO: 52914 - RNA, 19 nt, Artificial Sequence
  Antisense Oligo
uuaucaaaugauccaggaa

SEQ ID NO: 52915 - RNA, 19 nt, Artificial Sequence
  Sense Oligo
uccuggaucauuugauaac

SEQ ID NO: 52916 - RNA, 19 nt, Artificial Sequence
  Antisense Oligo
guuaucaaaugauccagga

SEQ ID NO: 52917 - RNA, 19 nt, Artificial Sequence
  Sense Oligo
ccuggaucauuugauaacu

SEQ ID NO: 52918 - RNA, 19 nt, Artificial Sequence
  Antisense Oligo
aguuaucaaaugauccagg

SEQ ID NO: 52919 - RNA, 19 nt, Artificial Sequence
  Sense Oligo
guuuaacuuuaugcagagg

SEQ ID NO: 52920 - RNA, 19 nt, Artificial Sequence
  Antisense Oligo
ccucugcauaaaguuaaac

SEQ ID NO: 52921 - RNA, 19 nt, Artificial Sequence
  Sense Oligo
uuuaacuuuaugcagaggc

SEQ ID NO: 52922 - RNA, 19 nt, Artificial Sequence
  Antisense Oligo
gccucugcauaaaguuaaa

SEQ ID NO: 52923 - RNA, 19 nt, Artificial Sequence
  Sense Oligo
uuaacuuuaugcagaggca

SEQ ID NO: 52924 - RNA, 19 nt, Artificial Sequence
  Antisense Oligo
ugccucugcauaaaguuaa

SEQ ID NO: 52925 - RNA, 19 nt, Artificial Sequence
  Sense Oligo
uaacuuuaugcagaggcac

SEQ ID NO: 52926 - RNA, 19 nt, Artificial Sequence
  Antisense Oligo
gugccucugcauaaaguua

SEQ ID NO: 52927 - RNA, 19 nt, Artificial Sequence
  Sense Oligo
ggcugcagcaucuuucuua

SEQ ID NO: 52928 - RNA, 19 nt, Artificial Sequence
  Antisense Oligo
uaagaaagaugcugcagcc

SEQ ID NO: 52929 - RNA, 19 nt, Artificial Sequence
  Sense Oligo
cugcagcaucuuucuuaca

SEQ ID NO: 52930 - RNA, 19 nt, Artificial Sequence
  Antisense Oligo
uguaagaaagaugcugcag

SEQ ID NO: 52931 - RNA, 19 nt, Artificial Sequence
  Sense Oligo
agcaucuuucuuacauccc

SEQ ID NO: 52932 - RNA, 19 nt, Artificial Sequence
  Antisense Oligo
gggauguaagaaagaugcu

SEQ ID NO: 52933 - RNA, 19 nt, Artificial Sequence
  Sense Oligo
ccaggcaccagggucugaa

SEQ ID NO: 52934 - RNA, 19 nt, Artificial Sequence
  Antisense Oligo
uucagacccuggugccugg

SEQ ID NO: 52935 - RNA, 19 nt, Artificial Sequence
  Sense Oligo
agggucugaauuucuccac

SEQ ID NO: 52936 - RNA, 19 nt, Artificial Sequence
  Antisense Oligo
guggagaaauucagacccu

SEQ ID NO: 52937 - RNA, 19 nt, Artificial Sequence
  Sense Oligo
gggucugaauuucuccaca

SEQ ID NO: 52938 - RNA, 19 nt, Artificial Sequence
  Antisense Oligo
uguggagaaauucagaccc

SEQ ID NO: 52939 - RNA, 19 nt, Artificial Sequence
  Sense Oligo
cugaauuucuccacaucau

SEQ ID NO: 52940 - RNA, 19 nt, Artificial Sequence
  Antisense Oligo
augauguggagaaauucag

SEQ ID NO: 52941 - RNA, 19 nt, Artificial Sequence
  Sense Oligo
ugaauuucuccacaucaug

SEQ ID NO: 52942 - RNA, 19 nt, Artificial Sequence
  Antisense Oligo
caugauguggagaaauuca

SEQ ID NO: 52943 - RNA, 19 nt, Artificial Sequence
  Sense Oligo
gaauuucuccacaucaugg

SEQ ID NO: 52944 - RNA, 19 nt, Artificial Sequence
  Antisense Oligo
ccaugauguggagaaauuc

SEQ ID NO: 52945 - RNA, 19 nt, Artificial Sequence
  Sense Oligo
aauuucuccacaucauggg

SEQ ID NO: 52946 - RNA, 19 nt, Artificial Sequence
  Antisense Oligo
cccaugauguggagaaauu

SEQ ID NO: 52947 - RNA, 19 nt, Artificial Sequence
  Sense Oligo
auuucuccacaucaugggc

SEQ ID NO: 52948 - RNA, 19 nt, Artificial Sequence
  Antisense Oligo
gcccaugauguggagaaau

SEQ ID NO: 52949 - RNA, 19 nt, Artificial Sequence
  Sense Oligo
uuucuccacaucaugggca

SEQ ID NO: 52950 - RNA, 19 nt, Artificial Sequence
  Antisense Oligo
ugcccaugauguggagaaa

SEQ ID NO: 52951 - RNA, 19 nt, Artificial Sequence
  Sense Oligo
uucuccacaucaugggcaa

SEQ ID NO: 52952 - RNA, 19 nt, Artificial Sequence
  Antisense Oligo
uugcccaugauguggagaa

SEQ ID NO: 52953 - RNA, 19 nt, Artificial Sequence
  Sense Oligo
ucuccacaucaugggcaac

SEQ ID NO: 52954 - RNA, 19 nt, Artificial Sequence
  Antisense Oligo
guugcccaugauguggaga

SEQ ID NO: 52955 - RNA, 19 nt, Artificial Sequence
  Sense Oligo
acaccuguuacuaucugau

SEQ ID NO: 52956 - RNA, 19 nt, Artificial Sequence
  Antisense Oligo
aucagauaguaacaggugu

SEQ ID NO: 52957 - RNA, 19 nt, Artificial Sequence
  Sense Oligo
caccuguuacuaucugauu

SEQ ID NO: 52958 - RNA, 19 nt, Artificial Sequence
  Antisense Oligo
aaucagauaguaacaggug

SEQ ID NO: 52959 - RNA, 19 nt, Artificial Sequence
  Sense Oligo
ucauaauggccaccgugau

SEQ ID NO: 52960 - RNA, 19 nt, Artificial Sequence
  Antisense Oligo
aucacgguggccauuauga

SEQ ID NO: 52961 - RNA, 19 nt, Artificial Sequence
  Sense Oligo
cauaauggccaccgugaua

SEQ ID NO: 52962 - RNA, 19 nt, Artificial Sequence
  Antisense Oligo
uaucacgguggccauuaug

SEQ ID NO: 52963 - RNA, 19 nt, Artificial Sequence
  Sense Oligo
auaauggccaccgugauaa

SEQ ID NO: 52964 - RNA, 19 nt, Artificial Sequence
  Antisense Oligo
uuaucacgguggccauuau

SEQ ID NO: 52965 - RNA, 19 nt, Artificial Sequence
  Sense Oligo
uaauggccaccgugauaau

SEQ ID NO: 52966 - RNA, 19 nt, Artificial Sequence
  Antisense Oligo
auuaucacgguggccauua

SEQ ID NO: 52967 - RNA, 19 nt, Artificial Sequence
  Sense Oligo
aauggccaccgugauaauu

SEQ ID NO: 52968 - RNA, 19 nt, Artificial Sequence
  Antisense Oligo
aauuaucacgguggccauu

SEQ ID NO: 52969 - RNA, 19 nt, Artificial Sequence
  Sense Oligo
auggccaccgugauaauuc

SEQ ID NO: 52970 - RNA, 19 nt, Artificial Sequence
  Antisense Oligo
gaauuaucacgguggccau

SEQ ID NO: 52971 - RNA, 19 nt, Artificial Sequence
  Sense Oligo
uggccaccgugauaauuca

SEQ ID NO: 52972 - RNA, 19 nt, Artificial Sequence
  Antisense Oligo
ugaauuaucacgguggcca

SEQ ID NO: 52973 - RNA, 19 nt, Artificial Sequence
  Sense Oligo
ggccaccgugauaauucau

SEQ ID NO: 52974 - RNA, 19 nt, Artificial Sequence
  Antisense Oligo
augaauuaucacgguggcc

SEQ ID NO: 52975 - RNA, 19 nt, Artificial Sequence
  Sense Oligo
gccaccgugauaauucauu

SEQ ID NO: 52976 - RNA, 19 nt, Artificial Sequence
  Antisense Oligo
aaugaauuaucacgguggc

SEQ ID NO: 52977 - RNA, 19 nt, Artificial Sequence
  Sense Oligo
ccaccgugauaauucauug

SEQ ID NO: 52978 - RNA, 19 nt, Artificial Sequence
  Antisense Oligo
caaugaauuaucacggugg

SEQ ID NO: 52979 - RNA, 19 nt, Artificial Sequence
  Sense Oligo
caccgugauaauucauugu

SEQ ID NO: 52980 - RNA, 19 nt, Artificial Sequence
  Antisense Oligo
acaaugaauuaucacggug

SEQ ID NO: 52981 - RNA, 19 nt, Artificial Sequence
  Sense Oligo
accgugauaauucauugug

SEQ ID NO: 52982 - RNA, 19 nt, Artificial Sequence
  Antisense Oligo
cacaaugaauuaucacggu

SEQ ID NO: 52983 - RNA, 19 nt, Artificial Sequence
  Sense Oligo
ccgugauaauucauugugg

SEQ ID NO: 52984 - RNA, 19 nt, Artificial Sequence
  Antisense Oligo
ccacaaugaauuaucacgg

SEQ ID NO: 52985 - RNA, 19 nt, Artificial Sequence
  Sense Oligo
aaugacuaguuaugaugag

SEQ ID NO: 52986 - RNA, 19 nt, Artificial Sequence
  Antisense Oligo
cucaucauaacuagucauu

SEQ ID NO: 52987 - RNA, 19 nt, Artificial Sequence
  Sense Oligo
acuaguuaugaugagcauc

SEQ ID NO: 52988 - RNA, 19 nt, Artificial Sequence
  Antisense Oligo
gaugcucaucauaacuagu

SEQ ID NO: 52989 - RNA, 19 nt, Artificial Sequence
  Sense Oligo
cuaguuaugaugagcaucc

SEQ ID NO: 52990 - RNA, 19 nt, Artificial Sequence
  Antisense Oligo
ggaugcucaucauaacuag

SEQ ID NO: 52991 - RNA, 19 nt, Artificial Sequence
  Sense Oligo
uaguuaugaugagcauccu

SEQ ID NO: 52992 - RNA, 19 nt, Artificial Sequence
  Antisense Oligo
aggaugcucaucauaacua

SEQ ID NO: 52993 - RNA, 19 nt, Artificial Sequence
  Sense Oligo
aguuaugaugagcauccuu

SEQ ID NO: 52994 - RNA, 19 nt, Artificial Sequence
  Antisense Oligo
aaggaugcucaucauaacu

SEQ ID NO: 52995 - RNA, 19 nt, Artificial Sequence
  Sense Oligo
guuaugaugagcauccuuc

SEQ ID NO: 52996 - RNA, 19 nt, Artificial Sequence
  Antisense Oligo
gaaggaugcucaucauaac

SEQ ID NO: 52997 - RNA, 19 nt, Artificial Sequence
  Sense Oligo
uuaugaugagcauccuuca

SEQ ID NO: 52998 - RNA, 19 nt, Artificial Sequence
  Antisense Oligo
ugaaggaugcucaucauaa

SEQ ID NO: 52999 - RNA, 19 nt, Artificial Sequence
  Sense Oligo
cauccuucaugugcuuguu

SEQ ID NO: 53000 - RNA, 19 nt, Artificial Sequence
  Antisense Oligo
aacaagcacaugaaggaug

SEQ ID NO: 53001 - RNA, 19 nt, Artificial Sequence
  Sense Oligo
gugcuuguugggcauuugc

SEQ ID NO: 53002 - RNA, 19 nt, Artificial Sequence
  Antisense Oligo
gcaaaugcccaacaagcac

SEQ ID NO: 53003 - RNA, 19 nt, Artificial Sequence
  Sense Oligo
cuuguugggcauuugcugu

SEQ ID NO: 53004 - RNA, 19 nt, Artificial Sequence
  Antisense Oligo
acagcaaaugcccaacaag

SEQ ID NO: 53005 - RNA, 19 nt, Artificial Sequence
  Sense Oligo
uuguugggcauuugcuguc

SEQ ID NO: 53006 - RNA, 19 nt, Artificial Sequence
  Antisense Oligo
gacagcaaaugcccaacaa

SEQ ID NO: 53007 - RNA, 19 nt, Artificial Sequence
  Sense Oligo
uguugggcauuugcugucu

SEQ ID NO: 53008 - RNA, 19 nt, Artificial Sequence
  Antisense Oligo
agacagcaaaugcccaaca

SEQ ID NO: 53009 - RNA, 19 nt, Artificial Sequence
  Sense Oligo
guugggcauuugcugucuu

SEQ ID NO: 53010 - RNA, 19 nt, Artificial Sequence
  Antisense Oligo
aagacagcaaaugcccaac

SEQ ID NO: 53011 - RNA, 19 nt, Artificial Sequence
  Sense Oligo
uugggcauuugcugucuuc

SEQ ID NO: 53012 - RNA, 19 nt, Artificial Sequence
  Antisense Oligo
gaagacagcaaaugcccaa

SEQ ID NO: 53013 - RNA, 19 nt, Artificial Sequence
  Sense Oligo
ugggcauuugcugucuucu

SEQ ID NO: 53014 - RNA, 19 nt, Artificial Sequence
  Antisense Oligo
agaagacagcaaaugccca

SEQ ID NO: 53015 - RNA, 19 nt, Artificial Sequence
  Sense Oligo
gggcauuugcugucuucuc

SEQ ID NO: 53016 - RNA, 19 nt, Artificial Sequence
  Antisense Oligo
gagaagacagcaaaugccc

SEQ ID NO: 53017 - RNA, 19 nt, Artificial Sequence
  Sense Oligo
ggcauuugcugucuucucu

SEQ ID NO: 53018 - RNA, 19 nt, Artificial Sequence
  Antisense Oligo
agagaagacagcaaaugcc

SEQ ID NO: 53019 - RNA, 19 nt, Artificial Sequence
  Sense Oligo
gaauuggguuguugauuaa

SEQ ID NO: 53020 - RNA, 19 nt, Artificial Sequence
  Antisense Oligo
uuaaucaacaacccaauuc

SEQ ID NO: 53021 - RNA, 19 nt, Artificial Sequence
  Sense Oligo
aauuggguuguugauuaac

SEQ ID NO: 53022 - RNA, 19 nt, Artificial Sequence
  Antisense Oligo
guuaaucaacaacccaauu

SEQ ID NO: 53023 - RNA, 19 nt, Artificial Sequence
  Sense Oligo
cacaucacuuccaaguaag

SEQ ID NO: 53024 - RNA, 19 nt, Artificial Sequence
  Antisense Oligo
cuuacuuggaagugaugug

SEQ ID NO: 53025 - RNA, 19 nt, Artificial Sequence
  Sense Oligo
cacuuccaaguaagauuaa

SEQ ID NO: 53026 - RNA, 19 nt, Artificial Sequence
  Antisense Oligo
uuaaucuuacuuggaagug

SEQ ID NO: 53027 - RNA, 19 nt, Artificial Sequence
  Sense Oligo
cuuccaaguaagauuaauc

SEQ ID NO: 53028 - RNA, 19 nt, Artificial Sequence
  Antisense Oligo
gauuaaucuuacuuggaag

SEQ ID NO: 53029 - RNA, 19 nt, Artificial Sequence
  Sense Oligo
uuccaaguaagauuaaucc

SEQ ID NO: 53030 - RNA, 19 nt, Artificial Sequence
  Antisense Oligo
ggauuaaucuuacuuggaa

SEQ ID NO: 53031 - RNA, 19 nt, Artificial Sequence
  Sense Oligo
uccaaguaagauuaauccc

SEQ ID NO: 53032 - RNA, 19 nt, Artificial Sequence
  Antisense Oligo
gggauuaaucuuacuugga

SEQ ID NO: 53033 - RNA, 19 nt, Artificial Sequence
  Sense Oligo
guaagauuaaucccagcaa

SEQ ID NO: 53034 - RNA, 19 nt, Artificial Sequence
  Antisense Oligo
uugcugggauuaaucuuac

SEQ ID NO: 53035 - RNA, 19 nt, Artificial Sequence
  Sense Oligo
uaagauuaaucccagcaau

SEQ ID NO: 53036 - RNA, 19 nt, Artificial Sequence
  Antisense Oligo
auugcugggauuaaucuua

SEQ ID NO: 53037 - RNA, 19 nt, Artificial Sequence
  Sense Oligo
aagauuaaucccagcaauu

SEQ ID NO: 53038 - RNA, 19 nt, Artificial Sequence
  Antisense Oligo
aauugcugggauuaaucuu

SEQ ID NO: 53039 - RNA, 19 nt, Artificial Sequence
  Sense Oligo
uuaaucccagcaauucaag

SEQ ID NO: 53040 - RNA, 19 nt, Artificial Sequence
  Antisense Oligo
cuugaauugcugggauuaa

SEQ ID NO: 53041 - RNA, 19 nt, Artificial Sequence
  Sense Oligo
aaucccagcaauucaagga

SEQ ID NO: 53042 - RNA, 19 nt, Artificial Sequence
  Antisense Oligo
uccuugaauugcugggauu

SEQ ID NO: 53043 - RNA, 19 nt, Artificial Sequence
  Sense Oligo
ccagcaauucaaggauggc

SEQ ID NO: 53044 - RNA, 19 nt, Artificial Sequence
  Antisense Oligo
gccauccuugaauugcugg

SEQ ID NO: 53045 - RNA, 19 nt, Artificial Sequence
  Sense Oligo
cagcaauucaaggauggcu

SEQ ID NO: 53046 - RNA, 19 nt, Artificial Sequence
  Antisense Oligo
agccauccuugaauugcug

SEQ ID NO: 53047 - RNA, 19 nt, Artificial Sequence
  Sense Oligo
aaggauggcucaaaauaaa

SEQ ID NO: 53048 - RNA, 19 nt, Artificial Sequence
  Antisense Oligo
uuuauuuugagccauccuu

SEQ ID NO: 53049 - RNA, 19 nt, Artificial Sequence
  Sense Oligo
aggauggcucaaaauaaaa

SEQ ID NO: 53050 - RNA, 19 nt, Artificial Sequence
  Antisense Oligo
uuuuauuuugagccauccu

SEQ ID NO: 53051 - RNA, 19 nt, Artificial Sequence
  Sense Oligo
cuguaaaugucaucaguua

SEQ ID NO: 53052 - RNA, 19 nt, Artificial Sequence
  Antisense Oligo
uaacugaugacauuuacag

SEQ ID NO: 53053 - RNA, 19 nt, Artificial Sequence
  Sense Oligo
aacucuccuugagcucaca

SEQ ID NO: 53054 - RNA, 19 nt, Artificial Sequence
  Antisense Oligo
ugugagcucaaggagaguu

SEQ ID NO: 53055 - RNA, 19 nt, Artificial Sequence
  Sense Oligo
gcccaagguagacauaaua

SEQ ID NO: 53056 - RNA, 19 nt, Artificial Sequence
  Antisense Oligo
uauuaugucuaccuugggc

SEQ ID NO: 53057 - RNA, 19 nt, Artificial Sequence
  Sense Oligo
cccaagguagacauaauau

SEQ ID NO: 53058 - RNA, 19 nt, Artificial Sequence
  Antisense Oligo
auauuaugucuaccuuggg

SEQ ID NO: 53059 - RNA, 19 nt, Artificial Sequence
  Sense Oligo
ccaagguagacauaauauu

SEQ ID NO: 53060 - RNA, 19 nt, Artificial Sequence
  Antisense Oligo
aauauuaugucuaccuugg

SEQ ID NO: 53061 - RNA, 19 nt, Artificial Sequence
  Sense Oligo
acaucaugccugcccauca

SEQ ID NO: 53062 - RNA, 19 nt, Artificial Sequence
  Antisense Oligo
ugaugggcaggcaugaugu

SEQ ID NO: 53063 - RNA, 19 nt, Artificial Sequence
  Sense Oligo
caucaugccugcccaucaa

SEQ ID NO: 53064 - RNA, 19 nt, Artificial Sequence
  Antisense Oligo
uugaugggcaggcaugaug

SEQ ID NO: 53065 - RNA, 19 nt, Artificial Sequence
  Sense Oligo
aucaugccugcccaucaaa

SEQ ID NO: 53066 - RNA, 19 nt, Artificial Sequence
  Antisense Oligo
uuugaugggcaggcaugau

SEQ ID NO: 53067 - RNA, 19 nt, Artificial Sequence
  Sense Oligo
ucaugccugcccaucaaau

SEQ ID NO: 53068 - RNA, 19 nt, Artificial Sequence
  Antisense Oligo
auuugaugggcaggcauga

SEQ ID NO: 53069 - RNA, 19 nt, Artificial Sequence
  Sense Oligo
caugccugcccaucaaauu

SEQ ID NO: 53070 - RNA, 19 nt, Artificial Sequence
  Antisense Oligo
aauuugaugggcaggcaug

SEQ ID NO: 53071 - RNA, 19 nt, Artificial Sequence
  Sense Oligo
augccugcccaucaaauuc

SEQ ID NO: 53072 - RNA, 19 nt, Artificial Sequence
  Antisense Oligo
gaauuugaugggcaggcau

SEQ ID NO: 53073 - RNA, 19 nt, Artificial Sequence
  Sense Oligo
ugccugcccaucaaauucc

SEQ ID NO: 53074 - RNA, 19 nt, Artificial Sequence
  Antisense Oligo
ggaauuugaugggcaggca

SEQ ID NO: 53075 - RNA, 19 nt, Artificial Sequence
  Sense Oligo
gccugcccaucaaauucca

SEQ ID NO: 53076 - RNA, 19 nt, Artificial Sequence
  Antisense Oligo
uggaauuugaugggcaggc

SEQ ID NO: 53077 - RNA, 19 nt, Artificial Sequence
  Sense Oligo
ccugcccaucaaauuccau

SEQ ID NO: 53078 - RNA, 19 nt, Artificial Sequence
  Antisense Oligo
auggaauuugaugggcagg

SEQ ID NO: 53079 - RNA, 19 nt, Artificial Sequence
  Sense Oligo
cugcccaucaaauuccauu

SEQ ID NO: 53080 - RNA, 19 nt, Artificial Sequence
  Antisense Oligo
aauggaauuugaugggcag

SEQ ID NO: 53081 - RNA, 19 nt, Artificial Sequence
  Sense Oligo
ugcccaucaaauuccauua

SEQ ID NO: 53082 - RNA, 19 nt, Artificial Sequence
  Antisense Oligo
uaauggaauuugaugggca

SEQ ID NO: 53083 - RNA, 19 nt, Artificial Sequence
  Sense Oligo
gcccaucaaauuccauuag

SEQ ID NO: 53084 - RNA, 19 nt, Artificial Sequence
  Antisense Oligo
cuaauggaauuugaugggc

SEQ ID NO: 53085 - RNA, 19 nt, Artificial Sequence
  Sense Oligo
cccaucaaauuccauuagu

SEQ ID NO: 53086 - RNA, 19 nt, Artificial Sequence
  Antisense Oligo
acuaauggaauuugauggg

SEQ ID NO: 53087 - RNA, 19 nt, Artificial Sequence
  Sense Oligo
ccaucaaauuccauuagua

SEQ ID NO: 53088 - RNA, 19 nt, Artificial Sequence
  Antisense Oligo
uacuaauggaauuugaugg

SEQ ID NO: 53089 - RNA, 19 nt, Artificial Sequence
  Sense Oligo
uaucuuguacagugaugau

SEQ ID NO: 53090 - RNA, 19 nt, Artificial Sequence
  Antisense Oligo
aucaucacuguacaagaua

SEQ ID NO: 53091 - RNA, 19 nt, Artificial Sequence
  Sense Oligo
aucuuguacagugaugaug

SEQ ID NO: 53092 - RNA, 19 nt, Artificial Sequence
  Antisense Oligo
caucaucacuguacaagau

SEQ ID NO: 53093 - RNA, 19 nt, Artificial Sequence
  Sense Oligo
ucuuguacagugaugaugu

SEQ ID NO: 53094 - RNA, 19 nt, Artificial Sequence
  Antisense Oligo
acaucaucacuguacaaga

SEQ ID NO: 53095 - RNA, 19 nt, Artificial Sequence
  Sense Oligo
agugaugauguguauugcc

SEQ ID NO: 53096 - RNA, 19 nt, Artificial Sequence
  Antisense Oligo
ggcaauacacaucaucacu

SEQ ID NO: 53097 - RNA, 19 nt, Artificial Sequence
  Sense Oligo
gugaugauguguauugccu

SEQ ID NO: 53098 - RNA, 19 nt, Artificial Sequence
  Antisense Oligo
aggcaauacacaucaucac

SEQ ID NO: 53099 - RNA, 19 nt, Artificial Sequence
  Sense Oligo
ugaugauguguauugccua

SEQ ID NO: 53100 - RNA, 19 nt, Artificial Sequence
  Antisense Oligo
uaggcaauacacaucauca

SEQ ID NO: 53101 - RNA, 19 nt, Artificial Sequence
  Sense Oligo
gaugauguguauugccuaa

SEQ ID NO: 53102 - RNA, 19 nt, Artificial Sequence
  Antisense Oligo
uuaggcaauacacaucauc

SEQ ID NO: 53103 - RNA, 19 nt, Artificial Sequence
  Sense Oligo
ugauguguauugccuaaaa

SEQ ID NO: 53104 - RNA, 19 nt, Artificial Sequence
  Antisense Oligo
uuuuaggcaauacacauca

SEQ ID NO: 53105 - RNA, 19 nt, Artificial Sequence
  Sense Oligo
guguuuccacuucuaacua

SEQ ID NO: 53106 - RNA, 19 nt, Artificial Sequence
  Antisense Oligo
uaguuagaaguggaaacac

SEQ ID NO: 53107 - RNA, 19 nt, Artificial Sequence
  Sense Oligo
uguuuccacuucuaacuau

SEQ ID NO: 53108 - RNA, 19 nt, Artificial Sequence
  Antisense Oligo
auaguuagaaguggaaaca

SEQ ID NO: 53109 - RNA, 19 nt, Artificial Sequence
  Sense Oligo
guuuccacuucuaacuaua

SEQ ID NO: 53110 - RNA, 19 nt, Artificial Sequence
  Antisense Oligo
uauaguuagaaguggaaac

SEQ ID NO: 53111 - RNA, 19 nt, Artificial Sequence
  Sense Oligo
uuccacuucuaacuauauc

SEQ ID NO: 53112 - RNA, 19 nt, Artificial Sequence
  Antisense Oligo
gauauaguuagaaguggaa

SEQ ID NO: 53113 - RNA, 19 nt, Artificial Sequence
  Sense Oligo
uccacuucuaacuauaucc

SEQ ID NO: 53114 - RNA, 19 nt, Artificial Sequence
  Antisense Oligo
ggauauaguuagaagugga

SEQ ID NO: 53115 - RNA, 19 nt, Artificial Sequence
  Sense Oligo
ccacuucuaacuauauccu

SEQ ID NO: 53116 - RNA, 19 nt, Artificial Sequence
  Antisense Oligo
aggauauaguuagaagugg

SEQ ID NO: 53117 - RNA, 19 nt, Artificial Sequence
  Sense Oligo
cacuucuaacuauauccua

SEQ ID NO: 53118 - RNA, 19 nt, Artificial Sequence
  Antisense Oligo
uaggauauaguuagaagug

SEQ ID NO: 53119 - RNA, 19 nt, Artificial Sequence
  Sense Oligo
acuucuaacuauauccuag

SEQ ID NO: 53120 - RNA, 19 nt, Artificial Sequence
  Antisense Oligo
cuaggauauaguuagaagu

SEQ ID NO: 53121 - RNA, 19 nt, Artificial Sequence
  Sense Oligo
aacuucucauuugcucuca

SEQ ID NO: 53122 - RNA, 19 nt, Artificial Sequence
  Antisense Oligo
ugagagcaaaugagaaguu

SEQ ID NO: 53123 - RNA, 19 nt, Artificial Sequence
  Sense Oligo
acuucucauuugcucucag

SEQ ID NO: 53124 - RNA, 19 nt, Artificial Sequence
  Antisense Oligo
cugagagcaaaugagaagu

SEQ ID NO: 53125 - RNA, 19 nt, Artificial Sequence
  Sense Oligo
cuucucauuugcucucaga

SEQ ID NO: 53126 - RNA, 19 nt, Artificial Sequence
  Antisense Oligo
ucugagagcaaaugagaag

SEQ ID NO: 53127 - RNA, 19 nt, Artificial Sequence
  Sense Oligo
uucucauuugcucucagac

SEQ ID NO: 53128 - RNA, 19 nt, Artificial Sequence
  Antisense Oligo
gucugagagcaaaugagaa

SEQ ID NO: 53129 - RNA, 19 nt, Artificial Sequence
  Sense Oligo
ucucauuugcucucagaca

SEQ ID NO: 53130 - RNA, 19 nt, Artificial Sequence
  Antisense Oligo
ugucugagagcaaaugaga

SEQ ID NO: 53131 - RNA, 19 nt, Artificial Sequence
  Sense Oligo
auuugcucucagacauaug

SEQ ID NO: 53132 - RNA, 19 nt, Artificial Sequence
  Antisense Oligo
cauaugucugagagcaaau

SEQ ID NO: 53133 - RNA, 19 nt, Artificial Sequence
  Sense Oligo
uuugcucucagacauaugc

SEQ ID NO: 53134 - RNA, 19 nt, Artificial Sequence
  Antisense Oligo
gcauaugucugagagcaaa

SEQ ID NO: 53135 - RNA, 19 nt, Artificial Sequence
  Sense Oligo
cucucagacauaugcaaga

SEQ ID NO: 53136 - RNA, 19 nt, Artificial Sequence
  Antisense Oligo
ucuugcauaugucugagag

SEQ ID NO: 53137 - RNA, 19 nt, Artificial Sequence
  Sense Oligo
ucucagacauaugcaagaa

SEQ ID NO: 53138 - RNA, 19 nt, Artificial Sequence
  Antisense Oligo
uucuugcauaugucugaga

SEQ ID NO: 53139 - RNA, 19 nt, Artificial Sequence
  Sense Oligo
cucagacauaugcaagaau

SEQ ID NO: 53140 - RNA, 19 nt, Artificial Sequence
  Antisense Oligo
auucuugcauaugucugag

SEQ ID NO: 53141 - RNA, 19 nt, Artificial Sequence
  Sense Oligo
ucagacauaugcaagaaug

SEQ ID NO: 53142 - RNA, 19 nt, Artificial Sequence
  Antisense Oligo
cauucuugcauaugucuga

SEQ ID NO: 53143 - RNA, 19 nt, Artificial Sequence
  Sense Oligo
augcaagaauguugaauac

SEQ ID NO: 53144 - RNA, 19 nt, Artificial Sequence
  Antisense Oligo
guauucaacauucuugcau

SEQ ID NO: 53145 - RNA, 19 nt, Artificial Sequence
  Sense Oligo
ugcaagaauguugaauaca

SEQ ID NO: 53146 - RNA, 19 nt, Artificial Sequence
  Antisense Oligo
uguauucaacauucuugca

SEQ ID NO: 53147 - RNA, 19 nt, Artificial Sequence
  Sense Oligo
gcaagaauguugaauacag

SEQ ID NO: 53148 - RNA, 19 nt, Artificial Sequence
  Antisense Oligo
cuguauucaacauucuugc

SEQ ID NO: 53149 - RNA, 19 nt, Artificial Sequence
  Sense Oligo
gaauguugaauacaggacu

SEQ ID NO: 53150 - RNA, 19 nt, Artificial Sequence
  Antisense Oligo
aguccuguauucaacauuc

SEQ ID NO: 53151 - RNA, 19 nt, Artificial Sequence
  Sense Oligo
guugaauacaggacuguca

SEQ ID NO: 53152 - RNA, 19 nt, Artificial Sequence
  Antisense Oligo
ugacaguccuguauucaac

SEQ ID NO: 53153 - RNA, 19 nt, Artificial Sequence
  Sense Oligo
uugaauacaggacugucag

SEQ ID NO: 53154 - RNA, 19 nt, Artificial Sequence
  Antisense Oligo
cugacaguccuguauucaa

SEQ ID NO: 53155 - RNA, 19 nt, Artificial Sequence
  Sense Oligo
ugaauacaggacugucagg

SEQ ID NO: 53156 - RNA, 19 nt, Artificial Sequence
  Antisense Oligo
ccugacaguccuguauuca

SEQ ID NO: 53157 - RNA, 19 nt, Artificial Sequence
  Sense Oligo
uacaggacugucaggaauu

SEQ ID NO: 53158 - RNA, 19 nt, Artificial Sequence
  Antisense Oligo
aauuccugacaguccugua

SEQ ID NO: 53159 - RNA, 19 nt, Artificial Sequence
  Sense Oligo
acaggacugucaggaauug

SEQ ID NO: 53160 - RNA, 19 nt, Artificial Sequence
  Antisense Oligo
caauuccugacaguccugu

SEQ ID NO: 53161 - RNA, 19 nt, Artificial Sequence
  Sense Oligo
caggacugucaggaauugc

SEQ ID NO: 53162 - RNA, 19 nt, Artificial Sequence
  Antisense Oligo
gcaauuccugacaguccug

SEQ ID NO: 53163 - RNA, 19 nt, Artificial Sequence
  Sense Oligo
aggacugucaggaauugca

SEQ ID NO: 53164 - RNA, 19 nt, Artificial Sequence
  Antisense Oligo
ugcaauuccugacaguccu

SEQ ID NO: 53165 - RNA, 19 nt, Artificial Sequence
  Sense Oligo
ggacugucaggaauugcaa

SEQ ID NO: 53166 - RNA, 19 nt, Artificial Sequence
  Antisense Oligo
uugcaauuccugacagucc

SEQ ID NO: 53167 - RNA, 19 nt, Artificial Sequence
  Sense Oligo
gacugucaggaauugcaaa

SEQ ID NO: 53168 - RNA, 19 nt, Artificial Sequence
  Antisense Oligo
uuugcaauuccugacaguc

SEQ ID NO: 53169 - RNA, 19 nt, Artificial Sequence
  Sense Oligo
acugucaggaauugcaaaa

SEQ ID NO: 53170 - RNA, 19 nt, Artificial Sequence
  Antisense Oligo
uuuugcaauuccugacagu

SEQ ID NO: 53171 - RNA, 19 nt, Artificial Sequence
  Sense Oligo
ccauuaaccagcagacagg

SEQ ID NO: 53172 - RNA, 19 nt, Artificial Sequence
  Antisense Oligo
ccugucugcugguuaaugg

SEQ ID NO: 53173 - RNA, 19 nt, Artificial Sequence
  Sense Oligo
cauuaaccagcagacaggu

SEQ ID NO: 53174 - RNA, 19 nt, Artificial Sequence
  Antisense Oligo
accugucugcugguuaaug

SEQ ID NO: 53175 - RNA, 19 nt, Artificial Sequence
  Sense Oligo
auuaaccagcagacaggua

SEQ ID NO: 53176 - RNA, 19 nt, Artificial Sequence
  Antisense Oligo
uaccugucugcugguuaau

SEQ ID NO: 53177 - RNA, 19 nt, Artificial Sequence
  Sense Oligo
uuaaccagcagacagguaa

SEQ ID NO: 53178 - RNA, 19 nt, Artificial Sequence
  Antisense Oligo
uuaccugucugcugguuaa

SEQ ID NO: 53179 - RNA, 19 nt, Artificial Sequence
  Sense Oligo
aaccagcagacagguaacu

SEQ ID NO: 53180 - RNA, 19 nt, Artificial Sequence
  Antisense Oligo
aguuaccugucugcugguu

SEQ ID NO: 53181 - RNA, 19 nt, Artificial Sequence
  Sense Oligo
agcagacagguaacuggug

SEQ ID NO: 53182 - RNA, 19 nt, Artificial Sequence
  Antisense Oligo
caccaguuaccugucugcu

SEQ ID NO: 53183 - RNA, 19 nt, Artificial Sequence
  Sense Oligo
gcagacagguaacuggugu

SEQ ID NO: 53184 - RNA, 19 nt, Artificial Sequence
  Antisense Oligo
acaccaguuaccugucugc

SEQ ID NO: 53185 - RNA, 19 nt, Artificial Sequence
  Sense Oligo
cuggugucuuuaucagugg

SEQ ID NO: 53186 - RNA, 19 nt, Artificial Sequence
  Antisense Oligo
ccacugauaaagacaccag

SEQ ID NO: 53187 - RNA, 19 nt, Artificial Sequence
  Sense Oligo
uggugucuuuaucaguggg

SEQ ID NO: 53188 - RNA, 19 nt, Artificial Sequence
  Antisense Oligo
cccacugauaaagacacca

SEQ ID NO: 53189 - RNA, 19 nt, Artificial Sequence
  Sense Oligo
ggugucuuuaucagugggu

SEQ ID NO: 53190 - RNA, 19 nt, Artificial Sequence
  Antisense Oligo
acccacugauaaagacacc

SEQ ID NO: 53191 - RNA, 19 nt, Artificial Sequence
  Sense Oligo
gugucuuuaucagugggua

SEQ ID NO: 53192 - RNA, 19 nt, Artificial Sequence
  Antisense Oligo
uacccacugauaaagacac

SEQ ID NO: 53193 - RNA, 19 nt, Artificial Sequence
  Sense Oligo
ugucuuuaucaguggguac

SEQ ID NO: 53194 - RNA, 19 nt, Artificial Sequence
  Antisense Oligo
guacccacugauaaagaca

SEQ ID NO: 53195 - RNA, 19 nt, Artificial Sequence
  Sense Oligo
gucuuuaucaguggguaca

SEQ ID NO: 53196 - RNA, 19 nt, Artificial Sequence
  Antisense Oligo
uguacccacugauaaagac

SEQ ID NO: 53197 - RNA, 19 nt, Artificial Sequence
  Sense Oligo
ucuuuaucaguggguacag

SEQ ID NO: 53198 - RNA, 19 nt, Artificial Sequence
  Antisense Oligo
cuguacccacugauaaaga

SEQ ID NO: 53199 - RNA, 19 nt, Artificial Sequence
  Sense Oligo
uaucaguggguacaggagu

SEQ ID NO: 53200 - RNA, 19 nt, Artificial Sequence
  Antisense Oligo
acuccuguacccacugaua

SEQ ID NO: 53201 - RNA, 19 nt, Artificial Sequence
  Sense Oligo
aucaguggguacaggagug

SEQ ID NO: 53202 - RNA, 19 nt, Artificial Sequence
  Antisense Oligo
cacuccuguacccacugau

SEQ ID NO: 53203 - RNA, 19 nt, Artificial Sequence
  Sense Oligo
ucaguggguacaggaguga

SEQ ID NO: 53204 - RNA, 19 nt, Artificial Sequence
  Antisense Oligo
ucacuccuguacccacuga

SEQ ID NO: 53205 - RNA, 19 nt, Artificial Sequence
  Sense Oligo
uggguacaggagugaucug

SEQ ID NO: 53206 - RNA, 19 nt, Artificial Sequence
  Antisense Oligo
cagaucacuccuguaccca

SEQ ID NO: 53207 - RNA, 19 nt, Artificial Sequence
  Sense Oligo
caggagugaucuggaccua

SEQ ID NO: 53208 - RNA, 19 nt, Artificial Sequence
  Antisense Oligo
uagguccagaucacuccug

SEQ ID NO: 53209 - RNA, 19 nt, Artificial Sequence
  Sense Oligo
aggagugaucuggaccuaa

SEQ ID NO: 53210 - RNA, 19 nt, Artificial Sequence
  Antisense Oligo
uuagguccagaucacuccu

SEQ ID NO: 53211 - RNA, 19 nt, Artificial Sequence
  Sense Oligo
ggagugaucuggaccuaag

SEQ ID NO: 53212 - RNA, 19 nt, Artificial Sequence
  Antisense Oligo
cuuagguccagaucacucc

SEQ ID NO: 53213 - RNA, 19 nt, Artificial Sequence
  Sense Oligo
gagugaucuggaccuaagg

SEQ ID NO: 53214 - RNA, 19 nt, Artificial Sequence
  Antisense Oligo
ccuuagguccagaucacuc

SEQ ID NO: 53215 - RNA, 19 nt, Artificial Sequence
  Sense Oligo
agugaucuggaccuaaggu

SEQ ID NO: 53216 - RNA, 19 nt, Artificial Sequence
  Antisense Oligo
accuuagguccagaucacu

SEQ ID NO: 53217 - RNA, 19 nt, Artificial Sequence
  Sense Oligo
gugaucuggaccuaaggua

SEQ ID NO: 53218 - RNA, 19 nt, Artificial Sequence
  Antisense Oligo
uaccuuagguccagaucac

SEQ ID NO: 53219 - RNA, 19 nt, Artificial Sequence
  Sense Oligo
aaugaguugcagaagccuu

SEQ ID NO: 53220 - RNA, 19 nt, Artificial Sequence
  Antisense Oligo
aaggcuucugcaacucauu

SEQ ID NO: 53221 - RNA, 19 nt, Artificial Sequence
  Sense Oligo
augaguugcagaagccuuu

SEQ ID NO: 53222 - RNA, 19 nt, Artificial Sequence
  Antisense Oligo
aaaggcuucugcaacucau

SEQ ID NO: 53223 - RNA, 19 nt, Artificial Sequence
  Sense Oligo
ugaguugcagaagccuuua

SEQ ID NO: 53224 - RNA, 19 nt, Artificial Sequence
  Antisense Oligo
uaaaggcuucugcaacuca

SEQ ID NO: 53225 - RNA, 19 nt, Artificial Sequence
  Sense Oligo
uaauaacuccauguucaga

SEQ ID NO: 53226 - RNA, 19 nt, Artificial Sequence
  Antisense Oligo
ucugaacauggaguuauua

SEQ ID NO: 53227 - RNA, 19 nt, Artificial Sequence
  Sense Oligo
aauaacuccauguucagau

SEQ ID NO: 53228 - RNA, 19 nt, Artificial Sequence
  Antisense Oligo
aucugaacauggaguuauu

SEQ ID NO: 53229 - RNA, 19 nt, Artificial Sequence
  Sense Oligo
auaacuccauguucagaua

SEQ ID NO: 53230 - RNA, 19 nt, Artificial Sequence
  Antisense Oligo
uaucugaacauggaguuau

SEQ ID NO: 53231 - RNA, 19 nt, Artificial Sequence
  Sense Oligo
uaacuccauguucagauau

SEQ ID NO: 53232 - RNA, 19 nt, Artificial Sequence
  Antisense Oligo
auaucugaacauggaguua

SEQ ID NO: 53233 - RNA, 19 nt, Artificial Sequence
  Sense Oligo
aacuccauguucagauaug

SEQ ID NO: 53234 - RNA, 19 nt, Artificial Sequence
  Antisense Oligo
cauaucugaacauggaguu

SEQ ID NO: 53235 - RNA, 19 nt, Artificial Sequence
  Sense Oligo
acuccauguucagauaugc

SEQ ID NO: 53236 - RNA, 19 nt, Artificial Sequence
  Antisense Oligo
gcauaucugaacauggagu

SEQ ID NO: 53237 - RNA, 19 nt, Artificial Sequence
  Sense Oligo
cuccauguucagauaugcu

SEQ ID NO: 53238 - RNA, 19 nt, Artificial Sequence
  Antisense Oligo
agcauaucugaacauggag

SEQ ID NO: 53239 - RNA, 19 nt, Artificial Sequence
  Sense Oligo
ccauguucagauaugcuua

SEQ ID NO: 53240 - RNA, 19 nt, Artificial Sequence
  Antisense Oligo
uaagcauaucugaacaugg

SEQ ID NO: 53241 - RNA, 19 nt, Artificial Sequence
  Sense Oligo
cauguucagauaugcuuac

SEQ ID NO: 53242 - RNA, 19 nt, Artificial Sequence
  Antisense Oligo
guaagcauaucugaacaug

SEQ ID NO: 53243 - RNA, 19 nt, Artificial Sequence
  Sense Oligo
auguucagauaugcuuaca

SEQ ID NO: 53244 - RNA, 19 nt, Artificial Sequence
  Antisense Oligo
uguaagcauaucugaacau

SEQ ID NO: 53245 - RNA, 19 nt, Artificial Sequence
  Sense Oligo
uguucagauaugcuuacag

SEQ ID NO: 53246 - RNA, 19 nt, Artificial Sequence
  Antisense Oligo
cuguaagcauaucugaaca

SEQ ID NO: 53247 - RNA, 19 nt, Artificial Sequence
  Sense Oligo
guucagauaugcuuacagc

SEQ ID NO: 53248 - RNA, 19 nt, Artificial Sequence
  Antisense Oligo
gcuguaagcauaucugaac

SEQ ID NO: 53249 - RNA, 19 nt, Artificial Sequence
  Sense Oligo
uucagauaugcuuacagcu

SEQ ID NO: 53250 - RNA, 19 nt, Artificial Sequence
  Antisense Oligo
agcuguaagcauaucugaa

SEQ ID NO: 53251 - RNA, 19 nt, Artificial Sequence
  Sense Oligo
ucagauaugcuuacagcua

SEQ ID NO: 53252 - RNA, 19 nt, Artificial Sequence
  Antisense Oligo
uagcuguaagcauaucuga

SEQ ID NO: 53253 - RNA, 19 nt, Artificial Sequence
  Sense Oligo
cagauaugcuuacagcuau

SEQ ID NO: 53254 - RNA, 19 nt, Artificial Sequence
  Antisense Oligo
auagcuguaagcauaucug

SEQ ID NO: 53255 - RNA, 19 nt, Artificial Sequence
  Sense Oligo
auaugcuuacagcuauccu

SEQ ID NO: 53256 - RNA, 19 nt, Artificial Sequence
  Antisense Oligo
aggauagcuguaagcauau

SEQ ID NO: 53257 - RNA, 19 nt, Artificial Sequence
  Sense Oligo
uaugcuuacagcuauccua

SEQ ID NO: 53258 - RNA, 19 nt, Artificial Sequence
  Antisense Oligo
uaggauagcuguaagcaua

SEQ ID NO: 53259 - RNA, 19 nt, Artificial Sequence
  Sense Oligo
augcuuacagcuauccuaa

SEQ ID NO: 53260 - RNA, 19 nt, Artificial Sequence
  Antisense Oligo
uuaggauagcuguaagcau

SEQ ID NO: 53261 - RNA, 19 nt, Artificial Sequence
  Sense Oligo
ugcuuacagcuauccuaaa

SEQ ID NO: 53262 - RNA, 19 nt, Artificial Sequence
  Antisense Oligo
uuuaggauagcuguaagca

SEQ ID NO: 53263 - RNA, 19 nt, Artificial Sequence
  Sense Oligo
gcuuacagcuauccuaaaa

SEQ ID NO: 53264 - RNA, 19 nt, Artificial Sequence
  Antisense Oligo
uuuuaggauagcuguaagc

SEQ ID NO: 53265 - RNA, 19 nt, Artificial Sequence
  Sense Oligo
acagcuauccuaaaagcag

SEQ ID NO: 53266 - RNA, 19 nt, Artificial Sequence
  Antisense Oligo
cugcuuuuaggauagcugu

SEQ ID NO: 53267 - RNA, 19 nt, Artificial Sequence
  Sense Oligo
cagcuauccuaaaagcaga

SEQ ID NO: 53268 - RNA, 19 nt, Artificial Sequence
  Antisense Oligo
ucugcuuuuaggauagcug

SEQ ID NO: 53269 - RNA, 19 nt, Artificial Sequence
  Sense Oligo
aaauauaguuaucucuggg

SEQ ID NO: 53270 - RNA, 19 nt, Artificial Sequence
  Antisense Oligo
cccagagauaacuauauuu

SEQ ID NO: 53271 - RNA, 19 nt, Artificial Sequence
  Sense Oligo
acggagggaugugaaguug

SEQ ID NO: 53272 - RNA, 19 nt, Artificial Sequence
  Antisense Oligo
caacuucacaucccuccgu

SEQ ID NO: 53273 - RNA, 19 nt, Artificial Sequence
  Sense Oligo
cggagggaugugaaguugu

SEQ ID NO: 53274 - RNA, 19 nt, Artificial Sequence
  Antisense Oligo
acaacuucacaucccuccg

SEQ ID NO: 53275 - RNA, 19 nt, Artificial Sequence
  Sense Oligo
ggagggaugugaaguugua

SEQ ID NO: 53276 - RNA, 19 nt, Artificial Sequence
  Antisense Oligo
uacaacuucacaucccucc

SEQ ID NO: 53277 - RNA, 19 nt, Artificial Sequence
  Sense Oligo
gagggaugugaaguuguaa

SEQ ID NO: 53278 - RNA, 19 nt, Artificial Sequence
  Antisense Oligo
uuacaacuucacaucccuc

SEQ ID NO: 53279 - RNA, 19 nt, Artificial Sequence
  Sense Oligo
agggaugugaaguuguaac

SEQ ID NO: 53280 - RNA, 19 nt, Artificial Sequence
  Antisense Oligo
guuacaacuucacaucccu

SEQ ID NO: 53281 - RNA, 19 nt, Artificial Sequence
  Sense Oligo
gggaugugaaguuguaacu

SEQ ID NO: 53282 - RNA, 19 nt, Artificial Sequence
  Antisense Oligo
aguuacaacuucacauccc

SEQ ID NO: 53283 - RNA, 19 nt, Artificial Sequence
  Sense Oligo
ggaugugaaguuguaacua

SEQ ID NO: 53284 - RNA, 19 nt, Artificial Sequence
  Antisense Oligo
uaguuacaacuucacaucc

SEQ ID NO: 53285 - RNA, 19 nt, Artificial Sequence
  Sense Oligo
gaugugaaguuguaacuau

SEQ ID NO: 53286 - RNA, 19 nt, Artificial Sequence
  Antisense Oligo
auaguuacaacuucacauc

SEQ ID NO: 53287 - RNA, 19 nt, Artificial Sequence
  Sense Oligo
gugaaguuguaacuauaug

SEQ ID NO: 53288 - RNA, 19 nt, Artificial Sequence
  Antisense Oligo
cauauaguuacaacuucac

SEQ ID NO: 53289 - RNA, 19 nt, Artificial Sequence
  Sense Oligo
ugaaguuguaacuauaugc

SEQ ID NO: 53290 - RNA, 19 nt, Artificial Sequence
  Antisense Oligo
gcauauaguuacaacuuca

SEQ ID NO: 53291 - RNA, 19 nt, Artificial Sequence
  Sense Oligo
aaaaugaucuaucgcagca

SEQ ID NO: 53292 - RNA, 19 nt, Artificial Sequence
  Antisense Oligo
ugcugcgauagaucauuuu

SEQ ID NO: 53293 - RNA, 19 nt, Artificial Sequence
  Sense Oligo
aucuaucgcagcagcuugg

SEQ ID NO: 53294 - RNA, 19 nt, Artificial Sequence
  Antisense Oligo
ccaagcugcugcgauagau

SEQ ID NO: 53295 - RNA, 19 nt, Artificial Sequence
  Sense Oligo
ucuaucgcagcagcuuggg

SEQ ID NO: 53296 - RNA, 19 nt, Artificial Sequence
  Antisense Oligo
cccaagcugcugcgauaga

SEQ ID NO: 53297 - RNA, 19 nt, Artificial Sequence
  Sense Oligo
cuaucgcagcagcuuggga

SEQ ID NO: 53298 - RNA, 19 nt, Artificial Sequence
  Antisense Oligo
ucccaagcugcugcgauag

SEQ ID NO: 53299 - RNA, 19 nt, Artificial Sequence
  Sense Oligo
gaucuaaagcaaauauucc

SEQ ID NO: 53300 - RNA, 19 nt, Artificial Sequence
  Antisense Oligo
ggaauauuugcuuuagauc

SEQ ID NO: 53301 - RNA, 19 nt, Artificial Sequence
  Sense Oligo
gcaaauauuccauaaaugc

SEQ ID NO: 53302 - RNA, 19 nt, Artificial Sequence
  Antisense Oligo
gcauuuauggaauauuugc

SEQ ID NO: 53303 - RNA, 19 nt, Artificial Sequence
  Sense Oligo
auauuccauaaaugcugag

SEQ ID NO: 53304 - RNA, 19 nt, Artificial Sequence
  Antisense Oligo
cucagcauuuauggaauau

SEQ ID NO: 53305 - RNA, 19 nt, Artificial Sequence
  Sense Oligo
agauuucuuaaagcuuggu

SEQ ID NO: 53306 - RNA, 19 nt, Artificial Sequence
  Antisense Oligo
accaagcuuuaagaaaucu

SEQ ID NO: 53307 - RNA, 19 nt, Artificial Sequence
  Sense Oligo
gauuucuuaaagcuuggug

SEQ ID NO: 53308 - RNA, 19 nt, Artificial Sequence
  Antisense Oligo
caccaagcuuuaagaaauc

SEQ ID NO: 53309 - RNA, 19 nt, Artificial Sequence
  Sense Oligo
uuucuuaaagcuugguggg

SEQ ID NO: 53310 - RNA, 19 nt, Artificial Sequence
  Antisense Oligo
cccaccaagcuuuaagaaa

SEQ ID NO: 53311 - RNA, 19 nt, Artificial Sequence
  Sense Oligo
ggguauacagauggucauu

SEQ ID NO: 53312 - RNA, 19 nt, Artificial Sequence
  Antisense Oligo
aaugaccaucuguauaccc

SEQ ID NO: 53313 - RNA, 19 nt, Artificial Sequence
  Sense Oligo
gguauacagauggucauua

SEQ ID NO: 53314 - RNA, 19 nt, Artificial Sequence
  Antisense Oligo
uaaugaccaucuguauacc

SEQ ID NO: 53315 - RNA, 19 nt, Artificial Sequence
  Sense Oligo
guauacagauggucauuau

SEQ ID NO: 53316 - RNA, 19 nt, Artificial Sequence
  Antisense Oligo
auaaugaccaucuguauac

SEQ ID NO: 53317 - RNA, 19 nt, Artificial Sequence
  Sense Oligo
ccugaauguggugcucccu

SEQ ID NO: 53318 - RNA, 19 nt, Artificial Sequence
  Antisense Oligo
agggagcaccacauucagg

SEQ ID NO: 53319 - RNA, 19 nt, Artificial Sequence
  Sense Oligo
cugaauguggugcucccuc

SEQ ID NO: 53320 - RNA, 19 nt, Artificial Sequence
  Antisense Oligo
gagggagcaccacauucag

SEQ ID NO: 53321 - RNA, 19 nt, Artificial Sequence
  Sense Oligo
ugaauguggugcucccucu

SEQ ID NO: 53322 - RNA, 19 nt, Artificial Sequence
  Antisense Oligo
agagggagcaccacauuca

SEQ ID NO: 53323 - RNA, 19 nt, Artificial Sequence
  Sense Oligo
gaauguggugcucccucug

SEQ ID NO: 53324 - RNA, 19 nt, Artificial Sequence
  Antisense Oligo
cagagggagcaccacauuc

SEQ ID NO: 53325 - RNA, 19 nt, Artificial Sequence
  Sense Oligo
aauguggugcucccucugu

SEQ ID NO: 53326 - RNA, 19 nt, Artificial Sequence
  Antisense Oligo
acagagggagcaccacauu

SEQ ID NO: 53327 - RNA, 19 nt, Artificial Sequence
  Sense Oligo
cccugcuaaugacuccugu

SEQ ID NO: 53328 - RNA, 19 nt, Artificial Sequence
  Antisense Oligo
acaggagucauuagcaggg

SEQ ID NO: 53329 - RNA, 19 nt, Artificial Sequence
  Sense Oligo
ccugcuaaugacuccuguc

SEQ ID NO: 53330 - RNA, 19 nt, Artificial Sequence
  Antisense Oligo
gacaggagucauuagcagg

SEQ ID NO: 53331 - RNA, 19 nt, Artificial Sequence
  Sense Oligo
cugcuaaugacuccugucc

SEQ ID NO: 53332 - RNA, 19 nt, Artificial Sequence
  Antisense Oligo
ggacaggagucauuagcag

SEQ ID NO: 53333 - RNA, 19 nt, Artificial Sequence
  Sense Oligo
ugcuaaugacuccuguccc

SEQ ID NO: 53334 - RNA, 19 nt, Artificial Sequence
  Antisense Oligo
gggacaggagucauuagca

SEQ ID NO: 53335 - RNA, 19 nt, Artificial Sequence
  Sense Oligo
gcuaaugacuccugucccu

SEQ ID NO: 53336 - RNA, 19 nt, Artificial Sequence
  Antisense Oligo
agggacaggagucauuagc

SEQ ID NO: 53337 - RNA, 19 nt, Artificial Sequence
  Sense Oligo
cuaaugacuccugucccug

SEQ ID NO: 53338 - RNA, 19 nt, Artificial Sequence
  Antisense Oligo
cagggacaggagucauuag

SEQ ID NO: 53339 - RNA, 19 nt, Artificial Sequence
  Sense Oligo
ucccugccuuucuucagug

SEQ ID NO: 53340 - RNA, 19 nt, Artificial Sequence
  Antisense Oligo
cacugaagaaaggcaggga

SEQ ID NO: 53341 - RNA, 19 nt, Artificial Sequence
  Sense Oligo
cccugccuuucuucagugu

SEQ ID NO: 53342 - RNA, 19 nt, Artificial Sequence
  Antisense Oligo
acacugaagaaaggcaggg

SEQ ID NO: 53343 - RNA, 19 nt, Artificial Sequence
  Sense Oligo
ugccuuucuucagugucuu

SEQ ID NO: 53344 - RNA, 19 nt, Artificial Sequence
  Antisense Oligo
aagacacugaagaaaggca

SEQ ID NO: 53345 - RNA, 19 nt, Artificial Sequence
  Sense Oligo
ccuuucuucagugucuucg

SEQ ID NO: 53346 - RNA, 19 nt, Artificial Sequence
  Antisense Oligo
cgaagacacugaagaaagg

SEQ ID NO: 53347 - RNA, 19 nt, Artificial Sequence
  Sense Oligo
cuuucuucagugucuucga

SEQ ID NO: 53348 - RNA, 19 nt, Artificial Sequence
  Antisense Oligo
ucgaagacacugaagaaag

SEQ ID NO: 53349 - RNA, 19 nt, Artificial Sequence
  Sense Oligo
uuucuucagugucuucgag

SEQ ID NO: 53350 - RNA, 19 nt, Artificial Sequence
  Antisense Oligo
cucgaagacacugaagaaa

SEQ ID NO: 53351 - RNA, 19 nt, Artificial Sequence
  Sense Oligo
aacucugacgugaagacgc

SEQ ID NO: 53352 - RNA, 19 nt, Artificial Sequence
  Antisense Oligo
gcgucuucacgucagaguu

SEQ ID NO: 53353 - RNA, 19 nt, Artificial Sequence
  Sense Oligo
acucugacgugaagacgca

SEQ ID NO: 53354 - RNA, 19 nt, Artificial Sequence
  Antisense Oligo
ugcgucuucacgucagagu

SEQ ID NO: 53355 - RNA, 19 nt, Artificial Sequence
  Sense Oligo
cucugacgugaagacgcac

SEQ ID NO: 53356 - RNA, 19 nt, Artificial Sequence
  Antisense Oligo
gugcgucuucacgucagag

SEQ ID NO: 53357 - RNA, 19 nt, Artificial Sequence
  Sense Oligo
ccuuuugaggccgugaugc

SEQ ID NO: 53358 - RNA, 19 nt, Artificial Sequence
  Antisense Oligo
gcaucacggccucaaaagg

SEQ ID NO: 53359 - RNA, 19 nt, Artificial Sequence
  Sense Oligo
cuuuugaggccgugaugcg

SEQ ID NO: 53360 - RNA, 19 nt, Artificial Sequence
  Antisense Oligo
cgcaucacggccucaaaag

SEQ ID NO: 53361 - RNA, 19 nt, Artificial Sequence
  Sense Oligo
uuuugaggccgugaugcgc

SEQ ID NO: 53362 - RNA, 19 nt, Artificial Sequence
  Antisense Oligo
gcgcaucacggccucaaaa

SEQ ID NO: 53363 - RNA, 19 nt, Artificial Sequence
  Sense Oligo
aggccgugaugcgcacucu

SEQ ID NO: 53364 - RNA, 19 nt, Artificial Sequence
  Antisense Oligo
agagugcgcaucacggccu

SEQ ID NO: 53365 - RNA, 19 nt, Artificial Sequence
  Sense Oligo
gccgugaugcgcacucucu

SEQ ID NO: 53366 - RNA, 19 nt, Artificial Sequence
  Antisense Oligo
agagagugcgcaucacggc

SEQ ID NO: 53367 - RNA, 19 nt, Artificial Sequence
  Sense Oligo
ccgugaugcgcacucucug

SEQ ID NO: 53368 - RNA, 19 nt, Artificial Sequence
  Antisense Oligo
cagagagugcgcaucacgg

SEQ ID NO: 53369 - RNA, 19 nt, Artificial Sequence
  Sense Oligo
cgugaugcgcacucucugu

SEQ ID NO: 53370 - RNA, 19 nt, Artificial Sequence
  Antisense Oligo
acagagagugcgcaucacg

SEQ ID NO: 53371 - RNA, 19 nt, Artificial Sequence
  Sense Oligo
gugaugcgcacucucugug

SEQ ID NO: 53372 - RNA, 19 nt, Artificial Sequence
  Antisense Oligo
cacagagagugcgcaucac

SEQ ID NO: 53373 - RNA, 19 nt, Artificial Sequence
  Sense Oligo
gcgcacucucugugaaugc

SEQ ID NO: 53374 - RNA, 19 nt, Artificial Sequence
  Antisense Oligo
gcauucacagagagugcgc

SEQ ID NO: 53375 - RNA, 19 nt, Artificial Sequence
  Sense Oligo
acucucugugaaugcaagg

SEQ ID NO: 53376 - RNA, 19 nt, Artificial Sequence
  Antisense Oligo
ccuugcauucacagagagu

SEQ ID NO: 53377 - RNA, 19 nt, Artificial Sequence
  Sense Oligo
ucucugugaaugcaaggag

SEQ ID NO: 53378 - RNA, 19 nt, Artificial Sequence
  Antisense Oligo
cuccuugcauucacagaga

SEQ ID NO: 53379 - RNA, 19 nt, Artificial Sequence
  Sense Oligo
acagccagcaagacccuca

SEQ ID NO: 53380 - RNA, 19 nt, Artificial Sequence
  Antisense Oligo
ugagggucuugcuggcugu

SEQ ID NO: 53381 - RNA, 19 nt, Artificial Sequence
  Sense Oligo
cagccagcaagacccucag

SEQ ID NO: 53382 - RNA, 19 nt, Artificial Sequence
  Antisense Oligo
cugagggucuugcuggcug

SEQ ID NO: 53383 - RNA, 19 nt, Artificial Sequence
  Sense Oligo
caagacccucagcagguga

SEQ ID NO: 53384 - RNA, 19 nt, Artificial Sequence
  Antisense Oligo
ucaccugcugagggucuug

SEQ ID NO: 53385 - RNA, 19 nt, Artificial Sequence
  Sense Oligo
uuuggaucugugaaggcga

SEQ ID NO: 53386 - RNA, 19 nt, Artificial Sequence
  Antisense Oligo
ucgccuucacagauccaaa

SEQ ID NO: 53387 - RNA, 19 nt, Artificial Sequence
  Sense Oligo
uuggaucugugaaggcgag

SEQ ID NO: 53388 - RNA, 19 nt, Artificial Sequence
  Antisense Oligo
cucgccuucacagauccaa

SEQ ID NO: 53389 - RNA, 19 nt, Artificial Sequence
  Sense Oligo
accucucgugguuuucacu

SEQ ID NO: 53390 - RNA, 19 nt, Artificial Sequence
  Antisense Oligo
agugaaaaccacgagaggu

SEQ ID NO: 53391 - RNA, 19 nt, Artificial Sequence
  Sense Oligo
ccucucgugguuuucacuu

SEQ ID NO: 53392 - RNA, 19 nt, Artificial Sequence
  Antisense Oligo
aagugaaaaccacgagagg

SEQ ID NO: 53393 - RNA, 19 nt, Artificial Sequence
  Sense Oligo
cucucgugguuuucacuuc

SEQ ID NO: 53394 - RNA, 19 nt, Artificial Sequence
  Antisense Oligo
gaagugaaaaccacgagag

SEQ ID NO: 53395 - RNA, 19 nt, Artificial Sequence
  Sense Oligo
ucucgugguuuucacuucu

SEQ ID NO: 53396 - RNA, 19 nt, Artificial Sequence
  Antisense Oligo
agaagugaaaaccacgaga

SEQ ID NO: 53397 - RNA, 19 nt, Artificial Sequence
  Sense Oligo
cucgugguuuucacuucuu

SEQ ID NO: 53398 - RNA, 19 nt, Artificial Sequence
  Antisense Oligo
aagaagugaaaaccacgag

SEQ ID NO: 53399 - RNA, 19 nt, Artificial Sequence
  Sense Oligo
ucgugguuuucacuucuuc

SEQ ID NO: 53400 - RNA, 19 nt, Artificial Sequence
  Antisense Oligo
gaagaagugaaaaccacga

SEQ ID NO: 53401 - RNA, 19 nt, Artificial Sequence
  Sense Oligo
cgugguuuucacuucuucu

SEQ ID NO: 53402 - RNA, 19 nt, Artificial Sequence
  Antisense Oligo
agaagaagugaaaaccacg

SEQ ID NO: 53403 - RNA, 19 nt, Artificial Sequence
  Sense Oligo
gugguuuucacuucuucug

SEQ ID NO: 53404 - RNA, 19 nt, Artificial Sequence
  Antisense Oligo
cagaagaagugaaaaccac

SEQ ID NO: 53405 - RNA, 19 nt, Artificial Sequence
  Sense Oligo
ugguuuucacuucuucugg

SEQ ID NO: 53406 - RNA, 19 nt, Artificial Sequence
  Antisense Oligo
ccagaagaagugaaaacca

SEQ ID NO: 53407 - RNA, 19 nt, Artificial Sequence
  Sense Oligo
gguuuucacuucuucuggc

SEQ ID NO: 53408 - RNA, 19 nt, Artificial Sequence
  Antisense Oligo
gccagaagaagugaaaacc

SEQ ID NO: 53409 - RNA, 19 nt, Artificial Sequence
  Sense Oligo
guuuucacuucuucuggcc

SEQ ID NO: 53410 - RNA, 19 nt, Artificial Sequence
  Antisense Oligo
ggccagaagaagugaaaac

SEQ ID NO: 53411 - RNA, 19 nt, Artificial Sequence
  Sense Oligo
uuucacuucuucuggccag

SEQ ID NO: 53412 - RNA, 19 nt, Artificial Sequence
  Antisense Oligo
cuggccagaagaagugaaa

SEQ ID NO: 53413 - RNA, 19 nt, Artificial Sequence
  Sense Oligo
acuucuucuggccaguuuc

SEQ ID NO: 53414 - RNA, 19 nt, Artificial Sequence
  Antisense Oligo
gaaacuggccagaagaagu

SEQ ID NO: 53415 - RNA, 19 nt, Artificial Sequence
  Sense Oligo
cuucuucuggccaguuucu

SEQ ID NO: 53416 - RNA, 19 nt, Artificial Sequence
  Antisense Oligo
agaaacuggccagaagaag

SEQ ID NO: 53417 - RNA, 19 nt, Artificial Sequence
  Sense Oligo
aacugauugcccuucuugg

SEQ ID NO: 53418 - RNA, 19 nt, Artificial Sequence
  Antisense Oligo
ccaagaagggcaaucaguu

SEQ ID NO: 53419 - RNA, 19 nt, Artificial Sequence
  Sense Oligo
acugauugcccuucuugga

SEQ ID NO: 53420 - RNA, 19 nt, Artificial Sequence
  Antisense Oligo
uccaagaagggcaaucagu

SEQ ID NO: 53421 - RNA, 19 nt, Artificial Sequence
  Sense Oligo
cugauugcccuucuuggau

SEQ ID NO: 53422 - RNA, 19 nt, Artificial Sequence
  Antisense Oligo
auccaagaagggcaaucag

SEQ ID NO: 53423 - RNA, 19 nt, Artificial Sequence
  Sense Oligo
ugauugcccuucuuggauu

SEQ ID NO: 53424 - RNA, 19 nt, Artificial Sequence
  Antisense Oligo
aauccaagaagggcaauca

SEQ ID NO: 53425 - RNA, 19 nt, Artificial Sequence
  Sense Oligo
gauugcccuucuuggauuc

SEQ ID NO: 53426 - RNA, 19 nt, Artificial Sequence
  Antisense Oligo
gaauccaagaagggcaauc

SEQ ID NO: 53427 - RNA, 19 nt, Artificial Sequence
  Sense Oligo
auugcccuucuuggauucu

SEQ ID NO: 53428 - RNA, 19 nt, Artificial Sequence
  Antisense Oligo
agaauccaagaagggcaau

SEQ ID NO: 53429 - RNA, 19 nt, Artificial Sequence
  Sense Oligo
uugcccuucuuggauucua

SEQ ID NO: 53430 - RNA, 19 nt, Artificial Sequence
  Antisense Oligo
uagaauccaagaagggcaa

SEQ ID NO: 53431 - RNA, 19 nt, Artificial Sequence
  Sense Oligo
ugcccuucuuggauucuag

SEQ ID NO: 53432 - RNA, 19 nt, Artificial Sequence
  Antisense Oligo
cuagaauccaagaagggca

SEQ ID NO: 53433 - RNA, 19 nt, Artificial Sequence
  Sense Oligo
gcccuucuuggauucuagg

SEQ ID NO: 53434 - RNA, 19 nt, Artificial Sequence
  Antisense Oligo
ccuagaauccaagaagggc

SEQ ID NO: 53435 - RNA, 19 nt, Artificial Sequence
  Sense Oligo
cccuucuuggauucuaggu

SEQ ID NO: 53436 - RNA, 19 nt, Artificial Sequence
  Antisense Oligo
accuagaauccaagaaggg

SEQ ID NO: 53437 - RNA, 19 nt, Artificial Sequence
  Sense Oligo
ccuucuuggauucuagguu

SEQ ID NO: 53438 - RNA, 19 nt, Artificial Sequence
  Antisense Oligo
aaccuagaauccaagaagg

SEQ ID NO: 53439 - RNA, 19 nt, Artificial Sequence
  Sense Oligo
cuucuuggauucuagguuu

SEQ ID NO: 53440 - RNA, 19 nt, Artificial Sequence
  Antisense Oligo
aaaccuagaauccaagaag

SEQ ID NO: 53441 - RNA, 19 nt, Artificial Sequence
  Sense Oligo
uuggauucuagguuuggga

SEQ ID NO: 53442 - RNA, 19 nt, Artificial Sequence
  Antisense Oligo
ucccaaaccuagaauccaa

SEQ ID NO: 53443 - RNA, 19 nt, Artificial Sequence
  Sense Oligo
uggauucuagguuugggau

SEQ ID NO: 53444 - RNA, 19 nt, Artificial Sequence
  Antisense Oligo
aucccaaaccuagaaucca

SEQ ID NO: 53445 - RNA, 19 nt, Artificial Sequence
  Sense Oligo
ggauucuagguuugggauu

SEQ ID NO: 53446 - RNA, 19 nt, Artificial Sequence
  Antisense Oligo
aaucccaaaccuagaaucc

SEQ ID NO: 53447 - RNA, 19 nt, Artificial Sequence
  Sense Oligo
gauucuagguuugggauuc

SEQ ID NO: 53448 - RNA, 19 nt, Artificial Sequence
  Antisense Oligo
gaaucccaaaccuagaauc

SEQ ID NO: 53449 - RNA, 19 nt, Artificial Sequence
  Sense Oligo
auucuagguuugggauuca

SEQ ID NO: 53450 - RNA, 19 nt, Artificial Sequence
  Antisense Oligo
ugaaucccaaaccuagaau

SEQ ID NO: 53451 - RNA, 19 nt, Artificial Sequence
  Sense Oligo
uucuagguuugggauucag

SEQ ID NO: 53452 - RNA, 19 nt, Artificial Sequence
  Antisense Oligo
cugaaucccaaaccuagaa

SEQ ID NO: 53453 - RNA, 19 nt, Artificial Sequence
  Sense Oligo
ucuagguuugggauucagc

SEQ ID NO: 53454 - RNA, 19 nt, Artificial Sequence
  Antisense Oligo
gcugaaucccaaaccuaga

SEQ ID NO: 53455 - RNA, 19 nt, Artificial Sequence
  Sense Oligo
cuagguuugggauucagcc

SEQ ID NO: 53456 - RNA, 19 nt, Artificial Sequence
  Antisense Oligo
ggcugaaucccaaaccuag

SEQ ID NO: 53457 - RNA, 19 nt, Artificial Sequence
  Sense Oligo
ucugucugcccugcgacca

SEQ ID NO: 53458 - RNA, 19 nt, Artificial Sequence
  Antisense Oligo
uggucgcagggcagacaga

SEQ ID NO: 53459 - RNA, 19 nt, Artificial Sequence
  Sense Oligo
cugccucagggccugguuu

SEQ ID NO: 53460 - RNA, 19 nt, Artificial Sequence
  Antisense Oligo
aaaccaggcccugaggcag

SEQ ID NO: 53461 - RNA, 19 nt, Artificial Sequence
  Sense Oligo
gggccugguuugccucaga

SEQ ID NO: 53462 - RNA, 19 nt, Artificial Sequence
  Antisense Oligo
ucugaggcaaaccaggccc

SEQ ID NO: 53463 - RNA, 19 nt, Artificial Sequence
  Sense Oligo
cugguuugccucagagcag

SEQ ID NO: 53464 - RNA, 19 nt, Artificial Sequence
  Antisense Oligo
cugcucugaggcaaaccag

SEQ ID NO: 53465 - RNA, 19 nt, Artificial Sequence
  Sense Oligo
gguuugccucagagcagau

SEQ ID NO: 53466 - RNA, 19 nt, Artificial Sequence
  Antisense Oligo
aucugcucugaggcaaacc

SEQ ID NO: 53467 - RNA, 19 nt, Artificial Sequence
  Sense Oligo
uugccucagagcagaugau

SEQ ID NO: 53468 - RNA, 19 nt, Artificial Sequence
  Antisense Oligo
aucaucugcucugaggcaa

SEQ ID NO: 53469 - RNA, 19 nt, Artificial Sequence
  Sense Oligo
ugccucagagcagaugaua

SEQ ID NO: 53470 - RNA, 19 nt, Artificial Sequence
  Antisense Oligo
uaucaucugcucugaggca

SEQ ID NO: 53471 - RNA, 19 nt, Artificial Sequence
  Sense Oligo
ucagagcagaugauaugcc

SEQ ID NO: 53472 - RNA, 19 nt, Artificial Sequence
  Antisense Oligo
ggcauaucaucugcucuga

SEQ ID NO: 53473 - RNA, 19 nt, Artificial Sequence
  Sense Oligo
cagagcagaugauaugccc

SEQ ID NO: 53474 - RNA, 19 nt, Artificial Sequence
  Antisense Oligo
gggcauaucaucugcucug

SEQ ID NO: 53475 - RNA, 19 nt, Artificial Sequence
  Sense Oligo
guuuaacugccuugccaga

SEQ ID NO: 53476 - RNA, 19 nt, Artificial Sequence
  Antisense Oligo
ucuggcaaggcaguuaaac

SEQ ID NO: 53477 - RNA, 19 nt, Artificial Sequence
  Sense Oligo
uuuaacugccuugccagac

SEQ ID NO: 53478 - RNA, 19 nt, Artificial Sequence
  Antisense Oligo
gucuggcaaggcaguuaaa

SEQ ID NO: 53479 - RNA, 19 nt, Artificial Sequence
  Sense Oligo
uuaacugccuugccagacg

SEQ ID NO: 53480 - RNA, 19 nt, Artificial Sequence
  Antisense Oligo
cgucuggcaaggcaguuaa

SEQ ID NO: 53481 - RNA, 19 nt, Artificial Sequence
  Sense Oligo
uaacugccuugccagacga

SEQ ID NO: 53482 - RNA, 19 nt, Artificial Sequence
  Antisense Oligo
ucgucuggcaaggcaguua

SEQ ID NO: 53483 - RNA, 19 nt, Artificial Sequence
  Sense Oligo
aacugccuugccagacgaa

SEQ ID NO: 53484 - RNA, 19 nt, Artificial Sequence
  Antisense Oligo
uucgucuggcaaggcaguu

SEQ ID NO: 53485 - RNA, 19 nt, Artificial Sequence
  Sense Oligo
acugccuugccagacgaau

SEQ ID NO: 53486 - RNA, 19 nt, Artificial Sequence
  Antisense Oligo
auucgucuggcaaggcagu

SEQ ID NO: 53487 - RNA, 19 nt, Artificial Sequence
  Sense Oligo
cugccuugccagacgaauu

SEQ ID NO: 53488 - RNA, 19 nt, Artificial Sequence
  Antisense Oligo
aauucgucuggcaaggcag

SEQ ID NO: 53489 - RNA, 19 nt, Artificial Sequence
  Sense Oligo
ugccuugccagacgaauuc

SEQ ID NO: 53490 - RNA, 19 nt, Artificial Sequence
  Antisense Oligo
gaauucgucuggcaaggca

SEQ ID NO: 53491 - RNA, 19 nt, Artificial Sequence
  Sense Oligo
gccuugccagacgaauucu

SEQ ID NO: 53492 - RNA, 19 nt, Artificial Sequence
  Antisense Oligo
agaauucgucuggcaaggc

SEQ ID NO: 53493 - RNA, 19 nt, Artificial Sequence
  Sense Oligo
ccuugccagacgaauucuc

SEQ ID NO: 53494 - RNA, 19 nt, Artificial Sequence
  Antisense Oligo
gagaauucgucuggcaagg

SEQ ID NO: 53495 - RNA, 19 nt, Artificial Sequence
  Sense Oligo
cuugccagacgaauucucu

SEQ ID NO: 53496 - RNA, 19 nt, Artificial Sequence
  Antisense Oligo
agagaauucgucuggcaag

SEQ ID NO: 53497 - RNA, 19 nt, Artificial Sequence
  Sense Oligo
uugccagacgaauucucuc

SEQ ID NO: 53498 - RNA, 19 nt, Artificial Sequence
  Antisense Oligo
gagagaauucgucuggcaa

SEQ ID NO: 53499 - RNA, 19 nt, Artificial Sequence
  Sense Oligo
cagacgaauucucuccagc

SEQ ID NO: 53500 - RNA, 19 nt, Artificial Sequence
  Antisense Oligo
gcuggagagaauucgucug

SEQ ID NO: 53501 - RNA, 19 nt, Artificial Sequence
  Sense Oligo
agacgaauucucuccagcu

SEQ ID NO: 53502 - RNA, 19 nt, Artificial Sequence
  Antisense Oligo
agcuggagagaauucgucu

SEQ ID NO: 53503 - RNA, 19 nt, Artificial Sequence
  Sense Oligo
gacgaauucucuccagcug

SEQ ID NO: 53504 - RNA, 19 nt, Artificial Sequence
  Antisense Oligo
cagcuggagagaauucguc

SEQ ID NO: 53505 - RNA, 19 nt, Artificial Sequence
  Sense Oligo
acgaauucucuccagcugu

SEQ ID NO: 53506 - RNA, 19 nt, Artificial Sequence
  Antisense Oligo
acagcuggagagaauucgu

SEQ ID NO: 53507 - RNA, 19 nt, Artificial Sequence
  Sense Oligo
cgaauucucuccagcuguu

SEQ ID NO: 53508 - RNA, 19 nt, Artificial Sequence
  Antisense Oligo
aacagcuggagagaauucg

SEQ ID NO: 53509 - RNA, 19 nt, Artificial Sequence
  Sense Oligo
gaauucucuccagcuguuu

SEQ ID NO: 53510 - RNA, 19 nt, Artificial Sequence
  Antisense Oligo
aaacagcuggagagaauuc

SEQ ID NO: 53511 - RNA, 19 nt, Artificial Sequence
  Sense Oligo
ucuccagcuguuucccaag

SEQ ID NO: 53512 - RNA, 19 nt, Artificial Sequence
  Antisense Oligo
cuugggaaacagcuggaga

SEQ ID NO: 53513 - RNA, 19 nt, Artificial Sequence
  Sense Oligo
uccagcuguuucccaagcg

SEQ ID NO: 53514 - RNA, 19 nt, Artificial Sequence
  Antisense Oligo
cgcuugggaaacagcugga

SEQ ID NO: 53515 - RNA, 19 nt, Artificial Sequence
  Sense Oligo
ccagcuguuucccaagcgc

SEQ ID NO: 53516 - RNA, 19 nt, Artificial Sequence
  Antisense Oligo
gcgcuugggaaacagcugg

SEQ ID NO: 53517 - RNA, 19 nt, Artificial Sequence
  Sense Oligo
cagcuguuucccaagcgca

SEQ ID NO: 53518 - RNA, 19 nt, Artificial Sequence
  Antisense Oligo
ugcgcuugggaaacagcug

SEQ ID NO: 53519 - RNA, 19 nt, Artificial Sequence
  Sense Oligo
agcuguuucccaagcgcac

SEQ ID NO: 53520 - RNA, 19 nt, Artificial Sequence
  Antisense Oligo
gugcgcuugggaaacagcu

SEQ ID NO: 53521 - RNA, 19 nt, Artificial Sequence
  Sense Oligo
guuucccaagcgcacaggu

SEQ ID NO: 53522 - RNA, 19 nt, Artificial Sequence
  Antisense Oligo
accugugcgcuugggaaac

SEQ ID NO: 53523 - RNA, 19 nt, Artificial Sequence
  Sense Oligo
uuucccaagcgcacaggua

SEQ ID NO: 53524 - RNA, 19 nt, Artificial Sequence
  Antisense Oligo
uaccugugcgcuugggaaa

SEQ ID NO: 53525 - RNA, 19 nt, Artificial Sequence
  Sense Oligo
uucccaagcgcacagguac

SEQ ID NO: 53526 - RNA, 19 nt, Artificial Sequence
  Antisense Oligo
guaccugugcgcuugggaa

SEQ ID NO: 53527 - RNA, 19 nt, Artificial Sequence
  Sense Oligo
ucccaagcgcacagguaca

SEQ ID NO: 53528 - RNA, 19 nt, Artificial Sequence
  Antisense Oligo
uguaccugugcgcuuggga

SEQ ID NO: 53529 - RNA, 19 nt, Artificial Sequence
  Sense Oligo
ucuauuaaccuucauuugg

SEQ ID NO: 53530 - RNA, 19 nt, Artificial Sequence
  Antisense Oligo
ccaaaugaagguuaauaga

SEQ ID NO: 53531 - RNA, 19 nt, Artificial Sequence
  Sense Oligo
cuauuaaccuucauuuggu

SEQ ID NO: 53532 - RNA, 19 nt, Artificial Sequence
  Antisense Oligo
accaaaugaagguuaauag

SEQ ID NO: 53533 - RNA, 19 nt, Artificial Sequence
  Sense Oligo
auuaaccuucauuugguag

SEQ ID NO: 53534 - RNA, 19 nt, Artificial Sequence
  Antisense Oligo
cuaccaaaugaagguuaau

SEQ ID NO: 53535 - RNA, 19 nt, Artificial Sequence
  Sense Oligo
cacuuacguacuuucauaa

SEQ ID NO: 53536 - RNA, 19 nt, Artificial Sequence
  Antisense Oligo
uuaugaaaguacguaagug

SEQ ID NO: 53537 - RNA, 19 nt, Artificial Sequence
  Sense Oligo
cauaaauaucugguaucuc

SEQ ID NO: 53538 - RNA, 19 nt, Artificial Sequence
  Antisense Oligo
gagauaccagauauuuaug

SEQ ID NO: 53539 - RNA, 19 nt, Artificial Sequence
  Sense Oligo
aaauaucugguaucucaag

SEQ ID NO: 53540 - RNA, 19 nt, Artificial Sequence
  Antisense Oligo
cuugagauaccagauauuu

SEQ ID NO: 53541 - RNA, 19 nt, Artificial Sequence
  Sense Oligo
aauaucugguaucucaaga

SEQ ID NO: 53542 - RNA, 19 nt, Artificial Sequence
  Antisense Oligo
ucuugagauaccagauauu

SEQ ID NO: 53543 - RNA, 19 nt, Artificial Sequence
  Sense Oligo
ucugguaucucaagauuau

SEQ ID NO: 53544 - RNA, 19 nt, Artificial Sequence
  Antisense Oligo
auaaucuugagauaccaga

SEQ ID NO: 53545 - RNA, 19 nt, Artificial Sequence
  Sense Oligo
cugguaucucaagauuauu

SEQ ID NO: 53546 - RNA, 19 nt, Artificial Sequence
  Antisense Oligo
aauaaucuugagauaccag

SEQ ID NO: 53547 - RNA, 19 nt, Artificial Sequence
  Sense Oligo
ugguaucucaagauuauuc

SEQ ID NO: 53548 - RNA, 19 nt, Artificial Sequence
  Antisense Oligo
gaauaaucuugagauacca

SEQ ID NO: 53549 - RNA, 19 nt, Artificial Sequence
  Sense Oligo
gguaucucaagauuauucu

SEQ ID NO: 53550 - RNA, 19 nt, Artificial Sequence
  Antisense Oligo
agaauaaucuugagauacc

SEQ ID NO: 53551 - RNA, 19 nt, Artificial Sequence
  Sense Oligo
guaucucaagauuauucuc

SEQ ID NO: 53552 - RNA, 19 nt, Artificial Sequence
  Antisense Oligo
gagaauaaucuugagauac

SEQ ID NO: 53553 - RNA, 19 nt, Artificial Sequence
  Sense Oligo
aucucaagauuauucucuc

SEQ ID NO: 53554 - RNA, 19 nt, Artificial Sequence
  Antisense Oligo
gagagaauaaucuugagau

SEQ ID NO: 53555 - RNA, 19 nt, Artificial Sequence
  Sense Oligo
caccagaggcccaaggaau

SEQ ID NO: 53556 - RNA, 19 nt, Artificial Sequence
  Antisense Oligo
auuccuugggccucuggug

SEQ ID NO: 53557 - RNA, 19 nt, Artificial Sequence
  Sense Oligo
accagaggcccaaggaaug

SEQ ID NO: 53558 - RNA, 19 nt, Artificial Sequence
  Antisense Oligo
cauuccuugggccucuggu

SEQ ID NO: 53559 - RNA, 19 nt, Artificial Sequence
  Sense Oligo
gaggcccaaggaauguaga

SEQ ID NO: 53560 - RNA, 19 nt, Artificial Sequence
  Antisense Oligo
ucuacauuccuugggccuc

SEQ ID NO: 53561 - RNA, 19 nt, Artificial Sequence
  Sense Oligo
guguuucacucuguugccc

SEQ ID NO: 53562 - RNA, 19 nt, Artificial Sequence
  Antisense Oligo
gggcaacagagugaaacac

SEQ ID NO: 53563 - RNA, 19 nt, Artificial Sequence
  Sense Oligo
uguuucacucuguugccca

SEQ ID NO: 53564 - RNA, 19 nt, Artificial Sequence
  Antisense Oligo
ugggcaacagagugaaaca

SEQ ID NO: 53565 - RNA, 19 nt, Artificial Sequence
  Sense Oligo
guuucacucuguugcccag

SEQ ID NO: 53566 - RNA, 19 nt, Artificial Sequence
  Antisense Oligo
cugggcaacagagugaaac

SEQ ID NO: 53567 - RNA, 19 nt, Artificial Sequence
  Sense Oligo
uuucacucuguugcccagg

SEQ ID NO: 53568 - RNA, 19 nt, Artificial Sequence
  Antisense Oligo
ccugggcaacagagugaaa

SEQ ID NO: 53569 - RNA, 19 nt, Artificial Sequence
  Sense Oligo
uucacucuguugcccaggc

SEQ ID NO: 53570 - RNA, 19 nt, Artificial Sequence
  Antisense Oligo
gccugggcaacagagugaa

SEQ ID NO: 53571 - RNA, 19 nt, Artificial Sequence
  Sense Oligo
ucacucuguugcccaggcu

SEQ ID NO: 53572 - RNA, 19 nt, Artificial Sequence
  Antisense Oligo
agccugggcaacagaguga

SEQ ID NO: 53573 - RNA, 19 nt, Artificial Sequence
  Sense Oligo
cacucuguugcccaggcug

SEQ ID NO: 53574 - RNA, 19 nt, Artificial Sequence
  Antisense Oligo
cagccugggcaacagagug

SEQ ID NO: 53575 - RNA, 19 nt, Artificial Sequence
  Sense Oligo
acucuguugcccaggcugg

SEQ ID NO: 53576 - RNA, 19 nt, Artificial Sequence
  Antisense Oligo
ccagccugggcaacagagu

SEQ ID NO: 53577 - RNA, 19 nt, Artificial Sequence
  Sense Oligo
cucuguugcccaggcugga

SEQ ID NO: 53578 - RNA, 19 nt, Artificial Sequence
  Antisense Oligo
uccagccugggcaacagag

SEQ ID NO: 53579 - RNA, 19 nt, Artificial Sequence
  Sense Oligo
ucuguugcccaggcuggag

SEQ ID NO: 53580 - RNA, 19 nt, Artificial Sequence
  Antisense Oligo
cuccagccugggcaacaga

SEQ ID NO: 53581 - RNA, 19 nt, Artificial Sequence
  Sense Oligo
uugcccaggcuggaguaca

SEQ ID NO: 53582 - RNA, 19 nt, Artificial Sequence
  Antisense Oligo
uguacuccagccugggcaa

SEQ ID NO: 53583 - RNA, 19 nt, Artificial Sequence
  Sense Oligo
ugcccaggcuggaguacag

SEQ ID NO: 53584 - RNA, 19 nt, Artificial Sequence
  Antisense Oligo
cuguacuccagccugggca

SEQ ID NO: 53585 - RNA, 19 nt, Artificial Sequence
  Sense Oligo
gcccaggcuggaguacagu

SEQ ID NO: 53586 - RNA, 19 nt, Artificial Sequence
  Antisense Oligo
acuguacuccagccugggc

SEQ ID NO: 53587 - RNA, 19 nt, Artificial Sequence
  Sense Oligo
cccaggcuggaguacagug

SEQ ID NO: 53588 - RNA, 19 nt, Artificial Sequence
  Antisense Oligo
cacuguacuccagccuggg

SEQ ID NO: 53589 - RNA, 19 nt, Artificial Sequence
  Sense Oligo
ccaggcuggaguacagugg

SEQ ID NO: 53590 - RNA, 19 nt, Artificial Sequence
  Antisense Oligo
ccacuguacuccagccugg

SEQ ID NO: 53591 - RNA, 19 nt, Artificial Sequence
  Sense Oligo
gcuggaguacaguggcacg

SEQ ID NO: 53592 - RNA, 19 nt, Artificial Sequence
  Antisense Oligo
cgugccacuguacuccagc

SEQ ID NO: 53593 - RNA, 19 nt, Artificial Sequence
  Sense Oligo
cuggaguacaguggcacga

SEQ ID NO: 53594 - RNA, 19 nt, Artificial Sequence
  Antisense Oligo
ucgugccacuguacuccag

SEQ ID NO: 53595 - RNA, 19 nt, Artificial Sequence
  Sense Oligo
uggaguacaguggcacgau

SEQ ID NO: 53596 - RNA, 19 nt, Artificial Sequence
  Antisense Oligo
aucgugccacuguacucca

SEQ ID NO: 53597 - RNA, 19 nt, Artificial Sequence
  Sense Oligo
ggaguacaguggcacgauc

SEQ ID NO: 53598 - RNA, 19 nt, Artificial Sequence
  Antisense Oligo
gaucgugccacuguacucc

SEQ ID NO: 53599 - RNA, 19 nt, Artificial Sequence
  Sense Oligo
gaguacaguggcacgaucu

SEQ ID NO: 53600 - RNA, 19 nt, Artificial Sequence
  Antisense Oligo
agaucgugccacuguacuc

SEQ ID NO: 53601 - RNA, 19 nt, Artificial Sequence
  Sense Oligo
aguacaguggcacgaucuc

SEQ ID NO: 53602 - RNA, 19 nt, Artificial Sequence
  Antisense Oligo
gagaucgugccacuguacu

SEQ ID NO: 53603 - RNA, 19 nt, Artificial Sequence
  Sense Oligo
guacaguggcacgaucuca

SEQ ID NO: 53604 - RNA, 19 nt, Artificial Sequence
  Antisense Oligo
ugagaucgugccacuguac

SEQ ID NO: 53605 - RNA, 19 nt, Artificial Sequence
  Sense Oligo
uacaguggcacgaucucag

SEQ ID NO: 53606 - RNA, 19 nt, Artificial Sequence
  Antisense Oligo
cugagaucgugccacugua

SEQ ID NO: 53607 - RNA, 19 nt, Artificial Sequence
  Sense Oligo
guggcacgaucucagcuca

SEQ ID NO: 53608 - RNA, 19 nt, Artificial Sequence
  Antisense Oligo
ugagcugagaucgugccac

SEQ ID NO: 53609 - RNA, 19 nt, Artificial Sequence
  Sense Oligo
uggcacgaucucagcucac

SEQ ID NO: 53610 - RNA, 19 nt, Artificial Sequence
  Antisense Oligo
gugagcugagaucgugcca

SEQ ID NO: 53611 - RNA, 19 nt, Artificial Sequence
  Sense Oligo
ggcacgaucucagcucacu

SEQ ID NO: 53612 - RNA, 19 nt, Artificial Sequence
  Antisense Oligo
agugagcugagaucgugcc

SEQ ID NO: 53613 - RNA, 19 nt, Artificial Sequence
  Sense Oligo
gcacgaucucagcucacug

SEQ ID NO: 53614 - RNA, 19 nt, Artificial Sequence
  Antisense Oligo
cagugagcugagaucgugc

SEQ ID NO: 53615 - RNA, 19 nt, Artificial Sequence
  Sense Oligo
cacgaucucagcucacugc

SEQ ID NO: 53616 - RNA, 19 nt, Artificial Sequence
  Antisense Oligo
gcagugagcugagaucgug

SEQ ID NO: 53617 - RNA, 19 nt, Artificial Sequence
  Sense Oligo
acgaucucagcucacugca

SEQ ID NO: 53618 - RNA, 19 nt, Artificial Sequence
  Antisense Oligo
ugcagugagcugagaucgu

SEQ ID NO: 53619 - RNA, 19 nt, Artificial Sequence
  Sense Oligo
cgaucucagcucacugcaa

SEQ ID NO: 53620 - RNA, 19 nt, Artificial Sequence
  Antisense Oligo
uugcagugagcugagaucg

SEQ ID NO: 53621 - RNA, 19 nt, Artificial Sequence
  Sense Oligo
gaucucagcucacugcaac

SEQ ID NO: 53622 - RNA, 19 nt, Artificial Sequence
  Antisense Oligo
guugcagugagcugagauc

SEQ ID NO: 53623 - RNA, 19 nt, Artificial Sequence
  Sense Oligo
aucucagcucacugcaacc

SEQ ID NO: 53624 - RNA, 19 nt, Artificial Sequence
  Antisense Oligo
gguugcagugagcugagau

SEQ ID NO: 53625 - RNA, 19 nt, Artificial Sequence
  Sense Oligo
ucucagcucacugcaaccu

SEQ ID NO: 53626 - RNA, 19 nt, Artificial Sequence
  Antisense Oligo
agguugcagugagcugaga

SEQ ID NO: 53627 - RNA, 19 nt, Artificial Sequence
  Sense Oligo
cucagcucacugcaaccuu

SEQ ID NO: 53628 - RNA, 19 nt, Artificial Sequence
  Antisense Oligo
aagguugcagugagcugag

SEQ ID NO: 53629 - RNA, 19 nt, Artificial Sequence
  Sense Oligo
gcucacugcaaccuucacc

SEQ ID NO: 53630 - RNA, 19 nt, Artificial Sequence
  Antisense Oligo
ggugaagguugcagugagc

SEQ ID NO: 53631 - RNA, 19 nt, Artificial Sequence
  Sense Oligo
accuucaccuccuggguuc

SEQ ID NO: 53632 - RNA, 19 nt, Artificial Sequence
  Antisense Oligo
gaacccaggaggugaaggu

SEQ ID NO: 53633 - RNA, 19 nt, Artificial Sequence
  Sense Oligo
ccuucaccuccuggguuca

SEQ ID NO: 53634 - RNA, 19 nt, Artificial Sequence
  Antisense Oligo
ugaacccaggaggugaagg

SEQ ID NO: 53635 - RNA, 19 nt, Artificial Sequence
  Sense Oligo
cuucaccuccuggguucag

SEQ ID NO: 53636 - RNA, 19 nt, Artificial Sequence
  Antisense Oligo
cugaacccaggaggugaag

SEQ ID NO: 53637 - RNA, 19 nt, Artificial Sequence
  Sense Oligo
caaguagcugggauuacag

SEQ ID NO: 53638 - RNA, 19 nt, Artificial Sequence
  Antisense Oligo
cuguaaucccagcuacuug

SEQ ID NO: 53639 - RNA, 19 nt, Artificial Sequence
  Sense Oligo
cugggauuacaggcaugca

SEQ ID NO: 53640 - RNA, 19 nt, Artificial Sequence
  Antisense Oligo
ugcaugccuguaaucccag

SEQ ID NO: 53641 - RNA, 19 nt, Artificial Sequence
  Sense Oligo
ugggauuacaggcaugcac

SEQ ID NO: 53642 - RNA, 19 nt, Artificial Sequence
  Antisense Oligo
gugcaugccuguaauccca

SEQ ID NO: 53643 - RNA, 19 nt, Artificial Sequence
  Sense Oligo
gggauuacaggcaugcacc

SEQ ID NO: 53644 - RNA, 19 nt, Artificial Sequence
  Antisense Oligo
ggugcaugccuguaauccc

SEQ ID NO: 53645 - RNA, 19 nt, Artificial Sequence
  Sense Oligo
ggauuacaggcaugcacca

SEQ ID NO: 53646 - RNA, 19 nt, Artificial Sequence
  Antisense Oligo
uggugcaugccuguaaucc

SEQ ID NO: 53647 - RNA, 19 nt, Artificial Sequence
  Sense Oligo
gauuacaggcaugcaccac

SEQ ID NO: 53648 - RNA, 19 nt, Artificial Sequence
  Antisense Oligo
guggugcaugccuguaauc

SEQ ID NO: 53649 - RNA, 19 nt, Artificial Sequence
  Sense Oligo
agacaggguuucaccaugu

SEQ ID NO: 53650 - RNA, 19 nt, Artificial Sequence
  Antisense Oligo
acauggugaaacccugucu

SEQ ID NO: 53651 - RNA, 19 nt, Artificial Sequence
  Sense Oligo
gacaggguuucaccauguu

SEQ ID NO: 53652 - RNA, 19 nt, Artificial Sequence
  Antisense Oligo
aacauggugaaacccuguc

SEQ ID NO: 53653 - RNA, 19 nt, Artificial Sequence
  Sense Oligo
acaggguuucaccauguug

SEQ ID NO: 53654 - RNA, 19 nt, Artificial Sequence
  Antisense Oligo
caacauggugaaacccugu

SEQ ID NO: 53655 - RNA, 19 nt, Artificial Sequence
  Sense Oligo
caggguuucaccauguugg

SEQ ID NO: 53656 - RNA, 19 nt, Artificial Sequence
  Antisense Oligo
ccaacauggugaaacccug

SEQ ID NO: 53657 - RNA, 19 nt, Artificial Sequence
  Sense Oligo
aggguuucaccauguuggc

SEQ ID NO: 53658 - RNA, 19 nt, Artificial Sequence
  Antisense Oligo
gccaacauggugaaacccu

SEQ ID NO: 53659 - RNA, 19 nt, Artificial Sequence
  Sense Oligo
ggguuucaccauguuggcc

SEQ ID NO: 53660 - RNA, 19 nt, Artificial Sequence
  Antisense Oligo
ggccaacauggugaaaccc

SEQ ID NO: 53661 - RNA, 19 nt, Artificial Sequence
  Sense Oligo
gguuucaccauguuggcca

SEQ ID NO: 53662 - RNA, 19 nt, Artificial Sequence
  Antisense Oligo
uggccaacauggugaaacc

SEQ ID NO: 53663 - RNA, 19 nt, Artificial Sequence
  Sense Oligo
guuucaccauguuggccag

SEQ ID NO: 53664 - RNA, 19 nt, Artificial Sequence
  Antisense Oligo
cuggccaacauggugaaac

SEQ ID NO: 53665 - RNA, 19 nt, Artificial Sequence
  Sense Oligo
caccauguuggccaggcug

SEQ ID NO: 53666 - RNA, 19 nt, Artificial Sequence
  Antisense Oligo
cagccuggccaacauggug

SEQ ID NO: 53667 - RNA, 19 nt, Artificial Sequence
  Sense Oligo
accauguuggccaggcugg

SEQ ID NO: 53668 - RNA, 19 nt, Artificial Sequence
  Antisense Oligo
ccagccuggccaacauggu

SEQ ID NO: 53669 - RNA, 19 nt, Artificial Sequence
  Sense Oligo
ccauguuggccaggcuggu

SEQ ID NO: 53670 - RNA, 19 nt, Artificial Sequence
  Antisense Oligo
accagccuggccaacaugg

SEQ ID NO: 53671 - RNA, 19 nt, Artificial Sequence
  Sense Oligo
cauguuggccaggcugguc

SEQ ID NO: 53672 - RNA, 19 nt, Artificial Sequence
  Antisense Oligo
gaccagccuggccaacaug

SEQ ID NO: 53673 - RNA, 19 nt, Artificial Sequence
  Sense Oligo
auguuggccaggcuggucu

SEQ ID NO: 53674 - RNA, 19 nt, Artificial Sequence
  Antisense Oligo
agaccagccuggccaacau

SEQ ID NO: 53675 - RNA, 19 nt, Artificial Sequence
  Sense Oligo
uguuggccaggcuggucuc

SEQ ID NO: 53676 - RNA, 19 nt, Artificial Sequence
  Antisense Oligo
gagaccagccuggccaaca

SEQ ID NO: 53677 - RNA, 19 nt, Artificial Sequence
  Sense Oligo
uuggccaggcuggucucga

SEQ ID NO: 53678 - RNA, 19 nt, Artificial Sequence
  Antisense Oligo
ucgagaccagccuggccaa

SEQ ID NO: 53679 - RNA, 19 nt, Artificial Sequence
  Sense Oligo
uggccaggcuggucucgaa

SEQ ID NO: 53680 - RNA, 19 nt, Artificial Sequence
  Antisense Oligo
uucgagaccagccuggcca

SEQ ID NO: 53681 - RNA, 19 nt, Artificial Sequence
  Sense Oligo
cugaccucaggugauccac

SEQ ID NO: 53682 - RNA, 19 nt, Artificial Sequence
  Antisense Oligo
guggaucaccugaggucag

SEQ ID NO: 53683 - RNA, 19 nt, Artificial Sequence
  Sense Oligo
cagggauuacaggcaugag

SEQ ID NO: 53684 - RNA, 19 nt, Artificial Sequence
  Antisense Oligo
cucaugccuguaaucccug

SEQ ID NO: 53685 - RNA, 19 nt, Artificial Sequence
  Sense Oligo
agggauuacaggcaugagu

SEQ ID NO: 53686 - RNA, 19 nt, Artificial Sequence
  Antisense Oligo
acucaugccuguaaucccu

SEQ ID NO: 53687 - RNA, 19 nt, Artificial Sequence
  Sense Oligo
gggauuacaggcaugagug

SEQ ID NO: 53688 - RNA, 19 nt, Artificial Sequence
  Antisense Oligo
cacucaugccuguaauccc

SEQ ID NO: 53689 - RNA, 19 nt, Artificial Sequence
  Sense Oligo
ggauuacaggcaugaguga

SEQ ID NO: 53690 - RNA, 19 nt, Artificial Sequence
  Antisense Oligo
ucacucaugccuguaaucc

SEQ ID NO: 53691 - RNA, 19 nt, Artificial Sequence
  Sense Oligo
ccgacgccacugguuuuaa

SEQ ID NO: 53692 - RNA, 19 nt, Artificial Sequence
  Antisense Oligo
uuaaaaccaguggcgucgg

SEQ ID NO: 53693 - RNA, 19 nt, Artificial Sequence
  Sense Oligo
cgacgccacugguuuuaau

SEQ ID NO: 53694 - RNA, 19 nt, Artificial Sequence
  Antisense Oligo
auuaaaaccaguggcgucg

SEQ ID NO: 53695 - RNA, 19 nt, Artificial Sequence
  Sense Oligo
gacgccacugguuuuaaug

SEQ ID NO: 53696 - RNA, 19 nt, Artificial Sequence
  Antisense Oligo
cauuaaaaccaguggcguc

SEQ ID NO: 53697 - RNA, 19 nt, Artificial Sequence
  Sense Oligo
acgccacugguuuuaaugc

SEQ ID NO: 53698 - RNA, 19 nt, Artificial Sequence
  Antisense Oligo
gcauuaaaaccaguggcgu

SEQ ID NO: 53699 - RNA, 19 nt, Artificial Sequence
  Sense Oligo
cacugguuuuaaugcauca

SEQ ID NO: 53700 - RNA, 19 nt, Artificial Sequence
  Antisense Oligo
ugaugcauuaaaaccagug

SEQ ID NO: 53701 - RNA, 19 nt, Artificial Sequence
  Sense Oligo
gguuuuaaugcaucaguau

SEQ ID NO: 53702 - RNA, 19 nt, Artificial Sequence
  Antisense Oligo
auacugaugcauuaaaacc

SEQ ID NO: 53703 - RNA, 19 nt, Artificial Sequence
  Sense Oligo
guuuuaaugcaucaguauc

SEQ ID NO: 53704 - RNA, 19 nt, Artificial Sequence
  Antisense Oligo
gauacugaugcauuaaaac

SEQ ID NO: 53705 - RNA, 19 nt, Artificial Sequence
  Sense Oligo
caucaguaucauucacagu

SEQ ID NO: 53706 - RNA, 19 nt, Artificial Sequence
  Antisense Oligo
acugugaaugauacugaug

SEQ ID NO: 53707 - RNA, 19 nt, Artificial Sequence
  Sense Oligo
ucaguaucauucacaguca

SEQ ID NO: 53708 - RNA, 19 nt, Artificial Sequence
  Antisense Oligo
ugacugugaaugauacuga

SEQ ID NO: 53709 - RNA, 19 nt, Artificial Sequence
  Sense Oligo
uaucauucacagucacuga

SEQ ID NO: 53710 - RNA, 19 nt, Artificial Sequence
  Antisense Oligo
ucagugacugugaaugaua

SEQ ID NO: 53711 - RNA, 19 nt, Artificial Sequence
  Sense Oligo
cagucacugaccugaggau

SEQ ID NO: 53712 - RNA, 19 nt, Artificial Sequence
  Antisense Oligo
auccucaggucagugacug

SEQ ID NO: 53713 - RNA, 19 nt, Artificial Sequence
  Sense Oligo
agucacugaccugaggauc

SEQ ID NO: 53714 - RNA, 19 nt, Artificial Sequence
  Antisense Oligo
gauccucaggucagugacu

SEQ ID NO: 53715 - RNA, 19 nt, Artificial Sequence
  Sense Oligo
gucacugaccugaggauca

SEQ ID NO: 53716 - RNA, 19 nt, Artificial Sequence
  Antisense Oligo
ugauccucaggucagugac

SEQ ID NO: 53717 - RNA, 19 nt, Artificial Sequence
  Sense Oligo
ucacugaccugaggaucaa

SEQ ID NO: 53718 - RNA, 19 nt, Artificial Sequence
  Antisense Oligo
uugauccucaggucaguga

SEQ ID NO: 53719 - RNA, 19 nt, Artificial Sequence
  Sense Oligo
cacugaccugaggaucaac

SEQ ID NO: 53720 - RNA, 19 nt, Artificial Sequence
  Antisense Oligo
guugauccucaggucagug

SEQ ID NO: 53721 - RNA, 19 nt, Artificial Sequence
  Sense Oligo
gaccugaggaucaacccac

SEQ ID NO: 53722 - RNA, 19 nt, Artificial Sequence
  Antisense Oligo
guggguugauccucagguc

SEQ ID NO: 53723 - RNA, 19 nt, Artificial Sequence
  Sense Oligo
accugaggaucaacccacu

SEQ ID NO: 53724 - RNA, 19 nt, Artificial Sequence
  Antisense Oligo
aguggguugauccucaggu

SEQ ID NO: 53725 - RNA, 19 nt, Artificial Sequence
  Sense Oligo
ccugaggaucaacccacuu

SEQ ID NO: 53726 - RNA, 19 nt, Artificial Sequence
  Antisense Oligo
aaguggguugauccucagg

SEQ ID NO: 53727 - RNA, 19 nt, Artificial Sequence
  Sense Oligo
cugaggaucaacccacuuc

SEQ ID NO: 53728 - RNA, 19 nt, Artificial Sequence
  Antisense Oligo
gaaguggguugauccucag

SEQ ID NO: 53729 - RNA, 19 nt, Artificial Sequence
  Sense Oligo
ugaggaucaacccacuucu

SEQ ID NO: 53730 - RNA, 19 nt, Artificial Sequence
  Antisense Oligo
agaaguggguugauccuca

SEQ ID NO: 53731 - RNA, 19 nt, Artificial Sequence
  Sense Oligo
gaggaucaacccacuucuu

SEQ ID NO: 53732 - RNA, 19 nt, Artificial Sequence
  Antisense Oligo
aagaaguggguugauccuc

SEQ ID NO: 53733 - RNA, 19 nt, Artificial Sequence
  Sense Oligo
aggaucaacccacuucuug

SEQ ID NO: 53734 - RNA, 19 nt, Artificial Sequence
  Antisense Oligo
caagaaguggguugauccu

SEQ ID NO: 53735 - RNA, 19 nt, Artificial Sequence
  Sense Oligo
ggaucaacccacuucuugu

SEQ ID NO: 53736 - RNA, 19 nt, Artificial Sequence
  Antisense Oligo
acaagaaguggguugaucc

SEQ ID NO: 53737 - RNA, 19 nt, Artificial Sequence
  Sense Oligo
gaucaacccacuucuuguc

SEQ ID NO: 53738 - RNA, 19 nt, Artificial Sequence
  Antisense Oligo
gacaagaaguggguugauc

SEQ ID NO: 53739 - RNA, 19 nt, Artificial Sequence
  Sense Oligo
uuuggagcugguuaaaagc

SEQ ID NO: 53740 - RNA, 19 nt, Artificial Sequence
  Antisense Oligo
gcuuuuaaccagcuccaaa

SEQ ID NO: 53741 - RNA, 19 nt, Artificial Sequence
  Sense Oligo
uuggagcugguuaaaagca

SEQ ID NO: 53742 - RNA, 19 nt, Artificial Sequence
  Antisense Oligo
ugcuuuuaaccagcuccaa

SEQ ID NO: 53743 - RNA, 19 nt, Artificial Sequence
  Sense Oligo
uggagcugguuaaaagcag

SEQ ID NO: 53744 - RNA, 19 nt, Artificial Sequence
  Antisense Oligo
cugcuuuuaaccagcucca

SEQ ID NO: 53745 - RNA, 19 nt, Artificial Sequence
  Sense Oligo
cugguuaaaagcagcucug

SEQ ID NO: 53746 - RNA, 19 nt, Artificial Sequence
  Antisense Oligo
cagagcugcuuuuaaccag

SEQ ID NO: 53747 - RNA, 19 nt, Artificial Sequence
  Sense Oligo
ugguuaaaagcagcucugg

SEQ ID NO: 53748 - RNA, 19 nt, Artificial Sequence
  Antisense Oligo
ccagagcugcuuuuaacca

SEQ ID NO: 53749 - RNA, 19 nt, Artificial Sequence
  Sense Oligo
gguuaaaagcagcucuggc

SEQ ID NO: 53750 - RNA, 19 nt, Artificial Sequence
  Antisense Oligo
gccagagcugcuuuuaacc

SEQ ID NO: 53751 - RNA, 19 nt, Artificial Sequence
  Sense Oligo
guuaaaagcagcucuggcu

SEQ ID NO: 53752 - RNA, 19 nt, Artificial Sequence
  Antisense Oligo
agccagagcugcuuuuaac

SEQ ID NO: 53753 - RNA, 19 nt, Artificial Sequence
  Sense Oligo
aaaagcagcucuggcucuc

SEQ ID NO: 53754 - RNA, 19 nt, Artificial Sequence
  Antisense Oligo
gagagccagagcugcuuuu

SEQ ID NO: 53755 - RNA, 19 nt, Artificial Sequence
  Sense Oligo
aaagcagcucuggcucucu

SEQ ID NO: 53756 - RNA, 19 nt, Artificial Sequence
  Antisense Oligo
agagagccagagcugcuuu

SEQ ID NO: 53757 - RNA, 19 nt, Artificial Sequence
  Sense Oligo
ccggcucugugagugguug

SEQ ID NO: 53758 - RNA, 19 nt, Artificial Sequence
  Antisense Oligo
caaccacucacagagccgg

SEQ ID NO: 53759 - RNA, 19 nt, Artificial Sequence
  Sense Oligo
cggcucugugagugguugg

SEQ ID NO: 53760 - RNA, 19 nt, Artificial Sequence
  Antisense Oligo
ccaaccacucacagagccg

SEQ ID NO: 53761 - RNA, 19 nt, Artificial Sequence
  Sense Oligo
ggcucugugagugguuggu

SEQ ID NO: 53762 - RNA, 19 nt, Artificial Sequence
  Antisense Oligo
accaaccacucacagagcc

SEQ ID NO: 53763 - RNA, 19 nt, Artificial Sequence
  Sense Oligo
gcucugugagugguugguu

SEQ ID NO: 53764 - RNA, 19 nt, Artificial Sequence
  Antisense Oligo
aaccaaccacucacagagc

SEQ ID NO: 53765 - RNA, 19 nt, Artificial Sequence
  Sense Oligo
cucugugagugguugguuu

SEQ ID NO: 53766 - RNA, 19 nt, Artificial Sequence
  Antisense Oligo
aaaccaaccacucacagag

SEQ ID NO: 53767 - RNA, 19 nt, Artificial Sequence
  Sense Oligo
ucugugagugguugguuuu

SEQ ID NO: 53768 - RNA, 19 nt, Artificial Sequence
  Antisense Oligo
aaaaccaaccacucacaga

SEQ ID NO: 53769 - RNA, 19 nt, Artificial Sequence
  Sense Oligo
cugugagugguugguuuuc

SEQ ID NO: 53770 - RNA, 19 nt, Artificial Sequence
  Antisense Oligo
gaaaaccaaccacucacag

SEQ ID NO: 53771 - RNA, 19 nt, Artificial Sequence
  Sense Oligo
ugugagugguugguuuucu

SEQ ID NO: 53772 - RNA, 19 nt, Artificial Sequence
  Antisense Oligo
agaaaaccaaccacucaca

SEQ ID NO: 53773 - RNA, 19 nt, Artificial Sequence
  Sense Oligo
gugagugguugguuuucuu

SEQ ID NO: 53774 - RNA, 19 nt, Artificial Sequence
  Antisense Oligo
aagaaaaccaaccacucac

SEQ ID NO: 53775 - RNA, 19 nt, Artificial Sequence
  Sense Oligo
guugguuuucuuuccuucc

SEQ ID NO: 53776 - RNA, 19 nt, Artificial Sequence
  Antisense Oligo
ggaaggaaagaaaaccaac

SEQ ID NO: 53777 - RNA, 19 nt, Artificial Sequence
  Sense Oligo
uugguuuucuuuccuuccc

SEQ ID NO: 53778 - RNA, 19 nt, Artificial Sequence
  Antisense Oligo
gggaaggaaagaaaaccaa

SEQ ID NO: 53779 - RNA, 19 nt, Artificial Sequence
  Sense Oligo
cuucucaggccuccuaaaa

SEQ ID NO: 53780 - RNA, 19 nt, Artificial Sequence
  Antisense Oligo
uuuuaggaggccugagaag

SEQ ID NO: 53781 - RNA, 19 nt, Artificial Sequence
  Sense Oligo
uucucaggccuccuaaaag

SEQ ID NO: 53782 - RNA, 19 nt, Artificial Sequence
  Antisense Oligo
cuuuuaggaggccugagaa

SEQ ID NO: 53783 - RNA, 19 nt, Artificial Sequence
  Sense Oligo
ucucaggccuccuaaaagu

SEQ ID NO: 53784 - RNA, 19 nt, Artificial Sequence
  Antisense Oligo
acuuuuaggaggccugaga

SEQ ID NO: 53785 - RNA, 19 nt, Artificial Sequence
  Sense Oligo
ucaggccuccuaaaagugg

SEQ ID NO: 53786 - RNA, 19 nt, Artificial Sequence
  Antisense Oligo
ccacuuuuaggaggccuga

SEQ ID NO: 53787 - RNA, 19 nt, Artificial Sequence
  Sense Oligo
caggccuccuaaaaguggg

SEQ ID NO: 53788 - RNA, 19 nt, Artificial Sequence
  Antisense Oligo
cccacuuuuaggaggccug

SEQ ID NO: 53789 - RNA, 19 nt, Artificial Sequence
  Sense Oligo
accaggcaagcccagugga

SEQ ID NO: 53790 - RNA, 19 nt, Artificial Sequence
  Antisense Oligo
uccacugggcuugccuggu

SEQ ID NO: 53791 - RNA, 19 nt, Artificial Sequence
  Sense Oligo
aggcaagcccaguggaugg

SEQ ID NO: 53792 - RNA, 19 nt, Artificial Sequence
  Antisense Oligo
ccauccacugggcuugccu

SEQ ID NO: 53793 - RNA, 19 nt, Artificial Sequence
  Sense Oligo
aguggauggguucuuugac

SEQ ID NO: 53794 - RNA, 19 nt, Artificial Sequence
  Antisense Oligo
gucaaagaacccauccacu

SEQ ID NO: 53795 - RNA, 19 nt, Artificial Sequence
  Sense Oligo
guggauggguucuuugaca

SEQ ID NO: 53796 - RNA, 19 nt, Artificial Sequence
  Antisense Oligo
ugucaaagaacccauccac

SEQ ID NO: 53797 - RNA, 19 nt, Artificial Sequence
  Sense Oligo
uggauggguucuuugacau

SEQ ID NO: 53798 - RNA, 19 nt, Artificial Sequence
  Antisense Oligo
augucaaagaacccaucca

SEQ ID NO: 53799 - RNA, 19 nt, Artificial Sequence
  Sense Oligo
ggauggguucuuugacaua

SEQ ID NO: 53800 - RNA, 19 nt, Artificial Sequence
  Antisense Oligo
uaugucaaagaacccaucc

SEQ ID NO: 53801 - RNA, 19 nt, Artificial Sequence
  Sense Oligo
gauggguucuuugacauac

SEQ ID NO: 53802 - RNA, 19 nt, Artificial Sequence
  Antisense Oligo
guaugucaaagaacccauc

SEQ ID NO: 53803 - RNA, 19 nt, Artificial Sequence
  Sense Oligo
auggguucuuugacauacu

SEQ ID NO: 53804 - RNA, 19 nt, Artificial Sequence
  Antisense Oligo
aguaugucaaagaacccau

SEQ ID NO: 53805 - RNA, 19 nt, Artificial Sequence
  Sense Oligo
gggauauugaaggguauug

SEQ ID NO: 53806 - RNA, 19 nt, Artificial Sequence
  Antisense Oligo
caauacccuucaauauccc

SEQ ID NO: 53807 - RNA, 19 nt, Artificial Sequence
  Sense Oligo
uugaaggguauuguugccg

SEQ ID NO: 53808 - RNA, 19 nt, Artificial Sequence
  Antisense Oligo
cggcaacaauacccuucaa

SEQ ID NO: 53809 - RNA, 19 nt, Artificial Sequence
  Sense Oligo
ugaaggguauuguugccgg

SEQ ID NO: 53810 - RNA, 19 nt, Artificial Sequence
  Antisense Oligo
ccggcaacaauacccuuca

SEQ ID NO: 53811 - RNA, 19 nt, Artificial Sequence
  Sense Oligo
ggguccaaaugaucaaagu

SEQ ID NO: 53812 - RNA, 19 nt, Artificial Sequence
  Antisense Oligo
acuuugaucauuuggaccc

SEQ ID NO: 53813 - RNA, 19 nt, Artificial Sequence
  Sense Oligo
gguccaaaugaucaaagug

SEQ ID NO: 53814 - RNA, 19 nt, Artificial Sequence
  Antisense Oligo
cacuuugaucauuuggacc

SEQ ID NO: 53815 - RNA, 19 nt, Artificial Sequence
  Sense Oligo
guccaaaugaucaaagugu

SEQ ID NO: 53816 - RNA, 19 nt, Artificial Sequence
  Antisense Oligo
acacuuugaucauuuggac

SEQ ID NO: 53817 - RNA, 19 nt, Artificial Sequence
  Sense Oligo
augaucaaaguguuuccag

SEQ ID NO: 53818 - RNA, 19 nt, Artificial Sequence
  Antisense Oligo
cuggaaacacuuugaucau

SEQ ID NO: 53819 - RNA, 19 nt, Artificial Sequence
  Sense Oligo
ugaucaaaguguuuccaga

SEQ ID NO: 53820 - RNA, 19 nt, Artificial Sequence
  Antisense Oligo
ucuggaaacacuuugauca

SEQ ID NO: 53821 - RNA, 19 nt, Artificial Sequence
  Sense Oligo
gaucaaaguguuuccagaa

SEQ ID NO: 53822 - RNA, 19 nt, Artificial Sequence
  Antisense Oligo
uucuggaaacacuuugauc

SEQ ID NO: 53823 - RNA, 19 nt, Artificial Sequence
  Sense Oligo
aaagggaugcauguaaaua

SEQ ID NO: 53824 - RNA, 19 nt, Artificial Sequence
  Antisense Oligo
uauuuacaugcaucccuuu

SEQ ID NO: 53825 - RNA, 19 nt, Artificial Sequence
  Sense Oligo
aagggaugcauguaaauau

SEQ ID NO: 53826 - RNA, 19 nt, Artificial Sequence
  Antisense Oligo
auauuuacaugcaucccuu

SEQ ID NO: 53827 - RNA, 19 nt, Artificial Sequence
  Sense Oligo
agggaugcauguaaauauc

SEQ ID NO: 53828 - RNA, 19 nt, Artificial Sequence
  Antisense Oligo
gauauuuacaugcaucccu

SEQ ID NO: 53829 - RNA, 19 nt, Artificial Sequence
  Sense Oligo
gggaugcauguaaauauca

SEQ ID NO: 53830 - RNA, 19 nt, Artificial Sequence
  Antisense Oligo
ugauauuuacaugcauccc

SEQ ID NO: 53831 - RNA, 19 nt, Artificial Sequence
  Sense Oligo
ggaugcauguaaauaucau

SEQ ID NO: 53832 - RNA, 19 nt, Artificial Sequence
  Antisense Oligo
augauauuuacaugcaucc

SEQ ID NO: 53833 - RNA, 19 nt, Artificial Sequence
  Sense Oligo
ugcauguaaauaucaucug

SEQ ID NO: 53834 - RNA, 19 nt, Artificial Sequence
  Antisense Oligo
cagaugauauuuacaugca

SEQ ID NO: 53835 - RNA, 19 nt, Artificial Sequence
  Sense Oligo
gcauguaaauaucaucugc

SEQ ID NO: 53836 - RNA, 19 nt, Artificial Sequence
  Antisense Oligo
gcagaugauauuuacaugc

SEQ ID NO: 53837 - RNA, 19 nt, Artificial Sequence
  Sense Oligo
cauguaaauaucaucugcu

SEQ ID NO: 53838 - RNA, 19 nt, Artificial Sequence
  Antisense Oligo
agcagaugauauuuacaug

SEQ ID NO: 53839 - RNA, 19 nt, Artificial Sequence
  Sense Oligo
uaaauaucaucugcugagg

SEQ ID NO: 53840 - RNA, 19 nt, Artificial Sequence
  Antisense Oligo
ccucagcagaugauauuua

SEQ ID NO: 53841 - RNA, 19 nt, Artificial Sequence
  Sense Oligo
aauaucaucugcugagguu

SEQ ID NO: 53842 - RNA, 19 nt, Artificial Sequence
  Antisense Oligo
aaccucagcagaugauauu

SEQ ID NO: 53843 - RNA, 19 nt, Artificial Sequence
  Sense Oligo
auaucaucugcugagguuu

SEQ ID NO: 53844 - RNA, 19 nt, Artificial Sequence
  Antisense Oligo
aaaccucagcagaugauau

SEQ ID NO: 53845 - RNA, 19 nt, Artificial Sequence
  Sense Oligo
uaucaucugcugagguuuu

SEQ ID NO: 53846 - RNA, 19 nt, Artificial Sequence
  Antisense Oligo
aaaaccucagcagaugaua

SEQ ID NO: 53847 - RNA, 19 nt, Artificial Sequence
  Sense Oligo
aucaucugcugagguuuug

SEQ ID NO: 53848 - RNA, 19 nt, Artificial Sequence
  Antisense Oligo
caaaaccucagcagaugau

SEQ ID NO: 53849 - RNA, 19 nt, Artificial Sequence
  Sense Oligo
ucaucugcugagguuuuga

SEQ ID NO: 53850 - RNA, 19 nt, Artificial Sequence
  Antisense Oligo
ucaaaaccucagcagauga

SEQ ID NO: 53851 - RNA, 19 nt, Artificial Sequence
  Sense Oligo
caucugcugagguuuugaa

SEQ ID NO: 53852 - RNA, 19 nt, Artificial Sequence
  Antisense Oligo
uucaaaaccucagcagaug

SEQ ID NO: 53853 - RNA, 19 nt, Artificial Sequence
  Sense Oligo
aucugcugagguuuugaag

SEQ ID NO: 53854 - RNA, 19 nt, Artificial Sequence
  Antisense Oligo
cuucaaaaccucagcagau

SEQ ID NO: 53855 - RNA, 19 nt, Artificial Sequence
  Sense Oligo
ucugcugagguuuugaaga

SEQ ID NO: 53856 - RNA, 19 nt, Artificial Sequence
  Antisense Oligo
ucuucaaaaccucagcaga

SEQ ID NO: 53857 - RNA, 19 nt, Artificial Sequence
  Sense Oligo
cugcugagguuuugaagac

SEQ ID NO: 53858 - RNA, 19 nt, Artificial Sequence
  Antisense Oligo
gucuucaaaaccucagcag

SEQ ID NO: 53859 - RNA, 19 nt, Artificial Sequence
  Sense Oligo
gcugagguuuugaagacua

SEQ ID NO: 53860 - RNA, 19 nt, Artificial Sequence
  Antisense Oligo
uagucuucaaaaccucagc

SEQ ID NO: 53861 - RNA, 19 nt, Artificial Sequence
  Sense Oligo
cugagguuuugaagacuag

SEQ ID NO: 53862 - RNA, 19 nt, Artificial Sequence
  Antisense Oligo
cuagucuucaaaaccucag

SEQ ID NO: 53863 - RNA, 19 nt, Artificial Sequence
  Sense Oligo
ugagguuuugaagacuagc

SEQ ID NO: 53864 - RNA, 19 nt, Artificial Sequence
  Antisense Oligo
gcuagucuucaaaaccuca

SEQ ID NO: 53865 - RNA, 19 nt, Artificial Sequence
  Sense Oligo
gagguuuugaagacuagcu

SEQ ID NO: 53866 - RNA, 19 nt, Artificial Sequence
  Antisense Oligo
agcuagucuucaaaaccuc

SEQ ID NO: 53867 - RNA, 19 nt, Artificial Sequence
  Sense Oligo
agguuuugaagacuagcuc

SEQ ID NO: 53868 - RNA, 19 nt, Artificial Sequence
  Antisense Oligo
gagcuagucuucaaaaccu

SEQ ID NO: 53869 - RNA, 19 nt, Artificial Sequence
  Sense Oligo
gguuuugaagacuagcucu

SEQ ID NO: 53870 - RNA, 19 nt, Artificial Sequence
  Antisense Oligo
agagcuagucuucaaaacc

SEQ ID NO: 53871 - RNA, 19 nt, Artificial Sequence
  Sense Oligo
guuuugaagacuagcucua

SEQ ID NO: 53872 - RNA, 19 nt, Artificial Sequence
  Antisense Oligo
uagagcuagucuucaaaac

SEQ ID NO: 53873 - RNA, 19 nt, Artificial Sequence
  Sense Oligo
uuuugaagacuagcucuaa

SEQ ID NO: 53874 - RNA, 19 nt, Artificial Sequence
  Antisense Oligo
uuagagcuagucuucaaaa

SEQ ID NO: 53875 - RNA, 19 nt, Artificial Sequence
  Sense Oligo
uuugaagacuagcucuaac

SEQ ID NO: 53876 - RNA, 19 nt, Artificial Sequence
  Antisense Oligo
guuagagcuagucuucaaa

SEQ ID NO: 53877 - RNA, 19 nt, Artificial Sequence
  Sense Oligo
uugaagacuagcucuaacg

SEQ ID NO: 53878 - RNA, 19 nt, Artificial Sequence
  Antisense Oligo
cguuagagcuagucuucaa

SEQ ID NO: 53879 - RNA, 19 nt, Artificial Sequence
  Sense Oligo
ugaagacuagcucuaacgg

SEQ ID NO: 53880 - RNA, 19 nt, Artificial Sequence
  Antisense Oligo
ccguuagagcuagucuuca

SEQ ID NO: 53881 - RNA, 19 nt, Artificial Sequence
  Sense Oligo
gaagacuagcucuaacggg

SEQ ID NO: 53882 - RNA, 19 nt, Artificial Sequence
  Antisense Oligo
cccguuagagcuagucuuc

SEQ ID NO: 53883 - RNA, 19 nt, Artificial Sequence
  Sense Oligo
acuagcucuaacgggugag

SEQ ID NO: 53884 - RNA, 19 nt, Artificial Sequence
  Antisense Oligo
cucacccguuagagcuagu

SEQ ID NO: 53885 - RNA, 19 nt, Artificial Sequence
  Sense Oligo
gaggagugacuugaaucuu

SEQ ID NO: 53886 - RNA, 19 nt, Artificial Sequence
  Antisense Oligo
aagauucaagucacuccuc

SEQ ID NO: 53887 - RNA, 19 nt, Artificial Sequence
  Sense Oligo
ggagugacuugaaucuuuc

SEQ ID NO: 53888 - RNA, 19 nt, Artificial Sequence
  Antisense Oligo
gaaagauucaagucacucc

SEQ ID NO: 53889 - RNA, 19 nt, Artificial Sequence
  Sense Oligo
uuaaaaguaaaaugccagc

SEQ ID NO: 53890 - RNA, 19 nt, Artificial Sequence
  Antisense Oligo
gcuggcauuuuacuuuuaa

SEQ ID NO: 53891 - RNA, 19 nt, Artificial Sequence
  Sense Oligo
caugguggcucacgccugu

SEQ ID NO: 53892 - RNA, 19 nt, Artificial Sequence
  Antisense Oligo
acaggcgugagccaccaug

SEQ ID NO: 53893 - RNA, 19 nt, Artificial Sequence
  Sense Oligo
augguggcucacgccugua

SEQ ID NO: 53894 - RNA, 19 nt, Artificial Sequence
  Antisense Oligo
uacaggcgugagccaccau

SEQ ID NO: 53895 - RNA, 19 nt, Artificial Sequence
  Sense Oligo
ugguggcucacgccuguaa

SEQ ID NO: 53896 - RNA, 19 nt, Artificial Sequence
  Antisense Oligo
uuacaggcgugagccacca

SEQ ID NO: 53897 - RNA, 19 nt, Artificial Sequence
  Sense Oligo
gguggcucacgccuguaau

SEQ ID NO: 53898 - RNA, 19 nt, Artificial Sequence
  Antisense Oligo
auuacaggcgugagccacc

SEQ ID NO: 53899 - RNA, 19 nt, Artificial Sequence
  Sense Oligo
guggcucacgccuguaauc

SEQ ID NO: 53900 - RNA, 19 nt, Artificial Sequence
  Antisense Oligo
gauuacaggcgugagccac

SEQ ID NO: 53901 - RNA, 19 nt, Artificial Sequence
  Sense Oligo
uggcucacgccuguaaucc

SEQ ID NO: 53902 - RNA, 19 nt, Artificial Sequence
  Antisense Oligo
ggauuacaggcgugagcca

SEQ ID NO: 53903 - RNA, 19 nt, Artificial Sequence
  Sense Oligo
ggcucacgccuguaauccc

SEQ ID NO: 53904 - RNA, 19 nt, Artificial Sequence
  Antisense Oligo
gggauuacaggcgugagcc

SEQ ID NO: 53905 - RNA, 19 nt, Artificial Sequence
  Sense Oligo
acgccuguaaucccagcac

SEQ ID NO: 53906 - RNA, 19 nt, Artificial Sequence
  Antisense Oligo
gugcugggauuacaggcgu

SEQ ID NO: 53907 - RNA, 19 nt, Artificial Sequence
  Sense Oligo
guguguggaucaccugagg

SEQ ID NO: 53908 - RNA, 19 nt, Artificial Sequence
  Antisense Oligo
ccucaggugauccacacac

SEQ ID NO: 53909 - RNA, 19 nt, Artificial Sequence
  Sense Oligo
uguguggaucaccugaggu

SEQ ID NO: 53910 - RNA, 19 nt, Artificial Sequence
  Antisense Oligo
accucaggugauccacaca

SEQ ID NO: 53911 - RNA, 19 nt, Artificial Sequence
  Sense Oligo
guguggaucaccugagguc

SEQ ID NO: 53912 - RNA, 19 nt, Artificial Sequence
  Antisense Oligo
gaccucaggugauccacac

SEQ ID NO: 53913 - RNA, 19 nt, Artificial Sequence
  Sense Oligo
caaaauuagccaggcguga

SEQ ID NO: 53914 - RNA, 19 nt, Artificial Sequence
  Antisense Oligo
ucacgccuggcuaauuuug

SEQ ID NO: 53915 - RNA, 19 nt, Artificial Sequence
  Sense Oligo
aaaauuagccaggcgugau

SEQ ID NO: 53916 - RNA, 19 nt, Artificial Sequence
  Antisense Oligo
aucacgccuggcuaauuuu

SEQ ID NO: 53917 - RNA, 19 nt, Artificial Sequence
  Sense Oligo
aaauuagccaggcgugaug

SEQ ID NO: 53918 - RNA, 19 nt, Artificial Sequence
  Antisense Oligo
caucacgccuggcuaauuu

SEQ ID NO: 53919 - RNA, 19 nt, Artificial Sequence
  Sense Oligo
aauuagccaggcgugaugg

SEQ ID NO: 53920 - RNA, 19 nt, Artificial Sequence
  Antisense Oligo
ccaucacgccuggcuaauu

SEQ ID NO: 53921 - RNA, 19 nt, Artificial Sequence
  Sense Oligo
auuagccaggcgugauggu

SEQ ID NO: 53922 - RNA, 19 nt, Artificial Sequence
  Antisense Oligo
accaucacgccuggcuaau

SEQ ID NO: 53923 - RNA, 19 nt, Artificial Sequence
  Sense Oligo
ggugcgugccuguaauccc

SEQ ID NO: 53924 - RNA, 19 nt, Artificial Sequence
  Antisense Oligo
gggauuacaggcacgcacc

SEQ ID NO: 53925 - RNA, 19 nt, Artificial Sequence
  Sense Oligo
gugccuguaaucccagcua

SEQ ID NO: 53926 - RNA, 19 nt, Artificial Sequence
  Antisense Oligo
uagcugggauuacaggcac

SEQ ID NO: 53927 - RNA, 19 nt, Artificial Sequence
  Sense Oligo
ugccuguaaucccagcuac

SEQ ID NO: 53928 - RNA, 19 nt, Artificial Sequence
  Antisense Oligo
guagcugggauuacaggca

SEQ ID NO: 53929 - RNA, 19 nt, Artificial Sequence
  Sense Oligo
gccuguaaucccagcuacu

SEQ ID NO: 53930 - RNA, 19 nt, Artificial Sequence
  Antisense Oligo
aguagcugggauuacaggc

SEQ ID NO: 53931 - RNA, 19 nt, Artificial Sequence
  Sense Oligo
ccuguaaucccagcuacuu

SEQ ID NO: 53932 - RNA, 19 nt, Artificial Sequence
  Antisense Oligo
aaguagcugggauuacagg

SEQ ID NO: 53933 - RNA, 19 nt, Artificial Sequence
  Sense Oligo
cuguaaucccagcuacuug

SEQ ID NO: 53934 - RNA, 19 nt, Artificial Sequence
  Antisense Oligo
caaguagcugggauuacag

SEQ ID NO: 53935 - RNA, 19 nt, Artificial Sequence
  Sense Oligo
uguaaucccagcuacuugg

SEQ ID NO: 53936 - RNA, 19 nt, Artificial Sequence
  Antisense Oligo
ccaaguagcugggauuaca

SEQ ID NO: 53937 - RNA, 19 nt, Artificial Sequence
  Sense Oligo
agcuacuugggaggcugag

SEQ ID NO: 53938 - RNA, 19 nt, Artificial Sequence
  Antisense Oligo
cucagccucccaaguagcu

SEQ ID NO: 53939 - RNA, 19 nt, Artificial Sequence
  Sense Oligo
gcuacuugggaggcugagg

SEQ ID NO: 53940 - RNA, 19 nt, Artificial Sequence
  Antisense Oligo
ccucagccucccaaguagc

SEQ ID NO: 53941 - RNA, 19 nt, Artificial Sequence
  Sense Oligo
cuacuugggaggcugaggc

SEQ ID NO: 53942 - RNA, 19 nt, Artificial Sequence
  Antisense Oligo
gccucagccucccaaguag

SEQ ID NO: 53943 - RNA, 19 nt, Artificial Sequence
  Sense Oligo
uacuugggaggcugaggca

SEQ ID NO: 53944 - RNA, 19 nt, Artificial Sequence
  Antisense Oligo
ugccucagccucccaagua

SEQ ID NO: 53945 - RNA, 19 nt, Artificial Sequence
  Sense Oligo
acuugggaggcugaggcag

SEQ ID NO: 53946 - RNA, 19 nt, Artificial Sequence
  Antisense Oligo
cugccucagccucccaagu

SEQ ID NO: 53947 - RNA, 19 nt, Artificial Sequence
  Sense Oligo
uugggaggcugaggcagga

SEQ ID NO: 53948 - RNA, 19 nt, Artificial Sequence
  Antisense Oligo
uccugccucagccucccaa

SEQ ID NO: 53949 - RNA, 19 nt, Artificial Sequence
  Sense Oligo
gaggcugaggcaggaggau

SEQ ID NO: 53950 - RNA, 19 nt, Artificial Sequence
  Antisense Oligo
auccuccugccucagccuc

SEQ ID NO: 53951 - RNA, 19 nt, Artificial Sequence
  Sense Oligo
aggcugaggcaggaggauc

SEQ ID NO: 53952 - RNA, 19 nt, Artificial Sequence
  Antisense Oligo
gauccuccugccucagccu

SEQ ID NO: 53953 - RNA, 19 nt, Artificial Sequence
  Sense Oligo
ggcugaggcaggaggauca

SEQ ID NO: 53954 - RNA, 19 nt, Artificial Sequence
  Antisense Oligo
ugauccuccugccucagcc

SEQ ID NO: 53955 - RNA, 19 nt, Artificial Sequence
  Sense Oligo
gcugaggcaggaggaucac

SEQ ID NO: 53956 - RNA, 19 nt, Artificial Sequence
  Antisense Oligo
gugauccuccugccucagc

SEQ ID NO: 53957 - RNA, 19 nt, Artificial Sequence
  Sense Oligo
cugaggcaggaggaucacu

SEQ ID NO: 53958 - RNA, 19 nt, Artificial Sequence
  Antisense Oligo
agugauccuccugccucag

SEQ ID NO: 53959 - RNA, 19 nt, Artificial Sequence
  Sense Oligo
ugaggcaggaggaucacuu

SEQ ID NO: 53960 - RNA, 19 nt, Artificial Sequence
  Antisense Oligo
aagugauccuccugccuca

SEQ ID NO: 53961 - RNA, 19 nt, Artificial Sequence
  Sense Oligo
gaggcaggaggaucacuug

SEQ ID NO: 53962 - RNA, 19 nt, Artificial Sequence
  Antisense Oligo
caagugauccuccugccuc

SEQ ID NO: 53963 - RNA, 19 nt, Artificial Sequence
  Sense Oligo
cugggagguggagguugca

SEQ ID NO: 53964 - RNA, 19 nt, Artificial Sequence
  Antisense Oligo
ugcaaccuccaccucccag

SEQ ID NO: 53965 - RNA, 19 nt, Artificial Sequence
  Sense Oligo
ugggagguggagguugcag

SEQ ID NO: 53966 - RNA, 19 nt, Artificial Sequence
  Antisense Oligo
cugcaaccuccaccuccca

SEQ ID NO: 53967 - RNA, 19 nt, Artificial Sequence
  Sense Oligo
guggagguugcagugagcg

SEQ ID NO: 53968 - RNA, 19 nt, Artificial Sequence
  Antisense Oligo
cgcucacugcaaccuccac

SEQ ID NO: 53969 - RNA, 19 nt, Artificial Sequence
  Sense Oligo
uggagguugcagugagcgg

SEQ ID NO: 53970 - RNA, 19 nt, Artificial Sequence
  Antisense Oligo
ccgcucacugcaaccucca

SEQ ID NO: 53971 - RNA, 19 nt, Artificial Sequence
  Sense Oligo
ggagguugcagugagcgga

SEQ ID NO: 53972 - RNA, 19 nt, Artificial Sequence
  Antisense Oligo
uccgcucacugcaaccucc

SEQ ID NO: 53973 - RNA, 19 nt, Artificial Sequence
  Sense Oligo
gagguugcagugagcggag

SEQ ID NO: 53974 - RNA, 19 nt, Artificial Sequence
  Antisense Oligo
cuccgcucacugcaaccuc

SEQ ID NO: 53975 - RNA, 19 nt, Artificial Sequence
  Sense Oligo
acuguacuccagccugggc

SEQ ID NO: 53976 - RNA, 19 nt, Artificial Sequence
  Antisense Oligo
gcccaggcuggaguacagu

SEQ ID NO: 53977 - RNA, 19 nt, Artificial Sequence
  Sense Oligo
cuguacuccagccugggca

SEQ ID NO: 53978 - RNA, 19 nt, Artificial Sequence
  Antisense Oligo
ugcccaggcuggaguacag

SEQ ID NO: 53979 - RNA, 19 nt, Artificial Sequence
  Sense Oligo
uguacuccagccugggcaa

SEQ ID NO: 53980 - RNA, 19 nt, Artificial Sequence
  Antisense Oligo
uugcccaggcuggaguaca

SEQ ID NO: 53981 - RNA, 19 nt, Artificial Sequence
  Sense Oligo
guacuccagccugggcaac

SEQ ID NO: 53982 - RNA, 19 nt, Artificial Sequence
  Antisense Oligo
guugcccaggcuggaguac

SEQ ID NO: 53983 - RNA, 19 nt, Artificial Sequence
  Sense Oligo
aaaugcugugcaaaucuca

SEQ ID NO: 53984 - RNA, 19 nt, Artificial Sequence
  Antisense Oligo
ugagauuugcacagcauuu

SEQ ID NO: 53985 - RNA, 19 nt, Artificial Sequence
  Sense Oligo
augcugugcaaaucucaag

SEQ ID NO: 53986 - RNA, 19 nt, Artificial Sequence
  Antisense Oligo
cuugagauuugcacagcau

SEQ ID NO: 53987 - RNA, 19 nt, Artificial Sequence
  Sense Oligo
ugcugugcaaaucucaagu

SEQ ID NO: 53988 - RNA, 19 nt, Artificial Sequence
  Antisense Oligo
acuugagauuugcacagca

SEQ ID NO: 53989 - RNA, 19 nt, Artificial Sequence
  Sense Oligo
gcugugcaaaucucaaguc

SEQ ID NO: 53990 - RNA, 19 nt, Artificial Sequence
  Antisense Oligo
gacuugagauuugcacagc

SEQ ID NO: 53991 - RNA, 19 nt, Artificial Sequence
  Sense Oligo
cugugcaaaucucaaguca

SEQ ID NO: 53992 - RNA, 19 nt, Artificial Sequence
  Antisense Oligo
ugacuugagauuugcacag

SEQ ID NO: 53993 - RNA, 19 nt, Artificial Sequence
  Sense Oligo
ugugcaaaucucaagucau

SEQ ID NO: 53994 - RNA, 19 nt, Artificial Sequence
  Antisense Oligo
augacuugagauuugcaca

SEQ ID NO: 53995 - RNA, 19 nt, Artificial Sequence
  Sense Oligo
gugcaaaucucaagucauu

SEQ ID NO: 53996 - RNA, 19 nt, Artificial Sequence
  Antisense Oligo
aaugacuugagauuugcac

SEQ ID NO: 53997 - RNA, 19 nt, Artificial Sequence
  Sense Oligo
ugcaaaucucaagucauuc

SEQ ID NO: 53998 - RNA, 19 nt, Artificial Sequence
  Antisense Oligo
gaaugacuugagauuugca

SEQ ID NO: 53999 - RNA, 19 nt, Artificial Sequence
  Sense Oligo
gcaaaucucaagucauucu

SEQ ID NO: 54000 - RNA, 19 nt, Artificial Sequence
  Antisense Oligo
agaaugacuugagauuugc

SEQ ID NO: 54001 - RNA, 19 nt, Artificial Sequence
  Sense Oligo
caaaucucaagucauucug

SEQ ID NO: 54002 - RNA, 19 nt, Artificial Sequence
  Antisense Oligo
cagaaugacuugagauuug

SEQ ID NO: 54003 - RNA, 19 nt, Artificial Sequence
  Sense Oligo
aucucaagucauucuguaa

SEQ ID NO: 54004 - RNA, 19 nt, Artificial Sequence
  Antisense Oligo
uuacagaaugacuugagau

SEQ ID NO: 54005 - RNA, 19 nt, Artificial Sequence
  Sense Oligo
ucucaagucauucuguaag

SEQ ID NO: 54006 - RNA, 19 nt, Artificial Sequence
  Antisense Oligo
cuuacagaaugacuugaga

SEQ ID NO: 54007 - RNA, 19 nt, Artificial Sequence
  Sense Oligo
cucaagucauucuguaagg

SEQ ID NO: 54008 - RNA, 19 nt, Artificial Sequence
  Antisense Oligo
ccuuacagaaugacuugag

SEQ ID NO: 54009 - RNA, 19 nt, Artificial Sequence
  Sense Oligo
caagucauucuguaaggag

SEQ ID NO: 54010 - RNA, 19 nt, Artificial Sequence
  Antisense Oligo
cuccuuacagaaugacuug

SEQ ID NO: 54011 - RNA, 19 nt, Artificial Sequence
  Sense Oligo
aagucauucuguaaggagg

SEQ ID NO: 54012 - RNA, 19 nt, Artificial Sequence
  Antisense Oligo
ccuccuuacagaaugacuu

SEQ ID NO: 54013 - RNA, 19 nt, Artificial Sequence
  Sense Oligo
agucauucuguaaggaggc

SEQ ID NO: 54014 - RNA, 19 nt, Artificial Sequence
  Antisense Oligo
gccuccuuacagaaugacu

SEQ ID NO: 54015 - RNA, 19 nt, Artificial Sequence
  Sense Oligo
gucauucuguaaggaggca

SEQ ID NO: 54016 - RNA, 19 nt, Artificial Sequence
  Antisense Oligo
ugccuccuuacagaaugac

SEQ ID NO: 54017 - RNA, 19 nt, Artificial Sequence
  Sense Oligo
cuguaaggaggcauuuggg

SEQ ID NO: 54018 - RNA, 19 nt, Artificial Sequence
  Antisense Oligo
cccaaaugccuccuuacag

SEQ ID NO: 54019 - RNA, 19 nt, Artificial Sequence
  Sense Oligo
uguaaggaggcauuuggga

SEQ ID NO: 54020 - RNA, 19 nt, Artificial Sequence
  Antisense Oligo
ucccaaaugccuccuuaca

SEQ ID NO: 54021 - RNA, 19 nt, Artificial Sequence
  Sense Oligo
guaaggaggcauuugggaa

SEQ ID NO: 54022 - RNA, 19 nt, Artificial Sequence
  Antisense Oligo
uucccaaaugccuccuuac

SEQ ID NO: 54023 - RNA, 19 nt, Artificial Sequence
  Sense Oligo
acaccauccaccugucuuc

SEQ ID NO: 54024 - RNA, 19 nt, Artificial Sequence
  Antisense Oligo
gaagacagguggauggugu

SEQ ID NO: 54025 - RNA, 19 nt, Artificial Sequence
  Sense Oligo
caccauccaccugucuucu

SEQ ID NO: 54026 - RNA, 19 nt, Artificial Sequence
  Antisense Oligo
agaagacagguggauggug

SEQ ID NO: 54027 - RNA, 19 nt, Artificial Sequence
  Sense Oligo
accauccaccugucuucug

SEQ ID NO: 54028 - RNA, 19 nt, Artificial Sequence
  Antisense Oligo
cagaagacagguggauggu

SEQ ID NO: 54029 - RNA, 19 nt, Artificial Sequence
  Sense Oligo
ccauccaccugucuucugu

SEQ ID NO: 54030 - RNA, 19 nt, Artificial Sequence
  Antisense Oligo
acagaagacagguggaugg

SEQ ID NO: 54031 - RNA, 19 nt, Artificial Sequence
  Sense Oligo
cugucuucuguuucucgug

SEQ ID NO: 54032 - RNA, 19 nt, Artificial Sequence
  Antisense Oligo
cacgagaaacagaagacag

SEQ ID NO: 54033 - RNA, 19 nt, Artificial Sequence
  Sense Oligo
ugucuucuguuucucgugu

SEQ ID NO: 54034 - RNA, 19 nt, Artificial Sequence
  Antisense Oligo
acacgagaaacagaagaca

SEQ ID NO: 54035 - RNA, 19 nt, Artificial Sequence
  Sense Oligo
gucuucuguuucucguguu

SEQ ID NO: 54036 - RNA, 19 nt, Artificial Sequence
  Antisense Oligo
aacacgagaaacagaagac

SEQ ID NO: 54037 - RNA, 19 nt, Artificial Sequence
  Sense Oligo
ucuucuguuucucguguuc

SEQ ID NO: 54038 - RNA, 19 nt, Artificial Sequence
  Antisense Oligo
gaacacgagaaacagaaga

SEQ ID NO: 54039 - RNA, 19 nt, Artificial Sequence
  Sense Oligo
cuucuguuucucguguucu

SEQ ID NO: 54040 - RNA, 19 nt, Artificial Sequence
  Antisense Oligo
agaacacgagaaacagaag

SEQ ID NO: 54041 - RNA, 19 nt, Artificial Sequence
  Sense Oligo
uucuguuucucguguucua

SEQ ID NO: 54042 - RNA, 19 nt, Artificial Sequence
  Antisense Oligo
uagaacacgagaaacagaa

SEQ ID NO: 54043 - RNA, 19 nt, Artificial Sequence
  Sense Oligo
ucuguuucucguguucuaa

SEQ ID NO: 54044 - RNA, 19 nt, Artificial Sequence
  Antisense Oligo
uuagaacacgagaaacaga

SEQ ID NO: 54045 - RNA, 19 nt, Artificial Sequence
  Sense Oligo
cuguuucucguguucuaag

SEQ ID NO: 54046 - RNA, 19 nt, Artificial Sequence
  Antisense Oligo
cuuagaacacgagaaacag

SEQ ID NO: 54047 - RNA, 19 nt, Artificial Sequence
  Sense Oligo
uguuucucguguucuaagg

SEQ ID NO: 54048 - RNA, 19 nt, Artificial Sequence
  Antisense Oligo
ccuuagaacacgagaaaca

SEQ ID NO: 54049 - RNA, 19 nt, Artificial Sequence
  Sense Oligo
guuucucguguucuaaggg

SEQ ID NO: 54050 - RNA, 19 nt, Artificial Sequence
  Antisense Oligo
cccuuagaacacgagaaac

SEQ ID NO: 54051 - RNA, 19 nt, Artificial Sequence
  Sense Oligo
cguguucuaagggaagcca

SEQ ID NO: 54052 - RNA, 19 nt, Artificial Sequence
  Antisense Oligo
uggcuucccuuagaacacg

SEQ ID NO: 54053 - RNA, 19 nt, Artificial Sequence
  Sense Oligo
uucuaagggaagccauuga

SEQ ID NO: 54054 - RNA, 19 nt, Artificial Sequence
  Antisense Oligo
ucaauggcuucccuuagaa

SEQ ID NO: 54055 - RNA, 19 nt, Artificial Sequence
  Sense Oligo
ucuaagggaagccauugaa

SEQ ID NO: 54056 - RNA, 19 nt, Artificial Sequence
  Antisense Oligo
uucaauggcuucccuuaga

SEQ ID NO: 54057 - RNA, 19 nt, Artificial Sequence
  Sense Oligo
cgcuuccggcagaugugca

SEQ ID NO: 54058 - RNA, 19 nt, Artificial Sequence
  Antisense Oligo
ugcacaucugccggaagcg

SEQ ID NO: 54059 - RNA, 19 nt, Artificial Sequence
  Sense Oligo
gcuuccggcagaugugcaa

SEQ ID NO: 54060 - RNA, 19 nt, Artificial Sequence
  Antisense Oligo
uugcacaucugccggaagc

SEQ ID NO: 54061 - RNA, 19 nt, Artificial Sequence
  Sense Oligo
cuuccggcagaugugcaac

SEQ ID NO: 54062 - RNA, 19 nt, Artificial Sequence
  Antisense Oligo
guugcacaucugccggaag

SEQ ID NO: 54063 - RNA, 19 nt, Artificial Sequence
  Sense Oligo
acaguuucuucguagaccu

SEQ ID NO: 54064 - RNA, 19 nt, Artificial Sequence
  Antisense Oligo
aggucuacgaagaaacugu

SEQ ID NO: 54065 - RNA, 19 nt, Artificial Sequence
  Sense Oligo
caguuucuucguagaccug

SEQ ID NO: 54066 - RNA, 19 nt, Artificial Sequence
  Antisense Oligo
caggucuacgaagaaacug

SEQ ID NO: 54067 - RNA, 19 nt, Artificial Sequence
  Sense Oligo
aguuucuucguagaccugg

SEQ ID NO: 54068 - RNA, 19 nt, Artificial Sequence
  Antisense Oligo
ccaggucuacgaagaaacu

SEQ ID NO: 54069 - RNA, 19 nt, Artificial Sequence
  Sense Oligo
guuucuucguagaccuggu

SEQ ID NO: 54070 - RNA, 19 nt, Artificial Sequence
  Antisense Oligo
accaggucuacgaagaaac

SEQ ID NO: 54071 - RNA, 19 nt, Artificial Sequence
  Sense Oligo
uuucuucguagaccuggug

SEQ ID NO: 54072 - RNA, 19 nt, Artificial Sequence
  Antisense Oligo
caccaggucuacgaagaaa

SEQ ID NO: 54073 - RNA, 19 nt, Artificial Sequence
  Sense Oligo
uucuucguagaccuggugu

SEQ ID NO: 54074 - RNA, 19 nt, Artificial Sequence
  Antisense Oligo
acaccaggucuacgaagaa

SEQ ID NO: 54075 - RNA, 19 nt, Artificial Sequence
  Sense Oligo
ucuucguagaccugguguc

SEQ ID NO: 54076 - RNA, 19 nt, Artificial Sequence
  Antisense Oligo
gacaccaggucuacgaaga

SEQ ID NO: 54077 - RNA, 19 nt, Artificial Sequence
  Sense Oligo
cuucguagaccuggugucc

SEQ ID NO: 54078 - RNA, 19 nt, Artificial Sequence
  Antisense Oligo
ggacaccaggucuacgaag

SEQ ID NO: 54079 - RNA, 19 nt, Artificial Sequence
  Sense Oligo
uucguagaccuggugucca

SEQ ID NO: 54080 - RNA, 19 nt, Artificial Sequence
  Antisense Oligo
uggacaccaggucuacgaa

SEQ ID NO: 54081 - RNA, 19 nt, Artificial Sequence
  Sense Oligo
gguguccaccauuugcuuc

SEQ ID NO: 54082 - RNA, 19 nt, Artificial Sequence
  Antisense Oligo
gaagcaaaugguggacacc

SEQ ID NO: 54083 - RNA, 19 nt, Artificial Sequence
  Sense Oligo
ccaccauuugcuucaagga

SEQ ID NO: 54084 - RNA, 19 nt, Artificial Sequence
  Antisense Oligo
uccuugaagcaaauggugg

SEQ ID NO: 54085 - RNA, 19 nt, Artificial Sequence
  Sense Oligo
caccauuugcuucaaggac

SEQ ID NO: 54086 - RNA, 19 nt, Artificial Sequence
  Antisense Oligo
guccuugaagcaaauggug

SEQ ID NO: 54087 - RNA, 19 nt, Artificial Sequence
  Sense Oligo
accauuugcuucaaggaca

SEQ ID NO: 54088 - RNA, 19 nt, Artificial Sequence
  Antisense Oligo
uguccuugaagcaaauggu

SEQ ID NO: 54089 - RNA, 19 nt, Artificial Sequence
  Sense Oligo
gcucucucuccucuucguc

SEQ ID NO: 54090 - RNA, 19 nt, Artificial Sequence
  Antisense Oligo
gacgaagaggagagagagc

SEQ ID NO: 54091 - RNA, 19 nt, Artificial Sequence
  Sense Oligo
cucucucuccucuucgucc

SEQ ID NO: 54092 - RNA, 19 nt, Artificial Sequence
  Antisense Oligo
ggacgaagaggagagagag

SEQ ID NO: 54093 - RNA, 19 nt, Artificial Sequence
  Sense Oligo
ucucucuccucuucgucca

SEQ ID NO: 54094 - RNA, 19 nt, Artificial Sequence
  Antisense Oligo
uggacgaagaggagagaga

SEQ ID NO: 54095 - RNA, 19 nt, Artificial Sequence
  Sense Oligo
cucucuccucuucguccaa

SEQ ID NO: 54096 - RNA, 19 nt, Artificial Sequence
  Antisense Oligo
uuggacgaagaggagagag

SEQ ID NO: 54097 - RNA, 19 nt, Artificial Sequence
  Sense Oligo
ucucuccucuucguccaaa

SEQ ID NO: 54098 - RNA, 19 nt, Artificial Sequence
  Antisense Oligo
uuuggacgaagaggagaga

SEQ ID NO: 54099 - RNA, 19 nt, Artificial Sequence
  Sense Oligo
cucuccucuucguccaaaa

SEQ ID NO: 54100 - RNA, 19 nt, Artificial Sequence
  Antisense Oligo
uuuuggacgaagaggagag

SEQ ID NO: 54101 - RNA, 19 nt, Artificial Sequence
  Sense Oligo
ucuccucuucguccaaaag

SEQ ID NO: 54102 - RNA, 19 nt, Artificial Sequence
  Antisense Oligo
cuuuuggacgaagaggaga

SEQ ID NO: 54103 - RNA, 19 nt, Artificial Sequence
  Sense Oligo
cuccucuucguccaaaagg

SEQ ID NO: 54104 - RNA, 19 nt, Artificial Sequence
  Antisense Oligo
ccuuuuggacgaagaggag

SEQ ID NO: 54105 - RNA, 19 nt, Artificial Sequence
  Sense Oligo
uccucuucguccaaaaggg

SEQ ID NO: 54106 - RNA, 19 nt, Artificial Sequence
  Antisense Oligo
cccuuuuggacgaagagga

SEQ ID NO: 54107 - RNA, 19 nt, Artificial Sequence
  Sense Oligo
agaugcugcccagaguagg

SEQ ID NO: 54108 - RNA, 19 nt, Artificial Sequence
  Antisense Oligo
ccuacucugggcagcaucu

SEQ ID NO: 54109 - RNA, 19 nt, Artificial Sequence
  Sense Oligo
augcugcccagaguagguu

SEQ ID NO: 54110 - RNA, 19 nt, Artificial Sequence
  Antisense Oligo
aaccuacucugggcagcau

SEQ ID NO: 54111 - RNA, 19 nt, Artificial Sequence
  Sense Oligo
ugcugcccagaguagguug

SEQ ID NO: 54112 - RNA, 19 nt, Artificial Sequence
  Antisense Oligo
caaccuacucugggcagca

SEQ ID NO: 54113 - RNA, 19 nt, Artificial Sequence
  Sense Oligo
cugcccagaguagguugcu

SEQ ID NO: 54114 - RNA, 19 nt, Artificial Sequence
  Antisense Oligo
agcaaccuacucugggcag

SEQ ID NO: 54115 - RNA, 19 nt, Artificial Sequence
  Sense Oligo
ugcccagaguagguugcuu

SEQ ID NO: 54116 - RNA, 19 nt, Artificial Sequence
  Antisense Oligo
aagcaaccuacucugggca

SEQ ID NO: 54117 - RNA, 19 nt, Artificial Sequence
  Sense Oligo
gcccagaguagguugcuuu

SEQ ID NO: 54118 - RNA, 19 nt, Artificial Sequence
  Antisense Oligo
aaagcaaccuacucugggc

SEQ ID NO: 54119 - RNA, 19 nt, Artificial Sequence
  Sense Oligo
ccagaguagguugcuuucu

SEQ ID NO: 54120 - RNA, 19 nt, Artificial Sequence
  Antisense Oligo
agaaagcaaccuacucugg

SEQ ID NO: 54121 - RNA, 19 nt, Artificial Sequence
  Sense Oligo
cagaguagguugcuuucuu

SEQ ID NO: 54122 - RNA, 19 nt, Artificial Sequence
  Antisense Oligo
aagaaagcaaccuacucug

SEQ ID NO: 54123 - RNA, 19 nt, Artificial Sequence
  Sense Oligo
agaguagguugcuuucuuc

SEQ ID NO: 54124 - RNA, 19 nt, Artificial Sequence
  Antisense Oligo
gaagaaagcaaccuacucu

SEQ ID NO: 54125 - RNA, 19 nt, Artificial Sequence
  Sense Oligo
gguugcuuucuuccuguaa

SEQ ID NO: 54126 - RNA, 19 nt, Artificial Sequence
  Antisense Oligo
uuacaggaagaaagcaacc

SEQ ID NO: 54127 - RNA, 19 nt, Artificial Sequence
  Sense Oligo
cucauuucuucaucucgcu

SEQ ID NO: 54128 - RNA, 19 nt, Artificial Sequence
  Antisense Oligo
agcgagaugaagaaaugag

SEQ ID NO: 54129 - RNA, 19 nt, Artificial Sequence
  Sense Oligo
ucauuucuucaucucgcuu

SEQ ID NO: 54130 - RNA, 19 nt, Artificial Sequence
  Antisense Oligo
aagcgagaugaagaaauga

SEQ ID NO: 54131 - RNA, 19 nt, Artificial Sequence
  Sense Oligo
cauuucuucaucucgcuuc

SEQ ID NO: 54132 - RNA, 19 nt, Artificial Sequence
  Antisense Oligo
gaagcgagaugaagaaaug

SEQ ID NO: 54133 - RNA, 19 nt, Artificial Sequence
  Sense Oligo
uuucuucaucucgcuucug

SEQ ID NO: 54134 - RNA, 19 nt, Artificial Sequence
  Antisense Oligo
cagaagcgagaugaagaaa

SEQ ID NO: 54135 - RNA, 19 nt, Artificial Sequence
  Sense Oligo
uucuucaucucgcuucugc

SEQ ID NO: 54136 - RNA, 19 nt, Artificial Sequence
  Antisense Oligo
gcagaagcgagaugaagaa

SEQ ID NO: 54137 - RNA, 19 nt, Artificial Sequence
  Sense Oligo
ucuucaucucgcuucugca

SEQ ID NO: 54138 - RNA, 19 nt, Artificial Sequence
  Antisense Oligo
ugcagaagcgagaugaaga

SEQ ID NO: 54139 - RNA, 19 nt, Artificial Sequence
  Sense Oligo
cuucaucucgcuucugcau

SEQ ID NO: 54140 - RNA, 19 nt, Artificial Sequence
  Antisense Oligo
augcagaagcgagaugaag

SEQ ID NO: 54141 - RNA, 19 nt, Artificial Sequence
  Sense Oligo
uucaucucgcuucugcaug

SEQ ID NO: 54142 - RNA, 19 nt, Artificial Sequence
  Antisense Oligo
caugcagaagcgagaugaa

SEQ ID NO: 54143 - RNA, 19 nt, Artificial Sequence
  Sense Oligo
ucaucucgcuucugcaugu

SEQ ID NO: 54144 - RNA, 19 nt, Artificial Sequence
  Antisense Oligo
acaugcagaagcgagauga

SEQ ID NO: 54145 - RNA, 19 nt, Artificial Sequence
  Sense Oligo
caucucgcuucugcauguc

SEQ ID NO: 54146 - RNA, 19 nt, Artificial Sequence
  Antisense Oligo
gacaugcagaagcgagaug

SEQ ID NO: 54147 - RNA, 19 nt, Artificial Sequence
  Sense Oligo
aucucgcuucugcaugucu

SEQ ID NO: 54148 - RNA, 19 nt, Artificial Sequence
  Antisense Oligo
agacaugcagaagcgagau

SEQ ID NO: 54149 - RNA, 19 nt, Artificial Sequence
  Sense Oligo
ucucgcuucugcaugucuc
